United States Patent Application Publication US 2014/0057251 A1 - sequence listing, part 137

SEQ ID NO: 255964 - DNA, 1252 bp, Cannabis indica
ataaggtgtatttattattttatagggtgtaaataaaactcccctctaagatactgtgggacccatctgccgtacaacagattgtaatccgtatttttcaattctgagcacaaaatcggccgcctataaatatattgataaatgatataacaatatcatttaatataaacatacccaacttttaattagataaatataaaactatttatatattatattatttttttttgaagaaattatattaatgagtaatgacgataaaatcttcttatattttaatttttatgcacttaatttttttatttatttatttatttatttttgtgtagcaaaactttattatgtttacttttctttgtaaatttaaaatattagttaaatattactgtcaaatactaactagtcatgatcaatatatatatatatacacgtaaaagaaaaacttcaaaattaatacaataataatttaattaatattcaacagtaatattcaactcacatctcaaatttatataaaaaaataaatataagtgtaaaaaatcaaacaataaagtttttcccaatattaatataagaagttgagttgataagttaacttaaaggccttgaacactacttactaataatactattattacaactacgtgtgtatgtgtatgaaagttgtaacgtatatagctatatatagggtttgtgtaaagaagtacctaatattacaccccacacatcacatacatatatatcataatatataatatattatatgatatgatcactcctttaattaatatattatagaatattacacacttaattattcttagcttgtgtatattatttttttatttattatatttttagatttgcatcgatggaatggaagagtttggtttgtaaaaagtttgagaaggtgctagctaaacaataaatttaattcaaaaaattatattattatttttaaatattattattagtatagtttatgcaaagagttgatgtcaattattaattatttttagaaaaaaaatatttatagaaagagagagaaagcatattgtccacacacaaacacacgcatatctaagctaagctcaacaaagtcaaatttatacaacactttaacttttttattatataaaaaaaatgtatatatagtttcgaaataatgactttaatatagtaaatagtaaaggaaatttatgtagtaattctttctaaaggagatttctctatttgttttcacttaaaaaaa

SEQ ID NO: 255965 - DNA, 565 bp, Cannabis indica
tatataatttattaactttaatttatttagtatgctaatcaattttctatgtattattttgtaagtgtgcttaattgtttatctaaattgggtacttttttggagtgatctcaaattattttgtctaacataatctcatataagtcattttgttttaaggtgattcattttttgactatgtatacttttttaattagacaattagcttactggttggatatctcttcgcgtcgacgtttgttctattataattcatatcagtctatcaaaagaatttaggtaaaaaaaaaaataacatatatattatattttgggatcttacaaaaataccattttttatcagttttatatttttattgtcacgtaatttttttttacatttttagtataccaaattttaaaaaaatactaagttaaagtttcaaaattacgaaaatactgtatttcagtaaaattaaaaaataatttaataaacaacatgaaaacaacaaaaatataactacaaagcaacaaaaaataacaaaacaatgatctaattgcaatatgcaaaacaatatcaactcct

SEQ ID NO: 255966 - DNA, 706 bp, Cannabis indica
acaattcatcaatccaaattccaaacacaatgtacatgaacagtatgaaagttatttgtttcatataaaaatatgtagataaagctatatataactatttttgagctagctcaatgggtgagtttaatttcttattgactccattatttaccaattttatatgttatttttactattttattatttcatgatttttaataaagtttggttacaaatatataatggaaagtggtaatgagaaaacaaaaatgatatttgacaaaatttatatttgcacttcccttttctcccttttacataataagtaacaacaaataattaacagaggatcaatgttttgatccataacttataattttgcaaatttgatatcttagttgtccatatatacattaattttccaaattaaacttcacattttatatgaaaacttcaaatctttaaaatgaaccaacaaatatagaatatatattaatttttttattcttttgtaaaaaaaaaaaatacatatagaataatcttgttttacaaacattacataattgtagattttgtaattatcaaaaaaaaagttgtagattttgtaataaaaaggacaacataacctggccaaatataggtttcaatttcaaaccttaaaagctcacatattttatttataattaattctaaatttacattctttttttttaataaataatgaaat

SEQ ID NO: 255967 - DNA, 1336 bp, Cannabis indica
atgcacattttcggatgtacatgctatgttctaaatgatcgagatcacttagccaagtttgatcctaaaagtgatgaaggatttctgggttactccatcaacactcgtgcgtacagggtatgcaataaaaggactctctcagtggtcgaatcaatgaacataaaatttgatgacttagaaggacatgaagaagtgtgtgtcgaggatgatgcctctgtcctctctggacctagaccagtcatcactagaccgactcaagtatatcctgacactcctacagagtcgctaaacacagaaccaggtgtatcaggtgacgatcaagcaaatgtcagtgatccagatagaggaactgaagttaatagtgccatgaccaaaggaccccaacaagccaaattctataaaaatggaccgccctcctgggttcagaaagctcatcctcaggcaacagtcataggagatccaaatgacaccatggtcacaagacgaaaactgcagaacctgttagcatttgcctgctacctattacaaattgagcccaaaagtgtcaaagatgccctattggatgagttcttgttggctgcaatgcaggatgaaatgggaaactttaaaagacttggtgtctggataatggtccctcagcctgatggtgcaaatgttataggaacaaaatggctctttaaaaacaagtcagatgaatttgggacagtgactcgaaataaagctagacttgtggctcaaggatacagtcaggtagagagaatcgactttgatgagaccttttgcaccagtcgccagattagagtctataagactgctactcatcattgcatgcttcatgaagatcaaactcttccaaatggatgtcaagagtgcttttctcaatggggtaattcaagaggaagtctatgtcaaacaaccgtagggatttgaagacccacaccatccccaccatgtgtacaagctcaataaagccctatatggactgaaataggctccacgtgcttggtatgatcgactcgcctcatttcttatttcccatggcttcattagaggtactgcagatagcattttattccttaaacatgttgaaaaaggaatttttgttgcccaaatatatgttgatgacatcatttttggctcaacttgtgaaagtgaagtacatacatttgtcaccttaatgactagtgagtttgaaatgagtttgataggtgaccttaatttctttctaggactacaaataaaacaactagatctggcacattcatatcacagtccaaatatgtcaagtctatgttagataagtttgggttttcacatgtcaagtatgcacatacac

SEQ ID NO: 255968 - DNA, 538 bp, Cannabis indica
ctaaaattactttttctctcaacgtgtccaagtgaaaagtgatgcacaacggtcttggctttgtccctctaaaattttacaatttttcgaaatgtatagagtgagatttaaaaagaacactaaagaatgtaagagtaagaaaaaaactttttaaaatttacctttaaaagaagaatattttcaattttttattagggggcattttaaaaaaattgaacgcaagaccaatcttcatattcacgtcttagtagtacgaattcattgtacctactggggaaaaatattcctagatcctggccacatttcacaaatgggatcactataaaaaatgtgagattttaatatttcaattaaaatgatttgtaatgcttgaaaactattttttctcttcacatgtcaatagagaagtgatgcataacaatcttggctttgtccctgtaaaatgttacgatttttcgagatgtgtaggatgagattttaacagaacgctaacgagagtaagagtaaagaaaaaatttgttaaaatttaccctgaaaa

SEQ ID NO: 255969 - DNA, 622 bp, Cannabis indica
ccagagatggttcttctcgagccatcctgcccctacccttcgaagttgggactaaaggatcgcaactcagctcgcagcatgccaccaaaagttggcgcaacctctcgactcttgggtccagcgactaggatcttgctatgcgaggcatctctaaggatctggccaaaaggagttatgaacttttgcatcaagttagttttccttacttcctattctcacttttcatcattttcaatttttactaactttaatttgccctctcctcgcaggcttctttcctctcccatgtcacacatcatcggtcgtctcagcgggtcaaaatgcgcgagactgagcttcgccaaatcagggagcatagggatgctctagccaaaaagtggaacgatttggtggtcgaggtttctcgcaccaaggaagaagcagaaaagaagcatctggccgaccaaaagaaggtcagtgaactcgaggactctctcaagtctctccaagatgatcttgataaagaacaggctgatcatgacaaaaagcttaaggaaatggaggctgaaaccaaagacagggtcaatagcatcgacagtcagaccgtctatcaaatctggttagttaaccctgacgtggacct

SEQ ID NO: 255970 - DNA, 812 bp, Cannabis indica
atattaaccttgtttttgttgaataataaaaaataatgccctagccgaatttaatataaatatttcttgttctcaggttttatgtatagtcattgttagaacttcgatgaatactttaacaaaatataagagtcttctagagtgtgtgaagtaaaaagaatctcaggtgaaatatgaatttttatttacaaaggtatatatagagtgcaactttgttatttgaatttgctcccaaaagataccaagttttgtgcgaaatttttaagtgtttctacaatgcagcttttaaaatggagtgttgacgatattttttaatctatttttttctataattatgtacacgcttatatatatatatttaagattttttataaaatttgaaaaaatttacataacattaaatacaacatatacaccaccataaaaataataggtagctcaaatttcaataataatttagttatttttcaaaaaattaaaatgaggttaaagatagtaaaacttatgagttgtgatctccttaaattttgaaaacttatggtagaattttttaaactattttagagttataattgaaattttgatcaaatttaaatttaaaagtcataactatttgaagaaatatgtaattttatttatttaattttttagaaaagcaatttgtttataaaaataaatgctaaatctcatatgaatacacggtaatacttttttaaaacaaaaaattgatcattttattttttatactaggagaaaaatgagatattctagagacttttttcttcccaaaagaaactaaatacctatgatga

SEQ ID NO: 255971 - DNA, 410 bp, Cannabis indica
tcttttgaagcgctggaccaattcctctgcctttagaaccttcttttgccaaatgagatcatttcttgccttccaaatcaagtatacaagtgctgcaatacttgatgctttgacacacttcttgaatttagtttgcgtagcctttcttatggtcttgagaacaacctgcagagtatcagcacgggtattccactaaagcaagctcttcacctacactagacactgctgggagtaatcacacctgaaaaacaggtgctcggttgtttcatctgcaacattgcagaggctgcaaaccggagaatcaattactttgaacctacagagccgtactttggttttcaaatctctgtaatatggccaaccaggtgagaaagctatgcttcagggtattaattctagaccagacttca

SEQ ID NO: 255972 - DNA, 539 bp, Cannabis indica
atatatatatagatatatagatatagaatatagatatagatatatagatagatagatatagattttattttcttaaaataataactctaaatttttcacatatctcctagctatcacgctttttttattttaaaaaaattaacaaaacactaatattataagaaagatctctaaataaacttaatagaagtctaaaaagattaataaaaacctaagaataaacttaatagattcttaaacttagaaactatttttttttattgttgcatgcattagattttcttataggataaatagtaaacacattgattatttaataattgataaatgataaaaaaaaaaaaaaacaatagagggaaaatatgaataaataataatcaccttagtactaagagactcccacattctacaaactctaatctttatgctccatcatgagagaagaagagagaaaataagtagtaaactcaataaagaaattaagagaaatagtttaggatatatataaaatctagtaagtgataaaagaaaaaaaaaaa

SEQ ID NO: 255973 - DNA, 1026 bp, Cannabis indica
actcaaggtttgatcaaactgtcttggacagttggaacaagccgtattgggcttgaagggctagtgcagaaaatgttcagattaaagcatgagttgaagatctttagcaggaacaatgttggggatgttgctatggagtacaaggtagctaaggataggtactgcctcatccaagaggaagctgctactaattcgaccgatgtgttgcagcaacttgctgtttcaaatttgcagcaggaatttatgataactaaagatggatatactcagttgcttaggcagcaaagcaagataaagtggattaaattcaatgataaaaattctagatattttcatatggctatgaggaaaagaagaatggagaatagaattaccacttttatgaaaggagatacaattgttgataacttataagaaagtggtaaaacactttgtgaagcactttgagaccttcatgggcagcaagagtaatgcttctggcagtattgatgtcaactgtataaagcaagggaaatgtctcaacttggaacaagtcaatttgattagaccttttaacaagggggcgtcaagaaagttttatttagtattcaccctgctaaaagcccagggttagatagttttggcttgggtttcttcagagacacgtggagcgagattggagatgaagtttcaaatgcagttttgggattcttcactagtggtagacttcctaaacaccttaatgaaactgttatatccttaatcccaaaaattgccaacccgacttctgctaaagactacaggtcgattgcttgttgtaacacaatttataaatgcatttcaaaattgatttgctccagactttcagaattgctccccaacattgttcagaataatcaaggtgcatttattaaaaatagattgcttgctcataatatcatgatattcaagtaccgttcttaaagggtatactaaggaaaaatatatcagtaaggtgcatcatgaagattgacctaagtaaggcttacgaacactgccgattggaaa

SEQ ID NO: 255974 - DNA, 1028 bp, Cannabis indica
aagtctctcttgacaataaaaaactgcttctttaccttgaaaacatatcgtttttaataattcaaattaaaataaataaataaataaacatatcgttttaataattcattcatttttaattttgttacataagaaagtaatcacactctgctagataaaaatgtcttgtgcattttgccctactctattttggagcttcaatatatattttcatcaatggcggtgacaacctttttgagagtgatgaaagcaaaatgaagttcttcagcaaccaaaacataaatgaaattgaataattatgaaagctaattattcaaaaatagagactacttaagagagatatgagaagcattatagttattgacacattacaaagccgaatgagatcatcataattcacaccacatataatctcaaatctgcaaatatgaacaaatattcaagaccaataataaattaattatatattaacagaatttctttgggtaaagcttgaagagtaggagagtagtaggaggagaggtttgtgtttctggataatggaatcattcccacttctgcttctcttttctgaacccattattcatcaaataacaaggaatgaatggtattggtattataataatcttggcaattacgttcttactatgcttaatattataatactctgattttttccctactgttttgtctattctgattcaaaaataaatgtagacactttgtggcattataaattaggccacccatcatgtatcaaaaattttcttatgaataaatagttgaattttaataacatcatttattctcattttcattgctcaacatgtcactatgctaagcaaaagaaacttcctttttgttcctaattataattcagcaaacattgctttgagcttatacataggtatttagagacttttcacaccatgacacatgaaggttttaggtattccctaaccatagttgaaaattattctagatatatctggatccaccttctcaataacaaatttaaagctaaaaca

SEQ ID NO: 255975 - DNA, 1263 bp, Cannabis indica
aggggacacacggcaacacctccgaacatgcaacatatcttcctaatcttgctgcagtaccacaacaactacacttctgtacaatgaatggaaaggattagcagccatatcttccaagttgcacagtaaatgaatcaaaatcttcaatgcagtaatgtacgtttattaaattaattccaaatcaatcaattatttaaaacaattaagagagaaaatctaaaattagttaccttgaaggtgcactaatataataagctatactcccaacaacacagatattctcagacttaatccattttctcaaaagatttataacaaagtttgcactgtaactaaacccaacttctaatataaacttatgatgttaaacgcaaataactaatctaaattataaatattataaaagaaagatagatataggcatacatattgatattaatttcaacatcaatttttaaaacaaacagatgagacaaacacaatataaaacaaaatttacgccattattgaactgaacacatatatacaatcacatgaatatacaaaaatctgaattaagcaaaagattcaaatgttaccgaaaattttcacaaataaagaagaggttagattacctcaaatctgaaatgttgtagacaaatggttgaataagaaaaagaatcatagagaaaccatggatgtgaccttgcaattagaaaaagtaaagaaataacaaagagaaaccatgagtatgagtttgaaacctgcattttcgtctcaagcgaaaggagaaataacagagctcagagggtgggaagagctgttgagcgtggaagggagaagagatttgtatgagtatggtataacatctctcttataattatttaagaaatttatttgattatgtatcatacatttatttatttttcaaagtctaataaacaaagaagaaacataacaaattgaaccatagtaccttcactcacagctattgacaagagaagaaacacattatgagtgtatgttctgaactaaaattccataggaatatgttctaaacccaagtctggtgtgtaattatacagtaatgaacaattatatatatatatatgtgtgtgcaaagcattcatgaaacccataaatagagagagggatatcaccgaaattgaagctcaacgacgaggtgccattgaatccgacagggagagagagagagagaggtaccgcgtcgcctatttgctgctttggttttttttcttgttgttgacatcgacaacgaaaaag

SEQ ID NO: 255976 - DNA, 1192 bp, Cannabis indica
ctactattttttttttatatatatatatatatattatataaatattatctctgcatgcatgagtgatcagtggcccttcattttccatgtctataaatatatatagcttctgatgtttctgactgtatactcagaaagcatagtgtgatgatattttgagagagatatttccatgaccgatcgcaaatggtaaaaatggggtggttttgaggatttatagtgtagatttgtaatatatattaattattattattattattattagttgtaccgttttgttatatgggagaggaatggatatgatcatgtccatttataaattatatatatatataaatgttgtaattttaatttagaattatggatcataatgtgtacatttttaattgatgatgctatatttaatatatattatatatgatattatttattatttaatatttagttggatgaatagtactattgacaaatagatattagatataattagtatttaatagcatttttaaggtagtatttttggtttagaacaaagagcattgccttttacaattggttataacaaatatttttttaaagttatctttttaaattaaagtaatttgcaatttttatgttttaatttttatattatttttctgataaaattaccttacattaattattattttttttatataaatttgatgttaaatattatgcatatgtgtatgtttaacagtaaaaaattttgaaattaaaattttaaatttacaaagtacttaaaacagattttgtcataaaaaaatttaagtgtataaaaattaaaacataaaataattatatcacactaataatgatataatatggtgtttttttagctattctttaacacaaatgtatatgaaagtgcattattatacacttattattatttatttatttatttgtatatgtagatatacattagtgaaaagtaaaatttcaattgttattacaacaacaactcatatcagaaaccctttgccctagacatgctccacctttggaatagcctttgctaatacaatcactattgcagctatttgaacatggacccaagcaaattactggcaagtttattgcttccgctggccctgttcattgtaaattaatagataataaactcaattgttaaagaaatatatatgtatagataggaattaagtaatta

SEQ ID NO: 255977 - DNA, 1692 bp, Cannabis indica
  modified_base (1643)..(1643): a, c, t, g, unknown or other
atccattatatggtgatccattttgacttttggagcatttcaactcacaatcaagtttatatgaattaatcttactaaatacctaatatgtgtaaatttaagtgttaataagtaacaagtaattaattacgtacttatatatctaggccattatagttacgaattatgtgactacactacaaaaataaataatgatcacaatatttaagggatacattaatataatgattaattgtgttataattaattattagggttatgggcttactgaggctacgatgacagtatcccgacaagagagcccagaagaaagtgaacaggtgggatcatcaggtaagattgcagaaggtttggaagcaaagattgtagatcctactaatggacttgccttgcctcccttcaaaccaggggagctttggattagaggcccttcaataatgaaaggtataattaaataaatacacggttatgtacgtatatgaccaattaatactatgtataacatacaagtgttaaattttaagggttaaactagaataatatgtttagggaaaaataagaaagaataagaaataggtagagctactgcatgtactttatacacaatatatatataatgcgcaggttatatgggtgacaaagaagcaacgtcggcagccatagacgctgatggttggttgaggactggtgacctctgttacatcgatgatcaaggttttctttatgttgtcgataggctcaaagaattaatcaaatacaaggcatatcaggttatatatatttgcatacattaaatatattgatcatcataaccatcgtggccttaatttgatacaatgtatgatcaggtcgctccagcagaactggaacagttgcttcagtcccacccagagatactcgacgctgctgtaataccgtacgtaataattaatacaagattaattaattaaacattttttaatacttatatatatatattttattgaatttgcgaacagatatccagaggaggaggttggtcaggtgccgatggctatagtggtccggttgcctaaaagtaccttgacagaagcagaggttaaagattttgtagccaagcaggcaagcctctaacattttatgagttattaattatatatttctttaatgatctagttataataaccaacaattaaacacatatgcataattttcattcgagttataagtttattatcataatctaatctatatataattttgtattaattaaatgtaggtttccccgtacaagaagataaggagggttgcatttgtagataccatacccaagactccctctggcaaaattttaagacatcaactcatcaaaattttcatcccatcatcaccctcatctcgaatgtgatacattaattactttacattacatgtataattaaactaaaaattaattaaaaaatcaaagagggacacatgacatttacatatatatatattaatttgatatttcctatgtatacatacatatatatatgcttgtgtatttaaagtatactttcatgctactgcaagtgctcgtaacgtagcaatgaaatgttcaattgcaagcagtgctggtaattggaagaactggtctcggggcttgatctgtatgttgattnttttctctctgtataatgccaagggcatcacttgtgatactgttgtgag

SEQ ID NO: 255978 - DNA, 1002 bp, Cannabis indica
tttgataaatgtatatgaataaggattttatgaatggtttttggtaagaaaaagaagagcaggaagaagattagtgtttcatgaatagttttcagaagagcaggaagaagaagaagatgacgaagagattgttttagtttttggattttaattaaaaatttattttaatttaatttaatgaaaatatgaatattaaatatttattattttatttaaatttttaaatattttctgttttatttttaatattttttttgaatgaaatcagcactttattaataaatatcctccaaaactaaggaagaaacaaaagcaggaagagtattcaaacaaaaagtactatctgcctcaaaatgagaagattgcgctaacatgtgcgctaccttattagcagaccgcttgacaaaattcaaggaaaaagaatttaaactattaataatagtcttacaatcaactagaacacagccataaggagagaccatgtttttattgttattcaaatccgctactgcagtaaggcaatccgattcaagaatcacgtccgcccaatcattgtccttaatccaacttagcgcttctttgatgctcattgcttcgactaagagtggttcaaagacaccatccccgctaccacgcttagctttcaccaccattccaagtgagtcccgagctacacatccatacccaaaatgcctactatcctagaacactgctccatcaacattaactttgattcgagggtacaccggttttgtccaacgctctatctcaacctacctaggcacaaggttggtaactacagaaagtttttgagcattaatccattcctcaaagctgagtttagcaaacagagtaacatcactaatagtcgactgcttctccttccaaaccagttggtttctgtgatgccaaattgaccaacacagcataaccgcttcaacaacttcagcctcctgccattgttgtaaacctgcatcgaaccagctggaaaaaaccatagca

SEQ ID NO: 255979 - DNA, 828 bp, Cannabis indica
gagagagagagagagagtattaatattgaaaggaagaagaagacagcaatgggtggtctgttgtggtctggcttttggtctaagtctaaggtttttggttggaatatattaatcttaattaattgtcttaatcttaataatattattattattaaggttgtatttttttaatacaaatcaatgtcgtttatttcaataccaaatatatttatttatttataaaaatataaagataatatataataataatttaggaattttaagtattgatttgatgtctcttgaatttcaatttattttgcaattcagtccctatgttttcttttttagaaatttaggtagcatttgattgagagaaatgaaaacataataatgaaaatgagaatatgaatagtaataaaaaaaataaaatttaaaatgacaaaaaaaattaataaaaaaaagtaaattttttctcatgttatgttgaatatccttccatttcaaaatggaataattattccatcaatatagtaaaaaggacattatattgtaatgacattttaatactttaaaatataaccaaataaatgaatgtaataaaaattattttattttgattctattttattacctccaaccaaacgtcaccttagtcttaagaagacactataaagagtagcaattaatggtgtttatttagtgtaatgcaatagtaagtaatctaattgaattataatgaaaatatgaattgattataatgtttagtttggtataataatgtaatgaaataaattttgtattgactaaaataattttattgtttttattttataattataaaatatt

SEQ ID NO: 255980 - DNA, 1629 bp, Cannabis indica
cctggtttgcatagttttggtgtttgccattccccactgccaactttctttggtctacctcgaatagcaattgcttctccctctgacttctctgtctttttaatctcctctccagtagcggttgaactcgagtccaccatcttgttctcctcagttgttgctacatcaatagaagtagcatctatagttaaagcttctctagtgtctagcttttttcctttttccttgccagcattatgactattattaccttccttttttgatccctctgcagcctttgacatttttctacggtgtgccatcctatcaccataaccattacaagctttgcagcgagtagctagccattcatagtccactgcttgttaagaaagtctcccatgttcatccgtataatggatgattcttgggggttcatcagtaatatccatctccacaagcaccctagcaagcttcatcatttatttttccttcataactttatcagtcattaaaggttttccaatcatgcttaccaaagcactaaggcatttcttcccttagtaatggagatgaagacgaatccataacggaatcgatttaaccaaacgcacaacagttaaatcagttgtccatggtctcaccacaaccggcttcctatcaaactgaagcacaccctcttccaggaccagatcacttgtggtttcatcattgaatttaacaatggtgaatcccccattcattcgaacaacttgagaaattccaagatgcccttatttacgttttatgaatccttcaaacaccgaaagagtagggtttgcacatagtaccatacacacaactgttgtattcaagttctcggcttgcaatttagcctcttctacatcaatctgggctattttgattccttctttaataagcggtttcgataggtcaaagtagtctctcgaaaagaaagcttaccttctgtgaatttcttctagctttgctgtgctttttcatgaaaatcagcctgctccacctgatctgcccaaattttcttctcctctcgatcttcatttttatcaaatttttcccagtcgaatccactcccacttcaagaagatcttcaggcggaattgcctgagaaattaagtctagagcattaggatttccattcgattcaatcttgttcccatcatcttggattgaagggggttctgcaatgttcaatctcacaacaggcttttgaatcatgcgctttttcttttccatggaagagagagagcagaccacacatgccttttctttatcttgtcttgtccctttatttgtgcaggttttaaccttttcctatgcatctcaacatgaagatggcctacacctactcctgagccatgtccagtgccttaaaaactataaccaacactaacaatctacaaaaggaggtggatgtagccaaaaggaggctgaggtcacaagggcaaagttgggcgaggtgaacaaaaaattttcagccgccacgaagagggtcgatgagctacaaaaggagattcaagacatgtcgtctaccgcctaacttgaagcggatgttgatgttttgtccgaggaggtcaattgtttgaaggacgagagggagagtcttcaaattcttcttgccacattaaccca

SEQ ID NO: 255981 - DNA, 1171 bp, Cannabis indica
ccagccgagttcttcattttttggattgagtttctacgcctcctagtagttgcagtagcgtggaaatatttcgaattgctatcaccctctcggagccaaagttgtttacttctttgtttccaaaaaatttccttttgaagaagaacattgttgagttgagacacagcttgtttatttagtttttaatattttgctcacttttgtacaagtaagagatcaccctggaataaatgagttgaaattgctttttttttttttttttgcattgtctcttcattaatttttttagtgtattcataattgttttataacaaatttaaaatttccaataaattaaacccgaaccaaatatttgccaattattacaatgattagtttagctataaaaacactagtcacatggtcctaaaagaacattaattcttagtattaatggacctacattggatgtaatggtattgtgcaaaatattttcccatgttgtatattatttggaaataacccaaacatataggatgaatatcataccaatatcattttgagaaaaaggcctaactaagctggtctgtttttctctttcatcgatagtaaagtaagagcatcttcgagaatcgaaatataaataaatgatctaaaacaaaaatattagccttagtaaaaaaacatgctccaataatatatcataaggtgatatagattctgtacatatacttactatgtgcgaaatctatatcaccttatggtatattattggagcatattttccatttagacatagtaatattattttgaacgtagtaaatattgtgtaaatatagtaaatatgtattatttttagttaattttataatattttattagttaaaataaaattactatattgaattatgtactatttatatttttttattattatacataataaaattactatattgaatttcacatcatgttttattactatagattgatagataatactataaattgatatatatatatatgtatatatatatgccaaatataacataatttttgagagatatggtcgtctaatagtaatagtattaaaagggtcagttcataaaaaaaaaaatagtaataaaagggcaggagtgggtgagtgagtgagtgagggagagactggatcagagagaggcagcggagcagt

SEQ ID NO: 255982 - DNA, 1336 bp, Cannabis indica
tttttattgattttaaaaaatattacatttttctttaaataagggctcaattttttttatggttcatcaaatttcttactttaaagtattaagaactaaaatcatcaatgaaaatggtatattattatttacaattttaacaagtttaatcaataagataaaagataaaatatctatttactaatgaaatggtcaaatatatgatgtgaattttgtatcacatgataaacattatcttcattgtgattattataataataggtgataaggttgaaaaggggtcacaaatcatattgctaaaattaacttaattaaggcataatcttttattagatatataaagaggaaaaattgattggtgatcaaaataaaaatagaaaaatataaatataggaatgattctatcattatcatatttgactaattaaagcactaatttgttgctattgccatttatagttaattgtcaatatcttttctttcctataaattgtaatcaaatgaacctttcttcctcactcaataataatttcatttcttaactatttctcttcacaaataagtatagagttaaagagaaatagatcatcatgaagctattgggatttcttttgcgtttgtttttcattgttcttattttccatacatctaattcttttgctggcaggtaaaatttatacatatatatacaaatcaatattaactataaataattaaatatatgtttagagcaacttaaaaagctcaaaattttatcaatataatataatttgttttcttctgcaaaagatctttactatattttttttttgttataattccgttttagatagaaaaatttacaaaatataaagtcaccaatatattcatttttacttagatttaattaatataaaatttaatgtggtactatttgttattaatcgaatttgtaatgtacaggataaatggtcaaatatattttccatcgccacctccaccaccgcaagtgaacatcccaactgatgatcttccttctactaatgcaccgaccgtccttaatggtcacaccgttcttgatggtcagctttatacaatgaagactgagacatgattaaaaaaaacataagatcactcttaaacctaatctccccttaaccatatatttgcttgtattgagattagacataatcccaaagtgatgtcttgtatctttgtttttgtttatttaatattatttatcatgactatcaataaaagttatgggaaatagtgtttgttattaagtcataagtatgcctaatatgatattgtgcatttaaataatcatatgttgtatcttatttaaaaaaaaaaa

SEQ ID NO: 255983 - DNA, 797 bp, Cannabis indica
aaatgaaaactctagaagaagataaagaagttgtattatttacttgttgtgaatagatgggtataggggtaagtgttggttttggagggagctaagctacgagtaggggtagtgtagaggaacagaggaggtggtattgtaatttttgtaggggttgtaggggttgcctatcttcttcaacctttttttcttttttgaaagagaaagatcatttggtttaattggtttagtgtaatgggaattataatggaatcataattacattacattgtctgtttttcatttttaaacttttgtaatggctttacattgtaatagtcattatactatctattgtaatccctattacattataaaactaatgtaatgaaaatatctcttttactatttttttttaattttaaatattaaaaataataaaactaaaaatatttttgtcaatatacaacttattttatttgattacaatatttattacagagttaaaccaaacatcataatatgatttctattacaattctaattccattatattactattcatattacaagagaaatttgattttctatgcattttttatacctaaatttgtttcccaaactaatagttatagctattgaaaaaatgggtatacttttccctaaactctaaaatacccctcccatatttttcaatctctctctcttcctcctttctctctcaaatcaaacccaaaacccacgcacctccatgccgagccacctccctccaccgcacctccatgccgagtgttacgtgcagtctatgatggcacgtt

SEQ ID NO: 255984 - DNA, 728 bp, Cannabis indica
tcatcttcccaactgtcatgggagttggattcgattttaagtgtagcgaattaattcttttgagcaactcctttatatatttggactaatttagatacattcccatgtaatcacggtgaacgtcaattcttaagaaatagtgcaagaccctttaagagcaaaaatctgattcaattttgatgtgaatagctattttatattatcgcctataatgattatatcatcaacgcaaactaataccaaaatagcaagtgtatcgtacccgtagaagaataatgaagagtaaacttttgaactaataaatctccagctcaagggtgtagattttagtctatcaaaccactgttgggtgttgtgccctaaataaaacccatttcaatataatgagatttactaattaatataagatcagaaatcgctttaatgttgcatggttcacatgatttatttcatgattatgtttaatgtataaattctattaagtccagaacatatataaatatgtttatttttgttcatgattataatgtcgtgtcgtcagcacagtggaatagaatcatgattatatgttcaaaagtttaattcccgtgatttgtcaattcacttggatttggactgatatgataatcgacaataaggtatacttaaaccttcgataagtgttatgtcctttccagggtattggcaaagtttaccagtatcggttgtatagagtatacattggaagg

SEQ ID NO: 255985 - DNA, 1204 bp, Cannabis indica
gtcatccatttgagattcatttcgcaaggcaccccccttacttattcgtattggaaagtatctcattaaaattaccaatcacaagccatggtagaagtggagctacatcatttaatctccttaaactccatgaatggcaccgattatgttgttctcgagaaccatagaaaatagtaaaatgtcaagtaggaccattgccaaaagtaatataacagtcgaacaaatttgaattaaaattaagaagagttacattgacaccatctttctaaagtaaaagtaaactctctcatagacctacttgtgggacttcaagtccattattaaaatttaaagcatgacgaaaacgagaaattacattagaacttagtttaattttcataataaataatacatgaggagattgctctttttgaagcaagcaaagatgaaggaatgcactcagattccctagactccgcgcattctaactgatgattttcatggctagttggggggctgcgatgcagtcaccgcaaaattgtccaaaaaactagactgatccatttcaggactagaaatactctggtttggctcatctccaaaagacaaagttggagagaacaaggttttctttggtcccctacatcttttaagaattttcctcattgagaggttttcaaattgtctctttgactttcaattttgggatgcattttctttatctccagcctgcctcgtagttgaacttatgacaacatcttttactgcaatggtgatcatttgcaaaggcttgcaaccaaatccataatgaggagcatgtatcgtggatggaattggaggataagtggccatggtgccaatatctgggatttaaagatcagatagatcatctacatctagagcctttactatgggtttatttggtgcagctgctgaagagaaaggacttgaggctttggtctttgcactagaattatggtccatgatattgggccaaaaaggggccaggtttaaagaggatagtggtggcaaattatttattagtagtggcattcttaatttgcattcaacattactacactttgaactgaaacgtttaggtaactagacacaacattactgatcaaagaagaagtttcatttatggattgagtggatcttggaataatagccttagtactagcattttcttgtttctcttatgattctactggcaaaagtggtc

SEQ ID NO: 255986 - DNA, 714 bp, Cannabis indica
aaatctctcacaaactcaccatcgtgatgatggtatcaaaaccattgcttagatggacagtaatggttcaaaggttgaatctcctattgcactccaagcttttaataatgtcaaattttgttttcttcttttattactatgtatcactgcctcacatgtctgatggcattctggttacaaaatgatactaactagagtcttgcaatgctgttatttgcagaggttggtcgtcgatgactgaaaccaacccagaaccggttaggctctgctcatcgactacaaaaaccaacccagaactagttcattggtcttcaaatctcgacctccggcgaaaagctctggaacgatatcgacgtggtcccgatctcaaatatgagcatggtgtgggtgaggattatttttgttcttgttgtgggaaaactgtaggagaagaaataaaatgggggtgaggcttggcatggggacgatgttgtgatcttgggggagtctagctcgaacagatctgagaaaagtggagctcgaagtgtggtgatgatggctgggctgggttgaagagaaatgaagaagatgaacaagaaaagaggttggctggattcatgaagaagattcgaagaagacgaaggggagagagaaaagcaagggtcgacgtggaggttttaggggacgacggttggagctttaaaccacggccatggaggttttggcagaatgaag

SEQ ID NO: 255987 - DNA, 1323 bp, Cannabis indica
aaatatagaaagcccaatattaattagtaccaatagcaatataatatttgatggtattataaatgctaaatgacatttatagtacttagtattgactattgtaatatgtatgttgtttttatcttaaaataatggatcttatattctatacacactagtaatatgagactctctaataacatctctcctcaagatagctcgattataagtaatttttttttggctcactatccgcgaaccacaagtgactcttttgttctatttttttagatttttagttagttttttttttttttttgtacttctactattttcgaatcactaagtggttcttttagaactactttttggatcattttttagatttttggtgaagttttttttttgataccttgttatacttgtaaaatgtatgcgattccaattcaaaactaattaattgttagaggaataattcacacatcttatctattttattttcttcctacatactaacatgtaaaattttcttaataaaaatcaaatttgactcagtctcactcatataatttagttaaaaaccataatctttaaaaaaaaaataaaaaataccgtttatcacggccttcaatttatttagcttcaatgttattggttccatgaccaaaagaaagaagataaagcacggccctaatgctcccctacagatgacacctcctccaccacaaaatatataatctttgctttgtttacttattatgaaatcgatctatgtatttgacatccacatgatgactatgtataatattaattaagagcatttattaattatgcttcataaagagggaagcaatacaattaaatattaagtttttaattcacaattagacataataaaagctctaatatcgaaccccaaccactcccttcttccacccaacaataataataaaaggaaaatagtcgttgtcgaaataacaaattaaaatccatgcaaaattctttcagaaaacggagaaagcacatgttatgccaccataaagaaagcacaaatattaattaattaaaaatgatatagaagataaatttaaacatattataaagccattaattaattaattagcaatagtcaaaattgtctaaaaagttgcttgaccccctaccgaataatgaaaaattcggtattatcttgattgtatgtaatgtatgtagactcatcgaatatatatatatatatatatatatatttaatgtgttcatacttcatattgagaaaaatattatgtagattccctaaaggatggactagtagactctacatattttgtatttataagtattttt

SEQ ID NO: 255988 - DNA, 1610 bp, Cannabis indica
ctaccaattgcacaatatgataagagaggaatttaagcaactcttatttgtgaatattacaaaagtacaaaaaagtcgcaaagtataaaaacttcatactcttaaaattttttacacatattttcacatatatatataatataatatttcacttttattgaaatgtaaagctcatgtcaatgtcaacttaaataattgaactatatttttacgcgcagcactatttggtgacaacgctcaaaagttttaatgttactctgcaattactttgatgactaacagttataaaataaaggtacctcacataaattcttggtagtcaaatataagaagctaaaattattttctatatcccaatataaaacaaaataacttgataatttaggaaccaaatgacgtgagtcatggaaaaatctagcagatcaattaattaccttacccatcaagtgcataagaacactagaattctcttttgctatataactcatgcaatttaacttaagcttagtttttttgtatatatatatagagagagaagccctttcgattgtatataagcttttctaagtaaatttttaaacttttgtgtataaactttaagtacaaacttatttaagtttagtttttaattgtatataagcttttttgtaaataagcttaaaaaccttttaagtttttgtgctttcgtacataaacattttaagtttttgtacaaatttttgtaggcctagttctttataaagcatatagagacaagtaggcgtgtttattagaccacatttaatatttttatgcctatccagattcgatctaactatacactggatgttagattttaccataatattcgatccaatttattttagtcatccaatcaatccaacttccattagatattggattggatcgattctatctattatttcatgtaaatctattggtttaatttggatttatcaaatattttagacctagtattttttgaattggatcggattcatctaatgtattagatccagtatttattggattggattgtatccattaaattataatataaaaaaatctaatgttaatttttgtattacattttttttttttatgaataataacataaaatcaaactactcattcaaactaaatgaaaaatattaattagtaacaagaatactgctattgctctactactactacttacttctattgtgtcggttactttgattttatattctgttttgtaaatctgtttggtttgattggtcattgcagtccctacttttatgggatacaatccctgactttgtgggattaggtttcctttcttggcttcctatttaaagcctgctttccatttgtactcatataatagtcaataaaatcttttctctcttcatccgcaatatggtatcagagcaaggaagatatgcttcctttcatttctgatttttctgatcattcctcgccgtgtttcagtccttcttctccggcgatgatcaatttcgaagatctgaagaattcatctcttcaatcgacacctctatccccttctacttcttccttctaggctctgttaaatccctgtttccattcattccgatagctccatgtct

SEQ ID NO: 255989 - DNA, 629 bp, Cannabis indica
ttcgaccagagctcatcaatcatttttggcctttggcgtagttttggtcgagattttccatgataacgctaacaactttattgtctttctttccttaccttaaagttttttgctctatttatttggaaaaatctattttgggcatggagtcgtctaagtctgactttaattagaacttgcttgttctcgtcgtctaagtgccttgtgttgtttatttttgcctttttctcttgatgtgatgaagtaattcaaagggttgttggtataattaagactttgcctttcgtatgaggctatagctttgggtcgttgtttaggatctgagtttgttgaggtgaataggaggtcgttgatttgaagtcactaggttgaatagtgtcgtaaatacgattagatttttgacactacacgaatccgatacgagcctaaaagacacgagcataagtaagcacgaacaatacagtcttggacacaaaaaacatgtctttcaatatgacatggcacgagaagcacaaataaactagcccgaatagcaggacacgcgacaagctcaaaaagtacacaacttgacatattaaaaatcttataatttattaataataataggatatgtatttatcaattataaa

SEQ ID NO: 255990 - DNA, 817 bp, Cannabis indica
ctaataagtattattaagaatataaaatatcatgaaacttgtattaagtaaaactataaggtgccaaatgagtacacaaccttccaaaaattacttaagaataaatttatgatttgtattattgagtttataagtacgcgcatcaatttttttactttattcttcaaatactttattaaaaccctattttttatttttatttttagtttacctcacacttttacattaaatcactcattaacttctctatattttttctatactatttaaatattataatttttaatatattttattatacaaaacaaaaaaaaattgaaaaaagaattaaaaaaaggagaaattattaaattaatatttgaagaatgggtagtacttctctacatgacctaaaattttgaactatttcagctcaattaatggagccttcttttaaaaattcttcatttttttttttacctttttgagctatttagctcctgaaatgttgagtgctctaactagacaatcaagggattgttaggcacttttttatttttaaatcatgtcaaaattattaaaaatttattttggttttaatcatctaaaacttatgattcttcaaataaataaattatgagatgtaataatgaagaaatgaacactatttttttaccatataggcatatacgagtaatttttatgtccaaataaataaaataaaataaccttcatattcaaactcaatttcttgtgcagtttttcaaaacatgtcttttggataaagtgaccatgttataaactagagttactatctcgcccaatatcaaatttacta

SEQ ID NO: 255991 - DNA, 4066 bp, Cannabis indica
atctaaattaaatcaatagaagaacattgaatcggatctggatagattattggtctaatgaacactcttaatctcaactaaaataaatatttaaattaaaaagataaaaaaataggaatacatagaaatataactaaatttaattaaaataaataagtaatgaaatttaaagtatctttcagaggcagagagagaccatgagacagacagatgagtctaataaatgataaatgtggtattctgatgcctttgattattatttgggtatccaaaacctctctcctatgccttgtttctctctctctaaaagaacccaaatcactttcttttttttttcctgtccatgttttgatttgagtgttctcattttctgtgtgtttgttatggttctgctgtagttttctcgggaaagtttgattggttctgaccaattgttatatattttgtactttgaaaaaatggtattgagttcgaacgctaacatttaagaatcactcgtgatcccgtcaatcaatcactccacagaacctaagtgtctgtcgaaacagggaaaaggccctttctctctttggtacttttctctcgttttctcggtctttcttttgcctttttttggtttgagaagcaagtgaaatttgagctttcttttcttcattttttgcaaggcttgattggtgggttgattagcttgatttgaggaacaagtgaaatttgagctttcgttcatttttccttccggtacaattcagttccgtaaaaaaagaacaaagcagagaaaacgcttgagttttctttaagggtagtgaattttcaaggagaaagaaaaaaggggtaagtgaaacattagttttttctttgttgggtttgttttgtttgatcggagaattggccaaaacttggatattccggtgtacggataggtgttggacttggccaacatttgccaacgaagaagactaagcggagaaaagatttttgagtcttccgtgaattttgctgtcctaaacgtcgaaaaatagaagtctttgcaagcctattttgcattctctctttctctctctctaactaaaagggaaaatcaaatcccgacaatatctctctcttccatccccttttttttctctctctacaaacctctttcttttgtcctctgtttttggtcttcttttctgggcttcctctgttttcaggttggtgagagaaacattaatttctttccctcccttcatctctatcatcatcctctctctctctctctgtctctgtctctctctatctctaaacatgattttggacaaagggtcaatgcaatcaaatcttgaatgtttcctccattgcacaacaccggtggttcaatctcaatttctaccgaaggtttgttttgttctctctttgactcttttcatatttcaattcaagtcaattgttttgtccttttccgttctcgaagttctcttctcacaaaatttgtgatgattggttttcttttttccagactgagattcgcaacctgaacagtctatggcacccatgggaaagagaaaaggtcgagtatttcacattggctgatctgtggggctgttacgatgaatggagtgcatatggagccggtgttccgattgccttggatcaagaagaaacgctcgttcaatactatgtcccttatctttcagctattcaaattttcacaagcaattcttccattaacagtttcaggtaatcaaactttcacaaaatctttggtttcattttgtgatacaatgaaaaaatcatacatgggtttgtttcaaaattccccaataatcacattttggatccattgaatgaaattcttttcttgttttctttcttttttttttttttttttccagagaagaggcagaagcgggtgagtgtgaaacaagagattcttatagtgattcacttagcgatgatagtgagagcgataagctatggagatgggatgggtgttcttcagaggaaggagggtttgagcaagataacaattctattcatctaaatgatagattgggtcatctttattttcaatactttgagagatcaactccttatggaagagtccctctaatggataaggtacttactacacacaaacacatagacaacacaccttttaagttcggtttcatattcgttttggtacaacctaacttctctctcttgattctttcacttgattggcgtgttatacttctttgtattttgttttttccttgaatattaattcaaatcaaagacttgtgaagtatatgaaaacatttgtggatttattttaccctagaatcaatagaactctttctttttcttggttagatcacatctttcatagaaactgtatattactctttttgacttttcaaccatgaagaaataaatatttatgctttataatccttttgtatagaaatatttcactataagcaagagttagttttaatagacaatgaacttgtacgaataatgatgataattattgatcatgagcatctgttctctcgtctttattattattaacttttttgtcttattgactatcttttttagtttcatttccttacacttgttttttcatgattcacaaaatatttatatgataacagagaataatatcataaatatatttccaattccactatttctgatgatatgtgtttgtgacggaatatgcttattaatccctgggggctttcttttttcaaaatgatattttttgttgattccatatatataattgaccacaacatttgattctttgccttttatatagatcaatggattggctcaaagataccctggtttgatgtcacttagaagtgttgatctttcaccagctagctggatggcagttgcctggtacaaaaaaaaaaaaaaatctctacatctgaaactagtttagcttctctattcccagtctttaaaaaaatctctatattgcacgtgcatgtttctatatactaaagcaaaatagataaaaaggattagtgtattgatggttttggatccatatatattcaggtacccaatatatcacatcccaatgggtaggaccattaaggacttatcgacttgtttccttacatatcacactctctcatcttctttccaaggtaataataataataatttaattactattatatgaatatattaatgtacatttatgtaattaaaggtttggtctgaaattccattaatgctatttcagacatggatgttgaagatgagattgatgaaaataataataataataatgtggggatgaggaagagaaaggaaggagatgggatttctctaccaccatttgggttggccacttataagatgcaaggcaatgtgtgggtctcggccaagtgtggccgggaccaagagaggcttttgtcccttttgagcgtggccgattcttggctaaagcaactacgggtccagcaccatgacttcaattactttactgggtctgcgattattcgtcgataaaaaaaaatggggccaaacaaagaagaagaaaaacccaaaaaaaagcttttgcaaaaaacctctacaaagaaaaaaaaaaaagaaagaaaaacctaatgaaagggactgaccactaagaaaaatatcttttctttgggtctatagctatttgggttaatttgtaagttgtgaccccggtgagagaagagttatgggccatttgttcactacattggtggctcttttagctatatatatgggtgcccttatttgactttttctttcttctaccatagagaggaggagtgagagtgagttgactcttttttctctctttttttaagtgctgctgttggtgcggtgaatatgtttttttttcttcttccccttttgtagaaaagatgggtgagtttcatgagaaattaataggctcttgaaccaacgagtttgtatatggattgtgtaatattgagctttctttttttttttgtttctcttgaccctatatatatgttaaattgttaattaatgaaaccgtgggagagatgaaaaatatatataccctgctggtttttgcaaaaacttgtgttgt

SEQ ID NO: 255992 - DNA, 583 bp, Cannabis indica
attagaatgtttacacgactccgttgcttagtgttaactaaattcatgaatttgagaatacaatagattgaaatacatacaacagacccacatggattattataccaaaggtaaacacatgagaatttacagggcaaaaattataatggcaaacctagtagagagaaagtaagctttgatagggatctttccgatgtcttcatcttccttagcttcaaacccataggttcggcccaaataaggagaccccgaatcgaagtcgtgggtatcaatggatactcgagatgggagagccgaaaatgttcttggattgaagaaatgggttgaaatggttgaataagttgaggggaaaaagaagggtttgagtggggttgtgggaagggatttggatatttggtggaagaggagggaaactccagtccacctgcccattcaccgagcgaaaccttcgctttgtttgttagtttacaatgcagactcctgttcttacttttcgatgctattataatttataaatgccggaggaaaggtagaggtgcaatttatttatttattttttttattattatttattttttttttt

SEQ ID NO: 255993 - DNA, 374 bp, Cannabis indica
aacataaaaacaactcaaacgtcacaagacatcaaaggaaaattgaatgacacatgaattattgactttagatttttccaagtgacagtagagtcgaattaaatgccaatactttccacttgttacacaattagaacagaaaagtaaatagacacatgaatttataaaggttcggcccccttagttagcaggtaatgacatactcctcttttagttttattgatactagagataacactacttagatcactatagtaatggcatctgaattagctctcttaaggttacaatgtgaaaactagagttggcaaatctcaagtgaaggtaaagcattgggtgtgtgtgtgtgtgtttgtgtgtgtgtgtgtgagaga

SEQ ID NO: 255994 - DNA, 979 bp, Cannabis indica
ttttttattttttttttcttaagtaaataaacaaagattacacccgtgtatggtttctttctctaacttggattgtttctttataataaacaaatatcacaaccatatatatggaacacttcttaatgggtattaatcataaatggtcactaaacaaaattaactataaatattaattttaaaaatattaaaccatcaaattttgatctaataacgaataatgaaatcacaaatttgaatttctatgcttaatttaactacttaaattaaaaaaaaaaaggaaacaaaaatatctctttttacactatataaaaaatatgttcatactatacaaaaatatttaactcaaactctaatttttttttaattttcttgcttaaaaacttttttaatttttttaatgccgatggaacaatcttagcccatatgatataaaaatgagagattttttaattaaatcgaaaaattaaacatacaaactcaaaattttctaattttacccattcatgggtaatacccattaagagtgcacatatatatatgttacatatcctatatatataacatacgaatacattaatatgtatatacacaatatatattataaacacataatatatatcatatatgtacgtatatacaaattactatttttacatatttattctcgcaaatatatatatgtaaatatatcttatgctcatcatataatatacatataactcacatatatcacatgttatatgatatatatctctcacatatatacacataataatatattataatctcaattataatatgatatatcactatatataataatatcaactaaatagtatatcacaaaataaatatccacaatgcttaccatggatggataattttctttgattgtatgaccttcatggcaagtcttttagaaattaagaagaatacgccatcgaaatgacttctagattgttggaaaagttctcat

SEQ ID NO: 255995 - DNA, 1849 bp, Cannabis indica
tggtaattaggtaaaatctttttaactgagttaatatctgacagttatgagcatgtgccctttcttttgtgaaacttcgttagcgttgttggttattaagctttacataatttcatagatgctgactctctctccattgccttgaaaactgagtgacattttgttttatagcagagacccaatactgagtgactattagtgtgtgataaattttctgtctagtaactagtgttttaaaataatgaaattctcccggataaatcaaaatatgattaacataacaattataatgacaaagaaatcctttatttaacatttatatccactatatgaagtttaaagttgaaatgaatctaattataaaagaggattgaatttttttattgaggttagcttgttgttttgttaccgttaactagtaaatatcaggtttaaatttagtgttgagaactagattttgaaagagtatgttcgtgctttttagctgaaatcttgactgaactttacaatctgagtctagttgtaaactggactttgatgagaggattttgtaatttgaaaactgtactttaatttggctgaatggttccatgtttctcctatgcattaacccccctttctctgtcttgttgaaccactgaatgtgcttgttacataacttatgattgctgaagttgttacacaattgttttatcacccctttatgaaacttgttcgagggggcaaaagcaaatggctaattgagtttttgtgatcaaaatggcagatttaagatatttgaggtagatggtgatttgctctgtggagatattaagggttagagagttgggtttgaatctgcaattgctgtacagtggaaatgttgtcaaggccgtaaagctagctatctatgtctatgtgctgctggaatgtgtagtgtgtttaatctgttgtttctcacagtggccttgcctttgccggggaatagtagagtagtgctctcttcatcattttcaactggtggctccatttcttttgtcacagatttgtataatatttggtagaaaagaatgtggtgataattagatacagtttgcatagcacgtgtacattgctaactactgctgctgctcatctttaagttttacgtgacttgtcttttggcattatgctctcttagcagattcaggattctttggtgttatttaggagatagtctgtaattcaagttaaattaagtcataatttcttatcaaatcaatttatccttgcatctttcactgtttcatctcaccaattaatgcaatttttctatgtataaagtggtcctcagtatttatggtgtgtttaggaaatgaaaatattgtttactttcttaacaacgaatctctttattataaaaagattcattttgcaagtacgttagtacgaggagtttttttaaggtggaaatgaaatatttgggtctcgcaccaatttgaaattaaagaatgggaatgacaatttttccaaactcatgggattgctattctcaatccttcttaattataaaaataaatttttattcttattcatttgattgatgattaattcgtttcttaggtaaatgcaccattaattttttaaaatttcaggaatctccatgtcattggaataaatagtattaaaaggtttttttttttttaccaataggataactttgtagtgatagtcatggatgataatttgatttgagaataattatagggagttttgggtgtcaattttgtctgtaaatttgtaggcatttcattagttttcttaacaatattgttccaataaataagtaggaattgaagaaaaatgatgaatggcgaacttcataattttt

SEQ ID NO: 255996 - DNA, 620 bp, Cannabis indica
ctctctctctctctcttctttcaaactcccaacccgtacgccacaccccatagacccacgacacacccacggcgcacccccatcgagccacagcgcacccccactgacccacggcatacccccaaccaaagtgagacccaacccataaccgacgatgcacgaaagtttgttgtgattttactgttaaagatagattttgttagattagggatagatttagtttaagatgtcagattttgtaattttgggcaagatccgatgcacattcgatgtaggtccgttggggtctgagggcttcaatgaatctgtaaggttgcgaggtaggagaagtaggtccgatggaggggggggggggggggtccgatgtggggtccaatgcggggtccgatgcggtgtctgatgcggggtccgatgcagggtctgatgtgggatccgattgtgtctgatatggggtccgacggggtccgatgaggaagaaggaatgggaagagaagagagagagggaagtgatgtaaatgggaaggtaatttggagataacattaaagttagcttaaattacaaatattggtaattataagtttagagaaaaaaaatcaaagttatgtaaacatatttagtc

SEQ ID NO: 255997 - DNA, 1596 bp, Cannabis indica
tgatcgtttaatctaatggacatattgtgattaaagtataccgggttgaaatcatcgaagttgtttcttgatcgactcagattggaagctccattaggttgtacaccaggtctgttaggattcgaattgttctgagtgttgttggtagtaactccaacatttgccatgttagtagagagagggggaaagagctctgataccatgttgaatctcttcaccattgatgaacacttaagcaaacaacaataaccaggaagcaggggaaaaacagagacaaagagaaagatgaagaaagagagagaaaggtaaagaaagagaagattgagacaaagggcaatcttattgaatgaacatgagtgttggcattatatagccaacgattacatgaaggagaagaagctagtagttaacagaaatcagttagagcaaacagtagcaactaactaatttaacagactaaatgtaacagaactaactaattcccctaacacacgtcattaagacccttcgggagatgtgtaggcgtgttgtttagagaccgttggattggaagaccttaggcattccctttccacgcgtctgcatcctaatgaataaggagtgtcaatatttaacctcctcaaatacaaatctattagcgcagatttttgttaactaaatttgagcttgaataacgataaacttacacagaaaaactaaagacggtaaagaaaaaagtatgaacactaaggattttttacgtggttttgcagttaaaattttgcatagtccacgagtcaatcttattagatttttgatgatttttcagggcctcttttcttatgaattttttgtcccctttttagtctaacttgcctctatttataattacatagtcaggcagttaattacagggttgactgggatctttacaatgactatcccctaaaatcgtggggtttgattacatatcacgtaatataaatgcggttactatttgaatatcacacaactgtgattaattcgcttttactgggtcaagataaacatgtattaaacacattttaaatcataacgttttgggatgtctcgacaggaactcggtaccaatgaccttgatagcgagctagagcttttctgaggttgatgatgtatgcctcgttgcttcttcgcttgaaggcataacgcttcattttgacaatcggagttcttaataacaaaaagtacttcaacagtcatcattcgaatgtcagcttctgctcaagagaaccaatttgccaagactaataacctcactgaaagatgtttgaagttgattggtgaaagtatcaggaacatgccttcctatagcgagataagcgcctcactattagttgtttgggttcgcccgactgttatacttagtttgtatattatacgctaagtgttttcatagtcattatgcatcgcgtacgtcttcccaggcgtaacgaagttgatgtctctcgccttgtgcatccaatgtcgtatggtttcttgttaatacataaggcaatagtttgtatatctttatctcgcataggaccttatagtcagcaagttgcaaatatactcggtcacttctgcatttaatgagtt

SEQ ID NO: 255998 - DNA, 901 bp, Cannabis indica
tgatcaagagagaccccggctggaagacccatatggtgccaacaagaagaagcaaaattgcaagaaagcaggatatgtgaagtggtttcaggagcagctcggcaggcagggcagacagatggaacgtcgacatgcttgattctgagattgacacaagttggcagactcccagatgcagcacgccaaagaaagttacgcacctttggtgggatttttagttgccaaaggttttgccaaaaacctgaattgttgctgccagttctggagtcttttgaagcttgaaggatgcggtaagcacttttgacagagaattgaccagagctttcattagaccaggaccagaagtcagatgaagctgagaagctgagagggatacttaagattaaattagcatccctttcattaaacatgtcccgaaccaaatcagtatcccaacttctttcatcaatagagaacagtgagctaacattgtgaccaataagaccaatatgggaagaagtgatataaggattaccagggtcagggagccaagggtggtgcagaatgctagtagaagagccagtaccaattgttctcctaactccttgacgaagcagatccatagcactccaaatactgcgccaaacaaagctaggatttcgacccaaatctgctgagagaaaatcatcatgggggaagtaacgggctttataaatcctggatacaagtgagtctggataacacaacaatctccaaccttgcttagctagcatagctaagttaaaatcatggagaaggcgaaagcctaaaccaccttcatcctttgaacgagagagacggtcccagttcatccaaataataccatttcctttgctacttgtagttttccaccaaaacgagccattaatttttcaatttcatc

SEQ ID NO: 255999 - DNA, 1045 bp, Cannabis indica
catgtatttaattatatatatatatatatatttctagttcttttatatttttttatagagttataatcgttgttcgtatcaagcgtacaattaatatgattactcatattttaattagatataattactcatactttaattagatatactctaaagctaaatgaattttactttacctctttaatttaatttatgatcataacataatatttttctaaaaaaacaaaaattctctctaatatctgtcactattcacctctcctttcctataactccaacactgaccctgtcggtcctttatctacaggggcggaggtattgggaagtttagggtggccttgcccccccacaattttacactattataattaacatatgtatatatatatatgataggtaatggctattggtttctgtaatgtattaaaaaaaaattataatatgtatatgtatatgtatataataaagagcaagtgagttgaaaagtcaaatccaaaatttatatctaagtaaataagtggataactaatgagatgtatttgtaaaatatatattattttaaaataaatactaaaaaaaaaaaaaggtttttttttttttacaaaatgtgagttaatgttaatgctaatcaatttttataataaatattatatgaaatttttgtaggagactttaaggattgttctggttgattttcaattatttttatgattgcgtacggtatattatataagaccacttgtaaatttttaaaaaatttcgaatagtttatttgtcgaaaataaagtttaaatagttacataccacacgtataagaaaaaacagttgtgcatgtaaattttattttcggcattgtaagctactcagaactttatgaaaaaattacaaatgattagataactataacgtacataattatgaaaaaaagaaattagattgaaaagttcttttgtataccaaaacagatagaaaatttactgaaacactccataaaaaaagcgtactatagtcatggacttattctatattgtatattcataaaaaa

SEQ ID NO: 256000 - DNA, 667 bp, Cannabis indica
caacactctattttactgtactgtttgaccctggggctacacattcatatgtggcatcaagataattactctattgggtaggccctatgatttcattgagaaaggttttggaaccatactgcctagtggggaattggttatctccagaaggcaagttaggtctatgccagttagggtggaaaatagggtttgatatcatacttgggatggattttctgttcaagtattcagccagtaattattgtaagcgaaaaatgatagcttttcagccggagggcgaagatctatttgtttatgaatggatctgttcaagggtctcgaatcttgattattttagatttaagggctaaagatttactacacagtggatgtgtatgatttttagcagttgtaattgactccaacagacctgaaatatttggacctgaggaggtcagagttataaaataatttctttattgaattttttgaggaattactgggatcgccgcttcagcgagagatagatattgtaattgatctggcacctggggcagaacctatttcaaaggcaccatacaaaatggctccagctaaactcaaggagctaaaaatacaacttaaggggatgctgaatttagggtttacccgacccattgtatcgacatggggagctccagttttgttt

SEQ ID NO: 256001 - DNA, 608 bp, Cannabis indica
aaataaataatagataaagccaagagtgtagaaagaccaagcagagtattgatcactaatgctccatacatgtccacatttcatttttgtacaattatacaaacatgtaacgtcaatcactagtcatatacattacaaatataataatttcaaaactagaaacatacaacaatatatatgtgaaccttattaaagctctaaattattttccgttgtcgattttgtattggtgttaaaaaaaaactaaccatgtataaataatatgagtttgtcttttaattttaaagctctgttataccaatcaatcaatcatcataaatggtactttactttgtttcaaaaattctaataccaagagaaacaatacaaaacgaggactatatgcctaaaaataaagaaataaagggtactagtagtgtgtagcacttttttaagtttcaatatggttattggtccaactaagtatcaggtctcgtagagtttaatatagtaacttttagagagtatcgctagccaatcgcaacgcgatatattaagaaggtgataggcaccactagtacctattaatagcaatgctcctaaaagtaaaagctaaaacagaagctttt

SEQ ID NO: 256002 - DNA, 1026 bp, Cannabis indica
taaccacatcattcacacttagaattttcttactctaaagaattcatttcaagcttgccaaatagcccaatatatcacaaccaccatgccttacttctccttacccacctgagctccaacctgttggaaccaaatagaaaaatcaaccccaacagagatcaactctattcagacattgaataacaaattgagagaattagactgtgaattatagtctcatcctcagacaaataataaagaagtaatgtggttaagctgacaaatttataaactaacacatcattggaagataccaaagttaagcatgccatataatttgaataagttttttaaatttttcaaagtagttttttttttttttttttttttttctctcatattaagtgctttttcttgattgtttgtttactttaaacaatttataataagctaatttaaatatatatttttttaacagtgtactttcattgaagaaaactgaagctaatttaaatgttaaaaaatttataaattacatatttgatttgtttgtttttttcttttttaaatgattacttcattaaacaggttacaaattgaaaaaaaaaaatcaaattgagataaaaatcaacttattattggtttgtgtaagactaaaactaaatagagaatgttgaagagagttacatagcaacaaaatgtcagctaaagctaatagcaaaagatttgttttccttttcaattctcattttatacaattggtcaaatttaattaatacaaatgtacaaattattcataaatatttacaattagccaactgtggtcatagtgattagtgattctacacttcttctagtaaaaagaagctccaaagttcaaatctccttcttccaatataaaaagaaagccctaaatcatgcaacttcaagtacaatttaaataatttttctttgggagattttcataaatattcaaatatgataaaaaaaaaattcaaaaatgacaatcttacattacagtttttcaatatttttatggatttaatt

SEQ ID NO: 256003 - DNA, 968 bp, Cannabis indica
attcagcgagaaaggtagtatctcttggcgctacagctcgctttttatttgttttatgtcgagcatcactatgaagcacacatcatgaaatatcgctttataactgattataaattttttataaatatttattaaaattaaataagtgagatctgatattaaattgtaccaataataatattgcacttcattaaaatacaaacaccacgagtatcctttagcatttcacttttaatatcttcatcaaaataataataataatgcattggaatgttattaattttttttacaaatttaaatttattaatccttacatatatgtatattatattttattaccatctatactattttcataaactattctcatctcaataaacttatattttgtttttctcttaagcaattgacacacacatatatgatgttgaataggtcattttcatgatatatttataaatataacattgacaaaacataataatatcattttttataatttcaaaaatatcttatatactacaaataaatatataatatttattattatttattgaagggctaagatgagacgttaccacaagtttggaagtgttgttgagtgtcatagcacaatgccacaataatcatccacttgtgagaattaaaagagtttcttccaagactttctaagaaaatatctaacaaaattatatattaattatacaattttaattactattataaatattgaataaaggtgtagactttggtacctaaagtaaaagggcatgatgttgtgttgtcaaataataagaaaagccattgtttcatcctataaaaatctgtattttttatatttatgagttttttaatttattttttttatagtcgctattgtattttttttttttttgaaatgaaatatcaacttcattgaattaataacattctgaatacaagagagcctttaaattagtccaaacagt

SEQ ID NO: 256004 - DNA, 603 bp, Cannabis indica
attttatttcctcaaaaaaaaatattatatatattttaatttctagagttataaatgtaattatatctagagttgaaatatgctgaataattttgggatattttatttttaaatttagatactactaattttaaaaaaaaaagtcattcaacaatttaaatgcctccatatcaatttgagctattgaaatatagaatacattatttttgaatagaattttttttttaaaaaaaattaccaataattcctcataaatcaaaaatttgttatatataaaattaattatataaatatatatatatattgaagtttacatgcaattagaatttgaggaaattacactctataccctttttatattattttcttttatttttacctctttttttaaacattgtaccaattttgcccttatcacttcaagatactctctatgtgatcctcttattatgtaagggcattttaagtacaatacatataaaaacagttatatttcaaataaatataaaattagaagtaaatttaattaattgataaataaaagaggcatttttcaacttaacccttagaattttacacgttcggtgatatatttatactagt

SEQ ID NO: 256005 - DNA, 1519 bp, Cannabis indica
agtttttgacaaggttgtgacatcgtttggtttcgtagagaacaagtttgatcagtgtatttatatgaagatcagtgggagtcgttatatttttcttattctttatgtagatgacattttactgatcatcaaagatttgtcattactaaacgagaaaaaaaattatctaccagctttgatataaatgatcttggagaggcatcttttatttttattttggggattgagatttatcatgacaagaattaaaaagttcttggcttatctcaagaagcttgcattaatcgtgtgctcaaaaagtttaacatgaatttatgtaaggctagttttattactaagcaacattgtcccaagaatgacttgaaaagagaagcaatgaagaatatctcatatgcaattgtagtagggagtttgatttatgcttaggtttgcactagacttgacattgttttcatagtcgatgttcttggaagatatttatctgatcctagccatgatcattgagttgtagccaagaaagtcatgagatatatgtgaagaacgaaaagtttttatgcttgtgtataagcatatcaacaatcttcaaattgttggttattcatactcaaattttggtggttgtgtagataatttaatgtcaacttcttgctatatttttactttttctggtgtagttatttcttgaaaaagtgttaatagactttaatcacatcatctactatatatattgagtttgtcgaatgttatgggacatctttttaagctttatggttaaagaatttgattttagagatagatacgagtagttgattctatttcctctcctatactaatctattataataataatatttatgtattcttttcaaagaataatgagattagtagtgcttccaaatatatggaaataaaatatctcagcattagagacttggcgaagaaatgagatattgttatagaatattgtaagaccaagttgatatgtttgcagatcctctaactaaaagattaagtgccaggttatttaataaacatgtttgttgatatgagtattttaataatcttttgcacttttgggttagtggaagtttcttattttatcatttgagattaaatttatatataatttacttgttgatgttgtgaactactttgtgggcaataattttttttttgttattattggatatttatgctttcaattatattttgttatattctcaagaatatcttttaagtttttttattattgtgggcaatgattgtcttttaagtttaattacttaatgacaatgatgttttgttggcttaatttttttaagcatgattagtgacactgacttattattaagtagtgtatgactaattttactggcttattgattaagcatcatggtatcaatgaaattgaagactgataaggatatcatgttattttaaattgatctcatgttgaacataatgtcttactacactactagatttattgaccatgtcgatttaatactttggtgtttgt

SEQ ID NO: 256006 - DNA, 982 bp, Cannabis indica
cactcggaaagcttctagacatccctacacggaaccctccaaacatcgggtcccatagtatcaaagtttgctccctacttcgaactcgcagagtgcacacgctaccaaaagaagatcaccattttatccaacgccatattctttaacattctcggtatgagtgtggatgcacacgacacctagcatcctcagattttctcctcttgtacgaacaatcctcacctcgtgaattaaacctcactcaagtggcccaaagtcaataactattgtattttaccccatcaaatggcctaattgatacctttaaatcctactaggttccctataaatagaacattaccctttcatggaaagtgttagaaattgaattcttgggagaagaattaagaattaggatttttcaactaggaaaaaaatacttataagaaatactttgaagcttttctggctcaataatattgactcgtggactagaattcattaacacttgagccatgtaaaatcttagtctcttcttcttctttaatttacttctttcttaagcttatttattttataatcagtttttgaaaatttcagtaaacattttggtgatttcgttgaaagatgaggaaagaattagcaaagttgtcatctacaatgatggttgcaacacaaaataattacaagcatcaagccccgtggttagggcgttaaattatctctgcaatatcaaaaagggagactcttgtcccccaaattcaaaaaataaagagcaacaaaaacaaaagatggataaattcaggctgagctttggcgttagcttcggtggacgttagaattttctctttaaatgacttggttagagatcgactcttggactatagatcgtctattttgtatagccattcacattaaaaggttacactgatattttttatttgtctaaaaaatcatttacacgcttgtgaaatagattatttattttatatattgtaaatta

SEQ ID NO: 256007 - DNA, 2957 bp, Cannabis indica
taaaaacataatgaaaatcccaaaataaaaggtcaccctactgctcaagtcatcttccccatctgcgtcatgtaccattattgcataatcgaagaagaaagtgagaagggttccataccccaactagtcttgtcaacaccttacaatgatcaaaactttatggacaaatgcaaacctaggaagaagattcgatgtgtgttgttgttattgggtgagttgttaaattttgttttcttctccagttttttcctcttttctcagactgttagtgttgactctggctgtgcatataatggtcaatggctgcttctccaaacttctctggtctcttcacggtactaattgtgatgtgctttggattcctacaaatttcaatagggttggttgcttatgccattgcgaaatggggtctttgtaattcttgtgctggttttgttaacttttgggaggtgaaccccttgcattttcagctttggagggttttcaagcaaaaataaacgtatatttgttcctaaaaatagtgaaaactcgtttcacatacacatattcaataactcactaaaattgaaattaaaccactaaaaattggaaattacttcaagctattgctcatttgcttgttgatcgaagaaggtcgaacgtgccaattaatagattgaaaacaatgttctttacttcttataaccgggtttataaacataaaagcagccaagatgataaaattgaaagcagaaagctaagtcgtcacaattcagtaaaattcaatattgaaagaaaaagaacaaaatacatttcatacatgttcggtaattcaaaatccagaatggaacacagtatgacgccagagaaaacctttacaacattctcacagaaaatgagacaacagatagtaaagtacagcaaagaatgtgcaattggagatgccattcattttaagttgctattattctctacttacctaactatttcaatctctctagttaggcagagagtaacaacaaagaatgatgaaaatgttaaaactacccaaaagaacgaaaaaaaaaaggatcgaaaaggcttctctctacaatgttctctatttattttcatcattagtctgctctgtctttggctcagacacctcctgcaccggctttggctcagactctggttctggctcaacaatcgcagcagtagcagcagccacaagagaatcaaaattctctgacttaccaagcacaatctcaatctacagtaaatgaaagaatatatcataagccaaagaacatgtagtttgaatttaattaacgaaaagatacataatagtaatatgagattttatttcttcttcgacccaccttggctttctggaccaggcgtcctttactctcatctttcatgccaacagtggaagttgaaacttctgttcaatctcatcattaaaacgaataaatattaaatcggtaatctgtatcaaatatatatatatatatatatatatataatggcatcacaaaacaagttcattactcttttcagtagctagtccattgttcttcaaaatttcagcaatagtgacaacagttgttatcgctgcaatggagttaaaatcaaaatctttaatttgtgcattgtaatgaatgtatttagtatgtacggaaaatggttcaaatgtaatgtacccattccgagagcagaaagctcaacctcattgtgttgctgtatgtacctctgcatcaaaaaataagaattttaatcacaaaccgtaatctgaatttctgcagtatgaagcatcaaatcttggaaaattttcaagaattcaaacaaaggctgagaatagttattaatttgatcatcgaggagaaaggtaattaagaaaataatcctatctcgattaagcgaacatacatcgaagatattaatcttaaattcttcagtttcaaaatttatcaaaaagccgaacaggtgaaagcaagcagagaatttacacctataacatcagttcgatcaaaaggttcacatccataaaaagatcaaggaataataatagcatcttttcaatctttctttagctatataacttgtaaattcttgcacataagaattcaagaaaaccaatggcttgtaaacacatactgaaaatcacaacattctgccagttccaagatgcgataagcgaaaagtttaaatcattatctctgtaaggtacagattccatcgacaaacaatacaggcattagaaaaagtgatttcaaagccatatctacatcaattttgacaaattaaagatccaaaccacatggatttcaaataatacaggtacgaacttaaagatttctcataaacacacagccatttccaacaaaacatgttcgaaaaaccaaacagtgaaaactcgaatgaataaaaatgaaattcgtaatggatgaaaagcttatacattataccttagcaagattgacgtagaaaaagagcggtttcttggtgttggaaacctggattctgttcttcttctgaggctcgataggttgaggaggaggtaatgcaacagtcgccattgttttcttttctctgagaaaacaaacaagtctccgttcaatttctcgggaattctctgaaggatctggtttgaaggaggaggagagagggtggggcgggaaagttgaaagcgtttggtttgagggaaagtaggagaaaccgttgaggggtttatatagagacggacccataaggaccgacagctggcgagtttcgcggtgcagagagtggacgcggtcactgctctgttcgtttggcagttaggatttgatgtggccgttatgactttctctctcttgcattactcaatactcacctatataccataatgggcttaatgggccgtctataccatattggcccactaattctgaaatgtcctttttattttgacaatttttcggttttattatatttcggtatacctatcatatttt

SEQ ID NO: 256008 - DNA, 542 bp, Cannabis indica
aatttttacccgagccagccacccaataagacctggtatttccatggccttggttctccatgacaaccaagcttttagttcattcaagcacctgctactatattgacaattaaagaagaggtgttcaaaggtttcatcatcatcttcactcataccatacatttgcatatgtggtgatattgaaatgctaaattctagcctttatctagagcctctttagaacagctaaccataagataaaactatgcttaagcatatttaatctgctccaaactacaacagcccaatgaattgtatcataatctcgtgtaagtagtttgtacccctattgaatattatatgtacttgctttaaggaattgaaagctagtactagatttaaattgattcttggttgccacaatatgcttctagtactaacttttatttgatggaatttgcaatcccaccacactgtcctaattttcaaatatatattatgaattcacttaacccaaagatcttcttgtttggtggaaaatgtccaaacatatttactaatgg

SEQ ID NO: 256009 - DNA, 745 bp, Cannabis indica
aaaatactaaatactaataatacttttttagccatattatattaggtgactgtgctaaatagataacactttaaattgactaactgttccaataatttagtaactaaaattaaaacttagaatattaaatgaaagtaaaataataattaggataggagaattttaacataaaaatagttaaaaagtaacaatgatgtgtatcgatattgctattggtccaactaaatatcggatctcgctcatagatagaggaagagtacgtggtaattaattttttttttagagagtatcgctaataaatcgcaaagtgaaatgtctacagatgttaagcactgctagtctacatagcaatgctcggatttaacagctaaaaactctataattattaactgcaatgcttttatataagaggtaaccaaagagctcactgaaaaattatactgacttgatttttcattaacttcctcacttttctactttggaaaaaacaaagtaagaaaaaaaaaatccagtaaagggaaaatgattttacataaagaagttaaactgtaatgggaattctgatcaactattcaaccatggcatctgctgatgcttgaggagcttcagaagctgctttccctgatttcttgttgttcttacctgttcattcattcattcattcaaataatgttaattaaacttataaatttgtattcatgaaatgtaatttgtgatattttaaacaaacttgcctttgcctttg

SEQ ID NO: 256010 - DNA, 562 bp, Cannabis indica
ggcataaaacccaacagtatatgattgaaatctccatgacaaaataataagacattatctggaaaatatagatggttcaattttaaatccaggcgtcggtcatggaacttgaaatcaaatttttgaccaactttagagagtattctagataggcactccatgcaaagcacaaaaattagtggggacatcgggtctccttgttgcaaacccagttttgcctcaaagaaaccatgtaaagatccattaaaataaagacagaagcgagaagttcagatacataccattaccaattgcacgaagcttactgggaagttcaaagctattagcatctcttctatgaaatcccattctagtgtattgtaggcttatcgaagatccagtttgatcatataatttggccttgactcttccgcccataatgtcgcaccaagtcttggtagaccataacattataagcaatgaatctaccttgaacgaaactactttaattttgtgccaccaattcaagtaaaacctttcttaagcatgtacatatcatcttagttgctgctttgtagataac

SEQ ID NO: 256011 - DNA, 931 bp, Cannabis indica
ggatgttctttatactgttggaaagcccgtaatgagctctattacttggtccagagttagagtccaaaatgtgaattattattaaagtgaatttaggattaaccctatttttgaataaacctgggattgtgactagtaatactaatacttgttgggatcacctatggactagaaattctcctcatacattggattttaggtaagacagtgagctaagcacatagagtatagtgcgatggcgcgagtatatattatatgattgttcatttattgcacaagactagatatcagtgaagtacaatttcaagtgtaacaacttggacaagtgttgagtcttaagttgattatttgactataatagactcaccataaagcatcatacaaagtttctaagggaaccacatataagacaaaggttgtataggtttgcaaggccatgacatatcttgccgaggtcgaaaaaggacaacaaactggccagccacttgggacgaaagctgtgggccaatcagggtcccacgacatcaaagaggaccaggcaggatcccttgatctttgaaagaaccaggcagggtcaaatgacccatgcattaactggacaagatcctaggacacaccctaaaaactggctagcccccatgacaaacaccatgggagggccaagtcttaaacaagacccctaggctggccaaggtgtgcagtggatcaaaatatgtgtttttcaagactcgaacgtgttcttcgtgactcaatgagtcaagaatcaaaaaaaaaattcaaaatcaaatatttttcatcaagaaattatacattatgcatcctaaaactatcatgtagatcaaaataccaaaaataccacaatctaatgtgagaatcaagaatgtaaaaagcttaaacacaaaaatggaaaaattcaagaaaataagtaccg

SEQ ID NO: 256012 - DNA, 530 bp, Cannabis indica
tttagaattatcaaaataatattgaaaataaaagttaataatgtttcataaaatgacataaaattagacttagttcaacttttatataaattcataaaatttttgtcagacaaaaaagtttgattataattcattcaacgaaattttttattggtagatgacaatcaataagacttgggtgaccatgagaaatcgtaaggatttaagttattaggaaggtctccaagtctttattgcactcgcgtctaaacacaaagattgtgagagaagaattttttgtctttgtgttaaatgcaagaataccaaattgcatcctttgaatactttggaggtccacatctttacaaagggttttgaaagcagttatgagaggtggatttaccatggggagccgaatgaacctgtcgaggctaacatcaatgtcaatggagatgagatggttgatgtaatggaagatttcttccctcctataaatgatgacgaaagagctgttgatgatgacatgctgaggggtcaatattatgatgaca

SEQ ID NO: 256013 - DNA, 4769 bp, Cannabis indica
  modified_base (2798)..(2798): a, c, t, g, unknown or other
aaacaccgttcgatcaaaccaatttaatctattccacactatgaacggatctcagagtccggttgcattgactaaccgtaatactcaccacacaatcgaaaccactctaacactgtaggtcccgcggtattaaaagacaaaaatagaaaaagtcgaatgaattttaaaattttatccgttaaattacagaagaagaaaaattggaccgctaaataaatatatattacagaaaccaaagaggaaaggataatcatatggagacggagctgaaaaggagactagtatggaagaagaactgaacgctcctttggctcagcccccatccgacgtcgtttctgagaagcccgctcttccacctcctgcgccaaagactgagcccaaggttgatgactctaaatctctagttgtggttgaaccaagtaagtttgttttgttttaatatgtttatctgtttggttgccgagaaaaagtataagaaaatacatttgtggataagattagtttccttttgtatgtgaaatgtctgagttaactatggtaataaaagcttgtaattacgtaacttaaggactatttcatttgttcaaagaaatttaaatataatcataaattccttaatttagaatcgaaaatcagatcacgaattaggctattaaacatttttttttggttttctgatcacccctgtgtatctgtagaatttagttttactttatttataaattaattaatgaaacatgttccagtatcgtacttatggattgattctctagtttggctgtccccttttcacttttataattttaatcttgtttgaggtgttcttcctttggaacattatttgttttggtttatttcactttctttttcaaagtgtcttgttagtggagtcttaataataaagtaatgacttaatttcaaagtggttgataaatatctagcgatcggcccccctctacaactcagaatgaatgaatattgtacatttttccaacaaattgttactaaaaatcatataattattggttttttatgtataattatgcttattttcattctctatttccattaatttattcaacctcatctttaccatttcaattttattgagaataagtacatacacttttctttttaagcattaactttcaagtttttattttcaaagggaaattctcaatcgatctctcatccaaaggaccaaagataattatccttagatgtccaagtctttatccttgacaaaatagcttttttgctttatctttataatcaattatcgctttagaaaacatctgtagtggattacagttctaaagaaaaagaggaagaatacaattcgatccacatcaatattattcacacattatatttctgtttatttatatatttatataaagatgagattgaactaattgtttgaaaacactatttgcttttcctatgcaaaacacctaatcaattatagctctcttgctctccgatccttccctctagttcttatctgttttctccaatgacaggtactcctgagccattggtaaagaaaccctctggtggatcaattgacagaggtatgtctactcatcttcctcagaagctctttcatatatatacatatacatttatatatatggaaatttatgttctaattttattacttttctttcagatattgctcttgcagggtttgaaaatgaaaagaaattgtcttttgttaaagcatgggaagacagtgaaaaatctaaggttgaaaacaagtaaggcttttaacaagagttttagttggtttatttttatctctgtatctatgatctatgctctataccaaaaaggaaaagaaaatgtaaaattgtgaaattttgtctaaaacttttgacaatataaatatattatataatatatattttgtatgagtatgtagtgtgcatgtatacatataaatataaatgattaatgaatgcaatgtcataaccagggctcagaagaagctctccactgttactgcgtgggaaaacagcaagaaagctgctttagaagccaagctaaggaaaaaagaggtgattatcttcgttgtgtgttgctacagatacttttatagaccttggtttgttaacactttattgtgaatgttaattgtaaaactttatccaatttcactgaaactgaatacatatattagaagctcataatcaagttgataattaccaggaaaacttggagaagagaaaggcagagtatggagagaaaatgaagaacaaagtggctgagattcataaacaagcagaggagaaaagggcaacggttgaagctatccgtggtgaagagattctcaaagcagaggagacagctgccaagtaccgtgccactgggaaaattccctccaagttccttggctgcttctaaattctttcttacttacggcccaagcaatgttatgaaggctccttgttttgatctgtatacttaaatgtcgttggtttattttatttatgtgtgaaaatctcagctgggtactagaaacttgttcgctatcaaccaaatttgtgtagagaaaacatgtttgttacatatgaagaagaaaaatgaaaagaaaaaagtttggcatttttgttattgtgtttctagatatgctcaacaatttttgttatgtttagaaaaaaacttgtttgttttgttagttttcaagagaggtacttttgaaaataacaacaaaaggtcatttttcttttttgaagcaacggaacaattttattcaaccataaacaccaaactaacaaagcaggctgctttcctcnggaaaaaaaaaaaaaaaaaaaaaaaaaaaaaaaaaaaaaaaagcaagctgccagaaacacaaaacttaaaaaatgttaattaaagacaaaatatcaacttcccttttactgagatgagaaaataaaccacctttaactctagctttcacaattaacttgatctgattacttagcactttagcaaagctacaaacaaattcaaacatacatctatttatattacaccaaatgcaatgtataattgcagctactattgttcaaaacagcaaccaggcctttgatgggtttcttacaccaggttatccaacctccatgtcctctagccaaactttgtagaagtattttttggggtgctaaaggaaatcgtagtaaagttcatcttactttttgggagcatgtttgcttacccaaaaagtatagtcgtcttggatttaaagaaggaaggaagtggaatatggctctcatggctatgacatttaagctctctcaataaaataaaactgtctttgggtgagataaattaatgttgtctacttgaaggatcaagatttctggtgtcttactctcgaaagtgactttagctggtattttaaaaagcttcttaaggaactccttggatcatcatcccttgatggaggctgagagacaagggctgtttaaggtaaaatatttataactttctcttcttgcttgttatagagtgttctattcctgttttgtctcgcacaaacttagtgttcttaagtactgctttattatttggcaggcgattaacaatcatttgctcacaaggaaccatcttggaagattcacgagcttagactctcgctgctgcccaattttatgagactcatcagcatgttttctttaattgtgtttacacaaaaatggcgattcaggatgaacaaaaggtcttggttaatttcacgagtcaggactcaggacccctaaatttatcatctaatataatatagaccaaggcaagcatttttccaagagtttaggacaaaacagaaacaacggtgaaaaactttgtagaaccagaaattaacatttgtctttgtcaaaacacatagttgttgccaccaggcaccaagtaccaacctttcctctcattttatccaaaaataataataaacccaataatagttaataacgagcgtggaataaacagcatttaaatagaatgacaagaccgtgttccacttggacttattgtagaaaaatccttccaattagagtctagaatatcatataatttcaataataatattatacatataagtcttgtctatacataaaaactgaatcctaattagttgacctgagattaattaacgactccattgtctccctacctctcaactacataaaccaaaatcaccatagttacttactagtactaccagtggtgccaatcctttctcactttaaaatgcaaaaagaacatccaaaaaccaaaaaaacagtgatcaacatggcctaacatctaactacttttgcaagcctaaaagctttttagagatgacagatgaatgaattttcagacaacatggcgtgatcggaggcgtaatgatcaccgcaattctcttccaaaaagctcatgtcattgttgatggggaagtctaacagcagctgcaatgcagaactatctgatgaatcatcctccatgtcattcgagcacgaagaatcagagcctgcacccatcactacatgatgatcatcttcattgttggggcagtacttaacgaggtagctcttgcaatccatgtcttcggcttggtcattaaccggagtatcgaatccagtcctgttcgggccaccctcagtggtcaaggccgaaacagaagcctgcgaaattgggctacaacaagccattttttcatctttgatagctactcctgctacctttcggaatgagtctccaacatcagagttccacaagcgtaggaagaagtcagagtcattgga

SEQ ID NO: 256014 - DNA, 592 bp, Cannabis indica
actttcaccgttacacaaggtataggcccttatgagtcattgctgttaaatttgattgatcaatactacttaattcaagatcataattacagattacacccaacaaacaaactacccttgaaaaaaaataaataaaaaactttaataatagtagaattacaaagaagttttaaatttttttattattataaagcatgttacagtgtatccataagtatgtactgttttagacagttataaaaaaatagattagtgagggatgtgtttgtgtccaacatggaaaacttacaggttcagaatttcaaatgtggggtctactgtgagtttcaatttcaggattcaaaaccatcaaatggttttagttgagacagaagaatcttactccaatcagatcacattggattctcttgatgtacacgtgggccaatcttaatagatatatatatatatatacgctgaattgataatgtgtatcgattaattttaacatttaataaaaaaatctaacttaaaaatttgaaatattggctgcaattaaataattttttaaaaaaaaattacaaaatttaaaaatataaatatatcatatatc

SEQ ID NO: 256015 - DNA, 1080 bp, Cannabis indica
aaaaattaaaaaaaaaataacacaaaaaataacgaatattggatagctagacctttcagaatagggttgagtatcagtcattttgatcagtttttttcaatattaaaatttagaattcaattttcagtctgaattggtgcaattcgaaaatcgatcgaccaatccaaaacctttcttaaaattgaccgtttttaatctcggcttggtcggtttaaaccacccaaaccgaacttctttttgttttctttaaaatatgatccaatttattctataagcatattattctacaaactacaaccatacaaattaattattcaaaaactaattgtcttattcttttatctttaatattaataagataataatatattattattatatattatgagtaactacaatacataaagcaaaaataaacttaataaattaatttatatatatatatgcataatagttggctttggtttttcgtcggttattaccacaaaattgaccgttcaatggcagttttaaccgttagcagttttttcgatttttgattttcggctccgccagtttcagttccagcggtgttcggtaggtcgatataaacaattttttcaattttttaaatttcatgctccgctctatttcaaaagccataacaatattgaacacatgaaaactaaataaaagggaaatagtaacaaatgagcctatgttttttttttattattgaagtttaatgtctcttttcaaaaataatataacaaatggtctttataattttttagtacctagaatacctttaattatataaaggtattattcacattatattcaatttctaaatagaaacagaaactatgttccaaaattaaaatgacgaaatttctctcctctattttttcggttagtttagattttttttaaaaaaaaaattggtaaattaccgtgattcctcccaaaaggtgataaaatattctttcctcatctatttattcgattcatttgctcaatacaatcattttctcctcctcacaatagaaggcgacgaagctctactcatatttttctacttctggttttctcacatctcca

SEQ ID NO: 256016 - DNA, 3178 bp, Cannabis indica
gtgtacacgtgaacaaaaaaaaaaaaagaaaaaaaaaattggacaaagagaagaagaaaaataaagctaggcaaagtgaagatatatagaccaataataaatgaaatattttcatcaaaatataatcaatgaaaattattttttccaacttaattaaattgagtttgagttgctactaatcttcaagataattgagttattattattattattattattatattgggaatgagatttgaaactaatggacattataaaaaataattatttttagtgataattttttagtcacaatataatttttttgtgattaaatgtgacttttagtcacaacaaaacgttacttgtgactaaaacataatatttatacacaagttgtcactaatttagtttagttacaacaagtattgtgactaaaaatacatttagtcacaacaaattgtgatttttgtgattaataccttagccacggaccttttagtgacaacataagaatgataatttgtaattagtcacaactattttactttcagccacaagttttattgtgactaaaagtaaaattttttgtagtgtgagatattttctttgcatggaaaaaatctaattaatacaactatagactatatttgtaaccgacaaaatagttatataaatcaatgcatgtgcatagttttctttttttttttcactagaaatttatgatgatcatgcttgatttgaaaaaaaataaaaaaaaataaaaaaattgagagagatgccatgtaaaatgatttggggttggcaaaattggtatgggtgtctcaatctcatccatagccttttgaagatcactatatatatgaacactaacacatctcacctttcttaatttcttacatttgttgttaccaaaatggaattagtgcatccatgcaccatcacttaacttgaaatatatatagagaactttccacctacacaaagaaactttgcttttgtttcatcttatatggggagataataaaataggtaatgacaacaatgctattgcttatcaaaatatcttttcttgcctagtcttgaaagatatctattaaatctttttttttcctagtcttaattattattatgaagttatgttttaagtaataataaacaaaaaaaaaaaaaaaataagcccaagatggtgggagctcatgagtgttaatagttaaattgatgtcttactagtgtaagggtagtttgtggcgtaaatacttaaattttatttttagttacatataaatacctaagtttaatttttaacggcaataatacttaagttatatttctagaaattccttaaataccttactgttaactgttaagccagtggccacatgatagtctttaattggtccaagtcattaaattttttattttgtatctaaaaaactatttaaatataccaataagaaaatgacatgttgaacacttaacgaccaggcacctacggaagttttagagatatgacttagatattattattgtaaaaaattaaactttggtatttatttgtaatcatgagttaaacttaggtatttactctgcaaattactcttgtagtaattatagttgttgtaatatataaatagataattgtcagcgaaattcctaaatgattttaatttttatgcacttaaccttctcatattttttatgattttaaagtgtcatttaaaattcactgttaaatgctaagtaggatgaccattgtgtacacccgtatatacatgacattacaacctcgaagttaatgaaaatatgtcacatacacacacaagtgtacacagtggcaatacatttggtatttaacagtgagatttaactagcgcctcaaatttataaggaaaagtaaaattaaaagaattttgccaccaaaaaaaatattaagaggttaagtgtataaaattaaaacaaaaaagtttcgccgctaataaccctatataaatacttactttctatcacatcattttatttcattctaccctcttacgcgggtgtattaaatgtgttgtacgaaacgaaaacaatcaattacttacgatttagtataccggactaacaaacatgcaacacaattaagaacaatatatcaagagatcacaagaaccaagtaatgaattaaagcagtaaaacagagaagaataacaccagatttaacgagttcgagccttgtgtaatgctctacgtctcagttggaacaacaacaatcatatctttattaatatcagtgatatcaaggttacaagaatcctctacaaactctcatacattacgagaaaaagtttctctcactagtttacactctatctctcaacattacattatcacaattttcattcaagtaattatggtttgattcacctacaaattacaaagattgatagctacttataaatttgcattgttgcctaaaatagctctaaaattatcgtggcacatttataccgtcttaaatattctagctcatcaacaacaataataattcacgacaactttgagatcgcactttcatttgagacaagccatatgctttaatatggacatgctctcattccggatgaacatccttgattgacagtaaactatcaagaagtgcatcttcagattaataacaagttatctggaagacactacatttacggaagacaagcttcacatgagaaccatctagattggccacatctttaattttcacactccgttgaaaaagccttctcggttacttcagctctttaattttcgtcccctctgattgcttgctaattaagagtttctgagttttttgagctctgaaaatctcttaaaaatactaataataatgtgtttatataagctaacaaaattacttaaaagatactaaaaagatttaaatgttaaactggaaaaaaaagataaaactcatgcttagccgcaactccactagagaagactatccttttatcttttttatttttagaaatttttctgttgcgattactaatagtattttggccataattctcttgatattactttgaattagacgattcaagattccaaaaagttaaaagagagatctagaacttttatattttaactttctctaaaatctgatcaaaatatagtctaatttaggcttgaagttttagtttattttcttacaaaattttct

SEQ ID NO: 256017 - DNA, 1522 bp, Cannabis indica
ccatttatttttttaaaataccaatttttctataaaaaaatctcatttagaaatattattttgggataaattaaaaaatatacttttttttatccattaatcaaaaatatcatcatattatattttattaaaatatacccacttttttgagtggattgttcaatataccatcactctctatttaagttttacatataatttattaaggtgtgtaatagagatatcatctataaaagtgggtatatcttatagaatatgaaaatagagataaaaattaaaacaaaaaaaaattggatataccatataatttcctctattatttttatgaaatatttgttatgacaatattttattgggcccctcttcagtcaagggccgaccttgtgattttttgatcaaataccaaaatagaaacgacaacaattattaaaagaacgacaacaagatggtcttctttcttataccgtttcagaaaattgaaaagttaaattggtttttctctatatcacaaaacgttcatgttcaattactctaatcacaaattccacataaaaaaaacaaagtataattgccacaaattttcaagcaataaaattcataagaaaggactaagtcaatatataactgctcaagtaagcaattttttgattcaaatggcaaccaaaaatactggctttttctacattggacaattcaaatcaaaccatgttttaagtaaataattgccacagttttactctttattaatcaatgagattccaatctttatgttgactcacaagtactgcaaatccaatcttgtgacttttatttattttatgtaaaatatttagctgcttgtaacttgggttttctcatgatttgtagaatacactagaatatagtaaaacttcttatatataataagattttgctggaacgttttatgtcaatcaaaattaaacaacaaatcagaattaaaattgattttaaatagaaaatattaaataacaaagaagtcagtgagaggtagctgctgtactgtgttgactaaatatttggcttatgaatatgtcaactccctactcagactggagttgttacttatcctaattaattctggtaattaacaattaattcagaatataggcttatggctattcccaccaaaaataattaaacaaatacaaattcataattactagttttcatatatttttttatgtacacttgtcagtttgtttggttttatactttgaaaagtgacttgatctcgtccatttgtggtagagtgaagtggattgggcaagtgtgacacacgaaaatgtttatgtaattttcttgaccttgacacatttttcacatatatattcaaagcagcctccaacgttgatacatgtttatatatttatatataaatcacctcaaattgtttaaagatattatagttttattgtctaaattttcggagacagttttgtctcatgtgactcgttctgagaatttaacggctcatgatttggcaaagcatgctctgcagttg

SEQ ID NO: 256018 - DNA, 2116 bp, Cannabis indica
ttgaggtgctcatcattcatgagtgttccaatttaccgcccccccaacaccaatgaaactccctccctcctatccacgacacatgaatttattattattattagtattattaaaaaaagtagatttatattatagagttccccttacaatttgatgtacacgattgaagtgggaatatcgtttattgtctctcctattctgttcttttttatttttaaagaccttttgaagaaaaaatatattgataatatttgtatagttaacaagaggctcaaccaaaatattagtcatatgacaaaataatggtggggttaacttgaatcctttgtgctttgcttgatattgtaactaacatatcttccatatgatgtcatgttgattttttccgaccttgatagttggtagatgcacaattcactatagctaaacacaaatctcaaatctttgtaatcaaatcatttttttatctttttttatgacattgtcggcaagtagatcaagctaaaagaagtatatttgtgactatgagtccaaaagagtaattataacctaattataataagaaagtaccagctttataaattaatacaattacatgtagtggctaagaaagcaaaccaaatgttccaccaaaaacagcacctttaaaaatgatacaagtcagtctagttctcctgttcatgcaataaacacacttatttgaataagaataaaggtaagaaaaagaataagataccaagaaaatgaaggtatattatacattccgtagaaataggaatcaaaagagaaacatagtgatttgagattatacatttcataaataactaggagaacatttgagattgataagtgtcccatttcatggattaactactttgtttcatatagacaatgaaacagctaacatgctgaaaattaagacctttttctcattatacaagactcaatatattttatttgctaacttttttttttttccccttacttttcttcatgaacaaacttctcaacctccctctttccaaacgttcaagcagcttcttggccccaggaatttccatctcactaagcttcttcaaatacccaatggccccataagaaatcatcagcttcttgcatttcttgcttgaagaaagagatcctaagcaaaaaatactgcatatttctttgctgtgttttgaagacttggttcaagcaactgaaccagattaggcacactcttgtcatctttctttacttctctgcgattctgtgaaagtgtcaccaagctggaaatcgcctgtgctgcaacctcacgggcactgttggatttggcctccagcatcttgacaagaaggggaatgcaaccggcctcccctaccatcttctttgtctcagctgaggctgagctgcatacccggcagattgcagaggcagcagcctgctgtgcaccaagtgatccagacctcagaacatgaaccagacgcggtaagaagccaagggaaaccaacacatccattgaaaccgagccaactaaatttcttaatgccccaacagctgattcttgtggtaaagggccatcaaggtaagccaacaagcttcgaattccgccttctgagacaacagacctccttaggttctcattgcttgcagtgagattctgcaagcactcagctgcatactcttttgatcctaacagaattccacaatccaagagattgatcatgacccttataatcccttcatcagctagagcttgtctaacctcgggcacagctgatatattcttcaacgtgcaggcagccgcagcctgtgaaactgagtccccggttcgacatatctcaatcagcggacgaaccccaccatggccaacgatttcacgagcagtttcagccaacattgacaatctctgaagcgaaattgtagccttctctttaccaacactgctaccagactccacaagccttatgagagcaggcagcacaccttcagaaacaagccaattttcacagcctccggactcagcaagggagcagatcacagtcacggtcttctcccgtatacgaggagaagttgctgtaagcaactgtaccaaagcacaaatattgctacgacctaaaacagtcaagacattctt

SEQ ID NO: 256019 - DNA, 490 bp, Cannabis indica
attgtagtttcatttattttagttttttttaaaaaaaatatatgaaatgacttttaatatttgttatgctaatatatatgacatatcccatatatattgaattttttatttttaataccacattttgtcaataaatattttttaaaggtattgatttatgtcttacccaataaattttaaatttttaattaatatataaaatctatatctatttatctatagatggaatcttaaatattttttcatttgtatttttaaaattttgtgatattttgtttacaaataaactactacacatacaaatttaaagtatctatgtaggttataaataacactttgttgtgctactttccatatccaataaatatttttcttttaaaagtattgatttatgtcttacccaataagttttaaatttttactaaatatataaaatctatatctatatatcaatagatggcatcctaattttttttattgtatttttaaa

SEQ ID NO: 256020 - DNA, 794 bp, Cannabis indica
ctagactctcctagaatcttgatgtgaacttagatctttgtgagacactatagacttttggagcactgtgaagacaaactatttactctaacatactactcaacatactgatcaatggaaaaattcgtttgtataggtaaaaagtcagctgaatttgtatacccattgacgattaccaacacagaatcgtattaccccatagtcttatgtgatctaaccacaaagtccattgtgatgtctttccattttcattcttgtaaattcaatggttttaacaaatcaaacacttagaaacaaagtccactatattattcttcattcttggccactaatacatggtcttaaggtcttagaacttcttggtcgtactggatgaacagagtggtatgggattcatctagaatctcttttctaatatcagcatccatcaaaacacatacacagttcctaaattgtgacatactactatcatcaacagtaaaatcttcagctttgcgagctaataatttgtcccaaatcttaaccaaatctggatcttcatactgagcttttctgattttctctagtaacgtcgattgtagattaatattagctagtagtcctactgttagaatttattttacaaggacctagatttactaacaagtatatttttaacatcctaaatatatgaacttctagaacgatgaaaaaggtatgagaaaccttacattggatgcaatagaattaaatgaatcctttgttggaatttattttaccaggatcttagatctactcacaagtatgttgtttaa

SEQ ID NO: 256021 - DNA, 1104 bp, Cannabis indica
gacaagcatgacattggagtttctccatcttgtgcagcaaacaccaaaagagcatgataatattcttgtgtaagtgtttcaatgacaatgcccatgttattatttaaaataattcaagaacgaaaatgatggccatttcactaaataatattaattttcacaaaataattaaaatatttgcataatattccatgattagtgtcacaaagtaaccacccaaaagcctttttttgttttgtatacacgtaattctatttcaataggttatgatctaactggcagagggaagtgggcaagtgtggtggatcccacccattttttaatttttttttgacacactttttttaaattattttattttagaatgaaatagagttttttttttttttttggaaaaagaaacctgaaattcattcaaaataggaagttggaggtgcaaatcacaggttacaattaaatgtatggtctttctaataaacttcctgatctaggcctaatgcaaacttggcaagagtgtgagccatttcaggttttattttccttatttcgtttctttaatgattttgttataatataacaaagagtaacttttttttttcaaagaactaccaattgattaagcagacgaaaagatcgggaaccacaaggggaattctctcccttgaaaaacactacctctctttccaatacttggttccaagacctgaggatcagaaggtgatattatgcaaatagattctaaaggttaaataaggtgtgacaaaggatgagctagtaagctttaaggcaagattagtttctaaaagtttcacttagttggaagggatagactacacagaggtgttctcacctgtagtaaagtataagaccattagacttatgttgtcaatggcaactcaacaaggtttagatgtgcagcttgatgtcaaaactatgtttctaaatggtaagagatctacatggagcaatcacctggatttcaagtggaacaagatggaaaagagtttgtttgaaataatccctatatggccttaagcaatctccaagaacatggaacaagagatttgacagcaatgttcatgagattggtttcacaaggtccaa

SEQ ID NO: 256022 - DNA, 1058 bp, Cannabis indica
aagttaagcattgggggcatttttgtaatttgttaagtggagagtggttgctaccgtaggtgttgacacatagcaaggaaatattcagccaagttttaatttagttaaaccattaattaattttagaaagaattaaagaaaataagagaaataagccaaaatcaagaaaagttctctctttccttccctctctcttcgaaactagctagaataagggagattgctggaaattcttggtgttttcagcaaggaatcatgagataatcaagccaaggtaaaccctagatacttcctagctatgttttctcaagattttcattggtttcaaatagtgattttacaaattattggctgttagggttaggttgtttgatagttctaattctagggttcatttgagttgaatatagcttcttgtagctggttttgaggtatgagattggatttatgtaagtttgaatttaaaaacctaagtttaggtctttaatggcgtaatttgattcactgagtttttctgtgattttctggttggaatatgttgtatatgcattgtataggtgttttggaaagtatggatgcacttggatgagttttgaacaagttggagcttgtttggggaaacctggtgcaaaccggctaaccggttttggcaggatccccgaacaagccattttttgaattctcgtccattctagtaccgtagttgggtgtttccctatttcctgatttagtgtgatccctagagattgtaacaaaacctggagtggtgggttcgggtttctcggattatgatttcgatcatgtgatttacccgatttcattatttgattagggcatccatttagcgcaagacttttcgttctggtcggccagcacacttgaatctggaaagaaggtaagaacagtaaataatgtgtaatatgaatatctcagtatatatatgtgttaagtgtatgtgcatgcttatatgtttgttgcactaccaataattgtacggctatggtacagagtgcattggtataacgaatattatttaagattacattacagtgatacca

SEQ ID NO: 256023 - DNA, 1042 bp, Cannabis indica
tctctcttccgccgcatgaaggaccagctcgaccagccacctttctccagccacaaatgacccaacggagggcaaatcggagccccataccctccaaaatctccaagtattatttcatcttgttcttattttttttttttgctgaaactctgattctcagtcatcattctggatctctctccttcttttttttctcagattgacagagtttatctatggccattcgtcagtcatggtgcttctaggttcttggcgtttcgtggtgcacgaagcttcattattggtggtcattgatagtttttctttatgctgtgaacccttgatgatgtattaatttgtacattttgatataaatttttggaatctgattataaaaattggttcaaggaataatataattttttgtggattttatttttttattataattttaacttttaatcccggttatttcataaaaacttatgtaataacatggattaaaagtctctttttatcttaatttttatgtcataaccgggataaaaagtccccattttatgttagattttcaaaaatattttatcccactagtatatattccagtttttattttagcgaaatcgagataaaaagtcttaaaaactggaattaaaggcttttgtttgtaatagtgaaattaatgaaagaaactcaactaaagtattatttataatacataaataatacttgaaaattttttaaacgatttggacttttagtttgtatgtgtaaattatttttcaaacaaaataacaagatttgtcataaaataagaagaagaagaaataatgagataccacatagacttatcttatgcttcaaagtacaattgaatccctactatctttcccttatttctcaatcgtcgttctctcattaaatcgtgtaactcaatcgtcattctcactatttctttttgtctagaagcccctatctgaatgagcattgttattaggtcaccaactggtgcctagtactttttttgtacatgtcacgttgcgattggctagcgatactcttt

SEQ ID NO: 256024 - DNA, 606 bp, Cannabis indica
aacaaaaccataatcactaccatgaattttctctataatacttttaccttatatgtttctcaaacaccaacaacatcttcaattatttgtgtttatagaatagttaaaaccaaaaccattggtgttcaagatttctttagctatagggaaattcttttgaaagtctttaatatattttttacttcaccaaaattacatgattgcttgaatggtttactagccatatttgctgtgtgtaaaaattgctctgatttttagcttaattaataaattgattaattaactatacacaaaagctatcgtaattaattgtaaagactatagaagtgaatggaaaaataagaattcgaaccataatgtctaaaaaagttacaagtatagatttagactagtttgagagtttgtaatagcatatacagccagaccttttgaatggtgctgcctagtttgtacatatttgattatgaaatacatttatctaaataaatgaaggtcccttggggtttgccaacctctctctgttgaggatatcctcccgattgtgggggatttgaacacctttgtgtaagttggttgtgtttttaataaaggtatcctttcatcaaa

SEQ ID NO: 256025 - DNA, 763 bp, Cannabis indica
aatagttatttttggttcacaactttatgtttattggttaagtaatttgtgtcttgcttattgctctttgtatgtgttaaaaaatttcttttttactctcacattgcatttacagatgcatctaggtattagcaaaggaattaagaactaaagcctacaaaacatgacaaaaattggtattatccggatcaaagaacgcaactatgtcatctaagctcatcaatctaatatggtggtcaagatgtctattgtaatccccaaagcacaccaagctcgaggcttagcattttctatctattcggttaattaaatacgatagattataaaatattaggaagagtcgtcaaagctacacaaaagaattaagagataatttattttcataatttatattatatatcaattaatattactttactatcaattaatcttgttgctcttctttctttcctcgcgggcaggaagcacctctaactgcaatgaatgattctactgtgtatataaataaatgacaatccaactacttgcagatttagaaaaaacaaagaatgtgaaatattagtgcatgtttggcatcataacttaaaaacagaaaattgtttttaagaacatttggtttgtttaactttgttttttaaaaacagttttcagaaaataaagttacaaaaaacaagaattttgaaaacaacaaaatgttgttttctgttttaaaaaccaattcactttaggtcaatattgtttttaaaaatcactaaccaaacat

SEQ ID NO: 256026 - DNA, 2046 bp, Cannabis indica
tattaggttctttggacggtgattgtttatacaaatacaaaaataatgacctgttactcctctttactgtgttcctcttgaagaagaggaagctcagtaggaatattttgaagttaataatggagttatagtaatgtgtttttcaaagaattagtcttcaaattccatgcgaagagccaaaaggaggaaaaaagaagtcccctgccttgtgtgtcttcaggggtatttataggccgatccctttgtatggaccaccttggatggatcttcataggaatgaacccccaccgttagattggtaggtggcatatttttcatgtgatctttaccgatgttagattgtactggctatactagtggtgctttggatgtgtgtcattccagggttgttcttatttgaattacccttattcctagccgttggattgtttggcacagtacataaggacacgcgtgctttgcatggtagcatggcgtgagcgacaacctctgacatcatacatgtaacagccccaccattgggtccgtagcctgacatgcgtgggatgagttttcacgggtcaaaggcgtaccccaaactagtgcatcttagtggaaagtccctattctttgtaggagcaaagggtcctatcttctagaaggaagagagtcgctagctcgtggacatgtctttcgtggcctgtattcgggaagacttctccgtcgaaggtcaatttcacgaggttggggcctttatcctcctggagcgtggagcaaggcccttaggcggcttaatgattccttttcctgattaatttccacgtgtcatgcttgtgaaaatgcaaataacagtggaactaagggggttagaggcgccaagaagagagaaaaagaagagaagagaggaaagtggttggtggcgccaagggggttggaggcgtcgaggagagagagaaagagaagagaatagatgaaagtggttggtggcaccacaggagttggaaccaccaatgagagagaaagagaagaggagaaaagaagaaagtatggtggtgtcaagggggttggaggcgccaaggggagagaaatagaagagatgtttggtgcaatttactcttcccaaagagagtggttggcgccatctactcttcccaaggagagtggttggcgccatctactcttcccaaggagagtggttggcgccatctactccttgggccatctactctccccaaggagagtggttacctcttgggacctatcttagttgtcaagatattttacccccgtattataattagatgacccacacttattgcatcccaaattttagagttattacttttaaggcattaattttcatttggactaataattacaaaatttacactttgcaaatattgggggtcaacacttgtcccctagtctacgagaattctttcatgtatccttgtagactaagtttggtgagcttcgctcccatcgtttggtcccatggttgcctctttaggcatttttaccttggggtcttttattaatgaccctctatggggtagagttggctctaggagccatctcgaccctttttatgagttattattttatttgagggaatattttgtcacttgagctttctcaacctcttctctcgtgtaacctttcctagagggagtattgactcttagagcagtctcaacctcttcttagtaactcattggatgtatgggaactttaggccccttgggaaacgctcaaccttttttttatcatgtggttgctcccttacgaaacttcttttctgttgagaactctttcatgatttctctcttagtgagtgggtttctttttcgagttgttttacttgtgaaatcccttttgatcatataaggacttattaatccttcaggcattggtgatcctttttttttttaattttgagcatttgtgtgtacctaatggctaaggatgtatcaaccctatgggctatttgtaacgccctaaataattaggcacgctacccaaaacacttatgaaaccctaatcccctaatcgggattactaatcaaa

SEQ ID NO: 256027 - DNA, 1078 bp, Cannabis indica
aataccactgactctctctctctctctctcaaagtatccgaaaaacaagtttttccaaggcctagggacctctgctcttaataggctaggacctaggataatcgacaatacacgtgacaacaataacatgaggaacgagaattagaataactttgttccaccacagaacaataattttaggtaggtagatcatccaaactcaagaaattagtacgattaacctcccattaacccgcagactagcctggcgggcaaagagaatctagccagtttggttggccaaggagatactaccagccaaaggctggccggccaaggcccattgcttagtcagaggctagctggccaaggcccattgttcagaaaaaggctagctagccaagatccattattcaaccagaggctggccgaccaagaccagttgcctagccaaggagttttggctggccaaggaatgttgtccagacaggaagaagaaagagtagatccatctgtgcaagcacaattggaccaacccaatgacatgatcaaaatcctatccagtccaaagttgtcaaacctagatctagacaggtcaaggggatcaccttttacaacatacattaatccacttccccttcaaaagtttaagatgccaacttgaagatgtacatggggaaagaagatcccctaacacacataaaatactttgagatccaaatagatctctaaaaagtaactagagatgtgcgatgccaaatttttccagtaacctggctgaaacatctcaacagtggtatttcaagctggccctaggaaaatttaactcttggaggaattctcttgagagttctatactcagttctctgcgtcgagacaaataccttaacaattcaaggacctcgtcaaaataaaagaaagtcaaggtgaacccttaaataactatcaaggtcatggtcgaggccaccaaggtcaacggcctaatagaagaaggctaataaatgaccatacttggaggcatcttgccgttgagtgatattagaaggattttaatgaacaacataaaagagttcctcgagcgagctgatggcttcataaa

SEQ ID NO: 256028 - DNA, 556 bp, Cannabis indica
gcctcttcctcgtacaatccctagtattaaaaagattaaaatatgtttacactttcttcacttccagattattttactgccacacatataaaaaattaagaataatgatacatggaaaatttagaaacaatattttaataaatgcaattttttatcacagataaatatgtatatcattactcttatgataatgatacacaatttttttaatgattaagattatttaagttatgtgaattaggttactcaatacacttctcatagttataaataaatattagatatataaatcatataatataagctagaacgtttgattaccttttctttttatttgccttatctgtagaaaaaataaaataagggttggattttccgacgttattatgcttagttatttcaattaatattgatgatgttgttgtttttagtttagtgaaaaattccccccttactatcttcaattgtttctcattgagtacgtacgagcccttttatctattagtatcaaaaattcataataaaatgatcgtatcccattttgtgtgataattaa

SEQ ID NO: 256029 - DNA, 3391 bp, Cannabis indica
gcttttttcatagtcccatgagtcaaactgcagctctatttcagagttcttctaaatgaagaagtacatctaaaaagttaatgtaaaagctactatgtcctgtttatgtgaatgtaattaatagtagattgaccctctgttaatgtttttgaggatgattaatttaaattttttttataggaatatggtattagagggtttccaacaatcaaggtatttgtacctggcaaacctcctgtcgactatcaaggagcaagggatgtcaaatccatcgcaaacttcgctctctcccaggtttgtaattcatattgtgatctgttcctttcttgtttctaatcactgatgttccattggaatttaatcgaccaaaatgtgaaagcttttggtatgatagatttcatacttttgtacaatgtctaaagtgttttatgtgtaataataactctcatttaacttggctttgtaacgtttagttaacaactctcataacttgtaatgtattagaaactactgatggtaaaggggagaaaatatatatatatatatatatttatatataaaagtaatcagtatgtgttgactattctattgcctgcaacagataaagggacttctaaaggaacggttagatggtaaagcaacagggggatcaagcggatcgaatgaaaattctgaagccagtgcctcagtagaattaaattctcgcaattttgacgaacaagtacttaaaagtaaagatctctggattgtagagttctttgcaccttggtaggatccctatcatctatatatcggttaacagctttgactgtccatctctgaggattagatacagctaatcaagcaatattgttaactctatttaaatcttctccttttcaggtgtggacactgcaaaaggttggcccctgagtggaagaaggctgctaataacttaaagggaaaggtcaagttaggtcatgttgactgtgattcagaaaaggtaatgttggatttctatcgacgattacataattcaaatcaaattatcttttccagcacattgttttgctatctcttgtcctagtttctttttcgttggctgaattccgatattatatctttcgccgtgtccttttgcaaggaaatgctgcaaagatgcaaataatttccttagagtgttgtttcattttaattctctttttacttgaaaagctgtcggttttccttggaacttatgttgctcttttggtatgaaactttgaaaccatttgattctaacgggatcatttttccagtctctgatgagcagattcaatgttcaaggatttcccactatcttagtgtttggtgctgataaagatagtcccacaccttttgaaggtgcaagaactgcttcagcaattgaatcatttgctcttgaacagttggaaacaaatgttgcacctcctgaagtgactgagctaactggccaggtaggcacaagtctcctttctgtttcttcagtccaaaatcggtactttggtaacttaaaaagtgatgtaatcttcttgtgtaggatgtaatggaagaaaaatgtggctcagctgcaatatgtttcgtggctttcctgccagacatcttagattccaaagcagaagggaggaacaagtacgttcagcagttattgtcagttgcagagaagttcaagaagagtccctataggcaaggacacattcaattctttttgtattctgtcccatttcgtcttacaatgtcattttaagttatctgcattaaccattgcatttaacttaaagaaacatcttacattactatatgctgaagagtcaacatcttatattgtttgcagttatgtatgggcagctgctggtaagcagccagatcttgaaaagcgtgtcggagttggtggttatggttatccagctttggttgctctaaacgtaaagaaaagtgtttatgccccacttaagagtgcttttgagcttgagcatatcatgtaagtcttcttttgtactaagaatttcgaataccacggtagctaattatcataacattttaaactactcaatttggttttaccagagaatttgtgagggatgctggtcgtaggaggaaaaggaaacttacctcttgaaggtgcccctgtaattgtcaagacagaagcatgggatggcaaagatggagaggtcattgaagaggacgagttctccctcgaagagctcatgggggaagatactaccagcaaggatgagttgtgagttaattaaaccttagttggtgaaggtaacgagatttggggagagaaaaagattttggactcttaggatcacaatattctaatgttttacggtatgaaatgactttttttcaccatggtcaaactgatttctgaatgaggcgtactgtctttctaaatattagtagaaaagagaatatgatatggctgatcccattctctatctccttgtcatgtcaagtgaaaaaaaaaaaattaagtcattacattgtatctgttttaatgagaataatcatcataaattagtaaagctttactccacgtattcgtgccaaaaagaaaactattcatatggatgaggttggcaattcaggtcatgacgcgataacacgacacgaacttaatacatattattgcgggttgggttgaatttgaataacatgattattatttggattggattaagttaaataatttatttatattcaatatattattgaaattattaatttgggacagattttataacataattttttatactcaagttttacacattaaaaggatccaatggtcaagatttgaacaaattagtatttatataaacttaaaaaaaaaagataaaaaatagtaaaaatgtattaatcaagtatgtatgcccccaagcgtactgttccaacttttagtgttgctcctggagcattctctcagtatcctgcctcaacaacagcttcggctactagttctccaaccaaacaaatcgtctgaagtaagagatcaagcaaaggaagcacatgaatcgataacaagaaagggagtaagacacccgactatgagtagaatatatccagtatacagaattaatagacacccaagagcacatctacttggaaactcaccaaaatgtctatcatcgcaagcctccactgatgattctgataccaacaaatgtaagtctttgaaggacaagagtgaaaacttgatcaagctaggcaacctctatgaatgggtaaggaatcgtttagcacaaatgcaaggaggactcatcgggccgcaagtgccaacaaggcatttgggagggttactgcaggcactaggtgttgggctttatgccataaataaaactctatttcaatgtaattttttctattcaattatcaataaagaaacata

SEQ ID NO: 256030 - DNA, 10849 bp, Cannabis indica
gctttttatttggttcctatatactgtataggacattaaaaattgtaacagtttctatttatataacattttagtattccattcaaaaaaaagtattataaaattatatcaacataaaaatacaaaaagggtattattttctatctataaacaatttttcataaatgtactctatccagacttcttatatgatgatttcaataacatctagttattcattccgtgtcttcttctttaaaatggttttgtatttgttgtatttttatatgttggatgaggggtctttctttgaaaaaagaaaattactttttctcatttaataatgcgctatagcctatactgggttgtcgtatagtaatgtctccaactaaggcattttgtatgttaatgtttattgtcgttggtattatttaatttagattctatacatctctaccagaaaaacaatccttcacgatattctttttgataaaggaaacttattagatataatctctaaagatgatttcatcttatcatcttttttcctaagctttgtcttttttatttccaaagaacttttcttttttatgctctttctttaccatttgtaactgagaaccatggctttggaattgttggttgcacctgttgtctctgcttctgttgatcttttggtgaaaaagattgcttcttctgatttggtggggagctttttaaggggaaagactgactctggtttcgataagcttcttgacaaactaaagactactttcctctctcttgctgaggtgctcagtgatgcagagcagaaacagttcagaaactctagagttgagaagtggcttgacaagcttcaagatgttgtggaagatgcagaggatctcttggacgaaattgagtatgatgccctcaaactcaaggttgaaactgagtcagaatttgatgataaattcaaggtaagtaaactatcctccatttttaactcaattgataggaaaagaaaaacagatatggaaaagattttggaaagattgaatacttttaaagaagaaagatacatccttgatctaagaacaaatgttgagaagatccaatcacagagaacaccttcaatgtcttccatagatgatgctgagttttttggaagagatgaagaaaagaagattttgaaagaggtgttggtggaaaatgaggtgactaatgaaaaaatatgtgtgattccaattgtgggattgggtgggattggcaaaactactcttgctcaagctgtatataatgatgatgaaattgaaaagtattttcaactcaaggcgtgggtttgtgtctcagatgagtttgatgtttgtaaagtaatgaaaactgttcttgaagcagtgactaaaagttcttgtaatgttgagggtttgagtgtgcttgaagagaagatacaacaagtgttagccaaaaagaagttcttgatagttttggatgatgtatggaatgaggagcatgatttttggaatacattgaggatgctttttagagttggggcacaaggtagcaagataatcgttactacaagaagtgaaaaggttgcatcaattgtggcaactgttagatatcaacatcttgatgtgttaaaagaagaagcttgttttcaattgtttgtcaagattgtatctgggaatgaaaattttactacaacagattcacacttgggaagaattggcaaagaagttgttaaaaaatgcaaaggcttaccgttggcagtgaaggcaatagcaagtctcttgcgctttacacatgttaaggaatggaaaggaatagcaaagagtgacattttggatttatctattggagagaaaaatattcttccggctttaagattaagttatcattatttgccatcacacttaaagcgatgctttatttactgttctatgtttcctaaagaccaccaattttataaggaagagttggttttgttatggatggtagatagtttattggagcattcgagtggaaataggagaaataggactgtgaaagaagtaggaaatgagtattttgatgaattggtgtctcgatcattttttcaacctattggaggtaggtccaaaagatatggaactggtgtatttgaaactgtcaactgtttcgttatgcatgatcttatggttgatttggctaattttgtatctaagaaaaaaattctttacttagagaaagacaaggtgtatgatattggaatagtgaaacaactgcgacatgttggatttgatatggtgaactgccaaaatttacatgagatatacaaattagtttctgatgcaacttgtttgcgtacaattatgcctgttactagaaatttatttgctacagaaagattacaggaagatgtgtcgaaagatatcagaaagttaaagcgtttgagatttttatctttggctggttacatgaatgttaatgaattgggtgttaagtcaataggtgaattaagacatcttcgtcatttagatttctcttacacttcaatcaaagaactacctgaatcggtgtgtttgttgtacaatttgcagtcattacaattatttggctgcaagctactcaccaagtttcctaaaaagtttcatcatcatctcattaatttgagatatctctacatgagttgtgttaaaatttgtaccttgccaccacttggtcagttaccgtctctattaactctttctattgaaagatgtgatgcagtagagatggtgggggttgagttttatgggactagttcttcccaatcatttccattgttggaatccttgacattcagatttatggaaaatttgaaagaatggtcgacgccaaaagcaaatgtggaagcatttccaaaactcaaagaactatacatagagagttgtcaaagattgactggagacttgcctggtctcctaccatccttaacaaatcttgaaatttgtgattgtccagagcttgcttctcctctcccaatgatgcctttagtcacaagaatacgtatagaccggtgtgagaagattgcaagattcaaatcacttagtagtcttcaaagttatgatgatttagaagacctctatcttggggtttgctcattcaaattgcttcctttacattccttttcaaatattaggcatgttgaggtttatgattgtgaaaatctagagtctttctcgctaacaaatactctaaattctctatcttttctctacattcgatattgtcctaatttcacattatttccagatagcaaccttcattgcccaattcttactcaactttggctcgtttcttgcgagaaattgaaatttttgcctgaaaaactacctagtctcctcccttcgttacaagaactagccatctatggttgtccagagttagagtcgcttcctaaatgtgggttgcctttcagtttgagtatgctcaccattagcaactgcaacaagctgattgcatctcgaaagaattggaagttacaaacacttcctaatctgacattctttcgaattgaagattatcaatgtgaggatatggagtcctttctagaacaagggatgcttccgcctagcattacctcccttgaaattgttaaggttgcttgtcttaaaagcttagaccacaaggggtttcaagaaatcgaatccttgaaagaactatacatctctgagtgccccaagttgcagtcacttccagtaaaagggttgccacccgctttcgaaggtttacttccaccttctttcgaaactttcttcatgaattattgtccgttgctggaagaaaagtatgagtgggagtataatagcgataaccataaaggttggatgatgattcgttgcatcactaggcctcaagatgttagcagtcaacagcccttaattaagccattcttaagattgattgggcccaaagctgtagtgttgcacatcctgcttattctcttatgtatgtatctatatgcgtattacaatttgtaagagaaatgatttctaagactgaagtggattgccctggttccaaactgaaccttataatccattccataggaccatctcaatctgttgcctactgtgagtttctctcttacatgttctttgttgtctttgtcatgatctttctcctttgatgattgttgtgggctattctctttaggtatttttgctgatggcagaggaaaagttggacccaaatgttgtccccatctgaacaaaatgagaccttagatgctgcaaataccagtgatgacaggttggttatcttttgtttttgttgttgttgttgttgtgcattatggtctaatcaatgttatggtgttaaatgcatctttatgattgtatatgtggattgcaatttaagacttcggttaatcttggcagttaaaagaatttgaaacttgaatggagatagcattgagaggtggaggaatacaatagaatcctcaactttgatccaaatagtctggtagtcttcgatgtgtaccaaggcttggaattaattggaggaagtttgcatttgcgacgtggctcgtgaggctgctaagcctaagactaccatagaaaaaatttggtgtatttgcatgcagtgcaggtgcaggtgcaggttgctataatgttctgtcttttttattaaaaatgatacaagattttggtaacagagaatatcattttctcatctgtttgactctgtttgtttctcgttatgtacatatgcttagcataattgattggatgtattatactttcaactttcgctatatatatatactagaactagatgggcatcctgatgatgggtttagctggaaacaatatggtcaaaagaatattcttggagccaaatatcccaggtaataataatactggttcaatgtaggtagacatacacataaacaatggagtgtacatatgaaatggcatgattagctttgtcatagaaactgtattgtatgtatagtattttaactattcatgaattttgcaactattcataagcatttttgacaagaaaacaatgttcgactattatagaaagtttaaaattattaggatgcctcagaaatgaacttatataacatttttccttgacattaatcatcccaatgcatttaatcgacaactttttcttataattaataaactattttatttgattaactcttgcaggggctattacagttgcacttataggcatagtaaaggatgtctcgcaaaaaagatccttcaacgattagatgatgaccctaggatggtagaagtcaaatacagtggaaagcacacgtgcaccaatgatgtgggtcacgtgattggaagtagtactgatgatcacactttcagtcccatgtcaagcatcaccgctgatgacttagtctattgggatgacctactataatttaagaatttatttttagaaaaatcataactaaatttagatgaattacatatatgtaaaatattagcaaaagtttcatagaaaatatacttcattatttttctctaatattttcttcatagtaattttttcgtgtaaaattcacgatgaatagctcagctcaatccatagtgaacattttccttcacaatttcttttctttaacaaaactattagaaatgtataacctattagaatgaattacacatttttactacattttagtttagaaatttatacttatttgtagaaaaaaatttctaagaactttagtaattttaatctagaatatattttagctaagtgaagtctacaaatatttaaatatgtaggatacaactccttttagtaaaagaaggatctagaagaaataaattttaaccacacaaaatgtaagggatgaacaattatatatatcttagaattctaaattgtgtaattaatattcaaactatcaataaagcttgttattttttttaaagtcaaatcattctctattgtatacacaaccaatcaagttattactattctaccatcatcatcatattataaaactatcacctaaaataaatcaccattatttactctatccaatttaacaaatcatcaaaaatctatcttgatactactcatgatagccaaatcaatcgtatgccaataaaacctatctatgatttataacatttttaaaatgattttttttgtttcataatttatatttgggaaatttgaagcataaaaatatctcatatctctcctgtaaatatattattctttgcatgtaatctgaaattattattattacgacaacttagctcttctctttctccttacgacaaaaactatctccacagacaattatctttttattaagtgctaaaaaattaggaattgcattttcctttatttgctaaaaataattttatgtttacaaaaacataactcaccaaaatagcagaaaacttctctcttccttttacttgttgactgagaatcgtttactttcaacaactgccgacaatcatggctgtagagttggtggtttgccctgttgtgtctgcttcagttgaatttttgctaaagaagattacttcttccgatgtagccagcttcttgaggggaaaaacttcctccggtttcgacaggcttcttgacaaactagagattacgttcctctcccttgctgaggtgctaggagatgcagagcaaaagcagatcagaaatcctagaattgagaagtggctcgacaagcttcaagatgctgtggaagatgcagaggatctcttcgaggaaattgagtatgatgcgctcaaactcaagctggaaatggagtccgaacccgataaactcaaggtaagtaacttcttctccaattacaacacaactgatgagattagaaagtcggatttggtgaagattttagaccgattggatacttttagtaaccaaaggtacattcttaatcttaccggagatgttgagaagattcagtcacagagaccgccttcgatatcttccattaatgattccgaatttgttggtagagatgttgaaaagatcaatttgagatatatgttgttgtcagataaggtgggtagtgagaaaatatgtgtaattccaatcgtgggtttgggtggaattggcaaaaccactcttgctcaagccctttataatgattttgaagttgataagtattttgaactcaaggcatgggttagtgtctcagatgaatttgatgtttgtaaggtaacaaaaacaattcttatagcagtgactagagatgcgtgtgctgttgaagacttgagtgttttgcaagagaaggtacaagaaaaattgaacaaaagaaaattcttgattgttttggacgatgtctggaatgaagaatatgatttttgggatacaacaaggatgcttttcaaagttggagcacaaggtagcaagataattgtcacaacaagaagtgaaagggttgcatcaatggtgggaactacagcatcttgccatcttggtgtgctaaaggaagaagtttgtttcgagttattattcaaaattgtatcgggcaataaggaattttgtacgacagattcgaacttgagaagaattggtgaagaacttgttaggaaatgtaaaggtttgccgttggctgtgaaggcagttgcaagcctgctgcgctttacaaatgtgaatgaatggaaaagaatagcagagaatgatattttggacttaccaattggagagaaaaatatacttccagctttgagattgagttaccattatttgccatcacacttaaaaagatgctttgtttattgctctatgtttccgaaagactacgaatttgagaaagaggagttggtcttattatggatggttgataatttattggagcattcaagtggaaataggagtctgaaagaagtgggatatgagtattttgatgatttagtgtgtcgatcattttttcaatctacaagtggctcaagtaaaagtgttttcacgatgcatgatcttgtagttgatttggctatttttgtatctaaaagaaaatatttatacatagagaaaagcaagatttatgacaccggattgatgagacaaatacgtcacattacatttgataagttcagctaccttgatttccatgagatacacaaattaatttgtgaagcaacttctttgcgtgtatttgtacctgttgctaaatatttcatcacttcaactacaacactacaaggtgtgttaaaagatttcatgaagtttaggtgcttgagatttttctctttagcgggttatcgaaacgtcactgaattgcctaagtcagtaggtgaattaaaacatcttcgccacttagatctttctttcacttcaatcacagagttgcccaattctatgtgcttgttgtacaatttaaggacattgaagttatctggatgtaagtatctcgttaagttccctaaaaatttacatcatctcattaatttgagatatctcgacatgagcaagtgtagattccgtaccttgccaccacttgggcaattacctgctctcatatctctctcgattgaacattgtgaggcagtagaaatggtgagtcttgatttttacgggactggttcttcgaattcttttccattgttggaatctttgacgttcaaaagattgccaaaatggaaaaaatggtcaacaccaaatgtaaatgttaaagcatttccaaagctaaaatcacttactatacacttgtgtgagagtttgaaaggagatttgcctcccctcctaccatctttaacaaagcttcatatttatgaatgtccgaagcttgcttcttcactcccagcgatgccaaatcttcataaattggaagacctctatctcaagaattgccaccatcttgactttctaccatcctctatttataattccctccaaaaacttgacattgaacatatttctggctcctttaaattgcttcctctaaattcctttcccaatattaggattgttagagtttgtgattgtaaaaatctagagtctttctcactatcaaataacctaaattccctattcagtctctccattgaaagatgcgcgaggttgattgagtcccgcaataattggaatttacaagcacttcctaatctgacaagctttagtattggagattatgaacttgaccctatggagatctttctagagcaagggttgcttccgactagccttacttcccttgtgatccgtggtattgctggtcttgaaaccttagaagggatgtggtttcaagaactcgaatctttgaaaagactatgcatctatgattgccccaacttgcaatcacttccagtagaagggctgccaccctctagaagaggtttactgccaccttcttttgaaagtttctttatgaaaggttgccctttgctggaagcaaagtatgagtgggatgaaggtaacgatttgggttgggagattagttgcatctctcagcctcaagtgccatcattgaatagcttaatccattcataggaccatagcagcagcctactcacgccactcgctgccaacactattcttcctctctgctctctgttgcccactgtgagtttctcttttcagttttctgttcattgataagatcattttatgtttaacattgtagtttcatctagtctattactcttgtccttttcatgatctttctcatttgatgattattttgtgcattctatttaggttttttttgctggtggcaaagaaaaacttggacccaaatgtcccatctcaatagaatgggactttagaggctgcaaattccaatgataagccatctgaacagagtgagacttttagatgaaaaatatgacaaaggttagttagttatttattattatacaagttggtgctaattgcattttatgattgtaatttgtacatttgcattgagtagtgttgtgtttcaacttcctcttttgcagtagctacaaagaagaaaataaaaacaagtgaggacacttttggagggtttatgtatataatattcaatattcatcttatattcataggtattctcactttgacagggtcttaccgaaatcggatttcctcttcgtgccatattgcaattccaatatgtagattggattatggaactcatctcatgttgactgtaatatattagttttacttttatgtgttgtccacatataatttcaagatggtgtctacactaaaaaaatggtagacaatggttacagtttcagtatattctttcatcatcatcatattgcttctcaatctcaacctctggaaattgtgtgcattctggttatgcattttatggctgtaatttttacttttgaagtagctacaaagaagaaaaacagaaacaagtgaggacagttttgttaattagagaagatttacttactgattatattaatttttcattcccattttaaaatggaaaaaagaaagcttgaacagagcagagtagtccacaccatctgtgcttggacagactaaatttacaaaaacatattatggtataatagattgttgctttgtttgggagaatttgggaaaaccttactcctttacatggtttaattgctttgtttgaaaactatctctgatgagaatttagttaattaaaatattattatgtaagtaaactataaattaagaaaaatgatattatttaaaattttaaagaatacattttttcacctgtcaatgcacaagagctaccaaagtaagaacaatttgtaagctacttgatttaacagtaattgattttcacaatctctacctgcgccaaaaacttgtgagaaactataatataataatataatgataaatactagtctctacagggattgcatgaacgaggaggcggccgccttaggctctccaccgctcaggcccctatttcaaaaaaaaataa

SEQ ID NO: 256031 - DNA, 4727 bp, Cannabis indica
ttcaatttgactctccgcaatattatgcttctttaaaatcgatagaagataagtttcagaggtaacaaacaacaacataaacttcacaacagacaagaagaaccaagtggagaatgctatggaaaagaggaaaaacaaaataaaaaatccagggctactttttcttcttttttgtcataccttgtgaaattccaaagtatcacctccggatttccggacttcaaccatgtaaagggaaggggccacttcaaaaatctacatgaaaagaaagaacttaagagcaagtttgaaaagtgattttcaaattgaactttttggctgaaaataaatgtacctcagttgcaacagataatggacctttgcgtccactcttctcaccatgaagcttcaactgaaatattacagaaaggattggtaacggtcttagatataagatacaatgcagtaacattatgccagagagagaatatgagaagatagacaccataccttgaaattattcttttttatatcgaaaccaagaggcccggcagcttgttcaatttttgtaattatctcttttgcagaacatttggatgtgaatctagtctctcgtttaacaagtccctggtagagacaaatgtacagttttctctcagacaatgatatttaattaaactcattacaaggagcatcctgaatgtattttgtagaataaacattgatttttgcaaattcatatgatcataacactaaattctacgactgtaaaccacaaatgctgctagtcatactaatttttcgtattgtatatactatatatttaaaagaaatatcgtaaggataatgtataatatgtcttcaactagagtcttttatgcgaaaatccaatttgaaagaaagaagtcgaaccaagttcaaccttaccatttgtttttcaaatagtgaactaaggtttaggccctgagatgtcgaaattagctcaaaagcattcatagtcacgggagctgtagagccttcctcccgcctctccacaactaggtttccggattcctgttatcaaagaacttttagcagcaaattcaagctctaaactaatgcaacgagattacaaatcaaaattaaatcaagaatctcaccccaaattcattgaagatgtcatccacatcatcaacattaacatcagcttgttcaaatcttggtggtttatatcctttcttaaaccactcattttgaattatctcagcaatcgtaattcgctgtttcatgcaataatgttacatcatgtatttcagaaattatgtcatagcagatacaaatttgccttcttttatttgaataaagaaaatatcagagccccttgaaagggtaaatgaaggtgattatcatcatcgggcatttgaaagaaataaagaaagaccacgaggcaataccgttgaggggtcaggatccaagattcttttgattagcttctttgcacttgaggaaaaccatggcggaaatgtgaattcagccttgtgtatctgtagttgcgatagccagctttatatttgttgatgaaagacatagatatacggtcatgcaataaaattgtgatattattgagtaaacaaaatcatttttcttttctttctcgtaatgaacaaaaaacagaacgaaaaatattaaaaatatctttatccaatgatttgaaggagggataacaacagtaaatacatatagacatccctgttaatgttttatgtatgcgtatataaacaaaatatatatatttgtgagcattattcagatatagatttaagaatccaaagacaggaaaaatcacctttttatataatgccatgaggttagattcttcgaaaggcaagtatccagccattaggacaaaaagaatcacaccgcatgaccataaatctgccttagctccatcataccctttgttgttaataacctaggtaagagaaggttctgttaagaaacaaaggggacatgttaacacaaatttttaattatctcgaaagaaaagtaaattcacctcaggagcaacgtagtttggggttccacaggtagtgtgaagtaatccatcctcctacggtcaagcaatgaaaaaatgagtcggcatattttattgttctactttaattaataatagaattctattcatacttggtaatttttgactaataatgtactaatcttgctgcactccgaccaaaactaatatggattacgaatgacattttcaagtaatgcaaaattcatcccaattcatactcacacgaacttgctgaggaagtgcactcaatccaaaatctgaaactttaagagagccactagcatccaaaagcaaattctctggctgtaatttacaacgatagtatcatctcagtgtatttatagtatatcagtagttcatcatctctagagttaaaaacaacaataatgtggatacaatggaagacaacgataaaaactaaagtttcaccttcaagtccctgtggaaaacacctcggctatgacaataatccacagcgcatataagctcctgaaaatattttcttgcttcatcttccttcagtcttcctttacttgcctggctcaagaaaacaagatcaattgttagatagtttgtacacacacagcattagtagaggttgtaattagggttggtacaaactaggaaaaccctaatcttacaattttgtcgaacagttctcctccagtcacgaattccataacaatgtaaatttttgtcttgctagccatgacctacatcaacattgcaagagtacatcactaaaatttccaagaatgaagaatataacagcaaccagcataaaacaaaatcagcactaacaatcaataataatatcaacagcaactaataaagctcaatgtaaagaatattactgatacataactttcccattttggttgcattgtgatgtgacatgtgagtggttttgttgttataacaatacaaactctaactctacaatggtacctttgtaaatgttccaaaccaatttctcaatctcaagtctcaacttgaaactcattttataaaacatacaatactacgatgtgatattactatgcaagaaaatccattaaactagtagcatttcatttcctaaatcaaaatataattaactcatttgttggctaacctcatacatccgaatgacatttgggtgcctaattagtttcatcgtcgatatttcacgtttgatctgtgtaagaaaaagaaaaaacaaacattgagtcaatatattcaagtgaacatgaaaataaataaaatgtctttgctaatcagacagaaaactctgtacataagagatgcaactataagcatcaagagttcatgaagacatgcattgcttcatctacattaaaaaattgaaaaagaaaaatatttatatatttatttaattcaaaactaaatgtatacttcaactataccaaaagcactaacaaagataattattcaacacaaaaaattaacaaacaaaatgctgtagaatttctgactttttttaatcaaaaacacgttttaaattaactgtttcaaagttgacttgctctcttttttaatttaaagtcattgtcattacttcataactttttcagtcaacaaacaggaaatcatccactgttgataataataattgcaaatgcaaaccactcaagaacagtgatggtaggtcgaagagagttttcacaaataaactccctttgttgagagtagtaaaaatagaggaatgggaatagaaatggaaaaaaaaaataaaaaagaaagaataaaagaactgaataagagtaaaaaataattgtagatggtctttcctctcattgttagaaggaatagtcattccataaaaatagtaagagaaagaaaagaattggataccaataaaaaaaaacagttgtgtaataaatgatctttcctgtcattgttaaaaagaatagtcattctagtaaaataatgaaaaaattcatcgactggaatggctattctaatgtgttgaagagtacatgaagaattgccaatacatttgacttttcacccactccaatatcaaagattggtcaatcaaataatagtaaacaaatgaatttgaattaaatgaatcgctagttatcaaaatattattctcgtctaacttaaacctaactaaattaattaggggaattcacatttcttgtctgttactctctagtattttttataccacagaaatttggattagcaagcagaaaaaagactcttgatacttacttgattcgaagtgtttggaaaaagtgtgttctctaaaactaagcataactaagattatttcccatttcctttcccagccaattataacctatttatattgcaccaaaaaatttacttccaaaatgacattcataacgataatttagtaaattttacttcataacaatgaaatatagcagttagaccaatgatcgatcatctcatcagcattttttcaataaatcacttaattcatatggcaattttatcaatcataatttaacttagcataagagacagaaaaaacaattgtaaaaacaaaattatagtctcagttatgaattcttctactttctcagctaccaaccaatggatcaacaataaaaaaacaattccaagttttattttttacaacaaaaattactgtcacatacagatttgactcattcttcatctctataattcacatataaaattaataaaaacaaaa

SEQ ID NO: 256032 - DNA, 1161 bp, Cannabis indica
gaaacgtgaagattattcacgtttcgtgaatggttacctagataagattaaaggagattaattgtcaatcctgaaaaatcttataaatatgtatagaacctagggtgcagggaacaaacaatcgtttgggatgaataaaactgagagaataagtatagaaaatatccaaaaatactatcatgtatccaaacacactataaaagaataatattgactcgtagagtatgtagattttaactacaataccatgtaaaagtctctttattttatttggatttggtcatatttaatattttaattttcaaggcttcattattcttaatgaatttctgtgttaacaaaaaaaaaacttaaaacatatccccgacataaccagacttttttgtcatggaaaaaactcaacatgatgaactagttgtggaagaagagacggtgcatcgaacgggaaaagagccccaggactcataacctcaaaatagaccaaactaaggaaagggtcctattgatgggaacaccaaattaaagtggtgaccccaagaaaggaattccaaaaaaaaaaagagattcacatgcatatgatcccacgaggttattatgaaataaccaacggcatatgacacacgtgttaataaaggtgtgcacctatattgtcggttgtttcctaataaccgacgccatatgaataataaataaccttgaaagtttcccaacccacaactgactttgtagggtatagtaaatttttatatctataatttttatacaataaccgcctctaaatgttaatttttaatcatgcgagtatttttacaacatgtagcttcttattttataaaaagggtgggaaaaaagcctctaaaggcccttactcaatacaagaaatgttacttttactagcacagttcactactgcgttggtaaaagtaacttttaccagcgtattttgcaaactgcgctggtaaaaaggtcaaagttttaccagcgcacatttacaatggctaaaatctaacttgtaccagcgcttttacgcgctgggaaaagtcatttttgccagcgctttttattttgtgctggaaaaagttctaataccaacgttgatttgccaaccccttttaccaacacatcaaaagtaaattccattttattagcgcaataccaaac

SEQ ID NO: 256033 - DNA, 4585 bp, Cannabis indica
aaaattgtcatcctttataaataaaaaatactactaatattaaactctaaaatttacacctcaaacacattgatttattgactttttaagtaaaaataatttctttctaataaaaaaaataaaaaaaataaaaaatgtcatgtaggctttgagtgacaacgcaaaaaagggccctcggtctcagcttaacaaactccgtttctttgttattcagcaaaaaaaaccgtttctccgtttcccgcccaataaataccgcgatgctctctcaatttcatattacacttactctgaaatctgatacgctctttacgcccatttcaaatttccaaatatttcttacacgaaaaagaagatgatctcctctctcaagtaagactcctctgttttcttcaaaaacctttcagtttcgatcttatggcgacgatctataattctctaacgtaattatttttactgatgacgatcagatccgaagaacagagccagctacagctcgtggaacgagaagatattgatgatgaagaagacctcttcgaagcgattgacaagcgtaagcttctgagcacttaattaagctatctctagactctagttcaattttttttttacttcatctttgttcgaagtaagtgttatctgtaggtgatcaattatgtctgcttaaattagtaggaattcgatttttggtttgagctaatgagcaatttcttatttctccaacgatgaccaagcttacgcttctgtagttctacggagagtgattgagtcggatccaaatcagtctaactctgttgtcattaattttaaattatgtcgtatttgtgtgtgtgtattaattttaagttttttgagcgtgcaatatttacttattcagcaatttcgtttttataacttaatcggcaagaaatgttgctttcaattcatagatcgtgtttctgtgcagtaatcgctcaaggaatcaatgccggagacattaagaagcttcaagatgcagggatttactcatgcaatggcttgatgatgcatacgaagaaggtagagttatttgaaattcggaacaataatcgtttgaatggtcagtgttttggcacgttttatttcttcctctttttcgtttctgatgatctttgctgcagcatttaacgggaataaaaggcttatctgaggctaaagtcgataagatctgcgaagctgcagagaagatagtggttagtgttcttagaaatcttgaactacataatttcgaccgtctatagtttatttggcatagctcaggaatcaatttattcacatatacttgtttttccctttgcagaatttcggttacattacaggaagtgatgctctgctcagggtaagtatactgtatcttttcatcctaaatttctctgaagctgaaaaacttcttcgtgaagacgagttagaacgtatgctcaactgagattccaattgatctttggttattgtttttgcttgcagagaaagttagttatacgcataacaactggaagccaagcccttgatgagctgttagggggtaatttcgccctactatttccttgactgtctatgagttttgatttttgacgagttttagcttgtattagcaaaagaaaatattaattaatatatatgatggaaattttgagcaggtgggatcgaaacgagatcaataacagaatcctttggggaatttcggtcagaacatgagacattgttctttcattgataaaatgctatttttaattcttctttcatttggctataaatgaatcactctttgttgttgatacgaaaattgatagtttagcttgcatctttaacattaactcaggtctggaaaaacacagcttgcgcatactctgtgtgtttcgactcaggtacttttttttttctgtttaatggaactcaggtacctccatcaccctattattcatatcagtacaaggattgaaatcatttaagatttgccaatcttacgtttatggtgaaacaatgttcttaactcttcagaaaataacaattggagtcttgtgtttaaatattaaagttgatcacgggggttgattagtgctattgctatacaccatatataaaacttggtgtgggtttattaaccaataagattgcaaaagcacgaaactaattatgtttgctctatttattatccttcctataatctctgcagcttcctactaacatgcatggaggaaatggaaaggttgcctacattgacactgaaggaactttgtatccttttagttgttcttaccagttagcaaattgactttaaaaattatttaagtaaggcctctagtgtttgtatgttttcttctcaacaacgtgcaccatcagccgacctgacaggattattcccattgccgaaagatttggtatggaccccggagctgtccttgataacgtaagcctcaatttcactatgattatagtatctaggaatacagacagtatatgaaactaatcgtgtgtgaatccttctctatgacaaagataatctatgctcgtgcatatacgtacgagcatcagtataacttgcttctgggtctggctgctaaaatgtctgaagagccgttcagacttctggtaagagtattaactaaagttttgcctagtggaaagttcatggtgcctggaagactaaaacttttcgttcatttatgctttgcagatcgttgactctgttattgctctcttccgggtagattttactggaaggggtgaacttgcagatcgccaggtccagtcccaacgtttcagttttttctttttaatgagaattgatcatcttccgcatcattataacacgtgaatcggctttgtttacagcaaaaactggcgcaaatgctctcccgattaacaaagatagccgaggagtacaatgtcgcagtatacatgaccaaccaaggtttgtataagtttcagctttactaagcataagaaaatgaaactgcttgaatcaggcattcactcactgatcagcaattaatgttcttcatttttccttatagttcgtgcaacttggatgcacgggctttagaaccttatagcttaatatcattattatggtatgtctggttgcagttatagctgacccagggggaggagtattcatatcagatccaaagaagccagcaggtggtcacgttcttgctcatgccgccacaataagactgatgttcaggaaaggaaaaggagaacagcgtgtctgcaaggtttttgatgccccaaacctacctgaggctgaagcaatatccttttatgcttaattatgattatttcacttgatcatttcttagaatcaaccaaacttactagaaactcacatttcactggttacagtttcttcttgacacaaaaatacgtatttcagattacaccaggtggtattgcagatgcaaaggattgaagtagcaagctcctttgtttcttatgcaccttaattctgaagatccatccttaataaggagaggctgctagttagcaaatgttttattcaaatgtttactgttgcagtttagatcaagtatgtcatatatcttttgggtttgaatattgttaatgtagaagggcttcagctgttctggcttaagtacctgatatcctatgtatagcaaatatcaacactagtcacttgtgtgtgctctgcacttaaaataggttttcaagtgtctgccatattttttaaaagatatataatcaacttccagatagtgaaatttacatgcaaaacaagccgagtctaagactaaatcagcatcaatcctttaagcaaggtgatattatttgaaattacacgccagaaggtcctcctctggttctggctatgattttgacagtaagtagaacatatatggaaccaagtcttggttttaatactaaaacgaaaaagaaaaataaaagagtaaaaagtaaaactactctctaaaaaagcagcagcatagtcatcaacaaggaaagccaagcgaagagaaagatctgaaaaacgaagcaaggccccaaaaataacaaaaaccttgctataagcaattaaggtaccagctcaaaagttggaagaccaattggcagcacttccaactcttggcatgccactggactccttgcgagacccttcatccaccttgaaatttgcaccgcacacatcacccgaactgtccacccttggcactgccttcaactggtgaagtgggtgctcataactcttcaagcctccagaagttgtgaagaaacagcctaatataaaacaaatataaacagagttagctttaaaggtaacagaattgtacagatgattcgaaggcatggttgtttttacccttaggaaatggtgcgaaagatttgccacagcctgtcttcacgatttctggatcatctgaagcaacaagatggccttcggagtccgttccccagaagaatggaacacttccatcagcatcctagattgataaaaaaccaagattaggcaatcaataactaatggaagctcaaaataaatggaaaaacgaaattagatctaacaaaatgagtagaaattgggaaaccaaggaaattttactcacaacagcaa

SEQ ID NO: 256034 - DNA, 1298 bp, Cannabis indica
gacgagagagagagagagagagagagagagagagagagagaaaaaaaaaaggagatggcggtttttaatagtttcagttatcattctctgttgtcggtttcttcacactaatcactacttgcatttctatggcttcactcaacacagccaacgacacttgtcacagtggttttccttttgtcgtttcgaaatacgacggtaaagttagagccttttcagtaagttgttgggtcatgacacgtggcatttggtggcgtgtcgagttgattatgggctccaccccttatacttattggataagacacctccatgagagtatctcaagattgaagcaaaacaagctataaataaataaaaataataaactcttatataggtgtctaagtatgactaactactcctttttctccactctagtaatactgtgtgtagataaatacgtataaatgtagacaaaatttggaataagtagtagatctcacaaagaatggaactcattttgtttgtatcgaaagaactatttaagctaaattttgaggaggtcttaaaatggtggtaaaaagttaatggttaaaggaggatcttttttattcaccttaattgtacttgttttgaaaaagatgggtcaaaataaaactatgtgccatatgctaatcctttgggattaatgagacaattgtgggctatgaagcataattgaatatgtgggtgtcgttttcttatagttaaagcaacacattaagaagttgtttgtgacaaatctattttccttttctgttaaatgcccacagaaatgtttacccccaagtatttgaaacagagagtaaagtaactgaaaatcacatctagctcctccttagttctcacagcaattaaaagtagtgctcaatttcttttactatgctctaagccactcaatataatatgaataaattgatttttcattaattatagattaatataatatataaaattctttatttaaattttagagtttatagtgtttcatttgaaatttgtgaactttagaatttaaattatattactattttcttaaatacttaaatgtccattcaattactttttatctgattttttaatttttcaattaatttttacactattttttaatttttaatattcatttacactataataattttaagcttaatataaatattatcttttaatttatataaaatataattatttaaacactacaaactaacaataataatttaagaaaagtttataccctttaaaagagatgcatcaatacatctttatctattttagta

SEQ ID NO: 256035 - DNA, 6118 bp, Cannabis indica
tggtgcgtgcatactaattttgttatatctagaatagacataaatgaatgtgacgagttcatggtcagctgtagcgtccaccagttaatttattcaggatagaggaaaaacagtctttagggcatgctttatttaggtcagtgaagtcgacgtaatttctccacttaccaatcggattaggcacgaaaatagggttggatacccaaaccgagtagaaagcttccctaatgaagtttttctcccataagctttcaacttcttccttcagggctttaaagcactctttatcaaggagtttctgtttttgttgcataggtctgaatttttctttgtttatgttgagggcatgattaatgacctcgaggtcgatccaaatcttgtcctcatgtgaccaagcaaagatgtctgggtttttcctgaggcaagccataagagctagtctcaaagcctccatcaagtggtatattgacgagatagcccaaaggtcgtacaaagctggccttctaagaatcacgttgtaaggagactacacgtccaccactatgaatgtgtccatgatggtggtctgccttgggtcagtgccgatagtaagtagaagcttgatcttaccacatggagctatctcagctccgctgaagtcatacattagttgttcgtatggctctatgtctttgagtgacaaacccattctctcttgggtttgtttaaatagaatgttcgaagatgcttcgtcatcgatcatcactcttgccaccatcatgtttgttatttgcagctcaagagctaataaatcgttgtgagggtagctgacatgatctgagtcggattctctaaatgtggttggatcacactcgtggtgttgagattttggaagacgctctgcaacctccaatacttctgctcttggtttatgtcgtaaagaccttgcatacctctctaaggcctttctcaaattcctaatcaggtgtgggcctctgatcactatatcgagcgtacatgctataggcacaggctggagaggtgcatttcctccagctgcagcttcaggtcgcacatatcgttgaagagaggcatgcttttttccttatcagaaattgtatctcgtctcgcaactgattacactcccaattgggtgtgtttccaattctggctttgtttctgccaggggagttagtttgtgtccctccgctaggggacccaattagttttggctttttgctagttagaaatgatattataaaaaaaaaaaaaaaaaaaaaaaaaaaaaaacccgcttaatttgggacaaagatttgaatttatttgtacctaataaaattataaaattgtacgtacacttcaacatatataaaaattaatttaatacaagtttgagatttccagtctaggtctcgggtcggtattggggtcgagtttattaaaaatatattataacataatctaatctattaatacaagttaatataaaaagtaatagggtaaatatcattttagaccatgtattttgtaaaagttaccaattggatcctttgttttgttaaataacaaaatggatactgtattttctaaaattatacgaataggactctgaactaattttttgtcaaaataaaacttaattataatctgatctagagatgttatgataaaactggttctattttctatatttattcatgttaaaaattatttttttttttaagaaaaatgttaaaaattatcttaaagtaagttatatttaaaaaaaaaattaattgaaaattgagtttaaagtcttatttttaccattttaaaaaatataagatctattttatcatttaacaaatacctttcgtaaaacagaagatccaaaatattatttaccattatatttttttttttttttttttttttggaagaaatttaccattatattaaataacaatgcaatcaaaaagccttaaaactaaagttaaaacctatctttttctctgggtgcttcgtatattgacaactggtggtgaatagggtcttccaggaaaagtcttattatatagcgtggcgaaaaactattggctgcatgtagtgaaatatttcgacagctgatacactaaaataaaagagcagacgacgtggcaatacaagagccactctcaacgatcgttacatttccaagccatcacacattaccagacccacaaaaatacaaataaaacccccaaaaatctatccacatcgaatctcacccgttcatttgtataatctaacggccagcataccctgatatcccaaaccatatccaccaaaaacaaattataataattaataataaatattaaacaaaaatctcacttcagtgttcttctcactggagctccaccactatcttcatcctcggccttccacgaatcgcagaaactcgaagcaaaatgacctccattgccctcaaatctttcgttggcctccgccaatcgtcgctggagaagcaccattttactgtccaagcaaaacctttaatcaatgtccaaacccctcgccgattccgagtcgtcgccggtaaattcagtcctaaagttaccggccgaaacctgcgagtggcaatcatcggtggaggaccagctggtggtgctgccgctgaaacccttgccaagggagggatcgagacgttcctgatcgagcggaagctggataattgcaagccatgcgggggagccatcccgctgtgcatggttggagaattcgatttgcctctggacatcatcgacaggaaggtgacgaagatgaagatgatttcgccgtcgaacgtcgccgtcgatatcggccagacactgaagccccacgagtacattggaatggtacggcgagaggttctggacgcgtatatgaggaaccgggcgacggagaatggggctaaggtgatcaatgggctgttcctgaaaatggatatgcctacagaggataacgctccgtacgttctgcatttcacggaatatgatggaagggccggtggaacaggcgataagaagacattggaggttgatgctgtgattggagcggatggtgctaattccagagtcgctaagtccatcggtgccggtgattatgaatacgccattgcctttcaggtattacagcctaagattcttctatcgtgttggtgttgggttttttgttttcactatagagacgaagttagaacttagaattttgtgttgttaattaatttgcacttagattatgcttatggcttttgttgacatttttatgcaccaatagctgtaatgatataagggagtatcttattaggtgatgattgaaaccaatgatcaatactgatgtgtaatcttatgctatccaatacatttgtgtaagagaatttttcaatcttgattttgcattgtatattttcaggaaagaatcaaaatccctgatgagaaaatggtgtactatgagaacctagctgagatgtacgtaggtgacgacgtttcacctgatttttacggctgggttttccccaagtgtgaccatgtggctgttggtactgggacagtgacacacaaaggagacatcaagaagttccaactagcaacaagaaaccgtgccaaggacaagattttaggcggcaagatcattcgagtcgaagcgcatccaatccctgaacaccctcgcccccgtaggctagcagggagagtggccttggttggtgatgcagctggttacgtgaccaaatgctctggtgaaggcatctattttgcagccaagagtgggaggatgtgtgccgaggccattgtggagggttcggagaatgggaagaggatggtggatgaaggggacttgaggaagtacttggagaagtgggacaagacttattggcctacatacaaggtgttggatattctgcagaaggttttctacaggtctaacccggccagagaggcttttgtggagatgtgtgcggatgagtatgtgcagaagatgacttttgatagctatttgtataagagggttgtgccggggaatccattggaggatttgaagttggctgtgaatactattggaagcttggtgagagcaaatgcacttaggagggagatggataaactcagtgtatgaaaattaaagcctttttgtgagtatgtaacttataatgtctgttttctctttttccccaattatttctaacattatgtatgatacagttttatttggagccaagatgttgagtttcaattcatatttgttcaaagaattttcttatgcagtgttggatgaaaaaaaaaacaattgtgatgaagatgctgatttggttgtggtaacttcctaacagagcctccttcacttttggtgatattgcggctttagttagtgttcatgaatttgttaaaaacatgtagaagggaaaagaaaaaaaaacatttctacaaatataaatttcgaaatgggcaaagtaaactggataataattaatgttaaaaaattgctacaatataagagacatcaaaagttaaaacaatgtcaaaggactgaagtgttagggttattttagccggtaaagatattttaatttgatatatgtttttggtaaattttaagagaatatactattattagctaataaaatatttttattaaagataatgtagatttttaattatatttaaattaaaataaaaagaaaaattatattaatattttatataaagaaattttaatttaaatttaaaatattgtaaatatttttaattttatcgatttaatttaataaattaaaagataattctactcaataggcccgtagatttaccacgatatctcacttgttttattgtatgtataaaatattaatcacaccgaaatagtataccaatgtaactacaatagctaaaaaaaagtctcaaaaatcaaaatctcaactccatttcaaaaattaaaaaaaaaatatatattacttaattaaaaaaaaattaaacctatatatattacacttaatattagctaattgaacctaattaaaaaaaaaacttattattaacattaacctagactgtatatacaaatgtgatatgaggcagtaacatttcatcctaaaattactttaaatagctctatctctcattttcttaaatagtttttcatgtatttattaaaatgacaaaaataatacacaaattcattgacgaggctctataaacatttatacagcccaacaacaaaagtttacaaaaatatatcttgctctaactattcagccacacaaacgaccttctttaataacgacatcttccaacaaccaaaccagcaggccaacccttaatgaaatcaagccagacagagaatcaccataaattctggcaatctcacctgagaagaagaccgtaagtaatccaaacacatacaatttcatatttatgcaaaattagacagaaaacaagtttcaaactaaaatttaagcctgaattatgattaaaatcactggaaaataatcttcctaatatcaatttttagattcataaaatatagatttgtctgcaatagatttggagttcctgatcaattcaaatcaagtataaattgaaaaaaaaaatgtattaaaacactagctaatgtttctcttgttgcattaatgttattttccaaattttcaatagtggatttattcatatcaaatcacaaataacaaagaaaatataaattcatctagagccacgtatatagaaacattgttttaatttttaagtttttgagtagttgcattgcggttgcattaacatttgtctaacgctctgaaactagacatatcaataattagaaattgataacgatacaatagtttttatgatattttcaggtgtttcatatcgacaaaccaacacaaagctcttttaaaaaattataacatggtaagttttattcatatacttatttggttgttataaagttggtttacagaattttaacagttggttctccatataatatcattaaggtacaattgattgttgatcagtgacacaaaaactactgacaaattttttcattacgatggccattcaaattttctattctagtagcaattaagttatatattagttgaataataattgtgatactacaacattataatttaaaaaaaaaaaaa

SEQ ID NO: 256036 - DNA, 4458 bp, Cannabis indica
cattaatgtctcaaccacgtaaaaaattaatcttctttaatgcttattcattatttcaactctaattaatagttactgaaaacctcgatcaacgtatatagatgtataaaattattctggtttttctaaaaaacttttttggttagatatgaaataatccctaaattaaggctcatataaattgagtcatcaaaggtaagaagatttagtgatttaatcggtctatcattacatttgattaatttataagtcatctaaataacataactcgccctaaattctttcttgaatcctcttatttagctgttacacatccagaattagattggtttgaggcttggccttgttttggtcatatatgagatatgattacacaaattcacttagagttctcacaatctaatgatattataattttttgtataattaatcccatatttaagaaatttcatattttctttaatatatatacattgtattaaaatttaatgaataaatagattaaaaatagtgatattcataaattcatagagattgataactcaaaaatgctagaatcaacttactaaagttcttaaaaaattaattattaaagataaatttactaatgaaatagatttgtctcttagtattcatgataatcacagatgtatttttgtaagttttttgtgataaagagatatttttactgaaatttttttaggattggaacgagagatattttagttttaccgatctccagtttacatatacatataatcttgaattcaccctcattcgtgtatcaagttgaactgtgctttacatttgaatggtcaattgaaactttatttacaaaccttcacagtataatatagtatataaatcaagataagaaattgaatggaaattagtaattacacttccatttaaactatttacctccattatttaaaaaaagaaaaaattgaaaggggaatataaagactaatcaccctccctattctacattcccgaaaataatgaataccttaactgaataggtagaccaatgacgacatgatggaattattttttggagacatttgtaataaatttggggtggaatggaatcattctataattgaagtgtaagttattgttggaaaaattatatttatatatataattcatgtgatgtttattagcttaatagtgaatttaaatgttgatgcttaataaaacttcttaccaccaatccattaagaaacttagatatatacccagcagcctaaaaatgataagaaatgatcaaaactaaccaataatataacaaaaataacattaagttgtaacaaaacttcagcagcataaaagatttgtaaaaagaaaaaaaaactctcagcctatgtctttggtactggccagctaagcactcaaaatttgacgatagttgaatgcatatgatttaacaaaatagaatttaagcaactgggatatcaatttcagcaggagccataactggaagagcttccctagcgtattcctcttcctcctttggagggtgaatggtgacaatatcaggaagaggagtcattgggccttgctttcccttgggatcccagtcaagcatgatcttcaccttgattccaagcactccctaaacaagacacaatgcagaagcaaaatacataaaatgctcgtagtaaaaaagtaaaaagacgctcgggtttaaatatacaaggaagattcaacaaacctgtcttagaagaacatgtctaacggctgagtcaatgtattcttttgttggctgcccagatgaaatcatgtatccatccttgaacttcattgacttagcacgctgggccctaagctttccactaacaatcacctgtttcaatcgaaaaattatcctaatcaaattacaagagagaataattttaaaagtgtgagagcaaaaatagtttaatgatagacaaacatacctcacaacccttagctccactttccataacaaacctcaaaacaccatagcatgccctgaagaaaataagaacaaagtatttagacgattgattaatatgcaacacaaatggaagataatagaacaattagtgcagtgagccaaaaatgaaaatcaacatatttatatcatccataggaaataatccttaataaaaaaggaaacaaaatgcaaacacaaacccacatcacacaaaaatgaatgttggaattggtaaactgtagcaaaccagacaacataagttacacgacaatacacataactaaagtagcctggtaagcagtttcaatgttgtcatcttccgacacaaacacggtacaaaaataacctatttgctttaaggatgactgctcaaaataatgatatgtacataaaatagaggattagagctaaaactaaaattcacaatttctcatgtatcacctaaaacattactgcgtgaaaagcacaaattttcacatagataaaagtatgaaggagagcttttagtctcgtcaacttccgacacaaagatggtacgagacaaccaaattgctttgtagatgacatagtaaattaatataagaatcagaacaaaaaccaccaaacaaccaaaatgagattacaggtcttggagaggtacaagagccagaaacaaaacccattcagcaaagtcatacttgtgaatgaattcttcatcaacacagaaaagaaaaaataataatgtataatgtatcacctaaaccgttactgcgtgaaaacaaaaagaagtcacagagaaaatggtatgaaggagaaatttatttcgtcaacttccgacacaaagttggcataacaaaaccaattcgctttatagatgacatgatacaacagaagtatcagaacaaagaccactgaaaagcagctatgcaaaaaaaaaaggcattggagtggaacagaatgagaaacaaaaccaaatcagcaagcacttaaaaggactcattatgcaaactaagcaacctatgttctttaaggatgcataggtgaaaaacaaactataatgtatcatctcaaacctcaccgcatgaaaacaacaaaatttcacgaaggtaatagaataaacgaacttttcttttgtcaccttccgacacaaagatggcaaagaaaaaccaaattgctttgtaggtgacataacattacacaacaaaatttaatggatgtcataatgagataacatacatgaatgcaacaggaattatataaaggataatttcaacaaactacatgcacaaagacagtgaatcacttctagttctagagaggggttaatgttcaaaacttacaaatcaagatattaatctgttcaattttactttatctagtatatcaatcaacatatcaatttataaaaagaaacgaatggttcaagcttttttcaaccatacaaattcgtataagtcggaacataccaggcaagaccaacgaggaatatttttttaacataattatcaaaactaaagagacagtaccttctgacggcaagaccaccgaggagtttgtaacgaagagactcagcctgagcaatagcacaaagccctctgttgttcaccttctcggcgtaaagctcaacactgttctctggaaatttgaaacgcttctgcacaacagaagtgagctccctgatccttctacctttctcacctgtaaatccatccaaaattaacaaataactgttaaacaataattatattttgacaccaaaacttaaattaacatctcattaaatcagaatctgaccaagaacgttctgagtccgggtagctctgattatgatctctgtgcgcatgggagtaaccctgacctcaactccagagtagccatcctcggctagctctctggtcagaacctcattaagctcggcaaagaacactccatcagcgacgaactaagaagatacacaacgcaatcacgttagaataacactagaaatagtccaaacatcagagcaaactaaacatttagaagataaatcgacagttgagacagtttagatgaattacctttcgctttttgctcatttgagtcgccatatttgcagaaaagttgcagatacgagatctgaagaactgaggagtgtggaggctgaaaattggatgccctgcaaaccctagatttctaactagggctttgaggagaaagaactcaggttatatgcattaactggagatagatcggacggttacgatagacttaaccatcacttattaacgaacgagattaggtcttattttttttgcctttagtgatagaggctgtaaaacgcaggccaggccttacctcggcccatttaggaaaaacctaccctaatttatcattacttttgttaggcgagtccaaattaaaggcacaagtgttgtactaaaagcatgtcagcccaatgcttggtctgcataatgtggacttacggtcatgtgaacttcaatttttttttttttttttatttttttttttagttttag

SEQ ID NO: 256037 - DNA, 3409 bp, Cannabis indica
aaaaaaaaaaaagaaaaaagattgtttatctgggaagcaaaattaaataagtttgataaatttttgtttataattgacttttaatttcctattttctaataagctattatcataatacagcgaagaaattctggtttcaaatagacatgtatgtcttgttttcttgtggattgaaccacaaatttatattaagtggttttgttgaataaaatcacattaatttgaatacatcttaagagctctaattcaatacattttttccaagttcagccttcttcaattcaatcattgagaagaaaggcaaacatggataacgacacttataatctttggcaaataaaagcaagcattatacttggttaatttccaaaccccgccttattattaaaagtgttctcacttggctaaaatgtcaaaggaaaaagaaagtcttctgtacaataattcaattaaatatcaaacaaaataagctaagctaggaaaagggaatctatacatggtacaagattttataattaatggggcattaagctgacttgcgtcacactcaaacaagcccatcaaatatacatatacctacactactcaatctcgtcatcaggcaaaattgaaaggattttggcttactgaaattatgcagttggccccatttgtgcatgcttctttcaatgggatccaattgcaataagattaacttcaagacttcagagccccgactttactagatggcattgtttcaatttcaccccttgcattgaggaaagttcaggaaataatcccgtgttcgactcagctgcattattgccagagcaactcaagatcagcttctgattcctgaattcaccgttaaagccaattcaacggcagttttccaaatagcttggactttcaatctgtctcttccttttcacccttggcagtttaggtagttcaaagttgcaactttaatataatctgaatgacagtgctttaaaatatagtatatagatccagatgattgcagactgatgcttagtcgtgcaaacatgcaggcttcaacttgtcttgtttctcatagctagcaagaaccaccaacagcagttgagcacttaaacggagtacaagactcctggcaagggatgaacccattcacatttcataacacggccctatgtctcttgctctctcgaatgagtttcttcttcactgcgctgcagaagctcctcataagctttcaatgagttagctgtgaacttttccatggcctcaaaaatacgttgcaggctagcctgcagactagcattactagtgtcgctttgatatacaatatgtccacttacagatagattgttattctcccctgtgacaagctccattttcttgtcaaatgcttgaatttccttctgcatcctctgatcctctttatccatgttcctaacttttctctctagatccttgtttgccatcattcgttgacgcatttcatgcttatcttgttcccagatctgaagaacactcgaggcaaatacacgcatagaatcgaccacttccttttcagatatgttgtccatagcttgcgaccattgatgacagattacaaaaacaggaggcgcacccatcctcccaggtgagaaaggaactattccatcagctgtttcttcaggctcgtagaaaatacatttgactagccaatcatttatggccctcacataacccttctgggcacttatccaagtagagaatctgaaagtccagttaataagctcacgcccaaactgcaaagttgcttcgagatgagcatcaccaagctttttaccagatccaatagagcctagagctctagcttctctgatggcttcacattgaatgctatggcattcaagcatacatttccacatcctggttaacctgaagacattccaaaacaactacccataagaatcaaatgcataagcatctaatataaaaggacattaatccggatgtgtgagaaaattagtggtgtgatttcagaaagctaagtgtcagttaacataaaggcataccaagaggacaaaagatctttcaaaaggacaatgatttacaaaaaagaaagaaaaatgctatttgtctctagctagagcaagaaaatgatcaagtgttcatatattggcatacaagcccttggaaagtcaacgtagaagttttatatatctccaaaagtacataacagtttttttacgtcaaggtggacttacagtattggtatcttcatattctaggagttatgccaataccatacaaaatttatcatacttagtagtgggattcaactctagcacaaagctgttctgagaattccacaaagttccttataatgaacaatcgcaattaatgagcatgcatatcaaactaggataaaagcatttaaaaattcatttcttctcattttaatttgtcatctatgttttttcgtactcttaaaagtcccaaaaggctgcgaaggaattttctactttagctgataggctctccttaagacaaattctgtctgcccaaagtcagatttctccaacagaaccttagatttctaactaagctcacaataaatacatttttaaattcctgcagaaagagtaatgataactgtatgtgcaaaagaactcttataactatgaaatcaaaaatccaatctgaaatttcttaaaaacaatatctagatgcatcagattatgataaaatgctatattatagtctgaaacaaatatttaccgcacaaaagactaagatcctgcaaagatccaatagagaactagttatttcacatacccttgaattaatttatttaactgtggccataattcttcatctctgatcttgttaattgtcacggaaatcttatcaacaacttgaattgcaattcttatctttgtggatagaccctttataaaagttctagttgcctcaactttgtgtgcctcagcacctctttcatccaatcgcttcagcttacggcacttcctgtcatgcattacccgcattttttcctcagcctgcacgtgtattaacataatactatttagctccacatcaacaataaaaatctgtgacatgcccctgcatcaaaagcttacaacccagataataacctagaaagacggaaatagtttaaaaggcctgatgcaacatgtccaaataaataaattactaaaatcagaacctaggatcatgaacaccccttttgacagatagcttatgttaatcaaaactaacaaccatagactgagaacctctcctcgtatcataaacacaaatcaaacttttgaaagttccttctgttattatcacaagacactcttaaattatcatcttaggtcatgtttagaaataactataggaacttactggattgaatagtccgaatgatgtgttcttagtcatgtaattagag

SEQ ID NO: 256038 - DNA, 2746 bp, Cannabis indica
ctaaccaccttattgtacctttctcttgcaggaagtatttgctctggcccctttgtaaggcttccgtctgaaactcaaatgtgtgttcttgctatcaaccaatggtttcattctcttgatccacctcttttgtcgtcaattactcagtgttgcttatgtaagtgctatgtctctatttgaaattttgaatgttgatgagttaatcgattggagctctaataggtgctagctagttagtacttactagatagagtgccaaccaagttatttcatattagtttcaaattacttttgctgcacgtcactctatctatgtactttaatatgaattgatttggttgacactttatgaagctctcgtgagtgttattaattctcttttacatttcctttaaatgatagttttgtctaattttcttgaatggctttcactaaagataatgtttggttggaggtaagggaaaggaaagtaatggaacaaaagccattcctttctattgtggttgataaagtcatatgggaaaagatttgccgattggataactcattaccatttagatggaattgtcatagattgggtggaaaaagaaacaattccattccacccttgtgtatcccattacaatactccatcacaccatacctatctgtctcctctttgtaattggttcttctagccatttttattggacaaattataaatttcatcctaaactattgcacttgtctagttttgcccatctacttttgcaatgcaacaaattatatgggtaaaactcgacaagtgcaatatttcatagataattttgccatttctctctctctctctaacaatgaagaatccgaacatactcttttctccttctattactattcttaaaatcaagacaaaaatgtagctaccaaacataattttgtaagagaaaaaagcatcaaagtcagccttattttattttatttattttgagaaaaaagttaagggagtcgactatatgagtacatagacctaaaagctgtatgccaactgaataaaatgtactaccattaataatattatttttcctgctccctgtacggcagatgttgccatcacctcacccgcagtccctaacattattgccatatattgcaggtcccgatttgaatcctagaacactgtctgatatcatagacaacatacgtgaatgttactatgttgctggtgggaatctcgatatcagccactttcttaaattcctcgttactttgcaagcagaatttagggtttctcctggtatttcatatcattatctttttccatatttctaattaaattattagagaaggctgtattttttttttccagcttcacatttccatgcattagtttctattgtctgtggtaagcagctaattaaataatttatgcagttacattgtggttctttttttaaggcatggatggttacacattctacttgtttcttagtctgcacattttcagttctcaactgggatcaacatcatatttcatagctgtcatttgattattttttaaactgaaggattttcttttcttgcagagaacatttttcctttcagatggaatgattccaactcgcgcagtacttttaagttggtctgcagcaagactttgtcttacataaaggcattgggtgataattctattcttctttggatagtcgaggatgtaatacttgagaagatggtaggattctaattcttggtattgtggttaatatggggcgaataccatattttaagatgtcattaaagtttgtcatgtacttcagttttaaattttctctgatccaccgtttttgtttatatatctcagtcagctaagcctcccctttataacttctgtgctatgctctggcttctagtagaattgatgaacttggagaccactaaacgtaatgtaccggcaaaacttagccctcatattgttacatcactaggcaatttgcttccaggatatcttatggatctcgcccatgtaagcatatttaattctttgtcactataatactattgatgtacttagttattgcgagtcttgtagatataaattgacttagattctgatttttaacaccataacttgctttggggattattataacctctaatcaacatatcaagcataagcttgtaaacaaaacaaaacaaatgccaacaaaaaaacagttaatttacttcgttctctcgaccaaaataatgcatttcagttgcattcctaaccaaaattgtttaagtcataattacagacaaaacactaagactgcctctcaatgtttaaaaaacaaactcaatcctttgtcaaggactcaataaattaccagaataaagagaaagacacgagtttaagtttgtctaaagaaaacaagttcgatgagccttggttttttttagcagttttagctaacttcttactacctgacttaaccttccatatagcaattggtaattaacaggaacctctccactcaaaagaaagttggctcaaattgtaagatatgtttgacagtttgtagtgtttaggcgcgtaggagttttgtttcaaaataaataaatagtaagaatttctccactttacacagtgaaatttaaagttaaagctagcacgattgcgacttgtttcactatggttatctctaaagcttgtagtacttacaatgtaatcttctgttttttgacagtgtatcccaaaacacgatgatgagaactccatgactgtgaacac

SEQ ID NO: 256039 - DNA, 6853 bp, Cannabis indica
gatcaaaaaggcattcaacttgtgactatcccaacctccatctatagaaagcaactccgcaacaagtctgtggtccctggcaggagacccaatgggcttagggaggaaattcttcatgtgagggatccaaggatcctcccaaattcgtgtatccctcccatccgccacccgtttgcaagcacctttctttaagatgaacttggttttaacaacgtttttctaaaaccaagaatcagagtctttaaaaccacagttaaagaactcttttcatttgaggtatttcacttgaagcaccctacagcacagagactgacttccattaaggatgttccacccccacttagccaaaaaggcttggttgatttctctagattttctgaaccccaggcccccaagagatttcgaaaggtaaattttatctcatgcttttatactacatattataaaaataaaatatttattatattatatatatatacatataaaatgataattaaaaataaggccttttgatataaaggaccttgtacaaagacttaagctgcgatatttttaagtcagctctgcaaacaaatacaacctatacccaccctttgtcatcaacatctttttatttattactaatttgttttttattttaatgtagaaaaccttgtcccaaatcttgccactcttttattaaatttaaatattaattaaaagaaataaataacatttgccactctttttacttagcactatacgtactcatagaaaataatatacaccttctctttaagcccgaccataagttatactttgatcaacataactaatagtattgcttactagtggttaataattatttttatgagaaaataaacttcataaaaccataaatcagtttgtagtagtaacaaaatgtgctatttcccttttagtatgatgaaatagtagaaaatggctatactgatagtaaattaatagtcggtagttagttaaacagttgttattattttcataactaactgattaattagttaagtttgtaacaatagtttgctagctcagtcctcttgtactcgattgtattctcatccttataaatataagggttgccttaacagtttaggttgagaagttagttttcttttctatcttcattcagtttacttttatttatttctctcttctttctctttcttttctttctgcaactctatttttattttctttcttggtgttagagctaaatggccaataatggagatcaagatccaatcaatcggcaagctccagctgcaatttctggtcaaaaagctacattaccaaacaacaatctcctactactcaatttgagactcaatcgatcaaactacacttggtggagatccttggttcttgcagcagctcgagcttacaacttcatggatgcattctgggaacaaatcctcaacctcctcagaatcttacaggtaatgttccaaactctgcattcttcacttggttaagattcgatcaatttctaatgcattggctaatgaactctataaccgagacaatgtttggtcatgtcatcaatgtttgagctaaagaacgagaataaaaagaagattctgtacattgattttcaagagagtgatacaggggattatatacataatgcaaggaaagaaaagtagttataactaaaaaccatcctaactactttctaacagaaaaataactaactgaaacgaaggacacacacctaaggagaatatgacaacttagatgatgcaacagccttgacaatcaatgctcgaacctctactgagatctggacaactttcgaacagttgttcgcacaagatcgagagccagattgctccagataagaggtctgctttaatcgaccaagaaaagttccctgtccattgatgaatacatcctaaaaatgaagcaatacagtgatactcttggtgctgctggtcaatctcttttagacgatgatctgatcttgtacattcttagaggcttggaatctgaatatgagaccgtcacagttaatcttacttcaagatctaaaaatctaactcttcaagaaatacaacttatgctccaaagtcaagaaatgaaaatcaaccaacttaccacagattctctcacaaacgttcaagctgatcttgccaatctatccttcaacaatagcactcgaggttcccaaaacaatggtggccgaagttatcgtggggaaagaaaaataatcaacacaaattatggtggcaaaggcagaggagccaacttcctccaccccatatgaaacccctcaagctcacctctcacaaacctcgattgcaccagatctgtctacaacttgtacataaacaatggtgccacacatcacatgaccaacaatgaagacttgaacacttccacaaattacaaaggcaaggaaaaaataattgttggtaattactctccctatactcaaaattggctcaaattatattcatacacaatctcgtaagaatcccttaatacacaatcctggaagacacttgcagcatgaagtgttcttaagggttgtccagatcttgcaagatgtctggaaacctaccattcgagtgaggaggctttcaataacggatgatagaaaccaggacatcagaagttggtcttgaacatcccagtcaagaaaggtctgattatatgctcgtgaggcttgatctgcatcactcaagaactgtagaggcagagcaacatcctgaatgaatttctgtaaacggttcccaaggatcaatgctagaacctgttattttcataacagaaagttgtgaccgtttaatttgactaggagattgtgtgtgaagtacacaagggtgaattcatcaggattgggattttgatttattaaaagcatcaaagttgtggttgttgaagctgattggttcaccagaaaactagaggtggaattttttagattcatttgtttcacctgattttgagtacttatgctcgtcatgttcgctgtaaatgggaaaaaagattctaataccatgtaaggattattaatctttcaatttattgttgaaagaattcaaagataaaaaatgagcgaagaagatagagaaaaaggttgagatgaaaaaattcttattatattgtattcatttctttaacttgagtattagaagtgatttatatatatcactagaagttaagtagatgagctaacaaacataacaattcagtaaactggaaaataacaatcataacagactcaactaactaacaaagtgtccctaataatgtatatacaagtaacaaaacaacaatatacttgaataaatcaacattaacaataaattcaacataaaatctcttacacatttctaaaaccttaaaattttaacatttgcctccaatttctataatagacttgtagtaaggatcttatttcatagaaatttgttcatctttcactaagaatgactctgaaaattgctcaaatgataaagtttttgggtatggtaaaaatagaaatttgtaggatttggaaaaaaggaaaagagaagagagagtaagattatgaggggaatattttagaatttttacaaaaacgtggtcatttttcaatgggtgtcaaaatgttaagtcctttctctttaattttggcattaatttatgcattaataatcaaattttccaatatatttggtagaaagctacatttagatgcatatgtataaatataatatagtataagataatatatgtcatggatataattaataaacaaaattggattattttgctaatcttggtttgcattttctatgcacgtgttaattaaatgaaagccattaaaaatttgaagaagaaaatgataataacaataataataaccccaacccaatagtagaatagatatgtagctgatcaaaatattaatattaataaaaagaggtttgtttgtgcacctaataattctaaaattaggggcaacaagttgatagttattattttgggcactcatcaccaaacatgatgagatatatgtacacgtatggattagtaaattttgctttaatcatgatgaaacacaatgaccatacattttattatttcaaagaaggacgtttgtgttgattggattccatgtacatacatatacacaataccaaacaaaattcatcacaattcacagccctttctcatcattaatggtagtataataatacctaaagacacctgcaagactgtgcattgtgtcataaaacaaaaaatatataaaaaaaaaccccatttatacatttatattttaaatttaggagtaggcactcaacatatgctttaaaagaaatgaaggtggctccatactcttatatggattgtgaaggggctcaataccccttaacaatcctcaaaggaggtgaatcatatagtagagaggtagctctcgtagtcgagttcctcctaaatttgtcagagcggtaagtgtataacaattttgattacttttctactgtcgcgtagtttagaatagggttcaagctaatggaaagcatttttgaactaataatttgaaaatgtgtgttttaaggtgctacatactacgagtctatcaagttatgtgatggtacgaaatttattaggattgttgtaaggttgttgcgaacagttattttgtaactattctagttaatttcgtaatgtgttcagatttgaattcaataaacactatgaaagcatttttgaagtaataataatatgaatatggttgtttataaggtgcatccatcaaatttttgagtgggggcctcttggaattaaaagataagctagcaatggattactttgatttcttgtctaatcattcaaccattgacggcggattaagacaatgaaatcttgtccacttgccttttcacaaaattaataatattttttttcaattactcaaatcaaagcctttcttttacaaaataaactccttttccaactagatcaatctaatttccaaacccaaccctagctagctagcttaatattaattcacatatagagatatctattatctctctaaattccccaaactactttttccctcttttctttcttttttttatttcaaccaaagttatcagaatccaaataatgttgtgttcagtcataaagtcaaagaatcatcatatactatattcacatacataaatttaaatatatttatttattgtatcagaaaaaaaaaaaaaccgcagcaatttatcaccaaacgaaacatgcaactagttgatattttggacgagaagttacgtcctaacttttttcttctttatattttctttttttttttctaagtgattggacaaaagctctttagtactatatttagagaagtcacaaaccaaattggaagaaaaacataagggacattttatttttattttttggatagtgaaaaagacatagtgactaagatagtaacgagttgactcagtgattcactttctagtagtggtcgacagttgaaacctccaccaccaccatcaccaccaccaagggctgtgccaccaccccttaagttgctttccttggccgttgttcacccgtcaaaatatcctccaccgttgctttttttttttattaattaattaatttcctttttaatattattaattttttaagttgttgcattcttgttggtctaagattactcatgtggggcccatttaacaccacttttacaaattggtccagtgagaagggcccatacggtccaatgtgggcccatcgaccgcccaaaaagaacggaccgtaattgcacaaagcctttctctactcacaaaacacaacttttatccacacacttctttctctactttttttcttcttttgtgttcttttaatccacaacgttattttttttaccaaaaatttcttgaccaacttattaccttactgacttgccacctgtttttaaatatacgttgataaagttaagaatgtacacgtggcaatagattgagctacaattgtacatgtatgatgagtttgagcagtttcaacagagtgagtcactgaatctattggaatttttctcttaacattgtaacttgaatccattttaaggagaagagtatcgaacggtgaggatttgtttatgtccaccaaaaaagatcacgagtggtgacgtcagagggaaggcgatattgacgcgccgtaaatcgacgtgtcacggcggaagaaagggtagagagtggggtccaccttcccatgtcaaggtccccgaacacagcgggagggaaaagtggaacacgtggaagtttatgacatggtgttgtcatatcccagacggcggggcccactgtttatgggtgccacgtcatgcatgcagacccaactatagtataggtgtagtataataaataaataaataaataattatactagggagattgttatttttagatggattcacgacgacaaaataggttaaataggttagagtgacacaataataccattccaaactcacacaaaatttaaaaatctcacacaaaattaggaaattttaattggattcgggttagtttaattaatatgagaaatgcttaaaaaaaaaaaaattgtgtattaggcagtagacaccactaaatgagtgtgatattattattagagtaattaaatattaaaatttatataatttaatttaataattattgtattaaaagttaaattgatactgatacttataataatattcttttttattgatttctttaacctattaacaaattaattgtatttagatttgacacaattattataaaattaactcgctaataattaatttaaaagtaaattttatacttttttttttttttttgaa

SEQ ID NO: 256040 - DNA, 3499 bp, Cannabis indica
ggttaaaaagtagaaacgtactctgacactcattcaatgtaccctgagacccatctaatgtacacgaaaatacatttggtgaaagtacacaaaatcatgtccaaagaatataaaagcaaaatattttgtacaaaagttttggacacatgtattgttcttgaaattactcttatgtccttttacgcagtacattctattttctatcatatcttattggttaaaacttgactaagggtacaaatgaattttcacagtccaaaattccctataaatacatatataaatgtattttcttgaaaaccctaacacttccactcttgctgcagcacatcactcatatttactctgtttctgttcttcgaatcaaacacatgatgagatgatgatgatgatgatgatgatgatgatctccatcatctgccgcagatctctttaaccaactgaaaacctaatttgctttgctttctacaggtatttttcccatatatattgtttgttttttgagaaaatttattctgctggatgtgtgaattgagtcatttttttttgtatatgcatatagatatactgtattctttatttactctgtttttgctgatttttcagtaatcttttttttttcccttttttttgggggttatagagacaaaagtaaaagaaaaatattgatgttgattgttttacgtacataaattgttattattcatttggaatagagtttgagtgagccatggaaattagtgtcttattcttagtgatttgagaattgagattggaggacaacaatattatctcttacaacaatttgttaattattaagttttcgaatacacatgactccaacttgtttcataaactctctttggtactacttgtgtaaatgttttctctgttacaagttttcatttttaaggtaccaaatcaaactatataaaaatgttataaatcatcttaaaaaaacaagaggtatattttacaaattcattttatttaacctattttatgtaaatttattttatctcgggatgatggggaatgaatataggtgaatgaacttatcaatacctgagttatcaaacatgtattggcatttagtctttttgatatatttacttttaactatcaatttgcatatttttgtatattctaatgtatgttttcaaatttgtgtaggactattcattatggaaccagcaccagacgaggattatgattattgggatcatttcgtttatgatcatgacgacgcacaatccatgccggaagaacctagtggtgaacttgaaaaacctccaccagcaacaccgaagcaaaaaaacactaggggtagaagcaaacagatagatatcactaaaatgaaacgcaaggggaaaaagatgaaagttgagtacaacaacttcggacaatgctggggtaaaggagtgactgcttatgttactcgacttagggcatggatgcgacttaacattccacttcgagatatatcgtggcctaaggtggatgaggaacttaaaaatatattatggaatgacattaaggtaatattaatattattattcttgtttttttactattgattatgatttgtagttgtaactatgattgttaatttttgcagactgagttcgatttgccagaggaggcaaggagaaaaaccattttaaaagctagagacatatggagggattggaaaaataccctagcgaaagatatttacgaatttaaagatccggttccccaccttctcgagaagccaccaagactatatgaagacataattgatgagaaagaatggaaagagtttgtggcatcgagcttgagtccaaattgggcggcgaagagaaaaaaggcccaagagaatagggcaaaaaatgtttacctccacagctctgaacgaggtgatatgaggatggtggaagaacaaattgagaaagagttaggccaccaattgaatgatatttatagatttgaagtatggaaaagacttggaaggaaaaagaaggatgaggccaacgagaaatggtcagatatggagaggcgactttgtgaggtagaggagcataataggcagatgcaagagcaaatagatgaactccttcgtttattccgttcctagcatagcagcgttgtgggtacatcacatgtgtttgatctggtgttggaggagcattgaatgaaccagcacgtgttgaccttgcctctgctcccgtagcacaactatcgcgtgtttccatgtctctgctccaccagcaccaccggtagctcgttctgacactatctctgctccaccaccaccactacgtgctgggaaggtttttgctccaccagtaccaccgccacttattggtgatagttcagaagaggtaatcttaatattaatttttgaactgatttaatggaaaattataaatatagtcgatttacaaatttgtttcttgtttgatttggaaatgcagaaattttcgtgttggatgcatgtttggctggagctcagtgagatgacactgaaagttgctacggggtacgttgtgaaagttacctacacaacaattatcgttaggtatttctcgaacaagtccacgtggaaaatcttgatcttccgtgtcccgttcaggaagcattcacaactgtaggtcaagcgatatgatattatgtagcatggctgaaggactaccttacgccagttggaaaagacatggtattttttaattaatttattgtgtttattgattactagggagttcaagatagagaaaataggatcaccattgttggattacaaatcttagtgtgtgaattctaggagggatgttaaagagattgtttctattctcaactttgttcatcaataaattcatttcactttctgaatattggtttagctactgtcattgtaagtatattcattgtttcttgatgagatttaatccacaacagatatgttgtgatttttaagttgttttgttaatcattgtgtataagtttcttgtgtgattagatcagccaaattgtgttgtcaaatgctgatgtggaccgagatcactcgtttgttttgcagttagttatgactgctcataactaactgtattgagttctataactaggtgcagctctgttatgatgagtaggaatagaattcagagagttttggagggttgtaaagagttcattggtaagtttactttgtaatatcagaagcaaagtcttcttggtgtgattgtcttcttgtgttgatatggattcatcaataaagtttctcagccatttcaaggctgttgtacccctcggattcgatagcaaagacacaatatattgtctttgtctattgaaccgagtaaattctggtttgaattttgttcgagagtagtgattgatgattagtcctgttgcagttagacttgatcattttgtgttcgacgagggccgaagcacctgcacccacatgaatcaaaaatatcagtacacaaacaccattgaaatggcaggaactaagaaatat

SEQ ID NO: 256041 - DNA, 3639 bp, Cannabis indica
aaggggaaccaacaatggaggactttagctatttttatgacataaagagcgttggccatgacaatagtttttattgctttagtaaattggctaactctgaaattgacggggtagaaggtacggtttccaatatgggagattggaaatccaaatggttctacgcattttttttttgataaatcgatgaattgtattgcacaaacagtatttacaacctattagcacccaaacaagggccaagaaatctatacacaatcaatttacaatctatacatttcaattacgtttccattataaagcaaggaaacaatctctatcaatattcttgactttccaaggcatgaacatagctatctggatcttaagagtgccttttatgtcttcaattattctagcaggattaatcagagactttttccaaatcacagcaatcctggacatccacaagctctacaccaaggctgcagttccagcagctaatacttttttcatgaattttgagatccttgctttcccgatccacctgattagttgagggagattgctggtttgggcatgccagttcagccaattcttcacctccagcaggtagtgtctagcaatcttccaatcaaagaacaagtgttgacaattttcaggatgaacatcacataggcagcaagttccattcacctttaagccatatttgatcaacctgtcctgtgtttttagcctattcagcatggccaacgacatgattacactatgtttaggtgtgtttagtctagcccaaacttcattacaccatttcaacttacttggagagggttggagcagcttgtaacatgctacaatagaatatttttgcctttgaaatacgttatgatcggttaaaattctgatatggtctttgagggctaccatcttcttccagtaccaactagagtgtactgaagtagaattgctccacgaatcttggttcttgatgtagacactatgaacgttctacgcgtttaaagtgctaggagttagaactgacttcaatcgacgacctagtacgtcgcatatcttgacacttagcatatatttttattaccttgtatagttgctaatgtctatttttattaatcacagatagaccgactcgacctgtactagaccctgcccatagagagatcgctgaagttttaggtagcctacctgttcaagatcacgactgacaacttctgtgcacaactacaaaattgtgagaacacaatatcatccttgagaacaccagtcttcaatgagaaccagtatacaaggagccttctgagaaacaaaaggaaagaatagacaagcgtctatccaaacagacgtcgagaacaacatcaggtaacacgtttggcatataaactttcttttatgttaagaataagttcttatttatgatcttcttgcaaaaatgactttcctaaagcaagctccaactttcaactgaaaacctaaggtttgtactgcgaaaacttctccagtcattccgcagaagaggaaaagcgatgctgttcctacagaggtggctgactcgtcgaagaagaaacacaaaactgcccaagacaaggggaagaaagtcgtgatcgatcctactatcaaggcccacgacttcatagcccttcaagataagtttatgagcaatgagttcgtctctaaggtcgagggcgttcctaccgaggacttgatgccacgcttcgcagaattggcatcacaattgatgaccatgttctcacgggcttatgttttaggttccaaagagcttgatcttctgaggaagcagaactcgcttctataagacagtgtaaagaaactgaagcttgaagtgaccacaaagggcaaagatatcaaagatcttggggaagctaaggagcaggcagaggaaaaagtcaaattctttgaatcgcgagttgatgaactcggtcgcgaccttgatgatgaaaaggagatcgggaagaagcagtatgatcaggctgtctccgattacatttatactaccttgtccaagctgcatgactttgacttcgtagttcttggagtggaggcggttgaaatagccgatgtatttcgcgctatgtcgcctactgaaacccagggacttggggggaaatattttttcgaggatgctaaaaatgggaatgtagaggaagtcgtagatagtgctgctacaaaggtcgcagatgatcccagcactcatgccccttagttttttccttaaattcttttgtattgtcaaacttccttttttttagcagcacatgggtactcgcattttttactttgaacaacttatttaacttatgttatcgaacaccatatcctttcgaggatatttcttttgcatacttatttagcggtacatgggttctcgcgttgttaagttacatttttaattaatacttattttatttttgcaaaagtttttatggatttattcacagcttggtgtgaagattaaagtatacaaacttgcaaataatgttgataaaagtttttgaaacttcgaaaatttcattaattaatcattagtacaatattaatggttataccccctatacttagtacattctatgaaataaattgactaagtataaatacatgtgagtaatattgatagtaatactttaaactttctccattccaagctctttcaatggctgtaccatcgaaatcgaataactgataagtcgcattacctatttttttagcgattagatatggccctttccaattattgttgaatacaccatgtgctgaattacgcgtattaggcataactttaggcaacactaaatttcctactcacatgtttctttctttaacctttgaattgaaatagcgagatgtttgctgttgataggctacatttttcaaatgagctaaatcgcgtttttcctccagaaaatcaagttgtggcaactgattttttgtattgttgtcgatattgaagacgtctcttctcaaagatcctgctccaacttcaactggtaccggcttcgcacccataagaaagcgtgaagggggtatcaccggtcattgagcgaggagttgtattatatgactataaaacttgtggaagttcctctggccacgtacctttcttttcttcgagcttaccttttatggtatgcttgatgattttgtcgactgcttcaatttctccattactttgaggatatttgactcctaaaaaatcttttttaatccccaagtcatcacatagttgacacatctccttacaatcaaattgcttaccattgttagaaattagtttataagggatgccaaacctgcagatgatagcactatagacaaactcgcataattttgaggccattatggttgctagaggcttagcttcggcccactttgtgaagtattccactgcaactatgacatactttactcctccttttccttttggcaattcaccaatgaaatctatgccccaaactgcaaatggcaaaggactagtgatagagtttaattggctaggtggcctatttacataggtcgctattcacactggtacttgtcgtatttcttggcaaagctagttgcatctgcttgcaatgtcggccagtaatatcctcaccttataatttttaaagtaagggaattacctccggt

SEQ ID NO: 256042 - DNA, 3950 bp, Cannabis indica
gtgtcccttaaaccattgcatttactattttatttaggactccaaattgttcaacttctttaggagtaggtgaagtgatcatcccatggttagctcctataagatttgcaattggattctttatgagtgagcaatatgatagaatttgcagcctcttaatttttaggggggagacaaatataaaatatagctaactgttcaaatagaaccttctgatattacctgttaacttgtcactaattatcactgatatagattcaaaaaaaaaaaaacaaagcacgtggatagtatcatagtaatgcaaagaaactttctaagagatgacctggctggataacataatacgaaaatagttctggatttgggagataacaaaacctctttatcgccagaagatgaacagcatcaggtcctatattacaatcagttgcagttgatggtgagaacacctgaactagttttcttgatattacctaaaattatgtattagaaatcaaaattagcagttatctaagaaatatgataaaacagacttcagagcgagattagtataacttagttaaaaactttgtggtaaaagaactggttcaggagatcataattacaagtgcaaactaagaaaaaaacagcaaattataaattattatatttatatcaaaaagtagagataaaaatattgttaagaaaatgcatcacatgacatgtaagaacagtgaaaaacacattaacaatcagagattgagctttctttttttttttgaatttaagcgtttatatattacaatgcataacctggaattcgaacccaggacctccaacacacacgcactctcctatggccacttgagctagcctcaagtggtttcagagattgaactttcaacaacagcttatcacccttataagaggtcttaagataataactaactcaaacatcaaactagcaccaatcaaatagtgcttagtctgcatgcaatcacataaagtagattgtttaccttgtacttgtttcaaagtagttgcaatttatttttagaaattaatcgttcattatcttacccgcgtgcaaccaacttctgaacagcatcatcaattccactttcagggaccccaacctaaacaaacataacaaaaatattcaatgccggaaaattacctttaggtcatatccatgagctcaataaaagtacatagattaaaacaaaacaagattcatatttggtacctgccggcattttccaactccacttagtgttattttccaatcaagctccttatgacctatttcagcatctatttcatacagctcataaaattttccctgcatttgacagtatgattacatgcagtagcaaaacaaagaactaaaacatgacaattggctgcattgataaagtatgatttgtgccttggtttaataaatatgagtataaactcagccaataaacatatagcaatacttgcacgaaaaaagaaagcaggcttaactgaccactttaaagaaaagcatgacatccatatattgacatttgacattccaatattgtttttgtgatgcagacattttcttcaaagcgtcagcaggtatataaagtgtcgtactgtcataaagagggtcatcacgcttcctcccattagcgtctttgattcgagatggatcaagccactcaaacttgctggccgtttcagatatttccaaacgatttctattcaaacctgttgattcctctaaaagttttagttttttgctagaactcagcaatctgtcatgcttatccttggacgctggaacatcatcttgaattcgcttcaatcttggaataaaacgttgtgttcctggtgtttctggtccaagattattatcatcactttcaatattcacggtacaactttgattagctttcccattggatttcacaacacctatctctccagaaggctgagaagccaatccgggttcagacaattgcttgggtttaatagactgttcagaaactatagagttgtccacggagtttccatgtgagttgttcctgaaaatattacataaataaagttaaattcaaaatgaaaacccatataccgatagagtatgttacagaggcacatctacctaaccatcacacgagcatgtaaaaatgtcatttaccgagatcaatcataccaaacagaagaattctcgtgactaacatatatagtttggaaagggaaaaaacgattggttatccaataacgaatttgggctctgatgatttggtactcagttcccagactcaagagttttgtgcccatattattctgtattcaacataaatttcgttccgtaattctcattgctgtattgactataaacagaaagcaagaataaacaataacaaataggccaccaaaggtagaaaaaatcatagtaaaaccctaaagacatccattatccaataatctttaccttttggagagcttctcccgttcagtaggcttcacaaacttatgcataatactcgagaacaatgatgaatcggttttgctctcatttgcgacataactcgccgggaaaatctgacgaggcactttttccggcggagtgtcggttcctttgatttccaaagccgattccgtcaccggaacttgagagacaagctggctgccggagctagggtttaccggcgcgggtttctggaagaaggagaagatggtcttctgacgctgcatttttagagaagctgagaaatgaaacctgtggccaaggcggcaaaaaagtatttatttattttttttgatatattgacctgtggaattggcgccaaataatttggggttctccagcaattaaatgccgaaaataccccgagtgatcctccatcgcttcgtttctcgtaattttacactttcatttagcactctcagcggtacggttgtggttttttgagttttgttattggacactagtatttagtatttttagacatgttgatttacaattggttacattaaattatatacgactcaatacttaattggattaatagagatattcacatataggagtgtgttaagcactacaggtgcattttagcatttctatgtagtttttgatcatttttttaaatcaactcgcacatgcagtttttctaattttctaaaccgtacgcgcatcacaaaactaaaaaactgcagaaactgcaccgcaaaaaatagtgtagtgtagtacgattttgactatcaccaaacaattaaactatcataaatacaacaaaacttgagtaacgcttgtcaaaaataccataagacttgaaaataaatatgaaaagaaagtttcaagttttaacaatacaataattagtaggcttttggtgggccttcacatattagacctaaataaatataaaaattagtatttataatatgtggtgcagtacagtttgaaccgcatattaacaattcaaaaccgcaaatagcattgcaccgtgcagtttaagaaaaattcaaaccgcgaccacactacaatttccccaaagaattttaaaccatatttttttttacagtgcagatggtttgagcggtttgatgactaaccctacttccatttatacttttaaggttcgtgtggtaggtggtataaaggtcgtactgtatttaataataaataacaatatatttaaataaaataatgtattgtattaatgattataactaaaaattgtaatacaatgtaaatcccaatctccaatttgaattcaagaacccaaacacaaacccagaccatactagtctcaggaatctaaactcaaaagttttgagtaaaaataaataaaaccactttaacctaacgtaaatgcccaaagatatcgtggggtcttgtgcattgtaatgtatatataaatactttagactgattagtattttttttttcctaaactttgacatgtaccaaatcatgctccctgaacttt

SEQ ID NO: 256043 - DNA, 2709 bp, Cannabis indica
agacaacgaggagccttctttgccaccttgcccgtctttggatcgagcaatgatacgatctttacgactctcgccacttcctttacgtggtgtatgtgaaactccaactgctcattccagttacaaataagtctccaatttaagaaaaagaaaaatgaaaagcgatgatgatgagaacaatacacacctgagaaccaactaatattggagttgtcacatccaagacgagaatcttcacttctaaatgtttagcgacaaaaatgggaaaatcgggatgacatagcaccccaccagccatcacattgctcccgtcgatgccttgaagggtaactgaaacattatctccagctcttgcaatggtgcaagcctgagaatcacgctctaaggatcgcacggttcctatctctccagaaggcataaccagaacctgcacattcaagagaagtaaatgcatgtacacaacaagattcttgcatatgaaacatctaacaatttggttaacataagcataatctgagataagaacagagaccagatgatgtcaaaggttaaaggtcatgtgatgtttatttgattttattgacttttaccttaaagccgggacgaagagctccagcttccaatttaccacaggcagaaacctgcccaagtgaagccgacttgatgacatcgcatataggcatgagcagaggttttgagatctcttaagggaggttggaaagcatcaattgcatccagcaagttaggccctcgatacctgcatatcaaacacgagcaaaaacaaaattctcaaaaagctctttcatgaccataagaatactaacctcttctcaaatggtttatgcaatcaaatatttactaaatactcaccaggaagagaggcgtgcatcagatggagctgcaaccaaattttgattttccatgacactcaatggaatccaaaatacagaagaatccttaaaaccacaaacgcggagaaatgtcccgagttgttgcttaatgaactcaaaccgatcatttgagtatcctatgatatccatcttgttcacagcaacgataatttgctccacaccgaagcttctgatgagttgtgcatgctctcgtgtttgccccttcatggtgtccatgcctgcttcaaatgccccaagggaggcatctattacgagaatcgccgcatcagcttgtgtggctccagagatcatgttgggaacaaaatctttgtgcccgggagagtcaagcacaacaacgtgatacttcttcgaatcgaaatatgccacagccaccgtcatagtgattcccctctccctttcttcagcactttcatctaatgcccaagcataagcaaaggacccttttccctgattgaatgaaaaacacaaattaaatcatgaaagaacaaggttcgaatagctgaaatgcataataattatactcagtttacctgctgtttggcctctttttcatatttgtgcattagtttttgagaaatccgacctgaaaggtgcagcaatcgtccagagagagttgatttcccggaatcaacatgaccaacctacaagaacatgtcacaaaaaagtatacaactagatcacataaccaatccaaaaaaacaagttcacagaatatggatcacaaaaacatgaacaaaaagaagactcacaatggcaagattcaactgaatcagggtgtcttttgcttgatcaggaagcatccacttttcaggtttatattgtatctgtgactgagtctttttagatttaacattgtttgactttccagtcttaacctccaaagccatgttattaactttactggcaagactttctggcttgcccttattctctgaagaattaatgttctcatccatgttactctgtctgccttttggttctgaataagatgaactattaaccgattctgcataagcagtatcactggttttgtaactcgcctcccccacagatctgaggtgatctcttgcacgagaatcagatgagacatccgaaatgttagcacttcctcttattttaactgtctctgtcgttctaacacttgattgttcattacgagaagttgtatccttaatgacagctgaagaaagttctgatgtctttaaattatcaacattggctggaacataaaaaaataagaaaagttaaatttaaatttaaaacaccaaacaggaagagttgcaaagatagaatatgttggtgaacgccgacatttttgcaaggaaaataatctatggtcagagtcaaaattactttttcatattctcattactaacactaacaatgaacaaggaaaagactactttctctcacacaggctacaaattatatgtattacctgatgaaataatcaaatgtaacttacagagtaataaagcataactaaaggataacttgtaatattatgctccataaaaacttgacatgtctgttcaatgtaaaaatgaacttgcagcaaatcatacgaaaactgaaatttatttttcggaaaaggatggatacctttcaaacccattttggatgaacgcaatccaattgaaaccaaatcgtcaggagatgggctttcaaacttgaaaggagctgtatcaaaagtaaaagttcatttagaaatccaactatgtgaaataaacagttctcgcaaaacattagtaaaagaaagaaactgctcagacacgaaagatgccaactacaaaaaggg

SEQ ID NO: 256044 - DNA, 2786 bp, Cannabis indica
atcactttcatcctcaccatacgctctcttgattgcacagttgccagtcccatgctcttgtacctgaaaaccaacattcaagaaatcttcttttagttgtcggttcacacaacggaggagagccatcgataggcaatgtagaagaaaaagaaagcaaaccttgaggccagggcggctgatatggccttatcatgcattggtgatgggcgtggtttctggcgatagtaacgcaagaaatcccgggaaccaagtgttttgcttgaaactccattgctagatcttcttgttataaggagctcaggcccagcaagttccacagcattggtttcacctgacacaaccagttggttaccatcctcatccatatagctgtatcaaaatagataaaacaagcatcccgattagatacaatctaacaaatcacaaaaacataacgttcgacagatacataagcagaacttcggagttatgagaaaggaggagaaaaaaacctgctgctgtaatcatagaactcttctagctcgagttcctcatcatcaccgccgtcaccatagtgtactttgcaatggcttttcgcaatcatatgcttccgaactgcttccaagctgctaaagcggtggcatctatcattacagtacaaacacatgaaatcccttttgacctgaaaatataaaaaggaatcaaagtgagagaaatttcttaaagaaataatcggtataaaaggaaagaattttttttaggatggtaccattaggccaagataagtaagaaagcctttaggatccttcaagtactcaacatcaggaatgaagaatccatgatgtttgtgcatgtgaactatgcagctctctaggttatcatgctctaagtcacacataaagcaacaagacggatccaactcatcgaagtcttcatcatcatccttttcgtccatgtcttcatcaggaccatgctcatcaacatacaagccagtcaaagattttgcagcttcaccaatcaattcttcctcaggatcaacctcctcccactcaccttcactctcatcttcactttcttcattaggagcatcattttgcagaggagccttattcacaacacgacgtggcaacggcttgatgatcgccatgtcctcctcttgactattgaccccttgagaagaagccttcaggatgtgatttcgtgatttgagatgctcagcatgagccttggaacttctataccctttgccacaaagaccacagctgtagagcattgggggttcgcttaacttgtttttctcctgagccagagcagcttgtctagccataaataatacttctgtaaccccagggaccccagctatctgatacaggtttagtagccaaaaacataactagttataaacaacattatgtagttcattgtaaaaacaccacattgaaaagcaaccaaaaaaatcaaagcaaattaactcaattataataacatgggaatttccaaactcactcctagaataaacaaattactccaaattacgtaattggtttgtaattagagttcaaagttgaaacttctttttttatttattttggaggatgaacgaatttatattcattgatggtaattgccaagaaacacaagagatagccttcaaacaatttggtagctcaagttttagattttttaaataaaatattaatcaaacaaattataaatatttcaataactaatcctaagaaaatatattacgatacagtaagggtttcattttgttttatttggtttttccgtgctaatcataagtttggataatttcttagatatttcatgagattgcaatgtgtgatttgataacaattaaattcgataaatgatagatttttctattataatcacactcattttgtttataaagtgaaacgtagaatcttaatatacaagaatgaaaatggaactagaaaaggatgagaaccaaaatgtaaaactatgttcaaagccaaactctttctttacatggtaaaatccacaaaatccataatctgctaaaacaaaaattatgaaatgggcaaaagaaagaatctttaaactaaaaactaagttcaaaatttaatatgttttagatgtgagaatcaccaccagcatcggttcaaataggtacagggtatggtttcatgtaaataattattgacgaatcggaaacccaaataacaggaaagaaatgctaattctgtaagagtacaatttaaaaccctagaaaattaacaaaatttgatgaaaataaggaaaagggtaagtatgtatggtttaagggaaactctttgaacatacgaaccttgcgcttgagattgtagcggtgccattcagacttgtaatggaacttttgctcagaatcgtcgttgaattctttgttgcaagcgttacatgctaagcccgagattattatcagataagcttctctctgtgttttcttctgaagatagtgaagaaaatggagaaacttggcgtagggtttaggaggaagaagaagaagattagtaatatggaaaaatcaggtttctttgaggcagcttttctccgtattttttttttttttaattttttttttttaaaaaaatttataaaggagacacccttaaaatggatgggatggatgctctagctatttttcagcatattaaattgggcaatttaccgtaatatacacattacataacttgagaatttatgtaatccctcacttttgatttgaagtgtgagatccctcacataagataaattttatttattatagtttcaggttaattttt

SEQ ID NO: 256045 - DNA, 3280 bp, Cannabis indica
ataaaatagattacattgaaatggagttttatttagggcataaaacctaacaatatctccattattctttttagtttccattaagaaatctacatcatgattcacactacgaatcaaagatagcagaaaaatgacctcttgagctttccagggctaaaagtttcaagaaaggactaacattaggacatgggggaaagttctagcccacctccttgaccttgagaaaattctgctgaattgagaaatcttcatctctattctgggtgttttcctagaaattatctgagaaaatatccacctgattcgtattgatctcaaggtaggttttgtccttgtagcgagatttcttcatgcaaatagtttgagaagtttgctgtggatgagtcaccaggaaagtggaaataggttgttccaaatggaccaacatcttttttttttcttagctgatgggcctggcaaaggctaggttggaacgctagtgggcctgttatccttggttcgaatcttttttagggcctacttaaaattagggttcaaggaccccttgaaattttttgccaaatgagataccctagccatattctcttctgtacacatgtccacctccacacgtttacctttttttgaaaagtcaaaaaaccattctccacgatcatgcagctcgccatgcatcatcatagtggtagcattacttgcgtccttttgtaccattgtattatttttgtccattgtgccaactgtagggttattgcttaccgttgtcagggaccaccgaaactaccgtcctcaaaaatcaaagtctttggcggaagaactaaggttgttgcttctatgacctgtgacgttgccctggcctcagtcaaattcaaattcgccacttctctttccaagcttctaacattatcctcaacctccgaaatttggaaacaatgggtgagtcgagaaccccatcgcatccaaggcctatacatcgggactattctatcaaaatcatctattatcattctacgtcggagtctgcaactcctgtcttcatgtcctatgagggcacatttaaaaataggtcaatgacaagttttcatatttaaaataacaccaccattcgcactccttgttcaggttctgatgaaggcctactaggagggggtgccttacctaaatttcaatttaaaattggttatattccggggttgggaaactattcttccacattctttcaatgcttaaaacaacaccaatacgttcacccacaaattagcatttcgggtagagaagaagtaggtaggaatgtcgtacacgaggacctagataagagttgaatccatacttactgagcgtcaattatcatccgtcggtattggttttaccagaagcgacccatcacacacattccatcgttcattgttaacaacgtagtccgcttcaatctttttttaaaattgtgaaacgaacaagttcatatccttctttttgataaactaacttgaagaaagtctatattttctagtaagcaccgagcgaagaagcccatcaaagataatccctcgtgataaaattgtaccaaccacagtcttggcaatcacatttgcaccaagcgccgcttctagctgtaagtcaattgagaaatcaacctgttcataatcttccaaatcttgcacaatttggttagggtccatctttgctagaggaaaattgttcaaaaaacgagagagctaagcaacaataaggattgctaagggaatatctcaccctaaaccctaaaccctaaatcttaaaccctaaactaagaaaatgtcaaaatcaacaaatttgattgtatggagagaaaacctagagccatttttcctcgagagttactaactgcatatgaagtagttattcacttattcatccgctaaacaatttgattcaacaaattgctaagaaattccaagcaaaaaaaaaaacaacccaacaccaacatcaaccccctttgtatacatgagaagctacctacaagatcaaacaaacaaaaataacaataaattagaattatagtaaataaaatgagaatagatattgcgtacacaatataagattttgacttaattattgattcattttatgtatagatataggaagcttgctgtcaaatgtcaatgacgtcttaatgtttaaagggactatagtattgtattgtacattaattgtaatgtagggtcattgactcctagtctcatgaggctactatatcatttactcataaccatgtgaagaattcatgttccatttaagtttttgccttatattattgctaatatttatatataagaggatatatattttattatattaatgatacataatgatgtatttatatatatcaatatgcatgaaggtgatgttttatacagacacatatttagcaatttgataaaaaaaattaatacgtggcgtttggtaacacttttctttttaaattttttaatcacaaaaataaaggtaaaatttttatttttgaaaaacaaaaagttctataaccacttttacttttcaattttgaaaacaaaaaataagaatgtgtttcgtaaatttcattcgggactgggggtgggtccaagtccggggccagagtctaaaatattgatttaaaaaaaactgtttaaaaaatttttaaaagtgatttttttttgtttttaaaattcagattcttaattaaaaaattaaaacgtaaaaactaattttgaaaattattttcactttttctaaattaaaaaaaaaaactgattaaaaaattgttaccaaacacacccttaaattttaaagattgtttcataacacggagggtaatattttcgtttttttaatgaattttaacattttttacttttatttattttttatacaaaaatacagaatattatatttttttattttttttaaaaaaattaaaaaatcttacaaaaaagaattggtaaagatataaatttacttattttgataaattattatatgttgaatctccttaaacaattaagaccactatcattttaataattagagaaaattatatttattatgagattttaaaagttatttactttgatacttttaagtttgatcaatttataccgtatttttttagttttaagtatttttatagtatttgatacgccatatatatatatatgtaaattaggttttaaaagctcatatttaatgtttttatttgtttaggcagttttatttgtcactgatgctaaaaaaatcactagagtttgttgccggtgccgaaaaagtc

SEQ ID NO: 256046 - DNA, 5548 bp, Cannabis indica
gttggaggatgggagagtgtgggtttcagataccaatgagtatctcttgtaaatcagcttttcacacttagttcgtatcgttttggctcctgaggacaggcgggccaaacacagtttggaagagctgtgcaccatcaaaagtcaaagtgttcgcttggttacgagctttggaattcattagacgcttcacagaggtagccatgccaattgttctctcccggatgatgtgtatgctttaagagaaatggagagaacatctttcatatttttgaatggagtgtgattttgttacagaattgtgggttaaattgctcactgtatatatcacactccattcaaaaatatgaaagataatgaggaagcagcaaaatctgccatccttgctgttctttaggttgtgactggaaataaataatggaatcattgaagataatgaggaagcagcaacagggctttgggagaaagttatgttttgggtagcaacttgttttttttttttttaagcaaatagtgtttatcaagctacaggttttgagggcttatcttttcttgaccctagtagagggttggaactttcttgtattgagagggtttcatcttcatgtcatagtttgtactttttttgtttatgttgaaatttccaaattgctgattgtcacctcagtttttcttttccttcaccataactgagggtccctaataaatttgggaggaggtcactcatggaaatgtaacctttgtctccttttttggcacttccaaattttattaggttgattactaacattaaaataagtttttaggacttgaagtgaaataagtagtaaagaatatagaccacaactgaaaataaaccttcctttttacatcagcttatgtatgcgtgtatgtttgtattgcacgagcataagtgcgagttcccaaaatataatgtatttgtgttggcatatttgtgggatgtttattattattatttaacattattatttatgcatgtgtagatatgtgagtttctaaatggcacatgcagcttgggacctccatgtgctatgctgtcttttctttttcaaaatcgatacataaaagtagattctaaacacgattctcatgttcttcacttctttgttcttggcttttaatttgtttaacttctctctaatgtctttagcaaagagcttatgtatcagcaagtattgcgtcgttttgcccatttcaatgctatagagctaagtaatccagcatcactgaaggagttaactatgttggcactgaaagaggagaatttaaatccagaatgcgcggttaatgatgatttgaacgagaagattgccgaagtatgcgttctcttcagtcttcatctagtatatttgtgtttgtagaaaatctttcctgtttccggtccgctgttaaatccaattctctctatttcatatattgaccatattaatttcagtaatattatctgaactagcaaaataggtattagaattatgacattcataaagctaaaagctggaaaatacacaactctttatgaacaacttggagcttggcttgtgtcatattcttgggatgcaaaatattgtcgagaagatttgatgtttagaatatgatccataatcaacatgatgctcaaaaatttttaatgtacttagtaaaaacaacatgtatagtttgttggacatgcctcaataaacctttttctgctgggaatgttaattggtaagtgtgaccatagaggacaattcttggtcatttagaacttcttgcacgtcttagtatacactctcatagacatgtcacgtcggtatgtgagatgcatttgcagattctttactagcaaggacttctattatggatggcaaattattcttatgtgtttggttctaggggattaaggcaaggggactggtctttttccagaatcccaattgagaattgatagtgataccacctctccatgcttgcttttgttaaactctgtgccataatgaatcttctaaggaaacctccatagccattaatgcttcatttctcaatgccaaattttcatttcctaaacgtctttctcagtacactaacaataattattggaatgttatattttctagatgagtacagcgctattgaagcagaaacgtgaaatgctagaagaatatttttgcgttcatatagacatagatgggaatttgacgagacttccagttgtacttgaccagtacacacctgacatggatcgtgttcctgactttgtcctttgtttgggaaatgatgtaggctgtgctatgttttccttaatttcaggttttccctagcatgattttcatgtatttggtttttgagacaatttatcttgctctaggtggattgggagaatgaaaaaacgtgctttcaagcaatcgcagcagctcttggaaacttctatgctatgcatccaccgatgttgcccaacccaactggtgatggtttgaaattttatgaaaagaaaaggccttccgagaacactgaagacatagaaactccgtcaggtgagacaaatatactttttatacctgaattaattctattttaacatttataattatacttttaaggaaaatatgttaggatatcttatcacctctatgtgtttcatttataacttcctacggaaatgttgttatcctttattaactaatatttcaacatcttatcagctttattttttattttttattttatttgtaattgttttctttgtaaaaatgtataaaaaatactaatggatgatgattcagaggttcttttagctacagaaacataataagtaaagccgttgaagctcattagtttgtagttcttactggaatgctcattggtttgttgttataagaatttcataaattaaacgtacctgtaaaatatatgtttttaatttataataccaaaagaaagagacaaagctgccatagatctgaggtaagatccctgatcaagaaataaatgtttttagtagagctttggtgaggatgttagctgtttgtaaggcacttggaacaaatgcactaatgagattattcctatttctatcttctctattaagaaatgtcaatcgatttcagcatggcttttacaatcataaaggactaaatctttgcaatacttatagctgctaaattgctacaaaaacttctttgtgggttgtgtggaaattgggtttaacttaatggttgataaattggaatgcatcttctgagaaatgtggacttgattgatagttatgttgagtagagatattgcagtgtttcttcacttaattctgtatcaaaacttaaaagttcttccataaagctgcataaacatttgtgtatgggacataatattaaatattttgtggataatcaaatattttttttgttgcgcctcaaggcatgacgacagctgaggagtggtttctggttgtgttgttaggcatcattcgtatgtttaaatttctttttctgactgcttggttatctttctttcgcttgactacaatttaagattaatattagttgtcaaatgtcagcatgtagaagatattaatatcacttttatgtggggaatcatgcagcttcattttgcctctaactatatactataaattgattgttttcacaggggataatgccatcatgacaactgaaattgacaatgaattactttcagaggcagaaactgcatgggcccagcgtgagtggtcaatccagcatatcttgtttccagccataaaactctttcttaagcctccagcttccatggctaataatggaacatttgttcgggtaagtcttctataaaacacaactgtactgattactatcattgaggattttttatttatttaaaggaaaaaatggaaacgaaatctgtattaatgaatgggatgaaatgcaaagtaaagaaacatgttaatctcatagaaatgagaacatgaacctgagaaatgccaaaagacaaaaaaatagaaatcttagtatatgctgaagtgtaagtgactcacaatgagctctagcaaaagttgaactttgaggtcatgcatcagtaataatgtatttttgggtgttcatggaggagataaaaataattggtcactttaaggctctttttatatctacagggtaaatgacaacttcatatctatccttgctcagtcatatgtggccaaaactctgttttaattgcaaaatttattatccagttgttcaggttgaatcgctttttgttcatgaaattaaataaataataaacatcacataatataaagagctagctaacagctatggtttggtttggaatacaacattgtacatctaaacttattttgattggatactagattcatctttgtaattgcatttgcatttgcatctggtctagtctagtctccaaacattgagtattgattaaattcttaactgttccaagctgtactccgataattttgatgctgctgcttacgtttttggtctgtggtcgcaacaatgatactttttttttctcgattctgctgtgattgaaatattgtaagaacttccctttgtgcaggttgcttctttggagaaactctacaagatatttgaaagatgctaatatgaatacttagcatattgcatttgcattgtgattttcaaagctatgagtattttttttctggtaaggattcaaattcattcaataacaacaactcacaatgataactaactctgaatctataaattgctttgtcagtgcaaatggtgggttcaattctggtccaatgcatattatgccctgttggttggttttacgtatgtactatggtgcctctgtttatagccgcaactcctatctctatcccttggttgataaatcccatctcctccaatcatttctcttctctcagctaaacataaaagggccctttttttttcatgaatatggaatcattggtaagcttgcttagatatgctaagagcgcaagacgcataagcaaatgggaatagattttgtcctatttagcatgtattatgttcacttcactcctactactgttatattaatagttgggctgattgattaattttgagttattagatacgaaaatacatcaaaccaattttgaagtatactcttaatttattatgggtaaataggaatataaatacttaaactttagaatttataagtagtataaatttaatgatttttttttagcgttataaagtactcaatatttataaaattatatattttagtaagtatagattgctttttgaatttattaaaagaagatttagatgtaattgatattatatgtttcgtttagataatgatttaacatgggaaatttcattttttgcccttaataaaaccctcaatatcaaaatttagaacctccactaatttgtacaaattaattccattgattacatgaacttcccattttacccttttattaaaaaaattgttaaaaactacaaaaacttccctctctcttcctctctctcttgcctctcgtgcacctctctctctctctctaagaaaaatt

SEQ ID NO: 256047 - DNA, 3853 bp, Cannabis indica
atgacttgacaccaatatgaatgtataaccattagcaccgagttgatgagcccaatcctcccaacaaaagaaagatttttagtactccaagttttgattctagatatcatattctgaactaataccttgcagtcatttgaggagattcgcttcgggcatatgggcactccaaggtatttgaaaggcagttgtctctggaatccagaaacatcaatgattctttgaatctctgtatccgacatgttactacaatagactaccaatttggagggattaggaaacaatcctaaggtgtgtgagaagagttttaatccttgcaacatataatagatactcttggaatctccattggaaaataatagtacatcatcagcgaaacttagatgattcagctcaaggtccctacatctctcatgatacatgaaatcatgcttcttacatatcttcttcattatccgagacatatactccattcccagaacaaagagaagaggggacattgggtcatcttgtctcagtcctctcttagcctcaaagtacccatgtaaggacccattgatcatcaatgagaagcgaggagttctaacacaagtcatgatcaagctaatgaacttgggagggaacttgaaagcatgtagcatctcttctataaaatcccattcaagggtgtcataagccttttggagatccaactttatcatgcaattttccttctttgatttcctcccataatgcctgataagatcctggcaaatcataatattataacctatgaatctgccatgaataaaccccccttagttctgtgccaccagctctagtaataccatcttcagtcttgagcaaatgaatttagtagcagccttgtaaatcacattgcagcaagctataggtctgtaatcgctcaccgagttagcacacttgattttaggaacaagagtcaacaccgtagagttaagatcctttaataacttcccagactgcaaaaaggaaataatagcctcagctatgtccttcccaattacctctcagttatcctggaaaaagaagctcccataactgtcaggccctggcgctttgttccctgctattccaaatatttcttttttaacatcatcaatagagtaatcagcaataagcaactcagcttgagctctagagacaaccacaccttggctaataacattagcaagaactgactttctttgagctaacttacttcccagcaacttttgataaaatcccaagaaggcatcaataagttgttctgctatatccactcttataccctccatatttgttatagagagtactctattttgcatcctcctcgctttgagataagagtaaaagaaacccgagttggtgtccccctctttcagccatgtcaagttgcttttctgctgcaaaaaagtatgctgattgtctagagcttcaacataaataccccttgctaacttttcttgttgctgcagatcacaattcatggggtcacgctgcaatctatcttaacagaaagtcagctgatcccttgcttgcaagacagtagcattaacatcagcaaaagagtttttatttaaagctctaaatgcatgtttcaagttcttgagtttagtgactattcgaaaaaattgtgtaccaggcacctgttgagaccaaattccagccacaatctcagtgtatttgggatgcttggaccacatcctaaaataacgaaaaggtctcttgaaaccagtaggcatattgtagatagctaggatagctggagagtgataaaaaatgccttccttctgaaagaaaacttcagctgttgggaaacaatccaaccacacctgatttgccattactctatcgatcttagagtaaattctatcctcgtcttgttgtttattgctccatgtgaaaaaattctgtaaattttacatcttctaattgacaaacttctacacaatcattaaaattagttgccactttgtatctaactcgagccccaattctcccatccttgttaagaatttcattaaagtccccaagtactaaccaagcttcttttacagctaacttttttaagtcaagccaaagctctcttcttccttcatctgtattgaaaccatagataaaagtaacaaaaaactttgctttcctatctatagtttcaacaaaaagatgaatcaattggcttgaaacttgcaaaatattaactgtaaaactccccagattccaactaacaattattctcttcctttgtgccaagcactattggaagtaaaacaccatccagattatatacgtaagtataaggctccaaggttctgagccttaactcttgtatcgaggagaccaaccaacccaattctttgtgtttcaatcaattgcttgactgaattttgtttttgttggttgttgatccctcggacattccaactcattattttatccatctctaagagagggtactccccccctcctttgttatcttcctcacttccttgctcattcaccttgtcacacaccctactctccatttcttgcaaaatctggaatgagttactggtgcctgctgctgcctctttctctgtttctttcggtttccagccccttgttacaagctgaaatccctcaacatccactttaacctcttctttgtcttgtttctttggtgccttaactatccattcttgtttcctctttactttcttcctacagtccaccgcaagatgtcccataccagaacaatgactacaaacaagaggcttccactcatatgtgactgccacagttgtattacatcctttttcatcttcaaactcaatgagtttaggatactcttgatgtagtgaaacctcaataagaactcgaggaaaactcagcttatctcttctcttggtagcctcatctaccttgatcggttttccaatttgcccaataatcttgaacaaagatctttccccccggtactttagttccaaatcatccaaatgcacccaaataggcaccattcgaatgtcctctctcttgaaatttacctccggatcccatggcttcatgacaaccggcctcttgttgaaaaaaatgtaccccctttgagaatatcatctctatcatccattgtattaaacttgatcaagaaaatcccatacaaaagcatcccaactctttccactttatccctccacatcctcctagcaaagccttccaagacttgcaaaggaggattagccccaagaacataacatacaattgagggcttccaaaattcaacttcgtcattaatatcatcatctataatttttactttagtttttaaattctcattagcaaaggatttttcaaggtttttcttaatactaccatatcgcagatcagtagggatagtattgttaccttgaacagagttgcaacccgcacaattagatcccagcagcaatctaaaatccttttggatgtcctcctgttgcttgatcgaacgaagcgaagacctaggcgtcaaaggctcctggaaaagatcctaaatttctagaagctgaacaacttgctctgctccaaaatcccctatttcctcaatttcctcatcatccgagaataccaccggctctactccgagaatagcatccaatgtcttgatcttcttgacattggcacttgagtctggtcccttcttcttcttaatcgctgtagcatgcttcccctgccccttagatctcgtcttggccatagccccagctcgagagctgaacgaagatgaagagagagaaaaagcttcttgataaaaataaatattaaaaaggaaaagaaagaataaatttatgttaaaataacaaaagagaaagaaaataaaaaagaaacaaaaaaa

SEQ ID NO: 256048 - DNA, 1373 bp, Cannabis indica
actactactgatatgtctggtaaagttttctgctcttttagatatgttcctcaacgaatttgtaaaagcctctttttctctttatgggtatattctatgtagtgtaacaacttccttgatatgttgacctttcccacttgggtttacagtgtaaaaaaaagctaaaaactagctgagtgaataaaactttctgtttctggtaaacacaaacagttgcttaatttaagctctagagtctttaattttcttgttggatataagtttttttcttatttttgggatgtaaacagagcgaactaggcaggttgttacgggtactggaatccacccgaattttctcccctgcccattaggggttcttgagttaaattgatttcttgtttgaaatatagacattgatgtcacaatcaagtatattgtcttgttatgtaatttgcctttagtttcctcaaattgttttgtttgttttgctaggcttgaaaaattctcctgaagtggaattcgttttcattgccttattcatgtgctttttttttttcctacatactttcatcttggcataaaatacaggaaaatggaaaacaaacatacataactgtcaatttttggttatgaatgtcaatttcacatgtcttaaaagagagagaaataaaataagacagctaaacatattcccttatgataaaagatagaagggaactaaagcttttatctctttgttaattaataaagattcttattcatctggctatgtatctacacaatcaggttttgtttattggtaaacacaacatgtgccatagttttaaataattgaatcccaagttttttcttttcacatgtataaataaaactgagtacattattaaagaacaaaagccagaattcagtacattatagaaccgagttctttaatggctggctgatacagaaaaataattgtccaaaaacaataattatgcattacgacaatttatctgtaataattataatcataaaaatctgtaataataatgataaaagagcctcgtatcataggcaaagccacttagagcttttcgaatgctaaattttgttgagttacttgtgagagtaaattggacccaaaccaacataatttgtggctgtgcagtagcaccggttgctggtcaatttttttttttcctcttttttaattggctaacataattaaaaaaacataacaatggatccagcaaataactaccatcattgcttttattggtcttgctcttagagcctgataaccaaaaccaagaatagttagttaagttgttttggtttgttatttttctgttaaaaacagtttcctaattaattcttgtaacggttttgcttttgtaattcttagctct

SEQ ID NO: 256049 - DNA, 3483 bp, Cannabis indica
ctctttttttatatatggagctaagacgggttaagtctgcgtttagggttcaccagttcatagacttaagaaaaccatctttcaaaaatacacatatttttttcaataattttaaaaataccacatattttattaataagatgaaattataaaatttatggtttttatatttttgtgcaaaaatatgggtttttttttttttttctaaaaagcatattttatggaaaaattaaagaaaaatataggaaaatcaggtaagagtaaccatgttctgtacccttatggtaaatagagaggtaaccatgtaacttatgctatttttctatattttaaaacttttttctaaatttttcccataatttttatttttttttttgtaaaaacaaaatatatttttacaaacttatactttaaaaaccataaaaataaaaattggataattacataaggcacaattttttttaaaaaaattacaattttaattaagaatttttttttacatttttacggtttttttatagaaacaacatgaaatcaacaataaaactacataaaagtaacatgaaaataacaacaaaaaataacatacatataacaaaaaatcaacatacatataataaaaatcaacaacaaatcaacaagataacaacaaaaaaatactgtattttctgtaaataaaaattatatttttgtaattgttttgttgtttttgtgtatttgtgaaattatcccctcttttttttacaaattgtgagattttttttttaaaaggatcctactttgttggcccaattagagaggagtcacttatggggaagcattcaaaatggggcaagaagttaaaggcccaaatacagcatataaaaggagaagcccaacagaataaagtagaacattttccattttgatttgcgtagtccgaatcggagctccaagaaagagacaacaaaaatggcagctccttcatcttcatcactgctatccaaggcgggaccggctctgcgccgtcaagtactcaatttgacagacgccgccgccgatagaatacgccagctcctccagcagcgccagcgctcttttcttcgtctcggcgtcaaggctcgcggttgcaatggcttgtcctacaccctcaattacgctggttagcttttccctattattcttatcctactattctcgtgataatatgatgcaattggaatttaagttatcttgatcagtttaataaaagaaacattttttttgcatctggaaatagaggaagatagaaattacatgatgttttttgaaacatatctcaggttttagagatcagggttgaaagaatagtatttattaatttattttgttgagaatattggaatagtgtgttatttacaaattacaattatgtctatggataatttgctatcaaattagaagccaacttttcaattttcaattctggtttctttattgtgaagctagtaaactaacatggctttataagggtgtttgtacaagtcatttgtgatgaaagggaattgtacgaattaccttatattatttgaaacttcttcctctaattatgtcgtatgttttttgtgattcaattttgtttctgtgtggatagtgttatcttttacacattttgcttttagaattttgtttcttggtggattgtagcttttagaatttttaatctgtgatacatttatggaaaaaagtacacttcttgtgcttaaacttacagttctagtttgattgccgttcctttatatatgatgtagatgaaaaagggaaattcgatgagttggttgaagataagggtgtgaaaatattgattgaacctaaggctctgatgcatgttgttggaacaaaaatggattttgttgacgataaactaaggtacaaattatatagatttacatttatatgtattattaccattctggtacagattgaataacggtgatcatgattctgtaaacaagcaaaacatatggttgtacagacaaacatatagtatccactttaatatataccatttggtttagaatagttttttaattttacaattttctaatccgatcctaaaatatcatgcagatctgagttcatttttattaacccgaattctaaagggcagtgtggttgtggagaatcttttatgacaacaagcaacgcagaaacttcaaagcgtggtagcagttgagcaatgtaacaagttcacatctgggagttatagcttctaggttacttggaaattaaaggacactgcaacaagtggaaaatattgaataaggatatctgagtgatatgtatcaatgtgacaagtccaagcattatctatgtatcaaaagtttatctactaaccagatagaatggttcattttgttatacaaaaatatcattatgttgcacaaagtttcgttttgttttgatggcacttgagagtgtaaatgtaacaacatttttacccagaacagctctaatatttatttgttgtaaatattaacatatactctcatatattaataaaactgtcgtgcttgtttttggtgccatagggcaaaagtaaacattccaaaatgcttattacaattattgtgctgatgcatggtcaggtctgtctggttttaaattttctagtttgtaaataatggaccccttttaaccgaacagagaaacctgctgcctctggtatgtgagctgttagtatataaaaattcattttaaatctttaatcactcgagacgagcttagtgtttgttacctcatgcattaggccaagtcttatttaaataatgaggcttagtgcaaacaatcaataataaactataagtgaagaaaaaatgtatccataatcagaagcaaaatgttaatttggattagattctccaactacccaagtgttccaagtatacaattatacatcattaggtgcaaaaatgcaacagaagtatatattatgataatgtgaatgagtgggcaaagaaagccacttttttaactagtccccatgaaaatgtcatccagctaagttttcagtaaagcacaaagagttacatatacagacctcctaggaggagacaaccggtttttcgaccattcttcaagagactaacggtggagagcattcatgcgaatataaggacgtttttctttgattaatttttcagcaattttctaatcttcaaccacatcaagggccacaaccaaaaaattatcgtttagtcactacctaaagttggtgaaagttgtccaaaactacttagcttcagttttaacttttaatagtaagtaaaaaataaaatttgtgaaatttaaatctagaccatttttgatatgcggtataaagatcatattgtattaaatagaaaataatcttatatttgaataaaataatgtattgttattaattattatgattaatttttttaatacaatggaagctttattattttatacgtaataaatgatctgtattaacttgtattataa

SEQ ID NO: 256050 - DNA, 2667 bp, Cannabis indica
ctgataaaataattccaacattctcaccttccaaagtttcttccaaatttctttctctggttgtatcgaagacttttgcatccaccaataagcactcttgacagagaaacgcccattcatacatgtacttaaaccaaaataattaatatacaaacggtgtagaaaacgttattattttatattaatttagattacaatatttatataaataaattattaataacgtgcatcaatgtaaatttttctaaattaattgttacaattttttttagtaggttttatcttttgcttaataattaattttaattattattattacaaaaatattataattaataggaaataaaaaaatagactacaaaactgaaatattaattaataattctaattaatataataattaacataaaatacataaataaataaacttaaattaatgagaacaaataattaagaaagtaaaaactttaggatgacacttcagcaggtttgtgattagcattatatagatatatatagattttaggacaattcatttatcctaaaaaaaaaaacaaaagcgtttaaaatggtaagccattaggctttgagaattactcggaaacatagcattttcacacctcttaaaccatcccactcttccttaccattttcccttgcgggtccctttcttctcagaggccccccaatatttttaccttccaatcaccaccaccattttgcagctttcttgcttcttcttcttcttctaaccggccagccaccgtccctccttcttcccccctctttctctcttatcatcaatctctgaaatttgttgactatttatttctcttttgattctatttttctttggaagcacattttataaaatcattctaaattaaagaaagatacccaataaagaactcaacgaaaatgtatcggaacgagtgaaataaaaagaattatagcgagaaaagacagagatggagatcgagattgggagaggggggagagaaataggtgagttaagtatgtaaaaggaaaatacacacaaaaatatcaccggggcttaccaagaccagtgagccttaaagggatattttagaagaagaagaggaagaagaatagtgtgaagcgtgtgagacatagataataaaaagattaggcaagttttgggatttgggtatcgattatttgtcgggttttttttttttttctggtatttctttcttgtaatgaccccttacaacaacggcagtgcacagagcgaaggtgggtcatcaggttcaagcggaggaaagtgtgtgagtgggccagacggggccattttgaagaaaggaccatggacagcggcggaggatcatgttctaatggagtatgtaaagaaacacggcgaagggaactggaattcagttcagaagtattctgggctcaatcgttgtggcaagagttgtcgtctcaggtgggccaaccatcttcgaccaaacttgaagaagggttcctttacccctgaggaggagagactcattcttgaacttcacgccaagtatggcaacaaatgggctcgcatggccgcccaagtatgtacactatttatacattagtaatgttttgtttgatgtcgtttcgttgttcttatattgagaacgacaattgcactttgttctttgttcttccagttgcctggacgaacggacaacgaaatcaagaactattggaacacaagggtgaagaggcgcaaacgacaagggttacctctatatccacacgacattcaacacctctctccaacgagctcactcaccccaataatccaatctccaacgacaccaacgacaccatcgtttcccttccagagccaaggccatgtcccattctcgcccactccgccatcccattctcctatgtcttctccaatccaacctttccctagtttgacctctccttcctcttttgaacacaacaactcttctttcaccttctcaaacccttcatccttcactttccaaagacctgttcccgttctcggtgcccctgttcgtttcaagtcgtttcgcgactcaaatgggttttctctccaaacccaacaacaaagtccttgtccaccttctcttgaccagtacacgccgaaccagttgagcgattctggttgttttcagtttccgttgaattttgacccaactttacctcaaaatattggaacccatttcgattctgagcttatgaattcctctggttcaatccgctcggtgaagtcggagctcccttcaagccaatttacccaaattcattcggaaattacgtgtaataataataacagcaacagcaacaataacaatactaataataatattaataattgtaactccaaggttgtaagctcagcaacaacccagagaaatggtgggttgctggaggaccttttagagaatctgttggaggaagcccagaggtctgttgagagctcctcaggtgaatcttagtatgtgtgattatgtatttttcaaaataagttaaacttgtgtctacaaatagttaaagcttagcttagttattgttgattgtttcactacgcctgtgaatttcaactgctacataccatatttcttatgatggatttcagggaactacccgcattaactctgttttcaagcatgtagaatacatagcatagcatagcat

SEQ ID NO: 256051 - DNA, 1515 bp, Cannabis indica
attgaattggattggatctattgtgcggattggattggattagatctggattggatgttatttgaccaaaaaaatggggattggatcggatgaacagtcttacatagtgtaaaaataaagtttgtagtggtgattaatcgaacataactacttttgtatatgtatatagtatgagagaattaagattttgtaggattttttataagaaactaatttactcatcacgtgggcaaaacgaatgggtaccgaataaactccatgtgagtaatatattaatgatgcaaacatttctctagatagagagagatagagtaatataactatatagtagagataattatttgtgaaaagtccaatgtttggtccactgcattgtaaaagctagctagaccgttccttccctttaaattagctttatacgagtggatcacataaatgcatacatgcataattcaaacccaagatcgatcaaaagcatcattattagcttctaacgctagcgtcttagtgtcacctatatatatagctaaattattaatatatgtatattcatcatttagttaaaataataaagggaaatatacataattcaattatatatagatgtagacattgcaagctgcactggatatcattatatggttatataattttggaattctcgtatatatatatacgcataatgcattacacattccacacgtagtacatatatgaattatataaagatataacatttttatgggtgtttatcatcaagtggtgctaccactaacaactgtggtccaatgtcatatttttggctccttctttttgttacatccaaatcaagggatcttaaaagaaaagcgccctttaagtcgtatatttggttattgttaattaacaatattcaattgcctatttttcttccttaaattacattatttgtatttattcccataacctatgtatatatgttgcaatattttagtatattaattatttccgttcttgaaattcatttaattacttgctatctgcctaaaaggtttagtacgtataatatattttaatacgtgtttttttttttttttttttgtatccagtatatatataatgcttgttttatatataagtgaaaagtgctttttttttcttcaaaaaaaaaaaactgtttctaatttcgtcaattaaattgtagagatatattaattactagctagctactgaaaaaaaaaaataacgagtcacttattggtttcttcttcttttttgttgtatcaattagactgctttggagggaaacttaaagatcttgattattaaagtttaagctataaggcttttatacattcaataatactaaaaatttcattatgaagaaggaatgttttaaaaaaaagtgcattaattagggaaactttttagttcatacattaaactactcatatatgttcttttaattaagtttgtttatgggaatttatatataatatagattgactggtatatatgtaataataaaaaaataaa

SEQ ID NO: 256052 - DNA, 2153 bp, Cannabis indica
tttttttttttttgatttttttccctttccctatttgctggtgtgcagaaacttttgtgtgcgtgtgtgcgcgtgtgcgtgtggctttttccatttatgctgtgccattagggtttttagtttacttatttgtttgggcgtgcagtcatcattatggtaagaaagaggagaactgatcatcctggtgggggtgagagctctgaacctcaggaatctggtggtggtagtgctggtggtcgtggctctcaacgccctgctgaaaggagtggtgctcaaatgcagcatggtggtggtagtggtggagggtaccaaggtggtaggggttgggccccacagggaggccgtggaggctatggcggtggtggtggcggacgtggacgtggacagcctcaacagcaacagtatggtgggcctcaagagtatcaaggaaggggaaggggcgggccaccccatcagggtggtcgtggagggtatggacgtggccctggtggtatgggcggtcaccgtgggggaggacctacaggtggaccgtccaggtcacaagatcccgagctgcaccaagcaaccccaccacaatatcgagctggggtctatcatcagcctctttcgtcagaggtgagttcttcctctgtgccacccgagccttcacaattggcacagcagattgagcagattgacctacagaaagatgctcctactggccaagaaatacaagctgcgccaccctcaagtaagtcaatgaggtttcctcttcgcccaggcaagggtagctctggcataagatgcattgtcaaggcaaatcacttctttgcggaactcccagataaggatttgcaccagtatgacgtgagttctcctgctctttaatttgtctatttgtttaatttatgttcatgttggtcatacttgttttgacatatgttaggtcacaattacacctgaggttacttcacgaggtgtcaatcggctgttatggcacagttggtgagattgtacaaggaatctcatcttggaaggcggctccctgcctatgatggacgaaagagtctatatactgctggaccgcttccttttgtttctaaggattttaaaataactcttattgatgaggatgatggaactggtgcacaaaggttagacaccattattttctttgtcctgaaattccttgtttcaaatgcgccattcctttcttatcatttgtttttgttttgttcctcttttttggttgtgtacgtaattgttattcttttcatgcaggagagagagggagttcaaagttgttatcaaattggctgcacgggctgacctgcaccatttaggactttttttgcagggaagacaagctgatgcaccacaggaagcacttcaagtccttgatattgttctgcgtgagttgcctacaactaggtatgccaacaaatattcattggtaaatatttgttttcaccagcataaatttttcttagctcttttgtgaaccattattctgctgtattgtaggtattgtcctgtgggtcgatcattttattctcctgatcttggtagaagacagccacttggtgagggtttggaaagttggcgtggattctatcagagtattcgccctactcagatggggctttctcttaatattggtactgatttaatctatataatttcttagttatctcttcatacatgtgcttctaggttctgctatacttccttacatgtttatttgttattttgccaatatccagacatgtcctccactgcattcatcgagccattgcctgtaattgagtttgtaactcagcttcttaatcgggatgtttctgccagaccgctatctgattctgatcgtgtgaaggttagatactcattctgtattggtttttgtattattagtatctctgtaatctgtatttctagtctctttcaatgctaagtttgtacaagtgccaggtcttttgaatatctctatttttactaatcctaggtttgttttttttattaatttatatatatgtatattttacatcttttggaagaacttccctcctttgcatttgacatataataatatttgttttatacttaatgtgtaaacagattaaaaaagctttgcgtggagtcaaggttgaagttacccatcgtggaaatatgcgtag

SEQ ID NO: 256053 - DNA, 5765 bp, Cannabis indica
ataataataataataatacgcaaatttgttctccctaaaatttgataactatcaagtaatgtccccaaatttttcggtcgttaaaagtttttctcgaccaattgaaatctttcgataaagaacttttgttcaattttactaatggatgcttaacgtggacagaaattcgagacacacgattagatacatatcaaagttcaaagacacgatttagtatgtatcaaactttaggagacacaatttggtacatagacaattgtcacattagtgacttgttagtaaaattgacgaaattggatgaaagtccataaatctaacaattttaatagttttggagaatttttatggcttgaaaagttaggatatacgatttggtatatgtgaaagttcggagaaaaaaaatcctaattaaatgtaataatattataaggtaccttgacaactgttccatccaaggaagtagaagcagcatatatatgttcaccatatatttgcaaggcatgaacagggcttgctttgccaagcaatttcctagaaccaatttgaatggtaccgactgtttctgtggccaaatcaatctcctgaaaaagtttgcaaaattttttggttatcagaatgggaaagaaacaagtctagttggattggaaccaagctcaaactaataattaaaaacacaaaagaagcatacttgaatgctattatcttggcatccacagtataattttccctgcactaaagccaagcacttcacatgtttgcttccattcaacaatttggacgatccattcccggaatgaacctaagttaaacaaacacaagcaaagtatataagttcatttcccatacattggattattgagtttgtcaaatcataaacaaacttgattcagcttatatgtattgtttcaaaactgaaccctgtgttgttaagtaccttgacaccagaaccatgtggaataaagcaataaactgtattggaaatgactaaactgagaacttgatccttcatatcatgtacttgtatacaatgtattgctttgtcggaaatagaccagacctgttctccagaaaagaagggaatgattcagtatgaaaaaggaggtatggctttacatggtattggagaaagtattagaaatcatacccttgaagtcctatcaagtgaaccactgtacagtttctctgctgctggcaaaatagttaggcttgtaaccgcctttgtatgttctcgaatttcctggatcagatgaagaatgctacctttaccggtccacaccttcagaattgagtaacaggtaatatcatcagactccatacaatacacatctaattagagctttacaattaagattaagataatgaaacatataagatacctttattgtgccatctgaatggcctgaaaagattttgtctttgaaagaaactaaagatagaacctctccattctcgctgcaatctacttgaactaattgtttatgactccacaagtcctgtggtcatgcacaaacagtgtttagtcaaagcactatcatcttttccatgcaagatacagaagaaacatataacagaacagaacttacagcacttgagtcttggccttcaaacaccattttcagcatttcaagtgctaagggagtggatttcctcagcactctcagacctttaaatatgtcttttaaataggaagttaactcatgtagcccctctgaaattcacaataaacagtagctaagtaactggaatctcagaattaagtcctactttaatgccccaagaagatataaaatgagtaaaagatgtccaaatccgccacctaaaatgatcctcacagagaaagacaaactcaatctggctgacactttctgaatctgtctagataattctaagactacttcttctaatgattttcactcaccaggttcctggatgaagctgctgagtgcaagcaaagaaaggattttctcttcagtatttctggaggacttgaatatggaagcgaaccgtttcagcaagcagactcgtgctgctcctcgtactcctgtatctggaagagttttgagcatgtctacaagccatgtagctgatatgaagcatgttgaacatagttctgaatctgtgcttcttaagccttcagataaagcctcaaagagtagaccaaactcatggctcaccagaacagaagccattttcctttcccaattttcagctgccttttcttcttccttctataaaaaattgaaacaatgaaattagataagaaaaaggatgaaatgaaaattaagaaaaggacgaataatgcaaaacacagtattttaggatgctcacaaggctctcttcagcttctgctgagaaactgcttagttggtcgattctcacaagattattatagcttttgtctaggccagcgcgtttgagaagggtagctcttgtaagagacttccctgaagtggtgaaactcccttgtagtgacataattgtttcagcagcagctaattggacaccagggaattctgtatttctgaggcaagatatgagagtatctatcgcctcttcgcggtaaatgctcatctttcttggctccgtctacagacaaaaagacaacaatgtcaattgaggatcaccagtaggataacacagattaatagtaaagcagaaagtagaagaatttcaaaccagaaggtctagctggagaaggagaccagcaactgttggacattgatcatcaggagctgtctgaagataaacaagaagggcatgcattgtactgagaggcccttcatcctttataatgtgaaggatttggtcattgaatgttcttctgaatcaaagaaaaatcaaaagtttaccaggcatgctcaactcaactccaaaagattcatggaagagatctttaagatttaagagatgttacctgtttaatttgactaattctgataaaaagttaatcatctcgaaccgttctccatcatttggacccattaagctttccaaaacaggagccaactcagccttatcagcaataatgttcctgcacttcccatctacctgcatacacttgacaagaattccaacagtagcaatcctctcttccgaggattcggccccaaacaatcaacaacactttcaatctcctttccagaaaccatggaattaacaacagaagcagctgtggtctcatcacagctctcaaaaacctgtcccaacaaaatcactgcagctgtttttggcttcacacacatattaaacaaatccctctctttattatttatggccattaagagtgagtccaccaagtccaactttgtcaagtcaagaattgatgttcttagcaaatatattaacacaatagcttcagtcaacccctttctaagcagagcagcaatgcattccacatcagaatcaacctgagtaagcgtctggatcacagctttgtctcttgatcccaactcagacagaagaaaaattgttgctctaagtaccttagaatcaacagaattgaaaagtatctcaacaaatccatttacaacaggaggctttgatagcataatctgaatatcatgttccatatttgcttcctgccagaaccgctcgattcgaagcactgcagtctcagactccttgagaatctcagaggtgcagagattggaaatggcatgtctcagctcactaacagtcccttcaatggtggcttggcttatgacactgttgggagaattcgaaggcatcatatctgagttggaattcacaacttggtcaactcctatgcataaattttcagaatggtttactgcagccactgaatcaggattgagctcttgccagctcccaatgagcctttttaagacatagtttgttttaggcaactgtgtgttttgcagctcctggcgcgtaattgggcaggtgtcgtttcctctatcgagccattcttgaatagctcggcgctcgtaagtctgaccagtctcaagggtcaccggatcattgaagacattgctagttatgggacacacaaagtcctttggaggtgtttgttttcctataacattatctggagaactgatcgtaaaaaggacaattaaaaaagtccaagtgttattacaatgttacatatttgtcttgtctggtgtttaattatttaatatatacatataaatatatgttattgcgtaccaacttgattctgccaaaccaggttgctctggtttctgggtttgactctgtctggactcaaacaaggccatgtttctgtttctttcctaaaaaggcgcaacaaacacaagaaaaactattattattatattacaagaagtaattaacataggtaaatcagaccaaagttgaaagctttttttttcgttggtatccattattattattattattaccacctcagtctctgcttcagattcttcggaagaagattctacccgaatatcgtccaatgaagactcaagttcggagtaggagtttgttttgggtaacgttgaaaatttccaagagatttttgatctgaaaatatttgaggagagactctttgagggtaaaatggtaaagtcttggacttggacttgctgctactagtttggttgaatagttcagtagacctttccccttcggtccatattggctgcaattgtttaagcaaaaaagaaaagaaaatattacatttctgccgaacttgaacaaggaactgttaaaattcaacttttagaaataaaagaaattgagatttttgcataattaatgaaatttgtaataatatggaaaacacgtgtcaaattgaatcatttgaagttcattgaggatctcctagtcaaatcaagtcaagccaagcaagcaacatattaaatagggtaaagcatttttattagtggaagttgaaataagtaatatacataaatttcagatgtgataatcatgaattacaaatctaaacatgtagcttacttttgcaaatatggacgactaaaaaaattcttcaattgaaggacttagaaattgattggttaacaatatatatattatataatactgtttcagcatatggcatggtataattttattcttgtttaggtagtatcaatattgtgaaactgtcagaaaaaaaaatactaatttgctagctggtccggaccatacaatttgacgaagaaggatataatattatatatgtatatttataaatgtactgcttaaaacattatttcaatcttatctgggtactaacttgttggaggaaaagaaaataaaacaaaacttaaaaagcattttgttacaacgtgacgtggtcggctgaaaataaggacaaggaagtaagaattagcaaattgaggatcaggacagaaaaatatatattaaatttacaaaactgataaaaattaaatcaataatttaaaagggtaaagagtttttaagcaattaagccagatctaacggcaaacggacaaaacaaggtataaaattccaattctaaatccatactcctgcaaagaaaaatcataatatatgaaaaatagaccaattctcataaccgagggcacaagatgaaaattattacaatattaaaataataatttagtttagtttgaatatagtacagtagcatcataaagtcaccttaggaaacagctaaattaataacactattatacaatagtttaaaatgtaataaaataaccataatttctaatctcaattactttactgaaaaataaaaaactgtcaacaaaaccatgtttttttttttttaaaaaaaaaaactaacc

SEQ ID NO: 256054 - DNA, 2637 bp, Cannabis indica
aaatatcaaatcccataatttaatataataactttcaagtaactaatcacaaaacaccatatctactcataaatactaatgccaaaaaagtaatgctcatgctcatatcatatgaatacgagagttcaaaattaccatttaataccacgtgtcaacttattacaatgtgaaacaggttgaggaaagattattagccacagcagatttttaatcagtcaataaaaaaaaagccagacgactcacagtctccatattttcatcttcatctttctccaatggcggcaattactccattactcttcttcttcctcactttgctattctctttcaaattttcaactactgaatcccacaatcccaatacagtagccattctcgatgtctcagcttcactccagctcacgcataccgtcctttccttcaacctccaaaccctaaaccccaccaccaccaccactactgtccaacaaattataccctcaaattttacttcttcttcttcattctctctgctcctccactcgcgagactcgctcctcaccaccaaccacagcgactacaaaagcctttttctctctcgactcgcccgcgactcaaaccgagtcaactcgctcaatgccaagcttcagctgaaactcagcaacatccgtaaatctgatctccgaccagtggagaccgagattcgaccagaagatctctcaacgcccataatctccggtgtaagtcagggaagcggcgaatacttcgctcggatcggagtcggtactccggcaaatcaatattacatggcgatcgacacaggtagcgacgttaactggcttcagtgcgaaccttgctccgattgctaccaagaaaccgatccgatattccaacccgaatcatcatcttcgtacaatcctctcacctgcgattcacgccaatgcgtcgccctcgaaacctccgcctgtagaaacaacaggtgtttataccaggtcgcttatggcgacggttcttacaccgtcggtgatttcgtcaccgaaacgctgtcgtttggtaagtcaggttcaataaacggcgtcgctttgggatgcggccacgataacgaaggcttattcgttggatccgcgggcctaattgggcttggcggcggcccattatcactcacttcacagaccaaaacgtcatcgttttcgtactgtctcgtgaatcgtgatcaggcaggcgcgtcttccacactcgagtttaattcacctcttcccagcgattcaatcaccgctccattacttaaaaacggtaaaacgacgacgttttactacgtacagctaatgggaatgagcgtaggaggtaaggccatttccgtttcacctgaggtttttcaggtcgacgaatcgggtgacggtggcgtaatcgtcgactgcggaaccgccgtgactcgtctccggactcagatctacgagtcactacgcgacgagttcaagaagcttactccgaatcttaggtcgactaatggtgtggcgttgttcgacacgtgttacgacttctcgtcgttatcgactgtgcgtgttccgacggtgtcgtttttgttcgccggtgggaaatcttggacgttgccggcgaagaattatctgattccggtagattcgtcgggaacgttctgtttcgctttcgcaccaacgacgtcgtctttgtcgataattggcaatgttcaacaacaggggacacgtgtcaattttgacttggctaattctcgtgttggattctcgcctggtaaatgttaggattatatttaatgaaattaagtatttatataaagagttattgttaatggttggatttaattaaggttaattgtaaaaaaaaaatgttgaaaagaggaggagaaagtagtagtacgttagcgagtgtgtgtggggcccatctacataaaatctattaaagggatatagttgtattcataaatgtagtttgctttttctagttcactcttatataaatggtaatgtgtctatttatttacgattcataagctattatttatcattaatgttttacactattagtgattttttaattatgattcaatttttagtttggtcaatgtttaaacatttttttgggtgagattttgtgtggttttacttttactttcattttcatattactttttgactttttttaacaagaagaaaaacaattagttaatttcattaatgattaattcttggtcgtagactcgtagtatgaaaccattattgtatcttacgtaattaaaatggaaagcacatattatttttcacattttaaagaaaagaattaaaataatagagttttaaatgttgtttaattttagttaataagataatagagatctaataataggtaatagtgattttaattttgttgggtggggaataaataaatgataaaatggtagggaagggatcacgtgcattaataagttaggtggggtacataaatataaattataaattataaataagaagaagaggacatgaagggctcgtttggaacgccgtattaggtcgtattgtattgtattgtattatattgaattggattatatatcatatttttatataatactatcttaaactttaatttatattaaaatattatatatttaggtgtccataaaag

SEQ ID NO: 256055 - DNA, 2649 bp, Cannabis indica
gaatcattgtcctcctttggctcctctgcagccggagttggaaggtcaattttcttctcatcactcactgcagcttcaccctctttagcagttgccaccaaagcatcgatttcttttaccttcttagaaacttcagttttcttttcaacataacgtgtgagataatcttttgttgcttgattaacatttaactgtcaggtgattaaaagtgagaaaggattacaaactaaatatcatcaagtaatcctgaaaaagctacaacatgattttctctagtccttaaaaaaaacacactccctcaaggtaaacacatcattttgccagagtaacatgaaaggtgttctaccattttgaacttttaccacactccttgctctgccttttgaaacattagagtcataagcaaggcattcacttgaaaacaattggaaattttgaatcgaaaaattgttgtacacgaagctcttaattacatggaaccattttatttttatatatttatttatatatatatatatatatataaatactaagtgactttgactttatgataacaccaatcaactaatattttttaatctacaaggcgtgcgacaagaaatagcaaaagacattaaaaaaaaataaaccagacataccacaagttcttgcccatcaatattaaatttactcagcaagcgcaatgcacgtagaacaccttcagcaccctcaaactcacaaaacccaaagcctctgggagtcccatttgtgggcacttgaccacgtttccaactcttgacagctccacaaaccttttaacacatatgagaccataaaaatcataaaagacatcactcctagtacagttcatacaaaaataaaacaatgtaaaataacttattgctagtatggaaaaaaaaaacatcaaatgcaagtacactgcaaatatttaagtacctgaaggagagccagtataaaatcattctcaactgtgggtgctatcttgccaacgtatacagtggtttgtggtttctcagcaggagtaagattaggaacaatagctggcctaacaacagggggaatgattgggcgaattcctggaataggtgggcgagatagtacccccataccgattgctccaggcggtcgaaatgaaggtcgaaccattgtttgataaggagaagggaaccgaggaagccctacataaataaaaacaaatatctagacaaatatatcagagaaaattcacatactatagatattgtgacagcaatatattttgataagataacgcacattgacatattaaaggaaatataggttaagtaaaataactaattgttgttaccacacattaaaagcaaaaagagatggcagcataggcatggaaactatcaccagctgaacagaaaacctgaagaaaaaatttcaaaaaaatagcaagttttgtaaagcatagatacaggaatgaccttaccttatgcatccacttgcaaaatagcaaccttgaaaaatatttcaacgacaccagttgcaaaaacaaaataccaaagtacagtaacacagtacctccaacaagttctcatacatacaaaagcagttgtaaaacaacaaataatttgtgtgtaattataatttccactcatcctaactctgaagaaaaaccgatgcagaagagtcacaaagcaagagaaaatgaaacgcaaaaacacatcattaagtattcattatgcaccaacacatattgtaatcaaataataaaagaaaaagaagttgagaaatagcctttatttggaagagttttgataccttagaagttagaacacaatgccaatgagcactcagttccaaacatggtgtgcttctggcacttgataaatccattaaaggaaaagtatccttaaactaccagaaagcatcctactaattgagcatgccccgatcatcatcaaccaattggtgggacaaatgagagcaatataatttgctaaacctttgtatatagtttttgtaataagatccaaatgccattatctttgtattgtagtaataataagtgtttcatttaaattcttattctaaagacaaacaaaagaacaaagcaaatatgtgcataccaaaaaaggagttgtagaggggggatctctaagcaatatgaatgaagcatgccttccaacctttctcaccgtattcaatcaagacactgtaggagaaaacatcctgtcatcgataccctttatctaactgacacacattggttttaacaaactccgagctctgttctaacataatcttccccaacattatgttattcttaaatttgttcaacggttgaaagtgtagttagttcaacattaatgttatttcttcacaattttcctatctactcgttcaaaaatttctaattgtttttattaattcaatcaaattataaatcctgtagacaccaaaactagctatcacccgttacaactatcaagtttctgaaacaacttgaatcagagtaaacaccaaaactgggaaatgagaattatctcatataagatataaaaattcacaagtaataacttttaacggaaatatgaacattcaaacacttatcaaagccaattaaccaaagaagaatgtatgtagaaacgaataacccaccaggcatggctgcgtatccat

SEQ ID NO: 256056 - DNA, 2613 bp, Cannabis indica
tttttttttctttcctttttcatcacaggatgctgtgtatatgaaatggctgctcacaaatctgctttcaaagcatttgtaagttgctattaataaattaggaacttgattatttttatcttcatttattttctttggactatgttattaagaaaagatgaatccctcggtgcaaatttgtttcttaccagtcttaaaaagtattattcagtgacttcaatgtctcactgttttccaacctagcttacctttattttttagtgatcagtatgtttccgttgttttgattgctcaggatatgcaaggtctgataaacaaaataaataagtccatagtggctccccttccaactatgtactctgttgcattgtgagtcagctttcctctatgtttgcttcataatcttgtagatgttactatttcatatgtttcagattttgtaatcatttggttccttatatattttcaatcataaattgtagtcaacgccatctcttatcgtttcagcagtgaaataacttggattttctgtgtaatcatatcattactgagatgttttcggtttccccttttgcagtagaagccttgttaaaagcatgctgcgaaaaaatccagaatttagaccaagtgtgagtctcttttttctttcaataaaatattgtcaaatggcatttgccttttcccattatatttaaccgtggtagttcatcttataattgttgaagtttatctctatttcgccaggctgcagagttgcttggtcatccacatcttcaacctcatatcctaaaggttcacatgaaattaaatagtcctcgacggaatacttttccaatgacatggtctgattctaactacataaagaagacaaggtttatggagccttcagttgttccagtccatataatcagggagaaaagacagtcactcagcaatgacagggctctaaatcccagtatatctggaactgaacaggattcactatgttcttccaaaatgacgcaaagattcccaagttgtttggattataagtttactgaattgtccattggcagctgcagttctcatgaaaaatatgaaatggaaaagtcagtaacgaaaaaattctcaagtgtcactcaaactccacgattgacaccagtaaaacattctattactccaaggagacagataacaacgaccaagattcctcatattgcctcaaaacgcgattcggtaagtttttatacacaatcatttactactaatattcttattatcgtacaaaaccaattatggattgtaactggtaggattagatctgcttcaaaacagtaccttagatgtgtaatcccttatccccttgaacttttgcctatggtttctatttagatttcacacttcaatctagagctctgtatatagtatttttttctgaccataatcttatctttacagcttccaatgtcgcgcattccagcaaaatctgcatcccaggttacaaggagagcatcccttccattggcaactagaggcacagctttggaatccccttacagaaacaatattggtctccttcacagtgtggattctccagatgtctctgtcaatgccccacgaattgacaggattgctgaattccccttagcctcttcagaagaccctattttgcccacccgaaaaatctcatcgacatcaacatcagcccagtgttcttcttctgcagacattgcagcagaccgctcaatcatgaaggacaagtgcacagtacaggttgtagaaaaagcgttttctaggcgcagcatctcagaccggagtcatggagatgtaaaaaatggaagtgagccatctgagtacaaccctacaggagcataccacaagtcatctcctgagtcacaacagcatcggtttgacacatcatcctaccagcaacgggctgaggctttggaaggactgttggagtttagtgcacgtctcttgcagcaggaacggttcgaagagctgggtgtgctgttgaaaccatttggactagagaaggtttctccgagggagactgccatttggttggctaaaagcttcaaggagactgctacataacatagatggaaatcctaatgttggttcatttgattctgttgtttacactttgtaaattgtacatgaaaggagtcgatgaagttcagagagctgtcttcaaacttagaagacactccttaactagtaatgttagaatttgattgatagattaggcttcacgggtgattgtgtttgttttgtttgtattttcagatacaatcttttttttttaccgcattaatacttgttttaatttttgatgcaatcttttaattgatttattaaataggactaataacaaaaacctaatttctctcttcccttcttctacgacaaccttggttagcagttgtactcacaggctcatatttggacggtggggtccaagtcaaacctccttggtcaatcgccagattttagccactccactcttgaccgctgcagccaatattgctcttcatttgctaacagttcatctagtatcagttctgcagataacacctggtttgaatgttcataacctggtgcatctaaattatgcagcaaggtgactttatt

SEQ ID NO: 256057 - DNA, 2286 bp, Cannabis indica
aaagaattaggtgaattaatttaattgatgacgattcatgaattggctgactataattaatttgttaataaaagttaattattacataattgacaaaatattcaatataatgttgtagtcagttacctaattaaattttcttattgtataaatattttgacaattaattatgataaaaattttgattgaatgtctcacctattgaaaataattttcaaggtcgctcatatatgcattcttccataacatcatttattttgtatatgttcaatttatataattattcttcatatatatagaattgttcatatatctataaagtaatttattctaacaccttattcatttgttctttaattaaaatttagaattagggattgcatatggtataaatagccttattttattttaattattattattattattattattttgtaaaactgttacaaaaatataagtaacagccttaatctaatggaatagaacaaccaagatttacagctcaatacaaaatacaagagctaaataatgattaaagaaatattacagcacttgtacataaagttataagtgaataagagaataaagtaaaagaagatatgaagagaactcaaagaaatattagaatacatttaaaggtatgacaataacataactagtttaagtgtaagatcatgaggaatgaggatcactgatttgaataagattcaagacttttctacaaaagccccccctattaatgagactcctaaatattttcaaaaatgtgatttttctatttacaaaaataccccattttttaaaaaaaaaattaagcaaaaacctattttatatacaaaaattaggaaaatgacaaattttgtattgaacctcacccatctcaaagtcaagtcttattttgttaaatctctctcaagctcgaccacgtttggtaatgcattgcatattaagtatctcactcaataatttcttatggattttgaataatgtattttttttgtgtatttttttcagtgtttaatttgcatgttttaagttaaaattagtaatgatagtagtatttctctctttgtcattatccattatcgaaaactctaataaattaaggacaactgagattctttcttctacaatacaagaagacttatttgtgaagacgtcattagatttatgattatgaatcagtttttaacttagttaaatgacaaacaaataataccattattactcacttatttaagggcttattggtttacaattaatattgataatttatttggagagatttgtaattgttccaaaacaatacaaacatataatgaccctttgtcctattgaatctgtgttctcttttattatttggtgaactgtcaaatacaaatggcaatatatatattttggacttgagtaacctaatggttcttcttgtgattatatatactttcaataattaatgaagatagctgtttttgtgtttgaagcttaattagtgctaatgatgactactgttgtaacttttgtttgattcaatattaatttggattgaatccaattttacttatgtggttggtatttggtagtttcagtactcctccaactagctatatatatacatatatatatatttatatataaatgttcattggacaacaactcgttgggttgttgtcatggtgtggacatatgattattaatttgttttcagtaaaaaaacagaatatatatacttagtggtgtgaacaatataactatcagtgaacacaaaaacaaaatatacaaacaaaggccactagtagtggtggtaatggtaagcaaaccaagattctctttatggtcattaaggaatctattcccactaattttcacgaggatattcatggtgcttagtactactagaagatgtcatattattactgatacaattcaatattaagttccacttattgaatgcgagctcgtggtggtgttggtcccatggtgcctaataggtcaaataatgtatgaaaatgcacaagacttgagtaaaacttaatattcaagataaagtgataacattttggcaacaatctactcttgtaaaaataataatacagcaataattctcaataaatttggcaaaacaggaaaatagtcataaagtgatttgtgtgctatattaaataattgaaactcttgtaaactagtaagccctagttacaaaatagcattttcaaaagtagttgtgtgtcaccaatcaaggcctgcacgaatgattttgctctaagttgggtttgggtacaatgt

SEQ ID NO: 256058 - DNA, 5442 bp, Cannabis indica
ttatatgtggtattaatttttgtggacacctaaatatataatgttttagcttaaattaaagtttaatatagtattatataaaaatataatatatatataattcaattcaatataatataatacgacttaatacaacaacgttccaaacgagccctaaataaataaattggtaattttaagaatcaaatctcaataaataaatagccaaattaagatagaataacattattattgagaaatgagttattttaaaatatgacacaataatctattatgattggattctccaaagtttaatcaaattaaaacaataaaatatgtttttatatgttttttaaataacacaccaactcctcgtgtgtgtggtttgctttgcttagcaatagagaaaagggtattatagacattttagtgtaagcggtgaggtacccagttgtagtccacggttgggaggtacttatctattggtaaaaacagctctctctctctcactctctctcttctctctctgttttaatatttgattacacttttctttttcttttcgcttatatagacagacaaagagacaggggtaacaaggaagtcagagcgagcagaagaagaagaagcagtagtagatctgcgagaggaagctctgaagctttctagaaatggcgtcaaagctgcttttgattgcggtattcatcttagacattattgcttttggtctggctgttggggctgagcagaggagaaccaaagtgagtaatccttttttattctctccttaagtttaaaggtaagttattgtgtatgtatgtatgtatgtatgtatgtatgtatgaatgtctttctgggtttctctaatgaggtgttttcagttggtgggttttgtttggctcccgagaaaactaaaagagttgcaagaaaattaattggattttccttttgttatttatgcaactgaatcttgacgacatatgtaatgtacatatatatttctttttttttattattattgtaaaatttaactttcacactgaaattttatttcaagactgtttttgagtggagagggcaagtgtaatttttcttaaagagtgagagaaagaaaaacccggactggaaattagaaatttattttccttggaaactatgtgtactggttttttagatattggtatattaaaagctagatctgtaggaacatatggttttccagatacatctttcatgaataatgaaaaactgcatatactttctttcttcagtacatttgtaaatattttgcaatcttcttatattttttgaggaaataatttgcaatgttaagtcgtgataacattattatgttggttaaatctctattatactttcatgtatgaacatatagatattcaattggtaattgcctctttcgttttatgtgtgcctagattttactttagccccatgttgttcccataaagtagccatccaataccttgaatagaatcttataccttttataattttacctgagttcttcagtcttggtcttattagcaatatttatcattagttcataaccaatttggggaatggttgagtaatgtttatcacgtttaaccatgaaataattataatttagtagtgtttgaaaaaaaacgtattgatccagttacacattccatgacaggggtgggttgttcaagatgctgataagaactacaactactgcgtttataattcagacattgcaactgggtatggtgttggtgcattcttgtttcttatggtaagtcagatcattataatggtggcaagccgatgcttctgttgcgggaagcctttaagtcctggaggatcaagggcctgggcagtggttcttttcattatctgctggtatgtaactatcaccatgataactctttcctttttttgagatatctatcttataaccatcctgtgtttcggatttgatttagacaaaggcaaaaagtataatcatggatatttgttatctaatgaatgcttattatatgacttctttcagggtatttttcatcattgcggaggcatgcttattggctggttcagttaggaatgcctaccataccaagtacaggaacttcttcagtatagacaaccctccatcctgtgagaccgtgagaaaaggagttttcgcagctggtgcagcttttgtgttcttaactgcaataatctcagaattttactatgtatgctactccagcgccagagaaagcttccaaccttatacaggtagagaaactggtgttggtatgggaacctacaaatgagcttcttggatgtatgagtagtgaccaattcgctcactatgtcatagatgtgattgtctgaacttccccacatcttttttgtccattacgttttacttatttgagactttttagttgcatttacgtggattgatctgtattatatataagttgtcttactataatatcttctcattaatgttaccattaaatttttttctttcattcattgttatgcaagtattgttacagaaatttgatagtaaaatcatcggttgtgttattgctcttgtctggaacctatttgtatagtctacattattaggataagtagtcctacatttagttaatggttttataatcttcgcttagattaattgtaatgttaattagtctgtctaatttctcttctcctccctctgcctatgtcaaaggctgtcatatcttgtaccattcacaatatatagaaacaataataaaacaaagcttcaagctaatatttgtccaacttatatggtattagaagttaacttgtgatttttccaagaaaccttcaatacataatgatgagaactcgcccaacatctttagctaccaccactggtcaagatccaatcgtcgatgccacaaatcaagttgctttgccaccatcacaaacattagttgggatgactcgagttacatctcctcctccaacttcaaattgccttgttgcaaatgatcgaccagcctgtgaagatgtgctccaatacttcttgagcactgcagatcatccaaggcttgttcttgccattccaatcctcacaaatcgaaattttcaattatgaaaaagagatttcaagctttccattggtgccagaaataaaacaccattcctcgaaggtaaggttccgcaacctcgtcctcatgatcaactttcatgttcttggacttgttgtaatcaaatggtaatattctggatcttgcattctgtatcccctgagattaagagcaacatcatgtactttgatactgaagctgagatgtggattgttctcaacattcaattcaaccagggcaatggccctaggatctttgaattgaatgaattgaccatataccttcgacaaggagaggattttgttagtacttcaccaaactgactgttatgtgggataagatcaattaatttcgtccacgactcccttgcactgtgccgcttcaactcagaatcaagcatatatgaacaatgatcaggttctttagttttggactggtttgaacgaattttatcacgctgtctgcgctcagattctattaatcaacccttggcgaccattgaacaaagttttttcaatgattgtccaacaagaacatcaaagaactctaagaactcgcataaatccctcaattgtagctgttacatcttccactccaactacagattccaatcctagtgctaatttagcatccgcgaataaaagaatgtgtctcacttgttcccattgcaagaaacatggtcacctcaaggagaagtgttacttccttcatagatttccacctggatatggcaatcgcagatctagcgatagtaatgccaattcaagtcgaaaacaaggctattcccataattctaggaacaatcctcaagcttcgcaaataactggaccacaatcagatgtcactgtatctcaactcacaccaaaatagtgtcaaaactactcaatgttggcacaacaactaccattaattccctcaacttccaatgacattccagccgttactaacttctctagtaaaatctttaatcttcctaacacattggattgtggatagtgggcaactcaccatgcatgttatgacgatagatgctttgcattttttaacaaaacaaacaatgcacataaagtgacattacctgatgccacttcagttcaaataattaaaactggaactgtaattatcaactcacaaattattttaactaatgtgcttcatgtacctcagtttcgttttaatctcctctcagtaagtgcattgttacgaacttgctctaacagtgtattattcacaagtaatcaatatcttattcagggatcttctcagatattgaggatttggacagctaggaaaataggcaatctataatacataaaacaggagacaaatccttttgcaaactataaaatgcctactgcttgtactgtttcttttaataaacacaatggcatactctctataattatccatctgtattagttaccaataagattaataaaaaattttgttttcctactgaacatgtatctaaattttattgcagaacatgtcactttgctaaacaaaaaaaactaccttttatctcaaataacaatattgctcctgctgtttttgatctctttcacatggacatttggggcccctaccctattgcatccagtgaagggtacaagtatgtttttcacaatagtagatgaccattcaagatacacttaagtttacattcttaaagttaaatctgatgcaccatttattattcaaaatttctttacattgtcaacacccaatatcaaacaaatatcaaatctattaggactgacaatgccaaagagcttatactaagatattgtcaactatcagtcatgtgttggatgacctcaataaaattcagttgttcagcgcaaacaccaacacatattgaatgtggcacttgctttagcttttcagtctaacataccccttttctattagagttacatgataagaacgacaacttatctcctcaataggactcctctgtattattgcatgacatgacatcttatgaaatattgcacaaaaaacaaccagcttatgaacatttaagaaattttggatgtcttgcatatgtatctcacataacacatgaacacaaattctcaccaagttctaaagcatgcatattcagtgggtatcctgaaaatatgaaaggatacagtttacttgacattcaaaccaattatattttgcatgatcgagatgttctcttttatgaaaatatatatcccttccataacaagattctgggattctgggactaccagtccttcattatcgccaccacgctcttccagcaccttgggttcggcaccaccagcaggattgggttttacgaaggtgaaaggagattgatgatggtgtctgacgagaagaaagagaaaga

SEQ ID NO: 256059 - DNA, 725 bp, Cannabis indica
tatattatacaatttattatataaatcatatattagatacaaggaagcaagcagacacaataaaccataatatatatatgtatatacatgtcttattataataattaaaataaagggtcgatcgatgaaagaacacgagttttcattcaaacaacaagattatatgcatggaaagagaaaagaaataaagttgagtgttttactcttgaagtgttcatgtttgcaggatccaagtgaaagccctcaacgcaatcagtctttgctgtagaattcattgtgtccataggattgtctttgtagcttatctcaatttgttatctttctaaggagttgatcaaaatcggacacgtgttgtatgaggtgcaattgcatgacgcgtatcccaagggtttgcacgtggcttatttagtctttccatatttggttagaagataatgacatgctaattgccaaaaattgggatattttcgtacagatacttcctaatattatttagagtgggatataacttcgctttgcgtggttatttacaaattttcttatatattttttgtagtgatagtcttttttgaaatgattatttagtaattataatcttcctaatacatagagtaggatataaataccggctatttacgcggataatttaatttttttttaagtattataataaataatttcttaaaaatataattctgttatataataaataataaatatattat

SEQ ID NO: 256060 - DNA, 4911 bp, Cannabis indica
aaaataatttccaacagatctcaattcgattcttcggccgatgaaaaaagtggaggtcgcccggtaactagagcggaaggtcaggggcttcgagattttatgtttaaactgggagggattgacttggagggtgttggagctatatttacatggtccaatggtcaaagttggaaaagattaattcgtgagaagcttgatcgtgtggttgtgtctgctgcttggatttcctattttaaaaaagcaggtgttagaaaccttgctgtgagacactcggaccatggcgctattgtgttagacactcgtatggacagagaagtggtgaagacgcctttttgatacgttgacgcttagagccgtaaccctcggtgtccaaggatcattgaagaagcctggaacattgctattgtcgggtttcagagcttcatgctctgtcgccgacttcattccactgccaaggcccttagtaagtggaatagggaagtttttggtcactgccaatttaaacttcaggctcttgaacgtcttttgattgaagtgcaaaatcgaatcccctctaaggagaatgtcgaattggaaggttctatcatgcttgagattgacgaagtcgaaaagcgacttgaatctatttggaagtagaagtctcgggaatgctggctaaaggaaggagattgtaactctagatttttttcatgcttcggtcgcactgagacgcaaaagaaactttatttgggctattaaagaacaagatggaacttggattgaggggagggattctattggtgattatttccgaactcatttcatggaattgttcacttccacgaatcctcactttaattctgagttggagaatctgttagagccgtgtattactgaggatgagaatatccttctaagtcagcccccgacttcggaggaaattaagaaagtggtgtggaacatgccctctttgaagtctcctggcccggacggttttcctacaaaattctttaaggactatcgggatatcgtgggacctcagactattgagtttgtgcaggagttctttcgctctgagaattttagcaaggagattaatcgaacatttattgttcttattcccgaaagagccaatgcaactgttttgatgagtttagaccgattagcctctttaacacttcgtataaaattgttgctaagctattggcgaatcggctttgcaaggtgttagataaaattatatctcctaaccagtcggcttttgtgcaaggtagatggatcgcggagaattcaattattgcaaatgagttgttctttgagttgaataagagacaaggaaattctgcttatgttggggttaagtgtgacatgtcaaaagcttacgatcgcttggaatggagctttgttttgaaggtaatgcgttgcttaggtttcaaccatcatttttgcaaaatgattctttgctgtatttcttcagtgaatttttagcttttgctcaatggcgggttaactaagtctttctctcctaaaagatgcctcagacaaggcgatcctctctcgccctacttatttattataggtgcggaagtgttaactcgaattcttttgatagaagaaagcaagggtaatatgagtggcttttctttctctcgggagggaccttctatttctcatttgatgtatgcggacgaccttctcattttccttaaggctgacaatcacaatcgtaatacggtcattcaagctattgataaatattgccggtggtctgggcagaggattaatgtgtccaaatctaagattttcttttctaagaattgttctgccagatgtcatgaagattttctccaggagatgggttttgaagagatgttgggtgatgagaaatttctgggcgatccgatcattttcaatggccgtcgaagttctgattttgattttgttattgacaatatttgctctcggttagaaggttggagggctaaccttttatcccaagccgcgcggatgactcttatcaaaagtgtccttgcctctatccctatatacactatgtcaacattcttgcttccccgaaagactacggattgcaccgattccattgtgagaaaattttggtggactggccagtgtaaagagggcagatatctctctttgagggcctgggacagtctctataaacccaagtcttgtgggggttttggttttaggcgtgctaaggatattaatttttgtctgcttgctaaacttggctggtatttagcctctggctctatgtccctttggacctcggttatcaatgcaaaatactgtaaacatgctgggttgctctctacctctcttccttctagagcttccccggtggcgaatggaatttgggccactcaggagttcatagctgagaatggtgtgtggatcgttggccaaaactcctctattgattactggggccaacaatggatttgtggggatggtcctattctgcataagggccttattaatccgctgacgaagaccacgactttggtaaatgacttggttgatcttggctcttcggggtggaatgaacgaatggtagagaatgtgtttgttcctgcaacggctttgttaattaactctttggataggaattttttccctgcttttgacgtggcttgctggaaatcttctaacgatggtcgtttctctttgaaagcggcttactgggattataacaagatgagatttgctgaaaaggatgatacttgtggaaggatttggctttccaaaatccacgaacgtttcaaggtcttcttatggaaactttgtcaagatgctttgcctttcggatcaaagttgcagagcatttttgggaagccccctagtttatgctctctttgtggtagtgagagggggtgatgttgtagatcattttgtgtctggatgttctgtcacgagactgttatggttctcctctcgatggggccttcgtttagatgttctctcattcctcaatggcagggaattggtcgcttggctctctcatcctccctttcaacatcttcttaacccgcaggagctgtctagcttttttctttatggtgctgtgctgtatcataaattgtggctttgtcgaaatgatgcttttcataacggggtgcctgtggattttaagatgctgcaaaagagtattgagaaatgcttctctgagcatgacaggattcggaataaggagagtgagaggcctgattcgtgtcgcggtgtggtggagctcagatggggtcttccaaggcctggaagagtgcagggtttcgtggattttgcctcggacagggaggttggggctgtggctgtggttctttatgatgcctctggttcgatcttggcttatggtgcgaagaaagttatggttcatgacgtttttcaaggggaatcggagtccctgcactttggagtttctttggctcttgatctgcagattgaaggggtggactttcacacggataatactatgctggttaagggtttgattgacagaaactctccgtcctggcattctcatttctcttttgttaaactctatgatctgttacttagctctgactgttctgttagttggatttctcgtgtttttaataaggctgcgcatgctcttgctagatggggtctgtcccattcttgtaatggtttattgcgcttttgggaggtgagtacccatgtgctcaccaaactttgtgttttggctaaaataatttcagtttcttagcgaaaaaaaaatacaattcaatagtgcaaaaggttttagcttttttctattacaaaaaatattattcttttcacatacataaatatttatcttaaattttcacacacttaacattatgaacaacatcactctcactctcacgtaatatatatgcatgcatccattgcgactggaagactaactgtgccaaacaagacgaacaataagagtattattgcaataggtaagaaatgatagtgataaaagaatgatacacaacattatactcaaatgcaaatagactcaaaacatgttaaaaaacaaataaatactgatataatattattattagacaaaaatggttcaaaaacgtttgttttacgtttactaaaatttaaataataaattttttcttcaacaacgaattgtttaatttttagaaaatatatacatataaatataataatattttaaaaaaatattacaattatcttcgtttgcgttataacttattaaatagtataatatatatatagggaagttctctagtagagggtatactttttaggaaaatttacaatttaaccacgttactaataatttatttataaaaatattgtgatgtaaattaatataacataataacgttttctataccgtttgtagaatagttattttgctttaagtacatgtatgacactgtttaaaaaaaaaaaaaaagtagatgtatgacatcaaccattgaagagatatttatactactatatttttatttttatttttttaaaatttattcagttatttaaagtgaaagaaaaatattatttttatttatttatttacttatttattttatattttgtaagaatatatagtttactcttctcattatattattattctctcctatctttaactttaaaaagaatttctggtcacatcattagttggttgagtttaaaaaatatattattgtaatctaatctttaatgtgaatatttcaaaatgtgaaaagcatatatttttttttatttctagaataaaaaaaaattattgaattactcatgataccgatcatatactaattagttattattttttaatttttttaatattagttcatatttaatttagaatttagttaattagattatattatactatgaaaactaattagtttttacgataaatttagattaccaaaatat

SEQ ID NO: 256061 - DNA, 2052 bp, Cannabis indica
tttttatatgtattgtacccaaaataccctgatataagagagtcaaatggagattatcttgaagtgtcaagggcaaaagtggtacaatgtttaaaaaaagagataaaaatgatagactttaaaaaatagggtaaaaataaaagaggacaatataaaaaaggtatagagtgtaattttctcttttttaaatggtctatttgtgtttcaaaagctttaaggagattgtcaaaaaataaaaagcattaaggagaaaaatagggaatatatattaataaaattgggatcactatttttatataagaattggaatatgctaaatgtataaagcacttatgagaaaaattgaaacaatacaaataatatactatataaaaaaaaatattagaacaaaaattttaatcaagtttattagtaataacatatccaatactactatacaatctaacttgattgtttctttcagccattgacaaaacttgaacatttttcaaactcatctcgctttcgcaactatcaatgtagtctacggccaccatgacatcgtaatttgccgacatagcatcctcagagagctcagtacgcgcgcttttaaaggacccaatcactgctttatacgatgcaacacattgtttaagaactgctcgtcttgtactaccactactactactactcgtcatcttattaatttttaatagattatggatgaaatataagctttctttcgcgttcttgattgctaaaccaatggagtctttggcgaaagcattgagatttttcggtgatttggttcggggatcggcttctagagcttcgatgcatttgaggtagtttattgtttctttacatatgttttcaactaattgggatgatgttgatgaggcttgtgtagttggtaaagtggtaaagagaatgaaaaacaagaatggtactattagggttagaaatgatgatgaaagtttttgagtatccatttagagaactacttagctagctagggtttcaaatatatgagagcaaatgtgtttttggcctagctatataaatgttgatgatcagtaattataagcttaatatatataattatatgtggtgatgagttgttaatttggcacattttctaaacaaaaaaaaatatttgttgtttatattaaaatttttcccgtaaaaagggatttaaaagagatcatgttggaagatatgttgagatatttgttatgtaaatattaatttataatcattttgtattatttcatggagagatgttgggatcaaccaagatggcatcctacaaatatttaatttaattatgggaattgtcttgaagtggcacttactttacatggccaactcataaaaatgatacttaaaaaattattagggctcttatattaactaaagattagtgccttattataaatagtactattaattgtttctatacttattattaaagtaattaaaaaataaaatataatattaaattgaaatattacaaatcgatagtttagacactaaatgtcttttaatatttcactaaaaagatatgtataaaaaaattatgtaaaaaataaatatatgtaattttgcaagtactaaattaaaatattaaggacgagatatattgttagtagctataattcttaaaattttgggaatttgggaaagctgagtttatttttatttttttgaaaaaaaaaaaaaaaagtatgtattatgtagtgagctttttgatccactattgaactaatttgcaaggttttctcttcttacttaataaattttaaatgttcacgaacaaacatgagtttgacacaacttaaactctttttgttttgtttcaaaaaaataaaactcttttttgtttttgcttttaattttttttcttctataagatagttctcttgtagttggaacctcctaattttactttaatacaaatatatataaatatgaaatatataattaatattaattttaaaaaatattaaaaccattaaattttaatttaattacgaataataaaaaaaagagaattattccatatattttttt

SEQ ID NO: 256062 - DNA, 2248 bp, Cannabis indica
gttgttcctttctaaccaaaaaataaaaaaaaacagttacagtggattgccatagtttttcttgtgttggttttcctctatatggaactcgatggagcatcattgtcctcatcatcgtcaccatcttcatcatcttcatcttctttcggcagatgaagagttgttcggtaaatctccatcacctgtctaagctccaaaaccaatgtgttcttcatctccgtcaccgacccttgctccaatttcgagactagcaaccagactccgactgccctagcccttaatttcacttcggacaagatatggaggtgatgaatgttattatataatatatataataacctctctatataaagtgtggctatgtaacagaattcttggtttaacgattattttcttaacatttccttttattttaataaaatctaatgggagattaacgtctccgttaacttttaaatccccaatttattttcatctataattttccttttcccataaatggttctcactcccgcatgcccaacccataaaagtccaatccaaaaagtaacgatcttgaatgtgctcagaagcctgatcaaaaagtgcgatcgatttgggtgcgattgaacgacgtgcaattgatcctccattgctgattgagctttgacctctggcataaaatcagtgaggtgctcaagtgattgacttcgaagatataccgattgcaccagagatttgacgattgctctatcagatatacaagaaaactaaaatataatattgttacctaaaacgtcatcgctaaaatctgaaagagagattgtgttcggagaagaagaataagaagaagaatgagcgagacgaggcctgtaccgaggagagataatccatgggggacgccgtagggagagcactgtcagcccaaagcgcatcgttgcaatgataaagtgaaagacgtcatccaagtatgaactcccactccctatatattaataaatcatttatcctattcattgccctaatttcattgcattgttgtcattggattaggtatttactaattcaattagcgaataggtttacacatttttaatcagtgaatcatcggagtgaccttgggctcaatgggtgggtttcagatcacaaatttgttaactatttgtaaaaaaaattatacctgtgtttgttctttattagttgatttgattttaattgattttaatgagttctatatttgattttcgtttattttgactatgtaaatatgggatattggttgatattgaatatgcaaatttgtcctttagttatggaaatctgagttttgtcttttgtcaatttttagtgatttaaatcaatattgggcttggtaatgcttctttttattgtttttcttttttttgcttgtgatgtatttttaaaatgcccaaactacaaaattattgcttttgaagtgtgatgtgtgtgaaatttatataagagacggtaacattctgtgttctccaatatcataacatacacaatcctttctctattttttctttgtagtttgaggcattcatgtaatatctgtactggttgatgtttgaattatttatcataaatgtgtttggttcggtcttataatttattttgggtatctgtttcttatgttcttttaattagatttggatttagacatactatttatattttatttagccactatttgttataattgtatataattttattaactatgatttttatgatgtgttttatcatgtttattttaactcaattttcaagttagattttataaaagttttgtttgtaacctaaatttgtatatttcaattatgaattatacaaatatttttgtggatactaaagcatgtagagtccctctcaaatctttccgagacaaaacaaaagagaaataatttggttgtgtactgagttaaataaaagtagtgagagaaattatttagttgcactcaaagtgttaatttaaaaatactttatgtctaattgaagaatattggattcaatttttataattgtttaaaaattgtacaaaatgaacacaaagtgaaaatatatatgtacctgttatgtttaatgtagctagatgtataaacaaatgtgatctcatattatttggtaatgatttgtttgttagtattctaggattttttttttgggggggggggggggggtagggtgttcgttctcttggtaggagagatggtcgttctatctatctcctcctgtctccttcgttttt

SEQ ID NO: 256063 - DNA, 2493 bp, Cannabis indica
cacataaactgtccatgttggcagtaagctagataatatggaacctcattcatcttatcccaaattctaacatagtattagagctacttgtgattcgttgtgagtctaaaatgccgccgatccaaaaagatgagctatagaaaagagatgtttgtgatctgttgtgagctcaaagtgccaccgctccgaaaagacgagtcaagtatctcccctttaatctctatttataacttttcggctaatgtgtaacctgtttcaaaatttacaaattttttgacgtatacatccacaaataacaccaaaatttaaatttagacaattaagtgaattgataattgagataatttattcgaaaagaactttatattaaataatacaatgcaaaatttatcctccttttattcatccagagtcacatcacgtgtatcttacgtgcaagcataattagttaaacatacaaaattaacaaatgatgaagcttctatgtctgtaaataacagaggaagaagagtaaagtcggtggtggtaatggtggagtggtggtgatataatccatacactgactcaagctgatatctttttcagatttggaaggacccatttgagaatttcaaaaaatgggtggtgggttcgctttacgctcggctttcgattccaaatctggccgactcattatgctcttactcttagtaatggttgcttccttctacgccggtaccctcttcggaaatcaagctcccatttacgtttctcagctcgattcccacaattcttcagcttcttcatctcttggtgcgtttgttaaaacttaaagcctcgtctttttagtaaatatatgataaagattcgatctttgtgtcatgagatttagtttcagattatactttttggccatatttggatgtgggttttattgggtttgagctaatttttcttggttgtgtctcttcctatgttaattagtttgattttgggttgtcagattgaattgttttgagggtcttttagtagttacctaagtggggaagcatatggtttgtagatcttgttgataatcacattcaatgggatgggctatgctatataacaacttgatagtggacaatgtggattgttttgagctgaatgatgatactgttttgacttactttcccctcttgcttggttgataatcttagctttttatggggtccattgttatttgccagtacttttgatgtaaggttatcacttattacctaagaaggatcattagtgaaacttgaaatggctctttagttttgatcacagaaattcttgagtagtttccaaataatttttgtctaaatgacttttctctttagatctaaaagattatgaactcaagtaggtgtgtatgttttgaattaaaaattaagcaaaagcttgtctttacacatgtcctaaccagtttaccagtccatcatcatatatgctaatttataaaattctaaacaattgaaagtcatttagatttgagacgcatttagcttatgatatttaatttaatgtatattagatgaagtagtctgttatatgggattgtgcagataggtttgcttccttgggtcataaaaattacaatagggtgtggtggagcttgtctcctgattctttttcggttattagggatttcttaggtctcattttattcatgtaattagtaaattatttcctgttttcccttcctgaaatattattctctcctgtttctggagaatttttgtggtttgggtattttttggattgctacactcctaataatttgtgatcatttggtttttttgaaggagtcggtaattcatcgtctacaaaccattcgttgtttacaaataaagttgctctttcataccgaagaacgccaactgagatacctgatagtggtttagatgtatgcccgttgacatttaacgagtatatcccctgtcataatgttacttatgttaagcagttgcaaaacttagatctctccagaagagaggaacttgaaagacactgtcccccacttgataagagactgttttgcttagtcccgccaccagaagattataagattccaattagatggccaaccagtagggattatgtgtggcgaagcaatgtgaatcatacacatttagctgaagtcaaagggggacaaaattgggtgcatgacaaaggtgaagtgtggtggtttcccggtggtggtacccatttcaaacatggtgcacctgaatacatccagaggtacctcttgctataatttttcgtttttaataattattcaaagaatgtacacaatagatttgctgttgtactagtttgtatgttattgcttatgagcacttagcatgagaattgaaaatatgatgtaacaactaggcctttttataggatttaatatagagggatcggcttagaatgtgaaatttctattattatcaaattgggtggagttaaattctatcttttgataattttttgatgatttatgaa

SEQ ID NO: 256064 - DNA, 7142 bp, Cannabis indica
actgctgctgacttatgttgcagctcagctaaaacactactaaccaaatccaacccaccaataaaacaaaccttatctgctcatctctattctctctcttctctcttcttcaacgccacctcttgcttatgcttaatctcttctaacattcagtgagtttgagcacagtcagtaccactacatacaatccaaatggcacccattctctcctcccattacttttcctactcctcacccacaaccccaaaaatcttgacttttcccatcacaaccaccaatcgtattcgcagcttccctacctcactcaaccactcctcatttcgcagccggttgactactcggtgttcttctcaaaacccacctcagtctccgactcaaaccgaaaaggtaccttttttttggcttctgggttgtctcaattttgatcaattttggaactttctatcctgggctctctttgaatgtggatttagttttgaatacattatcaaaatatagacttgtgtagattgatgtccatgatattgaatatacttgattttacttaattgggcagagaaagaagtcattctccttgaaggagtgtgcaatttcggtagctttggcgtttggattagttacaggagttcctgcattggatgtttttaacaatgcttatgctgttaaccaaccggtgcctgatatggctgtgttgatctctggaccaccaataaaggatccaggagcattgttaagatatgctctgcctattaacaataaagcaatcagggaagtgcagaaaccacttgaagatatcacagagagtcttaaggttgctggggtcaaagcacttgattctgttgagagggtaatgcattgttgtgatgataaggtttcaatatctaattgttgaaaagtcattgtaagtatatgtaataacagtgacttttaacttttcatgtagaatttgaagcaggcttctagatccctcaagcaagggaagactttgattatatcaggtttagctgaatcaaagaaggaacatggagttgaacttttaggtaagttagaagctggaatggatgagcttcagcagattgtggagagcaggactagggatgcagttgcacctaaacagaaagagctacttcaatatgttggagggtgagtatattaattaacatttcagattatggcatactgaagaattgcattttaagtttaaactgcaaaaatatgatcacttttgacagaagtccaatgaactggaactggtgtaaaagtattgcaccctttctatatgtagctgtgtttacgagtgcagctatctagttgatttgagcccaaaaaaacgcctgtcatttttcatggtggatgtaatttttgacagaaactagtgatgatagaagttagggtgctggtctctagtacctgtagtgtttcaagctgtcttttcgagcacagctgtctaaatgcgttgaattcaggaaaatgagtcataagataaacacctgagacttttgatgattgttagggtgcttgtctcaagcattactagtatgttacaaatgagcttttgagatgaattagatgcattaaaatgcttgtcattagtcatttcttatgtagttttcagtagtttcaatgcttaaacacctccctcttggtatatttagataaagaacagctatgctctaatgttaggttaatgtggagtccaacattatagggtcatttgtatgacttcaatgaacattactactactatgtgtagtatttcgaagatcgacaggagttgtttccttctaagattgttatcttcttccgcagcctttgttctcccattaagatatacaattttgtagaatacacaaaccacatagtaatcccataatcccataaccttttcatcactcatttatcctgctttcttaatattacagcaacctaaatttacattaaaccgagtggatcttgttggtgctgaaacattgttcgatgttgtagaattgttctgtgatagcatccttcactggaagctttaacagtatagtttgctggtggagtggtcgtaaaaaccatcatccttagttttagaaaagaagataggaaggagaaaagttagcctctaagataatgtagtctcatatatacccttgtcattgactgcagctgagatcttcctggcgcattgggtttctgcagtgttgaagaggacatggttgatggcttcccttatgacgtgcctgaagaataccaaaacatgccattgttgaaggggagagcaactgtggatatgaaggtcaaggttaaggaaaatcctaacctagatgagtgtgtattccgtatagttctcgatggttataatgcacctgtaactgctgggaattttttagacctggtggaaagacacttctatgatggcatggaaatccaaagaggtaatatatcataaacttattttttgtaagccaagtcagaaaaaattgtattaagttctcttttggttatagtatgcccacagaacacttttctaatttgttttgatttttactgcagctgatggctttgtggttcagactggggatccagaaggtcctgctgagggttttattgatcccagtacagagaagacgaggacaataccattagaaattatggtagaaggggagaaagtacctgtctatggatcaactctagaagtaagcaaatttagataaatcaaaatgaaaatcacaattgaattcattttcttaatcttttcattgagagttgaatggacaaacttagtataacatttctccttttaggaacttggtttatacaaggctcaaacaaagcttccatttaatgcatttggaacaatggccatggccagagatgtaagagtttgaacttccaaattgttctcttgatgtttcgaagactttgttgattagatttgacaatgacatgagttttgcttgttactaaattttatttacaggaatttgaggacaattctgcatctagtcaggtgttttggttactaaaagagagtgaactaactccgagtaatgccaacattttggacggtcggtatgcagtgtttggttatgtgacaaacaacgaagaacttttagcagatctcaaggttggtgatgttatagaatcgatcgaagtagtgtctggtttagataatcttgccaatcctagttacaagattgctgggtagatagctttctcatgtatttttttggtgatacattacatctacataggagagttaaatctgccaagccaagccaagccaagcttcttgcttttatgcctacttccaaaatctgaaatctgtatctttagcatttgagagagaactgacaattttattggaaatatgtattctttcctttctttcttttataaccctgaaatattactcatttgccactagttaacattcttgtatcatgtcaataaaagaagatctttcctttgcataatttgccttacatgtttcttgttggaaaactttttatgtcaacctgtttactttgacccattttgattgtttggacccaaaaaagcattgcagcacataattattacaagagatcttacataacctttatattggtttgaaaacggtttcataacctttataattttctttcatctttattatgtaagaaaattacttggtttcatccaaatcatgcaattgcaagcaaaatgtccatttacaatattaaccttattcattatgaaaatattatgaatctttaatataaaccggtttgactaataattcattgtatggagtaggctactcatattgttattcgaatgaatcctttggtttgactaataattttttttaccttaaatatttcgacattaccaaggagtccttttatgttataaaagtttatttttgtgcatagtcaatagtcaaaaagtgaatgagttaactcatgttgggtagagcatccaattctagacatgatttttggcataggacacatcacatctttcatgcgtaaggctttaaggtttaagccttattattctctctcctcaaaaaaaaaaaaaagccttattattcttaacctatgtagcaattgttccatataaaagaatatatattctaaatattcatcaattaataaactatttcactcattatattccatttaatatacaaaccaaaatataaatataattaaaagtgattgacacaattatccaatctttcatcagtggattaaccttatgtttatcttcaattgttttttttttcttttagtgaagcaactttataaaacaaaccaaaattatatggtagcaacaagaggtgctatcatcttatcagaaaagaagcaataagtgttagacacaacagtccaagccgctaaaatatctatgagcacaaacattagtaagtctaggaagccaatacacgacaaaatcaggaaaaaaatccaacaactgaaaaatataaagaaaaacaacagttcaaatctagtttggaatccttgtagagtacactgcaaattgaaaaaattgactgacaaagcttcatcgcatggaggagatcaaaagtcttgcctctaaaggggaggagacataaacttcgacaatgagaccttccaccacattttcatcaatatccctcataatcacacccccaaacaccatcatagatccataaatagagagggattatccaaggttgcctcacacaataataagaaggaaccaaaacataattgcaatatatcatttctatttttatttcaaaaccaatttttatgtgtatgtggaatttcaaaagcaacaatagtattttgctggtcgggctcatttaatctaagacttttggaaccacgacgagatgtgaattggtattggcaaaattttatgcacctcaaaaactaatttactcaagataagattttaaaagttgagaaaggggagagatttagcattagcaagatgcataataagtttctcgatcactataagcgagtttataattatagatcaaatttggtgtcatttgactacctccaaacatcaatttattttatagcaagcttttaataaccatctcttaactagagaccacttgatcttatgatgagttgcctactgattctagattttgaccagtgtgtgaagttagttatggtatatgctcacttgttttttttgttttgactgcttactccagtaaaagtaattcaaaaaacaaagttgtggttgggaggagcttgctggcctgaaaccaaaggtgtattcaattgagtatgtagatatgttgatcaaacatatgctaaaggctagaattttacttattgatagaagaaaaacacttgtagtctcttgatttcttttttaaagaaatatgcaaacgaacaaaattttatcaaacatacaaagagatattaataaaaacattaaaatgaacttggttgcttcaaaatttgtagcagaacaaatcacacatttgcttcatatcttatgtttttggctgcaaagtttgttgaattgatagatgtaacaactaacaagccttggggtcaattcaatgatattgtccagcttgtgagcttgtatagatattttaacactaaaagaaagaaaaagaagctttacaaatcaaaatcacaaactgagtgagacaattatggcctccatagattttttgtatttccttgacttaataattataacaattaccaatctgtttgaattgaataaagtacaaattgaatttcatttcttggttcactgtgttgttacctattctcctcaccttcactctctctcacacacattttcatcaaacactacactttcattagggccctctgtacctgcggaaacacagacaaccctgaggctgatcatgaggaatcattcctccccccttggtcgtatcgatcgcttccatcagtgacaccacttcatccatctccggccgcttgtcaggattcgcatcccagcatcgcttcatcacgttcgcaagggagcttgggcaacatcttggtatttcgggccttagattctgtagtttcatattgacatgagttgtctttctggataaattttgcaactttaacatgattctgatgaactctacatacctggcggacaacggcggaagtcacttccgagaaactaaggtcgggatacggcatgtcacagcagtatatctcccacaagcagattccaaaactgtacacatcacattttctgttgtatgggttaccattaagaacctgctccattccaattcaaatcaattatatacaagtctattcaccaaaccaagtgatggaaacttggaacattaaaccaaatcactgtagttagaaggttgctgtcaattattgaatatgcttagtctaccttcgttcgttggcagtgttggaaatatttcaagataaagaaatatagcacaatcttcttaacaaaaggattatatacccttcaagtgctatgataaaaaatagcctaatctttccataaattcgataaaatcataaacattaataattacagcaaataaagaggtcgatcggaaagagttcagttagagctaatacctcgggagccatgtaaccaagagttcctgtctccccagtcatgtcgttgggattagaagcctcgatacgagcaacaccaaaatcagctattttaagtgtacggctcttgtccagaagcatgttttccgttttaacatctcggtgtacaatcttctttgaatgtagatagctcaacctgcacaaaaagaggggtagcttaattcttttaacattcaataagtgaatttaataaaataaaaataaaagactgaagaacttaataaatgcagatgaagaaagcaaatccaaccctcttgcaagatctagtgcaagctgcgcaacaactttgaaagccagcttctttcttcgattctttatgaggtaagatttcagagcacctccaggacagtattcgacaactacacaacaaatattactaggcattccaatttgaccattatcagtttgtatctgtaagtccgacgaaccaattgtcgcccctatgaactgccaaagaaaggaaaaagaacatgattatatacccaaaaaagagatatccaccaaaccaaagcaccaacaatgatgacaacataa

SEQ ID NO: 256065 - DNA, 3357 bp, Cannabis indica
gaatcaagggacattatctttcgaagcatataatcacaatcaccttccactgtgttgacgtcactataatgtgaataactatatgttctggatttaatagattttgtatacattaaaaccataaaaaatgaaaaactacatgtaaacataaatgacttctaatcttctattgataacaaattagattgtattgtaatgggttttatttaaagcataaaatcccaacacttggatactattttgttctctgtgggacatttatagaggctgaccaagtaggtaactgaacttgaacaggggattctggtttgtgagtgtttaagaaacctgctttgaatagaaaattaacctcattaaaaatgacatttctcgatatatatagcctaccaattgtgcttaaacacttataccctttatgacaatcactataacctaattttatacacttgattgagtgatattgaaatttatgtgtttgataatgtctcaaacatggataacaagccacaccaaaaatttttataaacttgtaatatggctttttagagtgaacaatctcaaatggtaatttatgattgagaactggtgtgggcaacatatatatattaggtacacaactgtttggaaagcatcccactaatatttttagggcatgctagcctgggcaagaagatttagtccaatttctacaatgtgtctatgttttctcttagctcttccattttgagctgaggtatcgggataagaatggtcaaatactatgccattttcaacaaccaaattggagaatgcttgatattcacctccataatctatgtgaagtctcttgattatcctatcaaattaattttcaaccaaattcttgaattaaataaaagctgcaagtccatcacttttagcttttagtggatagatctatgtgtacctactatgatcatcaataaagtgtatagagaatttatagtttgcatttgacataataggtgctggaccccaaatattagtgtgaatcaaatcaagaaaatgagtggatctaaaattatttggtttaaagggaaaactatgagatttaccatattggtaagcctcacagaaatggctcctaacatttttaaaattatttttattgatttgagtgagtacaatatctaatccttggttgcatgggtggcctaaccttctatgccacttatacttgattgaaataacattttgctaagataaagactgagatacatttgattgaaaataagcaatagatcgctagcaagaaaaatagattgtgagttagagatattttgactgattttagtggttgtttctggtgctgttttaagctgatataatccacctttaagtctctcccttagagcaccatcctctttgttcccttttccttcacataataacaaccggcagaaaattcagcaatgacattattatcaactgttagtctcgaaatagtgattaagttctttacaatttcaggatacatgaagaacttctttaagaataagaggttgagctgaagtacgaattataccaaaaccaacatgagaaatggtcagcttgttaccatttccaacagttaaagtttccttaccggtgtatttagttttctggttcatggtgcctgcatctaatgtggtatgattacttgcaccagtgtcaacttaccaagcagcatcatccaccatttcaggagttacagtaaaggttgtaggactttgagaagttttgttagggtcactagtaggtgcagatacaatataggtcccatcaaatctattgtagcaaactacagcgaaatgcccatacctaccacacacttgacgggtaggtttgggaccatcagatctactacctctgcctcaaccaccacctgatcttcctctattattttgacctcctcttgttccacgaccaggtcctaaacttccacctcctagtccattgtttttgttggcaagattggctgaaggacctgtagagttgtttaaagatttatttgtgccaaaaagtgaactgagtctctcaaccttactgtcgaagcacagtagtatatcctgcaattgttgccaagtgctagatgtcctagcttcaatctagagaactatagggagatagtctagatccagacttgaaaggacatttgagataagctgatcttcagggtaaggagcttctcttagaggcaaaatatttgtccagtgtcgtttttgcctcaaataatctgtcatagccatagatctttttcaaactatttggatcgtagtttgatatttatcaattttgacccataatgagaaccataaagagcttcaagagcacaccacagatctacagaactttcacaccccataacctctgtggatattccctctgtcatggatccatataaccgccccatgggaagttgatcgtgagcaattcattgttcataatctggattgactttcataccaaaactaggttgtccatcaatagatggaacgaatatatgagctcaacaagttcaactctagttcttgtgaaatatccatccaatcaataaccccgaacaattgcacataccatcttccacagtataaagttattgcaatccaatttgagggcaaaaggctagtttagtgtgctcctaaaatgtggaacaacaacactcgatgtagaagctacattttgagtagtggaggattggttagcaacattgctattagactgaaatagagttgatcgatttccctgaggtgaggttgctggtggggttttatcaccggttgacatctctggtcacggtggctctaataccaacttaaagttttaaagaaaagatgaaataggaaaactcagctcaataagcatgagtgaggagccttgtatttatatttcaatatatcaaagggaatcgtctagaacaatacaaggcacaaaaataaagataataacaactttggaaatattccaaaaaaaatataacagaatggcaatatgccaataaaacagtacacaaatgatgagctaataatattaacaagttaaggtaggtgcagagacctattgtgaggagaaaaccaaagaataaaaatttcttaacaccagtagtgcctagtccactcttttacatgttaatatcgctattggagtaattaagtatagggacctatataatttaaatgtaataatttttaggaagtatcgttaacaaatcgtaagatgacaagtctaaaaagtgcgagcactaatagcaatgatgatataattatattattgctcgagtatgaaatggttgtagcataatgacaaatattttacaaggcaaaagttcattttccaatatttaaaatcctttcatattta

SEQ ID NO: 256066 - DNA, 2508 bp, Cannabis indica
tatggataaagacatccctagtgggaatgatagtgacaattttaattacagtaatgttgatcatttaaaattgtatgacaaagtttgattgaattttcttagattagaataagtctaagaattaaattcacacaacaatgtcgatatcccataatccttttattgataaccaaagaattatacaaaataactattggataggctttctctcaattctaaattctttcaaaccctgaaattgagttataattttctatacatagatgatgaagcttggcgcatcaacaatctaattaaaagttagtaactgagcctaaaacaattaaaacaaagactgaaactaaataaaactgctatgatgaaactctacaaaactcattcttggccctatatggcctttcttcctttgatagacacatcaaagcaggggcttatcattgaccctaaaaccttcactttgtctgaaattgtttactgttggtagtataatcttcgtaagcttcttcgaatgttggtagtgacttccattttacaagttctttggagcactacctcatgttctactcggagctaaaagttggttgtgagttgttggggagaatcgaatattgacgagatttcatcaaggttgggagaagtgtaaaagaaggtatatagtagtagttgattgcagatggagcttataagcaacttggccaatgtgttctacaatcagaataggcccattgtatcttgctagtagtttatcattagtcttcttagcgagtgagcagtgcctatatggtcatagattgaggaagactctaacaccaatgcgaattccaagtttgtgcaggctctgcggtaataggtggtgcatggcctccttcgatgtgctctccccctctattaaaaattcacctccataacctcactagttgctgtaggacaatgaccaaactacgtgatctaacattggacattgagagtgttatgtggtccgcaacaagtggctgattgtaccttcttgttaagtactttctacatctattaaacacccactgaaacgaaaacgagcaagagagcaaattcatgtgaaaagcatatcgggatagtggggtacctaaattcaagcatagtgcaaagttgattgcccaatacgtttttgtgatgctagaccatggtgcaaacaccctaaacccctatgttcgtcctttatcaaaaatccattgaagtacagaggcaaccgttccattacaacctgaatttttatttagtaagtagaacggtgcctattaataagaattactttttactgacttatcgcttgtggaattggcttggtaaacgtgcaaagttgcacttccggggtgatattatccaatgttgccaacaacttgtttacgttgttcttatattcggagagagttacctcttgtttcactgtcaaaatttgattgtgcaaggagttttgtgtgtctcgaaagtgccaaagtacctttcgtattgtctccttccaactgagaatggtcctccttttgttatcatactggtaccatagtaaagcttcccacgaatacgatataaaaattgtctatgttttatctttctcatcataattatgacaagtaaagaatcttttagcttgcataatccacctgttaggattgtctcatcaaagatggcattttgagtttctttaatcgatgctcatatttgatggatttttggctgtcctctttcgaaagatcttccctcaaacattgatttccatgaaatttgcttgttggtaccaaggcagcgccatagttgtgttctgactgaattcctatgcttcttgcatcctttgatactctaggaattgtaatcacttcgtcccttggttcttgggggtttcttgactgttcttgggctgcaagaataactttgagttgtggcagtatttgctgttgaaattggtgccccatctctttaatagactccttgactcattatcttcattctcagggctttgactttaactgcaaggttggatcctggggtgttattgtccatggttttcttgggtcccatggctctatgctcaccacaccaatttgctagatttatattagactagaaaaagtttaacaattaaatttacacaagattgctgaaaatcccactagaatactttgattaatcactaaagaattaaacagaagagctttttcaaaggctttctctcctattctaacctttcaagagggctagatctcactcaagagatttctctaaattctaaactctttcaaccccctgatattttaagtttagttgtctatacatagctaataaagcttgccgcattaatatcctaattaaaagctattaatcaatacaaaaagaacaccttagcctaaaacaattacatcaaacacgaagattgaataaaagtgtagtaatataactcatgcttggtgtttgtggtctttcatcctttggtagacacattgaaccaggggcttatcttgaacacatgtaatttgg

SEQ ID NO: 256067 - DNA, 6088 bp, Cannabis indica
tggattattattattattattacgttttctcagcttcgtgtagaagcatgatcagaatttcagatatatattttcacatgctaaggcaacaaatctgggaaaaagaacacctgaactgtattgaagaatgaagttcaatgctacaaataaacatttattttttattttattcttttctcagttattaatgtgttcttttgagaaagaaaattagctttaccttgatcgacaattgaataacagtacaaaacactgactaaaagtgatagtaaatccatacaattgactaaacaataaagctattattttgtatggtcactatgtacaacagcaaaatacatttaaagaattacatgtatctaacaagaaaacatagtacaatgttctatttcgattcagattaatttgaatatgcaaatggttgtgaccaacaaggggaaagaaaactgagaattactagagcagttcaagtaatgtcaacaaagcatagcttacctaggatttgaaacttcacaaactccgtccgctatcatcaatcaccattcctttgagactctttgctaaccagattgcggtctctcttggggagactttgtctttcccgaaaggccttagaacaatggagagctcctctaatctgttttgctgcagcagatccgccgacaattctaatagaccttcaagtgcatctgccctctgcctaaaagacttaacatctagtatttcctttactggagtttcttcttcattcacagaagagctgactgtagttgactcggaggattcgatcttgggaattgttggactgacagggtttctaacttctgtctcctttgcagttgagtgatcagaaatatttgacttcacactctgaggttcagaggtacttggtgatttgagaatcacaggagaagttgcggttttcatctccgaagttgtggttttcatctccaactcatccctcacaacgttcattagcttaccaacatctagactttgaacccccatctccatagattcaattactggttgctcgctcccaacacgataactactatgccgtataacatgaatgatatcatcaaagactgaaggaagatgggtagcaacttggttgtcaattcttgcattttgaatggcagttcctgtattcagctgcaatccttgttggcttgaagagctgggaggagtaatgcatgtggtagcttctgttattgaggatagaagttccctaacggtgaacttgtcatcgccactagagacagatgtcaggtttgactctgtcgatatatcaggcctgctactaggcccgcatacagaggtctcatccttacactaaatcttcttcagaacttggtacaggggagcaagagttgcagtgaaactcaccagttcattcccagtacttgtaccctcaatatgtataacatcctgagaggtttcaacagagcagactacggacttattttcaagtccatggttctcgttatgcatggttctaggcgttgcagaaggcaactgaataggagttgagcagcgcggtatatgggattcagtactgccattggcaacagtgccatgttcaggaggtattttgtctggcatctcaatgaaaggagttgtagcatcatcatagatctcaaatccttgaatggatattgaagatgaaatagagttgctgctatccgtttgcattcctttggaacctctttcttgagttctttgaggctcaataaggacctttttaggaatattaatcaggcaaccattgggcacttgagaaggagtcctctccacttcctcaagtatctcacctgtatctagagtaacagcattgctcacatcatttggagcatcaaaaccgatttgcttcatccgtccaggaaatgtacagcgtctaactagagatggaggcgttctttgcctaggcctagtttgaagtccatcttcaccaacatgctttgtgggagtaagtgtcactccgtcatgtttgggcttagcttttggagagtcaaacataggcaactgcaaagacaaataataatacatatagggatcgggtcaattcacaaatgagaacaaaatattttttggcagaatcttaatattaccaaatgctttagaggatgtgagctctgaatacgctttgtagaatctgaagctgcctttgaaggggcaagaggtggtgtgtcgtgagatgatttcaaaccaggaataacagtgctaggcttgggaattttagatgatgtttcagtgttaatttttggggtgggcatactgctgggccttgcacgattgcttctcattggagaactttcccgaacttttccttctttaatagccatcattatattttttatggtttttggttgctttgattcaagatttgatctctgatcatagtgaggaggtttcttaacatctttttcatccatcttgagagtaaaatgattgggaccatgctcatcttgagtaggtaagaactggtcaatgatatcttcatcattaaaagaaaccaaatctgtctcagaacctttgctaccacagtttggcaccacttgtagaacgtttttgtcatttgaaagcagactatccttgtcgctgcttgaactattactgttttggctttcggccatatttcttcgagaatcatgaggtctagatataggcttctgtggagaaaaatttgtagacagaataaatgatggacgacattgttcaacataaggctgcaagtaggggtgcttcaaaatttcggatgcctgaacatattacaaatgcagattgttagtatgaggtcctagagtgtgaataaagaaaaatttctggaaggcttttaggaagaaaaaaattacacttggccgatgttcaggattcttcctcagcatgcccttgataagtgttttcctgcatgtatcattaaaacacattatacataattacaacagcattcattatttgataacatgtgatcaagcaagcatatgagcagagaaaatttgcaatattcaagaatcctacccaagcaaatattttttcataagctaacttggtagaagggaatggaaaattatgtatgcaagtttcaagtccaaaaggatcgtagatgctacattaccgattaatcagcttcgagctgtgtacaagacctaaattatatacttaagtaggcgaagtaggcataagaaataattgaaatagacttaatttagtaggttaagactgttcagttgagttcatttggggatcagtaattgttgtttaatatgtattttgcaatacatgcagtttgaaaatataaatcataaataaataaatagcattgttagatgattgaggtgaaaacattcttaactgactgcatacacaatttctccatgaatgatttttaactaacccgttgatttactatttaattaaaaatcctagatgcaatttattagttaataaaactcaaacagaaaagaagtaatgtaaagcaaaggaaaggtaaagaaagggaatcactgtatattgttaatggaagaggaaggaagaatgaaactggtggccaaaaggtcaccatatgaattagcagaaacttttaagagactatggtagagagtttggccaagctagtctaagggttgggtacttgtgaaccaaatgcgaaggtgatgcaacaaccaccaaccatggcaataggcaacaaagtttggaaagaaaaggaatattcaagtgaatcttatcttgatgtgagacagacagaactagtgggtttagcaaatatcatataggtggctcaaaaattgaagcatcacaaagtggtggcaagcacagcttggaaaggaaaagcagcagcaatatttcatagctaaaattatgcaaccatggaattttttatgtcaatttgaagtttggcattgccaaaaagatgaccattcagcgtaaggacatttctaagtgaaagctttatgcatctgaatctcatgtcaagaaagaaaaaggattattctgaagagaagtttataattgggaatagaagcagaactgcaggttttcgttgtgaatgatgagggtgtgtaattgaaacacaacgtgattacagaaaatcaatgggtgtagttgccttcaaacatgggagagaaggctgaattctcaattgattcagtaacaaggttatgaaccgctaaaaaggtgaagttaattagtcgtattaacaagcaactagaaatgtagtggaagattttttaattaatctggagggtacttgattttcagatgggtgtgtaatcatttggtatatttgatcaaaatacaaatttggcgtgatagtgttttcaataatgcttatctggtaccccacattttgaaattgtacatatttagtactctaaactctaatttgatcaatatgatcaaactgtcttcaattatatgagttacaaattcaaatataattatttaattacatataactaagagcaatttggtcaaacttataaaaatttattgatcaaatttgagtttagggtatgtacgatttcaaaatataaggtacccaatgagcattatagaaaaacacatggcatcaaacttgtgttatgaaaaaatagagaataccaaatgtgtacacacttttgagaatacaattactggctctttgggcaatatgcaagttagttagaaatcattatgaacacaaacccattttcattagttataatgcattgaagaaggtaaccggctagtgtcctattagtatgattgttgagcttctagatgatacatagggctatgattctattgtttttttaatccaaaaatgggatcctaagttaagtaaccatcaaatttggatctaaagtaaagatatatcatttgaatttagcacctgtttccatcttcaaatgcaggcatattaataagcatatccttcctgcttacagatgttaggagaaaagacaaactatgcgtgtattcattaagaaagtcaatagacttggtaagaaagtcatttgaaaatcaactgtaattctaggtttcaatctcccaatttatcaataacaaaatctaaattaatttccttagtaaaaagttcacctagtaccttatcagtatgttcaaaagcattctaggtatttaagtagtttaaactttagaagtgctccaaagtcaacagatgctgttaataactatatgttgttaaaaaaggaacaccgtgataggaagttacagtccacatgcatgaaaacaaacacacctccatgtaactatttgagcatgtgcatctgcatgtcttctatgtcaagatacagggagcacagctatgcaaagaatagcaggtcaaaccaatggccaccaactgggagtaaccaagccaatggcatctctttctttttatgttaaattttttctttctttacttttgctagaatgacggtgaaaatgttattaatttattgtattgtatgatcatcaaatataaaaacacattaagcttaattaggcaacacttacaaggatggggaatagcaggatggcaaaggaccaatggaggagcgatttatcttgcttatcaatcccgccatatcctgattgtaaccaatgacaatgttagatataacataaaataacttgtgaagaaatatttgtagcggttatttcattatgagatacttaataattagaatgcaaatgccttttagcaaacaaatataggcaataattaataagaaacttacaaaagctttaaaagcagggcgataagcagacatctcatacatacagcaccctggtcagaagagaaccattttagcgaaagacaaaactgcaggtatatcacatacacacaaaacaaggcacatacctaaagaccaaatatcagatttaaagccataaggaatatcagcaagcaattcaggacacatgtaatttggagttccaaccacctgttcagaaagtaaaaccaagtacttagttccctatacaactaaagtttccaaattattttattttaaattcatatggtccaagaagcattcaatatgatttttggattcatggtattcaaaaagtaactgttaaggtttataattattaataaata

SEQ ID NO: 256068 - DNA, 1471 bp, Cannabis indica
aatatttttttatgataaatatgcccctacaaaataaaaattctgggtctgtcgctgtttataagcattactattatttgttattgttattaatattattatatatgagcatagcattagtagtagtagtagtacatgaaatgagaccacccccaccgacgccttctttcgttcttctatccaaaaacaaattcattaaatatttcttggcctaaaagttggtgggtccacttccactacactgttctttattctgaccaaacgtgggtgacctcttatttttggggtaccctataatatattctactctcatctcatctcatctttttcaccaccaaaattattcattattttcttttgtctctttctcatctcaaacattagcctatatcttaagaatttatttccgaaactttcactttactagcaattaaaattttaaatttaaactacttgaggctagctcaagtggccataggaggctgcgtgtgtgttgaaggtcttgggtgagtttcaatgcattgtgtaatatataaacgtttaaattaaaaaaaaaattaaatttaaattttagcgacaatttttttaaaatttgtgttccgttagtagtttaatattattaaactgttaacaaaacacgggatttagaattttgccaataaaatttaagttttgagattaatttctataattaaagtgaaagttttaaaaattttgccaatttaccttatatgttaattacataattaacatgtttaacattgtatatatgttactttcttctgtttgagaagaaaaagaaaaaacattgtatatatgttaattatgtaactcttttgtttcttatctcattttaaagaaacaaaacaaaaatgataattttttttttttgtagtataaacaaaaatgataaacattttattacaatttacttaaaataataatttaactgtgttgagttcgaactcatacactctcaccaatctaatcttagtagtgtaaatgttaaactaaatctacaattccgactaagctgtacttaaattcaaaaaaggccgacaagcttatcggaagaaaaaagacaacctctaataattataaatttaaaaacgaaaaaccctaacaattaattctcttctttttaaaatccttattaaattgcactaattagtgtcccaaaaacagtattaatattctatttctacacacatcaagtatagaagtacagtaccatttggtgtttttaatttatttatttaatgaacacattgtaacatttatatatatatatatagcttattacataagtttattatcaatcattaatttaatgatactaataattaatcgatcattatgttgtgattctatatataatgatgatgatgatgatgaccatctaagtagttttgctctgagcatgtaataatatatgagtataaaatatctatatttatatatgtatatatgt

SEQ ID NO: 256069 - DNA, 5229 bp, Cannabis indica
ggtttaatatacgatgcaaagctagtttttgaaaagattgtggagaaaaatgtggttatgtacaatacaatgctcactgggcttttacggtgtggattgatagaaaatgctgagtgtctgtttagtagaatgccggaaaaagattcgatttcgtggactacaatgattactggattcacccagaaaggtttgggcagagaagcgcttgacaagtttcgagatatgagatccgagggtttgactatggatcaatttacatttggaagcgtcttgactgcgtgtggaggactgttggccttggaagaaggcaagcaaattcatgcctttattattaggacttatcccaaggataatgtctttgtgggcagtgctcttgttgatatgtattgcaagtgtagaaacataaaatatgctgatgcagttttcaacagaatgccacgcaagaatgtggtgtcttggacggctatgctggttggttatggccagaatggacacagcgaagaagctgttaaaattttttctgaaatgcagagaaatggggttgagccagatgatttttacgtctaggaagtgtaattagctcatgtgggaacctagcaagcttagaagagggttcccagtttcatggccgggcaattgtttccgggttagtttcattcatgacagtttcaaatgcaattgttacattgtatggtaaatgtggaagcatcgaggatgctcataagctgtttgatgagatgaaggtgagggatgaagtctcctggaccgcattggttacagggtatgcccaattcggaaaggccaatgaaactattgacttgtttgaaaaaatgttatttcatggttttaaaccagatggagttactttcattggggtcctttctgcttgcagcagagcaggactggtggataaaggacttcagtattttgaatcaatggtgaaagaacatgtaataacaccaatttctgatcactacacttgcatgattgaccttctcagccgagctggaaggttagaagaagcaaaagcctttattaatacaatgcctcataagcctgatgcaattggttgggttaccttattgagttcatgccgaaatcatcacaacatggacattggtaaatgggcagctgagtctcttctggaattagaacctcagcaccctgcaagctatgtattgctttcaagtatctatgctgctagagggaaatgggatgatgtagccaaattgagaagagatatgagagacaagcaggtgagaaaggaaccgggatgtagttggatcaaatacaagggcaaagtacacattttctcagcagatgactggtccagcccatatgctgatcaaatatattatgagctggagaactaaatcaaaagatgatagaggaaggttatgtgccagatatgagctatgttttccatgatgtagaggagtctgagaagatgaagatgcttaactatcacagtgagaagcttgcaattgcttttgggctaatatttattccatcaagtcttcccatacgagtagttaaaaaccttcgagtttgtggtgattgtcacaatgccactaaatatatttctaagatcaccaaaagagagatacttgtaagagatgctgttcggttccatttatttaaagatgggaaatgttcctgtggtgatttctggtgagaggatatttaaaaatcaggagcatggcaagagaagggtggaaattcaattgattcgttatcatcattttgcagcaatcatgtttcaaggaactcagttaataagttgatgcactaacaggcttttggtcgtcccagttgatttggaatggatagttttgtgaatttttatcaaccacattttactagccattatcagtctggttgttgatttcagttttttttggctgtagctggctgaggatcatgaaggtgagtggtgtagaattaagctttaatggacagaatctattgatactagcaagccactgagagatgtgtacttatttcctgcacaaagtggctatgcttcacactcaaacagaagatgttaattatgctttgtgatatgtccaccaaagcgttgtgtacacatttgtgcgggaatgggattggaatttatactacatttttgtccttaattcatttgagcaagttatggtgatggaattggtgaagaccactaatacttagttatttgtttttacaaaaaaaggagaaattacattaaaaataaagaatatccagtctgagagaacataagagaataaaggaagagggaggaaaacacatctaaataattctaaaatgttctcaaatcaagctgattagtctattgaagcttaagctttgtgaatctgagtgaaaagttcttggaatgtaaacaattaacttcaagtttattgctatgatgatttgttcgagctcccttgaccttgatgaggattctgcattcagtgaagaaaagctgcttatgttaatgtaaaagttacaaaatggaactcaatttatgatacaattgaaatgccataagtacttacctgcagctgagtacagatttctatgatttcagccgaaggtgcccaatcaccaaaattcctctcaatgaactggtatgcaataccgctccttccaccccctactatgaagagtccacctttgatttcaccttctcctttgaagttttgctttatccccatagcctttgcacgcctgtaatttgttatggctcgggggttgaaaataaaacctgatatgaacttgtctttgagcagttcccccccaccaagagctttgaagaattccatattccgatcatggactacaacaccaccccagtagcggggccagaagtcttttacctgcaccatttgattagtgattcaactgtatgttgcttgaaaattcaaggaacatgaaattaatgctgaattacctctgactctatgtactcatgaagaaccgcatatagttgaactcccagtgcgtcgaataagggttttttggcatatagttggtgagcttcagctctacacatgatgcacctgtttcgatccaacagagttcagaaacaaactagaatcagtttattgctcaagggatacaaattcttcaggaaaagtaaagtctcaaactttgactaccctgttattcacaatcttaaaatccatatctcatctctctttttctcattgtttgtttttttttttgggtgtgtatgtgtgtgtaataatgatgtattaattatgagcatagtagttgatgaaacctttgtctcacattatttgtttagagtaatggtaaatgtattgcagagcagaggcaaagttgacaaaaggagaccatgcagaaaacgaaaaccaggtgcatgtaattgatgttttggtataggatttaccctggacgtctaatgcagaggagaacagctggttatctctccacaattccgatgccttcatcggaggtgactttgctttcactaaacgactccatcccaatcttgtattctggagtcaacttttgcactgagatgttttcaatagtagagtaaggagccacttgttcaacaacaggaggaggtttcacacaaccacatgctctactctgagctggcccagcagcaacaatccctttgaaggtgtatccatctccaatcttgaaatcagccaaagattgttctagttgtttactgctgtttcgagccattggtctggttaaacttctcagcttttgagaattgacctgcacaagactcttcatgctgttgtttctagaggctgtgctgtttgttcttgttggagggagtgcgtgtgatcgggttttaggatcagtacatggaccagttttatccatgaaacgggcgatatgtcctctcttcataccgaactgggaaaaaagatctgatgtacttaaactaagaagctctggaagacatgtcctggataactcaagcttatctgcatattgcatcagagaacgatcgtgtagatatgtcctgatttctagtgcatcctacagtgaatgaaaagacactgctgagaatgaatgattagaaaaagaaaacagaaaaattgacttctaatctatagatgaccaaccgaccttctcctgttgtgtcatgcttattgcgtccatatcttctaagctcatgatcttcaacgtcggcacgtcatcccagccttcttccaaaagctttggaagcagttctttgaggattccattcccaacaaattcatcaattgcaaaagaagccatgtttggaagaaaggagagaacagttcaatcttatcaaacttgttctactccctgaaatctttaaaataccgagtcttatgagcaaaaacaaacacatattttcggcaacatcaatgacgtaacagttgtatattcatataaatattatatatgtatctgtcattacaatccaaccaatccacataatctttattttgtcaatgagtatcaagtttgaaaatttataatggttaagtaaattagtctataagagctaaactccaaaagctgcaaacagtgtccagactgagaacataataaaatagatgccactaattaaagaagaaaaaagaagtaaactttggactaaaatattaagtaaagtggatagatttgagtttgtcgtgagcaggtggattgcaggccaaattgatcatttttgttgtgtcattgccggccaagtcctgcttttgttatatattattattttggaaaattagcggtaaagttctaaatttattttgatgtagataactctctattctcgaaaaataacggctataatcctcaagttcgcgattcctgtaagtttgttagttgttctaaaactaacacgtgttgatgatattaaattgtggcataagttttcaaaaaattcactttgatgcagataagtcgttagttttgaaaaattgcaataaagtcttcaagttcaagattcccattaatccgtaaagaaataatttaacagctttcatttgttattcttaaaattgtcacgtgtcaaaattttattggtccacatcataaaaaaaattattttaactgtaatactttttttttttcattttttattaaagattaaaaacattatatataaaaaaaaattacaaactttatgattcaccacccaactttctcggtggtggaggcttactgcgtcatttccaccttcttctttgtcccatttcactattcaaaaaaaccaattaagcaaaagaa

SEQ ID NO: 256070 - DNA, 1057 bp, Cannabis indica
cccttatattattttaatagtgcaacagaacggcagtgcatgatggagttggtaattatcttgcttatattgttacaccttatttctctatggtttcgcccctaaaggagggtagttacgtaatttaagtgagaagaatatgagggtaaaattggtataaaggagaagaggaggatactatagtatgggaggacggagctgaggaaattttatgtggtgagagtgtgtgaatttgatgtctttctcattttcttgtttatatgggggaagtaccattcgaggaaggacagatccaagtgcacatggtacggtttcatcattttttatatcatcactactaactacgtacatgcatgacactcttcacgctcctctccccgcgtcaactacactcgccaattctattccgacacgtgtaacaattcttactcgtttacaacaaagttctactaccattgctctttcttcgacttggactggttggcggttgcagcatgtagcttacctgtaaaatttgacaggagggccaattatgtaagtccacgtgtaattctaactttttttttcttcaaatgcttagtttgcaaagatgataacaaaattgttattaagaattagaggtacctaatactctaccactagttagccatatttattaaatgttattttttaaagttatataagattcgatgcttaattacactaagaatttatttggaacgcaagactatactagattagacaagttaagttgtccagtccaatgtttaggcatactggaagtctggataactaatccagctaatcccatccatctgcgattacatatcccttccagtagaatcagataaataatactatacagatgatttttattctttttttattttgattttgttaatatatttcaatataattaataagaattgtaatgagagaattattacagatttacttatagatttttaaatcaaaaacttattcattcaaaatagtggaaatgtataattttgaattatcatacctaagttttcaaaattgaaaataatattaatta

SEQ ID NO: 256071 - DNA, 6574 bp, Cannabis indica
aaaaaaagaactagcataaaatttaatattcgtgccttgcacgtagctttttactagttatattataacgctcaataaataaatgtaaaagattacaaatattgaacaacaccgcacaaaatacaacttaattccttagttaaatataaacaacaacaaacattcaatttcaatgaatcaatataaatataaaatttatagaaaatatgattttgaaagttttattggaaaaaatgacacccaatattttcaccaaagttacattctcatattgcacattcaccactaatttaatatggttaataagagtatctttaatagtaactctttaaaaatactaatacatgccaagtttgacatcaatattagtttttgatttggcttttagacctctccaatggtattcttccacgtcactaagcaaccccactgtagatgctctaatacatgccaatgagtgtcaatcgttattcaattatatgattttcttatatagtttttttttcttaatttgttcccatgtaaatatatttaatttaagtgactagtttcgtataatattctatcaagtgataataagacaaaataccctgcaacttctatcctaagcttctgtttaattttttttgaattagtaatcctaaggctcaatatgcacaacacccagccagattgaatcaaacaaaactatacaaacaaagcaatttcatactgcactaacacgtcagatcgtaaccaaacttcaatagccaattcctactcagccttattagcaggtttttgggccggacttccctccttctagtcttacaacgatctctgtatttccaacgcgggcacctgggcttcgcttgttttcttcaaccctaggtttgctgtggctgccttgtcagattcccgatggcttaccatcttcttttccttgtcagattcccgggggcttaccatcttcttttccttgtcaaattcccgggggcttaccatcttcttttccttgtcagactcccgggggcttaccatcttcttttcgatgttttcaaatttggcagtagccaatggagctgtgcccacattttttgcattgcttgtagagtcaattgtcagggctgccgcatcatcccgagatgcataccatgagtgaccacaaccaatgcactccaactgaagccacaaaccagagggaaaaggtcaatggcaaatatggatgatatgaaccatttacaatgtaattaatgtgaatgtatcaccagttcgacataatcaacgtaatgaatctctgtttatcattttctctttgataaaatataaaaggccacattctgtttattttgcattacaactaaagccaaatgtgtagctgctaaaataaattgtataactttggagctagtaagcaagatcctggccgaataactacaacaaatagtagaagctacccagctacgtactataaaatgattatgaaaacacaaacctgataacgctctccgtgtccagctttgatgatatccctcacaccaactttgaactctgaacatcttgagcaacgagcttgagtcatctgcttcacaagcagcagataatacagaatgagaaccaataatataaaggagaaaagtatactgaaataaaatgaagttacctgcattctttctaactcgtctggttccgttttggtcatctcctcagcagttaaaccctcctgaaatgttgatatttagttttgctatacttcttgttactaaagctaaaaacaagaaagcaaatataaaatacaaagtaggagacaaataaatgcatattatcattctattaagggctgccgatcaaaatttagaccacatcaaacaataataacaatatcttttttcattaaataagacagaaagttcaaatcatcaacttagtggcatttgtgctaaacattcgaattatctcacccaatttgtccagtaaaacctcaaaatccaaaatatgctgaatgatatattactaagttttgcttatttcttaatacaacagcatgaatagatagattaatatatataagcatattacaaaaatcttgctcaacctgacatgaagttctactctcaccatcttttttttttttcttatcgtttcttataactcccacccatcaattttctctttggccagctcttaaactacatggcactccaaattgagactataactacagggaacataaatgttgtcccacaccaagaaaccctccaaggtcactttgcatagacagtaaaattgctgcattggtgagaaattatacagacttggaccttcaagtttagggctaggctttgttctgaaaaaaaaagttagagagctacgctgtttaccctcactcagagcatatgcatttttattgagagagaataatcttcttactttatgactaaaagaatatgtagttatagttccaaattattttttgattgaagatttgaaagcttagttaatcaagtgtgctagacactacagtagtttaaagacatcaacaacctagctttaacataaaattaaaaaaaaattactcataattgatataatgaacaatatcatggctgaccagatcaagctctggtacactagtcaaagtaacattacatacaaaactgaaataactgcataactaaaatgtcagaactttcaagatgtatgaggctgctatcaagtccatacctttacttcattgggtgacatattcagtagtttcacaggatctaattctttatttaaaaaacgcctggcaagtggcccattgatctgtcaagataagtaaaatagacataaagaagaaacataagcaaggatccaaagaggtctgaaataattgttattgattataaagccatccaagttcagcatctcagtcatataaaacctgaactttcaagagcagatgcatgactgtgtttgtggcatgcctgaattgggatgtcaatcttgaatttatggatggatgaaaattaagaaagacaagacatgacatgacaacaaatccacttgaagttggattaagatagaaagtttctttaccttcaaatttgaatttaagtgccttaatttttgattatacttccgaaaatcgagagaaaaagagtcatgtgcagccttctcaagagcagcaactgctggaacagcgtcatctggccagataagggtcctgttgccagtctatgataacagaaagaaagtaagaatcagactatcagtcaaaatcttcctgaaactcccatccgaattacaaatgccacttcttgggataataaaaaaggaaattggaagatctagaaaaagagcagttgcattaagtaccttaagactcttttcttgagattcgtttgcagcttttggacgcataatatcaccatcatggttacttccatcagcaccagccttgtctttatcatccttactgtcttcagcagaaacgcagacatgctgaacactctcaagaagcttctccaaccatttatcacgctgggtttcaccaggtagtacattgaaattcaccaaaatgttgtaatattctgaggctttactggaacagcttcccggcgtatgcgtatcatatttcgaagtttgatcaggccttgttacatcttcttctcctctagatacatcaattggagaaatggcctttctccggagacttcttttggactttaaatgatcttcctgatccacactgctatcttcaggctcaatgtcagggagatctaccaatcgcttcatagttttctcaaccagtagatcaatttcatgctgctttttgtcctcgtagtccttatcggttagcttccaaagttttttctcaacagcatcatacacttttctcacaaaaaatcctggatactgtttccggttaggaagctgcttgtgtaatggaacaaaatgaaccacacacttgtgcattatggattctgctggaacgtcatcacggtgaaaactgtaaaacagctctctagtgtcatttgattgccaatttccaccaccttttttctctgcctcctcaggacgataaaaccattgtccagtgaccattatactgccatctttgtcctgagcaatatcctaaatgaacaacagaggttcagtactattaaatatgattgtcatttcttaagtagaatgaacatcaaagaaattacaaattcagaagcatcaattggcagccaaagacaatcatgaacgcatgtgaccacatattaattggtagagtggggataaaatgtccccagttcaataaaagcctggtgaggctcacataaaatcatgcgtattctactacagttttaaaaacagtcttacgtagctaaattggaaaacaatattcaaggcagtatacaagtaccttaataattgccacatagggcttttgaaacctagtctccggaacaatgagtacaggatcctcctgcagaatcggcaatggtgcataatatcagttaccaattaaaaagaaagacaacaataaacatagacacacactccggaactaagaatacaggctcctcctgcacaattggtcatggtgcatactatcagtactggttagaaagaaagaaagaaagacagcaaattaatatagacacacacacacacgcatatacataattacatatcataatgaacataagagagattagtggtaagtggtaaccaagtcatcgacattgctgattaagagttctcgaaatgccttgttaactcttttttgaaactatattaatgcccagaagccagaatgtttatcaaatagaacttgaacaatctattgcgtttgtataaacaagtattttttacgttactgaccattcccaatacaaaaccctttcaacttcagatcattactataagtgaataatgaaaaacaatggtatcatagctcgaatcataaacactacgcagaaaaccttctccccccagaaaaaaaaatgttaagcttatttcattttgctatggcaaacgagaaacctaaacatacttacccattcccaaatttcaatccagaaccccaatactgaatccacgactcaccattccaaaatcaaactcctagccctaaaatctcaaatcaattatattttttttcttgaaaacaaaaaagagcgaaaattggaactcacgagatcatactgattgccgtcgtactcgaacgcttcgtaatggttcttcttactccttccttttccagtagtcttaatcgaatccccaatcggtttagcatcttcagccacttgttcttcttcttcctcgctcggcggcgaagcctcttcctccttcttctttttcttcgtcggcgtattatttttcttcctcttcttcttcttactcttctcctcttcttcttcttcttcctcttcctcctcttcgtcttcctcttcttcgtcttcttcatcctcttcctcctcttcttcttcctcctcctcttcctcctcgtagtcctctttcttcttcctcttcctcgtcttcaactgtttgtcctccgacgaagtcgaccgttgccggcgcgccggaacatcgttgtcttcttcgtcactagtggaaacctgagcaaaccttctgttccccattctccctcgaagagtcaaaacggagtcgttttctggttcaaaagatttcaaataagagttataaaaaacatggggtatctccttggacaacccgcgaagtctaagcggtggagaaagttgaagttttttttaattttttttttaaaaaaaaaagaaaggaaagattatggtagtgtttggttggaatgaataaaaatgaaaatgatgaaaatgagaataaaaatgcaatgaaataaaatttaaaatgtatataaagaaaaaagaattactttacatattatgtttctaaaaaaaaatttaatttacgatttgaatttctcaagtggtttattcattggttttatggattttggttgcgatttagttgttcggttagttacaataaggatatttatgtgaaattccataaaaatgtaaaaaaaaattccaaaaaaattatttaaatggtctttctttctattttaaaatagaatgttcattctactaaatactattctattagaatggcattctaatactttaaaatgcaactaaacttgagattagtgtatttgtacttactattattgcattattacatctatgtcattacaataaaattatcctaaatatttacttagagctaattataaatatatatcttaaacaaaattatagcaccaattaaaaaaacaaaataaaaaaaaataaaattataaagtatgattaaaatttatttaacaatttaaataataattaaagctattttatttatatgcttttttacaattacttttattattattattaatttaatttaaaacacatatatcacttgtgttttgtttcaatgtaaaaagaaataaatcaatataattatatattagacactaaataaattagaaaaagaaaaagagaagaagagaagaatatgaattatatgtatttaaatttatattaattggtttgacaaaaaaaattatttaattagataa

SEQ ID NO: 256072 - DNA, 3098 bp, Cannabis indica
tggttctggtctatcattcattgaaaatatggcctagctaatatatataatttctagcttatatttatttgagttataatgtgtgtgtgctttgtatattatgatcatttgcaataaattaacattatgtacttgcattacatagtataatgagtattattattagcacataattaagctgtattggagatgtatagtaaaagtgaatgataagtattaaaagtcttgtaaatgttcagaacttcacatcagcaaggtatacataattaaacttggttgggtccaaaaatttgtaaattaagttaaatgataccaaaatttttttgggggaaaatctcgattcctaagcatcaatttgttctctggttagcaacattgattgtctttatctcaaatctagacttttcaaatttggtatatgttcaaacaattatctttggttactttgtgggaattaatgtagaggaaaacaatattgggtcatattatctttgattgtcattttagtaatagttgtttaaggaaatcggggagtggattacctagaggactaagcatctatttggcagctttagttaatttggaatcgttacacttacactacaggaacaaaaataaatttctttggaatcattacatcagtgttaaagtgtctagccattagtaacaagaaaatgaaaaacagaggaaatgaaagagaggaagaaagagagagcatagatatgagaaaataaaatgaagtcaccattacaaaataaaataacatcattggcaaagcaaaagtgattcattttcagcttctcacatcgttcaggaaacttaaagtcttctcttgcaccaactttcatcataattcttgacaaatattctattctcaacacaaaaagcaaaggcgacatcagatttccttgtctcaggctacgctttgctttaaaaaattcatgcatggtcccattaatcaataaactgtatttaggagttctcactcatttcattatcaagttaatgaagttagcaggaaaagaactggcaagattttgtgcctaagatgtgcaatggttttttgctcttgagtcaggataccagttggtgtcacttgagttgttgctggtggaaagattggcctgagcttagggacgattctgagtctgtgtgctagtgacatctgatcttaaagagcgtattgtgaaagatttatcaaaacgaaaagagcaatcttgcacagtatgaccaaatcgcaggcattgagggggtctgttattgtagttattgaagttaccactattgttccctctgaaggtgttggtgttacctctaccgaaggaattttggatgggattaaggacagatttattgaacctgccagcattcctgttattgaacggagcatttccattggtgaagggtctgaatcttcgaaagacaatattggcttcagcaataggatcttattcatgtgtcattaggttggcactcagatcaatctctttgtttgatttctcgattctcaattccgaagcaaggagaaaagcttcaatctcaccaacagtgtagttcttaactctggtgttcaatgagatcacaaacgtgtcatattcacttgggagctccttaaagatggcagctacatgatcacgatcagagagaacttcgcctactgaagcaagaagatccacagtctgcttgactttaagaaggtactcgttaagagtcatcgaaccttttttcagattctgcatcttggttcaaaactccaagatttttcgatgagacttgcagagtgaagtgtttctctaaggaattctaaatatgatgtgatgaattacacccaaccattctcgtcagtaaactttcagtcatggatgagagtaaccaagacatcaagagctggtcttgaacttcccattaagagtaaatcagattaactctgttagcttgtcgtcttcattgctcaagaactcagcaggagggggttctttgatgtatttcagtagacgatcacctctaatcgcatcaagaacttgttgcagctgcttccacaaaagaaagttgtgatcattcaattttgattgaaaaattgtgattgagcatgactcgttcctgattttgtcaatttctgacaagagctccattgacagcagctatgttcgaaggatttgcaccagggatcgcaccaccattcccaacagtcgtcatgttagcagttaatgaaagctccctccatcttttttgggagtgctcttttgctagagctatttggtttggttattcttggaaagttaaaactagtgatgctaactttttgaattggatagttggctgaattggttctttaaggaggagcatagacctagcagtattcattaccacctcttcttcgggggggggggggttgcaactgtttttgagagcatttggaatgagagaaacagccttgtccacgatggaaaatcaactcctattctagttattctgaatcacatcaataggaggcttaatgaacttgccgaggttcatttaccagctattgctttgttgtccaaatggctcccgcctcctacaaaatggatgatgtgcaacaaagatgttgcaattggggaatctcagtcgactagggcaatgtgtttagcaatgaggatggagctatcacaaaaaattttacttttcgaattggtcattttgatcctctggtaggtgaagttgctgccctttgcaggagtgcagaggaagcggttaagcaaggctacaagaatgtgatttttcattgtgattcaactaatgtggtgttcacggtgcaaaggaaacgttatgaggttcataacctgcaccacaacatctaggatctagtaaacaacttcctttcctcagctaacaatctcaacctcaaggaggtccattggatctcgagaaagtacaattaatggtgtgacccattttgtagctcaataggcaaatgaaacaataggtttggatttattgatttggccaattttgacagtttcctgcacactagtttggcggatggctatgttttgaattctagtttagtttagttctttcgttgtactcaatttcggtttgttagttttatttctgtt

SEQ ID NO: 256073 - DNA, 3397 bp, Cannabis indica
taataataataataatagtttcacaactttcactaaaattacatttataccctttttttctccatttctattacccatttatacaaaatttcacaaatacacaaaccaaaattatacattcaaatttatttattttatttttatttatttattacgtcatcacagagcagatgagaaaggaactccggtggccggaatccaagaacctccggccaaaaaactcccaacagtaaacttcccggcttccgccgcactcgataaaacacgataaccaggccaattaaccctccctccggtaccggcgccggcgccggtgttcatatactcggcgtagtaacaagtactcagagcaaaattcccactccacggtaaccaaccggcgggattaatattcccatcaagaccggttttcatcacaaccgttctagaatacttctgccacggccgacccaaataagtttccgacgacgccgtgattcgagaattatggataactattccggtgttctcatttgggtcggttcgggcttgggccgtgacggtgtttttctgtccggacatcggtttaatggcgtaaatgtttgagttttggattacggcgacggcgtcgccgaagatgaaatcgacggtgccgtagatgttgcaatcgcggtagaattggcgctgagagtagacgtataaggtgtcttggtagcctttgaaactgcatcggtagaagacggagtgatcgctgccggagcggagcgccaccgcttgatgttttgccggtccggcggtgtttacgaatgtcatgtcttgtgctatgaaaccgtcgccggaaaccgctgtgaagtttaaattttgcatgagaatttgaagaaaaaaatatattacaaattaataatttaattataattagtttatttgtaattttttttagagaaatagtaaagaaagttgatatatactatagttatatatatttataccaataataataacatgaaattatattcatagttatgattgaattatatataggggacactttagttagtaatttttaataattattatggataattaaaatatgaacactttcttaagttctaaaaggacatataagtctcctagacacatagtaggaagggatcaataatacaaaatcacttttttatgtagaatatatgtatatataataatattgtatatttgtatatatatatgactagaaagaaggacaacatgcatgcatgcatgattaagtagtagtacgtattagtaaaagttgagtatgtgctagtaaaataaaatttacttttgttaggtatatatatttttacgttagaaaaaaagttagaaaattcatgttggtattaaaacttaattgtttatcataaaatgaaaagcaccaaaaaaaaaatgacaattgctaacacacttgcatgctttgtttgtttgatagccacacatatatttaagatacgtataatacacgttatatataataatatataatgtaataagatttattcttttcaatagtaatttgtcatggctataatttatgtttgatttgttcaacttttaattatatcatgcaaacttaaaccctttattattcccttattccttataaaagaaaaactgatatcaaagctacataggtagatgaatgtcataaaattgattttataacattatatacacgaaagtgtacataatggtgtaatttattattgtaatctatatatattttaattaaataagtaatattagaaacccaaaagtacttaatgtattatattttattgaggttctctagtaataaaattttgaaactagtatcaaatatataaaagtcttattcttatactaactttaaatatggatcatattataaaagtttataaccatattcatatcatgcatgttcatcacaataaatcatttatgtataggtatatatatagtatatatatgtatatatatatatatactcaccaaaagtggctgatctaaaagtagtggaaccatcaacctgatttcgattcccagtaacaacagaaacatccataccatctccaataaccattaaattcttcacatcttttccaatttccacattttctttataaacaccagctttcacatacaccacaactctcttaccaccgccgccgagcttagccgccgcggcaacaccctccgatacagtcttatagttaccggagccgtcttgagccaccacaacatcagccgccgttttcaacgaagattgaagaagccttctattaagccatttgggccacgttaataaccgtcttcgtccgttaccgccaaacgacgtcgttttaggcgaaacgacaaaactagacttgtgaatgaaaagagaattgctaagcaatttggaaaagtttgttaaggaattattatctgttatggtttggaagtggtggattaaaccgaattcgttgaaaccgttttgacatgtttggtggttagcgaaagaagcggaaagccacgtgtgagtatcatcgtaatgagtgttttttactgttatggttcggttgagtaggtcaacggtgtctttgtagaggtcaacacagtcttgccaagctgacttggctcgtgggtcgaatgagtttgtgtcagtggttgcaaccacacgatgtgcttccatggcttggtccatggtcacttttagggccaagtcacggaaccaaaagtggtccaagctaaaattgttggtgttggtcattttttgggtgggttttatgtaatggtggcaaacatgaggatatggggttttgttgcatggtgaaataattgtgccatgcactactagtagtacgtgagtaaaaataaagagtagtagagaagttgttaatatatgggtataaaaattacccataggggaaatttggaggagaaaagtttggaattatagggtagtgtgtaaggaaatattttgagttgttatggggtttgaggggtttgtttatatagagagaaactaagtagaattaatataagtgttgagagaatctagctagttggaaacgtgtgttgatttttcctttgtaatatttttggttgtatatatattaatggttatgtggaaattaatatatatagaatcttgtagactaagcattgatgagtttttttgaggtgaaacttattgtaaaagtgttagctagaaggtagtgttcgaatggagtgtatcgtttaaattgataatatcataggaattgccagaacattacgttataacttgtataaatgtatagttttggtatttagaaaaattataatctatatgtttttgtatagcaatatagattttagttatttaaaagttaagattaatttttataaaattttgattaaaaactgctttcgaagaagtttatta

SEQ ID NO: 256074 - DNA, 2271 bp, Cannabis indica
tgcttttgttttgtagtgagtatgtgtgtgttttttttttttttggatctatttggtaccttctttaggttgaaactcggaaattaatctttggaaatgtgaaatgtattgtttttttatgtaccctttaactagtttggccagacagaactgtgttttctcaaatgtcaatcatataaaaattaatatatgtttggtgttaaatcttaccagtttagaagaggcatatgaagctttaagatcatttgagattcttggagttgataagaaggctgatataaagagcgccacgtgtcgttctgttattgaaatgctcgggtcatcatctccttctcctaaggatttgttccatgctttgagagttaatggtatattgaaatgtgaagttaaagaccagctttttaaggtattgtggagcctttagcacttatatatcatacattgctggagcttgaaagtcattgttgatgagggagtgacctttggtgcctaattttcttctcattatgtagggtattgttccaaaacttaaagctgtggtcagcagtgcaagttcattattggacttttatcattcaattggaagtttggatctcattaaggtaatttacacacattgttggttttctttgattgattcgaaatttgattccatattccagtttatgaatatttgtctgaacccctttgaggtaaattcataatagtaatgagttcctgattttattcttcaatggcatttatttaaacttcaaaggttgtatattgttaatggatagtgataattgttttatttttatatttagtttgaatctatttaatattctttttttttctttgatgcaggatcaaagttctaacgtcgacgttcttcttagtgatgctgatggagtctttcgttctatcaaggttggtgttagacacctctttattgtcctgatattcattaggtttagttccgtttactctctgtccttgttgaattttacatgtgagacaatttaattgtactgtttttccataatgtttgcctgagggtccagtagaggagctgatctttatcccgtgtttgttttttgtcgatttccccatctttcatattaacctttatggtcgcacataatttcaggctttgagccagagtgatggaaggtggcggtacagttctaataatccagaatctagtacctatgctgcgggtaatgactttttataaatcatttagaagtttgcttaaaatttattaggagatcaagtcacttgctttaactgtcaataacaatgtcttgaatttgtcattaacttattgttgttcctgcaggattagcaattaaaacacttgctggtgttatctctctggcatcttctgaaatcgatcaatctatggtgaacaaccctctctcctctttgtaatgtgtttagttaagctgaatatctactgtatgtgatttgtttctaattaccatgttgcgttacctcttgtataaatttcacaagtaatagcatattatggttgcatatgccggcgtgtttctctcttctgattgggtgttgtcagtaatatttatttctaaatcttgcaaatgttttttattggcagattggaacattgaaaaatgatatatcaaagctttttgacagtattgaaaaatatggtatgtgcatattcctccacgtctattacgctttcatcttttcttctcaatttaaaccagggttttatgctttaattttgagttgtcaaataagttttgaagataggaccatgatatagattttataggtgcctatcaaacattagtgttacattttctttctctcaatcactcgcttgctcgttctctctctttttcatttgccgtatcccaatgaggatataacatattgaaaaacttgattttacacagctttctgtgatattatttctggtgatgtcagtgggaaacttgttgctgaatctaattgcttcttaagctgttttgtaatataatgtcagctgtctgactgacttacatttacaatgtagatgatggtacattttattttgatgaaaaagttgttgaggcactacatcagggtcctctttcgactacctcttcagttgttcgagggctcacagcatttgcagatgtcacttctggaagtataaaggtgactggaatggaaccacacataatgttgcaggggatatttatacacacacacatatataaatatgtcattattgaaatctattttcttcaaatgctctaattcttggctttgtgtttg

SEQ ID NO: 256075 - DNA, 3682 bp, Cannabis indica
tcttttgatcaatgcaccaacaaacaaatagggtcttaacttatattttgctaatgctacaatattgtataggtgccttttggttattttgatgcatgcaccgacaactaaatgaatagacatcacatttagctaatgcttcagtattcatatattaatcatttcatttaaatttgtcaattttttaattacattctcacactaaaaccactacatgtgtattgtaatgtaaatgtgtattgtatgtgtcgaaacccaaagcaactcatcaacaagaaaaaaaatcaaatttttctatttcatttacatgattttttaaaggtttttctttcttaattacttacttaattaccatatttacgtttgaattttacggtgatattatcttgggaaaattaggagtaagaaaagaaaaaattttgagtgacgtaaacatctctttaaattacataaaataatacattttcatacattggcgtatcaattacatcgatccaaacaacactcatgaaatgaactaagaaaggataacgacaaatacaacacatatgactaatattccactagtgttcattaatttttttggatcttcaacactagtgctgctactcctatcaaaattttctatgtaattccatattgttaagaaaagattgttcatcaacctgaactcccttgttcaagaccttaggtatagaagattactcaacaattttttttcaaattgttcaggcaataatgcccatcaacatttgatcttaaaatgtctaaaatttctccttcaagccttctaattattttatgcaacaacccaagaaccacctctgaagccctttcacacattggtgggtcgatccactctcaaaaataacacccacaaatcaactgctaaaaaatcaccatttaagaccgaagagaggaggagatgagcaaacgaaaaaaggaaaaaacaaggcaaagaaaaaaattaacaactcattctataacgacgacatatagcgaatcttcttcctggatgtgcatttgtccacaaagttttgatcactggatcgaggttgttgacaagagcatttgggatatggaacccttgtcgttttcttcttcgactgtgtaacaatggtggaagggaaggatagggtaaatgactcgagtagtagggtgtttttattttaaattttaaattttgtttttattttaattttgggtttcttttttttggttttatttattttatttggctaaattgaaagtttatttgttttaggttttaatgccaccatggcatgacttagctgacttggatcgtgccacgtaggccaatttgacacttaaacggaaccagggtcacatgatagtaatgagcaaaacgaaacttgggttcagtagattctacaataaaattttactttatatggttaagtgttaaaaattataaaatttaggtaattttgccgccaatattcctaaaatataatgtttgagagctaacttaccaaaacttatatatttagggaaccaaattgaaaagaaaaaaaaatcagagactaagaggctatttagctgtgttttcagtttttagttttcagaaattgtgttttcaaaagtgagaacaaaaaacaattttttatcattttaaaaatttaatggtgtttgactcagtttctttaaactatgtttttgatttttttttactgaaaaaatcaatattctacaccacaccatgacaggaacccatccaacattggatcaaaccttagactcggaccccaaacccaaaccctgaactcggacttagatctagaccttggactgggtccgagtctatgtttggggcctgggtctgaggggtttgggttcgggtcagggccagggtccgaggtccgggtctggggtccggatctgagtttggggtcttaggttcgggtcggggtcagggtcggagtccagagtccgagttcggtctaggttcggggtccgggtccaagtctgtgcctggggtccaagtttgagaggtctacgtctaggtccaattcgattcgagttcgaatatgggattcagggtataagtttaatggtatgagtatgtgaacaaaaatataaaatataatatgttaaaaccaaaaaaaaaattattttcgaaaattaaaaaactacattttaatgttttttgcattctaatttttaaaaattaagttgaatattttaaaaatattttactaaataacttctattacttttaaaattatttttagtttttaaaaataaaaataattttaaattataaatactaaacccatataattgggtttcctgccgtacgataaaatcgaaaaatatttggcgtgatggtggagttgttgcttcgtcgtgcagtagaaaacgtttgttgtccacgcgctgtggagttatgaggctgtgtggtctgtgccctcacgcgccacttaaaggccacgtagtgattggttgatttgggcggctgggctgcaactttacacacctcccaatctccgcgagttcgcccacctaaacctaattctgtctcttcgttatactacagagcccatctacaacagccacaagtttattttgttcaactcctctcggtctcatctcagctatatacgaataatcctctttttctcgaaattctgcatatcaaatgttaatggctttatttccatactattatttattagtgagtaataaaagtggtcaactcacttgtgtctatttatttctttattattattatttttttaaaaaagagaagtttatagcaaccaattaattcttttctgatttccaaagaaaaaaaaattaatccttttctttttttctgttggttattcttgaagataacactacaactaccttgctgtcattgcttcattctagatatttagtattaattatcatttaatccactgaagatatacagtacttttcacacacgataatataatttgaacctgaacctgaacctatagctaatacaaataataacaagtatatagaaactccaacaaatcatatgcaactcaaatctttactaatataaatcaagcccattctaaccaaaataagctaacaacattagagagagaagagacagaaagaaaaaagaaatctgcatgtacactaatattaaatacacaacatgagaagcagaagaataggatgatttttattatatagattaaatactattagctactctttctgggtttgttttttctcctacttttctttgtgtgatttatttccttgatgttattattattagctcctcctccaatggttgccgatgattcttctttgtcctcaattagcttttgatgatgattagtttccccttctactacttcatgttcatcgattttagctttcttggattgactctggctaataataatgataccatcatcatcatcaccaactactatttcttcttcttcttctttttctgtagactttttcaatgctaattttccgaggcctacctctctttctcggcgtcgactgatgatgatgatgatgatgaggctctccttttaaagatgaagctggttcagctatggctactgaaatttcctttgttttctgatgctgcttcttcttcttacccatatcatcaactttatcactacttttgcctttatctttttaaccaatcgaaaacaac

SEQ ID NO: 256076 - DNA, 2513 bp, Cannabis indica
attttaaaatataattaatcttaattaaagttttataaggaaataaatgattaggttactttcaggttacaggttattttttatttatttttatttaatttccaaattaatcacaaccattaaatagtaatccaatggtttaaaaaaatgtaaccataatggctacaataaaaatgtaaccattaaaacctcttccttagttattctatattatatatatagttaccaatattaaaaatgtacctacaataatatgcttcctcttgtggtgtttgaattttactgtgccccctaacatttttctttattaagttttttacaatattagaaaaatctatattgcagccttaaaatattgttttagtacactatttatttaggagagattttcaaatttttttttataatcatatacgttatacttatataaaatccttataaatttttaaaaaattataaataatttaccatactaaaaataaaaaagtttaaataattatttactatatataaaaaaaataattatacatgtaataaaatattttaaatttatttttagtattataaattatttaaaactttttaaagatttataagtgattataaataattgtaagaaacatataatcataaaaaataaattgaacaaaaatgctatcttacgtaaactaccaaaatgaaagggactgatttatggcagaattacactaaatattttagagcttttgtactattatattaaaaatgaagtaaagtggggagtggggtaggttttggtgaatcgtgtatatacaaataacgatgaagcaactaccgcaacgtttggtacaaataaaaacaaaggttgttagaccaagaaattgtgtctgtaattgattaaacaatattaattatcatgtggtttgattattattattattattaacattgatcattttcatgtatatgcagctagcagtgttagaaagatgtgatgataaggtagttggggttaatgatttggtgtataaaattgggtaatgaagaaaattattgccttggaaggaatatggatgtgctggcctgcctagatagaagtgggtttaggagttgaatctaagaacgaggcgaagagtggttataaagtcacttcttttcgtatattttatataaataagagaaatattgtaatttaatattgagttatataatttagatttaataaataatataaaaaaaaaattattatttataatatgtcatatcggtataatgtttagctcgttcttctagttctacttctagctgtatttctcgagggttatatcccagctaatttggaatctactttggtagttgatttgatttaataaaagttaattttttaaattaaaaaaaacactttaaaataaatgataataatgcttaataaatataattgcaattttatttatttaaaatgaatctaaacttgtcaaaagtgatgatttcttaggcaaaatatattttaagtttgtgtcacatattattactcattttatccaagtttacacctaatttggaccagttccttctagctagcatgctacaatattgtgttaataatgcattcaatattattgtgcacgtaaattgtaatgctagcaacacaatattactattagatcttttggacatgtttaaagaacatcaaaaagaagaaaaaagagaggaaaaaacaaagagaaagaattagaagatcaaagatcaatcttattgaatgaactacacagtcggtagtttatcaaggaatgtactgaaagaattagttacaaacaaagttagttaagtataacaagctaataacaactttaatcaactaactaatcctaacagaaaactaattctcatttcttcaaatactccccctccaatcaattgtaagtttgcttcaaaaaaaagtactgctatcagaaaagtgaaattttcactatttcgattaaaatggttgttagtgcatgtaaactactttttctctcaacgtgtcccatagaaaagtaatgcacaacggtgatggctttgtccccgtgaaattgcacgatttttggagttgtgtagggtgagattttaacagaacactaacgagtataagagtaaggaaaaaactttttaaaatttaccgtaaaaagaagaagattttcaattttttgaattagggggccattttaaccaaatttaacgcaaaaccaatcttcatattcacgttttagtagcatgaattcaatgtgactagtgccaaaaaatatttcgagatgggtccgagccacatttcacaaaggggtaccactacaagaaatgtgagatttttactatttcgatcaaaatgtttgttagaggatgaagactatattttctctcaacgtgtctaacagaaaagtgatctacaacggtcttggctttttccccgtaaaatttcacgattttttagagatgtgtagggtgagattttaacagagcactaacgagtgtaagagtaaggaaaaaacttgttaaaa

SEQ ID NO: 256077 - DNA, 4997 bp, Cannabis indica
tatgattagtatccaattaaaatgcaacaaatgcatttaattaaaaaacttttgagatttataaatttttttttacatgaatttttattttcaatgttttatcagcaatctaaaggaaggggagccataatcgtaaacgtgtacgtagatgatataataatcatagggagtgatcttgacaaaattaagaagttaaaggaagtgttggaactgaatttgaaatgaaagatcttgataagctgaggctttttcttggaatagaggtggccgagtttaacaaaggaacattagtgacacatacttgacctgacattatttttacagtttgagtagtaggtcaagtcagttcgtgcatgatccaacagaagagcatctcgaggcagtttacaggatcttaaagtatttaaaagggagtctagagcatgattttctattcaaaagaggaggagagttggaaatcgaaacctatacagatgttgattgggcaagatatgttgttgatagaaggtaaacgttaggttggtttaaaattgaggaagagaacctggttacacgagaaggaaaaacaatccagaagtagtgtcactcgagtataagtcagtgcacaagggaagtgtgaattctttcatgaaagaaattacaagctaagagttacacctgtgagtcctgtgaaactttacagcgatagcaaagctacaatcaacatggcaaataacacaatgcaacatgatgggacaaagcatgttgagattgataggtgctttatcgaagagaagccggaaaatggagtaatttgcatgccatatgttccaacaaaacgaacaaaagactgatatctaaaggattctcaagagtgctatttgaatctcatatcgataagctggtttatctaacatttacaaaccagcttgagggggagtcttgtattcttggcagtttagttatagtcttagtttaaatttaaataatagtaattaatggtaaatgtatttaaatctaaatattcctaaattttagaattgttatatttagtgttttatttttagtaaatacctaattgttagttactgccctagtttatataattatctataccgtatgaatgaaagtgagcagacatacaaaaatatagctattactttgctttcttgcattaataaacaacagtgtattcagctggttccaatacaaacaaaatgatatatttcccaattttcagtgcccatattagctagtattaacactctcagactttccatattaactttaaccataatcatgattgatagtacagacaaacatattaaatcatatcagttagttgcagaatggatgaaactcatacctcagcacctgaatatttatcagaggagcctaatttcccacaaacaaaacactggtgctgtttatattcgcaattcttgcacaaatattgctggatcaactggaagttttacatgataaaggacataaacgaagattattccaataataaacaacaaaaatggaatcaagttgcaaaattcgtacaaatcaacaacatacatttacttcatcctctgtatagccaagagaaacacaattagaatcttcaccgctctccacagttgcatggaacgaccttaaacagctcccttcgcaactacagtgaatcacaaataacatcaacatcttaaaattcaatacccgggtttcagaacaaatgctgagagaactacaaaacaatcatgaatgaggaaagttgaagtggaatattaaaattctattgtatctaaataataaaaataataatgtatatcttcacagtggtacacaaccaaacttccacaaattataatagacaaattgaaatagaagcagtaaactgatccctgaggcaatcaacaatgtcaactcaacatatgatcttaaaaccaatctactttctcctctttatacagaaactaagatttcctgccgaaacttgcaaaatagaatttcacatagtggttctaaaatttcttgtgataatgtccacacacagagggtgatgatgaagtatgcatctgttagtttctttttttgttgaattgcagaattgtagcgttgaggtagcttttgtgtatggtaggatgaggagctttctaatatagggtcaaccactttttctgagttttctcttctttataggttttccatttattctgaatttctttggaggagatttggtcttttataacttaattcttttttaaggggaaaaatgaagaagaaaaggttaaatacattagtactaaatagattcagactaatgcctatttcacagaagaatctattttactatcccttcaatccttcatacagctactcacttataagtattgaattgacataaatgttcatacatcatagacgtatccactgattatgacacataaatttacaatagcatagaaaattataaggcttttaatagtgacgatagatacaataatctaatcatttcaatacttgtttagacgtaaaaacgcattatacaacaaagctcgggaaaaaataagagtgatagaagggagccacactaataaataaaccgctatttaacaactatggtatatagagtagcatcagaaattaaatgttcagcagcaatagcataccacaaaatatcaccaccattatcacaaaaagtacagacagaatcaaacagttcatcatcttcattggaatcatcctcttctgcatattctgtttcctctgtttcatcaactataaaacttgaagttgttgttgcttgcctttcctgaaaaatactttaattttccctttcaaaaagtggataaaaaaaaaataagataggaaaggaaaagagaaaaaacataaatcaaggaggttataagtgggacaatatgacctcatcaggtgctttcctctttctgggcttctcatcaagatatgcaagtaaaaactgtgcaacagacaaattaaattgcagttaagatgtatgttaaaaactgaggctctagttgtaagacatagaagtacaatagaacttaaaaccattgcatacaaagaactagtaaatgtagcaaattgacaggtagccatgcaaattaaattagataacaaactaaagtgtaggagtaacaaggaataaaagggactcgtgagatgattttcagtaattcaaagatggtgtggcctttactacttagcatctaaccaacgattcattgaaaacatagctaatattatgttatgttataatgcttctacttttcagtaaagtattaatttcaggatttatcgcatgcatgctgaaagtaaaacgaataagattaaatcctaacttcttttaggattaccaaatgaccatgggggtgctgagtgggaaggaaactatacaaaccttggactttgctaagatgtcattcttttccatagcttcaatgatcaaagttttttgatctaccaaatcattcttggaaggcctaacctcaaatgaactgtaataatgaataaaaatgtcagtgaacaatggcaccgagataaaacaaaaggatgattgtcactatgtgcgtaagtgtaagaaacacctgaaaactttagacatgtgatcccacaaagatttccctggtgtatcaggatttctacttataaaatgaagacagttcactgttatcaagattgatttaatgactttctcgaaactctttctgggcttttgaagaacgatccaactattatcctttgttagtacagatatctcgggcttcacataggaaagatcgaacttccatgctatgacttgcttatatagtttctggagtccattatcagcagtcccatgtaggaaaacttgtagattatcaccaccaatttcctcattctccctccattgaattggcaaaacagaaaatgaaacaggttcatctttgtcatcaacaaaatggtaatttgcaacagatagtggcagagcctcatcctcgtcatctgacgatgccatctactttctcttaactctaacccaaccaactctttcactgtcaagagaagttcaaacacaaaaataagtaaagctccatctgtgtcatgccatttgttcttaattgtggtaatataagtgattaaatttcgaaagcaagaaaaatttcaaagtatcataatcttggttggaagcaaacaacaaatttaaaagggattgtgatttttaataataacaataattgaaaaaagcaaatacttcacaagaatcattattctttcgtttccaccttcaagaaaatatttctaatacatacaaacaaatgaaacataaagtgagactaacattagcttttgacgccggagaaccagagtggcgcgcgcgaaagggagggatttagggtctttgtgtgaatttgagaaagaaacaatagcttggacggatgaagatgaagcgcttccttgtttagcccacgatggaattggagtccattttttttttactaaattaccgtgatttgttgatgggttaaaaaacaaattaactaggattaattgcgttaaaatcttaatacttttattttatttgaatttaactcccaaaactcaaattttggcgataaaaccttaaaactccattatgttagttattagccatttccatccattttcatctctgtcgggttgttgtatccacgtgtacacattttacatgaggtacattttattggtccacctaaaattattaaaaaaattaaataaatcattttaaaaaaaattaataaaaccaacaattaataaaataaaataaaataaaaaaaaacctaattctatcttcaaccttctcactctctctttcatttttctctctatctcgatagaatctactgcccataaccaaccaaaaatctagcaattgatggttgaaacgagccacaaaattaaaatccgtatcccccaaaacctctagattcgtccctctctctcgttttctagtagagacgagaagtcgcacgtttggtggagatgcatgg

SEQ ID NO: 256078 - DNA, 2479 bp, Cannabis indica
ttttttttttttttgattattgattcatcattgttagcatctgcacccttttgtgaatttctgtattttttttttctaaatggttcattactatgtgcattttaagtaaagtctaataaaagttgaaaaaaataagcaacaattatgttatttgaccagagcagaaccaacaacatccagaagactcactatgacattttatctgtcaaagaagatgcaactcatgaccaaatggaggtgagggccaacgccattggttgaaaaaatgaagatgcaacacatgcatgagttattgatttgatacttctctataatgttgtttatgatgcttgggctggtctgcagattttatgtactgtgagaaagcacatacttactggaggcgagggcgaaagctattgatttttatagtccttccttcttttcctgttccctaaaggtttgcttctacttgtttttctccctacagaaaatgtatatgtatgtattatattccaatccaatatttaagaccattcaaatttctgaagtagttggtcagagtttagattatgttttttagacatggttagaacttctaaatgaatgtgtgaagctgtaatataggtgataaaaagtttatttatatatataactaaatatttatcaaattttattgagaatattaaattaggaaaattattttctgcattgacatgaattattctatttttatcttgaatctataggtggttaggaaattgcaaggtcaggatgaaaacctttttggagatgacactgttctatctttaaagcatttaataaaaatataaagttgcttgtacattgttatactatccaatagcatcagggaattagttagagcatgtgtatgattaaataattataaggatttacattataattattatttttttcacagatggattacaattgccagagaacgctagcttaaaaaagactataatatccaaaaagggaaggaaattcaacaaaacacatgaacttaaaaaaccatcatcaacaacttctaacacagttgctcctctctcaaaattgaggacgcttcatatcattaacatgtccaattgtgatccaaatatgtggcagtcttttaatatcatatgttcatatcatttaaatcaagggttcaaataaaaattaaggaattatattttgcattcccaatcatcttagaaattagttattgaactatgttaggaatgcactgacctctctatctagtgtccagtggcaggtaatgcgtcaatggatctgacattatatcttcacaatctctctcctcatgttccctttaataattcataacttcacattatcgcaagtggcatctatgattcttatttctttgttcaaagagataaaaattagaggttcatcaaatgtaaatcaagaaactacgagacagaagtgaatgatgccattgctgctctcgatagaaaggtgaacaacccactctcccattttattttcaggtgcatttgacattatacttgacatttaaaaaccaaaatgagtcatttgtctatcacatttctttgcccaattcaatttctttttggtttttagagtttggatggaagattgattagagtaaatgttgttgaacagaggctgagatacaccttgttttcgtatcaaaaagattgttgatccaggattcatatgaaccctaccaattgaatttgaagtacaaatttgagagagagtgaaagaaagagaggttctacatttttctacctatttgattgttgttctagtaatgtatattgtaactggaaagcctgatttagagggataaaaatagtttcaaaaacatgcataaggttgttgatgagggtagctataaattctttagttttatacactactagaaaaactcgttttagtgacacacattgagtaactctaaaactatttagtgacacttcaacacgcgtcattgatgagggtgattggaaagacagtttttagtttttagtgacacttcacacgtgtcactgaaccctttatattcactttttgcgcgtcactataggcgtatagagtcaggttttgtcagactaaaaaggtaacaaccacacacatgaagtgtcactatatcctttttttttcttttttttttatttttaatttaatatttttgaagtatatagtgacacacaaaaagtcactatacttattcatttatttattttaataaattttttgagtattgggttttattttatttatttatttatttatttattttaataattaatatacttatacatcagatttgttttatttaattttctatataaaaaagacataaaaagtgtaataaatacaattacattcaataaccaaaattaatttacagaaagtaaaataaaaaaaataaagttattagaacaaaaatatacctttgaaaaactacaaagccttagttcaaaaatttaatacattaagaaac

SEQ ID NO: 256079 - DNA, 2481 bp, Cannabis indica
agtggcaagtggattattccactaacctctagctagtcattaatgattaagagataaacttgagttatcttttgtttaagggaaaaatttggaaaataatcaaaacctagtgtgaagagcaaaaccatctcttgctctctctttctctaacctttcggccacaagaagaccagcaggaacccatgccaatttcctcaaatttccagggtagtcaagcagaattcaagaagtataatccaatgtataaccctaatccctttctattatgctttttttgtaagtttttgaaggtttcctttggttttacgtatgtaagttaaggattagattctgtttggattatttgaacttagggttaaatttctatggttaaattgagttgattgaggttaatttcaactagtttggatggtttaatgaatggttgagtaagtttgagtttggctcaacgatggtgttttgagtttttgggtatttttgttgttatttttgcttgaaaactgttcttcgatgttactataggtatctggaaagtttggttggatttgggtgaaatttgtgtgagattcgaagcttttaggattttttaacaaagaatcgattaatcggttaaccgtttctccaggcaagactctaggaactggttaatcattttggaaatatggtttaccagtttaggcagtttctataaccttaatttttgtattttctcgatatttagagtattgccatgctatctatcgataaggaaactcctaaatttatatttagatcctcaagaaggttctagcaagttatttacctatttatgtggttgtgacgtagggcctccgttcagcgcgtgattttccattcaagtcgaccgacacacttaaatttgaaaacgaggtaagacaagcataaaatatgtttaagtatgtgtgtatgtatgtaaattgcatgcttattatgtaagtgatacactgccaacactagcacagtagcggtgcggagtgcattggtgcagtgtataatgtttaaagggtatggtacagtgttactaacactagtatgggatgagtacgtagtgcatgtggtacaacactagtggtacccggaggtctggttcagccctaccaacactagtacaggacgagtacttaactacatgtggcacaaaggtcgtacttttattaagaacgttcttgaccatccaagttttgggagtaatgcccgcgtctgccttagacattatgcatttttcttactttgacccttgtcagcgtggagcttcagccaattacacaacctgatgaaccaaacttttaggaaattcgctaagactcgtaagaaggaattcaggcaaattttctttttgaagaattttggctgaatatgcatcttttctctaaatttgtgctaagtttagttcttgcagaaagaattcaagcgtgtttctctcagggaaactaggttgaaaacatcgtctgacttttgttgcatatgtatactgagctaatcacctggaaaaattattctaagaaattgtagtcgacgacaattagcaactaggcatgccataccccccaaaagagttgagaaatttggtctcttctagattctcggtcattttcttaaaatctaactcatattctttttcagtctttgaggaggaggtatggttgtggttctgttttggccactccttcctctggtagacttgttctcactaatcctccacgccatacctttcctctccatgatcatttggaggggacttcttgatggtattggcaataatcttctagcttccgcaaggaaaagacgtggggttgtaggtggaaaccaagtttgatggctagccctaaacgactatcgttcctccaagctgatccccatccatgtgtttacaatgtgtcctttggctagacttggaccttggaaaggagagcacaaactctcgcgaaatggtagggttttggcttcccgaagggaaagctgggcctgcgtctttgcttgagaaattatcctttgatgaggtttatttcgataagctggagtcatgttgagttttgcagtggcaaactttggctttcatagggaaaggctaaaggtgtgcaaaatcgaacgatgaatttgcttgaaaaggccaaaggatgaaacatcactgggcatgcgacagacttcaattagtccttctattcggagaaggagggttgatgatgtgttgcatccccaatgatctttcacgcacaaaaaacatcgtgcatgcaagagtcatgttaaattttatgaagcagacaccgactttcgcaagggaaggctagagttgcataaaaattcaagcgatgacttcacttgagaaagatcaaagggtgaaaacatcattgtgagtgagacaaacttcaagcagtcctttcattcaggaaagagggttgaagacgtgtcgtaccctgagtgatctttcacgcgcaaaaacatcatgcatgcaagagtcatgtt

SEQ ID NO: 256080 - DNA, 2699 bp, Cannabis indica
agaggggcgttgagatttaagggtgcggttgtagacatgatagtgtaaaaatagtaaaaatcttttgctaaatcttaaactcatatgggttcgttttcattatattctaatacagaaatggtggccccatcgaaacactaaccttattaaacatgtacacatcaaaacaataaacacaagaagatgagttatgtgaatggacccaactgaattaattgtcaattcccaagtgtcctgagttagattggtctcaactctcgagataacaatttcatttctggtttgtaatctctgcctactttacttatcttctttctttctttcttctcacataatgacaaaacaaattaattatcttacaaaccacaaagattcgatctttaccctcatttcatctaaaagcttcaaactttcttcatctccaacctcaaatccaaaatgggttcttcttctcacttgttaataataacaataatcttcacaaatgtattactctcaacagttcattctggtggtgaccacagtaccaacaatggaccttcaaccatagtatcaaaacatctctctttcccaaatttcaattccatcacaaacccaagaattctagaagacattaagcttctgggcagtgctaaattctcaaaaagatcccaacttcaaatcccagatgaatcacaagctttcgatctaagacaccaagcaggaaaagccattttctcatcaccaatcagactctacgaccctccaactcaaaccccagcttcattccaaacaaccttctcttttcaaatccacaacttttccggcaacaacgccggcgccggcggcagtggactgactttcatcatagccccagatgaattcacagtgggaagaccagggccatggctggctatgataaacgacgcttgcgataaagattacaaaacagtggcaatcgaattcgacactcgtaaaaatccagaattcggtgacccaaacgacaaccatgtcggaatcgatttgggtagcatggtttcggtcaaaacagtcaacgcttcagatgttggtgtgttcttaaacgacggctcggctcaccgagcttggattgattacgacggttcacgccgttggcttgatattcggcttggcttaaacgatggaagttacccttcgaaaccggttttttctgagtctcttgatatttctccttaccttaaagaatatatgtttgttgggttttcagcttcgactggtaacagaacacaaatccatagtcttctttcgtggaatttcacttcaaagagtgaagctttacttagaattccttcctctgaaacgtgtgagaacaaaatcacagttgatcacaccggaaaaatgattaaaactaagcctccgacaagtttcatgatcttcttggctgtggttgtattagctttagctgttttaatcagtttatattacagcagaggaagtaaaaacgacaaaagaaacgatgtcgttttacctgaaaaaaaacagagacccacgccgccgtacaagccgcgccggttcacaagctccgaactttactccgccaccggctcattcagcgagttagaaattctgggcatgaattcaaattccaaaagcgtttactacaggggaaaactcaccaatggttgccacgtggcagtcaaacgatttcggttgacttttttagtggtggacaagaaacggtttttgaaagagattgtggctattagcaaagttcgtcaccctaatcttgttccaattcgaggttggtttcaagatcagagggagattatggtggtttatgattttttcactaatggaagtcttgataaatggttgtttggggttggagttcttccatggacgaggagatttaaggttgttagagatgtgggtgagtgtttgagtttcttacactctaagcaattggctcacaagaatctcaaaacgacaagtgtctttcttgatgtgagttttagagctatgttgggtgattttggttttgttttgtgtgggaatgagtctaagaggtttgaatcggctgtgagtcaaagtgttgatgtttttgagtttggactctttattttggaagttgtcgccggaaggaggcggcggtcggagggttccacggcggcgccggaggaggaggaggagatgggggatttgttgggttgggcttggagattgcatgagagtggtgagttagagaagttggtggataagagaatgggccttgtgataaatttggatcaagctattagggttttggaaattgggcttctttgtacgttgaatgagtccaaaggaaggcccattatggatgaggttgttgagtttttgggtatggagagaccgattcctgagttgccactgagtcgacccgtttctttgtttccttataatagtatgaatgtgggtctttgtaatattggttactcttgtgctccttttaagtgaagtgaagatttagaaaattttatatttgaattaacttatatttacttacatcagtagttgtatagttttatatatgtatatttcaatgttgtatagttttgtaacttatagtaacattgtgtttcaatattgaaactcaaagatgtcttatatattagccactcaattctcatattacacactattgtagttagtaaaactaaattagtaataaaattataccaaagtaataaataatattttttttt

SEQ ID NO: 256081 - DNA, 3818 bp, Cannabis indica
ctgcaagttgtactgatatctgtgttttcgaggagacatgtgaattccaagattgtttagttcaaccactacagacccaaacgtaggcctaaccaagctaatggatcagatccattagtgaagcaagccatccagatgacggaaagatgactcatctaggcgagataaacatccagcacaccaggcctcaagataacatcaggcagtgctttcaaaaaaataattaacgagtcttcggatgttgagcatagcatctcactcatttattattatattgcacaatatcaggattttatttccaagatcatgtccgagaatcagatattataaataagaaaatgaagtaattatcaatcaagcatttatgtgtctttattgtccataaaagtaggacatgtcttgacaactatcaacatgacgtggcatccacgtcagcagaagatcaatgcctcatgggctgggcttcaccaaatggacctgaagtcaataagttatttatatttactattagtgagtaaggtttacaaataagaattctaggtctataaatataagaaaacacattcatgcaaataattagaatctcaatacttgagagctaaggcaaattctagggttcataaacttggcaaacatttatgtaacttttctagccaaataatattgactcatggactagaggtcgttaatccttgaaccacgcaaaaactcttatcttattctttttttttatatatatatttctttagctttaatataattataattgattttcaaaaatctcggtaaatattttggttgcttgagagctaaaaaagagttgataccaaagttgtgaactacaacaatggtagccacaagaaccattgtcaacgaatttggtgctcgtgatggggacactctcatggatgacatcgaaccctcctactacacatgcaaaaattaggtgttgtaggagatacatttgaataattagttgtcctactaaggaaactcaacataatgagaaacatgttgataagaatctcatcaacaaagaaggcgacccaaaagatcaagatgatgatcctgaagatgaaggtgacaaaaaagaagaggaagggcattactatgagctagatcctgaagttattcaaatggccacagaacttgctgaaaccaaaaagaaattggctgaagaggaaaacttctcgcgtcaaatgcaagaaactttagccagattagaggccagtattgaatcagggaatgtggctccagatgaaaatattcttgatgagcatgctccttgggaaaataatactaccaagaaaacaaatcctatagatcctgaaacttctgatctcgcgagggacaaaggaaagggtgtcatgggtggacctagacaaaaggctgctccaactgctccatggaacaacatgagcacacacaaccaatctccatggaaaaagaaggtcccccatgctccagagtaaggccgcacgattgattcgcgaggcagagttgcgtgggatgataggcttggtgctcggacacaaaggcctactatttagggatggaaaaaattccttagtgattttattaaccagagcaatggaagtagatgaagttcacttgattctagaagacaacatgtgaatagtggacctttgggaacgcttaaatgcaaagaaagatcaagatagaggggagaaagcaaggcctcacaaaaataatctcaaaaatcatatcaatgatagagtttgtaagcgtgaattccaagatgacaacactaagcgtctagaagaccaaatagctaaattgatcaacttcacggaacgccttgcccgaaagcaaagtggggcctttgattcgaaagaagaagatctagaatcacatgtaaaaagaataataaaggcacacttgtcggagcactttcgaatgcctcaaatggaactgtgtgaaggtaggaaggaccccatgcccacctatctaaatatattcgattgacgcaagtggcgaatgcaagtgatgatgtaaagtgactctatttttcattaactttgtcaaagtctaccaaagattggtgaaaaaaattatctcctagatctattcgtaactaaaagatctacaaaccatgttcaaaaagaagttcgtagccacaaatgattatgatatggaagttagttccttggctaatattaagcagcaacggagagaaagtctcaagaagtatatttacaggatgatggtcgtagtggctaaaacaaaagtcaataatgatatgaagttgatggccttaacttctgggatatctaccagatccttgttgtagggagaattacaaagaaagaggtccaataaattgtccgatttcttatctaggacccaaggtttcataaacttagaggaaacttatgttcatgcttatagagttcctctaaagccatcaacaactgtcagtagttcaactcaagcttcaattctctgcttcaactattacccctctcgaaagtttattcacaactccaacagtgtacgaacctgttgtctaaggacatacgaccacatagaccagtttttttttcctttggagtggcacaaaccggatgtagtgacacccaaaaaaaaaaataagttaagcaaacaaaagttctagaatcgaatgcgagtcattccaagaataaaaggaatggtaaaaatccaagtcatagtgaagctccaaaaaaaagggagaagacatgaaccaagatattttgagtataccaatttggtagatactcgagagaatgttttatagggctacttgcaatgcgattcactaaaagaagccatcgcctatgtacaaaaggggaaggcacaaactggaacataacaaaagatgtgaataccccatggtgatgttgggcacactacaaatgaatgtgattacgtgaatgaagaaatagaaggattgatcagaaatggtcatttatccaattgggtacggatccaaatcatttatcccggatagggagtgggacattggcaactgtttgctctcaaacagtaaggaaccataaactattcctcagggagtaggttatcctcatgctctgggaatacaagccccttgaactcaaactcttggcatgtagaacccttagggagtatcgaatgtcgaggtgcctaagcccattccagatcccagaccaggtaatccgtatccaccaggagttactccaccagcgataaatgttcatgttgcatccatatatggaggcccacatactttcgaaagtacaagaaattctcaaaagagatacctcaatgagctgggtcaagaaggagaaatatgtgctcttgtacaaactcatgcccagtgtccgtgaatgatgaatctcccaatcactttcacggaagaagaagcgaagtacgtacacttccctcacaatgatccattagtgattgaggcataaatgtctaacaaaagggtatccggtttcttagtggacaatagaagcttggccaacattcttttcgaaacctctttccaagcaattggattagttgaggccaatttaacgccttgtattatccaactttagggcttcaatggagattctttattgctaataaaaaagattcaaagtccaattaagcttaatagagcttaaatctaaactacatgaaaaggaaataatacctcttgtagcctgtcagaggatcctcgattcttctcttaacaaataccaatcatccaacctttgctatgaacaacaatgaagacttcaaaccacagtcttccagactagcctcaacactcaagataagagtgggcttgtagacatgagtagaagaag

SEQ ID NO: 256082 - DNA, 7544 bp, Cannabis indica
attattttatatatctagcaaaaaaaacaaaaaaactaacatctataaacatagagatccatgaagttgatcttttgaactataaacaagcattaaaataaagaaaaaaaaaattcaaggtcttgcttgtttttttttttccttcatagcatacaaattcagttgattgacttatgaatctttataaaatgattcaacatagtatttttaaaattgattcacatgtgatcaacatgtagtccaaaaaaactggaaaatagttataagaatataataagatttatggtaaaatgaatatttataaaataaaattaataataattatgtttttctattttttttcttaaattaagtttttaacagtcaaattttgaaaattgatgcaagttgatatttatacaccgtagcacaggtgaatatattcgagtgccatattgatattgtttagcaatttacagaaattgtaatttttgtaacgggtctcgccgtttctctctcgatcaaacccaaactccaaaccccaaccccaacccaaatctctccatctcttcactcgcctcgtgattcgccttctgagatcttcgctttcgctctgtaacgaaagcccttttctttctctatttctagccctaactcactgagttcgcccccctcgaactcggaagctgcttcggactaatcacaggttcttttattgactttcttcaggtgaggatcgtttctttaaaacttctattctaaatgtgtgaatttcccaatttaatacatttacgttgcaacctagctctgcttgacttctattgttttctgctttgggcgctctcttagggcaaagagaataagccaataataataattataaaagccgaagctttggccttttacttttgggggatttgtttgtgaatagaacgttttttgttcgggatcatattgggtatcaagcgaattacgttaatagaggttttggttaggcgaactgtggcgttgtaaagcgatgttgaattttatagttgacgtttgcgtgattttgcttagttgttttactacgtcttgaaatttaatctcatcgtaccatttattctttcatgatgatctttagtttagcgaaaatcaattgggatcgtgtttgtgcgttataggttgatgatgatctttagtttagcgcattcaattagcattagagcttttgacgataatgcaagtgacatccataaaactacaattcacgtgcactttagcagataatatggtctttcattattttttaaattatactgtgcatttagcttgattttcattcattttgtttggctaggttcattgggtctacaagaccttttgtgggtaaggttgggggctttgattagtgctataattttctcaaaatttcaacattattaaatatgattttccggatcaggacattactctaagatattttggcattggcatatgtttgaaatttttattgctattccaactttggtcaacactttttgtgttttcttaagtggttgaatgacgatatgcatcgcttagctagctagaggcattacattattgtttgacactttagaggcctttatgtaacattcaaggctagatgcttttcttcgagaaagttgagttcctgttatgtttagtttcagagtcgcttattaccatcatctctaaacatggctttttaaacattaattattcatccaatgtatgttaatgcaatagagtggcttaaacagatgccaagttctttttcataggttaaagggttctgtgaaggatgaatatgcaaccggctgtccattccagatcatctgccaatggatttggccgtcgaagaggcgaaagagatgtggggaccaggccggagaacaggtcacagagtggaaaatcaaattccaataacagattaacatctactggtgaaattcacttacaatttctgttgtttcttattaggatttattttcctttattaagagtctaaactctatgacagggagcaaaactggtggccatgtgagtccttcacatgatcgcttagtatatataactacttgtttcattggtcagcatgtggacgtccatgtgaaaaatggatccatatattctggaatatttcatgcagcaaacgaaaaagactttggtaggttcacttgttctatttttgttgaagagtgtttctttatgttgttctaacttttttttatttgtgaaagatactatatttaatcacttattcttcattgagtattttgcaatttttctggcgtttaatattactttagtcagcttagctggcatctctaatcctgtattttagatgaacttttatcatgttcacctttttgttacattcaggaattatattgaaaatggcccgcttgacaaaagatggtagctctcgaggtcaaaagtctcctgcggagtcagttagcaagcctcctgcaaagacattgattataccttctaaagaacttgtgcaagttatagcgaaggttttgcgatatttatgttctactcttttttctgatatcaatttgttgcatatattttaagaagttctgccttttttctttctttgaagttatgttcttattttgttattactaaaactactgttacgatagttacattaaggccttgcttggtaacattttaagtatcaaagctcaataaagggtggagatcttttgaagatgttaatttggaaaatcttcacaattatttttaagtatataaataaaaatgtttaggggtaatagcttaataggcatctgcattagacattacataattgtatagggtatgctgatgcagtagtaactcaactttgacaggacgtgtctgttacaagtgacggattcttagatgaggctcagtgtgaaaaacagcaagaacttatgatagattccgtcatttcacaatctcgccaagttgagttggagagggaacttgagccatggatccctgatgaagatgatccgcaatgccctgaattggagaatatttttgatggccattggaataggttgttctaacatatattttttctcatatttattggtggtggtatatcaatgttgcaaatgatttttttctttcaagtagggtgccatttgcacaactttgtggttctttagtcttttattgtgcgtcctttgaattttttttgctttcccaagtaattactattgtgtttttcctttagggggtgggaccagtttacagcaaatgaagccttgtttggagttaaaagcacatttgatgaggaactttacaccacaaaacttgagagaggtcctaagacccgagagttggaaaaggaagctcaaagaatcgctagagaaattgagggtgaggacactcgtgatcttcatttagcagaggtgaggctttattgatggcattttgaacctataaatttttttatttaccttcgtagttttctaggttttgggtgttgattttcttaaacgcaacacaggaaagaggctttcaactcagtggaaatttggatattgatgaggagacaagattttcttctgtctttcggggtaagatagctgatgacagtggttacgatgaggacatattggtggattcccataataacgacacctttggagattcctatacctctggaattagtagttcatcatctgattggaacaaaggaaagagtaatgatggggctcgagcttcatcaagttcttgtgctatggtagttccttctttacaaatctttctcttaatttttttcctccacatgctagttgttgaagtgccttgctgtttattagcaatttgactgtttaaacaattttgttgcatttggattattgtcaaagagttagttggttctgcagttttaagagttggtaaactgtgtgaatattttgaagtaaaatgaactgcaagacctaaaattttgttcttaattatctttcttttttggtcatggggtttattgaagcaactgcctataaatcttctattctatctccatccccaatccccttcctctctacccagaaaagggaatttaacaaataaaacaaaatttgagaataaaatagtttctgttcaaagtgttccatacatttctgcatcctcagctcttattttgaaatttctttctgatattgtgctgcttttcccctggacattgtttcgtatttgggagaatggtcttttaatctatatgtgtattatgtattttctcttccataccaaatgttatggattgctattcctctttgcaggagcaagcacagtcttcgaattcgagtgttggtgtggatttaagcaggtctggttcctatgatcatgctgggcagctggcatcagaaccactttttaaaagctcttctgctacagctagtgaaagcaggttcctaatagagttttctcataatattcatttctttaggattgttttttgatgtatgtgtgtgtgtgtggagggagtggaaaaaagaagtttcattttttttttgtactttagtttaagcagcacctgccttttttcataactagtttcttgtctgaaattttaggatcttggataatcaacttcgcgaacatggagggaatgtgaaagagtattcagaaaaacaagctgtgagtaaaacttccgctgctgccttctattgcttttcttattcttttattgcttttaatatcctcatttttcttttcttttctttttttttttaaatttgtatttgacagtttatcgaggggattcaattgtcaaaacctgatggtgagtgttcaatcttttggagaattggattgacttctttcccttttttgtaatatgtatttatcatccttgatacgaaaaggttttgtgcaactatgaaatttaaaactgaaagtcttattggaaaattgtttatggttcttaaggaaaaacaaaatgtagatctgtaatagttgcagttttcttgatgaaacttttgtcttctatatcaacaattttgttttctgtcattttcagttcagatagttttttttttccttctttctctaacttcctctatttctctctctcaacatgtaacttttgtttcttaatttctcatcgcagattcatcatcttcgctgaatgggaagaaagatggctctgataaaggaggattatctcctaatgccacttcttatgctccgtctagtgttccactgaagggaaatgagaaaacatcttctctgagtgaatcagtggatactgttgttactggaaaagcacatgggcaggctcaagctgttaactctcatggtcggcctggtagttctgcatcttccagttcagaatgcgcagttactgctgctgctcctagcggccctggtttatcaccaagctcgtctatgggctcattgtcgtctgaaagatctacactcaatccccatgctaaggtgcaattagcttgtcatttatcttgatcacaaatatctctatcccactcacttttaataagaacacaagaattattatttgcccttacaagaaaaaaaaagttatttgatatagaagatatttgcaaaaatggctcaaatttgatagacattccatctgaagcctatgctatttcttttctgattctgctagttcacttagatatttcattcacaatcattgccttgtatcttgcaataatctaatatatacggttctcatttattttttcgccttctgttaggaattcaaactcaatccaaatgcaaagatttttgtaccatcttcaccaataaggcctcaatcccctgtgtctgatggctccttctattatccacctactatgcctggtgtaccacaaatgcatggcatgcctgttagcattggagtaagtacagttacatgcaattatttctctggaatgtttatatgttttgtggagatgtgtgaattattttaaatttcgatagatgatagttttgtattggcctctgttgggccactataaagtcaactgatgatttgagatgtcagagaaatttaggcaatggagttttgcaacacagtcattagcattgtaaataattcaatttctaatgatactaatgtttattcacttaaccacgctatcaattgaagtgtgcctctgaaattgttctgtaattgcacagcatgcttttatgtcttatgcttaatcaaaagtcagctaatcattttattgtcttttataatgtgtaaaatgaaatgtattatctttataaatcaaaaataaaaatataagacaagtaggaaatgcttactgtaatttatcagaattcagtcaatcttttatttttgaaagtcttcttgttcggactatgttgagaagttacgagtataattgtttacctccattcaggtgaagtagattttgttaagacatgttgtgatagctatgagtagggtagggaatatgtttagcttcgaatcgtgtattattaccatatttaataatgttatagcaatatacatacttaagatttatttacttttcacacttaatgctaatttccaaatgtttgcagattgggccctcctttccccaccagcaagttatgtttaatccccaagctggacagccacaaacatattttcatccaaatgcgcctcaggtactaaaactaaaatctgaacaaaacttttgggagctgtcatcgctgtggattttatttttggtatgtgatttaactgacactatagattctcgatcttaatttgatatcttcacctgagtgcagtatgggcaacagatgcttcttggtcatcctaggcaagttttgtacatgcaaaactaccaacctgtaagcaatttcctaaaatctttcttcatttattttggtaaaatgattgttggatagtaaattgaatgctcgtttctggtttagcttctcgttgaaagatagttactggattatttcttgcagattttatctgtggttcctaatgtttatcatcttttgatatgagatcgatttcattagattcattcgtgtgaattttggatgtacaggaaatgccatataaaggacgagaatattgagttgtttgtggcgaatggattgttggttttgcgttggtcagtagcagaagaataacccacctgggagttggaggaacctatttaaggaaagtgcccgccgtcccatgattatttaacatttgtgtgtgctagagcaagtttaccgtttctccgagatataagggttgccgcctccattccatcctttaacccatgctctatgtattttggggattttcccaatttcatttagtgcccttcacattttctatcttttttttttttaatttatggaacttcataattttgttttctttttttttttttttttatttttttttttctatatttcttctttatgttactcaatttgggttttaatgaaaagtgaaacaatgatttgtaacactggggctctgtctgcaattttttatgagtatttcttattaattagtattatttgcggttaaatattcgttacaattccaaacattggattatgttaaaaaaaaaaaaagaaaa

SEQ ID NO: 256083 - DNA, 6650 bp, Cannabis indica
tttttttatcattaaagctgaatttcactcacccctctagaatctataaatgataaaataacattataaaaaataggagcagcagcagctacagcaaccaaccacagttttgtttgtccatttgttcttgtcctaatttactctccctcttcatcatggctcgatagcgaaggaagtagccaagtgaagaagccatcataagtttctcccttcaacacttgcatacaatattccaccaccatattccacagatccccaacactccatttatgcaccaaaatccattcactcacctgcttcacccataattttaacaatatacatatattatattctaaaccttttctagttctaagacctttctttctttttttagaatataatgtgaattatttttaactaacccgacgaatatttcaacaaataacaacctatactaaacaaaaaaaatgtataaaaaatgtggagtacctgatctaggttctgcaatgcacgcaagccaaatgtgtagtaggtgataaaaggtcttcggccctacaacaaattgtaccattaagatcagatgaaaaatctagatgaggtggaatataagagctcttccaaattcatataattgtgataattccacacaataaaatgctccaaccaagaagtttgatctcttgagaaaatcaaagacttctctcgtatataacagaacaggtggtcaaaggtgcggaattgaagaaaaaataataataaacctacaactagaatgtgatggccctaacttcggtattcaagttttcccgtttcaaattagtataagtaagaagtgcttttttaatctaattctacctgagaagctgcaagccattgaattatggtcttcagttcagggtctcctccaaaagcaccacatccccaatttcctgttgcaatccctatatcgtcttgatttttcagaggcagatgagcattctcctgacatgtttctgtcattgggtctacaaactcttccaatgtttcaatggaagttgaggcagcttctgcctggtatgaagaaaatggccaaaaatttagaaagcaaacaatgagtacacaggttctctcacacagggatgcaaagctggccagtataatctcgggatcaagtagagaaaaatatattaatgtttctttgaaacatgaagaaagataaatgaaagtcagcctttttttttttgaacaatcttaatcagtgtgtctaaattaaaataaaacaaatattactgccaagttcaaacataaccctctcgacctcaagataagcttgaaacccacccccaccctacactgctcagtcaacaacaatcgttgctcatcttaaacatagcataatttgcaggttgtagacatgcattaagttctgattctgaccatgctaaatgccttaaccagcacgaattcctttaacatgtgaaatgacaaaatgtgaaaaatactaatgccagagaaaagcaaagagaactcatacttcaagattacttgtgccctcgtagttggggtctttcatgtccgtgtcttgctcatctctggaacaatcattctttactaatcctctctcatattggtcatatttagattgatccataaagccacagaatgccttgttaatctccctgttagaaataaacaaagctgaacatattgaatttgtcattgtcaaataaaaatgacatactgtatgtacagaaggatagttatcccgataaaaaatttggcaaactattaacaaaatgtacatctgaattcacaggagctacagacacagctttaaggatgacaagaattggcctgttttattctagttgaataattcaaattttatagtgttaatattttttgtttagagaggcactgaatatttgacatgagacatacttgaatttatatatatatatattactaatttcgtatatcattctacaaaattattttcttttggtgcttttggagaactagaccttttacaaagtcaacaagtagtttctgtaaaataaataaactgtgctgatatgcgtgtctgtacatattgaaaaattaacttaccggagaaggtattttattttgtattgtctcatccccgggtggcataaggcatcaattgcaacaattctcgttttgcgtcttccaagagagttcatttcctttttgtccacatagtcaccagaaaaacggaaagaagaagcatacctaaatgtcaggcattatatcagattcggagaaagaagagaatagtaataaattcgaaaactaaaagtacgggatatttaaatcaatactgggaagtcttttagaaatacaaatcaaaatctatagtaaatagacaagttgttaagttttactacatttatacaacatattataagggcacagcagcaatctgataaatgaaaaccatatatatttgaactatggacctgtaacagggtacactttacaaatccatttttttctaggaatttcaaattaaattaaaagaagattatgcttttgtcacttgttaggtgtcagtagaactcaccctgtatagtttgagaacctttctgcaccaacaacttctattgattcattatcttccaatgcaggcaagaaaagcattccagcaattaattctggattgatcataaaacggatctcctcctacattgtaaacaaaatgcatcacattgcaacgagaatatgatcttcgtgattcacaaaacataatacaagcaagactgccattacatattaagcatgtgaccatatcagtaagtaaggtttgaattattattattttatctaattattctttttcaaaagtctatcaagcacacctgtacacagcccctgtgaagagcaccacctccaaaatattgtttgcaaaatctacttcaagagcaccacttgactgatcttctatcaaaccgaaactgcagacctgcagaaatataaaaggctcaccaggtctaagcctatacaatactcataatactattttatattaatttcctaggtttgcaacgtaatacaccaaatctttctcatgtttttctttttgttctttctcacctcaaatttacacaaaggaattgaggaaccattccagaaattagcatctgggtaggaaacacataaaggacgttgctctaaagggagaacattgcgctcaaatgacactgaacctctagggatttgtgcacatatccgttcaaaatagtgtataatgcattttatcttgctctgctgcttttgatcacagctgtcatgtagagacctgcatgtatcacactttcagctctaaaagtattcagtagaaatattaaaacttccagtaatgaaagaaaaatcagatggataaacaacagaataaaatgagaaacttgcaaggtacaacatcaataaagaataataaaaccttaattgctactaattttcagttattataattacaattttctaagttgagtattttgacttgaaaattagcaaactttcaagaaaatctaagaatatcctggtcaaagaaaaacatctttagcccattgtgataaaattcttccagccttctgaaggggtaattttatgagaatattttgccaaaaaaatattattttgagaaaaatggtattagtttacttcaagccaaataaaagtaatattcttgattttttttattgtaaatagattttaatatcttctattatagtcaatatgatacagcagaaacttagattttcaggtaattcaccccacctctattactcaaccttcagttctatgaaaaataccaggacactaataatgccacagctattgcaagtaaaagtcacatacgcgaataaatgatcaaagttgattgttggaagatgtttgtcacctctgatagctactggaaacaagcaaaagagagagcatccaagaagagcagcaatcaattcctgataatcagtacaaacactgaccagcgaaattgagacagtgaaatcatatgaacaaacagacaagaatgctatttagcaaaactattaagtagtacagaggagaacaaactcaatatgtcactcactttacatcataaaaaggagactacaatagacctatttagaaaagatacagaatatgaatggaatatatatgcacactcaccccaaacttagaattatctttgcaagagcttggcagtataacaaaccttattgttcacagaagttctaatttcttttgatctaaagtttggtaaaaggacttcagtgcttaatcataatttttgaaaaaataataataataaaccatttctgctacccacatatgttatcctagcaacattttttatgcattaagaattaactacaaagcagaaacaacatactactgacagaaaagagttttaccttcaataataaccactaaaaattactaattggaacctttttctggatccgtgatattttttataggagcatcaatgatgtaatctacaatcatcaatcacagctatcatataatcagactttttcctcctaaattatcatccttgacagtcatatgaatattggatacttgatatagattttaggcttattcataagtccattgatttctactaaagttacagtaaagggttaaatccataatatctttcaaattatacaagtcatttctagcttgatttatatcaattaggctagtacgtagaaaaatacacctcaatgttttccaaaatacatactaataaattaacatgtaaagaaaaaacctaaattgtgttctttcctctaagcagttcacaaaaagatgaacagttacctgactgaggaccactaaaccagcttcttgtgaattaagaatacgaagaccagttttaactccattgatcagattatctgcattctgatagtgcgattcgagcaaagaaggaaaccgcaatagtaaattcgccaatgccggaagaatctcttcaaaccatttcttcgattcctccgtagatattaactacccaaagagaaaaaaaaaacaaataataaataaatcatcataatatgtttcaagttcagttcaagaaatttaacatgcacaaaaaagaaaaattgatcataaaagaaaagacacatgaatttgagctttgaaattgaattgattacctggtcgaagaagataacgtaaccttgatgagcagaaaaggccaatgggtcggaagagagagaaagagagcgtctgaggtcagtaatggtgcggaagaaaaggtctccggagttaagacggctacggtcaggtccagcagcaagtagcttgagtatttcaatggcttgagaaggccagaatagggttgaggagcgtaaaagcaatggcaagtagggtaagatggagttcagatcttctctgtcctccattttcatttccatttccatttcgctttctctgtttcagttacagtcggagtctctctctggaattagaattgttttggtgaggaattacttttaaaattgtataataaaaaaatcaattaattagtaaatagattaaaaagatttgttgaaagtgggatttgaacccacgccctttcggaccagaaccttaatctggcgccttagaccaactcggccatttcaactcatggtgattcagttatatgtatttactatttctactgttattaattataattactgataaatattaatggtcttcaagaaaaaaaaaaatctcatttctatattaagtacgtaataataaagattaaattgaggcattactttcaatatttttattttgcttgtaattaatttttaaaacttaaattttaacgataaaacttctaaaattactgaaaattatatgatgtgatgtatgagcaattaaaaacttttaaaaaaattattcttatgacaaaattaattaaattaaaagtataaactaaaaaaaataaatgaaaaggaaagaaaaattaatatttgaaaataaatataaactttcacatgtttttcaacttaaacaatatcaaaataaaaatatcgagagaaaaagtgagaagggggaaagacacgaaccaaacccagcaaaactattatcattgtcatgtgaaattgaagaaacccaaaaaatttgtggaaggcgaggtcagctttctctcgagcaagagatcaagcgtcttgatagctctgctagttgtaacgtgcgtgccaaggtggcacgttacaagctaggtgatacccataagttggccaagtgttagtcaagtggcggcgcatgttgaggtgcatgttggtggcatgctgatgcttagtttgtacggcaggagtattttcgtaaatatcttcaatattgttcgaattaggatgggacttggtattcgccatttatttgggtctacgtataccatggtgcaatcggattgaagaaactctatgatttggtatatggtttggccatatgtctacatagccaaaatcatgtatgtttctggtagaaggttaaaagctttgaatgctctttaaggggggaccgtggtgtcagctctccacaccccctagcaccttggtgttaagtgagctaatactagtcagtgggactaatagggctgggcatatgaggaccatgaggggactcatatgtctccatgagttggagtactcatggacatt

SEQ ID NO: 256084 - DNA, 1735 bp, Cannabis indica
ttaattaatcatttaattaaataatcaaactggaaatattaaaatacggaatttcacaaatgaaatgaaaacgaggagaaatagtaaccagcataccctcgcctaggtaattataaaattgagggtttttcttaatttgttgtttttttttcctttgtataaattttctttttactaatttatatgaaaaacaaaaatcaacacggatagagcttttataaggttctctagcggacacctggctgggtatctctctagacacatgtgcttgctatctctctttcattaggtagattacatcacaagttttccctgtcttttaaaaggacatctttttgttgttggttttcgaatacatatcttgaaaagttgttatatatacatagagggggcagccacacatgcgatactttgttaaagcacttgagatttttgtgggacatggcaaacacatgacaggttcactactacatggtcggcaatcacgtattattgattcttcttcttattcactgatttagttattacattaaaaatttgagagataccttatattattctcatttttaaccttttcttttgattttctccaaataaatgcatgtatacactaagctcgatcacatataagtatggtatgggtaaatattattttggatcttatgttttgtaaaaattactaattaaactctctcttttgttaaataactaaatgaaccatgtattttctaaaatgataccaatagaatcctaaactgatttttcaccaaaatgaaatttaataataatttgatctaaaagtattatgataaaaatgtttatattttctatatttgttcgtgttaaaaattgtcttcaagttattatattaaaaaaattgtcaaaatttaagctcagggttttattttagcattttggaaaatacagggttcatttttttatttaacaaaacagaaaatacaattgttaacttttgcaaaatgatatttaccctacaagtattctaattaatacaaaggttgtctctgaaaaaaaattcatggcgcaacattattgcacaacatttacatatatatctattgtgaaattttgcagagtgcaattatgaatctagaattaatagtaagaaaataataataagggtaacaaaatgtcatcaatttatatgtctccaaaaaagaaaatcaaatagcagctttacatgaagattttacagataagctcattaatttactatctattgctaccgttaatttgtgtgtatatatatcaatatttatatcacacaattattaatttgatcatctatttacgactattatttggctatacgtacatacagacagaaggatataatgggtcagaccttggacggtaccaaggatattgacaagagataaacggtgtcgtacgtgaaaaaaaaaatgagagaattgggagtctacaaattttagacacaaactagctatgtctattattacactcatctccatgtgcctctctctctctaaatttcatctcgtaagttaaattcaacgaaatttgagcaacaatacaaaatatacttttgatatatatataataatggtaataataatgtacagataacatttttaattctagcttaattaggagtccagcaatgctgcataatagtaaaaaaaaaaaaatttagcacatgttatgctttgtagttggaagacacacaagatcttgactgttgtgctccaccaat

SEQ ID NO: 256085 - DNA, 8011 bp, Cannabis indica
ttggatcgtgcggattggattggatcggatacttagtgaacacccctaatctggttaagtacttatttaggatttttgccgctcgaactatcgtgaactttttagccggttaaaaatagtctttgaactatttacacggttgtaaatttatttttctattgagttttaccacacgtggaaaataaaataatgacatggctacttaaccaattatcacattagtgacatatcaacggcctttatctttctttttactgataatgcaaactcaattaggtgtactttttcaggtatcaagaagaagggtaacctttggattgttacaattttacttactccatacccttagggactcccattattttacttactctttggaacattgtaaaaacattaaatccatcaaaataatgcatgcccacataactatttgtggtcataaccaaaacccatttactgcttctaaattggttgggaagtatattgagcactcttgtaaaaactcaagcatggaatatgcacggaaggtgtttgatagtttgcttaagagagatgttttcttgtggaatattgttattcaaggttatgctaaatggggtccttttgtagaagctattggtatgtattgtagaatgaggcaaagtggtttattaccaaataattacacctacatttatgtgttgaaggcttgtggtgctatgaaagattggaagaatggtggagttgtgcatggacatgttgttttgtctggtctttactcggatttgtttgttgggaatgctcttgtaactttttattctaagtgtcaggaagctaatgtatcaagaaaagtgtttgatggtattgctcataaagacattgtaagttggaattcgatgatttcggggtatgttgcaaacggattcgtggatgaagcccttgcggttttttgtaccttgatacaagatcaaacaacatgttgtgtgaatcgttccactcttgttagcactctttcggcttgtgtccaagcatcggggattcgagttggcttgtggattcattctaatattatcaagtcaggcatggaaatggatgcggctttaagcagtggcctcatctcaatgtatggaaactgcggtcgagtaagcattgccagagaagtgtttgttcaaaccagagataagagcttagaagtatggagtgctatgataaagtgttatggaatgaatgggcatgcaaatgaggcagttgagatcttttcgcggtttttaggcttcggtttataccctgatggtgttatgtttttgtgtttgttgtctgcgtgtagtcatgctggtatggttgaaaaaggctgccaaatctttgaaaaaatggaggaatatagagtggagaaaagccataagcattatgcttgtatggttgatcttttcggtcgagcagggtttatagaccaggctattgagtttatcaagaacatgccagtgcagccggggaaagatgtttatggcgctctcctcggtgcttgtagaatgcataacaatacagaacttgcagaagaaatcgcgaaaagattggtgttggtggaccctaacaatgctcgacagtacataactatggcgagtttgtacgaagagagagggcgatgggaggaggcggctagattgagagacgagctgagagagaagaaaataaggaagcttactgggactagctcaatcaacaggatttgaaattcaggatttgtaatgcaactgtaaaagattgctatgtaatacagaaataattgttgtgattcctctccaattcacaagaatacaaatacatgaaacatgtttgaaaatacattcattcccccaagtaccaacatttttcaactatgaattacacaaatttacaatttgaaaccaatctagcgaggcagggcggggcggggctgaccgaaaaatagaaaagaatgaatcaagatagaaactcaacaacctagtaaagggtacaacataccaattacccccattagcagtcattttatgaacaatgagtaggtagggtcgtagggtcgggtttacgtggtgagtacatcgggaagagtcgcagaatgagctccgattattttaccaccaacatctgggaatgaatcacaatcagacaagggaacaacctttccgtcttcatttacgtgtagaggatacttcagaaggtgtccctgtaatggtgtgaactcttcagtcataaaattgttccagtttcttatggcaatgtcgttcaccatcttcacacagtctaaattttctggctcttcaaagcagtgatccaacttgccaagatgttcagcccaaagggacatcctatatccatatatctgataacaataaaggtacagttagattattgaaagtgataagctcacaaaggcctaagcagcataaaacttatgcagaaaatccacgaaaaaagagagatgaaaagtcgaaactaactaacctgaccgcgaggatgtcttttccttcttgcccaagtatgataaggttgatatgaacccatggctagctcagtgtcttttgtaccagcaagagatctttggttgatattagcagatcctataatgacatactcatcatctactatcatacctttagcatgaacatagatcataaatcgcctacgattttgtgattcactgacctggaatgaagtgtttaacattaaccaacatgttaattcatcttcttaattatgcaaatcttaatttgggtgtgaaaatttaaagcaaaggggccatttaaattaccacagcagtatctgtactcgactgaacctcttcaaaatcttccctgttaccaaggcaatagaaattgaggtaatcttcaggttttaagtccgatttcgctgctttaagcgcctttgcaataacttcatacatcatttgcattgtctggctctgcataaagaacacaacagttgaaagtgagtaaggaaaaccgatcaactgcgtaaaaaaaatcagttcaatggatgatataaacctgccaatagaggatttcttgcacaggagcagactttggatcaccttcaggccacattggtataacacaataaacagcaaatctctcattagctctaattttgctagcaatctttaaggccaattccattgggattagattatcagctcctgccaaattacaaaagctttaagttaagaatccaatgaataagcatagtaatccatggaaccaaacaaatgtgtgtcagcttcacctgcatttttgtaatctggccatccatatgatgacccaacaaaatattgattttcgatatagatgaaatgctgagcagatctgatcgcttggatgtatcccgattgaatgcttcggtctattacttgattcttcgcgcatataaggttctgtgatcccaacaatgcatcatcaacaagttcagttttttcctttctataagcaaaaatcaatagatgagatatgaaattatacataccagagcaactgcatctttaactactttgggaaatccttttactgatccttgatcaattgacctcataatctgcataatgaagattcatcctaattagattagatcaaagagtgctaataatacacaataatgtatttagaaaaagattcactatcctacctgaacatgccaactttcattatcagtggaaacccataatttcttatcatcttcaggtacaattgtaacggcagccttatcctttgatgtttttgattcaggcatggaaggactaagtatccatgagatacgtcctatttttatcatggaatcatcgtgccaatgtgcaacttttttacagaacaccgtccctgtccattttgttgatttcctccaacgctgctcgaagtttataagaacatcatatgctgcaggcccgtcaattctgcaatgcaggtcgtgccatggttgccttggagccttggttcccgcctagcaccagagaaaagttattcgattatcaaatcaagagattttcagcactacttaaaaccaagtttatagaaaattgcagagaactacttacaggaaaagtaggattatggaaatcgtccttgaatacagtgtcaagatcgcgaaatagtctgtgttgtggcgtgtcataacgaccatcacaaaggtcaatgcctcctaaaaatgcagttatcctacggttatttctgtctgcctgtgtatccacaagaacacatttctgatggtgtgtaaatacagttccaacaacctgtaagacaacataggaacatagttataagaatgtcttgaaaactagagaacatattccatcaaaagccaatgcaatcacaactacttgtaaccaaccaaccaaattactagataatgattgagataagaagcttttacctgttgtttgatataactcatcttactgcttccatagcgaggcgcaagcacacaaataaccgaagaatgcttgaaaaacttctttgtttcttcatcatgtgttgccattactcctgcctgcatcactcaaatcaaacccccatttcaccattattaatcaatttccatttcttggaaacaaacaagagtgttttgtaaaaataatcattatcgaataaaatttatcagcaaaataaccacatttggtctcacgagcaaccaaaacaaaacaaacatttcaataataatactacaaagcaccaaattatccgaaaagaaaaatctataacaattaattatcgaaaaatttatcagcaaaataacatcccaaaaaaaattattagcaaaataactatatgtttggtgtcacgaactaccaaaaattatactctttcatattgttagttaggcaaatttcctgaaacaaaacaaaacaaacatctcaataataaatactacaaagcaaaatctattaacaattctcaccgtattaatcaagtaagcatcatgtgaagtcttatcatcccaaaccaacaacaaaactctaaccccttcttcagatttatacttaagcaaatcaccaagtgtcaaatccccacctctaggcaatggtctagtgggttctctaacaagtttcaccttatgataaatcgaccaaccaacaaggtaaatcatatgatgagcttcagaaatagcataacaaatatcttcccaacatttctcttgtgtaaaaaccttcccaccatcaagctcaattcttggaagcatttcatcagacacatgagcatcttgatacaatttcacagagcttcctttcctaaccgggaaataagtctgtctaacacctttctcctccggatctccggcaacaccgtgaaggtacaaagggttttcctcacaacgagtgaatttcatctccaaatgaatcgccgtatcaggcttcggcggattcccattatagccacaaatcggaaaccacccactaatcgttttaccgctcgaaatatccaaagctggaatctttgccgtaccgattaaatcagcaccgaagagatcatcatctttaaccatgaattcgagattaacgagtggatgagccaatgcaatagtgaatttctcatcccatttgggttctcgtgcgttcttgatgacacgtgtacgagccacagtagcttgagggacattaacggttacgtaagggtcactggttatgattctccggtgaggtttgccaccgtcggaggattcgttgggatctggttttgaacttctaccgtattttatggttccacaaccggtgacacaacgacgaaagtgatctgaaacgacgtccatgttgggtaagctacgagctccgattatgtgaaggtcgaggtcgccatggaggtaaattacctccgaagaatcaggatccgccatggaaactcaaaaagcgtgtttctttgatttatggaaactccaaaaccgattggaacccaacaaaaccgaaaagattcaagctttgtgttgtttggttatagaaagaggaggagttttcgaatcaatcagtttaacgttagccgtttctctttttatttgtttttcttaaaactactattttttatattatattggctaattagtaatttttatgtactaaattattcttctaaatttttttggctattaaaaattttacatgaggttaaatttaaaaaaatttgtctaatttcattctattttattatttcagtgattgtatatatacgaaatcatgatccttcatgtcccacaaactttaatatgtactaaatcatttaaggggcataatttaatacatgtgaaagttcggaagaaaaattactaattttattttataaaaattactaaattttattaaatgacaaaataaactttatatatttcaaaataataaaaatattagagatataaattttggtgtgtccacatcacacaaaccgcacctactataccacagtgtataaaaaattttagagtgtaattgcggttagcattttcgccaaattatacggtacggtacaatttgcagccttaaatttaataaccatagttcaaattgtaccacattaaatattacaaaaatattaatttttacattatgatttccttttcatatatgagtaacccatatacttataaaattcaagtcatataattaaatttaagtaacatttatataattattttttatttttctaattaacatatttaatttataatatatatcatataattttttttgggaaacaattcaatacaataacttcactaatatatatgttataacattaaaaaattgataaaatagtttttttgtttagttattgaaattttattagactaatcttttaattttttttcaatgtttgataataatgattgtataaattgcctaaaccatgccgcaccatatttttgcgatatgatttttacagttttaagtttttgcagtgcagttatgatttgagaaattacaaatgttaaatttatgtattattactgtcaaaaattaaacttaactatatatcagcaatgaaaaattaaatttaagtacttatgccgctaattactttatacatgaaattaaatttaagagttttattggtaagagaaagagatggaggattatttaccaaaacattttgagtatcttagagggaatggggacacgttctcataagaataagaagaattataaaataagaaaagattgagtgatgatatggtatttaaataataatctaaattatcatataaatatagttttaattatgagaaaaagacaataaaattaaaataaaatagaaataaagtgaaatgtatggtcccaattgtcataatgggaatggtggtagattgggtccatgggatagtagtcgttgggatcataattgccagactgtaatttcatcatcagtattttattttatattatatttttctataaatagaactatagagtcttattattgacaaaagatatttaaattaggtgacttttgttttggatagagatagagacatagtagagtaatagtcatatgaatcacattgttttcttctctttttggactaaactatgcaacttactatgcttgaacaacttgattttcttttcttttcttttctttttctactactatttttgtatgatatagttactattcttttctttttttttttgaaaataaataaagttatgagtacgtttataatataccaccttaaaaaattattttggtagattttttatctgtttcactattttaaaaaattaatctaattattattaataattgtttacattgtaataatttagagttgtctgtaaatttttataaaaatttgaaaagtttattgtatcaaaaaataaaatttaaatattttattgcacatatgaaaaaaattttgggggcttttttatttttacacttcaaaacagtttttttcgcatttttataaaattctacatagaaatttcggttgcaagtagcgttgcaaccactttagaaacctaaaccgtaaatttgaaaaaaaaaattaaaaaaatagtatatagagtaattctcttattttt

SEQ ID NO: 256086 - DNA, 3223 bp, Cannabis indica
ccccattaataggggggtgagttccgccggcaataaaaccgtcggtaatagagtgatttgttgtagtgatacctaatagtatgtattacttgttacttgttaataataattatcgcttttcatatataacaattagtatatatatgcaatcttatttattatttgttacttgttaatagtactaattattattgcatctaccaatttaaattaccaaaacagtaaaaaaaaatataataagaaatgaatattatgtctcacatatatttatactaattagtgtataaaattaaatatcccttgattaaaacgtttttatttaatctataaaatcctattgacacaaaaatgaatcatggcgaattgttaaaaaaaatgaatgaaattaaatgtaaactaataagcatatatgcaatagttactacactttaaaaaattaataatacaaaaaataattatatatatgtcgaaaaattcaagacattatcttgcaaaaaatgtaagtatctcaacaatcgtatttttataataaaatttaaactttaaatcataaagaaactaatataatttttgacattgactttttatattgtagtggtatatgatcaaaaatatacttaatggattagattatagaaatgcgtggagaatagatctcctacttacataagtatatgccatgatttagacaaaaatttattaactataagactaattatacttaattattatcaattttgttttcactaattacaatatgtattatgatataagacattgttgtattaagagatgcatataaaaaattactttgcaaatgatatttgaattaacactatatatcatcaatataatagttgagagaatctaaaaaaaaaatatatttttcccagtagtagactatttccccgggctgctaaaaggccattgagattgaccaatctcgtgggagtcgggcccactgaaataggtgtcaaaaagtgctaaattaggaaacaaatattcatatcaagatgggcccaacccattgagattgcataaccaataatgacgggcctagaccatcaagattgccaataataacgaagggcatggaccgctgaaatagagtcatattcaatctcggcattgaaattcacaacggtctgggcttgccaagatggattaataacaaggggttgggcccgccgagataagcccttttttatagtgattgtagcataattataaaatttaggtcaaatataagattgcactactagaaatatgatgtacatcctcagatttttactgttcaaaatatataatctgatataaaagtaaggagagaaagaaagaaaaaaattgtaaacatatatcttcgattatttcaaaaattactgaaactatagatatccactatagaaagcttacgtcttcggttatttgaaaataataaaagacataggtctccactaccttaatatacgtggaggcctatatatgtctttaattattttaaaataaccaacgacatgggtctcatctaccctaacacgatattagatacacgtggacacctatgtcttcggttattttaaaataaccgaagacataagtctataaaccctaatttcagaattgaaactctcattttcttctttctactccatatttctctcaacacaaaaacatcgttcccatcctccatttcctccatacaccatcatttttttttaaatcatctagttttctaacctaaaacacatctacactataaaaattaatttattctaggatatgagagtagatgtcagagtttaagttaatgattttgttcgatttttagagaacagttctaatcagctattgacagcgattttcagagttttaatgttgccttttagtttgcattgaggtaaaaattacttttaaatatgccttttatcatacattgtattttttttagtgtgtgtgtgatataagatttggatatcgcagtggttgtcagaaaatgcaccatggttttcgaagacgacacgcggagctcgaacatttggtggtgtaaacggtgatgattgaaaaacaatgttgtttaatgattttgattttaggattttgtgggtttagggctcggggacgatgatattaaatgttggcttccatttaggaaataattatcgattttttttattattttcttttctatataaataaatcgatatgcctcgtcccccatacgtatttggtattttcaagacttgcgtcttcgcttcaattatcttcagtagcaatattttatttaactgaagataaagctacttgaaaatggaaaattaaaattttctagtagtcatgttgactcatttattgagttaaattttgcacaaaagcttacaccattcattagaccatctccaatgcatggtataaattttgtattaaagttggctcaaaagataagtcaatattatatttggtctaaattttatatttatgctcaaatacactaagggtaaaacaaactatttgataaaaatgtgtaaaaaaagtcaagaaaaatattattaaatttttattgtaagtatatagaaaaatatattaaatatatataaataaaaatataaaaaatattaattgcattagtgagtggtaacagaataaataacaaagtgatatttattatggtgtaaaatttgatccatattatattttgcgttaaatttgacacaatttttaacatgtgtcaaatttagaccataatacaccattattagagttcaattttatgaacatgagctaaaaaatatatacaccacatttatcacattttattagagatgtagtatttaacacataaggggcttgtttggtatgttgtattagatcgtattcaggtgcggagccaggataaaattatttggggggggggggggggccaatatcagcaagtgtatacaaaaagtataaatttcaattaagaaaaatattacagtattttacttttataaatatttatacaatatttaaatattatgaatcaagtaattaaactcaaaataaaatatgagttttagggtacgttaggaaaatattcaagagaaaattgaaatgggtaattgaaggtaattataaaattttgtgtgtttgtctaaccacgcaattataagaatgaatagacacgtataaataaaaatagataaatcttagaaaaactataaatagaaaaatgacaatactaaaa

SEQ ID NO: 256087 - DNA, 2090 bp, Cannabis indica
tgatgaataaaagaggtatttttcaacttatcccttaaaattttgtccaaactttctcacaaacccacatattcatctacaaagactacaaatttattatgtttgaaattatgtcgtagttatgtgagtgtgtaaggataatttaggtacaattttaaatttaattttatttagagataaatttgattagtattaaaaaaaaacggtatttttcaacttcttcaattaagtagcccaattaaagtgaatctcatacaactgagccggccaaggttttgccaccactctggagaagaaaactgccggatatacttacaatggcggtggctcatgcgtaaccgctgctacagactaatcggttaattttcgaagacattacttcattgttggtatgtttctgtgttcgtttttcttgtctaatttcattgctacccgcaatgtgtttgatgaaatgtctgttaaagtaagatgtttgatattattacttcatgtcttttttttgtttgggtttggtttcactaaaacatgttataatattgcctcttatgttttctgtttaaataaaattgctggtttggctacatcaattgagacaaactccaactgtgatgtaaggaaacagagtctgaaatcaaattataacttcattggttggcaacacaatggaataaggaagtatgagataaaatatttagtttgagggaaggagggaaggagatatttacaactttactggtttggtgggttcatcagctcagtattcataccaataatggaactggtttgagtttgactacaagactttacacaaatttcgcttattttcttctttttacatgtaatataggaactatctgtttccatcatgaaactattttgttagggtataggggaattaattagtaaattgctaatactgcctagctagtctaaatatgtaaagtcattttatacatgaaaggagaatgagaatgaattataattaggagtattcttaggagattggaagaatttggcactgacttgaagagtgcaacccgatactgtgtattattggtgctttcattgagagctccgtaaaatgattttacatatttataccagctaggtaatactaacaatttactaattaaccccctatacccttcatgacttcatgtaacatatttgttagtgcttcaactgctcttgttagtgttaattttctttcttgtgtaaatttccaaaattacaactttacaagttttgtttgaaatatcatttttaagtggctttcttacagtaattttgcaaaatcctaagtggactttttacttttgtagatttcttcttgtcttttgagaggattttaatcttcataagagatgatgatgataattaggagaaaaatgggtcatcaaatcactgcactcttccctacatgtgtgtacaagtttaaagcttattcaagctccatttctgttcatgggtttactaacacttatttagccaatctaaatgaggaggttgtagttttaggaaggaataaggacttcccgcatgagatgaagtctttgtcaactatgacaggaacagtcttggtgcaggctggagacccagctatgctaagtgtggaaatagagaattcacttgatgagcatagacttgaagatacgtggaaattttatgaacaacatatgcagatagatgggtttcctagaaagtctgttgtgaacaaacttcttgtagtttttgctgaaagccttgatgttctgtggttagagaaggcctttgggatggtagaacgaatattcgagaaaggaaaaaaaaatttactacagaaagagacactaatatatctctctctttctcttgcaaaagtccagttgtcggttcctgcatcaactgttatgcgaaagctggtggaaatggagcaatttcctcctgtttcggcttggtcttcaaccttggcatatatgtgtcaaacaggtcctggtacttctcttgctgctgagttgatcttgagattggttacctatttcaagatagtaggatagatccccggaaaaaagcgtaaatgcacatttgcttgctatgaagcctaatactac

SEQ ID NO: 256088 - DNA, 2006 bp, Cannabis indica
gccatctgccatttagtttctgaagaagcttgtaggcacttttgacagagtaaaagcctgaagtttcataaatccaattcagcttatctctgccttgactaatatgcaatgggatgtccattataagcttcttgtcccgatcctcgaataaatcatctaaaattttagaatcccaactcccacctcctatcaccataagattaatcacctttaatccaatcaaactagggtgaattgaagtaacaaacagttgctcttcatttggtaaccacggttcataaaggacatcaatatcttccccgatacctgcacaccatcgagttccttttctaaccaaatattgagcttcaaggagactacgccatacagagctcgagttactccccaacttagccgtaaggaaggtgccattaggaaagtacctagctttgaaaacttttgcaaccaaggagttaggacaagtaatgagcctccacccttgctttccaagaatagacaaattaaaatctctcaaatagcaaaaacccattccacctttagatttatgcatacaaagtcgatcccaagagaaccaatgaattccatttctcacattgttggacccttgccaccaaaacttattcatagttttctccatatcccgagtgatctccaaagggtaataagaatacgctcattgcatagcttggaagagattgtgcaaccgttttgatcagcacttctttaccggcatgagatagaaattttgtatttgacactaacttattactatccacattgtgccaaataaaacactctatttgctgcaaaagagaaaaactaacgaaagtcacacaatacatagtataacgtagattagtataattaattagagacaaaaatatatttattatttaatttaattcgatatatataatcatatattcaattgagatgccaataagtgtaaaactaaaataaaaaatgtgctttaatagtgtgtcaaaaaacttatataaatttggcaacaatatctataatgaaaaattattttttattcatatattcatttattatttgtcatctcttacatggcagggtatttggtggggaagatatttattgaaagagggtctcagagtgaaagttggtgatggtttaaaaatagattgtggttcagatccttggatctaaattcgtttctatattctactcaggttcctctacaaataaagttgctgattacataactagtgaaagagagtggcatctacctggagacgccaccttattcaagttaggggtaagggtgaccgtctgacttccactctaacagtcatgactacccttcatgcttgacggtcatcccaacggttatgactcatattattcattaatttagtcgcgatattttgtgccacgtgttcctactcttgacacatcatcatcgttaagatttgggtaaacatttcccccgttactagcggtatggccatgcgataggaactttcttgtgtaattcgcgtcttgcttttgttgttgacggcatggcccaacagcaccaaaaatactacacttatactaaaattacattccaaaaatccaaaaaatattttccctacccattactcttttcacattttaccatatatcacaatcataattttccaagaaaaataaattacaaagatgaaaataaaactatttacaaggaaaataactaacataaaaataattaaattgccttatagcccccagtggcagtgggggttataatagcaattttggggtaaaaggccttctttttgcaaaaactcaaaaacttaatatgaatgaagagtaaaaacccttaaaattataacattaaaaaatcacacattcctcttgagaaccatttcaggttggaccttctcatcaccattggaggagattttgaagctatcaattgattcttggaagcttgatggatcatttcttcagtatgggtaagtttccaacaccttcatagtaattttttgcatagaaat

SEQ ID NO: 256089 - DNA, 2355 bp, Cannabis indica
aaattttactttctttgtagtttgaacctatcgtaggtatatatacatatattattttttttaaaggagagtataaattattttttttttgtttattactatgttgtatgtattgttataagttttaaaaggagtgatttcatatgttcgtattaaaattatcttcaaattagttggtttttcttttttaattatttttttttaatgtaaaaaattcagtcatgtgtactattttgtattatttcagaatatacaagattcattttgtcatttaacaaaatagaggttgataggtaactaatatatggtccaaaatagtgttaattcatataatatgatgatattcatgttatcattttatttgtcacgtgtacttaagtaaactatatgtgatgtgtcattttaaggtaatcactaatttagttcattgtacttttttttttaaatgacgtggtctaattataagatgacatttgactttttcttcggtactaaatgattaagtacttacgaaagtttcagaagtaaaacaaaatgtaattttattgcaaacaatttaatttagatatttaagtgcaacacaaattatactaaggtatatttgaggcaaataacaccaactataaattgctattaggaagcttaagatacccaacattatactggtgtgacactttataaaaaactacttgtttcacatattatttattaaattaaaatatgtaaaaaaaaaataatgtcaagcaacaaaaaagcttaatttgttggattgcaaattaagaaccatagtttcccacagtgatatgacattcttaaattcctccattcctatttatttattatgaataaaattattatttctaaccactaatagtaatatcaatattaataatctgttaagcaaatccaattagttcgttatattagtttactaactatttgttataaacagttagtaggttagttcattcggttgtaactgatcttaatcaactttgagtcgttacacatctgtattgtatatagtgtactaactgattcctttagtgaataacacattattccttttattcaatctttgtgtttctttatctgctctctttccttcctctattttttgttttctctttctatgttcatgttcatcctttgtataacaatgtcaagaagattcaactctccgaacatggtatcagagcagtggcctccactaatggtggaacaacaactaacaatggtagcaaccagatcaacacttgaatcgaaatcgaaacagagatcaagatgagaactcaccaatttactttaatcattcaatttcaatcaaacttaatgatcataatttttttctttggaaacaacatatcttactgccattcgtggaaattgattgctgaaattcatccaaactgtagctcctcctccacaattcctcatgatgcagatcaagccaacattgtcttcagccctacctttgtcgaatgggacgttcaagaccaaatcctcgtttcatggcttctctcttccatgacagagagtctgttgaccagaatggtgggttgcaacattgccaggcagatttggagctctctcaaaaagtacttcactcttcgtgtgtctttaaagatcctggaattttgcaccagacttcaaaatcttcgaaaaggatccatgtccttgaatgagtatctacataaagtgaagcaaactgttggtcttctagcaagtgttagagaaactctcaatgatcatgatcatatctctggcatcttcaaaggtcttcctagtgagtatgacacgttcataatcacttcaaacacaagaatagaaggctatacaatagcaaaaattgaagctttgctgcttgcgtccgagtcaagaattaaaaaaaatgatcaagaacataagatcaatgtgaatcttcctaaaactgaaattaaccatgttttttattaagatttgaatcttgaagccaacgttgctcagtttaatcgcaacatgcgatatcccatgccaaatcgcaacaacttcaataccttacgaggaggctatactggaaataattcttgagaaaatggaactcaattttagcaaataaatcctaatactcgtggaacaccttttgttggaagaggaggaaggcttccagctccactttcaagagtccaatgtcgactttgtcatcgtcttggacacattgttcttgactactactataggtttgataaaagcttcacatgtagtgttggatctagctctacacaacagaatcaacctcagcaaatttagcttaaaactcaacaactcaagactcaaactggtaccctgactctggagcaacaaaccactgcactc

SEQ ID NO: 256090 - DNA, 4461 bp, Cannabis indica
ctaatggttggatagcttcttttcttgcttatgattgtcatgtttgcaaaaacgatctatatttatggttattagcagttgggattatatagttttccttctatcactaaattatgttcaaaatatccaatagagttattctatttataaaaaaatcatatgctttagaatcatcatgggcaagctgttttaggttctattcatgtgcttcatgtttgcttacttataaagataaaacttatcttttgcgttaattttaattttctattttcaggctgagctttttgacaagtttctccatggttcaacgttagtggaatgctattcagctgttgcttctgtggccaaccgttggcttgatctactcgatgtaggtcttccaatagactttgcttcttatgcttatgctattctgctgtcttctgtgatctttgcagataactttttctttgtttctctttccacagaatcaaggaaaggatattgcagacagcgagttgctcgattatatatctgaatcaagtaccatgagcaagtctctagcagactatggtgggcagaagtcatgtgcagtgaccactgcaaaacgtcttgctgattttcttggtgatacaatggtcaaagataaagggcttcgttgtcagtatattgttgcatgtgaacctaaggtgaattcttcttttcagccaacacttactttatcaatctttcaattgttattgccaagttttaatgcttttcattttatcttttatgctttacatgcatttttacaaccctcgcctcttattattgcatgattccttaaccaaaatttttgtgtgatatttttaatttgagtagggaacacccgtgagcgaacgtgctgttcctgttgcaatttttgaaacagatgccggtaaagtttctggtatccttctgatttatttgtttgtgcttctacttccactaaattcagcatgtttgaaatttcagaaataatgaaattttatgtgcggaagtggtgcaagatatcggatgttgacattcgatccatcattgactggtcatactacaagcagcggcttagttcatcgattcagaaaattgtcactattccagctgcaatgcaaaaggtttcactgcttctagatgtctatttactggaagaaatcaatattttctttgtttttatctctatcctttttcttccccagtttttctattatgtttaatattccggcaaacaattacttcttcaggttgcaaatcctgtccctagagtgattcatcctgattggttgcataagaaggttcgcgagaaggatgataaatttcgacagcaaaagctagctgatgtctttagctcatttaataagggtgaactgttaaaaaggaaggatgaggctgtaggagttagtagtgtaattgaggaagaggttgttggagatcttgaagacttccaaataaataagagttctgtaaagggacccagaccagtagttcgaagttatgaagttaataataagagcaattcagatgagaatgtagcacaagaatgtccgcatcaagctgatgataatgaaaaagagcagcaaatacaagattcctccacttctgagattattgacaaaaatgtcgactaccaaggatggcttgaaatgaagaagagaaaatggaaagatactctcaacaagaggaagaagcaaaggtacctgttcaaaactttaaataaaatgctaaatgaaacaagaatagagtagaagaattgattttaatagaagaataggtagaaaataacaataaaagatgaaggattaaagaaagaaagagaacatagagaagaaatctcaaagattttataactcaataaacaatccaacacaaactaaaaatagctaagcctatttatagttaggcaaataacagattctaaatgcaacatgaaatgaattctaggaacttagaaatgtagtaaaattactattttgtcaaaataggataaaacccaattattaattcgagaacagtagttaggttctcaggaacaatttaataatgtgaagtgatatattactttaacagactaggcaatgcaacacggcacaatgctagtggtctttctgagctgctcagtcaaccgtcaaataaagaagctcaggagggaacaggagttagttcatactttaagagacatgaagtagctataaagcgatgccactggcaggtaataaaaccttcattaaccccaaacagttggatggagttattctagtttaatggcttaaatcacttttatttcgctcttgtgattcagatagtacaagtagttccagcttctcagcttggccagtattttgcttgggttgtggtagaaggagtgatgcttaagattcctataactgttcctagagtgttttacatcaattccaaggcccctttagaagacaaatttccaggaaggcgtgccaacaaaattcttccacatggaaagcataattataacctatatgaggtatttctggtgctaatgctatttattatgtatctgtgcttcttaatataaagatttcaagacgttatctttgggcatgagtttgtgcaggttgtaattgatgaagctcagttcaaagcagaaagaaaaaaccttactgcacttcttgcagatccagaagttgaggtgagcatcctatagccaagaaaagaaattattagataaattaataaatcttattgacaaaaatttcacagaagtgctttgttttgccccaaatatgaattatgtattttcttatttgcaaggatatgccttaattatttatttatttatttatttcaaattggaattgttcagttatctttgttttctttgtaggacttggctcatgtttatggttacaatttttgtcaatagaactttactaagtattaaagaatgaggaaataaataacactgttcttcattacaatgtaaatttatatgttctcttctggcgtaaagttctatctttcagtcttttagaacaattcatattagtaacaagtgcctgattattatttatttaattatcatatttttctttttgtcagggaatatatgaaacaaaggtaccattggacttgaatgcgattgttcagattggatgtgtctgtaaggtggataaagctgctaagaagcgaaatatccaagactcctggaatattagcgaactacatacgaagactacaacagaatgttcttatttggagcaatctatatctttcttctacttgtatcataggtaactaatttgccattacaaattgggttatttcaatttttttgctatgatttctaccaacactgaaatatgggttctgtcatgaactaactaattcatgtatggtctttaatttgctttttttaaatgtgttaattaaccatttcctaatctggttaatttcagtatttctgaagggcgtgctatatttgttgtttattttccttcttcaaaaacaatgtccattgtcgtcgtgaatccttatcaaaacaaggatctgtcaccatcctttcttgagaagcaattccgtgatgcttgccaggcgttatctgttcaaccacctcctcctagtaatgaattcatattcaaggttagctggtagattagtgaaaacaaatactttcctattggcgcgatttgtttgtttgtttgcttgcttttccttataataacgtgtgtttattgcaggtggagtatgttggatctgtaaaggatgctgataagattctgcaaagaacaataaatcagcacaggtctaattctatcgtaatattatttttgtttatcctgctttttgtgaattttgtttttctgtatatttccttactcgtgttgattctactaattagagaaatgtttctataatcatgtatattacacgttgaatattgtcttatgtaacttggatgagcccaaagtaacttgttcactgatttattttagtgtacatatatgccctagtgctttattgaataacattttgttacaatgtatgaactgtttggaaaaaaaaaataaagaataaattaaacctacatagactagcagattttaggcttcccaattagaccttttttcggtactttattggtgcaaacaaaagttcacatctcattttcattctctctagcaataacataacatacatttttctgtggttgatcaacagacatgaacatcatggaccaataattgctgttattgaatgcccaaatgctcaatcaatgaagtcaagtgtacgagctttagatgatttcccatgtgtgagcattccctccaatgctcgtgatagtaactatcaggtaataaattttgaatatgtagctgatttgcatccgttgatcatgccacatgcacatagtcaaatgcattacttttaaactatgctttgggcaggttcttgggtggcaacaagttgctgcaaaaattggaatgcaacggt

SEQ ID NO: 256091 - DNA, 4105 bp, Cannabis indica
cagagattcttcatacaaaacccaaatcaatctctctattttctctgacctctctctctctttacctctcaatctttctctctcaagatcacctctcaaaactcgtttcttcattcttttaaaatgctatgtgtgggttgtatttataggttcatgatatacatcctaaagtcagtcgttgtaagtgctaagttgttaagttagttacggcttaacaagcataacaaactcctcataaaatatctccacatcagcttaagttgcagtgcttccagatgagatatacacttcttagaaaagagaccaaagcgtacgctgaagaatcttcttggataggacaaacacaactggagtcagctatcttggactctcttctaggagggaataactagccatctagaactcctttatggaggaggactagcttttctaaagactcctcctaggtggacataataggcatccaaaaataccattccggaagacacctataattccacgtgacttcttctagatggaagagttagatttttgggaacgctctttcggaagacatcaaacttttcataaccagaataacttttggagatcttttcatttggaggaactatactacagtttaaatatatattaataaaggtataatagacatactaccaatttatgaaaaaatttaaataatttatgatgctgaaaataaagattaaaattaacaattaattgcaagatgtatatataaacatgtttaacttcatatttgaaccactgagaaaaaaaaccatgtttcttttttgttttaaatgagaaaaattttattgccaagaaccattatagaaaataacttagttgagaatacttcacttgtcaaactaaatcctatcctctttacatgttttctctcttttaaaatgagaaaacttattacaaacctctttcttaattctatttgtaattatatgaaaactataaatttttgcatcccaaaaagcaatatttattgctttccaaattcgacaaaaactacagcattaataatagctgtataaacctccttccaaaggcgagattggcgacacctctttatccacttcaatcattttttcagcttcaagctattgacaataatacctgcccaacgaaacattctactacaaatgtttttgctatacaaacactctaagaaaatatgactcttagattcagagttagtattacaaaaaagataagtattgttgttaatgataccaaacttggttagtctatcttgggtattcaatctcttcctacaagccaaccaaataatgaatttgtgtttgagaatactatatcaattctaaataaaagtattccacgttttttgagtagcaaacttggttagtctatcttaggtattcaatctcttcctacaagccaaccaaataatgaatttgtgtttgagaatactatatatcgattcaaaataaaagaattccgcgctttttgagtagcaaacttggtgagtctatcttgagtattcaatctctttctacaagcaacccaaataatgaatttgtgtttgagaatactatatcgattccaaataaaagaattccacgccgtttgaataacaaacttggttagtctatcttaggtatttaatctcttcctacatgccaaccaaataatgaatttgtgtttgagaatactatatcgatttcaaataaaagaatttcacgctttttgaataacaaccttattcggccaaaattaaaaaaaaatcatgttttttaaccttatatttttgttattgcatactattcaattttttttcttcaaaaaacaagtataatgcacatgttaacaataggttataatttttcaaactatcaaaattaaatatagacactgttgttggtaaggaacaaacacaaaagtggtgcttaattttcgtaaattcttttcgaagtattaatttttcaagtgccaataattaaaggaagttaataattacatgttcttaattatttcattaatcaatattaatcagataactgctttatatgtatttataaaaaattaagttatacattaaacagtaattaggctaaaaaacaattaatgtttaattacttctagtgtcatcgaaattaaaaagtacataatgaccattctataaattctacaagttgtgtccacgttttccgcatgacatgtctcataagaatgaacatgatgatcatatatatacacacatatacatataatgcatctataagcagggtattttttattttatttttttctctttttataaggagtggtgagaataactagttagacaaagagagaaagagatagtattaattgatcaagataaatatatatatatatatataataaattaagtttaataataatatggttgatccagatcaagatcgaatgctaccaattgcaaacgtgggaagaataatgaaaggaattctgccaggaacagcaaaaatctcaaaggaagggaaacaaacaatgcaagagtgtgcgactgagttcataagttttgtgactggcgaagcttctgacaagtgtcacaaggagaatcgaaagaccgtgaatggggacgacatctgttgggctctcactgctctagggtttgataactacgctgaggttatagtaaggtatttacacaagtttagggaagcagaaagagacaaggccaatcaaattgctactaatacttctactactactactacttcctactataatactactactactactactactccaactcttatggagtttaagatcattgagaagggaaatgatgatgatgatcatcatcatcagtataataactctcttatgttcagaccacatcttaattgatggtgaaagcagaataatgaaaaactacactactagctagctacaactgaattattacaatatgccatatatatgtaatgtttgtcattttgtagtgtatgatcatctatatatgtatgtatatggaccggccagttgtgctaatctcatcctctctctccctctgattatcaggcaagtactactcaagcttttctttttcctttttatttgatctatttatcttttaaattttaattttgttagtttgtactttccctctttcttatgtatgactggctagagaggagaagttttctttgactatacttatcaattgagcaagagtacttgtttttgattgttttttttttcttttttctttgggttaattagttcgtgcatatacatatatagatccgtcggtatatcactacacacaagatttaattttaaatatttccttgatgtgttaatgtgtgtactgcaatttatctttcaaattaataagaagaactaaagacaattaattgattgaaagtaaaaaggttaactatatatatacagtttatgtttctggtactctttatatggttcaatttggagaatttgatctatctctcagtctctctgtctcttctataattaaatgatttgaactactaactcttgtttatagtttcaaagaacttttgacatgatcaaatatacatgatatgatctctcatatatagaaatccgaattgcaattaggaagatatattgaaagtgatcagtttgccaatttacattaattttaattttaattttgataaaatgaagttagaatcttcacatgaaacactacagtcgcgcgcggctactggaaattaagataactgcattcatcttgtaatgtaatgtgacataatcaggcagcaggctctgtcattgttttttctatcttctgaaacttttaggtcagccacacacattcattacagtactggtaatgtacacacttaattttcaagccatcattctgcttacaattatattaagagaaaggaaaacaattaagggtgtcataattcagcaaaaaaatatgcatgatctcataatttttcctgttatactactaatttatatattaggattcaatatatacatctgtgaatgttaatatcacttgtcatatatatacattcccacatgtataaatgtacatcctatatcacgtcttcaagataaacattttaagatatatatatatata

SEQ ID NO: 256092 - DNA, 1349 bp, Cannabis indica
tgggctctttttggtgctatctatttgtgctttggtatgccagaagtgtatcgagttctttttgaagtgtttggaatggacccagaagctgaggactgccagccaagattaaggagacaacttgaagatgttgactatgtttcagttgaatttgaaggcaacaaactcagctggcaagatgtagctacctataaggtgagctctctttctttttattttttattatttatttttatacgttgtgcattccttgatgataaagactctatttacttacaagttacaattataatgcacatattttcacatccaagcacgagggtactgaatacaagataagttgatttagactaaagtgaacatagaacttgatagacatagattttgctgcagttttagaattaggctgttcgttttaaattgactgatttgtgtgagatgaatttttagtggctactcaattaatgatttcacaattaactagtttctacacctgcagttttagaatcatgatagagcaaataaattttcggtcagttatatagaaaagcaatgacattcccagttcatttcaaactttactgttgataaataagtagttaaaaatttaaacttactggaatatttgaagtctcctgctattcacctaatgccatgttttgcccctcttcagcctcctcaagatgctctatttgcacaccctaggctcttcagggcttgtgttccaccaggtatgcatagattcagaggaaatatatgggactatgacagcagaccccaagtcatgagaaacctgggatatcctttagatatgaaagatagcaatccggacatcacccaagccaggaacattgaacttggacttgggttacaggtaggtctcctcctatatttcatctttacatttactttggcccttgaattacttacgaaactggctcttgactttggttgctacgccaagaagtaaggaaaccaggaaaactatgtaaagtatgttaacctactattgcgtgtttttaatgttggctgttgatctgatttcttatatcaattactgataccaactcagctcctatttttcctttagaattatgaagttttcaagagaattattcagtatggatcaacttgtttgagaatttaacgctggaaaaagattttttttgaatttaacatctagtcttctgagtaaattttagaattggttgtgtatgtttgtatatgtatttatgtatttttttttttggtagattaataactttttctcttcatttttgtttacagttaagtttcttgcatccatcaaagcacaagtttgagcatccccgcttttgctatgagcgatt

SEQ ID NO: 256093 - DNA, 2324 bp, Cannabis indica
ttaggaaggttaagtcggttgccgaagtcaaatctcaagtatatgcaaatacatcatcggtgaaggaagaagtaaaagagctctttaacatatgaagatgcatgtcaaagctccaactgggtaaaagctatggaagaagaagtaaatgctgttagaaaaaattaaacttgagagttagtgccaaagcctaaagatgtaaagcctatatcttgcaaataaacctacaagataaaaaaaaaaaaatctgatgaatcaattgaaagatataagacttacttagtggcatgaggattctcacagcaatatggactagattatgagaaaacatttagcatccagttgcaaagatgacaacaatatgagtcttactagctagcacttgatgcttgttgaggatggagactttgacaaatagatgtgaagaatgcatcttgcatggagagttggatcaagaaatatatatgatccaaccaagaggatttgagaacagagtttaccctaatcatgtttgaaagttgaaaaagacattgcatggactgaagtaggcaccaagagtatggtatggaaagattgtaggggttcttaatgaaaggtgaatacacactaacacatgcagattttagtttatttgtcaaaataaaaaatgctaaaatttcagtaatgttgatatacctggatgatctcatcattgatggacctaatgaagtagaaattcatcaagcaaagtagaatctgtcagtgcattttcaaaagagcttgaagaacttaaacactttattagtttagaagttgatcgcaccaagaaaggtttatttctccaccaacaaaaatatagcaaagaatttatttcaaaattttagaatgcttgcttaaaaacttacatcaatacccatggaataaaatgtcaaactctgtgctcagtaaggaaaatgagttgcaagatgatacaatgtattgtcaacttgtaggtgtatatattttaggctaattaggagttttgcctcctgaactttgacatgtaccaaatcatgcctcctaaacttttaaagtcgttaaaaatgccccttgaactattgagaatgttagatttaaagacttttgtctaattttattcaattttactatttcactgattgtttatgtactaaaccatgctccccagactttgatatctaccaaatcatgcctctcgaactttgatatgtactaaattatgtcccctgaattttcatccatgttagacttttttactgaaattggaaaaaagtccttaaatccaacaatctcaatagttcaaggggcatttataacgatcttaaaagttcaggggacatgatttggtacatgtcaaagtttaaggggcaaaaatcctaattagcctatattttaatctactttacattgacctgcccagatatttcctatgcgattgaagtattaagcacatacatgcaaaagccaaagaaatctcagttggaagcaattcaacgagtaatgaggtatgttaaaataccactacaaaaaaagatcattttttatgacaaccttttaatcacaatatactttttttgtgactaaatatgacttttagtcactataaaaatttacttatgactaaaacatagcatttaaatacaagttgtaactaaaattaacatatggaaatgatcaagttgctgacatatttaccttaagtgtaagcacggtcaagttttcaaaatatatattcagagatctcaattaaaactcatcaaacaagaagaagtaaagggattcggtaatgagggggagtattaagagtcattactgatctagaatgttctagaaagtacgaagaaaaccttgaatgagtttcaaaaataccgatcacttgtacccataaaaagaagtatgctgtgtaccaaaatgcaatttgaagcaaatagagagtccaaagtgtgggtaacaaattcaaaagtgtgtaaaattttaagagtgccttaagagtcatttgtatcttaagtgttctaactttgtacaagtattcttcaataataataaaatgctgtaaatttcttactcaacatttgctgctgaacttgaggaattaatggtcaaaaggatggtcaatggcataaagttgacatggagaaggcggttttttgggtggagagattcatggaattaattcctacactttatctaaccttgggaagaatatggtttggctgttggagccagccagattgggacattatattgggtttgacaacgttattgctcgacgaggattcctaggtggagattaatagcaaacataggattccagcagagctctatcttag

SEQ ID NO: 256094 - DNA, 1284 bp, Cannabis indica
aatgtataaaaatttaatgtcaagattaattttagcaagagagattgtaatctaaatttatatttgttatccgaaaatttttactcacacattttacctttttgagttgtctatctttattggaggttaattttatcttttgttataatcgttcaaatgtgtaaacggcatgattagcctattgttttcaattatctcttttgctaatgcttgcccataagaatgggatcatttggtgtaaatttttttcccatttttttaactattttttttttttacgattctgaaaactttatatatcaattataggagttttaaacctcaaccaactttaattgagtcatcagtattattttcagaattctcatccaaaagtagttgattgttggcattttatttattttgtaattacccaaattaattcttttaatttatttatatatattatagagaatatggtatgggaaataggagtcaaaaaacatacatagagaaaaagatgagaattgtacaagtgtcatatgatgttgtgttacaacaaagacacttgtatctaccctaatccaacaacattaaacacaaaagttagccaaaaagacataataatatcaaaatttgaatcaatgtcaaacaaacaataataataataataataataaataaaaatagaaggatggagtgtgaataatgagacaaaagaaggagcaaaggcaataaataaataaataaataaattataaataaaaatgagaaggggaaaatggtgtgatatgagctgggtattagcaggagacagctgtcattgtacggcggccgaagatatgcaatgcagctacgctcgccgcttcccttactttttactatttactatttactatttactatttaccaccacatgatacacatgctccacaaacgtgtttttttgcagttaaattctcttaactattatttcatttttatttaattttttaaatttaaattttagtggtaaaatcttttaaattaccgaactattagcaaatttaagatatcatccaattaactgttgctatggactgtttatgcgtagactcttgtgtgacatgtttatattagtacacttaattttattatttcaaattctatttgctaacagtttagaatttgaaagattttaccaccaaaatttgagcttggggggttaagtgctagtgtaatgatagttgagatagtggagccgcaaaaaattttactctctccaaatgtaccaaaatcgttcttttttgagtaatttgcagcata

SEQ ID NO: 256095 - DNA, 2544 bp, Cannabis indica
ctgttacaaaatcatttcgaggattctcactgatcgtctcaaaggaataattgataagttggtctctcctacccagtcggcattcattccaggccggtggatagctgagtgttctattttggcgcaagaggtcctcaacagttttaagaacaagaaaggaaaacaaggtgtcatggcgattaaaaccgatatgagtaaagcgtacgatagaatcgaatggagtttcctcctcagagtgttaaaggcaaatggcttcagtgataaagcttgcaatttaattatgaagtgtgttacttcggtgtcgtactccattcttctcgaacggggctcctatagcctcccttcaatcctaagcgtggtctgagacaaggtcgaccctttatcaccattcctcttttattttatgtagcgaggttctaacaaagttaattgtgaaggctgaaagtagcggaaaactctcgggagtaaaagtatctcgtaatgccatgccgatttctcacctcttctatgcagtgctatctttttctgtaaagccaatgttcagaatgcaaaggcctttgccgattgtattactacttatgaaaaatggtccgatcaagtggttaacaagaggaaaagtggattggttttttcccccaacactcaatcgagatacaaggaagaagtaaagcagctcctgggcatgaattttctgagtcaagaagagaaatatttgggaaatcccttctttttctcggctagcaagagaaaagatttccatttcatcaaagaaaaaattctggcccatttggaaggttggaaggctaagtgtctctctcaagcgggaagaacgacacttgtgggagcagtgttgcagagcatacctacatacttcatggccacggctaaggtgccttctacgctgtgcaaggaccttgatagagtggtggccaaattctggtgggtgggaaactcagataagactagatatagatcgtttaagagctggaaagatatctgtcagcctaaaaactgtggaggactgggtcttagacggttcagggattttaatatagccctcctagccaagttatgttggatgatgatgaagaaggaagacaagatctggatcaagactcttcaatctaaatattgcaatcgagctgacatttggaaggttgagaaacaggcggggactcgcgagtttggcaagggattcttgaggctagatcgatttgcgtagaaggggcagggattttgattggtaagggagattcagagttgtgggataccccctggattccaggtttcgggattgagcagataaaggaaagctttcattacactagaagacacagattttgtcatgtctcagatttgtttgtgggagattctagaacttggaatgaagacattatcaagagtagcttctcaaatgaagtggctaccgctatcttgcaaatacaaccacttcagacaagttcagacatcctcttctgcaaagcctctaagtcgggagaattctctatgaaaagtgcctatgctctgagtcaacaaccaagatttcaggatataaattcggtttggaatgtcctctggaaatcctccattcatcctcgtctaaagcttctcctttggaagatatggtcagatatttttccaacaaaagttaggttaggcatgtgggaaaaacattgtgtactctgtggggaagttgaagaatcggcattccatttgttttgcaactgtaatatcactagagctctttggttccaaagtaagtgggggtttcgtatggatatgatgaattggacaactgtgatggagtttggtcaatggtggtctaagttggcagatgaggaggccaagaactacattgcctgtctgtgtgaaattgtttggaaacataggaatactataatctttcatggagactgctgtaatttgtaggttttgattaaggaaatttggttgagggcttaggagatgctgctctctatggaggcagtggaagaggttgagattcggactgaaattcccatggattccaacatgtatgtcgaattcaccaagtatcaaactgatgcttcggtagtttgttcgaaggcaggtctgggtgtggtggagatcgcgaatgaagctctccaagactggtgggtggctgtggacttctctgaggtttctggagtatttgaaggggagtttcgggctatccatttggcgctgcttcaggcaagatcgagaaaagttacaaagttgctggtgcaattcgattcgaaggtagcggttctggctctcaattttgggagcttatcgtttgcctggggtacttatcctgtttatgaatcctgtcgatctttatgtaagtactttgatcaagtaattttctctttcgtccctcgaagtgcgaatgttcttgctgattgtctggctgggtgggctagaaatgtttcggcatgtaactctgggttccttagggatgtagccccctttgtggctacaactgttgtgtaattctgtttgctctctaataaaataccttttaaccaaaaaaaaaaaaaccac

SEQ ID NO: 256096 - DNA, 3802 bp, Cannabis indica
tttttgttattgtagaaaaaacttggttaattagattgagagatgatgtctcttattttgcatatctatgacttctttttgtgatttgcgacattatttctcttttataatttgtgaaattctgcatgtattgttttggggttttcttcttacatttttaacgttatctaattgtaattttgttcaaaacagttcctttcaactgtaattgtggagtttgatttttttttttattattgttaagccattttatttgctctgattgtatacgccgctgttatatctatttgatgcaactgtgtcatcaatatacttcaaatcagtgactgacactatgtttgcttttttagtggagttggagatattctggccaatttgtgctccagaaaatagcttattggtatttctgttttggctgctgctttcatggaaccaattgattatcgtttgttttccaagtttttggtgctgcctttctgtttatttttgtattttaaaaaactacttggcttttctgaggtttattcatgcaaattttgtatgtttatggtaattttgctgcttaatttttcacaatttatgtccatttgtgagctgctggtgttgttgtttgtgttggttgctttcaagtttcttactttttgaatttttgtttaaatttcttaatgattattttttccatgcttgttgtcgattttagttttatttgattacatgcccagttcattttttccaggctgcttgttgattttaatgatatttgatctgctccgtctaattattaattttactttgtttagcaaaaaattttgtgtttttttgatccattaattgttttctgggattgcaggatgatgactatggtgaaggctacctggttcaacccgtggttcaagctgaggaagaagatggtgggggtagtgacatggatcctgggaatgaagaggaagaagaagatgacgatgatgaagaagaagaaggtgatggtgaagaagaggttgaagatgatgatgaagttcatgtgataccccctccatctacttcttcttcccagctaaagaggaagagagatggaggaaacaaagatgacgacgacgatgatgatgatgatggtggggatgatgaggatgatgatgatgttgttgagtttagcaagtcttcgaagaagcatcactaacacactctgccatcgatctaatctgatctttgcatgtttaatgtttttctgtttttcttttgttcatgtctttttagtatggaagacaaggagaaaccttagctagattggttggtactctggtagtagtgattttggctctaaatatatatagttggaaggaagatatgatgatatcgttaatatccttggcctttgggggtgggatttcagttcaaaagttcgttagtcttttctccccccagctttggaactcttacataatagccgttactctttcacatttcaaaagacagttaagagcggttcacaagtacatgttctgatttcaagagttaggtttcaaaagggggaattcttggagggaaacaacgagagaaaaagggaagttgtgaacttagttaatatatatattttttcttgtgtttgcccaagcagagtacccttttctttcttttatcttatttgttcttttttttttagaaaaaggggcatgtaaaaaaacaaaaaaaaacgcatgtggataggtttcatttccctcatattccattcaatcaaatggggcttcaacttcaagtattctgacctgttgactatcttttctcattattcagccatgtgacgtgtaatttttgtttatttcttatttttaatcctctatggtctgtaattatggtggtgtagtaatagtatagtccatatatgccaggtggcaatgagatgggctcttctgagttgtaatggttatgtaacgtgggcctcttagattgtacccaaattttgatccaacggttaataacatataaatgatacgcattatatggtcttgttttatttcagctgagctgtagtgattccattggtaaccattaccatattagaagtaaagtatgttatattaagccaaataaatagttcattcatggtgataaggtgacttttcaatattcatttttctaagccaaactctctctctctcctaccaccatggaagccgcagcaaaaatgttgctcttttctccaaaacccacttcaataaaacccacaatttcaagtctcaaacccagattaacaaccacacggcggctcaaggtcatagccatggcaaaggaaaccagcgaagaaactgagggaggtggtggagtagcggagacagcggctatcatcggtggcttagtgtcgactccagtcattgggtggtctctgtacactctgaagaccacagggtgtggcttgccacctggtcccggcggctcaatcggcgcggtggaaggagtgagctacttagccgtggtgggaatcgtgggttggtctttgtataccaaagcgaaaactgggtctggtttgcccaatggccattttgggttattgggggctgtagaaggtttgtcttacttgtcgttggttgggattttggtggtttttgggcttcagttcttggaacaaggctccattcctggaccacttcctactgatcagtgctttggctgagtgtgtgtgtcgttttttggccactacatttcttatctttttctctgtggccaccatttaatctaatctctgtgtgtacctacttacataagtttatatgatattttgctcttaaatatgatcaaaaccactccttttagctctctcacttattaattttagacatctctaaggttaaaatttgtgtaacgttggcaaggaaataaaatttaattttagtaatgataatgatttactaattagaatataaaaatttatttctttttattgtttgaataatggtaaataaaaaaaatgtaaagatttgttaaagtcaaaataaaaatgtaaaattttggcacgatattatattatgccaaattttaaagcacttttagttatgttctttgtatagttatttttttatataatggtgtagacccctatatgggtcatgctcaaaagttggctaagtggtggcggatgttagtgtgcatgctaatgcttagtttgtacaataataatatttttgtaaatatctttaatgttgttcgaattgagacaggacttggttttcgctatatatttgggtctacaaatataatggcgcaatcggatttgagaaactatgtgttttggtatatggtgatgaccatatgtctacaaagcaaaaattatatatgttcctgatggaaggttaaaaacttagaatgctctttaaggggagagtacttggtgtcagctctccacaccccctgacacttttgtgctaagtgagctactattagtcagcatgacaagaagggcagacatatgaggaccacgaggggactcatatgtctccatgagttgcaatactcatggacactatcggcccgacccggtagtgcatctaagaatgttgtcagaggttagtgggtatgtttctattagcttgccggtatgccgcttgcacgagacatggcctaaacctccaagagacgttgtggtgcgtcttggccacgagtctcaacacgagatgacatgagaagtcattcatgggctagtttgcatacgcgcatgtgacggatgcaccatgctggaaagagacagaggtctaacgtatgctactagtttagttgcttgtctcgagggcctgccaacatgcgtggaggc

SEQ ID NO: 256097 - DNA, 3980 bp, Cannabis indica
aagcatatttctgacattgctatgattgagtttgagtgtcttaatgctatcaaaagacacaagaagggttaaaaatggtttttggcgtacaaagtagatatatttaaggcttatgatcgtgttgattgggcttttcttcgtggtatgatggagaagctgaggtttcatttagggcggattggtctgattatgaggcgtgtttcaaccgtgacttatgcaattaatgtgaatggagcgaatggaaggggatctattatctcccttcatgctcgttgtctgtgttgaggggttgaattccaatatcaaactagaaattgagttacataatattttaagtgtgtcttgtgggcagggtggtcgtacaatctctcacttattgttggttgatgatagcttcttcttcttggaaggcaatttggaaagtcgcgctctcatttcaaactcattctccagtattatgaagcagcattaggacaatagtaaatcttaataagtctgcagtttgcttctcacatgcctgatgatcttgttgtgcatatttggctttggtattagggatttctttggtctcttctcatgacaaatacttatggttaccttattttacgagaaagagtgaaaacaatttgtttcaatcaatcaaagataaaaaaaatttatacacaatttggatggaagttcattttttttctctgtttaggtagaacaactattttaaaatttgtgattcaagttattcctacataattttcatacttctttagcaatgagagttatgaaaaggttttattttctaaatagttctattactaatgtggagaaaaccaaatgagccttgtttctttggaagagaattctttgggggcgagatctttagatagaggggtgtggggcgcgggggctctatctgtatttgtaatgattcttggatcattaaggataatgtggaccagtcctatactcttttttgagggaatgttggtgttgagagggttggtgaaaaacttgcctcaagtggtttgaatgtcccactcatcatggaactttttgatgatgcagaggctaaattcattttgtgtattcttcatattctagctttgattgacatgatagattgatttggaatctttatgataatggttggtttttctgttaagacttgttattggagctcagtttttaggcttggttggagtaaacattcttcttcttcaaggccatcaaagtggtgaaattttttttggaaactttctcatccccttaagattaagaattttgtttggaaagcaagtcttagttttgttccatcctatcccaacttggatagacatggcataaaagcttctatagtattgtcatcaaaataataaaacaacattacatgccttttggttatgtccttctcttaaatccatttggttttgatggggtttcaggaatttagatagctggaagatggctttcagtttctatgaacttctggctagagttatggatattttatccaagtttaaaattgaagaatttcttgtcattcgttgtaaaatatggcatcgtcgtaatatattttttgcatgataataagcttttttttgatgacaaggtcagtagttgggctctgagctatctgtggcgatattataggaagcttaaactcagattgctctagtgagtttttttgccaatttcttctggtcataattgtggtgtgcgattcctgagttaattttagaggagtacgatctatttgttgatgttggtacttgctatgaaaggtggcatattagtttataaaggcaatggtgtctctacaagatggtgatgttttatgttcaatttctacattgtctcgggcttgctttaacctcatacggtggaggcttctgtccttctctatgggctccttctttgtgtgtagttgggatatactcttattaatatattctttgattgtttgtacttggtgaactctctttcgaacaaaaggaatcattgcaatgagtatgtgattgttcttattgttatccttcacgtttggaagtatttctcccagatctctagttctcattgtaaccgagctagtaatacttttgcccgttcattagctaaattttctctttcattaaaaacttctaagtttagtggttgggtgttccacccaacttactttagatgatttatgattgtattggtctcaaaatctctttggctttatgccttttaatggatttattcatttttctaaaaaaacaaggtatttataatgatgtttattttagctttggtttcaaaataaaataaaattatattcaaatactaaaaatcgtatggtaaaaaataaatttagtttaactagaatcaaacattttggtgaaactcaaaacaaaatatgacagtcctttctcattgttttttcaaattattattgcttttactagttaataaaacttaataaatattaaattacactagtgaaaatatgtaattatatgacacctaagtaaatcttgtcactcttttttccttttgagatttttataaagccaaatttctaaaaagaaatctcattttattatgattttgtgtactacaaagttccttgcgtcatatttacacgtacgtagctaagcaaaaaagtacaaattaactaacgtggtatttaatattttgttgttttgatttttctaacaataaacttttgtaaattttttgtttactcgttcgtacaaatgtacctatgatgtatgattgaaatatgcaatccatcaaaaaaatatatacatatttatatatatagaaaaacttgaagctatatatatacgtctaaacatgcaataataaagattctgtactatcgaaaaggacaatgatactaccatattattatttgatttaatggttcattgatatatggttgtgtgtgtgtgatgtgcgtgttgttgcttatatcgatctatgcatggtaatggtagttcatttattatattattttgattattataaaagtcttattattaagttttaatggcgtggacccatgactaggacacaaccacattaggagtttccttggtcattgggtatatgatcataagagactagctgatcctctgaatataacatttctgtgtggtctcaaatctctttcaattataaaaatagtttaatgtacatgtatactaattatgtcatttatacaatatacaacaaccatagctcattgtggtaccattccttaaaaccccaacaatcattcgattagttagttagtctttaactaaattgtcaattatgacagcttgtatattgagttcctactcatctcattttcgaaagaaaaataaaaataaaaaaaaaaggacaagacataaagagacacaacacagtagaaagagaagttaaagtgagaaatgaagagagatatctgagagagagagagggattgggaaatcgtattgaacaatattattgattatgttggcttgagttagtgagttaatgagtgttgagggattacactatggatgactacttgctgtgattattttcttgtagctcctgagattgatatctctaattgtcattatcaataaagatttgtggcaatactttcaaactggagtatgaccaagttcacattaaacttaggatcgaaaccagtataaattatgtctcatgttattgtgtcttacagttatctagattcatctgtgttatatttttctggtttaatatctttgtcggtttttgttcttgatttgtttgttttgatttaacttttatttgtttaagtgtgatcttgaagctagaattacagaggttaattcttatgtatcagagctaaatttcctacaaattagagctaaatttcctataaataagagcttggttcttcgattatcaagggagattcaaagatcacttacttacgcacaaagaactcatacaaaaaatactacaaaaacacaaaattgaaagag

SEQ ID NO: 256098 - DNA, 3330 bp, Cannabis indica
tttttttagtggcaaaagtgcacaatgttcacttctgttagtattttttagtacccaattcaattctgtcaatttgtgtacaactcagattaattcactcatttactaagatgtaaaatgatgagataaaaacaaaagtcatattagtaaataggtgaattaatatgagttacgaaaactgacataattgaattgggtactaacaaatactaacagaagtgaatattgtgcacttttgccactaaaaaaataaattgggtacttaagtcatataaatatggaactttgggtattatgccgctattttccctcatttttaacaaaacaaatacagaaaatgtaactaataatttttatcataacatttctagattaaattattcttaaaatttatttcgataaaaaattaaatcaaatcctatttatataattttagaaaatatagaatacattttatcatttaacaaaataaaaaatccaattaataatttttttgaaaaatattcaaaataatatttacccagtttaaaaagccaaagcgaagatattaaagacaggtaagtgcccaaaaaatgagaataatctttactctttagatatcagattaatattatgaatatataattatagagttatatgtaagttgggttgtactttgattgagaatagaataaatccatcatttatattgaagagaaacatgagtaatgatttaaacgaatgtcgtctagagaaaacgttgatccaaggcccataatttaaaatatcagaacagaaagtaaaacaacaaaattgaaagtactaataagaatgagtaaacaccacaagttgattagtgatgatgataacactattaaacaattgtttaatccatgaaagcccagaagattttttattagggtagccacttataacataaaaacaatttattagtataatcaattaccaaagcaaatatgtcctataaacttttcaagtcagttaaaaattcccaaactattgagattattgaattcaaaaatttttgttcaattttactaaacaaatctaatatggataaaaattttggggcacaattttgtacttttaaaaaaacggaaacataatttagtagatatcaaaattcatatagacaatagtcatattagtaaaattgaatgaaattgaataaaatctaacaatttcaatagttcaggaaatctgaaaagttaatatgattaggtacatgtcaaagttcaattttggagagaaaaatcttaattggccattttgaaatagttaacttttttttttccttcaatccatgctatatagaaatcattcaactaaaccaacacaaaaccgacttatgccttaagatttaggactttcttgggcagattgaaatacactgatcacacattgtcatcaactatagacagattaatttctaaccataacactaatctaaataaactaaaggaaaaacataaaagggcatcaaaattggaccatagagatttagatgagaaaattactttacatgctgtagaaagataacttcatgaaaaggctaaaacgccaacaaagtaccaaaagtaaaattacaaaactagaaaagacattattataactgattggatcataagcaaacggatatacacataatcatgtaagataattatcaaaaacaagagacacaacatacccaaagaataaccaacaaaagcagaaaaatataggagaattaccccatatttttttaattttttttttaaatttactgtttgaatttctaaagtgatcgatcatcaatagttgcaatggggtttctataacattttttgttgcaaaaactgttttgaagtgtaaaaataaaaaagccccaaaaatatatgcaaacctaacattattgcagagctagagatagaaattccaatgaaatgaatcaaaaaacaaagtaattcatcacaattcatcgaaagacatttggttaatagcactaaaaaatttctagagtatggtcttaacacaaattgacactcactagtcactggggtactacttctaagttctaacagtagaaaacgaacacagtaacaatctcattcttttcagagcaacataattaaagatagtaataatccattgatcaagactatagagtctccatactcaaaattcagggcaaatgtgataaaaacagtcataacgatttcttaacactactgaaaccaacaaatcccaaaaacataaatattaccaaacaaaaagaagtaaaaaaaaaaagacctcttccatcttcgcattctgggttggcgaaaatcaacggtaagacttctggaacctggcacgagctccacgaccaccgaacttcttgggctcgcagcgtctgggatcagcaacgagaagggtcctgtcgtacctacctaggatatccttgatctccttcttgctctgctcgtccacgtacttctggtagtaagcaactagggctttggctatgctctgcctaatggcgtagatctgagaagtgtgaccacctcccttgacgcgaatacgcatgtcgactccggcgaaacggtgtcggcccaagaggaggatgggctcgatggccttgaatttaaggatctctggctcaaccagttcgattgggcatccattgatcttgattagaccacggccccgcttgcagtaggtgactgcgacggcggtcttcttgcggccgaaacactggacggactcgatcggaggagtggttgccatctttagggtttgaagaagatcttgaggcgcctaagctctactggaaaaccctaatattgagcgtgaggaaaggacagagagagtatttatattagggttttggattcaaattactccatttaatgggccagtatctgggcctagagagctttaaccgttcatgggctcaatagcagttttacgaaaatgacaaaggaattttttcacaaatacacaacaaaaaacaaattacaaaaatatacggaattatatatatatttttgctatttttattattctatttccagaaaataaagtattttgatatatttgtattttgtactcttattaatttgttatcaaatttttgttatttgtatatatttttttttatttctttgacgttgttttaatattatttttcggttacttttatataatattgttgctgtttttgtataatttttataaaatatcgtaaaaatataaaaaatatatctttgaacataaaagtaaatatttttacaaaaataatatcatatgtaattatttcaataacaaataaaattgtttgcatcctaggataaataataaaaaaattaaaat

SEQ ID NO: 256099 - DNA, 2970 bp, Cannabis indica
aagatatataaacttattgttatgtcttttctaagtcaacgtcacttagttgatcttaggtcaattgatctcaatctttagatggttaagttctaacttaattatactatacgggttctttgaattgttcatttccagcttacccgtaggactagcccatacttacatcttaagaattcaatagtgcaattaaatgggagtgttaatcgtagatatcgaaatgatagtttcctttgagcttggctaaacacaataaatgatagagcactcatttcagtaactacattagtttgctaaaatatcatttgcaaggagctaattattttaaggataaaatacatcaaagggtgaaatggtatatttgtcactactcaatgtaaatcgtctataaggatcattgattatttagattagaataatagataattcatagtgtatctatattaggtatatagagcatcctatgtaattaagaatatgaatctatagtaatattaggaggaattaataggctaggaaattcacttggtaaatttcaaatttactttattgggagcttggtttcataggcccatgatccccacattgtctgggataatatcaccttatagaatcaattaattgatttgataattcaattagaattcaaaaatagactatgtcttatttgagaattttcaccaagttttgcaattttgagaagaaaagagaaatatgggtttatttgtcaattaagacactttgtgagtctaattaataattatatttaaatagtatttattgaataattatttataatttataaatataaattggtatttaaataattatatatgataattagcaaaattggaaaaagagacatttttacatttaattgaaataaagtggcaacaatctaactatatgagccataagtgtaattcagccatgggttggattttaagcccaattgtctttattttatcccatctcatctaaaactaacccaaagtgatggctatataaaggatgtaatgagagaaagcttaagtgattctattctaacctaatttctaaatcttacacaaaagaatctctcatccccttaatattgccaaaaattacatagtatttctctctaaaaaagtgttccaaaggtgaactaagtaccaacccacactatttacaccaagagtagacctaatgatatggacatgaatgtttgacacgtggcaagaaagatgacatctcgcagctgagtagtccccagtcataacaggtcgaattgggagggtccatagccctgcgcccaagttgactttgagaactctaaaattgaagtctggacttcaataacttgaatccaactcactgtttttcaatattttgtaccatgaagatatggaacaacttgatccaagccccgagagctgaaattacacgaacctacaacttggaagccaacttgggaacctagggtttaactcggtgcccaggttgacattctcaactaaggtttcagtttttgggaccgtcttagtgtaaaatgttcaaaaaattgtattggcacatcaactatacgtaccatagacatatttgaggcatcataatcagaatcgaagcaagttgatttttgagcacctgaggccccacggcccaagcacccagcgctgaggttaacaatatgttagtctgggtgcgttccaagtgtttgatcgaagatccaactttttcatcgtatttgtcttcatcaaaatggggaaataggtcctttgaaggaaaaacaacaattcacgggtacaaataacaaggcccgacacacaggttgacacttgagactggccctgtgcccaggttgacattttctcaacttaggccatttaaaattgagttttccaggaattccttcaagtatcttctcactattaagaaaatattaagactcacctatttttgaggatcaaatagaattttagaagggccaaaagagggatccagcgccaagcttgatacttggggctaggccctgcacccaggttgatattttgtcaacctagcctatttctgatgtagttcaacaaaaagtgttctgggccttttttccgtcataaaaaataacgaagtttcaagtaaactctgggagaaaaccacaatcccgagtccctagaaacagggccaagtttatgatatcttagccaagttcaatatcagtccaattcgatgtatactccatacatccgatactagcatactttaccaataccctggaaaggacataatacttatccaaggtgtaagtataccttattgttgattatcatgctagtataaatctagtgtagtaacaaatcatgggacttaaacttttaaacatataatcatgattatattccactgtgttgaaaagactataatcataaatatgttttggatttaatcgaatttacattaaacatataatcatgatataaatcatgtgaactgtgcaacataaaatgattttcgatcttttattatttagtaaatctcattatattgaaatgagttttatttagggcacataacccaacagttattgggtgggaagatgacatggattggatctgcattagtaaattttattgctagctcccccacacgtggtactttaggtttcctttcttccatgaccaggattgattcattttgctcatactataaggctcgagcatacttttctctagctttgcttgagtctccagcgagatgtggacccccaataattacctgtaaatgcccatccactggtggaggcatcaattggttctgacaatattttgcttgggctgccctttcatcttgatcatccttaacgtacttctataagtgcgggttattctttctaattaaaaaatcaatctctcacttttaattattccattcgtttgtttcatggtcgtagtctgcatgaaaacgataatgtaacgccctaatgctaaggcacgctac

SEQ ID NO: 256100 - DNA, 4651 bp, Cannabis indica
tttcctctatatgacagatacattagggagtagggaccagtttaagtgagctttttaaaatgatataaacaaaatgagatttctacagaactcaaaagttgaagcttccttgggccaacttcagaatttaattgcaggattggcacaaattattcaatgcttttagttagttataaagcttaaccaaactaccctcaaaagtatcatattttataatgtcaatctgtattgaagagaatcgtagtacattattattcatgaacagtcattacgaagatctgcttttagaaaaataaatctagattattgcatatgatgctacatagatacatgtacctgtttgatccgggtggaacattggatattgaaagtttgtcaatgttgctgaaagttaaatcttttattctttccaatgtattacccgtccaattgacaggcaccagaacgacaaaagcaagcaaggttatggggatgaaaattttcaggctgcagtacgaaaattttcaagtaaagatgtttggtcaataggtaatgtgcaatagcaaatatattggcattgatcatataaaggctgagtaaaaaaatcatatcttagttctgcttttggtgaatcagcactaaaaagcaacgcaatgcagtacggataaatcagacctccgcagctcaaacaacaacaacaaccaaaaaagaaaataacaaaagagtaatgatgtgtaaacccaaatattacacacaatggcatggtagtttttcaactaatcacaggtaagactatgaataatgtttgggtgaaccgtgaacatatcattacccaaaacaaagacacttttacatagttcctacatacgagcttacccaagtagataaatccgcatgaacgcagtagaatcaagtccagcgtgctctgtaagctcgggttcgggcatgttcaatgctgcaggcatccaatttaagaactttatgtatgtctttaaatccaaattgacaacgttcttgacaagtcctccagattttgttgggcttcctctaattcccttgagataccacttggggaagtatactctatcgtttattggttgaagcctcaggagtgcgaaagcaacaaggaacgacaatgctgataagatattgatagctgctgacataccaatatcttgaagagaagccatctcctgatgtaaaattagaaaccaagtagcatatcaatcttgtccctaaattggtatatgctatctcactaagattttcttcaaaaactctatgcaaatattataaacatatgattctgctgcctagtaaagactaacggttttcctagtgtgaaaaattgagtattattccaattcacattagtaaaagggatggcttatgacaaccctacatcttataaaagctgaaaattcaatcaaactacgaatcaagaaagtgttcgccataattttatcctctataattggcaaaaatacaattcaccaattctagaacttgtggaatgtaaattaattgggatttccgaacgagaagcgagttagatcaaaattactctcgattcaaataagggaaacacatcaaaattaaagttctaatatataaacaacttgaataaatcaaaaatttctccataaccaaaattaaatacaatggcaatctcgaaaaaaatcaaattgagccaatttcattaaaaaataataataatagataaataaaatgagcgggaaatggaagatatgcatcgaaaacggacctatgacctgcgtaacgcggttctggaatctgagaatgtgaatataggtaagatggaggttagggaaaataagagctgaaagagtgaacgccattaaagtttctacggtcaaatttttcggacagagagacacgtcaacggctgctacaagctcggaggagtgtttggtctggctgcactcccgcttataaacgttacgggaatatttgaatattttcgtgactaaattacccttaactcatttatttaaaagaggtaaaacgcaaacaaaataagcaacacgacaagaagcacgagaaacgacaaaaattacaataacagtccgatattcaataaaaaaccaaaacatgtaatttgatatcatactatagtaatcattaacgaactgaaacgacacagtttgacactgaaactgaaatatatatttgtacagatacagagatcaaaactaaaaagagcaaaaactatatactagctcacgtaaagaaatcgttcaaaatttctgacatcagcacaaaaatcgttatgtttccaaacacagtggtcaacgagtcaacgggaggacagaagctcggggaagacaaccaatatcaatttgtgaagcccactcatcccgaagaccttcatcccggcctcgcgtggaaaccactttcccatatcccaccgtccgatcatcatcatcgcaatgattaagtgatccctgcgtcgcctcatcttgtccttgaactccacaatcgccatcgtcgtcgtttttgtctaattcgttgtcgttatcatcctcttcgtcctcgtcagataacggtaccagccagcaagctccatggaggtgaccgttaatgcagacgaaatactctaacccatcatcgtgcgagccaagccggcgagaggcgctcttggggatgagccgagctgtcttcatgctccacacgcgggacccacagtaaggacagcgaaccctctcctcgagcgccacttgtcgcctgagaaggcacgctctcgtcttcgatctcaagaatccctgaaatacccctctgtagatccccaaatcgtcctccttctcccccatcggatgctcacaagggtcgctcacgaacagcaaatcgctccggcagtccttcaccaagaaactgcgccccgacgttttcgagaaccgggaagccttcacgaagtgacccggagacgatttgctcactcggaattgccgagacgactcgcacccacagcaaaagaacatgagcttcgcgagtgtattccaacccccgcccatgcgcgtagccggcgcaccgttcgtcaatgtcgctaccatgcgcggagcgcgatacacacacagctcccgccatagatatcgctccgccaatgctctgagtttccgattcacagacgcagctgaacagatcgtttgaatatcccacttaatcgattcgaaaaccaacacgagtattcgctcgttgagtatccccgagtcactcgatgaatccgaaccctgactcagcgagttcggtctcaacctctggtttgcactcattgatgggttttttcaattacaagaatcaagaaagtgtttggtaaaagctcgtctctgaactggaagaagaagaagaagagtaaatgagattatattataaaacggcgcctatagtggagaccacagcgattgacacgtagcgtttattgtctgaatatctgccttaaagatgccaaggaacaagtacgtgtcagtttctgattggttaagtagacctataattgaatcaaaatgccgtaagagacaatcgaaatgtctcatataacatcagcggttggattattaaaattgggcaaacggcgccacgtgttgggatattatgctaagttacgaaaatatctaatttttgtgggccgaaatatctatggagattatacgtgtccaagtctacatgtaggtttctgaaacgactccactaggactgtctccttttccaaacattttaaggaaaaaagaaaaactttacgatgattctttagacacgtgtgtaaacctaaaactcccacgtttccctcttccaacgactttcaataaccgtttttcagtttattttttgggcattatctcaacagtatctttcttttaacagcgtgtactgtggagtggacctaataattcctaatcatggagttgttttttcttgagagataataaaggaatgtatatcttatcttttagaaatttaagtgaactaaatggaccagtgtcatgtagatgagctataaatcgaccacaaaagagaagtaattaaaaattcaacaacctagctaatgttgattatgtaaagcactaataactcttacaagttacaacaagatcatagccaagtaaaaaagcacctcctaggtgttctctctaggttttgcctattctactgtcgttactacgactgatgtacgtttcttctctagcctattaaaaagcaagaacagagatcttggagagaaggaagaagaaagaaaatggtaactgaaaaatactgcttagttgaaaatgcaagagtgagctaaacatatatttacaacaaagcttttacaactgaataagagactctttgtgagttgtcaaggtcaagttagttagatcattactaacagtttgttccaactaactgtcttaaatcactttgtttagtatttccagtagcccccctcacgtgacacgggtgagtatcaagtgtcaacttgtccctgaagaaagtgaaggaggatataggtaaaggtttagtgaagtctgcaacttggtactctattagtaaagaagtttgtcaataatctgagttacttgagtttgatctgttatgaatattttaccaggatctagatttactaacgagtatgtttcattaacatcctaaatgtgaattctctaaaacaatgaaa

SEQ ID NO: 256101 - DNA, 4012 bp, Cannabis indica
attttaatacattatttgatcatttttaattgacttaaatataaattattaattatatatgaaataaaaaccaaaataacatttattttttataaaacaataaattaaaaataaaataaaataatttaaataataaaaaaattaaaaataactttcgttgattaattttttactagtaccaatacatacccaaatgccaatttgaatcaagaaatgtgcttgcttatcccatctgtacttgaaattttatataatccgtacgtaccttagttagttatgaatttcctggtacaaccccgtaatacagataccatataatttttttattttctgcggcaccctcaaattccataagccattacaccaagcttctaaattcaatgtcaaactccctttctcctcattcacataatctaaagctagagaatatccactcttaacctcataacacccatttgtattgtaatgccaacaccatcaatcgatgcaacatccacccgccaaaggaataccaagaataacatctatatctaaaggtaagaaaaattaagataacgcgggtatgttctaagatccatcaacaacaatcaaatccttaaccaacatatccacccttggccttgaagtgatagaacaaaatgttcttggcctaggatatcacgaatctctaaaagtgacaatattacttccatccccaacagtctttctaagcccatttcttaaatgctctaggctccaaatcaaactcgactaaagatggaaaggcccatttttatctgtagccttctaaatagacaagattagaaaatatttatgttttgatacacgacctgacaacgagtctggtgcctgtaataatctccacacttgtttggccaccattgcttgattaaataactccaaatccttgaacctcaatcctctcgatttgggatgacaaactgtattccatttcactcaagcaatcttcttcgtgtcactcttcgtatcccattagaactataatataatcgaccgtaacttatcacaagtagcaataggcaactagaaaatactcatcaaataattcagaatagcttgcaaaattgatttaacaagtattaccatacacccgccaaaaagaaacttctcttccacccttaaacccgcttttgaacctttttgcaaatcctcttaaagttcctcttcttattcttcctaataaccgttggtaatccaaaatacttttcattagttatcatgaaatgcaagcctaagatacccaatacactagtgcaatttggtggctgaacattcaagctgaatgcaatcgcagatttatccaaattgacttgttgtcctgagacatgctcataacaataaagaactctacgaatagtagcggaatctaatccattagctcttccaaaaatcaaactaccatctacaaagaataaatgagacactctaggttctaaccgagaacactgaaaacccaccaactcaccccttaattcagcttgtctaagcagcgttgaaagcacttcaacacaaaaaagaaacaaatatgctgataatggacacccttgcctcaacccctttgacagaatcacacaacgtctcggcctcccattcacaaaaaatgtatactctagcgttgtatcacaatccataatcaacttgttctaacgactatcgaactcaaattttcccataattttcctcaaaaatctccactccaccctgttatatgccttaatcatatccaatttaagcgccataaaccccttgtaccattattcttcttaaaaagcgagtgtaaaagttcaaactcaaccatcatattatcatgaatagcttgaccaggcacaaaagtactctagaaagaagagataagtggagaaagagtaccttttaatctcatcacgtatactttagcaacaagtttatacaaaaccttgcaaatgctaataggacgatgctcctttactaacgatggctttgtaactttcaggatcaacaccacattcaaaatagctagacaaaccgatgtaacccatggcctaataatttcccaatactactagaaaaatatggcatgaaacccatccaaacccagtgctttcgtggccccaatggccttgactgttcaatgtacttcctccaccgtaagtggcgccaccaaaaatcccttttagcccttgaaattttgctctcaatgccaccaatacctgccttcacttgctgaagagtcggacacaaagatttaaaggtagttccaaagtatctcctaatctctccaacaacatcctcctcagtactcaactcttggccatccttagtcacaatctcaaaaattgcattctttttcttcctacccgaagctttattatgaaaaaatttagtatttctatcacccaatgctaaccaatcagctcgcgatcattgcttcctataacactcttttcgtgacaaaagatctgtcaattggacttcaagtctcttaacctcatccattcagatcaaaggagcatccacactaagtagatcatcaagtttttttttttttgtgtcttcctaaccaacataggaatagaaccattcttattcttgttccaaaccccaacttagaagcacatgacataaaacctcgataataccctcatggctttccaatggaatattaggagacaaccatacattagctgcaatctctcgacattcaacatcccacaaccaatgaggttcaaaacgaaaacctcttttcttctcattcgaccttctccttataacattctctataacaaccacaataggtcgatggtctgattcatgaaactctctgttaatcacaccttaacggtagggaatatctcgtgccatttttggttacaaacatatcgatcaagtctttcctggatgtgcgcatctcccaatctcttgttatttcaagtaaagcattgaccctcaaaacctaaattcaccaacaggcattcaatagcatgttagaaagcattcattgctgaaatatatcaatcactaccccctttcatttcactagggagggtctcattaaaatcacccaagaaaatccaaagaacattaaacatcccatcaagacgacttaataaacaccacaattcaacacgaagattggattttaggctcccataaactcctgtgaacctcaacatatccctccctagaaattttaccaaagcaactatatgacctaccgtatacgacttcacaaacacctcccaatcatcattccataacaatagcagcccaccacttttaatttccaacacaatcaacatgaaatctatttgcaaaattaattttccttctcaccccctccacccaacaaccataaaatttatttcaaaaaactaaacttggggagtacttacaaataactgctcataaagttgttaatgcaccagggttccccagttagtgtcattagttagtttatgtcttctccaataattcatcattgggagcactagagaaaattttatgttacttgaaaggagcaccaggatgagatatagtttacaaggatcatggacatacccagattgagtatttctctgattcatattgggcaggctccaaggtagatagacgattcacttcaggatattgtgtatttgttgggggcaatctaatctcttggaagagtaagaaataaattgttgtgtctagatccagtgctgaatcagaatatagagctatgacacagtctgtgtgtgaggtaatatgaatttatcagcttttgactgaatccgggtttaagacttctattctagcaaaattgtggtgtgataatcaagtttctcttcatattgcctcaaatcccgtgttccacgagcaaattaagcactttgagattgattgtcattttgttcgtgagaaaattcaacaaaggtctgatctccacagaatatgtgaagacctgagaacaattatgggttatttttacaaaaactttgaatggggtgcgggttgattatctttataacaagct

SEQ ID NO: 256102 - DNA, 1828 bp, Cannabis indica
tgtgccaatcatattacactagtccaacctagcttaaatctacatagactccaacaaacttctataatttaagccaggtgttatattcttcttcgatcttaatgggctttccactcattcctttgcccttaaaaaataattattctatatatcttgagtttctttttcagtgacaaagtttcattaaacaatctaaggttgtcctacctgcccctatagaaagaaactttattattgttgtttgtttttattatatagtatatagagccatttgctatataaatctttgtgattgcatacataagcaaaaagccgattaaagaaagaaaggtaatttatttataagaagaataaagggtagcttttgcaaattacagcaaattccaaaattgtatagtattattgcccacatttgtcactaattgtaataaggcccactattccaaccaatcccttaaccctatatgaaatcaaagagtgacacttatagaatttatattggccataatatataatattatttcaacgtttaacattattaattgtattacctcatcataatttgatttttaaccacgacattattacatgaaagtattttagataggttggtaagatatgatgcatcatgatcatgcatgtatatcattctagaaataattatctctatccaaacacctaatcgatctcccacaatttaactaacatcctcgtttagaaaaataaaagaaaaatagtttgccagataatgttgtaaaatcttgaagaagacttcactttaattatttagtagatatattatagaatttcgaatacctataatattattatacacattgtacaaattttattattattattattattgttggtgcttttcttttctctcaaagagtctcattaaactttgttttgatttatttatttatttatttattttgactaatcaccaaactttattaggcagttggctgtcatgaaactcagaagtattttcaactatttcacaaatagacatcaaagtcaacaacgctcaataatcaatcacatttaaatcaagacccaacatgtcattcagcttaattatcctctttaataaacaagaaatcactaaacaaaatgaacaagaaaagtcaaaatattatcgtacgtagttttgataatccaaatagtgaaacaaaattagtttacaaccaattctattataagttagaatcggttctaattgtcttgaatagttaattttttaagacttcacattcttgagcttaggtagttaggctgttatttctttatattttcctttcatgtagcatatgtatgtaaaggcattataaggttctcattttgctaatgttaaaaaaactgagagatattagattgaaaggaaagagaagaaacaaagggagaaagagtttgagagaacagtccaagttctattcttagagtactcgagttgagagtgttggggttctctttgtaatgctttggagttgtgttcttagctgagattgtaatcatgatcatcaattgaaatacaaagaatatcacctaaaggggatgtaggcatttattttttggccgaatctggataaaatttgtgttcttggtttcaagctttgattcatttgtttttttatttctgttgatcatttccactttgatgtttgttgaattcagtgttaattaaaaatgtaacagtagtattagagctttattgcaggaagaaaaagtaagattataattcaacgtagaagaacatcaaaggatcaagaaattaagaaatagacgaagatggcttcatcatcaactagattcgatctgaaga

SEQ ID NO: 256103 - DNA, 2118 bp, Cannabis indica
aaatagatctaagatcctggataaatataataccaacaattccatgatacataatgatggacgataagttgtactaaaaagaattgtttatgccatatgttaagtacatagcagggtcccagattagggcgactatgcgaaaagtttgcgaggggttttgtggagaccacattctgggtgccagtttttctaagaaaatcttgaggcaaggatacttttggcctaccatgaaaaaagattgtgtgtaatatgtctgaaaatgttatccatgccaaagatttgcaaacatttctagggccccaccatatgagattaccttgatgaccagcccaatgctgtttgcagtatggggaatcgatcatgtcaaatccttcccaactgggaaaggaggagttaaacacgcgatgttcacagtagattacttcaccaagtgcgtggatgctaaatttaataattcaatcaatgccaagaagatgttagactttattgtaaagaatatcatttgtcgatatggacatgcacataagatagtatcaaataatgggaatcagttcgataacgatcatttcacagagttttgtgagatacatggaataataaaaagtttttcagctgtggcaagactccaggaaaatggtcaagcagaatttgtaagcaaacttttaaagaccacacttaaaaaaaagctacaagcttacaagaacaactacccgaaggaattagcgcaagtgttatgtgcttatagaaccaccaatcgaacatccataggacattccccatttttaatggtgtacgggtgcaaggaaattctcccaatcaaaagtatcatactgtcccacaaaagtaccacttacgacccaaccaccaaccaatccttgctccaggagtccctacactttgttgaagagctccgggaagaatcgcaagtgtgcttggcatcgtattgaaggaaggtggaaaaatattttaactcaaaagaaaaggataagaaatttatggtggtagacttagtgctaaggcgagtcttccccgcatcacaagacgccagagtggggatactgggtcttaactgggaaggaccctatgacatcgaagatgaaatatgtgctagaacctatcgtctcaaaaaattgaaagatctagaatcccaagatcttggaatggtgatcatctctaaaagtactatcaatagttaggagtacggtattcaatttcatcattagtattttcataagaagtttgtaggtcagtcaaccaagaaaatatattttttttagaagaagtaatgaattgtaacattacataaagtgtgttaatgcaacttgaggaaacacaagtgactcaaggcctacacccttcaatcacttgggggtaggtaataagtagacaaaaatagcagagtagaaaatatatatcaaggaggcatggcccgacctacccacaaaaaaatgtaacctaatcaagaaaaataaattttgagcacaacaagcaaaaaaataatatgaacaaatataccttgtgaaaatattagaagcttgaaaaaggtaatattaaaatgaaggcgacatggccatattgtcttaaatagataaaggtcgcttagccggattgtctttaaaatataagccttgggggaaggctattaataagtgtctccctataattaaaaagtggatatataagccaaaaaaaataatagtatataataaagttgtttgttggaagttctgggttgtctattgcatttgagaagccgaaaggggtagctgaggtcctcccatctttgccactagagccatttccaactttttgtcctttcccgtgaaacgctttgtagtggcttcaagatcaggcgaaaattgaagacaaggctggaagttgttcaatctccagcacatgaaattcccatcctcatagtgtttcttgtagtgctcacatgtgacctgagaaggaagtcgaatggttttcttagctaagaccttattaaccaatttgttagagtcctggagaaaaaaaactccttcacctccataaacatattggcaagagattgtaaattagcctaatgaatttcctcaaacttagacagacgcagcttgaggttctcattctctaatt

SEQ ID NO: 256104 - DNA, 2555 bp, Cannabis indica
atacttctatggcaaagcttactgactagtggcccttcaaatctaccttgcatatgggtggtaccgactactgccactatagcctcctcttccataaagcccacctgctccaccataactagcaccagggccagactcataaccaccaccaccaaagcctgaattgccataccctccttcatagccttcaccacgaccatatccacctaaaccgcccgcaccataacccccaccataaccgccaccatagggcccatatcgactagaataaccaaaggaagattcaccacggtagccacctaagctaccgctgccaaagcctccataacccccgccaaattcgccactaccactaccatacccgtaacctcctccaccaactctgcccccaagaccccctggagtcctatagggaccaggaccataacccccatcaaacccaccatatggactgccaaatccaccgtagccttcattgaaagaacgagccctagaattgctaccatatgcaggagcaggtggtggattagaggctttctttggttcagctttcttgatctccacctacaacaaagcaacttagttaacctaggtcctgctgcaataaaactatgatgggagccctgtcctggtataacctatacctgtaacaacctccatctaaaattagaaacaaaagcactaaagtaatctctataattaaacatctaaaaattaaaaataaatttcctttgctattgaatatcattaataagatctgagaatgcaatagtgcactctcaatattgacaaggagtttgtgtacatgcttgttacttggacaccatccaaacaagctcacctgggtaccagacatatcaatcatatttccctttgacaaaatttcatctactacttcttcactgtcaaatattataaatccaaagcctctagatcgattggtctcatgatcacgaataatttggtgttcagcaactttcccatactttgagaaaaaagttttgagttcatctgacaattcaagaaggagatcactaatcaagctaaaaaaaagtcgccctaaacgaaactattacaacgaaaaacggaggacgtactctaaaaagtatttccctaaagcaataacatataaaatccttaccttctgtaacagttgagggaatcccaccaacaaatatcttctttgttttaaagtcctttgattgaccttggcctttagggatagttcttttgatctcaacctgctcatatataccaaagtgtgtgaaataaggacaactatacacaagtgtgtatgaatgggatgttttgtttatgagatcagtaaaaattatcaacaaataatacccaaaaaaaaaaaacattacctgttttccattgatgacatgtgtatcctcaataaccttatcaacaactgcaggatcagcataagtaataaaaccaaaacctctaggctgaccagagaaccgatctttcattatcacagaatccactacctctccatactttccaaaatgcttattgaaagtagctatagaccaattgaaaaattaaattaataagactctcaacatataaatctaaaacccaattcaatctatcttccccaaaagaaaaaatctttcctttttataaacaaacatgtatttcaatactaaccgtaattggtatctttagccaatcctccaatgaaaatcttgctgcaatatccaaagtactcaattttcagttataacacgcatacaagattcaataaagattcaaattaaaccttattgatgaagatctcaaataatcgaaaacaaaattcttgagtaaataaaattgagctaaaaatacatacccaggactagcgccgtcgcctgtaagtggattatcgctctttgatttcgagcccatgttatcagattaaagaaattcgccaataaaattttaaaaaaaaaatcgaacttttagggatttgcagagagagataggaaagggattagggttttagagacgaatgacggtggtttttggggaaagaggagatttatatataaaaaaataaaaatagatgtatttatgaaatgacgaatatgcccctaaagagaaaagatataacgaaatatttctctggactgatttggcatttaactaagtggggatttttctttttaacttgttttgcaaggttactcttttatcattttcctttttgagaaaaaaaggttactctttttttaatcaaacaaatagtaattactctaaattcaaataatttgaaaataggtgttcacggattggtttagtttaaatttttataaactaaaaatattgaaatcaaaccagaagtttgaatttacggtttaggcgaagattataattatttttttaaaaaaaaaaattatactatttatgaagtttttacttttattttttaaagtatatatttaacataataaattataaggatattcgcggctaaactacctgaactttacgttttgtaatacttaaccacaaaaactaaaattttggtggcaaaacctactgaactcctattctgttttgct

SEQ ID NO: 256105 - DNA, 4168 bp, Cannabis indica
atattactaaaaaagattaagaaattagaactttgtgtctttttttaattaatgtatattatatattatatattttaaaaaatatatataattaagtgcggattgaattggatcggttactttttgaggtcaaacaacattcaatccgcacaagtgcggattttagatttttcaatccaatccaatccgcacaagtgcagatatccgcattttgcggattggattagattggatcgtacggattggattggatcggatactttatgaacacccctaatgtttactttaagggaatgataattaattatacgatattgattctaatttatttttttactaaattttgttatatgagaaactagtggagcttacataaattagctggggagaaaaaatgaaggaaaggatagattctttccgatttttataaagaatgttatttacttgataatttatattacttaattgattagaaataaaaaatataaatatactctttaaaaatttataaataaaaaataaataaaaaataattaaatttttttaaaaaaattctaacaataacaatacagtcaaattaaaaaaatttgattaccatttagttatgtaaataaaaaaaatatataattctcacttccattcctactagtttaataaacaacattataaaatattatttttaattattttatattttaaatctattaagttatactgttaattattctgatttcaattagtaaacataccataacatcctcaaatttaccaattcaaaacaagtttaaagcttaaaaacaaaaaagaaacatgttgatttttgattcctttgaaatatctctcttcaaggaacaacccatataataagagtgagtgggtaagggttaattaaatttaagaatttggttgtgttggaccaccctatgagcatttatgatgagtttgatctaacatgaatcgcaattaatgaaatgcacactatgtgtttgtggaaaagacataaatttaaaaccctacttgatctaaaacccttatttggggtcacttcattgtttcatatgagtctcctatcatagcaacaaaaaagaaaagaaaaaggaaaaacgaggccctcaacccaagtcccaactcctttaggaccatcaatttgtttatttatatattttgaatgataatggctctcttaactttattgggtggaccaaattgtgtttattctctcccaccttgacatcatcacttcttaaccccaataatggatagttttttaagagaatgattttgaggttttattattttatttccccttaaagcgattactttgaggttgttgctcatcaggcaccaaagatttggaagaaatattacttacaattattttttaatttttggaacctaaggtactcaataaatatttatagcttactatagcatcatattaggccgtatcagaaaagagaaacaaaatattgttgatgagtacttgagtactttatctccaacatcaattgatttgattcttttttttaagaatatatttatggatcacttcctatttgtcaatggttagttaaaagatgattaatcaaaatactaacaagtgaataaaagataaattaattttgaaaatcaatttgcttatagaaaatgatgattctaactaataaagaataagttaattttgcaaattaatgtactttcacaaatgaaaaatttacaaaatttgagagtgtttatgtttttaatttttccatccaacatatcatatttttgaagaaatcaaaaagtaaaactaaatagaaaaaaatagtctagggttttctctctagcgataggttattcctctgctgtcgacttcttgatcttccagctccctctccagccagggctcgccaacatatttttgggcttgggtgtggctatggtcagggagggtaatgtttatgtaatgtgagaaagtcatagatgatggtccttctcagttcaacctttactttcgtgaattctatggcttgttaggcggatccaacttctatgctctatatttcgtggtggttttcgtgtgttggcttacagttgctttgattgttggaagtcctaccgtagttgtgatggtgacccggttgagtattcttgttcttcgacaacatgtcacaaatcgttttataggggtttggtaggagtgttggtagtttgggtggttaggttgtgtgacgattggatgtttggggatatggtgagggggtcttgatgtgtttcaataggttagggtgggtttttggagctatcagaagcaatggtcatatgggttggttttggatccaataccagtttcaaaacatcatgtcgtcatttcaagaagaagttgaagaggaatgaaggtgataagagttctatactagaacttaagaaggggaagaagaatgtcgatgaagtgcttaaggtttcgttttagtttcttttacatttttcccttatttagaaattttgcctctgttcttttaagttttttttttacatgtaattggttctagagtttcatatattttatttgttttattgttatattagtgctatatttactgatttagaatattattaaaattatgttattttttatttttttcgacataaatagttgttcattgttatatttttttccattcattttagactttattttgtaatatatatttgtgttgttttaggtttaggtttagtatggagttatttgttaatagtttactaatagttgtattgtaatttttttttacattgtatttgctattttctttcttttgacatttttattgtttgatttcaggaatgagaatacaagtccgctgaatctgattattataaatcgaaagtggctgcacttgcacttacagtgtcattgagaagctcaatgtcacgcttccgagaaatgtcaaggctttgtgttgtgctactcaatttggtaaatttgtatacatttcattgtataaactctaccctcaagtggttcatggtattcttttaagagaggtgcaacagtccaatgcaagaaaattttgggcgaacattgctagtcgttgcattcgttttagtgttgaagagttcactttgattatcagtttggattgtatgggggattgtaataaaaagaatttaaccaaaaaccaaattattgatagttgtgttttgcggtgttaaacaaatcactcaacaatctatactatacggattttactatatttgtttgagacaaggtattatatgatatttttctacttatgtatttgtacatatttctcgattatgccgatatatataatgttggttcaactatgaaataattattatgcaatctgtctaattattgatctaggaatgtggttggagaaattacttgaatcttttacattaatattttatgtataacacatgttatacgactattaatcaactgttgagaaactgtttaagattcaaccgtttagtcaatttaataagaaagtttttagaacttcatattaacatgtcaaatataatgttgctaacgctttacgtttctgttaatatttatgctatctcatacaactttaaatcaactgttatgcaactatttataaaatcaacaatatatgcaatgtaatagcaatgtattaaagaaaatatttctgcctgtatgagttctaaaaaaaatcaaataaatttccttttaatatttaattgctcggatgtacaagaatagacttggatcgtcctttatcctccatggttagtaactttctttcacttggtatttcagtttcagttgagtattttcttggttgcatcccaacatttattttaacttgtgtacaaattttacctattcacaatgttggagatcaaagcatgttgatcttgttcaacttcagcacgaaaccaaagacacttgcacacacatgaaccagaacacacacacacacactcgagagagaaaataactaaaatgaatgatctttattgaatgagaataatagtgttcagtacaatcttaacagaaatgaactaaggtatttatagaacataccttaggataccaacattagactacacccgagattactacatatagttagttaacggttagttaactaactgacatggacaaaaatagtaagtgacacctaatgactaa

SEQ ID NO: 256106 - DNA, 1576 bp, Cannabis indica
attttcattcatttcaacccaaaacaacctaagtacattacactacagaatcagaaattcagaattatcatgagttttccttttcaatattttgtggccactctattttgagattctgagaatgaattaaaacaatggaataagagacagaaatgttagtggaatattatttatattagatactgtgtaggcacgtaattttcatgataaaaaagtattgtagttttttttttttttttgtatgttacgtgagttactttttttttttccttttttgagttataacatgtcaaatagtaatattacctccattattgggacccacacagtaaaatgattctcgttaaagcagttgggtaatgattccaacaataattgtatacagttatattattaatgtcttttgtgtaaaattaacaccaataattgggattaacttgatctttaattaatttcacttttttaggcattccaagctgcatgggcagctgcttgtaaggttgaggcatcaacacttctagttcctgctaaataccaattctttgttgggcccatcgagttttctggcccatattgtgagcccaacatcgtatttcaggtaaaagagaatccacaatgattaaaatgacataatcccatttgatttagtctaactactacttaacattactctttaattctttctttcaatagttggatggcacaatcatagctccacaagaccccaaagcatggggaaaaggtctcttccaatggcttttattctcaaagctaagaggaattacagttcaagggagtggaatcttagaaggaaaaggatcagtttggtggaaagaggcctctctatatgatgaccctgctgatgatgagttaaagcttattatcccattaaacagcacagtacatcaatttccaccagtcccggtacttaaattatgctctttgaaccttttttttccgctaaaatttctctctgaactattaagattgttagatataagtatatttgtctaatttcatttaattttactaattttgaattgtctatgtactaaattatactctttatactttaatatttttaaatcatgtctttcgaactttaacatgtatcaaattaagtctcttgaactttcatccatattagactttctttattaaaattaaaaaaatttaaatctaaccatctcaataattattcaagagcaaaaatcataattcagcctatatattatatactccacacacagtccaaaaaacttaccttgatcttcattgaatttttttgtggcagataagaagcaagctcagtggaataatgccaagcatcaaaccaacagtaaggaccacttttttttttttcttttttggatttgagaagctaacatccaaagatataactcaataagaatttgaatgagtatctatgcatatggggagaggtaacatgtttgttgtatttttttgttgtaaatattaggccctgagatttttatgggtaggctttaatgtgacaggtcacgggaataacaatccagacagtccgtcatgccatctcaagtttgacaactgcgtt

SEQ ID NO: 256107 - DNA, 9030 bp, Cannabis indica
gtctcccacaacatgctatcatatagagcatgtgcgtccttatgtacttgagcaaatgatccaatggctagggataagggatattcaaaaaggaaaagccctgggatgacacgcgtatgaggcccaacctgtatgatctgatgcccttacatgccatatgggaaaaatgccacctaccaatccaacagtcggacttcgccccaaggatgatctattaaggcagcacatgcaaagaatttggcctataaatacccctgaaaaagcacaagaggggggaggaacctcttttcggagagaagactcattctttgtcatcctaagaaaaaacattttgtataaccttacagccaactgtagaatattcctactaagctttctcttcttcaagagaaacacgggggaaggagttccaagtccattgtatatctatttgtataaacagttactggccgatgaacctaataaaatggactcatggcctaaggatagttaacccatgaaccatgtaaaaatctcttattttttatcttgctatttattatgttattactttcttaagctcttaaaaatatttagttaccaaaaaactcggtaaagacttttgtttcattctcttgttcatggttatggcacacaaagaaggagttcaaactcgaaacagacgcaattctaaaaataactcaaatgattcgaatcaattttcagtgcttggtgaaaattcatgatcaacgaatgataattatcattccaattcttccttcttttctaatagtgatagtccaagagtcatgttagttctaaacttctcaccggaagtgagaattgtagcacctggaggtgatcgatgatgataggccttgtttctcaaaataaaacaaattttggaaaaattccacagacagatgaggatcatgaagattatgacagctagtgcagatgtaatagtgcaatgatttcttggatacttcatgtaaaatctagtgagattacatataggatcatgtatcacgacaatgctactaaaatcttgggtgaattacatgaaagattcaatgataaaatgctccaaggatttttgaggcaaagaaaactttgtagaatcttacacgagaatcgagcagtgttactacatatttcactcaactcaagtctctatgggatcttatcagagagtatagaccacaacttatttgtagtagtggtgctatgaagactattcaagagtatcaagatgaagatcgatttcttgaatttctagttggattgaatgactcatatagtattgctagatctcaaattctaatgtgtgatcctcttcctgatgtaaaccaagcctatgcggttattgttcaagaagagagatagaaaggactaactagtggtgtaagtagttattctgaagttgagaaatcctcatcaaacactattggacactttgttggtaatgtctaacctttttgacctaaatatacttgcacagaatgtgaaatgtctggacatactattgatagatatttcagaatcattggctatcctttggagcgcaaaattcatggaagattccccaatagaaatgataaaggacctccagggaaatctgcatcagcaaacttcacaggtggtgaagaagaaaagattgaagacatgccaagagagaaatacttggtgtctagtttatcaagctctcaatgccaaaagctaatggccttacttgcccagaaagttgcagacaactcttcatctaatactcatgattatcaacctatagtgtcacattttttggtaagaattcttttattcacaattctgaatggatcattgatactagatccactcatcatgtgtgtcctaatattttttgtttcaaaaacactcatagtaatccttatcttaaaaatatacttatttacagagactttcagaaactaaacaagttagagctttcaagaatttaaataaatattaagtaaaagcaatggaggatttttacatggttcagacgttaattatccctaatatatgactcagtgtattggacttttaggctttgaaatgtattacaaatgacttttaaaataaggaaccctaacccatgccataaggtggtttctctagatttatcttggagaagaaaaaagcttagaataaaaactagcagagctttggctaaaattttgtcccttttgcaagaatgggtaggagggtttatataggctagagttcgggtttgggaatacctgtgacccatacatgatttattgtaaaagtgagccccctaatggggcataatacacaaatacatgactatgaggcccaccaaggatatccagttcgtggggcaatggttttgtactgatgaggggaccatttggtgtaggacatgtgttgcataaagatcatgcatggcatacaaaggtgttagaggagttgtcagaaaaaaggggtgtatgccgtgtggtgcgcacactgccatgatatgacacaggggacaatatttgatcatgtgtcagagaggtggacacatcattttaggggagatatccacctctcgtctcgtggtacacatcccgtactcaccccccgatagacatccgactgccattttttagtaggtgtctaagagtttcctacgtggtctacttccaggtgcatccttatcttcatttgaaggttttcattccttatgtgtctcaaaagagtagggaaatttcagatcttggacaaacattatgtcttggaggtgaagctctgagtcttcactgggcttaggcccgctccatgactggcttgggcttctgcaagaaggaagtcaaacctagttttaggtggtgattatcttctggttacaccacatgtctcttctccaaaaacacggataacagtactcttactaactggattacatacaaaaattaattgcactagaataattattttagctccatatcttattcttgaaaatttctacatgctcttacttttaaatacaatttgatatctattaattctctgacagcaacaactaattgcacattcttatttacctatggtcaatgtgtcatccaagacactatgaagaacaaggtgattgggatgggtaaaagtttggcaatctctactacctaaactgtaaacagtccaagaataatcattctgtttcggcttcatcttctatttttgattctaaaatctcaaatgaaactgtatgacactatagattgggccatccatcttgtgtaaaaaatatccgttgaataaagcattgaaatttcattcagattctaactctttatttctttgctctatttgtcattgtgcaaaaaaataaattctttgatatctaatcacaacattgctaagagttgttttgatctacatgttgacatatgggggccttttaacactatgataactgaaggttacaagtattttattaccattgtagatgactgttctaggtatacctgctcattaagcaaaaattctatgcttagatttttattccccagttttatccagaacaagttcaataaaattattaagggagttaatctgataatgaaaaagaacttcaatttaaggacttgttcagtgagcttgggattatgcattatcattcttgtgtgcaaagacatcaacaaaactctgttgttgagagaaaacaccaacatttactcaattttgctagagcccttctgttttaatcttatgttccactggggagagtgtgtagccactgcagcctatctaatcaataggacacctacaccaaatctaagaaaaaatcatttttagttattcttcactctaaaccatctgcatatgatcatttaaaagcttttgggtttttagcttatccctctaccttaagccaatctagatcaaagttttcccctagatctgctccatgcatccttcttcgttaccgtactagtatgaaggcatacaagcttcttggcttaaatactaatgaaattttcaattctagagatgtctattttatgagcacatttttccttttgttcattctggaggtcttcccacagcctatgaaactttaatctctgatattccctattctgcaacctctcaatcctcaaacaatgtgtcttctattcctatctctactgatctcactcctgtttcttcttcttctcataacaaatcagggagacaaatcaacaaaccttcataccttaatgatttcattgttattcgacaactaatgccactatttttcatcacagtgttcaattgttacatctcaccctttgtctcatgtttttgattatcacaggttttcttccactttagagcaactattttggccatttcaagtcattttgaacctgaattttcattcaagctcaagaaattccagaatggggtgatataatggacatagaaaacgattcccttgagaaaaatcacatttagattaggatttccttacctacagatttgcatgttattggttcaaaatgggtataaaatctaatttaatattgatggaagtgtggaagattcaaaactaggctggttgcaaaaggttacaaccagcagaagggaattgattgtacaaatacccttacaccagtcaccaaattggtaatcgtcaaactggttccaactcttgctgtaaggaaaggatggtatttacatcaattagatgtaaataatgcatttctacatggtgacctaaatgaagatttgtatatgtctcttccccaagagcatagacctaagggggagttaccactaaatccaatttgcaaattgcaaaaatcactatatgatctaaagcaagcttcaagatagtggtttgtcaagttctctggtgctttaactaatgaaggttttcatcattttgctacagatcactatttgttaatcaacacttccatggaggtttcattttcttattggtgtatgtggatgatgttattctagccagtaacaacttacaagaacttgaagccttgaaagtcaaattaaatgctagattaaagttgaaagacttgggatagctgaaatactttctaggcctagaagtggctagatcataaaaggcaatctttgtttctcaaagaccctatactttgcagttgctagaagaccttagatacctaggctacaaacaaatgaacacaccaatggaagctaatctcaaacttcgacaatatgagaatgagaaattggttgatccaactctgtatagaagaattgtaggtaaattagagtacttaacaattacaagaccaaatatatcttactcagttaataaactgagtcaattcttagcaacacctcagatcactcacttgcatgcagcataaagagtgcttcagtatgtcaaaagcaatcctagtcaaagattatattttactgccaatacagaggtgaagttacatgcctatataaattcagattaggcatcttgtctagataccagaagatctaccacagggttttggatcttcagtggaacaccaatcatttcattagaagcaaaaattaacacattgtttctagatatttagcagaggcagaatatagagccatggcaaacacaacatgcgatattgtttggctctaatctatcttaagggaactaaagattgagcatgaaggccctgcattattttattgtgacaataaatcagctcaccaatagctgccaacctagttttccatgaaagaactaagcacatagagataaatttccatttggtcagagaaaaggtgcaagaagggatcctaaaaatagttcatgtgtcaactaaagagaaactagcagatattttaactaagcctccttttcctaattaattcaaattgattaaagataagatgggtttaaaggatatctatagcctatcttgaggggtagtatcaagttaaaaggttagttagagtagaagttagttaagttgtgcgagttgttcagtgagttagttagctttggtaagtgagttagttaatcttgtaactaattatagctcttattagtagttgtaaatcacttgtaatagattcattggataatgactttgcttttttttttcctcttacatttttttctctctgctatttccgcactaatactttgtcatcactttctttgtatgttgacacatcatgtaatatagaatccttcaatattatgcatgataatgaaatattaagtactcattaatttattaatttatggttaattgaaatgtttttctggctttgagatgagagtatgaaatatcaaaaacaaattgaagaaaaaaatagttaataaaatatttaagtacttgaaattataactcaaaaattataaaaattagatatataacttacttcctttgataaatccacaagaacacatccaagaatatcatagatcacacccaaatgcatttgagaaagagggacattatctggaactgctggcataattagcaccatcaaaccatcaaccacgagctctatagccctagcttccaagaactgagtcatgtccctacaaaactgagcttcataagctttgtaaacctctattcgagcgttggtgtagtgaactctactttggttccatgctatacaattctcatcaaccaactccttcggcattgtagatagccaatgaagagcaagggaggagtgcacgaaatggagggaggagttaggaaatagtcgaccatggaaagatcccgggacgccggcagtaaagtagcaccttttgccaacggccaaagaggaaaaaagagtgttgaaatcattggtgacatgatcattaaagaatacttggaactcgggcatcactaaagaagaagaagaattgtggagttcatgagattgtaataggtacttttgttgaatagcttcttgtatgttttccactgcagtaaacgtgtttggtccaactgaacatccgaagtcagcaatgcgaaatatgtttgatgatgatccaacaagattggtgaataatttgcttatatcaagcttatctgcaattgcgttatagatcatacacctagcaacatttgtagttgtttcctgtcataattgaaaatcatcatttggattagaatacaaaattcaattacataagagtattaatatatttgaatcaaatttaaataaacatgattattaatttactagtttataattaatcaaaaatttcaaataatgttgtttagtataattttgctttatgtttttttcattattagaatatgatgtgcctttttattaacaaatcaaaaatgttcattatcatatcacatatgtcattttgcttataccagctgtcattataatctaatttctatgatagtttacattatacttataatagacttgctacatatttttagaaaaaataaataaagtacaataccataaaaaatattcaaaatagttaattgtaaaaaaaaaaaggaacatgagcaactagatgttcaaactttatatttggaaccaaatattatttaaaaaaaaatatatttgtggaatacttgttttaactacaatatacacaatcaggcttgaccttataggtgtacaagatgcgctacctcatagggctccaaaaaatgaaagccctaatatattttttttattaatgccttttagatatattttgtatgaacccaaatttctaaggggctaacaacttatcattgctaactctcatgcaaaatatatatatatatatgtccattactgctatttattatttttttttcaaacttttcaatttctttttttttttcctatcattttctttttaggttgtattagaatcaataataatttaatataatagctctaatttttttagtgttttgtaagataaataatcgtataaaatattatttataaattatactttcttttttgttagaagcccaactttttaaattagaatagggcctcaaaatatttaagaggaccctatacacaatcatataaaaaaataatttataatttctccaattaaaaaaaaaaaaatagacacatccatattgtaatatactaaactaatgagaattgtaaatattatttatgagatattttaattcgtatgatatgaattttggaatcaaattgaaaaattcgattaaaggtttgaaaagatttgatctaggactgagctaagaacctaaacaaaaattagtttgaagcatatagaattttcgttaaataatttaattatgatagttattattttgggcataggaacacttgttcttgtatgtggagattttgtttgctaatattttaagatgtagagtctaagttaaaaatttgacaaaatcattattttgcttaaataaaaaatggcgcaaataatacgtggtggaagatgattatgatctatgttgttcaaggatttttaagttcactaaaccgttatggataggagatatccttgtagtacatcaatttaagtgtacttggggcatttttggaaagaaagaagtagggtcaggcctagtctaacgcctaaagggaacataagtaagaacattgccaaaatatacccatcataccaaaatattaatttttaattttctctcttggtatttttttttctacaaaaggtgcttcaatggtagacaactccaaaaattacatactatgattctacatatcacattttaaatataaaattaatcaagtttcttggtaaaataacaatttttcttaaaaaataaaaaaaaaaaaaagaatgacatggttattgtctgttttgggcaacacttaacatctatattctcaaaatttatcttagaaagtttaaccacattatatatgtggcaagactactccaatagagaacccctattagagatgctctaaggggaatggtcaatttcaatcagtgcatagattgaacccccatctatattctcaaaatttatcttagaaagtttaaccacattatatatgtggcaagactacttcaatagagaaccgctattagagatgctctaaggggaatggtcaatttcaatcagtgcatagattgaa

SEQ ID NO: 256108 - DNA, 2820 bp, Cannabis indica
aataaaaaaaaaaattatatattaaatgtcatcacgcaagtgatgaaaaagattcatggcttaaggaataggcatacacggaaaagaaaaagaaatagaataaagacattataacaagaatactctaacttatcttcttctttttttttagttatcttaagtatcttgagtgaatatcaataatactactttcgattcatatcatatataaaaatatatttatatttatgtagcgtcaataatctttttcaatccattctcaaacaatattcataaaaaaatattaaaaaagaataattactagataatggatcttctaaatgtgcatggaacaatccagataggaaagacttttttccagccctattttttgggtggcgtgtgcagtgaagtaaaatagataagagatctacagatcattaatctcaaaacagcaagtttattaaaaattatggaccaaatgtactaagagaccctttggtatgagaagttcagaaaaaaatctgatcaatgagaaagctaaaaatatgtaatgattgtccaacaagcagtaaaaactgtatttggatgtataagaaaatcttatagaagcatggtcaattgattataaaccaccaaccagtctcatacatagcagatgtaggatcctaacagattcactttccactaggtccaatttatatatatacatatactttttattaaaaaaaaaaacaactcacacacgcagcaaaaaccaagatcgttagcaaacctgttgtcccaaaacataacttggtatcagtgaacctccccaagattcaaagcaatatacatccaagtagtttttctgtaacaaaagaaaggtatcagttttggtgaaagaacaattgtctattaggtttctggatagagcatgtatttgtagggcaaaactccaatataaatattgaagtgagatatatggataagaataacaccaaaatgtactagatgttagataaatctaggcagtcgtatgtattgcctaccatataattctgcataaaaagatgaaacaatggtactgtgcaaaatattcatgaatgaaacataaaatacacacatataatgtcaaatactgacctctaatgaaaaattagatttttagataaactaagaacacattggtatagataataacctcgtaagagtaatgttacattagcaaccatattggagcccaacttttaaagatgaacagaacattggttgtcaatagggatggaagtgggacggagattggcgggggaaacacctcccccatcctcatctctcagttatgtcctccatccccatcctctggttccctagtctaacccattcatgttaaaatatatacatctatatgtaaaattctcatatggaggcattgaaaagtccccaatattgagttcttttaaaatcacatgagagtctgccacatcgttaagtgagtttgtgaaataaggttgtgcatcacacaagattacttataatttgtaatttaattaaattaaattaaattaaaccagaaaaagcttgaaagagtactgccacatcgtttgaaagagatggtaccattcaaggaagcattaacgagacattcatttgtctaattccaaaaaagcttaacagttgtagagttaaagactaattatgggagcttgctttagtatgtgtagttcttcaagcaggtggttcaatcaagagtagtgaagcaaagttaagcttcagcactacttctagctaccaccaattgcttcttacttcgccaagtaaccaaatttccaaaaacaaacgaacaataccttgaagtagaccttcaatcataataaacatcaacaaacacttcaatactataatttcggccattaagtttgaaacttgttatttggaaaggcagagaattattttcggtggtggttgtgattacaggacgggagtaattgtggatttgatcgattccacatatggatatgatgtctctaataaaaaaaaaaacaaatagatctatctcgctcattcccgaagaattcgatttttctcaactaaacagactgtgttttctagctctgataccataagcacaattaatttaggagagaaatcttacattccaacctaaatttaatgtatagattaaattagggggtatatataaaactacaatgactaaatgtaaaaacaaactaactaataccctaataatgggaatcgactaaatagagtctaaaccaacctatgactcagtcttataacttatcagaaatactttatttctcaactctagcttgcctattcccaagcccccttcaaatctaggtttgcaaacctcatccaatgccaccaaatgatcaaaccctgaaagatcccctccttcccgaagaaaatcgcacatcaagttctctattaaatttaggactttagaggctctaaagagtgataggtagtacactgataaagaagacagcattaattgaataagtttcaaccttcctcctttagaaagaaaagagcacttccatccttctaaacattttgcatatttggttgtaattggttcccagaccaaataactaattcaaaagaagaggaaaaaaactgcacgtagaaaggaaagttttggttaattttaaattataatttttttatataaaaaatatacatttaatatattaagctttaaaaatatatatttttactacgtattagttttttaaagtaatagtttcgtttacttagaaatattatcattatatttataatttttaaaatttatataaataggtgcgaattgaattcgatcagttaattttgcat

SEQ ID NO: 256109 - DNA, 2827 bp, Cannabis indica
tatcccacattttttttgataatttaaataaatactaataagagagtatgactgcaaagataatggaaaaaaactccatttaattaaatttcttaatttgtaactaatctataagaagtcatgaaaagaaaaaatattttaagaaaattggtaagcaaatttataattcatataataataatagattgatgtaaattatagagaaaagtaaaactcaataccaaattacaataaatcttaaattataaatgttagatcgtaagtagaccaaacaaaaaaattcataaaatttacttgaaacaattataagaaccctacaaaaatattttaagaaatttgaatgcaacaattaaactacacactacataaattaattaataactatatactgattgaataaagaggataagaaaaaacttatcacatcaaaatgatctccagctcttcattattttttaaatatcccatttgtttcgaacattgttatatttctactttgttccacctagacgcttagacgaaacccaatgcagtttgctaacgttaaagattagccaatttagtttacattttcattacattttgctctaacaagacatatcaaatatatataagaccaaaattgatcatattatttaaaaccatgtttcttattctcttcctattctatatctttccatataattttgtaaattctaattacaacacttcaaaaatttatttagttttgtggcaatgcctactctgtctcgtagattctccactctctctactccaattgaccttttcctccaatggaaacctcaacgagaaactcaacaactcttatggccccccttatctccatctcagcttcaaaaacaacagaagcttctgcaatccaaactcatcctcgctctcgatggctgcacaagtgtcaaacacgtcaaacaggtccacgcccacctcctttgccaaggccttgaccaatgctgctttgttctttctaagcttattcgaatgctgacaaaattttgtgttccaatggagacttatcctcgactcatcttccaccaagttagatgcccaaatccgtttttatggaatgctatgattcggggattcattcttcaagggacgctttcagagtccgttagtttgtataattgtatgagaagagatggtactaggcctttgtcctttacgttctctgtgtttttcaaggcttgcagtgctactcttgacgtagatttaggtacacagatgcatgcacagacaattttggttggtgggtatggttcagatttgtatgtgggcaatactatgattgatatgtatacaaagtgtgggcttttagaatctgggcgcaaggtgtttgatgaaatgcctgacaaagatgtgatttcttggacagagttgattgtagcgtattcgaagagtggggacatggaatcagcgcgagacttgtttgttgagttgcctgttaaggataaagtgtcctggacggccatggttactggttatgcccaaaatgctcgaccaagagaggccttagaagtttttaaacgaatgcaaactgaagaagtagagacagatgtagtcactcttattggtgtcatttcggcttgtgcacaattaggtgcgtcaaactatgctaagtgggttcgagatgttgccgaaagatcaggatttggaccacatgaaaacgttgttgttggatccgcacttgtggatatgtactctaagtgtggaagcattgatgaagcattcaaggtttttgaacaaatgaaggaaagaaacgtattttcttacagttcaatgattgttggacttgctatacatggtcgcggccatgaagcgatccagttatttcatgacatgttagaatctgagataaaaccaaaccatgtcacttttattggggtgctaacagcgtgcagccatgttggtcttgtagaacaaggtcaacaattatttgcagccatgaaaacgcattatgatgttgatccttctgtggagcactatacctgcatggtagatctactaggtcgagttgggcgcttggaagaagctcttgaagttattaaaacaatgccagtggaacccaatgcatgtgtgtggggtgcattgcttggagcatgtcgtacacatcgaaatcccgacattgctcagcttgctgctgacaatctctttgagctcgagccgaacaccattgggaactacatcttgctctgtaatatttatgcatcagcaggaatgtgggatgaggtttcggaggtgaggaagcttatgagagaaaagggtttgaaaaagagtcctggatatagctggattgaaggaaagaagggcgaaatacacgagtttttcgccggtgatatgaggcatccaatgtcaattgagattaagcaagcactggaggatctagtgaacagattaaaggctcatgggtacgtgccacacctgaattccgtgacttatgatcttcatgatgaagaaaaaaggcgtttactattaaatcatagtgaaaagctagctcttgcatatggactgcttagtacggatgttgattgcactattaagattatgaagaaccttagaatatgtgaagattgtcacgcattcatgtgtggtgcatcaaaaattacggggagggagatcattgtcagggacaatatgagatttcaccatttccataatgggacatgctcttgtggtaatttttggtgattattgaatcactaataagttagaaactttaaaagctcacttacaatcgtacatctggttatgaagtatgataggaaacatgtgaattcaaagtcctcacagaaacagattattgttttga

SEQ ID NO: 256110 - DNA, 2220 bp, Cannabis indica
accattgaatagtcacccgtaatacatatatatgtatattatataatttttaaaaacagttcaatataataacttgattagtatatacattatgacgttaaaagtttaataagatatttttttctcttgtataattgttaaaattttattggacgaattttttaatttttattttaatgtttgataaattgcaccacaccgcaccataattttttagtgtagttttcgcagttttaagatcttgcaatgcgattacgatttaaaaaattacaaaaatcacatatgtggtttagtttgagagaataacttaaacccgcaccacccgtaccgcgaacacccctagatactataaataatctatatctatatattcatataatgtaaagaaaaacaaattaggtggcattttatatgattttctttctattttactaattgtgaggctttatcattttatgaagaaaatttgatgataaatgtagttataattttttatttattattttatcaaaattttagtattaaaaaaatatatattataaaagacttactgtataaaatttattaaaaattaaatattttttaatatatatgaataaatataatatattttcaatatgtattacatgtaattagattaaatcaattttttagttagattttgaaagtttcttctaaaaccctatccaatttaattaaaatacaacaactcacttccaatcctatccaactataactagatatttaattgtttgtaattggattgaatttgattggttcgttgtaattggatcagttcaatgtaattagatcataaattagatcacaatcgttattgagggttaagaaaagaaagttttaatgttagtgtaaaaatatgattacaattagactctgtgtatcattatactttattttgtaaaatattatatctaaattataatttaactaaatagaaagaacagtcaataatttttaaaatatagtacttaaatttatatttacactatcgcgaagcgtggctacatttactagttattaatataccatacataaggccagtttaggaagatgtgcgttgattgtttattaaattatagattttaagtgatattaattaggattgaacatcaggtggcttgaccaagttttgggtctgcgaatttcaagtccaaaaaatggacctagacccacgatagggttgggttggcgagttagcgggttggcgtatcacgggttgacccaatcaactcaatcaatttttttttagaaaaatccaaattctagttatttaaattaagtaccaagactatattcgttacatttaaataaaatattaatttcaaatttacacctatgaaagtcaattcaaagttcaaaagttcgaaaatcaaaatcaaaactacatagtgtgtgtcatagtgatagtattagtagtataatggcagtaagaaaaattgtgatagtactagtatgtgtcatgtgataactacacacttcacaaatacacaacatacacatcaataataataatattcaaattaattttttaaagtcaataccgttattcaaaatattactatatatccataattatattgtccaaactaaaaatatacttataaatttaatgtccatataagcatctatctatatactagattaaaattacgtacaatgtacgatacttagttatatacttaatttttatataataatttttacactaaaacaaaaactacaaactataaactccaatagtattgtacttctttttttgcagtaagtaaagattattgaaattaacacaacaaaaataaaattgttaaagagtgattttacaaaataatttaacttaaattttttttttcaaaataataagtgcttctgtatattcttaattataaacaacataaatttataaaattaaaaagcaacaaaaagcaaagtcttagattttaattttcaataaagtgaaaattaaaaacataaaataaaacttataggttgaataaagattaataatagaacaaagaaatattaaacagtaataaattcataattaattaattaatgaaagttatccacccacaatataaaaaaaaatacaacagaaaaatttaaaatcactaaacaatataattattatgaaaaaaaaaactaaagatagaagaaataaatatttattggtttcccaccacaagttgaaaactttgtgac

SEQ ID NO: 256111 - DNA, 7635 bp, Cannabis indica
agttcttaaagatcaagaaagtacaggcctaatggatgaaccgcatgacctatctagaagactcccacctctgataacaattttcactttgcagtaaaaccctttaaagactatctgatcttatgtcaggaagctgattttgatgcccccctcaccacctgcaaaatgaaagcattctcactattgaataatccatcatatttttttcaacatcttcactgaattcagcataaaattggctgcattcggaatgctgaataaacctaaacttttgtcaagccaaaactgagtggcactacttaacaacgctatgctcgaaaggtcagaacttagagcagagtgcggggatcaaaaccaaacttcgcaagctcaccaagaacctctgaaagctgctgagttaagagcagtgttctaggacacgaaccgtgagcatcctcgagatcatctcttcaggaacactgtggctgtctcagtatctggcttcctgcagcttagtaccaaacgccctcctaagcacttgaaaacaatgagatggtttttcaagcttcttcctagaatataaggctctgttatcgcaaaatttatagtaccaccatctccaataagcataatggctcaaccttaaaattcttctaagccttgcaaaagtacagtaaagctaacaaagtacaaagtacagcaaaattaataacttggtcacaagtaactctatacatcgtaaaacaacacaaaattaatttcgaaggggaaaagaagtatcgaaatgtaaaatagtgtttagctcaaaaaaacaaagaaatgtaaaatagtaagaaccaaaataagaaggaacagatgctgagacagttagaatcaaaatgtaaaaattatacagctaaacttaggcaaagaaaaactaaacaggtaaggcttaattgcaagaatgatgaactctttctcctttgaaacaaaacctcagcttgtattaatagataataaaaggatacaagcaataatgggtgacaacacccaaagaatgatttaactgttcaaaatttaagaatcctcatcagtgccatctaatactagtattttaaaatccatacaaatgaatctataacttaaacttctagagacctaaatccacaagacaccatcaatctgtataaagtttcatcagaatatttagttgagcagccaatcaaggagatggtgaattcaacaatctacactatcattagtatctttgatactcttccctcatcattcaaatgacattgtagtctttatgccttagagataatgggaaacacttgaaaatctttcttgctttcataaaccttaacaatgtcaggaagaacatgctgatgcttttttaccaccttctcaacaaaatacttttcagtcattttgaaataagaaataaacttgataccttccttcagaaaacctgttgagatcagaagttgcaaaactaaactccttggaataattctcttctccaagctaagtattaatatacttggattcttgcaaatgagtgaaggctctatattcaatttgttaatgaagaaattcattaattttatgatcttcttctctgatgtaagcatacacatgggttgaatcttaaaggctgaatagacttgatcttctgacaaaccaaaacttttgtaaactttcatcttctgctcccatagtttcttacttatcacagccatagaacgaaaagcgagagcaaaatgcacagtattgggatcaaaacccaacttcactacctcatcaagtatctccataacctttggaggattcaaaagcaatgttcttgaatgaatagtgaacattctcaaaattataggatcaggaacaccatggctcttcagaatcaacaagtttttctcaaaagtcttttccaaattgtattcaagtatccagtgccctgcttttacaacctttacaatctcctcatcagtactgaaaaccctactaagaatttgaaaagaaggaatgatatgattctccaagctccttccaagaatataaggctcaaaagacaaaagctttgcaacatccccatctgtaaagcccttagacttgaaaaaatccagctttggcttcagtatgtcgttcacattgaacaaaagcactgttggacgcttcatagccaaaactgaaatttgcttattgctgaaaccccgagctctaaagaagtcaactgagtcaaccatatcacttaggagaaggcgtggctctttgcaaagcaatttaccaagtcttgctccagacagccccaatgactccaacaacttcatattaagcctaagcttatcttctaagtcagccaaaagcaatgcaggacgagtagctataatctttttgatgtgggtctgagttaacccgtgagctctaaacagctccaaattcgaatcagctctttcagggtttccaatgtttagctttttcgaaattgaaatggcggaattccgggtaaacccacatgagttttgaaggtaagaggctgtaaaattttgtgggtctcccgaatttggaatttctgacatgggtctgagaaagtaattgaatatatggaagccatgggtagagggggaaagcctggaatctataagagtgagtttattgcaaagtaaacgacgaagcattggattggattgtgaacaagtctcacctggtttggaaaatgaagtagaaaatgaaacaatggtacttagcttggtgctccctcagctttctccttcgaaagattcagactttgctccactcactgaattgggttgccggaaaggtgaatttaggttaaagacgtagagagtgtcctaatcctagatgcttttacatctcatgaaaatgataataataaataaatagttccatcaaataaataaataaatttttatatatatatatatatattattttttttttcaaatgaaaaattcaattttattaactttcgctgtcaaaattctaattattttttttttagaatactctaaattgaaacgacaatcataaaataatataaaaattttagcaaaattataagtcactatattaactgatcattttataaaaataaacgaatcttttctcaaaagagtaaataaacgctaacaataattaatagcatgtccaaataaaaatatcatacaaaaggtactttgtaaggcttgcacagtacatagacaatcgatttctagagagaccagttgccattgatgatctgtaatctaagtaagagcctcacaaactctcacattgcttcaactaattctaggtccacttgtccttgaaggaaagaagtgtgtccctcaattaaaaaatcgtttgcgtcttgagccaccatgtcgtagccaacactgtgattcctctttaacgaaaatgcatctatattaaccttaatactattagcatgtgttaaaataaaatccaatactcagccccattacctgtcttacaccaggccatgacaactctccctaagagtttggagcatgtctccattgttcaagatacctttttgcataaacaactatgtcaccgactcccaccacctttttgttccacaccaaatcgttcctagcactctatatagcctaacaaacaatggctaaaacacaacattgttccgagtccgaaaccttaaaagaagtgatacaatagtcaaggaaagaactacaaggtattatagttgtatcaatacctactctattacagcagctctgcccctttggacaagaaaccactccatggaaaatggtcttatccacccctctacaaacataacacaaagaactcacatctacatatttagtacgcaattgaaccattgcgagcaaataattcataccagccctccacatcaaattttttatttttggaggtacctttaattttcgcaacttttgccaaaagacagccaagaaaccctagcccttgagcatttatccccttccttgagccaagaaaccctagccttttgtttccattataactcttttctttcacaggcctcgttgagagatagacggatatcacattcagtaatccaatatctatcccacatgtaattttgaatgaagttgagtttcctttccagatctttaattaaggtgttaattctaccatattgagttctgttccagtgcatgagagcgacccgagttgccctaattttcttgaagaccctgacgggagcccaagagtgaaaaaccaaattctaggcatatcaaaccaccaacttgctcctatcgtctcgagtccaaccttcttcaaacttaaagcttcttttaaatttatttttccaagccaccagtaagaaggcaaagaggtttgtgatcaaagttgcaagtctgagaagagcaaatgaccgctctcgggaacagcttaagccaagcaccattcactaaatctttgtcaagagcgaatttaacatggttcgaactagacaggtgatcatcccaggtaagcttatctccatgaataggcatgttaataagcccccttaaattcaccaagttagagatgaacgggacaaactggtccctacccttagaaccaacatgtttcgattcgctaagcacaaaatttgtgtctcccataattatccacaggccaacaaacctatccccaatcttcatgaacttagcccagaacgttttcttaccattgaaataaggggggccatacacacaagataagagccaagggtaagacggggggtttgggtagacaagaccagaaatatgcttttgggagcaagaaatccattcaaatacaaacctgatcttccaagccaaaatgattcccccttcaatactaatagtcgacacaaggatattaaaataaaaatagagggagttaagagtatgtaccagagaagtagcattaactttgagctcggttaaaaaaataaagtccggggagcgtgaccaaatcagggacttcaactcccgaactgtagaggtctgcccttaccctctacagttccaagcgatgcctctcatgactcatatggaggagatataacattctcctccacagggttatgagagtgagtcgacccaatagaaccagatcatcaattagaaaagtaccaaccataggtcgcgataagataacatttcttcctttagaactcccctcattcgggtcatcaaagcaactgaaagagttcgagttttcatcagatgtttcttccaacactttagaagcttgatcttgattgttcgtatcccaaggaaagtcgcaaataacttcaaggtgttgtcgaagaagcttatagggtctggagtataaggaggaagaagcatcatagttttcttttcttgaaaaggagtagttctagcattagtttcagaagtaggcttgaccccaatgtcacctccaagcgcacaaatctcatataaattctcccgaatttatttaagttctggtaacaaagtatcttgggcttggaaaaaattagataatgccttttattcatcatgctgaaagttggcctcttgtccacaaactgagctatacttagcattattcaacacaccattatttttctttatcaccttatcttgtccaaaagcttcacacgacccacttccaataggccctttaaaaatactactagggcccacgctaacctcaccttcacgggcaatagggtctttctcatagataataggatcaggtccaatgacaggagcattaataataccaggcccagaaatagacaaggttggtccattagcaatgggtgagtacttcgtgtcctgacccaccaactcatcatccaacatattcaaatttttctcattaatcgataaacgaccagtaatattaaaagtattatttaaatccaaacaatgtaaatcagcagacccctttgccaattcttcatccccaacagcaaccccattaccagaaggagaaaccagaggcacgcgatgcctaagctgcggcctgggaatccacacggcttgctgagaagtaccaacagtctcacgatcacgactagtcaccatcttgatacgcctcgagctacggatagcattggagactggacccttgaagcccccatcaccatcgccaacagacgccatagtgagaagacgacgggacaaaaaagacactagctttttagatgcagcacgatgaggaaagaaagtgttggcacctgaaaaaacgtctaggtaagaagaagaagtggacagccatggcccaaacaggggaaaagggactttattactattggccactgtgaccggagaagacaaagaacaacctctacgttggtggcccaagcaaccacaattatggcaaaaaatattgatctgctcatacttgaattggagctagcgcttgataccagcatcgaggtcaaaaaaaccaactcgaaaagagaggttaagcaatgtccatttcaaccaaaatctttagaaacttactccaagaggctagattatcttcctctaaatcaacttgaatgactttcccatcctttcctcccaatagataaccatttgatttagagaaatattcatgggggagattatggacttgcacccacagccgcatacaatcaaacttcacttgtaaagtatttctcagagtccaagcttgcagaatgagagagtaacctcttatgcaccacaggccattttccaaggcccatgttctatcctctgcaacagtaaaaccaaactcaaaacagtttgagattttagagtcatcagtcaaagccacaacagccactggtaatttccaaaatttagccacaaactccttgattgtagcttcatccacaaacataggggccaccactttcccaaccaagcaaaaaatagataaagcctcgagagaagaggcacagggaaccaagttaacagatgcttcatgacaggagaaacagttgcctttaagaggggagttggtagaattaactaactccataaatgcagacagctcaggacaaattcaccacagaggaaggagacaacaccacccacacacaccacaagaacaaaacaaccgcacacacacacacctaacaccctcccaccccacacaaaagaccaccccacaacacagggaaaaggagaaaaaggaaagaaaaagagaaaagtgaaagagagaggaggcaagacgaagcaaaagccaaccaagatagacaagggggacaagacaaaaggcaacacgaagacaagagggaacaacttaggaacggccagaaaagagggaagacaaggcaacacaaagacacactaacaaacacacaaaccagggggacaaagagaactacgcacactaggtgaaatggaaagagatgaggagaagaaagaaagaaagaagagagccacgggaaagaagaaaagttgatgaccattcttctcaaatgttgtcgtgagaatccacaaaaaatgctttaaaccatagaaacttggagctttaaaaattcacataaccaaattgatgtgttccctccaaagaacaacaaacatccatggaccaaggaattcccctttcataataaaatgaaccaaagttaacactgtttgtgcaattgcagtttattgaaaagttacagcaagtttggttgtatatgcatacgaaagtgtagggtgttaaatattttaccttaca

SEQ ID NO: 256112 - DNA, 3821 bp, Cannabis indica
agccaggttgttcacaacttcaactaaaaaaatatataaaatgcaattttttttatttgaattgcttattcggagcaacaaaaccattttaagtgttgggatatcagtatatacaagattggttttgttgaaatagaatatgtattgtgagttcaaatacaaccaacaatttgactgttatgttttgttgttggagtaggattgatgcaggttcaggtttgctgacgtctataattttattttataatttctatttgcaggtgagtttacactccgtgccttcctcaatgggcgtttggacctctcacaagccgaaaacgttggaaaattaatttcagccaagagtgtggctgctgcagatgcagcacttgctggaattcaggcatgtattctgttcaggatgtaaattttgatggtcgtgaccttttatgttattcaattctgctctagctagacttccattgcaaattgcagcaattgtattttttgcttctattcagtgtaagcttagcttttttggcatctgccatgttaagctaacacatgcattgtctttttcctctttgatagggtggcttttcttccttagtaaaatcaattagaatgcagtgcattgagttgctaactgaaatcgaagcccgtttagattttgacgatgagatgccacctttagatgtggagctagttgtgagtagaataaattctatgtcgctagaggttgagcatgcattagagacagctaattacgacaagcttctgcaatctggattacaggtacggtttgctgtaaatctgacaagttatccttataatgatatcctgtggaagttgtgctctttttagatgatcattgacttattaagctcttagttattttcagttagctttgttatttctatctgaactgtattagtgctatcttttatgtttgtattttctgttttggttctgagcttttctcttgttcaattccactacctacctcttaattattcacatgctctgtgtcatgtttctttgaatttgcactttcagatttctttaaactgtttccatttttatgtgcttctgacatgtgattccccttattgaaattttgcagatagcaattgtcggtcgacctaatgttggaaagtccagtcttcttaatgcatggagcaaagtatgttatgaaaaaagcttttcttataacttaaattgttggagttttcttcttatataatggaccagtctatcgagaattacgtagcctcaattacatgcattttagctacttaaaatccatctttttcttttctttttttcttgaaaaaaggtacttgaaatccatcttctgaatcttattttgcattcaatcattacttttagggcaatggatgtttttttaaatggagttaactagactatgattagtacattagtttctttgtccataatatcagtgaatattttgtagagggaatgtgaaaatgttttgttttttaacttgtgcttgcatagttacataaattattataattttgtcatcttaatgaatatcatgtttttatatagcgtgcagagtgatagagcaattgttacaagtatcgctggaaccactcgtgatgtagttgaggctagtgtcactgtcaatggaattcctgttacacttcttgatacagcaggcattagggacactgatgatatagtggagaagattggtaagctcatcctttttgcatagtctaaaattatgatgttttagtattgattctaagcaaagaagatgaaaccaacttcactcgagattcctttttttcaatagtatctttttcaagtttaaagatatttttaaaattacaacaaaagcaaatcccttttgtagcagtaatgatttattttttctgttgtcagcatcatattctattcacattgtactaaactattccatattttagacatccaaatgtgcccaattttctttttccaataatctcgtttggtaagagaaatgctttgctaatgaatgacttgagatttcagaaggtcttcatttttgaacttgtacctgtttcttttgtacattaaagttgaatttgaccacgtatgactacaattttccaggtgtggagaggtctgaaacagttgctatgggtgctgatgtcattatcatgacagttagtgctcttgatggatggactcgagaagattcaacactcttaaacaggattcagtctaacaaggttctaagggggttttacaaacaaaataatattcctttgtgcttcgtgcctttcattccatatgttgatttactatattttttgtttggaattacagaaatcaactggatctttctctccaatgatcctcgtaataaacaaaattgattgcggcgaatctattcctaatattgaatgtatcgatgaagatggaaatacttttactaagcatgtcaaaacgtgtgctgtaactggccaaggaataaaagagctagagacggcaatatcagagatcgtgggtctcaacaaagttattcaaggggggcgcaggtggactgtgaaccaagtgagcacccttatgactttaaaagattcatctttctaatttacaatcttcttataatcattatttttataattgatccaaaactgctttatctaatttgaattgatgaatcaacagagacaatgtgagcagcttgttagaactaaagaggcttttataaggttaaagtcatcgatagaagatcaaatgcctctagatttttggacaattgatctaagagaagcatcattggctcttgggcaaataagtggagaagacatttcagaggaagttttatctaacattttcagcaagttttgcattggtaaataattattagctttagagtaatctaaaacaattcataaagaacaaaatattgtttctttttgtacttctttggtttagctgtagcaaaatatgcttttcttttcacaatttgttaattctgactttttcattatgcaaaaatggtaagaaatttatgttaatatttcaatagtcattggtcaagcttacaagttatatatttctgtgtatataacactaaaatgcatctttaatgggtttcttggtagtagtagggaagtaaaagaatctttgtttctactaatgtgattacttttgagctttttcttcttttaattaaataattgtttgcattcaaagttattcagaatttatttggtaaaaaaagatatagctcttaaatttttttctactttagctaaggaattttttagctatttgtttagctatgtgagattatcctccaaatctttcttcaatttataattatggatattggtggttaaactattcaaactgcacattttctaaacctctgttatgtttttgctctatattatttcgtcaccccttctctatttgacccccaaatcgtcctatgtgccaatacaaatcttgattcatggcaactgttaggggccacgtgaaacttgaaaacccaatttacaataatatgttttttttcatttaatttaaaataataactttactactgttactgacgtatcacgtcagtcaagtatgatatttttgatgttcttaaaagtaattttttggctactaataatgttgataagaaaataattagttacatttatattaaaaactttattttcatatcataaaatttgagatatattttggttactctctaaaaacttatttgtatatatctttgtaactaattagttatttttaagttatattatggtagattataatttaaaatacattaaggtaatcttaaactgttataaatattaata

SEQ ID NO: 256113 - DNA, 6341 bp, Cannabis indica
catacaattctaacccaaacctaagatgactttctataaatagaaagtgatgtcttcaaaaaactatgacttgcatattgttcctttcagagaaagccatagtcgcccatctcttctcttttcttctcttcaattttcgaaataccctagtaaataagagtggtgcccacacacatcaagtggtatctcaatcatagtgtggaagattgtgaagaatccaaccaacaagaaggagaatcaacataaaagaaggagagaaagagatccaggttcagatcttggtgatgctctgctacagaaaggaatcaagggctagagatctgaacgtacggaaggagtcattatatgcagcttgggcggcataatcttgctctttttcttcgagggagcgggcactgaatcccaagttgcatacttcctgaactcatccatggtagattggtctttctcgagtagaccataatttcttaaatatgtcaattgcaaaaggaagtctacaaccctcatcccatatggtaaatttacaagttactgatgacgcctctcaatagcttcggtgggaacaggtttcagtaagcgctgaaagaaaaaaaaataataaaggacatgttagcaacaaatgagacaaagaaaatacaaataacataaatcaagaaatgtcttcagaacttacgaatttttcagaatgaagtgtggttgatagggtggaagtcactcatccaagaaacttgtccataatttatttcttgttggggagtctgacgacaattttttagtcgtcaaagtaagcctcaagataataaaaacctcccgagaagtattttcttgggggggtctcttttattatatacaaacatgtgatttcgttgggagaagggccttctcatcccatcaagtgatagagagacctcagagaggccaaaattctataactattaatttggaattaattgaaaatgagcgatcccaacataattacgaaaatccttaaagcaattctcaagtggaagaattgtaccggctcatatatgttttgcacttcaagctcccatagcaatgtgagaagaatgttcgcactacactcaagttctctattgaaacgatcagaagggaagcaacttttctcatcgtgcttaacagatcgacatagattgggctggggctggggctttggtttatttttttttgtcaatttcttttagtgggcgcatcaaaagatagttttgaaaaatactctaatatgtgtaattgggcctatctttgtgttaagtgattttggtgtaggtattggtaaaattctaacagatcacatctctctctcgtctgacactaatgttgatgagctataaactctaactctatattcttctctttatttctctattattgaagatcaaataaatttaggctaaatgtcagtttctccgaggaactagttaccataaaaaaaaatgatgaacctcgttatatcttgtctctaattcatttagtttccacacttatttttttagtttatgtttattgtttgattttccattccagttcttcagatcttgttttaattgattcttaataagtattaattcactacaatatatataaatagatctaacttgttgggtattttttactgttgtgtatttctttgatttgatcactaaaaactaacatttttctaggttgctttccatagtggtctactacttctaacaaaagtttaagatgctttaagattttgaaaaatatttcccaaaatttatgcaaattataatgcatagcaacatcatgatcataacgtagttcagtttgcttccagacaaaaatgcctacgtggtgttggtgtagaataattataatgtatttttcatgtatgactttgagagcaattgtcttttctaagcaccgttgaacgtacaaaagataacacaatataaaatgattagtataaatgcccttattttactgattcagcattttcttcgactgataaatgctgaaagtgggtggtgggtctttactctttagtaattgcaataagacttttaaaaaaggacatttctgtgcaccaaaattaagcagtctgctgatgattttgcactttttgtaaataaaataatataatactcctttccttgctttacaaatcgatcaatcctaatcaatgtatgtatatatgtatcatactgtactaaaaagtaatagtggtgctggatcatgtgtccctattggtgtcataaaacttgctcagttgccagcatcattttggaagtaagaacgaagaacaaagttgacataaattgcaatatcaaacaataacttattattatgggttttcaattttcacaactaaatcctaccactttttaaacccatgtttgtccaccctttaacaactctttaacttttttttcaaagtcttaggcaaaccagcacttcaaaaactctggaataagttttttaacaagctgtacatttcaagagcatgataagatagtgtaaaaaattcaggagataataaaactaattattctacatttatacatatatgctggttccggagaacactaggtaatattgttgtgttgatcatcaaatcagaaatgagtaaatataaatatgtaaacataacaaggacgcaacttgtatgtacaagtactgttgtgattctacaatggctagaaatcagagaaaagattgcttgaatatttccattgcttactaaactgtttagatcagcttttaccatgatctatatagagccttttgaaagttttgagctcgaacgccttcttctttctaacctggcttcaattagctttgccatcaatgtgttttcatttagttcctgaggccatcttaaggaagattctgatttttcaaaatctggggttaccattttagacttccactgctgtattggactagcatcaccagccaacacagattgcaaacaagattcttccttgcagcaattttgaatcaagttttcgatcacatgatctgattttaatgtcttgggcaattcagaatgtttaagatcatctgttgcttctaagttttctctggaaaatctaactccattacatgacatggctctagtcaatctctccccagagtggctaccgcctttgatcagtacctgtgaccgaaattttttcttcaaagaattagactttgacaatccttcatgatagccttctgaagtatttttattatgttgtctttcagtgcttttgtttagtttgacaccaggtgttttgttgattacttctaatgaaagcgaatcacaatcagtagaatcttcatcgcctaaatgacgaggtgcacttccagcttcattcagttgaaacgactccaatgaatgtcgttgaaggccgagttcttcctttggtgataattgaccattttccctggatactgtctgtttagcttgaagaaaggttgttatatcgaaacctagcttctccactatcgtaattttttctgcaatgttgttttctgcttcggctagcttcatttgtattcgctcatcaagccatgcttctgatatatggagaattaacttctcaggtttgtctatgcctctttgatccatctcaagcttgtgcttcagcgatcgaacctcttgttcatagtttcttattccctttgcaaactcatcacacaagttttctaacaggatccttgcttttctctccctttcaagttctctcaaaacattggaaaaagaagaattcatttcagaaagctcacaagctagcttccgatgcaggctttctgaacgcttccttaacttcctctcatcatctagctcatctcgaactgattgtactgctgctctaattcggtcttgcacaatactcttcctaactagtttaccatccgtaacttgcttcatcaaatcatccatttgttccctatccgtctgcttttctttcagcaactctttaattcttgctcgggaatgatctaattccattttcagcgctttcactaacgatacattagacccatgttgttcttcaatactccagatccggttaagtactttgagtagctccgtcgaagttttaaggccatgatcattcatcctaaactttaaatccaaggaactggtgggagtaagagcaggcttataagttcccacctgtcagattacaaagaaatatctaaatctgtcaaaaaaaaaaacaaaacaaacgaaaaggaaacttccgagcatgtgccttgatcatcattttctaatcaatgacacttctaggaccataaatttaacaagaaaaacttacttaaagtagtcatatattgacattattatagaacaggcatagatcctaacctccatcgaattactttcatagctaggaggagaaacaggctgcaaagcatagttgctcctttcacgtgatgatcgatgatctttcacaaaggatcctgaagaagctctgcccaagctgctagcagttgctggctgaaattaggcaaagagatatcagcaaagccttaatacaaaaactttatggataccacaaagctgatgttctgcatgagtagtgtaaaactataaatatgcaattacaaagaacattttaattgctaaaatactttggttgagagttaaaagagaatttatactttccactttgccttatttcataatggataagaaacttaagtatattggtagcataattaagttatgcttatcgttctgaacacgaacaaataagataaatcaagaggaatacatatatctcttatgtcataaatatggaaataattgaaagaacaaatgtcactattaactaagaaaaaaaattaccgaaaaaaggaggaaaaaaaaggaacaatccatcaacaaagaacagaggatgggcaaaccagtaggcccttatcacatcagcgacaacaatcgaataaaagcaaaagacaatcgcttccaaaagagggaatgaaaaaatcaaaaagggaaaaactcaatcaacaaatctatcaagcaaaacttcccaaaatgcaaagagcaaaactataacttactcacctcttcttcttcattgccaggattggcatgagacagatgggcaatatgtatgggaagcttaaacccattactcttgagttggcggcggcggattctgacttgtcctttgcccactttatcaagtgaagaacgatgagactcaaaatcccaaagactggcacacaacttcctagcagagacatttggtggagtactaatgagaaattccgtacaggctctatgattgttgttgtttttgaagttggtatcttcgaagtcggtagtactaaactctaacctccatctgggtggtggagtacagggccctctttctcctcttttccccaccattaatccttgctttttcgatcttgctttttgtttcctctccattttctctcactctctttgtgtttttctcatcaaacttatgtaaccctttttctatcttgggttctaataaaaatgaagtgaagtctcgtaggtcgaagttaagaaagaagagggtgcagtgagtgacagtgtcagtgtcacttcacacatttttcttcatcttcttcttcttgagcactctcttgagttgaggtgttaacagcagtttatgttgtttaactcacccttatttctttcgtctttctaacctttttacccaaactttagccacatcagcactaattatggcaaactaactcgaatggacacctgtactcacaattattcttatatttaatttgtttattgtgttacaaataaaatagacgaaaatcttaatctaccgtatatcttttcgcattcgaggaatatatatagggttattctatagtagatcctttagctttttcctcatagtatagggtaataaattagaccaatcacaaactaaagaatataaactgtattgaaattacggtgaagtgtctgtatgttatttatatatatttaatactttaatcaattaaatattttgtactatttaacacttgttttcatagaggaaaattaatatccagaaattcataccatttcaataaaaagttgatgaagaaattcatcaagaatctcataataaatttatataaatcttttatcaaatacactaaaatctactcaattaaaatgcaccctacctccatattgccattagatataaaagcaatagtcgaaaaagttttcctatgagtagagaatttatgctaagttctactataatcttgctctatatataaggattatctatggtggggctggggcggcttgtttttaccctattgtataaggaaattttttaatcaaatatgaaatatgaaatagtgactttcat

SEQ ID NO: 256114 - DNA, 4163 bp, Cannabis indica
agatgggatttaatagttgaaagtattttcagatgtgaataaatctttctacttattctttaagttgcagtttatgatatctttactatatttccgctggtttgaacatatatttattccatatcatctcactggttgagattattgtaattgttgtggtttatttttcctatttatgtcatataaaccatataaaaattgatattgctattatcaattattcatagttcttactccatcaaactctttgcattcatattgatgatggttgcttttgctatcgttgagatcttaatttattctaatggaatgattactcttggataatacaacttaattgaacggtgtagtctatatttttgaagttgggtcattgagaaaccctttcttacttatgttttggcttattatccccacagttcgtcaaggaatctattctcgcgcccctaacttcgatggaagtttatttcaaattacgacagttgataatatggccaatcaattgaaaccaccaggcttatggctgaatattcaggtacgtgagataatgcatcttggcctactttaaccagctttcagcacattcgttttctgaactttaagctacttttgggcatagtttctagtttaccatatcagtatgaaccatctcatctcttctatttttgcagcacaatgcattcttcatgcaacggaatttaagtatgagaaactatgtactctctttatctaaaagggtagtcattaattatatctcatcgtcagagttgagtttcttgaacaatattagagcaagactcaatacaaatgtgacaaagctggtctttcggtttcttggacaagatgagattgagccttcaacaaatcagacttatggttctctcttgaaaaatcttaaaaatatcaagacatctgcctctgcaattattgtccctaaaggttacatatggcctgttgatacaaaatcttatttggagccacacacttctcttgtcttggatgctcataaagaagggttggaagtatatgcatcagagtttgtaaatgacatttctttgagttataattatagttatgatccggtagctgagtacctgaacttcatcgacaatggtgacttcagtgttgatggtgtgctaactgattttccaataactccttcagcagccataggtaatttttattttcctgtcataagaatatatgcttacctagtgatagattctcttcatggctgttttaaaaaaagtaagaacaatactttagtttgaccagagacatggagtttaactcattccaatatggaagaatctcagaaaatcactgggcgaaacctctctggaacatcataatttttttattttcattttatctatttcaagctgctgaattctctttaaaactgcagattgctttgctcacctagaaaaaaacgctacagaacaaggtataccgctgttttttgtttcttctaattaaattttgatctatcacttgttttttatttcatgtctaaactgttttgcattttttcttgctctagcaaaacctttggttatctcaaagtgcggagccagtggagactatccaggttgtaccgacaaggcttattccaaggcaattgatgatggcgtggatgttcttgactgtccagtccaaatgtcaaaagatgggataccattttgcttaagctctataaatctaatagacagcacagatgtggctcaatctgcgtttaccgaccttacattaagcattccagagattaagactgggactggaatatttgccttcagcatgacatgggatcaaattcaaactttaaaacgtaagctcaaaacatttctcatgcgtctactaatttagctgtggtgtttttgtaatttatcattatagagtaatgactaacttatatatccatgttataaagggggagctaaatagtgtgattaaaaaaaagatattgctgactccaaacttgctgtctttgtaattaaggtgcttgtttattcaaggctatcaatggacctgaaaatgtttaaaactttactaatgtttctatctttggtattcttatagctggatgggtgaaattggtgtaagaaatttgcttgattaaactcttcttattttgttcttaaatattacttgggctatttatgtagtatattggtatagagtatagtatttctttagatactaattgatgcacgagatctcgtcttgaggaattatttaaaaaggacctctgtatttatttattttctgcttacatatagctgttatatcaaacccctattcatcaaagtacgcattattccggaatccaaggaacatgaatgatggaagttttgtctcattggctgattttttggacttaacaaagaaatcaagttctcttactggcatcttgatcagcatagaggtgagtctttttccatgtctactttgatttctaccggtattaaaacattgaaaataaaaataaaaatgtgagatgaaaaatattaacaagaaagatgcatcccagagcagatcctagttcgaaatttgctttatgattatttctgtttctgtcattatattctttcagtttgcggcctatctagcagaagagcaaggcttgagtgtaactgaagcagtcattaactccctgagcaaagctggcttcaataatcaaacagccctaaaagttatgattcagtctaccaatagctctgttctaacaaagttccaaggcaaaaatgactatgaactcgtgtacaagattgaagaggaaattcgaagtcttgatgatggtgccttgaatgacatcaagtcattggctgactctgtggttgttggcaaggcctctgtcttcccagatagtaagttatttttgactggtagtacagatgttgtaagtaagcttcaggcaaagaatctttctgtttacgttgaaaccttcagcaatgagtttgtatctcaagcatgggacttcttctctgatgcaactgtggaaattaattcctatgtcatgggagccaatattgatggtgtaatcacggacttccctaaaacatctgctagatacaaaagtaagtacatatacttctgtacactatacctttctcatatataggatataattataattgcaggtccatatattcaaagcttattttagagaacaagtaaaggccactgctgacattttttgtacaaataatggttagtatttggtgagaatgaagctaactgagggtggtcgaaactaatgcaggaaaccgatgtttggccctaggtgacaatacacctgcttacatgagccccgttcagcctggggctctcttgcaactcataagtcctcctttcatgccaccatctgaggcaccaagcccagtgttgacactggaagatgtatcggagccacctttgcctcctgtctcaccaaccggatcagcttctaacccgaactctacagcaccggcaccagcatctcgcaatgcacagcctaagattgctgcaggctccatactgttgagcttagctatgcttctttctgctcttttcctgttctgaaaccatactggagttgtttatagctttgaactctctctttctgcacaagtatttcccctggcattgcttaaaatttgtctagtttggagatttttgctgctccattatacagcttacccattctttttgtctcatctgtgccccttttactgaatgttgctgaattttcccctgctgatgttgtagataatagatatattcattcttcttccaaatgtaattcgagggatataaactatttgaaacatacatttcatataatattttagttagcattattttttttcccttttaattgtttcaagatatatttataatattcagtgtggctttttctttttttttttttctttttttcttttttctttttttttttttttggttaagggaacaaaataaattgagtgctgaactagaagcatgttctagcaaaaaataaataaaaagaaaaaaaaaactaagaagcatgttagagcacttccaatgaagtgctataaagggtgtatatgtatggagtatttacaaaatatgggatatgattttgtctcgtgatgtactttccacggaatgtattccgtgttacattagatgggtctcagggt

SEQ ID NO: 256115 - DNA, 3490 bp, Cannabis indica
atatgttgttgtgtaatatagtgctttaaaaagaactaaggtggcagtagtatcattgtgtgaataacaaagttaataaaagtaattgattcttacattaagcttcttgatagaagtagtaatgaaaacgtaaaatatatatttgtatatattttgtgaatgtaaaatatattttatctatgaaagttgtcataaatttagaagatctttcaagaaatagattggtttgggttatatagagttaaaatttgtctaactcataaccaacccataattatatagtctataacccttaacataaccctttattttggcccacattttgtgcacccctacccgtcacattatcatcttactctttgaatttgggataaaatgaatgaagttctatctcaaaatcaattggcaataggaggagtagtacattcatcttatatgtagtaatttatttctaacacttaatactatttgtttctgaaagcatctaactcgtattttaacaatattaattttaatattcaagcaaacaataactcgtcataattctcatttgatatttcatttcatcactatcttctcatcatccgaataaatgtttatcaactctagagtgctgacatgcaatttcgtttctactaggggctatgtagccagatgaagaaaatactcataactaacaaatgaaagattttgtcacatatttgaattgaggtagtgatttgtatgtttgcaacatatatgcctctaatccggggtatacctttgtagcttccttcttctcaagtttctataaatggtcattcaccttaaacataagagaaaaccagcccccaaaaaggaaagtcgttacattggtttacccaatgtaatttatctaaagatctggtcaaacaactaatctggttctctaatttgtctctttgccttaactaaaaaaaatgtcccaaaagagatggaaaccccatcacgtgtcctaaaattacaataccattaaccatttccactcattaatctatttcattttgagcctttaatcgttattcaacttgacctgtacaagtacagggcaaagggtggctaaattttgtagagttcatcatcatcatatctcaatttttctgagatatagagaaaaagaactcttcctgtggtttctcactgaacgttttatcatttattgtattttggtattgtatataccattattgatctttctctgttgagcttttgaagtttaacaacagaaagaaagacaaaaaaacacaacaatggcgttcagtggaacccaacagaaatgcaaggcatgtgataagattgttcatttcattgaaatgttatcagctgatggagttatttatcacaagacttgcttcaaatgcagtcactgcactggccttcttgtggtatgttttcaataatgattaagccttttcttgtcaattagtttctttaacttgattttagggggaaagatccttaagggactataaagattattcaacatgaaaattttttcacatggaaatcataagagaaattcacaaagtttaatgtaaaagaagataagggtaaagtggtaattaaaatgagatgatgaagcacttatctgatatatgacatcttttttatgcagataagcaattactcctccatggatggagtcttgtattgcaagcctcactttgagcaactcttcagggaaactggtagtttcaccaagaaatttcaatgtaagaacaccctctttcacctttgaagattgactgatcttatttccttcataaactactaataaatgcttcttcatcatgtctgatcagctggaaagccaccaacagatcaactggtacatccaaatcttttacatttatcttcatatctttttcttctaggaaatctctactcaacttagcatatatgtattcattcaatctctcaaaattccttcataccatactttctcaggccagggcccctacgcaagctctcctccactgttctctggaactcaagacaaatgtgcaatctgcagcaaaacagtatatccactggaaaaggtaagtgaagagtaaaatataatcaaatcccaattgtacttttaggctttggagttcagcactaaagtcattaatgagaatagataacttttttcattgtggcaaataatcaaacatctgggccacattgtattttgtgttgtttacaacaggtaactgtggagggagagttttaccacaagtcatgcttcaggtgtaatcatggtggttgcttcctgtcaacatcatcctatgctgctttggatggaattctttactgcaaacaccactttgcccagttattcaaggagaagggaagctataatcacctaattaaaactgcttcaatgaagaaaaatggagttctattaaatcaacagaagcctgagataatagaaaaaactaaaactgaagaaggaacagaagtaaacccagatgaggattcagtccaaacataaaatcaagccaataaaaataaggaagacaagtcagtcagtttgatctaataattttggtttgatatatttttcaacatgtagcaatgcttttttcattatgtattaattgtataaggaagttgttgctatagaattgttcctggctttcacttcaatatatagcatgaatttttcaatccacatttattttttttatatttcataaaataacaacaattatcatatattagtattgaaattcaatactaaaaagaaacttgtttttctttttcttctcaagtgagctataacaaagaaaaaaaaaacctttaatcaaagtaaaatttgtcaaaatagccttttgccaaattgaaatttacaaaataattttttctttttctttttttttttttacttttattttacacttaactcatttaaaaaattaattttatattaaacaaaattgattaaaacctcataaaacaaaaaattaaccctaactttattttttaccaagaagaactcctcctctttcttgtaaactcgtctttctttttgttcttcttctcctcttctcctctttcttattcttgctaataagactaaaaagatcatgaacggtcacaagtgaactattcttcttattctcctcctcttctcctcttctttcttcttcttggtaagaccaaaaagaccagtcattattcatgaatggtggcaagtggtggcagtcatagacaaaagaatttgagatttattctaacagaggtaaactccaaataatttccttgtctcttctcattctgtttcttttctttaatattttttttcagttgtagccattaatatttttttttctctcaatctcttacttgcaataactaatcattcagaattataatggaatcaataagtgatacatcaactacaatacccacaccacccaatgaacatgaacaggtaacatatatattttattgcagtcttttggattataattttgatttttgtaat

SEQ ID NO: 256116 - DNA, 1048 bp, Cannabis indica
tgagctacgagtttgactttgatttgaatttgcacagcaaccatggccacattgtaaaggggtcataggctcactgcatttttctcgaaaatatttacaggacccaaaatctgatctggaagcttgagacaaagtctcatgagccgccactgtccttggtacagaagaatgtttcagtccattcaatggatcataaacactaaatgcactaattcgtgccactggacgggaaatgatagtatgacgtggtgcttcagaagcaaggttatgataatttgcttcatcaatgcaaccctgatttacttgagcactgtttccatactggaaaggtctattctcgactgaaatatctcctccttcaagattcctaagtggattcataatttccacagacatggtctcttctgaagatgaccttctcttgtcaaggctgccatcaatcaccatctcctcagggccagtgttgaacctcccacactcagggtatttgcgttttagagtagagttccagtggttcttaattgcattatcggttctacctggcagaagtcttgctattgctgcccatttgttcccatggattgcatgagctgtaacaataagacgatcttcttcctctgtagaaatttaagttccagacagagaccaagaaatatcagtgaaaatcaggtatgaaatcccaaacatatgaaattggcaacaaaacatgaaaagaacatgagcccaaatactggaaaacataatagacttcaaatgaaaaattaaatcagtttaccacaaggggaaggaattttaaatattcatgctgtcaagttatacatagatcactaaaagaatttaaacatgtcaaaatctcatggaaatggaaaacacaactcaaaatatcagttcaactggacatgaatattacaactttactaattgcaatcaggaaaaaatagtatgcggtaaacatcatcacagacaaaatgattgatttatctcaatatttaatacactctacagaagcccattcaagcagttattgttttccttacccaacactata

SEQ ID NO: 256117 - DNA, 2108 bp, Cannabis indica
atgcatgccaattatcaatgacatttgcctaccatgaaaatgggagacatctaacatttagattgtagtagtgtattaatgacatttgttagataatctatttttgtatagaggttttccaactgagttttgcttgatggtatttaatctttttactcataaaaaagaaatgaatcttgtgatattagttgttactttatatattatttatattgtagagttagatcaaagactaattcatcaaattcattgatttaaatttctttgaaatgataggtgaagggttgttttaaattaaaaaattgcttgtagaaagatatggaatatagcttacaagagtaagtttacaataatattatatggggatattattagtgataatattattggaattatataaatagtaacacttaatcccagcaactaactttttagagtgaaactctccaaacttagttttgttttgctttttactattcggttaaattatatatgttaagtgctaagatagatattttatattatacaattttacatatatcatgtttttattagttcacaaaattttaattatttaaatattataaaatttatttaaaaagaaaaaaatattttaaaaaataagaattaataattttttttcttttctctctctttttttcttttgctcagacaccgactatttctcttctcttctctctctctctttctatattcagccgcacgacactaaggtacatttccaaatctaagaaattaactctggtagaaaaatctaatacctgttagttttagagagagagaatttatttattgatttaagttgattaaaatagagtacaatgagaaggtatttatagaactaatggcaagattgttttgaataacaaactgtaacagaaaaactaactttctatctaaatatagttaactaaaccaaaccaaggtttaataggatctctcatgcatcttggaaactagttgatgaaaatgagtggggaaaggtagttttgtaaagatgtttgcaattttagatttggaggagacatggttcatttttattgtgccattttgatcttctctcgaatatgatgacactctatctccacatgcttggtgcgttcatggtagactggatttttggagatgtgtattgttgtattattgtcacagaacatagtagagggtagattggtgtgaatgccaaagtcatgaaggatggagtgacgccatgttaactcacaggcagcgttggtcattgatctgtactctgcttcaactgaggagcgtgacacaaattggctactttttggatttccatgagatgagagacttgccaaggaatacacaataacttgaaatggagcacctggtgtctaagcaggcaccccagtctacatctgcaaaggcttgtaggtggagatgttttggtgtggaggcatagaagaagagtccttgtctaggagagctttttaagtactgtagaattcttgtagctgccgaagatgagtttcccttggatttgtagatattttcttagtttgttgatagagaatgaaatgtctggtcttgtgattgtgaggtagatgagtttcccaatcaaagtcctatattgtgtgggattggtaagaagtttgcatgtttcattgttgagtttgttgttgggctccataagagtggagactagtttgatgcctacataaccagtttcttttagtaaattaagtgtgaatggtctctgtgaaacagagattcctttactacatctggcaatttcaagacttaaaaagaaatgtaaggggtcaagttcattgagtttgaagtgagaatcaagagtatatatgagatgttgtagttcatcaagactattggtggcaactactatgtcatctacatagattaataaggcaaggaagatgcctgattttgttctgatgaataaactgtgatcatttttttgattgtttgaaattctattgtaacaagatattgttgactttggcataccattgtttggaagcttgtttgaggccatatagactcttttgcagtttttatactgcattttaggaatgtttctttttagggtgtacccttggggtaatttc

SEQ ID NO: 256118 - DNA, 5921 bp, Cannabis indica
aacaagatgcaccttattgatataggtagtaccaattaatccatttaagtcctcttcaactgtgtaatcctatacctacacagtcttagaatcatcacacttgaccttccccaggcggtgtgggattggacaacttacccgatttttatcttgtgacaggcaatagtctcgtgattcgtaaggggactattgcctgtcacaattgggcaaaaaacttcatacaaagcatcgagtttgttagcaaaagatgtcataattgggctttttgcaagagtcgtggatactggtgtagaatgtgttgagcgttggttggaagaagcaataatatcagaaaaagttatcatgatgtataatactgtgatttcttaatagaagaaacaaggagaacattattggggtttttttgcaagaaaggcaaggttcatctcactcgttttacggacatttcaagaaaagcgagattttgttcagcaggaggcactctcatcctactttctcttggattttaaagccatttaatttagtaagattgtttatacatggttatatttttgatgtttttataattaattttttctagtttttattagtggtgattcatgtaataccattctacgttctacaaataagtttaattatgtgtcccatgcattagctacatacagtggcggacccagaatttaaagtgagggggggcgatataaagtgtagttggtggggtttgaacctttaccctctaacctatttaccaactaccttaaccattacaccaagattactattatgtctataaatatcatcttttaatacaaatatatgttgtaacaaagtaaaatacatatacatttttttctcgatttttttttttttcagggggggcgactgccccccctcgctacaatgtgggtccgcctatggctacatacatgttactattaatgtatttgacaaatacttgtctctaaatttttaaattttccgtaatatttgcttttcagttaataaatcctcctttgaagaaaaatataataaaagactcatatttatatacaaattaaaatatataaaacaagaaaaaattaagatgtttacaaaagaaaaaaaaacctaagtgtatcaaatggttacattttaatacctaattcctttttagaatggaattggtatttagttaaagtttgactatgagtcatctacttttatttttcatgaaggttgaaagtacaaatgtccaccattgtcattgtaagacgtcacattcttaaaatctagattattaattaatagttagttaggtcaattgtttaacactttcctcacatttggcttaattaattataataattacacatagtttatatattaactttttacaaacgtgtttggttagaagatcattattgcagttgatcaccaactttgtatttatgttataagaagctatacttgtaagctacgtacgcattgtgttttcataattttgctttcacactatatatataatgtgtttctatatatagttagggcatacttagtaagaaaataaaatgttttacatgtcacattttattaaagcaaatttattataggtgtgaatctataataataataataatttttgctttttaaattttaacatgtatacactgataatttttttggccgttaaaattcattctaaattattaagattattagatttaaagacttttattcaattttatttaattttactaatttattgattgttcatatattaaattatactcctcaaactttgatatctaccaaatattctttcttaaacttttacatatatcaattttattacaccctactattaagcttacccattttattcatttaaaacatcaatttttataaactcactccgcttaatttaccaaataaatcctatttataaactcaaattttatatttttcagtgtttaatatataaaataataaaagttagatgatcttcttgtgagttgccactatccaattttttctataaatagattatatatgttcatcgtatgtataactatttcttttttttcttttatcttttttagattaagtactaccttccacaacaaaatttccaatcttccacacagaaaaggatcgtcacgagaactaaattttgtccggtaaacaacggaactccggcccgtggtttagtaaaagagagggaaaattttatcttcatcaagaataatatcatttataatatataaattaaatctataattgtaaaagatatataaattatatatttatataatgcatatataatgcactacatagcatcaacaaagaaaaaaaaatgtcgagaaacatgtatgtgttagatgtttagagtaaatagaaagtaagagtatagattagggtgtagttatgaaagtaatttttcaaaattaaatcaaaaaattaaaaattggtataatgagcttcttgtacaaagataataatgtaattaaaatgtatttgacaaaaataatgtatttataaaaatgagggttaaatataactcgagccatattcaccaaatcacttgtgcctgtgcatctagtgacttctaattaagtcttattcattgtttgttacaatgaatttatgagaggttatttattagaagaggtaaagagttttgcatttagggaaagagagaaaatcccatcaaaaagtcgttagtatatagatagataaaaccaagaagaaggtacttacttaagaattgatgacaccctttgaaaaatgtgtgtgcctagctacattacatgactattttgactaaagtagagttttaatttcaaccatcttagacttttggtttggttgggacaaatgggctctacctacccacttcaaaattagagtacatcttactttttaccaatcctcatcttcaattaaatttatacagttctaactaattggtacatagtaataaattaataactccttaaatttatcacttaattgagactcaatttgtcactcaatggaatttgttttgtgtcttatattttcttgagctattatgatatactacatatgaaaattagtaaataattaatagtttaattattaattattaataataggtcttattattataaacatacatttgtgttataatttttcaattacggaatgttaataaatctatatgtgctataaatgtaatatataaaatttaatatttttatgtttttattttcggtaagagtgaaaactcactgaattttgaggttatgttcgtaactttttaatttcttaggaaataaattaaggtcaatttaataatttttccctaaaattaccataattcttttatagttatctttacatagatttatgtagataaacctcaattaaggaaaaaaggataaacctttctctcctattatctctctctctctgcatttaacctaaaccaagagggaaattagatattctcttccattttcttgatgaaattgaaggttttgaagctgctaagttaagggaaggttgtagaaaacttaagataaccattttctttaaatttcctctttatttttgttaaattagaggagctgattaattgcatgttttaaggtttcaattcatttagaattgatggaagtttgcaactgctcaagtttgggttgcctgtttatagccagttttagttacctcattttttatgttttcttaatatttagggtattgccatcttatttatcgataggaagattttagattatgaatttaagatttgaaaagtgttttagcgagacacttatcagtttaccgttaatgtgacttaggcctctgatcgtcgagcaattttttcattcaggatgaccgacacacttaattttgaaattcaagtaagattagtattcagaggcacatatgcacatattttagatatacatactttatgataacatttacctagtatactaaagataacagtatagatgtacatttagttgcatttagatactgatatctagtgatactagaagatattggatagtatatattcctaactagattaacatatcaaaaataacagtatcgtatacatagatttgccctggaatattgacaaataaacattaggcaatgtagaaaaaagtacatattaatgctaccaacactagtacgactaaagtattgtgtgcagtttggtattatagttaattgtactcatttaagaatgttcgagccccaattattcctgttggatgtgtgtagcagtaattgggtgtattgacacctaattataagtcagatatatgttatatgttttatgcttttcttattgagtctatcaactcacatttatgtttctatgtatagttaaagggaaggctaaaactgagcatccgtgagtgatgagcttggtgaagattgtacatctagacgattatacatgtagggttgcaatcttcatcgagacagcacatgcttagttttggttgtcgctaggcgatacttttcatattatgtattttatgtatgttttgaaaatagatttcgaaatctcaaattgtgaatattttgtaattatgatatatgtttagtaaagttttatttattatgaaaattttattaactgtttttctatattaaaatcctttaattagcaaatgttaacacactaattaagaaatcaccgttatgtgccttagttagtaagccgttacaactattcatctctatttttttttaactttcatcaatttttgacagtagattcatagcatacaatatcataatttgtcaaaatcttgttcgtcactatgagaggaataatgttcgaccaaattgtatgattaagctagacttacagatagcttatgatgaagttgaatgaggattcattgatgagatgcttgaagcgtttcaattcctggaatcaatttagaagattattatgagttgtgtttcaaccctgatgtttactcatcttcttaatggttcaactcatggttactttgcatcaaagcgggggttaaaacaaggcgatcacgtgtctccacttttgtttttacttggtgtggaatatctgtcaagaattatgaagaagattagattgaagtaagatttttattttcatgagagatgtaaagagcaccaaacttaatcacttttactttgcaaatgatgttctcttgaatggtgatttcagatcaatctacctcatctttcaaggtttgaaactcttctctcaaacttctcatttatttcctactaagccaaatttgctgtttattatattgtgggatgggggaccatgacgtccaaacaattgttgatgtttctagtttcagtcacaacaatatgccttttcgatactttggtattccaatttgtgccaaacgcatttcgtttgtttactgtgaaatcttactagagaaaatgactcaaaaaatctgtgtttggagcactagaaatatttcctatgctggtagactagcccattagtttagtgttaatttctgtacactctaattggtctcaaatcatagttttaacaagaaaaattttaaagtgagtaaatgccatttgtagagccttcctttgaaattgttctaatgtttttcaaggctcagaggtagttgcatgggacaaaacttgccccccaaaaaagcaaggtggtttgagctttcgtcaaattctctgttatatataacacaatagtgttggagaagtatgtgtgggctattacttttaaacaagataatctttggattaaatgggttcacaatgtatactcacataatacttattagaatttgctacacatttctacacaatttagtctagaattctcatgcattatactgcttgcaacaagctatggcggacaatatttttccacgaattatgagagcagcaacagcaaaagaagcatg

SEQ ID NO: 256119 - DNA, 1862 bp, Cannabis indica
gcaagtattttacactttcactatcttatcttactgtttgtccacaatttcatctctccaatatttaccttctttacttttttccctttttccatttcttttgagtaaatttatataatgcaagactaacatttagattattatgtagccaaaagtggacttcaattgtgcatagacctaaacacttgttaacctttgtttcaatacctttcaaaactacattttacattttaatcatggaatttgaaggcttatttatcttttatttaataagctgtatatatatatcatataatataagagaaccacaaggacaaattataatgggttaattttgtcgtttattttatagtgctgtcattataagcaacaatgatttactatgataaggtcttagcatttggaattgtcatgtcttttgggtggaccaaggtatggattggaccaccacatatggcaattattttgggatttagattattattagtattagatagactaaatatacatatgttgtccaagaattatgacttgaataggatcccaattgacccatttctatgaaatttacatattcattatggaaaatcatcgttccttaaaattttaggaactgggtaccccactacttaataaaatcaacatcataattttaccactgacaaataataccaagttctattattgaccatcaagaaaggattctgttattcatgtgagcaaacaatttcatttttctctctttttctttcttgcaaaaattctgaccttttcacaattactataattttcacaaacgtgctcattaaattttcatgtgtacaataaatatgaagtatgccctttaatgtatgagaaacactaaccatcttcaataatatatttagtttaaaatctgcaattatgctctaatatacaaagtgtatattaaccaccagaattaacatagtcatcaatttttttattgaaactatataaaaaaattatttaaatgaataaatattaaacagttttacattagtaaaaattattaatgagtagcaaatgagtaaataaaaaaaaataatattaattctggtgtataaatttatatatgtatacatataaaatatagattattttatatattattaaagaaaaattatagtaaatggtcctaaatcatagaactatgttaataaatattttcatttcaaaaacttgtagcaaaataacccaagagttgttgtgagttgttggtatatagattttgttgtacactatatttttatttggctaattaggatttttgccctctaaactttagcatgtaccaaatcatgcccctaaacttttatggtcgttaaaaatgccccatgaactattgagattgttggatttaaggacttttgtctaatttcattcatctttactatttcagtgattgtttatgtactaaaccatgctcctcagactttgatatctaccaaatcatgcctctcgaactttgacatgtactaaattatgcccctgaactttcatctatgttagacttttttactaaaattagaaaaaacccaaaactgagaaatctcactatacacactctattatggcaaactttgataattatgtatcaagaaaatgcgagaaattaagtgctatgttcactctagtagagttaactttgtttctttcatctgattttctgtttgtaatgaccacatttaattttttcataattacttaatttttctatttgggttgtttgttactatctcatatcagaaatagtattacattacataaatattttagtttagatttcttgccaaactctacataatatttttgtcaacagttataaacagtcatttaaaaag

SEQ ID NO: 256120 - DNA, 1848 bp, Cannabis indica
ctctctctcacacacacacacacacacacacacacacaggaatgggcattgtgaactttatataaaatggatgtaaagttaatgtcattgatgtagaatgtacatgtaatgtactataggtttcatttttcttcatttttaaatcttgaattatgaaatgatattatcatgattggtgatatgttcgagttttgtttgaacattttgttgtttttgatctgatctgcttaccgctcttttatgcagatggggaaaagaccacagcttacggatgagctcgaggaattggattcatcgagtgagcctgacattggtcaatctggatcggaattggatgaaaagaaagctgattcagttgctttgaaatttctggtcgacttgttccgccagtgtaccaaggagaacccgaaggaccggccaactgcctcagagctgtatgaaatgttgattgcacagccaagcaaccttaccatcacagaaagaagttaggtattaaagtagattaaagttataggtaatgatcaatacccaccaccacacccattataattttttttgtagacttagtagattgttgtaccatagggatggccatttatatactcacaaacttaagctatttttcttgacatcaagcgggagaaacttccattataatttagttgagatttgtaaaaattgttatatggtttctggtacgggcaattcttgggcggcagcgtattctttttctgtctttaccatgactaaacccgattgatcattaagttgctgcccagaatataattcacaattattcagttatatattatttaatgaattacaacattccatatctggaatttcagtatttactttattttttcgctacttttatttatcttgctctgatacagacaacattgtaagattatagtctctctctacaatacgatctacttctgaaatatagtctaatgaattttcgacaagaaaacacagttaagggcatatttgttaatattaatctggagtaatattaactgaccatagggtaaccacgtgaagagagggtctttagcgtggaagtatggtcatccatcgtcctccttccatggtgtcttggtttattttttcgggtatcttggttttttcatgtgtcctttgttttcgacatgtgtgacttgtcttttgtcttccttttagcttactttaggcctcttgcttttactttgatttacacctttctcacccttagtctctttctgtcctttcccttggttgttttttttcctcctgtttgtctctttttcttccccttagtgttgtgtggcgtagtgttagttttggtttttgtttctcgtccatgtaaaagatctttttttgatcatgtttgactttgttttgttttcttttctttgttccttgattttaaatttgggttttcatccaaacaaatcttatgcagccacgtaatcctaaattttccattgtttgtggactcgataaatgccatgaccctacacagacatgggcacgtacaaaccatccagaagattttttttttgaccaagtttagctttgttttgttttgttttcttttttttttttcttgagtttaaattttggtatgcatccaaacaaatgctatgtggcaatgcaagctacggttttttgttgcctgtggagtggatgccacgaccctatgcacacatgagcgactacggaccatggaggagattttttttgaccaagtttcactttgttttgttttcctattttcttgagtttaacttttggttttcatctaaaaaaaatttatgtggccatgcaagccacagattttcgttgcctgtggattcggtggat

SEQ ID NO: 256121 - DNA, 2508 bp, Cannabis indica
gttaatgggattgtaagctttgatttagtttttttattatgtgtatttgaatccctttaggaactgttttgtttcataatatccttatatgaagagaagctgtttgttaaaatgattttatatgtttgagaatgaaaaaattgggatcttttgtaagcatttgatttagtttttcattctcagccaaaaaatgcagagcaatcaaggctatggcatcagctcccaagagggaaaaagatcccaaaaagagaattgtcataacaggaatggggttggtttcggtttttggcagtgacattgatacattctacaacaaacttcttgagggacagagtggaataagtaccatagacagatttgatgcatcgaatttctctgttcgcttcgcgggacagattcgtggtttctcatccgaaggctatattgatgggaagaacgataggcgccttgacgattgttggagatactgtttggttgctgggaaaagagcacttgaaaatgctaatctcggaccagaaatacttgaaactgttagttacatcggtcttttttaacttttagcataaactttttcgtattttcattcctcccaaccaaacatactcaatactcacttgatcttttcaactacttattttttttcttgttatatatgtttgtttaacacagatggacagaacaagaattggagtgttggttggaacaggtatgggaggtttatcagcattcactacaggagttgatgctctaatccaaaagggatacaaaaagatttcaccttttttcattccttactcaatcaccaacatggggtcagcattgttagccatagataccggtttaatgggaccgaattactcgatttccactgcttgtgccacagccaactattgcttctatgctgcagcaaaccacatcagaagaggtgaagcagatgtaatggtggttggtgggactgaggctgcagttatgcctactggtgttggtggtttcattgcttgtagggcattgtctcagagaaatgattctccccagaaagcctcaggccttgggataaaaaccgcgacgggtttgtcatgggagaaggctctggtgttctggtaatgttatgattaacatgatcttttctttatttacattggcatgttttcctctttcttgataatatgacatgttactaagttttgagttaacattcaacttgtttatacactttacaatgtgtaatttggtcatgtttggagtacgagattagattagattggattagaatcattagattatatcaaaaagacaaaattttgaagagtttaatatttagccatatataagaatatgttctacttcactcatcactaattggttttgagatgaaaccttatgattctcaacatagtatcaaagtcatatttctcgatctttcgtcatccgcaagtgagcaaattgcattctcaataacattatctcacgtggatcaaatgtagaaatatttttttgcttaccaattttgaattactttatcatcactctcaaaagttaggttaagagacgacttagactagagtgtctaggtagttactgatcaatccctatattgggatcttaacaataacatagcaaaatttatttgatcttatctaatctaatcatgaattttgtttttgagttgtaataggtaatggagagcttggaaagtgcaatgaatagaggagcaaccataatagctgagtacttaggtggtgccataacatgtgatgctcatcatatgactgatccaagatcagatggtttaggtgtctcatcatgcataaccaagagtttacaagatgctggagtttcccctgaagaggtttataaaacacccttaatccttaaaccatttcttaatcattattatattagcattattaacaataataatgattataattttacaggtgaactatgtgaatgctcatgcaacatcaacactagcaggagatttggctgaagttaatgcaatcaaaaaggtgtttaaagacacatctgagatgaagatgaatggaaccaaggcaagattaaaccttttccttaaaataataaaaacccaattgaagaataaagattaatggaaaaatctgtgatgtttcggtagatcttttatctgtttcgacattcaggagagatttttagtagctatttagaatcacctgtaaaattagaaatttttaaataatatacattaccgaatataaaattcaaacatcacataagcaacaaggtttttgaactttattttcggcactataactaatcgaaattttttgaaaatttacaagtaatgctaaataactacaaaattagacttaaaaattctcttgaaaccgaaacacctatttaagagggtgtactatagactttcccgatattacttattattattatatttcagtagcacatgcaaacaaaatttatttacttttttataattttgataatgttgttccagtcaatgattggacatggtct

SEQ ID NO: 256122 - DNA, 1081 bp, Cannabis indica
ttttttgtagtgtaaaatgtattggttattttttttttaaaattttttaagtatagaaaatcaaatttcccatctaatgatctaatggtactatatccctccctatgtgctttacttaagttaactttacttgtggatcaatatcactgccttttttttgtatcataacttaattaaccattattttctagtctagtctcctcctcacaaacaatacatccagtatttcttgtcaaaataaaaataacaataacaaaagaagacatactaaacatgaagacacattttgagaccaaacaaattaatttaatcacaaaaatacaaatttaatcacagacttaacaaatcaagaatccaaaacttagaagatccgcaagagagatttatgaacttacacttgttgaaatgagaatagcaaaatgggcaaaggcattaaaattgtaacatatcagcaactatttcatcaatcaatgaatcacatatttgagcttcaacctctactgccaattcaaattcatcaacttcaaagtccaaccactttccatactggctgctcatgtccttgtccacaagttcatccaccattgaatctcccatgctttcccaacctgagatttccttgtaaacttcttcagccagccattcctttcttctcaccattgctactcctttcatccacattctgtatcctccgcccaaacaacgcctgtatctcaagtccaagcattccccaacacaatcaaacaacaccttccttctcatcttagacccccctccaacatcacggtccaatggcccttttctattctccaaaacattgaatagacgagggttaataagatcacgcgaacggcccatcacaaactcattaaacattgactctatgttacacaatatcttcttcacatattctagttcccactctgttgtttccgagagatgggacatgatcaatgtggttgcgcgctttcttgttaaatttcctgtagaggtagaagaggctgaatctgacagctctgtatcagcttctagtggctggaatttcttcaaaaaactcaagctactagcttcttgagcttga

SEQ ID NO: 256123 - DNA, 927 bp, Cannabis indica
ttttgtttgatatatgtttggctttatatacgtggatcagattatatttgagaagttttacaaacaaagaggaaaactggacgatagtgttagtagtgatgttgaaggaatgctaagcttgtatgaagcttcacatatgagaatccatggagagcctatacttgaagaagcagtagttttcaccacaactcatttggtggaggcctctaaggagaaatcccagtgctcattatttcttgcggcacaagtcaaccatgccttaagacagcccatcttgaagggcttgccaagagtagaaattcaacgctttatttctctctatcatcacgaccctaaccacagtcatcttttgcttcgctttgctaaattggacttcaacgttctccaaaagttgcaccagaaggaacttcatgaaatttcaaagtaactatatttatatacatattcaatccttctttatttaaacgttaataatttatttagaggactattgatgtttgacattacaatattaatttaataatattatacatattattattatgattaacattaaacaggtggtggaaagacttggactttgcgtcgaagctacctttcgcacgtgacagactagtcgagggttatatttggcctgtgggagtgtactttgagccaaagtacagtgctgctagggttatattgaccaaagtaattggtgtgacaacaatgattgatgacatttatgatgtttatggaactttagaagaactggaactcttcacagacgcaatagaaaagtaattattaatacaaattaataattagagatatacatatatcatcattaattttgtacatatatataactaattttaattaatatcaattaattgttttagtaatcatatcatgtatattatattgttcaggtgggatataagctgc

SEQ ID NO: 256124 - DNA, 1336 bp, Cannabis indica
atctattattattactattcttaggccaatcacaaaacgacgtcgttgtagacaaattacgacaactcacagactcgatatcctcttcctcttccatactcaaatgctcctccacttccacgtcatcataattattatccaaaccaaccgcctccacattccaaagaatccaactctgtgttgccgtacggtaaggtacatcgtaagttactgtattcctccaaggtggcgttcccccattggctcgcaagtatttcctcccttttccacttttaagcttgatctgttggaacccctccgttctgggttcccattcaaacgacgccgtattagaagaactcgcttctctgagtagtaccttttttccagtcatacccaatagaaaagcgtcgtctgaggccgtgaggtacttgccgttaaagcttctgagacggatgacgtggctcttaccctctacgagctcaaccgtccaccaagctcgtctggaggagccattgttgtgggtttgacggactgtttcttcgtctttgtcggcgattaggtactttcctaagtggcttttgagtctaacggctttggctttgttgaaaaactccattgatgggagatttagggcagtgggttttgggttttttgaagatgtgatttctttaatttggtatttatagtagaaatttcatgagccgttggattggtatgactggaaaaatgagttgactaaaataaaaaagtaagaaattaggaaggtgtgcggatgattccaattcacatgtgaggatttattttaatttttttaataattaaaagtaaataaaatatattttaaaataacaattggctgcgagtgactttaattatcaactatgtacggcagaaagaggcaggagagtaagagtgataccaaaattggtaatgaaattaggacaactaatatgactaataattaaaaaattaaaaaatgacaaagactatacaatttgatttgaaactattattttacttttaagaggaatatatataatattttttttaaagaagaggaatatatttaagagaaatggtgtaaaactattttaaaatgtgtacatgtgtcatttagatttgtggtggtaaataataacacatttttagtgcatgaaattagaaaaattttaaaaggtcaaagcattataagatgattactcgagttcttatactgaagcccgctcccggatataatataatttcaaatatgtggtggtttgtattatttttaaatttgttctctcagccatttcagattctctccatattcatcattcttccattgggttgagacaatttttttttaaaaaaa

SEQ ID NO: 256125 - DNA, 1595 bp, Cannabis indica
aaagtagaaacaaagagcgaaaaacaacactaaaaaacgactcaaaacttaagctaaaaatagcctaacactcatttataaatcttgggagctctccatgtaagaaaaaatgtagcaacatctttgtcaacttctttcccaccatatccctgaacatgaaaagcaactggcattccgtctgatccgagagccttttctatcctcatagcaagcatggctttaatgatttcaaaactctcattgatgacctataaatcctcatcagcgggcaaaactcctaaaagacccacaagcgaggatgttcccctctacgggttgatggaatgagtagtattaaatttctgagcaaaaggattgacaatttccccggatttgtcacccattctccatcagaattatttatagcttggattaattacgtctcctccttataactattgaagccataaagaattttgtgcatctccttaagcctagaaacccttgattttagcttaccatttacttcatttgatagatgtacatttttgcacaattttgtaaaactttagctatcttttagctcatttattgaaactgcttaaaggaaaattaatagtgtcaattccaagaaagaattgatgctaaaacaagacgcgcctaaagcttgttttccctttaatgtattcacctaaaatatataaaataactcaagcaaaaaaaaaatagttgagttatatttattttattagccagtaatattaaaataatatggatatgtataaagtcatttttaataataaattaaatgtcactaaaagtcaaaagcagatgtggatatgtactacttatcaaaaaaaaaaaagatatggatatgtactatttgtatttgtgactgtgaaggtagtgaaaaagctattaacatgtgggaaaaagattagacataaaagatgcgatccacaagggtgctttcttggcgtgaagtactttttaggtatattgagaagaccattgagttgagtatgctttgtcttggttttactattatacattaaagtgagaaatgaaaatgacagtgcagggttattatttcttatttgaatattctattccttcgtaataaacaaattaaatattgctcctaacttaaggtgtccaaaatataatcaatttgtgtgtaatttgatattaaaatgcaccaacaacaatattaaaaatagagttaagatattaaaatagaacaagctatccattccttttataaacactctcgcaatttgtttgaatgtgaaaaggaataaagtgagttgttggataagatatataaaattctatctctaccaatacaatccacatagcaaattattattggttttaatatttttttacataataaaaaaattgatgtgtgtggctgcttaggacttttgataaaagtaacacagttgattgggcaagtagccatatattcgtattttagatcgtgaaaaaaccaataactaatgaagtgttataaatattattaattatgtggatgttcaaattttttatttattaccattaattgtaattaacattactcttttcttagtttccctttttcttagtttcttaat

SEQ ID NO: 256126 - DNA, 3100 bp, Cannabis indica
ggccttaccgcatagctcagttcattccacttggaacgtataagctagcctgcatggacaacatcgtggtaccgcaagcctagaacgccaagtacttgaggaagtattacaaatgagactgtgatgaccattatcgaaaacgaaataagaagtatgttatttttaaatccttttaatttcaatcaaggaagagattttgaaatatcttacattcctatgtaatttgaatatgatgtaactcaaaattttgctatcatatatggtatgacaagttttagtgagacaatcatgcaaaacattctaaaagaaaacaccacatacctcaagcgtctactcgcatcaatgctagacaaaaaaactctcgatgactatggggattaactaccccactagtccaagaaaagagaggcctagtgataaccccaagaataagggcacaaaaaaaatgtgctcattagagtactacaaaccctaaaaattaccacattttagaaaaagaaaaaaaaatcaaaacctctgctatttgtgtaagttcattagtaaaaataagtaaaaccaacagttaaaagcgttgttactttggacccataaaccttccatgtttatcatcaaacgcaggcaactgtaagaagatttgataatgaaagagcttttctctgctacaataataaaagagctattatacagagtaaccccaaactatgcactggaatgttacagaacaaatattcagttaaaaaattataaaaggaaagaattctgatgccaacggtgggagcttcctcaggcagtcaaactaatgcctgtaaaggccaagcaatgacttctctctctcttccactctcttctttgcagcctcccttgctttgagtgcagctgtttcttctttcgataccaccttcggcctcccatcttgcctctttcttttgccaacagtaagagatgacggagcacctttaacagatctcatggggtttaaagaagctgaaacaactcgcccaggtggaggcccttcttcacctttagcagcgtttgtatttcctttagctatgcctgacgatgaagctgaagctggctttttaaaaattgattctttatatccagaacttgaggcaaactgaggtgtcgcatgcgcctcttcttgtgacacccacttccctgtaacatttatgcaaaattgataatcaaaacatatatatgagaccttttaaggaaagtattacatatcatgtgttagaaataaagtttaacaaccgtagttatgtacctatactatcagaatagtagaagcctgaatttggatcgtaatgaaaaccatttgtttgattgtagtaataccctgaagtgctgtcatactcccattctgttatcattcatagctgtttcagtttaaacagttccagatcaaaataaaaccatgcttgtttgaatcgaaagggcattgtaaatctactgttcttttttcccgataaatatatgcagattgcaaacttactctcttgatcatctacatctaattcatgagaatctctagcctccttaaagtttgccacgtccttctgatagctgcgcttagctttctgcagacatttaagattaaggtaatcagcatttaaatttagaatacattaggcaatattatgctaaatctgattttatcagttttttatgatctcaacctccatgatgaaggcgtatttccatattccttattcaaattaactcacattgaccactgtctgtctataatacattttaataatttcctgctaattgtcaaatttcttttctaatgtgtctgtgttgacttgaaatcactctcacaatttctcctgcaagtagttcttaagtagtcctcactactgagctgatcatagttacttgcctggaatttcaaaattcgtttggttcatcttatacacaaaacaatctctaaatgcattctgatttctcaataaatcgtcaactgtgccctattacatacataaactataaaaaaggccagaagttttttctgaagtttcctacaacgagagaggtttgaggaatgaaacatgtatataaatatatgctatttaaaaatatagtgtatgcttattatggatccataatttcatccaccagcatacaaaatgaacagaacacattaataaactacaaagaactacaaatgttactttagtccccacactagctaaattgttttgtaccaagtgattacaacaacatagaacaatctaaaccacattctcatttcttagttaaattgtcaacttcctttaaaatatgtaataattgatggaaaaggccagatttactcgagtgtactataacaagattttgtctaccagcatatgaagaaattaagttcttatcagcaaatatacttccagactagaagcagtcttagtcacaattgataaaacagtaaccaaatttgtcagaattgatacaatgcaagcattgcatcaactataacaaagccatttatctattgatactcactgtttctatttgctccaggagccgggctgcttccttttcttccttctccttagcagccttgtctttccgcgtatctgcaatcttcttcgaaacattatctttgtgacgctgaccaagttcatggtttctaatgctgctcgggttattggatatgtatattttgcagaagtcgcaccatttgttaccctggctaacccaatactgcaaaatggggaaaaaaccaataattaaggaaagcaattggcaaagatttaactctactaaaggggctactatgggtgaaatgaacttaaagagataaataaataaacaaaatttggatgccttttaattgaaaaagaataactattgtcattgtcggcagtaatacaaaacaaagatattcctcatctatttctctcggcaaatataaggtgtagagattaaattttgatcaacacagttttgtgagaaccctcaattagtaaacaaggttgaaattttcttttaatgaattaacaaatttgaaacaaaaaaaaaatgaatcgaattcaacataaagaacaaatttttcacttaaatataggtcaatatactacatcggtaacaaacccaa

SEQ ID NO: 256127 - DNA, 2476 bp, Cannabis indica
gggttgtcttgttatgcgctgaaatatgcacagtgctgcttccgttaaagcaatggtttgtctttctcttggttttttccttctttccctattttaggaataaaaattagtgaaagtaggcaactaggaacggtttctgtgaaagaaagactgaaagaatatgaatatttgcataatggggtaaatttcttggggtgtgtgtcattggagttattcttggagattgatgaaatctatgatgctatcattctatgtgctttcatattccttgatcttggttggtctttgggttttggaggttttcctcaattgtcttatagcattgtttaatgttgttacattcctttctgtgcaatctttttgttttatacattactagagtttggtgtctttcttgaatttggtttcatcaactactgctcaaaagaactgttgtcttatttatgttgtcaaaaaaactgttgttttactcaactgttggatgttatgttgtgttgtgttttattacagggattgctcgagaaagaagcaccatttctgaagatgttattagaggtgcctttaatgctaccgaagaagggtttatctctgttgtgcggaggtcgttttctctaagaccaataattgcggcaatgggatcttgttgtctggttggaattatctggaatggtaaattgttgattgccaatgtaggcgactcgcgagctgtgcttggttctgtaggtgaatcgaataaagtagttgctgagcagttgactgtggatcataatgcaagcagtgaggatgttagaaatgaactccggtctttgcattctgatgatgccagcatagtggttaagagagagggagtttggcgaatcaaaggcattattcaggtttttccctttaactgttattgtcccatgcttattataagttgaactgattgaccttgacaatggctatgaatgtgtgttctgtgtacatggcagtggcacttaatccttgctttttttcactttgttatgccatcaggtatctagatccataggtgatgcatacttgaagaggagagagttttcactcaatattccgagatttcgacttactgaaccactccgccgtcctgtactaacagcagaaccatcattgtacactagagttctgcataacaatgacaagtttttgatcttcgcttccgatgggctttgggaacacttaagcaatcaagaagctgctgcaattgtgcataataaccctcgagcagtatgttcattatgtcttgttaaaatgtgcatctttttctcattgtgtttcctgtttgatcatcaattgttttgaactctcattgtgtttcctgtttgatcatcaattgttttgaactctcattgtgtttcctgtttgatcatcaattgttttgaactctcattgtgtttccagggtatagcaaaacgactcctgaaagctgctttaatggaggcagctaggaaagtgaggattacatacgatgatgttaagcaatgtaaagcgggagagcggcggcaaattcatgatgacatatctgtggtggtgatgtttctggatcatgtgacggggcaaaatggctctgtacctgagttgtcattcaaaggctttaacaacaatattgtagcatcaaattttgatcttgaaggaatcacgtgatgacgaataatgggattatagatttgaaggtcaagaagacccaggttttcagctggatttaatttttcatttttcacattttttgcaacataatattgttgtttctcccaacttggttaacattttcttttttgagattgaatattctaaaactgattcctttttttttcccacaagttgtgaatccttttgagataatgtcacttagctaatctaggtggaattttgttgagtttacatgatgtatgtagtcttcttgtgtatacactcggaattacatttggttcttctaataaagctgctcttgttaaccctgctttactctccatttcttatataaatgtttgatcatttgttttattttatgtacttataatcattgctcacccgtaattcttcttaattaccactttttgtagggtaatatcattttggactatgtattttgcaaaagttattaattggactttctcttttgttaaatgacaaaatggattttatattttctaaaattgtacaaataagacactgaactgattttttgtccaaataaaacttaataataatctaaggtgttatgagaaaacttgttactgtatctgttcatgttagaaattgtcttaaagttgattatattaaaaaagaaaattgttaaaaattgttgcaaaatacatagtttaaaataatattactaatttttttatagatgaaatcttcataccaaccactccttattccccttttctttttttttttttttctactataacaattattttattggaaattttttatatatataaattatatatat

SEQ ID NO: 256128 - DNA, 5713 bp, Cannabis indica
tatatatatatatatatatatatatataaaccccgttcttccactatcttctacgcttctccatttttggttttctatttcattcccaagtaaaaaccaaaccaaacaaacatggacaccaaaaccccagaaaccctctcgtttttccgaaacgtttctccgttacaaccccaaacgtttcaaactattatatccgaaacaccgtttttccagttccacgattcttactgggaaacaactcacttaaccctttcgggtcaacccgaaccattaacccaaactgttcaaaacaatcagcttccttctcctccgccgccgccgtctccgtcgtatcgttctctcgacggaatcgccgcggtggtcggagaatacgtactttacgggaagaaaacaaccgaagaaaaagaatcagcagagcccaaaactgtcgaatcaacgagtttcgtttccgattcggtgaagaagagtaacgttaagagttacagaggagtgaggaagaggccgtggggaaggtggtcggcggagatcagggacagaatcgggcggtgccggcactggctgggtacgttcgacactgctgaagatgcggcgcgtgcttacgacgcggctgctaggcgtctgagaggttcaaaggcaaggactaactttgaaataccatcagtttttccactagtgatgatgacgtcatcacccaaaacgacgtcgtctgggtcaacttcttcttcttcaacttcggcttataataataaaaggcgaaacaaagcgaagggaattagtaagaataataataataataataatcgacgtaataagtgttcggtggtgacgtcaccagatcagttgtttagtaatataagtaatatagctccaatggtttacaataataatagtattagaacttgattagaattagttataagtaattaacacgactaattaattatattagggttttgttttgttttgtttatcttatattttcccagtttcaactcctttggttgttttaggtagctatagatatgatatatatattatatataaatattatgtttacgtatatgcatgaaatgaatagtaatcatcaattatggactgttcaacaatgaatgtaatttatttattaggagagtaccatgcttttgtaatgttgagattactattcatctctgtaatatatgatcatatatatataatattatataagtaaaaatttgggcaaaaaaaagcgtttatttatgcatgtgttatatttacattaatttgagacattattaattatattgattgttattttccagattttatgacatttttttttggtcaaattctcctacagtataaacgatgattcagtactatactagtactagtcttttttactggggaataatatataaaattcttctttaacatataacagtaaaatttcaattcatgaagatgtaattacttacgttatgtctaaaaaatgtatagcctttttatatgaaatggggtttcaatcataatatctagctagtcctatatatcgatctagtactatactatatactcttgatcttgaaagaaaaaagaaaatcatcataaaactctagtacttataaattaaaacattctgatatatatgatgagagaaaatggataaactacacaaaaataatctatcaaaaaaaaaattacacaaaaataataatgatgtaatttttgtacgaatatctggaactattgatcatatatataatataattctaacgtatatatatacaaccgtggacactatatacaattaattacgtcacattgtgagatattgcatcaatatataatattaattaattaatagactaaataattaattcaaacacatcattttttcccatccaattataattaatattaattatatatatatgtgggtgattgacttattgagttgaaacttgatagaaaacttgatacattacaactctctacgatctatctatttaccttaccttcattcgaggcagtaaattaaaaagtaaaaactccaacccttttctaaaagctttctgtcatttgtattttgatcagttgttaatcttaaatcaatgacttaataatttttttttatagacatcaatattaatggttacctttaaaatatagaacaagttatataattatatgtatagaaaatgcagatgaatattaattaaatatctttaattttattcactaattttaagtagtatataaaaattacactaaaatagtgaaaaaagccatttcaatactttctaaatgcccaaacataaaatagtcacaagcaatattatatataattggatggagcatatataaattgaaaaaattatagtagctagtgatgagagttgagttagctaaggtacgtatttggatttcttaatagagagaaataatgtagctagtggtgtgagttgagttgagggaaatttttagccaaacaaaaataaaatggagagaaattctggttaaaaaaataataaaatttgaggagcaaaactctataaacaatcaataatggaggaggaaattatagctatattaatataaagttcatttttcattttcctaaaaaaaaaagatcatttttcataatacaataatgtccatgtatatagaggttttaaggcaaggactaagtttgatatatataccatctcagttgttttgccactaatgatgatatgacgttgtctactgaatcctcttgttcttcaacttcgatcggcttataatgaaaggtgaaacaaaagggaagggaagtacggggtactactcattatattttgctcatatatagtgctttttttttttaattagttattttttaaatcaacaacaaaataaattcaattattattattttatatctctaacaacaaattaaaataaattaaaaaagtcatacttatataaaaaatatttaatttaattaaaaattaaatattctttataaatacatttgatctatattaatttttgaaatatatatataaatatgtctgaattagatttaatcaattatttttacatgtaaattaacacatctgacccgcacaaatacaaattttatattttttaatacaattcaatccataccttataaaacgcccctaagtgttcggtggtgggttcactagctcagttgtttagtattaatattacttttatatatataagtaatataggtttgcaataattattatagtattagtaataaaatggaggagcttgattcgaaaacttggtaatggtattttgatttataagattagttttatataattaacacttttattatatattagggttattttgttagacggattaattaggggctagcttattatattatatataggtatatagattgtcttaggtaactatatggagataaaatgtttacgcacgtatgtgcatgaaatgaatagtactcttaacagtttagaatcttatggggaccttatttttgtaatgttgagattaactactattcatctttgtaataatataataattgtaaatatttggaaaagcctttattatatgcatgtattatattaattaatttacatatttgagaaatatatattattattggtggtgtttgtccagattttatgctactttttctctctcagctggtcaatcctataaatacgcatacgtaaagttgtaaaaataatattatttttattttttgttaacataacagtaaagtttcaattcaaagatttataaacttaacgtcaagtctaaaattgtagccttttgtataaaatgggttacaatcataatatctatctagaacaactatactctcctaaaggaaaataaacaaagaaaaaaaaaactactcatattgttgaattccagctaaagaaaaaaggagaaaaaaaaactataatgcaattacaaactacacaaaaataataatattaatgatgcaattaattttggtacaactacgtcacatagtgcatatattgcatcattatatataattttaaggtaattaattaattaaagcacatcatttttccatgtaattaattgattaatttgacatatatatttatatcttggggtctgattgagttgatacttgatagaaaactaaatgctatctacttattaccttattttatcattatcattaaaacgtaaacctttttctttcccattatcacttatttttgttcttctttttattatactgacttgcacaatcattatttcaaatcttatatccatgttctccttttatttttagccaaaatcttacaatttagagtaattaatcttacaaatgtttatgtaaagcttccacctattctctatcttatttcctactcattttctttaaattcatattacaaacaatctgagtaatcttcctaaacagtactacctgatcatcaagagtagggagggaatgatcccataaaactttgttcttactatgcaaaattactataattaaatcacgtaaatcttcctttttgatcctcttgaggttttaccattcagaatccactttaacacttgatgcagcagctcaattaactgcaagaacaatcaaaacacaagtggctaatatatataaacaatacatgaaataacctgtctctagtaccaagtgatctttgtttcagtgctacccaacaaatgactctatgcttaatttggagtagaaaaagatatatagtaccatgcatacttccatttctccaacccttctagcttgctgaaatttatcacaaagagctgcaatagagtaattaattggtttgagatctgaagacaattttatgtttttgaaaatttaaaaggcctttgattccacctgaaaatacttgattgacaggggtgttttcaaaaattaaatttggatatgattttaagttttaagcttaaaaatgaaaacaataattttatgtttttttgttttcaaattattaaatctaaaaactcttcaaatgctctcttattttttaattttgagattcccaactaaatcacaaatccaactttttaaaactcaaaaacacaaaattacactacaactaatcacatatttagaaacaatttttcacatacaaaattcaaatttttatttccaaaacaataattcaaaacaaagtaaatgcaagaccaaaaccaactctaccaatttgaaactccaacttcctagtccacattacaacgcatatctacattacatacttgcgaacccaggcccatttagccccgagcagagtcgtacataacaaagttagagaagtcggcccagcccataatagcccaaccataccagaagatagcgcatagtgccattgaaaaagagaaatttctaacaaaacagtatttttcttttttccttttacggtaccgttttttttttatttggcaaaagtgtaaacaaattatcactttcaggtatgaagtaatcccttagaaaaaaagatgggttttactcaggctgagtagcgaaatttcaattagaaaaaatacacaaaagcatcaaatatattagactcaataaattaattattcaaaaggtaaaaaaaaaaaaaattaaatagaagcgagcgaatgttatgcgggaaaatcagttccaaatacaaatatttaaagttaatttttgattgattgtttgtgttttaatattatgattatttcc

SEQ ID NO: 256129 - DNA, 2970 bp, Cannabis indica
agagagagagagagaggagtgttgagagtgatgaggagtccagccaagatggcttgtacatgaagctcagaactttttgtgagattctaaagtaaaaggtggacaatgttccacgtggactcatttaatgccaaacacccaagcttcagactttattatatctttttcttttctcatctttataaagttacttttctattttatctttcttttgtgctgctttgaaggactgtcatgcctaacactatgtttggcaagaaggaaaaaaatgttagaatggtggagagtttaaacagaaggaagaagattggtggatggaatgaattgttatttttattgatgttatttggtgttaagagagaagagacaagaatatatttaaaatttataagtaaattttttaaattttttattatattatctatatttcatgtatatgtaattttcaataaaaagatttgtcttattattgaatccttcacttttttggaaggattcatttttgaagatttggaggaatagctcttccatcaatctttctttttcctctcattttatttcttgccaaataaatgattttggctctcctcccaccctatctcctcctatcctttctattctttcacattttcttctctaacattggggcaaataatatttggactaagtatttgtaaaagttattgatctgactttttgattttattaaatgataaattaatttaaaatactataaaataatactttgaattcaatctaaaaaaaaaaaaaaaaaaaaattaaacataaccagcttgaagttaatttctagcacgaacagatgtgaacaatataatcaagatctaatttgtcaaacaaaatagaggattcaatcaataaattctataaaacacagcttctaaaacaatatgttccctttactaaatgtaatatattgaatataactaaatggactcaaacttatattatttattattaaaattgtagatggctccatgtcaactctagtctctttatagatttagtgattctttctcactcttttctggtctttcttagtttgtttttgtgagcatggcgataatgcatgagatggagagtaatacagtgaatgtttttgttgatagtgttgactcaagtgttgctcaaactctagagagagatagtaatatagaaattgaaatgatggaactctttgaagatatttccttgaagaattatggcacaaaaagcttgtgtaagaaaagtaatggtagtgcaaaaataagtttgcttcggtggtaaggaaaattctgttgggtatctggaacatggaggggaaatgtggcgtctgatgaagtttgatgagggtgttttggggttcttcttctcggcagaagatgactactcttatgtcatggataaattaccttagttggtggatggtgtcttgctccttaagcaatggatgactaaaggggaagtctataatgtgaaggtcgatttggctcggctttgggtccaaaaacatggacttcctacacggtgcctatcaaatggcaatgctccttgttgacctcaaaaggtggccaatcgatagcaaactcgtatgaacccaatgtttgtcacgcattacacaacaagaacaataaagtaaataagacaagaatttttgtagaggttcgacccccttggttggcgggtaatgacctactctctttttagttgtattgatacctagagataatactatccagatcactgtgggtgagatctgatatagctctctataaggttacaaagcatggatcaagtaggcagatctctaatgagagagagatatggccttagaggcatgtgagagaggaagagagaagccacttgggcatgtacaagagtaagagggaagagagactaggatttcaaacttaggcttagaacttgatcacttggaggctaggaatagacctaggttttctaggttagagttaaggctctttatataagagagcctaaaccctaatttacaattgaaaccattagatatttacatatttaattgattaaatacaaaagactaaaattcccctttaaagtaaatattttctatcagtttgttgggttgttaaaggcccaatttgcaggtagcttgcagtccacatatcaggctatacaaagaatcctgccaagtcaatcctggtcgggcatccaccttgctaggtcaatcctggctggccatactcttgcccgatcaatcctggctagctagctcttgccaagtcaatcctggctggccatgctcctgctaggtcaatccaggccgaccatgtccgtgtcagggtctggcaggtcatgttcctattagctttaccaagaggaggttagactttggatgtggaggccagcctttggcaagtggaggccaactttgtacactttttccttgtagaggttaggtttccttggtcgaacggaagtcctttggtctaaaagtcaccttttcgccggccaatttgtgcccaaatcccaaccagccatacaagctcaccttggctggcctataggcttctcttgatcagccaggcatgttggtacaactcctttgatggctcgcttcactcttttcgaatgctgcttgacggttttgccatatcttgtatggagaccctatcttgctactagcaaggttgtattccacatgtactctatcttggcttacgtggacatgccacgtcaagtggacaaaatttgggataacatttgccccccaagtccctattcaaacatctcatcagatagggactttctacctctcgtcttatttgtagtagtctctgtcgagcggccttatctagctgagtcttggctttttgcatggcatgcttttagatctttgatcttctctctcgataaacttctcatcttctcttcttggatttttcttctttgtacctaccattaacaagttttaagcttttggaaactttttga

SEQ ID NO: 256130 - DNA, 4151 bp, Cannabis indica
aatttcagttatataggcacactttatatagaatagatataaattgaatcaatttttaaatccaatccaatacgcacaagtgtagatatttacactttgcagattgaattggattggctaagcccccgtttcttccaaaagacctgagtaattgaattaggaattttatcaacacttcttcaaagagcttgttgtttgaagcaaatttgaagttttaaattaaaacataaatgacaaaaggtgaccatggtaatttctctattttcttgtatgttagtttcaactttgaaactagtaaaacaaagtatacacacaccgtgtaagaaatcaatttcccatatggaacttaaacttaaccacaagtatttggtgttacaaaatcttgaaaggattttaacaagtttttgagtatttgtactatttttaagtttgttaactggatgcatgatttagaattggtcgaaaagcagctttgaagtcttcataaaatctctgctctgaaaatctgctagctcgtcttctagctgctgatgccatctcaagcctctggtctctggcatttcaatcacatttataattgcatctgacatattcatccacactacgggcgagaaaccagtttgttttctatcttctctaaaacatatccatcgtgggaccagcagattatgcgctgaagcgagtgaaaccagtattgtctgtcaataacttgaaagtcaaagcagatgataaaatattcagaatgagaaacctaccaattggaatggcacctgcagccatatactccacaacactgatgccaaagtgttcatcagtcattgagtggattccaacagtggcacctcccaaaagttccatcagatccctgcagaaataaaaataataataatcaattcggagaaggagaagcgcacaggtccaacagggagtcataaagttacaaagacgcaagaaaatatataactaattgaataaaaaccaaaaactacattcagctatttcagcagaagcataatatcttgattacattggaaccaaaccaatgtaatcaagtcaccaaagggcaccatattgatattgatcacatgttttgtcatggattttacagtcagggcacgcactcggagcttatagatgtttgcaaatcaacactttaaatataaaacatgcatgtattaaaacctctttggtacttacctatacgtgacattcttatggaattccacatctgcatccacctttagctcacacgctctagtcttcaaattttgtagtctttcctcatctgatttatttcgacaactaccaacaaactgaagcttaggtcttgggaagtcggcttgtaattttccaagtgcaactgaaaaggcctcaagttgaagtgtatgcgcctgaaacagaataattaagtcaaaatggtttgaacagcaaggaaaggcctcgtaattaaccgaccagaagattagtaccttctgttcataaggtttatgtgcccaccttttcaggacgaaattgagcaacagatatgattttaattggcttactcggcctttctaagggaagtgcctgttaaaagaagtagttaaacccaaatgtatttgctttaaacatcaacaataagataaacaggaaaatagatgtaaagacaatagtgtactgaagaacaagaaaataagaacctttttatgaaataactagacaaacctgaagtccagaagtatcacaaggaggataaactctcttgatacgatctgggatcttccaaagcttctgaatatgagactgagtccacgaagaatttaccatggcaagatgggcgtgagatccaacaaagccatacatccagctgaatatggtgtaatatattattttgacccgggataaccaaacactgtagtaagggaagatttgtgagctttaagttaaagaagaaaagctagttgattgacacgagtagacagctataagctaacatttatgaagggaaaaaacctccagagcaattcaccccattccaaatcagtaaagctgatcatacaattccccaaataaccatcttcatcatgcagtttaattgtatgacaaatacaatgcacaaacaagatttaacaagtaaaagccagccatgtaagcaatgaagatgttattaatagtgatttagtataaattacattatcaaattatcattgtcaacatcttcaccaaatatcaaatcaagagcaaaagtagatgagagtgcataagaaagactcgtatcaaacctcttagcgacaactgcatcattattatacatgaaactacggtcacgaacacgggagagcatgtctaaactaattgtaggataatgtgtgtagcagataactttgcaaccaaatatccgagcaactggatatgtgaaagcatatccactagtatcaacataatacaaaggtgtgaaactgcataaagcttcccaagcgagataaaccgaaccaaagctctgccctatcatagtaaaccgaggataagtagtttcttcaacccacttccttttatacaaatgtaccacctgagcattaataggatcaaataaagatataagaaaataattaagtaattatgaatggacagaccaataactataagattttcatgtctattagaaagcctcattgcagtccatgatcatcttaaattatataaacaatatatatgtgtgttattccaagtttgaatcttatcaaaaccaagatctcttaaccattaacgaccctaaattttacaactgtaatatatttgagctaattaagtagaggccgcttcaaattatcagctttacatgtctcttcagttaactaatgagtttaagactatttgtatgattcttaatctcaaactaaaataggttgaagtttaaataatcaaattgcaaaccacccaaggaaaaaattgaatagaaatgatacaaacgaatccataattgagaactactactgaaaatggtttgtaggagaaatatgggtaccttaggcgggtgaagcagcttcaccccgaatctatcaacggctcgacccatcaagctctgaggcgaggcgtcgtgatcgccagtgtagacgacgcagtcaagatcaggactttcttcctgaatggctttgacggcacaccacaaaactctttctccaccgccaccatcgttggtgtaagggtggaagaaccccacggctcgctttctgctccttctgccattggtaatgtgcgaagcaaatctcagaattataatcgaaagtgcagaaaataaagcccaaatgacgaacccatttgccatcaacgaaagattttggatcgaatcggaggactaagctgagaactagaaaagacgaatacttcgaatattgttgtgaccacttctgcatatacagaggaaatttcctccgggacgtagcagatacgaaattgttgtcgttttccaagttaatatttctgactggagatattgtcgtttttagttattcttatgtcgtttcttttgctccctaatacagtaatgtagacttttgttttgttgagaaaatagtcagcactcagcagcacatggtgcttgttctatatattttctttacctgaaaatatacatatcaagcatctgattgtccaagcacttattgttctttcattttttttttaattaattttgttgcaaactcatagccggttaccactttcaaagttgaaaaaaaaaataataaatgagttactttcatgtatttttgggatattagtaactagttcactgtgaaaacaaaaacgaaaaaaaaaaaaaaaaaactagcaatgtgataaacacattttaacaaacaatcacgtgcttgcaaatgtataatttttgtcaagaaaagttaaactagttaatcatttttgtggcaaaacataactctttaagacgcaatgcaagttgacaatcaaagaacaaaataataggacagtaatgcgtgtaacgtgcgtgctaagatgacacgttacaagctaagtttgtaacgtgagtgcgtgcttaatttgtacgatagtggcattttttgaaatattttcaatattgtccggatcgggacggaatttggtattcgccatttatttgggtttacaaatacaatggtgcaatcggtttggcgaaacta

SEQ ID NO: 256131 - DNA, 1817 bp, Cannabis indica
gagaattgaaagtgtaattggaacccctcaattaccctaaattacacaattatagtataattactcagtcagataaatgtgtcaaattatgtaattacctccgattacactcaaattcaattcctctataactttccaaacgcaacttaaacgatttattaagttgacaaatttacttccattgagtttcttggagaagaattgtatcccgtgtggttggccaatctagtgctagtcacgaagcctaacgacatgtggagaatgtgtatagacttcatggatctcagcaaagctttcccaaaggattgcttcttgctttggtagatcgatcagatagtggactccacatcgagtatgaattattaagctttatgaatgcgtactctacctataatcagatcaaaatgcatgtggcagatcaagatcatactagtttctaaactgacaaaggggattattgctacattgtaatgctatttggactgaagaatgtcgaagaaacttatcagatgctagtttataagatgttcgaagacgtcatggggaagaacttagaagtgtacgtggaagacatgctggtcaagtccaagaccttcgaagagcatagcaatgagttagaggaagccttcgctattatttggaagtacgggatgaagctccatccaaagaagtacacctttagtgtttctttagggaaattctcaggcttcatcatcagctctttgggaatcaaagttaatcaagagcaaatcaaggcattcctagccttccccaaagaaacacaaagacgtccaaagcttgatgggaaggattgcagcactcagtaagtttatttgcaaatccattgataagtgtatccagttcttcaatgtcctaagcggaagcgaaaaaaattgaatggatagaagaatgtgaagatgccttccagaagctaaaggaacatttgaccaaatccccaatttttccaagtcgattaagggaaacgcgttatacttgtacttggtcatgttagctcaggttgtaagtgccgcattagtgcgagaagaagggaagatccaacttccggtctattacataagaaaatgattgttgggtgtagagtctagatatcctatgaaaattgtccttttacttgctaattgccttatggaagctgaaccctacttttaagcccatgtcattaaggtattaacaaaccaccttctccgtaaggtattacagaaattagagtcatctggaaggttacaaaaataggctatggagctcaactaatttgatatttaatattagcctcgagttttcgtcaaagggcaagccttagcaaacttcattgttaagtgtattaggatgaatgacgatctggacgaaccagttccgaaactgcatctttggaaagtttatgttgataggcctccaatgaaaagggcattggagcgagaataatcttggtctccccacatggatactagcttcagagtgcccttcacgttaaattcccatcctccaacaatgaagtggaacacagagccatgatagctggcctacaattagcaaaggaagtaggggcttatcatatcaaagtgtacagtgactctcagcttgtagtgaatcaaatattcggagagtatcagaccaaaggtgaaagaatggttgcctatatgtctcaatctagagaactattacaacatttcaagagatacaacatctatcaagtcccaagggatcagaactcatttgtagatatgtttgcaaagttggaaatagatctagaaactgtgcaatatagaatagtgcccattgaccatctagaagcccca

SEQ ID NO: 256132 - DNA, 2596 bp, Cannabis indica
tttttttttttttttcaggaactgggatttcaaattcaggtaaatgggttagactaacccattattagatcattctcaatttgtgctgttattgttgtttggtgtatcggggtatgttcattttatgttgttgaaaaaaaaaagtagaatgttttatcttgaatcaactcagtttttagatgtgcctttttttttgttttacccaattgataattagaaaaaagagaacttcttgatttaagtttctaacttttttcacattctctatattctaacgagtaggattaatataaattatgaagcattttttttttacatatttcacttttcaactgaacattatttcattattctgaatgtatttgttaggatttgaatagccttattcacaagtatttaagtggagaaatttcaaagggaaaatttggttcagcttttgtaagggatggattcagtaatttggtactacagatggtaatggaaaagcatgaaaatggaatttagtcagtgacattgtgatttgaaagtatttgaaatgagtcggtctccctcattttcagtgaagtcagaacttagtccaaaacttgatccagaatccttgaggcaatgggttgtggccttttgcatcattaggtttgatcttgaacagggtcagctcattgaagagtgttacccacctggttgccttacccaggatgaggagcttgaaattgcattcagttcattcccagattctgttacccagcatcagaaccgctcaagcattcatgattgtatgttcttttttcggtttcaaagatcggagaattctcaaacttgtaatgtgtcttccacagaaacaactgctgtagataaggagtcatctcccaaaaacacagaaaaaagaactcttagaagattgaaaagtaacatttgtcgtggttcaaaatacatgtacggctatgtattcaatagagagagacatgatgagaggttgaagagaggtggagagcagaagtcagtggtaattttgtctagctatccgtattctactgtgtttaaacccttgttacagatcatgggtcctttatactttgacattggaaagaaagctcttgaacatattgctgcttatgtgtcaatgtggcctgcacctgtacctggaaagcttatggagcttccaattgggaatgccatgcttaaagttaacttgccgcctgctcacagcatgccctttgaaagtggaatgattttggaagaatctccttcttctttggctccatttcttcctaataaccagtcagttcctcagggcctattccatgattcagatatttttggtacatttcgtggtcttcttttgcagctttgggttttgtgggagttgttacttgttggcgagcctattcttatcattgctccaactcctccacaatgctgtgaagctgtggctagtcttgttagtttggttgcacccctactttatagtgttgattttaggccttatttcaccatccataacccagaatttgctcaactgaattcccttcgagaaggagatatgtttcctcctatgattttgggtgtgactaatctctttttcctaaagtcgttgcgcaacatccctcatattgtttccgttggaagtcctgcccctaattcaaaccgtcttcccgcttcaaataataggtcctcttctggcagagttcctggtaaatctgaaggatttggtcttcaacagctctccttgaaaaaattctctccctcaaatttgttaaatgctgtgaagttgaggagagagggtcctctttgtctcatgacagaacataaagaagccatatggaccacttatgctgcaacaaccaagccagacactgctatattgaataggcttttagatgcgggcacatcacccagggttgaagagtcaatgtcagtggttaataatgagattctgcggcgacatttcctggagctcactaccaatttcttggcaccttttggcccttattttaggactctcacaccatcagaaggttcttgtccatttttggaccctcctcctctccccccctttaatgctgatgaatttctagcaaccttatcgggaagaggaccggggaagtttttgtcaaagaggatgagatataattggctggacttgtataggtaatttcttacacatgtatttatcatcaatatgtttgtgcctttagtatgatggatgtttatgcttgacattttaatgttttacatttttgtatagacgatttttgaaaggaccaaactttatgccatggtttcaaagaaaacgtgttgttgctgaacaagaacaacatagattgtggaggcatgcaagagtgaaggctgacatacaacaatttatatcaaagatgtcagaactggaagtagttgattcctttaatgcaattgaaaggcatattattggagacataaaggtaaatcattcttcttaatagtggcttgcacttgttatgtgcctcctggttctctttcacttttactccaagtaaagagtatagatcaacaagtgtgctatctcttaggattttgaaattaccgttgttattatgttatgaatctctatgggatatct

SEQ ID NO: 256133 - DNA, 1215 bp, Cannabis indica
gatgttaatgaaacatacatggtagtaaatctagatcctggtaaaatatttccaaaactaacacccattgatagtttgaagagctttgtaagcacttttgacagtatagtgccctgaagcttcatgaaatcagtacctagaatcctcttccactgactcacttaaggtaactacttgtacaagctctttatcccaagcatttaaaagctcatccaaaagatcaacatcctaaactctctttactggtaccataagttgctgaacagaaattccatccaacgccggatgatctgatgagataaacgggttatcaagatgaggaagccaagcttgatcaagaaagaacattcaccaaactaccgtctgcaatacaccagcgataaccattttttttgtcagagattgagcttcaaaaagactatgccacataaagcttgggttctgaccaaaggcagcagtaaggtgcgaaccattgggataatatcttgctttaaacatctttccaaccaaagaattttcattactcaagagtctccatgctggcttccccaacatagcaaggttgtgatcacttaaactttgaaaacccatccccccaacgtgtttatgagccaccatcctatcccaactttcccaaataatcccactctcctatccagaagaggaactccaccaatactcggataaaattctttctatttcatgataaagtttgataggcaaaaggagcacactcatggcataacttggaagcgcttgtgccaccattttaatgagaatttctttttctgctcgagagagcaatttttcatcccaaccttccactcttttcctcaccttttctttaagaaaacccagaacagaactcttattacgacccatagtactcggaagatccaagtacttattatgctcatcagcttggaccatattcgtgatcaacataattttttggcgcaagaaaaccttaatattattgctaaaaaatatcaaagatttagccaaattcaccttctggctcgaggcaatctcaaatttatgcaaaagagacatcacacgagaagcttcatcctctgaggcttgatagtaaaaatagctatcgtatgcgaaaagcatgtgagagattgaaggtgcatgccatgaatccactttctttgctcaaagtttttgaatagagccggaaggccttctgccttcagcacaaagaatgaacaa

SEQ ID NO: 256134 - DNA, 2145 bp, Cannabis indica
ttaaatatttatttacaatcgaagtgaaacttaaatatttatattataaattactctataatatatatattaataaattcatcaataaacaaaaaaaaatatttgttgattttcgtgtcaaggtttcataagaaaaagaaaaagaaaaagaatcgaaacttatccgataagaaaaatcgccattctcattcacaaggctttggtcaccaagggagtctttttccttcttgttgctagatatctcgtccatacacttcggtcaaatctttataattaatattatgaatttgcttcaatttcgtaccgcttttgctgctaagtgcctatagctcaaaagaatattgtttttccatatatatataaaaaataatatgcatattttgttgtcttaattgatctagatgtggagggcagcattaacagaattagtagccacagcttgcctaatgttcagtctaacatgttccatcatatcgtgccttgactcaggtgaggtccatccaaagcttctagtcccattcgcagtattcatagtagtatttcttttcctaatggtgacagttccattatctggtggacacatgagcccaatcttcacatttatagcaactctaaagggactcataactctttctcgggcctcaatctacgtcttggcccaatgcattggatccataatgggctttctagtaatcaagattgttatgaaccaaaacgaagcaagaaattactctcttggaggctgcagtgtaaatggtcacggtggcgcttcaggggtaagcgctgacacagctttggtgttggaatttgcttgcacatttcttgtgttgttcgttggagtaactgttgcatttgacaaaagacggtgcaatgaacttgggcttgcaatggtttgtgtcattgtggctgggtccatggctcttgctgtttttgtgtccattactgtaactggacagcccggctatgcgggtgtgggcctaaacccagcaaggtgtttgggcccagcattgttgtttggaggtgggttgtgggataatcattgggttttttgggtagggccctttatagcttgttctttgtattatggattgtccgtaaacttacccaatgatggtttagtttgggttgatggagagcgtgatattgttaatttgacaagggcttggtttagtggtgagagtggtcgttttcctaatcttgaaaaccaaaaataatttcatatattctattatatagtattatgtttaattatattttatataatatttatatgtaaaattatatatggtattaattttgatgaacacttaaatatataatgaacacttaaatatataattttttagtataagttaaaatttaatataatgtaaatgttgtgtaaaaatattatagaattaagacattaagacactaaaccaaatgggctataaaagttcaatactatcatcaaaatttgtagtgcctttagctaaagaagcaggcatgctgctccatctatgaccaacgaatgaacgtgcctcatgtatttttatttaagattttattatcttttctttttttacccttattttttagtaatatttcattatgttttttttcattttcaatcaatttactttattttatttggaagaaaaaatatattaagtataatattgaaatgatgtaaaaagaaatattggatcaaaatataaaatgcatacaaaaaatgataaaagattaaagaatttatcataatcttcctttacattttaaaatagaataattatttcatcaaaatagtaaacatttcattcccttagattaatattttaaaatgcaaatcaaccaaaaacaaaggcatgaaatgaaagttaattcattaatttttatttaattccatttcatttcctcaaaccgaatgtaatcaagtttttagagcaataaaacaaaacttaatatggaatagagttcttctttattgctaagaatggaggatgaagattctaatcaatagagaaaggatatggccaagtaataaagagacatagggtatgaacaagtaataatgagatgaaggtaaagaatagtagaaatgaacaaagacagcttagagtatcaccaagtaattttcattgagaaaaaaaaaatcacaaatatttg

SEQ ID NO: 256135 - DNA, 4221 bp, Cannabis indica
tcatttaacaaaacacaggatccaatctataatttttgcaaaacacagggtccaaaatggtatttacccatttttttatcaaaaaaagtacaaaatatagaccccatgaccgttgcccttatgtagcagctaaagtagtcaaatatttttactccaatgcattagctactcttcctggtagccatacccttgccagatcagatgggcatcgataatagaagcagcattagagatgctcttactcaacaaaatatttaacttttcaaaaagaaatataagcatgatggtttttacatagcaccgatgctttttatttttttttctttaattttattgtgcaagttattattaaactatataaataatactaagtgtgttagtggatgcaacgcttcttgctgcttgcaatgcactataaatattttgtagatatttatatttattgttctatacattttagttctcggtattaactttttcgttgacgtctagtcattagtagctaaatttgtggttaatgtaatacctagtttaaagataatattcaaaattaattgtgtgaaaataattatatttttccttttattattattaataatgaatagatatgatcctagagtagtagtggtgattttctgtgtattatttgttaaggtaaaatattatagtattcttaccagttaaataatgtaattatttagctaagatccaatatgaaagtacattaaagtttaggagttttcacattttacactattttaaatttaattttgaaaaatgatgtagctatttcttttaactttttctgtgttactaatactaacgtttttatttgttggtgttatcttgaattttagtcaggtgtcgtgacaagttcttttgggtgacatgtattatcaccgcgaggcctaggcagataaaagagtctcatggattggccacccaaaatgtatccaagttcggtattattaacagacaaattaagagtaacttgtcgcgcatcattagcacgaacaaacttggtcagaaagaagtggtttgaaccgcgtacaatccgaccaaggggaaaatgcgtgacaaaaatacatttgatgaagtttcttattattttttttttttttgacaaatgaagtttcttattttatatgtaatcaaaatccagtcaaagggtattcccatttatattttcagtattttaggatgattagttatttcttgattttatgggttgacagcttgaggaaaccaaattctattgtaaatatcccctataaatagtagatcaattctaatgtaaggggatctgaggtcatttgtttaagagagcccttatgttgctcattttttctgtaaagctttcgagagaaattaattcattttttacttctctactcataagttaaatacaataacaagaggagtaagtcattacctaaataatgggattgaacctctataacatatcgtgttcttagttttgcttattattaattatatctttcttaaatcttattgatttcttgtcactttaaggacccaatgttgttgactaaaagcgaggtcaatattttggtactttcattgagagcagaactcaagaacacaatttgattgatttattcaatcaacattacaaatggttgtacaaacttgaaggactcaagccactaatcttatagatccaatggcaactgatccaaatgcccaaaatcctgctaattcgagaaatcctcctgtgagtgatcttagcacacaaaatactagtacaattggtgtttgggagaatagtctgggctccagagtgccgccaacaagtggaactcaggtgacaatcgatgatgactccgagctacgaaattttggagaagtagtggctcaaattcaaagtcacactaatacacttcatcttgatcaagcagatacccgagcagctatgaatgaggcatttgcacaacaaaaaaaggattttccaagaatgtatggataattgcaggcagagagtctaagagctcagtaggaagcgatcaatcaccggtcacgcgaaaccacaaagctgattaggcagttcaattaacagaccggacagtaattgtaaaaagatattccatttgttcgagatcccttccgtggaaaggaaccatatgttctacctgtgaataaccacgagctggaagttctgatgactcacacccaaaatcccttacgcgccggatcatccaattctaggccacatacaaatgtgggcccaacggtagatggtcaagagttttcaggacaaaatgggcaacatagattgaaatttcgctccaagtgggagcatcagccaaatgtagggtttcaagaccctatagccatttatgattaaaatgggcaggtttagtatttcaatatgttgcgtacacggctccacagcagggtcaaactacaactgcttgcattaagtgatactcaagtaacaatgatgaagaagcaaatagtgcaaccagcacaaaaagacaaagagattgacgggctcggagggagatttcaccaactaacactaaaaatgcaagaagacctccgagagaatccatcttggagagggtgggaacccaacctgttgatctcaaacacacactgaactagtagagagagcaaaagtttggggtagttcgtccaaacatacagcccattaatgtggaaaattacgcgtcggtcggagctcaagggggacaacaggtgacataggccagtcaacaagcaagacaagttgatccaggggtgcaagcccaattagatcgtcttaaaagcatatttaaaagtttgactggtcccaaactcgccgaccttaaacttgaccgagcaagaggttcaccctacactgctcgaataaatgtgttccctcttctgcccaaatttaaaaagccaacttagaaggcatacactggaaaaaaaaatatcccttgtcacatataaagaactctaagctgtagatggatttgcaatctgtgtattacgatgtaggttgtagagtctttctagcaacattggcagatgttgctcaacaatgatatttcaaactgacaccatgcaagtttaattcatgggattcttacttatcagagttccttgcacaattctcatcttgtaggcaacttcctgtacacttggaggacttggttggtgttaagcagctcctgaatgagccactcaaagattacataagtcggttcttgaccgaagccacatgagtaaagggattgactaaggaaggaagactcgctactgtgcttagaggaattatgccattaggagatttatggaaggtcatcaagaggctaacgatgaactccatggcagaatttttggatcgggcagatagattcattaagttggaagaggcaatacaaaatgttgctcctagagtaggttctacaggtcagaaacaaaatcttggcatgttattaagtgcttcagttccaaacccaggtgggagtagtcacattgggaaaaggtcgaatggtgggaataatcagggaaataaaaaaaaggaaaaaaattattaatcctgaaaaccagcacccacaggagaaaggtccaaagtttgcatccttcactattctcactgaagatataaaagccatccttacggccacagatttagtggtgtcgtacaaaagacccctgccaatgaagaaggatgcaagcaaaatggatcattccaaataatgtcgctttcataaagatttcactcatgatactaacgagtgcaagaatcgaaaagaagagattgaattcctgatcaagaagaacaatccagacataaggaggtatgtaaaggttgatcaagaataaatggcaggccaacaagatgataaccaaaacctactgatgccactgcccgtggatgggaatttacaagttatcataaggggcccgcacatagcaggagattctaataatgcaagggaaaagtatgctgaaactcttcagtacaagaaaggagaagaaattttggtcgtagaggagaggaaacccaaacagacacgaatggaagattcaattataactttcagtgatgaagattccacaattttgagttacctacacaatgatcctctggtggtggatgtacaaattgcaaacaagatggtagctcaaacagtgattgataatggagcctcttccaatatcttgtacaaaactacttatgagaaaatggatcttcatctcaaagattta

SEQ ID NO: 256136 - DNA, 6245 bp, Cannabis indica
tttttagtgtaacactatagattctcacatatatagaatggcatttagagttctattgaaacaattttatatctaaacttcactatttttaaaattttagtgtcttattgaagaaaccctaatgttaccaattctaaattgaacactttattgtattatgaatgattgatttaatataatacgcattttcatctaaaaaaaataaaataaacactttatccgatataaatatgcttcatagataattctcagattccctgttcataataaataatcatatttcaattgaaatgaaatttttgagataaatcaatgcaatttaaaaagacttaatcctaataaaacaacatcaactcaaatccgcttaaattaaaaaattgtggtttactttgagttgataatccatactgcaagagctttcttctccaattatcaagcacagttgtaccggaatttataagttatttttttggtagctttgtcaatcgtgtaaaagctactgaattatctttcaacttttgctaataaaattgaacaaaaatttttaaatataacaatctcaataattcaaaaaaaattttaaatcacctaaaaaaattctaaaatcatagattggtacatataaaaaaaattttatgtaaaaatcctaatatttactaaaatcaatcaatattaaatatatacatatatataataaagtgtaatttaaatttcatatttattattatcatttctttttatttcgtatttattattacgtgtcatcatttcaaaaagtctataataatcaactagatacataaataaataaattataaatttttcaactttcagccttcacttcagtaagcagtgataacttttctaaaacggtaaaacctaagtggtatcatatttcaccatttgagttttgtttgggtaaaagggttacaaactttactcatgaccaaagcacataaagtccaatttaaattaatcattttctattgaatgtagtgaatgggctatgtttatacaattactgaaatccagattgatatagcagatgcatttaaagattgaatattataaaataaatggaaggaagataaatgaacctgtaaaaataaagtcatagatggatgctgacatgtgcccattgttgacacaattaagaagcaattttgtaagtaaaaataaatatagagtgaggggatgttgataaagaaatgaaataaataaccccaattacgtgttaggcctataaacctcaaaaatttcaaaaaacaaaaaccaaacaactttgcaatataatgtataaggtaatttcccagttggaagaggttaccagaatcctctgtcaccgaggagaatatacaaatattctcaaacagaagtctcaaaggcatcaagataaaatggtgccttccgccactcctaaagctaattctgttctaatcgaaagtacgaaaccggtgatgggttttcagctattattcaccgcgggaactgctgttggcttagcatcctctgtcttctcatgttctttatttagcatctgaaaacaagtaaccgaaaataagaaaattcaaaagtcttaacaagtaatcacatcataactcattttaacttccaattgcaaattcttataacgctcttgaaaacatagcaaaggataatcgcgcttgatctaattatatgtatacatgaaagggttaatgaaaactaattgagaaatttgcatagagcttaagattttcacccacaatttagtatttactgttagccaaacctacaggatgtaaggagcttgaacaacaaaagagcatacaaacttcacgaaaacaattatctaatcggcttcagtaagcatgacatagctgacataacaagtaaaaagaaagagtaacctaccttgttattgatcaagttatggagtgcaattacacttcggatgacagaagaaagatagataactagcatcatatcatttgttttcactgcataagacaatagaacaatattaataaaacgactttcaatatataatcagatgggcatacacagcatacagcaaatgcagcatattaatttagtgtaaaatacctgcaaatgacttgatcagttcggtaacattgagatttggtagaagattgaacacgtcctgaaatttacacatatttactttctacccagtaaaccttttacactcaaaacaaaatcatgcaaaatgcagaagcaacacttccagaaaaagaatatgaaaagcaagacgtgtcatttggtgggggagttgaagaaatagtagagaagagtacctgcaaatggtaaagtatctcatgatttaaaggaagcttctcatcaataacaagatctagataaccacgtatttctcgtaagcgtgcatccaaacccttcaaggctgtcagttttccggtaacctgaacatgacaaaatattaattccatgggcatctgagacagtcataacacatcgaagaacaaactaaagatcaaacctcggttgcaagtgtgctaatagttgtatccttcacatctcttagtaaatgttcgactcctattatcagatatcgtgtacataaaatcagtttatttaagaaaagaactaataaaaaaaatcaacttgcataggtaataatttgtgtgagctagctataactactcatgtaattgtaaccatatacctatttcctcaacctcatgagcagcaatttctgaaaggacatgaacaaaaatcttttggcttttctgagtggcattctgtcacataatcaagaagattaagctctaggaaggattattttgagaaaatggatagcaaagaataatttacggacttcattggtcaatctggaaatcaattatcatgattctcaatagcaaacccatcaatgtaatgcttacctctttaacttcttcgacatcatagtaggccttggtcggtattcccaattccttaggttggacatcaataatgaccaagacaggatttgggacgtagctataagatcagaataataaggttataaggatgtgtggtaaacatatagccacaccatggtttccaaactatcataaccccgactggaatagtaaaattatgtatagataaagatcaaaatgacaatcgttgctaaagtagttccaaaagaaacttgactgtcaaacaaattaaagtatagcaacatatgaagcacaattattaaaattcgatgtgcagtaggttacaatacatgcacacaccaacttctcgaattaaacaagtaactcataatcttacttgtgaaataatctatgaatatctagatcattctctcgaagctttggcccagtactataccaacctacaacgtgctccttcgctgaacattatcagaaatccacacaaaatatatgatttagttagtccaataaatttagcacagtaatcaatatctaaattaaggggagacaggggtaccattaattctcttgaacatcgaatacattgattcgtggtagttgtggtcaagaaaccaaatactgggatctttatcatcttcttcaaatggcactgaaattcagaacattgtggtaaatttttttgcccaattgtcaggttaaacgcattttgcgcatacatagaaaagcggaaagttacacctaagagtgttaaactaatagtatttattgcagtgcaattacaaatgacaatctttttataaactattaactgaaaattgtagatatcctcccaagtctcaaaaacatacaataataccatagctttaggttggacaggtttgtataagaaccaattccggatacaaatttctcaagtcacatacaaatttacttaaaatctttctacaaatgattatcgtatgaacaaaaaatgaccattcagacacacaataaatcatattagttataactttcaaactagaaaacatttagttacaaatacaagacaagccataatttgacatccaagatgcatctatccacaggtacttcttgatcttgtggcttccaatccttatatcaattttaatcttaactacaagattgttctcactggagcctcagaaaataccttcacttaaataaaatctatcatatgtataaaaaaacactcagttgagttgagctgtaaccttcccaaataagttcagagacagtgatagcatggacattgaagcacagagagtagcacagcccatatatcctaactatgcttttattaaagtatagctgcagtttaaagactcattttttaatagtttgagatcttcaatctttaaacatctaccagctcagtcattttccaaagcaaagttcagtttaaaattacctagttttatcacgcagaaatgtcaatactaagaaacccattatatataaaacaaataaagtctaagtagaaaccacaagaatacttctagggtttgacagattatcatgcattgattgggcgaattccctgaaaacataaaattgagcagagcatttgggctcctaaaagaaatagtttgtgtggtgaaacatgaatagagggaaagcaataataggatacctgcataactgttggtgacatcgacggtgcctttaaaagtgcttccgagtaagacaccgacgactcgtttgcgagtgtccttggcgactcgattgaagttatcgacgatgctgagcaagacgagcgggtgcactacgaccttctcaatgggtctcgaagatacttgctgggtcttgattacgtccatggaggaattctttgtgaaatctgaactttgtttttgcgggtaaaaccctttgttggtcagacgaagaagaagaaaccccaaagagcaagaatcaagtttaggatatttgctcctatgggcccctcaattttaattttcttaattaagccctcaaaattgcttttaatatttttaataaattatacaattttattaataataattagttaaaataataatttgtaatttaattgggacatcatctctatcgagacataactaggatttaaaattagattaagaagccaaattactttctaataataaaatacaaaagatgtaaattttgtgtgaaaaaagtgttagccattatgaaattttgggtttttttaagtaaaataagtttataagagagaattattaacaaaataattttatcactgtgtgatataaattgttcatgtagttttttttatcgaatcacaatcgtatatcaaattttttagaaaccgattgagaaataaatatttttatgtggttgaggtgttaataagtcttacccacgagtcaatattattgaaccatttagctatagggtattttatgctagtattcttaccaaatttttaattgtacccaaaattcgtagccctttgcatgtagggtgaataccttatttataggccagatttgggtttttgggtgaaacccgaacccattagggtttattgttgtagtattttcaacacgcaagtatacgtatgattaacaagtaataggcttacaagaatgaggtcgatcccacgaggattgtagttaagtactttaaaattaaattcttacttctatttgactaaataaaattaagagagaaaattaaaataagaaaaatagcgaaagtaggaagcaaataaataaaggaatttaatagtgaaaaaatgttagggcttcgacttcaattgtatctattgattatgacctaatatgattatcttcctattaccaatttctatgcaatagcaggtttactaaggtaatttatagtcttctcagatatataaatctcaattgcatgcaaattttctactctcgtgatacattaaacacagaaaccttataagctatctaaaccatacaggcactctcgtcctatatcgaaattcagttctatttcactatagcataattgacactcacttcttagatctcacatcaaaatcatagacagttaattggtaatcagacaattaaaagtaattaagtacgaatcaaatagaatacaaactgatggaaaataaattatattaaaactataaaaaaatgtcaacaatatccatctaaaccctgattaagtgtttagctactcatgttcatggaagcaaaatcacaaatattaacttgagaaaagagaagaaaataaagaagaaaagaatgctaaaaaacctctgaaattttagaattccttgattgatattcttttgcataaggataagttaggttttagataagtatttaaaaaaaaaaa

SEQ ID NO: 256137 - DNA, 4587 bp, Cannabis indica
gactctattatcaaacgtagtctaattcagcctgaaataaatcactaggttatccgattgatcaatgaacaatgagttcatttctttcctttacgggccagaaatcgttccctagctgcctgtattatactatcacgatcatcttggacctcagcagtgccggtgactacctcttttttaggcgagtctgagagctttccatttgtatcctcgtcaatatggccacttccaccactgcattaagtcaaaatctcaagatcaatggtatcacgctcgcatttaaactttaactaagaaaaatacgaatttgcaattgaaattgcttttggaaaactgatttacctcaatttgttgatattaaggttactgaacttgtttctgataggcatcacccattttatatcaacagagcatactgtccgcaaatatgggcgcgaggttgcaatgagctcgtgaaatataatgtagtctggtagtttaccttcatcgtctggttccaacaccgaagaaggatgcacctaaaacaaaaggtatattccacgcaattagcagtatatctctagccagaatccattaatagataattatacactagtaaacttagaaaaattataataatctaaataacaaatacctgtactacttgaggtttaaaacctaatgttctgtatccattatgatacaccattctctcagcaagctgatttgcgtaacctatacacaacgcctttcgcaaatagtaataatcctgttcgctttctctccgtcttcggcttgtctgtacatctaatggacctggtttcaagaaagaagatgaaatgtcaaaatggtacctacagatatgaggaatataggaaagtagaaacaaatactggaagaagaaaacacatggaatcaaatttatataagtttgttcatttttcttttccattgtaggtctagaattgttttataatccaagtagtaatttgaaacataattaaagactatgagagaattattagcttactaacccttcgcaattttctgcataatctgacccaactgcctccttacatccttgacgaacttcatccctctcacctacattgagtaggattcaagtatgttatgcttcatcatgtatgataacagatgcgtatggttaggattcatttcttctcaccacaaagatcaaatgaatcaaggtgaataaactcatcataacactgttagataatctctgtgacagaacctagtcacttaatcctgaatagttcatgacagtcataaactcatcttaatttctttacctgcaagccgtgatcctttaaccaatcaatatcgtagtcagtttgatgccagcactcatagatttgcagcaactggatgtgatcaccccagccagatccatcaggaagatccaaatgctcctgtttccttttcttctcagtattcttgctgcatttagaaaagcttagctaataaatgatcttttcataggaatgtggaaaagagaaaaaaaaattggggaaaggggtggtattttggaaaggcagaaagctggaagggccaggaaaatgaaaaggagaaagtggaacatggtagcatcctaacaaacttcactacccaagaaaatttcataatttaccttctaccaggaagcaacatggtttctgcagataacatagaagcaactgtcaatgcttgggataagcaaccatattcgtttgcctcaatcaaagttcttgaaagtgaaggttctagaggaagctctgcaaaaaatcatttaagtcagtacagtctctaaatactagtccttttacatataattttgcccaacacacaagttttgcaatagtaaaagtcatacttgtattataaagaaaaaagacaaatctggagacagggttaattaggaatctctcatagaatctaatcgtccatccatggaaacaaaaatgctgaaatttatttcatgatgcaagtgataacaacatgaagctactattaactatcaaaaatgactcagaatttcaaacctgccattgttcttccaattgacgtgatcaacccattttcatcaatggcatctatgagatataattgctttaaagcatcttctaaagactcggctgccacaaagacaacaagatcaaatcaaaatatcaagaaagccaatattgtaatttttaactaaccgacaataaaaagaaaccaaaagtaggaatattcaaaaactatcaaaagaacgtgtacatacaggaaggaggatcaagaaaatcaaatttcaaaatatcaatatctcgaaggtccaatgatttcaaataaaggacagttccagcaagagaagatcgctgtatttcaggaattgttacatccaagaattcatcattgtaaacagcagaaggatacaatcgatagcacttcccaggacgtgttcttccagctcgacctgcacgttgattagttgtactctgcaattaaggaaacccaaaatcaactagaatatataactgttaaaaataagatttctattagacatatatgataaaaccgcagcttagcaggcatagccactcattctcaacccatcttttaatttttaacctggatcatgaccaaaaatttacaaaataaaccttctaaattgtggaaaaaaaaatatgaaattaactaatgtactggaaagcaacaaatacaaaagcaaatacattacataatgacaataaaaatttcttacttgctaatttggacaacatcaagggaatacatgccagtggatgagttgtattgccgttgcttcacataaccagaatcaataacatacctatcattcatgcacataacatgtagatatgtaactgtcagattaaacaaaaataaacaagaacaggcagagcaaatacaacagaaatgctaaagcaagaatgttactcttacacaacaccatccacagtcaaagaagtctccgcaatatttgtggaaacaataattcgcctacagtttgcaggtggaggactaaatacacgtacctgcagggtcaaaaaagataagagacaaggacacttatttaaaatttaaagacattgatatccttgagaagggggaagctgaagtacttaggtacttgcctgcatttcaggtggcaaagaaccgtgaaggggaaggattatcacatccatacaagatccttcctctaggcttcttattttatcttctaattttgataccagcttgtctatatcatcctaagatcaaaccttatgattagttataaaatgggtacaaacacaaagttgtaacatatacaatgcgaacaccccctcccccaaaaaacaccctacccgaccacacatcaagagtgagagagagaggccacacctgcccagtcataaatactaagatatcaccttctggttcccgaacatgcaaatctaataagaatattatgtttattggttagtataagtaccaatattccttaaactcataaaagagagaaaaaaatgataatagggacaaacaacattcatactcaaatcaaaacattatacaatagagtttgacatgcatctttactcacccataaaaatgattcgatccaactttaaatatatgagcagttaaatcattagtaaatgttttttaatataaaatttgagtgtctcaattattactcttttataaataaatcggttaaatcatcatactaatgctgtaaaagaagtatattacaagcaaagaggaaactaagaacactgatcataccaagcgctgttttcaaacatgactcaagatagcttttaggacgctcattgctgtacaatatttcaacagggtatagctttccaggaacattcagtactgggcaatttgaaaaaaagtttgatactttttcaccatcaagagttgcagaagttattagaacttttaaatttgatgtacgcctcttaatcaaacgcttcatcaatcccaacaatatgtcactgaaattaggaagaataattcaatgtataattactagttcatctccaacactaaacccttttttgattcttttcaatactccttacacaaatacaaaattttcccctttacatttcttcaattacaaattagtaaaagtaatcgtaggcttgtgaaacttacgtatttagactcctctcgtgagcttcatcaagaattattactgagtactgattaagctcaggattagccaaactttcgcgaagaagaactccatcagttaggtatctaagaagagtgttcacaacaagcattaagcaaaaagagggtaacaagaagaaataaaagaaatttcaatacaaagccttagcagatttacttaataaaggttctatcacaggttcgatcttcaaatctgatagcgtatccgacctcctctcctagacgaacaccaagctcctgagcaactcgtctgcggtcacagtatgtggagtggagttaaacaatctcgtacagtcttcggagatggagcatagcataggatggaataagtttcttaaatgcaaacctggaaactgagactgcggcaacccgtcgaggttgggtgacgccgatagctccagatttactgtatccatg

SEQ ID NO: 256138 - DNA, 1208 bp, Cannabis indica
ataaagtaaaaaaaaaaataaaaaataatgataaatcaacctcacaataattataaataaattattaataaatgataaaacaactaaaaataattagaaaaataattttatcttaaatatcatacaactataaataaactataaaaaaaaaaaatagtttatttcttgaagaagtatatttataaatataaaaatataaagggtagtaacaataaaagtttccatatttacctatttttctttaatttttttaaaatttgtattatatatttcaatgtgtatgcattcatcaacttttatttttatttaattttttaattgttttatttttcttttttttttttcttgaaagaggacaatttcattgaaactacacctaacaatggagataataattaagttagccgacaaagctctacaaacttacaacttgtcatcgaacactactgttcttaggttttggagatgaagacactagctgcttcctataatctgcaatgtagttgtagcaccattttttcactgtggcattagcatgaggtacgaccacaccaatagtagctacagcaaaagtttcaaagtcatcttcagaaagctcttttttttatcccaagtaaaagtaagaatggctcataatcaaagaagttttttttcagcttccaaaacccattcagtttccaaatgttagtaacactagagcacaaccaaagagaatgtaacccattcactgtggacaaataatattaatatttataccctacaaaaaaaaaaaatattagtaaaaagagtggcaaagtgtttattttaggaggcatgcactctcaatttccacacaatggtccatcatgactagatttctttcaaaattgaactcgaagcctcagcgcgtcctctaaaacttcatacagttttatattcatttttgacattttattcatgcattacttcatcaaactctcttgtaacactctaattatctaggaacgtacgctaactatgtgtttttttaaactatcttataataataagtataattttagactattaaattgtggttaaattgaaacaggctaattaaataaaatttaaaccaacatttattaaaaaccttgactatacaaaatttggttgcggggatccccatttaaaattacatgattatgtttacatcaatagagttaatacaatatactaagttagaatacaaa

SEQ ID NO: 256139 - DNA, 2920 bp, Cannabis indica
ttaaatctttatgtgattttgtgaaaatagatccttttggctatttgtaaaatgtttaatttctaatattaaagttgatatcttttggctgagtccccccaaaattgaacaatgtattatgctaacatatagattatgtgcaatcatgtaaatgagtttcttgtgttttgtttgtttagtgggaacttagtgcctttgattttggtggtgcattgagattttattattaggggttttagtgggttttgcggtacacgtttcaaatttggaatggaatccgaatgaattttaaattatagttcttatgggattttttttgagtgcaggaccatatgcttttgttcagtacgttcctggtgaaccaatacttcccaacagacccaatgaaggaagtgtgaaaagaaggaatgagaagaagcgtattaggctgcgtcttgctttcatttcggtgcgtgtttcattgatctttatcatttgtgttaacttgtctctctatactataatttggaatgtggtcaattttgtttcttactttctggttgtaggggttgtcgttgctattgtattgaaactgttaattgttttggatagacttgctgggaagaatgtgattgaaaaagcgttgagttatagcttctcatataatttgttaactccgagaatgttacatttcaccaaacatggcataacattttaaagtgtttagttaggccaatattttcaaatttgtagcactaatactatgtgagttcattacccttagattgattgccctcgcaatactgactggcttgtaggtgtaatttatgataaggatagaatcatagaaatttggaaactaaatttagacggctggatccttgggagaagcctagagatccgagttttcatcaatatgcatttcttcacttgaattttgcaagcaatttgagtctgcgataggactaatcttagcacttacaagatcaatcgttccctccagttattttttttttggtgacaatctaatttcattattgaatatatgattgagatttgttttttaatggtagtcttgttattactttctctaaactaggagctgtatcgtatttctgtattatgtaaatgttagatataatcctgaaagctctaaatggtgttaaattgtcttttttccttagtttcttgaattttaacttactgtatctgtacattcgtaacaaaatgttcttaaataagggtctttgaatttctggtatatatcatgctgtggatgcacagtcaatagttttttagcttaagttcttgtattgtcataaaatctactcttgtagttcttattctgtttctgtattctcatgatgcgtgaaaagtaggggaagagtctgagtcaaaaccgtctgtgatagaatgaacccttttcattgataactttatgagattcatgagttgtgagttttatcattagctttagacatcattagtttgggcacatactcaaatttggtgttataccttggcttggagctgcctctgttgttatcttcccttcccctaattgggacttggttttgaacttgtgcagtcagagaaaaggaaaaggaaggctgaggtgcaagaggctaaaaggaaaaagaacattaagaaaatagagcgaaaaatggctgcggtggcaagggaaagagagtgggctcaaaaactggcagagttgcagcgactcgaggaagagaagaaaaatctaccgcttgatattatttactcattgaactgcattaggcaactaattttgcttttcttgtttattttttttactctcactaacagtgagcatgtgagaatttatttttctagatcaatatcaataacttgccttgcaacaatttttctctatatgctaatagtctttgcttgtgcagcaggagggtaaggacttattattttgttgctgttgttgttgtaaagttaaggttcaattttgttctatcatctttttttgactgttccaaattcatgtgttatataagttgactttgtcaaacacagtgctggtagacacagatttcacctctctgagaaatgacagcttatttgtacatttgaacttgagatatatatagggttaagaatagtacatcacatgctctattattaagtttccaactaaaaaaagatgggcagatgacctctcatcaaattatcaactcacaaaatccaaaacagagtcctgaaaagtaagaacatctgctgttaataaactattctcttctcccatagatgtgatgggagacacatcaaagttatcaagtcataaagtaaaaaccaatggtggtggtggcgttggtggtagcagcctattaaatccatttcttatattgttttctcaagtagccaaaatgatgatttgttgttgatgaggttgattcttggtatgataacaaataaagaaatgtgcttagttttctggccaatagccaaaacttatctttgcccatcttatcttcaagcaggggacacattggagattatctaatttatatgagatatttgctgaaatatttaaagttttgagtttgtaactcgtttaaacataatgattttttagcagcataattaatcaatgtatgtaaaactataattttcgtctaattttgttattatatactgcattaatgccttaaatattttttgattcaagcgttcatacataacttgggactcgtacctaagacctccaacacacacgcaccctcctatggccacttgagcttagattgtaaattactgagttatgatagaaacgtagtatcaataacttttaattttttttcaataaattcaaaatttattaatattggctacttgtgtcgttgaaaaaaccattgcgtttatgttgcttaaaatctgaaaattttagatactgatgttacaaatatctcaa

SEQ ID NO: 256140 - DNA, 3377 bp, Cannabis indica
ttagggttcgaattttaggatttttgaacttatctcatgtaaagttatagagataaattggggattatcaattgcaaatgaaatatattttttattattaatttgttatctttattgttggtaatttatatagtgtaagaaatttaattaattttacaaatagttattgaaatacatatataattcttttataagagagtttcaaattcgtcatatatatttttgaagaagaagatgagaatattttaaagaggcaatgtatttcgattaatatgagtgatttttctatcgatcctggattttaagctctaatttctaattacaattcaaatactcaagatgaaattcaaagacattatttacaaaaaggaccttgtcaaccaatacttgatgaatttcctccgatttattacgggacagtgaagtgacgattcaacattacatggtataagatatactcttcatgctagaatatagcgtcaataaaaattctttattttctctatgttgttatctttttaaacaaaataatacaaagcaagttggtgttcacatatttgttagagatggtttgagaaattagaagaaactatcaaagaaacttggagatcatgttaaagatcatttaggttcacattatgagtgttacaaaaagtgtgaatctttgatgaatcaaaatcaataaattcaatacattcttatgaaggaaaacaagatggattgagtaaattatcgtgttcgattaactacattagttgattgtgtttggtttcttttacaacaaggtcttgcattttgtggtcttgatgagtctcaaaattctaataatcaaggtatatttttttttttgaacttcttacttttttggctgatcataataagaaagttagagatgtagctttagaaaatgctcttgaaaatcttaaattgacttcatcacaaattcaaaaacacatcataaatacatgttttgttgaacacagttagtgttattatcaaagacataagagatgctgtattttctattttggttgatgaatctcgtgatgcatctataaaggaacaaatagttataatatttcgttatgtggacaaaaatggatatgtgattgaacaatttataggtattgaatgtgttctaaataccacgacaatgttactaaaaacgacaattgctaagttgttctcaatacatggattaaacatatctagattgggagatcaatgatatgatggagctaacaatatgagtggagagtttaatggtttgaaaagtattatcttaaaggagaatgaatgtgctttctttgttcacttccagttggcattaacacttccagtggcaacaactttagtggaaagggcattctcagctatgaatattgtgaaaaataagatgcgcaacaaaatggacaatcttactgtttatcttgaaaatgatgtattcgctattatagacaatgagtctctcattcatcattcttaaaacatgaaaactcgtaaaggaaaactttaaatatatgatcaaaaaaataattgtattattttttttaatagacaatttggatatttgacttcatctttaatatttagaccatgaatagtaaataaatctgtcactttatatatataaaattgaaatcctatcctgggatgtcaacatggacactgggtgtctgggctgactttcgggaggtcatgtcatttcgactctttttagctctcaggctttggacttggacttttcttgactttttggttcagaatactgaatgatactgaattggaaacaacttggcagaatttatatacttattttggagcccccgaagtcaacctgggcgcagggctagggacccttcccaaagttgactgctatgattcggacactcaactccatgaatattttccttcttgtcacgtgtcaaacattaatgtccacgtcatctggactaattttcgtgtaaacaaatccattagaaacaaagcctggcgaacatccccaccaaaaaatggcatgatcaattgattattcatagcattcaaaaatatattaggaacaacaaccaacacccaatcgaaagattcactagacgagcaatcaaaattaaataaagtagcaaaataattttcaaacactactccaataccatcttgtgacaaaatttctttattcagacaattaacaattctcgaaatactgttcttatcaccaagcttcatccaactagatttagcaccaaaagtccaatactcttttttttttttgaaccacatcgagttctttctcagtttctcctaaaaaattaagatttatttattcattaagttttggcattcaattgttttgtatctcttttttcacatcttattttaaaaattgtttttgtttcttactataactaaacaccaaaagcatgaatttaaatattgaatatattagttttctattccatttgtcatattttgaacaaatttgttagttgatacaccaactatcttgttagcatgtttttttttaatggtattgtgttatcgtatttgaaatatctatattatatttagaagcccaaggttcaaatattattatagtatacaatgtagatgaaatttaaaaaacttataagcatatttgagtaagttacaacattgattttctagacatcatgtccatgattacaggggatgttgagtatatgctcccttctttttcattttttctttttttaaaaagtgaatcaaatatataagcttaagatttaaagggcaagcaaatattttggttgcttgaatatacattcctttcccttaaaaaaataatgacaataattaaaaaaagaatcctctctcttgctcttgactcattccaacttccaagccaaaatagagaaatacatggtaaccatttccaacatggttttcattaatgaagacatttcttctttctttggagacttcattctcataccttaacataataatcaacaatagaggattatgacttctccattaacttgggttgggatggatggggggaccattattattatgtttaatgatgtcaatcacattatcatgacacatcctaaattatgtcactcactacctattttatacacctcctttactcttctctgtctctctgtctcaaaggaaaaaaataatcttgttggatttaaaaattaccaagtaagatggataaggatgatggttaaagaagagggaaaagattacatattttacacttttatttacttattcataataccacaatgtcatcattgtttgaatttgaatcccttgagaaaccatgttaaaataaaaagtggttgtctcaaattttattgcagatttaacactaattataatatacatat

SEQ ID NO: 256141 - DNA, 861 bp, Cannabis indica
ccttttctttttgtatatcttattcttattttattatcttctatatgtttccaagtttcacaagataattttaaaatgcaccatagttgagaaaagttagccaacttttcaaatattttaaactcatgaatttgtaaaaaaaaatatacttttggagcactctttgagatatggatgtaaatggctgcagatttcacggttattgtcccattgatgcttagtctatggtcgatttattttatccttagatattttgttcctttatggaacttttttatttttatttttaatataatcctttatggaacatttactagaatataaaccgaatccgaatagatataaatgatttactaaatataaattaccagaattattaattatttattcccatataagcggtgaatattatttttttcttacacttgaagaagttaaaatgctactatatttatagattgtactgtgagttatttagatatcgaaatcagaattcatactcttgttaaatacacgtataaaaaattaatattacgtttaataaattgtctgatttcaacaaagataatttttaagtttcttaaaacttgcatcatgcataattataatatatacagttgtttaaagaaaattaattacgagaaaaacaaaaagggtagaatgaatcaataaattagtcatacattatataataaaaaaaaccaaaattaatttaagtgaaaaattgtatatgttagaatcatgaagtattggaaaggcaagaagagatttgtgtagtagagaagaagacaactcaattaccttactatatattttcaaagtattttatacattatgccaaattctaattgattcgaaaga

SEQ ID NO: 256142 - DNA, 2559 bp, Cannabis indica
  modified_base (2530)..(2530): a, c, t, g, unknown or other
atatccataataagatcagaaaaagcatgataaatcggaatctaatctattcaaagcatttgagacccgagaagcgtcagtttcgatatgtgtaagaagaaattgtgattgcgaaacccagttaacagcatgaaagagcgcttttgcttctatctcatccgatttgaaactaccttgtacaaccttggataaagcagccagaactgtgcctttgtgatcacgaaggatggacccaatgcccaacttttttttgctccaaatcagtagcaacatcgacatttagtttgaaaccattagtttggggcggtctccatttttgaacatgctgatttatagaagaagaaggctgtgatggatggttgctgctagtatcagctgctggccaaacctgagatttgagtctattaacgtcttcatagaatctggtagcatattgaactatagcagtcggttgtcttggaatcccaccatggacaaccttatttctatcagtccagatttcccacaatacacataggaaagtctcaaattcatgttgctggtatgttgcagacaagtgatacaaataaatcaatctgaaacttagtaagttttcaaatgttcttagcatgcttacaaccaaagagggcatggcctattgattcccaattggaagtgcaaagtgaacattcccctgagtctaacacatttcgtttaaacaatgctgcagcagtaggaagaatattttgaaacactttccaggcaaagattcttattttcgggggtaatttcagattctaaaaaaatttccactattcgcaaagcttatttgaagttgaggacgagttttgttcttccaaattagtggcaagatgaaaacctgatttaacactatagatgccattaagggagtgatgccaaactaatggatcatgaccagcaaaataagagaaaggaatagacaaggtgtactcctaatgtagaacttgggcttattagcccaaaacattgtgggccaaaggccctcctaagcccaatttctttctagtccataaaatactaaaatatattatctaacaacatggtttggcatattcttgtaaatgttctgttttccaaacaagcatcaagagtccaaacgaatctaatattccaaatgaacggtggaaaaaaccatccccaaattaaaatgacaaaattgcccctctaacattacaagcaattaagcaaagcacaatgacccagaaaagtcttcctggtttgaaacctctgagaaaaaagaaatagctagaaacccacctttaatggattcttcttcacttcagccacttttgtatcaaatgaggtaaacaagtcattattacataattaacttacatttttcttcttgttttgcatgaagtgttatatacttatattatatttggtttaatgagaaattttgtgttaagagtttggatataatggatatactacaaaaattcatgtatgtattgtatagatatatttatctaggttgagagattaatgtagttgatcaaactaacatgttgtatataaacccagcggtaaatattttatttcaggaatattgattaaattctactgaaatttacaattttatttaattccaaaaatctcctcacacctataatatggattatagtaactaaatagtactgaaaatttttgtagtacacttgaatgtttgggtagagtaactatctgtttcaacttattttaatttattttcataattacgtacgttgtggctatttagtactatatgtaaattttttagaaaattttgaataatttacggtgctaaaaataaaattcaaataattattaaccatgcgtataaaaataaaacagtcgcgtgtgaaataaaatatttaaactttattttttgacattcaaattattcagaattttttaaaaatttacaagttgtcctaaataattataattaggggtgtgcataaatcgatgcaatccaatgagaaccgaccgatccaattacaactgaccgtcaaacattggatatccaattgtgatctattcagattggatgttatttttaaatatccaattggattggatcagatggtggatggggtgtctaaaaatacaatacatccaacatccaatcaaactaatttgtatttttatttagtttggatgagtaattagattttatattgttatacgttaaatctatatgtatatatgaaaattaacattaaaattttactctttttttcttggatttagtggattcagtccaatccaatacatattagatctaaaatattagatgtatccgatccgattcaaaaaatactatgtctaaaatattgtataaaccaaaatcaaaccaataaatatatatgaattggatgttggattgattgaatgacttaaattgattgaatcagattggatggtaaaaatctaaacatacatttatgattggatcgaatctgaataggcttaaaaatattggatgtgatctaatgaacactccccaaatttataacacacacaatcnttaaaaaagttatataattttttttttaa

SEQ ID NO: 256143 - DNA, 6573 bp, Cannabis indica
gtttagggttgagatgtcttttttgtggaggcattttgtcgaacaggtttctgtatttccgaattttcatccattttcttcgaggaacccatttcagtgtggagaaactgcgtatatgcatatacatatatgtatatatatatatagttgtttttgattcaaagtgtgtgcatgcgtttcgcctagtgtcaaatggagaaagagaaatgtttgtttgtattgtatatatggaaattaatagtcaacaaaagaaagaagacgagtcaaagtggttttttgaggttattaattatggaaatggaaggattttatttttacatataatatgcttcttgactacacgtaacgcccatgagtttgtaggaaatttaattcttttcttcaaatgttttaatgaatagtatgagaaaatgacaatgcatgagttgtgttaataattaatgtattccatttcagttttgttggtcttttctatgcaaattaataaatgtatttgggtattacttttgttaaaaggttctaacattacttctgtccctaagtttgtttctggttatttgataaaagatgttcctttattttaattattttttgaaataaatagaaacttcattaaaagatgaacataaatgataaagccaatacaagcaaagttcaaacaagaaagctagattactatgggtagatccagccaccaagtcttggtatgaagcatcgctagcctatttaggaagagaatgaactaatatattaaggctatagttggaagttgaattttggtaagaaaaaaaaagtaaggagaatataggggaaaaataaaaaaaataaaaaaaaataaaaattatcatgtttgttatggaaagtgttcacgaagaaaaatgatgaaggttataaagcctcaagaagaatgaatgttgaggacaacaataaagagaagaataagtcttgtattgctttcaggtgcttatccttacaataattttccaacccatttctccatctgtgaatgggtatttatactctaatggcctgagatacgtaagtggtctctaaggagaatattggaccatcgtaaaccaattgaaagggatgtagtgcagcttggtagcgcctttgttttgggtacaaaatcgggttccaatcctacctgttacttctcctctgggcagtaacgagggatccattgagatcgattcaaattgaggacataaaaaagctttcatttaatgaaactatatgcatgcaagatgtagtgggggtacaaaaagaatccttttctccacagtcgttatctactgtgataagaaagcgctcttagttcagttcggtagaacgtgggtctccaaaacccgatgtcgtaggttcaaatcctacagagcgtgattccgttcttgttaggtctaattacaatgaaagaacttgcagaatttgccatgttcgtacacttgcaggtgacaggatacatgagttggtcttgtggaaaatagtgattgtcaggtgtcaggtggtctcaacatgcagagttagtggttgcagagtacccttagtcgggacgtcagggcgtgtaggcgaaacgtctccactactcgtaccctctctcacaattatcctcttgttctagatcttataagtggcatggtcgtaccctgacgtgcacttgaccgtgtgtatgtttgtccttttaattcttcgatcaatagttttcttcccaacacttaggaaaatttcactaagtgttggttacatcacatgcctgagatgctctttaagcataagtggtcgagatgcttccccaaatgtgagaaggtcaccaaggagctctcctcttggtgtggcaaagatggtcatcaagaggctttcctcttggtgtggccaagatgcatgcttgtagggcttgcccaagatgctcacttgttgagcatggccgagacgcatgcttgtagggcttggccaatatggtcatggagaccttttggccgaaatgctctaggtcttgagcatgtggtcgagatggttgaggccttgagaatcaagtcgtgtgtgacttcaaaaaaaaaaacttgtattatttaagcaagccccttgcaattgggatctaaataaacacttcaaactaaaagattttggaccactcgaatttttccttggtcttgaaattgcatgttctaacaaagggatctctgttcgcaatggcctttggctttacacattttgtctaagacaggattcctaggtcgtaagcctatttcctctcccatggagcaaaacttaaagcttagtaaggacatcagtgatcttcttctgaatcccataacctacaggagcaccataggcaagctcacctacctaccattacaagacctggtctttcctttgatgtaaagaaactcaaccagttcatgtcatcaccaagaacacctcatttacaagctacccatcgaatgttccaatacatcaaaactaggaatgtcaatcgagccgggcccggcccgaccgccatagacccggcccgacccgatatcgctttggcccgacccgaccggcctgacctgactactttcttcatcttagtgggtcaggcccgacccaaaataatcggatcggatcgggcccgacccgtattttaaaaaaatagtttatttatttatttatttttaaagaaaaataattgaatagtcaggacacatgtagagattatcatttgtattgggcaagagaacatggctacacaacaactcttactctagcaaagtatccagttccacaccaatccaccccattcccaaaacaaatgtttcaaccgaataattggtgcctactccttaactaattgaaatacataatttacatgaaaatcacaatataaagaagttttctaatcacacaaaggatgtgagttcttcaacttgggaactttgaatgtggctaagaacaattttggagtcactgacgtgggcacaacatcgtcatttgcctttctcttcgatcttttgataccctgatcgcaagaaaatatcaataacaaaaatacatatgttttaactcaaattttcaaaagaattatacagaatagtttaatttcataattttttgaatatttagaatattggaacaaaagaactagaacatgcatggcaaaatataaaaacacaacatatgaaaaaaatccagaaagccattgttacagttgttacttgttacctgggtaagtaagtcagaggacgtcgtcgtgtctgtcaactgtcgtcggagatgggagtcagccatcgtcggagatgggagtcaaccgtcctcggagatgggagccatccgacgtcggagagaaagaaaacaggagagaccatagaagagtcaaagtttaaaactaaagaaattgggaatgaattttttagggatttaggtttttttttaatatctgaaattgggccgggtcaggcccgatccaaaataatatgtaccaggccaggcttagagcccgataaaaaccctagatcattgggccaaagttgccccgagcccccggcccgtgaaaatggcccaaattccattcctaatcaaaactactccaggtcaaggcttgtttttcttctccacttctccccctcatatcactgcatatgttgtatcaaacttaccagatgacacaatctttctctcaaagtatttttctacgctaattgggggacttgcgtggacactcgactctcactcactgactattgcattttccttggcaattcccttatctcctataagtaaaaaaaaaacaacctactatctcctgctcttttgtcgaggctcagtatcgcgcaatggccaacgccacttgtgaggtcacttggtttcttagctttcttgaaagactttgttgttcatcactagctccctaaaacattatattgtggcaatgcaactatcattcacattgagatcttagtgtatcacgagcgcacaaaatatgtcaaaatcaactgccatatcattctagaaaaaatccaaactgcgcgagtgctcaaaatatgctaatacaaattatttattatgtaaaataatacaattctcattgcattaaaatatataatcataatcattaataaaatatacaaagttttatacaaatatagtgttccttattatttaatagaatgcgactcttctacgtcctacctaggccctaaagttcaaaaattaatttataaaaacttatctagtgtaaattgtcattttatccactgcgaaatataaaaagattaattcgtaaagggcattattatttgataagcatatgaagtcaaattagttttattacagaacaatgttgctaacaaattagaagttcaagtggattatagataatcgaatatctcaaatgaatagctaaggtaaacaatatgaactattttgggagcaaatatgaaaacaaaacttctgaatatcagcaaactaaaagctcttactctttccgtagagagtcctcattatttcataatcaacataaggaaagtgtggaaaagggatgaggtcttctacctctctcgtttcctctggtccgtggcatgtctttgccgtgttgttatcttcctttgacctcgtttccctttattcactattggacttttccctgtgttgtggtaaacctgtgaaattcattttcttttttagtcgtgcccctactgtttgtcattccaccttcttttgttagcctttgacttcttctttcctttcttcttttcttccttttcactgtgtttgttccctccccttttttcttgtcccgtgttagctttggttgtgggcttttgattattcttttttactgtggttagtggtgtggtattcatttattgtttgttatggagttggttggaaactctgtttcagtggttggtagaaatatgtcccatgatgaggctactttgacattaactccctgtgattccactgtcaaaagcttatctaatctgtgtctctttggtaaagtgttatcccatgtgcacgtggaggaaagcttcattattgaccttgtgaaaaacgtctggaagcgccttgctcttgtggtcccggctcatccaaccaccaccaacaacaactgctttgaattgatttttgaaaaggtgcatgataggaactgggcccttctcaaaagcccgtggaatgtccgtggtgagctacttttgctcaaatcctgggaaccgagtgtgcagaatggtttttcgttcacccatacccgcctttgggtccagattcatcagctccctgtggaatttttctcagtcaccaatggtaataaactgggagctcgagtgggtaacgtagttgttgtggatttggacgagaaaaatccaacttcgtgggcgaaatggctaagagtgttggtggagattgacattgagaaaccacttttctctggttgcttcatcaacgtcggcaatgaagcgaaagtgcgggttcaatataaatatgaaaaagttggggctttttgttacttttgtggacgtttgggtcaccaacgcacggggtgtagtctgtcagcaccaaacattgtttcggatgctcagggttgaaccttccccttatttggaccttggttaaacactgattctctatatttggactgttttactggaaaatcaaagaaacctactgctccgttgaggttttcttcttccacggcccgtggtctacggttggcgcatcgtgctccgcccttgatcgtacaccctgccgtcggagaggacactgtaacaggggcttcatcgccggtcgtggctctgagaaagatgaaaacgactactcgaggccctcggtctacgcactacaacggtactgttgccgtttgggtccccaaggcagtggctggtgtgaaagagaagggtcgggctgtgaagggtaaggttgcaggggtgtttcctctgagttggaaaaaggctctgtgcaccaacctattttggtaaaggaggctaataatactgataaaaagagagttttttaagaataaatttgaaaattttaggttgaaagagggtggtgagctggcggttaaggagggagtggagagtagtgggcccgtgagtcattcaaaggagttgggtgttgggcctttgtgtttgggctctttaaagaactctgggcctttaattcataacacttgcttggaggaggctaacttttttactgggccgaagaaccaatgtgctactgggtcgtccctttttatttctggtgggccgtgtggattgtgtgaagggcctaaggtactattaaattaagtggtgaaaagcatgaagggcctaagggagattttaacttaggtgccactaaacattatggagaaactagccaacctttggtggatgtgggccgtgtggagaatgccgtgaatgacaatcctaaggcaaaatttagccttgcacaagcatgcgttcttcaggagctggcggcttttgagattaatggcaataataagaggaaagcttgcttgattgatatcggagtccaacccacttccgagaccaatgaaagaactactccggttaagaagaggaagatgggtgcggactctcgctctttagg

SEQ ID NO: 256144 - DNA, 2151 bp, Cannabis indica
atgaatagaaattactgtgttttcgattgtaattataaaacagtgttttatattagtaaaatcattaaaaatgttgtgaagtacacagaatcatcagtcttgggttacacgggtataagtaagaatagttttgagatgcatatttaatgtaatatctaggtggtagtgtagcttggtccctgctgtgttgagcaatggctagttttgttggttgcttgtagtttgctttggttgatttttgaataaagatatcaattttaaaaaaaaaaaaataagttaggttatactagttttagtttttaaatataactcctctataaattctttaataaattatttttgaattgtttactaaacactttttcttatcacaatttttaacttttctaaaaaatatggctaatgagccctatataaactgtaatagatagaactaaatgatttgatggagcaaatgattaatattaatataacaaatgatttgatggagcacattttttaactagtattatatatttaactctttatgactaatagagtatttttaatagtgagctataaatacagtatagtattatttttaaaaaaattgtgttaaatttgacacaaaatatagcatgggcaaaatttagcccctaataaatactaccttctttaattattatttcattattactatttattgactttcaataaaatattaaaataatataaatgaaattaattgtgttatatatttttaataagcattaatagtaatattgatttttataattaatttgcctttgtgtattaatagtatattatgagtcaaatttaatgtaaaatataaattatctattggagatggtcttagagtatctctattagaatatcaaaaaagtggtgtagtgttataatttagcacacttaaaaaatatttgttactctaatggtattctaaaaaaatatgttgaatttagtacatgctaaaagttatatcaaatttgacacaacatataatattgtgctaatttagccctcaataaatattatatttctttactataatgctagtaattattaagattttttaattttcactcaactttatattctttatttactatattactattatttaaataataaatttttgtatatctcaataaaatattaaatgtctataaatattattaattatttttctttagaatgtaaataatagatcaaagaaaaaactcattttcattcacaaatttttaatttttttttattggagatgatcttatatacaaaacaataatagttatatataatatatatgttacgttatcttttgtccaacattcagaaatctatctctcacaaaatcatgatgaaaaagcctttgcttcttcattttataaaaaaaaaaaaaaaatagtcttcgtctctatacgaccacaaaacagcctcaaaatctagagagattatatatagtaccgttcatcagccatggcgttaccaagctcggctaaaacactagaagtttcccatgtcgcacctttaacgacctcaccagaatcaaaagtccacttcactctccctttaacctttttcgatataatatggttcaaattcgctccagtcgagcgtgtatttttctatgctctccctgaaactaaacacactttcttcaactctgttctcccaaagctcaaacacaccctctctctcacactccaatattttctacctttagccggcaaaataacttggcctcaagattcccccaagcttgtccttcaatacaccccaggcgacgtcgtttcggtctccgtggccgagtccgatgctgattttgacctcatcgcctcaaaccgcgctttccatgcctccttggttcgtcctctggtttctcctttacatgtttctgaaacaggggcttcggtaatagctcttcgaatcactgtatttcccaatcgaggattttctattggcatcacaacccatcacgctgttctagatgggaaatccacaaccatgtttatgaaggcgtgggcttacttaactaaacaaaatcctccgttattgccggagctcacacccttttatgaccggaatgtcattaaagacccacctggatttgacatgataaaattcttgcgatcaagtcctggatcgacgtta

SEQ ID NO: 256145 - DNA, 2843 bp, Cannabis indica
agttgaagcactcttatgataaatacatgtaaacaaaaatgtagtaatgtatttaagaaattataagcaaatcattcataccagtctttggatgacatcagtaagcttttgaactctgtcagcttgcctaaataagttataaaaggcctgagactgtctatcccatctgcttcttgcatcctgcaagatttgtgagatcaagatataaacagaaatggtatttaaaatttatagaacatttagatgaatgtaaattaaatttacctttaataaaacttcaactccagcttccctaaatttcaacaattccagggcataactataacatagaaaatgtaagacttgtcagttgttcatcaatattagccatattcaaaagagcttgttacactgatttcaaataaagagtagactcacggtctggcaatctcagtaatatcaaatcgagggtcaaggccctttccaatgccatccaatactgcaggccaaaaataataaaaatagtaattacttaattacaggtagggattatatatgacgtagaaatttacaaagccatttaaataatgtagccacctgaaaatgcccgaacaacaaatgtgaaagtagcaggaaagcggaagggttgatctcctgcaatggctaacagatcttcccctgttaaatcaatgcaacaatgagtacagtacagaagcatctcatgtttcaccagatgctacaagtagaatgatgacatatatgaatacttatataaaatttaataggaggaaagtgttaatacctaataattttcaagttaatcttatgtttgagcaagttacattttgtactcaaaacttgctaacccatcggcgtaagaaaactaaatcaatttttgccaactacaggatgcctacaaagtttacatcaaaattttactatgacttctctcaaactacaagaccacacattgctaataagactggcaataaaaaaaataatcagtcgtcccttcctctaaatcattcattatatatactcactagtcactcctatattctctaatctagggaaaggatacaagtctaggagccaaagtgatctttaaaagaacaagtacttgcttatgcaacttcttttcatttacatgcctaatggtgaagatagtttaagcaaaactttgagaagatccctactctttactcacttttttcttaaaaaaggaataaagcaaacaactacaaaataatcattcaaatctcgtaaatgagttggacagaaaaaaattgtgtaatgaaatcaacattattgaattaccaattgcagccaaacgttctttcttcttcattatcttttcctccttactcaatggctttttaaatccaagttcagctgtcgccatctctctctcttttctctgtgcagcaaggcgctcttcaaagctgcaagcataatcatgagcatggctgtcattcatccatctttgttctgtaaaactaaataatgcatctgttcctagttttcggatattgcaaacatggaaaaaaaatcccaataaattagaaataacaaatcatgaaccatattacctatgacaaaaatattgattaaaaatatataaaaatatttttctatattgattagaaatattgcatgagaacccatatgtttctgaatattttaacctatgatttaaagaaggaaaacttctcttgagctgtctgattttctgtcaaattcaactccatattgttagatgaatgagtgaaaagagaacacataattaattttctgcgatgttctcgataaggcacctgttaaggaagaacagagcagttcgcctgacagctgtcatatctccagtaggtacaagaacgcccatctgtatcattgcctggaggacctgtactgatataagaattttaattgattagtagcttacaaatttgataagtcacattataccactgacacttaataactattattcaagagaaataggtacaagtaagggctgcaactatggaacaaacaattaccttatctggatccttctcgtaaactccatagaatacttccaacaaaccttctctgatgtttggactaatactgcaagtagctcaaacagtatatgtctttagaaagggaaacacccaagaaaatatagaaagcacaaggacaagagaataccttcccatcattccaaaatcataaaagattaaccttccaccattaacatcatcaacagcaatatttccaggatgctgcatacaaaatataagtacatctataattctcatgcaaacgtaaaacacaacactaagaatttttacaatatttctccaaggtgcatattttagaagtactaataatgcatgcaactctatatgataatagatgcatagtagatagcatgacatgtactcgtgctttataaagccagaaatatataaaggccaactttaaaatgaagttttcttggcttgttctaactagaaacaccacaacaattaaactatgcacatataaaagtagggtttatttgtgttgctgctgtgctgcccgattcagacccctgacctgaaccccggcctcgaccctgacccaacctcgacaatacaacctaagttcataaatattacaatacaagctaatacgaacaattttttatacattgaataataagattcgtattgtattaaaatttatgattgtaacaattaaatgattaataatacaatacaaaactcaatccaaacaaagtgttttacttatttaatacaatacgaccctcttatgtcaaatgagccctaaaagtattataagttgggttagttaggctgttttcagttgggagtttgttg

SEQ ID NO: 256146 - DNA, 7391 bp, Cannabis indica
caaaactttccttttctctttggccattaccaaatcagtagggtatgtctaataattcgctttttttcttcctaccacaacacagcgatgagattcgtggagagtatcttttttggtttgtacagattatttactctccgaggatggtgatggagatgatattttgctaccttctgtcctaagctgttgcacttgtcattagaggccttagttaagactcaagttgacgatgtccggttgaattgtgtaggtttgttgtcaatttctctacaatatcttattccataactgatttcttttctttatgatttttttagtgactgaaagtgaaatcaaattttatcgccctctttcggttatgtcaccctcaaatttatgctcaaaaatcaatgccactaacggtttaactttcattttagtattcttttctggattgatttatatatttggacttgtaagttgtaaggatgagatcttgatacatgtagaattttaataaatcgagctctgtatgtggtcgtgattttcatcattcaacttctaggactaaattgtttagcaaaaaaaaaaaataaaaacttctaggactgaattttttcaaatatcctttttttggtgtgtgtgactaaatctgttgaattttacttgtgtagcacttttgacggtattggcacagaggggattatttggaaatgcatttgcagttgaaacaactagcttgtatacaaatgaagcagatagcgtaatgcaagcagcagaagatggaagagatggatcacctttgaatgttttatttgctgaagccatcaaaggtccactgctttcaacagatagccaagttcaaatcggtacagtgaatttgctgattcattatatgacttcagaaggtacttcaattgaacagatccaagtcctggtggaagataacattgcagattatgtatttgaaattctaaggttatcaggtgagtaaaaatttgagtgatattaagtactaagaagcacatatgacaatgtgtactgttagtctagatgtttatgtatttccagttatagagacactaaaattctttgatcacttcttaaacttgatggaaacaattggtttggtattccaaaattttcttaatttcatactgtgaaccattattcattaattggttgctcagaaaacaattagtatggtattattaggcttatatataaagttctttccaggaaatatagttctttgctgataaagtttgttgatgaacagattgtaaagatccagttgtcaaatcttgcctccaggtacttgatctcttatctacagctaagcaggccttcaagcagagacttcttgttggtttttccactctaattccagtattgcaatatgtggctgaaataccttttcatccagctcaaaggcatacactaaagctcatatggacctgtatttctgactgtcctcgaataccatctgcttctcaaataaaagaaatagttgttattttgacaaggatgcttggaaagcatgctgggggagagatagatatgcttccagagacatttacaatggcttgcttaatctttgtgtctctcttaaaatctccatcttctcatggaactttgagtctcacaacatcaattaaagaagcattacaatataccgttttaacttgtctcagtattcctgacaaaaattcctgtcaacttttgcactctttgtacctacttaaggaggtttttgaatacagtcatgatgaaaaatttgctgataccagtaacatagaacttcgaacttgcattgttgatatatgcgtagtacatctgttaccttggtttttaactttcttcaaggagattgaagaggaaacagttctaatagtactggaaacatttcattcaatactcatttgggattctgacatacaaacaacagaatttgcggataaattggtgtcatcctcttggttcagtttgtcctttggatgtttaggcttatttagatgaaacagaaagtatatttggtactcagttcactagttgatgttattctggacaaggattctggccaatgtattagagatgttgctttaagtttaccatctgatcctgttgatttgctctttctactcgggcaaaggagctccaataacttggaattatcttctactcaatctgccattttgacaatcttattgggtagttctttatatgatgaaaggtaattgagccagctattctctcattataatgcagttattgaagtacattcactattgccatttatctgatgttcatctttaaatactccccaggcttgcagatgacaagctggttttagcttcattggaagaatatatttttgtcaatggtagaaatttccaacatcgggctaccgattcatctacagtaatgagacttctgtttctgtatagtttttataggagtcttgctaaagtgagctaccaaatccagtacagtccagaggccgaaaggattttgttccagctggtcaatgattatgaatgtgatttagtttctgcaagagttcatccaatagcattgaaatggatgtttcaacaagaaaaatgctgcgaactgttatctgatcagattctcaagttctgtggaagtaatatctcacatggttctgacaccacatttaacaagaatgcttctagttttaatatacaagcaattgcagagttagtagcatcgggagataactatggggcaaggatactcacatgcttactaatgaagctcgtcaaggaagaagttgaagaagattatataatttctttagtaaatctcctcactaaaattgttaatgtttctccagctgcttcagatgaactattcttgaataatattgggaatgcactttatactctttacagtgaaaagaaacatacattgttatcagagatatccacgccggtgttggttttgatttttaacatattatcctcagtacactccgaaactctttctgatgatgaaatatggcttgcagtgattatgaaagtaagtagcaattttttctttgttttttttcttatctaatcactcgcagtttcggacagcttaatcgaagttttctatgttattctactgcagttgatggactactatatcagctcagagccttctagaaattggactcaaaataatctcatagtccttggaattctatccttgattttgaaccactcaacaagcaatgcacttatagaagcttcaaaatccatacttttcaattcttctctgatctctacaatcgacagcatgatccacgaagcatgtctaaaggggcctgcattggtggaccatgccgagggatcatcaagctatggagagcatttactatatgtgcttctacttagttacttctctttaagaaggtttgtactattatttgggttaatgactttggtagtagtaccaactattactataagtacaatagctaattcctttattcctatagtttgcatgctgttctaccaggaaccattgattggcaaagtttctttgatccaccagataggacgcaaccactttccgtgattggaatcccttgccatgacttgtgcagactgatacatttcgggtccccccaagtcaagcttgcagcttcatactgtttgttagagttgttcaccagaatatcagatgttataaacagagaaggcgaggagctaaagtgtactgccgagtacctaatgtctgtcatcaccatattagagggtttggttttctacagtgacaacctggtggctgtgaactgcagcctcagtttatcgatgataataggatgtgaaactcaaaacgcaccaaacaattggagtagagtgatagtggaagagttgacagtgtctatgtcagctccatgtttagcctcaaaatcttttgttaatgagcacaaggctgctgttaatgttgctgttgcattgctaaaactggagaagattcctgtctggttgaggtctgtttttgatgatcactgtatatctggcatcatcgaaaacctcacgtccggtaatgtaacttcagagattgtagttttattccaagagctactgaaatctggattcttgaaggaagaacacattgcaagtctaagtcgggtctttcaggtgagaattctttttattctatgtcatgatttttgtttgctatatattatatacatataaatgttgattttcgtatactaatctaatgtttggtagagtagaaaagaggaaagaagtttattgtgtaaatagtaatactaaaaagattgtttaggttggaaagtaaagagagtggaagagaaaaatgagtggtgaaataattgataggttggtagaatggagaagaggcaagaaaaagtatattgtttaaattggaagaaacagaagaagaaaagattgtttaggttggaaaggaaagagagtgaaagagagtgcaagagaaaaatgagtgtaaaagtaattaatagaaccaccaatttgtatttttcgtccacatatgatgaaagagtctgaatagtttaccgtcatatgtgtagaagaatatcaagaatgttgtggatattgtaaattattcaaaaagatttaaaaatatacgtgaagaatattgtaattacaatacacaccatcataaaaacaaatcttgacatgtaatttttatcagtaaagattgagaaagaaagaagttcattttagtaaataagtttgactcgatattacattgaatattaatattggtgtaaaatattacttttgtctccattcttattttatgaatattcaatacatttgtaactctccaacttttttctttcctttatagagtgagactcattagtccccatgattttgcggatattacaggcttgcagaaaacgattatatagtgacaacacaaatgatgattgtgaaaatgagcatattttaaagaaggtgagcatcaccacaatgtccgatgacttggaaaatttttgtgagtatcttatttacttgatgtcatctcaacatagttattcaaggaataagagtctgttggtggaaatagagtcgttttttagaactttaacaatagaataaggtgagatgataactaataataggacaatcatagttataaacttaagccataaacacaataataattaattcataattcatatacttttgtttcccatatactacaaagtacaaacaaaagaaagtattatagaagttcaagttgtgtatctacctctttcaaaaaaaaaaaagttgtgtatctacaacaatagtgcttacttaattcacagtattactattactatgtctcacactttcacatggaacacaagagcagtttcattatatgtaatttcttgtttggacaaagagaacgaattgtcattgaaattaccaagaatataatattttttagggtataacatgtttggaaatcagtgtaattactatattctgtgtttaaatgtgaagttgtggttacgtataaattcatgttgttatatttggcaaaatagttggtgattacacagtactctctaattatatgattatcatgtaatttgtacatccagacaaataaaccaaattgaatagttaaattgaattacactgaaatccaattacaaaatgattttcaaaagaccctacaatagtaatcttccatcaacttgactgagaagacagacaaacctcccaccaaattaaaaaaccgataattccaagtttccaatgactttggaggaaaattgtcaagattgaaaagaaatgggttgtgtcttcatcttgttgacaccaaagtttttgatcttcaaattccttagtagccaagttagggttccagagaaagcataggccactcatatttcagacgacatcagtcacatagttgtgaagttcctcaagttctgcaattagttggctttactcgaaccctaaattttctccaaagccctactgattggttcttggaaatattgaagagagataaagattgcctcctgttgatgaagatgaagaaaaatgcaccattagcacattttgatacagatgtttcatgagtaactgacatatgcagaaaactgatactacctcggttcgaattgttcggcttccctggtgtggacatgtgttcaaatatgagtgaaatatttcactcgcatcttttacctaccaatgaggacaataaatcttcaaacttcctatcgaatgtgcaactataaattaccaaactctcaagacaacattacctttaaattcatatcctcttcaatgcactcttctaacccagcaagtccaccaaaagcaattaatagatgcctaccaaatcagacacacacaatcacaatgtgaaccaaagaaagggatttttgaaaccaaacatgaaacatttagatgtgcaagaaatatttatacacagttttaatcacatctgccaatgaaatgcagcacttacagattcagcaaaacaaactgagttacaactgaaattggaaacatacctaaaggtaggtataacgagatcagatgatttagtaactgaaccatgctctgaggttccaatcaaatgatcatagcctccctacgaattaataaaataagccgatcaagaaatgatgtatttttaaggttagtatctatctacagttcactggcaaaatgagtcaatgcacaataccttatatgggcattccctgaatactgaacttatattggaagcatatcttactctgtaaccccaatatgtgtttgcttcttccctgggcttagatgatgaaacaatttggcgaactgaatctacgaaagaaaaacaagcaactaaatttgctggcatcgtactaaacagaattattgtaaattagaaaaacaagatcacaagtctatacacagtttgaaatctttaagacagctttgcaaggctaaattatttgaggaaatcaaaattagttatttaccagcatccagattccgatcagttcccatagccacggtaaccctcgttccaggattgagtacttgatcaataacgaaattctgcacatttagcactgtgtccataaaaacagatctattgaagactttcttgatagagttttttgttttaattcaaaaatccaaagtgaaaatattgaataaactacataagaaacaaagtaggaacaaaagggactgggggccaatcttaatatctcgtatgctgatggaaagtaaaattatggtagataaaattaagggacaagtaacattaggtgcttactgtttacacagaagaagtattgacaatgccatacatacaaagaggagattacaaaaaatagcaataataataaaataaacaaagtatgaagctttcaataattaagaaagccattgaagatggcaatacct

SEQ ID NO: 256147 - DNA, 3698 bp, Cannabis indica
gaaccaataaaaaagacatttgctagatagcaagttggggttaaaagttagccacgtgtcagaaaaccattggttgagtatcctaaacattaatacacaggatcatttccaccccatattgacgacagctcttcccagttcccatgccaccacgtaaaaccaagtctctcttctccccgttttcgagctcaaaaaaaccaactccttctcatatacatatatatatacacaacatcaatatataaatatatatatacaaagatccaaatgatgatgagaaagagagaatatggttttcacatggtggtgtaaaaagaaaaagaagagagagagaggtaatgtaatatataggttaatatatatatatatatatatatatatttaggtagggggcattgatttgtgttgcatgaaatcagaactttaagaacaggtgtaaatggttctctactatactcagtttactttcctttacatccgtcactcttgtcttggtccaaccctaaccacccttcaccaccacacttctcaacgctaaccccactacactactcttctctggttaacttaactatatatacatacaatacacacacatttgaatcatcatcatcatcatgatcatcaaaaacaattttcacatatggtatcaaatgcatagttcacatttggcaacatttaaccaacccaacaattaaaatccccccgtgttgtattcaccgaaattaaattccaaaataaaaaaaaccctactactacactcttcttttcttttctttttaatttttttttatttttcccatttacccattatagggtatagcataaatatgagtattagaagtactacaatgtgaacaaaaaaagaaaagaaaaaaagaagaaagagagagaaagagaaagagagagagagagagagagagagatctgttatcaaagtttgagtgaatgcagattgcacaaatggcatgattttcagtctttctgtgattgtgtgtgttagatcgccgagactatacacccaagttttagattcctaaaaatagaaagagaaggatttttttggtaagtaaatatatatatatatataagtgtttagttttcctctttttgggtttcttctttttactaacactactactactactactacccaacccaacccactaataaactcttactacttctactgttgcaccactagtaatacccatctcatctcatatatatcttctcatcaactttttctttcacagaaaaccacacacattatctatatctatatatatatatatgcatgatgaagatgatgatgatgatgatggagcatcaaaagcagccactacttgtacaagtccgtgagcgtagtcatcaccgtgaacagcagcaggtccaggggaatcgggtcgacccgtttgtttcggatccaatcgggttgacccgagacctacccactactgttactcataggaagaagaggttacccaggcagagacgcatcaaccttcatttcctctttcctaatcctggcacctattcctcctcctcttcttcccacgtgccaccatcctctcttccttccgcacgtgtaagtttttttatatttttatttttctaaaatatatataatctttttcttgacaatgtggtgcttaagatttattattatttatttgtctatataattgataatcaataagagatttatgtactaaaatttgtttttttttttaattacataatgtaatgatttcaggtttaattatcaatcaatcaatcgatttaaattttgcaatcagacttaattaattagatgtctctactaaactagatatatataggactaatatttggttatacatttcaatgatattaattaattaagtaatatatatagctagtatagtagactagtagtggtatcatcattgtattttgactatatagtgttttattttctttaatttatgtagaatgtatttttttgcataatgtataatattatatatatatattaattcgaatcaataatgtaaattaattataacttatatttatgtatatatgtgtgtgattgatcaggggattgatctagggagattgagattcctattccagaaagagctcagaaacagtgatgttagctctctcagaagaatgatactccctaaggtaccaaaatattaattctatgtatatatatcgaaatcgatatatatatatatatagcctcatcaacaacatgatctattttagtttattagtgtagttatatatagtcatgaccacatggataaataatttacatcgagaaattactattttattagaatatagtagggttgaattataataattaatatttatgattaaattattaattatatatatggcctatgggactgtatatatttatatcacatttcaccagaaagcagctgaggctcaccttccagtccttgaatccaaagagggaatagtcattaatatggatgacttggatggtctgcatgtatggagcttcaaatacaggtcaatttaattatttaattattatatatatatttatatataattctaggtaatatagtaataagatcttatataatttttaattatttcaggttttggcctaacaacaacagcagaatgtatgtactcgaaaatactggtatatacatacatgccttttctttttcaaattatatacagaaaaagaagaagaaaaaaaaacattaatattaattttgatttattaattaacaatttgttatttgacaatttttcttaggggatttcactaacacacatggattaagacttggagactttatcatggtttatcaagataacgaaaaccagaattatgtaacacaatttaattttaatacaacttttctaaatttttcattaatttaattaataaatataattaaaatataacaaatagtattttaattttttcttcaggtgattcaggctcttaaaaagactagtactgaatctactgatcaagaagaacaacaagaacaagaactacaagatgatcatgataataacaaagaacaaatagtacatcatcatcatcatgatcttgttatatatacaaataatgatcacataaacacaacaacaacaagtgtgaaaatggaggcaccatgttctccatttgaagaagattattacttgaagagtagtaacaacataagatctaatcatgatgatgaaacaaacatgtctttcatctatgacactaccaatttctcaaatgagtctctgcttgactttttgggtggttcttctatgacccataacaacaactactactccaaatcaggaccttttgggagttttggctcagtggacaacttttctcttgatgactattactgatcattagtactacgtactatactacctctcctacctttttagtctcttttctacttaattttttgagaaatgtgatcagtttgacttgttctgttttttgtttttctcttcttttggatgccctctacctttgttgatgatctgtaacatgtattttggttcatgtgtcaaaacactagacacatgtatatatatgatgatgtaataaagagtggtaacttaagttataacaacactactacctttcttttttaaggggaaactgtcttattatgtaataatatattaaatgtatacattttatt

SEQ ID NO: 256148 - DNA, 3532 bp, Cannabis indica
tttggggttttttttttttcttacttttttgcatcatcattattattattattattattattattattattattattattattattattattattattattatttataaaccatttattaaaattggagcacacagagagttttaacatgtaataataaaaataatcaacttaatttcttttacttactatttttattaatttagacacatttcatttctaactcaggttataaaaaacagctacgccacggttttaccgtttaaaaaaatcagttttaaggttaattgcaaacctaaccaaatttatttagaaagttcggccataaaaaatgttacaaatgtaataaaatacagtaatctgaaaatagaacgatatcggttcttcatattaaatagtatctatgtatacatgacaaggactaaaagtaacaaagatctttttaaccttgattttgattgcaaattttctctttgtttcattttcaaaaaattccaaaagtggtagaataaagaaagtgttttagaatataaagctttttagatcatattgatcatgatatatattgagaaagaaagcttaggaatcacttggttggaaagttggtttcatatagaaaaaataaatatatggtatctatgacgtatacaactttatataattatatatatttatgcaagaattgctaaaagttactattaatatttaattaatattttctttagtattatattgttattgatgtaattatagcggggttcatataatttttttaaaaaaaagactaatttttaaaaaatattactaatttattactacctataaaaaatttagggcacccttatgttatttatacacatcattaatcattgtaccgagtggaatatattgaatcgcctaacataaaactataatatgtaataggcatgtttggaaagttaatagggaattagaaatgagattatttcaaaatacacaaaaataataaaacaaaattataaaatatggttgtatgcaattttatacattttaacattttttatgattttatttacagaaaatacgatcttttgatatatttttatattgtacccttgttaatttgttgttgatttttagttatttatatgttaatttttgttgttggtttgatgttgttttgatgttattttcatgttacttttatgtagttttcttgttgattttataaaataccgtaaaaatatatatataaaaatatttgaacgtataaatataaaaaaattacaaaaaaataatgttgtgtaatcatcccattagaaaggaattatttgtatttaattttgcatatttgtttgaccacgtaattatatagtaattgtgtaactggatataatcgagagccctcgattatactcttcaattctcatactcctatgagaattaaatgtaattatactatataaaaattatttttttttatgtaattattaattattttgtcaaacaatactatattaaaaataataattacacttactaataattacacataaactttcaaccgaatcaaatagtgttagggtttacatacacatatatgttctacttgagctgtatcaagctaatcattgtatgaatttaattattattaatattaataaatttttttctaatagtattttccacttgcattcgtgcaagtgaatctttttatttctttcttttttgaacaaaattcttcttgtcttaacttaaggcttacaaaagtcaaaattaggtttctatcaaagaaagaaaaagaaatcttttctcttatcttatcttccatttgatgatgttttgaaaaataacatttttctgttgtttcaaagttaaatttggttttacacaaatcccgtttgttgtcgtctttcacgaaatatttgtgacaaaattactcaaacttttgtgtgtgagaagtaaccgttcaaaattttcattaacgtcaaaattatttaaattttttaatatagcactccgcccctactaatttagtagatattaatttgctatggaaaaataaaaataaaaataaatattgtaaatgagttttttatatttatggcgaagtggctaatcacaaagcattattattgcacgatcaaatagttttactgtcaatgaaaagcttcaatatttttgttacacttataaaaatttaagtaattttgccactaataaaaaaaattaattatatactattcttacgaaaacttgagtaatttcaccgcaaattatcattatttttttaaaactaatgtcactatctatcttaatccaatattcttaatttcttatgaaagtttctagacttcattaactcaatccttcatgttattgaatagacatttattaagagcattattattgagcattagtagtgtccataccttttatagttagcgttccacgattgatgagcaatattcattaaaagctattttcttaaactatatgggactcgacactttactacaccaataacagtataacactgagaaatatactaaactccaatggtaccttttaataattctccaatcataacttatgaaaattaaggtgaaattgttaccaccaccttattaaattgatatttttcaacaatggcgattattattataattagcagcctaattaattagtggcttcattttcataatacatataataatgactagtttgattcttcaaattttgttgggtggtcaaaaacagataactaacactattttatattatgatattttagaaatatataattttttccactcatatataaacttttcatataaaaaaatcaacataagaatcatgtttttgtttttttcttttctaagtaaaataataataataatactctattataatgtttggtggctttcaacatcatggaccataagtatcaaaatcaaaggataaattattaggaaaaaaaaaaacccaacaacaaaggataagatttacagatggctcaatacactttattatgtgtgaatgtttagactagtctaattttgttaccaaattagtgaacataatgaccaaataaataaattattatatattattagataatggattttatttgttagaggatgcattttgttcacttcataattattaaattataatttaactgatcgaacgattattaatatctcaaatcaaatttataatataaatataatatatcattatttttatatataaatatagggcaagattatagtaggacttagcaaaaattccttaccggtagaaaactttttttgaccattgattttagatcatgcggttattatgatataaggtgtatactcttacgataagattgcttgtatacaattaaaactttatacatattataaaaatatttaataatatatttattttttaaaaaataaaataatattaataattaaaaaatttattatttttttaatttgaattattttttcaaaaaagttaatttgaattgtaagtatttattttcaaaattaatttactta

SEQ ID NO: 256149 - DNA, 3019 bp, Cannabis indica
aggggttcgataatgatgagaacgcgagtggtgatgaggagataaagaattatgttgctggtagaggaccgacattgatgcgtgaggtatttaaagcccgaagtgagggtatacgcacaccaatagtgttcaatgagttcggtcaagtcattggcccagcaagaacaaagttcatatcgacacttggatccattgtacgcagaactgttaacattaagcatgacagttgggcaaaagttcctatttccgagaaaaataaattatggaaaatcattgaggtatgagtctattatcataacatgtgttgtttgtaatgtgtttcatggtatgagtttattataatcgattgcttgaattgcaggagacttttgagatagatcctaaagcaaggaaaaagattttacagaagagtggcaaatattggaagaacttcaaaacaaacctcaccaattgttggatagaaaaacatagatacactaaacccgacaagctgagacacccaccgagaggatatatatcggtgataagaaaaatcgattgggataactttgtcaaagttagactgagcccagaatgggccgagaagagaaagaaaatgcaagcgttacgagctaagcattctcacaatcataacatgtcaaggggaggttatatttctaaggaggagcaactaatgaaagaatgtgatggccaaataactgagattgatagggccgagttgtggacattaggccgaacgaacaagaagggagagttgtctgttgaggcggcttcagtgaaagctaacattgtaagtttataccgaaatacttcttttaattgttgttattttcacaatactaagtatgtgattagcgttttattgtttgtttaataggatcattttaaacggctgcaaaccgaggggaagtggaaacccgaagggtctaatgatttgcttactatggcaataggcacccccgagaatagagggcatgttaggggtgtgggagtgggcgtgacgcccactcaatattttgacactccaacgcccgtgtcaaggaaggggaaagcaaaagaagctttggaaaactccaaagttgaagcgttaagaagagagtttgaagaaaaatttcggcaacaagaagaattcttcaaacaacaacaagaagaattcttacgccgacaagaagccatgatgaaagcattcatggagtctgcgagaggctcgtcgtctcatgcagtaacgcctgagttggacacaacacaaccaacatgtgtaacgaaccttgaacccgattaatagaaaaaagcatgagttttctagcaaggaatgaaaaatgtaaactggtgtagatgatcaatgtagaagttggactgttgtagagtagagactatactatgctaaactcttaagttaagatgtcatatggtaaaagaagctcaatggctatgattttgataagagcctagaatgggataaaaattgtctttttttgctagatgaatgagattcatagttacaaaagaagaaaacaagtaatatggggtctcaaccccaaattcttggaattaatatgattcccttcacttattaatttgtaacaattaatattaagataatggtgctctattaacaatgtttcattgctttaagccaaatgtaaatgttattaagaggcaccagtaagatccattacttaactagtatacaatagtagtgctctttagtccttcctaaaacaagttactttttctttcaaaaataaaataaaataaatattatattgttttgttgattaaatttttttaatggggtgaagtgggagagagataacaattctttttgtttggcaagagagattggaggagggaagaaatagttagatggagagcaaattcttccaaatctttaatttataatccttccactaatggaagagtccatactctctctttttaattgtttaaaattacaattataccctcttaatatattattaaaaaaatatttataaggattatataataattttataaataaatactccatccttctactactatattttttaccaaacatcttaaaaggattgttacttcactctccctaccttctattctacatccttcatcaactctccatcctctcgatcccctaccaaacatagtcgaagtgcaaccaaataaaataacaaaaatgtatttttaaaaagctaattaggatttttactccccgaactttgatatgtacaaaatcatgcttccaaacttttcaagttgttaaaatttttccataaacttttgagattgttgggtttaaggacctctgtcaaattctactcaactttacaaatgcagctattgtccatgtactgaattgtgaccctctaaattttaatatctaccaaattgtaccctttaaactttgacatatatcatatcgtgccccctgaactttaatccacgttagaaatctgttagtaaaattagataaaaatccttaaatccaataatttcaatagttcaaggagaattttaacggcctgtaaagtacatggggcatgattttgtacatgtcaaagttcgggagataaaaatcctaattggccttttaattttttttgaataattagtatttttgccacttgaacttttgacactacctgatcttgtcccttaaaatgacttgttaaaaattttccctgaaatataacaattacataattatcccttttttgttaaatcccgttttttttaccgctaaaaattaatattattactctttaactttgaataatacaaaattttgtcttattttattaaaaaaattaattttgaatattataatgttctattaattttgaaaattaattaaaattattaaaaaatctgacaaaaatatttaattaattaaaaaatattaaatttacttaaaaaaaatataaattgttttttaaaaaattatttcaaattttattttatttataaatatgtatcttaaaaattaaactaagattattaaaaatccaataaataa

SEQ ID NO: 256150 - DNA, 997 bp, Cannabis indica
atataaatacatgtatacacttgaaaaaaaattggccccttctaataagttcaccaattctgccactgatctagaggtcgtcttaaaagcctgcagaaacacttggtgatctagaacctgtgatagcagatgctaatgtggggtcattggctgagagacttgttctcattgtcgtttggatcctttactttcaaactcttgatgagcgacggagaatttttttttgtacaaattttcacgttaacattgaatataatttatatatttttaaatttaaaatagtttttataatatttaatattagttggaccaatatagatgtgttacttatgtacgcatggactctctttattgatttaataacaataaaaaagtgtaaatttggtttgaacaaagaagactcggaataaataacaccaagaagatttggtttgagcaaagtacctaaacaacaatcaagatgtaccatttaaaacttgtatgaagttttgcagttgcttgaaaatagggttggtaggaagaaaactctcaacgaagctcatagaatttcgcaacacactagggtgggacactagagggttgaataagtggaataaacaaaatcacacaattaatcaataagtataggattcaatgaaacattagaataaaaagtgacaatttagaactaacaacaaaactaatgccatcacgcatgtgctcaaagaacaattgctaatggggaaaatgtatttattcttaatgatccttggcttccacataattcaaacaattattatgtctcacggcaccctgctcttgtgaataagtcggtcagctgcctttttcatgttggtactcgcgcgtgggatgaggatgttgtgagggacttgtttgttgcccgtgatcaggatcttattttgtccattcagctcagtgattcggccgccgatgatggttggagttggcgacttgatacttgtgggaattatttagttaaaagtgcatataagttctt

SEQ ID NO: 256151 - DNA, 2401 bp, Cannabis indica
gccaacttctggtggggttcaaaaaataaccacaataaagttcattggaaatcctggtccaagctttgtgattctaaactcattggtggcataggtttcagatctgtcaattatcataatcaagcactccttgcaaaacaggccgggagaatcttcactgatcctcaaccactcctctcccaactgctcaaagccaagtatttcaaacacaataaatttctccaagcaccaaaaggtcacaatccctccttcacttagagaagtctccttttgggaagagagaagctactgaaaggtctcacttggaaattggtgatggtaactctattcagactgcacgtccaaattggatcccatttacgcacaaaccctattccatcataattccctctaatctgctagaaaaggtctcttgcttcattgaggaggacagatgttgtaatactaacaagctcaacaatacttcaatgctgatctagttgttgaaatacttaaagttcccattgaccattcagtaaaagactgcttcatctagggtcagcacccttctggtattttctcagtaaattcagcctaccaccttgtcaagtccaaagcgccctccaaaaaacccacaacatccaaccctacatgtttccaaagctggtggaaaatagtttggacgaccacaatacctccaaagataaaacatttcatttggaaagcttttactcacgccctcccttctaggctaaatctttttactaggaaaattctccaagacccaacccgtcccctctgcttcaggaacgaagaaaccatctctcatgccctcattgaatgttccaatgctaaacttgtttggaaaaaaaatctcttttaaggaactgcactctacgaacaagtattatgatatcaaggatattcttctttgagggtttgattcactgccccaggatctggtgggggtcttatttggcattttatggatgatttagaattataggaatgagaactttttaacaaaaaatatggtgctaacatgaatataaaaaattatgttgttaagcttttgtaggactatgctaaggcccaagtgaacaacctttctagctcgcccatactgctcgaccatcaaactcaaacatagagatttcaagctataatgacaacccccatccacttggatactttacacttaatatggatgctgcttttgatgttcatagggaaaatcagatttaggggctatagtgagagactgtcaaaaccgagtcattgcaacccttgcctccccaagagttggtgcagtctccccctgtatgcagaagcccaagctctctccattgctctgttttggtgtatggcaataagacttcttctctctcacactgcaatagattgcctctagcttgttcaaaaaatcaaacataaataaaaggattgttcgaccttgtctagtttaatttcaatcattgaatccttatctttctatcctaaagtatctctagtttttgtcccgagaaatctcaacactttagctcataacttagcgagagattgtttaggcttatatagagagcgtattgagagaatttcctctcaatcatgatcgaagtattaactctgtactttattgtttatctttaataaatattgcaatctttcaaaaaaataaatttattaaccactaattagtatctaatataatcatcacaaaattaataaaatagtttcatatatacttgttggtattttatagagtttgatatcttattttatttaattaactaggcaacaatgttgcacttcacgtagctgtttaaatatttctaaactatattattttttaaaatatgacaaattaaaaagtaacttttttttttgtatttagaattttcttttaaaaaattaacttaaatatgtatgattataatatttcaatactaaagtcatcatcaatctaaattaataattttaatatagaacgtcaaaactatataaatctccttaatttagaagcttcttattgattcaacttgattattgacatagattttattttatcaaattaattcaacttaagtttctaacaaatattcaaacatacaatattttagtacatatattttttaaatcataaatctaaacacaataaataaataataaccttatcctaacaattaatatgaacttaaataatatgctatatataaaaaaataataattattttttgttgagatgtacttatatttcatcattgagaatgtacatttaaatatgaatgatacatgatcatctttcaatttcttggaagatgtttctgaatctctctttattttattaacatggaaagttctaactcttaaaagtggaatgacgccatgaatgaagagaatgagtctatgcaagacaataaaa

SEQ ID NO: 256152 - DNA, 5513 bp, Cannabis indica
tttactttggttgatttaagtaagagatgaatccagaacgatccattcatcatggctagccaaatagtatagacttttacatttctgatcgggttgatgataaatgatcttttattttatcaacactagaaaggaagttcttagaaaaggaagaggatgaggagaatgttgatttatgttatgatgacttcatttttgggcaaccaatgcatgaacaagttgtggaaatggatcttaaccttaaagaagaaaataccaaatacattagaaatgatatcaatgaaggaatatgggtcaattgtgattcaacaaaaggtaaacaaaaatgaaaagaaaacgtatctaattggtagatatgtgaaacacaattttagctaacttgtatttatgtagttactctatttgtatttatgtagttactctattatagctatcttgtgtttatgttcgtttctgttgtagatatgtcaaactcaggttcaggtacagacatagaattagacccagcagcagagtgtcctaggatgatacctaggcaaggttaaacggagatacacaatataagtaagttgatggaccaaggaaaaagattgcccctcctagtcaatgataaaggacaatactatggcaaaaactattgccagttgatatcaactttaggagttagatgtcgtaggcagattgagatttcctatgaagattggaggaaggtcaggccagcactaaaaaacaaaatttggaatgacgtaaaggtaagaatttatttgttagtattttaatttgtgtttttgattaattcaaatgtaactctaacaatatttgtttacttcataactaggcgggttttatagttcaagaagatttaatgaaagatttcaagaacagaattacgcatgacatcataaatccatgtatagaagaaaatgatatgcaacagttggccaacatcacagaaaagtatcctgaaatagatcaagaagattggctgaaatttgttgcaagtcgcctaactcgtcaatttcaggtactaattttatatgttaagataaaattttaaatacaagtactagtagctaatttattatgtttgtattgtaaaaaaaatagtaaattccaaagagaatgatcaatgaaaaaccagtctagacaccgtagtggtcaaagtggaatggttaacctcagagaaattgtagtaagtaaatgataattaataaaataaatttctagcaatgtacaacaagatgtgtaatagtactcatttaagttttgtaaaacaatgcagacaaaggaacttgatgtccaagatcccccacaccataatatttggattgaatctcactaaaagaatacgaaacttgtcactgattttgacatagaaattgctactaagatagtaagtattaatcactgataacataataatgagtcaatatacatacatatatatcatatactaatttcttgatgatgtgcactaggttgaactggagaagaaagttagccagggacaagttaaggtccatggccaaatgacatattgacgcaagcgttagggatactagtgcatcctagatgtgttagggatgctgagtatgctaatgtttgatttatgttattttattagttacacaaaataaatattcattaacttcatttattaatttgcaggtttattgcgaaggcacctaaaattttttacaggaagaaatggaaagtttctcatgctgtggcttagaaacagagagagatagataaattaaaagcataaattagatcccttaaaaagaagaaaattgttgtcaaacaagagcaagatgatgatgagaagtatgttcaagaagaacatgctcaggagtatgtttcacaagaacatacttaggagtatattcccctttatgttccacaagaacatgctcaagagtatgttcccctgtatgagcaacccccatgtacaattttgctgaacaaagggcagttgagacaatatttgtctgctcagacaatatcagtaacagaatggccaaaaacttatttttatgaaaaagagagtgtgatcaaagttcatactatgctctatgatgattcgcatgcacgcgttctaatttcagaaatgctgcaagaagatgcaaaaatcacagtaccacttcagggataaaatatgttatggaaacgatgaacacaatcctccattggcctaaacattttaattataacatcagaagtaaaatttctttcttaaaaatcaccattacaaattatatatacaaattttgatctattatggtattttgtatagggtccacttgctcaaccaccatcaaaaagtgttatgtcgaacagaaaaggccctatgccttgtcaaaaagtcagcggtgatcgtgttgatctgttattcactccaaatattatgacacaaatcttcaggtcgatcagatacatggctgaagactttttgagaataaaagataaaaatggtacaattcaaattttgttaccacgtgaattcataaagcctcgttacctagatcatgataactggggaagatgtacagcaggtggcgttgtgtgatttcattggaaaccaacgaatgctttttggaatgaggtatactttttgtaacctaattaacttcatatattaatttctgctgaaattattataaaactttaacatttaacaatttaatgtaggtgcatttgggaggagttacttgatataaaacagtttttgaagttttatgacccaaagcttcttgtagtacactataaattgatatagagaagcatcaaaagtgtgaggatgcaacaaataagttgactcgttggttatcaatgatgaaaagccaataccaaatgtttttcattccttggaatatttggtaaaacctacttaagagataaataaaaattatttcttttattattacttaaaattatttgtacactatcctatatatatatatatatatatatttaagtgcacattggatgctagaggacactacgccaggaagattatacatttagaccctataagcggctgcaaaattcctcaacaacttgatacgatattgaggtggtaataatttaattactctttatataataaatagtttcattagctaagtcctatgtgttaattaattgaaatattaatataattttaaaacagggcatacgagaaattaagggagtcaaatgtgttcattgagacgtatctaaacatcattagaaaattgtccaaaacaatctaaaagacaagaatgtagtttttatgtattgaaatacatcagtgacatcaccacacatgcaaatcctagcagatacataactgatgcaaaagctgtaaattttaattattaattatcttatttattatattaacaaaaagtttattatatatactaataaaatatttacttacttttacaatttggggaaaatattacatataatgcaaaaactgagtcgttactgtgtgagagtggaaagcacaattgcttatagtgattcacaatcctgatgcgtagaacaattgtataagaatttttttcctttatttttctatgtttaattagataacttataaacacttagactaattttaaaatatttgtgtaatatatttacttagaataatgtatatattcatttagttatataattggtttaatttttagttacatgaaattaacatttagtttaaataaattaataaaaataaaaaaaaataatgagaaaattaaaaaaaaaataagttttatataaaaatcaatgttgaatatgttaactataaggcatcggttattagctaataacagataccatttatgttgaatattcaacaagaatttctctatgtcttcggttattatgaaataattgtagacatagagttgttttatgccatcggttaattctccctctaacggtgtcgtctgaaataacgtcgatagcgaatttcgctaaaactgacgttgtatgattccaaaaaaatacctctatagcccatttttctaaaagtgcaattaataattgaattggatcggatgagaagaaaattattagattcgatcggatgcccaatcctactcctacgtatctcaccaaacttaatcctaatctttagattagttgagcactttaatcctacgacgatagcacaattaggacaacaatctgtgtttttgtcataacgggaccaaatccagttcctatatacacatattgttaatatcccaaatgattataagctaattaatcactttgcaaagcaatctatatctcaaggcaactttaaaaagaacatgttcatcaaaaaaagaaaacttttaaggcatctttttttattatttcagaatggggactttatcagatggaattattcttcaaacgagctatcaatctataatagagctgtagagagatatagatatatggcatagctaggtagccagctaaggcatatacatatatagagagattgaaatcacaagtcacaacacgccaactactatagataagacttgccacgtcttcttttatttttccttcctttcttcgttctttcttttcttgtatttgcacgcgtagtactctcaatcggcaacctgaaaacaaaaacaaaaacaaaactttattggttgtggttaataataataatgagtatgatgccaatcaaagcctatacatatagctggttgtgccaactaaagacatcttttcaagaagaataatataaagacttgtagctatgacatggtagagatcaaaagctaatattacacatcaaacctcaactcaagtctctcttttagttggctttgctaaactactgataaaaagcacgtacgtacgtgaagcgaaagctcctttaactatatatggaatacatgatttggcacactataataagttttacttgtgaatatcgtgtcatttactactggtgcgcatagatctaatcagcacatgcaggaaaattaaaagagctgagatgagcttcgaagtgagggctgccaaatcaaatatatatatatatatatatacatatataactatatattaatactcttatattcttaactttattatgttgagtttgtttggttacgtttgtttcgaccttgcaagtcatgtgatttactctagatatcttcttttacctttctctctatttcctaacttttattactttactcatttttacccaataatggttttccatgaattaatatctatgatcaatgctagagaggtaccattggtacttagcattaagcatattctctactactatattattattacagtgcaattaagtattaaatctcataaaagttaattaaataatttttaaaatatagttaaccaattataaggtgtcatctctaagtcatgctagacacaattagtgcccattaacaatattctctctatatatttaattaaccctggaaattagcaaggctatattttgagattagtcaatccactacaagaaatgttacttt

SEQ ID NO: 256153 - DNA, 7493 bp, Cannabis indica
gagactctaatttattgcctttacacacacaaatcacaaataaagaaaagggtatctctttacatcaaaaacactataatgaatgaaatatgggaacatctgaatgcgtaaatctcagaaaaataaagtaaaaacgccagaatctcagttcccgggttcaatttcggcaatgtacagcgctgaaaaacgctactgaaataaagcgttacagagactctaatttattgccttcaaaatactcaaataaaatttcataataataaaagggctcagagattataaaagtgtttgcatcaacaagctcagtttttcaagctttcaaagtttgatggtataaaaatttagtcttcactgccactgtaaaataagaacaattaaattcttaatgacaaggcctcagaaagatttgtaagatgattacatcagacatcagatggtacggacaaatttggaaaaatcactggccattgaatcatatgatttaatcatgtaaagaaatcaagacaaatcaagaaagaatcatacaaaatttgtcaaaataacaatgtgaaatactaaaatttactctataagacaacctattcatggtcatttctgtaactatacaaagtgattattttacaaaacaatcttgcattcatattgattatttatacaaacaaacaaataaaaattttcagattattttcacaaaaatagaagaagccttcatatactatccagcggaatttaacaacatgaagtggaatttgagaaactataaagcttcccacaaaatcaccattcaaatatccattcttaaaatcaatcataaggccaattagaaattcataaaatgtaaaacatgattgtatatatatatatattcaataatgcatcagagagattcccaacgacaaatcatcaacacttctttaaggaagttctgatgtccctgtctaattttatcatcacttgcataaacataacatacaaaaattgaaattgaaatgcaaatacataaaaaagatccaaaagcctcagattattgtaatgaatgaaagattggtactctaatttgagcaaaaaaacacttagcttcaaaagcctcagatttcaagtatttttcatagagatatgttgagtgtacaaacacaatcaatacatttataacaaaaaaaaaatattgaaaattggatatgaggaaaatgattgttgaatttcaaccaaagaacatgaaacacaactgcccactttccccaaattaattttgcaggaaactctttcggagaatatgcactgaaattagcacaatgccgatacacacaattcctgctttaattaaaaatttaaaacaaaagaacaaaaaaaaatcatcaaaattattattatttctgattagaaataacaaacgtataaacttcaacaataaaaatacataaaaatcataactttattcaaacaaaaaaacaaacccagaaaagggatccaataaaatatagagcaagaaagaaaggtttaagctttggattcagttttgatattagggttttgggttgaaatagctatatatatagtagtgaagagctagggttagctagggcaccaaattgagtggttttgataatagagaaaaagggaaagagggtattttggtcgttttctcttttaaagaaaagttaaaaaataatgttgaaagtgggatttgaacccacgccctttcggaccagaaccttaatctggcgccttagaccaactcggccatttcaactcttttgttaagagaacattaattaataataatataaattatttgttgatttgaacaatgaacattttcttaatctaattagagtttaatttaacaatgaaaaaaatgggaaattattagtcaaagtagttcaccaaacaatttttaataaatgtgtgactattaatcctacaatgaacatgaaaaagagatgtttcgagaaattggataataaactaggatttaagaacgtggataaatcgatttaattctattacaaacagtcaattcaatcacaatctaccgttaaatattaaatatctaattggattggttctgatgttagataaagtgtttttcatttagaagaatttctaattgatgtgtgactattaatcatacatcaaacatgaataagagcttcacaaaaattggataacaaactagtaatatgttctaacaaaaattctaatttattgcataagtgagatctcttagataataagaaaatcaaactaaacagtcatgaatcaagagagttaataagtagtgtaaccattacaagataacaaaacttgtaaattacaatttaaaccatctaaaattttctcaaagttgtctagtactacaatatacaaagtcatataacaaaaaaaataatctacctaaaaatcttaatagtaaagaaaagataatcacaaaacttcacctaagcttattagtacaaaaattttattttaaacttcacccataatgtcatagaaccctaagaaatgtgtcaaaataagtccctccctcattcgagctttcattagccgatctttctaagtgtattcacgtacgtatagctagaaaatgcgacgaagagcttgcgaaacctacaaaaataaagtcacattttcgagttaccagacaaaaaaaacatagtacaacgaccattcaacgactaaaaagagaagcatgcttaccagacccattggcttgaatgttgtgccattgcgaggaaactcttttgagtatgttcgtttaacaagcacagtgtccctccacccgagagtatggcatacaagtgggagaaccatacatcgagcggtccactatatttgcgtactatgttggtgctcacctaagagaacaaaacaaatagcaatggcacctcaataagtaaaataaatcaatctagaagaattgataaagaatgaatgaagttctatagctcaaaattatcaagccctctaaataattagatttcaaatgagctcatgtaaaatttgtctctcgttctaagaatcattctcttgattcttttccaaccgtagtattattaagaaaatagtaaatgtcaccccacacccctctattcacccctctattacgttaaatgacaatttagatcgaaataattagatttcatataagcatggaataaaacaatgagctcatgtaaaattttcctcttttcgaatcatcctattggttcttttcctatcatagtattattaagaaaagagcaaatattatatctatcgaccattctgttttgttaaacgacaatttagatatcgtattctgtaaaaatgaacataataatacctcaaaccgatttttgccaaacatttttatccctaaactctaactattgtgacgtgatttctaatctatcctaaattgatccaaatggtatatagccttaagaaaatatattattagtatgagaattaaagtacttggatcaaaggtaatcatgaaaattccaaatatgagagttggggaaatgtattttcaaaggaaagaaaatgtacaagttcccatgcttcaatgtccttttgtgaaccatcatacaagagccttctgcatacaaagataaaatgaaatctcaaaacgaggattattgaaaacataggttaccaaacttgtttctcgagaaaattcagggtaccaaataagtatattccttattctgaatatgggaatacaaagaagataattaagagaaagaactgattgaaaaaaagcatgataatcatcaaatttatgtactcatggttgttataaaatccgagaaataattttttctcaatccttttgttgttgttgttgtttttcaattttcaaggaaaattttagaacccatttacaaagctgaataaattcttttgagaaatatagtcagctaaacagaagcaaagttccgaaaggtcccttcagctgtttatctcctagtacatactacatactcgacattcccatgccaaaatggtgaagttagatgctttcggtacaaaactgaatataaaagtaaagaaacaatatttacatgttgatttcttgttcttctaaagattcacttaccttaccccatcatgaacatcgcgatgattacaatgaccagaaacaccatagttatcgaaagtaataatctgaaataaagccatgttaatagaatttcagaatcaggaagataaaaaatataatttgaaagattagaaaaggctttcaattctctagaatttaggagaaacgttaaacatattggaacaagaatcttacgaagtcaatatcatgatcgttaacttcttctccgataatcttagccaaaagactatgattccatgtttttccgaaaccatcctaatgataagttgacatatcaaatcatagacttctcaagttaaaaaaatcaaacagcagtaatacatgtgtgtgatgctgaacctgaagatctggatggtctagaaacttcacatgttcaagtggaacctacaaatacgattatgaatgaattgtaatgtcacaacatggtctccttttcaataacataagttctacacgcaaacacgataaattttttggaaaaatcgatgaaagaaagtcagcagaatggaaaatgtattggaaagctcggaccaaagataggaaagagaactttggaaccttaatggtctaacaaagtgtatactttagaagactactttatttagtgattaatattattaaccgagcgcagttgcaaatcaccttaaggactgcacaggcacggtagagctcttcttttcttacatttccctttccatcagcatcacctacaaaaagagcaccgaaaagatgctatagaaaaaccagaagacattttcctaacaaaactataacacactcatacacaacaagtaagtcttcaatatatccaccattggtgattctagagaaacaatgttgcaataaatggtaaacaagtgctttggatatagccataaacatcatagtaacaagaaatgaaaggttttttttttatataaacatataaactgagatcgtttcagagctaacaagattcctctttccggaacagaggaaggagggggatacaaaaattggaagttccactttcgaagagacttacgcaaagcaaacaatgtttccatagaccatattttcctccaacgcaggttcacattcactttatggaacttgcagcttaaaaaattcaggttggagaagtgtacgcctcaagcaccgtatagatttgttagacactaaagtaaaagggggtaaatccatctttgttcttagaaaactgatgcgatggcaatctccggttggaaagaaacaaaacaacaaattttttgaaataagggaatctacaatcgagtctttacgggagaggataatatgctgggtaactataactgtttacaatgctaaacgagtttaaatgtggaaactggaatagtttgttgtaaaatcccattctttttgtttctatttttgtggtttttctaccatatttttttcattgtattttctccaaattactacaaattatgcttctaaggaaaaaaaataataaccagataaactgaagacaaaagaaacatttgatgagggattcaacattttctataagttgtgtagaaaaaccattctttgctttggaatccaattcgaactaatacttgcaaattgtaagaattccatcaaagaaaaagcaatataggttaccaatcgagaggcacaatatgcgaagattgtactttctggaagtcaggtagcttattgttggagaaaagaacctgaaagatattgcaaatggtttcaaaacacacatagcataataaaaaatacctcaaataatttgagattcgattagcacaacaacactaactatttcacttttttctcttccttttcctttgtgggtgtgtgtggctacatactaattagtgtaaagaaaacaatatgggcagcgtttaattatgaaccgttcaaaattgctcataagatttcaatgcttacatagactcgtcatccgggtgggcaacaaccagcaagacatttctcttattatgagcaccacctgcttaaaagaagaagtgttttcaaagcataaaaaagataacactcattaagtgagttaagatacattgtgagaaagcatatcatttcatcacccaccattaggggaaaaaacatcattggaagatgagcgtgagccatggattattctgaacaaagaagccaaccacagtgcaataagagaactaataatgacaagccaccccatttagaatgaacctacaaacaaccaaaaccaatgaccaacaaattttaaaagagggcaacactattgcttactactatatattatcatgtatatgtaagacttttattttaggtttacattaacattctaattcatcaaatcttccaagttaaaagtgtggatattttcccaagtctcatcacaattgtattttgttctgattacaaagatttagaaagaaaagacttagttaaaaattgcagtaccaatctcaattatctcaatggatcaatcaatcagacatattttgtattatcattgaattactacaaaatttgaataattcatcaatcaaagaagtactaagtaacaacacagctgatttagatcaaaaggtttctactttcttcaatctacaatgagttagtggatatagatcacctaaaaaggaaaactttttgaaaaccccaaatagaaaaaaggaagaagaaagattacctgaagtgattattcttctttgttcgaaacccatgtatgggtttgcgccaactctcccaaattcatcaaatcatcttctacccagcgccacactcttaagctcaactcatcagaagaaaaagagattcgaatttttcactttgagatcggataaatttgtcaaacaaacaattacaattactaaaatatgtaaaatagccgcacttaatttactggacgatgatggtggcactgtataaatttattttagcaatgatagttttagtttatagccaccacaactcataatttatgatagtttttgcatcatagaattttattttactaataaaaatttggaaaattatttcatatattattatttaatttttctttaaaatttatagtttaatttattatagtaatttttatttaagttattatgtaaattttaattgcgatttaaattacttcgttaattgctatataaatttttatgttaatttttgtaaatataaaaaaaaaatgttttaaaatgtaaatgacaaaataaaatttattttttaaaatagtttaaataaaaattctaagttcaatttttgataattttttttaatttaaaacaattcctaacatgaatagataaaaaaaaaataatcaattttatcataattcctataggtcaaattattattaaattttattttgataaaaaatcagtctaggtcaaattattattaaatttta

SEQ ID NO: 256154 - DNA, 2101 bp, Cannabis indica
atattcttttatttttaagtatattctgttaaaccaagaaatgtcattagataggcacttttaatatataaaaatacgatgagtttgcctctgatcgattgataacttcgaaagggtgcaagatttcattactttaatgaataatttagaatataattctcccattctcttaaaactatattagctaaaatattaaaacctataatagaaatttcaataggataacgactataataatataaaaaataacaaacattacaaataattttcaagaaatgtgtgcgaatacaagtaggttgcttatccctaaaaaaattaatagtataccatattgtagaatttaaatcatcaaagaaaaaatgatatacaacaaattacactccacatgttctctctaccaccaacacaacaatcccaaaacagaatattaataattcaccaccactgtcagtacactaaacacattattatacaatacattcatatacactacacatatacaatatatacatatatacattatcgatattaattttcctaactttaaatacataatcctacactaaacaaaaataaataataataatatatttctctacattccacatacaataaaattatataaataactttctaatagtataaacataatttcttagaatcaaatattttcggattaaactatataaaacaccaaaaaaataaaaagtataaataataatacataccttattttgaaatcgccaccaacggtcaccactgcccaaaaaaataaccctatatcaaaaaacccaaaacaaaaaataattgaaaacattaaaataatacaatgaaactttcaaatataagtatgaaatagagttttacctaaatacaagctaataaaaatcaccaaatagcttggaatagcgattttcaatcacaccatcatccacttaaaactttcacgtaaaccttcaagttactttcacgtaaaccttcaagttttaacattaaaatcctaaaataaattatttttggtactctagattggattatggctcgaagaattaaagatataaaaaatggtggaaaacaatccagagtcgtgaaaattggtccgatcaattggtggtttcctttagggttcttaaaatttttagttgaaagagtgaaacagagaagagagaaagtgcagaggaaaggtggcagaagatattataaagcacctatctctttggttattcactgataaacaatgacgtaggtctttgattatttggggcttctcatctccacgtaccagcctcgaaaatcaccctccttccttttatctttggaaccaaagataaaactaaaattttattgagagtcgagcaaaaattgatgaaacgagtccatatagacctatgtctttaattttaattttttttaatgaagaaattgaatacaaatgtgttaattataatagtgtcaaactagtcgatccctgatacgaaataattgaaggaaatctagccaagttatgaacttgtatttttggtagcgcaaaatctattccaaatacactcatatataccaaactttgtgtaagttgtccctcgaccaaattttcaaacaaagttgagaaaatgttgaattttctacttaacttagccagtatccattttggtttcaataatatttttatcctcaacaatctttatgtaaagaaatgttccacacataccttctcaaagcacccatatttcattgatcaatgtatatatatattttttttttatgaataagctgatttcattactccaaaacaacaaatgtacactcaaagagcaccctcaaataaaaagagaggatctcaatcaatactatttacaaagaatcaaaccaaattttatcactattggacaccttctttggccatatacaagatattctactctttgttacactttggacttgctgaaaaatcacattacaagtgcccactttgccttcccacaatttcccattacggcagcaccacacttgataaatcaaggcagcaagagcagcagcaaaaactgctcttttgaacttgctaccctttgctttaccaagccaaatcacaattctatccact

SEQ ID NO: 256155 - DNA, 3578 bp, Cannabis indica
gtttttgtaatctgtagggccataggtggagaaaagatcagccaagaaccagtttttccttctggggttacaaccaatgtccttacataattgatcattgatgtatatttgaagcaaagcaattgaacaatacctcttgtagctacaaccagaatatcttttcatgcacttttcccacctaataacatcttcttccatatcctttacacttggcaatttgaatttttcctcccaaaaactcagctacccatttgctctttatctctgtgctatacaagcttgctggactatcactatatccaagtattgccagatttggaatacttggatgaatgcattccctgttaaatgaaagaaaagaaaaaaaaaaaaaacccaacctttgttttaaagcacttacagtacattgtaaaataccttttaaaattatcacggttttcactttaatcttttgttgttcccttattttctgagtctctcaatccgagaatgcgagtgattcaaaagtatatgagtccacataaagtataaacataaccatactcacaacttaatgagttcaggaccggttctaaaggtatatggggtctaaaagcaaaataaaaattttgaaagcgctatatatagtctaattattatgaaaataatagttcttatactttgatgtaatggtaaagcttttaaaaattcttaagagctccaaggtagaagttgggaattgatcacctcttagatttaagtaatattctttaccactataccaaacaatacttgttatattttcttaatatttaatattttatctatatactaatttttttttttcataatttcgaaccctgagctttcaagggcctgagagttacgcctggctcgcctactctcagggctggccctgacaatgacatcagggctatataaaaaaaatattaaaaaaagagtgttatgggactcaaacccacactattgagtaatgtgttatacactccaactaaccaaactgtgaatataataagggctttcattgtttattttaggacccgaaaagggcctagtctgtctatacttaggcctgccctgaatgagtaaagaagaatttatgtaatgccaaaaactatagtagacaaaactagacagataattatcatttatcttataattaaagacttctaagcttgattattatatttatacctgtataagggagctgaggagccaattatgcatttctggaaatgcaatgatgcaaagatgtttttgagtttctgatcaggtttgtaaccagtagcaaagataacaatgtcagagacaagaggtgtagattcctccttgtctataatcaaaccaactttgcaaaagctgaaactaatattgaacttcttgagtatgagacttccttctcttactctgtcatagaaattaggaggtgtaatagcactcatacatgaaaatatctgttgaatgaagccatgatttggcaccatattgtatttcttcaaagggtacaagaatctcagaaagtgctccactatttttgaatataaccacagctgaaataagaaattatataatatatatattggtcaacactactgtatgtaaccttaacataatttacattgagtgattctgaggtcacttaattagtgtgaattcaacaaaattattttgctgatttcaaacttttttagtgtagcaaattacctttatattatgtgtgaatttatctcatgtataaactgaaagcaacaaatttggatttgttgtttactaaatttgagttaaataaaaaagtagtgttaaattgacattttaggaaattacacttaaaattagattttaaaagttttttattaaaatatgacagatttaattttattcattttttatggcatgttttatgggcttaggttgtaaatgtctttctaaatctatagttaatgttttaaaatttctttaaattagtcaaatgtatggaaattaattttttcatcaagaaattggattttttaaaaaaaactagctttgattatataaaaataaaatttatatattagtttttaagttttttatggttttcattcttatgattcattctatatttttaattttttttaagatatcatatttagtacaattaagttggcatgtcatatattatattgaaactttggccaaaattaaaagagaagggccaaaatggttataaatccttagatggtatgagcttaccaaaggtgaaagcagcaaagcgaagaaccattggaagaatccttcaatgggtttgtggatcatcaattctacaaagcgattcaagcatttgaatgtgtatgccgtaaagtaatcaggaacagtccagtgaactgtcctgaacagaagtgtacaagggtactcgcctcctaaaatcaaaacattattataatatgatcataattaccaaatcaaattttctctgttttgaaccaaagtatatatacatataccattggatttagcaacttgtgcagccaaatctagtgctgatttttgaaatccaaccacagtaaccagctttcctttgatgaactcagcagcagcttcatagtccatggcagcataatccattgaatgcataaccacaccaccaaacacctcaggccctctgtctattccaaaatcaggaatgttgggcaacccactaaagcttccaatgcatacgatcacaaaatccacttggtataccttaaattacatatatatttaggaaatcgcaataattattaatttggcttaaaaatgaagtactagatagatacctcaatgggagcagatgggttacgagaatcctgaactgtaacattccatttcccagatgaaaatggttctccggagccaccccaaaaatcacagatggactctgaacaagaataggagatatcgataaccttggtgttgaagttgatcttgttgaggattttgaagtgagaaacgtaggaatgaaggtagtccaggacttggttgtgatctgggaaagtggctgtcacagaaggcggccatgcaaagtcggaaaactggtaaaagggtcttggagtctggagcctggtggactcaatggttttagaccaaactccaccgatgcagctctgggcttcgaacacaactgggtctaaatcttttttctccagacagtgtttgcaggccaatagtccactgattccggcgcctataatcgctattttcctttcagccatttcttcttctttggtttcttttttatttaattgtatttttatttgtgatagtgtggcaaacttacagtgtgtttcctggcaagcatggttattgggcagtttaacgtgtctaatatcacacacaatgtgacacattctaagtaattaggggttttttatattatttattaaatcgtgtgagatttattatttgcataatagtgatatgtcatttttttttgtagtacttagtaccttcttagcattttcttttacggttgagctcttagaacactcacattaggtgctctaaactctttcatcttaaaattcactactacaaatatcagaattcgcgacagtcctaaa

SEQ ID NO: 256156 - DNA, 1722 bp, Cannabis indica
ttccaatgttgttgggcacaaaacatgcaaaatttatgaaattctaaatatgacatatcaaatgcattcttaattcaaataaattatcataaattaataatttaaaactaataatcaagtttcataattaaaccccaattatctgctaatttctaaattaaagctaagcggtctttacattaatagcctccaaacacttcttgctagatgaacaattaaaaaaacaagtgtttaatgttttcatttccttctccacacatcaagctaagtctcttctacataaccaaccacatgatgaacctttgttttggggtcattaatttttctacaaattttctaaaatatactttttcttcatgttcaaataatacctggtgatcaaattgaatagtataattttgtgatatgatacaatcttggctcatcttagctttaatttctttttcacagcaactaatcgtttctaatactaactccagtacttgagattattttaatcccaccaatttttattcaccaaatacacactgtttatccatttgacaaataaattattctttctttttagtaatttcccacaaatatttctccagagcagtcacattctaatcttgtattcttctaaattccaagccaccccttgccttaggcaaacaaataatatttccacaaaacaccttacaaattgctttcatatctctaagcaatttctttcgtaatgtcataagctgagtccaatacgagtgtatggaaattaacactagattaatcaatataactctacttatataagacaaaattttagagctctaaattctaattctgttaatcattttatccaaaatacaattacaatcagcagatgaaattttcttagagcaaattggtattccgaggtacctaaaaagaagatggttgcgggaaaaagatacctcaagcactcgagcaacttgaatttctgccattccattacaatatattgttgtctttgctgcgttttttaatatacccaaagtatcagaaaagagtttcaatcctcttagcatgagtgaaatggatatgccgtcccattgcaaaacagtaataaatcatttgaaaaaaaacacaagtggtttcgttttaacattgaacacttattatgatatttaaatcttgaggttttttgcactacatgtccctaaactatatatgatttagcaagttggttcctaaactttttttttttggtaaatgggtccccgaactatataaattttggcaagctggtcctcaaattttattttttgataaattagtccccaaacttatattttcttgaaaacataaagtcatcacacttaaatgatagtattttattcattcattcatttatttttgtattaattttaaatagttttatattaatatattataaaattaaatatatattttttatttatatgtatattttaatataccaaaatattaagaagaaaagaacaattgaaaaagtttaaataatatatattttttttatataaacaactaagtaaattatattttaaaatttatttttcatttttactcccaggcgaacccatgaaattttagcagcgtttatgcaaaattaaataatcaataaatatatacaattaaaaaattattaaaattataataccacatatttataaaatcaataatcaaaatatattataaaatgttaaaaatataaaaaattttgaa

SEQ ID NO: 256157 - DNA, 4547 bp, Cannabis indica
attattttttaatgtaatttttattatttttgaattattttatgaatattataaacatgtaatttaaaaggtaaagtgtaaaaaatttaataatagttaatttcttaatccccaaacatgaagatgaagatggttgagtgatttatccagagtggattgggatttttgtcctttaaccaaaaaaaaaagagtaccggtgcagtaggaccatccatccatccattctaaacgtcaccaatttttgtattgtaggactcatcggactgatctatagaatgaccaaaataccccttcccataataaattccagtcttgtccggtgagcgttggcctctccggggccacaggaactgtttgtggttcacattttacttctcttcttcccatgccccatgtcccaccctctcccactctctttctctcttcttcaaaacttgtaagttggacccctctctctctcaatctcggttagtagttactgagttggactggattttttctttttgctttgtccaattttcaaaggctgttcattcaaccactgcactatttccctatgtgggttaattttctttttcatgtttaagttcttttgggactggaaattttttcttttcttgttctgtcatgctattggtcactaccgttctgtatatgaattcattggaaattatagtgctcttcttttttcgggtgtgtttgtgcttgtaaattagattatagtttatgatccataacacttttaattgtttatgttagcttttatcaattaatatcgtttttttttaattttttgtgattgtgagttcttccttggaccctgatactgatatagctatgtgtagttgctttttaagtgtctaacaagggttatattgcatatgggtgcccatgacatacggttgtaaaaccctgaacatattttgagcgcattgatctcttttggaaggaaataggtatctggaaaactcatagttcattctaccccctgattttgcagttcctgatttagagccatatatctctctccacctgcaattgggtaggcagtgcttcacatgtatgtaattttaatattctctatctatcagttcaatgagtatcaatttgctatttctatgttgataccgagacattacaattcttttatttttctataatgaactatctgaaatgattagtcttaactttagtacaccattttggacttgtttagacacatttaggcttttcactattgattgtggaactctaaatcatttatatgtttcctgaagtaaggatataatttgagcaattatgtaatggtactatgtagattctatttaatttgtgttttaataagttttctatttgatgtatagactgtagttcatattgaatatagttacccccatattatctctactattttttcaaaaacccacaacatgatatgtaagattgaattcattaatcattattgttttgctctacagattaatgctgtcttgagctaactatttcattaggcccgctccaattttatcgaagttgttccaatggcacttatttcaagcaaggtgtcaagcaactcaacatcaacgaagattgcaactctttctaaatcacatggaattcaaaaatcatttgttaagtcaatgcaacaaaataaattacaatttacaagtcaatcaggtgaaccaacacaactaggccaccaatgtttgtcaacaaaaatattttgttttcccaatggtactttgtggcacagaaatggaaaaccatcgagcttcactgtttcgcgaagaccctccatgttatgcaggtcgagtggccctcaaaactctagaagaaaaggaggtcttagaacttgtgatgatcatgaaataagtaggtaagattaaataatctttacggtccatgaagaaatgctgatatgcttaagagtttaattattaaaactctgtctttgtttcttgaactacagttatagctgacacttttgtttacaatatttcattagctctagagaacgtaaataccaaggggctcatttatgcttttgggatgggtaatttctaacttgatattagacttaaaggtcttgagttcaaatgcctacagttgcactccccaagtgcctacattgtcttctccaagttctccctactttccaagtagtgcacttttgaaaatgtttttattattttttttatattgttatacatttgtaatctgctttcgaccaaatatatggtcacgtgtggagtgtgggaatataaaagtaaaattagtcgttcccaatagcttttgagaaggatgtcaaactagtatgacttggagagacatgtgatgtgacaacttttctttggttcaatatgctatggacaactacttcctatacctggagttcagtagatttgttttctgtattctaagtgtgattctaattatttgtgatttattgttcttaatgaatatgcaagaacctagctatgagaaaatgaggaagagaacaataatcttataatagctttgttattttgaatgagaatttcagatgtttttgtgctatcctaattgcttaatttatatgcaaaacttattgatttacctttcttctatatacaacattatttaacactactttattaccttcaaactttattaacactttatttcaatacttttcttctatatacaacattatttaactattacatgaagaaatctgtctttcataaccatgtttgcatctttactcttctaattcaaaagtattgagaaaaaagatttaccttcaaactttattacaaatatcttttattaacacttctagcatatcagtgaccaaaatgaagatgagcaaccaatttcacccactagaagtattaactctacaaagggcttagctgaagcttgtaaatttgtatataatgacgcgaagtatgtcaacgaaagggctcgcaatgatattatcctactttcacggtactcgtcaacatttgtatttatctttcttattaaaagcttcaaatattgatcatcaaaacctatctccgtactttttggagaattatctttcaaaagagtaaggaggtacatgaaattcggattaatgggtctctgtcgtaggttatgctaaataattttacattcaacattggcattaatgttctcttaattaccctttaattggcgatcatcaaattaaatagtcaattgtaattatcagaggcataatgagattggatgctcgtgcacgacaaggcgttgctattcttgggtctgagtttcttaagcttgacggtgagctccttaaaccgggtcgtaaaggtctttgatgcagtttttgaacaataattttttaggtcgcggtgatttcatagtttttttattctgttggtagctcgagcaagggaggacactataaaacttgaccgtaatgtgaagaagaaagcagaattccttcatcatattgctacagtatgtataattgtggcttacttggaggagaatacttgctcatttatcatttattgtttgctcatatttggttctgctaaaatttgtagatcttgaaggacaaagcagagtcaagattgaaaactgcagctgataaacattggagcgatggagccttagaggtgcatgttctgtcttcgaattgctatttgtcaattgcatcctaatacatgtgatatcacagaactacactaaggagagaatgttttaagtttacaatttgattggttgtctatgctttgaagtagtgcctaatttttttaagtcaatttatgtttagttggcttgaaacgaatttgttttgtgcagtttttctttgtgctgtattaggtttaccttttggtttttgtatagatgcaaggtttgatcttaataatgatctaattcattccttacctttaggaaggtagtaagaatgctaataaaaagacaaggcacaatatttatacttgaatcaggctgaaggatcatcaaagaacaggttatgagtgtgttacccatggaaaatttgataaaattcccagtatggagccccttatccatcattttgtaaaagagtgataagattgacaatgtctgagagcaattaatacctgcaatggtggcatgaaatggtagagtattaaatattaatatgttcctcgtcacagaagaaacaacaaatggacagaagatgcagtttacattggatgattagtgttgtgtttaagagggaaggtgaagtattttcatcgactgggaaaggagtggctaaagagaaagaggggaaaataaattaagattcctagatcaaattaaaaagcggctataatcaagaaaactaatttgataatatattataatgcatatgacttaaatgatcttctttcttctttctgtcaagtgttttttctttttaagtactcttggtacacgtcaaactgtagaaccttcattctaaattttgcattatttttaggtctgatttgcgtcctcgctgacttccgtgctagcaacgtgcaatggagatgctctaatggctttagaggtgattttgttta

SEQ ID NO: 256158 - DNA, 5210 bp, Cannabis indica
tctgtacctctctctctctctctacctctcaatattttctctctcttactctcaatctcaatctgaaccatattctgaaataacaagccaaaatctatatatttagtcttaggattaagatcctaaagtcagtggctggaagattgaagttgtgaagtgagttaggcaataactaacttaattaactttcctttgagtgagatctccatgttagcataagtctcagtgcattcaggaatgtatgtgagcttccagataggatacagcttgctagagtcgacaatccagaattgcctttctaggacgaacaactagccatcaagaactccattccaaaggaatgctagcttttcttgaagacccttcctggaaggacaaggaagccttacaggacttgcttctgcgagtgaataattttccaggaatgacttttggagacctttcaattaggagaaactataccacataatagatgttttaaaaaatacatgtaaataaaaataaacaataaatcacttgtaatttataataacatcatactttatttctctatcaaattttaattaagattaattatattttaaattaaattaattataattaattatttttttaatttattactaaacaagattcttttagcaatttatatgttttagcacttaaatgattgaatgtttgtaaaaaccttcttataattttaaattattacacatataatcttataatttaaaattatttcacagatagccttataatttgaatttattacacttacaaaaatttagtttttaagtatttatttcaaaattaatttaaacatttaacaattaaacacaaattacattaaaaaataataattataaaactaatttgtaatctaagattggcgtaagattcaactcatcgatcatcgatcataggagtaaaatttgagtgtaggtttggtacgttggattatgtgatatcttccaaaatcaactgtttatcccttaattcactttatagtatttcttattttatttttatataatatcttgtatttatttgtgctgcaactattgttagtttgatcaagagacattgagatatgtagtcaaatcatttcattctcctaggtttcctataacttaaagtattatttatttatttattttggggaagcccagactggctgcttctttaattagttagtctactgggtttgtaaggaagatatgtacatctttgtagaaatagacttttttcattatgaattaaaccaaaaattaatcctcaacaaaaaataattaattttctttctttttaattttttcatcttctttgatgaacccctgtcaactttgagaaactaacaaagccatttcacaccccaactccaaaaagaaaaaaaaaacaaaattaactaacactatgaatgtatgccaaacccataaccataatcacactaaaaaggtggtatcattttaatacgagttcaaaaaagtaaagtgatgaaacaaaactatacagatcaatgaaagttgaaaaccaaatacatataccaatcaaaaccaaatttatcacaactcaaatcaaatcaacacccacatcatttcaacctccaatttgaaaaaaaaaaaattaagatattaaatctaaaattatattagtgctcgaaatctaaccccataattctaatgttagtgaggtgggctttgcttcagagatgcgactccacaacgaagacgacgccaagaaaaaaaaaaaggctctaggaaaaggtttgcaagagacgcaaggtggcaagatttgggttgcaaagggtggaaaagacgtagttgggctctttatggacaagaacattcttatctttcattattaatgtgtagaatcaaagttacaaaaatttgagtagtttagtcattaggaattattaaattaactatctacttatcatattgttggagaacgattttatcattcctaattaccatatctaattaaaaaaaacatgcaatattaacaataagtaaaaaaatataataagagaaaactctctaataatatttaattacatatatagaacatgcaaaactcaaaatttaattttacaacctagagtacatataaaagcttagaacaaataaataccagaggaccaaataggtagattgggataatatatatatatatatatataaacataaccattagatattatttagtgtaatcaagaatgaagtaaataaaaataaattcttttatgtgattgtataaagcataccaaaaacttctttgtcccaaaacataattatagatcatgtgttatgaaatttagtcataaaaagtagttgaattattctatatatatatatatattaatccagaaacatttttgggtgatgtgaacatcaatatttgacacttggtatgaaggatgattttatggagttgagtagacctgagtaatagcagtcaacttgagaggggaccatagccctgcgccaaggttgactccgggatctctggaatgaaaatttagacttcaataacttgaatctaacccactatgtttcagtatactataccatgaagatatggagcaaccttatacaaggattgggagctaaaattacatgaacctgcaacccagaagccaacttgtgtacctagagtttcacctggtgcctatgctgacatcctcaactagggttttagtttttgccatcgtcttcgtgcaaagtggccaaaagttttcagtggagcatcaactagacataccacagccatgtttgaggcatcaaaatcagattcagagcaagttagtttttgagcacctgggggccccagggcctcgagcatccagcgcctaggttgacaatttgttaatctgggtgtcttccaagtgtcagatcgaagatccattttttatgttgaatcttgacttcataaaaaatggggaaacaagtccttctagaggaaaactaacaagttttgggtaggaaaaatagagtccaacgtccaggttgacacatggggctgaccctgcacccaggttgacaatttgttaacctggaccacaaaaagttgagttttcctagaattctttcaataattgaacttgaaggggaattaaacttgagtgaccaattcaattctcttcgcacttccctcgagttcatggagaggaattgaacttgactgacaaattcaattctctttgcacttgtgatcctactaaagactactttgagggaagtatccactacaatgctcctaatgaacactctcatagcgggtctccccaagacgatcctgagttcattccagaggcctcaccatagttgccttcacgaccccatggtcaggagagaataacaagacccaggtcgacaggagcacatgatcaacctagaagacaaagagacctgtgtgacctcttgaagaaaagaagaatggtcgatgtgggaacttctaaggaagaccctatttgggtgatagaaactccatttgggacataaaccaccattcatggagtcaatcgagcagagttttacaccttagttgctttagagaaggggatcatgacacctaagttgtctgaatttgagctaacatagaacgactcaacactctccaaatgaatcaaagtccttcttattcctccaaagttcaagaatccttctgggcatcaatacactgtaaaggaagaaccaatatctcacacccactacttaaagtgctgatcgatttgcaaggtgtgggagatgacgtcaagtgtagaatcttccctggtacactaataggcctagcacaactctagtacctaaagcttccccttgatcgatcgactcctagaaagatctagtggacgcttttggtaatcagttcactccttcctaacaatgtcgaattgagccaaaagatttggtggatgtcaagcaacaggaagatgagcccctcaaagactacatccaatggttcttagaggcacccgctaagaccaaaagtcttcagtaggatgcaagggttatggcactcatattcggtctcaaagaaaccagtcctcagtggtccgacctttgtcttaaggcagtatacactatgaatgacttagatagagcagatggctttatcaaacttgaagaagccatcacccaagcaaaaggctcaaagggtggcaagaagaagttgccaagcacctgatattgaggcacaaggcaatgggaaaagagggggtttgaacagacgaaaaagagtcaacaactgtgggaagcaaggaaactcccccaaaggaaagaagcctaaaactaggggagacccttgagagattatgatcatcgcttcaccacctactcaattttcttagctctaagagaggagatctatacgaccacttaatcaatgtgtcgtattgcaaacctcttcctttgaaagagttagggaaaagggacatgataagttctgtcgttaccactaatgagtgtaatcagttgcaggatgagatagaatttctcattagaaactgctcttcagcagtatgtaccacctgaagctccagttggggcaaggctccactttagcctacactagttgcaggtaggttaaagattgttattgaaggccttcacttagctggatattcaaggaatgccttagaaaggtatgcaagagcactctgacatgaaccaagagccaaaatcctagaggtagcagaacgacctccaaagtctcagtgatacgaaagtgaaccaatcaccttcagagagtgatgcctcacttgtcaacaagttaaggctgaacatcagagaccggtagggatgttgcaacccctagaaatcccagaatggatgtgggaagatatagccaggattttatgataggactaccccgaacaaccaagcaacacgactcaacgcagagaactacgctgacttgtacgtacaagagatattgaggttgcatggagttccaaagacgatagtctctgatagaggttcattattcacctccaagttctgggagagtctacataaggcaatggggatgcgattgaaattaagtacaacatttcatccccaaacagatggacaatctgaacgcaccatccaaatactcgaggatatgcttcgagcgtgtgcactagacttcactggctcatggagtaagtatttacctctaatggagttctcctacaataatagttatcaagccacaatcggaatggc

SEQ ID NO: 256159 - DNA, 2149 bp, Cannabis indica
attcaaagacttatgtgtgagcctttggacacaggaagaattgcgtccatatttctcattaccaaaggttatgaatgggctttttgaccttgcaaagactctttttggaattgaaattgaagcggctgatggtcaggctccggtatgtatattgtccacttcatttctggtttatgtggattacttctttctaaaactcaaaatcaaaataatattcggttatctttcaggtgtggaacaaggatgttagattctactgtgtcaaagatatttcaggtgaacctgttgcatacttttattttgatccttatgctcggccttcagagaaaaggggaggtgcctggatggatgaggttgttgctcgaagtcgtgtgttgtcgcgcaatggcacatctgcaaggttgcctgtggctcacatggtttgcaatcagacaccaccagtgggaaacaagcccagtttaatgaccttccgtgaggtaaaccttaacttaagaatttgacaagccatttactaataagcatgatctattaaaaataaaaattgatccataactataataccattcagtgctaaaaattttggagagaagtgctacaagaaaataaaatgggattatttttattattattgaaatgaggctcccctctccccacctaaccctcaaatatttggagactcaggccaccaaattatagcaattgctatgtgggtacccatgcctaaccgtttgagctacccaattgggataataaaatgggattatttttgttgatattgtggtgtggagtggaaaatcatctacttcctcaagccctactatggtcccatttggggttattggagggaggagtggaagatttttttaacgtacatatttattgcagtgaatcacattttaggatgtattgtagactcactctggaacggcattgaagcatgggatgtttctatatgtgatcatcaagacataagattaggaattgtgatatcttttgcaggtagagactgtcttccatgaatttggtcatgcacttcagcatatgctgactaagcaggatgagggtttggttgctggtattcgaggagttgaatgggatgctgttgaattgccgtcacaattcatggaaaactggtgttatcataggtatatatatatttatacatatataaatttagggatttccaatcaacatggttgaattaggtaataattttcttaaaccatattaaaacttgctttatgtggtagggatactttaatgggtatagcaaaacattacgaaactggggaaagtcttcctgaagaagtatatttgaagcttcttgcagctaggactttccgtgcagggtctcttagtcttcgccaggtttgtacaatttttctttcagttgaactatcatttttttttgatattatatttactcttgcgagaatggtacatctagcttgttttatcaattcattgcttttcaaatatctagataataaaaattaccgtgacaaatatttttaaaattaaggtctttcatacaagttattgatattctttattgtcagatcaaattcgcaagtctggatttggagctgcatacaaagtatgttcccggtggctcagaatccatttatgatattgatcgcaaggtttctgaaagaacacaagtgatccctcctctgcctgaagacagattcctttgcggttttagccatatctttgcaggtttgccttttccttcccttatttgatttcaagttcaagaaatttttcgtcttagcaactacttatcaatatgtctctttgcaacttttaggtggttatgcagctgggtactacagctacaaggtatatattgcttccaataaggttatgatgaaaatagtccgcccacctttcatcttgagtttacctacagaaagaggtggcggaaaaagaaagaaaaaaaccaataacaaaacatttggaaatctgtaattgatcttggagcattgtattgttattattttttctatcctcatttttccaaagggtacctgcagaaaggtagcaggttggggatgggaacaaataacttccaagaagattctaggcttgtagctctttgagaaataaatatctttttctctcacgtctcctgaggcaaatttctatt

SEQ ID NO: 256160 - DNA, 2727 bp, Cannabis indica
atgataatccatgtgattgctcttttcattatgcgcatcatactctgaaacatctgaggtatttgtttcataatgatctcgcctctttttacttttcttcttgttctttgcatgtttctttttcctcgatctcctttcttcgtcctcagaagtagaagaaaactcattttcctccgactcctcaacattaggagataatatttgccttttgtgctttttcttcttcctggacttatccttagatttgcctgggaagttggttagcaactcagggatacctccactgaggaagcctacaaaacaaaaggtctattatcataaacatgttcagaacaaagacagtgatagcttgcactacaagattttcttggaaaaaacaaaaaatcacctccatactcatcaaatatatcctccgcaacaatttgttggttgggatcatctaacttaaagcctccacggggaggactaatgcctggtttttgctttagctcccactttagaggctgcagtcatgaaaacattcgaaacctcacattgtcttctaaaaagatgagactgatgtagaaagaagagatacaatagatgttgaattcttcagtcattatttctcaaggatagagttgtatagcaagaatggaaaacttttatcacagtcgaaattcttacaaaagcctctcaagaataattgaaggtgaatcaagagatcttccaactctgcaagagactaatcctgaaattccaaaaataccagcatatacctaaacacaaactacactgagtatatatagtacccaataactgaatctagtagctaatatctaacaatacaatatgctgacagccacaataaaattataaactaggtcacacattgtgtttagccttaccccttgcctaagtaatagaatcagggcctatcagggacaaaatgaaagatcaaactccttggtgctttaatttaatgtgacacattcttaaaagaccttaataatcctctgcccctctcttcccaaagtccacttcggacataatgatatcagcagccagtttaactatggcaagattctcttttaattttgagaccgcaatcatattcttcttctcacattatttccctcaatgacagttatgcttgtgtatctcgcccagcacgttaatcctaatggtgtaaaccttcaatcctctttgccccacactaaggcaattttataaaacctctcgaatcattttatagaggaaacggtaagattagacaattgctcatacaaaggccctcttatcgcccgagtaatctttcaaattaatccctcccatgagctattttttctttaccaactttgtatttctctcggcaagtgagtggcgaacactagtatcaaaactgtacttataaaggaaacaacaaaagtccacctccttttcttcaatgagcttgaaaaccctcatcattcaccttgttattattttgttttattttcatttgttataatattcagagtgggaaaaaaacctaatatacactaaccacttttatagaggtaaactcgagaaaaataagactaacctcactaggatctatgtgggcaaggatcgcagtcaaggggtcatctctcttcaaccggctctgttcattaggcattataacatctttcaatggacattcacgatcaccactttggtgaccaaaagttccacatctaacacatttaacattgcgtatttcaactccaaatggtttagcccttccagcaacaccagtctccaacctaaaaagatagcacacttaagtattcagataagctatggtgagagtcaaacaagatcctaagaaccaatatcagaattttccacatcaacattcaataatttatcatgggagaagctccgccataccgtggagcatttttcaagatttcaaattcctctccagtaggcaatgagcgcccgaaaacatcttttggcctgcgtttcttcttttcttcagctttagccggtatagattctgacggcctgaaagatagaaaacattccactacaatgttatgtacttttcaagcataacaaagaaaattgagaaatcacttattaatttctttgctacttatattacattgaagcggaggcctcatctgcattagggttgttttgctcctccattctcctttcctcagcaatctctgctgctttagcactttcagcattgtaacccggtggccgaacatacatgaagctcacagctttcattatctccaactaaaaagatgattaaataactaagttagcctaaagaaacatctacaaaaacagtattaagaaaaactcatctaaccctttttaaattcaaaatgcgacattactgtttagaaacgtcattgtattacgattgtctccaaattctaaggtactacgatgagagaactcgttcataatattatgaatacagaatgattgttgatattcaccaaaagcacagagccatagtagtacccacttgactaagattgacaaaaaccaaaaaccaaaaaccaaagaggacagacagatggagaagaactgaaccttttcttgctcttttttggataccatagcagcttggcgaaagaattcttgttcttgagcatactgaaaaatggacatgggtaaaaagttaagaaattgaaaaacagggttggtgatacgaaaaactagtggaaaatgaagcaaaaagtacctcgcgagcgacctctt

SEQ ID NO: 256161 - DNA, 7297 bp, Cannabis indica
ttgtgccttatgtaattattccataaataattcaatataagatatttatataattttctcttttttttcctttcctcattactcattagttttatttttatttttggaggaaatcaagatagagaataagtttcttcaaaaaaaaatagaaaattaggagggagagctttatttttgagattattttagaaatactcaaaaaaaaaaaaagtttaacatttttacataatactaatttcttttttacttttttacggtatttcattttctaccgttatttttggattgttctaaaaatacattattttttcattgcagaaatatagtacgtataatgttacaacaaacgaaaataatattatttttcctcaaaagaaataccagcccgtaaaatgtaaaaaggagaaattccataaaaacgtaaaaatgagtgattttaggtatttcatgtggagttccttccttttatttttcatctattatatatgcaatatttgaatcaaaccaaggagatgattacgaagataacagaattagcttggtctgagctttcctttcctcgtcttgggccgagtggttatatcacttttgagcgtaaagtaacactgggccaatattgggctggactatgacttcagttcaagcccaatcaagaaagagcgcaccaccaagttaatcagttagagttaggtactgtagtagttcctaacggtttcgtaacgaattcttgggaatattcaatctctttgtaaaataaaaaagcgcgcgaaacttgttttttcaacactataaatacagagtcttaacagaaattcatagaaccccaaacacgttaagataaatcaagatcgaaccccaaacacagaaattccaccccaaattcaagatcgaaccatgaaaggagaaaagaagactcttctttacctatttttggtgttcacgacggttttagcatacatcggagcacaagcgtcaccgggaaactcgagcaacgtgatcaaccatggcgatcggatgaacagtacttcacggtggaccgaaaagaatatattcgtgatgttcatcctagtcataatcttgattttgctcgttttagcatacatcggagcacaagcgtcaccgggaaactcgagcaacgtgatcaaccatggcgatcggatgaacagtacttcacggtggatcgaaaagaatatattcgtgatgttcatcctagtcataatcttgattttgctcgttctactcttgatacgggagctcctcaaatacaactccgacaatgaaccagctgggaacaatgttgtcggcggtgaagaaagtgttcagttaatcgtaaggtcgtctggtccagtcgatgtaaatcccgaagtgttgaggaggtttcctacgttacagtactgggaggtgaggaatttggtcaagattgaagaaggctttctaaggtgcgagatctgctttgaagaataccaagatcattcagagattacaataatccctaattgcggtcacgccttccatagtaaatgcattaatagagttttggaagaagatatgcgctgcattttctgcagagtaaatctgagtagagatggtgatgagtatcgttacaacacaaactctcaagaagatggggaaagcctttacacactgagattgcctttatgggtatgggtgaatatagtaaagattcgggagagaagatctaaaattggactgccgttgcgtagatcgagacagtagtagaagtatatggaagaaattattaaacaaatattaatggtacatttcaattgatgattctacttctacttctattactgttacgttatttattacttttcttttttaaaatttttcgttgaaaaaatttacacgttgcatgaaaactcatcaaatatgtaattttcacttaattaccattactgggataaaattggttactagatttgtgcattcaactcttgaataattatatgcttatgagcaactccatgaaggtaacagattatagccaaatacgggtttgcttggacaacttattttctgggaaatgttattcaataacaagatgattggcaaacactcaaaaatacaatcatttagatcacagagtgttaaaacaaaaatcccacaattaaatcattttaatttgtctaactcaccagaaaaaaaaaaatggcaaagcaaaataatatcagaaattttattattattaaagtttaagaacatgagagaaaaatcaaagagatgagaaatttcttgtgagatcaaaataagtgccttgatattactcctctagacattgcatatgatattcatatctttggttagatttttgcttctcttactactgttcattgggttgctattcttcacattatatggtatcttcaaggtaccattttttagagtctactactatctttgacctcttctctggaattgtgaacttactgtgatgcaaatcatgatcgtgatcccacagaccgaaaatttgtcactgatttttgtatcttttgggagattctcttatttcttgaaagagcaagaagcactttgttgtttctcaatcttctatgaaagccgagtatcgggttatgtcgtctactacaaaagagattatttaattgagatggttacttgcaaatatgggtgttattcactcttgtcctacttctatgtactgtgacaatcaaagtgtcatttagattgctcacaactcggtttttcatgaacacaccaagtatattgcgattgattgtcattttactcattaccattctaagttgtctaccaatactttgtcttttgttccttcttcgttgaagcttgctggtttttttactaagttgcatacgatttctcgttttcattttttttaggcactctcgatgcttcgtacagcaacatcgtgagtttgagggagagtgttaaatagttatttagggttagtttagtctttttttagtggcctatataaggcttttttattaattatattcttttatctttgactatgtaattgaataaaatcctaatttatctgcatttattttattttttattggttattctttgtcttcacaaataattatcaattttaatggtatgcataatgtattacttaatttgtttaagaataacatgtacaagtttttttgtgatgcagtaaaattaaaatatgcaagtttgatccaacttctacttccccttcttttatttactcataaacaaaagagtaaagagagttacaaactcatacgatggccagtaataaaacgaatcaagctacacaaattgttatgaaaaagggccaaaatacaatttgaaaacttaagtaaactggcctattaattttattggtgcaactgcaaacagtttaattagctcaggaaatggagctctgtgaagcattcctctcaatgcatatgaaattctttgacgatacccttgtagcatttctctcgatacatgaagtggtcacgaaggtggtggtcatggcaatggcggtggagaagtcgtggtcatattcatatgctcagttaaagaattgatcagctttaaattttaatgacatgtgtttcacttagcaacacattatttttgtataacatctaatccatatacagtatttccataatagaaaaacaaaacaccttattttattacatattattacttatacgtttatatgaccaagtctttgttcagttaaaaaataacttcaacaataaacaattgaagcagctatgtggaaaataagaacagaattaaacgaagctaaaaccattatcatcagcttcttgaggaacaagtacatcgaaatcacttacagtccattccgccgtctctccattacgactaacatagatttctgttccaacattgagcgaaaaccaaactcgctttgctggttctgttcctggatcctggcaaaatcaaaattcattggcaccaacttaatacaaatgaacataatccagtaatctaatacttgtaagggcaaaaagaaaattgttttcagctgaaaatgatcatacctggtagaaatacaaacgactagaaaggcctccgacatcaagctcccaagttctagagtcgccaatccacccatcaccttgtttttcaggatagccatggacagcccattcggggtgtggaataatctgtacaagttcctgtgcttgtggattgctataagggtcgcatatatcatatggtgcctccaaataatccccattcccagggctgcagtatagatgataagcagagtatggaaacctcgacgtgtcatttctgtatatcttctcacccgaaacagtaacatggtaggggggacaggagacgaggttatcagcacgacaccagcttgtggtagctggatttatgatcatttcgctatatctagtcacatctgtgagaacatctccatcacatggttttccattgttcttccaacagcttcctatgtctaggagataaaactgactgttggatcctccaccgcgtataacattgagtgttaatcttactttgaaatttggagagactggcaactgaaaacatgaaaattctggatttatgatatgctctttcttaacttgattcacaaaagaacacaatgagaaataaaaaaacataagcaaggataattaagcaaaagtattttccacatgccatttgaactaactaacactaaaaaactaacctttttcatgataccacgaccgttataatgataacctccattaaatcctttggtagcgtctgcacgcaggtataacataagccaaggatacttttgagatgttgtcagtttatgggagaaaatccaacttcctgaggtcaagttcttttcccatgatactgaaaagtaggaattgttccccacacctttgctcaagtccacatcaaggtcataagttccgaaaaatttcccacttaagaacaatggttgcatcttggaataaaacaacctcgagtaattgtgataaattagtggttgattcatacaccctttgccaaaacaaggaaaatttctgcctgttataattttgctgacctttttaccattttcaggacaaagtgtagtgttcttgtcaaagtttccatttttaagcataatcatccaaaactgccatggatcctgggagtcatgaacttcacaaagcgaaccaagataaagttccttttctactgcatacaagtcagggtccggatatggattgaaactcgttgcgggaaactcatcacctgcttttaacttgttgtctgattcatttactcttctttgcattcgacatgttcgtccattcatattggtgatatccaaagaatctggtaatgaagacataaaacgacaatcatctctgagaaaaaaaaagtctctaaagagttggctacttttaatgtacatacggtaattcaatgttagtctaagctttattgaacatagatttcttagttcaaattatttaacagtaagtcaagcagagacctattaactattaagcagtaagaacacaattgtttcatttctatatatttggcaaactacaaaggaaacaacttggtttcttaaatgggatgtttgtcttacatgctctaagtacagagtcaagaaatacaacataatcccatgagaaatgccaagtgacacctgaatatgtcaagcactacaacacgtgacatatcgttattggtgcattcaatattggatcccacacaaattgatttaataaataatagaaaaatatctaccaattaagaggtaccacatctaatgcaatcgtacaacacctaaactcttaccagtcagatttgtttttcaataatataaattaaacacataaaagaaaaaccatttgaaaaactgataagaatcaaattgaacaatatcatcagtaaattcaagtaaccatcatgaaaaatactttaataaatcataatacatggattaaacaaattactaaaatatagtacacccagtcaattatgagttaccaaactactacttttcactttcttatatcatactctattttatttatttatttatttttttaaaaaaatcacttctttcatattgagaaaaactagtaacctgattacttctgagttctattttactaagacgagagagaacataccagcactgggagaatagcaattgaaatcagcacagtcagccattcgagggctgcccataccaggagcttcagctccaacttcattgcagaagttccaagcttctaaaccaactctgacatttgggctcttcattcctgggtctccaacggctgacacgtaagatttctctgagctcagcggggacacgtaaacccccatactcagcaccaacatatccgaaacaaccacgagaagaagaagaaacaaccgctccgagtagacatagaacacgcaagacgctaacgccagaccaactactttacgagacgagtgtgtgaagaaggaccaggcaaggtggcgcgtgggctcgttgcgcgcatgctatgaataaaatggaagattggagagatgggtttttgttgatttcgtgaagaaacccatgaaagaaaagatcaggtgggtagttttttgcttagacgcgacgcctgagctagctttcggatttggacagttgccccgtgagtgtgaagtgtacaggaactagaagacgaagaattcagtactcggttggtgaaaaacgaggaaagtcgtcattttcggccttcatgagaaacaaatatgggccttagctttttggaccatcatgagaaacgaagaagggccttcctattaaataataaaaaaaaattacaccaaatactcatttttttttatttcataaatacacaaaaataacaaaaaaattacaaaaatacggtttcacaaaatttaaaatatttaaatgatttttttgatcttatttatagaaaatacagtctttttatgttgtactcttattaatttattgttaattttttgttatttgtatgttattttttgttgttgttttgatgttatgtatatgttattttcatgttacttttatgtagttttcttgtttttttttttttgttattgtttctatgaaaaactataaaaatgtaaaagaaattctttaaacataaaaatgtaatttttttacaaaaaaattgtgccttatttatttttttttttcttaaactttacatttatacgtacaacataaattttacatttatatttttcctacttaatttttttattttttactaatatttacttattgaagttaaaaaaaaaaaatctacttctt

SEQ ID NO: 256162 - DNA, 3895 bp, Cannabis indica
tatatatacatatatatttttacttctaggttctacatggactttttaataggtgtaggaaatgatgtttgtcgtgtataccaatgataagctctgaagtaggagcttggtgagacaagacttgccttgtatgtggctgatgggacaacacaagaattagttgtcaattagtattcatagggaaacgtaatgtccgaatagtgaatgatatcttcatttggagtgtaggtttaatttattgcctgtcttgaagcattcacctataatgttttgccttcgaaatcgtatggaacacatctaaaattcttgctgctatgtgatctgggaggcttgcatcttttcgaagagcaatgttaaactttgacttcagggttcctttggggctagttgtgagctctcggatgctttcatgccttgaagagaatactaaacatttattatgttaatactgatcatccacatgctcatgtggatcttgtggacacgtggctgattcttcaattcccacatattttggtaaaaattacgaataatatttacccccaagttctgactcataattttatgatttggtacttgtgattattctgaatttttccctctcgaagggtttgtaaggtgacatcatgcctgtgcaaagcacgcctatttatatggatgtgccacatgccctactgtgaatggctcgcacgttggtgtgcttttttgctcctcaattttgattatgtcgattctcttctctaaaattaaatccctgggtaagtcataaacggaggttctcagtcggatagtcgagtactccaaacacgtaaagatatggtgtttaattgatgtaggatatcacgtaaagatatgaacacgtgtcaaaagagtctcttgtgatctgttgtgagcccaaagtgccaccgatccaaaataatgagccttaacctccatttgggacctttcgactaatgtgtgccagtttccagtgttggagtctttgacctgtttcaaaatccacaaatttctcaacatgttcacccataaatttccctatatttggccttgtgggattctttcaaatgtggtgtttggtcctgtggtctcttaaaggtcgttcattatacccacactttctaagtctaaacgtgaggagggtgtattagagtaagccccacattgctaatgtgtggaaataaactatcatatataagatgaatgggctactccttctattgccaattggttttgagatgcaaccccgtgcatcttgtcctaaattctaacactcttttaagaagaaagctatctaggaattttagcagaggttttgtaagtaaaaaattattcacccctgcacataaaaatagaggtatttatatgcacataagtgggtaagggcacaccctttacctaactagggtttcttactccacacgcaagaaaggctaaaagcaccacaagatcatctaactgctggtttggtaggtagctcttccatcatatggtgtttaattgatgtaggatatcacgtaaagatatgaacacgtgtcattcaaaggtttctcctttaaaagtaattgcccagacaagtcgttggacaataagcactacagaggcacgtacgtgcacaaccacagtctgacgcaagggacaggatctgacttggtgtcagacgaggcgtaactgtcgggtgtagttccggagtaggccgtagggagcttctaggaagttcagccaagggcttctagggatagtcgattattgatcatctaggagtgcttgtgctttccatttccctccaaatagcgtaagcatcaaattagaacttcaagaatcattctgtccttcgcaaaggaaatattcttccgaatacttcaatatctttcgtgatcctatcttaaaaaagggtccgtgagatcattatatgatctgacgtggcacccttctgctgcttccatgtagaacccatccatgaacagggataacagtgattggtgttaaaaatcaatttttctactttctttctatttgtatattttatgttaggcgagatgttaactaatctacttatggtttagttaaataaattttactattgaataatgattatatttggttagaggagactctatttgatattttatactattttttatgttgttgtaaatgaatagttttaatttataataatagacatttttttataaagaaaagaaagaaagaaagatatttatccttagacttttctttattaaacaaaaagagttttgcaagacacgtaccgttaaagagagtagacaatatagcataaaaaaaaaaataacaattatataaaataaaaacacatcaaaaaaaattataaaaaataaaaataaatagttaaagcacaaaatggactctatacattccctatttctttctctaaactttctttctcaacattataaccaacccaactacaacctcctcctccttcttcttctactactagaaatgttactccataaccagaccgtacacttacacacgaaccctcctccactttttcaacctattcatgttctcaacttctgaaaaacctttcttcttcccaatttccaaacaatgggcaaagcttcaaaatggtttcgaggtctctttggcctcaaaaaatccgactactctgcctcctcctcttcttccagaccctccaaagagaaacgaagatggagctttgtcaagtctgtaagagacaaagaccacaacttctccaccaccactactactaacccaagcgacaccgcaacaagatcaaccgtgcgtgacggagaccgcgacggcgaaaagcacgccattgcagtcgctgctgctacagctgcagtagccgacgcggctgtggctgcggctcaagccgccgcagctgttgttcgcctgactagcggtggcggtgtcggtggcagtgttaccaccgcggcggtgcacgttagtaaggaggagtgggccgctcttaggattcaatcggcatttcgaggctgcttggttcgtttattactctcattctcttaatttgttattttagtaaacatataaaattataaatttacgatctttaaaaagtttactaataactacgattttgtttacggggattgctgtattgtctccaaagttttaaagtttaactctttgtattatgtgggcaattgacacgtgtccatctagttcatttggtttctgggttttcgtttattgctcttttttatgttatttgttaccgtggttttgaagcatgatagagaaatatggttactttcttcctttctttccttactgaatacattcatatattatattattatcaaaattttgttgtcgtttttgtctcattatctcaaaataatgcccaatattttagtagttttttatactccaatgctctactttgagctgtcttctcttgtccttttccacattattagaataggtaaaaaatctaatcttttctctcttataagaaggaacccaataccaattttttttttcttactaggagtatgcaataaaccgtgtggacctgtcttcatattttgttgttgctgtaatggtgttttaagagagtttcatttgttattagttgttagtaatggcatcaatggggcccatttataagaaagtctcctttttcagttttaaatatagtgggtgatttataatctccttgtacaaagctaaattctttggttaattaattgatgttcatgggattggaattatgagggtctttttataacattatattttgttatgttttgttcttattccctatgtcttgtaccacctcacagtttcttaaattggactcagtgcagggtttgtctctttttccttcttttaccctttgaataaactctgcttcaatttagtttttttc

SEQ ID NO: 256163 - DNA, 1481 bp, Cannabis indica
tagaaaatattactaatatataataccattaaattacatctaaaaatataatggctgacccaaattataaaccacaagattttgaatattgtagaaaattaggattaaatatttcaaaattttaatatggcatattaatttttttttaaaaaaaatagaagatcgtaattaaaacaataataatatatgttgttgctctttgataattataagagtgattaatgaattaaattaaattatataagactcaatataaatacactaataataatattatattttgaaaaatattaaactatatcttataacatttctcataaattaatatgtaaggttttggtgaatggtgttcctttctgtcaaaaaattatattatcatgctttgcactactttaggcatatgattctagttaggtttttattattctgtggaccgacgtatacttctgaaaagactccaaggcctttcgcacgcgtatatcaacttttcaacttggaaaacagtacaagtaaataaagacaataatatatttatttatatatataattattttacgtaccattgtttattaggcaccacacagatgttattttacaattacttaacgttaattttaaaaaattattataaaattcaacacttaattatattaataataatataatattctaaattttcaaagatggccacatcttttaacatttctctatttattaccattttcgtaatcgttttcaattataaatatgatatataccaactggccttggaataatgaggattgaggaagatatataatgctactgcgtagctatataaaacaataataaatacaatgtaattaaaagcctttaattttttatatataaataaatgtacaagattgatcatttatttcattatgaataaacaataccaaattcatccttatttcgtatgttactcatctcataaatgttggcagatcatcaatggcttgttaataagtcaattatattttaagtaaaatcataaggtgctttttttttttaaggaaaaaattgtcgagaatattctttcgtttagttttactacataatttatataatacatataaataaataaaaaaaataagagaacgaataagttcttttcttgatgttggactcttcttaactgtcttattatcatctcgttttatagcaaaaaaaattattattattattatgggtgaacatcaagcaggttgatcgggtttcggttttataggtttcgggttcaaaaaattgtacccagacccaacccgtcgaatggttcgagtttgcagattttgggctcacaggttcgcgggtctacgggtttgggttgaccgggttggccgggtcaactggttgaccgacaggttgacccggtcaactcattaatttattattttattaatcaaattttatgtgattttttctagatattaaattaaacatatacgttataaacttataac

SEQ ID NO: 256164 - DNA, 2551 bp, Cannabis indica
ctcaaatcttacttcaatcttaggaatctcaactcctaccctattagccccacaatattaaataaattataattacacttattttaatttcttggttaagttaaaagataatttcattatttcaacactccaaaatcagagacagaaaaggcatacttatatcagttggccttttctagtgggaaaaccattatacaaagcagctgggaataagttaaatccaacagagaagttgttgtggtataacaattacaaatcaacaactatttattttccatattaaatacaacaattactctaatttgaagagcacattacattacatgaaaataatgcaaaaacacaaaagtgaaaattaatgcatccttagaaagacaagaataggaaacttcttttcataacaaaggccaataatagtctagtttgtagatttgtaacaattttgcaacaagaaaatatatgtacaaaaataaatctaacagtaaagaacattatcagcttcttttttttcttatgatgaataaacctcttcattgaaaaacaaactaaacaaaagtagtgaccacaaagggagccagccagaagaacaaaccccatacaacctcgccgacttagccaagcaatcagccagaggagatggcattcagctcaccttcaaggacacccgaaatagagcaagtctaccgggaaaccataacattgccctgaattgcagctatgtcaaggccaccaaactcgtaaacaggcgaagcagcctgagtttcgatccatgtctaacaaccaataaagtaaagacaatctcataaaattaccactaagcaaagaaaactaatagaacacaattcataatctcaacagttatgatatcataaagtaactaaaatatgattcttttattaatagataatgtttctaaagaaggccaaatccgcatcaaatcatctttcaacactgactctctctcatagtgataatcagtaataactctaagatgcttccaattaagaaagggataattctttatcttcaaatcttctagcaaaagtagacccttcatccatgcaaaaatttatgaaaacatacaaacattaatacattgtataatagattaaaactatgaaaaaaaaaaaacacaaagaattaaacatacctcatatgagctaacatgtaccgtcacaacattccaagagcaattgagtttcacaagaaaataatataacatattagtaaaacattttatgtcattgtcaaaatgtatctccctactaactatttttccatttatcaaattagatgactccattgatatgctgaattcgaaaatgtcttcataacaaaagtattctaatcttggagctgattcaatttcaacataaatcgattcacttaaaaaggaaagtccatcataagtgaaactttttaagtgttgactcgaaattctaagacagtcggccgaagaagattggttgatcaaagtaaaattctccaaaagaggaatactagagataagatcttccaacgacggctgataacattctgcgtagttagttaaggagagatttctaatttttttgcatgaagagaaatttattctttctgaagaatggtatattattaccaaagattcaagatttatggcttcaacttctagttcatacttaatatctatatagttaagttccaagaacttaaggcttaaactttgtagacgaaggcgatcatccatacatgataacgaataattgattatgcgcaatttttcaagagaagggcaacacaacaaaaacttaaataccacattatcgtctttagtatttgattgcttaacatttaacaacgacaatgtttttagtaatggaaaactaaatgaatgactactatccaactttactccgctcaattccaaaatagtcaaatatcttgcgtcgtttagtattgtaggtaagcagtaatagaaagcatgagcttctcctcctaggaatagatatatttccttaactttattctcaacaacaaaagataacaatttatctagtaaccaaatcttacgatatccataataactaggcatgttaaacttaaaactagttatgctcgaatcatcaacaagatccatacctttcttgcgattttccatataattagagacataatcgtaaaacgtttctaggtcttgtctcttgacatacttaatcttttcgaattcgaaagagagtgtgggaactgaataccatatgagtttccaacgctttgaaagaatgcatgttcgaaccacatcttcagttgggagaaacgagagaatgtgatcgattaatgcatcaggaagtttcaaaattatgtcattatcatcatcaacaacacctcccaccattgatgacgtcatgatgatgatgatgattttatcactataacaagaaagagaagaaagaaaagcttaatccgtttgatgaatatatgaatataaaaggttaatactttaaggcctaactgtttttagtagttagggtttggtctagagagtgagatatatatacaaataatattttgaatg

SEQ ID NO: 256165 - DNA, 5214 bp, Cannabis indica
gcaaacaaattcccttttgcaagggatagaatggtggaattgtatttttggatattgggtgtatattttgagccgaaatactctcgagcaagaaaacttttagccaaagtcattgccttcgcctcaatcattgatgatatttatgatgcatatggtacaattgatgagcttgagcttcttaccaaagcaattgaaaggtctgatcatctcatccatctttttctaatataatttttattgtcttttaaatattacttataattgataataaatattcctattagccattaatacatatagtacccagtagaagcttacagaggctttatgcatctaggggtgttcataaatcgacccaatcaaattacagctaatagtcaaacattagatattgatcggattaatggatcggatgttagatgagctgttcaaaaattcaataaaatccaacattcaattgaactaattagtatttttatttaatttgaataagtaattagattttatgttattaattttacttaaaatatgtatgtatatatgacaatcaccattaaaattttacttatattatggtcaattaacacctatcaaaaatcaaataaaacaagaactgaagaactagaatcccaataatgacattaactagaaataattacaaaataaactaaatgaaatagaaacaagatctaacgaggttcattaccctttttatggtgactaatccctgggaagagatgccctttggctgagctttattcgatcttcaataatagaggaatacagaggagaatacaaagttaatctcatcaatcacttgagagagatgtgatcaaacacacacatccacttttacaatcccctcactcattacaagcataattatcatccaaattcctctctatatcatcgcctaaagaagtagtacacaaaaccttatataggtaactcaatatgagggggtacttttaattaaaaaaactaacttaggagctgactagtacaaacctattccatctaacaggtcactagatgacagtacacctagttactaaattctcccacaaattccacctattttagtcacgtggtaaaatatatcattatattcttttaaaaactttgactgttccacctgttgtgcctctaaaaaatagaggacttttagtgctcttcaatattcagaaagtttaggcaaatgcttaaactttctcttgttcactcttggttacactcttggtgaacatattagtcagtttctcattggtgtgaagcttatagactgaaatatctttactactaatgatatctcttataaaatgtagcttgatgtctatgtgctttaaccgttcatgaaacatgagattcttcataaggtgaatagtactttgattgtcacaatgaacaatcagctcatctatcttaatatacaagtacatttgtagaatacctttaagccaaatgacttcctttatggcctttgttgctgccatattcaatttcagttgatgatagaggaacaaatttttgaaggttagatttttagctcacacaatctactaaacactataaacagatatcctgttaaggatcttctagtgtctagattagcaacataacattgtccatctttcttcaatttgtctcagtcttgggggattgctcttcaaacaatttaaagggctgagctagaggagtttcaactagtttaacatcagtcatgacaaatgtctccattaccttattgaggttgctgccttggcttaacatgattgtacggggtatgtcccactttatctcaatccccaacatattcttagcctcacctagatcattcatctcaaactcactcttaagttgagacttaaacttatcaatgtttgttctatctttaccaacaattagtatgtcatcaacatacaataagaggaaaatatgattattgaaatacacacaagtgtcataattactttagccaactttcatcatgaattcatccaacctcaggttctattgtcttggagtctgcttcaaaccatacagagacttatttaaaaggtaaacattatatggatcatcatactcatagccttctagagtctccatgtagatcttttcttccgaattcgcatgaatgaatttcttacatccatttgatccacctcaagatcaaattctgtagctaaggaaagaattactcttatcgatgtttgcttaaccactagtgaaaaaatatcgttgtagccaatgccctccttttgtataaatccttttgcaactaaccttgccttgtaccttgttccttccactcctgcaattccatatttttacttgaaaatccatttacatcttataagtctcttgtttgatggtctcttgactataatctaggttttgtgtaaatcttcttgaataacttgcagtcattttgcaccatcttttcttgttatggcttctaggttattttttaggttctgcactctcaagattttcaactactgatagtgaaaatgatgtgaaatcagcatatccatacttatctagtgctttggtgatccattctttttttgtcactagccaattgatagcctctcagggctgtttgagcatcttctatggttgtagattcatctaaatcgtcttcggtttcatcaattacagatttggacattaagtccacctcaatctgaggtttgctactccctacttcttgagctgaagtaatatatgtcttctttaccatgatcatttgttcttcattgatgacgacatctctgctaataatgcacttcttgtaaccaggttctaaacaccacaatttatagcccttcccaccatcaagatagcctaaaaacaagcacttgagtgctcttgtcctgcctaatttgtgcataggcaatgcatccaaacactctcatgtgttcaagcttaggtacttgacctgtccacaatgtggagtcctgaaattcaatgggacagatggacatatattcaccgaataacaagttgtttttacagcttctccctaaaatgatcgttcaagacatgttcctttgagcatgcacctcactctctatgagagttctattcttcctctcaacaagtctattttgctgacgtgtgtttcacacagttaaatgcctagctattccatgctctttgcaagattcatcaaactggtttgagtaatattcccgaccgttgtctgttctcaacttcttaattaatcttgcatttggcctgatattcaatcagtttcttccatgtgacaaatgtgttaaaacgctcatcttttcttatcaacagaaacacccacacttttcctgattaatcatctatattactgatgaaatagctagcaccacccaaagttttgactctggaaggacccccaaagatctgagtgtatataggccaacctctccttcgttgtatgcacacaagtattgaattcaactctacaactcttcccataaattccctttcagtccaccttgaaacaagccttgtttttccattttttataagctctcactaacatgtccaagcctcaaatgcctagtcttgatgtttccaacatcatccttaccaactgctggagctgcatctccaatcactacatttccaactagatagtacaacccatttcttaacttccccttaacaaagatcaaagaaccctttgaaatattgagtgtatcattgtcaattttgagtgtaaccatgattatcaaacatgccaattgataaaagatttctctttaagtcaggaacataccttacttgtttgatagtttgactgacactattaactccaaaaattagcactcgctaacccttgggattagtcaagatctactagggagattaacaaagctcactttcagagttagccacgacaaggccacccgacatgctcattagcaacccacttggcatgaatgcaataagagtcactcgacgtgcatgcatcaagaatcactcagcatgcatgcaaaaagagccatttagcatgcatgcaccaagggtcatttgacatgcatgcaacaacaaccactcagccacaaggcctcttagccacgcggccactagtcactcgacatgcatgcaacaagagtcacttgacatgcatgcaacaagattcaatagacatgcatgcaccaagagtgactcgggacgcaagcaccaagagtcacttagcatgcatgcaacaagaagcgctcggcatgcatgcaccgagagccgctcgacatgcatgcaccgagaggcacttggcatgcatgcaccaagacccactcagcatgcatgcaataagggtcactcggcatgcatgcgctaagagtcactcgaccatgctactagggtcacttaacgtgtatgccctaatgaaatcataaatcctaaaaaggttgagtgttgcctaagaagcaaaaagctccctaacatccaatgagtaaccgagaagaagtcgagactactctaagagtcaatactccctccatgaaaaggttacactagagaggaggttgagaaagcccaagtggcaaaacgctcccccacacaaaatgatagctcataaaagaggtcgagaaagctcaagaggctaacattccctccacatgacaagtatctaccatgaaaaggaatagagatagcttctagagccaacactctcccattaagggtcatagaaaaaagacctcaaggcataaacacctaaaggggcagccacgaaacagaaagatgggaggaaagctcatcgaacttagtctacaagaacacttaaaagaattcttatagactaggggcaagtgttaaccccaaaaattagcacttgctaaccctcaggatcagtcaatattgactaggagattaatgaatctcacgtctagagttagccatacaaggccacctgacatgctcacgagcgacccactcagcatgcatgcaacaagagtcacgagtcactcagcatgcatgcagtaagagccactcgacatgcatgcaacaagggtcactctccatgcatgaaacaagaaccacttagcatgaatgcactaagggtcactcagcatgcatgcaacaataaccactcggccgaccactctgccataaggcctctcacgccactccggccacaacgccactcgtcacttatcatgcatgcaacagagtcattcggcatgcatgcaacaagagtcactcgacatgcat

SEQ ID NO: 256166 - DNA, 2324 bp, Cannabis indica
caaaacataacaaaatttcgtcaaaaataatccaaaataaaaatattatcttgagagctattttcaaaactatagatattttaaagaatagatgtagggggtgcgtagatgatggatggtcccaataattgtatatttcaaaatatccaattccacacaccaatatgaatactgattggcttataaatgaaattaggtcataacataattataatattattatttattattttttttatcttttttaattttatacgtgacccacaaaatatttataatatactaacttaatcaaaatggatctcattgcaaagggactaaaatctacatcagtttcataattgttttagattttagttaccattttagggtatacatattgttatattttaatggagaaggaagagttattattgaatattacacctaaatagtctaaaagaaattaagctaccgaatttagaaaatacacacttaatttaattactatgtactaaatgtttgactataagattcaaagattaaaaatagtaacacaaagtatattataaaaagatttatactcaaactacctaaaattgtacaaatcctaacccctgtattatcattagatttctttataattttggctaattataatttttgttccttaaactttaacatatatcaaattatgttctctagacttttaaggtcattaaaaatatccctgaactattaagattgttggatttaaagacttttgtctaatttcattcaattttactatttcaatgattgtttatgtactaaagtatacttgccagactttgatatctaccaaattatgcccctcgaactttgacatgtactaaattatactttctgaacatccatgttggacttttttactaaaattagaaaaaagtctttaaatccaacaatctcaatagttcatgaggcatttttaacgaccttaaagttcagaagacatgattaaatacatgtcaaagttcaggggcaaaaatcctaattagcctataatttttacatttttactatttctttttcaggatttttacttgtatttttttcagaaaacattaacaatatgtatatttttttactcgtgtattcataaaatataaaaaataaaaatatgtaaaaatactaaaaaagtgtagatgtgtatttttataaaggttattatttatgaaaatattccaattataaacatactggttaaaagattgtcatattttattccacttagaaaaagagttataaagataactattagttgttgtaaagcactaaaatttagatctaaatttatactatagatataatcatattatttttgtgaaataaataaaataataagatggttgagtgagttgtaagtatacaagtttttgactttaatattactctttgttcaatttagacgtaatgtagttgtagttaatattaataaaacattaaatcatttgattacaaacagattaagagacatattaacaggaaattctatcagagcggatctacaagattttattctctttctattggagtttgtaatccatataataattatagataaactttgtacatgttcatgtggtaggtatttttatatatatacaacattataaaaaaaagtactatctcatagagtggcttgcatgtgagagaagtacttggcaatataatataaactcacacttggccatagcgggtatgggagggtacgtgtggaggtcttaaattatgcaatataatgtatatataaactcttcaataaaaaaaaaacgaaattcatatcaaattcaaaaactcacacagaggatatgttatgctttaatccaacaatattaagtgatcttatgattcgcactttagtgttgagattgagttaaaaaaaaatgatccttattataaagataaatgatagttttaaaaattattagaaaaatatatatcttttttaaagggtgattttttttatttgggcccctaaaatgagtggaccctaagctcggatctaacccgcttatacttagtgtcggccctaattgagatattttttaagtaattagttttctttttcttttaaaaaaaaaaaaaacttctctagctatataattattattataaatatgtctaattgattaattgaagctaaatatataaatattaattagttctaaaaatatacatttatatagtctcaaaatttattattagactactatctaagcatatatttttctttttgactattgagttgcatcatattatcttaaatcaatgctagtgtcaataaattatttaaaataataaaa

SEQ ID NO: 256167 - DNA, 4253 bp, Cannabis indica
atctgggtcagccactaatcccctcactgactctgacgcagtttcaaactcttcccccccacccacaaaaacctcatactcatttccactgtcattaccactaacactactaccataactagtatcctcaaatttatcattgttggactcaaaatcagaatcatcatcaacagtaataggggctctaatagggagtgaaataggtgacaaaagtgagctggaaagagcaagcttacgtggttcaaaaggttgagttggtagtactaatggggtcccttgtgttgcagaaagtgagacacgctttgatgatgagttcatggattccattgcttctaacaaaaataagaagaaaactccataagcagtagacaaactaaacagaaaagttgcaacaaaagtagaaaaagaagaaagaaatgagtaccttagttaagtttcggtaatgcttaggttgttttttttttcttttgttttatgtgttcgtttttttatattaataattaaatatttttatggtttggtttagtgtttggtggaggaagctactccttggaagaaacgatagtgtagggacttgaaccacacataacatacattcaactctcgtgttttttttgtctactgtagattaattatttgattaaaacaatataattcacattaaattaaaatatatgaaaagtatcttttatcacaaaaaaatatatatcaattatctattcagtgagcaccatttttttctgctcctcatatttgtttttgccaattttgaaaatcaacatcattcctttaattgaatggctcataattatttatcagattatgtgatataccgtggtgttatatttattttttaaggatataataacaatacaacaaaaataataaaaaaaaacaaaatactatattaatatacaaaaaaatataattacattataatatacaacaaaaaactttatgaaatgcttaagaaaatacatttattaattttactttacttttaaaaacaagaatatattattgataatatattaatcaaataaaatgttctgtttaaattaaaaataaaaataattactgttatttataaatctttcataaaatttgtgatatcataattgttcacaatttaaaataataataagtaaaaaataatacaagttagttaataacaataaaaaaatattatcactccttttcaagaaaaaaaaaacaagaaaataaataaattccctacataaattttcctaaatattaacaccattaaatttattgcaaaccattttccattaaaaatgcaacaagtaccaatagccaagttacaactttacaacctctgatttctatgtgacatgaattatacataatgtaatccaatttttaatttttttttttcatttactctttaaaataacctttattaacacaaaaacttgaagaacaaagtccattgtggaaacaaaaggtttcacctcctttgaagaaatacaaccaaaaatactattgttagcatcccagtacaaactgtaaggcaaccaacagatctcgaaaccaggaattaaatccaacacccaaaagagatgcgagaaaaacagagtttctttccaatcataggcttgcttgagaagaacctcatgcaccaaatttaggcaaataagaaataaaaaaaaggggtttcccaaccccttaaaacagcctaggaagtccatgaagcatagcagtagtttctgcaactagcgggggatgaagttgtgtactccaccatgagtgtctcaatattacacaacaagatacatcaaactaaacttttacaagctgcataaacaaaagtgttaacttccatcctaaagccacacctatgataggaattgtggtgcaggttttcaggggaggatcaaaaagtcttgcaattcaacacaaggattttcttctaaatgccacaccttagttgacgatcaaaaatcatttactaaaataaatttgattattttaccagctttttagactaattaatattaaatagcatacaaatgtaaaaaaggcattgtataagaaaagctagttgtgcataccctagtctaaatataaaagtaaacattcttttctattagagataagccaaaatttagactgggcttggagggttgcgccaggccaatgcagtagtgcaacgcataggcgacgctcgaggacccaaatagcaagctattgaacgggccctcacccttaaaaaattaatttaatatcgtgtggaccattggcccacatatcagatattaaactgataagaacagatactacacttgatcttagccaaaaggccgagaaaggtatgcttctaactttcaacaaggttgtgtcttatagcttgctagcctaccttactttaactccttaaccgatgtgggataaatgggcttacattcttatcttctcattttcttcctaaagaagagaaagttcacctcatgtacttcagttaatcaaccttgtttttctgtgtaaaaactaatttatgtgttttatcttttgtcaaatagccaaagctggtaagattttcaaatgttgtagcttataaatccaaagctgcaaaaatgtggaagaagaaaaaagtaagcttgagtgtgttatgcaagctttccccttattattttcattcagctttgttctgttatgggatgctttatttcagtgaactaggtggaaaaggagaccgtgtacatatgtgagttagagctgaatgtgcatggaacaaagtcactgatcctaaaatggactacattgaacacattgagtctcttttttttctttttccaaataggcaagaagaatttgaaatacaagtttctatgtacagaagggcaccagtctctagtttacagaagattggcttttgttaaaatgttttaagtttttccctcttctttattgggcatttgtaccatcataaactgttaattatatatgaagtcatgaataccatttcagatcctctgcttatactggccaaaattctattcaacatgttgtcatatacttggtgatatgggaaattaaggttttgactcatacacccttaaccctttctattttgatatattttccttgactatgcaatgaatgaaatgaaagcataatatcctgatgtgtatcaagagagtcaccaatttctattttgagagttgcacagatttcttacacatttccagattatgaattgctttgcatgaaattatcagtgcattgatttttattcaatttgatactaccaatatcatcgtttacttctaaattggtgtatttatatttgtcttcttccatatttatctgctcaaaccaattaattacatgcattttccaaaacatctcttcttcctctaaacactacgtaaacagcttattcatagagcttccatttttgtcttcataattggagatatatcaactatgccactcattgttgctgatgtgttttttattggtaataatgacatgactggcctggatcaggatcaggatctttacatggaaacttgggtagttgggttcaggggaagaatgtggtgtacaaggctaaggtctggtatgcaatgatagaaagaaagaacttgaaagtagcagccatcttaccatccaaatgcctcaatagtcaatatcaataggaacctaagatccccacttattgcgaaagagcatcatagttccacattaaaattgtgcaaatgacacaattcctagggaaaagaaggtcatgacatgtctgaccttttttcacaacacatctaagctttacagcttcactcccattcttccacatcttcccaagtcccaccatactaatccaccatgaggcccaagaaaatttgagagaagaaagaacactactactctaatttatcccatttcttaaggtccaaaaatctaatgtacctcatggatttcccaaaaagactagattagaaaccaaattataacaaataattcatgacaacaagtttcaagttcaaatgtttgaaacattgctgaaatatatttaagattaacacatcagaacccattttgttttaaaactagaagaatatatattcaacggacttaatctatttctcaaatttattctcacctcaaaatctatctcaaagccctcaacttgaacactacctcataattatagttaagattataacaaattaagggaaaaaatgactacaaaacttgccaacatttcaacttttcaggtgctataaatgtta

SEQ ID NO: 256168 - DNA, 3223 bp, Cannabis indica
aacagcattggtaggaaataatgataataataaataatgttttcttatgtgaataatgtatttggcataattggaaaattgtcacattgaaatacaacataatgatatgatatgtgaagagttagacaaatggaaaaagtaaagaatcaagatcctttttcttttttttggtggttagagatttaggatgaaaaatggttgtgtttggtaactaataatcatcataattgttccacctatctgggtcatcgtcgccttcatcgtacttcaaaggactattttgaagatcggtaacttccattttctgttcttgatctttaacaaccacatccaactcagattttgtatgttcttcctgtaagatcatatatttacaggtcagatgtaattaaagcgaaattcagcgagaaacatgtataaaattttgtctgtcgagtattcatcgaaaaaagaatgctgaagtcacattcgaattatagtgatatttatgaaatttcctaaatggattataaaagttccatgttctttaaacaagagaaactaagaacagtaacatagaatgttgttaccaccaaagtccattagcttgtgaaaaggacaaaaaacaagatcagttgtctacatgtgacacagtcgaactatgtccaaaaccaaaaccatgtgttaaaaaccctatttgggtagctgtaaaattataatgcataatgtgtttatggacttttagtgtaccttttgtactacttgtaggggtctattataattggagacaataatggaatataattctccatataatatcatggtatttcatggggcagcatataagaatcttagcagaaaagaataaaaggacaaatgtacatacattaacatcttaacagaaaatgacaaaaggacaaaaatacatacattggtattgcgggtaggctcctccatttcttcctcccctgggtgccaattggactcatttccaatggcctcttgctttgcttgagcagcaagttcttgtagtatcttgatcactgactcaaaatgggaatgatctgcgtggcaaaattatattaagggaaaaggtaaaataacccttgcatgtgaaaatcatatgagaaacaagaaattggtatccttttcccaatacatgaaaatatgtgcctttaagcaatataaccacatctatccagaaaatgatgaaagcggttgaaatttacttaatttagaaatctataagacatattaatgaagcaaatcgatgaattctagaagagtaagatgatacaatcacttgggtagaacttactcccaaaagttagcatatgagggtgcccaagttacatactactagttaatctcatacttggtcaatggaggatcctataaatacactccctttggagccaatgtccacggtgtcccactctaaagcggcccactctgggcctattgcaaatgttgccccatccacgacatcagtcccacttgagggtgcgtggctctaataccatttgatacaaccatttaggtagaactcactctcaaaaagttagcctaagagaggagggtgccaattagttagatactactaactccatacttggtcaatgtgagatcctaacacagaattcccctgattatcaggtcctggtttctagattcaagtttcgcatctcatcaaattgaaaattatgatagaaacaaactagttgatttattagatcagcatttcatgataatgcatttataagtgccggtgctgatgcagctgatgtgaaatgtcattaatctaagtaaagatgtggaggagaggaagaatcaatttcagatatctcattttagtgtgccaattcatccaaccaatgaatgaacgaatcaccatttaattcaaagtggagagaagcacagcaaataaggatctcacactcaccttttgagcgattattcagggaatcagatagccttaagggatgttgacgctcttccttcttaaatttcatcttcaattgtttccgtgttcgatttggaaaaagctgttgtataatgctaaaatctgtcccgatttgttgaaccgcctgaaccacatggtaagtatatattgaatgattactaaaatagtattaatatttaccaaaatgtgaacaatcaaagtcagtaaatgactaaatgcaactaacatgcaaaagttttgagcaaattcacaatacttatggcagatacactataactccaatacatcatctcaagcaatcacataacttcacctcatagaaaagttcagtgtcgttttttgaccaccttgtactgggtgttttgtccataaatgaatgataattaacataactggagcttggctgggcactgtaagttggttgctcgtcatcagagttttggccctgttctgaatgaaacatctcttcattgtgagaaacaccctgacggaaagaatcatcagcgctgttgaaaggaattgcataaagatattagatcaggcagattacttgacagtctcaagcaataatatacagatagtgtgtgtgcaagaaaaccatttatcacagtcccattgtaaacttatctagcaaatgtaaaagtttcaagtttcttcaaattccatatcagtactttgagaacttgatcatgatcccacttggtccccaacactctttatgatgtctttagcaaatcaattatattttatttgtgtcaagctgaaaatagtaatcaaacaaaagttttttgttttccataatgttaattgaacaaaaacaaaaacgatgcagggaagaaataggaaaaacccatgtctaaaatattgggaatcctagtttcaaatacatataaatatcataaagatgcccaaatataagcactaacaaaaaatcagcatataattgtgttgtcctcacaaataaaagtagccattcaattatactgtattgtatcgcatggtttgaagtaggcagtaaaaagaaaagaatcagctaaaaaatgtcaaggacctttgatttgtctgtggtgtcttaagctttgctgcatctttaatctggcacacatagattccaaaccaggggaaaaaagtacatacaaatcaaatatcaaacttacaacttctatgcatatatagaaaaagaagtgcaatgaagtgaaaaacaaaaattatcatgtcctcccataaagataaacaagaaaagcatgtataccgccactcgctctctgtgctcggcaagaa

SEQ ID NO: 256169 - DNA, 1468 bp, Cannabis indica
ataatataaagtcaaacttaatttgcacgatcgcataatcaaaataatcaaaatatgataattataaaacaaatctaatccaacttacatactaatgctatcataatcacttatttgacagcctcataatcaacctgcacatttggagcatgtggagttcataaccaatttacacgcgtcgctacaaaaaatagctacttttagtgacaattttttagtcacaacataaatttttttgtaactaaatgtgacttttaatcacaacaaaaagttacttgtgattaaaacatagtatttagacacaagctgtcactaatttaattttagtcacaacaagtattgtgactaaaaacacatttagccacaacaatttgtaatttttgtaactaatacctttagccactgactttttagtcacaacatagaaatacttttagtcctcgtgtaatatttcaaaaatgtatttatatttaattaaacctattttattttatatagaataatttaagtatttaaagcataatgattaagagtataatcttactaagtaaatatatattaattatggattattatatgaatgaataaattagcggaatttattaatgatagagattttattataatataggagtattgtatatgctatttatgaaataaaatattttcaagtttggggtatgtggaaactcgatgccaaggatgtcacgacaataaaagagtgagttttagatatgccgaaagtaatatttgtattatcgaggtatttcagtaattagttatgactaatttacccctaaccttagagataacttaagagctaagttaagggtgtaatggtctttctacataagtcttacttagtttgtttgtcttttaatgattttctagtgtaacttgggttggagtaaacttgaataggaaaaggattttattattatcttcattatgaaaaaatagataaataaataaaacctattatcaccatcatcaacttttcctttttatctctctcgaaaaaacctagaaaactaagagaaaaaccctattttcaaccagagttttcagctaggagattttgttcaaagatagagctaattgaagataaattaaggtaagcttagctcaaactttccttcctctatgaaattttgaaggaaatcaagttttaagtttgaattttccatgaactggttctatatgattagattagtgttagagcatgtttttaagctctaattatcagttagtaagttgtttttatgcttgtgctattggttgaaaatttaaatttgaattcatggaacgcaagcttcagctctaatgatatatatatatatatttttaattttcatatttttgggataattgaatggtgggttatgttctaatcatgacattatactgttctcgaaagtttggcaggatttggagaagtattggtggggttggtattgtttaaaccacg

SEQ ID NO: 256170 - DNA, 3366 bp, Cannabis indica
aaaattgtaaatttttacccaaattcagtatatatttttgtaaaaacccctatttaaatcatacagaaatattacaatagttatttgtgctaatttaaataaatattgaaaacattgatattattttgagtgcacatatcattcattatttgtgatattttgtataatatttgatattattttgtaatatttgtgatattgttagactaaatattttttttgttaactatttgcatgtagactttgagcattacatactccaaagatataaaaattatcggattgatgtcgttgaacagtcaaatgtttcacattgtgataaatcattgtgagaatgtggaaatgagaggagtaaagataatagcccatggcgacagccccaacaccgatggtatccatgttcaactctccaaaaatgttttcatctttaactccgtcgtaggaactggagacgattgtgtttccatcggtcctggaactcaaaatctttggattgaacgcatgacttgtggtcctggtcatggcattagcatcggaagtctagctaaaaacatggaagaggagggtgtccaaaatgtaacagtgaagcaaattattttcacaggcactcaaaatgggattaggatcaaatcatgggctaaacttagcaatggcttcgttgaaagtgttcatttctcgaacatcgtcatgagaaacgttcaaaatccaatcataattgatcaaaactattgccctagccacatcaattgcccaactgaagtaataattattctcaaaactttaattagccaaaatactacacttgatttcttttcttaatacatatagctatttttttaatgttattaactaagatatcgaacatatgattgtgtgtatattacaggtttccagcataaagatcaacaacattacttacaaaaacataaaaggaacatctgcaacattagtagctacaaagttcgattgtagctcgggaaatccatgcaatggcatcagattagaggatattaacttaacttttcgaaacaaatcagctcaatccttttgtgccaatgcaaatggaaaatcttttggctcagttctacctgatagttgtttatcaaattgaggaatataattactttccttttctttgtataattaattattttattatttgttgtaattttgtatatcatttattatattcttttttatttaaaccaccattatttaatttattaattgttatttctattctttctaaattcaattcttatccaatttgatgactacattcacatgtttaatatatgcagttataaattcaagatattatttcggacttattaattgaaaaactaataattaaatcaaaaattatctcttaattaatttgagaactaagtataatataaaaattagttctacattctgatgaagtcttaagtaaaggtgcatcataaatataaaaatgttatgatataataatatttttcttaaaagaaaaattttaaggtgatgtaaaacttaatacattttaaattattacaacttattttattaattaataaaaggtatagatatagattatgtgaaaaattacttataataagttgatcagtgcattgaggatattacatggcaaaatatgaacacaatattttaagcttatttaatgattaataacacaagaagtttcatgaattaaataacctattttacaataatctaaaagcctaaaaggtcttgccaatatgaaagtgtgtattaagacataatatataaagaaatttaaaagcacacgattgaacacaaatgaagattgcatgcatagaaatattatagtgttcaataaaacaaaatttaatttactaatttattaatatccataaagtaatagttttatcttctgaattttttgtgtagccaaaattctttcaaatattttgtcccttcaaatatatctccagtctatttatatagattatggtttacaaattcttaaaatatgtaaaccataatctacatatagagcgtacgtttgtatgtttagtgtcgataaattgattttgattaacattaagttaatttgattgacaatctacaaatatggctaacaaacggcttgaaaaaaattgaaagagagcaaattgttcgcaataattcgaggtgaatttttaaccctaaaaaaaaaagttcagaaggaattttggccacgctaagaagttttaggacagatccccatatatagttcaagactatttaccttttaaaatatattaagagtagaaaaaagaatgtatagaggtaggaacaaataaaatataccagtgaaatcaaaaacaatttaaatatacatatatactatcaacaaagtcttaatattttgcgtaaaataaaatttgacaaaaatataattaagtaaaaattaagcaaagtaatattcaagtgtctttaatttctgtatgtgtacatgtatatatggagaattatatgtataatttattgtattacactatataaatataatattacaaataatcattaaaaataactttttagtcacattttttgtaattaagtgtgattttagtcacaacaaaaaattaattgtgactaaaacataacatttagatacataaatatattagttacaacaaattgtgatttttgtaactaatatctttaactaaccacggatttatcacaacataagaatgttaatttataatttttttgtagtgtatatatttattaagtgtaaattaaatccaaattaatggataaggttaattacgtaccattaattacaaaattgttaacatataattttgttaattaattaagcaatcggctgttgttagctgactgagaattagccaccaaattattatataatataatattaaaactcattaatcctcatcatgatgagttgaaaacatacacagataataagaagaaacaacataaaatattaagaagaaaagatttcaggtaaggcagccaaatgtatatagctcattattattgttattaattatagctgttaattaaaattaattggagaacttaattattaatattatcatgataaatattattaattaatgaccggcgcagctttcttcatcataatgggaatcatacatgcatgcattaatagcaatttaataggccattaatatatatatatatatttatgtatctatacatattagctagctatacatccttaaaccctaatcaaaccctacaatatgttcaaatagctatactataaatacacacatatatcattctaaatcacacacaacactttataccatattcaataagcattatatatgcctaataatcattccaataacattttgatga

SEQ ID NO: 256171 - DNA, 2440 bp, Cannabis indica
ctttgaagaagtccttgacctcagaagctaacttttgcaccaacggatcaaggaaagctgagagaagcgctcctccaaccaattcagcagccagtgttgtgttgcagtgatcatcaactattaaatgtagaggttaatcatgaacccggatcctgggacctacgttatcacaataaatatacagtaaagcaaataattctttgagaatctttttttttttttcttttttttggtaaagtagttgtcttgggaccttacctttttccacaagtggtagacagagacatagaacttgggacctacgttatcacatcacagttactaaaatacttatgagaatttttatacacaacttaacaggatcaagtgatcaattaacagaaataacaaattaagttagttgatacaactgacctttgcaattgaagttgaaaccttgaaattgaacgactttcattgattctactttctctgacaacaagaaaatatgtaacccttctaattaaccaatagcctaatctcttacaccaattagcctccatttaattttatggtattataataagatttaagcaattgcatgccaaaattattctaaacaaaaacatattatatcaaaatttaaaaaagccaaaatcatgggacaagagaaagaaaataaaattaccaaaagtggagctgtgtacattttgtagtcccttaatagagagagagatgacatctctaataaattctcctcatgaacactaccaattaattactcatatttccaccaataaacatacaatatttttaaaaaaaaagagccaaaatcatggcacaataggaaaaaaattcaaaagtggagctgtggagtggatatgatacacaatatagtatttgttcattcatatttttctgttctattggtctttgtttatatataaatgcttaaaacttgttgttgttcttgttcttattaattataaaagaaaagaaagattatgagtttagtggcattgataataacttgtaaagtacagtctcaactctctggattgagtacaactgtataaggactttaatactgactggtcttctggctggggagaaacagttaataacagaattaactgtcataactaacagtccaaactaataagtccacgtgtacgggtagatagtcttccaaaggaatggaatggagcagccataaatggcgaccgagcttctttgaatgccacaaactgatgcacacaatgtttagtacaaataagaacaatattctgttttgactacttccaaacagtcttttctgaatgaatatctttgatttcaacttaaatctctagctaattctacaccagaaagaagcaacttaaaatgcttgaatgaatatctttgaagtgtaccttccttgaattgaaagattaaaaatgcaaatgaaatttctaactgaaagattgacaaagattaatcaaggaacactagtaattaatagtatgaattaacctttagataagtaatgatgatcaacagcagagtcaagtgattttcttcttataatacaagtaaaatctttccttatcaactagtgttgtaatatcttttgatcacctatacacagcacagcctaaaacagagaataaaatgaagactttagattcattacctaataatgacacaattcgaataaagcttttaaacaagcaggaccacagataaagagagagtaataccgcctagattttgttgcaattgagaattatatttgggatgtgagcaataattgaccagtcctcccctgtctccctctgaactcgtggtgttagtagtggacagctagtgatatgaagatcagaaagcgaagtgggaagttcttttggcaagcatcggagtttaggacagtaacaatcctcagctcctcaagggaggtgaggtgctgaaaggccgcctcatctaattgcataatgttttcacaaaacttaaatacaatcctctttaaactgatcaaaggggcctgcatgagttgatctcttgggagtaataacaatggtattagtttctcactgccatgtattgaaagatgtctcaatgaaggaaaatagtctcctgacaatgtcacttttttgagtctcttgcagctatcaaaatggagattcttaagacgaggaaaaactccacctttgataaatgaccactctttcagcttagacaaattctcaaattccaaggtctccaaagatgtaaagaatggcttcgtttgtattgcaacagaagaagaagagttaacactagaagaataataaaactttgaatctattctcaccacaccacaatgcgaaatcataaggtctttgagagaaggcagttgtcccaaggatggcaagaagctgcaattatcacaatgcccaatattcaagcttactaaattagacaagcagcgatgatctcccatcca

SEQ ID NO: 256172 - DNA, 2519 bp, Cannabis indica
ctattttaatttttgttacttttgttaattttttttaaatatattaaattacacgtgtaataatagaagacctttagttaggatgtgtcaatcaaagaggtaaggattaaggaatacaagggaaacatataacctagtccgagtgtgacgccattaacgaatctcaaacaacttttcatctctgatttccatttctttgcatacactaagtcagataatggaagtcgacggaagagaaagctcggcagtaccatactcggttactgattcagtaaatacaagtttggtccacttacaagatgttcaaacccactttctccatttcttgtccctctcagacccagatgtcctcgcccaaatgccacctcttcaacgtgcacactcactcctcttgcttgccaaagccaccacaacccttttcgcatgtaaaattataaacttttatttgattcacgttatcattcatcattatatatcgtttaattcattatgtttattttccagtgaagttgagatgtaatggagttgacccagatgaccatcctgtcaaatccgagcttgtacgtttattttttagttctgtgattctttttgtgtctaattttgtatgaactttgtgaattgaggttttgtaaaattaggtgggggtttgttttggtatttgctaaatttaatggattttggtgcaggagagattgagtttgtatcaaaacaaactagaacgattcatagacttgaacaaaggtaaatactttcatttcatgttattttaaatccaaagagcaatggaaatttgttctgctctgcaacattaattaagatttgagagtttgaactgttctgttctgttctgtttgcattcatttttttctatattatatattattgagagagtttgaatttggttcttgaagcacctattcgaccttccaccaccttaaactttcaggcagcaactcgtttcattgagcattctttgcctgatcttacctcaggttagtaatataatatagttttctactaagttcttgataaggctatatatagtcacatctgacatagtgattcatattgtaattgattttgaagattggaacacttttgttttgtacagaacagaagagaagtatgagatatattagtaaaggtgaaggaaaaaagataattttgtagagaaaaatgttcaaaagaagagaaagtatgaatcaacagagaagaagtctgttaaaactgctgctaaggagttttagaaaaagcagccattgagcttctgggcgacagtaaagaccgcgtcttgggacctctaccgatcaaggctgaagagaagagactaaagattaattttttcttggggtaaagttttgacttacttttcctttcatcttttatatgaatttttatttggtgttatgatattacagaaacttcattgctcacaagacatttccaaaataccaaaaaattgatcagttttgttgctaccaaatacatcattggtttattattctttgattggaacatcaaatgggatttttatacttgattttcggtcgtgtcttgtgtgtgagtcctgccacttgtttgaacaaatacacctctcttgtttgtagtatttgctcctgttttctgcagaagaacttagaatttctcatgttttggcgaggaaaagactcgaaagatgtagaaagtaattgacattttgcaaggcctttcatttgggtaaaaggtttaagccatttttgagatttcatgtccatgtcaatgtataaacttctgaagctgtttttcttttgttaactgagtaatattttgggatagagcaagacataaggttaggtagccatttgagtcatcaacaagaaagaatttgactggcattgtttctgtgaaatattttgtgtttagttcaagcaatgtgatttagaaactgttgttttgttcttctcactacaaaaatctgagtctctaccaacaacagatctacctaggggtaaggacttggctaagaagtgaagaccaaaaagaatttgtttcaaaaaggaaaatgaatatagtaattatgcttatttttagcttctattacacaacaacaacaacaacaaatgccatagaaattgggtgaagcagttgtaataaggttagctttcaataaaagagaaagcaaaagaaaaaacaaagccaacaaacaacttttaattaactaagcaaagcaaagtagagcagtctgagcgaagtaaagtagagcttaacatttctccacacttatttacataatagaaacaacaacatactaagctaatgtagtaaaattaagggtttgtaaaaaaaatactgattttgtgtaaaagtttacaattttactgttacatggaattttttacaaaaatgttgtctttttataaaataatcgtaaatcaacaaaataaaacaatagtggaacaactaaaaaaacaactgtgaaaacttaatactgtctttacacaatatttttgaaaaaaatttgcctcacaataaaaaaa

SEQ ID NO: 256173 - DNA, 1568 bp, Cannabis indica
taacctaacatgatatctgtatctatttaaaaatgtggctatataacagaatttttagtttatgagaaattattgggtgactttttttttaataaaaaaataacaaattattagatgttgccacgtaaaaagtcagcatccatgtaattagctaaacctaaatataattaatccacctaaagtgtagcaattaataataaatttgttcattatttttatttttaataaatttaggacgaataattaatttttttaattactatgacaaagtataatattaatttttgtttttatttttatttaaatcattattatgttttcaaatttcaattattatgactacattgaatattattaattttaaaattatgatattaaaaaaactaaaaactaaaataaaattaatataaatcactttacaaatgtatctagtattaaaatatgtctaaaaaaatatatatgtaagtaatagttatatggtggtgctcttttattaacaaatgtttatatttattgttttgacatgtgtcaaccgaatatacatacatggattccctacttccttggacatggtagcggaattaaatcaagttaattgcatatcatgaaactaatctaagtcaaagtattctctattaacaataaaatccaagaaacctctacatcactagagctttgtaatcgaagtcaatacattttaattaagcatagaataaattattatattattttatattaatatataaaaaacataagacaaaaccatcgacagagtcgtctaattaagaaaataacgaaatcaaattgtgtcattgtgatttccttcaaggccatcttcatatctctatataaacacgccataactaaaaacttaaaagcaccataaccataaatatggagtacacatgcaaggatttcaaggtgggaaagtgcaaagggcaaaaagtggtggacggtgagagcatgccactggtgctggaaccagtggagcccaacaagggtgatgacgtggaatctcttctttctgttctgaagaagaacaaggagtggttcgatgagatgataaccaagaacagtgctgtccttctgcgtggtttcaacgtcgagaacgccgaggatttcaacgaaatcatcgaagccttcgggtgggatgacattcgttacgtggggccagctccacggacccatgtctacaagagagtatggactgccaatgagggacctctcactcagttcatatactatcatcatgagatggttttggtaataataattaataatttctcacttatatataattataggaaacttctttagcagtaatttggactaacggtgtacgcccctgttttaagcacttgaatatttattgcatctatcctactaatttttttaaaacttccaattaatgtacatgacggtcttaaggtagatgggacctagggcgaaattaaattttggggctcctatatagtttaactattataaaattggtagttctagtacttagtgcaatggtaaaatttttaaaaactcagttactttaaagtaaaactttttaccactac

SEQ ID NO: 256174 - DNA, 2418 bp, Cannabis indica
agagctgtactgcctaagttttactcgtcggatgttcacccggaatcgtggagagttttctcttcgtgtgggagacggtgcgttttgactgcaaatccgaggattatggtggaagcatttttgaaggagtttcttggagcagacatggttttggggactgagattgagagttacaagggaagggcaactgggtttgttcggcggccgggggtacttgttgggaagaacaaggctgatgctcttaaaaaagcttttggtggcgagactaatagacccgaccttgcccttggtgatcggctcactgatgttccttacatgtcactatgcaaggtacataataataataattatgataataacgtatatattttattttatttttacaaaattacggtaaattttcgacaaaaataatgtgaattttttagaatattaaatttacaattcatagtatttgtttctttattttatgcatgtaatttgaataataactttagctttatagattccgaatattttttaaaaaaaaaaaattgtaaaaattgtactatatcatatgaaaaatactaattaaaaatatgccaaatctattactgcaatttatccatatactaaatatactaattaaaatatacttataattataaaattaagcatatatatatattcgattattaaaattgagcatatgtaataattgaattttacacgttacaaactagaaacattcttgtcaacatacttgttttaaagtaaatcttgatgttatcggctaggttataagataactccgataacgtaggaaactcagttaaataataacttaatatatagaaattttgtcgtttttattttaatcaatcattaatgatcgaagatcaatttgagaacaaattaaatgatataccaaaccatgagactatagatttttgataaataaactatttttgacacgtactacaatacaggagggttacatggtcgcagccaagccagatgtgaaagccctgacaagcgataagctccccaaaccagtaatcttccatgacggccgacttgcctgcaagccaacgccacttgtggctctcttgatagtcctatggatcccctattggcttcatcctagcctgcttgcgaatggccgctggttccctcctccccatgcgcctggtctactacgctttctgggttctcggagttcgtgtcattgtcaagggcaatcctcctccacctgtcgacaaatcctccgataccaaagaatctggcgtcctcttcatatgctcacacaggacactcttggatccagtattcctatccacagcattgggtaggccaatccccgccgtggtatactccgtctcgcgactatcggaaatcctgtcacccatcagaaccattcgtctaacacgagaccgaattatggacgcttcaatgatcaagaaactacttcaagaaggtgacttgaccctttgcccagaaggaaccacatgtcgtgagccgttccttctcagattctcggcgctgtttgccgagttgactgaccatctagttccagtggcaatggtgaatcggatgagcatgtttcatgggaccacggctcggggatggaaagggatggacccattttacttcttcatgaatccgagccccgtttatgaggtgaccttcttgaataagttgcccgaggagttgacttgtgggtcaggaaagtctagtcatgaggtggccaattacatacaaagagtcattgcatctaccctttcttatgagtgcactagttttactcgcaaggacaagtatcgagctcttgcaggaaatgatggaaatgtgactattgtggctaacaaaccttttttccaacccaacaaagttatgggttgctgatgaaatgataatgcttttctccaacacaacccttgatggcttagaattactggtgaccatccaaagtagatgaatcaaaatatattgcatatgtattgtcattgttaagggcaagacaatgggtacaaaatatataatggtgaaagaagtgacaaaaaaaatgtgtattacttgtgtgccaaatttcggaattagaataactaatgatcaacttcatttttattatcacgaaaatactatttctgatttctttcatgtatgtactaccaatgcatcttgttaacattacatttacatttatttgaattcgaataaaagtaaaatgattaaatagaaaataaattaatactgtatctttattattgatatatctctctaggcttctaaaatgccaccacccaaagtctgtaaagaaatgaaaagaagtatgcaacctagttattatgctcctcacctcactcaagtcaatcttgtgcttctagaagattcaatggtcgccattctgttatggaaaaatattgatgattaaatcat

SEQ ID NO: 256175 - DNA, 2791 bp, Cannabis indica
aaaaaatacaaatagattatatttaagaaaaaaaaacaattttatagaacatattttctaaaaatacttttacttttttagttaaaaaaagtgttactaaacacactttaaagtattatagtatatattgtactagattatatgatcttgactatccatcatcaatgattaaaaagctattgtaggaaaaacacccttcctaactcccatgttgcacaagttcctatcggttcagtatcattgcatactcaagaatagaattctgagatgatcactcacacacacacaatcgaatacagtttccgaattgagtctaaactctgttattcatatggtaattgtgtcaatacaaagtactagtaataaactaagtcacatgcccttttataaataagaaacaaggacaggtaactaacaaataacggtcatttgtgagtttattaagactaactgtcatctaaactaaccactaactacttcttaattgttatgatgttagttaggcaatacggatatataacaattctctaccttgactattaatgtacatatgagctaatagtttataaagctgagaaagataataggttcaagaagtgtttaatcttgtcattatggagagcttttgtcagcatatctgatggattgtctacagtatgaactttgagaagtttaattttttcttcattaattatgtctctgatgaaataaagccttgcatcaatatgttttattctttagtagaagacttagtttctactcagatgtaatgcactctggctatatcacagaatattggtattgatctttgatcactgtcaagttctttggtaattcccttaagccaaagtgcttcctttatagcttcaatgcaggctatatactcagcctttgtagttgatagtgctgcaatggattggagatcagccttccaacttatggtgcagcctctcatttgaaaaatatatcctgtttgagaacttctcgagtcaattaatatcccctatataatttgagtccacaaaccccataacatcaatgttattgttgttctttgatccaaaaatcaaaccaacatgtgttgttccctttagatatttcacaatttattttactgctttatagtgctcaatcactggttctttcatgaatttgttgactatgctaacactatagatcaggtctagtgtagaccataagatacatgagactgctcaccaaactggtgtaaggcactgatcccatgtatgttatgtcttcattagtggaaggactttgagagcatgataggctaaactgttggctaatgggagtgctgacaattttcacttcaacaaatccaaatcgatccaagattctgcttatgtatccctgttgtgatagcttgggtttcctctataatctttctctaataatctcaatccccagaatcttctttactaagcccaaatcttacatgtcaaattccttccctaatgtttgtttaactttgtcaatctcttccatttgcttgcttgcaataagcatggcatcaacatagagaagcaagtacacatggaaccttaagttctccatatatacgcaactatcatatccactccttttgaaacctatcttggttacaaaatcatcaactttttgtactattgccttggtgactactttaggccatagagaaatctttttagttaacaaatcatcttctttcctttttcttcatacccttctagttgtttcacgtagatcttcatgaaggaaggttgtcttaacatctagctattcaagctccaaatcttcacttgctatgctaccaaactgagcaaaattctgatagaggtatgcttgactactagtgagaaaatctcatggtaatctattccttctcgttgtgtgaagccttgagctacaagcctaggtttatatctagcttcctcaacttcaagtatgccttctttatacctgaaaacccacctgcaactaataattttctatccgattggctttggtacaattatccagattttgtttcttttgagagcaaccatctcacttcccattgctccaccccatttaagcttgtcatatgagttcatggcttccttataagatcttggttcatcctcaatcatttctgccacagaagagcataattaaaaatgtcagtatagccatatctagtaggtgctcaaactactcttatcttcatgtccatgactaattgataatccagaccttcataatctggctcacataatttgttctgaatgagtgttatccttgccaaactccacctccatctgtgtgctctcattggtctcaatatgatcatttccttgctaagttttgagtgtcttcgtataccttgtcctcatcaaataccacatatctactaataaaattcttttgatgattacctacttctatactccagattttgtaccccttgatacctttagggtagcttagaaagatacactttctagcccttggctctaacttatcttatctgatatgagcgtaagctatgccaccaatagttaatgatagacttctgttgattagttagcaagcagttataacaacctctatccaaaaaaaaaaattggtaatccaaagtgaatcaacatgcatctaaccctttctatgatagtcctattcattctttcagctagaccattctgttggggtgtttttcgtactgttttgcatctagcaataccaactttcttgcaatgttgattgaacatatccacacaaaattctagtccgttatcagttctcaactttttaa

SEQ ID NO: 256176 - DNA, 3663 bp, Cannabis indica
tttctcttctttgactctaatttttcataataatttgagatgacagaatgagctctgatcgagtcctttggtcacacaaataacttgtcaatggaataataacacacaacacaaatttgagattgacacaattcactaagttgttttgctgttttcatcaatgtagcttttctgtcgagaattttttttatcattcttcataaattttgagagagagactgagatagacagaaaaatagatagaatggaaagaattatgaaaagtaatattaatggcagaatggatttatagagttgagatttagggtcaatgatagatcgttgttctaaatagataactttgttaccgttggtatataatgtagcaatttaatgactatttccttatttaatgacacctgacagtatttaatgatgaatttctttaatgacacacccacgcaagagtacaccacaagtaagtatcctttccataatacacggtcataatactataagggatgtttgaaatgggttaatgttagcaagagaatggtaatgtgaaatattaccttatttgttttgaggctttaactttaaaatattattcccttagtaatataaatacccttgaggagggtaatgttgatacattaaaaatgataattaggatttttaccttctgaattttaacatataccaaatcatgtcccctgaacttttaaggtcgctaaaaatgcctcctgaactattgagattgttagatttaaagatttttgtctaatttcattcaattttactatttcagcgatattttatacactaaaccatgcttttcagactttgaaatctaccaaatcatgcccctcgaactttgacatgtactaaatccttaaattagaaaaaaaaaattagaaaaaatccttttttaactacttagactttcatcggacttttttactaaaattagaaaaaaaaatccttaaatttaacaatctcaatagtttaagaggtatttttaactactttgaaagttcaacagacatgatttggtacatgtcaaagttcagaaagcaaaaatcctaattagccaataataaataacaatatgcatagcaaataacggttaaagaattatttattgtacattgtgaatttgtagaaaataagaatagttatatcgattctgaaaaggaaaaaaaaagggggcggcactagttgagtaattaattcaagaacactaattcttatacataataacaagttcaatttcaactccattgtaaattcatgatcaaaatgcaataaacaataacaattacgaatataaacaatcaaatcaaaaccataagtaattgatatcaatcctaaatcaactattaattatactgcaacacaaattaagtctcccctttcatacaatgaatcccattgtgcacatttcaacaatgtaaaattaaaacacaaagatcagttggttactgttgaagacctcatcatcatagctatatttagtactcattatagttgttgaatatcatcataaatacacatgttaatagcataaaagctcacaaagtttgttcttccttgttgctcggtgctgcaggatcctgattaggtggatgtggagaagatcttgatccttagactttaggaggtagcttcgccgcgagctcctccaaggcttttatgcgctccatcatcttcttgagctctgcatgagtaatctgaggtggaggaaatacagtttctgttgaatattttgccccactcgagcaagaggtgatgtcctcctctacagctgtgtgatttgccaaatactgtgaccgtgtctcaagcaaacacatcaagatttcctgtatcatacaattagcaatatcaatagtaagaactacccaatgatcaaattaaaaaagactcaaaaatataaaactttacttacataattatcttttgcgtctttcatcacccctttgtcgtccatgcgatgagttgtaagccatgtttgcgggatcctagcagggcctaatgtactcagcaacatcttcgcttcacgatatgacttaggcaacttatttggagctggaaatgcatcttgtaacaattctaataattcatcaaaaatcgtagtaggaattttccccaacactttgaaatgcatcaacttaatcaagaaattaaaagatgtgtatttttcacacccggggaataatggagcctccatctcagcaaacaaattgttataatatcgttcatcattacactcgttttcttcacctgtatacctatcccaacacgaatcatcatagctgtcgtagtcttcatatgtaggcatatcatcatcacaatcgttttcatcatctttatttattttgggttgttctatatcattaagaccctccattatctcatccccctgacattgttgcactgctttatttgttggtattttttcctcttctccatgccaataccaattagtataagtcagtagaaaaccattattgaaaagatgatgttctaatacgtcaatcttctgcaattggatattaacacacttgttacaaggacacttcactagtcctgtttcatccacaaaaagtctagctctctcaacaaatgccaacactccagttgcatactcatcagacaatttatttggattgttaatccaagtcttgtcgatcgacatcttatgtgtgtagaactgcacaatggttaagaaaagagttattcatctaacttagatatattttgtatatgttctacttttcacattattttatttctatagggacaaataatctattccatttaagtttttgcataaaggaagtgttttatgtaagagttttacttggtgagttttaattgtaagaggttaaggttaaaacaaatctcaaactcaatgtttaaagagttagagattaccttaaaattaaacttaaaaatagaactcacaaaaacgtaagtctttaactaaaattataacaaacctagtttagttttaaattcccccctaacaaacaccccatagtctaatctacctatacttgtatacttatttagagcacattaacgagaataaagtaggggtgacaattcaggctacgacacacaggttagacacaaacacaactcgagattttacgagtttgaaacgacataaaaattttgtgggtcatgttcgtgttctatcaatttttcgtgtcacgggtcgtgttcgtgtcaaccctctaaaataaaattaagaactcaacacgacacgatgacactaaactcaacaatttagcttacaacccccaacacgatacaaaatttattcgagtcgcgtttatgttcgtgtcttataaatttttcgtgtcacggttcgttcacgtcagcagttttttaataaatttaagacattagcataacacgaacacaatacgccaacacaaattgccaccaaaagagatacataccgaaatctttatgtatgaaacaataaataagttataaataattccaaactatctatccagcaataacaaaatcttcaaaaatttagagaaacatatttgtatactaataataaaaaaataactataataacaattcatcttattaaatctaaaaaaaaaatacatcttatctttgactacaatttcatattataaaaataattaagaaaaaagctaa

SEQ ID NO: 256177 - DNA, 3735 bp, Cannabis indica
tttttttatctcattcccttttatgtagctcgaactcttaacattttttcgtacaggtcaacgtgaagatggcttatgcttattctcgagccaaatcaactgttgccaagagccttgccaccaccaacacattgcagagggaggtagatgtggcgagaaaggaaactcaagacgtgaggagcgagctcggggaagtgacaaatgagcttgggaaggtgaacaaaaagcttcttgcagctaacaccaagattgaggagctgaccaaagagctgcaagagatgccttcgacctagtagatggagggtgataatgtctctttgtccaaggaggtcaatgatcttaaagatgagagggagagtctccggactcttctttccaaactggggaaggatgtcaagaataagcagactagggaggaggagctcgagaaggaggtggagaccctggagatagctgctcttgaggttttctacgaattctggaaggccaaccctgaaggaaactttgattaccttggtgaatccaagagcacgtatcttgacttctgggcgactcagacggccaaagaaaaccccgagggagctacctccacagcttcagccgactagattaacgagcagcttttaatcccgaatttaccgtgctttgttatctttttgtatgaatatcgcccattgttttgataattatcttgttttgttttttagcctgttatttattttttactaacgctttctacgggtatagttgcccccccaagtaatcgaacagacttttgactcttggtcacttgcattttacaagaatggagtaaattatttgaaccttattttcagtactgtaaactgtttaaaattaactaaaccattacaacatatacaattaaaaaaaaaattaaactaccaaaacatatatagatatacccaacactcatttttgtaaaaggtgtaccataaagatcattatcataactttatatatggtttgtagttaatctatattatgctctcttaaaaggatttttcgatagattttatatttatttcactatttataagagctcttaagtctttttcttatgatcgtttatgctatatttatttaagattatctgtaaattttttaaaaaaaatttaactaatttacaataataaaaataagatttaaatattttattacactcgtaattatttttttacacgtgtggtaaataattatttaaattttattttcaacattacaaactattcagaattttctaaacatataaacataatctaaaataactactacacataaaaaaatgtttagactaaataaattttgtaaatgcctaaaagagataaagtgatccaccaaaagactccctaaaaaagtgtactacataagttttatatagcttgtatgtatattcatatggggtcactgcatatgatggtggtagtataagtagcaaactatcgcaatttattagttaaaaagactttgagattggttttagtctacctatagtcctacactgcatagacgtgcgtatcatattaatctctgtatagctctgagtaatcaatataaatttggttattcatgaactttatgttattttgtgaatgtcgacataaagtagtaatcggaactaaaaatgtctacatgaaccatgacacaccacatatattatagagccacccattcgtggggctgaccaaaatttaaattaagccttttctaaaaatttaaatttgtagtcatccaatattttataaataattttatattttaattattttaaaaagattgagacattgcaacagctgggacataccaattaaggtttttttttttctttagaaagcaaaaaagaaacatatatttacagtaagaaaggctttcgttttaggattttaaaataatctaattattaaatggttaaagtggataatgaaaatgtcaagaaatttataactgtgtctgattgtcacaagaatatttttaaattaataataattaaattatattatttgttgaccacataaatctcataaattatatagtaaaaagttagtttaagaatgacggaaatgtaaattattatgtaaagttagtttaagatagagtaatcttataactgcaactataatttttctagaattaaaattgttaataacaaacataaaatataaaaaaatagtttttaaactaaatgctcaaatttgttttatttttttacttttttactgtggggtggaattttaaaaaaaaaatagtatgtaaatttatattttgtacacggttgttttttggttgtttcaatgttgttttatggttgttttataaaaagacagtattttttgtaaaaaaatttgtgtgacagtaaaattgtaaacttttactcaaaatctaatatttttgtaaaaccctgcccaaaaaaattagtatttagtgtaaattttctttatttatattcttaaatgtatatatatattgcgagtgtcacttttctcacgcacattagaactttaccaattaaatccaatttgtttttattaagattaatttgcggcataaatatctaagcttaattaccagttgaaaataaatatacttaagttccatttttagcgctaataatacctaagttatatttctggaactctgtaagtacttgaacgttaaatgtcattatccatgtgtcatttttttattggtacatataaattattttttaaaaaaaaaataaaaattcataacttggaccaataaagaattgccacgtggcaatttacatcatatttaacaaccaggtacctaaatataacttaagatattattgctgtcaaaaattaaatttagatatttatttgcaactagaagtaaaatttaaatatttataccgcaaaatttttttattaaaaaaaatatattcattaaaccttttacctgacaaaaaaagtccattagctttatttaaaaaaaccaaataaaaataatgggccttctaaaatgtaagtcacaatgctttaaattgcccaatgcagcctaggtgtgtccaaactagtattctaaagtgaggaaattgtattctatactttatttagtttaacttttttttttctaatttttactcatattatttaaaatatacttatttgtatagatgatgtcttaatatactccttaggttaatataaatgatgtgctggacttaaatagagagcgaaggcaaaacaccaaaaaaaaaaaaaaaaagtgtagattttaatgaaatataaaaatataagtagtttttttttattaatggatgcaaaagagaggtatctcaacttatctaaagtagggtgttgaaggctaaagctataaaaggaaacgtcagagaaataaatgaaaacacagtggaagaattgctgctcatggtgaatctaataagatagtacggtcgtttctttccaaaaaaaagaaaaaacaaacagattgtcctgtcgtttgttgttggacattggacatttaaagaaaaacacttgtagttgtagacttttaccttctcagcttactgcaatcatcttcttcttcttcttcttcttcttcctctcatggctggagggaagaaaggactcaactattcatgcattctactcataggtcagtaactatgcttctttaatatcattaattttaaacataaaagtaagagtttggttatctgaattaatggagagtaataatggtttattatatgtt

SEQ ID NO: 256178 - DNA, 2137 bp, Cannabis indica
aagtcatttcatgaaatgacattttaatattttaaaatataattaaataaaatataaaataaaatttattttttctctattttattttattttattatcaccaaccaaacgacactttaattttttcatctttacgtactcgaagaatctagtagtagtaatactaaatgtggttaataaaaaaaaatagtaatactaaatgtgcacttggtttttatcaagtgtacgtatatatagttacatatatgcccttggttagcaaattaaccacttggtctaaggccgttagatgcttaacttggagtgttgcaaatttctcgaacaaagtagaagtagatcaagtcgaactcgaaatgcttatgctaaattaagatagcataacaatgctctaatactgttatattatttttcaaataatataatatatattaaaatgtaataaataaatataatataatatatagtttgataattattttattatatagttgattgtggccaataatataacataaaaagagagttaagatctataacaattttgtaactctttgattacaatttaataatgtgtaattaagtgaattattacacaaatcaagaaaatcaaaattatgaacatatagctattcgtgatggttattacaatgatttaagtcattaaaatgactagaaaaacattgggaattataagaggagtcgaaaattccaaaatagagtgtgctgaaaccatactagacgacatgtgtcagggctgaccttgaattgaaatgggttatagataaaaaaaaaaaattagacctttactataaagatattttttttatttgagccccaaaaataagtggaccctaggcacggacctagtccacctatgcttaaggccagtcctgcgtgctgtccagcaccgagcgacatgatgcttggaagtactttagtttcaagaaaatgatccaaacgtaataggatcatgtgccctaccttgtcttcattctccaatatttacaaccccatttacactcatttaactgccattaacagctatgggatgttgatagtttgaattttgaaattttggttacctaaacactaaatagaaacttataggtttacttgtggactattagtttctattaagagagtaatttgttagaaatactagaaattcataaagctattactattcttttttctaagtacttgtagtagggaaaatatacttttgaacaaatgtttaaaaccttgtttaaatttagtgattgccttactatacacttaaggtgtatgtagtgttgagattgctcttacatctcttttttctttattattattgtgttcatctttatttgtatcttttagttttgtattgtacttcttcttcttttcatgtaatttttattttatgcatatcttttattttgagttgtaatctcttattttattgttgtattattttggcttagagttatcaatttgtttgttttattattccattgagtattattgtgctaccatgttagagtagaaagtagaatgaaattggtttaaagtataatgtagaacaatagaaatattgaattccatctcaaatgactcatgtttttaatatttagagagtagagtaaatagtgacataagtatccaatattaataaaattgtaactttcattcagtctcgtcaatacagacttcgttttatatttatcaaaataaaatttaaaagtaattgatactacatgttttcgtccgaaaccaataatttagaatatgagtcttacatgtatcctattttaagatactaacgaagtctgtagtaacaaaactgaacagaagttacagttttattaacattagatatttatactgctaaaaatattatttagtttttgccacttacaaactaaaatttaaaatatttatgcggatatttaaagaataatgttcccacatattttcacatggagtactaatatttcctttactattaatttcagcctaatatttagttcaattaagagaatcttcattggagtactaaaatagtgtagtgctatattttagtatttaaaaaaaaatagctctccaatggtatgttaaatcttgtacaaaattcagttgatgctaaaagttgtaccaa

SEQ ID NO: 256179 - DNA, 3743 bp, Cannabis indica
aataaaaaaaaaaataacattaattgtgggctaaatttaatacactacttttagcatgtgctaaatgtaacactagaacattatagagtaatagtttttatcaagtgtgtcaaaatatagaaatacactattattttgacattatattagagatgctcttaggtactagtactgcttttatgaagtgatgctttaagaataattattgatattttattaaaattattatattaaattatgttggatctcatacttatattatttattctaatagcgatataatatcttcgatgatactaagcatttatcttagctaaattatattatttaataaacttattaaaattcaatatctaatttgtgtatagagagataccaatattactatataaaagtaatttggtaaatatttttttgaactttatattttacaaaatttactgattgaaccatttattttattttgttaaatgacagcttgaatcctgtaatttccaaaataacaataaatattctcaactcatttttcgtcaaatttgttttttaatataactatcatgaaactaatttttggcatgaacagatgaaaatataacaagtctggttataacacctttaagttaggttattattaagttttattttgacgaaaattaagctcgcaatactagtttgtgttattttgaaaaatacaagattagagttgtcatttaataaaataaaaaagtttcattaattattttttaaaaaacatgatttaaaatagcatttatctaaaataatttgtataaattaatgatatattaaatttttatgtataataaaacgcaacaaattcgtatttatagatgatagttttggaattcaaaggaccaaaattaattaatttcactaaaactaaggactaaatttagaatttttagtagtttaggtgctagcaggataacggaaatcaaaattagtagaatttgaactatgtggtatataaggtaaacaatgttctatggtctgtaattttgaaaatatatattgaaacaacactataagatgactcgtcgtaatctcttagataacagaccagattttaacgatcaaaattctgcaagttcaaaaggaatattcagaattttaaattctgaacataagtttggattgtttctagaatgttgccaacaaaattaataatgtgatatttcaaaatcccttttttcactacaatgtaaaaataataatgaaaaactatctcaattggtgtcactttctggctacttctgaaaaatgcagacaaatttgttttcggcctagataattttgaaatatgagtgtctatttcataactcatatcataattagctcaaaacatttatttgttgataatgatttagtcaaattgattcacaactaatacaattacaagcttatgaaatgatgcctagcatacctctggacatgatgtcgctttgcgattagctagcaatactttctaaatattattatattaaattatatgggactcaatatttaattagactaaaaataatattgacacataggaggctattaagtaccactgatactttttaacaattctggctaattaaattgtacctcccacgtaaagcatggcacattatatatgaattaatatacctcaattgtgtttattagttggatttggatttagttaggtctagttaaatatagttatagatacatttagtttagtaataaatgtgaaagttcattgtgtgcatctcattggtcggtccaactgagcaatctactcaacaaatgtgacccaaactttgatggtctgacccactactctaccatttcttaaagcaatcaaagagttataaccataagcaaatttataaaacattatgttgtatgtgtacataccacatatgcattaaataacaataagcaaagtggttgttgtgtatactatatataattttggccaccaatgcaattttgttgagccttataattgcattaactttagcattatttttcctttaaattggtgggtcaacagaatgtaattctctccaatacaactactttctcagtgttgatgaatgtggataatactacaatatgtttggattcagtaatcataggacctcaaaatgttttttttttttttttgagagagagcttaaaatgtatactttgaaaatataaacaaatattataatttcatttattaatgaagataaatttatgatcatgccataaatatcattaattacattcatttccatatgccatacttcattttcattgtgctggccgagaaagatgggaaaaataaagggaggcaaaaataatataaaaataggcacattaatctttatttaatatccattttaaaaatgttaatataatatctacagttagtatgcagtatataatattgagtcattgactagtgaaaaattgtgcttcacatcaatcgatctattttgtgtgtgtgtgtgttttgcccttgaaagaatcgatctattgtgcttataattcaatgtttgttattggattttggttggttaggtattcattagaatttatgcaacttctagtgactacctaaactaccaaagtcaatctgaaaaaacggaactaccaaagtcaagtattacgtatactttatgcaatttcaagtaaaatcatatcagtaatagaataagtgagacccaatattaatttatgctaatagtaatattaagaatattaaataatatgagtatcctttagttttttttttttaagaaaaatgtctcaaataaataccaaaagcaacaaacactctactacgaatatttatggggtttttacaaaaatattaaattttgaataaaagtttataattttactgtcatatagaattttttacaaaaataatgtctttttataaaacaaccgtacaagaacaaaacagaacaattaaaacaacagtgaaacaaataaaaaataagaattttttcaaaaatatacgtaaaatatacaataattacaaatataacttaacaaaactcaattacaataatatcctggcatgtcattaaaaaatacctgtattttaaaataatatacttgaaatgaaactaatcccgaaattcgtttttttttaaacttttctgtgtttcaaaaataaattttttggttgcctatgatgttgacaataaaccaacaagtaccttttactataaaaaaaaaaaaaaaaaaaaaaaatcttttttatattatataatttgagatacatgttggttacttctaaaacttacatgtatacacaattaattatttagattatattaatacattttgagtaattttcaagtttattttcaaaaatattgagttatccagtaagctactattttagtaaactgcattttcaaaaaagatatatcataaacgtttaagccatatttttttaatgtaaattaatatatatatatattgattagttaaataaaaaaataaagttacaaataattttaaatcattacaaatacgatatttttttagatcaattagttatgattttgataatataccaattggttactttgataaaatcataaattttaaaataaaaagatgatgatcataccaaatatcctataatcagatatgcctatactcatatatgtccaaaaaacttattagtttattttggcatattcaaacaaattttcattcttcgtttatatttttcatatagcctaacatcg

SEQ ID NO: 256180 - DNA, 2880 bp, Cannabis indica
cttcttgctttcaaaacatacatgaactttctgaaattaagacccaaatgtaggactttgcagtaacaaattctatacacaggaaaatatctctccatcaatggctaaagcaaatgagcctgttgaagctgatgattgcagttctgatgtagtaaattctttgcgatttgaggtaaaaggttctgcataccaaaaggattcccaccctatgctgtgctgaatctgctgattacttattattccttataatagtcatgctcatgccttataaataataatgttctgcagtataatagaataaagaatggaaaaaatattacagatgatgcctttatatggattttcaaatttcaatggatgtttcctcattctttggagattcatttatataaatataagtataaatataaatataatttatgattatgtatgtattaaaaattaaaatgtatgttatttgtcaactttgtagcaacgttttaccgagaggtctctttctgctcacttaaggcttgttttctcttgaccgtcgcaatttatttcaagcatgcatcatgtataaatattcttgttatatgggctattagcattattgatctgatctgcatcactgtaccatgtccttcctgctgtgtgtatgtcacgtttcaatggattgctaactcaatcattttaattgctgtttttgcatgttttttaggtgagccaatacactggtaggatccacttgtattcttgcatttctgggacagattcaagaccaagaccactgtttgagaattttcgacctgaggaacttgagcctgtagattctcctgttgctaacaataataatagaactttaaattctatcatggacaacccagtttgtaggaatgctgttttggaattcagtaaggagtggaataatctaaggcctgtggagcgaaaaaagttaactggaaaaccattacaacttcctttgtcagtagaactctgctttttgaatgaaagcattaaccacaacactggggtatgtaagtcctttgacagtcgagctgtgctttttgaattaaggattttcttttgttctacttagttattactgttgctttttcgtattaatactattatataaatatatatatatatatatttatatatatttcttttctccttgtaaatacaatatatatttgatgaatgtgaaggaagaagtattgtgtgtatttacattggctctttataacaggggctgataaaagttggaagcaagcgccgccatacacctttgtatgagattagccaagctcttccacccaatgctgtatggaaaaaagtttatctacgttctggcaatggaaaaaaggagaaagaatacactcaaggttggacgatgaatgagccactctgtaaattatgtcaagcaccatgcaagtaagtcccaattgaccgtgtggtcaactgttttggtagactgaacttttcttcataactgttttggtaaagactaaactttttcatcatcaggagttgcaatgctaaggaacctgaattttttgaggatcttttctgtgatcttgaatgctatgaagaatatagaataagaacaagtaacagatcccttcgtcaggtcagtattcaaagcatactaaaacacagagtgtgttgactgttgagcttctctattgtgctattgtgtgtatgggaacactaacgtacaagcaattgtcaggagctttttcaactagagaatggtatttgtacgaactgtcatttggactgtcataaacttgtggtgtacataagacctctatccttggcaaagcgaagagagtatattgagaaagctgcacccaaaatagcaagtcgagagaagttgtaagtcactcaagccgaaactgataagagtatcacttttttctttccagagttttgggagagtaggacgtgttaggtaaatcaccttgttttaattccttgaatctgattacatgcaggctcgagaagcttattaaggatccaacagagggtaatgcatggcatgcagaccatattgttcctgtgtaccgaggtggaggtagggtaccattgctactatattgtactggtctatattattattattttagaagtgcctttcttaattggcaagacagacattttcttacttttttccattatattttggttgtcagtatttttaaatattgtatcatctgaattggctttaggtgaatgcaagctagagaacatgagaacactttgcatagcctgtcattctgatgttaccaaggcacaatgtgctgaacgacgcttgacaagggcaagggctaagaagcagctcaaagctatcatgaattgtcttaaaaatgttcagaacaatgaacaaacagaagcaaatgtgagtacaaatttttttctgctttcctgcttagttttgattatttctttttctgttttttcaaagctagaggacttgaatattcatagttaaggataaaatatgatctaccaagtctattgtcttgagttcagcatcaagtttactgtgaaattcataatatgcgtagaagacatgcacaaactttttttttttttggattaaagaacagtaagagtatagaataatagaatataataacaatatattgagaatctttgatttcaggaccaagggaattcgaagatacaggggaatgtttttgaggatgagcttttagttaaggttcctgggagtgcgtactgttcaggaaataatatggatggtggaggtgaagggccatcaaccagcaaagaaatttctgcatctacaaacagtgtatagtatactcagcacattgtaatgagagaaaagaaaaaggaactacatagagggtagggtctttagtaaaatataaa

SEQ ID NO: 256181 - DNA, 1749 bp, Cannabis indica
ggctaaaaatagcctaacagatgatattcaaaacatcttactcctatcaacaactatattttagtcacaagcctaaagttataattctcaaacaacaagtaaatcacatataatccatatatctttaacatgcaatacagttcaagaaatcaaaaaaaggataaaatttacatgatgatgaattagtcaataattctggactcgagtagaaatatggtctgggagggcacacgctaacatcgattgacagttgtaagggaactctttccacaacaacatggtctagacaatcaatccttactgcgatggcattggcgtagtcatctagagaatcgttttcagaaatgaaatccagagttgtaacttcttctcgtgacgtagtcgagataactgggggtggtgcacctgggaattctcgagctctaatttgaagaagttgaatgcaaaaattgatgtcatgctatagaatggtttggtttgtgtttgatcctggttccagtttgtattttactctcaaaatttctaggtttgaaacaagaaattttgaaaatttaggtaaaagtggcaatagtttccattaagtatttatacctacgaggaacgatccgtgtaaagccaaggtcaatggccaaatttcatctttcaaaaacacaaagtagatccaacgtctcggaatccatcagtcaggcattgaatgccgcatttggaaccgaggcagatcaaatgataaaattctactcgagactcgtgccgaaataaatagtcatcagttcgttcactttgccacacacgcttcatcaagcgagccgatgctacatgaaccaataagataatgttgttggaacttattttatcaggatctagatttactaacatgtatgttgattatagaactataatccaacatcctaaatatgaatttttttaaaataatgaaataaacacatataaagttataggaaaatttacattcgtagcagcggaagataatgtctccttttatttagatctctaacccttgatcctttatgtcacagagtatgatcaagatctaaacatggatcttcttctgtttttagaattcttcacaatcttctacaaaggcctgagtattgacttgaattgttagggcaattcctcaattcactaagggttcgaaaaattttagaggaagaagaagagggttttgaactctagctaagaggttctctctttattttttaagttgtctgacaaagtgaagattaggttttttattagtttagaaaataagagcatcttattctattaataggatttcatctagggttaggtttagaattatatgaaaatataaaagatgaaataatggctctaacttaacccttgttggtcgaacactaatgggccctacaggtttcaattttgctattttagttaagagcttatctttgctttcacaaatgtcatattttaattctaattaactctataaatgtcaaatatatctatttaataattataaataattattaaattaaattgtcatttaacttatttattaattagaccttacaaagtctattaattaataaataaaccttaaatcttttcttttttctcaaatgagccattgcttaatgaaaatccataaacaagacatagtcttatttagaattctaattgattaattaaaacaaattgtttaagtctacaaaaaaatattatcccagacattgtggggactatgggcctatgtaactaagctcc

SEQ ID NO: 256182 - DNA, 4333 bp, Cannabis indica
aataataataataaataaaaagggtacccaattcttattattaaatagtgagtatcttacctcagtattaatggaatggaagattattttttagaagaaaattttaaaactccataatagctctaaaaaagaaaaaagagaaagatattgttaaaaaaaaaatgtcatcagccatgattaattatgaacaatccagatcttcaagccaccaaactttattagtttctacaaataaagcatacttagcaaagattgtaagcaataatattaactgtgctaacacaatgaataactcgcattattaaagagagttatattgcaatgaatgtcacgaaaaactaaacttgaaggcgagcccaaagaaatattattgttaatcatattaaccatattaagatagtcagtctcaaactgaacattttccagaccaaaaagataacttgaattcctacatgatgaagaacaagagctttagcaacttcagcctaaaaatgttcaatcatgtgccaaatagtcgaggcaaaaactaatcccatgagtatcacgtataaccatatccataccacaaaaaaactcatcacatctaaaactgcatcaatgttaaccttgaagaagcccactaaaaggggccccaatgaggcacatgagaagagaggaagaagacacgagcaaccttgttgccctcacagaaacaatctctcttggtttcaaaagagacttttgataatcatacaaaaaatcacgagcccaattgaccaccagctcaagaaaaaaaaaaaaatactatgcacctttttatttctcctataccaaccttcacataatgacaagagctagggaaattattctttaagtgtgtctttagtctgtggcgtggggctagatgagtttttctattttctcagattgtcaaatggttgtacagggtttgaatgctaggaaggttcccatttggcaggctcacaagacttttgatgacacctttcaggtcttctctggtctccccaatgttcatatgtgttgaattcctcgtgcttataatagagctgcccatgacttagcaacccaagctgctagcctgctgcaaattccttttttaagtccttcactactgggaagtggcaccttttgttgccactataaactttggcttctaagcttttttgtctttcaataaaaggttggttttaataagaaaaaagaagaagaagaagctaattccacttgagaaattggcaacagtctataaattgatagttttagtgtaaggatgaataagtggttaaaaaaaaaagctctttagtctttaataccgaagcttataaagaatcaccgtattattagtcacatttatcttttggttgttatatttacactcaaaatatgaagcatcaatattttttattatattaaaagttaaaacatatatttaaatcttaaattttatttacaccctaattttaataattaaaattgacattctcattattaatttgtcgaaaattacattaattattacaacacaacaaaaagaatgaagaaaaaaaatcgtacaacataaaaaaataaatttattattattttaaattacttttttttttcatatatgtatttatatttgaaactatatttggcatttgtaactttataatccaattagttttaaatcaacaaaatcgaacttacaattttgttttatttttattgtttgtaaaatagtgtacaaatcaaactattttatagaaagtacataaaatgaatataaataagaatattttgtaattttatgatgtatagatgtattgagtgtaaaaaaaaatttcatttttttttacctatttcatctgttccttataaatagaagaaaactccatccaagagaatctaatagaagaaagaataatacaactcaacctagctttattagacgtaatcttcctaaattccgtatccatgtaaggaaatggtcccagacaaagtttgttctaaggtttatcatgtctctaacttgttactcttttcacgatttacttgggggacacagccaatgatatgcttagttctcaagcactcttcattgcaacaatccaaaatacaatacccattttcatgtttttatggttaaaatacccaaacaccttttcttttcttttctttttttttttaattaagatataatatgaacccgttacacccatacgtacctgcttgcttgtacatttttaaatattgattaaccactcagatgaaaatgaaaaaaaagcctacataatttcataacgaagatgcataaaaaaaaacactatatcacggcaccaaacattaacattttcatatatcaaagccatttcacagtacatcatcatacacatattaatcattgataaactaataatataatagaccttacaactcacaccacacccaatacaagacagtatactttgcagtataagagaacagaaaacccaatgtctaaaaccttctgtatacaggagaatactaagcctcattgcgtttcacctcacaacctgtcctacatttcccgtctgcgtctgcatcttcttcggctcaatcttacttccatcagctcttagatttgagagcaaggcatctcttcctgataatactatttcaaaaaagccatctacttccttcgtaagaagctcaattcctcctgaaaagctatcacctactgttcgcaattctgtaacggaattctggaaaacatcctcatgatcagaggcagacccttcttggatcataggatataatctcttaagtgtaacatcaacagcttccagctctgtcaacgcaatgggtttcctgttagaagtatttctaatttccttatttacactagtctgcaagtccataaaagcttgtgcccacaagtatgtctcggaaacatttaaattgaacagcttctctgcagaaccagagaagacagcagtaaagacgctatacacaaaaacaatctccaccttaactccatacatagcacgcatcaaaatctttcctttagcagagttcttaacctttggaagatcaagtgattcaaccagactatctaatattgtccagcacttgtcaagtctaggattctttgtatgaatatgctttctaaatccatcaactgaagagcaggcacgtgcaagctgctttgaaggggtgactccagattatgcatggcacactttaggaaaagctgtccctgattcaaccgtgagagctccgagttgaaagcattgcatatgtcaagcaacttcacgctgatgtccaagtacacatcaatccatttctcatcccagtcacaaacaggaagatcaagattattaatgagggcttttatgtcattgtaagtttcagaaatggattccattgccaacttcatccacgacaaactgaatatatcactcttgttagttgggttcagcttaatcattctctgagccaaggtttcctcaaaagagttcaacagctgaagaagcttgggagacaactgcaagcccttaggtgatatcattctaaagggatttccaaaagggaagaaagctcggtgcggttcctgtgggcgactcatattcaaaagtagtatctgcaaagacaatactgtgttagaaatcctactaaaaaaccaaggaataaaaatactggccttgccattgtaggataaaactcaacacaaaataaatttggcttgccaaccaaaacaatcagcaaataataaaataccctagctggttaagttctaaccatgaatttacagggaaaaataaaataaagaattcaaaggaataaaaaacgagctcctaaggagagcagaaaggaatattttgttactatgtttgcaaaacattgtagcaatcagatggttgattgggtaccggatgagactgctaaggagagcagaaataatttcaaataaaccacctagaaaacgaaaactaattgtaagatgagtacagaatttcatgaaaatagcctttatgaaaattttattagcaaaataactttataaaaaaatttcttagcaaaataacctggtcgcaaaaacaaccatgaataacatgtgcgaccataaacgacccttatatagatctacacagtgcgacctagcatagagaaaattaagtgaggttattttgtaaattttagtatttgatatggttagcttggcaaatttctcaaatttcattctgaaagaagcctcatctcagttcctctatccagtttttcagcaaccaaacgaagtcaattatatctatacagccaaaccctaacccttttcgtccaaaaaaaaaaaaatactcttgatccccaaactctcgac

SEQ ID NO: 256183 - DNA, 2432 bp, Cannabis indica
tagtcacaataaaaaattacttgttactaaaatataatatttagatacgatttgttactaatttagttttagtcacaacaaatattgtaactaaaagtaataccttttagtgacaacataaaaataatgatttataattaatcacaacttttctactttaagttataagttgttgtgagtactaaaagtaatattttttgcagtgttgtaaaagaaaaaaaataaaaagactttcaaaattggaaattttattacaatcacaaaaatatgaataacaatttaaatattattcaatagcatgtaataattttttattgagtatgtaaatattgtttgtaaaattataacatatagtaacaaacatgaaaaacattagtcataaaattatatattatagatcaaaaatgcgatatttacaatcatacccttctgtatttttgtaaaaagaaaaattcatgtaccctatttttattttttttattttttttgtcaaaatttaaagcaattttaaaattcccccaaaaaataatcatttagtaacaatctttagacaaaagataaattttgctaattaattgtcaaaacataataatgaaattttcctaactaaaaataagataattattatagtgaatgtgaaaatgtatgtaaatgaataataaaacgtaacacttacaaagattattgcataaagattttgacttgtcaaggaaaatccaagatcacaattattatgaaaccttagaagaacatcaacaaaatcttcatctattacttcaccatcacctttctctgttgtttttttctccatgtgttcttgaatgatttcttcaaatatcacggctgccctttgtttgagactctcgagcttaggcctagaacggctaatttggtgaaataatttaaccgaaggaaacaaatccgaaagtgtaaaccctaacgatatctgagtagcttccatcaacacggacaagaactctttgttgtgaattcttgtcctaccacacgctgcacgcgaaataataccatacatcaacatgttaagtctcttattgagattaataacacttccaacattagatgaaattgattctatgaaattaaacatctctttctctctaacgggtttgaaagactgaactcttgtagcgcttaaaagctcttgcgtgaaaatctttcgcaattgcctccaataatcaccatatggagcaaaagcaagatctgttgaatcatagaagattattttcgaaaaaagaatggagggtcttgatgcaaaagccatatcatggactctcatgacttgtttggcatattgtggtgatgagattactatggttggaatttctccaattcttaagtatatcaatggtccatgtttcttggctaaatcacttagtttttgataaactaaaggggtaaaaataagttggtgaatgtttcccaaaataggtaatttccatggtcctggagggagttttgaatgtgatgaggttatggtttgtgtgagtaattttgttaccataaacacaaagatgaaagagaagaaaaggaattggagagattgtagttggatctccatgtagaaattattaagtgattgttgagttgagtaagctatagctttgtcctttaaagtatattaaagctaatattttgtcatcttacttcaattatttttcccttttattaatgaaaaaagatgaatagatcaaagtagttggtagaaaaagaaagaaacgtgttcatcatagattgttggaaaatgatgtcattgattaagtaatcttaatattatttttgtgttgtattctaagtggcttaagtgtgagtaatttaaattttgggattctcactttcaaaaatattttaaaaaaatattaaaaagagaattgaactcacattattatggaatgtgtgatacattccaaccaactaaactataaatattcattgtctataatatacttaattttacttaaattaaagtttaatgaaatcttttattttttatttttggactttagaaagtgtgagccctagacacggacctagctcacctatgtctagagtcggtaaacccgattctaggttaaggcagactagagctaaagcagactaagcccgtacttagggcccactcaaacagaagtctaaattccttatatagtataagtcttactaccataatgacactagtaattagataactattactttagtatgatattaaacttattaagaagaaataaacttatatatgtgttttgttttatataatagtaagtattatacttaataataattaaacaaatatattttcgaatgcgctctataaatattttttttttccttgtaaaaaagaagaaagagaatacaagaggaaatcactttataatgatttgtcttttctcttgtcatgttgtgcaagtggc

SEQ ID NO: 256184 - DNA, 2937 bp, Cannabis indica
tggcaagtccagcataatttccatcctgcaaagcttgtgcaatagttctaccgaacgatgctggcaaataggaaataatgcttgtgaatatcaaaagtgatgtgccattcccgagttttaggtccgagattctctccccaatgtatgttgttagtactgaaccaagtgttaataatgtaacagatgatagaacccactctgtactgaagtcattcacataaggccgaaggaagaacacttgaccaatggcctgccatgaaaaatcacaaaccgattagtgataacacatattttatctagattgtagagtgaaagtgatcgattgcaatgcattttgtcgagtcaaatgaattaattgttgttggttgagatcctaacctgtactacggcaaacccaactgaagcataccgagtatactgaagaattttctttcttcctgcttccccttctctcttctgaagatcctgtagtttaggataaatttgtgcaagaagttggaacacaatttgtgcgttgatgaatggaacaatgccaagtgagcatatcccaagtctaccaataccacctccagaaaaagaatctagagtgcttagtaaactgttctgatccaagtttcctacgaaagcttctctattaaccccgccgagaggtacatatataccaagtcgagagagggccaagtaccctaaaagcatgagaaacttcccgggcaatgggcctttgaagaagtcaccaaaatctatggaactatcctccattgcagctgtcaagatcaaggtatattgatcaactataacagcaaccaaaaaagaagtccactttgaaaaacataaaagggaatttcatcaataaggatcatcaaagcaaacctgccattcctcgggctgagggcttctcattttttgtaccagaagtactctcaaatgtttgtgataccaagccaacaaaaccttcccaagctgtattcaaaccagaagatacatctggattgatacccaagggatcaaaaactgcaccttcagagctgaaaagtcattacaatcagcaaaagagatgaatctcattgtgatattttaccaaccatttgttaataaattttgaagaaatataataaattgaaattttaattcgtgttattcttctgtgaagtactgaaaaaagtgttatttaaacatcgtgcataagatctttattctttattttgttaaaagaaatttggaaagtgaagtcctaatttctaaacaaagaattgttataaactcttcaaagagtaatatgaaaaaggagcttggtataattaaatttgctatataaatcagcaaaagaaaatggaatttgagactttggctggtaagattactaaatgactaaagaaagattatcattgtctgataaaaatgaagaaaatcagtgcttagttattgtgggtgtacacgttgaaaaatttgtagattttaaaaaaggtcaaagaccccaacacccagtggcactttggactcacaacggatcgtgataacatgttagaatttgagataagttgaatgaggttctatctcaaaaccaaatgggaatgagagaagtagctcattcatcttatatatgtcaatttatttccacacattaacactaaatctaatattatctatgccattactttgccagtaatcaactattcctaataaaactataaaatgaatcaatcaataatcttcacatcatatgtcatctttctggtattggcatttaacataaacaagcttaaaaaaacatctacatgggtggcaatggcacctctcactacatacctaaccactattcaccacaacctctttcattgacaagtctcttaacaacttgagcaatcatttaatcagttcctaaatcagcacacacagttcaatctaatcttaaccactactcactctcaattactcaaaatccttactttgtcaaacatttcccttctataatcatcaacaggaacatcaaacagcaaaaacaagtaatcttcttcactagggaaaaaaataaaactagaccaaaaagacccaattggagaaaagtaataaaaatccaatcttggagagcataattccataaaaatgggaacaaatgtaaagaataaagagaaaggtgaaaagggtaagcgggaaacctgttggattgaaggccaaagctccatgaattggtgttgtaaggttttctgtgaagattcaagctggcacggcatagtgatgaagttcttagtctgagagagggcttagaacagacattgttattatgagataaggaagagtagcagagtggagaggaagaagaagcttctctaaccgttatcaacataactatctctctctctctctctctctctctctggaaccgtttccttagctctttctcccttcacagcttcggtggttgttcttccttgctgtacggagtaaaaactgtgtacaactatggtgtctgtgtgataagatttgccacgtcatcttctctgctatggtataatttttttctgaaatatttcataaataccaaaaatgaaaagaaattacaaaaacgggagcgtagggtaaataattgcataagtacccaaaattttatgtttgtaagcggcataaacccaatgtttatttttagcggcataagtacccaatatttataaaactgtaattttcttccagttttgtcagtacaaattctgttttgaatttattaaaaaaatatttagaagtaactgatattatatatttctatctagacctgatgatcaaaaatttaggtgttatatgtgccatgtttaagacaatatcagaatctgtactgacaaaattaaagaaaaattacatttttgcaaacattgggtacttatgccgttaaaaataaacattgagtttatgccgcttacaattataaaactttaggtacttatg

SEQ ID NO: 256185 - DNA, 4322 bp, Cannabis indica
caatctgcaacatctcaagagtctggatttatcatttaacaatttcaactctacgatcccagatgagattggtaacctctcaactttgagttatctaaatttgtcgaatgctggctttgttgggcaaatcccaattaccatatcacacttgacaaacttggtcacacttgatatctcgactctatcatttttaagcaattcttttctgaaacttgagaacccagacttggagatgctggttcagaacctttccatgcttgaagaactatatcttgatggtgtgaacatatcagcacctgggagtgagtggtgcaaggccttgtcatcttctgtgccaaaattacgagttttgagcatgatgaactgtgatctttctggccctcttgatgaatctcttgggagtcttcaatctctgtcaatgattagccttgataataataatttgtctactatggttccagcatcctttgcaaatttctcaaatttgacttccttgactctcatcttatgcggattgtatggaaattttcctaaggagatttttcagttaccaacactgcagaatattgatgtaacaagcaattcgaaacttcaaggttctttgccagaatttcaccaaaataattctcttaagagactggtactcagttcaagtaacttttcaggaggattgccaacatcgattggtaacctttggaacttgtcctggttagacttttccggatgcaattttagcggggcacttccaaaatcattgggtgaactacgacaactggtgtacttggatttatctattaataaattcaccggtcaaatcccatttttcaatatggccaaaaacctgacacgaatagatctatcccacaatatgataaatggagaaattacatccaactgggaaggccttctaaagctggttaatgtggacttgagccataatgctcttagcgggactattcctgctgccttgtttgtacttccatcagtgcaaaagattcagctctccttcaacaattttacaggtcaagttcctgagtttccaattcctagttcatcagtattggatactcttgatttgagcagcaataatctagaagggtaccttccgaagtccatctttgagctcagaagacttaaaattctattactgtcctctaacaaattcaacggcaccatgcaatttgatctgattcagaaactgagaaatcttacttcacttgacctttcttacaacaacttgtcagtcagagttagtgcaaatggtaaaggttctactttgcttccctttccgcaacttaccacattgaaacttgcctcttgtgaactgactacatttcctgatatgaagaatcaatcaaaattactcaatttggacctttcaaacaaccaacttcatggggagatgcctaattggatttggaagctcggcaatggcagtcttacccaactgaatctttcccacaatcatctgacgagcctgcaagaaccttatactccctctaccagtctctccatcattgacctacattccaacaatctccgtgggaagattccacttctaccaccaacttgtacctatatagatttctctagcaacaactttaattcctcaattcccgcagacattggaagcaaaattgaattcactatatttttctccatttcaaataacaatgttacaggtattctgccaacatccatatgtaatgcaacctggcttgaagtacttgacctgtcttataataatttagacagagagatacctgaatgtctgtttatgagtcaaactcttggggtgctgaatatacgagggaacaacttcagaggctcaattcctaaagcctttccagttgattgtgctttagagactttggatctcaacgggaattcaatagaaggagaaattccaagctctctatcctattgcaccagattagaggtcttggaccttgggaacaattatatcagtggtgattttccttgcatgttgaagcacatatccacattaagagtacttgtgctacgatccaacaggtttaaggggcgcattggatgccatgataccagtggaaattggactaaccttcaaattatcgacttagctcacaacaactttagtggtgatctatccagacactgcttaaaaagatggaaaggaatgttggttgatgatgctatgctcaaacacttacagtttgaatttctagaattcagttcatcgcgatattatcaagatgctgttacagttaccttcaaaggtctagagctgaagctgcagaagatccttactgtcttcacttccattgacctttcttgcaaccatcttgttggatcaataccagtggaaataggcgaactacaagcactctatgttctcaacttgtccagtaatgctttcacaggagaaatcccttcatctattgggaacttgaaccagttggaatccttagacctctcaagcaacaacctcaacggatcaatcccatcaacacttgcaaaccttaacttcctctcattcttgaatctctcatataatggtctgaccggaccaattccatctggcactcaaattcaaacattttcaccagaatgctttgctggaaataaagctctatgtggaccacctttgattcatgtatgcaagtcccacaacgcagaagatactgttctatcaggggtcccaagaaccgagttagagtggcaatcaatttacacaggaatcgggtttggagtaggaggaggagcagtttttgtgctgctaatgctctggaacgaaggtaaaacctggttggaggatagcgttgataagattcttctagtgattcttcctatgattggatacacttacaaacctcgccatgaatgggatgatgaagatgaggaagatacagaatactggggctcagattctgcagaagacagtgaagattatgaaatggaattgaatgagccacagggtccatactgtgtattctgttcaaaactagatatcagtagaaagaaggtaatgcatgaccccagttgtacatgtcattcaccatccaattcttcttcctcctcaaattcttcctcttcatcctcaggtttcacataaaaagttcaaatcttttcttcttatttttgacattctttctttcctttaggtttcttgttttgtagtttgtatatatattcatagagataagtacataattgtaaaactctgataaaaacaagaacagagcagggttgaggactgtaccttaataagcaaatttcccaattgtctgaggttttgggcattcttttctcttctcctctctaatcaaaggaaatgattggctatcttgtttatgttaactgcaaataaaaattaaaaattacatgctaaatcatgtcgaagatctttcacacaatttatcaaacagttggaatgctaactacactacttaaattaatgttcgtatgaatcaaaattagaaactttgtagttctatgtacctgattatacgaaggtcctttgctttttcaaaatcttattcatggctgatctctaactctataacattcgttaaatcgaaagagagaaaaaacgttaaaacatttcttgaaaagaaaagatttggcaataattctacaaacaattagatttttttctctttttcctttaagatatatagcatatatagtttaggccataatttggaattgttaccatatcaaaaatccctaatcactataatcacgtgtaagaaaccatgaaaacctagtaagaattgctttttccaaataaagctggctacaaatattgtaacttgtaaggtgatataatatactatttttttttctcttgtaagttgatattacattaccattgagattggaagggctgggacctcctacttttctggaggtaatctaatcacatcaaattcaccatttggtaatcatttaacaacaattaaaacaagagaaagatgaacacaataccactttcttttatgttcttacattcaaaatattttaatgccatcgatgtaaattggaatgaatactgtatcaaaaagcacatcagttaaagaggtaacttgtttgtgaccatctataaacaaagccatgtataatcaagggctcagtcgtcttctgagttcctcgacaacactccctctttggataacatcttcggctttggattcgacgtctttcagtctcactgtcccctccttaacttgacgttcacccaccatcaacatccatgggattttagactcttccgcatgacgaaagtgcttatccggtcttttagccaccaagtattctgcttttatttttgcatcccatag

SEQ ID NO: 256186 - DNA, 1849 bp, Cannabis indica
ggattggagtatttacacaatggctgcaaaccacctatagtgcatagagatgtaaagacttcaaatatattaataacagataattttcatgctaaaatagctgattttggtttgtctagaatttttccgacagacaatggtactcatatatcaaccgttgttgctggcacagtaggttatttcgatccagagtaagtataataaatattaagggaatttatttaattgaaacaaatttatatatatttataaaaataatttttatatttgatgaaaattgaagggaaagaaatacatagctactactaatatatcatataagtctctcaaatataatttcttgacttacattcaggtactacattaaaaatagattaaacgagaaaagtgatgtttatagttttggagttgttctacttgagattattacaagtagaccggttataagtgtagcccaggataagaggactcacctcaaagattgggttagtgtaatgatagcaaatggagatattaatgatattgttgatccaagattaaggggacattttaaaataaactctgtgtggaaagcagttgagatatcaatggcttgtttagcacattcatccattacaaggccaaacatgaatcaggttgtgtgtgagctaaaggagtgtttggtagctcaattatctggaaggaattgaatcatggccaaatgattccacaaatgtactctataaatgtgactaatcccttggcacgatagcagtacaatattattatgcaattgatttcatttatgcagcatttttctcttttctgaacttccttttttaattctgccagtttttgtgtggatataaaatattaatttttgtatttgataacaatatatcttggccaccattattttgtgaccctgattgaataatgatattctacagtaagtaaaattagtgtatatatatgatattaagcataggttgttgccttccatgattaatatagtcagagagctatactaggattaaggacacttgcatattttttttttcttccttttgttcatatccagaagaagttacatgcatctaatgctcagacttgaccaactcttgaacatagtgtatgtactcgttcattagatatttagatcccttaaaacataaaaaaaaggcttaattgatcggaattggaaagagaacacacaatacttaactcaataaacagctatatacctctgttattccagtttttccttttgcccatcaactgtctacaaagccaaacacaacatccacaattctatcaggatagagttgctcatagtttttgctagggcctattgtcctttttctgattgagtttcagaatggtgtaatgtgatataacccttctgagttaaggtctattttggcatgaagatttgttggaaatgagttcattgttttgctttgctaactgtaatttctaatgaaattttgtaagtttcactgggaaaaaattataaaaaaaaacaatcaaagacttatatttctttaaaattaaactgcatatctctaaattctaatctcaaatagcctatcattttaactagtattttaaaagaattatcatgtaaactaaaatttgccatccaactttaaaatttgtttactgaaatgcaatgccaagtgaacaatcagcctttcgattcatatataggaattcactttcaaaagtgcacactctaaacttatcaaaacccaatgtactacccaacacagaaaaataaaactaaattaaacatagtcctgatcaattcaagtaagcattacgaaaacgaaaggttgaaaaaatacaggtaaaaggagagaatcattca

SEQ ID NO: 256187 - DNA, 1787 bp, Cannabis indica
tatgtggtattaacttttatagacacctaaatatataatattttagtataaattaaagtttaacataatattatataaaaatatgatatataattcagttcaatataatacaatacaatacgatttaatacgcgttctagacgagctcttgatagggaagtgcatggtattattagttattgctcattggcttgactacaattaaaacaaagggttactcataggtaatataagcttttgtagcctcaagtggttttgctttatagacagacaagacctccggcttagcttgggatttgcttttgtgtcttcctcggtttgtggcaaagcttccaagttgaagcattttcaatgctctattatttaactttgtattatacaaacatgtatatatttatatataatttaatatatgtttatattccttgatcaaaataaataaaaactcatgtataatatacatatagaggtatgaaaagtgatcaacatcactaccttttaggaataatatagtggatggtagtggagtattattaaatgattatacgtatataaagtatatataatataaacctcaatatacctcatgacatttctataaacagtaatttatacatacctctatatatatatatataaatatataataaaagagagagatcatatatgcatggtagaaaattttagatgtgacgcggctaggcttgtttccacgtacattaataaattatatatatatatattattattacatattattctttttggattaatgctatgctatatatgtgtatttaatatttatatatttataatcaatgttgggattctctcatcagctttatgaatatgggattcttttatattgtgagatcatgatgggtttctggccgcccaatcatgctggctggctggcttatctcaatgaaagtgattcctttgcttcctccttaagccaattttcatcaaccaatcactctccctttccttttacctaattagtaacatttttctcaatttatatttaaataggtttttaatttaatgtttaaccaacattacatgcatgaccatatttgagatttttattttttttgaaaaaaaagaaacaataaaaggacaataataataggaaaccactaattgattcctttacttgatgatcataatatgggcatagctatatgtataaagaaaacaaaatacctacactactacacacttatccttacacattgacattcgaaccctttttctctgtcacaacatacaacattatgatttttatgagaacagatttttattgtacactcctgtaatttaacaaagctaataaaaaaataataattatatattaaaagaaaattgaatagcatttctgatagcttatttcactagtgttcttttattgtaattaatgaatctgtgtgcacacgtgcgagcatatcttatgctaactaataaaatcatgactgctgctataaactttctcaatacgtatataaatttaacggttattataaaaatttatttctttatttatgtaattttactgtattaaatttttaaaaatattatgttaaattttaaaattacaaaatattatattttaataaaaaatatacaaaaaaaaaaaaaaccttaaaaacaaccaagacaacataaaaataactctaaaataacctaacaaacaatatgaaaataaatatagaaggcaaagattctattgaccgagtcaaaaagtgaatatatataatataatatatatgtatataaaaaaaaaatta

SEQ ID NO: 256188 - DNA, 3677 bp, Cannabis indica
ttagatgatgtttgttttttcatatttatttaccttgaatttttttctctaattcgattatgggtatatttaaagtttttccgatctccttctcttcaaattctctcctatgtacgctttcagtttttgtttataggttgtttttgcattttttgacaacaatggaggttgatttctctgttttttattttttcgttttttgtatttggatttttcgagatttaattgctttttccttgagatctacatcttgatttgagctgattttcctgatttttgaaataaaacaatggagatttggtgaattgaggtgttttgactggctcatgaagaaggaggaatttcctctttttttgttaggctggtatttttgtaaatacaaacttttattttctatttatgtttatttttcctttatagggtataaatgtaaaatgctgcctttattagtttattatagaaaaaaccttttatatttattagatttttaaattactattttctttaaattgtatatatatttttttaaaaaattatataaaaaagtatagatatggatggattggataggtcacattaacatgtcaatcaacattcaatccgcacaagtgcagattttgaattttcaaattcaattcaatctgcactttgtgaattgaattgtgcggattggatcgactatcttatgaacactcctaataacatatatgatggtctttttctttaacattatactgcattattatatccaaaacttgtacattacaaattacaatgcactattagatgaacttcctaatattattacatggcctatgcctcttttgcttgtaccattcggatacagatgcagctttgtacagaaattcagatagaaccaaacttcagcttcttacttccagcctcagttccattgttcctaatgaccaaatcttggcatccatattttggatccaagcgtttgaaattggaatttccacaaaatatctgaattctttacaatgaaatagagctcaaaaaaaggtcacatccagtactggaatcatctgcagggttgagatcagaaccatatttactgagccactccgttgcactggtttagacaagctacattctccatttcaattagcctgcggtcacatttttgtcttgtttcgcgcttatctggttcagttttctcttgatcttccaaatttttctgcattattgttgtttctcattcagtcaagcagaaaatacttccaagttgaggccgacaagatcacccacctccttctcaagctacaagtacatagaaaagactaatgacggttatataagttggtctaccactaaggcttacgtaattattttgtggttccgggtctgttatacaggcataataaagaaaattggttcactatcaatggatgagtgttggccgaaccttcacaatttgagaattttctggcaaaacgacctgcttctctaaattagtggcagaaagctggagtgaaacaccacggatgtctttacgtgtcttcgtgcatcccttcatatgttttacaacaagatttattaagcttctcaatttatttaatgtaagatgtaacatacacagcaagtaacttactgaacccaaatgtccagactggccacagttgtagcaagagtcagaaattagaattccaccatgtgaatcagcacaacacaggtggccgagagccttgcaaacataacaatgtatttcctgcccacacaataatatattcacggcacatatgaatctttctatcataggacacaagggaacaacagattcaagaaaaagccaagcatacacaaaaaaaaattcaaaaaaaaagttatgaaggaagaagaaaaagatcttaaactattgtacataccttgatatcactaggacaataatcattggagcataaaaacatatcatgtccagagtccccacatctaagacaaattataggacttggattatctacttggcttccattggggcaatgtctagcaacatgacctcgttctttacataaaaagcaattccgacgctgtgggtacagcaataaagcatgtaagtggcataactacaaaactaaaaatcagtacttataaaatgcaagcacaaagtatcaaataatcagtataaagcccacgattcttatactcttcaatctctcttctctttttcttccatttgattatcaccatcatattcttaacatggtatgtaaaaagaagagcatttcaagaaaggaataaataactacaacatccaccatacaaacagaatgtgaatttaaggaaaacttataagctataccatcttgcaacgtctccaactgtgctcaaaagttccgcaaacaaagcatggtctccttcgcttttgtgctctacagttattttctctatgcccttcttcgccacaattgcggcacacgcaagtaatttcttgagggggatcaaaatatctaggtcgatgctaaagtaaaatacaatgggaaaacaaatgtaagatgactgtgcaacatctccaaataagagctcaaatatagttgtttcaactcacaaggcgcttttgtaaaacaatactgtttttaatcacgtttgattccgtttccacttttccaattgacaccatttcttgatgttgaccaatgttcgcttgcttttcattgtccaccatattaatctatagataattagagtaaaagattgcagcatgagcttaggcaaagtcaacctattcttgaaattagtagtaacaacgcatatggtacgtaacacactgcagggtaagtcaactattcttctctcctcaagtcactagtcatgattgagaatataaataatttcatttctagtatttttagtcttaccaatgttgcagaactaagcttacatattcaaaactagaaagatagccaattccaaactcattccctcgatttcaatctctacaactaaatctttcccttgcaacataaagataagaacttcgtaactaaatcgaaaaaggacgaaaatggtgaaagacctacttacagtcatgtcgtctaaatcgtcaatcacaaactgatgatccatcttcttcttcttattcttaatcttcattctcttcctcttcttcccactggagaaagcctcaaacccaataacagcactgaggctatcaaactcactgagttcggaaatcaaattacactcgtcagccatagatctcacacctcacactccctcttctttcgactttttcttttcccttgtacaatttcctctctacggccaattagatgagaaaatggacatttgtgagctcagcccaagcacgagcactgtttccaattgatacagaaatggccgtttagtctattttttgggactgatgaataaactggtagttgccagtttggtaggttgaacttgagccgaagaaagaaagaaaaaaaaaggctaaagtgtatttattattattttattttaagtttgccgcataaatatttattttgtttagtttgttgctaataaacacttcataaatataaataaaatttataaatgtgtttatatatactagcaaaaattacgtgcgaggcacgtatactaaactttatgctagttttttctatgttatttgaaagtgatacaattaaaaattaaagaaaaaatattattagtta

SEQ ID NO: 256189 - DNA, 1896 bp, Cannabis indica
aaaaaaataaaaaacaataaataaaaaaagaatcaccatacagatcaaaaccacaatcaaatttttcaaaatgttatcatttattattggtgctatatatcatccaaaagctgatgattgttttgcttccttcattgttacaatttgaagtagaatattattataccattttatcacacatttacaacaaacattaatattattacatgcttaaagaatatcagacaaacataactctactcaatcaataaaagccactaggcccacatctggtttctcattgtaaactaaacagagtcaatcagagaaatgaaactctcattagttgactgtatatgaattactcaaactagtacggtatcattaatgcagacgagctaggaagaaatgaatggtacagctattcccaaatttcacacaatagcatggactttatagattattagaaaagcaaatttcagattaatggtacaaaacaaatagtgaggcattcaaaggtctttaaacaacaaaatgaaagagcaataaaggcaactccttttgattactgacgtctcccctatttctcaaccccacctcaccactagacaaacccattgagcacatgttacaaaacttggtaatagttctctgagagatcaaatgctggacactgcaaatgggaggtggctattcaaaactcaggttatttcaccaagatttcgttttcctcttaggtttgctcagaaaatttgttcatgttctaatttcttgttaaaattacattaatggaatcaattcaacatcagcaaacgactttaaattttgttttgttaaaacatatattattagcaaacgttgaaatagttcctttctttaagaaaaaaaaaatactttatttatggggaaaaaacaatacagatgacacttcgtgttttttcaaacttttaaacaatccattaattactactttgtctgttaaataaaacaggtgatattatgtacgaatttatgtactcacgtgaaaaacaataataaaagcctataggacctactccaataatttgatttgaactactctcaatccaatttggttatttatacataatggtattgggcataacaacagaatagtatatctatacagaatatatacctcaggattaggataatgacaaccacagccgacggttattccaagcccaaattacacggcaaagtagccataatcacaggcggagccagcggcatcggcgaagccaccgcacgactgtttgcggataacggtactgcaatggtagttatcgccgatattcaggatgaacttggacgccaagtggcccaatcaatcggcgctggaaggtgcacgtacgcgcgttgtgatgtcaccgacgaagaacaggtaaaattcacagttgactggactgttcagaagtaccatcgcctggacatcatgttctgcaatgccggaatctgtagcagccaaccgcagaccgtattggacctcgatctctcaactttcgaccggcttctggaggtgaacgcccgaggagttgcggcgtacgtgaagcatgcggcgcgtgcgatggtggagcggcgcgtgagaggaagcgttgtttgcacggcgagcgtggctgcctctgtcggtttgaggacacggacagattactgcatgtcgaagcacgcggtgttggggctagtgagatcggcgagcttgcagctggggaagcacggcgttagggtgaactgtgtctcgccgagcgggctggcgacgccgcttacgtgcgccgccaatggggtgcaggcggaggaacttgagaaacgttacgaaaggtcttcgtgtttgaaaggagtggtgctgaagacgcgacacgtggctgatgcggttttgtttctcgcgagtgatgaatctgagtt

SEQ ID NO: 256190 - DNA, 2072 bp, Cannabis indica
catgaatttgagaatgagagagagacaaagattcaaaattttctaaaggtaagaaaaatcttttctttgatttagctttttaggttttgatagacaatttaaagagaattagtgaatcaaagcctttacgttcattttatagagcctctctaagtttaggattttagagtagagtgagctttagaaaaagataacaaatccaaaactaaagccttggccaaaatcaccatgtggacctcaaggttttgatgtttgccattttgtttcatttaatgaaacgtttttatattttcccaaaatactattttttttatgaatcagagaaattctattacaccaatcatcaatttgtacaacctaaatgacatcttgtaaaataaggcctatatgactatatacaagagagactaattacaataattcaaacgaataaacatctttttgggttacaaacttaggcataacaaaagttatcttaattttgatttgccactttgtttgttatactaactgttgcgagcttgtactagttgagttccaaatcttgttgtttctagcttgccatatgtagtacactagagttgtgatggaagcagctgaaacctccttaaacttgctttctttagccctatatatcctcctaaatagcccctgcaatgagttcaaattgaatttccagccaagccattatcccagctgcattagacaatcttgagaaaaatagattcaaaaaacagatggtccacagtttcagcagccctactagaaaataaacaactcgggtcatcagtgatgtggaatccgtggagcctctccttagtttttaatctcttcagcaatgcaatccataaaacaaagctatacttaggagtattaagtctacaccaagcatgtttgctccagtggaaatgctcttctgtctagtttagtagcttgtatccagaggaaataagatactttcttattgtgaattggacaggatccatcaagcttttgatctcatcttcgatctccaccaatttcctccaataccagctactctgaggtggggcattgtaaccccaccaatcctcttccttgatgtacacattgtgcatgcacttgacccacatattatctttctttattgtattgactagatgtttttgattaaggtagctcgattccagtcaaagatgtttaaaagtcctattccaccagctttcttaggcttgcacaccttgtcccaagctaagctccctgatcctatcatttggcttttacctttccatagaaaacttctatcgatgtcttgtatttctttgaataactttgttggaagtatcataatttgactccaataagtatggatagtcaaaagcacagaattaatcaagaccctccttcctacaaaagacaaatttctggaactccataccttgattttaccggtcattttctcaacaagcactctacaattagaagaagatatcctcttaacacaaataggcatgcctaggtacttaaaaggaataccttccttactgaatcctaagatgtcaataacttttttgatctcattttcctccatgccactgcataaatagcagattaactactcttaggctaaagaccagaggagattgaaaacagttttaaccctacaacataagatagatgcttttaaaatcacctctgcaaaataggggcacatcatctacaaaactcagatgatgaagcttcatatccccacatctttcatgaaatcagaaagctcttttccttcaaacttctctcataatcctacttaggtattccattctaagaacaaaatgttgaggagacattgggtctcctcctctcagtcctcgttagctttaaagaagccatgtagggttctattaaacataagagagaacttaagagttgtgacacattgcataacaagttgaataaacttgataggaaaatgaaaagcatgaagcatctcctcaagaatccccattccatggtatcataagctttttggatgtacaattttatcatacagttaggcttggtgttgcgatatttagcacacgcaagtgtacgta

SEQ ID NO: 256191 - DNA, 3625 bp, Cannabis indica
ttccgattattttatattttaacccgattgatttcttccattgattattctgattccaattgcagtttagtaaacatgccatttaatagattaacttttaaggaatcactactcactagctgctaatagcaaagcgacatgtgattaaattgctttgaattatttcattattttgttgatttatctctactccttaatatatataaataaataaataaataaagccaaactttgtgagtccaccatcatttattaagaaacaattaaaatccattcaaaaaaaaaaagaaacaattaaaataaatgatatttaatgggtctgcctacaaatttgagtcttttttcttggtaaaaggcagatatgccaatcctcttaatgattttttcaatatattttggagtgaatgttattttatttaaagacgactatcaattcttttataataattcacctaattccttggtcgattattatatataactaaataattagctagtaattttataatctgattgtgaaattcaatatgaatatatatcattattttgccctttaaatcgtgtatttctttcgatcttcttcatgttttttaaatatgtgtctttcttaaacttgttttaggggaaaacaaaaaagataagttgaaaaatatatatatttttttatatctattaataaaaaaaactcttatattatatttaattaaaatctatcaacttttatgagtgtattgcctaatatattcttgtcctttactttaagtgtagtacatgatttacattaatataaggggtataatgaggatattatctatgaaagtgaatatatcttaaagaatataaaaataaaagtaaaaattaaaatagataaagtaaagtaagtatacaatgcaatttcctccgatttaaaaagatattggtttgatgggctttgatgttcaaataagagtgttttcatgttagctagatgttgcattcaaaggtctatatatatatttatttaataacccttaaaacattacaaatgtagaaattgagcctgtattgatctagacaccataccttattttccacccatcttagcacacctattttggacttgactttcaataatcttggatgctaattctcctcaattgtaattaccaacagataacatctttcaattatctcattattcattattaaagtaactaattaatcattcatctttattaattgagccttaaaatttaataatcacaactaacccaaagcattagagaattaattagcatacatttcaaattaagtacgacccacactacagctccactaaatattgtgacgttttatataataatatatatgaaaggaaatatttttaaagtgttaagcataaggatgacatattttgatgggattttgatgaaaatattagattttgaataaaaatgtttacaattttattgtcacacgattttttttttacaaaaatacagtctttttataaattaatcgtaaaacaacaaaacggaataattaaaacaatagtggaacaactataaaacaattgtgaaaacttaacacagtatacagtataaaacttataaagtatgtttgaaaaaaaatttgccctacaataaaaaaagtaaaaaaatttaaaatttcaatatgtgatataaaaaaccttatttttattggtgtagtttactattggctcttaggtacacatgttaattagaaaaataatatgaaaaccctcactcaaaaattcagtggggcttaagaaaaataaaatttattgaactcttgtaatatgccatgatgttagacaccttaataacaatgctcaaaataaaaatattaactatcaatatccattcattctattttcagtctaatcacaatgaccagaatttttattttgtgggggcttatttattattaaaaaatatttatacatatatattataattactcttactaaatttatttaattttgtgggaacttttttactattttaatctgtaattatcaaattaaaaaaaaaattaatttaattttttaaaaaacaacatttttattagtagtatctccacaattactcaagtgggtatgttccagtatacatataaatattaatagacacacaaacagtatgtaataaataacatgttaatttgtttgggaagaatacgttttacgtgcaagtttatatttgtatatatcattatatatttctataattattatatatttagattgtatatgacaataaaggggtctaatcataatcataatagtaataagtctaattactgataaaaagctttatttgcagtgttcataattaaacttttgattagtacttgatttacttctaattagaggtgaagtaatatattcatcccaccaaacatcgaaaaaggtaaataataaaaagttaaataacgatcacaccggtcatgatcttacatctatatatatatatatatatttatatatataatatattcgtgtgtgaattataaataactttgaaaaaaagttaaccataatcatgcatatacatataaatataaatatatatacatataaattgtcaacaatttcacgagaaaaagtggttttgatatattaattagctgggaacagagagtatgagatgcttcttgaacctataatattatataaatataatctaatactcttttgagtgagatctttactttaagatacctttttacataatttttaatttttatacttactaattttttcttgctctataagtcaggtgattaaactccattttgcacatgactaatcatttttaccatacaaaaagttaatattaattatttggcaataatataattagcaaatatatatattttttctagtatatatatgtttccttcaaagtatatgaatatatgtagtctaattccttgtatgtacgatatgacttaattttttttttatttatattaaggataccttatatttgttaccttatctttttaattaataatattttatatttgtacatatttggtatttaaagtaaaattaataaaatttaatcaaattaatcaaatagttctcaattatatgtaattaaataattaaatttaaatcagaatgcataaaattttaaacagtttgattatattgataaaattttattaatttttttttttaagttgaaggtactaaatatgtatgatttttaaaatacagagtaataccaaataaatattattgaaatcacaaaatacttaacttgtatttaaataaaacacacggtactaaatatatatgcatcctttacattatcactgtcttggtgacactttttgaatcatatatcatatatgtacataaatatatatatatatatatatatataggagatgtaaagaccggcttagtttaatttggaaattagcagttaatcatgtttaattataggaaattatgtatagctatttaaataattattatactgtttattttgtaattcagaatgctatttttatgtcatctagcgtaaatttcattaattttgctattctggtgcccggttacatggaactcggtgtttggctcagtaaaatcacaacttagtatgttagtata

SEQ ID NO: 256192 - DNA, 1180 bp, Cannabis indica
ccatcccatacaatctaattgaattgagtcatccgattcaattccaaccgaccgatccaatcgatgcaatagaattagatatccaatcattattggatgtgatcacagatttgagtgaaatgcacgcctgtatcacgcgtctctctctatatatatgaaacaaagaagatgaagagcagggaaaagagaagaaagaaagtgaagcatgggcaggtgttgttcgtattttttagtagttattctatgcaccactactgttgtagtaacctgtgtcggccactcacaaaaaccaaataacaatattattgtgccgttattcgtgcttggcgattcaatatttgatcccggtaataataactacattaacacaattggcaaggctaattactccccctacggccaaaccttttttaaccacccaactggcagattttccgatggtcgcattatccctgattttattggtaaacaaacactacttttctcttctatatctattttattactcatattaactaaattcttctatatatagtactggtctaacttagcctttatgtgatatgttagctgaatttgcaaagttaccactgattccaccgtatttacagcccggaaatcatgaatttagatatggagtcaactttgcatctgcagggtccggtgctatgcctgaaattaaccaaggaatggtatgtatgactatgatatatgcgtgtaagatggagtgtgagtgtgaactttaactttggcagtgatttgaaatggagtatctgaatatatgaaaattagtagctaaataatattgatcatacctagaattatgatttttaatctaattaattcaaaaaagttctatcaatatatttgggctagctctatcatcttgtctaatggatttattaatttatttatttattttttattattttacagactatagaccttcaaactcagcttagatatttcaagaatgtaagggaggagttgaggcagagactaggagaaacagaggccaaagctttactctcaagagctgtgtacttgtttagtgctggaagcaatgactatgtataccctttcacaataaactccactgttattccagcctattctccccaagaatatgtcggactcgtaataggaaatataagttcagtcattcaggtacttttttctt

SEQ ID NO: 256193 - DNA, 1738 bp, Cannabis indica
tctattactattaaaaattgatgacaatgatccgtgtaataatatctgaacaatttatattttttatttttttattataaaaataataaaacatctaataaaacaacagttaaaaactcaatcatatataaacttgaaaatatatatattaaagagagatatcatccattacatacatatttaatataaaaacacaaatataagtacccataacatccaaaacacaatagaaaatataaaattaacagcatgtaaatattatttttaatcataagaaacaacataacaacaacttaaaaacaccatattataaaataaaatatcaaatgattctgttagacatttgatggagactcagattctctatcagcattttgcacttgctttttgaccatagtgataaaacaaaacaatcaaatgatcacggtgcacttcatcatcaaaatcctcataagggataggcttactatcaataaagtactctacaaagctaccaaaaaaatgtcacaatcactacaaaataaccaagaaataacataaaaagcaaaacgaatgaatcaaaaatgaataaacatgaatatgtattttaaaaaataataataaaaaaaaaagacaaaacaaagcaaaatctgaaaacttacattgtaccctactcaggcaatccgacaacagggacaatttcaaatggctccactatagaaaaccttattttgttccttcgagttttaaaatctagcatagacaaataatacggcaggataacagagaaaggcttacaagcctccttcgtagctttatcaaacttacttgttttgagagagttgtacagaaagatgcagtgctcagatacattcaagctgtaatgaccgtaatttattatatggattagcaagggcaattagcattaattattggtatttttatagttatttatgaatttatttaattgtgggtcctattattagaaatgggcattagagttataatttcttaatttcaaagattttattaaactctacgagtaatgtatattatatatgaatatgttattttacaatttgtgctcggggacaacagaaatgcgatggatggctattttaatcacatgggtaagtctagaactttattttttagtgggatgtctattaaagaaaatagaatatcgagtttgagcggggttacagtttttgaccattttacccctaggcttgaatttgcttaagttataagctagaagggtatttggtaatttagaggaggctttggtggctgcatgagagagtggcagctggccatttagtttgttttcagccaaaggaattaagattaattaactaatttattcatttgggaaaaaaggaaaagaaattagaaaactcacttccttttctctttcttccttgctcgaccaccacatgaccagctagcttgggattgttctctagtgtaattgaaggagagctagctgaattcaagtaggttttaggcaaaggtaaccctagaattcttaatctcttgtttttgaagctttgattttggttgaatatgcaattttgaaatataggggctgttagtattaggttgtgttataattcgatttctaagtttaaattgagttgattttaagttcttgctgctgtatttgatgattgttgtggtggatgaccaagtttgagtttgaaaactcaaacttgggtcatcaatggcatgttttgtttcagagagtttttttgggttt

SEQ ID NO: 256194 - DNA, 1579 bp, Cannabis indica
tttttagtattgcggtgcgggtgtgggtgcggtttggaaaattggaaaaacagcatgtgcgggttggtttaaaaaatagttaaaaaccgcaccacccgcaccacgaacacccctactgatgattaaaggtctggtcctgttttgcttctctatacagtatgacttcatctcagatcttcatttcccaaggcatactatgagtgtatccctcgaagatattgggtgttagcttcttcatagttttgtagtgttagaagagataatatattatatgaatataaattcactcttacatatacagcatacacaattacactattattactattacttttcatagcaataataacaaggacagcaattcaattcaattaatgacacttgaattacaccattactaatcattattcttgagcctgtatgttacaattactaattacatcaaaatgatccggtgacaggcatgtttaatatttttagacctattcagatccgattcaattatatattgaatgttaaattttactatccgatctgatccaattaaattgagtcatccaatagatccgatatttattggatgttggattagatcggttctatctggatgtattttatatatatttattgatttaatttgggtttattaaatattttagacctaggatccatttaacattttaggtccaatatgtattggattggattagatccgtccaatctaatgttaatttttatatatacatatatattttacgtataataatataaaatctaattaatcatccaaactaaataaaaatactaattagtctgattgtatgttggatgtattgaatctttggacatcacatctaacatccgatccaattagatattcaaaaattacatccaattcgatccgatcataattagatattcaatgtttggcgatcggttataattagatcggtcggttatcattgagttaggtcgatttatgcgcaccctttggtaggcatttgagcctaatgaataaataactccaatctaattggcatatgatggaccaatttggttcatttgagactggggttgaaaggttagactaagcttcttagtctaacaattaacacatgctccccttttaatgttgcttcaagttcaaccacaataaattgataaggggtttggggttactcacaacaatttcattattgagcacaacaattctagtggaagtagagagaataatcacacctccaaatattctttttatatgggaacaaaacaaacatctatactaaagaagtactccaatattattgtttatgtttaattattgtcatgaatgttaaacttgagtgtgaccacattctattacatatttgcatgtgatcttagaaatgtaacttttagctatttttatgtaataattattttaaaaattttaactagatcatctcatgataatattatataggctaattaggttttttttccttccgaactttgacatgtatcaaatcatgccccctaaacttttttggccattaaaaattcttcccgagctattgagattgttagatttaaaaacttt

SEQ ID NO: 256195 - DNA, 1947 bp, Cannabis indica
taagtttttattttgaaaaaaaaaaaatcaattcagagtcatatttgtataattttagaaaatacagggtctagtttgtcatttgacaaaatagagggtcaaattgagaacttttgtaaaacacaggatccaaaatggtatttacccttaattaataacgggttttacttgttccgaaaattttatttttaccatcatattaaagacagctgtaaaactcaaatttagtgatgaataacaccaaaaaggtacaattttaatactttaaatcctttttcatttctaaacacaatactaaaaattactaaaaagtatattttattgttatattatttttgttctaatttcaaagtgacaataccaagattcttgagattaatgtgcaaaacaactaatgctattaacagcaacaaatcaacaaatacttaatttactcaatgaacaagaatagaaaataacaaatagaggaacaccaatttttatcctggtttcggtcctcgagatcaaacatgatccctgacatagtccaactaagaaacatcatcaagtttcattaatagagaataagagaggttacaaacaccaatggcaaagcacacaatactctaaactcgaggattacacagagagaacaatctcattcctctcccctacctcgagtacaccctcaagttcttaatcccaacagaatttgtttacatagctccaacaccattctctcaatccctctctctctctctctctgaactctttacttgaaatcatcccaaacagtagtgaaaagaaaagctatttatagacatagcttacaaccgaaaataggagaaattagttacaccagctcctagtaactaacataactaactgttagagttagttaaaatatgttaagttagttgtaggttagttttaaggatcaacttctacaatctttattaatatagtatacatttaattgttattattattacttatttcattaattataataatgttaagatttcttttgtcaatgcatttattaataaagattgaaaggaggtttattaaaaatgaacagtaacaactaaaatcagagtatacacaacatacgaaaaatagactaataagtttagtggtgtatatcattatgtttgattatagtttactctgtgttgaaaatataaaatattgttccaacaaacagaaactagtaagtttattgacatatataatggtaggctacatgaaatgaaatgaattgttgttccaatatatgaaaagaaaaataaaaatttgttttaatatgccaaaataaactaatatatttattagcatatactatagtataggctatacaaaaaggctactatgtaaaaaaagaatgaaaatttgtttcattatgccaaaataaacttattagtttattttatataaactaatctttttattttgcatgtatgagtataggcgtagtatagccatatatgccaaataattttatgagtaagacattttatcatattcaaatctttgacaagtgcatatcttgttattcaagtttactatataagtctgtaagatatgttacaatcacgtactttgtatacaatcaaatttgatatctcgatctgaaaaaaaaaaaaatgactaattagtttgttattttataggcacacattgtttttgaaacaaaaaaatgaattgttattccaatatacgaaaaatagactaatagatttatcgtatattattatgtttgattatagtttactctgtattaaataaacttgaaagtaacatatatatttttacaaaaataaactaaaatggtaatgtaaaagtatttaaaataacaaattaatttaatataatttaaaaataaacacatttcaaaattataaaaatgtatataaaataattggtaaataaaaatagtagctcattatattatatgacaactcatta

SEQ ID NO: 256196 - DNA, 6012 bp, Cannabis indica
agccacatcacaggaaaggaacaagtgttccatagattcttccctcgtaccacatagaggacaacttgtgtcctcaatatggaatcttttacaatcacagatcttataggcagagcattagccaggatacaccaccacaagaccttatgtcgttccagaattttgctattccaaagcttgttccagagattcagagcaacgtcacactgggaggctctgtccaaagcttgaactagataagtagatttacacgagaattgcccatcacctgccagtgtccagatccatctgtcagggccttgaccagaagggtggccccattttagaataacagttaataatttcctggtcaaagctctcaatttgtttattaacatcccattgcccattgggtagcagcagatcagccactcggttgaggttggaaggagcatccccaattggtttcggacagaaacctttagagtgaggaatgcagggatccccccaaatattagtattctcaccattagtcaccagcttacaagcaccttttctcaatattgaatttgccttcacgacactcttccagaaccaagagtcagagtttttatacttgtatttgagaaattctttcccttttaagtatttagcagccagaactctacaacacaacgattggcaaccaattaggatattccacccccatttaaccagaaacgcctggttcgtttctcttgttttctagaatccaaggccactaagagatttagggaggcaaagcttgtcccaagcttttaagtgaatcccatgatttcctttatcataaccccaccagaaatccctaaccaaaccatctatccggttgaccatacgattagagagttttgtggtttgcacaacatacattggcagagacagtcccacagattttatcagagttgctcggcccgccttagacaacgtctttgccttccaaccctgcaactttgccgtgagattgtctggaatggaattgaagtctgcatccttttgtcttgaacggaagaggggcaggcctaaatatcttatgcattcttcaggagatgcgattcccaaagtttccttgatccctctcctcatgctcatcggggtgttcttactaaagaaaacagatgtttttagcttattaacctgttggccagaccacgactagaatttctcaaggcaattcaaaaaaccattgacctcatttaaattggctttgcccaccagaattaaatcatccgcaaaaaagatatgggatagagtcggaccacctctacttagctttatgccttgaatgttgcccagagcaagggcgtcatgtaattatcttgatagaacttctgccgcccaaataaacaggtagggtgagagagggtcgccttgacgtagacctcaggaaggggttatctttccaacctgacccccattaagacagatgttgagagtggtggtggaaatgcattgcgagatccaattacggaacctcaaaggtgtcccacaggaatccatgacatggtcaataaatctccagctcagcctatcatatgctttgactagatcaattttaatttcaaaaaaaaaccctccttccctttctttctattgaatgaatgtataatctcttggactatgacattgttatcatgaatgtttcttcccggaacaaaagcagcttgagtaggacagataaatgaaggtaacaaaggttttattctgtcgtcaggatcatggaaatgaccttgtacaccacattgcaaagagaaataggcctaaagtggttggttctttcgggtttggatctttggaatgagaacaatatacgttgagttgatacctctatgcatattaccagttacaaaaaaatcggtcgccgcctcacagaaatcagcactaatagactcccaatagtgcttgtagaacagaactaagatcccatcaggaccaggagccttatggttgttcatggcgaaaagggttctttgatctcatctatactggggcaatcgagtagagtctccgaatcctccatagagattctctcatgaaacaaatgacaacagtcataatccagcccattattcgcccctgagaagatacctttgaaaaagtcaatgaactctctcccaataagctcatggcccgtgatccagatgttatttttattcaagatactttctatggcatttcttctacctttttatagcagctgacaggaagaaaatatttgaacatgtatccccttccttgagccaagaaaccttgacctttgttttagtagattgcttttctttccagagattcatttaacgcacgacagatatcgcattcccagttccagtcctgggacccaacaagatgactctgcatagtgttgagcttttttcaagatcctttattaccatatccagcttgccaaattgggtctgattccagtgcaagagagcaaccttggttgcaccaacttttttaaaaagtcgagtcggggcccaagagtgattaaccgacttccaagcattggctaccaccaacttgcttctctcatcacgagtccacccttctttaaacttaaagcctctctgaaacttgggtgccataccatttgagagaaggcacagaggcctatagtcagaattgctagtgtggccagagctaagaatagcccttggaaataaattgagccaagctccattgactaatcctttatcaagggcagacttaacatgactccgaccagaccgatgattatccgaagtcatcttgtccctttgaataggcaaattgataagaccacaagagtcaataagattagagatgaccgggataaaaggatcccgacccgaggatccttctctttcagaatcactaagaacgaaattcgtatctcccaaaataagccgaggaccaccaaatctatctccccattttcaaaaactcagaccagaactttttcttggcatgcaaatagggagggccgagtaaaccataaacacacgagaggagccacaagtgggagggggatccgaatacactaatccagagatatgattatgcgaacaggataaacattcaaaactaaaacccgtcttccaagccaaaataatacctccagcaataccagtcggaggaacacaaatattaaaggaaaagtggagggtcttaagagtacgtaccagaggcttagcatccactttgagctcaaacagaaaaacaaaatccggagagcgcgagctgatcagggacttcaattcgagaactgtggaggtctgccccaaccctctacaattccaagcaatgcctctcatggcttctatggaggagattcgacattctcctccacaggggtatgagagtaagaagacacactagaaccagagtcttcaataacgaaagagccaactaaaggtttcttcataacttcggaatggctcgaggatttagacgagtccttagaaggctcgccatacaccactctagattcattatcttgctgtttagtatcccaagggaagtcacgaatgacactaggatacttccggtgaattttgtgaggcctagaacagagggaggcagaggcttcaaattttcttttcttgaaaggcgtggttctctcattaatgtcaaatgtagccgggaccccaatgtctcctccaaacttacgaatttcatacaagtcaagttccccaaaatgtttgagatcatgtagtaatttttcttaaaaaaatgagacaaagccttgtcttcatcagatagcaccttggcctcacaaacaccattaggattattagagggtgtcaaggaaatggtctcacaaaaaccctcacgattaacaaattaagccaaggccctttcatcatccttactttggtcggcctcaacaccacgacccataacatgaccctcataattcgttgaccctccatgtccgaatgttgagcggaccttgtcatttttattagtcaaataagtgcccccaattaaaagacgtttgagtgggcccccatgttcaccatcaacattactttgcttaaaaattaaatcattctgcccttttgcaaccatggcactattgcccaacccatcactcacgtgatacgacccactaggattagacgacccaactccatccttgacacggcccaagccacttctttcacccttttccaaattcaaattaacttcttttcccaaagtcaaagcattgatatgtccctctctctcaaaaacaggtaaatgttcagcattcttttctccccccagctgacctccttcaccaccattaccattttgagcccctgcctgaacagagaggatagacagaggcttagggcgccacacccccaccttagcctactcagaaatcgacatgccaaaagcacgcttggtcgccatcagctggcgtctcagacgccgtgcattgataagtccctgccctttcaaacggtcgccaccagtacagtcagctgccataaccggaggaccacctcgaatcttcaaacccgcagacatggccaccaacccgcgaccacgatttcctttggaccagaaaaacatcaatgtaagcggatgacggtgaaagccacaacccaaacataggaaaatattttccttcagtgttcactatcataaggtgttgataagttacaccctttgcgttgatggccaagaacatcacaattgtagcagaaaatccccactttttcaaatttgaattgaagccattgtttcactccactagccagatcaaaaaaacaaccagagaccaggagtttctcaaactcaatgtcaacctgaactctaagaaatttgctccacaccgcaggtctatcatcttccaaatctaccttcactaccctgcctgccagacttcccaatagatcaccattttcagtagaaaaatattcttgtggaaggttatggaagatccataaccccaagagatgaatcatttccgacccagctgttctcggagtctaagcctgcaacacgagcgtatatccccgaaagcaccaaggtctgttaaggaggacccaatctctatcttcagaaacttcaaacccaaactcaaaaaggttggtggactttgcattctcagccaaggccaccacagagactttctttttccaagtttttgccacaaaatctgccaaagagccttcatccacaaccataggagccaccagttttccatataagcatagcgaggttaatgctttcagagtagagtcactcggagtcaaagtaacagtagtttcaaggtaggtaaagcatttgcctttaagaagggcattagaagcatttaaaggttccataactacccgacagtaatcgacaaagagaatgggaatagagaataaactaaagtcaaaaccaaccccacagataagagtaaagactcaaagactaacatgagagtaaatgacaaacaaagagataccacccactcacactagtaaacaactaaccaaaaacgcaggacacgagaaacaggaaagaaacactcaaaacaaggacacacgaggccaaaagaaaagattaaaagaaaggagccccaaggaatggcaccaagagaaaacacacaggttgacaaagcatacactgaagagatatctaggaaaaaatcagtcaggagacataaaagaaataaggaagaaggaatagtagaagaccattattaaatatgcgtatgataaatgtagtacacataagtataacagtacacataaattcagtgccattattaaatatgcgtatgataaattcagtacacataagtattgatttttggaaaattacaattgagatatacaataaattatgtattacttttttttttacactttgtgataattttggcagtatagtaattgttttgaatctcttattctttcctttggttatataccacatatcgacttattttctgaagtctagtgaaccaaagggaaatcataaagattttcaataaatcaagcagcataacaccataaaaaatttatattattctct

SEQ ID NO: 256197 - DNA, 1943 bp, Cannabis indica
tatatatatatacgtaccatggaagtaagtccaagaaatggtagatccctccgtaccccattcaccttcatgtaattcacaaccatgtattatgttttgagagacattagaaacatgatgaggagtgtgcttaaaaatgtggtggaatttctgtgcttcagctttgatttctacattagtctctagcgttccaaagaggtcagaagaagaggaagacgtcatattataatatctctttcaaataatattactactgtatgtctttgataagatgtgatatatttctatgtatattataaagctaattattgatattatgtagctactttgaaataataaatcaatggctatcataccctatatataggatatatatttggctagctgttcatgacgagatcatgtatatattattatatcgttttcctcctcctggctttcatatttgaattaatgtatattatttattatatatatgttgttaaattggatagtatctatccctatattagtacgatatatcttctactttgaacttaagctctctcaatttattcttggattctacccaaaacatctcactgatcattgagatactatccatctgtatatatatgcggccataattcaacaaattctatagctagtaacagtagttagcttacttgatggtttatatatggatatattttctagaaaaaaaatattttgagtctttttgttcaaactttgtttttagtttagttcgacaaaaaaaaccctagtaatttgagagaaaagttggaacattattaaaatgtaatttataggcatgtgaacaattttatatttatacagaataaatttattgaatgaacatatacataatatatgattaaaattgtgtaccccagtcattgatatatgcaaatcttctcacaataaattagatatgcaaaataagagagaaagaaattagtggattatatagttcttccaaactctcacttactctttttaatggtgatttgatcaaaattgaatgagcaacaagctttgagaccagaccaatatagtacatttatattatatttataaaaattagacattctattaaaatccctaccacattaattgacagttgattttgacgatgaattgagaaattaaattggatgacttaattaaatcaaataatattgatgcttaataaaaaaatttgtcaattaatatactagatattgattttatttaaaataaatcattctattatatatatatatgaggtgaatcctaaataaaactatagtgcaattactttaaaaagtagtaaagagttagaagagtctaccaagaagcttattcctgaaccaacgattgaagttgagaatgagggtttagtagaagaaaatgttactagaaaccttgcactacaagaaaattgggcaatctcagtggcccaatctcgacggtcctgtgtgtgttcaccaagatagagctcggcagacttagaaaagactgccgatatcggtcattaaaatgaaataaaaataaaacaatgaggggtcaatcccggtaggcctatggaggactgtcgagataggtaccctatcacgacagtcccctatgggcccgtcgagtgattggtctaaaaaaaataaccctagccctagtttgtctcgcgctgccccattaaccaaatacaacaccccaatcatggcgggctcattaaggccctctgagattggtcactacagtttgaagtttttattaagccgcccaacctgtaatttttttcccaatctcttcttctttccaaaatatttcccatttttctctctcaaaaccaatacaagaatgcccaaaaatttcatctaaaaatgcccaagattgatccaaaatctagtattcttgtctcttcatcactactacactacaaaacaaatgtaagttctaatatttgt

SEQ ID NO: 256198 - DNA, 1608 bp, Cannabis indica
atttgaataacaagaaacaccgaattattaagtatctttattttaatattatttttataatatatttctcaaaaatactattatgaaaacacaataattttctcattaacatcatctaaataatttcaacatccaaaactaaatcacacaaataattatataaaatattgaattaaatcacataactattttaatatccaaactacaaccaagttttttcctagaaaattaacaaccaatattttagataaaagaaaaactaatctttaaaaagtcaagaggaataacaaggatatctatactacagcccaaatccgtttgcaagtcgccgccagatctgttcacaaagtcctcgctatctagatttgttcgcaaggtcatctccatcagctctgcccaaatctcgccctcgttgcttgtggtgtcgtcgctaatcagatttttagcatatgttataaaccgacactaaatatgtccaataccatcagtttagaaaagtcactcaattttaatagtttttaaaaaaactgacatttggactggctgggaatgccttttttttagtagtgagatctacacccgaggggaggttgtatgtcgcacaggtttatacctggggagagaatctttaagttgttgaaacaattagtttaattccctcgttcgatcttctctccaaaggtctcggttcaacaattgcgagagacgacttggaatcgaagaattgcaccccgaattctgcatgggaggcaagtgtatgtggcctaggtaatatagtttcctacatgggtggcatagtatatgccgcctaagtgtgtgcactgtgtctttcatctttggtcgcagaagatagctcgatatcaagaaactatgccccaaagtcctttcttggaggcatgtgtatgccgcccaaggtatgggcctttgcctggatgacatagtgtatgccacccatgtgtgcacaccccttcttgagcagcatacaccatgccacccaggtggttgaacgcgggtttgttagactagcttcatttccccatccaggaacgcattgtttatatccatgtgatgtaagtgccattcatggatggcaactaaggggaagatgagttttaaagtattgaatttagccactggggcacaggtgtcgaagtagtggatatcaggtaattgagtgtaacctgtggcgactaaacatgctttacaacgttggacagagccaccggggttgagtttctttttatacacacatttattgccaatcacatgttggtttggtggtaatggaacgacaatctaagtatgattttgttatggcatctattttgacatccatagcattgttccaaactttatatttggaagcttgtttgtaggatgtgggtttaggcattaagcttagtgatagaatggctgctcgaaattctggtgaaaatttatggtaagataagtggttgatgaggggatggtctgtactagtggctgttgtcactaagtcacactgatagtcgtttagataagttggggattgttgtgcacggcctgatctggtagtgcatgatttttcatttttgttagttgaatctgtgttctaaggttgatggagtt

SEQ ID NO: 256199 - DNA, 2861 bp, Cannabis indica
tttttagaaaaaaaaaaactttttaaggggcaattgttatacccgaaatttggcttcacttcagaaggcgacacgtgtcatacaaaggaatctgaacaacctgatataatgaaattatatcatttaatgcgaagaaaaagtataactcattaaataaaggattaatataaaatattcataattcgctgaatatgcagtcttaagcgagactgaaatagaggactattaaaacctatattaacgagacacatgcctgcattgaagtacacaaatccaaggagataattcatttattttgaaggaatgaatgcggttatgcaaagcaacctcagattatgtatagcgagatcatcaccttgctattcataggagacttggagaggcaaatcatttgctaacacttagtattttttctacattataatatctaggtataacaacttagaaataagcgagatattattgtctaaatcagcattgaccattgaaaggataagaatcacatgtagttaagcaattatctagtattatccaacatacgatttaaatgaaacgtgatcaattccaacgttttatcaatggttgtattttgaatttaaatgtaaataactgccaacctatattcctataaatagggacaaatcccacaacaaaaaggaacggagaattttagagagaaaatagatataatcaagtgtatattgtatctaatattcagaaaatatcttaaataagatagactcgcggggtatgtaaatttaattgcaaaaccacgtaaaaatatctctaattatacataaaaattatcagtaactctaaaatattaaactatacacctttgatatttttgtcaatctgtcgagtttctattattgctcatcatagacatattaagttactagttacgaatttgcttatttctctataaataagtctttattaatttatgcacataaatcacatgataaatttaatctttattttattataattctaattaattttcattaatttcatatctaattatgtgttcattacaaacactagcgtcatcaatagggattcatcccatagagttaagttgctactaatcaaattaactaagaattaccataaagacaacagtttctaacgagctacccgctacaacgcccataactcgagcaaggttttccctagagcatcttcgctgagatcttccctaaagcatgtctcttggcatcatgcatcatactagcaattgtctcaactacatgtatccctatagtatgtgtctcgtcaataagcgtttcattagcacgcatcctaatagcatgtgtcccgaaaacatctatttctacatcatgcatcttgaaaacatgcatctcatcgcatgcatgtcgacaacatgcatctaaacaacatgtgtcctgtcagcatgcatctctaaaggggaatctcaccaagccttcgtgtcttacccttacatcttgcttgaggttcgagatgacaacatttctttttcaagactacctcttgcaagaaatagtattgtaagaggcatacgatgggggtaagaaaaataaacaaaccccaattaagaagttagaaattgcgtatggcaacaacttataagagacactagatcaaataatgcaaagcacgtgggtcaatggttaaagaagaaaacaaaaggtcatcccgaaccatggaaatgtgtccatacattccaccaacaacaccttatagtaaccacttatctccaataatcttatgcagaaatcaatgagagaagaaaccatgaacgatacctcatatgttgacatttgaaaactccaacaagtcatatcacatttataaaatacaaaacattcaacgcacatagtaagggtgaagaatgtaataaaaaggagttgagtgctgcctaaggaagggctacatgtcctcttataaacttgtagttcataaataaggtacagcgctgcacaaggaagggccaaagtttctttaccttgatacataaaaaaaacacattcagggtcaatacagttagggaagccaagagtctcctataaagggatccacatacaatcgatgaccttaaggaatatatgtcaaagatgaaaaaacgtatgaagaaaagcctaaagacataaatgtcaaagaggtccaagatctcaagaagtgatatccacctctcaaaggttcgagagcccaaaaaaaggtctcaaactctaaaatgtctgagaccccaaacaaaggtctcccactctaatgagcctgaaacctcaaagagaggttcccaactgtctagggtcctagacccaaagagtgcgtcttaactttcaagagtccgagaacccaaagagaggtctgtagctctcaagggtatgagaccacaatgtgtaataatatattatacaataaaatatataaatcatcaaaaaggaaatatactataaaataaaatatatataccaataaccaatcgacttaacattaaaataaaactaatttgaataaaactattataattataccatgatatttatctaataaatcttaaaaaatttaaaaacactgaaaattaaatatttaaattgtgagaaccatgaaaattttgttggaaattatttttccaggatcttagatctctgaatctttgatgctgaaacttctttgctgatgatctttcttcacgatcttcctcactatgattgaggtattgcttgctgtgtgtgggcactactctaatcactaaggggtttcaaaattatcaaggaagaagagagagagagggtggcggccaaggtagagagagagaggctcaggtttttctgaatcagaagtgtaattttcctaaagccttcactacctattta

SEQ ID NO: 256200 - DNA, 1575 bp, Cannabis indica
aaaaaaaaaaaaaaagaatgtgagaaggtgactaataattaattaaatttggtgccccgtaaattaatgagtgaagatataatataattgaatagttaatttgaaaggcatgaggggaaaatcattagtggcatgtgacatgtcgtcaaacactctttttttctttttgatatttatgcttttcctaattagaggactatatactacttctaatactactactccaccatgtgagctcaagaaaagccaacttaaagaaaaggacattcatatttcatttatatatatttgtctattttttaaataaacatatttatataaatagtggtggcttaattaattaaagtgtttgtatatatagagaccacatggaggggtcatgtttttggccattaaactccaacagaaattaataaagtgaaaagatatcaaaaagaaaaagctaagctttgtgaagatggcaaacccatatggtcaccactactactaattaataaataaaatttatataaatatataaatagaatttttcatatatatatatatatatatgcatagtatggcatatcaggtatacgtcttcttccatggcgacaaacctttttttgccaatatatatatttgaaagttttctgatgtgtatatgtgtatgtatatatatataatataatgagcttagaaataaaattggacaatatcacttgtttttatgaataaattaaaattaattagggaagcaaagaaagataccttatttatttatttttaattccttttttgtgcaatgataattaacatttttattaggtacactaaaccacataaaatttactatatacatacacccttttataaatggaatatctacacaaaattattggattatatatacaattatacatgcattgctgtataatagccagctagctcacacctcacccgaaagacctaataccatataatatatacaaataatacattatatttatattaagctagttaattagtttagaaaaatagtaataactcctattcatatatatatatatatgagactctaacatatatgttcattttgtttgatacataatattatgcaagaaaaggataaaactattctgataaaaataatagaatcttcaattattgaccatgatatgaatttgatgatcaacttgcataaaatatatatagggtaggttaattagttgtagaataggggttgggaaacaaaaggtactatgaattattgcatacatgacaaattaatcaatcaaaagatgatatgaaaaaaaaattaaaaaaaaactaattaagaagtttttttcacgaatttcactatgtactacattttgtttttcaaattttttaaattagttaaaaattaatttaagttattgatattggtagatttaaaatattttaattaattacattcaataatactaaaagatgtttagtatggtaagtgtatatataccacattatatattaaattgtgcttataaactttaacatatattaaattgtggctatgaacttccatccaaatcaggtagcattggtagatctagg

SEQ ID NO: 256201 - DNA, 1784 bp, Cannabis indica
catgattgaacactatgatgatagatagaaataacatagtatactaaattctccatttataaagcgttatacttaattaaagtagctaattaattaattttccaaaaaaaaaaaacagcagctaatgtatttctagccttacttaacctactgcgcaatcagtttcgattgagtgcttctcaattttgaagtttattgcacgcatgggttagcttgtgcatacttgtcttatatttttatctaaaggcaatttggcatcttgctacatacacatataaacctaattaatttattgacataaattatattccctctaataaagaagaagacaaatgctttgatagtggttgataatgataaaaaattgaagaggactcaatgctttgttttgtggagcaagaataattaatggtattcttttgaagagagtattaattatgtataaaactttgttaaattaattcaaagtagtataacttgggtcttaatcaaattggttctcaattagagtctcatcatcatatatattatgtcacttgaatcttactctctttccttttatgtggaatattgggtcataatcaaatggtgctctaaagattacgtggtcattatctaatgaataggataagatagctaaccaaaccggccactcaagcactatatatgacttatcacactatatattattaactataattatttttttctcaaacttttttttgccttatttgattattattttcccctattgctcttctagttaggtcattaataaaacataaatttattcattttaaatggctaaaccaaccaattgaagacacatccgatcaatcaactaccacctacttaattgtaaattaaatctctctctctctataaagatatataatatgaatatataaatgatgcctaccaatatttctttactaaaataatatccatagattaaataagagcctatattatataccgaatctgctttactaaaagaggaactagtcttcttaaaataagattgataagaaaccaataactgagggaaaggtagcctatgcgaaagaaaagcttttgaccccatcctaccctaataatatgcttttacgacaatttttaaccattatcaagaaaaataaatatatataagttacatgtgaaagttttggaacctatgtccaagactctagctttaattacttaaccactacttggatagttggaagcatgttatttcttgccatcccttttatctttgtgaaagagatgggagatggattctttttgtggagaagttatagttttatatatatatatatatacatgcatagatatatattttcagatcttaactagaagcttttgtaaattgatctagctagatgtgcatatttaaagatttgaccaaaaaggtaaagtttgcaaccgagaaaggaggactatgtattgagttgcataccaatgaaaatggtcaaattagagatcagattttctttaatatgaatgatctactttttttaatgggctttattttatttttataatgagggatatacattcatttggagaaaattttactatgcacccctttttaaggatgcattaataaatttctatttattttggcatttaagaaaaattttagtcatagttgtagggtcaacccgaaaatttaatggatcataagagaaaaaataaagaatattacaaatatatacctcttttaaattgatacacttaatttttaccatctctttcaaaaatttattatgtttacttctttt

SEQ ID NO: 256202 - DNA, 1253 bp, Cannabis indica
ttcagtaatcatttcaaaacttccctattttacagcaaacgcaaaaagtagttccatttaatattaatagtgtaaaaatgtgtgttcatagaatttgtcctaaaattattttaaagtaataatcatgaattatctatagatcgatgttattcttagttattgagctctatttgcaggataattttaacatgaaccatattgaaagcaatccttattaatttgtaattatgtttgcatatatagtcaaatatacacatacacctccccttgttttgtcaatatgtatacacacatatttagcaaaacaaattgcattccattacggcgttctcgagtttctatacagtgatacaatttttatagctcttttttggaccactatgtatatgaacctcctttcattaagttaggcttttggattttacaatacacatatatatgtacattaaatgcagatatatttgtatagggttacgaattaacctaagttacgcaaaccactttctcatgaaaaagcacaatagtcatggctagtcattattgcgtgggagactttaccatcctctttttttttttgaaatgtggagactctacaatcttaagaagtaataaacaacaatattatataagtgtttttgttgtgtagtgaggtttttgcggcccaactagctagcttgataactatgaaaatgaaaataattgggtttatttgtaaaatcaaatgattcaaatccaaaccccatacgcaacacacatgcatgtggaattgaaatgtgcagtacttacaaggccaattttaagtcgtcatcatcttcgtatgggtcactatttagaataccttttatctttttgtcagtttttttctatgtatgaaaatattaaagaatttctagtctttatacttatgtgctcccattccccaccaccataattttgtgtcaaattcttctattaacatatatacatcaatgaaagaatatattattttatgtaatgtcagtcatcatcttatgataataagacataaatgcattgatattatgagccggtgtatacattatttgtatgtatattacaatcatatttattgaaggaaagggaatcgtgatcgtaattgtaattatatatttagttacgtacagtacagagatctgaataatcaatattaatatgagaatatttatatatataattaatgtatatcatgctcatttttttattttctattatccatcaaatcatggttaatagat

SEQ ID NO: 256203 - DNA, 3638 bp, Cannabis indica
attgtccacaccgcataaaaaatgcggtttaaatcatttgtggtgcagttgcagtttgtatttttccaaaatagcatggtatggtgcggtatgtggttttgaattctaaaagagcagttcagactgcacgcacgtccacactcaaacattgaacaacttgaggcttacgctatgaaatgataagatgaaacttaaaagccctcaaaacagcacgaactatattttaaacacaatggcttatgaaggggtgaacaataagctctgatacagaagtggcatgaaacttacacttgcaatcataagaggaatgaaggctagacagtcttcacatcattgttgaaccaaacctaggtttttttttcagctggcttgagaatttggaaagagcacattaagctttcatcaacgctcatcattgcaccagcattatcgaactcaccacaataattaggagcagaaaatattgtaacaagctgcctgtcagcaaagaattcatacccatcctcaacaacctggaagaagaggaggaagcatcttttaaaccaaaactgaggagaaagatgggggtgagaggcaaccaaagagagacagcaactaacctgatgggcacgacaaacaaggtccatttcatgcttagttaaaaactctgcaactttatccacaccaaaagtgtatgagactccacggtcattcattccccagcctttgacatctctaccaggatctgaccaaagtaaatcgcaaagcaaaccagaatctggaacatcagttggacgaggtaaattcctaatctgatccaaatgtgttagatcaggagaaaggccaccgtgcatgcataatattttatcatctatgagagcagctactggaagacagttaaaactatcagtaaaggtcttccaaagcctgacattgaaccgccgtttacattcatcataaaatccataaatccggttaatcgaagcacattcatgatttcctcttagaagaaagaagttctcagggtacttaattttatatgcaagcaagaggcaaatagtttccaaactctgtttgccacggtcgacatagtctcctaagaatagataattagcattgggaggaaaacccccgtactcaaaaagcctcaaaagatccgaatactgcccatgaatgtcacctacggaaaagagtaagaaatgtataggtcagctaggagttttaatgaaactatgcatggtggacacaaccctaaaactgataacatgaaaaagaggttttgggacatcacttagttccattcatctagaaaacgaagatggagatagcacaaaattgtagagaaacacactgcaagtaaagaagtcaagtaaatagtttcaattcaaatgatagatctaatgccaaggttttagaaaacgaatcagtaccaaggcgttttcccttagccccaccacccacgaggcgtaaaccttgaggcgtacgcctcaacaataagaagaaaaacttcattaatatcataaaactcctaaaattcataacaaacaacatataactccatgacaaagtcatcaaactcataaaaattactagttaagtcttcaaatcataaactaaatacataaaaggttcaagttcaaacaaaatatcaaattaatagaggaatgataaaagtctaaacatataaggaagacatattcctacttccaacactagcctaggagctgccttgactttgagagatagtaaaaaaggagatagtgcgtgagggagatgaagagtgggagtggcagtcgtgaatctgtcagactgtaacgacattttgacttaacagctaatttatctttcctattaatttattaaaattatgttaaaaaaggctagaaattcaagtaatttaaaagcctaaaaataagaaaaggcccaagtgagcccacaacaaaacagtcgtaacccacaaaacaaagctcaaggctgcgacgtgcgcctcaatacgcctagcctcgcctcagaggtgtgcacctccagtgtacctcatcagtgcgaggcgtgtgcctcaatggcaacagctgaggtgtatcctcatgtacgtttttgcaccaacttccactaaagcaagttagaataccattgcattttaaaccaacttcaactaagaagttaaatcagcttataatttgacataatgatagtggggaaaacaacatcaccttatggcttagggaaaactgaaaagattgatgtcttgagaacaagcccataacaaacaagtgactatcatttcaagttttggccattttgggtattacaggccacacaaacaatggtaaaacagtaattttgaagaatacacaatcaaagaccaacaatacttaccttagaattcttgagtacggccatgcacataataaattgtaattaccagtttgtaataaagtatagaaagagccattcatcaaaaaaaaaaaaagtatagaaagagccagggtgatatgaagatacgcatctattcgacaaattggaatataatggatgattaagcaaatatgcatagtgcatacaacacaataacacatctggaagatcaataggttgagtttttttatcaattgactaagtttctccgtataaaagtcagaaaaaacatgtcatattagcatttataacaaatagcatttactgcaaatgacagcaattctgatacccttaaaataactttatcaactcctcccagaccccaccaagagaaaacatcattcacaaatatcccacataactctgtaaagtatgcaggggcatctcaactagttcctgaatctgtagcagtggaaaatatcaatatggctgtaaaagttcccgtacagccaatggaaaacatcaaatagattttttttaatgtgaaatacactcatcaattcttaagccaactatttcacttattctccttgaaagacaacaaagaagaaatatatgtgctgcttacatttatgcgtgtttgtcaatatcatacaatctgttctggacatctgggttacacttacttctactaatgccatcttttttcaaactcaaaagagataagcaatactgaaataaagtgcaaactgtcaatagaaagatataatatacaccaatccatgccaatatgatataaggcatccagtctttgtaatatttcatttgaaaccttgttcaagcattaaacctacattatcatccataacacatctcaattcaacaactctcacacaaactgctcttatgaaaactagaaatatacaaaattagacatgtcaaacttaaaaacacttatcaaaaaatcgtagaacatgcatagttctaaccaatccgaccctctaaaaagactatgatattattttagtcatgtactcatgcaatggagtaaaaagcatatactcaaaagttccatatcaaaacatacatacatcaagagtgctggttccgcatgttgtatatagctcacaacagcttgaacgcagagtacatggttatgcaccggcaataatatagcatccagaatatcctgattttcatctcaaactcaggtttcaatactcaaaaagcagattaaaaaacgaggaactatgtccttaaagaaaattcaaaaccgcttagaacttatacaaccacccacatgc

SEQ ID NO: 256204 - DNA, 5929 bp, Cannabis indica
aaaaatctaaaacacaatcaaatccatcattatttttgcatacagtttcaactatataatattttctgattggggtttccgatttcacctctttccttacctctcaaggcttaacgtacgcacacccccatgattaacgttcaccaacaaaagaaaagtaattacctttttgatcatattcattagtcgccatcgtaatcatacacacgcacacagtggtcatctctgtttcccgcctcaatggcggtgttggaccatcaatattcaaatcctgttaccaacaaaaagcgtaaaagagaaaaatgccaaataaagcttcttctaaatgatcaagttgaggtacacgatttataatttgctaaaaagacttcttttttgatttaacatcattgttggtttgtttagtgattatcgatttgctttttcattacgaaaaagatggtgacaataaagaatatataatctacatgtatgtatgtatacacacacatttgtgctctcgtaaaaaaatgtctttgattttaatgtctttgctttcatgcatgcccatctctaattttgattactaaaaaagaaaagggttcttttttccttttttggtaaaaggaaaaagcttcatatactgtttaattggttacattgtgctagtttagagttaggggtgattattataatctatctatggagttaaatgtacactttttgattttagaattgtatgtttctctgaatatgatcacactgtcacttctataaatttctagtatgtgtgttgtagcgatgaaggtattgctaaggcaatgtgtttatataaaaatatgactttcttttcttgataggaataaaaagtgttccgatagtgggaaattgtacatgtttatctagtcgcgatcgtctgaattttctttcttttttaggtgaggagtgttgaagatgggtttcttgggtcatggcattctggttctgttgttgcatctggcagctatagacgccattaccgtgacgtcaaatataaccatcttttagctgatgatgggtctaggaagctagttcaaacggtgattgtttcaccgattttgaacggcattgatttggacaagagtgagttaaaggagaacgatcgtgggaatatcaggccattgcctcctgcatttaagtttgaaccatgggggcttcactatggactctgtgtggatgcatactacaatgacgcttggtgggaaggtgttattttcgaccacgactactattcaccggagagaatggtgtttttccctgatttgggtgatgaaataaagatggatattggcagattaagggttactcaggtctggaatgaggttactggggattggaaggtgcgaggggattggattcttcttaagttgattgaggaggttgagaaagagtcgtgtcttcctgtttctgtgaagcaaatatggtatgatatgcgggagaaaaaggtttttgagaaggtaaaggagtggacttgtactgatgaagagttatggaacaagatgttctgggaggtcattggggattatacttgtgttattgagaaagagcttcgttctttgatagcaccttcacagaacatgttaccaatagatatggataaagatattatcatgaatccccaagcagagccgattgaaactgacgatgttctccctgttaaaaactctgtaaatagtggtgtagtgattgatcaaggagcaactgtgatggccaggttggagtcacctcaacttggtgcagagtttacagatgctaaggtagatgaagcagcactgaattgttctaatgatgctttatttgttgataactcaataaataacaatggtgtgatttgtcaagaagaatttgtgaattgtgcgttggagtcagctcaagctgataggaggcatgttaatatggaccttgaagcagaaatgaagggatgccatacttctgtgcccattgacaatttattgaacagtgaaatagtggcagatgtaatggatgctgataactgtagtgaggtcgaatctcttcatttatgtgatgacattgctccaagttctctttctatggaacctgatatggatcaattaacttctgtggtgaacatggatgaatcaaatatgaaattcttagctgactcaaacgcatcgcattacaatgaagcattttgtaagttacctcaggctttaccaatatcaccttccaatcatggtggaatctctagtgctggttctaatagcgttggtgttaagggcagtggaaagagtaaaagtcaagcacatgtgagtaatgtaaattggtttccttttagctcagatatgattcaaggggcagaattctgccccaaagctgttgatgagtactatgacctacgttttaaaaagtctggaaaagatcaaaataaaagttctataaagatatctgtttggaagcatcttttatatttaggttggaaatgcgaaacatcacatgctaacatgaccagaagacggtatacatcacctgataacagatgtttccattctctttatatggtctgcaagcacttgaaggaatctaccagaaatactacctcccaagatgaacaaaaaggagagcatcctttaattgaactaccagaagagagtaaaaaccctgagttttatcctgagactgctgaatttccttgttgcattgaagacaataaacctgacaatggctttgaatcagttcaggaatatgttttgaataaaaatcacaagagaaagccagaggagctgtcaaattcaaagaattacctcttttctgtgggatggaagcttgaaacgcactatagttcaggaagaaagattgtgatatataggtcacctaaaggaagggcatatcggtctctattagctgcctgcaaagcttgcattgatgaagagcattacacaagtgctgacactggagaaaatgagggatgttcaacttcaagtaacgtgccatcttccttgataagtgatactgcctttcaacaaaactttgttcaaccaaaacttccttcccaaaagttattcgccgagagttacagtgtggcagggtttagaaaaattatatataggggagaagttaaggttcaaaggattagaaaagctcaagggaagagaaatggtgatttggttggggatgtacatgcatttgaaagacagatcagcctacgtcaaagaagaggtggaattaaaaagttgtaccaaagaagcatcgaaatgcctccaaaaaaatctggagcattgatcaagttaagaaatgctgaggatggtactaagccgaaacgtgtattaaggtcaagcaaacgtgtgcaagaggtggttattcctaatgcttcacaccaaaatccacgaactgtactttcttggttaatagacaataatatggtgttgccaagggcaaaagtaaaatatcttagtagtaaggaccaacgtactatggctgaaggaaggataactcgcagcgggatcaagtgcagctgttgccagaagttgtttactcttgctagtttcgaagtccatgcttgcagcaagcagaacacacctgctgccaatatttttttggaagatggcaggtctctcttagactgtcaaaggcaagtcattaataattgtgagatgcaaaactcgacgacaaaattacatgatagagataagagcaattggaggcggggtgagaatgactacatttgtactgtatgccactatggtggggagttgatgttatgtgatcaatgtccatcatcatttcacaagggctgtctagggctgatggtatagccttctaaatccattctttttcacgtgtttgttaaatttcttttcttttcttttgttttttttcattttggttgcttttgtaaggattatatgcttgacaacttcaatgtgttgattcagattgaaattgttcttcttctaataggatattccagagggtgactggttctgtccatcttgctgttgtgggatttgtggagaaggcaagttccaagataaagaagacaaggcagacatgaaggaagaaaatctcacctgctctcagtgtgagcgtaaatgtaagttgccttcttgtctttactaactagaggtatatgctaaaattcttttggaaggtctcttatgtttgtttttggtccatttgatagatcatgttggatgcataaatgaaaatcagctagataagttgaaaacttactctggaggaaagtggttttgctctaaagattgtgaaaaggtattgctttatttactattgtttcgcacgtcatggattaatttcttattcttctttttggaaatgatacatgtcatttttttcagatatttttgggcctccagaagcttcttggaaaaacttttatagtggggaaagacaatttaatctggtgtttattgaaggccagaaagagtgatagtgactctattgacaatgatgccctgactgagaattatagcaagctcaatgttgctcttagcgtaatgcacgagtgttttgagcctgtcaaggaacctcttactcgaagagatctagttgaagatattttatttaatagagggtaaggaacatttttattcaaattttgttatttttcgacttttatgcttgttagcatattctaattctaaattgttgtagctgcattttggcttgatgcatgatattatgaaatttatggacttaattcctttttcttgttttatttgagggaacaacaggtcagatcttaaacgtctaaattttgaaggtttctatacagtactcttacttagaaatgatgagttgattaccgtggctacagtaaggtgagattggcaattcttttctttatgtcctgttctgattgttttcttttacttgtcaaaaattggtctgttcttagttgcattgtgtactaaagtacttatcccccctcctctttgtaagggtttatgggcggaaggttgcagaagttccccttgttggtacaagatttcaatatcgccgactaggaatgtgtcgcataatgatgaatgagcttgaaaaggtaaaaatgagccttcatttgtgttcatgattttttttattgagaataggaggtaagggttggggtgaagatttttttttataatatgactgcaacaatagcatcttagactagtcactgcaaaaattgtgtttatcaggcttttcagtttaatattattgctaactgatagtcacattttatatagtagagtaagagttagagacatgaaggattattagcactcatcaaatttctaattactgttgacaattttcttctttcagaaactcatggaattaggagtggagagactggttttacctgctgttcctagtgtgcttaacacatggactacttctttcgggttcttaacgatgacagcttctgagaggttaaagtttctagattatacgtttcttgatttccagggtactgtcatgtgccagaaaccactgagtatcccttcggctggattaatcacatgcgaaggtaaacttacttctttcaagttctttgtatgaagaaaaaaggtttagagagaaaggtaatgcatagtttttacaaacaggcatacttattcttgtatgcaactatactatgcacgagcacaatccaattctcatgatagtatcattgaagccgacaataagattggttgtgatagattaagtgttgtctctgaagtatatcaagtagaacaaatcaaagacaatcatcaaatcatggatgaagaacaattagagtacgtcctcacctccatatattttggaaaacggaatctgaaaacaaaattttttcactaaaatcatttctttaagtgagaacttgagttgtggtagaagtagcttagtttgtgaaagaatagactcaaagcttcttttctgctataattggtgggataataataat

SEQ ID NO: 256205 - DNA, 1540 bp, Cannabis indica
tgaggatacaaagtaaaaaaaatgtaaaaatgatattaagagatggattagataaagaaagggagtagatatacagagaaagctcccttgagctaacttgtaataatatatagtttcacaaaatttcgggatgaaattagtagctagcttgggttacaaaaagaaaacaatgaaacagacaagcaatagaggaaaaacatactaggatgctattttgatgagaagtactgaaacgggttcttttataggaaagttaatatattgttttaggacccagataaagcttgagagctaagagccaaaaaagtgtttaataaaacaagtacacttatataatagggtagaaatgagaagagaaaagcttaaagtaagaggaaattatcaaaaccaaaggtatatattgcatttctcgtgtttatggaattgaaaaagtagggaagtatgtatttatatataacagaagttacaatggagagaacaaacaacacaatatccaagcgcagttttcaaagctgttttgagcaataacaataatgaacgacagcaatatcttattttcatatatatatatatataaaatatatatgtatgtaatgtgagatgagtagtaactgaaagggttttgatgatgaaagcgatagcaaaggttattaacctttttatacagttcgatacaattagagaaccacatgtcatttcagaattacattgctctgttatcatcatcaattaatgtaaattggttttgttgttttaaattataataataatttatgcatctttgaaaaaaagaaaaaaaaaagaaaactaaatatgcttttggcattaagtttgaataaatgagctgacaaataatgtgtttaaaaaggtttatttatttattttgtcacagttttaagagatttaagtagataagatgtgtatgtaataataatgtggggtagggtatagggtagggaatagggattatgataagttggggtgtgtagggcataggacttaggatgagtcaggtttttggagggactagtatatactatacagtttcattcagctaagagctaaagcaggggaccatttcaccgtatggtaattctcaatcattatttattggccatgcaatgcaataatgcaaatcaaagagatatatacttatgcatgtaaaatcgtaaattaattcatgcagtgcacagtgcaggaggacaggacaaaacttatttgggttttcttttctattcactttaatctctctttgctgttttcttcttcttctgtacgtaggtgctttggtttcttgccttttattaattgtctctcgtgaaaacaaattggacgaaacaaggaaggacgaagctaattttgtgtatttattatgacatatgtatatagtatatatacgtatcgaagagcacacgaggatgcctttccaattaatgatataactacaaacttcttttatattttttttttatttaaggacttatatattaaacaatatataatttaggactcgaacttcctcctcctaatagtcaagtgc

SEQ ID NO: 256206 - DNA, 2027 bp, Cannabis indica
aaaattaagctcatgatcttatttttacattttagaaaatacatggtctattttgtcatttaacaaaataaaggatccaattaataacttttgtaaaacactgggtccaaatagtatttactcttttttatggggatgaccctatacggattcgcatgggacgaggactgagattagtttttgttcttgaatattttacaaggtgggaatggagatgacactcccaccccgacgggaatccatttaagttatcaatatttttttattgatattttatattttatatacgtatttgtatttttcaatatattagtgttgtttttataattttttaagttgtgtttttgtataatagtcactaataataaataatgtgcacatgatgaaatcaattggctatgtatatgaaactaatggagacttgcaagaacaagtcaacatgatgttggctatgtatatgaaactaagcttcattatgtatgcaaacttcacaaatccttatatagattaaggcaagtaccttgagcatggtttgacaagctcaaaacttgttctcataagttgaggattcaaacaatctgttcagatacatccttgttttacactcacaagtatggctgttcttctagttctggtttatgtagatgacttgttgattgcaaggagaaatttagatgatatccatcatcttataaagaatttgcatacatatttttcctttaagtctcttgaattttcttcgattcgaagcatatcgcaatgcctctggtttatatcttactcaatccaaatatgcatcttatcttcttgccaaaactagttttgaagatgccaaaccttgtgatacaccaatgattttggcaaataaacttgccttagatgaaaatactctttttaaccaaccagagttgtatgatagcaccatagggacacttcatgaatatctgacttttataagacttgatcttgcatactcaataaataaattgagtcaattcttaaaagctccaactatcaattactggaatacctgcaaacgtgttctaagatacattaaaggcactccacattttggacttcacttaaaactaaaaatagttcttgatcttgaaacatactctgatacagactaggcttctaatgacaaaagatccaccagtggcttctgtatgcttttgggtggtaacttagtaaattggagttctcggaagcagagagttgtggctcgatcaagtacagagtttgagtatcgagctcttgcctcagttgcaatggaagtagtttggataagctctttacttggagaaatttgcatatcattacacaaacatccaccagtgttgtggtgtgataattagagtgctcaagttcttgctcagaacctaattttccactcaggaaccaagcacattgaacttgatattcactacattcgagatcaaaatttttgctaacaaacttaaagtttactaaaaaacccttgtcttcccacaactgatatgtttactaaacccttgtcttccccacgatttcaatttctttgtctaagctacacttagaacattctaaaatatagcttgaggggagggggtgttagtagaagcattacacgacagttaattagttagttagtaaacaacagagtggtgaggcagagtttgttactcttcttagttggcattcttcttatatatatattcagttctttttcgattaaaccctctcaactattattttatttacattttatattttaaaatttttaatattttttttttatttttatagttttatttaattttaaaataaattttgaaatcctttcaaaaaaataaataaataaataaataaataaattttgaaataataatagtaagtgtaatataaacgtgctatgtgtataagagtatacacataagtaatctatggtagcataagcagttagacggatgacactttattgggtagttaacccaacgtcccacaattgaaagaataagacatgaattagttttgtactataagtg

SEQ ID NO: 256207 - DNA, 2502 bp, Cannabis indica
aaaaaagttgtctaaaattaagttcagggttctatttttaccattttagaaaatatagagtctattttgtcatttaacaaaacatagggtccaatctgtaacttttgcaaaacacagggtccaaaatggtatttattttattttttttttttttttttggttttttgataaccttttcatttactttttgaatggtacaaattatctttttgtgttttgactgaaattgactttgagaaatttatttaggaaagggtaagaaaaaggaaaaaggtaaagaaaaaggtttaaaggagtgacagtaaaaacatcccaaacatttaatagttctaaaaaaattacagcagtgattttaaatgtaagaaaatggccaaagtcccaaattgctgccattatgacttctatttttggtcattaaaagtaaaaagatgaactttctttaagtccagcaagtatttgccattatgacttctcgtttggccattaaagaaatagatgaccctaaccgaaattataccttaaaattccatttaagaagatgattttgttcagctttagacacctagtaaaacagccaaaaggagctgctaagctctacaatcttcattaacagtaatgtatatatatataaatatatcttgataatactatttgttctctataatcttcattagcgctaagaagtattaagttaagaacaacgtattcaaactcaacacgaataaagaaaattcacatcgagcggtatatttgttttcttaggaagaaatgagatattggctagcttcttatactgagtctttaatctcaaatgattcgtaagactaattataataataattattattaaatttatgtgtctatgaacttgaatctccaatcttaaaacctctatcagcagcataatccacgaagctgtaaagtggtaaagtagactcaccatatttctcaaaaccatccaactctagtttggccttagctctaagctcttcggctacttccattgccttctcaacaccaaaaacttccacatagctcttacctttcttcttctccactaccccaccattcttggatttcgatttctcttccagaatatcatcaaccaactgatacaaaacccccacagctctaccatacctcctcagtctctctatctcatcctcctctgcaccagctagtaatgccccgcatacagccgagcactcacccatctcaccgaatttcttttcttgcgcgaattcaacgaagtttggcccgccctccaggtcaaggaactgcccagctgccatgcctgtagacccaacagctcgcgcaatctcagtgatcacgcggaggacccggggctcgggtaccaggttggaaggtgtgttagagacaatgtggcgaaatcccaacgggaagagagcatccccggcaagaattgccatgtctacgccgtagattgtgtggttggagggctggcctcggcgtgaggggtcatcatccatacaaggaagatcatcatgtatcaatgaagctgcatgtacctgtgaattaactctaattttgtcaattttgagggtactttttctttacaaaaagattatatagtattgttttgttcaattttttgtgttggattgggggaatagattcttagattaaacacagattctcctttttgaaagaataaaacccagaatttaatgttctcgaagttgcttctggtcattaataaaaaaagaaaaaaccaaaaccgattgataaaaaatgaacaaacaatgaaaagtgagaaaaatcaatgctaacttgaaattaataaagtaaggttttttaatcaagataagaacgaaccatttcgagggcacaagcagtggggaaagcggcgaggcggtcggcgccgaagagttcacaggaggcgacgcacatgacaggcggagatcgtttggctcccttagcgaggacggagtagcgcatggcatggtagatctgttcagggtacttaaccggaatcgcttcgtcgagcttttggtcaatctcggctatgagggtcgtccaatacgtcttcaaatcgaattgggtcgactttgattgggttgaaatcgactgtggtgaagaacatcgaattggtaagataaagtttctgggcttcaatgggaggtaaagaagggaagaggatgatagtacagaaaacgccatttctgagcgttttggttaaggttaatgaagatggcaaattggaattggatcacgcttcctctggtagtggtgctgctgctactcctcggagagaagcagatgagatatgattaggtgtttcgcgatcagagtagattggtaacatgcgggtattgactcagtagtcaaccttagcagttaccactagactaatccccctttcccacttttattagctagataccattattttagctgaaaaaatgtcttattttattgttttattgaggtgtcctcttagactatttctaattgagtgttataaatatgatgtatatacat

SEQ ID NO: 256208 - DNA, 1838 bp, Cannabis indica
catcatacataacaattaaactaaaattctattctattcattcaactcactattttactatttttcttaagttttttttttgtttttttttttttttaagtttttagggtcaaatggttgatgcccagatagagatttgaagcaattttcactccattaaggtctgtactcgtttattcttttcatttttatttttatttatttaattctcttataggcaatttgtgttttgattttcttaatgggtatttgaatgcttagtagaataatagtatatttcatttcaaattggatgaaatgatgatcattctaatatgcatattaaatttttattcattcctattcaaatggatcttaaggcaagctttagtgagaaatgaagaatttaatacttaccaaaatggttgaaaaattatttgattgaaatgatattctaatactttaaactgcaaccaaacaaaagaatggaataaaattaatcgatttttattccattctattacctacaaccaaacacagccttattgttttcccaagctcaggagatccactatacttatttctactggtttttttgttatagttgttaaagattacatcttttaaggcttgatcatttttttggtgtggattaggaatcttattaatctacttttattagtgaaaaaagttgttatatgtaaatcattagagaaaatatattgttaacaaagaatttctaatgttgcagcaactatgtttcgggtaatcaattcttgaacgaataattctgtcgttgcagtatgttagaaccccgaaagagttcgaaaacaatggctgaagttgataaattctgcaatgcacttggtgggaagaaaccaattcatagtattttgattgcaaacaatggtatggcagctgtgaaatttattcgtagtgtgaggacttgggcgtatgaaacgtttggctcggaaaaggcaatcaagttggttgtcatggctacaccagaggacatgagaatcaatgctgaacatattagaattgctgatcagtttgtggaagttcctggtggaactaacaataataactatgccaatgtacaactcattgtagaggtttgtaagctctaccaaccaaccttcattgatttcttaaactcgaaaagaaaattttcattggtttaatgtttacacagatggcagagataaaacatgtagatgcagtttggccgggttggggtcatgcctccgagaatcctgacttaccagatgctctggatgcgaaagggattatctttctcgggccatctgcaacatctattgcagcattaggtgataagattggttcatcattaattgctcaagcagtagaagtgcctactcttccatggagtggttctcatgtaaaattccatcaaaacagtaatttggttacaattcctgatgaagtatatcgagaagcgtgtgtttctacaaccgaagaagctgttgcaagttgtcaagttgttggttaccctgcaatgatcaaagcatcatggggtggtggcggtaaaggcataagaaaggtttgttgtttccatttcaatatgcaattattcgaaaacttgttgctttggctgaaattgtttacaagatttgtgtttaggttcacaatgatgatgaagtcagggcattgtttaagcaagttcagggagaagttcccggctcgccaatattcataatgaaggttgcatctcaggttagaaaaacaatccttactttttcgatatgaaatgattataataacaactgcagcagttttgatctgtgttaagcaaaatctacaatccacttcacaatttgagaatagagtcgacatct

SEQ ID NO: 256209 - DNA, 1417 bp, Cannabis indica
tatctataaataattttcataatcaaacataattaactgataatttccaaattaaactaagcagtctttacatcgctggtctgctaagtcactccctacaaatcttcccgctttggatgctaacgtaggagtgttgactccattaagatatggggttagcaagccagaagccataacctagaaaattgccttccccatgttcatattataccaatctccatcctcaggccattcacgaatgattaataactttccattgatgatccagggtctatttcgaaggatttccacacaatcctcaggctggtcgaaaaagatgccccaaacaccacgcttcatagtcttaaatttccaatgccccttgagtttccagatcttgttgataatctttctatatctagacctaaatactcccttgccactaaaaaaaatgactagcacaccagtattgattacatcagctgttagttcgaaatctggttccagcacaagagtcatgactccaaaaaattattgcgtaggacatcaatatcttcatttcacttattaatgttatcattggtaggaggctcaaccaacccttctgccacctcattattagtggcttcgataataatctctgacgattggggtagttgagaaggaacatcagtcacaataactttagggggcccattcacaggaacagattcctttgtaatggaatcacatgggataccaacgttgtctcccatatcaaccacaagacaagagacaaaataaactttgtaatgaaacaataggcaacgagacaaactccttaggaataagttttagggaacaaaacaaaactttgtattttgaaaaggagaaaacgaagaagggaggcggtttactgaacagtcgagaaatcaggatattaagttgaaaactattaagattgacattgagtcaagttggacttcccaaaactctcacttgagagaaaaaaaactattgtcctgatattcagagaactaacttaaaaatatgaaacaaaacatttttttttctgaatatccagttcagattatagaatatgttcaacaagtacactccaaggattgaaaagcgcaacaactaatatttataataatgttatagatacagctccgaacacttaattaggcaatgcaattataggattatcagattaaagtattaactttcctgattaggcaatgtggtgtaataaaaatggttactttatgaggtaacatatatgtaatttatattattcaatgaatatggcttctattattggtatatgggttttgtattactaaatatttttatgctgatgtttattcgtgacagatgtcagtagtgatttgggtttcattttatgagtaatgcgtaatcattggattttaattgtctgagtataaatgattatatt

SEQ ID NO: 256210 - DNA, 1114 bp, Cannabis indica
ctaaagcatgattctgattagtcctgaatttatctaccagtttgcttattctattgctaatggtcgcgattatcacattttggttaaacacatttttcattattaacatttaagtaagctgtatgtgtatgcccttggtttggaatatgttggttatgtatataaacatacataatacattatcacatattattgtgtggctttatgatatatatgtaactatcatatatttgttatgagaaatactatgtgtcaatatcgctattggtctaactaagtatcggctcccatataatttaatataataatttttagagagtatcgctaaccaattacaacgcgacatgtcgagaaggtactaggtactattagtacctaatagcaatgctcatttgttattaatattcatttgaattgagcaatatactatatatctattttttacgtgtacgattttcaaagctcattgtgagattaattcaacatgcaatctatatattgttgcttttgaataaaacgtcaaaagcatattatcgttcagacttaaattaaactcatcggctcttaggagaataagtaagaaaaatcatgcataaaagtgaagaaagggcagaaggtttggctcagctcaattagagactgagggcagatattgtatttatagaacaggggagcataacggctccaatgattacacacagagaaatatgccagctggcattacaattgcataacagaaaaggaaaaagcaaaacaaataaagtaaaagacaaaatagaataacagaaagagaatctccaacaatgcaggagtattaggcagtgaatgattaggtgattaattagatgactaattaaccaatgaattactctgtcttaacaccacccctcaaacgcaagggtgaacttgtcacaccaagtttgctcacaaagtactggaacttaggatgagtgaggccctttgtaaagcagtcagcaatctgctcttgagaaggaatatatctgatctcgattttcctctgtaaaaccttgtctctgatgaaatgtatgtcaagctctatgtgctttgttcgagcgtggtaaactggattagaggctagagcttttgcactcat

SEQ ID NO: 256211 - DNA, 2091 bp, Cannabis indica
atctcagctacagatcaaataactctctcatctaacggctaccgtacatcatgaaatacattccgtgaaagtacaatcacgaaataaaatcatatatagttgggcggcagggcatgaagtgaactagagaagcatgcaagtttgaattgagtttttgcctctaaatatacaaatatatgagattgagttcatgcaacaaaagtttttgtgtttcactttattcttttgtgtgtgtgtacaaattattaaatagcacacaatttaatatatggttgtcgacccaagctgtctgttctaaagatttatttgtttattttcgtttgataatggaaagagtcgtgtggagctctaataggtatgtgggaacattacgatgtcaattttaggtgaatgaaaataaagttgaaaataaacaaaattctttgatgaatttatgatttttgatgacccttttccaattttaagatgaagtgctactactactagtgtcacttaaccctttaaaacggggagcttaacttaaattgacattttcgttgttgtaataagtaaagtgataactattatttttcaaaataataattttatgttttttgagccaatagctagttgcatattaattatcctttttcaattttgagattaagtactactacttctagtcctactcatcccattttaataaggattaacctattaactgacttttgtggatgtaaattaatgtattttaattagttttataattgttgaagccaatagttgcatattgcttgtaagtaacggcaagattataatgacacaaaactgaaaaagatgaagaaataaatcaaaggagttggtttggtttatcaaatgatcaatctcatcatcactttatctttgcctaatttgcgtctcaaagtgtcattagtcataactacaatccacactaaagtcaattacttagtgatatataaagttgaatatatgggccatatatgtttgtttggtctatcatcaaatgacccaaaaatcttaatttaattataaccacacactaatcgccattattaatgatgagtaccattccgattatgttttccagatattattttctcttttctaaaagattagattcttgatcaaatagtatcataatatgcattgacgccaaagtatagccaagaaactaaggcttaatcaattagtcaatatcggcagttattatcaaagttaattataatgtaatatattagacttttgtctttaattagctctatggtttgattaatggccattagtctaggctcatgttttatttttttcataaagaatagtgtataaaattaagtacattttattagctaggaaccttccttgtacgttcttatgaaaatcaaacatgtatacacgccttccttttggaaatgtatgtacttgtctttattttatgtataatttcatatttattgtattttgactttattatttttcaacaactttaattttatttaattggattttatcaatcgataaataattatccgattgaatttattttttctatacaactatctcatttaattattttttttgaaacaatgactatctcatttaattttttttaacaggtttattgctaaaaaaagactataaacatttgtggtggaatataatatgtatagtaacgttatattaaatatgtaatcataataatacattagatttaatattaaatcattattataagattgtgatgtatatattataatacaagttaataaaattatttctatggtaactataataggttaaatatgataatacaatttaaaaatacaaaaaaaaaataataaataaatgaattcaagtttatttaaaaaaggctaattaggatttttgccccctgaactttgacatgtaccaaataatgccccctgaacttttaaggtcgttaaaaatgccccctgaactattgagattgttggatttaaggacttttgtctaatttcattcaattttactatttcagtgattgtttatgtactaaatcatgctccccagactttgatatctaccaaatcatgcctatcgaactttgacatgtat

SEQ ID NO: 256212 - DNA, 3829 bp, Cannabis indica
gaacttggcttctagattgtcatattacatccttttcgtgttttagctattttttcacttactagtaagtcaaacctacaagcttgcggtaatgaattgggaggattcttcctgcttcagggtgtctgcaacatgagcaacaaccccaacaccagcattatgaagccattcattcttcacctgaatttttaaagcagaaacaaagcttagaatccaaaaagagaagaaacgcatctcaaagagctttttttttttaaacaaaagcactacatgaatgttgttatgggcaaagaagggccacatcgcggagtgaaaactgacatcaactcttttccatcctagttgctgtaagccatgtatcatttcctctgtaaatataaccaaacacaccatcaatccattacagcaaaagatgagatttgataatgaataatattttagaaaaaaattattttaccttccataatttcgtgatattctacagtattttttgtgctaggttctttctgtgctgcctcctttgctttagctgcttccggaggaaaatgtgggccatcagaggaaattgggggaatatagtcaacatctactacatgcttataaccatccagagaacgacgaggtggctattgaaataacattgaatgtatgttaaaaatttatgttcaaaggataaggggcaagataaattaacaatgtaatgactgcactctcttgcaaaagaaaattttcacagatgattacaaccgccatcaacgaaaaaagcaaacacttaattttagaagtggaaaaagatgaataaaattatcttgcatcaactagagaagacatcatgcttgaatcttcctatgaaaatggctgttcaacatctgtattcttatcagttcacatcacacacaaagcaaatatctaagacagatggagaattttgaatgattgcctatattttattagaattgctcacatttatccaacgaaccagtacaaagaagccccaggttttaaagcttgtctctataatttttccaaacgacctaatcctttcctattttatagctcagccctatccttatactgattaacaacaataggcattacaaaaaaccagaaacagagctattagaagtgtaaactaaataaatctactggtccatgtcattacttcacttcttgcgtcttatgtacgtttaacacaccctcagtttaacaattggctagctataaactatttccatgctcttgggtttcaacaacttccctgacctcttcccttggttcttgagagttcttgatctttcttgattatctaagagaatcgtgaactgctgttgcaaggtttcttgaagctgttgttcaaccttggtgacaatctactccattgaatccttgattccatagacatcaattttcagagcttcaaactcgtcctcaaacccagcagtagcgtcatttttctccacaggtttctttggcatcgtgtccacgctcaccgcaccaatttgatatgatatgcttagataataaaatttatctatccaaattggtatccaaaattatgaaattcctcaaagaaaacctctttattgatgatgaaataaaagaataatctaactttcgagatgctagcatctccaattacaacctttcgagagggctgctctttcctacaatctattctcttctatttccaagctaccttacacaatgaatcaaccccctatttataggtattggacagattaaattagttgcctgccacgaatctaaaaagaattaatacaacacaaccctctaagacaaaatagccagctagataaaacaattgccaatcagataagaaacgaaacaattatagctggaatagaacataacagccctatctttaaatgtctcaagccttcctaatgtatactaacttgactagaggcttatcagaaagccataaaaaagatattgagcatagaaattgcaccttgacaatttctgtttcccttctaatggatgatgtccgccaaccaaccatgtctgtgtaatgtcaagaaattcacgttgaagaaaggatatataaatgaaaggtacaatagttatttcattgcagataggatggcattgaataggatacgatcataagatacatttgcataaacaatgcgagctctaaaagcacccaaggcggatctgcaaaatagatcaaatcaagcatttttaaattagttaagctcagtaatagggtgaataaaaaaaaaagatacaagtagttttagatgcttcctacacttacataaactttccatcttcacaatcagaggccattcgtaacagaagagggggtttatcgggtttcccatcagtcaagaacagctgactaccagttagaccagcaagaataggagcaatgggtgctgctagtttttctaataggggaactcccagaagaaatggaagctggacaataatcagagatcagaagaataaattaaacttgacaatgtgaagccctgcagacaatgaaaataatctagaaaattcaagggtcacaggcaagcaaaacataacagaaatcacaagatagccaaactcttaaaatcacatacaaagaaagttaagcacgacaatcatgacattaactatttatgtggccagaaaataaacattttgatcattaatgtgcttagtatcttaattcatcttctgcgccgaaagctgttgacttgcctacagtttgttcaagcgatcatctagatatgaaaactatttatttagcatattaaattaaaatgataataattattggaaggcagaaaaattcctgcaagctccaattaagatgagagtaaaagggaaattttgaataaataaaggtgattaggttggaggggtctaaccactttaactcaggttccttcgtatggatattttggtccttcaaaagtgagggatacggttggttgatagccttaactagtcgaagcataagaatttacggcgatgcaagtcaattctacaggtttcaaaaagcaggtgctaatttgaattgtaaagcattgacggctatctttcaacacgaaacatttcatttgccatgtataaaaagtttgtatgtatacgatatacatttatcttaaattttaaatttggactagccattgtggttgtaatctgatactagactattcttctcagtattggttttagattattggtcaaattggtgcaattaaggctctaacaaccttaatatctagatatccaggttcgaaccttggtcttccctgtttcccaaccccctcaccactagaccaaattctggatagcttgcaaggtagtattttggatgatcccgaatcatctttcattaatgctctatatttcctctgagcgacacatggcataacatgagatgatgtactcttctcaaagatgacgtcacacatcaaaggaagaagttatttaataagctttctatacgttttatatttaataggagattgtccaagaaaataaagtacttattgtttttgtagactttttcttattttgttctttttatctagctggcagttttgtttagggtgtgtttggaagtaattaagtaattgctaggtagggtggtaattacacgtttagtaattacactatattttaaaatgcaaggtgtgtttacatatgaattcctaatatcttgtttgctaaatagttagtaattacatgagaaaataatattttttaatagctaatgtttaatgtggaaagtttttagtaattacacagtgtaattatattcaattctcatggggggccatgagaattagagagtgtaattggaacc

SEQ ID NO: 256213 - DNA, 1352 bp, Cannabis indica
tttctatctaatgaacatttattgttttaaaaaaaaatctagtgtacaaaaaataaatacataaatagcagtctaatgatgaattatgagagtatgtatgtacattcttattgcaattatacttgtaactcagccacgtatctaaattattttaaaaaatagatatataattggagggagatatttacaacgatttacatagtttaagaaaaattttgcaacagagaaaaatttaggagacaaatctctacaaagatcatagttcaaggaaaaattttattattcaatataaaataccattttgatttggggggggattatgagaatgaatgaatgatttgctgcaaattaaacaacatgtcgtttaattaacaattgtggtttgtactgaaatctcaacaaaaaaaaatggcatattaattttttttgaatgtaagacaaattcataattttttactttttttttctcttcttttttacagaataataaagacaaattcattgttgatgcgtttcttttaacaaaatgttgatgtgtactattcagcaaaaaaaataactttgatgtgtactcaaatttgtgtacggagtccatgtcttacaatttgacacctttatattaattgatttgatcgaattatagtatatttcaattaatcaaatattaaaaaaaatctaaactcacctaattaaaaagaaaaaaataaaaaatatttaacccaccaaataactttgacggtttattcaaattaactcttctaatcaattataatttatattttattattattaacttttagtatccaaaatagttatatttaatatagaattgaaacttacaaaagtatgacttaaaaatattatagtctaaactaatgttaaaacataaaatgagaatattaatgtaatcaacattaaaatattaaacaaatattttgttgatcctgaaaagcgtcaatgacaatgccgtatgataagcgatagttgttgaacagagaaaagtaaataattattaacaccaaaattttatagtagtctaccccttttttgttggtaatacatctacttgagatcttattaattgttcaacactttgagcactcagctaagtgataatagcagagatgcttacaattgaatgacttagagtactcaatgtgaagtcggtaaaagctactagtttttagagcacatgtaacgccctaactcttagaatcgccacatgtgtgcttttataaattattttataatactaaactaacaaaaaaatttgtgatttaattaaaatcttgctaattaatttgaaaaataaaatttactggcataactgttttgagttcggggattccctt

SEQ ID NO: 256214 - DNA, 1509 bp, Cannabis indica
ccatctttgctgatcaatcacctgaatcttgaacttcaagaactgccttcaaacttctctgaacatggcaaacttgattcacgatttgacacagattgatccctccccagctctgataccagttgttgagctaacaccagttcgatcacaccagtaggtggatctttcttgcaccagaacagacccaaggttcaaaagttgaacctatcctaggaactcgaatccaattaagacagaattgagagagagaattaaagctttattactacttagctttgttacagaatggtacaaaataaaggatagccaaaaggctatatatacacacttgagaaacagtagtagacacataacgaacataactgtcaaaacagttatgttagttggtgtccaggggtaaattgggtattagttaggcatactaaaattaacagttaatttatggtaattgagtgtatgggcactaagttatacactagattaatatgttgtttattgagtttttcgattcatgtttaccttgcggccatgtgtaggtaaatgattggtcaaagttgaacatcagtgagttgggagcttggatgaagattgtacatatctaattgtctaaacttgaagggttgtgatctttgagataattgttggcaaacttctgtatttgtgatcagtagacgacaattttagaactttttatgatataaagtattttgtaactaaattttgggattactgctaaatatttaataaaagtgcttattataagtaaagttttaattattatgaaactttattaaatacacttttaatttcaatcccttttattagcaaatgttaattaaaacaatatttagaaatcacgtaacgtgccttagatattagggtgttacagaaatatactaattttaagggtaaatagaaaaaaaataaagtaattaagtataaattaatattttttctttatttatacattttaattttacctttttgtatttataaagaacaacagagcaacaaatggagcaatctaaattgtaacctaaattcacatcgcaccctacatacatacgcagcaatcaccggagcacctagaccataaaaatgaaaaaaaaaagttaaataatattttggttcccaattctctattttgttaaatgacaaaagagaccctgtattttacaaaatgatacaaatagaatcatgaactgattttttatcaaaataaatcttaataataataatctaatttagatatattatgacaaaacttgttacattttctgtatttgttcgtattagaaattatcttcaagttggttatattaaaaaaattgtcgaaaattgagttcagagtcctacttttatcattttcgaaaatataaagtctattttattatttaataaaacagaagatgcaattgataatttttacaaaatacaaaatctaaaaataatatttaccaaaaaaattaaaaagtgatgtataagagaatttctctctctctttttttt

SEQ ID NO: 256215 - DNA, 3891 bp, Cannabis indica
agcattcaatccaatccaatctaattgtaattggatcaattcagttcaattgaattagattggatgttgtccaccacccctactcttagtaaaccaaaaaaatacttttaaaaaacataggtaaaattattattaaataaaagtcaaataaaatagtaacatcttaattgtaaattaaatagaaaaaaatatgtattattataaattttattataattttctcaattttctattttaactttaggtgtctttaattaaatgtgtagttaatatttgtatgataaaatatcaatgaataataatgtggaggggagtacatacatttaataaaatttatataaattttaaaattattttatcttaacttttttttttatttctctctacctttgttttttattatacaatgaatgtatatttatcaaatatatattttacaggggtttaaaaaaatatatatatctacagtaataaatatggtagtggtagggcgtggaaaaatcgtcaggagaggaggaaaagctgtcaacgaatcagctcattaactaatttccctaaatttcattggctgtttaataaaataataataaatgaacaagatactttacttgtgggaccgtgctcggaatttagctttttcctatttcataatatattaaattaatctggaacaaaaaaaggaattttctttttcaattttttttttaaaaaagattttctttttcaatttaaaattataatattaaatattcattttgtacgcacagtccatcgtttttgggaataataaggaaaataataactgtgatcttattattaaacacaaactataattcttgatttcgttttctttttcttttctggcctataatattggttttttttttttttaacttcgccttcttattattccttatatctctagggttttctattttttctgatggcggaatttgaaaaatatagctttcccttatataaagcttcctttttaatttctcacttttaacttaccatttagggttttagatcatcaactaaaatgctgagtttatcagtacctaccgttcttgtaaagtttccgcgagagtattcacccgaagcagttgctgaatggtccaataaagttcacaaagatcacagcagatctccagggttgacagaaaaggccaagcgtcatctatcgttcatgggttggacttttttgctagcgaagaagatggaaaccaggcaagagttgcgttacgtctcaccttctggacgctgttattactcgcttcgtgctgcttgcaaagcttgtatggagcaaggaaacggcactactcaagcaccgcctccaccagagccaccatcagcaaatatgaggagttctttgattattgaacccgatgaaaccccactaattagcactactcaagcaccgcctccaccagagccaccatcagcaaatatggagagttctttgattattgaacccaatgaaagcccacaaattagcactactcaacccccaccaccacagccgccatcagccattataaagagtcctttcattattaaacccaaaaaccccaaaatagaagtcgtttctgagacacgacccgaagagaatcatcgcaagagaaaaattgggaattcggtcactgaatcgtctgattttggttcggataatgataatttgaagaagagggaacgagtggaagtaccagaaattacgaaagttagggttgatcacaaggttattaagaaacgaaatagaaagacgtttcttattgatttgatagaaaccggtgtccttccattaggaaccgaagtccattaccgtggaacacaatgtagaggtgtgattcttcgtgaagggattaagtgcagatgttgtgaccagattttcttcctcactgcattcgaaaaccacgctggcagcaccaaacaccgtcccgctgccaatattttgctggaagatggaaagactactttactcgattgtcaaaacctgatcaataataataataacaacaatcccaagagtagtggtaccgataataataataacaccaataatcatcaaaatgatgatgtgtgtggcctttgccaatacggcggagagttgctctgttgcgacggctgtccggcatcttttcacgccgcctgtttgggtataagtgtccctcctccatccgaagactggttctgtcaactctgccgttgtgggaactgcaccactgtcaatttcaagaacactccagtggtctgccatcagtgcgagaggaaattccactattcttgttgcggcgtagtgctttccatgccagaaggattaacattctgcagcgagaattgcaaaagggtttgtttgggtctcaggaaaatagttggcaaacagattcgagtaaacagtgatctcacctggactttggttaaagcttccaaaaacaaaatgtcctccaaatatttggagaaagctttgagtattatgcacgaaagtttcgagccagcgataaattactacacaggaagagacataactgaagatgtaatatttggaagagaatcaaacgtgaaacgtcacagcttcaatggtttctacgtggctgttttggagagaaacgaggcgatggtatgtgcggctgctttaagagtttttggtgatgaggttgcggaggttcctcttgtggcgactcagtttcggtttcgaaaacagggaatgtgtgcaattatgatgagggagattgagaagcagctgaggattttgggtgtggagaaactgatactgcctgcggctgtggaagttttgccaatgtggactagttccaagtttgggttcatagtaatgactccgcaagagaagttgaagattttggagtataacattctggattttggtaagagctttatgtgcatgaagtctattagcactgagcagcagttcatcactcacgatgaagatgatttagttctgaataatgttaaaggtctatcgtggaatacactatataattgactgtgtacaaaactacattaatttcttttgttaattttacccattctttttccattcatgtaactattgttttgactatgatttataattagtactttcctgttacttgcatactcaaaaaatttactctatcttacatgcacaatcatgcaaaatttattattgatgggcaactattcatcacgatgttaatttctatatgcaataaccaattataataaaacacaagtatcgtattagccaccttaagctaactaatgaaaatgctaatttaatactaaaatgttgtggtatctaaatgtgttattatgactattaatataatttagtatgagatttcacattaatttaattgagtaatgatacacataattcacacacaaatttaattattacttatgttgcaagtaactactgtgtgttatatttatatataaattatgtgtacatatcattatttaatttaatttaataagtataatgtaatattcttaatcatttattatactacctcttggagatatagctatattttatagaaaaagtagttttgtgactattgtgcttcaatgcataagagcattgctattatatgtgatgagatacttaattcgaccaatagtcataatcacataaagacggtgttgggcactaggtctacgagtgtttttttagcatttctcaatgcataattgtaaatcttgatgcaaaatttaatatgttatattcaatgctcacttaataatttattaaaaaatataaaataataataatacaaaattaaatgtaaactttaataaattaaataataataatgtaatcatttaatgcacaagagtatgttagctaaaatttaataataaaatattaaaaatgacataatagtaaat

SEQ ID NO: 256216 - DNA, 2443 bp, Cannabis indica
ggaaatggtaatactttttaggatcttgcttatttctgcatgtctcattagatcgggtctctgaaatgcgaccctattttcattcgttagataaatatttttaggagtttcatttaatttcgtatataccgagtatataagaatatatttctcgtgctttctttttcttttttcttatcttttgacaagtctctcgacccattagttttttcttggtaattgggccatttaggtttgaatttcttgctttggttgtcacagttctcgctattgtggtactcgtgctgggttgtctcccgagcaaaactttagcaacgtcattttatttggtgcttcttccttctgcacgaaaatttgtgctctttcattgaactcataaatgtttcttacaggttgaccttgcaaatcatcccatagttcacctcatgtatctgacaagtcagttgttatcctagcttgaagagatgttaattgaatagtatcattcaaatttttcactttggctgcaggtgtactaaaacagcttaagtatgcttttagggactcctttggttgttccttagcattggttagtgaatatgcttctggtcttcaatcccttttagcttgaaattattttttaaagtcctttgatagttattcccaagaatttatgaaatggttggtgaattcgtcaaactgactacttgctgcttctattagagaagttgggaataaaatgcatcgcaagttatttgaaacatttcttgctcgcattatggtgttgaagttgttcaggtgtgccacaggatcagctgtcccatcatattgagcgacatgtgggtttttgaatccttgagggaattaaaaattcaaatatctggatgaaatggttttgtttcctcatctgaatcgtatccccacaattttccatactctctatcctgctatcgcctgaacttatctttcaattgtatcactcgcaattggattagatccatgggctgttgttccattgattgttgcctacctatattttcatttaattgattgtggagatttggtgcattacgatcgaaatgcttgcataggtcaggttgtctacgatttagctgctcgtggaaatcagagtcgtgacgcctttggtcataattactcacaaaccctgttcccaagtaacttttggattggtagctttgagagttactaatactctcttggtcttttcgataataatgtcgcaattaaccttcatcttcagttcacctgtcataggcatgagttcaagttgatctgctatgcccgcgggtccttgaccttgatccacttggatctgtactcgatcttttctcttgtggctcttctcccattggccttctccttcagaagagatttgatacatgagctctactcacgtaaatgtgtgtactgtctttattgttgtgattgggcctttgtggatgccatggggatcgacctattccaggccaatttcctacatttctcgcaacatgttgtggaattttttggcttccaagtcgtgtttgcctggcatctatattcatatgagaagactctggtacttcaggttgtacattctcttggtttgtaaatccatggaaaattcttggatcgtcatgtcgaattttctgatttcttgtatttccaagatttcgtgggtttcctccatccattgggatatttctcacattcctaggttgttcttcctaagtttctaagggattcccttagttgtttccttgtttcctggttctggagcctcggggcctccttcgtggtcgtcttgcagatgtgacaaattgattttgaggggcctctccttgtgtagcccttgttgttgctgcctcacgctctaatttggcgttgctttgatttgattcgaccaggcattgccaaagtttcttattttccaattccactagtagaatatatctggttggatcataagcatcctcgcttcatctttctaggatatgttccacagtttgatcaaagtctccattgttgcttccagaatgaggagtctcaacagtgttcgtcctttgtgaagcttaaagctcctttcctggacgatgggttgtctcttctggatgattctcatcgttacgtggagtatcgtctgccatgagtgtgatcaaggttgtatttttaaggaaggtatcttttttgagtgttattacaaaagctctcaatgaaagtaccaaactgttaacgaagatttttgttaactaaataattagcatttttgtaataaataaaatgcagaattaattattataattaattatctaaaaagcaataaatgataagaagttttttacgtagttttgaagttaaatcttcatagtccacgaatccatctttttaaagattgatgtgtttgtatacaaaatataataatactaatttttcaagaataaataatggcaatattatctatttt

SEQ ID NO: 256217 - DNA, 2912 bp, Cannabis indica
ttaatttttatttgttaatatatattgatagttttattacataaagtataatagtgaacaataaaataacacatgcaataataataatcaaatgaaaaaatttgtcaaataaaaatgcataataaatagatgaaaagttttgcactaaaaaatatcttaatgatcttgattaccgtcgatcttatttaaatttgatagtctatgataactttcgataattacaaaacgtgtggtaagacattaaggagcgttcattggaccatatccaatgcttttaggcctatccagatccgatctagttatatagtggatgttagattttaccatctgatcacgtgtacaaaattcttcacattaaagtaaaaatgtagatcatacattggttccaagttcatagatatattagcatattgaaattgcaagagaaagggaaaagaaataccagcataatttacttgaacacattgaccaaattgcataaatccaagctgtcatttttgtattgctgccatgggaagctctctccacctcctttggaaacaccattttgagagctatttagtttggctgctctgttgaggcaccaattatcaacaaaaatattgcataaataaaacaataaccaaaaaaggtatttgttagtgacataatttctttgagtgaaaaattgatacagaaattgtctgctacattacaattaggctggtagaagaaagatgagctttcaaaactgaaagtatgaaaaattaaaaattagggtttggaaattgaggttacaccttttttttctcaaaactgaaaagaggaaaagagaatcgggctactattttaaaagctaatttatgaaaaaagataataataatttgtttaatattttttttagttgagtttattaattttttaaaatatatattattcttttttagtgacatttgaaagtgtaattgattttaatatttggtgacatttttataaatattattattcacatattttagtgacatttttcaaatgttattaaaattaaatatttataataattagtaaattaatgacatttttaattatatgtcagtaaaatatattaatagtgacatttttaaagaaatgctactaaatgaaatgttattctttcttattaaagtaacatttttaatgaaatgtcactaaagtactattattattacatttttttgacaaatgtcagtaataaaaatgtcactaatcttataataatgaataacaaaataacaaaacacagcctctatatataacctgctatatagactacatagtataatcattatattacattgaacctttaaatttattatgactcactacatgcatcatgtgtcttaaaactaaataagttatttttgttttagagaaattgcctcatatctagaaagaagataaaaatatagagataaataaagaattaagcaaatatttacagaaaccaaactgatcaaaattaataaattaaggggataacatgatggacgtaataactaataataataaggatagagtagataagatatgataacatgatctttctatcactaatattaatgtgttgtttagatatgatagagaaaataaattcaccatcatcacttcatttattatgagcatatacaccaaattgaagtagttagagtacgtagtagtaatagtactacttttgttatactataaatagaatgcatgtagaactcatataatatacccataataatttactagtacgtacaataataagctagtgagaatatacatatatatgatcaatatggagatcaaaaataaaatcggtgtgatgatgatgatgagctatatagtagttgttgctcttgtgcttaatcttccatctactactactgcagtttcagctggaacaacttcgaatattgttcaacagcttcgatcagactcaaaatctgatgatcatgctcgtcgtcctcttgaggtctacgatcataatggaaagatgttgactattatcgaacctgcttctatttcagaagcaatattgatggaaatgttatcttacaaaaaaatcaatgctggggtaaattttgtgcgccttggagtccttgccaaactggatgttactgtgttggaaagtataatactggagcttgcgttggccctccaaaataagtttacgtaatttaattatgtatcgattgacatttatatatataagtatatatatatatataaaatattattaataaagtcaatcgtataagtaagtgtaatgaataataataatgttatatttgtaattgtacatgtgcatgaatatccatgcatgcctgcctaagtacgctatatccatcttatatgtgggtgtaactttataacattatgtatcttttatcattaataaaatagaatattatatagaaattaatattgtacgtcttttagagttacttaaaaaaaatcatgctgcctcatagtaccacttatgaaaattcaaagtccaaaccagaactccatcatcatgtaacaacctatgttcatgaaccactttgttcctactaaacaaaatgcactatagaaaaatcaacaaagcccctagctccttactcaaaacagtcacacactcgaaagagctattattgacaaacagagcattcacatatgatcgacctcaaacatgtacatcctcttaacgcatgaaaggtagtctccacaagttcattacaaaaggggcacaatccgtagtaataggaacaccatggctcgtcaaattattttaggtaatgacagattccaactgtaacactctactagtttaggggtgttatcgtgattttatattaattatggacttcgttgctaataaacgagtttattgtaaatcatgagtagttaaaatttttcttgattactat

SEQ ID NO: 256218 - DNA, 3397 bp, Cannabis indica
accattttctcaaagtcattattcattcaagtgctctccaaatggactgaaaagtatttactgcttcttcaatggaagaaatggacataattataagaaaaacgggcaccttaaggtcccaagcaccacaagacgtggtacactgctattagtgcattttaatattaggtcttacatattttaatttaataaatgatatgggaaaccgctaactaattataggacactacatcagtgtggtgttgggcatcttaaagtgttaaatagcaatgctctaaaaggtcaaaggaaacacggaccttcaaattgtgcagattgccaaatgtatcaggcaactgagacagaaggtttgctgtcagatcaacctgtattgtgccagaacaaaataagcagacaggcaaaaaaccatatccagagtgagattcaactaaatggagacaattgtagtacctcaataagagcactgcaatccccaatggatgcagttatttcggttatcctgagcgaagaggtgtaacattaacaagaaaatgtcagaattagcataatggctctagaatctttctggtcagcagagtattattattacaaaattatatattcccaacagtcaaaaagataacagaaaaataaatataaatcatctagtgttttcccatgtttacatgcaatgatgccgattccgtgtttgtgagaactaaactttaccccccatgataatagaacaagaactaaacatatatcagaatactcaaaacattacctgttagagttgactttcaaaatttcaagctgtctcagaagtcctatttcgttagggaggctagtcaacttgttgtttgcaacacgaagttgcttaagtgaagtcaactcgcccagtgcaggtggtaaagtagttaagctgaagaagggaaacatattatattattgcatgaaagaaaataaaatacagaactttctttgacgttatgtccttatttggtttttaggctctccctctctttctatcacgcccattaactccgtatttgtaagacatgcaactcaatcctgaactcaataacaatcataggtatgaacttcctggcccttctccagataggtgatctagagaaattgaaccctgacccaagtaaactcaagccataggctggagtcttgaaaataataaatcaaaatcaagaacaaattcttccatttgtacttgtttcgaaatttgacctcatttgaaaaagaaaaaaaaaaacttgcattgaaccggtaaggccaaaatatactcactgattatgattcagagaaagaagtgttagatttcgcatagatgccattccttcccacctaagagattcatctgttatcttatttgcattcaacaacaatgtctgtgcaacaggagaattgggggaaatgtttagaacttacaataagagagtcgaatagttctgatcaaagtaaatacatagaaataaaagaaagacaaaattatcaatacctgcacatgaaaggaaccaactgggaaagacacttcttcaatagcattgttactaagatcaagaagtctgacatttccagaagcccaaacttcatcaggtatggccttcaaaggaaatcaacaacaataattcaactatttggaaaattaagccatgtgaacacttagttacaagtaaatgctagcaatatattttaaatgctagcataaagatgaatcagcgtatatgaatgatgtatagcaaggacaatcataagtgaaatataattagcacaaatttaagaatgcatccctgatgaaaaacatgggaatgcattaggtacgaccaccaaagataaatgttgacaatgtctgatcatccaaacaaaatttgattcttatacctgcaggttgcattcagacaatgctataactccagttgccttccatagatcccgcctgattttatcagcatcaattggcttactttcttttgctgatttagaagcatctccgtctcttaacactggacgagtctgagcttgcttaaggacaggaccgtcctggttaaatccccaaagcaaaacaacacaattaggttagatcatttcttgaatatgtttgtttcaaaagaacgaggtaggctagatcatttcttgaatatgtttgtttcaaaagaatgatataggttaaatgatttcttgaataataataataaaaaaaaacgatgtcactcaaatctttcgaagctctttaaactttctactgattacaaattcttatatcaatgttctatcattcgtccattgaaataatttggtttatcgtatcgaacaagtgaacgttcccattcatataaatttttcattctcaatgccaaaattgaaattggaaaaaaacgaaaccataaaaggtagttaaacagatataataccccttggtgcaaaccgtgagcagccatgagcatgatcttggatccattcgtgacctctgactccctaatcgtcattccatccaccaaaagtttgcctaccaaaacataccggaccatacatgatttcgacgctcaacaacaaacaccaatagagaagttatgtaattctgaaaaactcaagttggagagtgaaaagccaagaaagaaagaacctttggaaatgagcttctggccacggggaagaacgttggtgagaggttggagaagggacttgagttctttaatggtggaatcgggagatatgaggatcggaaatgatctcccgccgaacttgacgtggatcgttatggttgggtcgccatcgccggccgaggttccactctccattttcttttgtcttggtcagttggtcttccttcttctcttcagtctttctctgttctaactcttgcttcgctcactgaaattttacctcaaaacccaacctcctttagttttttatttatcctcttctacaatttacatttttttatcattttaaatggatttattttttttttatgtcaaacacaaagatttatttttttaagggatttgttggctacaaattttaatttttagttattaaggtagcgtttgataacacttttttaattagttttctgtttttaaaattaaaaaactgaaaatatttttcataaacattttctataaaactgtttttacttttcaattttttaattgaaaatcaaaattaaaaaaaaaaatacaggtttaatatttttttaaacaatttttttcttaatcagtattttgaattccgcctagatccggacctaaatccctcccaaggccttggcgctgaacccgacttctaactcgaacccgaatctgatcccaaatctagacccgacttaaataaaatcaaaaaatgaaaatgaaaataaactttacagaacatacttttattttctgtttttgtaaattgaaaa

SEQ ID NO: 256219 - DNA, 4735 bp, Cannabis indica
tttttaataaaatactattttatatagtttcatcttacatacataattgttagtagttcaaattaccaataataattattttagttttactttttagaaaaatttaaaattaaggtataaagttttgaacttgtattaacctttttaaattttaaaaaatctctaccaccacactaactaactctacctactattattaatttggctagaaaaatatttatataaaaggttaaaaagaaattatttagatcatggtcctaataatgatgcttttaattaagtatataagatatgacattttgtctaattaagtagtaattttttgtcattattagtagctagttttgagtattaatttaagtacatattaatatgtatatataataaataaataataatcatgcataaggatcaatcaacattaattgtttgaattccaagttggcttttattcttcaagggctggtcggatctgacgaagaaattaattaagaaaatatagatgaaaacagaaaagttgactataagcctcatgaattgactacctatatatatactatatatctatatcttaatactactaaaatattaaatttattctgctatagatctatatatatttatatacttatataacgtacgtacgattatggtacgtaaacttatagctaaatgtgatttttgtagctttatgaacatatttatctctgaaatgacttaattattatgtatcatctaatccttcaggttttagaaattttaactaagtgattttatatataaattttaaatatattatttatacatgagttttatgtggttaaacctttttaattattattttgtttgcacttaacttcttaagtttaaattttagtggtaaaacactcgaattgtgttagcaaattaaatgtgttatctattttttacagttaactgccaacatggactgattatgtatacacgtgacacgtttatattggtacacctaatgttggataaatctccatactaactgtcacataaaaaaataccttaaacaagttacaaggaaaataaagtaagattttttacaaggctcaacagaccattataattctttgagtagtcggttctgtttcacagataaaatcttttagttctctacaatacaagaaaataaataacaatattcaagactccaacaaactatcaacaactcaaagaaaacaaacaacagttttataactgtttctcaaccaactttttctcagctcaacacaacatcaacaacaatataaaaggagtatcaacctgcccattttcagagtgtgttcggtccaaccctaaagtgttgctgaagaaataattctcagttcatgagaagaaaaacagagagagttagagatattagtgttgtattatcaaagccaaaaatagagagaaaagagagaaaagcttgagattacctgctgacttttgtcactataggaatctccaacaccttgtaaccgattttgacatggatagtgaagaatcaaacgtctttgaaggaagcttgacggagatgtacccttgattttgaggggaactctgaaatcaatctctttgtcttattgctcttatttttctgcctttattttttgagttacactctatcacaaccaacaaagatcattttagatttttgttgttactgttttgtggttgtttatttctatgtgtaggttcggtcatagaaaactcttgtagagcttgaagaagaagaatagaagggctgaaggaggaataaaaaaaccaacagtaggttcagctttttgagagctcttacagagcttgaagaggaagccaacaaagagaaagaaggaaggagaaatgggggactacgctgctgttcgaaggcttgaaggaggaacaagttttggttggtagggtttcaagcaagaagaagagaagaagaaggaggagttcaactgctagggttagatgaagtagtgatttgtgtgctaggggtttgcagctgaaaagagaagttttatactgccaaaaacggcagtgttttgagggaaaagtctcttaatccacacagatggaaatgtcaagtttgacccttggttttgtgactttggggtattggtgtagggacatttcgggtaatgcttaatttcctaccctaatattattatttaaaagttataaaaattatttcaaaacttataatattttttattttttaaaatattttatttttttatttttataatgttatataaattttaaaataaattttgaaataataatattaggtgtaccaatataaacatgtcatgtgtacacgagtgtacacataaacagtctatggtgacaattaatcagatgacactttaaatttattaatagttcaatagtttggatggtttaccaccaaaagttaagcttggagggttaattgaaagtaaaatgataattgaaagtatatatttagctgctaaaaactcttactatattatatattaattaattatcaaaggcgcgaataattgaaattagatagcgtttagttagagataataaaatgaaatagaatggaaaggaaacaatcttcattctattctattatttagctgcatattaaagtattagaatgtcattataatggaatgacatttctactattttagtgaaatgattattccattttgaaatgaaagttaagactattctaatataacataaaaaaaaaaattaatgatttttttcataaattttaaattttattctatttcatttctaattttaattttttttttcttcatttctatttttatattttcattcaatacgaccaacctccaccttaattaattactttggttcaaatctcaggccgaaaggtcataagatcagaaaagtggtcgatagggtcggctaacttactctaatataaaatattaaaatacataatattaataataataataataataataataataataataaagactccctcaaaaaaaaataataataataataaagacatgactaagttacatataggggtccacgtacacgtacgtaggacatataagaactaataatattaatgcttaaatagtctaactatgactgccaatgtttaaactagctactatcctctcttttataccccaattctctatacgaatttgtaattgatgaaatgaaaatgaattaattttattataaaatattgaaatgtcaaatattactactccttttctagtattatttagtagaatatttgactgttctattttaaaaaaaatctacatttttttttttttgtattttatttaattcctattcttatattttcattttttttttaaccaaacgttacttaatattcctatcatggtcaaggtgactcctcattgggacctggctatttttttatttttttttaagttgttacatttaatttttttcttcattgagatgttgtttggattttttgaggaattttaatgattcggttcataatttggttaagtgggggattggatcactccatccatgtaatggttttcttagttttggaagatgagtctctatgtactcaacaaaatcacttctattaaagaatttttagtgctaattgattttgagaaatacacatgtatgctctaaattattttctcaaccatacacactttcttgatagatagtgtaaattaatttttagcaagtaattgttgagataaagaacgtacaacttttttagtagtgtgaatacataatactatactacctaattataacattatggtaaacatgatatatatacatgtgtcatgttccggcccataaagtatagtacttaatataagaaatctctttaatttttttttgccaaccttcattatttattaattgaaaaataaaaagaatgtcaaatatatataaatagataattagaatttttgctctgaattttgacatgtattaattatgtttttttgaatttttcgagtcgttaaaaattctttatgaattattagatttaaggatttgtctaattttatttaattttgttaatgtaacaattgtccatatactaaattatgtctctgaactttgatatctaccaaatcatgcctcataaactttaatatgtactaaattgtgctcccgaaattttcattcacattagactttctttagtgaaattggactaaaagtttttaaatccaacaaactcaatagttcgagaacaatttttaacgacctgttaagtttaaaaaacatggtttagtatatgttaaagtttatgaaccaaaaatctaaattaaactaaataaattaataagaatcatggattttcatttcatttaaaaaccaacgaatagtactatttagatatcgtgtaattgactaaatattatctagaaaaaatgtggattggaagcttatatattctaccttaaaattaattggtaatgaatttagtttcctatattcttgtattcccgtaaacttattttgtaacgaccgaaaagtttaattttctttgaatgctcttattttcaaaaataaaagactcaataattttacatttaatttatatgaaataatattattcaatattctctcaaaataatagctatttttactcactaattttaaactattattgtcacaacccgtgccatttgtaatgagtacatatgatgttcttattttgtgctcatttcattatttattaattgaaaaa

SEQ ID NO: 256220 - DNA, 2347 bp, Cannabis indica
acaaaaagagagagagagagagacttaagttaataagatttgaagaaaaagtctcagcttaaattctgtaattagtgaacaaattcccctattttcttatgcactataaagtataaacatgttaaaaatgaatcaaaaagaagagattagtaaataaaatgacatgcatgtatcaaaaatgaaaatccaacttaaacacttaatttcaaccctaaaataagatttgaagaataaacaaagtgtaaaaaccttaaattcaaatgaataaaaagagagagagacttacgtgaacttggtaccaaatgaagtgtgaaaaagggtaagcttgtccaagaaaagatcagggttttgaatgatttggtcaaaggtggcagttggagtcggataagaggatgacccattagaagcttcagctcgaatttgttgatgaagagctgaaatggaagatgggttgttgttgttggtattaatgttttctggaagctgtgagcttgagcggctatggtgattataccagccattttgagctgagttaagagttgttcaaaactcgggtgactcagtaactcggttggtggggttgatggggtttaagaaaacgatggtaaatgctaattacatcgaaattggtagcacagaacacagaacaaagaacccttttttgttctaatcgatttggtttgaaactgttgttaaagttttaatctttaatcttaaaaatctaatctttattaccttaaccacaccaaagtaacagcttcttgttcaatacaataattaataataataagttattattttctatgatttattttacttttataagggtttagagaaagatacgattttgatgagatttgagaatactgaatttagttttttatcttttgagattttaataaatgaaaaatcaacccaataaaataaaaaataaagaaagaaatcttcattcaaaaaaaaatctttcaaaaatatagatcctaattgttagattttcttttgtttcaataataatgcaaaagtgatatttttgtaaattatatctagttaatgttatttttgaaagagagccaaccccctaattcgtaggctattttctattaaggctataatcaaccaacaaagttcaacccctattgcaagaataaagctacattggagttgcttttaagtgtgatataaatttctattgtgaaagagtaaaacttagttgttttgctaataaatttgcaaggattattaatagttataatggagaatgtaaattaagatgaacgttaaagatttataagtattagaagagagaaattgaattggaagtaaaatatagtgaattggaagtagattctaataatgcaggtactaaaagtaagttcaatttaaaaacaggaacatagagaacattggaaagtatcagttgggagttaagtccaactgtgccaacttttttgattttaacagaggtaccatttggtaaattgatagtttttacattagggttatgattaattgtttgaaaatattgtaaatgagcacaaatgtggtgaattgcaccaattatccaagaattaaaggaaaaaaaagtcaaaattacccgtaaaattattggcagtaagtgtgtcaacagaggtggatgcatctgttgtaggttggagctgttgtgtcaacatagaaatgatctgttggcattgagaattagtgaaatgggattgggagatataagtgttgtgagtggaaatttgcatgctttgaggattgcgactgaatgaattattgtatggttttcttgtgtttgttgcatctgctagttttctatttccataacttgggggaaagctatgtaagaaataacatttatctttgtagtggcttgaattctggcaatgggagatttttttatttcttgaagcttgatttgcagcaggtgcacggtcagaggcttgtgctgttggtgtagaagttgcaccagcagcaagggtgggaatggtgagatggccaatggttctttggcgttcttggtgaacagtcatggaaaataatttgttaagagggggacaagggtcaagaaggagtatttggtcacggacagcatggtatctttcattgaggcctttaagaaattgaagaacttgatcatggttgagatgatcatgatattgtgttgctgcagcacaggtgcaggggagttttggtcttaattggttattttcatcccaaatcgttgtgagcttggtgaaataggagctaacagaatcttcccattgatgaagataagtgagtgtttcattgagttcaaagattcttggcccattcccttggttaaacgattgtgtaacacagtccacat

SEQ ID NO: 256221 - DNA, 4027 bp, Cannabis indica
gattggctgtcaacatcttcttctgaaatattaaacaagaactttggaagagaagcaattcgtggaagttgaagcagcaggtctccaaaagaatctttcctcgacattcctggttgctttccaacaggattttctttcaaattcaaatgctcttcagatgttttaccgtcgagagcaaggttaagttgaatatcacttccatcaccagcaggtccttcaacagagctctcgccgccatcaacatgagagtggtgaaggttggcaggatccttttgaagaagacagcagagagaattgacccttgtcatgagagacttctcatcggaatcggttgctaattgattatcattcagcaggtactgtgcaacctcctccaacatgtcttggtaatttgtttgttgatcagcaccagattggtttccagaagttatctgttctgaaatacaattttcaatgtggttcatgagatcgctcattgacattgaagggtgaagaccagggactttaatctggtcccaattcatgggtccccgggaattaacagtttcagaacttccattcccttcaattgcatggctgtccataactgaaatggaaagaagaagaaaaaacagtaagtacaactgctaaaccgcaagcatattctagaataatcttgaagaaaataatttcataactgaattgtgtctaaagaattagagttaattttcttttctttcatcagtgggatatggacaccaaatatggcaagagctatatgcattgtctatgaattgttgtaaaattacagtcattaagtgccatatactttatatacttaattctttttcgaaaaaagtcttgaatccaattaaaagaaataaacattgataatcaaggaaaagaaagcagatgcaaattagtttgttacctgagctgggggaaggagcttctctagacctagtctccaccacattgccaccagaatcttgctgatcaagcttaaatgaagatgactgagttgatggcgatgcaacatcttgaaaaccagagatggaagatcctataccattgtccattagatcaataactcggcctttggattcttctgggtcctcgaaaatagaagttcgtggttcaaaatatggtgaatccagaggtacctctggctgtctacttaaaaagtttagacgcatgtcgcactgaataagcttttcaaaatgtttggtcagcagtccttgagggcattgaagaaagtgcttcctaaagcccaaaaaaatatccatcaacacagcaacttataatatataactaaactttaaatcaaaaaagggttgtgactatataaactcaagcaaaggggcagagacgggactccacactgtaagagacagcctgagttgacatattttcagcctttccacatgtggatcaagacaaatattctattctctgtagagataacagagagaagggaacaaaaaagaaagaaaataaagcaggaatacgattttacctgtttatgctagcttgtccatcagtaaaatctgatgtcgcttgccataaagtgtgttttctaggctgagggttggtttccctgaaaaaaagaggttgtctagccagctgcagcatgtaagatcagaagttaacatgcaggtctaccaaaaccatcttgaaccccaatgagccaagaagtacacacaaaaatatcgatcacaaaaagaacacattaccacaacattcaaggtactaggtccctcatcaggacaattcgccttcaaagccataatatctgaccattgaatttcaattttactcttaagaccaccttcaagaacttcccagacaagcttatgcttagcaaagtagcattttgccactaagtctccttcatatcttgacttatactgcagtaatttaaatatcatcagcaccgtttttgcaaggatattgtaaggttccaatattatgttttagataaaaaacagctagcagttaccaatttttgttgaattacccagcctggggtttgaaacccagacctcatacaaatcacacacacccaaccactttagtaagactcaagtggcataagttgccaatatcagcatgttaatacataagcaatatttaaaggtacctcccaagcgcctatcttcagaagtgaggcaggaaagtttgaagccttaagcttgtcattagaggtcatttgagcatttcctttgttttcctttttgactacagaggtaacagttccgctctgcatacctccaagttgagaaggattaccctgagatagcttcatttggatcaaatccaacagtgaagggctctttttcagcttcaaccccaatgggctgggctcatcaagcgggttgtattgtgacggaggaatcggcaaagatttgtttccggcatcccactgaataataaaaaaaaaaaaaaaaaaaactacctttagtcaaaataactcccaataaataaaagactagcatttcaaaacggcttaaaactaagacaaaactcaaagcaaccactaaatagtaaatacaagattaaaactacgcctaagagcttgtgaaacaagcactacgtactttcccagatatttatcaaaacataccagatttaacataatgcgagaaattggagagagtagctgagcaagtgtttaaaaaacttagattaggtttacaatttcataaaccggcctatgaatgacctcattaaaaatgaaactaaagaaaccccattcaagaaagtaacgttagataacaaagtcacataaaacttgaaaatccaacgagaaaatatcaatgtcaaatgaatcttgatatcacgcgcttcatcaaaaaataaaagaggtcataatttcgatgaacaaactaaataaactacttgaattaattgtctttgaaaatataaagaacatattaacctaaacatgcacgctagctagtagatgaaccaaatccaatcagtctcgtcattcatcaaagagagctagcaaaatatcttacaacttaatctgtatttaaaaaaaatcttatttttattttcctagcttattttctcggcagccaaacaaagaagttgggaaaaaaaaaacctcattgaaagccggggaaggcttggatcgcttggcgagcggaccatgctcctcttccaatgaatcctcgatctccaatttcaccggatgtttgtccgtacaagctaccggttcttgatcggaccggagatctccagatttcattaactgaaccatcagattttcgttttcctttacttcttcccacaaaaaaaattgcccaacaaaattccgggaaaaccaaaattactcgagaaaattgaagaaagttaccaaatcaaaccctagaaagacgagattcgatcaaccgagatcggtggtgattctgaaaaccctaaaaagaaggggaaaaatatgaaaaataaaaatccgaaaaaaaacttttagaaaatcttattaacggtttacagagaaggaacagtactattgacggcgagcacgtgaggcacgtgtcttattgtacacgtgttcgttttggatatgaatttactaaattacccctaagaaattcgtttcagtgaggtttggggtgtaggttaaaatagtcattgtgtgtacagggtgtacaaacgtgtggtggcggacacgtatgaaattaaatggatatatgtggggaccatattcccctttaaacgacggcggtggttggctttgtcgtccacgtggcagcagatccggtgggtagcttgtcacaccagctttgtgcggccgacacgtagacttttgaagtggatgactgagggaaatatttgggtggagccgattccaattttattctattactaattttatttttatttttaatagaaaaaaaatcattatctgtgttaagaaaattctagtggcatcaaaaaatgaatgaatatatcacactttagtcctacttttaatttttagatagttttaatattgtttttttttgtaaaaaaatagttttaatattgattttttttttaatta

SEQ ID NO: 256222 - DNA, 3256 bp, Cannabis indica
aacgggagatcaaacctaatcgttaaatttaacagaatattccttttatttttaagtatattctgttaaaccaagaaatgccgttagataggcacttttaatatataaatatatatatatatttatgtcgactgaaatctttacgtggaatcatatctaatgtcagaatgtatgtaagcgattcagttttcacatactggaaaatctagcatatgcaactaataatatttgtgtatataatgtaaatatatatttatggctgcagaattgatcaatttgaaaagagttctataatattatcctgtgaaacatataatattatatacttttttaattgttaattaattttgaaataaatttacttttaatatacactataattaatacattcttattttttttatcatttttatttatctctttccttggatagttgattaaattattcttgctcatttaattagttataatttttaaaattcatataatctataatttatattaatattttttttgacaataatttattatattaatatttatttgcctacaattaaggaattgattatgctttctaaaataataaaatatttatttatagaaattgttatccctccaaaaattaaaagttgatggcatgaatttttcttttagatatgaaggagttcatatcatctcaacactatcttgagaacctcagccaagcctcgttagatcgtcattttggcccctcctactttgaaacattatggcatcagtttccaaggcaccatctcggcctaagccgagatcacaactacaccaaagcattatcttggtccaagttgagatcacaacatcatcaccatctcagagcttcttaccaagtaccatctcggccctagtccagatgcacaccattaatgcatcattttagccctagctgagatgctcctcacctcgacctcttcttttcctgagcattgccactttggcccatgccgaagtgatatgctctagcacgtgttattatcatcttttttagatatttattttgaaaaataattttgttgtcatttcgtattttaaaattaacccaactatagtaaggagaatgtttgtcttgggttaagagattttaaaccctaagagagtcctagatgaaaacctacataaatgtgatatcaattttaaagaactctactttattctcacgaactctcacccccctcattctataaactcacttatttaatcttaatttattattcaactatttgattattgctaatataatatccattcctaaaacaataatataaacacataaagggtagagattcttacattcgttctagcagaattaattgacaccttccgttttattctctaacccttgatcatttctgttacagattatgatcaagaattgaccttggattctccttcagttgacaaaattgactacacaatcttccttgctagcatgagtaatttcttgatatatgtgggtaatcactcaatactaagtccctcagaattttgagaagaagaataagagaattttgaaattcactatataaaatataatctctctcttttttattctattttgtctgacaaaattgagtcaaagtattatggaaatcaaaggttatcatatatattcatagtgtatctagggttatgtttagaattgaaatagatttaaaaaatgataaaatgagttaattagaacttatggccgaaaactataataagtctcatgggtttcaattaatttttcaattctaattgtttaaatgctaattttatctatttaatgatgataattaattattaaacaaaattatcatttaacttatttattaattagactttctaatgtctcttaattaataaataaactaaattctctcaaattttcccttatttagtaaaattcaaaaataagacataatttcacttagaatcctaattgattgatttaatcaattaattgagtctacaagacaatattatctcagatagtgtggagaccatgagtctatataatcaagctcccaataagtagttttagaatttacttagtaaattctctatcttattaatttctcctgactccactatatattcaaaattgcacttgttgccctaagttttccccaatatacgtggcagtctcaatataagacacgtggtagaagtaggcccatcatccggagatgaacaaaacacaacttaatcccctctagaagaaccaatagctatgatccaagggtaggctcccagacatgaggaaatagctccacttcctcttctgaaggtgaagggcaaatgaactcctccggactagcgaagctagaggtgaatggtcactttgcatttaatgcaacatggggaaaatgtctgagaatacccataagaggacgtgtcagacgtcataaacttatttttgggcgattacatgataatcaagggtgcaagtgacgaccatcaatcaagaagggatgaagactaatctcacctaagacctaggcagcctactacgtaggttatgcatgccctattttgtaccttttaggaatttatgcatgccctcagatggtactttaagacaagtaaaacctttcttcttcccaccaattgctataaatacccctcaataaaattagtgaggggatcagaaagaatacacaaaaaatagtttttgtaagaaacacccactcattaataacagagactcgtggactatagctcattaatatcttaaccacgtaaaaacatccacattaattatccctaagctatcattattacattaaacatatggttgttgaaaacctcgatcaacaacactctttattatatagaatgctctatttacaaagaataaattgctaaattatccattgtttcaatttaaacaataaacactctattgccgttttacccctcaaagtattttgtcctttatacacttagctacttataaatgatattttgagaaaataatataattatcaaaataagtactccaccatttaaactcgtttagctaagctctaagaaaactatcatttcacttttaagtatttatagaagctatagatttcatatctatgattagccctctcacttagttgtactaccatgttctcaagatgtaagtatggaataatccttcaggtacgcttgtaacaaacaagtcaaagaacacgtgcaatacagttaagccagaacctaaccatcttaggattgagatcattgatctaag

SEQ ID NO: 256223 - DNA, 2852 bp, Cannabis indica
taaaattaattaattgagcattaatttataataactacaaagttaaaactatagctcaaatataaaaacaaaaatgacactataaatagatgagcatattaatgccagagtaagcattttctgtctttcttgcgttgtactccaggagcttaggcgccacgtatatcaaggccatccttccactcgaaatatgcattaaaaaataaaaactagtagcaacaaaacatttagttcagaagtctattaataactaacagtggcaccagtaacatttctcacagaagagtgattatatatgcactaacaattcttaaataattagttaacttgagtttcagtagtttagctcaaaagtataaaacatgatgtctaaatatgttaactttcatctcaggttgaatactcctcttaattagctcaaaaatgcatgtatctcttggatgaagacagttattcattgcaaattcagcccatccagtagaaaatttatattctgatccatcaacaattaacttcacatcatgcctgtattcatcctcaccaacccaaagagtaatactttctgtcttttcctcaaaataatggcttgcaaaatccaatggaataggctgcaccaaaaatgtcatcataatttgagattatcattaaaggaaatattgattagagcaacattattaatttctgcctataccagattatatcctccatgcaaatgatctaattgcaaagtcactttaaagcttggattttttgaaaagaaatggctagctacttcaaaagctctcttaaccactgaaaatttagatgaagatgaagaaggcctgtcttggttattaccagtgtttgcttcagatatcagattagtggacttatctgcattaaattgataataaacagcattgtaataatctgatataattttcttaagaaacaaaaaataaacatagagagaagagagaatgacattattcttgatcgattcatattcatacctgaaagttcagcaataactttctctctgtctttctttttgattatgttctgtgaaatgtttctagctttattgtttccagcaaatgaagaatcaagcgtgacatttcgcttggatggtgttgcagttgatatttttgaagctgaaaacaacacataaccaatcttacacagtgtaatgatttaagaacagagagagagagagaacaaagaatgtaatctgttattgattagagaaatggttacaaaggagctttatatacagatacaaaggtgagttgaaccataacagaataaactaaccaaataacagaaaacctaactaactaactgtcttaactaacctacatccttaacagcccccttcaaactgagtgtagctttagacacaacactcagtttggttcgaaaatcagaaaacttggagctggaaataggtttagtaagacagtctgcaatttgtgcagtagcaggcacatgcttgacaagaatttgctgctgtagaaccttgtcacgcacaaaatatagatcaatttctatatgttttgtgcgtgcatgaaaaacaggattagcagccatgagcacagtgctttgattatcacaccacacagagggaatgaccgtttgaggtatatgcagttcacgaagtagagactgaacccaagttacttcagcaactgtgcttgccagacttcgatactctgcttcagaagaggagcgacttatggtaggcttttgagacttccaggcaacaaggttaccaccaaagtagatacaatagcctgatgtagagcgtctgtcatcgggatcagtcgcccaatcagcatcacagaaggcatcaatagagaaatcagaagcaggtttgagaagtagtccatgatcgagagtgccagcaatgtaccttagtattcttttcacagctgtccagtgagaatgcaaaggattgtgcatgtactgacacactttattcacataaaaggccagttcaggtctggtgatggtagcatactgcaatgctccaacaatggacctatacagagttgcatcttgaactggttcactcccataatttgagagtctaagtccactgttcataggagtatgttgagtattgacattttgcatatcagcctttgtgagaatatcttgaagatatttggtttgagtgagtagaatcccagcagatgtgtgattaacttgaatgcccaagaaatagttgattgtaccaagatctttcagagaaaaagcagagcttaactcatgaatgagttgttctactaagttgttatcactgcccatgatgagaatatcatcaacatatactaggatgtatatgcaagattgaggtgtgactcgaatgaacagagactgatctgctttggagaactggaagccatgttgaattagaactgtggacagcttttcaaaccaggcccttggtgcctgtttgagcccatagagtgccttgttaagtttgcacacatatgttggatgatctggatcaatgaaccctgaaggttgttgcatgtagatgttttcctttaagtcaccattaaggaaggcattgtttacatccaactgccgtattgtccaacctttggtgatggctatagtgagtacaattcgaattgttataggcttcaccacagggctgaaagtctctgaaaaattgaatccaacctgttggtgaaaaccctttgccactaaccgtgctttacacttgttgaatgacccatcagcattctgtttgattctcataacccatttgcatccaatacaagtttggtcatctggaagaggaacaagcacccatgtcttattttctttaaggctaccatttctgttgacattgcattgaacca

SEQ ID NO: 256224 - DNA, 2729 bp, Cannabis indica
aacattaaatgttatttctgatctatattaataagtaaatcttattatattgaaatgggttttatttagggcataaaacccaacaccacccccatttcgctaagaaggaaaggttcatttctctagttttatggaacccaagcccccttaaagacttaggaaggaaaagtttatcccaagcttttagatacaggccatggttacccttttcagacccccaccagaaatcacgaaccattccatcaatcttagtcacaaggcgacttgagagtttggtcgtttgcatggcatacataggtaaggaaaggccaacagactttatgagagtagcacgacccgctttagacagagacttagctttccatccctgaagtttagagatgaggttctcaatgatgaaattgaagtcgacgtccttttgtctggagcgaaagagaggtaaccctaagtatttgatattaccttccggggacccaattcccagcaccgacttgatacttcttttcatgccactgaaagtatttatactaagaaagactgaggttttgagtttattgacttgctggtcggaccaatcgcaaaacctctcaatgcattgccaataacttttagcttcttccaaattcgctctcccaaccaagatgaagtgatccacaaagaaaatgtgggagagtatagggccacccctgcttattttaatagccttaatagagccttcgcattgtgcatcgatcaaaagtctagacaaaatttccagtcccaaatgaacaagtaaggagacaaggggtcaccctgacgaataccacaagagggggtgatgttaccaaactgaccaccattaaggcaaatattgagagaggtggtagtgatgcattgggaaatccaaccctgaaacttttgcggcgccccaaacccagcaagtacatggtcaacaaaattccagcccagtttgtcataggctttcataaggtcaatttttatggcaaaacatccttccttgccttttttcctgttgaaggagtggataatctcttgaatgattacattgttatcctggatattcctccccggaacaaaagcagcttgggtaggacaaatcaaaaaagggagcggaggcttaattctattagcaatgattttagaaataaccttatacaacacgttacacagtgaaatatgcctataatggttcgttcttttcgggttttggaccttggggataaggacgatatttgttgcgttaacacctttatgcataatgcccgtccaaaaaaaatccaagacaacctcagagaaatcctcgcccacagtcccccaatagtgcttgaagaacagaacagacatcccatccggtcctggggcctgttgttacccatagcaaagagagcactacggatttcttcattagtagggcttttcacaagatctgcctggtcatcaacaaatatcctatcctgaataagatagtcacagtttagatcctgattattgaccgaactggagaaaattccttgaaagtagtcgatgaattctttcccaatcaagtcacgtctagaaatccagacattatctttgtttaagatactttcaatagcattccgtctccctctgatggctgccgagaggaagaagaatttcatgcatttatccccatcctttagccaattaaccttagccctttgcttccaacataactcctttcgttcccaagcttcattgacagcacgacggatttcacattcaaaaccccagtctctagaccccgcaagcctattctggattaaattgattttaccttccaactctttgatcaaagtttcaattttaccaaatcgggttctattccagtgcaaaagagaaacccgtgttgccccgattttcttgaagactctggcaggagcccaagagtggataaccgatttccatgcgcaattaaccaccaacttgctcctatcatcccaagtctacccttcttcaaactcaaagcttctcttgaatttttcctccaagcctccggaaagtaggcagagaggtttatgaccagaattgcaggtctgagaagagcaaagaacagttctcgggaacagcttaagccacgcagcagtaattaggcctttgtcaagagcagatttaacatggttagggccagtcctgtggttgtcccaggtaagcttattgccataaataggcatgttaaaaagtccactagaattcaccaaattagatatgactaggataaaacagtctctacccttaatgccaactctttccgaatcctgaagaacaaaattagtgtctcccagaatgagccaaggaccaccaaacctatccccaatcttcatgaggtcagtccaaaactttttctttagcattgcaataagagggaccatacacataggaaagcaaccaaggatgcgacggggggtccgaatagacaacaccagaaatatggttttgggagtaagaaatacactcaaattcaaatccaatcttccaagccaaaatgattccccccgcattaccaacagctggcacaaggatattaaagtaaaaatggagggagtgaagtgtacgtaccagagaagtggcgttaactttgagctcggtcagaaaaagtacattcggggagcgcgaccgaatcagggacttcaactcacgaactgtagagctctgccctaaccctctacgattccaagcaatccctctcatggctcctgtggaggagatat

SEQ ID NO: 256225 - DNA, 3058 bp, Cannabis indica
attattcaaatgaaaatgataggattttaattttagaaaaagaaatatggatattaattaataaattaattcattctaaatttagtgcatgcatatgcattacgtgtcccaccctctaatatttcttcattgtgtgtctcacccactaatattcttacatttggcaaattaaagtaagaatttttattgaaattgaactataaattagtacgtaaccctataacagctctaacactaccctttgaaactttgtagctccttcactaaacccataacataactctctcttttttgtgtatattatacatttacagtgtaagtatctcaattctcaataatgaggctaactactaaggctgctttttcactgtgtttgtctatctgttgcctgctcaccctagtaacatctaattctggagacactactgcaatggtacttcttcaggtatatataaaatatatacatacattactcatgttttcattacaaaattttacattgcttttaaggggttttagccatgcatcatcatttatcatttttagaatttaagaaaatattttaatttaatttttttaatagtgtatggtatatttttcacgcgtataaaattaaataataatacttacgtattaaattttttctgttctaattcatgagagatgaaaaaaaaaatatgaattaaaatattttgttagatgccaaaatagatagatttgagttctagatgtcaaggttctctctgttctctctcatggaaaatggtcttttactgttctccattctgctagattagtcttatactaatcttttactgcctcttttctactctctctgttatgttcctttgtgagttgtaagttctccttttctcctgtttgtttgtccctagttgtcgtgctcctttcctttggtattttgtgtgttgtttcctctgtgttgtgtcctttctccatcctttttgcttttggttcctttcttttttcctatcccatttcagccttgtgttttgcttgcgggtggggtccttgtgctttgttttcgtggttggatctctctttgacttcagtgtcgtattgtgtgtttgttttctgttggggtgggtagttggttgaatagttattattcttgtcttttgttgtcttgtgcttttgttcttttgagagttatggagttagttaatgcccccgctgccacccttaaaggtaaatgctttacctgcgtggaagcttcaatttctctggctccttgtgccacctccctgaaggttctttcctctctttgcttatttggaaaggtggtggcacctatgctggtagatgcagatgacatcatagaatttgttacaaaaaattggcagaagcatgtaactgtgtgctcacttgctgagggacctgggtcaaagaactgcttcaagcttgggttcgcaaatgttgaagatagagattgggctctggatgttgccccctggtcgttcaaaggatacacctttgctcttcactcttggttttctggtatagagcagtcgcagtccgtggatatcctcagagtgtgggtacaatttcataatcttcctcatgagtattattcgattgagaatggctctcttttaggtagtaaggttggagaggttgtaaaggttgagttagatgaggagaagccggtggaatggggtccttatctccgtgtgcttatcgacgtaaatattcaaaatcccttgaacgctggctgttttttcgatctcttttctgggggcaaaaactggattcaatgcaagtacgagaaaattggtatattctgctatttttgtggccgcctgggccaccagaggaggggctgctcactctcttctccggtcatggtggaggcgaccgatggtacgacgtaccccatgtatggcccgtggttgtccacggcgtcgaggttccatgatgttttttcggggagtgcgtctcaggcgggggtgattgtccatgcttcgcctttgaccagtcctgcgttggaagggacggtggcccgtccggtctcaatctcgtctcgagctactaaacgtgggaagaaaaggactgggcgtgggatgtctgagcttcatcggggttcgtatcagaattgggtgcccaaggccttgcctgctgggggtgcttcaaagtttgctgaaaatggtaatagtgttggtgaaaatttgaaagaaggaggaaagtcttctgggcattttccaaactcgttggcttcgtctcaggcggtactagtgagtaacccgttggtttttgatgacaagcgtacaggtggggcccctgtggtcattggggcaaataatggaaagtgtgatttgggccaagggtctcgtgggcctggggtttctttgaaaaaaagtcttgggctggggttattaaatgatgagtgtgcagaaaggcaaggtgggccgtttgtttcaagtgggctggactgcttcaaatcatctgggccgtgtgttactcttgagccacctatgaataatgggctgaagaataaggagacctcttttgaaaagcttgggccgagagttgttattgggtcgggccccttggaggttgggggaattaatttaagcccaccccgtgacaatcttcatgcaaacttggaaggctctcttcagcttgatgtgctccctctgggtaatagctctttgttggttggcaagggacctgagcttgtcaactctaatggaaatgaagcggaaaaagatattgaagagaaaaaggccttgtctcaattttttaaagcacaagaagaattactttatgatttgaaacactttggtaagttggatttgtatgagatcaaacaattgggtggtgatattggagtgccgccttcttcggaaactaatgagcgtactacaccttttaaaaagagaaaatttgagggatccgcttctctatgctcgagacctcacaaattagtgagaacttatcatggtgtagttcgagactttccttgggacactaagaaaaaaaattcaagaggatcgtgcggccggtgatgatctttctgaggaaccttcggaggagccctctg

SEQ ID NO: 256226 - DNA, 1758 bp, Cannabis indica
tctctctctttttttttttcactcctgaatattcacaatccatttgtttttttcccttcctccttttgatacttaaaatctctgccatgaatctcaaggttttactgtgtcaatgattaagatttttgagaaagagagtgagagagagaaagctagggttaataagagggcgtgggatccatacccttatcagttccaggtgttggctcaggtggtgggaccaaaatgctggtcattgccctaaccaatgtacaatgtcactgacaaacaggtggatcattcctcttctctttttattttttatttttacttttaattttatatttaaaaagaaaaaaaaacaaaagaaaaaaaaaaattggtgcagttgctttggcaccatagagagaaggatcggtggtggtggtactggtgggtgttattgaccctaccggagggcagtaccctaccttgttctcataatttttatttctaatctgttaattaatattgaccgtccgtttgcatcttcttcatttgtggggtccatctactcttgatggtcacattgaataatgtttttgaggaggtgtgtgagtgacaatagattttattgggggaagttaaaagaagaaataaaataaatgatgttggattatggagtttcatgcctcaataaggttgttagttgttactgtgtctcccttctttccttctttctctaacttgttttttagttttttaattagattagacttgtagttgtgcatgtactttccacaatccaaactttctatttttggaataatacgtaagatattataatatgcttaattatagtcttatatttaaataacttcatgtttatttatatatatatacatgatcatgtttatttaattataaactttcaagtttattatgaaaggttgtatatcaaaatatatatatttctcaatctcaatttagagattaaattacaaaataaacatttagtgtgtactttgtttgtacttaatttttatataatgtattttttttttttttatcatcttcatcttcttcttcttctttaaacataactcaatatttctaatttaataataaatattttattgtgaacttatggtcgaactttgtttatactgtcataaagaattttgtgaataactcagttcttaatttttttaatataaatatgttgtccatgtttaattcatagatattgaatatttatgtataattgtgtttctaaataactataatagaagaacatatctcacatcatatactcaaattatagcagcgataatttatatgatataatcatttttaaagccagaaagatccggtaattaaaagaagaagaaaaaaacaattcatgaatattcattcgctaaactatcatattattacaaatacccatcctaaatttatatatttatatttattaacttaatattaagtgcaatgtacgaatataatttatttattttttatttaaatttaattaagtgatgtaaagtgcactactgttcaatttttataattagttaatatatttttagtttttaatttttgaaataggatttgaaattttgatccttgaattttttttttaactattgtggcttggtgtgctttttaaatataattttatatatatacgtattttatatgtacaataaaaaaataaattttatattattatacatattttatacttattttaatgtctatatatataaattaagataattatattagaaaatattttga

SEQ ID NO: 256227 - DNA, 1102 bp, Cannabis indica
ttgttttaatattgtttacttcataacagtttaatcttatgtactttcacagagaaagagttccatgatggacttgacaatttgcttgatgtacttggtgtcaaatctcctttctatctagttgttcaggttggtctactcccctaatagaacaaactatagcaatatgttgaagttgtttcgatatgaagttttgaatgttggttattaccagttagttttatccaagtataaacactataaaccacattatctaattagctgtcatgcttcgtttgaaggggtttcttgttggttcatatggattgacatgggccttgaaaaatccaagcagaatatcaaagctggcgattttgaatagtccattgactgcttcatctcccgttccaggattgttccagcaactaaggttaataaacaagaaaatatcatctttttcaatcatacaaataaagggtgcatttttttcctcaattctagtctgtcatttctatttttattgttataacttaatcataatcaaatattagttttttcattttcttgtctccttacagaatccccttctttggtgagtttacttgccagaatgctattatggcggagcgctttattgaagcaggtagcgcgtatgtatccaaaagcatatccgaatcttaccataagacctttggtgtcctctctcattttcattcatcgaagtcttgagaaataacctgctattaacttttaacaatgtgctttcttaatttttaccagatatgtcttaaagctggaaaaggctgatgtctatcggttaccatacttgtcaagtggtggacctggttttggtttgtgatccatttttactctgtaaaactcttagattcacttgacatggtctttaatacatttcgttgctgctaatctgtttttcccattttgtatcaaatgaaaatgctctcattgtcttttctctacacatgtttcccaagaatttttttaactttggttagtcaattcccaaaagacgagcattttatgactacctagaagcatctcttaacattctggtttgatgttattgtgttgatttttcagctttgcttgaagctgcaaggaa

SEQ ID NO: 256228 - DNA, 2356 bp, Cannabis indica
tttttttctctatatatttatatgaattttgggccttaaatttaagtgggccctaatcacgaacttagcccacatattgtgatagaggcaatagaagtcatgtgtgttttcacataaagaatttaagattgtgagtttaggttttccatttttcataacatttttagggttgatttgtggaataattcaaaaagtaaacctaagttactttttcgcttgattaagaaaaaattactgtagattaatgagttactaaaaaaaaaaattcggtatcacaaataatattgtcttaaagcgacttcaataaatttttaaaacaacttttcaatactattcaatctaaataaaacataaatatacacgttttggtatctcattaggttaattggatgcgttacaatttctttacaacctaaaaaaattatgtcatgtttctaaaagcgacaaatcagtatcatcaacttaaagattctaaaaaaataaatttcaaaatctcaaattaatgaggaagaattaatcaacgttcaaaccttttgattttgtgtttaactgttagataattaagaataccagtgctacgtatctcgagaaagtaccctcttaaagatcttcctgagccatatggcaccacaagattagtcgagaagattacaaaattgtatcatcagttaccttaaaaattctaaaaaattaagtttcaaaatctcaaattaatgaggaataattaatcaacgttcaaacttctttatttggtgtttagctgttagataattaagaatatcagtactacatatctcgagaaaataccttctcaaagatcttctcgagtcatatggcaccacaagattagtcgagaagactgaaaaattcttaccacgtgactcaaaaatgtagttcccatcaaaatacacttcgattctcaataactaaataccgaactttctttcgaactaattctataatttacgagaagtgttacacaacaaaaaaaaaaaatagcttgaaaaattaaacttttttcctaaaaataatttaacaataataatttttttcctaattatatctccaaacaaatcttatttaaatatattaataaaaaaaaaatccaaattaaatttggatttatcaaaacaatgtgaaaatttttgttctttgtgcccaatcaaataaacccaaatatatcaaaaaagtagtctccaatggagtgagtgttcttctgctactctcttctctctctctctctctctctctctaggagatattttgacgaatttcaatctggtttctttcacttcttcactcaaattcattatttattttcagaaaccaatctcatttctcactttcaaagctaaagtttcgatttttaattttaattttttttttctaaaccctaaaatactaaatcatcattacctgagaacaacgtaagccgatttctcatctccgattaccgccagtcagccccatcgaagagatttccagtaagcttaatctgattttcaaattcaaatccgatcttattattttttttttgttggtgttaattacccaattatttaatttcaagagaaaaaaaaatatgtttggaatatttaatgtaattattatataatttttctgggaaattcatgtcttttttttccatgtatttaatcagatctgcgctgtgatttagatttagaattatcttttgtaatttttggtattatatataaattgggatttctttggtgggattttatatatattaatattatgattttctttggttaagaagttgaaaatgtaagtttttcttttttttttagctcataaataataagaaattaaggtttaaattccttgagatgaaaggtattagaatttatgatgttaaagaatagaactttgataatatgtgatttggatttgattacttgttcaattttgagttgggttattttttttattttatatttttgtatgaaaaattcattgaaaaaaaatggtatgaagttgggttgagaaattctatcttgctacttttttttcttcaaaataatggaaaaaatcatgtttatactcctttagatgaaaggcattagaatttgtggtgttaaagaattgaactttaattatatatgtgttataattttgagttgggttattattattttttgtagctatgaaaaattcattgaaaaatgtcataaatttgggtggagtaattctatcttcttcttcaaaataataagagataaaggtttaaattccttgagatgaaaggcattagaatttgtgatgttaaagattagaactttaataatatgtgtgttgaaatttgtaatttagatttggtttcttgttcagtttt

SEQ ID NO: 256229 - DNA, 2659 bp, Cannabis indica
aatatatatataaaaattatttttaggtgtattgtatatgtcatctcaaattacacaggctggcgtaacatccaacatggtgacacgtggagaacattgagaaatttgaacaattggtttctctcaagcagcccgaccaaagaactctctatctaaaactgtcaaggttatatcttcaacaaagatcatccagatagaacatgtatgtgattgtccgcatagatcctcattatacaaaaatatcgagtcttccgagcaagctagttcaacataagaagatcttcaaagatactttccataaatattttggcattcaggtctcgatcacctctttgattttgtgtgattgacttgaatcgacaagaaataatagaaaaccttcctagtttccctttttagttttatctgttttgagaaacctaattattgtatttttttctataaataatggagtcattccattgtatagggattcgaaaaccatattttctagagagctctaatattgtaaaagaattgtaagattttcctgagaattcttaagaaactcacttggccaactccttgtgatcatattaattcttctaagtaatacaattaaaaggggagtaggctattactattatcacgggatcaaatcgctataaatctatgtgttcttatttgtttaattacatataattattattcattattattaattattgtctattattctaattgctttaattgactcaacgacgatggctaaaagcgaggttaatattttggtactttcattaagagcaagaagaacactatttatcctttgatcctctctaaagatggttgtaactaccagaaggtcccaaaccacttaaacaactgatccgatagctatggatcttaatgtgcaaactcctgttaataagagcaatccaatggtggcaaatcctaattcgagaacccatctgcctccacaagttttgccatcagcaggacagggagtgacaacccctttggttgggttcactttgggcgcatagaaaactggaactaccagtactcataagggagagactgggctggttactggagatccatctattggagaacctcaaatggtgattggtgatgatactgaattgcaaaacctgtgagatgccttagggcaagtgcaagaacataccaaaactctacaccgtgattaggaggacaccagagctactgtgaatctagcattcaaacagtttaaatgctaattctaggattggatgaatcaacaaatggagatcgtgaaagcccaacaagaagcgattgataattgctctaggtaggcaatcgtgctgattagacgagcttatcagttaacgaaacaacaatcagtgaagatactctagtgatacaagtccaattagatcaacttaagagcttcgcacaaagcctgactgacccaaaactcaccgacctagaacttgaccaaacaagaggatcacccttttcaccgtaattcaatgccctcgatcttccacacaagttcaaaatgtccacatgaaaaatgtatatgggcaaagaagatttgctctctcacatcaattactttgagatgcaaatgaattacaagctgtaaagggtgatgtatggtgtagaatttttctagctaccttggcagaggttgcctagcagttggacttcaagttagccccagggaagttcagttcatggaactcttttatggcatattttcacgcacaattctcctcctctagacagctcccagctcacttagaggacatggttgaagtaaaatagatagtaggggagcctttaaaggactacatcaataaatttatgaccgatgctataaaagtgaagggattgactaagcaaggaagactagtcactatcctaggaggaatttaactcttgggagaattgtggaaagatattaagaggctcactgtggggtcgatgggagaattcttagaccgtgaagacggatttataaatctcgaagaagtagctcgacgagtagacacaattggtcaaaaaaagatcaaccaaagtctgaccaatgctgccaatacctccgtctagcgcaatcaaaactctcagcctaaaaatagcaatagttatttctacatttagctaagcactatttattgagctaaaacatatgtaaaatagctaaggtttatctcacttattggaaactcaattttgtaaatttttctctataatttaaagattgagctattttagctcatttatttggagtgctctaaatacataaaagtaacataaattggcacatcagaacatagttacaaatcaaccaaaaattccaccaaaatatgtacacttaatgctataccgtttttattattaaaggatttttactattatagctttattaggtctaaagtttactttttattactatttagaaaaataaacaaaattagaaaataaaaactttttttttcaaaaatacggtatctataagccttcccaaaatgacttcttctcctccacaaaataagtcaacttctccaaacaatcctagatctaaaatcaacaccaccaccaacgatgtagaagctttgccgatcaccatgaacgctgacgagaagtttttttttttctaatctccatgaatgtcagtgagaagctttgcttc

SEQ ID NO: 256230 - DNA, 1647 bp, Cannabis indica
tttatctatctttttggataaatggactcttactctgaaggctattctttctgtgtcctaccgtgtatttgatgacaaagaagttgttgtggtacgtgttgagaggtgatgatggtaccctagaagagggaatcttattcgtgctagtttcattcctttagaggcttcgaccatcttgtctatcccttagcctttcgaaagacaagtttatttggggccatgatgagtttgggtgcttctttgttaagagtggttattggtttagatccaacttcttaatttgttgcaaggacaagttggtggagtttactttggagtcttaacaatccttccaaaagcattttcttggaaggcttcatctagttggattcctacattagtcaatctcaacaaacatgacatgaatattgatcaaatttgttatttttgttctaagaaaatggacactgctcatcatgtcttttggggttgttcttcgcatgccaatattcgaaaggcgaatggtttttttgttagggacctaaatattttggtgactgatttttgtagttacattaaacattttgtttctattctccattattctggtgtggaaaaaaattctcatattgtggtggagggtgtggttttgtaggaataagattgtccatgaaaatatcacttcatctttggccttgattgttgattgggcgtgggattacctagatgcttattaaaaggataataggggaaagaggttatggtagggttggtttaccgtggggttattgttgatttttagtgatcaaatcaaagaaatatccagccgaaaaaatgctcaacatgttagatctacttctacacacacacatatatatatatatatatatatacattaaacaaaaaggatagaaagaaagaaattaaacttgaagtcctttctcgctactatctttttgtatgataattccttaagatctcacacaaagatcttcctcgacagtctcacaatccaaagatgagtgtaggcttgtaatacaacgtaatgtgaaatttttatttatcagatattctcaacacataagatctgataaatttagaaccctaatttttatttcagagaaaacctatgtgtgtgaaattaggtttgagaaaaatgttgtatatttttttgattgctttctctctttatatatatctatatatataaattaattaattaaataaatatttttaattaatgagagatactaattaattcaaaattgaatattattcgattaactaataattaaatataattagttttaaactaatttaaaaactaattagttgagtggttcactcatttttatcaactaactaaaatattctaatttcaaattttatttattaaataataatattttaatcatgtattaaaataaaggaaatatgcggcaaaagtctccaaaaatttagagttaatgcaaattagtccccaaccctcaaaaacttaggcagtaatagtccataagatcactatatttgtaagtccgttgatacctaatttaacaatcctattaaatactgacaataatgccacatgtttaaaaattattaggccaactcataattttaattaaaaataatttgaaatgatttgaaaaataaataaattattaaaaa

SEQ ID NO: 256231 - DNA, 1384 bp, Cannabis indica
tttaatatgtatcaaatttaacacgtttttttaatagccttattaaactggtacgtttttaaaatatgctaaaatataataatacgctacttataaaacactctaatgagatgcttatttaacaggcatgcctaatcatgtgtaattgttgttgttaatcaatcatgttccttaatcctttcaaaaacaaaattgtatctcatgtatctttttcactagtaaagttatttatacaattcgtaatcaaactttaattaatttggtttaaatgaatttggtgaaaataatttagtcaatctgaatcgtttataattctttggtctagttctagttttaaaattttcaccaacggttcaaatcaaactaatttgcctaattattttacatgaacttgttttcttgatacaatattgatacatgagaacaatctttatacacaatattttttttattgttatctataaataataacctttgaaaagcaaaacaaaaatgataacaaaacaataaattactttttaaaaaattgaacaaaatgataagtccatatataaattatactcaaatttgacaccaacttatatccaaaacaattttaaccaatctttttatttaagatagattctacctaaataatttgccacatagatatattttaaatttatgtgtgatttatgtatttacatatcattacttgtacaaaatataaaccaaaccaatttattcatacttggattggcttgatttggtttaaacatttaattagtctaatttttgctatctaaactatgacatttgtaaaattttgttcctgaatttttctctattgcaaacatcctcgagctatgcaaatctttacaaatatatgagttacatgtataattgtagtacaaagacttatttaataattttaagctacttgaaatttaatttattgacattaaacatacaaaaagtaactctaataatgcacatacatattctcataatttatcattagatcgatacttatgtatttatttttcgtctagactcttaaattgatctagaataatattatgttaatgctatatcaacaacttgattaaataaacgaccagaatgcaactgtaagaagacatttacaataatttttatagtttaagagaaattttgacaacaaaaaaaaaaataagaagagaagtgcatgtttgacattataactaaaaaatttatattttgtttttaaaaacagaaaattattttttggaaataatttgacttgtttagccttgttttttgaaaatagttttcagaaaacaaagttacaaaaaacaagaattttgaaaacaacaaaatgttattttctgtaactaattcacttttggtcaatattgtttttaaa

SEQ ID NO: 256232 - DNA, 2099 bp, Cannabis indica
aggtgacattatctggcttgaatccagagttaatcatctgatcaaaaactctcagagcattctgaccgattccttgaatcccataaccggtgatcatggaattccatgaaatcaagtccttagtatctaaattctcaaatattagctgcccgtctttaaaacttccacatttcgtgtacatgttgatcaatccgtttccaaccagaatgttatcatccatcatagccctaataacattgccatgaatttcccttccaagatttagagcagctaactcggcacagacagataaaatgctacagattgtcacactattggcccttactgtcgttagctgcattctcctaaagagttcaagagactcctctcctcgccccttggaagcaaaaccaccaataacagcactccaacttatgatattaggcctcacttgtggataaccatttgatttctccaactgaataaaaatttcataagcctcatcacataaaccagattcagcataagacgatatcaaagcattccaactcactatattcttggttttcatctccaaaaatgacttctgtgcatgttcaacatctctgcattttccatacatacaaattaaagcatttttggcaaacaagtaatgttcaaaaccaccttttatgacataagcatggatcatcttccccttgttaacctcagccaagtcagcacatacagataacactacagcaagagcttcagcagttgccccaagtcctctcaacctcatcagaccaaacaactccatggtttcttcatgtttcccacatcgagcatgactcgataacaatgatgtccacgtaacagaattcggctcgaaaccttccaactccatcctgtgaaacatcttagtagcaccaccatagtcatggttaaaggcataacccgaaatcatagtgttccaagaaacatagcttctaatagacatgccatcaaacacatgagatgcatctttcatttggccaagctttccgtacattcccaacatttcattcaccacatggagattatttttaaaacccatttgcaacacacgacaatgaattctcttgcacaaaaacaaatcaccaataaacgtgcaagccctaattaccaatggaaaagtaaaaccatcagcccaaactccaaacttgagcattttgtcatacagttcaactgcttcgatataaaacccattactaacattagctctcacaattgaattccacaaaagcatgtttttgctactggtctcaaccgggaagttgtcaaaaaccttctgggaatcctcaacgagtccaaaacgggaatagaccgagacaagtcgagcagccaagaacccagacgagttaccaccagtgagaaacacttgaccatgaacttgtttgcattgttgggttgtaacgcattgtccgagaaggtaatcaaagaagtcaataagttcattatgagtgccattataagatggttgtagttggagtgagctttgaatattatggtgggcaacagagaacgaacgagtaaaaattgataggaaacggaaatgggactgagtaaaagataaagaggtcgacaagaaacgttgagcagaggattttagcatgaaggtgatgaatttgaaaatctagccgttgccactttctgagttctgatttgcccatatcaattatataaatatatatatgcccaaaatcaaatggctcctaaagtcccatcaaggtaccgaatttagcaatctttgtaaaatgccgaaatggctcggtaagtaaaacgaatgtaagaactagaaaaagccaaaattttcctcataatagaggtttaggaccttagtgaagcttttttttatttaattcattctgataaaaaaaatatggcaagtgtataaacccgaaaactcgacggtgtaacttgaataaggaaaaacaaaattggagcaagtgtttaccaggttcttatagttaatggatgaggccaattttgaagctattcgatacatgagcccattaatcgaggtcgaagacggtgtgaacaatcgagaccgtagagagagaacaagaagaagctttctcttttgggttaatttcacaaat

SEQ ID NO: 256233 - DNA, 4740 bp, Cannabis indica
tgacaaatttgtttctttcttctgagacatctacatagttaacatttatagctataatgtatttttctctgttgttatttgaattctaatgtattcaatcattaacaacttcttttgattctaacacaaaaaacaaatgtaaaagtagttgaaacattttatattacaatgtctgtttcttgccaaagaagtaactcactcactcactctgtctcatatattagactaaaccaacttcagtcacagaattttaaagcctaaacaagccaaagcaaaaaccatgaaagccatcaatattcctttgtgtcttctcattattcttctgttgcttccctttaagatcacatcttcgcctcgaacacaagctgaagctcttgtaaaatggaaacaaagcttgtctttttcgccttcttctttgaattcatggtccctcactaacttcaacaacttgtgtaactggactgggattgtctgcaacaatgtcaccgatgatacagtcttcgaaattgatctttccaacttgaatctgaccgggacactagctcagtttgacatcattccatttaccaatatcactagtgttaaccttaccaacaacaatcttaatggttcaattcctatggagataggcctattaacaaaccttcaatatctgagtcttcacaacaacagtcttggtggaatgattccttatcaattgggaaatctcaagaacttaaggtactttgatcttggagcaaactacttggaatctcctgattggtctagattttcaggcatgtcatcattaacttatattgatctttattataatagcctcacttcagaatttcctagcttcatagcaaactgtagaaacttgacttttctagacttgtcattgaacactttgactggacaaatcccagaatggttatacactaatctgggaaagcttgaaactctgaaactcaatgataaccgattcataggactgctgtcaccgaatatttcgaagcttttcaaactcaaacaccttaatttgggatcaaatttcttaaatggttcaataacttttcaaattggtttcatacatggtcttgaaattcttgttctgtctaataattcctttagtggagaaattccttcttctataggccaactcaaggagctcaccaaacttgaccttcacaagaatttattgaactcttctattccttctgagcttggattttgtaatgaactcaccttcttggcccttgctgataataatctcaatggtgaactgcctttgtcactttccaatttgaacaaaatcagtgaattgggtttatcaggtaatcaactttctggcaatctttcatctgttatgatctcaaattggacatcattaatctcattgcaacttcagttcaatagattcagtggagaaattccattgacaattggactgttgacacatctcaactacctttaccttaaccaaaacaagttttctggtacaattccctcagagataggcaccttaaaggatctaatacacttggatttttctgtaaaccatttatcaggaactatccctcccaaacttggtgagctttccaatctaagcctattatctttatacgaaaatgacttgtctggcttgattcctttcgagattggaaacttgaacaaacttgtatcgttggacctctccgaaaaccatctctcaggttctattccctcaacattgtgcaacctaaatggccttgtgtctttgcaccttttcaagaacaacctcaatggtacaatccctttggagatcggtaacatgacatccttggtttcctttcttgttgattttaacaaattatccggagagcttccacatacaatttttaatcttggtaacttgacaagtttgtctctgcagtccaatagtttttatggcgaaattccaagagatttcgggaagagagattcgaaactaaactatgccatcttcaatgacaacaacttctctggtgaattaccaaaagaaatatgcagtgccctccctatactggaaaatccaccatcaaacactataagttgttcagaattctctaaagtaaaacatttcagtagctcaaaccttccaactgcactgtgtgttccttcttatctcgaattaatctcttttggtggcaatgaatttgtgggaaaactgccattagagtggggagactgtagaaacctcactactttacaagtggacagaaacaaaatcactggaaaaatcccacctcagcttggaaatttgacaaagctgcatgttttgaatctcagttcaaatgacttgagtgatgaaattccaattgaactggggaatctaaacaaattgtacaagcttcatctcagcaacaatcgttttactggaaaaatcccaccaagtctagccaagataagtagtgagattgaagatctcgatctctcagccaacaatttgagagggaacataccaaaatggcttggtagctgtgaaagattacttagcttgaacctcagccacaatagtctatcaagtgaaataccttcagagcttggtaacttggtttcgttacaatatgtattggatctcagcagcaatattctctctggtgaaatcccttcaagcttttcaaagtttataaggcttcaaagcttcaatgtctctcacaatcatctctctggtagaatcccagcttccttttccaggctaataagtctactttccagcgatttttcgtacaataacttggaaggttcaatcccaataggaccaacattccaaaacacaagtgcatttgttggaaatcattggtgttgtttgcagccttgtagctcttgcagctgccatattttcaattcttctgttatgccatcgtaaacaaaaagtggctgaccattctcgaaagaacactgacatagctctcgagtgtttgatatgggaaaaggaaggaaaactcagttttgcagaaattgtggaggccacagaagacttcaacgacaagtattcgattggaaaaggcggttatggtactgtttacaaggccactttgtgttctggtcgcgctcttgcagtaaagcggttagaaacaagtgatgaacaaacagaaccaaaccagataatgagttttgtgagtgaaataagaattttgactgaagttagacacaggaacatcatcaagttttacggatactgctcaagcaaaggctcaatgtacttagtatatcagtatgcaaagagagggagtctagctactgtactatatggttcgaaaaagggaggtgtggaacttgattgggatgtaaggttgagaattgtggaaggactagctgctgcaatctcatacttgcaccatgattgctctccaccaatcctacaccgcgatgtgtctttgaacaatgtgttgctcaatcaggattttgttccaaaactctctgactttggcatggctaggctgttgaaccatgactcatcatcaaattggacaaatcttgttgggtcctatggctacatggcaccaggtaattatatgaaaaattgaattatatttataaatttagagtatttattggctaatgtaatatgtttggttgtggggacagagctagcaatgacaacgaaggtgacagaaaaatgtgatgtgtatagttttggagtggtggctttggaagtcatgatgggaaaacatccaagggaactattagaatcttcttcatcaaacaatagagaattgctcttgaaaaatgtgttagacaaacgtttgctccctccaactggtaagttatcggctgtggtggtgttagtagtgagcttagccttgtcttgcaccagaacctgtcccgagtcacgacccaccatgcgttatgtggctcaggagctatcgaccaagtgtgctacttccctcttgcagccgttatggactgcaagcattgataagcttgccagagatgataaaattgagaaaaatcatatcagctattaaccaacctggtagcaatggtaagagctcatatatagctcaatagtttagactttagaagggtgtatcagtaagtaattgttggtatgtgattgagcttgtgtgcttgttatgtaaatatttctgtacagtaggcaagctcagaagctcatttttagtgactctcttaatatcttgatcagtataagaaacagtaaaagagtatctattgtataaagaaaccagttgcatattgattgccatcttagtttatgattgattgaatgtggtgttcttagttgttgtttttggttcttataatgaagcaatttcactacaaggtagtaaaatcagaaatgcatatatttacaatctgtacattactatattagaggcggctttggatatattttaatgctcatcatgtgaattacaaaaaattatggatcacgctttggaactagatccacaaaattttggtcaaaccaaattgattaatacttaagttattatgatatctaatatgtataagagaaagcagattatttttaaggatcatcaaatttagtaatttagacattcaagtcaacaccatgaaaagagactcaacaacttgtttctatcttcttcttcatattttagtcctttccttgcttccattgaagattgcttcctcacaaagagcacaagcagtggctctgttgagatggaagaacagcttggtggtgaagccatcttctttggatacatgggacagcaacaacatcattaatctctgcaactggactaatgt

SEQ ID NO: 256234 - DNA, 2918 bp, Cannabis indica
gaagtgtgtcagtgtctgccatcacaatccactctcttcccttatactagttttatttttattttttaatcttctctatgtcatctcccatcatatacaccaaccttggtgttgcactaacaccaaatatagtattatagtttgtttcattcttaccacaacaccaaaaaaacattattctctattatttgtttcaacagtctatttaacaagcttataaaatagtcgtgttaaatttttctgaatttattaaaattgtaccggatatcttaagtaactaatgtacacaaccataaagaaaaataaactaaaatattctcctcaatatcttaggagtgcaccatataattttcctaatatatatttaaaaattattaaatataatatgataataatataaaaaaaatgaaaaagtgatagtgcagctatatacaccacactatatttggtgcaggtatagtgtcacggttggattgaaaaagcatacaattgccaccatattttccatgcgttggagatggccttatactatactattcataactcaaattaaattgttactgaaaagaatgcagaattgttttggttattcagtttatgacctatcctgtcagttgtacaccaatcaaattcaagcaaatgtctacaaatacatggatcgatgtgttgtttcctttacctctctgaacttatacaaaaaggaaaatggactattttctttgccctaaagaatcaaaaatatggaaaatctacagtcttcaactgatgttctttctcttaagaattcacgaggcatatgtagaaaagaaaagagaacaattttctgtcgtataattggtaacaaatttcaggacaccgatttgcaaatgagaatgaaactactaaaaagacaagagcaaaatttaaccgaaaaacgtaccagaagttcaatacactcacaggtatccagaacctaaaacctacacagttacataaaattacaaagtaagaatcatgcaatcaagccaatttaaataagtctttctttttccttgaaatcaatataaatatataaataaataagaaagcaataaagataataacttaaattttaccataaagtagggtaggaagagcatctttctggtacttgtctggaagctgtgagagcttcccttgccacaaattgttccatgcaaaaataacagcaatgacacatggaccaagcactatttggtttaatagaacctgcaagtagaagcaaattttggaagaagttatacagttatctaaccttcacaagaaaaagagccactgctaagtacaatgaagtaaattgtcataacagagaagataaggagactaaaccttcagcatcacgtttgtcactgttggctttggcaaacaacgatcaagcaactggtaccatgcataagaaccagggccatacaaaagaaacccataggatgccattctcaaagaacgaagccaattatggtccgaaaggagagtctgcaccacatcctatagaatagtttccagtcaattttaaactcgaaaacactacgaaccaattatttgaaaataatagcacaaattagaaagcataagttcccatttattaaatttttcttttacatagtatcatcaaaccataatgcaaaacaatgtcaagcctaaaacttacagttccctccaactggtttcaacaaattttttaaacctattaaaaattgatgagaacacaatatagacgcaatatgtccctttagaagtgaagatacaacagttactatctaaatgatatatatctttctctgaaaacgaagcagggaaattgtgccatatggtgctatcataaccaaacaagcaggcctccattgagattcctttaaagctcttacgagtaccaaacaaaagcacaaaacccttctacaaaccaacactcccgttaacagttaatcggttgaattataatatttacttgaaacccaaccgataggagaatattattaatattaaagaagaagaaaaacaacatataccaacaaaaaaattgttaattataagtaaaggcacccaacgaattgaaaagataatttcccacatcgcataataagaagatactaaacaaatcatatatttttctcccgcattttcttgggaaccaaacagcgcacataaaataaaattctagcaaatgtaagagtaaaacgagttctgaagttcgtaaaagattatataatgtgcccggaaaactcatagccaaatttcctcatctccaaaattaaccagagcaattaattagcctgaataactccccgcaaaataaataaatataagacgaacagagaaaaaaggagagacctgagaatcggagggagaggaatgtttcttggaagcctttgaggttctccaacgctcactgagctgagcaattgtgtcaccagtgagagcaagggagcccgccgtcatggcttgcttcaaggggaaccattcaccggctccgccagtagcctgggcagattcggaggagttggaattaggtcgtcttctttggtttttggagcgaagccgttcgtgtttcctcggtggaaggttccaaccccatagcccgccgaggccgcctcctccaccgcccaacgcgtgcatttttctcagaagaaaaacccaaaacaggctgccaaactaaaatttcgtctatttttattaaaatctgatgtttggtttgttctaatgagagtggtaatggaatcaaattatccattacaatacaatgtttgttttgctttcaaaaagtgatgtaatagaattacactgtaatcataattatattaaaggtaaatactattttggacgctctgttttacaaaagttattaattggaccctgtgttttgttaaatgataaaatggaccctgtatttctaaatagtacaa

SEQ ID NO: 256235 - DNA, 3128 bp, Cannabis indica
cgagtgaaatcgttaaacttgaaaaaagccattacaatgaaatgaaccatatgttgaggaaaaaaagaaaagacacatactgaatccaacaaaatattagaagtcttaaagtcccgataaatgacttttgtttcagcgccatggagaaaggcaagccctcttgcagcaccaagggcaattttcatccgcagcttccatgaaagaggttgaatgtgagaaccctctgttggaacaatgtaagagcgaatgcaatcagtaggaagatgacaaatggaatggtaacacattctattttttttaagagaaaagtaaataattcaaaatgaaatcacaagaggagtggaccaactcactcctgaaaagatggttctccatgcttcccttaggcatgaactcatacaccaggagtcgatgatcgtcctcaaagcagtaaccaatcaacttcacaagattaagatgatgtagctgccccagataattgatctctgcctgtatgtttaatggtgtaatgtttattataaaacttttctcttcatagaagtttgttatggagacagacaagcagtaacgttactaaaccaaaatcataataacatagaaaatataagaaatatactgaccagccactccctgtgaccttgaaacccttcttggttgagtctcttcacagcaattactattccagtcccaggcttggtggcagtaagcgtgtgctcgtccacccaacctttgaatacagaaccaaaaccaccctcgcccaatacgctatccggtcggaaatttctagtggcagttttgagttcattaaatgtaaaactctttacatttggggaccttaagatatcatcttcacttctaggtgtcattgatgaagaaaatgatgaggatttgccactggagctcgtgctcttggaattaaacccttcaacaaaaccccaaatgtgacacatcaaacaaacactcactattcacatgtagggtaaagatatatatgcatacaaaaattcaacaaaacaaagtaactagtaaccaggatggtaccaaatcctgtatccagatatagacaatcatgaacccatacacatttcactcttatctacaaagctaaaccttgtgaatatgtaatgtattagcttgagttgttaaaacaagcacaagaaaaaaccaatttaccatgacatgtagcataactcctcaatttttcatttcaaggcataattttctatagaaaaaggaacaattaatggttcagattaggaaatagcagaagtcgttgtctaaatttcatttaaggctaaaacaaataaaatatgcatgtatcgatcctaacaacacaggcaaaaatcgtgttcttctaaagacttaaagctaaacaacaacaaaccatctcaatcagtaagtataagattaacgaaaccataaattttgatgaaattcaaaaagaagaccggtggttacctgtatgaaaagggctttcagccttaattcggttgctccaacaagcccccatctaaattagacaacaattctttccaaacctcaagagaaactgtatgatgtacacccagagacacccaaaaaccagcaaaattcagataaagtagagagctgaacaagaacccaagtaaatctaaaaaagaaaacaagggtctttgttttcttcttcttcttcttcttctctcccaaggaaaggaaaaaaaaggacaaaacaagattgataaaacccaatatactagaaatgacaacactttgttatttaacactccaaatccaaaactcagatccttaatcttcagctagtgtgaggtaacagagaaatgatttgaggtttgagattttgattgcagagagatctttgacgacactttttgagtacccttttctctatatttttgggattagaaggaagaagctaccaaaaagtaacgaaaagaagaagaagaaaaatggagtctttaccatttgagtggcctttttagaccgttgacttggctttaccctttgtttgctcttgtttttacttgaaaacttttcttttcttttccttttaattttaatatattaccatatatcttctaaaaaatatattacatataatactatgttaacatcactattttttttttaattttatttttgagggagttagcatcacatttaaaagggtttaactgtaaatttttttaatataaatttagtaagaaactctatggaaccatcctaatgggatataaatttgtatttattcaattatttccaatttcgtgtagattagatgcttgaatatggtatataatatattattcggcaaaaatatatatacaccaataccatattctttaaaaaaaaaagaaatgctaaaacaaaaaattatatataatattaataggttgaatgttgtttgtcttgttctaaagaacatagaattatatattaaactaattcaataattttattgaataatagtatttgtcttgatcttattggatgaacaaagagaaaagtcaaaaatgtgtagcgttgaccagtcttggtagatttagcttatagaatgaagaacattattatcatacatttctaaatttatatatgcttaattttttaatctagaaaaaaaaattcatttttatataatatggactaaaattgttctatcaattaaaaaaataattaaaaaatagaattttttggtaaaaataaattaaaaaattaagtttaacttaaatattttgtacattaacatatttttgatatagtgcaaaaagatatattttttcaattactgaaatcacaccaaatatagcatttatctaattactaatgcttacaccaaaagtaacctaatgacgtggacatcaatatttgacatgtgacaagaaagaaaacatcccagagttgagtagtcctgaatcataacaagtcaacctgagaggggcccctagccttgcacctatgttgacttcgagaactctagtatgggcgtttggattctgccaagttgtttccaactcattatctttcagcattatataccttgaatacatgaagcatccaagtgcaggccccgggagctgaaaatacaagaattagcacatcaaaaatcaacttgggcaccaagggttttaccc

SEQ ID NO: 256236 - DNA, 4719 bp, Cannabis indica
ggattcttcacaatcttccacactatgattaagaacttaaaacgtgtgtttcctgctctgctagggcagagtcagctatggcagggagacctcgtttaaggagatcggaaaggacaaccaaggcagcaaagttgtcagcgaccagattgaaggcaccgaagaagaaaccgaccagtccgaaggcaaagaagaaatgtggcccgttgtctttagacctgatgaagaagaccaaatctcttgatgaactcttgggagtgaaatcgattgccttctttgattcagaatttgaggatgcgattgaggagcttccaagtgcaacaataaaggagataacagagatggaaacgatgctaccccaaatcaaagttcataacctaatcggagacagggattggtgtatccctttctccaagagcctctaaacgtgaactcctccgaaaaccaggtattcgagcaacatttttttgaaattttgggagctcgggtgtacatttcaggtactgctaatgtccttaagttccctgtattacacgttgaaaaagaggatttgggggaaatgggtaaatgtgctaaaatctgtgatgaggatattgttgataaagtaaatttctggaatgctgcaattgtgtgctatgttttaggttcaaaccccctattaatgtcattgaaggtttctttagaaggatttggaaggcacaagttgataaaatcagcttattggctcatggcattctccttgttagattccatactgttgaagctcaggatggaattccaaaggggggatatcaattctttgataggaaatcgttgataatgaaagcttgggatcccgatactcaatttactaagaatgaagtttggaaagtccctatttgggttcaattgagacaacttgaactcaaatattagggagaaagggcaatggcaaaaattgttagcatgattggcaatatgattgaacaagatcaagcaatattgaatcgggataggctacagtatgctcgggttcttgttgaaatggacatcaaacttggatttcctaatcaaattcatttttaagatgagaaaggagaaaaagtttatattgacgtcacttatgaatggaaacctaaaaaatgtgacatttgcaaaggcataggccatacaaaggaagtttccaggaaggagaaaaagatagaacaagttaagcaaatttggaagcctaaagtccctttggtggttgatgcaaaaaaaaacaaattgaaattcaagatgcaaatggctttcaaacagttaagtggggaaaatgactattgctaagaactggaaagtccaaacaagtaacacatttgaagttttggaggatgaaatgccacgagttcaagtgggtgaagtggtttgcaaggttaggtccattattgatggagggggagatcctccaccaataaatggataagttgtttatttggaatacaagagggattaacaaaactaataaacaaaaagatgtcatgagaattattcataataagaatattggttttgttgatctctcctcgaaacaaaggtcaaggcttctcgaatggggaacttgtaccttaatatgttccaagagtggtgctttacttctaaccttgcctactaccctaatggtagaatagtgatagcttagaatcctaactcatttgaggttgacattaaaggtggttctagtcaatggatccattgtattttgaaaccgaaaaggagtcttagttttgcagtgactgtggtgtatgcttttaatgataataaagggcggctggatttatggagtgttgtaaaggacttggccacaaataataagaatttgtgggttgtgggaggtgactttaactctgttcttgctactaatgaaagacttaactttcgtggtaacactaatgacttagttcctttccagcagtgtgttagtaattgtggtttagaagatgagaaattcaatagaagttttttcacttcgaataacaagtaagaagggaaagatagaaattttgcaaaacttgatagggtgctagcaaatgcttcgtgggttaatctttataagacggctgaaaagtcacttttctcccagaaggagactttgatcattgtcctatgttggtttcagtttatcctgaaattaataatacccacaagccttttaggtattttaatttctggaaaaacttaaactaatttaatgcaactgttagtgactattggaagaaaaatgtgaccaaaactcccatgtttaatttggtttgaaagataaaaaggatgaaagttgggttgagagctcttattcaagatggaaagggaatattgagacattagatggcattgccttgatggagttgatttcggctcaagaagctctccaaaactatcatggtaatgaggagttattgaagaaggggaaagaggctagattgcgatacaatgagaatcaccagaactacttactcttcttaagtcaaaaagcgaagttagcttggataaagaatggtgatgataacaccaaacattttcatgctagtatatggaaaagaagagttcaaaacaccatctactcaattaaagatacgagaggcaattgggtagaggagcaagataaagtgatacatgcctttcttgatttctaccagactctgcttggtacaaggaatgctagtacaaccaaggtgaacaagaagattgtgagagaaggggttgttatttctaactttcaagctgccaaattgattaaagattatacagaagttgatgttaagcatgctcttttctcaatcccaaatgaaaagctcctagccctgatggttatagtagtgccttctttaaagacacttgggatataatcgggaaggatgtttcgaatgttgttatctctttcctcaactctggtaagttattgaaggaaattaatgctaccgctattactcttgttcctaagactctgtgccctgagtctatgaatgattatagaccaattgcttgctgtaatgtgatctataaagtggcaacaaaaatgatttgcaacagattgagagaagtgcttcctgacattatttatgaaaaccagagtggttttatcaaaggaaggtgaattgtacacaacatatatggttagaggctatgaaagaaaagcggtcaaatcgtcttgtcttttcaaaattgatttgcagaaggcttatgatacagtggattgagagtttcttaagaaaatgcttgaagctcttatgttcccaaagaagtttgttgagcttattatggtttatgtcactactcctcgcttctcgtttatggtgaatggttcattacatgggtatctctagtctaagaggggtcttcgtcaaggggacccaatgtcgccgctcctctttgtgataggcatggagtgcttatcaagaatcatggctaaaattgcaaagatttgtgactttgcttttcacccgagacgtaagagcttgaaacttaaccatttatgtttttcagatgacttgcttctcttttgcaagggtgatttcaagtctgctctcctactactaagaggcttttggttatttttgaacacttctaggcttatagctaatgaaggaaaatttgttgttcatggagcaggtttggactctctttctttggataatattattgatatgtctgctttgaaaaaaagctctttaccctttaaatatcttggaatggcaataaactcaaaaagaatttataaagcagactgtgaaggtttagtggagaaaatgatagccagaatcaaaacttggagtttgaggaacctttcttacgcaggaagaatggtcctcatcaactctgtcttattgtctattaacacttattggtccctgattacggctcaaatttgtatattttaagtccttatttatgcacatataattaatataaattaaatattccttattttttaacggtaaatttatttaagtggaaatatttaatttattttaattttgttatatttttcagatttgagtacattgttataagtgaaaataaattcttaagccccaagtgtacaaaagcccaacatgaaggaatgactttgtggccttttacttgaagacatacatatatatatatatatatatcacattatttctttcattgtggatgaaataaatacaaataagttaatgggccatagtgatcagcatatatatccagcccacttagtcaagtgcatcccacgatttgatcacttcagcatattatttgtttctgcacgcggttcacactcgtcagcacaatctccaccactcactgaggaagcattctgagcgcgccacctggacagtttgtatcccattttcttcagcttttcatgccactttcccattattattggcacacgaaaatattaatttgggtgcaatggttcattataaatagacccaaaattattgagaaagacatcagattttagagagagtagaaaatcactttgtcatcttttttttctctcttattactattttatttatacttattttagtgacaaaaatgagtgtattgaaatagtaatattggtgagatcagagtgtagcttttgtaattcttatttctattattgatattgattcttttgtgcttcatctccatatctcatttattaaatttttcttcatcttcaatttttcttcctaagttaatagtatcttttatataagttcagtcatgcttttc

SEQ ID NO: 256237 - DNA, 2353 bp, Cannabis indica
atttagtcacaacaaactgtaatttttactactaatacttttagtgtatatcataagcagttcataatgatacttaaccggatgacaccttaaatttgctaccaactcagtactttagaagggtttaccatcaaaatttgaacttgaaagattaaatgtaaatgaaaccgcaatcgaaagagtttagccggcaacaactctttactttctatattgagaggagtgtattaaaatttagaatatatcagcccccacttctcttttgggctttcttatttctttggccttgatgcctttattcaaatgagagtgtttcattcaattaattcctacaagtcaagtaaatagcactatacaaagaatatatatagcaatagcactatacaaacaaagtgctcatgacactttaaaacacacttagatatttttgatgtgttatatatagtaaatgcacttagatattaagttaaaaaatcttcggttgatatatcaacaaaatccaacttaatgctctccaggagcttacttcactgaagtaatagagctgatttgctcttaactcttttcactgttaactcattccacagttcctttgctttagtctagttgtttctgcaatggatcctgccagtgtatgcgacctatttgaagaatcagtccagatttcacaaaatgacatcacattcgcccttaacccgggggaagtcgatgaaccacaggaggctaaccaagtattgctaggaaaaatcattagccggcatagactcggaaaagcagccattcaagggtctctcaaactctcttggaatgccataaaaggatggaaatagaaagaaatagagagtggcatcatccaatttacgtttgcaaacagggcagatcgcgctgaacgttcttgcccgtcgtccctggttcgtttgtggtgctctattggttataatgccttggccgacatggctatccccagcagaggtgcggttcgacaaaaccccgatatgggtgcgcattgacagtataccccccttctactggaatctttccaacctcaaggagttggcctcaaaagcctcccctgtatacgaactcccaccaggcatagaagatgcggttggcatgagtaatctcagattccgggcaacgatagacatcaacaaaccgattttctcgggcttcttcttaaggcgccaacgcctcaaagatttatggatacaatataagtatgaacggctccctaaactatgcttcaaatgcagtgttctcacacatgaccaaagtatatgcttcaagtcccccaccataatcaaagatgctaatggcaatgtttacccaatgtttggagtatggttgaaaaatgactcacatgaaagatctaccttctcatctcccctagcaaagtggtttcaggattgggttctacaaaagaagctatttcatgactccacccttagaaaccatgtcaaaatccataaggcgatacagaacggcgagtcggctgaaatcagggagtgcaggcgtcaacttccagggaagaaaaggatagtatccgacgacgatgagggtccggcgagccaaattctgacctggttattacccagatgccgttggtctatcttccaggtattggggagattgccccatttggaaacaatacaaaaagtgtatccatcctagacctgcaagaggcggctgagaagtatgcagctgctaaagcctgcaaccgaggggatgaggtttcaccaactacacttgctcagggggaggcgatggagacaactgagcataattctcttttgggagagaccaatacacaccactttgaatacaataaccctactacctcaattaagaagccggttggggagaaaatccttcctgtggtccctatcaactcagaagtctctttaggggagtctagtaatcaagctaatgaacttttgggttcacaagcccaattagttaaatggccttccaaagagtgttgggccgatcctaaagcccgtgaactactaatgggggccctaactattgacaaatatcatagggagcccacactttttaatcccatttgtgacatagaagactttagggtccatgaacaccttgatgggccaaggaagagaaaagctttggatggtattatattcagcccaaatcccagtcctaatccaacccaaacaactcctacccgtatgcttcatgtcgacaacaatggtcccccttctcctgaagaagtccaagatgctcctcacttttcgaatatatccaagaactcgatccctgaagaactcaataccgcgaccttctcgcctggatcgaatgacaatcagaaggctaatatgtggcaaaggaaggg

SEQ ID NO: 256238 - DNA, 3437 bp, Cannabis indica
aaggtgttttaagtactttttaagattaagaagtaattgtaacatttaaatgcagggcgtgggtctagttatgttgcttgttgccttaggagttgacaaagtgctcacagatttagggctaaatatcaacctcaacttggtggcttgatgattctatctgcttcattccagtaagtctaattttccttagcctgtttcatcttaggattttctagtgttacatgcttctcatgataacttggcattttgtcatgctctgtggtcttattatacacagttaatctgagtccaaagagaggataccttagacttacagccaacatagattattttgtaaacaattcgtgaacttttggtactcagtcggttacccatcatactgtcattagattttgaagtattggatacacttaagtaattctgggatctttgtagggggcactgttggatagaatctatggtaaataatctcaactttgcagcggatcattctgtgcctgattagaatgttagtgactggatttgttcttttccatggatggctttgcttatcgtaataaatctgatgctttgaatagcgctccatgcttgtatccccaaaaggatggatgttaactaaaattttagtgtttttcttttaaaatatatttatttattttctatatttttcatagaagcatttgatatgtcattgggtatgtctgatgacagtatttctttatggtgcaggcaatggagactgctgtatagctcatagagtattttccggcatcttgcgatctgatgtcatgtgcatggtttgtggtttcacatcgacaacatatgacccttgtgttgacatctcactggatttggaaccaaaccaagggggttctggaaagatgtcatccacaaaggctggtcatccttgcaatggcgaggcaggttacacaaattcaaggcaacacacgggtacatctactttgatgggatgcttagaccgtttcacaagacctgagagattaggctctgaccagaaattcttctgccaacaatgtcagattaggcaagagtccctcaaacaaatgtccataagaaaacttccacttgtctcgtgcttccacattaaaagatttgagcattcttcaatcaggaaaacatcaagaaaagttgatcgttacttgcaattcccaatttcattggacatggcaccttatctatcttcttcaatcttgagaggagtcgatacgggaatagagttttcccttttgacgaggatgagccagatgcttcaaacgacttgtcctcagagttcgagctgtttgctgttgttacccacagtgggaagctagacgctggccattacgtgacttacttgcggttatgtaatcaatggtacaagtgtgatgatgcttggatcactcgtgtaaacgagaacatcgtccgggcagctcaaggatacatgttgtttttatgtacagaagatgctatactacaaagcaagcgagaaacaggttgctagatgatatgcttatcagaaaacaaaaaataaaaaataaaataaggattgcatatactaattaaaaaaaaaaaaaagaacaaaagaaaaaagagagagaaatgggacaagaaattaccatggccagttttgttgacattgaaagcaatgtcattggtaattgactaggcaactactcccgttgctctttgcagcatagattgctaaatttttgaggcagtattttgcattggggaagattaatttatcaaggtaaggatttttcaggaaaataattttctcatttgctttttttttttaagttatttaaatatagctttatgtcctcgtttagtattcaggtttgttaatttatttttttctcagaagtttacaatgcttggagttacgaagtttaccatgttttactggattgtttccttgaatggcacaaccaggccaaaaatctgagtttagattcttttttcgaatacttgaattgatgttggatttttatgctcaacaagattctttgctcacattttattcttttttgaagaaagaaacatgttaagtgaaaagtttataaaactgcaccagcattaaggaattacagtacagctttctgatatctttatataaacgcatacatctaagccataaaaaaggtagcacgaaacgacacttaattacaaaatggtaacaagaagttggtcacaaaagaatgaagccaatccatgagagaactactgaaacaaaaaaaaatgaagactctcttacaagagctttgatgatgaaaattacttttctaagtgtggaaataatataatgtcagcttgattgttcaaggcttgagagggcggtggactgatggtttgttttagtggtggagttgcggattgtttaagcgacttctgtctttcctctgaccggagatgagtttcatccaactctacttctggctttcttctcaccttctttgtcaccactatactgtctcccaccttagcatcttctggggagtggcttgaagttcccttgaacttttcttgtttaaccttgtcgaagctctgaacatttattggactgggtggctgcatgaccactgttgaagcaggaactgacttgtttgctgaacaatgaccaccagataaagtagccgaactttctcgcgtgtattgaggctgcaaaatggaaccacactcaactcgaacaccctcctcagttttagaggctaacatctttttcctcttcattttctcctgatcctttttcctgccatatagttctcttcgcctctcttttgcccggcatattgcacgtttgatcccatggttgtccataaaaccattaggccataattctgcaagctctgcgtacaaccttcttacttgaggacctgcgtcgtcatccagaccatcaacataaagatcatagagatcacagatcttgtcctccaatgcagcatccatactatactttcttttagaattttcttttggttcagtagcaatttcttgaaaatcgtctgatgctccagcttgtttctccaaggcttttgactccatagagggtgctcgcacttcaagcatctctatgacttccttctttacacgttgaaacctatcgtttgtctcctgtttagctgacaaacccatactaaccataactttcaaatttctcttcaatgttctcagctgaattaagtgaccaagaatactcataagacggttgagtagttctttagaaacttttccatggctagccgctaatcgcgcaactttggcaagcttcatttttatttctctaggcagtctccttttaatagcctgtgatgaattatctacctcttgattttccacattaggcggccttgattctgctaccattttctctaactcccttatagccttttcaagtattgaaccttttggccgtgcattagaaccatcctgctttt

SEQ ID NO: 256239 - DNA, 1653 bp, Cannabis indica
cccccactcctaccacatgcatcaaccgcaaacataccttcaaacttcaacttagctcgaactcgctccaacacatccttgcgacacaaagtttcacataaaaagatataatccggtttcctatgggctacagtatcatataggaattgtatcgcccgtgggttgcccatcccacgacaattccaacttaatgtactcataatgcccggtgggcctggaaaccagaacccacctcgaactcgttttttgagagtccattaacatccataccagcactatcctccgcttccatatcaacatagtcgggcccaccaaccccttcatgttggcgcctccttttggactcagtagaaggcccacggcctccttgtcctccatgtggaccaataatgccaccaaggaaaagtgaagattgacctttcccacttggcacatgattgccaaacacaactgactttcctctttcattgacagtagacttggaaacactagtcttgttgccattattactcaaatttaataaaagtgcaatttcatctatttgccatttgtggggagcaaaagaatgcaaacatgttacttacaaaatatcttaaaaatgtatttaaaatttaaactaattatttttgaaatatcaacaacataacttcccaatattggtaggaggtaaagaaaaaaaaaagttcttggtaagatttgaacacataacaattacactaaaattaatattacgtttataaatattatcttttattataaatattgttagtactataaattattcttagtttttgatgtaaaagaaaattacaacatgaacttttgagaacaaaaattgagaaagaagttaaaataaaagattggacatataaatcccatttaattaataacatgtcttgtagatggaaaacgagagtacatcaatctctgtcttattttatttttggagaattcagtcttttaattattggatgtatatttatagttctgaaagtgatttgaaaatcgacatgtaactttgaagtacttataatttataaatgtgacaaatcctaagtttgtttgtttttattattattattattattattttgacaattttgagtggcttaggtatgtttggtttgataatttaaaaattatttttaaaaataaaaataaaaatgaattttaaaaagctaatatagtggtgtttggccacaatttttacaaacaattttctgaaaacaatgttacaaaaaattagaaaaataaaaatataaaaatattttctatttttaaaaataatttttattttttttgtccaacacattcttttttatattttttctcacatattcaggtctcggtccgaagtctggatctgcgactagggaccaaggacccgagtcccagggtctaaggtctcgagtgcgggttccggagcccaaggccgagctcgggattggactagattcatgtcgtggtatagtgtagaataatgaagtattttttttagaaaaaaaaatctaaaaatagtgtttaaaaaatattagctaagcactattaaaattttaaaatgacaaaaaaattgttatattctaacttttaaaaacataatttaaaaactgaaaacacaatcgaacagtcattttagtgtttttttaaaaaaaa

SEQ ID NO: 256240 - DNA, 2675 bp, Cannabis indica
gtgataatggtggaagttactcatagtaacaacttctccaaatattacaaaatgatgacacataatatataatgtcatatgttacatattagtttgttacatgtatttaatctacacattatattattgataaataatataacagatacacctatttctaaagagtattttctaaaattatatttgtcagtggccttatgatttcatcatttgatttttatatagtccagatccattttaccctttctttaaaaagattgaaaagtatttaccttcatatccaaaaaggcaaaaaaaaatatttaccttgacaaatgacataacatacttcctagctagtgtaaaagtaaatttatgtctgccatgcaaacaaaattttggaggcattgtacaatttgtcatgcttcgattcatgatcatgatcattgggttttactagatccatagaggtcatctaggaaacaaagatttatattaaaagatgtacttatgatgatgatcagaattagacagtttttatcactcgattttaacttacagaagttataaatttttcacttgtatttcattaaagaaaaaaaaaaaaaaaaaaaaaaaaaaaaaacatatacattcatgaattgacatgactaataatgtttgcactaatctggtttttcagtggtgaactgaaacacatatgccaatataagaacatcaatctattagtgggaatttgaagttaaaccaataaaccaattcccacgtatcaacacatctgggactgagattattttgggccattaaaatgaaggtgattgatttttaataaagtgatgcctgataattaatgtaattagttaactaatatgttgttagttagtttattaattaattattagttttcttctaagttttgtttactcttttttgtatttttgtaacagaattcagttgaattgaattttagctccattataatctttggcctataaataaagctctaaacctcttaatcaatgctaagatttctagcattgttatgaggcttcctttcatttttttttcttgctgttattctttcatggtatctgaggtcctttaactcacgttcatgatgtcctctgacgacgactcgtctcctgttggtatcactaatcctcaccctcaagctccacctcctatgcaacaatagaatcctttctcccattctctcacctcttctcttaccatcaagctcgattgagctaattttctttcctggaaattgaaaatcgtgcctactattattgcccacgattttgacaaaatcctcttctccgatgttactcttcctgataaactgatcaatgggaaaagtaaccctatctttcttcaatggcaacacaaagattagcttatgttatcctagttgcgctcctctatgtctgagagtgttcttggtactgtctctacttacaatacctcacatactctatggaaggcccttgaacaaagattctccactcaatccaaagcagaactttttcaactcaaaggtcagctcaccaatctttataaatgttcctttagtatctctgattacattgacaagattaaatcaatctacgattccttggccatttctggacataacatcatagatcttgatatgatccttcatcttctcaatggccttggccttgaatttgatccagtagtttttggtatcacatctcgcaatgatgtcttgtctcttaaagatgttcaagccttgcttttggctcatgaaacaagactcaaaaggcaccattctatgcttgatctctccaccaaaatgtcagccaattttacctttggctcttgtaatggcccttatcgtccacctccatacaataccaaaaatacaaatcctaaccaacaaactcgaaatccatcttgtaacccttcttgacctccgaacaataatcgtcccatgtgttaagtttgcttaaaatatggacacatagctcctgtttgtcattatcgctttgacaaacactgggtgaccccaaagccaaattcctctcagcctcaggcatatcttactgaacaacaatttgattatgatcctaggttcatgtctcccaatctctccctgattttggggatgatgcaggttggttcgtggacacaagagctacaaatcatgtcacctgcaacatgggtagtcttaactcaacaaccacttactctggccaagaaactgttagaatatttttagccaattatttatgtcgtttttagagttaattttcttcttcattgtcactttttggaatagaattatgattattttctttaatttcaagttccaacacttggaatgtataaattagtcaaatttcagaaaaaagtgatctataaaatagagaaaattgtgcaaaaaaaataaagctaaaaacttaaagcctaaattcgactatgatctgatcatattttggaaaaagtgaaaacataaaacttcaagatttctctttcagttttccagaacatcttgaatcgtccaattccaagcaatatcgagagagttatggccgaaatactatcaatcattgcagcatgaaatttttgaaaaaagataaaataaaaatatagctttttaagtagagttgcaatttttatttttttttaagtttaaattttaaattttttgtatttttgaggtaactcagtta

SEQ ID NO: 256241 - DNA, 1896 bp, Cannabis indica
catccgtcttggacgattcatagccatggcagccactacttatcccgagaagtttcgaatcaaagcacccatttctgtttttccttttgtacttgaaacaacaccatccacattgatcttcagtttcccaatagtgcggtacacatttctgttagtatagcagagtctctaatttaatttttcgttccttcttcaaagtgaaagactatgatacataattaatcatatgcgtggtccaattgatataattgcattccatgatgtactaatcgcttaaattaacaaaatggtttatatgtttcaatcattatatagatgtgaacatccccaatacttctcatcaaatttatcacaatactatatattatttatatgtatggtaatatatattctccttattatttcatttccaaacatcgtttttacttttttcgaaacattgatcactattaaatttgattattgaaaaattattccaaaaattattataaaagagaaatgctaattaaaaggcaccagtaatctaagtatagtagtgttagtgcttatatagttaatattgctcattatatatatatagaaagttataaataattagtatagatatagtaaaaatgaattaataactatagttttactcacaaaaataaaattctaattaataattaatatatgtttcatattattggtcttagccgaaatcgatgacgagcgagggagtgatcaaataacaacaaaaggcagcaaaggtgatttcctatcttaaagggaaactattaataaaacctaaatggttggttttcgtcccacagataatattatttattatttgctaacttgggacactaaattgatcattgtgttgtcacggaagtataacaagatatatattactgctcttttactacaataatctttatatgttatgctacatatatcgtttataggaattattatacgaattattcaaagtaatgaaataaatggtaaacctatatgtgagtacatatgccacataaataaaactatatttaatccttccttggctaatatatgagtatatatgtaaaacttattaaaggtaattatatctggaaaaatagaatagtataaaacattaactttgaaattaaattcttagttgtaagcaatgacgtttatttctctttccaattccaatttagaagctcatcaaatatatgccacttgcacgcaacctgtcaaacggtgagtgaagttaaatgtctcaacttcaagataatctaagtgtgttactttccaagtaaatctctttttcagcgtttgaaatgagttaatataatgtggccgtctgcattaatatattatagttcatattgattatttgttgttatagtgtggtgtgggggaggggccgggggtgttggctgaattggtgacgtttgaaagcggttacaaaaggttggattgggttgcaaaaattagagtcccgaggtggatgaggaaagataaccctatctccactacttgacaatcctatcttccatgtcttttcttggtttctttctatatcaaactacttattccaatcacaaatacttacccaaaacatacaaacctctcacctttatcattttgttattatatattaatcaaaaacttaaattattatggaactttttcattattacactttaaaatagttttttatattttattttatttttacgaaattctatatacaaactcctattacaatctaaattggaacaaaaaatcgtatagattctcttattgtaactagtactgcaaccactttagaaactcaaactgtaaatttgaaaaacaaattaaaaaaacaatatttagggtaattccccaattattatttatcagtaatgatatattaaatttaaa

SEQ ID NO: 256242 - DNA, 1812 bp, Cannabis indica
atgaaagtcatcctaccaatcttagatagatgtttaagtctccaaccttctattctttcacacattcttgttttgatgaaattgaaatcctttcttttactacggctgaataaaaagggttgcccaaatgtcgttcattagaatggatgttcccaacccccaatatcctttgaatagcagctttcacatttggatggcaattatttgacacaagaaggctcgatttctgcttactacacacttgaccagaccaatcttcgtattttttaatgcactgcaataatgtttccacttcagaggtgttggctctgcagaataggatagtgtcgtccgcaaacataaggtgggaaacttcaggcgcatcacgggccacccgtatgccatgtatagtattcttatattgctcatgatagattagccgagaaaggacttcattgcacaacaagaataagtaaggcgatagcggatccccctggcgaagtcctctccccgggacgattttacgcaaaggattgccattaaggaggatggcataggtcaccgatctaacacaactcataagcaacttagtgattattgggttgaaaccaaacagttgaaggactttctcaaggaagtgccattccatacgatcgtaagccttattcgtatccatctttagcgccataagaccacctttccctttcttctttttaataacctctactatctcctgggtgaggatagatgattccgcaatccaccttcctgggaggaaagccgattgcgtaggagcgatcatagaatccataaccaccctgagtctttgagccaaaatacgagcaataatcttctatacaaaattgcaaagggcaatgggtcgaaatcgatccacactatcagggttgaaacacttagggatgagacaaatgaaagtgtggttcaatcccggactcatgaccccagtgcgaaagaagctctggacgctatttaccacatcattgccaacaagatcccaacacttacaatagaaacacccagagaatccatcgggtcccggggctttgagaggatgcataagaaagacatgggactttatctcctcgaagtcggggatggccgaaagcatggcattatcttccaaagacacagaaggagaaattaactcgtccaaaccatagtaagggacctcccccttagaagagaataacttcaagaattattcattcagaatactgcccatttcactttccttggaacacaattgcccactcgcattcttaagattccatatgtgattcctcttccttctaaccatagtagaggcatgaattttattggttttatggatatttttggtaatgaagttttgttcattcaaggatgtctaatatttgtctacctacttttgcttgatcaccaattgtaggttgttagctaatcttgatttatggttcatatcagattcaataattatttttattaaatccaaaattttattctacttccgttgcaactccgatatgaactataaaaactaacactgttgcttaatgagacagccaatagagtaataaatcttccttaaattgttgcctaatgagacaaccaaataacgtaacaattctctcttatagacggtaattaccgaatcatatattgacatgctaggtggtaaaattatactttttcttaacctcaagtacaaattcaagtgtgccgattaacttgtgtggaaaacgctcaacgattcctgggcctatgtcaataacagtaaatcgataaacaactcaatttagcccgttctaggacttaaactcaaaatcgaaacaa

SEQ ID NO: 256243 - DNA, 3369 bp, Cannabis indica
tacatcataggagaaacatagtagccccaaatcatccatggcttaatgtcatctatacaccaagaaaaaaaaaaagtagtttccttaatgaaaatcaatgtattcaatgatgaaatattttcacaatggaaagaaaattctaacctttggcaacaatgtaaccaccaagaacaaacaccaatagtaatgaaaaagatccaattgtgtttgcaacaacctcagttcttccgaggcctgcaatgaaacgaaacaaggaaagtgccatctgatggacaccgaaaaaggccaagaactgtttaaagaacctgtaaatattgaagaaaaacaatcaaatgatgagaattctcattcaattatgtttcaatgagagttatgttgagattttcgcctttaccttgtagcagaaggtgcaaaaccaattgtatagtatgtaagaatgatccaaatgcctgattccaaaaatgaaatgggaatcctcagaacccaaattggcaatgcaaatgcccaagcagggtaaaacaatgaatccctttgtttatagaacacaggaagtcggaaaactgtcatggcaagctcagccatcccattaaacatgacattaataagactaaaaaacagtgctcccaaaactttgctccatcttctacacgaccggttttcatttctgttcttaagaacacagtcagagcaattatagccatgattgtgatttgagtagtcttgaaaatatagataaaagagtttcgcttcatcaacatccattcccttgaaaacccggccttgaagagttccttattggaaataccatatttttctttcactagtgcagcaggatgagttgagtttttatcatatggaattctcaaatcctctgagagccttagaccaacatggaaggtgttgaaggcactggcgaattcaataaccgagatgtattggtaaggtcggttctttctaaaccagtactgttcttggtcctttttggaagtaacttcttgtagaaagtcagcaactcctttcctatcagggcatttgaatcccatatactcgaagaattcgagaacattatcacgaggcccttggtatacgattttaccttcagaaagaaggataatatcatcgaaaagatcatatgtttcgggtgcaggctgcagcagagagatgaccattgtaacatccataatatgaaccatttgcctcatgaacttgacaatctgaaaggttgttgaactgtccaatcctgttgatatttcatccatgaaaaatgcttttgctggtccaaccaacatttctcctgcatgataccaatcaaaggtaattccaattagagttgtttatgaatacattttacaccttaacaacaaacatgaacaacttcattggccaagtctccataatgtaaggccgccacatacagggttgttcatacaatccataccaaaccccaaccaatccagactaaaaccatttcagaccgaaacaaatgaatccaatgttaatggttttgttaatccaaacagctctataattctctggtacagtcatggttttagaattttcgctagcggctcaaatcagaccaaatcacttaattcttttacatttacttaatatgttgtctttgtctttttaatgaaatattgatgtttgagagcaatattagacaaaatattgacactatttttatttattgtaatttatgtactataaattttgaaccaaatcaatctgtttttaagtggattggtttactttgagcatttttggttttgaatttttaaaactgtaatactagtttggttcgaaaaaaatccagaccaaaccaatcagtgaacagcccctagccccctacataccggtgttacacgcttcttttgtccaccggagatgccccttctcatgtcatcaccaaccataatatctgcacagatatctagcccaagaatctgaaaattttcaaaaataaaacatgttagatttgtacaaaagaaaagtaaaagatattgagcaacttcaaaatggaagtaacaaacctttagaacataatcagtgatcaaattggtttcttggccttccatagcagttgctttcatgaaagcatcaatctcaggatctggtttgattccagctgatctctccctcctagacaactctaccaacaagtcatatctagttccaacaccaagacatcgccccgagaaatccaatgtttcgcgaactgtcatctcaccatagtgaagatcatgttgactaatgtaagaagaggttctctgaggtacaaattccttaagatcatggccacagtaggttacttgtccagttacctgtttgtcaaaatcccaatattttagttcaaatgaaggaagagacagaacttgtaaaccttctaacacactaaacttgaactaatacattataaaactgagaaaaaccgaaacatacccttaaatcatcgtcgagttttgcagcaagagcgcgtagcaatgttgtttttcccgaaccaggaggcccaagaagcagtgtcaacctgaaagtgaagagtgaaaaaaaaagttaatgaagagagtttcaagcaaagttactaggctaagatttattaaacaaaaaaaaaattctacattataacattatgaatagttcagggaaaatttttaacaggtgaaaacatacacgatctggtagtagtaatagttctaagagcaaaaatcccaaatagagcaaagtgtggaaactagtgactgtgaacataccttgagggttttataacaccattcacattttggagtattttaacaactcttttctttgatggagtgagtccaagaagtccaatagctccctattataatagattggagtttagacaactcatataataaaagcataaatggtatgtgttgaaaatatttctaagtacctcaattatgttgagactagagttcaatagagttggaagagctcttgttcctacatatgcatctccttcaattgataaattctcaaatctaacttcaaccttaggaatgtcaatgcctaccctgttgtccaaaaacaaagaaaaaatgaaaataagttaaaactcaatttctaaatctatagctttcatgttaaagacaaacaatatttctgcaaaatcaattctcaaaagtttctgattataagaaaatcaaaccactaaggttgcatttggttggagggtaatgaaatagaatggaatagaaatgaattaattttcatttaatttttttgtttggttgtattttaaagtattagattgtcattccaataatttgattctaccattttgatggaataactattctaatgcaaaatgagaaatatatatattttcttaaatgtatattaaat

SEQ ID NO: 256244 - DNA, 1276 bp, Cannabis indica
tttttttttttgttttgaaaattaactcttaagaccctctctatttttctccttaaaaaagaaaatgaactatatgatgtttcatttgacacacttatatagtttttaagttttaaccacttctgtcactttccttttctttacatattatatgttttagagaaagaaaattgtcttacgattacatttttttcattgaggtgtaggaattccactatatgaaaccaaaatacctttatgaaaaaacgtaatccttttcatcaataatcatctgacaccatcaactttataataataataataataataataaaaaaactagaactgttgcttactaagaaggaagcacaaatggcaccaagctagttctatacgtatcaaccaaattagtgggggttttccttaaacgtagttatatcaaaataagtgacactataatattaattaatcattaatgaagttttgagggtaattagtgatgtgaataaagagtggatcaaataattccatctttattagaattgagcatattctaatattcgtttaggcatatcttggtttcttgtcatcattttcattatttgaattcctacactacaaagcactactaaaaggtggcaatagggaacattgtcttgatagatacctcaattataagagaactcaaccagagattaaatgaggttatccaatcatggacaacttaactattgcttagatattatttatttcatactaaggacatctctcactataaagaaaaaaaaatatcttctttgcttagtggaacctctccattgtggatggggagcataatgttcataaggggaatacaagacacaattgtgttgatttttacagtgtttgtttgctttattaatggcttacacagatatttgagaaattatggcatgtataatatataatattcaaaatggtagaaatgtaacaaaataaattaagaataatagggattcaatgtttttaatatgttgtttacttaatttttttttttttgggaaatataatattagtgatttatattgtttattaacataatcggaatttggtatatatttctatattgaattctcagtatttttacagcaaataatcaggggtatatatagtacacgaaaaggaactattaatcctaacaatataatattctcttgtccaatgattggttgagtataaaagggaatcccaaagattttaggaattgtatgacagctcatgattgggaatcatctagaagttcaaaaatgaacagcac

SEQ ID NO: 256245 - DNA, 3376 bp, Cannabis indica
ctctctctctctctctcaatcatatcaatagtcaatcgtatatgtatctttttcacacttacgcttgactatgctttttgaggtgtttgacaagtgtgacttcttgtaaaaatgtgaaatttcaacaaacaggatatgtatgcaaatgcacccgatgccaagttctatggtccactgtctatgggagttcctggggagatagctggtctacacaaagcctggttagaccatggacgtttggaatggaagaagttgttccaacctgctataaaacttgctaaagatggatttgtaattacccctttgcttggaggaaagataattaataaagcacagatgattttaaatgaccctggattgagacaagtttttgctcctaatgggaagttggtaaaagctggtgacacatgctacaatgtgaaacttggccgtagtttagaggaaattgcagagctaggaccccaagccttctataatggttctatcggtgagaaactggtcaaagatgtgaaagaggctggtgggattttgtcaatggaggatttgagaaattacaaggtgaagactatggatgccatggctgcagatgtaatgggctacactgtatatgggatgccaccgccttcaagtggaaccctcgggatttctctggtaatgtgtgtttgcccaaaatatttcaagttgatactgcttagtaactatagtttttaatgcttaagtgatgcctttggtgaaataaggatgtcttttattgttagaacaggttatgaacatccttgatagttatgaaagctctgatgctgcaaagggagatcttggtgtgcatcggttgattgaatcgctaaagcacatgttggccatacgaatgaacctgggagaccctgattttgtaaatattattaaatatgaaaatgaaatgctttcaccagattttgctaagcaaattaaggaaagaatatttgacaatactacttttcctccagagtactacatgaacaggtactatcccttcagccttggtaactcaattaagaggtctatgataatggtgccctaactactgagatcacaaatggcaggtggagtcagctaagagatcatggaaccagccatttcagcattgtagatacagatcgaaatgcagtatcaatgacaacaaccgtaaattttccatttggagtggggttctctccccttccactggagttgtgctcaacaatgagatggatgatttctcaacacctacagaaatagccccagataagctccctcctgctcctgcaaactttatcaaaccgaacaagagacctttatcttccatgaccccaattattgtcaccaaggtaaagaggaagagtttcaaagcatcagaccagatactgatgctagtaactatcttcttaataatacaatttaccaattaaatgtgatgttttcccaatttattatgctccttgcaggataatcaagtagttggggtccttggtggcagtgggggcatggatatcatctctgcggttgctcaggtttttcttaactattttgttttgggaatggatccattggctgcagttcagagtccaaggatctatcatgaggttcctgaatcgtttcaagtcatagaattgatatcactaaggaaatatctccaaatggctaattgattttgtggttgtgtctttgcagttaattcctaaccaggtctcctatgagaactggacagtgatatgtggcaatcacattgagctttcagaaggaaccaagctgttcttgcaagaaagaggtcatcaaatagtgcctagggcagggggtgccatcactcagtttattgttcaaacactacaatccccaattgccatgggtaggaaaaatgtaaaatctcctaatggacaaacactctatggtacacttgttgcagttagtgatcccagaaaagatggaaagcctgcagcctgttgaatcagttgaatgttgaaacatcataaagtcgaacagggttttggctacacatcaattgatatcgatttacaaaattgttccataatttacacatcaattgatattttccaatatggtctaatgcctactgggatattgattatataaaccatttcacggtggtgtttattatgaacaatgtaaaattaataagatacttgtaaattttgtaattacaaatgtcagtttcttcttatttcgttgtttttaacctctttgtagttcactccatccagtgtcaaaggccttaaaaaaacacttccaaacaatctcatatgccccatttcatgtgatcaaacattagtttttacaaatagcgattgaattttatgctcttaacttaattgcacaagtattaacaataaagtcaacaattccattgataacctcagaccaaaccctggaagcccatctggaaactctttaatatgtcttgtccatcagttgtattggagctaaaatgttactcttgcttgtttccaccacacatccattcattaccatttcctcaagcatgaaatgggctttctccaagtggaacatgatgtctaactcacactgcagattcatgtagaaaagtgattaaataaatggaattgaacagatatttctagttttacatataattttgaattctacacattcttagaacaaagaacttaccacattgccaaaatgacggtccatggtttcaactaatagatgaatgaattccaaaattgcaagttcattctgtaacacatatgacaaaaaaggagtaagcaaacagaggttcagtgtttataaatcaaaacaaaacattatgctgcttatatcaggttcgtccagcataaaaacttatattctaagctccatctactccaagaatggtacatctttgagacaaaaggaagaaagccaacatccatttatagtatgcaaccatgcattggcacatcaatgaagtgtatgaccactaatgcaatatcttataagacgttgtacaaaagaaattcccccgactaaaattgatagtcctgttacgattctaatcatcctttctatctgtaaacacaataatgctaacttaaaactgtcaaccactgaaacctctatctgaaaggttcctcttttaaaaaaaaaagttgtcacatttcttgccctaccaacggccaatgactactatcctctctcttaaaatgatccacaagattaagaagagaccaattcttcaggcatttataaattatatgtgtatgaagagactaaacagtgattctaccatttccaagttcaaaggattaagaaacaacagaagttgatattccatgtgattttcatcaactaaaaatgctagcactttgaaataacaaaaaatctggaagcttacttcatcatt

SEQ ID NO: 256246 - DNA, 1789 bp, Cannabis indica
aaaaaaaattaaaaaatatgtataaagctaattaacatcaatatttaatcgcaccaatcacattatttcatctcttatggtactaccttaaatacaccttaagttgtgactaataagtagaatagcaaattgtgtcctaatttctttgtgctaatatataataataataaatctaattcaaaaatatcatatatatatatttaaaatatatataatttaattcaaatttgaattatacttgtgtcatatttaaatttaaattaatctatcatattttcttaaatttaaattaatttttatttgcaatatggtgttagtttaacgttaaagatatacataataatatatacactccgcctctattatggtattttcaaatttgttcgtgttgtgactttcaatttttacttgaactaagtttttttaatcataattcatatgctctaaataattattaataaagtaaaaagagaaaaagaggaacatataaaaacttgtgcgatttaagccaaacacaccaactattacgaattacaacgtctacaaatgccaccaatcaattgaaaaaacagaaacacactaaacaagaaatatgaaaagagaacgacacaaaacatagttcgacgtacgacaatttaaacgataaacgacaactaaatgcagagcttagattgatggctttatttggtcgtactagctcaatgttgatcatccactgccaatggaatcttcttcacctaaagtacaattacaaaaaaaaaaaagaaaaacaattaaataactaataatcttttttttgtgacttaattaaacttcgttaattaattgtacctatatatattattacttaccaaatctctgaacttgagtgtgtaaaacatttctaagtatcgcctagtctctcgcctctcaagttttgacacatatttccaaaacccataaactccagccaatgttagaagcctctctgaatatatcttccaagtgtacctaaattattataggacatattaattaatatacttcaaataataatgtggtagctaatgaatatatattatatgtattttgaacctttcatagattcgttttaggccagcagcagagattgtgtcccagtgttcaggctccttctggcaacgttgaaagaaggcaattaaaaggtgagccatttgatgagtatgataaggatcaatatggaagcctgaaacaccatgttcaatgatctcagctggaccaccgttacatgttgcaaatgtgggaagaccacatgtcatcgactccacaacagtcagaccaaaagcttcataaaacgccggctgcatccattaataactatctcatctttagtactgctcactgcttttcaccattactgtttagaaaaaaaaatacatgaatcaaaagtttcaaaattgagaaggaaagtctcccaaaagtactaaaatataagtataatgaagaactttaatataaattagagaaaatgggattatagtgatgtgtttcaaaaaaaaatagagtaaatgcttaattacaatctcttattacaattttttaatcaacttttactctcgaaatcacatgtcggaatattttttcaaatttttttcacactaatactccttataaatttttaaaatttttttgaataatactttacaacatcagaaacagagctcgtgatatttaagtttactatgcgtgttcaaataattttaaatttattttcgacactgtaaattattcgaaaattttcaaaaatttacagggataatgttgtaactat

SEQ ID NO: 256247 - DNA, 4801 bp, Cannabis indica
tgtattaagaatcggaagagtgaaccaaaaaaaaatgtcagtttctgagccaaatatcatggcttccccttcatttactactactcaaccacctactccaattaagagtgataaccctagaagatttcctcaagctcaagctcatgaggatgatttcaacactgtcggtgccactctcagctgcccttacggccatggaagctgtccactcaaggtttctcgctcacaagccaaccctggaagaccttactactcttgctctactcaattttgtagattcttcaaatgggcttcttctgaaaataataataataataacaatcacgccaatgatgttgttgttggtggggttaaacgccaccggattcttcctcatgattaccctgattgtcgttgtggtgccggaaaatgtaagcttttgtttgacaaaaatggcgcccaaaattactttgtttgccctattgaaaaggtaacccctttttttcaatttttttatttttcttcactctcattgatctgggtttttgtttttttgactaaagattgagtctttgtaatagggacatggagcttgtagttttaaagttcaggccatggctaatagttctactacacctggaattgtgagctctgtgttgaatgaggataatcaagttagctttgagaatcaaaagagaactaaatttgactcaaatgtagttgtgatggtggaaaataataataataacaataatagtcctcctgatcaacctgatcaaccatctacacctgtacaaatgggaattggaaatgaagagaaagagtcagagcaagagcaagagttggaatatgtaaacgtagagaaaacactccaagtttcttgtttaaaatcagatacaattcaatttggccaaactgagtttctgaaccagatttctgcagattcaggtattggctttttgtgttcttcagattatctcattgaataattaattggattttatttatatgttattgattaccaactcatttatgcataatttttgtttttgggggagtggaaaaagatcctgctaaacaaatactaggtaggcttgttttgggttggttggggaggcttgcattcccaccttctggaacccttactatgcctcaacaagcaaggcctttcttatgctgtgagtatgttatgttatgttataatggattgtgtcacatttgtttgataattgataatatttgagttgtatatttgcggcataactacttgaagttttgagtttgtaaacatcataaatctaataattttttttaatagtataagtatcaaattttagttagtaaaaaactgtcattttcatcaagttatgacttcgttagtgtctcaaatttgtaaagacttttgaatttgttgaaagaaaatttggaaatatcttataccaccgggttctacgtgtgtgttctgtttaagacattaatagagtgtgttgatgaaaaatgatgaaaattacagttatactaatattcggtactcttatgttgctaaataaatcattaagtttatgctagttacaaactcaaaactttgggtaattatagtggtatgttgtgttgctgcaatgaacttgtatgtacaattcttatatcttttctttacaggtgtttttccatcattggatccaatctatgtccccaaggccactggtgtgggtgcagttaattcgagagtcttaaatgaatctcctcatggtgtttccgatacatctagacaaatagtgagacgggattctgaatgcggcggcattttaatggagctctcgagcattaagaatgttggtggtggtgtaggagaaagagtactagatgaattcatgggaccaatctcagaagcgcttggggaagcaggattgcttgtgcaaaatcagctgctgagtattctcgagtccacgaatccagtgaaccacaattcgatgagagaagcagcgaacaagacattttcagtcttgaaacttctctcaattgatcatagggcgttttctgagcgtgtgaggaagttcatttcgtgtgcagcagagtttgctaagatagaagatgagtggaggaaaaagggtgaagtagtaatgtggcttccgggaaagattgaggatttgtatgagaatgagaaggctaagtttgatgagatagcggaaattgaaagggagacgatggctgcaatcgctgcttctgataagggagtggagtgtattgcagaagaggtaatgcaagtgagggaaaagcttgttgggatggagaaagagttgaggcataggaagatagaaaatgaggaactgaaatgtcgagcgggaatgataaaagaggatatggaagaggcaaaaaagaagatggagaaagcaagagcagcaaagacggtgcatgaagagcgagctgctgcaattgaagcattggaaatggccaggcttcaccttagacacaatcactaaacttcaagggggtttggcctagtggtaaagggtcttactcggggatgtctagttaggcgcacggtcacaggttcgatccccactagcgtcaatatttgaggccgctgtggcattcttcgcttggtatgaggtagagggtcgttggattagtcgaggtgggagcaaactagcttggaaatcctaagtttaaaaaacaaaatgtatatgcgaatatgatgatatgttaggtatagaatataagataagataggtaatatgactaagtattgtaagttgtaccaggatcctaactaagtaatgttattctgtaaattgacatttcttgatcagtattgtaagttgtatctatttccttttttaagttttcaaaattatggtttcacctagtttagttgacttgaagaattttgtttcaacatactgttttttgaggagggaaaaaaaggtacaaatcaactgttttttggtaattcaatagtctaaactttagttccatcaataaaggaaataaagtataagaaaattgaaatttatttggttcaaacgagaaaattagtgaaacatcaattgttgaacttttttttaataattatttttttttgaataaaaccattgggtctcatattcataaaaaaaaaaattggaaatttgatgaaaatatgattatttttggagagcttacatagttacttcaaaagtttcgtaacttacatatatactactgcacataattaactacttttatactatttaagttgcttttttttttaacaaaattatgtttttttttttttagtttagcgtaatggtattcttacaatcaactagcttatagtttaaaggtcttgggttcgaacccgtgacctctctcttttcccatccctctctcaccactaagctagccttagtggcttataaaactattgccttgacacatgcggcctaacacccatgttttatcattattaagttatttctttttttcttgtttatttataagtctaagaggttgtttcgctacatttttactttttacaattgtgttttcaaaagtaagaatagaaatttttttttttttcattttaaaaagttattggtatttagctcaggcttttaaaaactatttttagatattttttattaaaaaaaattaataatctatatcatactacgacactgaatctcaattcggactcagactcagatcctagaccccggacccaaatctagacccagaccttgaccccttaccccagaccacaactcaaaattgaaacccaacccgaacccagactcggggtcaagtctgaggtctgggtctagagtccaaggcaggggttcgggtcttgggtcaggagtccgggtgggggtctgggtcagggtccaagtctggatttcgaggtccaagtttaaaagacagaacaaacaaagaagatgttaggaatgtttttatttatagattgacatacctcattggtcaggatgacccgagctaaaggaagaaagttatacattttccccacttacggagttattacatgtgtatgtttgtaaggggatcgagcgtaatgtggaaggcccaataccaagagtaatagttggcaaatactgtgcattatattacattatgattcaacaaaaatttctatatcaagtgtgttaaatttttattttgaagattatcattctaatataattgtgttttttgatttaattttgcgaaattttttttgtttatttttgttagttttggcgacaaactttttataatagaaaggtattttttgaatgtgatggggtactatttgaaggcgttataactttattgtctaaatttctgaaagcacatttgtcccatgtggctcgcgattagaattttgcaactcatagtttgtcaaaatatgtcttttaattagacaatgagctatccaattcgagaaagttctacaaccaattaaaacttgctgcattatttagtaagtatgaaacgtaacaaaaattctatatcaaacataaaaaaaaagttccttttaaaaaaaaaaacataaaaaaagttttttgttttcctaaaaaaaataattaaataaatgattaaataattctctccttttaaaaattattggtcataagacataactacaaaattaactaattcagagttttataacaacaacaataataataaaaaaagaaaattgtaataatgagatcgaccgatatttctctccattcattcagatatttctcttctatttcttttttatttatataaaataataataaaataaggcaaaaaagaaaagaaaaaaagaatgattctgttccattgtgtgtgtgtgtgg

SEQ ID NO: 256248 - DNA, 3790 bp, Cannabis indica
tccctcataaaacacaacaattacatctatatctcatactcatatataccgtacaaagtaaaactttttggatgattaaacttcttcattaacaaaaaaaaaagcagcagaaaaaaaggttggtatatatcgacacaggtagagaaaggggtcaaattagaaaagaaaaaagaatgttaatctaagattagtaaaataatgaagtatcaaataaaaccctaatggagattccaaaacacatagatagtccaactaactcataataaaggctttttttgtctgaatctgattattggatggattcattcatttctagacttgtatttaattagtgagaccacagtatagtagtaacatcatatatagctttatttatttattttttatttggagaaaggcatattatatatagcttttctagagtggagattttttataaactttatttattattttttatttttttggtaaggggttacagtgtcagttattggtccatcagccacagctgcaaacaattaatgatttaaacttggattaattatatcaatttctatcatgccttttattgtatcatatattataatatagggatttgattatcctattttgagcaaaataaattatatatttttgattatccttgtgattggacaattgatgaaacctaaatttagctttttctcaagctgggaccaaatcagtaaagcccaatgacatcaccaataaaagccccctctagttgtttattaatccatttccacttacatttttttgagaggaacattttattataattttgtaaagagcattgttattaaacactagtgatgtttagcactttctcgatatgttacgttacgattgactagcgatactttctaaaagttatgatatttaactatgtgagatccgatatttagttaaactaataacaatactgacatataggaaggtgttaaaacaccactggtactgtttagcatctctcttttgtaaattaactttttcttttttaccccatgttatttacttttactagatgcgatatgtgtggtagaaatatccatgtcattatgtcttgccgcaaaaccaatagtagattgactcctaaccccaaagaaatctgtgactcatgacgacatcaccaaatttatgattataaaaaaaaaatcattacagttttctattatgcttttaatttattaggaaatttgtagaaatgttattttagaaaatgatattattcaagaatatataaagtaacactctagaaaattattagaatattataaattaattagcattaccatttaccagtttagttaccgcactataattctaagagatttattattatgtcctatttatttttatctcatcaccttttgtacaaaatgaatactttggtgatttcttcagtatgaacgaaaagtttggggcttatcttccatgatagactgaagtaaatttaatgttgtggtttataaaatattggttaaacatattttataaataaacaataaatattttttagaagaaattcctcttcctatatgtaatggtgacacataattatatattttcatttcattgaggtggtgttgacaaaaaaaaaaaaaaaaatacttagcaacacttaccaaattttgatttgcctttttcatatataataaatatatatatgtataaaatattaattaattaattaataagtaatttgttttgtagtataaataattaaattaatttttaattataaataaatatctaagtttaatttttatcagtaattaaattacatggtaatttttaattagttcaactcatttaatttttatttttttttttaaaaaaaaaagtttaaatatactaataaaaaaataacatatggataataatttaacatttaacagctaggtacaaatttaacttaatattacaactaaaaattaaacttaaatattatttacactaaaattaaactccacaaattattcttaattaattatttttaaattaaaagtgccagtggaaaaatttacttttgatttactaataattgtatcatttttagaaggtgagtaaaaagcatttttaaaatttatgctataattactgttttcaatgcctctaggtggtaagtagttcgttttcttaggtgagagcagcagctatttaagggatgaggattaataaaaggtacaacgaaaataaatactaaatgccaattataccaaggattcatccaataatttagtgtatataaagtgtatgcaggtctgatatttgatgcttgtttgtacacgagtacatactaattaggggaccatgataacccaagtgatgatacatgatcaataaatatgtatgtatacacgttttactaataccaaaacaaaaaatgacctaatcaaacataaaataaacttattattagaagtagaaaactccaaagttagtaaataattaaaacacccaacaaatggagtactaagaaccattttcccatcaagggaaaatattaaagaaaatatttatgatgcattcactgcatattattaatatatgacatttgaaaatgcccgtgaacaaataagagccaaaatgaaaaaaaggaaagagttaaaagggcagagaagattgaagagtacaaagtaaaggaagagtatcccattctactacaaggtaatattaatccttattgtcttggattggaggtatagtactgcattctcactctcattgtaaaatgttatatcaaatatcatatatcatatatatatataatatatatataacaatgccagctgattgattgaccccccctaaaccccttactactcctcctccctcacatctcatgttcaactgaccgtacacccactttctctctctgtatctacgtgtaataaatatatacatatgatatgattaaatattaaaaaattaaaaaatcatttaaaaaaaaagtcatataaaataaagggtaggctaccctagtcgtgtggggggtcacttatgcagaggggagagagaaagagagaacaatcctccgtttatatattttctttcaccccattctcttcattattagtttcatttcatttctctcttttctcactaaaacactaaaatccctctctattctcgttttccttccctttccctttccacgttcagttttccttctctgaaaaactatagtgttatatatacatatatagacccttattataccaattactgtcatagcatctgtatttttgttcatctggggtactgatcctcagattagaaagcaaaattattttttgtctcaactctctttttttgtataagaaacagagaaagaaatagtagagagagagagagagtcaccatcagcgcagcaatgggtgctgacccggtgagctcatcagaaaccgagtcctctactacttccttactcaatgaggatcggggcaaaatacccgacccgaatcagaaacgggccaagagagcaagggaaagttgtagtcatagtaatactactactaataatagcagtagcaacaataacaacaataacaacaataataataataataataataataataatagtaagcaccggtttacagagggtccgaatgagacatggggaaaatgggtatccgaaattagggagccccggaagaagaatcggatctggctaggaactttctcaacaccagaaatggcggcgcgtgcacacgacgtggcggccttaagcatcaagggtaactctgcaatactcaacttccccgag

SEQ ID NO: 256249 - DNA, 1807 bp, Cannabis indica
ctctaaattaaatattatttatttttgatttatttatttcattacgaactcataatataatacttaatataaaacatagtatacatcgcacctaacaatatactagaattatctttatatatatgtatatttttcttatggagcttattataaataataatattaatatatcatgtatgaatccttatgattaggtataaacagaaaacacaaaactttggccattcaaccgtaacgaaaatgggttaagcgtaacttaatcgattgttatagtagttagtgcaaataaatacatgaatatatgataatgcaatgcaacacatattatatatgtatataactcaagcagcaccaaaaaagaacaagtggcatagcagggaccctagcatggtccgatatgggaggaggttgaacttgagggattgattggccattatagagcccaaaatgcaacaacgacaaggttgcccgggtaaccggtacgccaacgtggttacaacccttttgtacaaccacccaccaccgccactagttcgacaatagatagcgtgatcgatctcgatcggttcccttttggactgttgtttctagctgtgggcattgttcattttttattattaattcatcatatttcagcatttttctcaaccacttttgttcgttttctttgctttgctttctggggtttattatatatatatatataaatatatatatatatatatatacatacacgtttttgtatatacataaacatatatacatagcgtacgttcttttggtttatcagatatggcgactggattatacactgcgtcaccattattgagtagatttgaggtatgttgcgtgacatatatgtggattatataataaaattcttggaatagatttgtgttatttgatgtgagttggagattttcgtttggtagatttaataataaatttgtgtttttatgagaaaatatgtatgcaaaggtgtgaaaattaactaggcactgaaaaatgtgcaaggtcacttggagctagtttattgagttgttgggtgaaatatggcaagaacatttagttggtagctgtaatgtgtgagcaaattggtaaaacaagaacaagttttcaattatttggaaactagcagaattaacttttgataattatgtaaattaattgaaattaataaaataacatatgttttaaggactcaaccatatttcagctttcgtttcatgaccactattatatactttgagtctttccttgtattatatattagaaccaagttattagtagatgccaagttagtaggaaaaacaaattaattttcacattatgcttgtcttatagattaaatttgacataatatatatactctttttcttgtagggaaaaaactcaggtatttctgtttctggcaattcatgtggatggactggaaatttgatcttcatggttgagcttcgaaagaagatcctaacatttcgagatattattgatcttcctccttgtgacggttcaagtcccatcaacgaggtacaaaataattatgaaaaatagtactgtgatttttagttgagatatctagcaattaatttactattatgaactacaagcgtagagcaacaattttgttcatatatatatatatataaacatattcttgattgagttacttattctattacagctggtcaagggaacagttgaagatctccacaagctgtatcccaatgttgtcccctacaatttccatgcttcagaaattgaaaatatttcaatagatcatgtatgtaaatatatagtcagtaaa

SEQ ID NO: 256250 - DNA, 3582 bp, Cannabis indica
tgcctgcacaccaatagggtcgggcctgcatagcaatatctcaaagtaataaaacttgtttagaagagatcatctatatcccaatttatgcccattattatcatatttatcgtagggaattttagtcctacaaactaaaaggtaactttgtagatcaaaacttaaatacaatcatattttcaactaacaagacctttgaaatcatacaaacacaacacaaatttatcaacattaattagtcacatagctagctagttactaagtttttgttgttgtacaacaagaacagaagcattgctcatgaaatctgtggacgaaagcaaatcccccacaacaccaagttcaggaaactcactccattcctcaagacctgaagttaagatagagtgtagattgaatcttcttccaacaataaaaagttcgaaatcatcagccatggatctcaacttagtagccgtttcagtcccatctttaaccatttcttttatataaccaacatttccatgaccaacatcactattttgattataattcagaattatctccttaagcacttcattatcaagaaccgtctcccactgctcaagttctcgatcctcattcacactcacaaaatgtatgattgttaaggttatgcatgagtccatgaccatgcgcttggcgaacgtgacagcctccctatcgtcgctcccgcccaagaataccatggcaacgcgatagggagcttgtctcgacaccatagactcaacagtctcagagtgtcctcgatcaacaaggacagctacagagcaaggagctctctccatcacactacaattaatagcacgaacagtgaggttttctgactcaatagctgtcccgtccagagaccattttctatgaaatgggatgactatcaatgaggctagcttgtccaaagcaagagtacaaatatcttcatgcatgtattcggtgggggaaatcgcggtgaagacgttgacattggccgcgccgtggttctccctttggaaatgtgtgaaggagaggattatgttttcagagtaggagtagttggagagtgttttcttttggagttggtgagagataaagacgggcgtggctcggcccacgagctcgatgagatggagaatgtagaccgagatcgggttgtctttggtggggcaagagacatcgaggaggttcatgagggctggggtgttgtcaggtctgttgatgcatgcaacaatgcgaagctcggtgtcattggtagcagattgcattatgtttcgcttttgatagcctgcatattttctcatggggttgtataagtaacgaacagaaattggaaccactattgcggtcaccaaaactgttgccatcacaaaacaatacacctctaattctataacctgcattgaaattgcaataagttcaagaaaacaaaacaaaaataatagttaattatgtattagtatattgtaattttaaaatttaaaattaaattttggttgatatcatcttttattttaagggtattgttatttgactttaaggtactcaacaccatatgtatcattcaattattagttagtagtttctcatattattattaaattaaaatttacaggacacgatattgaaatatacatatcacctgttatggtgcttggttagtgttttccttatttttagtgtacgtttcacaaaaaattaaatttagtgaaactacacattatttatcatcatcttttagtcgcacaaaaccaaacttatattttcatttttaatgagcaagaaattattgtgatataatgaccatatgttatagtggtgttgctttcaaattatgttgtgattaaataatctaaatgttgaatttttctccttccaatatattccaactattagttatactccagttaaaaaataattggtacagatatacataccttactatctctagcaataccataggaggccatttccacaacccctttataggacataataaaggcaagagctaatccatcatttaaaggcatcctactaagcagaggaggtatcaaagagaaaagaaactttgacacaataatcacaagcacaagaagagcattggctttagccactttggtgttgagattgaggtcatgtgggtcagctttgatcatggccacagtcacaaagataggcatgaaaaccccagaaactaaaggatcaaaagtcttcaccaaggcagaccctaatggaggcccatcagggacagcaaggcccaatatcataggcccaaaaataagtgtcatatgataccaatttgataacatggcagagaacaaaagtcccaaaataatgatggaaaggtaaactttttttaccggtctaccctctggggtttggctaaccatccatatcatggctggtctggccacgtagataacaaaaacaataaataaagataccaaaacaaagtccaaaatggctaaccctatagacttgtcccacaccttggctagagtagccaaagctgtgagaatcacaccaagtatgtcacttatgatagaggaagacaacccaagacgaccaagctcagaattgaatattttaaggtcttcaaggagacatgctatgacaggaaaagatgtcaaagaatgtgttgttaggacaaacatgagttggagattctcttgtttgtccaaatcgaaatggcgactgagcaagtattgtgcgcccgctcctagaaggagcggggcaatcatggcgagagaacccgtgtggaaggccttagagccagtacggaagactatgcttaagtccatcttgactccacttaagaaaatgaacattgtgtatgcaaagagtgagattgtacccaatatgtcttggttgttgagtcgaaatattgagttgtaatacttttctatgaattgtgctgcgacgccttggcctaggacaattccagcctagttatatataccaaaaagaaaattgcttagttgttatgtatacaataaagtacaatagaaagcagttaacttcagctatatggtttctttagtttgttaaattttgaggccctttttcttctatattgattgtatttgttttgctctatataggacaatagggtaataatttatactttttctcgtattatttattaaattaaaatgtgtccaacttaatattagaatgtaacaataataatttaccatttctgcatttcactttataattattgtagtcttgccattttcttttagcagaaatctctaaactattgtcatcaataaaaacatattcttatgttgcattttatcctactaaataggttatattttttttatgttaaatttagagaatatatctataatcaatacaaaattatattttattagtttgtccatccaaaatcaattgaacctacctagactattttgtaaaagaactacaattctctaattaaataaaaagtagatttagctagaaacttttcctcctttatcaataatttaaattctattattatcttcactctccataaatataattcaatgaaaagaaaagaaaatcaaaaatcgaatttataagtcaaacaaattaacttac

SEQ ID NO: 256251 - DNA, 2768 bp, Cannabis indica
aaaaaaaattatttttaaaagtgtaaaaaatataaaaaactcatataatttattatattgggcattttatacatggagcctaaagcaatgttaagtatcttaagatgctttacatcaacactttggctaatgagtctaccaaaatcatactgttattagattaatggtattaatttttattaatcaaaatggcatataatcaaatcataggccttaacaaatccaaaaaaaaacacaatcccagcatcaatccaattctgcaactggattggaatatcatgtctagagattttatattaaacatataagataagtaaaagaaaaggacttgtgtccagaaaaataaaaaatctctaaagagactaaataatgttatgtatgtggatacaaaatgttatttacaagagacaaatatcaagaactacacatttacgtatggcacaaccaaaaaaagtgaagtgttaatatatgcaggtctaagtaataccttatcccagtgaaaaagaaaagagtaaaacccatatctgcagctcctactttacttgttaaaagtctttatttgcttctccagctggtaacaaattaagagacaaaattagaatcataaggctttgaatcgggtttcacacatttcccttaaaccgaatacaggtcatgtttctttttttttgtttatgttcaatcatatcatgcagtactaatctaaaagagataattcagtaattaaactcaaaccttgaggctctccattttttgcatctgcaactctttaactagtctctcattgctgtcatttataaacatagagattcgacagtcaaataaagagagtaaacaaaatgaatggaatatatctattgaaaattacttttggaaaatcccacttacttttgttccaataacagtacttgagtttcgagggctctctctctgctgttagtaacaaacctctgcaaaacacgacacatttctttactcctacgtacgattctcatttcagacacttgagaagataaaacatgtcgagtttacatagaaaaaccaaatagcagtcactcttttttcaatggaagaaatttttactgcatatatggtatgaatctccttcacttaacaatttcaacttagttataccattttaaagcgtcatggtcttaacagatgttcggttttcatttcaacttagtattaataccattttaaagtgtcgtcttagtgttaaaagatgttcggtttcattataatccgtcattgtcaagcttaaagctatgtttggtacgaacgagagagagtaagatatatggataatttaggatgaaaggagaggatagtaaaactccatagttgcaaaaccgagtatatccagttacctgattgagctcattgttgcctactggttccgccaactctctgcttctacctttcactatgcaaattagaaaaatacattataagataagaagatgataacttatatgctatgagaataaagaattgaaaaatatgtacacataccagcaatttgttgttgtacaaagttaatagatctcaatattagttcctgtaattgaaaaataaaaaataaataagaagaagaagaggaaaagcataatttcctaaacagtaaataacaaaacaaattccagtacgcaccctttgtaatgcattttgctgcaagagatgttgtagtgagggaaggattgaagcagttgtaactgatgtagaagatgtaggtttttcagaacatgtgctgacgaatttatccgaattactgtcctaaaaaatacataattaatggaaaatgttaaaactccagtcgatatgtaattagaagggaataatatcttgaacgggtcgtcgatactagtacatgaaaacatacagtgaaatttactacttgaattcaccttttagattattcttgttgtattcgaagagaaaaatgtaaacggtttgcacatgttggctagtatatcaatgtattgaacaaaaatgcacttaaattttaacagacatgatttactttggttttttcattaagtatgatttagaatatcaaaggttcaacttgattgttttgcaaatgagcttatggtaattttgaaatagcacaatcttaccttaggaatggaactcttgttttcagcaaactgccccttggatggggaggccaatttatctgacacattctctcctgcatcaatctcagaaaactgcttacacaagtaaagaaaagaaataactttgaatagtatagaacgaaaaaaaaaggacatcgagacgtactgttatctttctcaagatgatgtgtacagtgctctctgcaaaggaaacaaatacataaatgactttaaataactaagacaattgtaataacattactgcaaaattcactcaataggacttaatatttccaaatttgaatctgaatcaatttttccatagtcataccacaagaataaagaaaataaattagcgtaaatatgaagttgatggtaacagcagtgaaaaaaaagaaaaacaagaacacatgatgccgagaatacttaaatttaggacattattaatttaaagccttgacagacagaataagtatggtcgcgaagattaaatggaaaaactatgaaataattgcatgattagctgaagaaagttgagaattgcacacgcgctacatgaaagttataaaacaaccaaactcattttacatacttgtgtgcctgaaaggatacgggagatgaagcgggtgaaccatcaagattcctaag

SEQ ID NO: 256252 - DNA, 2859 bp, Cannabis indica
cctgttcttgactcttagaacagaactctcagcttagaaccctaagcaaatccctctaatcttctctcttattctctctcttctaccttctgttctccctctattaaaatgaaaagactagacttatatatagtcctaactcaaacaaggatagcaccaactaactaactaacataaccgaatgttagttaagttagttggtttaaatgagttggataataaattggtttagaggatcaatttccacactatgcctcttcacagttgaagttttctttccaataaataatgaatcaaaatgtctaactcgtaattatgtcactctaataatgctgtatgtaatcacttacatttttatgttctaaatttatttttttcggtgagtttggaatgttatgtaattagaggtactaattaattaaacaatttaattagtatatttgtctgggatataattacatacttataatttaaggaaaataattttacattgtatagttattgaaacttcctattataaatattaatttactagaaaaactttcgtatagttactagctacgtaccaaaactattaccataattatttgattagagccgaaattacataaaattaatttaaaaagcgccttttttttattttaatataactattttagaaggttaaattgtgtaattagtagtaatagccgtctgaattttatatatagatataaaaagaaaaattatctgtgtgtatagatttcaactttttacaatccatcatttacttttattttttctctttttttgtttaatataaataatatatatctattcataacaacattttaataattagtaagaaataaattataattttttaaaaaattcaattagacataaattaatgggcaacctaaatttattgtgattgtacaaatgaataaaataataaaatcaattcattatataacaaagtcacttcttattcttcttcaatattcaataatggcttgcatggaagatacaaaaactccaactaataataatactagtaaagaaccactaaggaagacaaaagatagaaataaagaaattggaaaagaagagctacaaacaagtcaccttctcgaaacgccgctccgatttgttcaagaaagttgccgagctcagttacttttgtgtctaaggcagtgacagaggaagcaattgggagcaaattgtaaaaaaaaaaaattcagggggctaattgttaatactgttgagtaaattccacttataactagtcccttatacacataaatatccacatcagcaacatacaacagaaacaaacaagttgactcgatcctaggtggcttcgcctctagtggatcaagatttagtagttagttacaaccgaaattgtaactaactcctaaacctttgatcaaccgactctacaacatatataaagctggaaactaaagcaaataacctaagatctaacacaaaacacagatcagaaagtaacagagaagagaagagtggttataccctcgcctcgagctcccaaatccaagatccagagagaactggtccagatctgagagtaaaactctcgtggtgaggattttagaagaagtacatgcacaaaggagaagcacaaagttagatccagaagataaaagaaagagaaagaaacaaacaaacttgtaaataccaaaattgagtctgaaagtcctaattactacaagttcaaattgatgattcttaacagagtaattctatgttatgaactagaaattaaaatcaatgaacacagaatttacaagcttcctctgcattggaaacgcattccaaccgagtagtgcttgggttcccttgaaccgggtacagtaactttcactaaacaatcaattcaattacaatatccagttctgattcttcaaatcaaacaatgtaatctaaattgacttttgtacaaagttacctaatgcttgaacaacctcaagctttgagatctaaacacatttagatctcaaacacaagaaacacacagctgaactaccttcagcaaagaatctgaactcccttcagatcaagcagattcgaactccatcttcaacctcaggaagatctctcgaatttcaatctgcacatacaagaaacaaaaacagaaaaatgttgccctagcagagcaagaatcaagaagaagattctaacagaagagagttagttagtacaacggttctgaccgaatttatatactaaagataataaaccagactaactaaccaaccagcaaagtacagctggcacaacctaacaaacttgcagaaagctgacatggcactaaaatgaaattagtgaaaacagatgcaactaactacagaacagatgttagagaaaacaaatactgaacaaaagcaatatctaatttgccacacaaaacatgacacttacagagtcttacctgatcgattttgtgacaggaagctccaaatcgtgtatctcaccattgttgatagtggatatcaagctagatctctgagatgagcttgacagagacgtagcccagttttttgggtgaactctgaaacaaattctctggtgttttctctccctcactttgtttttcattttgctaaacctaaatctatgtgtgtgtgggtttgattctgggtttcagacttggaatcgagcaagttcttgaagagaacttgctctactagggtttcgacttgtgagattgggaggttgagtgtttgagtgttagggtttctagaccctaactctgagaacggaaggacacaagattgagtgtcgtgttggtcatacggtgtcgtttaagtctaaagtataaagtagacttgtaaaggtcgattttgacctttg

SEQ ID NO: 256253 - DNA, 2276 bp, Cannabis indica
ctaaaaaaataagattaagaaataaatacgataatatttttacgtggttaggacattaacgagccttactccacaagtcaatattatttataagctctttggctatggagtatttactgcttttctcataccaaaattttctaaccatttgcataaaaggataaaaccatacttataggcgttggctagtgggtcaggcagacctggacctattagggttctatttggtgttcaaagcccaccgatggggtaaatacaatataatattggctattgggctaggtaggtgaggcccaatctataggcagtcattgtccgtacatggaggtactattgacaattatagcatagcatgaactgtcgattgtgaaggaaatgtaagagtagtgggcctcagctagaaaggtgattttcttttcgttgtgagcctttttatggtctgacacaaggcacaagctgcctaatttcatgggattgtgttagaattatgccacgtgggtcagcttccattacctaaaatgttcccagatgccctttcatgttccgttctcggtgcctcctaggggcatccttctttgatctacacttgtttactcctcgagtgtttgttggtcgatccgggttcgggcctctgaattcgtcgttaagagttagcctcgatgtgaccaaacgtcaagtttggcttcgccaattcttgatggataggttgtgcatctgctccacatggacctaatgaatgggcctcatttctgtattgggcctctaccacgactcattttactagctatccaaaaacacagatagcatttacccccaagccttcggggctcaagactcgcagaggcttgctgctccccattcgagtttaggatcgtaccaggggccatgaaatgggacaacctcttgatatttttccatagggatgatacgaaagcatctagacctttggtattcaattggtgcattccacgtgtcaacataatactggtgtgtgttcgtcacacgtcctatagggacgtgtgctatctcaggctgaggacttacgattgatcatgttagtgtgttccccaaggcgcattccatcattattgtgagcctcttcatttctaatgaagcattaaatggcacccctttacattcccagatcgttagatctgtgggatctgtgttttctcaaactcaatctaagcccttggatcaaagacatgtgaatcgcccctacacttataaatactcaacaagtctctcatttggcacttttatccatttttgtgaacatttgagttttcaaagagacgaatttcccttctaaacccaaaaaccttcattggtaaatgtccaacgctagtttcgagcttgttaaccccttattgtagcttcgacataaactgttttcaaaagccacctatcatacccgtaacaacgtcatcttcattggattttcaaaaagattaattctgacaaacttgtaaggaggctttgctattccaggtgaggatctcatcgactgtttagaacctgtcaccccctgtttcatctatcacaagtaaatagcccatctttataaatttgttgttgttttttgtttggacaaattttggggatacagatggttaaatgagcatgctataattagggggatttttatttcctttctaggtttttggtttatcgaaattgtatgctccaacatgtaaggcggtttgtttgcttttgtatgcttgatgaactagagacattatgaatgtagctaatatttagaaccttaccatgcttaaggatttaggaaaactaagaatttccaaattcgtcgcttctagatgattatcgattctaagggttttggtaacgttcactgagggcattattgagacccaagaattctgttcgggatccttttggttctggaaaactacatatttgctttcgttctttttatttgcattcccaattttaatatttgggaataaactattcctagatatagggtctgatggtgatctctccatgcagttaccggggaggactctcccatacccttgctattatttttttttttactttgggtaactgcttgatagttttcttctcagcttctttctcttttatgtcaagagatagtccattgggcgtaggcgatcatggtgttgtccgtgacatgaatgatccatggtggtgttgggaaaatatgcttaataggatcgattttattcttcaagaaaattaatatttaacataaatattaatttcatataacatcaatatcatcatttaag

SEQ ID NO: 256254 - DNA, 2942 bp, Cannabis indica
tagatcaatctcagccgtcagatcaaataactccctcatctgacagctgccgtacatcacggattacaatccgtgaaagtacaataacatgacaaaatcatatatttttttataattgtttttcttttcaggggcagtcaactaaaatccacaaaaaagcaaggttaatccaaataattaacttgttagctacttgaccgtcggaaaattagaaaacaatgagataattagtcctctttatataggtcaatgaattcaatatatatatttactgtcatattttatagttgatttagttaataaacaactaacaaaccaaatgtaattagttaagagtttaaagaataatgctacaaatattgttaaaaaattatataaaaaagtacggacatatttatcaaaagaaaaatacgtatggcctagatctttttatgggccagtacgacacgacttatattattgcagacttttcaaaatataaaatcagtcggggacaacacaaacttatttatgcacaagacatcatccccaccccacttcccttctcctcatgccgaccctagacctctgctcctccctctctcctgtcaagagttgataaaatatctcttttctatattttttatcaaaatgttaagggacattgtaaaatgtcaagcattatacgaaatagtatattattattaatacaaattaatattaaaatttacccaatttaatttaataaataatataaataatcactcccaacatgtgacgttaatacaatattaggaatcataaaatatataatataaaaataattcaagaaataaagggaaaaaatattgataagtggtgtgttgtacgtgcgcgtgtcatttttgtgctatgcaaattaaagtcaaaggtgaaaattgatcttttagtgcgtctaattgatgttggtgagttgtttaggaattttaatatttttattcttataagtgaattcaataaatcccaaaaatattttgtttaaccacaagcattattcattgtagctttccgatagttttagaataaatttatattattggttttatttaaattatgtaaatatatgattaattatttgttgtggtaatataataaagtagtaaggttgataaataattattcatttagtatataaaattagttatgtaaaataataacctcttattgaaagattaatataactttaaatttttggtattagttattatttggaacttttgatgggtatttatagttactaaccttcaagtattttaggctagaattattttctttaaatctttttagtttaagaattttatccatacatttctacatatatctcaagcatgcataattaaaaacctctagataaaagttttttagaaatgtttatattctattatttttcacatacctagaaaattctaaagtattttataattattttttaaaaaattaatcagaaattgttgtgtacaatgctgttatagaaaacttttggttctcacagtgctctctctctctctttctggttctgtccgggtgggaaggaagggcggtttctctctcttcagcgaacaggtatgcatataataatattaatcagcttaatttcgttcaggagaaagaaaaaaggaataaatttgatctccgaataagcatgcagctacattaattcatttattagtactaaatctcaatatttaattatgttgttatttatataatttcaacttgttatttatataatctcaatgaaaaaatccaaatggggccttaggcgagtgggcccaaacctgcccccaatccccacgctagacccctatataaaggtccacaccaaggaatttctttcatatctaaaatcatacacgtacatatatttgctttgtgcactcaaagagtacacaaagacttctttacgtatatataattatatatatatatatatagattctatctaatatggggaattgttgtaaaggatcctcggcatcaccagcaactccttcggctgctccgacagtggctacgagtgtggcatcttcgcagccagataatgagattacagggcagacatggggaggtcctccagcttgcactgatgggcctaaccataaccgttcccgcgttcgtagacgcacaacaacagtgattatgatcagtagagcctcgtataacaccaattctgttttagtaaattggtgttacatcagtatttgtttctgtaatagtactcttcgttattataagaggaatgtataaataagagtattgcttttaggctctctcgattgttcagacatattttttaaaaactgttttcttaagttatttggaactcaatacttaatttcaccaataaatgtataacaccgagaaaagttagttgctaaaagacattgttgcttaactactttctcggtatcatacctttattagtataattaagtatcgaattatataaaacttaagaaagtaatttaacaaatatcgttaaccaatcattgagaaggacttatatagagtagcaatgctcataaatttatcgctacttttgcattaatgtatgtctcgatttgtacctgcttgacctcaaagcaggtgaggaatatgaaatattatttatgtttaagaaaactttgcaaatacattacgtatgaaatatttctcaaaacatgaaacaagagatcgattaacactgcagagattttgcatgcatcaatatagattattcagaaagatgagaaagaaaattggcaaactattttcttaccagtactgtttgtttagtaagaaaattgagtctacgagtgagtgattcgaactgaatctggtgccgccgtctacctcgtaggtcttggcttggccaacattggtgagataaagggtcaacatcagtcccttttcttgataaaaagaaaattaagttaaaaaaaaaa

SEQ ID NO: 256255 - DNA, 1500 bp, Cannabis indica
gctttccaaacgcgcccttaataaatttacatcatgaattaccatttttcctagaacctccaagccatgaacaactgcctccaactcgccctggagaatagacttcaccgaaactttcaaaacacacaaagccattataccaccatagctatcccacaccacaattcccacaacgtcaattccttgtttgtttgcataatcaacattcactcatatttttccaagcctaggaaggaagaccccgaaacctcttggacttgtctcacctcctgttgactgccaagaaagacttccaatggcaataaaaccttcaaaaatcttcgacttcttctcttgaaaggccacctccctccattgtaattagtattcctaaagaaccaaagcttatggtatctaataacaacaaacaaagcaaattctgcctaatcaaacgaaatatcataaccctgagaattaagaggattaaaaattcaatttaccatctccccaccagagtggaaaggaatttcgtcaatacgaatgcaccatccacttgtgaaccatgagcattttgtcaccgaacaaagagagaagaagtggatagaagaatcactctcatccataccacacaaagagcaatcaccaatatggttaccaaagatactcaacaaccaagacccaaaaggaaggcaatccttgagtaacttctaaagaaagagctttaaatgcccatgaagatccgatccccatagcaactaatattatcatggataaacgatctctattcatgtgtaaataggaagctttaagagagaagaagaagactgccaaaccaatttatcatcatcaaggaagagggatccattggtagacaaaataatttgagccgcttcaggtatgaagagtctcttgaccaagtctttattccagtcggtgccatcatttaacactgaatcctccacatccaaattatcctcaatccaaggattacaatctggtggtttgataagtcgcccatcagagcaagaccaggagaaattcaacaccttaaccttagagttcttccattcccaatgatccacgtgctattatcctaggtaaaatttattgtcttccaaattcctttaaccacaaaggaagcatagcacgagagtttattatcctagaagctcaatttggagcagtacttaaccttaattatatgcaccgaaagcgcatcatatttttagcaataaaccagccaagctttgacagaaggcaaaaattaatatcatgaaaacttcagattcctaaacctccacaacttttaggcttacatgtagcttcccaacttaagcatagcacgagagtttattattctagaagctcaatttggagcagtatttatccttaattatatgcacccaaagtgttggaagttattttacgaggaacttagatctactcacaagtatgttgatttaacaacctaaatatgaacttttaaacgatagaaaattaaacacataagagtatcagaaa

SEQ ID NO: 256256 - DNA, 1487 bp, Cannabis indica
ttatgatcgtaatttttttgggggggttggttagcgaattgggttctgtttggttcgtgagaaaacgtgggaaaatgaagatgttgaatgaaatttgaaaatttgaaatctttgtattgtttttttgtattaggcttcggctaagcggttcagggtgactggtagagggaaaatagttcggaggggagctggaaaacaacatttactttacaagaagaacaataagaggaaattaagactctccaaaatggtaggattccttaaatttccatctctctctatatatatgtatttatataatgtatgtatatgttctgtgacatggtgatagatatagatagtgttaccataatgatggggtttcaaaaagacatatcctttttcattgatttgctactgataagaaagccttaatggctctggttttgaattgttatgctaattagaactgaaagaaaataacttaatacttatgtgtttcttgaagctatggaagaggactaatattatggcctcttcttagagaaggattatataatatatgggtcttcttctcaatagctgcacattaaaactaagattcattactcaacgtgtaaagtgtttcaactcaatcaagggttttcattaaaatacaccgaatcctatcagaacactctcctcgagagtagtatgaagatgggtgacctcttggaaagtcctcttgtcgcgcccctaaaacttttccataacaggattttggtaatcggataggataagagcttctttgagggagcagggtcatccaccaagtaattggaggaaaaagatcttcctttcattttttttaagtttcatgattatggtcatctaccatatctatgaatgagatttattggtactgtcttcagcaaattatgatatcttattcagctggactctcattatgctattgagtgaaatgaacctgcatgtttacataaacaactatatgtatatatgtatatacatttgatcttttctactttcttgtttacttatctcattcattgttttggttcttgtctttaacagcatccagtctgcaaaagtgactatgacaatgtgattaaagccttgccatatctgaaagttaacagaaatgccaagtagaggttttgcttaagatggaaagcagaagcttattagatttgtaaacttgccattttttttccctttttgaaattgcaagtagaggtttttgtagatactttcttgattgtttcattttcccaatcaatgatactttgatttcaccccacatgggatttccttttaatccatcttgctttcattcttctattatttttctactaaaatttctccctcttaaattaagggggtttaatgtaaatcattttactatattttatttaaaacttaattattttaacatataattagttaaaaaaatgaaaagggacatggctataagctctaattgccttttagaataaaaagcctaaacg

SEQ ID NO: 256257 - DNA, 2116 bp, Cannabis indica
atttctctctatttttctcacttttgatactaacaaaactttcttttcttttacatgaacactctaggaggagctcacatggagatgacaactctcagccaaaaaggctctctttctctctgtgttgaatctgattttgttttctttgctctgtatatttacttctgttgttgtatctcttattttgtatctgagaaaaataactccttttatactgatctgtgattctgatctagggcagagccctagagtaatatttgtaactgattttgtaactgctttagttgtaactgtctttgtaactgtctttatgtctttagtcttgatctttgttgtatctgatgtaagggtatatttttcaaaccctgtgagtggtattattcaacttaagggtaaataagtgaatctgtaacaacagtatggttgttaaaattcttacctccaaaacactcaaacccgaatgggttggtaatgctataaaggaagcttgaatagctcgctttccatcaattgtctttgattatcattctagacttaatctggtgtgttttgggtgtgaaggtgatcggaggggggttgttgaggaacaaccatgacattttgaccgctctctaatgctctttgctattcttaatggttttgacaccatcctttcaagccaactcaagtatatccctctttggatgcaagtgcattatataccctttggaactaggtcttataatctagccccgtttgtggctgatgctataggtgaccttattgaagtgcacatttcttctctttataactccataacccctttcatgagaatcaaggttctccttgacaccactaagcctctccatagaggcatgaatgttcattttagaaagttttcaataagtggctcaaatttttgtatgaggggatctagaactattgttaccactgtagtaagctcgatcacacttataattaatgtgtgaaaaagtccttcagtcagtgcttatcccctttccttgagttacaaagattccctgagggctcctgctaaatctgtttacaaaaaaacgcatatttgaactgtccaacactctattcctttcgaggagcaccccacactttccaatacttccagtcagtgccttcaagaacttgatgatcagtttttagtccctagcatagttaatacagaactttggttcttctactggttgttctcttacacttgtctcggcaggtacctttatccaaatgtctagcttacatgtagtctcttgtgaccctgttatgagctctcttacttgttccattatctccaatcctgttatggttttgactgttatcactgtcacctctaagggtaaaggccttatgtatcctgaggtgtctaggggtcgtctctggtttcaccccctccccagaccagggcaactctaggaactaagtctgggacaaagaggtctttgactagacaaagctgcaagtgggttcttctattagaggcatgctgaaaagagcttgatcttccaactttgagtttgttgtggttgttggggattattttacaaggatttagatttaccaacatgtatgttatttaacatcctaaatatgatttttttaaaacaatgaaattaaacacatataaagttaaaaaaaccttacaggcaacagaataatatgactcattccactcagatctctaattcttgttcttttctgttgcagagtattatcaagatttaagctcgattctccttcaagtgttgaattcttcacagtcttacacactatgattgagtatttgacttgctatgggtgggcatgtactcttctttcactataaggctcgaaaataatgaagaagaagatagggagattcgaattctatagaagaaggttctcaagtctctagttgtctaacaaagaatgaaaactagaatgacttaggttatgttggatagaatgaaaactatcttattccttatataagatttctcttaggattatatttaaattatatggcattaaaaattgataaataatggctaaatataccttaagtggccggtcatttaatgtgggtctcacttaggggtgttcataaaaaccgaaaaaccgaaaccgacca

SEQ ID NO: 256258 - DNA, 1783 bp, Cannabis indica
catagtgagctgagagctttgtatccaagatagtggtgtttggtgtgctcgagtagagtactgagagagctttctttctgtaatgtctctagtctaggtgtacacaactgatcattggtgattgtaaccatcttaagcaagagtggactccttgtggggagagctggaggtaggccctttggtttggccgaactaggataaactcttgactcttttattttactgttttgaaccataattgttcatcgatctttatatgtttgatcatttgatccttgatcttctgttgagtgagttttgtgttgcgagtttacagcagcactcaacacacccgtcactaaaattttgaaactcttccaattataacctcttgaatagttagaatcttctatctctatttcatgttcaatggttccaatcactccccattacttgtcctcacgagttcacaatttttcaaattgattaaaagagcaaatttccaaactatgggataaccaacaaaatgaaacaagatttagtttggccaagattgctattactgaattctagtgttgggattctaatagctaaaagaaatcaggagtagagctcaccacaactgatagttcttggagttgctcttggcaatagcatcagtgaaacccaattcagtttgtaaatcaacgttgagagcctcaagaattagacgcctgaattgccatatctgcaaacaaaaaagaaaaaaaccaacttgagtttccgtgagagagttgggaaaccaaacacagtggaaagaaacaataaaaaagaaggaacacgaacagtgtagttgccggggttaagtaagatggcttcagtggtgagacgtagggctcgaggggagcgctcatcggcatggaagagggctcgaaaatagtccatggtctcagtgaactggtccttgtaggttataggaacgattgggtttggaccgtcgtcttgagggatgggagtgacgtcggacaactctggtcgctgcctcagagggatccatggctgcttctcttcgtcggaatccatctctactcaaacaatctgcagatctaagcctacttacgtttattccttttccttttctaagcggacccccatattattatgtttactattttttttaggaaaatttttgaaaaatacttttttttaaagaaaattttataatgcatctcttaaaatggaaactcttaaaatggaaacactgatacatctctattaattttagtatccgaaataatttttagtcaaatttttcttattaaagacatcctgcaaaattttaagaaatttagaaattctcttgaatgctgaaacaagtagagggtgcatcagtacatctcttttaagggggtgcattatagaatcacccttttattattgttttatttacaattttggaaaattctataatatacgccgacaggtttacttcagcctttgatgatacctgagtggaagtgagaagacattatcatggactttgtagtagggttacctagactactgggttatatgattccatatgggtgatattggatagattcaccaagtcaacacactttttacatgtacgagtgacttatactgtggaccggtatgccgaattgtacattaaggaaatagtgagactccatggtgccctaaaatcaattgtttcatatcgtgatcctaaatttacttccaagttctgggagagtttacagattgccatgggaaacaagttgagattctatacaacttttcaccctcagacggatggtcagtc

SEQ ID NO: 256259 - DNA, 1418 bp, Cannabis indica
ttttatttttaataataaatcattttatttttaatatgaataaaaagtctcccacgaatttctcataaaccaagaattcgattatataagcacactttatatagaatagatatatatgtgatcatgctctttacagggaaagtgagaaatacataatttgtttgacaatatctcggatcaaaagtagttattgttgttgcgaagactgctcataattagtgtgtgatcacaagaagaacatcagtatctcttgtcaaattatccattgttcgcgaccacattgcctccttcctgctcctcgcaaatgctgttctctacttataatgagtaacatctattctataatcaatcaactaaaaatggggattactcttacaactatgggaatgtatgagactactcttattacattgtttcatgaatcatgatgagagcataatcatcattacttctttaaaatcctacaactagtgtactaggaaggaccaaaatcaactacaaaactcaacgaaagaaagtactaagtaggcacaaaaacaaggctcaacatcactccacaaaatattattattagtaatatatatcaaaagtcaataaataaatcaaatatatctaacatgtgtataaatagaatagataaccatatttaaaatgtctgaaagagatctcaatggactgtaaatgatattatagatgagagaaaacatcctcagcagaccacaagagagccaaattttatctatctgaatatgaaacggatcgattatatacgttctctcactcgagctttcttctaagcaggcctttgaagaagtcaaaactatacatacatgcacaataaaagcaaagcagtggtgagaattttcctaaagagtccatatattacatcattgagattatatagtatttgtgtacctattcccatcaggatgaagttcacacatttgattgtcatcaccaacagctaacaaatatcctgaagaggtcaacccctacaaaacagaaacaaatatatatatataaaaactcaatactcaaagtaatatactttgataaggagaatgttagaagtgtacctgaattgtgactacgttttctaccactacgtcttcattcttttcctgtacaataaccctctgcccgctgcataatcaatacgaaatcatttgcttcaaaaagcacaaaataagctatttcggaaaggaaaaagaaagaagctgatgacacatctttacaacaaactactcggttttgctttaaaatcttcagtttatgcagaccacatgaaataagatagtgaaatgcaaaaacttgagccagagttctattttcgaactaagatttactaccagcataagcagaatttctcatctttcctatgcctacacttgttattctccaagaaaaagaaaaaaaga

SEQ ID NO: 256260 - DNA, 1176 bp, Cannabis indica
aaattttcatccacattaagcttctgtgagtaaaattagataaaaattcttgaatccagcaaatctacaatagttttaaaaaaaaaattttaataagctctgaaaaaatttacaagaaaaacataatttagtacatattaaaattaagaaagtaaaaatcataattagacttacaggtcaaatttagtattattattatgcatactcttttaaaaattggaaaagagtattacttacaagttgtctcatgttgatacacaaccaactgtgctttattcatagccttatttcatatgtttatggctttatgaaaaggcatacaatcataagtacatttagaatcatggcaatacaaaatcaaagaaggaaaccacaagtacttgaaaaacaccagaggctgctaactaactcgttcgagactttgacgccatgtcctccaacttctgttcagaaataacttaaaaaatgttagccatgatctaaatgaagagcatgagcatattcataattcattgccttgatctgatatggcacagactacagaaaatgaagaagaatatcccagaagaaagaaatcatatcatataataagttttaactttcaggtcatcatgttttcttttgaaagtttttattaactttctaggccaaatctatgtggctcatcaacaaatgtgatacacatttcacaatatgccaaagaaaattaaacaactaatttacaggtcaactttcaacaaaagaggctctattgtcatgtcagattatgtagcaagctatccaagctagttcaaaaatccaaagcaagagatagactcttgtttaaacatttaagggcatggacattctcaataaaaactaaaggtctctgcattgttaagtacttaggctaaggcaatttaatataagaatattgcagggcaaactatgaagataccgacctgctcggtgtaaggcaaatactttccatccattgtcacaacaacacggtcctttccatcgacacctttcactttgtcaaccgagcagtagaagtctatagctgacatgctaaaacattcaaacagtaaacaatgtgaaagatgaagttaacactgaattgctcgaataaactatattttacaggccgaacacacattaaaaaagagattttgtgttgtactgtatattaaggtt

SEQ ID NO: 256261 - DNA, 2355 bp, Cannabis indica
aactacttggattctctcatttacttgccttatggtatctggtactaatataatgggtgcatcatttctgaagcttcacttcatgcctagagatgggagcatgaagaatttccatagattcatatttttgtgcatatctttgatatagcattgcttaaaatttgtgtgcatctttcaggaaaaatactgttggtcagtatgaaagccacgcctccttcactcttcctgggctctatcgagttgttcatggcattgatgtttttgatccaaagttcaatattgtttcacctggagcagacatgtcaatttattttccctactctgaaaagggaaaaagacttacagcgttccacgataccatagaaaagctgttgtatgatccagagcagaatgatgagcatgtgtaagtattcaattgttttcaaagttgcttagactgttttaaaactttctatataggagtatttgatctgtgatgtgtaacctgtgaactaatcatttgacatgaagtttaaaagattgcagcaccaatgcagtttaaattatgttatacttcagttctgtgaacataactatgattaagagttatcattgtttgttcctacaaacctagttaagagaattactttttttattaattttgatgtagtggcatgttggatgaccgatcaaagcccatagtgttctccatggcaagacttgacagggtgaagaacatttcaggattggttgagctatatgctaagaatgagaaactgagggaactggtgaaccttgttgtagtagctggctatattgatgtgaagaagtcaagcgatagagaagaaatctctgaaattgagaagatgcacgaactatttaaaagctacaacttgcatggtcaagttcgatggatagcagctcagaccaatcgtgctcgtaatggagagctatatcgttacatagctgacacaaaaggtgtttttgtccaggtacacagcgcttgtagactcttttcaatagatattttataaattatgtcatttagtaatacccaatttactaccattttttttttcagcctgcattctatgaagcttttgggctcacagttgttgaggctatgacatgtggtcttccaacttttgctacttgccatggaggtcctgcggagattattgagcatggtatatctggtttccacattgacccttaccaccctgatcaggctgcttcacttctggtggatttctttctacgagtcaaggaggatattagcaactggaacaaaatttcagacgggggattgcaaagaatttatgacaggttaatgttcaatgcattttaatgatattaatgttataaaaaccttgttgttgctatatttcactgacctggattttggaaatatttaggtacacttggaagatttattctgaaaggcttatgactctagctggtgtttatggtttctggaagtatgtttcgaagctggacaggcgtgagacccgtcgttatcttgaaatgttctacattctcaagttccgtgatctggtaagttgtatgctatgaaactagttcatcatcatactgtaaaataaaatcatgtggagtctcattacagtaattttgaatttcttatatatttcaggcaaaatctgttcccatgataagtgatgaagcgcattaaggtaatgaagctatggtgagctttttagtccacgaatatatgtgatttcatacaaaaatggtgatgtaaataaataaagcttttgatcatgtgtgtcttaaacatgaaactaatccctgttgtatgtgtgtcagagctttgactctcatggaagatggaacccttgtaatgtttaattaatataacctttcttttctttgggtgcgatgatagggtgggttaataagtaataatcatatattatattctgttgaatgtgtccttaaaaattaaaatcattccaataagttcaacttgcttaatactttacacccgttggattcgagaaatttgttgggctccacttgatctgttatgtatgtatacagcagctacagtactaaaactcttttcattttccttttgtttattcaacatctatgagtaagccttcatctaaagctgtatgttctgagtcttctgacaaatctgacaaggctgctgtgaacttacatagtgcagctttttttgaccctatgaatgaattataaacaaccccaatattctagtgttcacatgctcttcctcaaatcttctttatctcccttgatcccttcctacatctaatcatttcaatggtcgaatactcggttaacgaccgaatgtctaattgacttgctctattgtggataatttattctctcttt

SEQ ID NO: 256262 - DNA, 3456 bp, Cannabis indica
aaaaaaatacttgtatagatagtgatgttatatgtatttgtatacttgacgttattatattttagtttcggctagctttaagtataaattctcataatcaacagattattttgaaaaaatgaacgaattacaaacctatagaacatatttgcaataattactataattcggagaatttgtctatctgagcacaaaactttacaatgtcataatttgagtaataaaaatcctatttaataataataataaataaaatggtttagttaagtatgggaaaataggttatattatatgatgaatttaggtttggtgacagttaggttgatctaatattgaatttggttaattttgtactttctgttttgcctgatcttattccactatacttctgggtgtggtcctgagttagtcatcatgaccacgtgtatgggggtgttttgtcattttttttctgtaaatgtctatcagaaatataattattatgaaccttgatcatggctcttctccatggatctgaatcaaagcttgtggagacaattatactgacagggtgttatctgtatatatgtatatgttgtgttgtgttgagttgattatactcagaaattgcagtgaaacattttggtatagtaaactctctaacttagcaagatctctttccatatataatataaccttgtactcaatatatagtactaatatatattgatgagttgtattattgtattgttcatacatgattaaccctaatgattaattattcaactactagtcatgtgtagtaatatgaaagctacataaatcaatcatcattgcttatgatatatgtatatgtatgtgtgtgtgtgtggcctttatctaagattatatataagtcaattttattacaaccaattacgcgtaattccattattatcatatcatctaataaagctgttcttttgcaaaatgtcaacattaattagctaaaattgacatttatcactgtggccagatcctgatgattagtgggtctctttcaagtgtttttgataaatacgttacaatatataatatattattattggctaaaaataaagcatgttctcatttccatcaatgtcacaaaatatgttatagtttagtacaacatcagttaccaaatgtaggaaagaaaagagaagaaattaagtgtcagttttcattttccaggggtaaagtttgtggcaaatgcccaagcattgttgttaacagggtcagccaagtgatcagccaagttctctataggaccttttccagtaacaatggcttgaacaaagaaaccaaacattgagaacatagccaatctcccattcttgagttccttcactttcagctcagcaaaagcctctgggtcctcagcaaggcccaatgggtcaaagctcccacctgggtacaatgggtctgtcacctcaccaagtggcccacctccaattctgtacccttcaactgctcccattaagatcacttgtgtggcccaaattgctaaaatgctttgagcatggaccaagttagggtttcccaaatagtccagcccaccatcgctgaatatttgagacccggccttgaaccatactgcctcaccgaacttgaccccattgcgggccaagagttcggggaagacacagcccaaggccccgagcatggcccaccgtgagtggatgacctccagctcacggttcttggcgaaggtttcgggatcagctgaaagcccagctgtatcccaaccataatcgccagggaattctccggtgaggtaagatggagcttcacctgagaatgggcccaagtacttggcgcggtctgggccgtaccatgggcttgaagatgaaactttcttgggtttagctgcggcctttctcatggtggttcggctctcacccatgagtttagatggggaaggagcaagcctcacagcttggcctgcaaaagatggagaggagagagccattgttgaagaagccattatgaaagagaattttcaatggagaagagactttgttctccttggaatgatatgagtttgtaatactatcagtgtctttagttatagtgtatatatagtttatttattttatcctttgaatatctttatctctactctcattcgtattaatgaattgtttgattatcttttcatttttttaataacaaagattgtctttgttgatttcccaaactctagaggtttagctgtagccaatacaatttatccacgtgtcctcaggagatgacaatatcatctcttgagcttatgagttaaagatgtaaaagataaggaaagagatatcaataggattctttgagataccctttttgtttccttttctgtttttggttacacttgttctacaccacacaacaccaatataccatttatttattagaggacaatataaactaactaaattttaacagcaaaagctgtgaggattcttcgatattgttcactggcattaatccatttttcttccacaccagcaaaagcttagcttgtaaatttaatttcttaaaatccatcttctttttttcacctttcattcatagagtctaagcttaacttaactgagctctccatgaaataaatatatgaaagttgaaagcctactcaaaaatggctcttgttaattgttatattattattaactcaggacaagccaaaagaggccactaaacactttctttttgcttaaatggaaatgaaacagagccatctagttacactctttctaaaactctaagaagggaatctgatttcatggtggtaaataacaaagccaaatcaagaactctttactaacctacaagacatctatcatcacaaataattgaaatttcagcatatgaaagttaaaactcagttaataataatatacttaattacctacactacagctccatttctaatcagatactgataaagccaccaaacaagattcaacagcagcatcatccaggattactgtaaattctgtacaaaaatacacataataatgtcagtactaaacatggcacattatatagaattcaacaaatcaatgaactacaatctagagctccatgcagaagtaactaagagcaatgtaccattgaaattcaagaggttccattcatcaattcttgcaaagtggatgatttaaatattcgaagaagcaaagctttttctttctttcccaacttgtgtgcaccgtagcgcctaatgacaccgagcttgagtgcttctctgccttcttccacaaccttttttctcacatccattagtaaacctgtcccttcacaaccattgtccttctcctcttcatttccacctttctcttcccttgttgatactgcaccagtggattgaactttggcgagttcttgagatccagctccatctttggagttagagatggcttcatgtccatcaggaaagctagttcctccccaccatttata

SEQ ID NO: 256263 - DNA, 1421 bp, Cannabis indica
ttttttaaaaaaaatcaatattaatatattaatggtttcaataaaagtgattttttcgctaaaaaaaatattaatacaggactttaatatataatttttaattactatatttctattaattactttttaagatatttaatttaattctgcctgttagcacatgaaaatactagtgtgttagagcttaattataaaaattgtgaaatataacatttatttatatctacccattttaaaagttctaaataatttgatcgtgtataataaaaagtaagtatacataaattgtttgaacttaattttgacatcaaaattatttttaaattttctaaaatgaaaaagaaaagtactgtttttcaataaaagaaaatgaaagaaaatataccataagaatggataaggatgaacacatggattggtggagccatctaaataatatcttctgcatcgagatcttaatgatcagcgaagactcatacttaaatatattaaaagttactttgagttttgtctaattcaaagactcagaaaaattaaaagctgtgtccaattattctccttagtaggtggggtcacaactcacagtgagatggataacataattttggaaaacgacacatggacttcattttcaatttagtcttatttttctcttattggataagctttttattttttttacaagtttgaataaatatttgattttttttataatattaggtaaatattattttggatcttatatttaataaaaattattaattgaatttttttactaaataacaaatagattttatatttttcaaaattatataaataggtacttgaattaattttttgtcaaaataaaacttaataataatccgatctagagatattatgataaaactggttacattgtctatatctatttgtgttaaaaattaccttatagttgattatattaaaaaaataaaattattgaaaaattgagctcaaggtcctatttttaccattttggaaaatataaggtctattttattgtttaacaaaatagagggtaaaatgagtaacttttgtaaaacacaaggtccaaaaatggtatttacccaaaaacttgaattctacagtacactgtttaaagaactattctggtagatttctaatttatttcgaaacactttatagtcaaaccttttttatgatgataaatattataattatttaaaattttatttttaaatttttaaaaaaaagttgagtaatttacaataaaaaataaaatttacatacttgttgcacacaatatttatttttatatgtgtagtaagtaattgattaaatttaatttttagtactgtaaactatttagaattttctaaaaatttacaaatagtcctaaatcagtataacgtagacgattataaaaaaaattaaactaa

SEQ ID NO: 256264 - DNA, 4008 bp, Cannabis indica
tttgcttgaataagtaagagccaatttggaaacattttcaatgtccttgttagtctagttctgcagtgcaatagtgttgaaattttaaagaattacttccttcttctcccttgttagttattatgagcttgcatatgcagctagtgcagctttcatcattcttggtttaatttagaataattaccaatttaccatcactgaattacaaatgttttggttggtattatatagcctcgagaaaactttattcacttacccagaaaatgaaatacactccccaactttggctccttctggaggctgtaaaggctctacaatggtgtgatcatcattagaagcacataatacctgcaagcatgagttgaaaccaatctcgtaactatgcatttacttgtagaaaaaaaaacaacaatttagcggtttttaccatattctgagcaaaatatatttgaagctacaaaactttggaaaagtaaaaatgaagtataaataaagaagtgcaaaatatggtaagacaaaccaaacaatacaataaaaatttgaaaaagatgtataaaataccaatccttctgacatcacatcacgcagcttcccaggtttaacatttgtaataagcacaaccaggcgattctgcaaacaccagaaagtcaaatgagaagtattagccttatgattcacatactgagcagttgacataaaataaactagaaattggttgaaaagaaaattttcaagtagttttgatgagaagaagacaataagacgtactgttaattgttctggagtgcaaaactttgctaaaccactgaccacttgccgcaacttaccttctccgacatctatctcctctaccagtaaactaaatttacacagacaaagagttgtagaataagttcaaaattttgcaaactacatactttacaggaaaaaagaaaaggaataattggttttgcctccgctggtaatgtgatacaattaagacactgatggacatccaaaggaggtaaggtgggaaaatatatattagataaagtgaacgggcacattggtaattgttgtgagaagtgctaaagggcacccatggtgcctagcaccttgtgaggtataatatcactattggtgtaactcaatatcgagtcccacttattttactttaataaatattataaaaaatcactaatcaattatagagcgacacttcatcatggtactaggcaccatgagtgcctcataacatgctcttttggtttggatagtgctaaataaggatataaatatatatatatatatatatggaggaggaaattaggaaagggtatgattgagttttcagagctaatgctccttggaagagtgccatgacttgaatttttgtctggttactgtaatcattttggcgttcagtaatataatatctattttggaactgttctcggttttatcatacacttcaatatttcaagcaatcatgataggcttttgagtagtaactgtcaaaagttaacaaggagaagtaaaaaaaatcgacatacctatcagcggacggatgtttccatgctttagaaatcagaccaacttttatattcaacaaactaacactgacttctttgtctttctcaactgtttccgcctcaggtgcttttttcttctccttggaagcttccttatttcctgttgccttcttctgtttatgttaatatcccaaaagaatattagcaaaagagtataatacaattatcagattttaataataaatactaacactacttccattcggtgatacaactactttcatttcctgctgctattttctaattcgagttctataacattttagaggaaagcagcacgatgataaaaaaaatgcacaaagatagcaattgaaatctaatgggcattatttacagaaacacattttatatatacattaaggacaagacaaaccaatctgataaaacagtcaaattatcaacaacatcacacacaaatgaaagtgctaaaaaaaactgttttcctcctaaatatttaaactgaagagaaacaaatcatgaaatgttatccagattaaatctttaaagctaatataagttttccaagttactatcaacactccagtgctagtatattagagaaccatatggtgcatactttttcattaaagtatcacacatatgaattttatatttagctctaacaagtcccagattttaaaagtaacataggaaatgcatccaatcaaccctttacttaatatcttaaatcctcaaatgtagccataagttactctacaagatttttcttgcaccttttttttccatttcatttgctaaacattttgtacaaattaaacgaacttaaatagcttctgttggtaccaagccagaagttttgacttttacaaaataatcttctgaaagacatttaccgcattatcacttttctttgctttaggatcttcacttttctttgttttcacttcagcttctggcttatctgcaactttagggctttctgcaacttttttggcacctgattctacttccaccttgtcagcagccttggttccctgtaagtgcaactgtgaaactaatattaatacacacatatacatatatattaaaaatgaaagtgaggatgatgggttgcttgctaagtgggacacaattttgctcaagggatatatcctttttgtaggaaagaaaaaatgaaaaaggttctttcttgcacagtcatcatgacaaagtttagttcatttcacttccaactttcaaaattcataataataatcacactaaactcacatgagttcatatgcacaatacaatcctcaactgttctgcagtataaaaatatataggctatgaaaatgaagatcaataagtcaatgcttacgcacatgaggctcaaatggggtcttctcatgcagaatcttcttgaatacattccccaaatccaccttgctctgaaggaaagtgaaagaagaaaacaaatagcattgagtttatgaattgttaatacccaatgcattactagaaatgaatactaaacacaaaagtgtaaacactagaagtaactaaaacaaacaggtgaaacatgagatcaaattaagaatagtacgtacagagaaaaccaacactacaaaacttaattttatatgccccatatagtgatcagaatgtgacctacttggatgtaatctatccatctcataagatgtggcaacttttctttatctgatttcgaaagctcaatctgtcaaaaaagttacaatcaaagtcaaaaacatttaagtaacgcttatgcatcttagcaactacttaataatatgcataccacagaagaatgtatcactgaaaaaaacaataacatcagcttcagagggtttcaatccatttcccaaaagcacagattttagaaccaggtcttcatttaatccttggagaacttcaaagcaagcactggattctgtagggaaactctccgcaaatgctatccactttgtcatctaaaatcagaaattgaacgatacataatgattaacctaacaaaaatattacgttcaatgcaacaataaaagggtgattaatgcaacaaagatttcatataacctggtcattgttttcagtaggcctctcattttttgatgatttcaagatattgtacatgctcttgatatcattttcgacaacatcgcttgaaaattgattctgcagagacatattgaaagttgatcaactatatgccaaaaacaaggtgaaacgtaaagttgtaactgtccattgtacatttcacggtataaacatgctgcacctataccattacacggccatttgaagttaacatttactttgtgaaagtgaaacaatggtacactgtaactgaaaagcaaaacctgttgacaaacagacttaatccaatttaatgtacacacacacatataaccttgccaacattttaaacttgaataatatgatactagaaattgcccatttcattgacacgcatgaa

SEQ ID NO: 256265 - DNA, 2901 bp, Cannabis indica
aaaataacttccttatagcatagttgtaatacactaagtcctataccttatatatcttttaaataataaaatttataattaggagttcctcacttggattagaagtcaacttatatagggtggataccactgagaagcacgtgtgagattcaagttcaaagtttggggtcgactaattagctagcgaaccgggctcttttattaatattaaattctgtactcatcatctcatgaataaaagataattttctatggctgtatgagttgtgaacttgtgaggcagatctaaaaaccacagtgattcttgaaatgttgtttaattaatttggtattaaatatttgtagtactgctatatggaaaagaatatataggtagttaggatccaatccacaccatacaattaaaattaatcaagtatagtagcttctcgatggggtcctacgtacctcacattatgtgtgcctattagaacttagaagcatctagttttatatatatgaatagatatataacgatatggtacatcattatttaaagtttagaaaagaaataagaaagcaattaattaagtaggacaagatattttgtataatcatataccgcgggctctggcaattcttgttttaactatttaccaaaagttaccgttaattaagtgcagcaaaatgtaaggtagatcctgccataaaaccattaattagttaagtcttttattattttttttcgcaagtgtctttttgtttgtttgtaaagactaatcgaatattgttggggccaagaaataaaatgaaaaagataaggtgaaaattgacgtacaaaaatttggatgaatatcaatttgtcatgaacaaagtgtaaaatatataaatatatacattataatataattatattcttaattgactttcctactcaaaatttttttacttaccaaaatgcaaaaatgtgtttttcttttcgggtccaaaatacaatttttaattaagcacatatatatatatatatacatatgtttttcaataatagaataaaggtaatagaaaatttaaaaatcatgataattgactagtttaatatataatcttttttaaattttcttccttgcctattatccatcaatttaattcatcattcttcaaaggtcataataactaccatttattggatattatgcctgttatacaaaaatgaatttatattatttattgtttttttttttgtcaaactactaataaaaatcatggtcgctcgttttatcaaatatagtcttatttgtcgactcaatagttaaaaaaaacaaacctatattgccaccattaagttttttttcttgttgaacttagctgctctcccatttgtagaaattaataaacaaattaaaacattaaaaaaaatacgaagaagaagaagaattcacaatcagattcaaattaagaaggaaaaaaaaatataaaagaatacaaaacgacaatgaatttagatacaaatatatgccaaatttcacgcgaaggtgcgatacaaaagaagtgtgtgatatcttcttatctttttctcaagttaataaactgatcatcatcgatcgattatctcttcaaaaaagaacagccatgcaagcaatacccatcccaacaaacaatcccaaccctacacgtgtattactcgaatccccagtactatcatcggacgatggtccggatgccttaggcttggtcttatctccgtcgtccttggatgccggagtcttggccggaggaggagcagaggccggtggcttagctccaaaaagacttggtggcaacaaaacatcgtcgatctggtaaacagccaatggagattgcatcctcagagcattgttgacctgagtctccaccattccactggtgacgttgacttggcggccttgaccggtgaagttaaggccatcagcagagaactgagttctgacggggttggatacggtgaggagttctgatagggcgtagtacttggggagaacgtggaagaggattaagttaacttggtcttcacgggagaggccgtttagggttccggccttgaggttgttgaaggcattgtcggttggggctaagacggttagtccttcggaggaggtgttgagttggtttacgatttggcttaatacttggctgtcggagagaaggcggaggaaggtggtgtattggccacctttttcgaggattgcggtgaagtttagggggccggccggggcggggcccggggcttgggctgaaatttggtgggaaaaaatggtgatgagagtcaggaggaggatagagagaggtgtgaaagccatgagtgatgagctagctttctggtagtagctttggtatgagagtgatttgtttttgtggtgtgttattgggtgtgaagggtggggttttatgggataagggtgtgtcttcagcggaaccttccttgttggaattatgagctggctaattatatgtatatatattaaaaataatatatttgtattggaaaagaattctaatgggatatatactgatgatgatttaatgtttttgaaattgttatttatgaacaaaattaatgaattaatggggatgcattgatcgtatggtagattccttttggtgaatagaatatatatacaaattgttaccaatagatctcaattactataacaaatttaggtcgagattggtgacaatcatgcattattatttggaattaattattaaatcagcattgtgattgagcatcaatagtgccaacactttttataggtggcactttacgattggttagcgatattttttaaaatctttttatttaagttatatgtaatgagatacttaattacactaataacgataaaacatcgagtaaggtgcgagacaccaaattctcttattaaa

SEQ ID NO: 256266 - DNA, 2752 bp, Cannabis indica
gcacagtaattgaaaaagcactgtagcatgccttagcattggcgttacagggggagatgccaaaacttcgatatccattctgcttcttagaagtgtggacatctagcccggagtgtgagaatgtaatcaatgatgcgtggagcagaggtgagtacttactgggtaaactcacaaggaccaaatgcgagttgaaaagatggaaccaagaggtttttggattctgtgatagaagattggtggaattgagacgtcaattgacagagattaaaaatgctggtatctcacatagcagtatccagagggaggctgatgtgcaattggaaattgttgaaatggagggaagaatggaccggatttggagacagtaatcccgtgaaaattggattcgttttggtgatgcaaattctaagttctttcattcttcaaccatcatcaagcgtcgtcggaattcaatcaactgtgttgaggacgctactgggatttggttgagtgagagaggtgaaattggaaattatttcaaccaacagttcaaaattttatttgaatcatcgggctgtagcattgatgataagttttcctctctttttggagatagagtttcggaagctgaaaacgaagctataggcagaattcctgaagtcgaagaaattaaggatgtggtgtttaaaattcatccgctcaaggcgcctggtctgaatggtttcccgggaatcttttatcgtaaatactggcatattgttggccctcagctctgcgagatggtcaaaggcttttttgaaactggggtcttgaacaaaaagatcaaccattcgttcatatgtctcattccaaagacttcgcaggctaccaggttcgatcattttcgccccattagtttgtgcaacttcagttacaaggttatttctggtattttaacagaccgtctgaagagagtgttagatcggttgatatcgccttaccaatcagcctttatgccgaggcgttggattgctgaagcttcaatccttgcccaagaagtgatgcattcgattagatcgaagaaagggaaggttggggcgatggcgatcaagacagacatgagtaaagcctacgatcgcttggaatgggatttcattcgtcatgtcctcgaagcaaatgggtttaacgataaagtgtgtaatctggtaatgcagtgtatcactacggtcagcttttccgtgttacttaatggggctcctctagctcccttcaatcctaaaaggggtgttcgacaaggcgatccgctctccccatttattttcattttgtgcaccgaggtgctatccaaactcattatcagagccgagagcaatggtcaaatttctggggtgcgtattgctagatattcgatcccaatttctcacctactgtatgcagatgactctatatttttttgtaatgccactgttgccaattcggataacttgatgaaatgtatcagtatttatgagggctggtctggtcagatggtaaacaaacagaaaaagtggtttggttttttctcctaatactgctagatcttgccgcgaggagattaaacaaagattgggcatcaattgtttgaattcaagtgagaaatatctgggaaatccgttctttttctctgctagtaaacgacgtgattatagttttctgaaggaaaattttttgaacaagttggaaggatggaaagcgagacacttggctcaagcggggaggtctgttttggttagttctgtattacaatctatcccaaattactttatgtcaacctctcttttgccaaaaactttctatggtgagcttgacaagatccttgctagattttggtggaaaggtaactttgagaagtcaagatactgtgctttaaagaactggaatgagctttttcagcctaagaagtgtgggggattgggttttagaagaatggcggatgtgaatgttgctcttcttgccaagttgttttggatggttctaaaaggggaggataaactgtgggtccgggttcttactgataaatattgcaggctgctatctccctggtcagtggaaaagaaagaggttgattcgcggggttggaagagtatactggctacgcgccaaatctgtctagaaggtgctggtttgattgttgcggatggaagtaacgagatttgggataggccgtgggtgccccataggaggatggaggagttgaaatcggggtttaatttgagtcgtaaccaagcctgctagcaaatcaaggatttatttgttagaggaaggcgtgtttggaatgaacatttgatcaaagagtgctttaatcctactagtgctgaagagatccttcggattaaaccccttcctgaaggggctgatgttttgttttggaaagcctcgaagtcgggcattttctcggtgaaaagcgcctattggttaagtcagagtcataggttcaatgaaacaagtgatttgtggggaaaattctggaaatcaaaaattcatcctcggcttcagcttttatgctggaagattttctcggattgtattcctacatagggcagaattggtttatgtaatggagatcaattgaagtgtaggttttgtttggcctgtgatgagacttcccttcatctttttttcaagtgtcatgtggttcgcggcatctggttcagaagcttctggggtttgaggagtgatggtctgaagtgggattctctcaaggattgtggtgagtggtggtgcggccttaaagatgataatctggccttattca

SEQ ID NO: 256267 - DNA, 2322 bp, Cannabis indica
ccccaatgcacctgaggacaagcgtcttttcaaaaatagtcatccttttccttcctaagggacgcgtctaagatgaagagcgtggacctcacggctccgctaaccaaacctcatactttagccagttctccaggatatcacccagaatagctataatggactctcccctttcgtttcttaataacctgtctgcaagacaaagatacaaaaccaacctctgggggaagatagcaagctcccaacactttaaagttttgagtgcttggggggtaaatcttatccctgcacctggataggttctatgtggaagtagctaaagggtgccatgtcagatcgtatgggaatatcttgggttcctcttacttttaagataggatcaaggaaggcatcaaagtatatgggagatcacatctgttgtgaaggaggaattgatccttgaagttgtaacctaatgcttggaggcatacgcgaggcataggccttccggggggttcttaggaatcgaccattccaggaggttccgagttgcacttcctagaagcctcatgcgacctaacccgaagatacacttgacagttacacctcatttgacaccaaatcaaatcttgtcccctgcatcagaccatggttatgcgcgtacgtgcctttgtaggactaattgtccaacgacttgtttgagatatttcttttaaaggagaaatctttgaatgacatgtgtccatatccttacgtgacaacctgcatcaattatgcaccttacagtgggagagctacctaccaaatcaacggttagatggactggtagtgtttaacaacttcacttgcgtgttgagtaaggaaccctagtggggtaaacatttgtaatactcaaacatttgccaaagaaggctaatactactgactcgtggactaaaggtcattaacgcctaaaccacgtaaaatatatatttgtctattatttaatattttttatttccttaagttctcattaatcagtttctaaaaatctgagtaaataggtagtttatgggaaagcccaatttcttttttattgtggtcgtaactttttactccgatgtttgttttagacgttctatatatggttaaatagcttatagaagtctctagagaaaggaacttaaattagagccaatatatattttttaaggtattttcatcacataatttggtaaaaaaaataagattttagatacgggtattagaaagtattttagaataaacactcaccatgtttaacgctaatatgacttagggccatcactcattgataggagtttttactcaggttgactaacatacctaaaataggaattgaggtaagaaaagtattaagatgcacatatacatatgtttagtaatgtatgtatgatattttcatatagctagcatattaaagatagttgtatgtgtgtacatagagttgtgccaagataatgatatctaatatgttaggcaatagtgaatagtatggattaatgttatcaatatcagtatgactagagtactggaattaggtttatattattgttaatcatgttataggtatgaatgtttggatctcagatacacgttagatgcagttagtagacttatagtaattgagtgtataggtacttaattacaagtcagatatatgttgtattattttatattttttagagtctatcgactcacatatatgcttctatgtgtatgtaaagacaaagccaaagatgaacaacagtgagaccagagcttggtatgaacgtttggatcttagatgttggtattattattaatcatgctatgggtatgaacattcggatatcaaatacacgttagatgcagttagtagacttatggtaattgagtatctatgtgctcaattacaagttagatatatgttgtattatgttatattttcttactgagtttgtctgctcacatatatatttctatgtttaggtaaaggtaaagccaaggttgaactacggtgaaagcagagtttggtgaagattgtacacatctaattatcgaagcttggagggttgcgatctttgagacaccactggcatagtttttagttatgtgattagacaatacttttgatgttatatatattatgtatgttttataaatagattttgggatcttagattctaaatgtattacaaatatgatgcatgttcagtaaagttataattattacaaaaattttactaaaaacatttttatattaaaactctttgattagcaaaggtaaccacagtaattaagaaaataccataacatgtctttcttgagttttatgccctaaataaa

SEQ ID NO: 256268 - DNA, 2282 bp, Cannabis indica
aaaaataattttttaaaaaagtattagcctttattgttttgttaaatgattttcacacatggaaattttacaatctatctccttatttcatccaaataggatatatatgaatatgaatcttgatcaaaaaggagtttgataacaatcccatagctaattctaaaaaaaacatagaatgattcacaatagtaaaagaataattaatctttctttatttcattcactaataataagttagctagccaatggagatttattatcaaattaatattagttctcttataaatcatacatatatatatatatatagccactcactcattacgatccatctccttatttcaattaatccaaataggatatatatatatatatatacagttagagaacatatatgattatgaaatatcaagcaaaaggactttgattgtaaaaatccaagttaggtccatagccaattctaaaaatatcgcaatatctcttgtagaatccaatcctactagccaccctatcatctcggccatgaccacattcaaggccaccattgatgatgttggtaatctcccggctgatcggtcactctgggatggtgaccaccgccctatgataacatcgtggctcgatggcttgttaccctgtggagtcatcccgaaccataatgctgtcttaaaagacaccactgcatatgtgccctggatcgtttataaaaattgagaactataaaaggtattactagtatctagtacttttttaatgtaatattactaatgtaattaagtattgggtcttatataatttaacaaaataacttttaaggaataccgttaaataatcgttgatcattatttatagaaagtgttgagcactactggttatggttataaatcttggttggctagacttttaaaaattgtttttaagttttcgaaactttaaaaatacttttattgttggggtaagctctaaagagctctttcacaaaagctagctttggtaactttctcaagaaaaatttcttaagttttcaaaagtaaaagttcagctaaacaaaattacgattataaataattaagtgtatacgtattgagttaattagataggtcctctgccataataggtttttcgaggaggacggtccttagctactctcacaaggcacactttgattcttttccctcacaaaacaataacccaatgtgtatggaccgtctgctgcacttgctcatcctcctgtaaatatgaacattgttagatatcactattggtttgtgaatgcctagtgatgttacataagaatttttaaattaaaatattaaattatcaaaacttattacacttacaataatataatactttgtgatagtggtaagcattcttaatacattttagtatgtttatattaaattaaacttatagtatgtattataggataatttgttagtgtgatttaatatcaaattgttaaataggtgtcactttttagttaattaggtgatcgtgttgtagtttttcatgagaggtttgaccaagaaaggcagaaatttctgttttacgagtgtgatcatcattgacaattggtattgaggtgtggagccgcaccacccatgttcgctgcagcatagcccattgggcacatactcctcctctttatttcccacattgctcacccaagcctcctccatcctaccaacaacaacataataaatacaatcttactctagcttacaactatgagtttaacaattattttgtttatgatttaatgcacaatcatgattcaaaattaatgcacaattatggtttttatagatagccaaacaacttaaaaaaaagtatgagttttacaattatttgtttatttttactcaattcctttttaaattgatgtattaattagccgccataattttactcaaaatctttttaatttccatgatttattatttattagtattattaaaattatttttagcacttcttgtgttttttttttcattgttggacatataataactaatgtataataattttaaaaaataaaatatagcagcccatgattgaccctatacatgttataataatataaattatagtggctgcaaaattattttttatttttatttttaatttcaataaatttatgcagtgcctgaattctctaatatctcaaacaaattttagtttaatcttttttttcataaacgcatatattgtagctatttaggaccgtttgtaattttcaaaaaaatttaaataatttagaaattatttggctgtgtttt

SEQ ID NO: 256269 - DNA, 1974 bp, Cannabis indica
ttttatttttaaatatatataatcatattataaaattataaaattaataaataatattctgtttaataattagtatattctgttaaagttaacctataaaaccaaaatagccagttaaatctaactccattacatatccataatatatttcagagaagtcattacaatatttgataaagggggtgtttgccaatatgtcttttgaaagtaaaggtatcatgcaaatgttttaatagttaattggtccatatataaaatacaattttatgatgttaaaggtcaactacaggttgtcgacatgggcatggcttgtatgtaatttacgaggtttacgtagagtagagactcccctgtaaccaggtctattataaaccaagcaaagcctcgcatgatcaaccatcaaatgtttgaagaagaatatccaacggtgaccaagtgggtccggatgctgacatggcaaatcctaattggtggaacatcagagttgagagaagtatacgtacgtagatgatctgtaagacctccaaaaatgactaatgacagtgaggttcacttccttcccttctgacccgcaactgtgtctgcttcaaatctaccttcccacccttctaaaactctgtttttaaaagcttatatatttggaaccatttcgcttccaaattctcgtatcaaatcatatcatatcatatacccagaaaccagttttcaaggccctttaattaattcatttggagtactactttatgtaaattacaataaccacatcacaagcgccacaacctcgttagactttttctcttttagtttttcattgatcagagtatgtaaccgtattatttctcagttgaatcctcaatcaactcagcaaccacatcattcaaagtatatatatatttttgttagatcgatcatgtaattgtgtagcttaatattagttgtttgttttggtcaatatcatcatcatcttctatttgatgatcaaataatggcaactctggtacccattactccaacaactccgtagaaaattgtaacatagtagagaagctctgttcttgcatatacatataatattacaatagttaattagttagataggtcactgctgagagagaaagaaattaaggccatggaagagacctttgtaccattccgggggatcaagaatgaccttagaggaagattgatgtgctacaagcaagattggactagtggcattaaagctggcttcaggtataatatgtacagtaattagttgatcaaatttaaaactactaaattatatcctataatgaccttgatttctgatgatgcaggattttggctcccaccacttacatatttttcgcttctgcaatcccagtcatttcattcggtgaacaactggagaggaacactggtatgtataattgggcaccaacttctaaaaataaaaagaaaaaacttttagatctgacttagaacattctacttttgcctaaaaagcagtacttttataaacatataatccttcttttaaacaaattctattggctttggtaattacagatggagttttgacggcagttcaaaccttggcatccacagcgttatgtgggattatacattcaatcatcggtggtcaacctttgctgattttaggagtggcagagcctactgtcatcatgtacacattcttgttcaatttcgctaaagaaaggcctgaccttggtcgtgaactctttttagcctggacaggatggtgagttgccttttctctgttttcttctgattaattatacttgttgtacaaatttatatatgtaatatatgttctgacttttctaaacattaaaggatatgtgtttggactgcatttctgctgttcatgctggctatattgggagcttgttcaatcatcaataggttcacccgtgttgctggagagttgtttggtctccttatagccatgctctttatgcagcaggctattaa

SEQ ID NO: 256270 - DNA, 724 bp, Cannabis indica
ataccagtaagtaaacattgttttaatcaatattcttacataattacattatttgtaagaatataatttcattaatattgcaattagaattgagaaagagttactagtctatatatttaattttcagttttcatatattatctaaccaacaactcttttatgatttatgagtgtttctttttgttgacttaataatacatcataatttattaaagaacaccgttatgtaattttttagtgaatttgaaattaattttttatgactaactgaaaatgtaatttaatttaattattttattaaatgatatatattattattttagtttttatgattgatggttggtacgtccatttctacaacaaaatagatacatagtcatcttctcttttcaaatgccaactcggatcaatgtaatgaaaaaattaatttattagtatcaatatatcaaaaatcaaaattaacagtagaaagttgcagcaaaaataaaataaaattaataacagtagaaataattatactttgtgatttttgtgttgactaaaactttatataaataaaaaaaagcaagaataaatatgtattttgtgttataaacgttttcactaataagattgtgccattattagcaatgtttaatattttctttcaacttttaacgttaataataagacttcagatatatagattttgttaaactaaagtcccttaacttcaattaaataa

SEQ ID NO: 256271 - DNA, 1147 bp, Cannabis indica
atattttttaacatgctatctcggatggtataactttactattgaagataaatttgatttatgtatattgatcctatttgtcatttgtgatattgatttgccattttggcttatcaaaatttgtattggatatttggtccttcagtcactaatgaaaatttcactttgtagtttgtatactcaaaaataaataaaattattgatagatatattataagttataactacgtacactacatcaaatattaattaacacaaataagataattttttatttattagaaaataataataattaggtagtctaagattgtttatatttcatcagcagtaatactttggtattctcgttagtaattcacttattaaaagttgaagcactaacaacatataaagacccataaatgtaagcaaataaattaagggctgtaacgtagtatacgtttccatgtagttaatcatgtttgagtaatagatttatatatacccacgtcagtatattttaattaatggaaaggaaaggaagtcatatgactttgtaacaatctttaattaaaaaaaaaaagagtatctttagaattaagaaaaaaattaaaaaaaaaaaaagagtaagtaattctcaacaaaattgtacagggccgcgagcgagcaacagcgtgattgattggaccgtaattgggtctgataaaaaagaaatggtctggactggactggactgaaaggtgtggctagggaagatgagaagttaggtgggaaatggaaaagaaaccttctcacactcacactcactttatttgctgtgactcttttctcatttatttcacctgactttcccaattttatatattttatgcttcatttcttattcctaattttataaatagaagaaaaaaatccttacaagttcatagaaatggtatggcaatggtagagtagaaaccattagaaggtgtctgatcttcagttaatgctatatgactctacattcacaaggcagtgggccttataattgtatcatttttcaaaactaatacatacaagcaacgggtgcttatatatattgtcgttattaattgatcagaaatatgttttttttttccttacaattattcaatagtatattaaattttttattccgtagtggggt

SEQ ID NO: 256272 - DNA, 1493 bp, Cannabis indica
atatgtgatcgtcatacatgcacatataataaataatatactagtaatattaatattaccaaaataaaaaccctagctataaatgggtgagtgatcaatgaatatatatagatagcagactcagtagtctcaatattggttttaactatttaaacaagtaaacattaaaggtgactaaactaaacactgtattctgaacactatgcatgcatgcaaatattaatgtatttatttctctaacttgaagctatgacctaaatttaaactacacattcataataatggatcaaaattaaatgtaccacacatatatagggtatagacacaattagaagcataaactaaatttgtgagtaaaaataaaaaatttgtgactaattataaatcactatttttatattgtgactaaaaggtccgtaactaaaagtatcagtcacgaaaattaaaatttattgtgaaatactatgttttagtcacaaacaactttttgttgtgactaaaagtcacttttaatcacaaaaaatttatattgtaactgaaatatcgtcactaaaagtagttgttttttgtagtgcctaaattagacttaaagagattttaaattaagagaatatgaaactcgagtattagaaaaagttaattagcattaccattaattaaacttaaaaggtaggactcaatgcacttgaaaacacaaaccctaaatggttaaaattaaatttacccaacccgctaacttcataccaaatgttccataatggttaattaaagttaccttacatatatattagagaatgtggggtttatgtacagttgcaagtattagtttagttagttatttttcggttgtaaacttagacaattatttctgttatttttgtttgtttgtttgtactctcagcctatgtatataaaggcttgtgttctgtaattatgtaagtgacagaaagagagagttcatattgtgagctgaggggttcactttgagttgtaacagagcatgattaaatccaattcatgtctctcgagtgtctaagtttctggtgtaggagcaagactccatttagtgtgtttgctgtatgttgttgttgatcaactgagttacattcaatataataaaggcaaagcctcaaggcagttcctcccaaggattagatccaagtgttaattcacttgtgattgaaccttgtaatccggttgtgttctctttttcttgcttctggttttattgattgtttttctggtttatgttatctgtcctactggtttatttgatctggttttgatgttcttgaatggtgattgaatcaccacaaatggtatcagagcacaggttgcattggaggattcaagaaccctgaagatcaagcttgaagaacaacaatggcgactgcaagattcgaaattgacaaattcattggggtgaatgattttggtctatggcgcatcaagatgatggcactccttgtgcagcagggcattgtcaatgctat

SEQ ID NO: 256273 - DNA, 1463 bp, Cannabis indica
aacctgtcgtcactaagttttttctaaattaacatgtcaggattgttagcagggaacctaacgatgttacaaattttattttctaactttcttccaaaaagattaaaaaccacctccctattcctattataaccactagttgagactaccatcttcaaatgagggtatcgaattcgaacaccataaaactcaatgaattcttcaaagttgagccaaggaatccaaggttactttcataaattaatcgaatcaccctttcttggtaaagccaaactacccttacggataatacctcttgaagacaaaattccgttccacatgggtgaattgttccccctcatctcagtaccctaaaaagattttcttttacaatatttggcaataagacatttaatccatagtttcttactaccactagccacctaccaggccaacttacacaataaggccttatttatatcctcaagtcttctaaatcccaatcctcccatagaaagcggaaggcagagtctatcccaacccaccaaagcaagaaacctttctttctcattacccctcgtccactaaaatttcctgatcataccatcaatttctctgcaagtagagataggaaccttacagttagatatagtataaatcaacacactcaacacaactgatttaaccagcattgttctacccgcaaaggggaggagcttagttttccattcttcaattctcttcataaccttttcttctaaattttgaaattcttctctcttcctctgtttaaagacaaatagatttccaaggtatttctcatgccccacacattcttggacatttataaactcttacccgacaaaatatagtaccaatgaatgatgcataaattatgttaaattttttagaagaaaaaataaataaataagtgcacatgtcatattcaacataatttccactctagatacattcctgtgtttaacaatttgtaatctataagtcactaaacgtttaatctctttcactatatgagacactatattagaaaagccctcaaatgtacaattatttttgttgatccaaatgctataacaagtgctgcaaatatagagatatctatagcctgcaacaaactcaaagaagacaaagacaaccaatttaaccatcccaagtaatccaatgaccaagcatttttgcccagacaatcaaaaataagcctgaccacctgccgagacagagaatactcaaaaaataagtgttcatgagtttctattccagcagcacacaccagtcaatctacattttcaattgcaaccttaaattttcacaagttaactcttattaaaagttgatgattcacaactgccataaaacaaattgaatgcttgggcaacgtcaatgagttccaaacaactctatggtagtacacttgttgttgaagagagttgttataaagtattcttgttttgagtttacttgca

SEQ ID NO: 256274 - DNA, 3420 bp, Cannabis indica
ttcctcaaacttaaagcttcttcagatcttttcctccatcccttcagaatacaggcagagagggcaatggttcgagttagaggtctgggacgagcagagaacagcctttggaaaaaggctaatccaagcaccattaacaaggcctttgtctagggccaatttaacatggttggtcccagaacggtggttatcccaagtcaaactgtctccttggattggcaaagtaataagaccccgagcattcaccaaactggagattaccagaatgaactggtctcttcctttagagccgacccgttccgactcacaaagaacaaagttagtgtcacccaagataagccacgacccgccaaacctatcccagtcttcataaagttctcccagaaagttttcttagcatggaagtaaggggggccatagacacaagacaaaagccaaggatgtgaggaggggtcagagtaaacaagacccgatatatggttttgggaacacgcaatacattcaaactcaaaaccaagtttccaagccaaaataatacctcccgcaattcccacagctggaacaataatatgaaaataaaaatggagcgagtgaagggtacgtaccaaagatgaggcatccactttgagttcggtcagaaagatgaaatccgaggagcgcgaccgtatcagggacttcaactctcgaactgtagaggtctgccctaaccctctacagttccaagcaatacctctcatggctcttgtggaggagtagagacctcctccacaggggtatgagattgagcagacccaaaggaaccagactcctcaaccacgaaagtgccatccattggcctcgatgagatcacatttcttcctttagtattccacacatctgatccactaaaatcactaatggataaagaaatatcctcggagggctcttcctccgcttctttggatgcattagcaatgacaaccgagtcccagggaaagtcgcgaacaacaccagggtgatggcggggaagcttccatggccatgagcaaagggaagcgtaggccccgtcaaattttctcttcttaaaaggagtggttctagcgttggtctccgaggaagtcggaacgccaatatcactgccaatggctttaatctcatataaatccaaattgccaaatttctttagctcttgtacaagagtaccttgagcttgaaaaaaattagccaaggccaatttttcatcatgctgaaagtgaacctcttgcccacaagtagagctctcaaaagaagtagcttttgttggcctattagactcaatcatattcatactattgccccccataaatatttttgtttccacagccggcccaaggtcacacaggcccacccttttaccatcatccatgcacatagcctcttcctggaactcaaaatgccgctcggtcccacaaggtaaattctgggtagttttattattcttgcaaatggtatttggcccactagacaaaaccctcttacattgcacatgactcttttgaccaggcccagaagaggagagtgccggcccaatagcttcaacaaaaggcccaagaccaatacacttatcattcccaatagtcaaccctcagtcagcataattcaaattaaaagagggatcgatctcagcctcctttctcgcgacagactccccaggacgagttgttttgcccagataggaaactccaggcttgcaaaaggcaggctgtgttttgggaacccacacctcctgcctcgacggaccaccctccagagaactacgtccagtcaccttcaattgatgtctcggtttgcgagccaccgctttcagtctaacggttccaagcttgccattaaccatggtcgactgatggctaacagcacgattcaagccaggcctaggacgtgccgatgaactcaatgccggagtaaaagagttggcacccgaaaacacgtccaggtacgaggactccgtagaaagccatggtccaaacattgggtaaggaaccccatctccatttaccacagtgacgggagaggatagggagcatcctcttctttgatgacccagtcttccacagttatagcaaaagatacccaacttctcatatttgaattgtaaccaccgctggctacccgattccatttcaaagtaacaaccggagaagagaggttgcagaaaattcaaatcaatcaaaactttgaggaacttactccatagggtcggctttccttcatctaactcaactttaataactgtgcctgctctgccccccaagaaattaccattggcagatgagaaatagtctcttgggaggttatggatttgtatccaaattctcactttgtcgaaagttacagtgggggtcttccttggcgtccatgcttgcaaaatgagagtgtaaccacacactcgccaaggtccgttttccaacgcccaagagcagttttcagcacttgagaacccaaactcaaaacagttatggttgttggtagactcattcaaagctaccactgccactttgaaactccaagtcttatccacaaactctatgacagtggcttcattaactaccataggggctactactttcccaagaaggcagaaagttgaaagagcctgctgagaagaagcacaaggaacaagcttaacagatgcttccaaacaagaaaagcatttaccattagtagaggagttggtggcattaactaacgccattacacccgacaacaaaagacaagcctccaaaataaataaagagataaagcccaaacacaatctactccacagacctcctcacgacaccctaacccacgaaaaaaaacagagacagaccccacaaccaaaccaaggaaaagaagaaaaagcaacaaagaccaaatggagactctgaggtagaatggtcaaggaaccaaaacactaaaaaaaccaaccaaccaaaagaggtgagaaaaacttcggatcaacagcagactacaagaaaaatgagacacgaaacacataaaactcagagagaagaaaataaaagggaaggaaagactcaactaagagagagtggtagatgaccattctactattactagccaaacacctgtacagtagggtttgggatttaccaagtatcataatcaaacaatactcgaacaatatcaaattaacatatttattacacacaatcaaaatcatcgagtggagtagtcaaacaataatcgagcacaatcaaatagtcatcttcaaccactagctaaaaaaattacttttgtcaatcaaacacaatggaatactattgaacaacagtgcaaaaactcaaaatatttgaaagtttatcatccaatttaaccataaagattcaaaaaaaatttatccaagtcaaccaaaaaataacactgaatctaaacactaaataagatttaactaaaataaac

SEQ ID NO: 256275 - DNA, 2885 bp, Cannabis indica
gcacgtatacttagttatattttcgatggatgcctttgtttaatgctagtgaaggaagcaaagacgagatgtgtggtatacatgtaccaaaaataaaaaatatatatataaccgagtttaagtaaccgataatttaagagtccaatatagtctaaaatgaaaggaagtgaaactaaccaattctgcattactggtgtttttttgcttaagatagttctggaaaacaaagtgaagtagaagaatttgtagaatataataagtttaaactcagagtgcacaaatagcaaaaatttaaagatgcttgaaatataaagacttgctttcttttctttcctttttccgttgtttattaaataagaacaaaataaaatttacacctcttttgatttgtgtcctttatatactgtctttctttcttgatgagagaaacataacagtaaacagagacaaccttcttaatgaagagcatccaattgattgtataaggttctatgtaacatccaaaaaaagcaatagaaagcaacctacaaaaaaaaaaaatcaaggttacagttattataaactaactacggagaaaagattgatgacaattatcaaacatctaatttataaataaattattaaatgataagaaaacccacctctcacaatcttctagtaatgtaggctcaaatttgggaggaaggttgaagacaacccaaataacttcaaatgacaaacataggtcattgatttaacaggttggttgccagccatcctaagatcaacctggattattataattattttatatatattatttattatcataaagtagaaagtcttgatataagtaatctccaattcaaaatgtaaatatataatataaatattgattaaagcaactactactttattgagacatgttgataagataaaaacatacttcggtacatttgtgctctcttgctaattttaatagctagagaatctttcacatcattacagaatgcaatttttctttaatttttcatctgatacaaagtcaaactgcacctaaatagcaagaaacatcaggatgtggtacggaaaagtgaacaattaaacattcaaatacaaaataaattgtattttagatgatttagtagcttgtattaagaacttgttatctccttgcccaaacctcaaagtggttcatattagcaggaattataataccttggcgcataatgttgctaaatggggtatgggcttgatagtgaattcgtttggaatgactctttgccttccttctagtcttgtggttttggtccttgtaattcacaagactttctttcataaaaaaaaaaatacaaaataaaagagagtcgatattgaaagaataattatagcaaatcggatagcttgaagaacatataaagggtcctccataaaagtacatttgctggaaaatgagtcacaattcttccacatttcagaatctcgatgcctgaatggaatcaataaattccaatggaaaaaatattacaaccccaaacatgttatcattctactcagaccaaaaaacctattgatggttaaatatcttctgtaggcatgatgttatatctttgctacaacaaaaatataaactttaatgatcaaacgattgaaaattagcagattaacaggctaagaaaaaatcaaaaagccattcttaaatttataaaaaaatgatacactttataataaaaagaattgtaaaagattaattaatttagctaggagccgatggatcctatatacaaaaataactaaaaactgaaaaaatcattatatggtatagtccaaattgcaatgaaggatcttcataattaatatttatgaaataaaatatctatacagaaaaaaatgtatgctggttttatttatagtatctttgaaaaaaaaaaaaaagcattatatgtgtttacttagagttgttaccctcaaacatgtgatgtgatctagcaccaactcttttgaaggtacaattcaaatttcaaagttagcaatagcaaaacaaatagaaaataaataaatgaaaaataataagaaggaaaataaaaggaggtggaagctttggatgagaattgtaccttaaagctttttcgcccacttcaacaacccagatactccatcgaatactccttgaagcactacaacaagcaatgaagtgtgtaaatgatgaactgaaataaaaattcacatcgaagactaacaattctaattcttcctgaatgaatagaagctagatcaatggctaaaagctcaccatttagaaaaattaattgagatacaaacctcacaatctgaaaaagactgtaaatggggtcacgaattgttgtcctaaatatgtgtttgagagaagaatgaagaaacacaatgtcaatttctttcggtggtggagaatagcagagagttagaatcgcaataagagtttgagaagaaagaagaatcacaatatgattttgatttcttgcgggatggagttgctaggattaaaaatcgcaatatctgttttgatttgaatggcaataaactcaactattgcaaatacattttttaacaagaaaagttatgtatgttttgtaaaaattacgaaagaaatgattatcacatcccgacttgaacaaagaatcaatattaataaaacataaaagtggagagagcaatgtgataccttgaacaatttatgatattgttcagcctagttcctatttttgcaatccaaaagtcaaaaatcagtataaataacactgcaatagcgaaaaataaaatagcagtctaatgggtaagactactattgttaaggagcatatagatcaagaacagagtacgaaatttcaacgacaattttttattttttttttcattttttcctccta

SEQ ID NO: 256276 - DNA, 1461 bp, Cannabis indica
ttttaatggccgattgctcacctagcagcagtgacaagaaaacattgaagaggtggtttttcatagacaaaagagttgggtgatcgatcaaaactcattctattaatattactggatccagatcaaatagttattaaattaacaaacatttatacacaaaatatggagttgaaatcaagtcattcttctcctgtgctaactgacccggcaccatcttctgtgaacaacaagtcaagattaggcctcggccattcaagcttgtatcatcatcaccatcaccatcaccatcatcaccagcagcaaggagcctctttctctcctcccaaatgtattttgattccgaggaagaagccttcggctatgctcgacgatgttcgctccaatggctggcttgatgccatgaaatcctcttcacctccaaggaagaagttcatgaaggatttctcatcatcacttgatcatcatcatcatgatgactctgactcatcatggatggtaattatctgatttctctctatgtcttatcgatgtgggattttttgtgtttttttttttagtttgtagaaaaaaatagtaccaattttgaactagttaaatttcttgtctagatgattgtttgactttgaacacttatttgtgttgaatcaaaactcagtctagatgcttatttgacttataaatcttaaggaaaatctttgttctagattgtttaaggtatatatgataatattgtacgcaaccataataataataataaggttgttttgtgtgtttgcagctaacgtatccatctgcactaagttgttttagtcaaattatgaagaaagcaaagaacaagagaatagctatttttcttgactatgatgggactctctctcccatagtagatgaccctgaccgtgcccttatgtctgattcggtatgaaatatttgcatatatacctaatatattacataactacagagtttgctctcactatattttgtagcttaacttttttgaagtctcttaaaatttaccctgtagttttgtaagaaaaaaaggtaaaattagacattagaaactttatttttacaataatatttataaatatatatgaccaaaaatatgtggaatttgagtctcagctaacaggtctatttaacttttaaatttgacgaaattataacgtttattggactttatatgcaaaaacatgtttttttttttggaaattttcatttaaaatgtaagtttgcaagaataagacattttttcaaaaaaagaaaaaattattttatgagaaattaaaaaaaaaaaagttaaaaaatatggaattaaaaacagcaacctgattaccctcttattgtaattggttacctggttattcttacccgattttctaatattttttaattttctttttactttttctacaaaataacttttctgaaaaataaaattatatttttgcacaaaaa

SEQ ID NO: 256277 - DNA, 1184 bp, Cannabis indica
atttcaagtaattcagctaacccaactcatataaagaaagactaaatatgatgaactatcatgatcattcataataagtatttcaatataaattaaatggtacaaaagaataagaaacacagcactctaactctaatccagcttctccaaatggcatattattagagaaagagatggatatggacttatcaatatcatcattacaaatccaaatccaattcatgtatatgttgagtactggtcaagtttctaaatgtagcattatcatttaaaactagttccaatgatctcaactttcaagtttctttcccatttctttcagtaaaaataattattacattttaatcgaaacgaacgcaagccagcttaataggtttacaaaagaaaaaaaagaacccattatctagtttttgagttttgtggagccccaccaacctcggacgaagtaattgggcaaaacggtggaccccacacaaaacctcccttttaaagtgaagagaatagccaatgtggcatggggttgaaaagtcactatctgccatgtggcactgtgccagcgtggaaatcctacaagtgggttccagctggcaattagggggaataatatagagagctttgggagttgggtctacgttttaagagggttatttacttatttttggggtacggtcccagtattgtaggaccagacaagtcacagcgtattgagccaggaggagcaggtccaccacccaaagccagcctgtgagttttgtggaatggcggcagagacttgttggctacctttttcttactttctttctctccttttcccctctactctctttaagctcttctctctcttcatctttttgtttatttatgtcgtttttgacaactggctgcaccacaatacgacacgcattctcatccattgcttactcacacagctctctctctcttttgattcttgcccaataattcttctctttctcaaccctctcttttcaaattttgaattccttttcaccaaattgtccttcattattcttcatttcaaaaaacaaaataaataaatatatagagattttctatttactcttttttttaccagtttatttcatttgactgataagctacgaggaaaacaatgtttcgatgctacttaagttaaggaaactaatgctacctcaaatatgcgtgag

SEQ ID NO: 256278 - DNA, 1494 bp, Cannabis indica
ctctctctctctctcctttttataagaaagatttttattatgcatcttctttcttaaggattcattttctatttaactaaatatattggtttgaactttatttcaagattgccgagctactttatttttcctgagctactttacttattgatttagtggaatcaaatcaaagacgcatcactgttagctttcctttgccactacacacagtttcaaccactttttgtattcttaattatctggtcaagattactatcattactcagctcaatctactttcttgagatactgctacatagctttctactatactagtaacgtgctaagataatgaatttatgaaccttatatcctgaaatgcttatctctagcttatatcctgaaatgtttagtttaagaactgtattatacgagggttttactttgttcgggggtgaccttgtcaattggactgtcaactaccttttaaaacagtgggttatgatttaatttggccattcaaatcatactatataaaaatactgttttaatagatacataaggtgattgggatctagtgttgtcatccaaatctaattacgatgacttaagttagtattactctgaacatatgtaatgtttggaaggtgatttgtgtgcaatatattccaaactgtatatcatcagtaaggctaatttgagttataccgtttaatatttttcttttgtgtcttctgtgtttgatttgcaatgatgtcaaaggctcaaaatacattgaaaataatcatgttgaagattttgttactaggggaaacaaaagaaagaagcataataactgtttcctgtcttttcattttgtttgtgttttttcctctttactacgaatactcaccaatttgtacttgtgttagattattccagcgttttctgactgtttagagttttgttctgttcagaaaagtgcagtcatccattttgactcctgagaatacagagaagattcagaaatcagtactatctttggtttttaccttgaagaacatcgaggtaagatcctagtacactattattaatttttgtacgtgcctctgccatattgatgtatatttgcacttatttttcgtaattctatctatgcagagtataagctctgatatccttggtttcactggtgatgaggctacaagacgaaatttgaaattacttatcaaatccctcagcaggttaatatgaaagtattctggagaaactaatcgatgttagctagaactagcaatatcggttgtgaaatttaaaatggtttccaggtccaataatgtagtagagatgaagagaagcatcaccaaactgggtctggctccttcaattttaagcctttccctttaattgtgcttgcactggaaatctttgagtagagtccttatttttcattaatctatttggttacctcgagttcccttgatgttctgttaacccatttaaacacagttgcttataacccattatgacaggcct

SEQ ID NO: 256279 - DNA, 2249 bp, Cannabis indica
attttcagaaaccaaatatttaggacgtaagaaaaaaataacaaaataaataactaatgtgagatttttacgtggttcaggcgttaactatccttagtccacgagtccattttattaggctcattggccggtaaacgttcattttgtccattttatcttcaaagtttccccctatcctatgaaatggaggggtatttataggtcagcttacctccatgcgctagcttgagttgatcgcctttggacgagatccaacggttggtttggtaggtggccttttcaccatgtggcatttaagggtgtcagattgtacaggctaggcatcatacatgtgtcatcccagggttttcgtttttgaatttcccttgtcagtggtcgtcgaatgacttaggcgggtacgattggacgtgcatgctctttactatggtgtatcgtggaggataaaccctgatgttgtactttaaaaagcctagctactaagttcatagtcttacatgtacaggtagagcctccgcgagacgaggttatagctcagctaatcgcattctaagagaccttcgggaatttagtgagaaatccacaacctttacgggagcactcgactttagtcctctgagaaaagttggcttcaactcctgtgctgagattgagttcccttctcggaagtttcccacactgttgccatacaggggacttcctttcatgatggaccttttcgtgatctaatgcttcctccttcatgggacagtggtcaagagagtcaacaggctacttatcatttagccttttaggatacacgtgtcaagcttacaaaaatctagacaacatttacccccaagcttttgggatgtaacacgatccagaagcttacagtgtttccttgtgattgattctagacacgtggaataaatttgagcttcttattacgtcatgcacgtagtctctagccgaagtgtcactcggcagaaggtattatttcttcttcgtactaatagaactttaaatgctgacatttgaaattcgtgcatgtgctggttgcgtgtctggggaggcgccaaaacagcggcaatctgtctaagcagactcttcatttactgagaacatttcacaaagcatgcaatgatggaagttaaacgttgggagctgatacatcttcttaacttctcattcacccaactctcaagtcacccctcagtgagtgattcgaactgttcgcacctcgtggaagacaccccttcttggtattcaataaatattcatagcaaccatcattttttcaaatttcacattttctctatctgtcgtatataaacttgggcatttgcttcatcccttctcctatcttttgagactttcctaactgcatcattttgagaagtgtgcatcgctgggcacggcacaccgtagccatactcataatacctccacccattgaccggtaagtgctctttagcatagttcattttatttagagttttttaggagttgagatatttctgagaatgttggcgctatttgcacgacctttgttaggaaaagaaccttggggtcttacatagcactgaacctcttgacattacggtgtcctttgttggtacattaggcccactatggagaaaactagttcttcaagggtcataggagatatcgatcttggaagaaaaaggcaaaggcaagattttgttgctagtacaggttggcttcgctcttatcgtcctaccgcccttctgaaaattcctcccgtggggttcacattccccacaaaaactgtccctctcgatccctacgctatgcagagggagagagagataaagaaggccttaagagagaacttggaggcaaagatgggaatgatgcacaggcatgccaaagggtgatgactttgttttaaaaaaatccaaagggcaaaacatcaccgggctatgacagacttcaagtagttcttctcttgtgggaaggagggttgaagatgtgtcgtacccccagtgatctttcacgcacaaaaaagtacgtgcatgcgagagtcatgctgaattttaatgaggaaaacttcaaagtcgtgaggcaggctaaagttgcataaaaattcaagcgatgacattgctttaagaacccaaagggtgaaacattactgggtgtgtgcaagacttcaagcagtcattctctttgggaaggagggtcgaagacgtgtcatacccccagtgatctttcacgcacaaaaatgtttgtgcatgcgagagtcatgctga

SEQ ID NO: 256280 - DNA, 3189 bp, Cannabis indica
actttgatgagaaacacaaatttttgctctccttcagtgttgactgcggtctcctcttgttttaaaattctgttgactaagttgttgagttcttctttgaatctcttggcttgcgcccttgtcaccgggccaactagaactttacttgtatctttagccttagtgttctcatcactaggtcctaccatagtcttgccctatatataaatatatattagaagaaagctttcactattattataaattaggagttatttatccaaacaataaagaaaataggatagaagaatttactcattcaataaagcatattttgctaaaccatgtacagcttgattagcatgtctcttaacatgtgagaaaataactctaagaagaaatggataaaagatagtgaacatctgagattatatctgaaaaagaagaaaaatttaaagatgtagttgataatgcatttgagtggaatgtctgcttaattttagtatgagaattagcagataattagagtttaatttagaatttaacttaattagaaaaggtgcataccagtgagaatgattctgatatgttggcaaagactttgactaaagagaagctcaaagcttgtaggcgacgagcgggcttagaagcccaccaactgagacggagggagagatttgttgggtccgtcccttgttagtgagcttggaccaattaaggacttaaggcccaatttaaatgaaacctaaaagaaacaaaaaaaaagtaatagttgatggtggtatcgtgaaaaaccagcagccaagagaaagaaagaaaaagagagggaaataagagaaagaaagctagagagagaaagagattttgccattttgcattgaagatcaagtagttaattctcatccattttagctcaaattttgggtggtgaatccttgcaaggttctcttcaaatccaatgattctaatttgacgattgtcctctctaaggggctcttctacaatacccacttggtgagacccaaactttttctatttctgtatccatcttttgagatgatgatgatgattgtattcgtgacccaagattgtttaatcttgatgttgttgtgagcctctatttttactagagaagagctttataatcccattattaaatattggtgatagtggatgatttgagcggattacggtcccgtaattttttcccgcattgggttttcaagtaaatttgcttgatttgtgtattttatattgtttgtggtactttggttgatatttgatattgcttattgtgatgtttgataagtatcccatttttgacatacaaagaaggaaaatattgtggttaattgcaatagatttttcctcacggttatttgttattttatttattttaatttattattggagacataaagtaacaataatttatttcattttgttgctatttatgtgaaaaaaaaatacttttttcataaatattaaacaatttaatattaagaagtaactaatccaaaataatcgatctaatccgtacttttccgaattagatttgagctattgtgcggattaaattagattcaaaatatgaaatttacaattagtgcggatcggatgcactatgagcaaaatagtgcgaattggattgaatgaacacccctgctgtcacatgttcattcaggatgaaaatctagtagtattcacattgttttgatgcttcacagctaacagcttatgtgttatttagttgaagatgttgttagagtttgtgtcctgattttaaacgaacttggtttgtctatttttactgagtatatgctcaatgagcaatatctgcatgtaatgtaatggactatgtctgagttactaattaatggaaaatgtgtcaatcttaaaaaaaaaattataaagacacatgtaaatggcatggatcataatgtggtaattttggtaataattaacaatttgctacgtttgaatggcttgtgtaatcataataccgtgactacttgtaactagtttcctcttatccttgcttaaaattagaaagtgtcttatacatactaatattactcatataagaagtaatcatgtataatttatatatatttatataatttgattctccatgtgtcactattcatgaacatatatatatatatagctaaattaaggatttgaaaatgttataactattaattaattagttaattatacaatacacatatatgcataaataatacttgaatgaaacatgattttcgatgtaaataattaaataactatcaaacagtgatttttttaatatattactaaatgaaatgaaaagctcgccattggaaaaaaaaaatgttaagagaatgatatattttttttttatttaaaaaattaaaagtaactatattaatttataattgatcgtatattcataacagtaatttttttaaaaaaattatttcatcatagtatttaatttgtcatgaatctatttatttttcttcatacaaaaaaggaaacggtcgaatcaagcattcaaactataaatgaatacatagttgtttttattattattatcattatttatgaaacagtcttcaataactggattgagcattatcacttgaatttttgtttttcctttttgtaattggggaaacttattaaattagttttgattattattggcaataatattgttagaagagctctcgtacgtcattgtgagtggtccattacccaaattcaagcaacatctcccgtgggtatattttatttatgtacatggttccaaattccatgcattatatagaggaaaatttgatttttttttttaatgcatgcattaatttaaaaataataacttaaatttaagttgcacaatattagtagtatatgtatattttaggattttgttcctaaaatattcttccatacactgcacgtttgttatacagtactaagaatcgaaataaagtaatagagaaatgtaacagaataaatgaagaataatcagaatcaatatttgtaatatgttatttattaaatttttttggatatggaatgatagtgatttattttgtttactttatcaggaaacgtaatcagaatattcaaaatgactaaattactttttttaagttaaattatagtatatggtagttattatgtaagacatcttttaaaggtaataaaattagttataaattt

SEQ ID NO: 256281 - DNA, 695 bp, Cannabis indica
tcgggagtaaaaatcttaattagtctaattctaattatcaactatatttatagctgaaaaaatataaaagaataaagtgatgaaaaaataaatgtaagatattcaaagaatgtcgatacattaattcaaagtagtcctttcattggatcggtagctaaaacaaaattttattaagtagtagagaattaagctccttaataagtgtacttaaaatgtaattggatcatataaatatataaaaattagagaactaaaccgcgcttcgcgcagtgttgatcaacatttgttattttactttttatgtaaaatgttgcattgtgatttttaaattattaaaaaagtaactaaacagaattctaaaaatataattatctttgaaatatgtagaagtcttcaaaagagggcatgcaatctgcgattagggcggtctttcacaataaatataattttgctagttggtaaatttttgtatgaataagtataatataaaatacaccgttgatatgtgttttggaagatgtatactccttaaatggaaaggatcattcccaaggagtccgtacaatgtgacaaagataaaatttaaacatgcacaaatagaaaaagaaatatatacatgtaaacacatgaaactaacaactaccgagcttggtcacgacttgccaaagcttcatatgcaggtttgagacatctgt

SEQ ID NO: 256282 - DNA, 2373 bp, Cannabis indica
attttaactcacaactctaaaactaatcaatatttagttttaattataatttagtgttatattttagtttcataatcatttgattaaatatatagttgataatttgttgtgtttgagctcgttatattgtgtcatattttggtgtcatatcgtgtcgatctaatttgcaacatcgtactatattatgccttatactcgtgcctatgacaaaaagcacaactcatccttatttacaacactattaattaactatctaccatataacaatttttttaaaaagaaatggttgaagtaataattttgatttgagttgagggtgtttggtaaataggtacaataagtaggcaattgtactaattatgtccccactacaacatcataacataaatattttattgttttaatcacaaacaatacatatctttattcataatttatagcataggaatggaatgggcattgttctcttctacattttaattttaataacacaaaattatatgtttatttattgccaaaagttggaacaacacaacagtcttttgctttcaataataatatttttcttctttactttctctttttgttgttgttttctatgcaaagtttaatctatttatttatccacataatagcaatgctccaccaacaaaggggcaataatccttaattagagactcaatgaacaatgcattgttttgtaatactatgcattttttaatgtgattcttacatgcaacactggccatagaaaattattatgtcttctacacttaactttttaataattcattaatttttttataagataaatagagattctcttaaattgtcaaatgatattattgttggagaattttttttaataacataaaatacttcgagcattcgaataaaacttggagaattaataaaatatgtgtactcaaataaagttaattttttttacagtaattcatcactagtaatatttacgccaattttagcataaattataattaattatttctcaactttcgattgacatattggtaaataggcgttcttttaatatttacaacaaatgaaaaactaactatttatagccatattttgttttgtaatttacaaaatttgatcttacaagtttcaacttcaccattgaatgagtccttatatgcttgaaacaaatagagtattccatcacgagcattacccttcactagttgcctcatgtttttatctgagttggtctctcctttgattatattaaaaaatgctaacacacttggttttagtgtcgatgaataaccaacatgtttaatattaagacggttaatagctcgcacatttgagtgtaataaaacacattatttaacttcatactcaacctcaattattaatcgtcttaatattaggattatgactgaagttattgagcacacaatagtgtcaactgtaaagaggcactccactgaaattttagtcaaatgcgttgattaatactgttaatcgacgcctaaagacatattttagtgtagtgattgttcacactgacattgttattatgaacaagcacaataaatacatattaataacaaaattttattattaatttttattcctattaattaatacattatatttaataccaaatttattacttttcaagttgtccaaccctccaatataacaatttgactaaatattatatatttttagtatgtgattaatactatatagttaaagactaaaaaaaattaagatctataacaaatcagaatgatcaaaaaattataaattaaacaataaattgatcaaatttcattaaaacaagtagatatttcattacatataaaaatatatatcttttaattaattaaattaattaagttaactctttcaaattattaaaccatttataagaaaaagaaatattgagagtaactttaagttttaattttttttaattttaatatgagtggatatataaattttgtgagtgtaaatatgaaattggaggaatttagtttgaatatttattggacaaattactgagtaaataaatgatatgacctaccaaacatgacttctaaacaccccctaactcatatattttgcccacaaattaatgcgcacattacaattaaatatctttatctaaaagctccacttctatacatataatatgttaggtaattataatcacacaaattagtattgtaacttgtaaggcagctaataaattagaggacaataatgcatttgcctcaatttttttaaaaaataataataaatatatgcatacatgagtgctaccgtcaacttcctgttacaattttttagtcaaccttcatgcacgaaaacacacgtcaaaatattttttttcaattt

SEQ ID NO: 256283 - DNA, 2189 bp, Cannabis indica
taagagaaaaaataatagagagagaaaataatgagagagaaaatgaggagagagaaaatgatgagagaaaaaatgaggagagagaaaataatgtgtgaaaataatagtgagaaaataaagagagaaaaaaaaatgggagaaagtcatgagagaaaaaataatgagagaaaaagtgtgagaaaataatgtcaaaaaacgatgcgagagaaaataacgagaaagaaaataatgtgaaaaaataatgagtgagaaaataatgaaagagaaaataaaatgaaaaaaataatgagtatattaatgtgtagataaaatagagaaaaaaatattgaccaaaaatgtaaattatttttttaaaatagaaaataatttttaaaaaatatggccaaacatgcttaaaataattttctaaatttgtttaaaaaaagtttttttaattatgatatcaaatataatacaataaaagctccaattagtggctgcttaagtgactttattttcttagaatcttaagtagaatattagtgaaaggattacacaatgcatatataatttttacacataaaaaagtttagtgtaattttctaaacaaaaatatgagaaattaacaatatagaaatgtagaaaagagaagagaattagagttagagaggtagagaagtaatataagtacgtacctcagtttgtatatcaagttcagcatagaattcatcggaagagaaatgagaacgaatattaatagctcttaatcccaaccttttcaagcaattaagaacctccaccataagatcaaccccagaattaatgggtttagctactcttactttaatcttattattcttattcttattattaatattaatatttctctccattaaagcctcttccagcttcatctgttccctcttcaactcctccttgtacgtctccagttcctgaattttcattgtggcaatctgaacaattgaattcttatcattctgcacatccacaccaataaataatttcaataattgtgtaaaatcatttagaatttcttcacagtaaattaatataaattattgtgatatattaaatttcggtataccttagttcccacagggagcatagaatgcagagtgaaatagctctgtttttgtttttctcttcttattcgttcattgatcatgtgcctataacacctttctttctcatgttcatgatcaacatggctaatattatacttactactactactacttcttcttctcctcaacaaatcaatcattcttttgttgaggttcatcttattatcactattaatccaacttgtttgcataaaactaccctttttgggttcttctctatacacttcaaaagcgcttggaatcatcggagtagtagtaatattggcctcactataccacaaagcatcgccagaaaaaaactcctctgaaataaacacatccatatttttctccctttctttgaatcaacaagtcagcttgtagccgttatatgttatgtattttctgaataaatacatactaaacacgtgaaaggttcaaaagtggtgtcttatttgttttattatttattattatgtacagaagagagagagagaggagagataaaagacttggtcaaattaggagatttagtgtccaaggttgtgttttgggggcattgtttaataaaaataatgctaacaataatgtttacttttagggcgaaaagtccaagtgagccgcttttaaccctcatacaacagttttgactaaaaataagtggtgtcttggtgacccctagtactagtcatcgactgtcctaggcacaaaatacaagtaatgagtggttgagaattacttgaaacattcgtatgtatatatatagatgttattctcgtaataatacaattgagattaactaaataatcaatccaattaaactagtcttgtaaatgctgaccgaaatttttgatatgagtcgaaattggcatgagcccgaaagataaaagcatgattagacataaaaaatacgggtttgagcacaacgtgatgctataaattggtatgcacgacacgaaaaatatgtttttaaataggatatgacattagaagtacaaatgacacaacacgtaaacatgaatagactagcccgaaaagcacgacacgcagcaaactcgaaaaacacgacatgacatattacaaaac

SEQ ID NO: 256284 - DNA, 2154 bp, Cannabis indica
aagaaaaaaaaaatactaaaattgattctttcggaggatagaggtttgctggaaagattttcaactactgagatggttgcagaaagagagagttaggaaattgtgagtggtacataattgatttagtatatcgattaatttttacatgtgtaacaaaattcaattctaaaatctggaataaaccaattgaaagaatgaatataaaaaagcaagaaatataataacttccaaataatattatgttttacgatgcaacttttgttgtcacaggatattgagcaagaagattcaaatacctgcaattatacatgttccaactattgtctactatatatttaggtttgatataatgacatgctgatgagaatattagaatttttgacccaataatcaaaatcttaccacatttgatcaatcaatgtcatgcaaataatagaaaattgtacttaattgactctaacccaatacaatctgattaaggtagaagcatgcatagttagtggaagtagtacatgtgagaagcattggaagataaattttaagatactacaattacaaagggtggtcagctccaacaaattatataatacgaaagaatatgaatacaagttttctttcgaattcaagattcaagacttttaaaagattcaagatactttcaaatatttcacaaaaaaaaaacccaaagaacaatatgatgtatattacattttaacaaaaaaaaattatcatacaagctaaaggcataaaaaccaacaaaaatggcacaacgtaacaacaatacaaaaataatcaaaacaagatgttaattaatctcacaacaaaacataggaaataaattaataaaaaagacaaatatataaaataaatatgcatttaaaaaaatatataaaataaataggcatattttaaaataataaattaattaatacaaaaaatgaactgatgtatacataaatgttaatacagatttttgttaaccaaatatgagcctactagtgatagcctcccaaactgttaaagcagattttcgtgaacctaatatgagcctaatagtgataaccacacacagaaaaataaaaacactaaaggaaaaaatatgaacacaaaggattttttatgtggtttcgcagttaaaattctgcatagtccacgagtcaatcttattagatttctgatgatttttcaggaccttttttcttcaatttttttcgtcccatttttaatctaacttgcctatatttataattacatagtaggcagttaattataaagttgattgtgatctttacaacgtttatcccctaaaatcgtggggtttgattacatatcacgtagtataaatgcggttaatatttgaaaatcacacatctgtgatttatccacttttactgggtcaaaatgatcgtgtattaaacacgttttaaatcatatcgttctgggatgtctcgacaggaactcggtaccaatgaccttgatagcgagctggagctttttcccctatctttctgaggtcgacgatgtacgccctgttgcttctttgtttgaaggcttaacgcttcattttgacagtcgcaattcttattaacagagagtacttcggcagtcatcataatttgaatgtcagcttctgactcgtcaagactataagtcttactgaaagatgtctgaagttgattggtgaaagtaataggagctcgtcttcctatagcgagataggcgcctcgcttattaggtcttgagtccaccccaactgttatacttagtttgtatattatatgctaagtattttcacagtcaatatgcatcgctttcgtcttcccaagcataacgaagttgatgtctcgccttatgcatccaatgtcgtatggtttctcgtttatacgtgaggcaacagtttgtatatctttatctcacataagaccttatagtcagcgagttgcaagtatactctgttactttcgcattttaatgagttattccattaaaagtaattatcgttacacgcatcgatccatattcctcttgatcttgacacgtgtcctccattgaaatggtagccgaagtttgggtataaaaatttccccttagaaagttctttttaaataaaagtgctttttaataattacaaaaggtatttttgtcataatccct

SEQ ID NO: 256285 - DNA, 1589 bp, Cannabis indica
ctatatttctgggagcgaactcctatccaacctttgctttttattttttttttttttttcatttctcatttttctttggtataagaaattaaaatgcattgaacaacaacattgtttaatccaggaatggtcttatattccagtcggcggatccttgcccaatacagagcagaaaaatcttgcatttggtgccgctgccagcatggtacatccagctacaggtagaaaacttcgaacgttaatctaacttccatttccccccccaaaattataaagaaaagaaatctaaatgcttttttaatacttgttttctcttgaaaacaggctattcggttgtgagatctttgtctgaagctccaaaatacgcttctgtaatagcaaatattctgaagcagggccaagccgagggcctccccgggaaagaagtactaagaacatttcaatgcagggtaataagactactagactctatactggctgccttgtgattgtacactggaatatgttcttattagtatgcttgtttatttatttttctctttctagcttggaatactctttggccacaagaaagaaagcgccaaagggccttcttcctattcgggttagcactcattttgcagctggacattgaaggcacaagaacattctttcgcactttcttcagattacctgattggtatgatcacaatactagcttttcttatttaaaatcattgatataaacatgcatacaaacgagagcccatgaaagagtaattcagaagaacatttgcttgctttccaaatggtgtgtagggattaactctctctctctttctctcatttttcaggatgtggcagggttttctaggctctactctctcctcagctgaccttgcagtgtttgcattgtacatgtttgtaatagctccaaatagtttgagaatgtcccttatcaaacatctaatgtctgatccaacaggagcaaccatgataagaacttatctcagtatatagcttgtaatgttacttgttagactgcccacttgtcacttttgagggtttttaggctcttgtgtagatatatgtatacatacaagtccatttttttttgttgtctcaataataatgttctgatttcttctccagccgccagaaaaaaaatagctacaattaagtctttctatactttttttggtcaggaagtctctctatacttttttcttgttctcagttatgaattttggactttaaaaagcaaaagcaattcaagttgaaccatcaagaaaagcttgttttgaccatcatttacaagtaatagagttacaaaagtgaggtcgatctcacaaacaccaccgtaaataaatatcaaacaattaaacttttatttctaatttagcaatcgaatcaaaggattttataattaaataatctacacaaaaagtaattaactaaacaaataaataaagcaattaattaatatgatatcaacaatgataaaaatttagagtaattaattgcaattgaatttattttacatggtttaacataatttaattcttagtaattttcatgtaataactaatttactaaataaatttatattc

SEQ ID NO: 256286 - DNA, 2331 bp, Cannabis indica
tttattttttgaccttaataatacttatttttgaaacttttgtaagtatctatcaagtcgttatctacatgtcattttcttattagcatatttaaattaatttttaaatgaaaaaataaaaatttaatgacttgtactaattagaaactgttaagtaactattgacttgatatttaatggtcaagtataagtttcaaaaatataacttatgaattgttcctgtcaaaaattaaacttaattattattagagttagtgccgtaaaaaataaattgtgatatataaaatgaatgagttactcctcctattgtcaattgattttgagatggaacttcattcaccttatttctaaattctgacatttatttatatgcaacttcgagataattaagtatttatacaataaattggtgataatactttttttctctcattcctcatcttcatttggcttatttacgacaaactacatagtgtggtatcaagttgctcattggtgatgctctcttagagggagtaagtaaacttttgaaagcaatgtttatggaaagtaagcaacaggctccaaaaagaagacagaaacagaaaaaagttggattgaaattgtgagtcgtaataacaataataataataataataataataaggatcctgaacattttacgaataagtcccaacccaaggtttctttcaaaattggaaagcagctgcctgccacgttgtgagacaccagcgccaagcgaatattcatctcattcatgtgactgccacgtggacttaatcgaacggttgagatggtaaaagagaactattaatattatggagctgggctgggctggctgaccttcctccaaccctccaaaagtgaggctgtcttactcgttgatttgtgagctgttttgggaattgattggtcagccatattatctgtaatcacaccttaactaactaacaattttttccaatttagaaaataaattttaatattaataaaaaaaaagacctagcaaacgttgttaattgttaataggtccatttccaatttcatggtcccaatgtctcttttttccttaactaaacataataacatggtaatattttttactatttattatttattattatttattattattgtatgttacgtgaatttgtaatatgtataaatcggtaacattgtaattttattttatacctaacctaatacagaagagcacataatgtagcttaatgaggaaacaaattaacctcgacgcgtttatctatacgagtaggagcatggttggaagaaagctgtttcggttgatcattcataggcaagatctaggagaacaaatttaatttatatttatatattacatatttatgaaacttcctatctactcctttatgtttttgtattaatttccttctaagttaattttaatctctaaacgaatcttaaacaattttaatttaatagtttttccttcttttttaatgtctcctaaccaccgtgattagttttttctttttttggttcatatttaaatgcagtctataatcaataatcttccagagtggctaccacggtgatcaaaacgacatatatatgatataaaaacaaaatctcaataattaatctttaatgagtaatattaataaatgttgaagaatatatatgtacattcgtttttgatggagtgaaagacattcttatctctatatagttgaaaaaataaatatcagtacatttataatgttttttaataatcaagtgtcaaagacacctgctctaatgtttcacagtatatgtatatgcttattttatgttatatataaatggttttaagtgcctgtttttacttagttaagttttgcttaagctggtgtgacttgtgagacgtcacagcgttttggtccattatttattaaaattaaatggattgaattgttatggcattatattaaaatcatggatattacttgtctaaaaataataaatttgatggatattacttcaatatatattattattttaatatgttaatttatttttatttattttatcaagaagatggtgttggattcatctttgacccattgatttttccttctttgtttttttttcttctaagattgacagtttagatttagttctttgtctctctacgagaatcatttatatgtattaaattaattaaaatttttattaaaaatttttctagtttacttactaattttttccctaattcatattcgtaatcatgaattagcaatacgtgcattcagggtggataataaactaatttgaatgaaattctcttatctttttttttatgtatgtactctc

SEQ ID NO: 256287 - DNA, 2990 bp, Cannabis indica
aacaacaacaacaacaacaaacttgatgcaaacctcatcttggttggcaaggttccacctgacacagtcaagttgttgttgtctagtaaggtgcagcacgagtttcgcttcatcttccacacctaacagaaaagtgggtaagatctgaaacaattgttttgataagcaatatatgcaactgaaatttgataaaagaaacatgaaatggcagaatgacccatttgaatcagaataaattaaaatgcacaaaacttaacaaagcaccctttaatcagcaaagcaaaagaaatttttttctttaacttacattcagaggattgattactttggcaataaagagtctcaaaatcatgcactgttaagcaccctgattttgttacagataccaaatatattccctggaaattttttaacaaaacggaacaaacactgagttctaaattaaacagaacaaacttcaaattcaggaaccttaacaaaccagacttcaccttgttgtcaaagtccaaagctgaaattccctccctaaacaaatttaaaaggaaaaaaatacaattagctatagctacctttcattaaaaaaatttaaaataaactaatgattaatacaatagattttattagggaaaaaactgacttaaaaactgacttttttatgagcgcttgaccatgaatatacccagcattagctactcggtttatctaaaacgagaaaaatcaatcagcacataaacactgaatcatgataatcagtaatcagaatgagacatatagcacaactacggcaatagggcatacatgcgtgagacaaggagtgccattgagatgatgatacaaatgagggaaagccccaacctatttccaattttgggaacccaaattagagttgcaaatacaaaatcaagaacagtactacttaaactagggttaaggataacacctctgagtaggattgaatgagtaaatcggacactgaatgtcggtattttggatcaaacctaccgttcaattcaatgagacttcgtctccattgttgcctgaaggagccatttcagattatacacaatatccacttcaaaattaacaataaataaaccaaaaattacctcctcactggtttggagacttcattcaagggttccaagggaaccaaatatttctccattaaacatcaaaatcaatatggctggcaatttgggttattgtgttgtcacgtttatgacgcgagacgtttatagttaacacgaacacaacacgattattaagcgcatcaagccctgaacacgaacacaaaataaattttaaacattataatttcaaaaccgacatctttaacacatgattaaatgtattatgatacgatacgaaactaacacgattaaacattattttatagagagttttccaaaagaggacgttacaaaaaggcaataaaccaactagaaacagcaaagttcaatcaaccaacaattttcttcacacatcatcaaatttaaacaaaataatatacagatctatttaatttaaacacagtatctacacaatctcagaccaaatgaaattagaaacaaagaattgagaatcaaaaacacaattaagagagaaattatatcaccttccatttccaactgtctctgccaagaatgtataatcttaacatttccataattgaaacaataaaaaagtgaaaataaaacagtgttctgggaggttcattaagaaatacagataacagaattctaggaaaaggatttataaggtcaagtctaaaatgatttgaaaatatacagtaactatgctgattctttcatcgaaacaatagttacaatggtctgaaactttaatgtgcttaatttgcttttatgcatttaagaagagcaagttccaaatttttgataaaatgttaattgtatattatatatataaattcaagaacaaattcaataaatccatcccgagcaccccccatccctgggacctcacagcctcaaccataaagcccccgtgaccaccggccttggaccccaagcccagcgacccccatcctcacgcccagaaacccgacctcagacccaagccccacgaccccccgccatgacagccgtgacctcagaccttcagaacacatagagagaaaaagagtaagagaggtacctccaaggagagatagcggatgccggtgagagatctcaccgtcgagagccacgccgccggttagatatgacagagaagagacatagggttttgaggagtcagggtgagaagctgcctcaattttgactgttattaagagttcagttaaaagtaggggggtaaaatgggtttcgacagggcacaccaacacgaacacgaattttacgggaaaaaattagacgcgggtcgaaaacgggtcgacacaactactgacaaaaaataaaaacgagttaagcacgacatgacatgacacgacccgcttaacacgaatgtgacacgtttgatacaattttttaaaatataataaaataaaaaataataataataataatataattatataaaaatatatatataaatatttttgaatatgaaatagcaacttcattgaatacttagcattcggaatacaagagggagattaactcatcccaagcattatactcaaaaatgctaagaccagagagaaaataagagtgtcttgcaacaacatgggcaactcggtttgctgatcgtctgataaaacaaatcttaacattattttgaaaagagagtaaaatttgacaatcatgaataatcaaaccaaaaatagaatttaattattgattactacgaatgccttgcacagtgagcatgctatctgtctcaacctctacatcagaccagttcttgcttttaatccagttgagagcttctttgactcacattgcttcaacaacttccacatcatagacacctccataatagcacgatttagcctcaaatgagcttacccgagctatctcgagcaacaatcc

SEQ ID NO: 256288 - DNA, 885 bp, Cannabis indica
atcttttttcttgaaatcattctttaatttttttctttagactgaattcttttgacatgccagaaaaccggcatgagcatgattcgactaaaattgaccaacacaacattaaaaaataaacttaaacacaacacaatatacttaaaagtacgacatgtaaatacgaataaactaaaaaacacacattaaaaaatcttataatttgataatgatactatatacatatttactaatgaatattcaaaacaggatggactggcattactacacctgaattaggaaagctcatgctatctatatggctggtgagttaatggtggaaaagggtattattgatggagttttattgtgataatgttactgttgtcaaggcattattagcagcagggtattggtgagtcatcttttattcctctaaaaattgtgaacattgtagagttttatttttaagatatttgaggcgatatttctttaatatttgcagttattacacatgaccctaatcataaaaaataacggtaaatgtactttattttacgattttgttgcaatcatatatttttttttgctattaagtgtcaatcaaacccgttaagtgctagctcagaaacatatggcgacatatttctttagcttatgtaatatgtagtctaataatatgtctctacgtgtttctcagttgacacttaatgaccaaaaaagagtacggctgtaacaaaattgtaaaataagatacttttaccatcactttttttgattagaatcatatgtataacaattgtaaatgttaaaggaatttcaccgcaaatactcctttactttttgaacattattttattttcacaatttttatttatattattataaatattctccattcaatta

SEQ ID NO: 256289 - DNA, 2185 bp, Cannabis indica
gttccaaaataccgggcaccgaaaatgcaaaatatgaaaaactactgataacataatcatgcatttctgaattccataaataacagtactaaattatttaaatagctataaataatttcataattaatcacaattaactgataatttccaaattaactaagcgggctttacactagctcatgtatctcccgctcaaagactattttacccagtttttttacggttattaggcttgctccattccaggtgatcctgcagagttgtaggcttatggtaggatggtatattttttgtaaggagtgggccatggtggagcctgatttggaggagattgtcttcttttaggagtttgaattaatcccaagtaataaagagccctccaaagacgacttctacattctcaagtagtcaaaagtgaggtgtcccacaagttcctgaagtcatcctccagacatctggtaatactagtttactacctctagttttcttttgaagaggcaccctactcttttgctcaatttcaatcgaacaggtaagtgtcggccttctacttttcgtgattgtatcttctagttttgaaagtttctcgcttaaaattgcctcttttatctctgtgtaatgggttttatttctcgcctcggtccaactccatttttagaagaatgccaaaaggtgcattgggacatacccctggaggaattaaaagtcggggaactagtgacagcaaagaagttccaaacctgatgaggtgcgggaagccatttcttaaataattgcaaacaaagagaaaaaggttgttgagaaagataaacgtcagatggcagagctgcaagagaatggagagattcttgacaaggccactaaactcaaaatgcagtttgacacaagctttcctgattacggagccccagatgccaatacttctgggataggtaacacaccttataatttaattcatgctccctatctggatggctttacagatatcaaacaagatgggtctaattcctatttcatgaatttaaaaattcatggtatccttgtaggaggttttactcagcgtaaatgagatagtggcgagctcaacccatttcattatgccatctcataatgttaggatagccctgttcaccttaatgtactaccccagattctttgagtatgatagcttcataggtcgtgaggatattttatagtttaacttggaaaacttagagggattcagcttcaactttgagggttggctctggatctatgaccgttttcattattgctaatttatattcatgttttattgtttttacatcactgatctgtatctctttttttgtgtgattcgtcctcttacttacatcatggataccttggaagcattcaagaacaatgtgatttcccagtcatagattgtgaaggacggttccaagagacaaagggaaagaccttcaagctccaggttgaggaacatggagacattgtctctaacaaatttaatggattcccttgtcaatcaaaatgttatggtttttgatgtgcccattcaataagtttcacttcctgaccttccaattcctattgcaatcatgggaactgatatattattggtcttagcaaggatgacgctacacaattaccattgaccaaaggtctgcggctgagtaggataagtatgggaataaggccaaagtggaagctttggtggctagactaaaggcaaagtgagagtagaaggtgaaggagaggaacatccattgtgaggactcgatcaagattactgctcctgaagaattcaaggaggtttataaggggaatcctgtagccccttcctttcccattagaccatacaatcaatgatggagacttagctttgaacagtgaaagaaaccagctgataacctagaaataggatgttgggagagatgatgtacatgtggctgcttgccggcttacgacgagatagaacactgaactagaagtaagtgatctagaagcttcttcaaatatcaaaatattggatagatatgttgctattgatggattccagctaaagctaggaagtgaaacaactccatttgttacttttgcccctgattttgcccaaaatacgtggaccaaccggaggatgacacgtagatggaaagggtttagcgtttgaataaatcagttaagtctccttaagcgcaggatt

SEQ ID NO: 256290 - DNA, 3349 bp, Cannabis indica
ttacaaatgcaattaatttgactgattttatatgtttatcatgacatgtaacatcaaatgcaagtataacaattttctaagtaatatttcttttggtcatcaaggataatctctttctagattactattttcattacaaaggtgtagatgccaattatagctgttcatacatttaagaagttagtttagagtatttagtgtttctttggtcaataccgaccattttttcattagtttccttaggcatatttgaccattttataaggtcactacctaatcatttgtaagggacttatattgagataccacttgtactaagagactctttaacacaatgaagacttgttacttctgccttcagtggattaggttgagtaatcgactgaaccacgtaatttctttgtgctcttgttgtttaatctgatctagatgtgtgcttgtgtgtgtgagtcagatcaagcattcttaacaaaaacactaatctgagttttccttaagcttatgcaagcaagaaaagagaaagaaaggtttcaatcaaattaaatgaaaccaggtcatttggttgctctgccactgatgccttttcacttattttcttttcttttcaaagtaaacaaaatttctggctatgctgatcattggaatctcacagtttttttttttttttgttgggttgaagaaataaatactaaattgtaattagacatgatatttcctttcagtatataaaaatgaatagttttactgtcttgcagcacaacatgggtgtaagaagtgttgcatgtctttttcttaaaatatattagtgtcaccataggagaaccacccataccacccttagaacttgtgtagatatatgaaaagaaaagaaataagaagcctatgattgaccaattggaagaaagacttcacctggattctttctgcaagtatgttaagcccatacattgctgcagctcttgcactagcaattgctccagcatccctcaaaccctccaatgctacgtactaagaaatgttgtgaatgagatacttatattagcatgtcctagatcagacaacctgacatgaggaattaccaaaaaaacaagtaaattacctgagctgcaccagctgtatcatcaacatcctcttggattgtgcctaacttacttagaaaagcatcacttgaggcaagtgcctgaaaacatggattgtcaaaatatattttaaaacttcagcagtagtgagaggtttacagatatggcaaatgcaagggccaaattatatgccacacatatgtatgcattttctattaaattaccaggaagcttattatacaatactgttcagaattcctttaaagagaagaagaacaagaagatttttggttgacctgatgatggcttaaaactcgtcttaactgctcttctctaattcctggaagagcgagaaggcagagattggcagccaactgcacctcaccaacaatgtgaagcctatgacagagtagtaaatcatagttccagtagatgcttccaccagcagaattctcaataggaagaactgccttatcagccagccataattcaacagcctgcaataaaaaatgcagaatgaacaaactagtttcgtgaaaaatgttgttacctatacttcttttacacacctaaaaaaaaggctaaaaatcataagttaatgtcaataactctaaaaccgaaattgcctcatagataatagagttcacaaactatgataatctatcacatttctatgttgctccataaatatcaaacgatattagaagttttaaaaccgttttggtttgcttacatactgctaaaactacaatcataccataccttaaacgtatcttcaaacctatcacaaggaactgactgacattttgggtacattttgagtgcagcatcctcactgtaacatcctggtaagccctgcaacaattaagtttcaacatctagaatgcagcaaaaaaataagacattctcttacatcatttcataccttaaacgctattcgtacattgggatcatccttgggattattagacaaaacagagtcagttattgatcctgcaattaagtacaaatgacaaaaaaagcatataatcccacaaaatcagctatgacgaaattataatatgtcaaggtaaaaattttaagcagcaattacagtaatcttctcatctttgatttaagattataaggctagtacataagaaggatatacaggaattggcatctatagcttgtgatttgtaacagaaccaattgtttttcccatgtattcttctattggttttaaggtctaagttaaaggtttactagaattaatcattgtcaattgtatcccatctcattcaaatccgactgtacctttcagaacttcacaaaattcttcatcataaacatcctagcattcctctattatctggtttcagctgtttgggaacactattcctatcctaagaggtggtgcctaaataaaccatataaaagtaattttctggctatcttggcaaatttacatgatggcatagttaaacaagtacaatcttaagtatttatttggccaagacttaataaccacattaaacaagacatttttcatagttggaaggaaataattcttatatcccactacacacctaaccacattaaacaaattaagtggaagaaaaaaagtatgtaaaaattacgcacttgggaaaaagctcaaatccttatgcaatctctttgaaacattatgcttgtcctcctgactaacaatctgctgctgttctttctttggctcaaatgacttttttgcattaccatggaaagctaaagtactaccagatgaaccggaaaggcaaccaaatgatttggatgggaaacctcccaatcccaattgagatacacagtttcccagcacagaattcatacccatcaaatcattcaacctttcataaatgtctggaaccctgcgtctgaaatgttttggagaaaaaaggttgtcttttgatgaatgaaattggtattggtaagtaaggtggcattggagtcaatacgaaaaaataaaataaaatatgctgacaaaatatacatatacaataataatatttattttaggagtggaagaacgttacgaaattggttaagacttttcaccgaacatttgcaacgcagaaactggaaatggataaagcgaattcgcttctttttgcatggtttttcagatttttcaatgtaagataagagtgagtctgactgagtttaccattgttatatttgaaactgaaagacgttacataagaaaagaaaaagaaaacaacacacaacccttacgtaaaactacgtacaaaagataa

SEQ ID NO: 256291 - DNA, 2085 bp, Cannabis indica
atatatatatatataaatatatatatatatattttatataaatatagggacacgattttgtcccgtgatgtactttcacggaatgtattctgtggtacattagatgggtattagggtacattagatgagtgtcagagtacgttactattttctaaacctaattacccctaaatcaatcttagccctcaaatcaaataactccttcatctaacggatgacgcacatcacagaatacattccgtaaaagtacaatcacgagacaaaatcatgtccctataaatatatatgtttgtatcctattttaggtagagttctaatacccattgtgatagttattcttttctacagtaaattgtgttaagtagggtcagccttaatttgaaataggctttaagaaaaaataaatttgagctttcataataaaaatgaatgatatttctaaaaatgattaaaaatatgtatcattttttattagaggctctaaaataagtggaccttaggtatgagtctaacccaccttaatctaagactggcctagtgagcatgtttaaaaagtattgtttattagtttgatgcaacaagttagagattttcttttaaaaaaattgttaatgagaaaataacttgtaattaatattagttatattaggttaaatacttaacaagttatagcaatttatctatagagaacatcactagctgaaatcacgatttgaaatcattttttctttcaatattattttgtaataaaaacatatttttgataaaagaatattcacatttcatattataataagatccaatgaaaaattaacaacgttaagattcacaatttcttttatttactttttgtgattttttctttttaaaacaacaataagactagaaagttttaaattttaaaaacttgttttataaataaaccgtctcattatatttcatattttggtgtatttttaattatttttatccttgtagtgatatttatgcaattgattgattttcataaaaaaatcaggccgaaagcccaatatctgttggactatattttttttaacaacccgttggactatttatacgaattatttcataaatacttaaaaataacaaaataatatattttacggatctaaagttttttttttatatatttttttacggatctaacttttttctttacaaataatatatttttattgctttcaaaataacgttgttttcacatttacatagtaccggaagtaatgtaaaaataactatttttaaaataaaaaaattaaaatcttgtaaaaaatagaatctataagaaaaatgtaaaaaacaaatccataatgtaaaaaaaaaatatgattttaagtatatattgtgtaaattttttctatttaaattagaatggttcaaacaaaatatatttgggcttttagctaagcccaatatcctaaatgaacttcaatccaggcctataaagctgtcctgattaaataatattaatgcgttttcttttttcgttattacatgaaatataaacctttttgtgtcaaaaaacaaatatatggaatttttattctttgaacattatgcattttttttcagtttatggttttcccccattattttaagaaattgatagtagtaattggttactaacacatcaaatttttttattttattttttaaaaataacctgttactaatgttgaattagatttttatttatttttaatcaaaatttaatgaattggttgattttttttttacacatttttattaaaaataaagttaatttactcttaaatatattggagcaaaaatataaaatttagactaaatataacattagtttatttttgagattcttacaaaaatattgaattttggacaaaattttataattttactagcacacagaaattttaacaaaaatactgtctcttcataaacaactataaaacaacaaaacaaaacaattaaaaataacagtaaaataactaaaaaataaactgtgcaacaatagtgaaaatttaatatagtacacaatatttttgaaaaaaaaatcgccctacaataataaaaaaaataataaaa

SEQ ID NO: 256292 - DNA, 2718 bp, Cannabis indica
tttttctttctgatcatcatgatgttcagagtgcggatactattgaaggaaagtgtactgttcatagttttaagagttatactaagctagacgcagtgggaaacgacgatttcttctgtcgttttgagtataattctgccactggtgcttttaatccagaccgagttgcagtgtatgttcctcaatttctcaaactatatgtttttgattttgtgttcttttagtgtttaggaattgaaaagctaaagctttttttgttgatgatttttatttatatgtgaaattttggtggttcctcattttttgtggtgatctgaattggatattcaaaccataaaagataaatttctgagttttatgactgtgaaatgccttattttttttctgatttctggtttgttgagtgtgttttcttattcaatttggtcagaaggtttgatatttgatataaaatgacaggtattgcaagtgtgagatgccttacaatccggatgacttaatggttcagtgtgaaggctgcagtgactggtaagttagattgctcggttttcgtttgattcatatgagttttcggttgtagataaagttggtaaaacatacatgaatttgtaggaggaaacctttagataactctttagaatttctcattatttttcttgagtattgaaatgcatgtttatagttggtgtgcaaatttcggaccatgaaacttgtcaacatggttgaattgcagagttttggtctttgtttattgtcttctaatagatatatttacttgttaaagggaatggggcagcatgttaaaactaatttcatgatagaaaggtttgtttaaataatttgatcagaatcaaacttgacttaagatggtatgattttaaaacactttttccaatacatttttctatttttttcccttgtacacaatcagtacctgaggattatatacatattgggaaagtgttttcgaagaaagacccatctgtttgagtctttgagagattgtatataataattcattctgaaaaagtattttctcctgtacatttgtattttttctgtaaaaaatggttatggtggtgagacacagtcgcaggctcgcgctgatgtagaacacaaaaatttggacatgcgatggtacttcgatgaaaatatcaattattttggcttaagactgttcaaggctgatttagcttacaatggtgtcgatcagcttagagattgataaaaattaacatatttagtcttatgttttacgaaattgttaatccatttatattcttttcttccttcctgttcttaattgcttgtgattttatgctattagcatcttgatacgtgtctataatgttttagaaatcaaagtctttagcattctacttttgattcaggtttcatcctgcttgtatagaaatgactccagaggaagcaaaacgactcgatcacttcttctgcgaaagctgttcctcagagagccaaaagaagttgcagaattcccataatgcttcaagaatttcagatacaaaggtacttatttttttactcaaaaatcccagttgttattgccattttacaactattacttaaaatctaaagcattctatattatcaggtcgacacaaaacggcgtcggaggtgatatgaagtgggaatgcaaccaagttatgtagaatcgcaacggtggtggaagtgatagtggtggtggtggtggttgtgcctctgtctaattccgtgggtagaattaactcaagaaaaaacaggcgtcacacacgccgccacagtatctgaaaacctttttatgggtgtttttgcctgaattgttgaaatgttaggttgtttaggtggtggtgatgatgatgatcatggaggatgtatttggtttctcctgaatttatatctatatctatataaatatgtgtatgaatgtaaatactcttagaagttgtgaatactgagtagtaaaaattacttgttatgattagtaatagaaacagagttttttcacaattgattcaattcatgatataatcaattcataaccaacaaactcaaatggcataagaaaatggttttttttgtgcaataggtatactgaataatttggatattattaagagtgtttggcggttaaattttttttaattatcgtttcatttacatttaattctttaagttaaaatttagcggtaaaactttctaaactactggattgatagcaaattgttaggacctaggattagtggggtgtgctagcatatattaaataaaagggtgtttgagtctttgtattgagggtagtgttttggagggaatacaatagtatatataaaatattaaggggaattgaggggcatgcaatgttttgagtaaatctctatttgcactaaaggggcctaagggctcccttattttgtaattaggtttctcatacattcaatacacattttctattgttttgatattgttctattcctattattgctactgttttattgtgttcttaagcagaagatctcgggtctcatcaattggtatcagagcgagcgatttcggtggatgccgtcgtctcgaatggagaaattagaggaacaatggagatcgaagtcttatgattatccttctgaatttaatacactggaggaccttgcttcgcttttggatcaagtaattctcggacagtaggaggtactccgcctctcccgcgatctccgaagtcat

SEQ ID NO: 256293 - DNA, 1707 bp, Cannabis indica
attaatttaatattttcttaatcaattatcttgtgtttctttatcaaattattttgtaaaataataattaaacaaaaaaacaaaaataaggtgacacgtgtcttatccacaactagtatatatatatatatatagagtatgtatatattttcacttatcatcttcaatttgagtttctggaattctccactatcatcaatggcttccactgtaacaaaatcttcaagctacaacaaatacgacatcagaacacgaaaccctaaccctagatccgccgccttactcgtaatcgacgttcaaaactacttctcctccatggccaaaccaatcctccccaacctcctctcaaccatccgtctatgccgacgcgcttccatccccgtcatcttcacgcgtcactgccacaaatccctcgacgacaatcccatcctcgccgagtggtggaacggcgaactaatcttcgacggaactcccgaagccgaactcatgcccgatctggactccgatctccgcctcggcgaagatgtcgttttggagaagaacacgtacagtgcttttcagggtactaagctggaggagattctgagggagcggcgcgtggaggaggtgatcgttgctggtgttatgactaatctgtgctgtgagacgacggcgcgtgacgcatttgtgagagggtttagggtttttttcagtagggatgcgacggcgacggcgaatgaagagttgcatgaggctgctttgaagaatcttgcttatgggtttgcttatttggttgattgtgagagactgaaggaggggctttttgggaattaaataattttattattattattattattattatgtgagcttgtattatattgtgaaaaataaatatatagtaagaaatgtaaatgtatgtatgtaagaaaataagttgaaaataattatatggatttatgtttaaggaaatgagagaattgaaggtttaattttcaagacaatgcatgcatgcatgcattatacgacccacaaaattatgaaaaaggtccatatgagataaaaacccaatatataatgtaataattaaatccataatgaggtctcccatttcctacctttaggcagcttctagagtagttagagcataattttaattttatttaaatatagtttcttaaaacggctaaagagccattagcaaagtgtgtattagtgattcaagaatgtggtgttaatttaaagttgtgtttgattgaaagtaatgaaatggaatggaaaagaaataatttttattttttgtttagttgcattttaaaatattgaaatgtcattttaatgtaatacttattttaatgtaagggtaaataccattttggaccatttgttttacaaaagttaccaattggactctgtgttttgttaaatgataaaatagactatgtattttctaaaatagtacaaataggaccctgaattaattttttgtcaaaataaaatttaattataatccgatctaaaattgataaaactgtttacatttaaattaagttcaggagcctatttttactattttagaaaatacagtgtccattttgtcatttaacgaaacacaaggtctaatttgtaacttttacaaaacgcggatccaaaatggtattcacccttaatgtaatatgaaaaaaaaattaataatttttttttatacattttaaacttaaaatttta

SEQ ID NO: 256294 - DNA, 854 bp, Cannabis indica
ttgtgggattaatttggggttcccgaacccaaattataaccgggttaaggttaggaacccaattacgagatgggtacataggatatccagcggtaataatttatattggcaaacataaaatgtttagacttgagaatgttagtatggtcaaaaagttcaaggatatgtctccctgatgagttatttggatactttacccagtgagagatcgattttgttattggattgatactggggagtaagaattacatacttattttaagaaattagtctagttagcaagtaaaataggcacctatagttaagtattgatgacttagttgaataactttaaggaaacttaacctctttccaaagttgcaattcgcttggagtgacatcagttaaagacttttaaggaagatcttctgatgatggcattccattttaggtttagccagtatgaatgtttagtttttgacctttagactactggtattttgacagcttctatgagtatcataaggagagtggtaaatggtctccttcagtaattatattatggtatttatcgaggatactcttgaatactcacaatcagtagttggtcatgagaagtgtttgtgagtagttttataggatgttaaggaccatatgttttacatcaattcaagaaagtgaggattttagttattattagaagacttccctaagtcatattagtagtagagacatgattatagtagatctgggaaagaatggcgcaattagaataaatattcaattaagaaacctcctcaaattagttgggctttactaatggttattagtaaggttatattaatatctctacattggtaacagaaagaaccaag

SEQ ID NO: 256295 - DNA, 1690 bp, Cannabis indica
ggtccgaccatcggacctggggtgtgggattattgggaccggctagatagagagagaaagagagatagttttagtttgggggtatttttggggttttgaaaaaaaaggtatagtttttttagggttttaattattggtttaaaaatcaaattttttgattttctaagcatagaaaatcaaatttcccttaagaaatagtaaaggttgataatattaaacataaataacctataaaaatacagtaagaaaaatgactaacaaaatttagaagaataaattttttcaaagagaaaataaaatttgcataaaattataaattaaaattattctaaaaaataagaaacttaacaaaatagaaattagatccacaaagtaaatgtaaaattaatatatataaactatgaaaaataattaaaatataaattaaagttgagttataagaataaataaatgactaataaataatgaaataataaataatttagaagttactaaattaaacagaacactaattacgacatgatatgcgatcatttcttcggcacccctaccataagtcttcactgacctctgtcaaatcacttttgcagagaaaatgcagagaactctggccttggcagctatatcaacctggggattaaaattaataccatccacataatgaaaatgaaaccaaatcaaatcacgtccacactacaaaatcaatagtaaacattcatacaaatatataaatatatttagatttattagaaaattaaaaaaattagaaatattattaagaaagtattgggagagcatgatgaacaagaacacgaggtttgtggcgtagagattcccgataataaacggagataaggatgtccacacatcgacgacaatgacatagaaactaaaagactcggtcgagaaaaccccagcaatggcaaagctttgtcttctctctctacgctcgatccgttctcctcctccggtgattgaagtattttgtctcctcgtacgtcataatcaataataataatagactataaaatagggggaaaaacaaaacacatgaataaacatttctaatccaattaattaacaatccagaggcacttttactcaaattgataaattaatacagcttttggttcaatgatccaaaatatcttcaagagtcaaacggaaagaaacatcaaaataaaaatatataaaataaaaagtaaccatagatttagaaagaagggaatatacttatttggtaccctgcattttattaaataccaaaaatgccctgcattttaactaatgattatttttatatattattcatattttaaaagaaattatatataaatatatatatatatatataaattatattttgtattaaataaataagataaatataacatttatcgttttctttatagtttagttctaaacatatccaatattttaaaaaaattgaagttataatttagaaattcaaacaaatccagttcaaaaaattctaaacgcattattaaagtcaaataaaaaaataataataagaaacaattaaaatcaagctattatagaacaaagagagataattaatatgagtttatgatatacattctatctaaagtgaattgaaaatttaattttttaacatttactaatacatatatatgtccagtaaaagagtattaatactcaaaaacacata

SEQ ID NO: 256296 - DNA, 2217 bp, Cannabis indica
ttccatttaacacaagtgtggagttagtgttgcaagatacaagcattcttggtgctgaaagtcatcctctccatctccatggatttaacttttttgtggttggacaaggctttggcaatttcaatccaaataaagatccaatgaagttcaatttggttgaccctgtcgaaagaaatactgtgggtgttccatccgggggatgggttgccataagatttttagcagataatccaggtgagaattcagttataaataaaaattgtatgagtattagactaaataagatttttacctcaactatacaatgcttgttgattttttctccataaataattttcttataaaaaaagttaattcttcctcaactatgaaaattattgtaaattttcttcttcggttgcttttcatccattttattcttaaaaaaatacttgtatagatagtactttagtgaaaaaatttagaactgggtagctaatatttttatgtttaagggcattatgtttgtgtaattatacgtgtaatttatagctgcatcaataaattatcttaaaaaatgaattaaatacaaacgagtaagtatatttacaatgataactatagttcaagggaatatttttttaaaagaaaaatatagctttggaggccgaactctaaaagtgagttaaaaatcttatttactcttaacatgtctataatttaataatttgatgatgattttgaatgtattggcaggtgtgtggtttatgcattgtcacttggagatccacacaagttggggactaaaaatggcttggttggtcttagatggggaattacccaatcaaaaattgcttccaccaccaattgatcttcccaaatgttgatttatattctcaccatcacttattcaacatttattttaagagtcttgtttctttaaattttgtcaaacactttaaattattctttttgaataattttttgtccacatgcatgtagttcattgatatggagagtcaaaaaaataatgaaagagaatttgtttattatgtgaggttgaattagccaagaaaggctcaataaaattggcaagaaagatatttagatcactattgattctattacatttttgtatttatcttttgttgttggcttattgcacaaaaatttagttctttagtttagggtggaaataatattattgtttacttaactaaatcaaataacaaagtagattagaatttattaaaggcaaccataatcttatgtgagtaaatcaaatttagttttggataagcatatatttaagtaaacaatactatcgttcccatcgcaaattacactatttactagatctttaattagaacctaattttttttattgaacaatgaactttagctcctaattccatcacaacaattaactttctaaacttgatagtccgataaaaaaggttcaagatgaattttagtttcattttatgggacaaaattctacaaaataattcaggataaaagaaattatttactcaattatcttttcaaaatatattgacaagtgaattttttctctttggaaaatcacttcttcaataacaatttctttattaaaaaaatcaaggctataacttttaatatttggctaaaaacgataggtctaatatagggcctgatagatctgatgtcaacaagataatattggatctatcgggccctatgtcgggtccatcgtgtcataataaaactaaattatgagaaccatcaggcccactatcgtaccctatatcgaacctatcgagctatcttcttcaacctttaatcccttcaacattaaactaccattggattctatatcgggcctacatcgaacatgtattgggccaggcaaaaattgcagattcctcctaaactgcagatccgaacctaaaaatctcaaaaatcacatattctccactaaaaacacagacctaaccctaagtttaattgtttaaccctaaatcatgaaaaaaaaatgattacagttaaaaactcatgaaaaaaattaggaattacctttgacgaagacattgtcagtgttgggtggtggttgcagtggtccgatcgcggtggtatgtgggtcgtgtgggtgatgtggtcgcgaagtcgagttggtttgtgagtcgtgggtcgtgtgaatggtctgattgtgtgctcctccgtgtgcgtggttacacacacacagagagagagagagag

SEQ ID NO: 256297 - DNA, 915 bp, Cannabis indica
tttaaaagcataaaaattaactctataccatagagttatcagtcattgtgacaatgcagaagtgaatagcaaatgaagtagcattaattctaaagatggtcttttcagcaaatgaagtctattggtcctagtcacattcacaccattgtaaccatattaattatgtgacagtgggattatatattagagttcatgcatgacattatattagtttctacaaaactcatttgtctaataacactcgatgacttaggtgtcaaactaaatgttgatgcagcagttttttctgaggaagctcggtatggttttcgggtgtgtttttggtttactgattgaagacagtaagtttttgtgtgttgagtttatgcataatgtttatttgcaatttattaaataatttgcaattgtgttgctcattgtttagcttggatttcaaggtcatatgttgattgtagttttgtgggatttacggttcttttttaggtttgaataaattgagacgatgagctttgaagaatccattagataaagtaacagaattatctgcaccattgatgatgaacagttggcttgaacttttccttaaaatcaggtcctaacaaagaaaatagtacattttttaaaaacttgttatgtaaagtacatttttagagaaccaattgtataattagaattggctcgtcgaaatggagtgtaataatcgcataattagatatagaaattataataattaattttacagttcaaaattataattttttttattcttgtaactttcgtaccaatttggtgacacatctctaaattattatagaaagctcatttgtcatgtaagatttaggaataaagagtggatatttggcattatgaaaaaaatcaatttttaagagaaccgttcattatctccttaattaa

SEQ ID NO: 256298 - DNA, 2797 bp, Cannabis indica
ttgtctaaaaatttatattttttgaataatatttttctaatttttcatattgtatacaaataggttgatccctagacgggggaactttctagtgttgtgaacacttttacaaagttccactgtaagaacaataaattgcgcgatgaacacacacagcaactgcatgtaagtaattttatatctttaataacctcgttctatattttaatttctatttaactttaatagtttgttcaaattttcttaggccaaaatggttgagattcgtgaaattcaaccagagctgaccaatgtcccgcgacagtacaatatcgaccccacccaatttcccgcgacaatatacaatgtcgaccccacgcaatttcccgcatacatgcctgttatgacacatgtgctgggtaagcagtcacgccacttgaagggatgggccagttgccaagacataggatggggacaaagagggcaggtccctctgggcaacccattgtcacccgggaggaatatgaggccctgatgcgaagggtgaaagagcaggaagaacagaacgagtgacaacaacaaatgatgcagactcaaaatcaaatcatgagcatatctcagcaacaaatgatgcaattggccaacactgttctagaattttagatgcccccaatacctctaattccaccgattccactattttggcctcctggtgttgggtcttcttcacaaactacccatccccgtgatgatgacgaatacgatgctatagacttgtagtttttttagtttgcagtataaataatattaatgtttataaactaaatatacttttatttagttttagacaatttatataattttgtaattacaatataaatttcagttttataatatattttggattatatttattaattattatcataattctaatttaattttattataactataaatattaaaaaaaaaatagttttaccagcaaactatgtagcgccgccaaactaaaataattttttattgcccaagttttcccggcacattaatgcaccgacaaaactttcgcagttaaatgtagagtagatgataatttggtgccaacattttgtcgacgccatgtctcgctgacaaaatgtcgtcatggaccccttagccgacaacaaattgctagcgatgaacttattacaacaactaaatttgtcggtataaatactttgcgagttaagttgattcaccgataaaacttgttatgccgatgaatcattgtcgacatcctttgccggtgcaaaatgtcactggcaaaactataccgacgagatacgtatacttttactagtgagaaaatttgccagtaaaattgttttttcttgtagtgttttcttcagtttttattttagtcggagatacatgccgaaactaataaatcattatttgtgacggtgaccaactgaagtaaaaaagtgtagattattgacttttgtatcagtcaacaagtttgaccaaatgcattgactgacgcaaaaattcctctttagtaatgcttgcttgtagatctatcatattattgagaattttagatacattaatgcctgtttgcaacctttcaacattgttgtcgaagctgagaagaagctcttgccatgtggttttagaatgagcttcaatctatagaacaatgattagatcagtgacatgtaaggccaaaaagcacattagttaccaactgagattcttgataaggttcgcctgctagagcaagagaaattgtctaatttttcttctaccttaatgagtactctgcatggaggtacccctttttttgtggttttaaggtgcgtgtgtcattcattttagactttgaatgagcactatacaactgttccaacacagaccatattccagcagcagttgatgattccatcacttcaatagcaatagtctctgccataaaagctgtacaaccacccataaccaattggtcattgatgatccatttctcatacttgaggttgagtatatttgcaactttagatttagtttctccagtaccggtaaaaataaatttaggtggtcagatgttaaaactatttaaacatcaagcctatatcctcttataatggtagaaaccactgtcttccataaatatagtttttcatatctaatttcaatgaaaaaggctagttgagtgtgctaaagtgacgagggatgaagttatggagctgagagctgatatggaccttactccaacatttgtggaggtcacaactgtagcagtctattgagtagtagggttaatctgctgaaagtgtttagttggctactttttgacatgagagctctgataccaagtcaaatttttagagtataattgatttataattctttgagctcaaaaaatgttgagagcccttcccttttatagacaaatatgataacacacaaaataacatgagccattagctcattaactagaaaattgattacaacagaaaaagaaaacatactgaatttagtacaaaggaaataattttttttatgattgctccataacagtttgggaccacaacatctttatgaaaacaatgcacttctaattaggatgagctgacttcatttcttcacaaagtatttacgactgtgtctaatttttatatttttttttataacacagctagctaaaaagagtagaggtgctagaatcaattggttttaaaatgaacctactctacactattggccaaatattaaggaccaaatagtggctttggattccctcagaagaaaaaaaaaatccttctaaaaatatatatatata

SEQ ID NO: 256299 - DNA, 1932 bp, Cannabis indica
gagcagataggacattgtacatctgttaagggtatggacattcctagtctttcccttgttggaaggcaattggatagaattcgccaccaaagcattttaagtctattgtggattttagacccccaaagaagtctccattttctatctccttccaccccactatcaatattctttaggagtttataagctgagctaacagagaagtttccacttggttcaggaagccagagccatgagtcattggttagtactcgtgggaggttgatattgagtattcttcttgcatcttcttccctaaaccattgtctaaccatgtcctcattccattggccatccgtgatgaagttacttactagactcacaccgcccgtggactcaacacgaggaggcggttggcgagtttctcccggaacccaagggtcgaaccaaatggatgttgagtttccattgccaattttcctgcaaatgccccgttgaagttcatctcgcatccgtaagattgctttccataagatagaatcggatgccttggtctccatttgaaggaagttttggtttctcgagtatttgtctctcataagctggcgccaaaggctatcttcatccgttaagaatttccaagcccatttcagaaggaaggctttattcattgtttccgtggtacgaaaccccagccccccagcagtctttggtttgcacagacgctcccaagcgagagtgtgaagcttccttttctcctccgtatcgccccaccagaagtccctcagaagtttatcaattttggtagctgttgaaacggggataacatccgaagaggcaacataattcgataaacttgatcccacagatttgatgagacaagtcttccctgcggttgataaaagtttgaccttccatccctgaatccttttgaggacccgttccactaagtgttgagtgtcttccgatcgcttgacagatctaaacaaggggagacccaggtaagaggccctgctgttcatacgtttcatccccaaagtttctgcaattgcttgggcttttctacttgaaactccctttgagaagaacaccgaggactttgggtagctgatcgattgcccagagaattgacagtaggaatttaagcactctagcaatgttcttgcctctcggactgaagcctccccaaaaaggatgatatcatccgcaaacatcaaatgggtgattggagtaccgttacgagccagcttgaaccctttgagaagaccatggttttctttacttaagaggaggcgagagagtgcctcggctgccacaatataaagggacggagagagcgggtctccttgtcttagccccctctcgggatggaacttgcccaccgtcgtaccattaaggagaagcttgatttcatccaccgatatacaagctttgacccagttagtgaagatattactaaagccgagttggagtagcacagaggtgacgaagttccaatccagtttatcgtacgccttctctaaatctaacttgatgagcatgaagccacgcttacctcgcctcttacccattgagtggacaatttctcgagctatcatggtgttctctgcgatgtgccggcccttaacaaacgccgcttggttgggagatacgattcttggaagcaggtatcgtatccttgaggctaggatcttcgaaattatcttgtacgccacattacaaagggcaatagggcggtagtcattgacggtggttggcgagtccttcttcggaaccagcaccaaggaagtatcattaatgaagctaggcaattccaagtgagtaaagaagtgaataaccatctcaatgaggtcatccttcaccgtgtcccagtggtggatatagaaacttggcggtagaccgtcgggtcccgggccgttcgtctttaccctactgtcatttattggctgccat

SEQ ID NO: 256300 - DNA, 1010 bp, Cannabis indica
tttttcactcacattttgtttttatatatatattgaaaaagtaatttaatcaccatagattaatgaaatggtgatcataaaggaaaagtttaagagaaataatatctaaacttaaatgctatatatttttttctttgaaggaaaacttattcaataatttttttgtaaaggaaaaaaaattaatgcaatacatatgtatacataacaacaaatatataattgatgagtaataatatcctagatatatagtaacaatctccaagtaattaattaaatatgtatgtatttatataactactattaattaatatcaataccttgcttcaaataatatattaaataaacttgggaatataattaaaaagaaaataatgaaaaccaccaataataaagatactagctagtagtagaacataaaaataacaattaatttcaaaagaagaaaaaaactattgaaatagtaacggttaattaatttgacaaaacgccatttaatgggacaataattagaaaagtcatatgtttattgaaacaactaaactatatatacataatattgagctaataaagaaataatgaaaaaaaaattctaaatattcagcattgctattaagtatataacgggtgtttaacactttatagatgtgttgtcttataaataatttaaaaattattacattaaattacatgtgactcattatttaattagactaatagtaatattaacacgtaaaaaagagctaactaaacactttttaacctttctcttaaatattagatattagttgtactactacaattaagtgatacttataaataaatactctgatattatataacaattattctattaaaatatatgtataactcgattgagtggaattttaaacatcattaataatttattagtgcattttttggactacatttattgagaaataattatttgtcaatacgagttattacgagttgaaggagtcttgggggctgctttgctatgtgctattcat

SEQ ID NO: 256301 - DNA, 1891 bp, Cannabis indica
aatgtttatgacgaatgacatgcttctgaaaaaaatagtttctataatttgatctatgatacagtttagattatactttgttgattgtcttgtcattttgaataattgaaattgtatgcagccatgaagagattgatgttagccatccagaatttttcagcacagctaagcaaaataattatgtacctccaaataaagaggtaacttatctgatgttgaagtttcttagaataagtacttttttttgtatggagaataaaagtattttagttgcagaatacttattagataattaggttctacatcattatcatagggcatttgtattaccatgcatattacagataagtttgttattacttttcatgtcagaacatagaggttacattgtgaatttttgagaatgagctactgaaacaaataagaaccacttattttgaggtcctatttttaggggcataatctagttacagatttactaaatgattgttatcttttgttgattcaggattgcggacagcctggttttactctctctgagagaaagcgttttgctaacatattgaaagagtatgtttgaactttttcgtttccttcttttcttcatatattaatggctcttctttttttgaattattaacggtatagtaatgggatttttcatttgattggggtcaggcagaaaattcggtactaggtactcacacacaactttctgaacacccaactctatttctccaattacatttttttttcttgttttcgatcaaagagaaagaagcttgtttccaattaaattatttgttccttggcctcaacatctcatgtctgatggaaaatgtgactgctttttcataataatccttctatttagttctctttactgtaaacttcaaagatgttaattgtttacactataggtgagtagtacttcggagatagatgggttagaacttatttaccatggatcgtttatacacaattacaatgtcatgatgtattgaacttttacagcatcatgatttacttgtgtttgtggattatgcttcaggggaaagttaatggacgcatatagatttctatacaaagagaaagatatggaacaaggattttcatggtctggaaaccccatcggaaagtaagaatcttacataaagaaaagcgtttgagctgatcgtttaccatgaaatatggatagatcacattgatttaataatctttgattatattataccaccagacaatgatgtgctgagtttcttgcaggtatcgtggcaaaaggatgagaatagactattttattgtctcagagaaactcaaagacaggattcttgcatgtgagatgcatggaaaaggcattgagttacaaggtattgtgctttgtcgatgctttgtttttgtaaaccgagcttctcacccaacttttgaggaatagaaaattatgttaaatgctatgtaggtactcagtgggatccttttctcaaattttgtaggggtaaaccacaggtctggggtgtatattgttcattctaatgagtttcttgagtaattaacaacttgaaactaatatcccaagtagataatccactcccaaagtttgtggagaccatttattatgctgaaccaaaatcttatggataactcaatttctgagaaaagtgtcttaatgaaacaataatgactgaatttagtagataatcctgacatgtttcaccctaaagctaatacaagtgttgtgtcttcttaacatgtcagaagaattatttgttatgtttctcccactcatatatatgactgattttagtatcttcttttggtaggtttctatggaagtgatcattgcccagtcaccctagtcctttcagaagcaagctccataaattctggagaa

SEQ ID NO: 256302 - DNA, 1948 bp, Cannabis indica
tataaatgtgagtatatctaaaagaatatagaaataaagaaggtaaaaattaaaataaaaaaataaaatagataaaaaatgcaattttctcatatatatcatatatattcttgtgctaaatttgactcacaataaatgttatttttttatttactataatatcactaattattatgattcattacattttataaactttaccttttttatttactatattaccattatttaaacaataataaagaaactatcaacacattcatataattggttacgcaatatgaagtacataaacaatcattcacctcacaccttattaagtgaattctattcctgaaaaggtaaattactgactgaacataattaaaattcactttagataattctgaacaactatcttgaatttgaattaaggtaatcacactctttattaagtaaacttcatgtcttttataaaccactaactaaacataattaaaagagaattaaaatttgctttagatatttcttaaccactatcatataataaggtaaaccacacactttagtaggtaaactctgcgctttaaatagtaaatcaaaatattattaaattattaaaaaggtgagccactaaattataaaataactttgtgttgaaacttattttaccaagattttaatttactaacatgtatgtttgattatcacataataatctaacatccaaaaatataaaattcataaaatgatcagataacacatataagtttaggcattcttacattggttgcagcgaaaattaatgactcattctattcaatcattctaatccttgattctctatttgtagtagggtattgccaaatgatgaacttgaattgcttccttaaatccaataagtaataattttacacagtcttccacaaagatctgaataccatcttcaatagtttagattggtactcaactcactaatgatacaaaatttgagagaggataattgagagtcaattttgaattgtataatttaaggaatacaagcttttcttttatctgtgtcacttagattaggttagtgaaattacgctttatcatattccttatataggctctctttagagttaaattaaaatgatttggactagacgaaagactaatgagctcaaatcaaagccatgattcaattccataaggagtggcccatgaatttgatttttgccattttattttaacttaattaaacaaaatatctttttttaattttaacatttatctcatctaattatttaaataccaatttttgtttaataattatcaaataaaaataaaatttaaatatatttataaattagacctacaaagtgtcttaattaacaaataaatctatatttctcttttcttctcaaaatttcctaaagttagtgaaaattcacaaataagacataatttattatcgaattctaattgacttattaaatccattaattgagtctacaaagaaatattatcctagataatgtggggaccacgagcctatgaaataaagctcctaataagtagatctaagatatactaagtaaattccataaattattaatttctctcgactctactatagattcagaattgaattcttgattacataaaatgctctatatatccaatatatatatatatacactattaattatctattgtttcaatctaaataatcaattatcctctatagaaagtttacatcaaatatggacaaaattactgttttaccattcgatgtatttttatccttaaatcgcttaactgcttataaaagatacttcagtaaactaatataagtactgaaataagagatcttccatttatatcatttaactaagcactaatgaaattattgtttcactactaaatagttatagaatctataaattctatatttatgattagggctgagcataaaatccaaaaa

SEQ ID NO: 256303 - DNA, 2201 bp, Cannabis indica
taaaacttataatgatttggatttgatgcttaaataattggattagatgattatttttaaaaataattattatttttttcttattccttttaagaattatgcaattttcttagtaccaatcaattaaaatacaattatttaattattggattagactagtaaaaaaaagtaaaatttaatcggactagtgcaaagattttgcaactaaaaaaattacagaccgcgcaaagtgctagtttagaatataattatctctaaattaatacaactatacaaagatcccataattatagctacattattgttaaataaattaaaaaataatagcttactaatatttttaaattgaggttttttttaatggtgaatagaatcacacgtgattaacaaaacaccaaaatgtaataacaaaaaaaatggttcaatgatgtaattattcctagattttttacatatgtgcaaaaattggcccaaatatatcacttattgacattttatattagtgtcaaatataaaaaaacaacagtaaatttatttgaaattatgaacatagcaataaaaagttaaaacagtgaaaaaagtcatccaatttgaacacacctaaagaaacaccttagtttcctactgttgttttaaggggcagagaactttcaactccttcagcttcagcagtcctttcagcaacaattttcgacattccaaacatctgaaaatgagtgcaaataacaaattaggttagtaaatgcatttggcatcaaaatcaaataaaatccagcctcatattgtgccaatctactgaagaaattatgaacacagatcacataatcaataaacaaacatagaaacactatggtggggggagtaaaccttttgtatggtcttcttaaagcatgttttatgctcatccatagaagcattgatgaactcatcaatgtgatccttaacatcttccaagaacgacgcttcctcgcttttcttcttccgacaagaagtaacaggcggttttgcaacagatgattgcttttcgggatgagttttatttgactccattctttatagtgtccaatcagcaacttataattaaaactcaaaagcagcagagttagctgaaacaataaataaaaataaaaaatcaaattcactttactgcaacacaaggaaacaaaaatggtttaattagtaaatcacagttgaattggtttaaaacagtaacttgcgcagtaagtaacatcagttaatagaatcccagtaagaaaagaaagacatttcaaaaagaccaacatgaaaatttaataaagttgaatttttctttttgaaaaagaaagaggccatcgtctcaaaatattagaacctagtacatcagcgttttccactccctacacaggtctaggaatgataaattctcaaaatgtttggttctaaagacccatgtgactgtccagaatctgattctctcccatagatcctccgatgagctttcaatttcttcaaatattctgctattcctttcaatacatacttcctaaatcatggccagtaatgcagtcctccaaagtataacccttcgttttcctcccatcagtttattcctcatgctacttcttagtttatgaggcaatacaaatcacaagtttggattggagactcaccaaatactgtttccttttaaataatagtttgtttcgtgaataaaaatttcctattttcttttagtattaaattcttttttataacacctcctttttaaagtatacatacatatagagaggaaggagttcacgtttagtttagtaaaattattgtttatactttcacctatgtttttttattattattactaatgattctgcttgcaagtcaaaaattacccaaaattaactcagtcccaattcttcaaaattcaaataggaagatcaaactcatacttactcaacaaattaaacagaataattaaccctacttgaaagaacttatcaatacaaagggtattcagtaagaagcatttgcaagagttaatctttatttcaattagtagaaatgaatctctaacaacgattaaaattgaattaacaaaactttgaaactaactaaggcatcatagatagtcagtttagctgagattatgcttatcaaaacaaaagaaacccaaagtctaatttgaataaacaaatcatcatgtcgatagaaaaacaattatatat

SEQ ID NO: 256304 - DNA, 1861 bp, Cannabis indica
taatttttttttaatatacatatatattatattatatttaatttatttattatatatatactcggtttgactgagtcaaactgagtcttcacattgccaatgtcctagaaagaacgtaacacttatccaaggtgtaagtaagttttatcactgactatcacatcagtgtaaaaatccagtgcactgataaatcatgggacaacttttgaagcatataatcacaattacattccactgtgttgacataactgtaattgtgtataactatattattttgaatttaacagaaattgtatagtaaaccttaaacatgagaactacttgtaattaaacataaatgatttctaatattctattgctaacaaatcagattatattgaaatgaggtttatttagagcataaaatcttaatatgtgattcttgccccactctgtttaacattcaatgaaaataaatatttcttgtccctgtcctattccctatttagacggataatttctaccctattaagggcatctctcggcggagcccatttctatggaagaaatgtgcattcctataattattagaaacagtctttaaaaaactgatttaaggacggaagggaataaaaagttttatagtagtgatatatacaataattatagtgggttttggttttatgatcattttctccctttgttataggctattaattaaaacaattgttatttttcttttaatttacacccatgtattatgataactttaaaatggtatgattggtctaaaatctaaaagaacaatttctcaatattatatatctttcaaagacagacgaaagattattcgtttttgaacatgagaaaactgtattttgtagagactgtccaaatgtcctagtacctttttattcgcacgtattatattgagaagcaatcaacagaaagctcatgacaatctataattattgttataaaatattatactattagaactttcttaattaattagcaatagagattgctcccaggagaaacaccaaactgtctgcagtagtcattgtaataattgatccgagcttgaactttgtcaggctgtttgccatcgcattcaagagcaccattgatctttcttgtggtggcaccaaacccttggcccatcacagaatgaacatttgtcatccagaaccacaatgctgatttgaacgagacgatggcgtcctgaccaactctttctggtgagttcaaggtatcaatgttgttgtccctgccgaaagctccatagttatagttccatgtgagctgaagtggtccacgcccgtagtatttcttgtttgggttacagggatactctctacttgacctgtcgcaataatcgtgacttgcacctccagtctcttctatatagcatagaactgcagtttacaaagccaaattacttacacattattattaaaaaaacatagctgatggtataatcttaaataaatcttacatccagtttcgtgagtaatatgggcaaagaaagctgcaatctcacgcttagattgatcagcggagccagaaccgaattggcgaaaggagttggcagcgttgataaaagcgtctcggttgtagaagctcttaccgggacagttcccagtagccttgttttttattccattgaaaaattggggtgtcactatagaagcaacagaaccaccattgttggaacctgtacaaggtccggatcggcagccttcgccgcagtaagcttccccagaaccacaatatccgtatttgctacagcaaaggttagagctacagccacagttttgagccagggctcctccagctagaatagttccaatcacaatgaggctcactagtgctttagcta

SEQ ID NO: 256305 - DNA, 2138 bp, Cannabis indica
gtgtgagacgtgacttgatagagtactgaattagtttcaaaacacaagttgctacatgttaatcagatcaatattgagtgagttatggttgttttagtaagctatcgaccatattttcttgacatacatcagtcttcatcttggccgcgccattcatagtaatatgtttatagcatgcacattgacatgctttagggtaaccagcctcaataacaattaagattgtgctaccatacttcgtcttcaagaatgtaccgtcaatattaatcacaggatgacaaaacttaaaacccctcctacaataatcaagtgaccaaaaatagtacttgaacctgacatcctctgtcacaaagtcagtaatggtatttgaattcttctgttccagtatatacaagttggtgtatgcctaacctatgtaagtgtcctctccttgccttctcataactaattgtgataccgtattcatcaaatatatctctcattatgtatttttccttgtacttagttccatctgatatatactttcccttaataaggtggccaacaattcacaatgctcggttattagaatttctagaatctaggttacatgtgtgttcattgtggaacacagtaacctcaaacatgtcacaacatgtgttcttcctccgctcaatatccatttacaatttggatccttgcgagttgcgagttacgtaataatcaaggcgtaccactaagagaagttgtataaatagtattttcctccatgtcttctctaatctgcataagatgtttgaatttcgtacatacttcaacatcaaatgctagagtactacaaggaggatctagccgaatgctactagtgtctaacctcaaggcatgtacctctacaacttaatcaacttctaactcgatatcatcatccttgttcaaatgtaccacaagatcattattgtaatagtgagcatcaaactcaacaaactaatccaattcgttatcagtgttgtgctcatctaatttagtagggacctgctcattcaaaccaaccacgcaatttgtttctagaacaaaagtcccaactacacttcatggggggagtaggtcccaaattcacatctctcttccccttagtcacaaatagtgacaccaagttctccacattcattttttcatgcttaagaacactcttacttgaccatctttcattaaaacttcaggcggtattttattacctttcatgtacatttaaaacacctttaatttcaatccgtacactaaagggtccacttccaactcttcatacaaaattttgcattttctgtagagtagtgtcaatctcaaataccatcttaatttttgagttattaaatatccagttgaaatctttaacaatccaaactccacaaacatagttgaatctacaaacaaaaatgtaacaaaaaattaattcatatcacaaacatgtcgaaaactatcacaaattatttatcgaaaactatcgataaacataacgaatttgcattagattgatatcaatactgttatatagcaaatcgtttcacaacatattgctaaacatcattaatgtcgacgatgttactatatgtcgataatgatatcgctacttgtcgtcaaacgtcatccctaacctctaacacacacttgttgcaaaatattgctataagcattgctaaaaatctgtcgacaatgctactatatattggtaatgatatcgctacacatcgctacttgttgtcaaatatcatccctaacttctaacgcacactcttctcacaaaatattgctataagcatctctaaaaatcgttaaagcacgaaaaaaaaaccaaaacacgtagaatcactcaagttcatttcagacacaaaacaaccaaacaaaaaaatatatatgtgtaaatctattcatattaagctaaatacaactaaacctaacaacaattagtaaaaatattacatataaattgttttttttttgcaagaaattagttcttaaatgttgcagtttcaaggtagtctaaccaactgcactgtcatgcaaggtggcctgacggcgtgagctctggcgacaggtggtccaactagtagagtgtgtgtgtgactttgagagagagagctgcactgtcatgcaaggtggcc

SEQ ID NO: 256306 - DNA, 1710 bp, Cannabis indica
aagagagagcaaaaattattacttcgcaagacaaatcagacaaatgggcggctttttagctgaaatttcccgagactcaatagctttctggtaaataccgttcttgagccgtgaaatacacacgacaaaccactttctaaattcaaaacaagagacagataaaaaaaaaaagagaattatgattaaaaaaattgttcaagttaacgtttccaagttcaattggatgtggggtgaatcatacgatcagaattgggtattgaagtgcctgaaaaatctatcagcagagtcttgacaataaaacttaatcagaatgctataacaacgattctcattatgatcagaaattctacaaaacaaaccaaagcagagttaaaatcaagaataaaagaaaggttcaagaatgtaatcagtcgaataaaagtttaaagttaaacctgataatttgcatttgcgaaatttgatttataaaatcaggaccacagaactggcaaaaatctgcatatgttatctgatttggtacttgacaaacacaaaccaggggacttcttttagcctacatgaatataaattggtaacattatcagcccaaatccaaggttttaattttggaaaggcaagtaagtgaagaatgaaaagaaagaaagggaaatacttacaggaagaacgtcattattcatatagagtacaatgaagcctctacaagaagataacttaaaacgttgagtgaagtcattttgacatggctctttggttgacatggctctaagactaagagtgtctaagcttgatagatctgagattagaagataactaacaaagcactttaattttatcaatatacataaatggttctgttttcttaacaaggaatttctcttgaaaaggaaaaaaagccctcttcatacatcaaaaagaaagccataactgttaaaaaaaactcaagaaattaaatgcttttattcatacacgaacagtataataataataataataataataataataataatgtgtatacatactctaaaaactccaatgttcatgtgtggattactgaaaaaacttcaagtttggattatttaggatcgttaaattcattcagacatttcatcaaatcattttcatacacaatctacatactgagtttatcattaaaactcattcttttcaatggcaatatacaatgaagtactaatactagactcctctaatatgcaatttaaaagattaaagtacagtcattgcaatttgattaatcaaaatccacccacagacaatctttatccgccaagatcagagaaaacacaagaaaacttacggtgataacaaacaagacttacgtgagcactcgctttcttcgacagtcgtgtggcccaagaaagcggtagctccggcgagttgacagaccggtgagccaagagcgaccagaagaagaagtagaaagagaaactttggtgttttgggttttgtaattaagaaataactgaagttttagcggtaatcataaatcacaggaggaattgagtttggattagagcgctaatcaggagtttaagatatatatacgaagtgccacgtcatcatttaattattattaacagtgacagtgggtttttagttactagctaatgatgtcgtttcgaagataaaacaaatgttaatggtgtcttatcctgaaatgatgtcatttatgggaaattttgtcgttct

SEQ ID NO: 256307 - DNA, 1681 bp, Cannabis indica
ttggactcaggacgttgggatcaggattcagatctggactcagggccgggatctggattcggacccaagacataggacctaggacccgaacccaatcccggacccagactcagaatcgaactcaaacccgggactcgaacacggaccaagatccagaattggatccgggcccgagacccggacccaatccgtagtcagtgtttggtttgagtttattgaaaatatataattattactttacacaatctattaatataagtcaatactattgtattaaataatattaatacaatataatacggcatacgaaatgagcccatagtaatataagagtagtatacttattcttaatttttacttttaaattttttatatatatgaaatatctcgcaccttttattttagttagcaggcctctcaaatctccacaattctaattgtggttcaagatttcaagaaatttaatttttacattttattttaattaaagaaattcaaaatataaaacattttttttttgaaaaaaaaaaacattttttttggagtttagtgtttatatataagaaattcaaataggtttattttttatttatttttttatttacatattattatttttaattatattcctcaatattttttttaaggaataataactcagttacatacgttttgctatgatatacaataattaacctatctaatgaattattttcttagggtatagttatgaattattttttaggatcattggtaaatttatgctttatgatagaagtaaatcagacataaattaatttaggtaagtgtatgcttaaataacagacataaactaatttcccttttatttatgtacgattattagatagtcctaattttagtttgttggtttgtgaaatcattcttatttttgaataaaatacaaaaatatatattaagattatatttataaataaattttgtcaatgataataaaaaaaaatagaagtagttacggacaacagaggttcctaagtaaagatacttatttccaaatactcttccaattcgtgcttcccatcttccattatggtggtgtctacacatgtgtagtgtaccaaatcaatatctattattgattatacaaagtatacatatacataaatacgtaactcaaacttactctaaatgtagacatattttaatttattttgagcaaaatgacattgtgaaccctttgtctatattttatctactttcagccactaattaaattaataattggtcatctagagtagatatgaaaaatttaaatcaaaattgaaagaaaaaatataaaattgaccaatcaattaatttatttgtgaagtattaaatataatatataatatttgtaacttatacatttcatcgagctggtttgcccgagaggttaagggggtagacttaagatctactgcacataagtgcgcgtgggttcgaaccccacagccagcaatttttcattttcatttttttcacttcattttataattgattaaaattattaatataatagaatatttagtatttttgtcccttgaattttcaataatagtgattatatttcttaaaatatatggtttgttaaaaatcttttctaaattattatatttataaaaattttagtctttctgcccgttaggtttcgtctcattatttt

SEQ ID NO: 256308 - DNA, 1170 bp, Cannabis indica
ttctacccaagacacaattactctcagggttggccatggaagaaatgccgaaaaatatgaatcgtccggtgtggtgtgattatgattaattttttgtgattaagtaaaacacattaacgacacgagttttgtctctttaacaaaaacaaaaacgacatctattttgtgttacttaaaaaaaatgcagaacgactcgtcgtttaatgaggtaattgaggacagaaaagaaacacattccagtgatccactacgctaaaacgacatgtcgttttcggtatcaagttcgcagaaaggaacacaagacaaaagctcccaacaactacaacaatggatcaaagtcttcccattcaatctttcctctgctcctgaaaattcctaatccgttgagtttatacaaattaagtatatatatacatatatatatgtgtgtatgaagatcgtcacctataacgtgaatggcctgagaccacgaatctcacaatacggttctctgctcaaacttctggactccttcgacgccgacatcatatgcttccaggagaccaagctccgaaggcaggaactcaccgccgatttggtaatggcggagggttacgagtcgttcttttcctgtactcgaacctccgaacgaggccgaactggctattccggtaaggtgtttgatgaaatgcctcaaacaaaacctaccaaagagcattgtctcaattttcgttttttttgtttcaggtgttgttactttttgccgtgtgaattcggcgttttcgagtactgaagtggcgttgccattggcggcagaggaaggttttactggtgttcttggaaatcctcgtttggttgctactggacttgaggagtttgagaaagatgatcttgttaagattgatggtgaaggtcgttgtgttatgactgatcatggtcattttggtgagtttaatgttataaatactatattgcatagaatggtagtgcaatactgacctactaagtcttagcaaatgcatagatcaaccaaaaatataaccaaaacataccattatcgcgagacaatatttatttatagagttcgggagaaaacctagcaacgaaatcctagttagactggtcacttgtacttacaaagatgctaagcccattaactatagatcactaactatatgggctaaaatgaca

SEQ ID NO: 256309 - DNA, 1599 bp, Cannabis indica
aattgagtaaaagcatcagtatcggcaatgcaccgacatttgaaatcaaactatttcatcaataattgaccaaatatcaaacctttgaccactaaattacaatgccaccgacattcacagcagatcaccaaaagcctcaattatacaatcaaaacgttcaaatagtaaaatagactagttaatcgcaaatcgcaatacaattgccaaaaacaattcagatctgacttcaatctaaattatgcatgaagaattaaaaaaagcggaagacgaaagcaatagcatacctgacgaagaggactgtctttgggaagaaagcttccaatcgttttcccatacacttcacaagtagagaagtgaatgagcctcttattgttttcggaacagtacttcacctaaattcaaaaaagaaatcgcacacatatccacttcaatcaatcaaattcactacaaaaacaaaaacaaaaagattatccatttccatattcaacgtaccacaggaagagcatcaataaaattgctgtaaatagtgtcgagcgggcgagtgttatagtccgccggagtacagatcgcagcaagatttatcgtctacactcaaaaaaaaaatcaaatttcaaaaatcaagaaccgccattaaaatgctaaaagaatcaataaacaaatatgacaaaccagatctgccatcttaatgaggccttcaagacgagaatcgtgcttgatgttaagtcggtggaactggatacgatcagcatattcagaagtctcaggctcaaggagatgcctgatcttgtcgttgtaaacatcaagagccaagatcttgtgaggagtttcgtgaatgagcttctcgcagagatgagaaccaatgaagccaccagctccgatcatgcatattgtcaatggctttatcggattcccatccagatctactctcgttgccgacgccattatcgttttcttctctttctctctctcttttggtttctctctctttctactgaaatgggtatggggaagatgctaacgtgcgcagggggtgtgtgttagtgaggaacgacagtgagagatttttgggtttggaaagggaaacgaagggtcggtatttatctaaagaaactgagagagtgggcccacacgagtctgtaaaaatggttttagctacgcgcccttatcacatgccacgtggaattattttcggaaattttaatcaaaattaataatttattgtgataattgtggatttttttaaaaaaaaaaaaattggaaagggataattgtggattaatttagtaaggattttctttttcgggatattatatagaaactaatttttattttatttttaaggaaatagaaactaatttaatgtgataattgaggattaaaaacttcttagaaaaaaagggataattatccaaaaacacgatttttttttgtaaaattttaatattttaatattttataaaaacaacagacaacaagataacaacaataacaaataaaatacaattaaaaaattaacaataaattaacaagagtttaaatataaaaatacattaaaaaaaactttttttcatagtaaataaaattataaaaattgtaaaa

SEQ ID NO: 256310 - DNA, 1220 bp, Cannabis indica
tgtacacttctcgtatgtcatcaagttgattcaacagatggttgtgactataatgttgaattttacgagacattattagtgtacgaagttgggttattttggttttttgggctaggggcgaattgtgtatgattgtttaaagaaagctttaatatatgatctatatatagatgatcaattgggttgcttataatataatccacagatttatttacgacaagtacaattcttacctctcattcaaaaattaaacaaggcataattatgatgaatatattgaaattctttacttttcttatctgaaaagaaagtaattgatattatttcttgttcattatttcctattcgttcatttgaacaaggaaaggaagcaaaggaaagtagtatttttcgttacaaaaattctattctttgcttattttatggtcgttgaatatattcatcaaattatctctaatatattcatgatattatcatttttgttaatttgtttttgtaattgttcttcctttagttttaaatattttctttctacccttttaattaacgaataattttttttatatgctttatgcggtgaggcggcggcgtgttgctttgcgttggatttagcgaagaaacatgcctttaaatttattatggtggagagtgattcgaagctagtcatcgacgctctcaacaggactgagtccaagtgggagcttaagaactatgtctcattttgtattaggtcctcctcctcttttattagttgtattttcagtcacactagtagaaattgtaattttagcgcccataatgtggcaaagtagacgtttacccaccagaggtttggagatgtcttcctattcattccatccctgaacaacttttttgtaatgaggtctaaatttatttgactaatatatgcacgcttattttaaaaaaaaaaaaatttacagaaacaattacctcaaattttgaggtacccaaaactgaaccatataaaaaagtcacatcactatcgtctaaaaacactaaatttaaaaggagtttttacatttaatattgaaattttattgtattttttaaaaaatattgtgtaaactttatattgtgtattatattaagtttactgttattctactattattttttagagataattacataaaacactattttttttttgtaaaaaattttacagatttttttttttattatttttacggtttttcata

SEQ ID NO: 256311 - DNA, 1426 bp, Cannabis indica
attatttgtttagaaaaaaaaaatttaaccaaatgtaagcataaaaaatcaaatttccctattcaaaatggattacattacccaattttgactggggaacatatagaagtactatattagccaagtagtttcaaagtggaaaacaaaaccaatatttacatatattgacaaaatatagtaatagcatctttaaaatacatatatataataatagcattaaattaatttgaaatggatgtaaaggatgtttgtgaagtcggttaggttagatgtggaaagaagtataaaaatatccaatcatttctttcataacattgttaaactacaaaatcagcaattggcccaaaaacagtgaaaaatccatctttttctttcacccttttctttttttttccttcatattcttacaatcaaaaatcaatgttacccaattctctattaaaattcaattgggttttcgatttcgtttgtgtcttttaaagctctgttttcaagagaatctagctttaacagttacatatttgctttgtcataaaaatatatctgttttgtactaattttcgatgtaggccgttactaaaacagaaacaaaacagaggaatcacttctctgtgtcaatccataaaagaaaattacaaaacataaatacacagacacacatacgaaataattatttcaaccaaacttcacaatcattattgttttcaatataaaattaagacacaacaccatgaaaatgccataagtactcaaaaccaggaacatatgttttcttcttcttcagctacataaatttgtcgttggtagttttggactcaccaccgtgaaagataacagagaatttcttaactatatatttaaacatcatcgtttttaccaaccttttctttgggagaaagatgccattattaataacactgtgattagcttttggttggaactttttcttcttgttgggattggtgtagtagttttgcagctcagtctttggccatgccttttttccatctgggtcttgcttcattcccatcatagtttcgaaatctgagattcttgtcactgccatgtctcctttttaatgtaaagtttctcactttgatgtttttttttggttgttaaagagagggataatatctttgtagtattagtgtgtataaatggtgtgggggaagaaaggagtgagaaattagggtgtatgacatggaaaaaaaacccaatagtatttaagatagggagagtggtcggttgtgtacgatgaatgaaagtgacaaggatctctctcatgtaagaagtcgcctacagactaggtgacaacacctacacactaggtgcatagccggtcctaaaatatatgagttttaaggaaaaattaaatttcaagacttatatagtttaattattattaaaataatagttctaatgtttt

SEQ ID NO: 256312 - DNA, 2431 bp, Cannabis indica
tagtgccctgtagaactggttaatcgattcttgctgtagaaatggaaaactctaatttttgcatcaaaacccaaccaaatctcctccaaacctaatgaaactttccaaaacataccaataacattaaaaaaaacatattcaagcattcaaaattcaataatacctcaaaataacaaattcactatagttgagtgaaaattggattcttgatctcaattcatccaattctagacctaacagccatagcatcatccaattcactctcaaaaaaactttaattaaacttaaaaacatactatgaatccaaaagaaccccatagacccaaaaccacacaaaaattccaacaaaacttaacctaaaaccctagaaattaaagggaaaggataaacatcttacctccaagcttgcacaactcctagggttagctaattcagctagaaaatggttgatttggtgaagaaatttcctttggttcagttggtttctagggctcaaagggaaggagagagagagagagagtaatattatgtaatatttgatttttctaaagttcaaaaacctaattatctaactaaaagtaaaataaaactaataattaatctgcaatactcagcctagtataccgtaggtcatcaaataagacaaaagaaatcaatctttgataaaatgctattttaccctccattactacttaaactataacataacctaggggcattttggtcatttactagctaccccgactaaaccgacatctcaaaattctaaactagttcggtacaatataaacataacattctattattgttgtgacatttctgaccaatccatcgagtttccactgtcgccgaatccaaatatattttatttcaaaaatagtgtataaaatacccacatactccgataaaatctccgtaattaataaattacatttaattattcaggtaattacgtatttaataaaatatgtccaattttaacataataataatttttgggatattacaaggccagtaatacaatcaggaccactaggccaccaaacatagtgaccccctaaaaaaagcaaactgagcaagggcacgcgccacactattcactagtttaggaacatgaacaaataaaataacaacaaacttttgcaataatcgataatgtctctaataatgcatcctaaatatgaatggtcaataatacacttgttgatagcaacagtaattgtaagacaattaaattccacgatcaattggtcatagcccaactgaaggcacaaacgcaaacttctatggatcacaagagcttcagccacaactggctggaaaaggccatcaaagcacgatgtcataaaaccttaaccaacccaaaacaatctctcaaaacaaactcaatacatgtcttagtattcttaatggacaaccccacatcacaatttaccttcaagacattcccacacagtttcacccttttggcacgaggaggtaagaccgctccttcacccacactagactccgttgattgagaaagaaactgcacttgactattatcccctttaaacttgtgaaggtaatcaatgctccaatccaagaccatataatcgttaaaatagtcttatataatacccccttatttcttctaaaccaaattcttcaaacacacatagcaaaattttcaagcacaattgatgacagtttttcaaaaaggaaagaaaattcataaaaatccataccaaggtaattagggacatcaaaaaaattaagcacctagtctttaagatacttaaaatgatcacaataccatagactattaaacacaatttttctggcaaacaaaaagaaaaatctgctaataatacctcgataacttaaatttgacaacacatgtaactaattatagacaaccttctaaataaaatattgaacttttgacagaatcttgaggccccaaatattattccaaaatccagagttaccacaagactagaagcttgaccaagaccagccaaacaaaccctattccagtacccactacggacactatacaaccgagacgtgtcatgatgccacaccaattggtcaaataagggcttattatactacgggatagacatgataaaatcagtttcatttttagaaaaagatgaaacaatctactaattattccaatttctattgtcatccagtaaacaatcaaccttcgcatcaaagagaacacaagagtgttgaaactttttacaaagttaatgaatttttttaaaaatgagagagtgtcctagtgtgagtgaaatagaatgagtctcacatgagatgatttcttatttacaagggtatataaggtgcaactttggcacttgggatagggccccaagaggtacatagttttatgcgaatgtgtgaggacacatacttgacccaccacacacatgtgtacgct

SEQ ID NO: 256313 - DNA, 2872 bp, Cannabis indica
tttttctatatgatgaagatgttgatgatatttataccacatatatattatataccttattaaatttttttagatgttaaaatagtgagttacacgcatataaaaatacattaaaaaaatatggtaacatgttatttgtacattattttaaacattattgattaaattattttaacaaattccaaaaaaataaatagaatgtatgctataattatattatacaatattaatatatatgagtaatattattttggacctgttttgtaaaaattattaatgagaacttttattttgttaaataataattcagattctatatttttaaaaactatacaaatctttatcaaattaaaacttaatagtaacctgactcactgattacatttttttttttgtatctgtttgtgctagataatgacttcagattaattatattaaaaaataaattgctaaaaattaagtttaaggtctattttatactattttaaaaaatacagaatttaaattataatttaataaaattaataattcaatcagtaatttttgtaaaacacaaagtttaaaattatatttacctgtatatataaaataaattataattttttccatatttaaaataactcaccaataaagacaagaatagtgaaaagaatgtttaccataacataagcatgtatattttctttggtcaactttatctccgacttctcatcttcaaactcatcaagcaacacatcaagtatatctctattattttcataatcattattgttattattattatcctccattctcttctttttggcctcaacatgttcctcaataatcttccccatcaacctatcatacctatctcttacatccttaagtcccaaacctttgcaaatcaagcttcttacaaaaccaaatgaaatcttgaacattcaacttcccacccaaatcacacatctcatcaatcacatgtctcatctcgtaagcatcgtcatcatttttggcacacttttgtttcaacgccatcctagaaatgacattgtttgccaatcccattagttgtgcacccaagtcaactttttcgccctcatttgccaattttcgaatgctatttatcaataattttatttcttctcttcttatcggacggtagaaattcatcatcgaagctccgaggagcttcgatacagttagttttttcatgaacttccaaaagggtccatacggagctagggcaaagtcagagttgccataggtcaaatactgtatgttgactttttgtggcctgtttaagaagcatgactcgttggttttgaggcattctttggctatttcagctgaggaaactagtaaagaagttttgtagccaaacttgaggtaaactatgggcccgtaacgggccgagattttggcaaagtcatggtgggggagcttgccgatgagatgtaggtggcctatgataggtagggctggtgggcttggagggagtggtgggtttttttgggcttttaaggatttgatggctcggcccaataagatgattgaggtgattgatgataagatgattagaagaaagttataatctatgatgaactgatgaccaatattatgaagctcaaccatattggatggagagagaagaggttggggaatcaatcgtgtttataattagtaatatgaaatatttggtgattttacttccaaggaatgttgatttatatagaagggttttagaacaagattattagtaatttgaactattagacatatgattggggtctttctttaatttaagggttaataatatgttcattgtctttctttaaaaatatatatatatatatatatatattatattagctacatgctggaaatgaggaaggaaaaaacaaataaaaaatattatcgtcatgacattattgctcatccaaaatagttttctttttttttctatttagtataactaaaatggtctatttttaaagttttaggtaaaaaatataaataatgctacattaagtgagatcattcttcatttattcaagactgattagtaattttttttcccgaactttgacatgtaccaaatcatgcctcctgaacttatttggcagttaaaaattctccatgaactattgagattgttagatttaaagatttttgtctaattttagtaaaaaattcttatatggataaaaagttcaaggggtatgatttagtacatatcaaagtttgaggggtatgatttggtagatatcaaagtttgggaagcatggtttagtacataaataatcactgaaacagtataattaaatgaaattagacgaaagtccttaaatctaacaatctcaatagttcgggggaaatttttaacggccaaaaaagttcagagggcatgatttggtacatgccaaagttcagggggaaaaattactaattagcctttactcaaatcaacttctccaatttattctttaaaatactttattaaaatctcattttttgtattttatctcacacttttacattacatcatacatcaacttatttattttttttctataacatttaagtattatatttttattatataaactaaaaaaattaaatgaaaaagaattaaaaaagagaaattatcaaaataatatttctacatgtagaaaaacgctatccatgaattaaaattttgaattattacttgacgaagtccctttataacaacatttttttatatatatatttttaccttttgagctattttagctcatgagatgtggtgctcatagctccaacactattcatactttatatgtagtaatatttttataggtttttgggcttcttcaaaaaaatttcttcaattttttattcatttttctat

SEQ ID NO: 256314 - DNA, 1220 bp, Cannabis indica
atctataatcaattgtatctttatcctttatctagagaggaaacagttgtagcactggtcagattgggtggtgccccaggtgcggttgatgacccaactccatcttttccaggagggcaaaaagcagctgatctagcctcaattaatggacataaaggaatagcgggatatttggccgaagcagatttgacaagccatctttcttcattgaacattaaccacaatgtagcagatatttgtgatgccgttgtttctgctgaaggttcaattgataatgactcgaaaggtttctcatcagagttggatgctgataatcattttcttaaaggttctctagctgcttttcgaaaatcagctcatacagctgctttaatccaagctgcctttaggaatcacttattccgtcataaacaattaaccaagagcggggacgatgtttccaacgattcggttgaccttgttgttctggattctttgaacaaggtacagaagtcaagtcattttgaagattaccttcattctgcagctaaaaagattcaaaagaaatatcgtggctggaaagggaggaaagaattcttggatattcgcagccgtattgttaagattcaggtgcttatataattgtggtttttttcatatgtttatctcgtgtgcgtgtgtgcacatgcattgtactgcataatttgctcttctttacccgttcttcgtccttttctttcgagataaaattgtgtgccatgattgagttaagagctataatggggtgttaattatatctcttatatcatacttttcaggctcatgtgagaggacatcaagttcggaaacagtataagaaggttgtctggtccgtcagcatattggaaaagttaatacttcgttggaggcgaaaaggttctggtttgcgggggtttcgggtcaaaaagtcaactgaagatgcatcaagagatacaaaaagaagtgatgattatgaatatcttgtgattgggagaaaacagaaatgtgctgctgtagacaaagctcttgcaagagtcaagtcaatggttcgccatcctgaagcacgtgagcaatatatgaggctagttactaattttgagaagtttgaggtaattttgttctattatttttttccttcaaatatcttggggcataagacatttggaaatagtaattgtttgatgatattttttatgtttaaacagattggtgaggatgagaac

SEQ ID NO: 256315 - DNA, 1754 bp, Cannabis indica
gatctttgttcttgtctttgattggttaacacttgtgtgttcctgctcagattcccaagagagggaagatttattcagtgaatgagggaaatgccaagaactgggatggtccaacttctaagtatgttacagtcaatttagtccttttctcttgttctattggcttctactctgtgactatgtagactcataatgattaaaaaatacaggtatgtggagaaatgcaaataccctactgatggttcttctcctaagtctctgagatacattggaaggtaatagatttttaacccttttaatgtgatttcaatgtttaccaattctaattttaaaaatttctcaatggataagacatgttcaataacaagtgggaatatgtcaacagtatataaattcttaaaagctaattaggatttcgtctaatttcatttaattttactaacgggtgattgacgtaaacgaaagttcagggagcaaaagttgggaagacaatttaatacatggacaatcgctacattagttaggggaaaattttaatggtttgaaaaattcgaagacataatttggtacatgtcaaagttcggaagtaaaatcctaattaatcatttttaaatggaatacttagtgaaaatgtttgctttgtgttttttacaaaccctgatgtttaaaatcttcattaacagcatggtagctgatgttcaccgcacattgctatatgggggtatcttcttataccctggtgataagaagagccccaatgggaaactacggtatgattagttaaattctagcttcatttttctctttgaatgttcattacatcttttgcagttatataatgataaaattataccctttgtaaaccagtgttctgtatgaagttttccccatgtcattcctgatggagcaagccggaggtcaatctttcaccggcactcaaagggtattgtcagatttttcatttttgtatatgttttcagtatttaactgagttagcggtatttttaaatcgtaaaagtttgtttgttcttgacagtcactggatttggttcccaagagcatccatgaacgttctccgatatttctcggtagctatgatgatgttgaggatattaaggcactctatgctgctgcagagaagtaagaataaggctcatggtggttggcatccttgtactaagtatataactcatctattttgttgttacactgaaatcctttctaatcatctattcccaagatgaaactatattgtaagtatacaatacaatcatcaacaaataaacaagttccaatctttctttatattgaataagcaagttccaattcattttcatattctttttcatgaattaataaacatatattgttttctttaataacaacaagcttcaaatgggctgggacttcaacattataatcgatatgtaaagggtatgttaggttagaggataatggaatggaatagaaaagaattttggtgaattttgtattaaagtttatttcattcctattcttatccttattcttatggttcctgaaaaagtgaaatttattcacaatgttatatcaagtatggcatgcattctaaagcaattaacaccaaaaaatcaagatgggaccttaaattaacaccaaaaaatagattgagcagtgaaaaatcaagtacatgagttttggaatttgattgatattttatcatttaatatctattgtgaagcagaggaacagcagaaaagcaaattagcaaagta

SEQ ID NO: 256316 - DNA, 2378 bp, Cannabis indica
atttgttaattgtgacagctttttcaatggctttttaacaagtcaacaacaagtgaggaaaagggaaaagaagagaaagacagagttattattggtatgacacttaataattataccctttttctcttttcactaattattacattaatttattttatgtaatttacaaagttttggttttgtttttcagatcaaaaacctaaacaaaaacatagcattgtgtttaaacaagatgatggggtttttgggaagtttaataataagaacatcaaatccaaaaaaattgaaggtaataataaaacgtttttaaagctttttttcctttgtagaaaggatatatcaacagcttgcttttacagcacaattaatttgaagagtcttagtagtaattgttgttgtgacattgatacaacaagagataattgggttaagtacaattactactactcaatgaagatgaagaaagaagatattggtaataaaggattaggaattgttataagtaaggcagatcaaacttctcatgcagggaacagagttttaccaattagtgaaacgacagcatcaacttttaccaacaagcaaaacgacacaaaaaatgactccaatgaaaagaaggttgacaccaacaccaacaccaacaccaagtccaaaaccatttctagaatgaaggagctcttgagatgggcttctaatgctaaatcagacaaaggagccaaattcatggccaggaaggtaacatttttctattttactaaacatttaagtatttatatattactcgaacccagaacttctaacatacacccagatacacccagattcaaaagcctagtaacataacataatataatagaaaaaaacatattattgaagcggtgtgttgttatgtatgttgatttttcaggttctactttttagaaacaaaggagctctaaaagcagtaccagatgatgatgaactgagtctcgaatcgcctaaaataagtttcagatgggatttagagagttgttcaactactacttcttctacttattcaaccatttcaatggctactaattctttaaagaatgatccaaatctaagcatgatgaaactctcattaacttcaactagtaatgatattgaagtttataattcagaccatcattgtatcccaaagaaaggaaattggatcacaacagactctgaatgtaagctcattatgacttacccttattactatttatttttttttttttttgttaaattcgagcttcaattaatcgacatcacaaaactcttatcataaaactaattacgatattagctcaagaaattcacaagcacaaccaggctcggtcctgagcataagtgggcaagaattaaaaaaaaaattatacttttttattaatttaaaaaatatcacatttttttaaataaagattcaaaaatttattattttttatgatttattatattttaggatgggccctgcatacaaccaatgttaggattcttaagctaattactgttcttatgtttttttaacagttgtggtgctagagctatgaagaacaagttttgaagatgatttgcatcaacttttgagaaattgtaatataaaattcttgaagatttttgttattaattagtttttgtttttttaactcttttttttagaggttacagaggatttgaatgtaaactttaatgtaaggatttcatgtgtacctcctgcacagttaattaacttcaacatcaatgagctatttaataaaaaaataataataataattgcattttgtgaattctaaaatgtgattatgttacttagtgtgtgaaaggaacaaaaataaagaatgtttgagctttcaaattatgagttgggaaaagtatttaatataaaatttatggcaattcaataaacacaaataagaacaatttttaggcctcgaatgaatgttaaagtgccacgttttctttttaggaatatgaaatatgaatgaacttttattcaattattaaaaatggaccacaattttataggcaagaaattaataaggtgtttttatattttaattgttttattttttattattttattttgttgttttaagattattttatgaaaagataatattttttaacagtaaaattgtaaatttttgtttaaaattcaatatttttgaaaaaaccaccaattaataactaactaaataaaaggttaacattaaattaaagttttaagggatatttgctacaaacttaatcatttaaatacttttgcaaatattgaatatttaagtgttataaacataataattcaaaatgattaatatttttttgattttgtattttgtaaaagttattaattggactatctattttgttaaatg

SEQ ID NO: 256317 - DNA, 1903 bp, Cannabis indica
tgtatgccacatccacgtaagttgatccctgagttgtagagattgagctgatgagtcatgatgccaaagctgaattcgctaagtgttgatcgccccgcacggctcgttgaatatttcattctggatgtgccagcgaggcgtcctgctcggcctatcgttccgagcagatgctccaagtggagtccacgtgtcaccattctcgtgatgccacgtcagagtgccaaatttgggataacactctaatctcatggatatgtcttacttactagagttcaatcaaactacttcctatcaacttgatcttcacatatcccattctagtcactagaagagctctattatctccaagcttaactgtcccatcctcaatttccttgtagcaataaaattgagaactatctggacagatgtcgaaggaagaacctgagttaattacccaatagagttcatagtatctatttgatacccccataactccattagtatcataaccatcactctcacacccatctacaatgttagcattgccaaatttcttattgttttaaaaatttcccaattctggactatctctttttaagtggtttgtcttatgacagatgtaacacatcttgtagttcgaattagatttcccattctttttactttcttaaaccctgttatatctcttatttattttctcttaaacaagcaatccttcccttgatattttatccttttgttctaactttttcttcaattgctttgacattagagtactatgaacctcaccaatgtcaatgaattccttccagaataattgcttgatcttcatcttccattttagcatctacgttttcaagatcaagaatgatcttattaaagtcatcaagattatcttcaatggatctttcaggggataactcaaaagtatataacttctgccattcgattggacaatgatttcttcatataaagttgttcaagcttctttcataagctttttgcatgcactttttttttttttttatacttctcgcagaaccttatccccaaggcatagaataatgacactatgagccttctcgagcaattcagatgtctccttctttgcctttctctcaatttttcattctccttttatggtgccttgaagtccatatgttgtaccagaagagcttgcattttcatcttctgtaagccaaagttgttcttgcctatgaagctttcaaaattaaatttcacatttcctatcttccattggatcaattcttcgagcaggcagagatcttcaatcttcctttatcctccaatcgatcttctctaatccttcaatctaatccaagctctgataccaatttcttaagaatcaatacaagtcttaatttaattcacatcaccattcaagcaatcataacacagagaaaataaatgaataggttctttaattgtattgaatgtaatctgtacaaactaaactaaaagaatctaacgcaatgaccttttataagcattattacaatcaagtagctaagcctaggagttgtttaaacaaactaagagctacgtaactactaatagaatacaattagttgacttaatagtcaactatcaatcacctggaataaattgaactaacgttcactaactgataagtaatatataatttgttttaaaaaaatctaaataatttattatgtcaatgttgccccttattttatctaaaatacatggaccaaccagaccgtgacacgtaggttgaagaagcaagactttgagatgattcgactaagtccccttaattaaaaggattaccacttaacatgcctcccggagaaggcatgggggtttcacatactcccggagagcaaggctataacgaagcacctccggggggtatcaaatcctatctgaacagtcacct

SEQ ID NO: 256318 - DNA, 2662 bp, Cannabis indica
aagaaaaaaaaaatagccatcataagggatgagagaaaaaccaggttgaacaccgaaacacaagaagaagcaaaacaagaaaccctaaatactcaaactgatctctctctctgtctcactctctccctctctccctctctccgagtcaaatcacatattataacaatcatgttcaactctgttacagtggtcagattacattttgctaacattgcagctctagatctagaaccatatagttttgctttacactaaatataacagcaaacattgttagtctatagtatatccaaaataattgaatctgaatattattggaagtaataagagaatgaggactcccaacgttattcatgtcataaaaacaaggatttattatttttactttttacttacaccatgattcaacatattactaaagcccaataaccagtaatatgcatgtcactggcaaaactaaatattggtaagttgatagaacataagatcttcaaaagaaaatggtgaccatggcagatatatggactccattagttaaaaatattatagttgaactcctttagtatattctttggtctatatcattaacatggtcatgtgtgttcattgtatgatacagaagacagattccaacttatccataataaaatagttgaattcttaactgacagagtaatatgatgataccagtagaaatgttggtgtccttttattttctgctggaacattgagcgtaaatgaaaagttttaaaatcagtacgaagcatccgaaaaggcatcagcacttgcaacctcttcaataatatttctctttgaaggcatgccagcaaccacatcatcttcgatatcgcactcgtttgttcctctcctgatcatgaagtaaccatcctgccattcagaaagaaaacatcaaaattggcacatatttagatagatacatttactaaaaatggaggaagttttaagagagacttacatcaccccagcttctgttccactgatttgcaagaagctgaaacaaaagagtaaacagaatcagcatataacttcacagcattaaagctcgaaagttagagctagagcgtataaattacccagtagtcgtccccgttatcactagttccccatccaatcagcttaacagcatgacctcccatttgttctcctgttatgtgtttgtaaactccagatttgtagtgagcgaaatcctgagaatggtttagagaagtttaagaagcagagcatgtacattcggaaattaaaccatttcctttctacatttgaattactaactaaaaagtacggaaccagatgatacctcataaacggtgaatgaaacttcaactgggccatttttataaacttcagccataatactgtgggggtcggacttgattctgtatgcattattactataatgctttgaattcttccagaactggttcttatcaacacactttctagcacatttcggagtagggaatccaggctcacaaccaggatgagaacaaccagtattatcgaaatacgggtcacactacaagatatgaaatttagactcatcaacaataataaaaatcattagctattgcttgatagaacattgggcaaaaataaaaagcaaaatttttctaacataatacagaatttcataaggtgcaagtacataagaaagggaaagctagatcccatccttctccatggaagacaaaaataaaacaaaagttcatacctcttcagtcacaacaccatgatggttaaggtatctccaagcagaaatggggtagcccccatcacaaccacttccacacataaagccacagcaagacaagagatcgttcacagaaagggatatgttctgaaacaaaatttacagcactatctttcagagcttgtaataaaatatcatcagtcgtgatgtcagtaccattagattcaacttaccatgttaaaatggatgcaaaaccgatctgacaatgcttccacagcaccaaaagcccaacaagaaccacagtgcccctaaagatgcaaaacatttaatgttacattccaaacgtttagtcactcaaaaaaaaaaaatgctctgctcagaaaaacagaaacaagattcacctgatcttcattgataaagttgatccagcatttgacataaagaaacagagaacagttagcactttcttatttccacaaaaaacagtcatattggaaaactagaaaatatgaaacataaggtgagagtaacctaaaatccttgaaatggtgctgcactgcgaccaagcggttctcgaatcaaacgattttggcagcttcaaggattttggatgacttataactggggtactcctcaattgctgtttcggtgttggtttaactccaagaatgtgcctaaattggccaacctttgaatcaaaaacaaaatcaagcacacagtaagtactttatcccaaaaactaatatcggttgtgtcagacaaactagatgagagaaaacccttttcaaaactcacagtgaaatttgagaatctatcattcttggcagcagtccatccagcattagggttatcattgatctctttaacaattgagtcctgcatagccatagtaataaataagcataaaaacactatatatcaaggtttacatgtataaatatatattagcaa

SEQ ID NO: 256319 - DNA, 911 bp, Cannabis indica
aaaaaaatagtaaatattaataatttgcattcacatttggttttgggttggtagtagtgtgaataatattaattaataataaaacaaaagccaaaaatggtagtaaaataaagtaatataaaaataagaagtagaagcgaagatggggaggttcatctaccagtaatcgagagaaaggtgtagatagtcagagtttgaaggaggcgtttactttctttcttccttcgttcgtgagtgggtgatcatcggaggcaaattgagccaagaaaatggcgttgcagagcagttgcagcaatcctatgatgcataaatcagcatcgccatcatcggtgtctttgtcttcgttcaatttaaaccagggaagatctctcttgaccattcctaattctagttttaattctgagaagtggaagaaaacaggtcttgtttgtgttcgcgctttgagccgcaacaccagcagcagcagcagcagcacgggcggcggcggcggaggaaacagcagtggcagcagcgatgcgaagaagggcggaagcggagttcccaattcaaattacgtggttccactggataagtcattctcaccggcaaattcttcttgtattactcgtcctttggctgagatcttgagggacctcaacaaaagaattcctgataacatcatcgtcaaaacgccatctacttctaatgttccagctctcgcttcttccacgccctttatcccctggtaaccaccgcaatctttgtttcttcttcttctccttctaatcatatcattttcaaatggattgatctaatcaatttcaccttcgttttcttgtgtgtaggtaccacgcaaacaggatgttgagcttctatgctcctggttcgtcattgtattatattaatatatataagtgtgtgtgtgtgtgtgt

SEQ ID NO: 256320 - DNA, 1925 bp, Cannabis indica
atgctcatttttcttgtagtgaagtatgcttcaataatgtgccaaaaagtgatgtaaaattggcacataacaaattttgtgccaaatttagtacaatatttgctatgatgtaaaatttacaccacaataaatgcactacttttttatttacatttatgtcatttctattattttattagcatatttaactatcacattaaattatgaacatttatattattttttttattgtcttacatattaaaataataaaaaatagattataaagttattagatattattttatttttaataaaatattaattagatattaaattttacgtcaaaattttgcaattgtgcattgaaacacaaagttagaatttagtataaatttaccacaaaactattttttgtgctaaatataccacaatttttatatattcaattggagatggtgtaaaacatccaacataatgatattacgcaggcatttactaatgtagaggtaaaaaatactcatattgtgatctcttattaattttgaatatggatagagtaaaattacatttataatggatgaatgaattctatgaatatatatgaatcacaaaactaaatctttacactttttatttgtgcaattatttttccttttaaaataaaagacagaaaagaaatatgatcaagaaatcaaataatcataataaactagacttgattcatttaagttggttggctatggccaagacattactgcatagatgtccgaagttggtattggcttgtgtcaatggagaagagcctgacttgaacccaccttcacaagagtcaccatcggtcatggcagctgttacccaagtgttaatgtccgcgtagtttttggcagctatggcattgagtgagtcacccagttgctcattggcgctatcataattttcattgcagtcatttaaggcagctatcacatccttatctttcgttgttttgagtagacttgcaatctggccctcggtggttttggcgcttgaagatgctgcgttgagggcgattttggctaggccgtcgagggtggcaccactgctaatggggtctgctcggagtgtcttctcacaaagatctttgtacaaagctttgccacacgtgtcagagatcaaatctcctttaaccatttggttcaaaccaagagagacaaaggtcacaaagcagaagatcgatatcgagttcatcattttgtatagatatatatttgttattttcttttggagagaatatgaaagaatggtacgtatataaaggtcttaatttcatatgtttatatagagagatgtctaggtttggacaaatatgtacgtacggttgttttgtatggttgttttttcttcttctttaattagtcaatgtgtaccaggaccaaacaattagagccactttcatttttggcaaaccgaattttatgtttgacaataattggcctcaattttggctaactaatattaatttgattaaaatcattccttttcaaaaaaaaaaaaaaaagaagaaacaaattatatatatatttgggtgattctacactggacccacttaaaagagaaataccgatacacccttgacttgttttggtatcccgaagaattttttagtctaattttttttttcatattcatgtacgttatagctatataaggtaatctacaaaattttgagaaattcagaataatttacaatataaaaactaatgttcaaacagtctattttacacgcgtataaaataaaatagtcacacgtgcaacacacagtttgaacgtatttttcggcgtgttaaagttttccaaatttcttaaaattttgcaggttgtcttaaatgactataacgtacatgaccatggaaaaaaatttgactaaaaaattatttcgggtgctaaatcagataagggtgcat

SEQ ID NO: 256321 - DNA, 1361 bp, Cannabis indica
tacatcatgttactatatctattatcatcagtatgtaacattggaaaaaaaaaaaaaaaatagaatctaattttgtaacctgtaaaaaaaaaagaaaaaaaaatatatatgactattcgaaccaccatgtttacacttgtttcaatcttttgagaagtgtttttttttctaaacattggcacagttcattggtgcaaatcccagcttagaattctttgtatcataaagaatgtgaaaattttgctgttggtagtttccaataatggaaagagcattagaagaagtattcttaaaagccaaacaaataatttcttgaggatagacttgaatgaagtaattctcaactgggaaatcccaaacagctccatctgagaacacaatcccaaaatctggtaggtccaaattatcaacaccagaaacattgtaacaaagatccaaagggaaatcttcaatctcagcagtttggtaccctttaatcttgttaaaaaatgcatctttaataacttgataagcaggatcagtaaaatagctaagtgttgtacctgaatcaatgatagtcccaccactcccttctgatgacaatttccaagtctcctcagatatgttgagaatttcacctccaacaagtatggacttaatttgaagatagtaaaatgtgtcaacaggaatgtctttggctgtgaccaaagtagtgaaattcaattcagggtgagctaacaaccctttgtcctcaccaaaaatcagcttactactaacattggtatcactatctctatcgacaaggcaataagaaaatgattgaccatatagtgattgaagctgtgatgaaaatgaaagaggtcctctaccaagtcctaacaaccctgcagcccctctaaacaggcctctattccaatgcccacatccaaacatgatgtcctcaactcgccggaattcgcctttccccgaattcggggttgtgaggttaactgtgaaagtttcaagagcaaaatcccctgttgtgttggaactatcaccataccaatagtaataagggcatgtttggttatcagatttacaaggctgaggagggtcaggagatgagaccatttcacatttggggtcattacaagtaatgcttttgtatgaggttgagtgttttggatcataataaggaccattttggtcaaaacaatcatggcatggaacacactgaatccaattcaaatcactacctgtgtcaagaattaaggaatagtgttttggaggtgtgcccacgaaaacatccatgaaatattcacctgacccgaacccaactcccgattccaaagtcgcaatgagttgacccgaaaactcactcttgtatgattccggcgccggcg

SEQ ID NO: 256322 - DNA, 1738 bp, Cannabis indica
tgagctatcacctttgcttactcgacatggaactccatgcagtgatgttgcaaaaggtgatgctgtcaaatctgacctttctatataccgccagcagaatcgtgtgttgacagttgttcaaagaattcgctcacggaaaaagggtcagctggctcttgtggaacaacttgattcacttatgaagcttaaatggcctgctttgtcctgtgaaagtgttccatgggccttgcattctcctctgtgcaaattcattggttgttcacccattggtccccctcctaacaatcatgcttcatcttcatctgtatcagatgcggggcaggttacacaacctatagaggtcgttgaacagtctggtacttcaaaggaggagctagagggtatcagggaagacggggagcttccatctttggcttcagtttcatctagtgatattaaattggctccatcaaaagggtcaaatattgaacattcgaggcagctgtctttactttcaaagagcgtcataactccaatcagcaagccgaaatcacaaagttacaagaaacacgatgaagatgcaaatcttttgctggactttgagagtgatttggatgaacctacatacattgagtcagaagaagaacatgtggggcacattaattgctttgagatgactagaaaatgggttaattatggaatcagggaattttctcttgtcttgatcaggaacgtagacaccctaaagaagtgtttcaagttggaagctaagattaatatcagtgtggagtaccctttgaggcctcccttcttctcattgaacatttacacttcatttgaagaaaatccttatgaggatgatggttccgaatggtataatgaacttcgggcaatagaagcagaggtcaatctccacatgctgaagttgttaccacctgatcatgaaaattatgtcttagctcatcaagtacgctgtctggccatgttgtttgactattacatggatgacatatcctcatctgaaaaaagaaagactatttctgtagttgatgtaggtatgtgcaagcctgttaatggtcaacttatatcgagatcgcatagaggaagagatcgcagaaagatgatatcttggaaagacatggaatgcactcctggctacccttactaagaagtaagcactgtatttctttggttactgtgttgttttcagttcaagactgaagaagattgaagctgttgaattcaagagtttggaattccattaatgagctctgggatcctcttattattttatgtattgagtatttatgtgtttaaatatattgatttgactgaattttgtcccttcctatacataggctgaattgattagaatcctagtctcttttctttggggttgctttacctagttgcaaacttggtgaaagtgatgtaatcttgtatgtttcatcccatggattataatctgtttttaatgaaggagcccattaaacatgcaactgttgttccatcttctatttcatttcctataatccttttcgaattaatgcattttctcttgaacatttgaagtgagaaaatagatttttgttttacttgaaactttttgattggctgcatcaactaacattcaaaacctgtaattgaatctattgatttagaagcacatatcatttgctgtagaaaatgtaaccttatgcggatcaaattggagttgtgaattacactatctctatatgataatatactctttataatt

SEQ ID NO: 256323 - DNA, 849 bp, Cannabis indica
tatttcttattgtcagttcatggtataccaatgttttaagcaaattctttgattggtcccatttttgtatgtttctttttagcttaattgattggtattaatttgattggttctcataataccagttatggaataaaattattgcgtttttggtgggtttatatcacttttgtttatagatggttgcatatctaaaacttattaatttaactacattgtaatgcagaacctgtatattagatgattgaccaagacagatgctataccaaaaagactgaatgctgagacaagtatttcaaaaaggttatgtcaagccaaagatcagatggaacaatctatttgtttattattattattaattttcatgcttttaaagtctcagctcacctcgtgcactgctttctaaattgataactttgttggagatatcatacaactattgtgatatttatttattcttgaaatacagctatgtaataaagatctcactgttcatgtttttttagcagtagaatttgaaacaaaacactgatataacagactttgaactcgggttgcttgctcgaacactttctcgacaatttttaagattataataaattagtcttaagcctgcgcggctgcggtgacctcatattttgacagtgtcattgctcgtgatagacaggatagagtgaatttggcaggtttttattagctggaggtgcgggttcgattgtatttttttggccacactaatgtctaggggatgtcataataaggtttttgatagacataatttagctctacgctgctcttgtatcggccacgggcgtggatttgtaccgcttacccgtttgaaaaaggtta

SEQ ID NO: 256324 - DNA, 3307 bp, Cannabis indica
tattaaaaaaaaaaaaagataagagagtatttttgtgataaaaaaagaaaaaaaagttagtttggccaaaaacatattccctgttttgggataattgaaaataactaagttttaattttctttttaacttacaggcaactaaaacatttctaaaaattattgttatcaaataaataaataaataataatttctccttattattttttatttttaagaattatgctacagtgaatgttattattcatcataaaaatcgccatactaaaagtcaagtctttcttttttgtcatttttcatattttttttggtctaaattattatgagtatatagagagtgcagattatatcatactatctcaatcacgttatcaatggcagcagcagcagctaccctctttccctttctcatcttgttctgtcttccaatcacatctcattcaattaactttaaaataactcggtttgtcccaaacgacccaagagttgtttacgaaggagacgcagcaccatcagtaggagccgttgaatttaacgacgtaaattacctatgtcgtaccggccgagtcatctcggcagagcctctacgcctttgggacgcccacaccaaacgcctcaccaacttcacttctcgtttttcattcaccgtagacacccggggccggcccatctacgcggccggccttgccttcttcctcgccccagtcgggtaccaaatccctccaaattccgctggtggctttcttggccttttcaacaccaccactagtgattcctccaacaatcagattgttacggttgaattcgattccttcccgaacccggaatgggatccttctgttggacatgtggggatcaacaacaactccatagcttctgctaccttcactccttggaacgctagctaccacagtagtgacattgctgatgctttgattacttataatgccaatactaagaatttgagtgtcgtttggtcttacagaactacttctactaaggcagagaacacaagcctttcttaccgaatagacttgatgaagattcttcccgaacgagtcactgttggtttctcagctgcaacaagccatttcgtagaacgacatgttcttcactcatgggagtttagctcaagtttggtagtgaaggagagaagtagccgattcactcaaaagggtaggtggattattggcttaacagtttcaggagctatttctatagcaggagtgggacttattatagtatttttagtattgataaagcggaaaaagaacaggggagaagcagaggctcaaaacttgacatcgattaactatgatctcgaaagaggagcaggagtaccaagaaggtattcatacgaagatttagcttcagcaacaaacaacttctcgaatgagaggaagttaggagaaggaggatttggagccgtttatagaggttatttaagagatatagatatggtggtggccgttaagaaaatttcacgaggctcaaaacaggggaagaaagagtacttgacagaggttaaggtcattagcagtttgagacaccgaaatttggtgcaactcattggatggtgtcatgatagaaatgaatttgtactcgtctatgagttcatgccaaatgggagccttgattctcacctctttggtcgaagaagtcctctaacttgggctgtaagatacaagatttctcttggaatagcctctgctttgctctatcttcatgaagagtgggagcaatgtgtggttcaccgagatatcaaatcaagcaatgtaatgctagattctagctttaatgtcaaacttggtgatttcgggttagctcggcttatggaccacgagctcggtcctcaaacaacagggttggttggaacattaggctacttggctcccgagtatgttagtacagggaaagctagtaaagagtctgatgtctatagctttggagtggtagccttagaaatcgctactgggaagagagcaagcagtccaattgaaaccgttacagaaatgggattggtggagtgggtttgggatctttatgggaaaggtgagcttgctttggcaatggaagagaggcttcatataggttctgatcaagaacaagtggagactttgatgattgttgggttgtggtgtgctcacccagatcgaaactttaggccaactataaggcaagcacttcaagttctgaaattggaggctgctttgcccaatcttccagcaaagatgcctgttgctgtgtaccaaatacctacacactcacttagttctggtgaacctttgataactacaagccttgaagtggatggtcgttaaattaattaggcactagtattatagctttacgtgtttcaaattaattaggcactagtattgtgcaataaattaatctcaatattgttaagacgagttttgtgttgatctaccattatcttgaactcgacaacaaaaatctttaataattcttcaagtattggataaaacttctctcctatttttctatttttttcttttggtagttgaagaacattcatattagattagatgagtgctaattacaatttcttagtcaatctttatgtgcttaaaatcacatgcttgaaaattatttttttaaaaatttttttcatagcgatatctgttatagttacagtattatccatgtaaatgtttgaaaatattcgaatagtttacagtatcgaaaatagaagtcctgatgttctagtttaccacgtgtttaaaaaacttcaaatatattttcggcactgaaaaactattcgaaattttttaaaaatttacatggatgatgttgtaagcataacgaacaccgccatgaagaaaaattttaagaaaaaatatttcgatatatattttttagcacagaggttaactaagaaattgtaataggaagttaatggtagaactcctctcaatattattagcatatgaagagtgctcatggtttgttaggtgtggatgatagtagttaagaaagttgtggatgagcgtaaaattgtagttctcattggaatattggcattattcatccacaaaagtattagagttataaatttcaatcatatataccaactattaacttgaagttgaaatccctttgctttcagtaagactattgatttgattagttaacaaagacatttgcaccatcagtgacacaatttgatttacttccatcatacacttcatttttcatgatctaactcaaactcgtagccccttaaacaacaataactagaaaataaaaaattagtaaacaattgaaaaaaagcaagcttagattaaa

SEQ ID NO: 256325 - DNA, 2082 bp, Cannabis indica
tatgcttcaattgtagtggatacgattatggcatgctcgaaatgataaggtaatctaaacatcattaaatattatatatattgactctgtcactcattgttatgcagattttggctcctgtttgttttcacatcctccagctatcgtaacttgcttgtggtcatctcccccaaaagattggatcaagataaactgtgatgttaaagtggggagtgaggctatgtgtgtggctggctagagatcattagcgaacagttttatgggccactaccaataggcttaactggtttgatctccttattggttaagttgcaacttgtttgtacattagccctagaaacaacggtttttttgaagcacccttttgtgatgattgagagcaattctaagacagttatcaattctttaaagggaaactattggtaactacttgctttaatgtaatagaatctctaatttatttttggttgtaatttcttttttatgtttagactttgtaattttgcggcccataatatggctaactagacatttgttcaaaatttaattgatatagttgaggttttaataattccagagaacaaacactaattaaaaaaaatgatacaattaactgatgttgcggtgaatttttttgtaagacatggcttatgttaataattccaagcccttctgttgcataaatatacatggtatatatgtaagtgcatagatttaatcagagaaccacattaattaatgacaacgtacgttagtatttcccaaattaaatttctatcatattaaattgtgtagaattatattaatttatatgtttattactatcactgtgcatggaaaattaaggactctaattaaaatttacgtctttgcatggttagagaatcaacttactcgtatagctgtacgagtcatgtgtagtgtatataatgtatgaatagaatacatataagaaagtgaaattaaagattaattttgcatgcataatatgtactataaataacatgtctacaatacacttttaaaaacatatttcagttgatctttatctatttggttatataaaaaagttttgaagtgaatttttttttttcatgatcatctatgttataattatttaggaccacttgtaaatattcaaaaaattttaagtattttacaatgttaaaaataaaatttacatattgtgctatactcgcgactatttttttcttatacgtgttgtaagtaagtatttaaacttgattctaagcacagtaaactatttggaattcgctgccattggaaaatatatttgggcaatctcatctaatcaagataatctatgaattagatgaatccatagtatattcttataaggaagagatttgtgggattacaaagtcgcaccttcggggagttggtattatattgtggctgttaaagaccaacttaaagctgctagctaccaattatcaaccacttttaacaagtacctacagcaaaaagaaagcctatcaaatgctgttagaagctcaaccaagagcttattggactgatatgatttggaatagactaaatgtcccaaaacatagttttatactatgcttactagtgtttacagcggctccaaacgaggacaagattgaaaagattcaatgacgtaacagatgcaagatgtagagtatgtgagatgcatgatgaaacactagaacatttattttttgaatgtctctttagctcgagatgtttaacagaaatcaaagcttggatgaaatggaattcaagagcaggaaatatcccaaatttcttcaggtggctaacccatgcaaagctaacaaacagcaagcacaatgtgatggttgtttcctttgcattattagtgtatctgctctagaaaaatcaaaataaaatttggtggaactctaaatgttttacagttaatgcaattgtacaaaaagtaaaaaatgatgttaagaatagaaatagattcttttttgacaaagagagtgattgaagttgataagaggtggattgaaatattgtaagtatagttgtggacttttgatcaaaagtttgtataagttgtaaaggggattgatg

SEQ ID NO: 256326 - DNA, 2285 bp, Cannabis indica
atttttaactttttttctttttggagggttcaatagcatggcactctctacaggcagcaaaaaaccaccggaaaatcctcggagtccgaccaaaccgaagccgcttaacaacaacggtcctctttttcttcttctttggtatcgatctcctctcttcatcattatgatttttattattaaccgaaacctctgttttcctccgccgcagcgaagtgtctcggcttaaagccggaacaggatgagccatgaattgccacctttgagaagaaccgtacacttgagcagacactgctttacttccaccgccatatctaatttgatctgatctggatcctctccccataactgataacgacgtcgttttgctcctctgacagtacaacagccttctctcggaattgtcgcttgaggaggagctggtcctggcgctactactgctgcaactgctagtgctactcctgctgttggtgctgttgcttcgggacgacatcattgagtctttgctgctattactactgcttgttcgactcttaatcatggatcgagatgaattctccgatacgacgccgtaaatggaggtagtattggttggctggaatggaaacgagtgcggaagaagttttccgttgaagaagagatggtcggcgggggaatttttgctggggtcatcgctgtacggtgagtctggagtaatgctaccgaattcgaaatcggacgaggagccgcggctgtggtggttgttatcgggttcgggagtgctcgggaaagagaacccgtcgccggagatgctttgtttacgacgggtttccatatttggagagattcgcaagaattgtgaattgtgtaattttttgttttggtttgcatgagagagcttgtactgactcactgacatgtcttattaataataagggacagataagcaaatatctgatgtggaaagtagaaagaatgtaagtgatctatgtactatttactattttatttatttattttaaaaattgtgagaaacaggtggaatggaagataaataatctagattacctaaattgggtaaattatactttttacattttttgtatactctggtggtataaattattgattacaatactttgccaactctaaccattataaataatattatctcgaacaatccttaatctaaccaattacattttgataaaaagtccatctacataaattatgaaataaaaaattaaaaaaatctccaaaccttcaagaaattattacatcccaaaaaatgagtgcaaaaagctcatacaatgaattaaatagttatcaatttcctaccttgagtttaattccttgacaagtttgataaaactgtcacattcacatttcacaataaaaaaattgtagatttctttgttagttgcaaggccaacaaataaaaagtggctaccttactaatagcattagtaaaaggtagcctcttagtatcaaaccacaacacttttcctatacatatggtcaagagttaccaccgctaacattataactccctctctaactgccatatcacaattaagtttgatttagtccatagacagaagagcccacccaaagacatgaggagaaggttgaaattgggacagaaatactttgccaactcacatttaattaaggtactaacgttgtaatactagtattaaaaaatagtaggaagtgtgggatgttccaaaatttgcgtggtagtacagatatcatgtcccaacagaggtacttatatatatgtatatctcaattccaagtagtcaaactttatccccacgttgcagaaaatgggtgggtcacaatgcatcatctactacacttgatccaataacaagctcttcaatcattacttttgggttaactaatctatagtgcattgttagatgtcggaaatgtacactcctctacccatcccatgatgctacataactacatgttactacttattatcacgctctcatgtgtctaagtgtcttggacgattttatgacagcttttgcattactcctatatcatcaacttaataatgtatgtatatattttattactttggacatatagaatattatatttggagagaattgaaaattcgctgaaaattaatggtagattttgtgaaatcataatgattgaatcaaatgtaggtggtggggtttgtcgacactagagcggctttaaaaagactactaataaaataatatttcgttattttttttttcaaagaaaaaaataactattttgtttgatgatcgatcatcacctactcc

SEQ ID NO: 256327 - DNA, 1682 bp, Cannabis indica
gagagtacaaatataaagaaattcgtttgcattgtattggttaacaaaagtgggtggggttgggtcaaaatgcttggtttccaatatgtaagtaaatgcacatgggaagagaatatgtatattatctattttgcttgacattctcagaaaagtgataaacacagaaacccacatgacattgtgtaaaagaaattaaaaaacacccaaaagaaatccacaccaaatcccaatagatacaaccccaactcaatacaactcaatgaaaattgcaaagcaagaaaaaagaaagagaattaaaaaagtggtccagaagtactcctctttcttttccctctttcttgcactatctcacacaggctgttaaagaagaaatcatacaaataatgcaaagtataatgttgggtcacatggaatactatatttcataatatttttattaatacataacaataataataataataaaaaagcaaactgacaacaccacacacacatgccattgcctcctccatattcatttgcacatgctctctttctctctctctcttctgtcttctcttcttttttctatatagtactactcactcttggtggggccttctttagttcctgtgcacactaccacaccatatctatttagcactctctaatctaaataaacaatctattttcaaatgtaattaaattaactcaaactcacaattctcactgctgtattaaactaaaaacatcacagcatattagccaactatatatgcacttttgagcatttctttctctctgagttaaaacttccactgcttattttgtttcttgataattagtgttaattaggagaggtcctataggtcatttgtctctggcaccgcggccgatggggcggctgaaccgcgggccccaagtaaggtgcattggaggtgcctgtggcaagtgatcaagtggtcatttgttagaccagcagcttgcatgaatgagtgaaccacggttggaccaacgaacctaaaacctctcctcaccatgtctttacttatggtctctgattttgatgtcttcactggaattctctgccctgatttgtattgtgttgagattggtttgtgatttacaaagccccatatgtacttagcaaatgacccaaactccttcttgatctgtcatcattcattaaatcaaatttattacgttaattaatgataataaataagattttatacataaatatcataacaggttggaactacttgggccaaagaaactttttaacatatagaatagattagatagatgaaaagaaaagaatataagtcatgtgattaacatcatgttttccttacttaatgatagtttattattatatttactcccctattaactaaaaagttgatgaaaagtgaggaataaatgattgaattaaaaatgggatcgaatagacagaaaagattgagaggacacacccaataaaaacaaaggaaaaaacaacactaaaataaatataaaccatgtggttgtttaaatttttattaaagcattaaataaatgaaaataattagtattatttattgggaaattattttatatacttttttaggttgtttcgatggtttttttggtagtttttatatgggtttgctatgttgattttggttgcaatttaagataccccgttaattggtatgaaagtt

SEQ ID NO: 256328 - DNA, 3615 bp, Cannabis indica
cagggtctggaccatcaaaaaaaccatccatgaagggcatttgtgctacaatattagcacttagcattatagtgtttaattcaggtaatacatcgacaaccaacacctctggatttgtttctagaacaaaactcccaacctagctacgattgcccttaatagaacttagtgtgggactaggatcgacgcaaacattcttctttaacaaagtcacaaataagggagtaaatttatctggctttttcgcaagtgtagataaaaagtaccttgcacgcttatcatttccaataactttagggcgatactcttagcctttcatgtacttgtaatttacttctaatttcaagtcatactccactttgtcagcatccagttcttcatacaaaagatcaaccaaacctgagtagcttacgttcagatcaatgtcaaatgtcaaatttttgctctgtttataaacccaatctctaccatcaagcttccaaacaccattatacataacaaacgcattatcagttgaacctgtcacatacattaaaaaaatacaattacaatttagaacaaaatctcgctgagaaaaatctttctatgaaataaatatgaaaacaatcggaaaaaatcagacaccaccatcggacaaaatcgggcccgatcccaaaattaaacaaaaacttaagtttttggggccccatcggacacccatccaatcaggtcttaaaaaattcccaaaatatatttcggactataatcgaacacccaaatcggactcctatcggacccattggacacatatcaaacacgcatccaatcgggcctaaaaaaatccccaaaactatttcggacaccccaatcgaaccccctatcggacccatcagacacaaattggacctgaccccaaacaaatcaagaaaacaaaatttttcgggtaccatcagaccccatcgggccttcacccctgtcacccattttgacagggcatcgggcccaccatcgaaccagcatcggaccccatcgggccagacaaaaaaaatgcagaaactaggaaaattctagtattcacaggcagcaaatattttaacacaaaaaatagtaaaattacagcaacaatccacatatcaagcatcaaaacaacattctaaactaaatataacaacaacaaacaagattacacaaacaaaaaaaaattacctattgcttgcatatgttgctccctgtatgatgctccttccaaaattgaaagaaaatatgtagtatagcttgtagtgtagtagattatagcgtagtgaagttaagaaaatgagtggagaatgagtgaacaaaaaaaaaattggccctcttagtggggagcttagcagtgaagaacaacgagagaagaagagagaggggagggggtaatgtaaatgagggtattttagggatattttaaaatatgtcatatcccacaaatattaaatgttatgtgtttaggaaaaaaatattagatatatgtaagtatagaaaatcaaatttccctttgctattttttttcttttgcagttgtttacgattaaatttaaagatacagttagaattacctatttcagtgttagattatattttgttattagcttttttttattaatatttattactttataagtttttttttttattaaatttaaactaagaattgtcgtttaatatataaagatatatatattatttttaaatatatataattaaaggtaattaggatttttctccgaactttgacatgtaccaaatcatgctccctgaacctttttgaccgttaaaaattctccctggactattgagattgttacatttaaggacttttgtctaatttcattcaattttactgtttcagtgattgtttatgtattaaactatgctccccagactttgatatctactaaatgatacccctcaaattttgatatgttctaaattataccccttaattttcatccatgttagaatttttttattaaaattagataaaagtccttaaatctaatagtctcaataatttaggagaaatttttaacgggtaaaaaatttcagaggtattatttgatacatgtcaaagttcgagagaaaacaatctaaattagcctataattaaagttaacgtaaaaaaactaagaaattttgttaaattaaatattccattacatagctacgctttatataaaataaatatatataaagggattaatgggtgtttaatgtgaaatgtgtgtgtgtggtgattaagagaaagagaatactctttcataagttgctttcttactatctctacaatcttgcttacattggtaattttagtgtcatggctcaaatggaaaatgctactacaagagggtatgttttttcaatcattaatgctctaattaaatattctgatcttggattgattttatgagcattattgtaattattagatgattgtagttgattataatatgctgatgtttaagtttctttaacattaatgctttaaccgcaattaaattaacaaaaaattactataatataaatcttggtgaattatggcatcttggcaattaccatattgtttcatgaactttaattgtgtgtcagaatgcgtcaatggatgatctcaccatttcaacttaactgtaatggaaacttatctgtatcaagagcctacctctccaacaaaatggcctttctcactgctctgacagatggattcaattcaagtacgaaactttattaggctactttaaaccagaagaaattgagattgaggctttcacgagattccttttatttgcaattttccttaagacatcagtcatattcatattaaaatagccgagaaaagcccactccatgcctttccggcgggaacttttccagaggtgggcttggcctttgggtttgggaccatgatgaggaagtatggactggtcgccaattacgctgctggcgctcgagtggttgatgggaatcgagtttttgtgtcgttcttacatggaagatcaagctcgtttacattacactaacagtcactgtcttcaacttcgagaaaaggtaagaaaaacattcaactaagctcatttttaaatggcaggacattagtacaatgtttgataaaattttgtttgtcagagtcattattgagtaatgagaagatgaagtgaacagagtaggaaactacatgtctggcccaaagtctggttccattgtttgtttcttttcttaggaaagctgacgaaatagttgggataatagatataaatttccgaagttgggtttgaatgtttgggagtgtagtgaaatgagttggactgaatctatactatacttttctcggaacccaaaagaatcatctttagaaatactagtcaatagagtattacaatctaggagcttctgttaaggctaattagactttatcaaagaaccaatataagaaaatgcaatggaagatgttttgaaatggtgtttagaagaagggaaaccaatcttgattatggaaccatttggggagaaagatggaagagatttaagaatctgaaagtctttttctatacaaaggagggaattggtatgactcaatatacagtcctttgtcacatggaaagatga

SEQ ID NO: 256329 - DNA, 923 bp, Cannabis indica
atcattaagaaaaaaagagcttatttagcttacttttccaagaaaaaaaaataagttttactcttgagtatgcatcttgctcttcttcacaagtaagaagacaaacaagatggtgagctattctccaaagatatacctccgcattggttattatactagcccctgcttccttagcagcatttccaatagccaaggatactgatcccatcccaccttcaacatatctgccaaaaataatattattagaatgggaaatgagaagagtaatgacatctggataatacagaaaatgtagtttcatcctaataagctttgccagttcacaatatgtttgttgtaaagtgtatcacctgacaaggagacacatctatctcttctactccattaagcctaaaatgaagtgtttcttgctatgatatatttaccgtgccatttagttattttcaagcttaattgacttatattagaatcatagcaccggctagaggaagttgcaatatggcaatgtacagtgttgcatcatgaaactgataaaaatatgtgaactggtatattacatacgaccaaattccacgttcaccatcagtttctcccatcacgtgatgcagcagaacataaccactccctggtgtgtggacgcttgccttcatcacaaaatagaaggcaactgatcttattaatgatcacaagagtccaatgtaagaagacaacaacaaaaacaaggaccgagtgtatcaaatattaaaaatattgattagttgtttcagtaattaccagcacaaaaaccaacttcacaaatccatcaatgtctatcacaatcacataatgaaaaaggctcaaggtttacagtagaaattgtgaatgaattatatgtctgaaacacaggatatagaaaattacttataagaaatattaccgttgaa

SEQ ID NO: 256330 - DNA, 2311 bp, Cannabis indica
aacagtcaagtatttaatcattatcttttcagtcaaatcatatcacataagccacaatttatctaatttaaataatgtctaactactatacatcatttaaatagtataacgtatcataatcataactttgtttaaataatgtgaatccatgtctcgtccactattcaaacaacataactagtttaaataatgtaaatctattgtaccatccattattcaaacaacataactagtttaaataatgcgaatttatattgtaccgttcattatttaaacaacataactagtttaaataatgtgaattcatattgtaccgtccattcttcaaacaatataatataataatgagaaaaaaaaaaataggatagaagtcttatacttcactcccactccttttgaatattatttcatacagaaaacttaaaagttttcacttagtttccttacctcgaatgtggaaaaatttgcttgattgcgagagtgatccttgagccaataattgtctttcgtaaaccctaaattttatattgattaattagacattctattgtgattatatatatatatatatatatatatatatatatttatatgaaacttaaccttgaatctataaaccaatgctacggttatgcatgaccttaccttagcatccaaggagaatcctatttgtgactatgaagtacctttgagcccaagcctaatttgaaaactcatctagtggttcaaccatgagtaagacaataaagtcattaaagtttgatcaaataattaacggagtaaaagactatagttttgggttcgaatcttaccaacaacttgacatgatcttgaaatgaataaaaataagatgaggatgacgataataatgacgatttagagcttgtagaaataatacttatgtgtggttttgaactgtgggagatagagaaagataatgatggcttgagttgttggtataggaggttattataccaaagttagcacaagaactagagtctttgttctttaagagcatgtatgaaaaggaaggataatggaagagatatatgaaatgaactttagctatactttgcttttgtgggtgtgaaataaagtgaatagaatggatagtatttataagcttagaactaaccctacccatgtctcctctcacccaaccactaaccatgattaacatttataaataataaataattctattaatattctacacaataacacataacattttctagattcttcttagctaccacgccgttgaagatataatccaagcagagaacttttctccttggttttctcttgaatggtgaagaggaataaaactatggcttgatacctcactatcatgggctgacttcactattttcttgctagctactcacacgttctagtataccactattactactatttcttttattatttaattaatcctacaattcttaattcagttaaatgaaacaaactccactatcaaaataaaattatgttggtctacccaatattctaactacatcaacgatgatactaatccttagttgcatatgtttacaatattttaatgagactctctttcactgctatacttaactacttgaccagataaaggttctactataaattctccaaccaattctagctgtaactagttttaccaaccgctatatctactaagtccattttcttagtgttagacgttcccaatattcaaatttcaaaatttgaattgtcttcataacatatatacttataaaacttactttaagggaaatattgctttccatatatactaatatgcacatttctatataactaaatattattcctcaaataatatatcacttcaaatattgagaccaacccaacttcatatatatgtcactatacgaccttagtattactactattactactctcttataatttaaggtgatatgctactatttttaatatttacttaacactaacttgtgctaataatagtaatgttacatcctaattctataagtccaacacctaatggactaaacctaaaagcccatagtaatctataaaagtctagcttattaaaatgacgaaaattttcataacttaaggaaatactatttaaggaccaaataacatattctaagcaagcaagtatttccacatcgagttaactaacgataataataaaatatatagtagaaaataataacaaaatatttatggttattacaatttccaatcagttttgcgaaaaagggttttcaggcatttttctatcattagagataacaaagatacaagcaaactcggggagaaa

SEQ ID NO: 256331 - DNA, 1322 bp, Cannabis indica
aaaaaaaaaaaaaacaacagattaataatattaatattatattattagaataatcaatcaaataatgtatgtggcaatagctggaaaggacttaataataagatgatagcatcatcagttttggtgctacgtaacaaatactgtcctaaaactggtaattaattaaatatttcagataaaaagaacagggaatatttccttttgacaaaatttaagattacttggcagtctccatgttatgcacaatcataattatatattcaacaaagactctgtgcattacaacgttaattattatcatcagcaataatgaaattaattatctacaatatatttgagaatatctttaaagagaaaaccattaagctccttaattacttaccactaattggaattaaattcttatgaataatataattaatgtcaatatatctctaagctaacaaataataatatggaatgtgtagtgctaataagatttttgatgacgtttcaatttaaaattaattggcaacaaatatatgtatcattaaaatagtatttataaaatacttaatctaatttaatttatacgttttaatttgtatatatttatatacttatgcaaattaaattagattgagaaatttaaattccacatttataatttacatgatacaaaaataatcaatccatcgaattcaattcacacatatttatacgtataatatttaaaaaaaaaattataaataaataaattgaatttaaagtaaaaaaaaaaataattaatacctataggtatagtatatatatatattctaaaatttaatatgtcaaacatatagtacatatatatataaaatataatttaagataaaactaaactttttgcatacatttttttttattctttcttctaatttattattttttgtttttttatttaatttaatttgttgttggagatacataaaacaatagtaatatattttattttgttgttagttatgtgaaaattgttaagagttagacaattttgttttgttaattctgtttgtgtttgttatttttctttgtatagtataagccaactgtatgattagttttgtacagttgtgtttgtaattagtcttagctattcattcattattgaataatagagatttatacttttcacatccaaatcgtttctcaacatggtatcagagtgatcttctctctctttcattttttctcacttttttctcatctcttatgtctcttgtgatcaattttgagtatctgtaacatctctgcttcaagcttttattgagcccttacacccacggaatgaatggctctta

SEQ ID NO: 256332 - DNA, 1136 bp, Cannabis indica
ttaatttaattggatgttggatgtattggatttttggacaccccatccaccatctgatccgatccaattggatatttaaaaataacatccaatctgatccgatcacaattggatatccaatgtttggcggtcggttgtaattagatcggtcggttctcattggattggatcgatttatgcacacccctacctgcaacacaccatagtactatcttgtagccttgagaccacatttgtatcccaaacaagaaaaggggttgaaaaatcattgttaagaaattctattaagtaatgcaatacacattttcaccattaatgctctgaactttcctttgagttttacaaatttgatctttattcttaggtcttgtttcaaaacttcggttaatagaccttagttataagttgacgagttttcaccaatatgttgtaattcgtgatcatataagggtgtgcctagcatcctttgttgggtcgtctcactctttctttgctcctcatgttgtaaagatgtatgcattctttcattgccatctactatgctctcagggaagtggagtaagagtttgattgtagtcgtgtttgtattgctttaattaacagactcctctcctatataagtaagattatgttatgcttgatattttttttcattggtcaaagtgtgactgtagttagtataagacattgtaaagctataaatgttttaacccataagttagctaagttagcactctctttagagaatgcaagattccggtggggggagatttgcccttattagaatattttggttctctaatataaatagttgtctttaataatatttcattaatatttttagaaaaagaaatcactcaaaactctccataacattatattatattgaagaataattattaaattttaagacaaatataataatagtttatttttttgaattaaatttaacacaaaatttacactatttatttaagatagttttatctataataaatatttaagtgcagctacaaaatcaactatctctcaagactaaaaaattttcacttcaatctctctcccttttatatttttattttattttttatctcaacaattggtattaataccgaaaaatctgactaattttgcca

SEQ ID NO: 256333 - DNA, 3743 bp, Cannabis indica
  modified_base (3689)..(3689): a, c, t, g, unknown or other
caatatgcatcgcaaaacacattaagggaaaagtctaaaactggtcgaagtagaaagccatgatctaaggtgcctgtaatgatcgaagcagagggttttacataaattgacatactttattgacacaaaaagcaagttcaaatctgattatggtggcatattacagatcaccaacaataaatatatacaaagtggcatctttaataggctcactaccataagtggaaagcttgagactattaatgggagtattttgagtgttcacactttgcatattagcctttgttaatagatcttgaagatacttggtttgtttaagtaaaattccatctccaattttggtaacctgaattcccagaaagtaataaactaaacaagatctttaagagagaaggtagaactcatctccagaatcaatttctcaacagattgtcatcactccctgtgaggagtatgtcatctacataaattaaaatgtagacacaagattgagatgtaactctaatgaagagtgattgatctgcctttgaaaattgaaaaccacgatgaagtaaggttgttgacaacttctcaaaccaggcccttgggacctatttgagatcatataaagccttgttgagtttgcacacatagtttggatggtttggatcaacaaaccctgatggttgttgcatgtaaatgtcttcctttaggtcaccattaaggaagggattgttgacatctaactatctgatgttccatcctttggtaacaactattgtgagaacaattctgatggttactacaggactaaaagtctcagaaaaattaaacccaacttgttgatggaactctttggctacaaatcttgctttacattgttaaatgaacctttgcattttgtttgatcctcaagacccacttacaacctatacaagtttgattgtctggtagaggaacaagcacctaggttctgtttttctttaaaccaaacatttctgtagacatttcttcaaaccaatgaggctcttgcaaagctattttaacaaactttagttcatagatagccaacaatgaatttgatttccagatccctgcctttaatcttgttgtcattggatgtgaagatgtagattgaacaattgagagagctacaggtaatttgttagtaggtctttatgattttttagaaactgattaattagagcttatgaaaaaatgaaaaacaataaataataaacaaatagtttttacgtggttcaggcgctaataatccctagtccatgagtccattgtattagccttgtcatcgagtgtttgagtattataactatttacaatattaactatgtattccttttatttctctgaagaagaagaaacctctttaggaatttcggcagaggttttgtaacccctcacatatgaaaaaataggggtatttaggcacaagcgtgggtgagggcatacccttcacccatctagggttttgtactcagcacgtttctttagctagtggttacaacttggcaatctgagcgttagtggctaggaaacctcctaattgtgcggtacacagctacgacatcccaatttgtaggactaatgacacatgtcactcaaaggtttcaccttagaaagttggtgtataaataaattgttgggaaaaaatgagctacagagcacgtacgcgcactaccaaggtctaacgcgggggacaagatctgatttggtgtcagacgatatgcgactattgggtttagctctggattaggcattatggagttctaggaaggtctagctaaggtcttcctggaccaactaatttgctaccattctagagcgtgtgcgactttcattcactttcagtagtgcatgattaatgaaaatctcgaaatcctttccacctttgctggtggggagagcttttgggtattacaatgccttttataaccctagtaagtggaagatataagataagaatatgtaatctgacatggttcccttccgtgattgccacgtacgattcatctaggaacagggataacttttacccctagctcctaggacttaagagtgttgggagcttgaagctttctcccggatgcccgttttgtacctccaacttgctgaccacgcatcagaatatggaaggaatcttccaccatgttgagcatttgaaaggttgtcgtgctctgcaatatcactagtgatttgctaaagcgtggtgctcgattagtggagttgtgaaactcacgctctaaattttaagcatgtttctcaggggaaacaaatgaaggctggtcttgaagagacgctaggcttctagcacattggggatgataccatgaaatgatgaggaataagcactttattcttttccttcaggcgcattaaatgcaaacctttcatatccccaatcgttggatggcatagcccctaattaattcaatctggaccgtgcatttcaaaaacatttgaatcgttgccactcatataaatggacgtcttggcgattgaaaccattttcttttcccatttaccaacaactctttgcctagagaactcttctcagacgaccatcttccctagaaactttagcccctactcacttctctaaaccaaagttcaaccccttcaccctcagcttcacccttgtgtttctttgacgttcatcatcttcccaaactgttggcttgtcgttggagctaggagaggcacagtcgccaaacaggcactggaattttagtgaaacaaccatcgtcttcacttctaacccatcttacaagtaagtattcccccaactaaaactattttttaggacttaatcaaaatatagttttttacttgaagaaatctgtaactttgcatgtgtagggtttaattttaggaattagggttattgcgtctggaattagtttgcatgattcataggggaatacctctggggctggggctttaaagaggtactttccctttagtttgggttgagatgcatgcttgttatttggggttttctgatttataggatcagtttaaatatttttgagttcgtagtaatctcttgaataattcctctttggcatgttatgtgtatacctttttctttgtttgtggaagagtggatttgggctttttgttgttgttgcatattgggttctcgatttgttaccatagcaggttgcttcatagtagtaaccttggtggtgacgagttcggtggggaccactctaagcagttttgggggacgcttcccccgataccttaaaaaaccctaaattaatatatttttatttatgtgtataccatcatgcaaggcttgcttttgaaatctagtcaccgaaaaaattactaagaaactggtttcttcatcaagaaaccagtttcttggtgatttttccagggacaatgctaattctgacgactttttcggcgccggcagcaactccggcgacttttccggcaccgacgactactccgacgacttttccggtgccgacagtaaactccggtgacttttctggcacgagtgacaacttcggcgatcactatagttttatttgtttttattttttttaaaaaataaatatgaagggaattttaatattttttatggtaatttaattaagtttttattttttatgaattttaaattcagatttttttttaatgttttatatgagttttttttttttttattttttaaaatntttttagttgattggttagataatgcctatatttagtggctattttacttttta

SEQ ID NO: 256334 - DNA, 3783 bp, Cannabis indica
catgaaatgaccctggaaccccaactgcaaagtagggcttatcgatgggaagagaagcgaaaagggtgttgaaatcattggtgacatgatcgttaaagaatacttgaaattctagtgtagttttgggagaagtagagaacttcaagtatttgtgtttaacaacttcaagtatttctcccatagaagaaaatgtgtttggtccaactgaacatcccaaatcagccatgcgaaatatggcaccattgtttgttgatttattagaaaagaacaattctttaatgtcaagcttatcttcaattgcttcatggatagtagttttggcagcatttacagcagcttcctaataaagtaaacaagataataaaaacaaattttagactcaaaccataagaagaaatatatatatatatatatatatgtatgaagcagaagttgcaagagcaatagaagaagctaaagctaaaagctaaatggagagaagaattgagagcaagattggtaaaggtttagcgttagcttattttttgtcagtgcattcactgcaagagaagaagctttagcattcttgctctcaagtctgctctgctggtgtggtgtcataggttgttgttcttgagagatgtggatattcctgactgtcaaagtgttttcttccctcgagcttttcattctcaacacatcaaaaattgttgttctttagatttctgtagcatacactatctctggtttacaattctacaatttttcatataaaaaaaaatcagatgcttgaagaatcaattagcctcatcagaaaatacaagcatctgatgatatgttggtttagattttgcttcttgctctagaatttgatacatttacatatattggtttaaaagttctagcatatgacattacaaatgtaagaaagaaaggaatatatacataatccaaaatcttagaataggtagcaaatgataaatttatgtgactgcttgcctctgaaacaataaaaacatgtattagacacactacaaccccatacaaacatgaatcattttgaaatagaaaggtatattagaggtacaacattctcggactggattggagactcggttgtttctaatttagtaccaatcagcattatcaattagtttagtttttcttactacaattgttgtttagtttcttgtgtgttttgttattgacatttattattcttctaaaaataaagattaaaatatgataaaatcatttctagcaaaagcattaaggttgaaaagtagagagttagtggcaggttaggtaggtattttagttgtaaatggaggttgatcaaatgatgaaattattttataatggcagcatatattaagaggattatgtatcttcaaatcaacttaaattcaaagcatatgtgtttgttctttattttacagtttgttaagattcagtgaatatgtgaactctgtatatacttgcaaagtgtaatatgtgaactttgtatatacttgcaaagtgtattttggtaactgtcaaaacatagccaataaattttgcacatgtatatatttccaattaagtctgtcaggggggcctactttcttttctttctctgacccctggccaattgatcaattctttaatataatagtggcacaccatagttgaccaaaagatccaattaagtaatcaaagcatcaaatgtcatcacgggaaccaaagttatatcactgaaatttcaaggaaagagggtctctactattatagtattattattgttactatactcttcacttacacattgattcttatcataacaacttcttttttattgatttcattctcatttcccagattcaaaacatatatacactacttgctcttgcttttgtcattcattcaatatggctgttgaattggttgctggtgctttgctctcagcatcacttcaagttctgtttgagagattggcctctcaagacataccacagctgttccaaggaaagaaacccattctgaagctgctcgacaagctcaacactaggatgttatcagctaacaaactgctcaatgatgctgaggacaagcagctgagagatgacaatgtcaagcaatggcttttcaagcttcaagatgtcatctatcaagctgacgatttggtcgacatgattgactatgaagctctgcgatccaatcaatctagcagccgcgcaaccaaggtatttcaccaactgaaatctgtctcacctttgttgtccacatttgatagaactgtgcagcatgatgtcactgagatccttctgaaactagatgatcttcttgatcaaaaggatgctcttggcttgagagaaggtgttcaaaacaactcttctcaaaggccacctgctcctttagttgaagaatctgatgtttatggaaggcacgctgaaaaagaaactattgttgatctgttgctaagaagtgatgatgttgatggtggtgattataagatttctgtcatccctattgtcgggatgggtggtgttggcaaaacaactcttgctcaacttgtttatgatgatgttcgagtcattaaacattttgagattagagcatgggttactgtgtcagatgagtttgatatttcaaaggtaacgagagagatcttcgagggggtcacttctaaaaagtgtgatctccagaatccgaacgaaatccgaagaaaattgaaggaagcattgcaggggaaaagtttatgtttgttcttgatgatgtttggaacgagtcttattctttgtggaacactttgaggagttgttttgagtctggaacaagtggaagtaaaattgtagtcactactcggagtgaaaatgtagcctctactatggccaccagggaaattcatcagctacacacattgttagatgatgattgctggcaattatttgtcaaacatgcttttagaaacatggatgaccttcttaactacaaagatttggagatactaggtaggaaaatagtggacaagtgcaaagggcttcctttagcaatagtatctctcggtggactattgcgctccgaaagaaatgtcaagaaatgggaggacatacttaagagtgacacatgggaggagttgtacaagaaggagggttctattcttccagctttatggttgagctaccgtcacttacctggacatctcaagcgatgttttgcgttttgttctattttccctaaagattacgagtttgaaagaaaagaattgattttgttgtggatggctgaaggatttttgcaatttgataaaaaaagcaaaaagttggaagagcatggggaagaataccttgaagatcttttgtcaaggtctttgtttcaacattcgaagaagattaaatcattcctccaaatgcatgacttagtacatgatttagctgtgtttgtatcaaatgattttggccttaggttggaatattctagtaatgatttacttaaactttcagcaaagacacgccacttgtcatatatgaagaagtgggaatacgacctcaacaaattcaagggattgcatgaagcccagagcttgcgtacctttctagcactgccattccaatcaaaccatttcacctcaaacaagatgaagtatgatatgttgcttacaagtggaagttgtttaagagttctttctttatgtcaatgttctatgaagaagctgcctcattcaattggaaatctaaagcatttgaggtatttggacttgtctttcactccacttcaagaattgcctgattcagtttgtaatttgtacaatttacagactttatt

SEQ ID NO: 256335 - DNA, 3105 bp, Cannabis indica
acaaaaatgtcatggataaacttgaattggatgaagagtttctggcatttgtgtctgtttgatattattattattattattattatttttccatttgttgttctaagggattaattattgtgcctaatgctatacttttgatataattaattattgatcataattacttagctagggccatgtgccttcaacatattagagcatatctaacctctctataaatagataatattgtattttattactcttttacattatttgattatttgtagtactttttgtaaaatgctttaatagcgagcaactttaaaaattattaaaaaatcatattgtactattatttaatatatattaaatagttatttttttaatgacaaaattataataaaacaaaaataaagagaagatataaaagatgatgttgttaggtatatttttagcattctttttcactccaataatataaggatccattcaagcaaagatatatcaaaaataaattcaatgtcatcaaatgttctgccaaaagtaaatccatctcatcaaatattcttaaaatcaattccattggtaatattgctcttaatatttgtatgtcacaatgtctaatgtgctttatctcttttttcataagttatatatatggatcaaagtttatttatgtgatttattaaattaaaaagtttatttatttatttgtactttaagattacatttattattgtcatattaattattgcataacaacatttctaatagagataaaaataaataatacaaagttgaaatataaaaatatattccaatgatattgttgatggtaatgtcaaccaagttaaggccgaaaaattaaagtaaagataaagattaaagatgattaactattaagttcttatgaactcatgtaaaaatggagaaatgctattgttgcattgattcgtgaatatgagttgcaacatataattttcaaccccactctatctaattaaagagggtcctatttatagtcacactattggccttgatatatgtggtcccaaaagctaaaacatatatattcttatctatactaagaaaattaacattgcaaggggtagttgtggtcgggtgtcagttcatactgacacttgtggatttggtatctattaccctttgtacacctattacttgcccatgccctatagaggcgtggaggctttatctgatccccatcatgtacaccgtacagtgtgtcccatgccttgtatctttacaccaggtactctagcactttgtacctagacattggctatgcaccaaagtgcatagaccccgccatatggttcttgatgagaagttagtaacagtggatgaagcttctcttttccacttccatgttgtgtccgttctacttcatgggtaagtttcctttctcagacattacttatgcgatcttgcttactttcacatgctaatgtggacttatgctctttaaatttcaatcctcgggatcacccactgcctatcatccttgtgtgcctcgtcggctcctctataggctcagcttgaatcttgcatgcaagacctcaaattgtagactattgagaatgatagtctattgaacaaggcatctcatttgaagggtaagatgtctagtgccacatctttagtagatactcttttcttggaaaagtagactcttgggaaaacaatttacactttaagggagaccattgacccttttccctcccaccagaggcctttgagaatatttctatcgagcatactttatacagtgtttggctccaatgcttgcctttcaacttctcttacttcgagcctgcatttgctaaagttgcagagtggcctgcgaacagtggggggtattgaaagcttcttccattgccaattttctgcctttatagcatatttaactttattttttggaagactatattgttagattttgtgccctaaataaaattcatttgaatataatcaaattttctaattaataaaagataagaaattattttatgttgcatggttcacatgatttatttcatgattatatatttaatgtatgaattatattaagtctagaacatatatttattcatgattatagtattttcaacattgtagaatataatcaggattatatgtttaaaaatttaagtcctatgatttttcagtacactagatttagattgacatgataatctgcgacaaggtatacaactacctctaggcatccaactcaacatcttcaagtgtggctctattgccattggttcatgcatatatcataaatttgtagatggcatatcatattttatgtttctcaatagatggacggcaatttctcgaggagatcaagatcaagagataaagatcaacaattgtgattcaaagcagcttcactctttcctcctatgaattgatcacagtacaactttaaaactggctttgtgaacaataatagcatgagttttacctctaaaaggtttgtattcaaggcctctagaatcaaagatcttaaacaaaaatatgttgtggataataaaagtgtttcttgtgtggaggctttgtcagctttcatatggaactgttttgttgttgtatgatgatttatccaaaaaaaactaataattatgtgatgatttatccaaaaaaactaataattatgtgatgagttatccaatgaatcttcgaaacaggtttgatcctccactcttggattgttcatttggaaatttttttagacttgtaatgtttaatgttgatgtatctctagataatgagtgcaagacttttataagaaagcttagagaagaattcagtcacattaatggcaagtattcgaaaatgctacagcaagaagagggaatagtgaaacacttggattttattaagaagatgagtaatgaaaagactctttttagtttcagtagttggtgcagatttcctttgtacgaatcaaatttggttggggaaagcctatttgggttggcgtgcctcccttttcatccaagaatttggtcgtgttaatggattcaaaatcaggtgatggtggaatagaagcctttatcaacttagcaaaaaatgtcatggataaacttgaat

SEQ ID NO: 256336 - DNA, 1547 bp, Cannabis indica
ttattaaaagtaaaaaaaataccaaaaaaaatgaacaattattgtaaaataataccaatccatttttgagtgatttggtttagtttggtttgatcatttcattggtcttgtttggttttgaattttaaaaaaccgtaatagtggtttggtttgaaaaaattgaaaatccaaaccgaaccaaattaatccgtgaaaaccccaagctaagtccccaaacatcaaaagaaagcttcgaaggaatgatcgattagtacgaactgatgccaaaagtcattacggaaacagattcgttggagtgtttgatgacgatgagagattgagctgcgaccatgccagttccagtcggattcatggcccaggcaacccaaccgttatgttttgaagatatagttccagatctgaaaaaaaaaaccctcagatctcttaaagagagagaggagagtgagcccgagagagagagagagaccggagaggaacaagaaaagggacgtcaccgtcgccaaagtgagtctcctgatatctctctctggttccttcgtgggtgttggaaccagactcgaagcccaccctccacgcgaaaatcccgaatcccgcgaaccctctctctctttttccctctatttcctgggtcgattttcctttggtcaaaggtttagaaattttggctcagttgggtactcttcatttttgtctaatttcatgtattttgatgtgtttgaggattgttcttctgtaaatgggaaaggacccaaatttggtgcttcattgggtttgagtagtagaaatagttttagtaaagttgttattcagtttaacagagctattaggttccattgtgaaagaattccaattgggtttgcttctgttagaaatgttggcgaggataataataataataataataagagtaatttgcagtatatatatctaagtttaactcccgattgcaaataaatacttaagtttaattaatttttggctgtaataatacatgagttatatttttggaacttcgtaggtacctggccgttaaatgtcaaattattattcacatgtcattttcttatttgtatatttaaactaattctttttagaaaataaaaatttcatgacgtggatcaatcagggattgccacgtgacaatctacttaacacttaacagtcaggtacctacagaagttttagatttataacttgattaccgccaaaaatttaatttatgtatatttacaattgggagttaaatttaagtatttttgccacaaattactctaataataataataataatgagataattgaagagggttgtagtgttttggaagatgattgtttgggtttgaatgttgttgagcctttaaaactaaagaaagttcttattttgatgagtgatattggtggtggtcatagagcttcagcagaagctataaaggcagctttttatgaagaatatggtgatgaatatagtcaggaggaggaagaagaagaaggaaacaggggggaaaggtcgtgatctgatggttcatctagaagaaggaaaagaaaga

SEQ ID NO: 256337 - DNA, 764 bp, Cannabis indica
acaaaaaattagttcagaatcctatttgtacaattttagaaaatacatagtttattttatcatttaacaaaacagagaatttaattagaaacttttacaggatccagaataatatttaccctaaaaataataacctttgccactcttgttaacatgctctgttaccaagttgcttgaacttaaaacaactgatgttaaattttaagtaacatggatattcttgagctcacttgttattatatggcagaaaaatttaagggatatagctgaactttatgaatgtgaaaattcattacgtggcattgaagaatatcgcaaggtgaatgggttggaggccataagctcaacatgctttaaggctgcaaaaatctctgctatactcattgacgatggattaaggtttgacaaacaacatgacatagaatggcataaagcctttttaccatttgttggtagaatcttgagaattgaaagtctagctgagacaattctagaaaatgaagtaagatactttcaacgtttatcatgctttttcactctctcctaatatcaatgctatgtttatttgtaatgcaatttttcttttttggagtttgtgtaggaattgcctagaggaacatcttggacattggataagttcactgagatatttgttggaaagctaaaatcatatcctttgcctttgtatttactatttaccctctttaattgaaatggactataagtaaaaatagttttttagactcttactataaaaataaata

SEQ ID NO: 256338 - DNA, 1976 bp, Cannabis indica
aaacaaacaaacaaacaaagaagtttgtaaatatgcaatttttttttttaacggctgtaaatactaaatacacatttgaaaagcttatacttaaaaaattaaaacaaaataagatattattttgaaactcacattcccaaaatattcaaaacataggcaagaacttctgtttgtatatgtacaacccatagcattgctacaagctaccagtgcctagatgggatatttaccaatgccaatactaatatgaatgtgccttttagcatttctcaaaagtaaaactagcaaaagagatcaatcattgctagcacccaaaattggtcaaaaacttcagtcacactcaccacattattatagtatagtatagtatgacacgaaaaggaaaaaacaaatcaacagaaataataaagtagacaactagaaaagaaaatgtactcttttgagatatctattacagggttttcaaaaaaaaagagaagacaatgataaataaacaaaaatgaagcctttgttatcttatgattctcattactaacattgctgctgctgctgcttctgtttcatttcgtaccaccttctgttatcactgtaaaaaaacaataatcatttgttttccattatgagcagctgataattgaacatcaacaattcaaatctaaacaatgcatgccaactaaaattaagaaagataaaaattcaacttgacctattgaactcgatgctaaagggcacccatggtgcctagtagcacgatgtgtaatatcgatattggtgtaacttaatattgagtcccacttgttttactttcataaatattataaaaaatcgctaaccaaatatggtactagcaatgctcgttgaactcgaataaaaaagaaacttgaagattcattttaaagatatggtaatcaaatttaaagatagttgaagattcctctgacaaaatcttacttcacaaatcaaatccagttgactgcgaaagaaagagctaaggccttgaagaatcagctaacaaaatctaaaatgaggaatcaaatacactaatacagctatcaacgaaagagagactattactttaactaaaattaacagacccctaaaaaaatctaacatgatgaactggatcaattcaacaatgaaaggaaggctcccattttaaacaaattataagatttgaagaatccactataacaatttcaacatcaggaacccaatccagttaaaatgaaatagccatgctcaaatattaaaccctaagagaatgaggagcagcaagcagtacagtactactttatgcctgattgtatataaattatactaacacagttctatgtcatatatttgcttgtattacccgataaccataacaatgcgaggttacaaagcctccacaccaaccatcaatatatgcaaaacattctaaagacaagtgtactgatggattactagaatcagtaactaccacttccttacaaatctaattataccaaaaccaatatcaacacattgtttatctaaagcagaaatcattgtaagtgaaatcaacacaaaactagaaacacgggtcaatagaaataaagtagacagctagtagtagtagaaaaactacctaatcaagcttcagcttcaactggcttatcttccacatcaactgcagcatcagttgcagcctcaacaacatcagcattttcagcaaggggctgtacttgctcgtcctcgggcagtggttcttcaacgtaatcattctcaaaagcatcagtaggcacttcataaattctaacttgaggtttagaaggatccttcacgagaacatacttgccctctttcaacttcatacacaaatccacaatagatttcacaatgccccacatgtttgaagtgttgagattgatctgagctgcaaactctttcggtttgtatccaacaacagccaaaatgacatgattgaaatgatcacgaggatgcaccctcgaaac

SEQ ID NO: 256339 - DNA, 2202 bp, Cannabis indica
ggttgtattaaaaaaaaaagttgtcaaaaattaagctcagggtcttatttttactattttagaaaatacatggtccattttgtcatttaacaaaacacagggtccaatctgtaacttttgcaaaatacagggtctaaaatagtatttacccttttttatatataatattttgtaaatatttttattaattattcatatatgttttttagggagctacatattatacaagtcttcattgtgtgccaccacatacaaagtccacagcaatgtttgtttcacaactaatcatacacacattgggagatgttatatctttcccccttgttggtcacattctggtttgttataataattttactaataattaaacacatatatattatataatttatagtcataataatgataataattttattttattttattatataggattggacacataattggagaacaacttgtatcatattaacttctgttctctttctagcagctatatgttggactattggtaagtctatacatattatattctttttattatacttattataataaattataattttactaattaattgtaatataataaattctcatatatatttttattttattaacttgtaggtatttttgtgagtaaagagaacataactgaggaaagcatggaaagtacaagtgaaggacaaataacatcatcttcatcctcagtttctttagttaatttatgagttattattattatttaattttttttttacaaatatttttagcgtactgtattattggtttcaatttttcgtttgactatttgttttttcataaaataactattttttttaaagaaaacttcaataaataattaatgattcatgtctcaaaatagtttcttacacgatatatgtttcttacatagtatacaaaaatacaaaaaaaaatatttaccaaacaagtttctcttttatcctaaatgtacacacaagtttttcttcatagtaaaaataaagaccaagtgaaatgatacaattaatagagatattctttaagttagtgttaaactccaaattctgttcgagacagtgctaatttttaactaaatcaaaattctattttctcaatcctttccaatttactaataagcccctaaaatagtgtaacatgaaactattccaagtaattatcacatataaattatgtttaagtaactctaagagccgaaataacaatattaaagcaaataatgagtaaccatattatggcttttaattagtttaaaaatttattaaaaataagataaagaaaaaaaaatacttatcaattggagttttaactcttcattagagtttttcagaaagttaataatatgctctcgtttccaaattttcattaactaacacaaatataacttacaaagtattacataataaaagtcgacaaagatatttttgaatgaatatgtataataaataaaaattgaaaaccataatattaaagaaagtaaaaattatatgacaccaacttatttattttataaaactaagaatgagagaattaaaattatatttatttatcttattaattagttatcacttgtttagtaagttttataattatgttacttaatcacaacgtaaatataattaaactaatatgttccttttattattaattacatgaaaaaaaaaaacataatatacctcaactcaaacactcaaaaactttaatatttcattaatggtaccaatatcattagtagcatgaagatgatgctttatatttttcttggacctataaatataaaaaatataattataattaaccatatatattattaaatcatatatatgataaaaattaataaaataacttcacataatagaaaagaaaaaatgattaagactagatttaaattacacatatttcttacacacaagatgtgtagctaatctcaatcatacaattaaaagtgatgatctcacttaaaaatataaatggctaatatttattgtgtaataagtgtgtgcaatttaagtgtgtatccagcgttacttaatagaaaatcatgttttaagtctttttctctattgtgttgaactcacattaacgctatttaactcttgtcgtcgtcaatgctactgtctctgtcgacaccaacggtgatggtggtggtggtggtcgatccaactttagttttttccc

SEQ ID NO: 256340 - DNA, 2159 bp, Cannabis indica
aacgaaggtgccaagtctcaatatgccctatgctagcatctaatctactccacgtgatatgtgatgacgtgcggtagactttgagccatttctagagtcccacttccttttggaatgactgtctgcattcttctttcataattcctataagaacaatcaagtattattggtgaaacttctaatgtataaaccacaataaagttttaaatattaatcattacataccaaaaagctaggttcagaccaacgatcacaaagatattccaagtcttgctgagatacttctcctctagggcactcattcttggcctttgttgatctatttcaccaccgactttcttgaaatggtcatgcaatttatatttgtggacttccatgctcgttgcatctacccatcaataactttttcgactttctcatctttaatgacaatatcaaatgtattctactggaaaaaaagttgcaataataattagagattataaactgaaaaatataaaaatttagaaatattagtcaatcttaccaagagtcgatcacgaagtcgagctctaacttctggaggtacaagccttaattctttgtactgaaaaatacaatattggcgaactataaatccaatctcattattgaatcactcaacattatcacaaataacttgattaagtttatagtcgaaggttacaattaacgacttagctgacttcttaagtgccttagtaccatggccacaagtaggcccccatttcgctatagggtttctagcattctctacagtaaaaaattttaaaaaataatatacaatattattcagagaggcttttactctctagatttctgctttaaactctgttttggtaactttcccctaggttctcgacctatcgctttgagttgtctaggaaaaataagtttttataagtgatggtccggtggggacctctctaagaaattttaggggaggccttccccgataccctttcttttcatttagatagtgggtgtttaatttattgaccttccttttcttttcgtctttccagtgatggatttaaactaggagctctatcttaatgcagtggaaatcaaataggacacatcagttgtccttgttgaggaaacagctactgagggaactcaagcagaggttcctgcaagggaacctcactcagatgctgcccttgaaaccatcagagaggccactctgttcatgataccaaaaaagtccatagggaaagggaaggccaaggttccacctcctcctcaataatttgacagctccatctgggagatagagcaaaaaataactgcttccgttcatatgggatgcttgaaacatctgccactgaagttggattgctcaacgtattgggactaatgagccatagattagatgttgcggaagactcaactttcacgagcactaatgggttcagtgcctggagcttgtcccatatcctaagaacttactttgtagagtttattgcgcgtattggacttgctctgttccaactgatacctccggcttacaagctcatagccaaatggtacattttttttttttataaaattaacaagtttttggtgcccactctagagaaattctgtacatctacggggtgaatcctcatccaatgaggaccaactgcaagaagttggagttttactgttggaacttatttttaccaggatctagatttactaatatgtatgtatgattaatttctataatctaacatcctaaatatgaatttctgaaaaaacaatgaaataaacacataagagattaataaatccttacattgatggtagcagaataatagtgactctttccattcagatctctaccccttgattcttttctgtagcagagcattatcaagatttaaacttggatcttctctccttcaatttggttagacatagtcttcctcactatgctaggtattgctttgacatgagtgggcatactctcaattgactatggtttgaaatattcagaggaagaagaagagaattttgaatagaagggggctcttttctattttctaattatctgacaaaagagactgatgttggttatgaaaataagatccatcatattctatttataggtttccttctatggttaggtttagaatttaattggaatcaaaaaa

SEQ ID NO: 256341 - DNA, 1662 bp, Cannabis indica
agagattaagaaacaatagtcttttttaattttttttctatgaaatattaaataatttattattaaaaaactcttatgcggatcggattggatccaaaatataaaatccgcaattagtgcggattggatgttgtttgaccaaaaaagtgcggattggatcggatgaacacccctaatttcgatgcttcatttgacttactgaattatcaccagttttataagattaacctaactcaagaacacacggaggagatttaagagaatcgtaagagttatatagctaaacctttagtagaggtatataattttaatttaaggctttagaatccagcatcaacttccaaactcatcaaaacaaactaacattgaaaaaagtccaaaaaaggctttctagcaatagctataaaataaaagattaaatataaaatctgccacaaaaacaagcttcaggtttgacaaaaaacaaaataaaatttctgggcactcaaacaaaaacttggattcctacttagcctacaccttcagctgttgaagaagcagaggcaccgccttggagagctctctaagcacgagtcttttctggtttcctagaagccaactgactttcaggctgcacaattatgcaaaagccatattagatgaaattgcttgtaaatatcagatcatgtgttctttttaacaatttatttacctctttcttgaccggctcttctttctctgacaaagtcagctcgatatggcatggggatgacatgtaagctgcaataatatggtaaaggttactaaaaagctaaacaaatggagacatgataaatgtatatattatatgtaaatactcacggttaattcttccatgggcacggtatgtacgacgcctttgcttttgagcttggttcacctggatgtgagaaacgtaaagtgaatcgacatccaaacctttcacctaaagaagtattcacagaagaaacttgttagaaaacccaagaaaacaacaagatataacatgttcgagaaagaaagagcaaacaaataaagattaacagattaggaagactagtacctcagcattgctctcagcattcttcagtaggtcaagaataaacttggcagattttacaggccaacgtccttgtccatttgagtggcgattttttgcctgtgcagtacgccctactcctctacagaagcgacggaatgggatagcttgcttgtgaaccaaaacatcctccaaatacctttttgccttgatcaaaggcatctttctgattgaaaacgctgtctccctagtattctgaagagatatacaagcaaataaaataaacatctgaataaatatatgcagaaaaatgacagcagtgactaaaaaatatacagtaattctaatatagctgcaaacatatttttactactcagcatactaatatttcacaatttattttcgttaaaacaaaaagcaacacacaaacatagtaataccaagtataatcttaacaaagcttcgagatactgcgcaaatcttcaagtaatgtagtttaacaaaaagtagaattgggcacatttgtttaaaaaaagtggctcgagtaattaaaaatcacaactatcctagtttacagaaccaaattatagttcgtcgagcgaagaaatgtaccttaaagtgaactc

SEQ ID NO: 256342 - DNA, 1064 bp, Cannabis indica
aaaaggtgaaagactgatattttgcctgagaaagacattgtggtaaaccaaggtatttagtgataaatggcttatcctcaagctgaaaggtcctaaaaaaatagatccctaatatcattttgagtattaggtgaaaacaaaatagaagatttagtgaaattaataacctgccccgaggcttgagaatacaaagaaagggcttgttgcaaagcatggcaagaatctcgatcagcagcatagaaaagaataccgtcatcagcaaacagtaggtgggagataggaggggcatttcttgaaattgaaataccatgaagcaaacccctatgatgataattactaagaatggctgaaagcccttcagcacacagaataaacaagtagggggacaaatgatctccttgtctgagacccctagtgggcttaatattgccatgcattgatttacttctataatatggaattaaagtagccaaaaatgttcattcacttgatataattatatagtggaattcacattttttttaccttattacatattgaagaaaatcaaaattaaattaaataattatacaatttagtgacatttcaagaaaacaaaaaaggaaaaagatgatctaatttcaaaatacatacatatattcattcttatatagctaatatttatttgtttagtgtcaataatttttttttcttaattatttttaattgattaaatagatactcatattgtagatatatacattgtcacaacaatttattattgtgaacacaattatttatttttctaaaaaatgaatggaaatgtaatacaatgaatatatgtttgcaataattattttatttcatactaaatacaaaattcgaaataaaattctataatgtctatgctgtttttatttttgacaatacaaaatggagaattcaaacatagaatagaacctcttttttgcgagaaatatgtagttcactaaacttgtctattagaataatataaacttatatatattaatttagatataaaatcaaaatcaattatttttgggaactatatattgcattagaag

SEQ ID NO: 256343 - DNA, 1519 bp, Cannabis indica
ttaagcatgcttaacccgaaaaagctttctcattatcttatcaagaccatttcctgcaatctctttgttccaacaatccatcacaagttgcttgtacccaggataagaaggccagtgattcccaaaacgaaagggtttgaagccaaccttgttttgcacctgacacctaataatgcaatagcagtgatccgaaattacctcccatttaaaacaagcctcagcatttgggaaatcattaagccagatgttgttcatgaaaactctatctagcttagaatagatcatatctcccacctcatgcttattcgtccaagtaaaaaacgatcccgaacatttgaattcctcaacttgacccaaggcaagccaagcttgagcgtccaaaatatccttattccgaataggcctccctccacttctatcttggtaaccaaacatagcattaaaatcaccaataatgatccaaggttcaatcaaattcccaaaccttgcaagcttgtcccaaagctccttgcgaacctccatgtcattgctcccataaactgccgtgattgtaaaactcttgttctgaccactgaattttattgaacaatgcaccagctaatttgtctcttctaaaaccttcacctgaacaaacttgtcttgccaaataagaagaattctcccagaagtaactccactagaatgaaaattccaattgggaaagttctccatcatcataccttgaaccttctcatgtttaaccttggtttcaaacaaagctccaaaaccaattttatttaacctacaaatatcaagaatagcagattgcttttccattttatacatgccccgcacgttccaacccataaaattattgacttccatcagtaaaagaaagtgggtcaagtgccttaatctcatcttcaattgccacctgcagagcagcaaatccatttattgacttagaaccttttagattatcattcatcgccttgccctccatttgtctcactgctttcctcttgggtgtaacccaatctttgctagcttgagttttgtcttgttcttgccttctagcattctccttaaccacaggcatcataccactaccattttcttcattgttaactatcaattcagcatcttccccagttacacaaacttctttttcctgctccttctttgcccctatctctgcttccgattttctcttccaaacaaattttttctctctgttgcagttagcaagaatgtgacccaaattggcacaagctgaacatctcgaaggcagccactcatattctaccccttgttccaccaattgcttcttttcatttatgtaagagatagttttaggaggatcatcagttatctctatatccacaagaacccgagcaaatttcaccatagttcgatcttgcgtaactttatcgatcataatcggattgcctaaagtactaactaaggcactcaaatttttctttccccaatactgcaatcctaacccatttaaacggatccaaactggaacagagcttac

SEQ ID NO: 256344 - DNA, 3406 bp, Cannabis indica
tactttctgcattatttttcactaaaacttattgcaattattcacacaatattttatcgtcaaaaatagcatacttatcaaataagacaaacgatattaaatatcaattaaaataaataagtaatagaaaatacacaaattaagtataaaagtgagacactaatatttttatgtagaaacttaatgtgaaaaaaattatgaggatcgtagtccgcttaaatcatctacttattattggggtaaagttcaatgccaacattattatttagggcaacttataagtgtgttctccttcgtgcagttggaaagaaaaaatcttgtgggttaagtaatgtagggtggtggtattggtgaagttgacgatgttttggcctggtatgtgtaaggagtgggtggggggattcatgactcctgtgagacgcaattggttatagtaaggtgagattccaaatggtccctggttcggtcgagtggttactctcaaaatgttctcatatgggagtggtggtgggtgtggggatacatcggagggtctcatatagtcaatgcacccattataagtgtgcccaagacgtccacaatgatagtaggggttaggctgatcctcatatttcaattcaagctaggtggcggaagccatcccagggaagagaatagggtcacttcttgggaaaggcttggtgacatccaacataatacaaactgttaaaaaagatccccacgcttcgaggagggagggttgatggatttccagaagaaccctacaatctggccaacaagtttggccgtcgatatggatcttcgtgtgaatgggatgttgtggatttggacccataaggggattttcctaatagcctcagagacatgggaagagtcacggtcagggatttcagggaggacgagatttttttttttttcaaaaatccaaggctgattgacaatggctcgacgcctatctccttcacagtggaaatctactagatacaggttggaattaggagatctttccttgacgctaacgggaaaccttcctttccagtatttttaaagaaatttatcaaggcattgtagttaaagctttttgtggtatacaaggtggtcatgaggtggaataggggtggagctagtggaagtccttcttaaatgttagcattatcaatgcgagagtgtacagtgttctttgttttagtaagactctaggctgcaaaaaaggaacaggctaagtcttccattttttttttttttgaataaattaagtcttccattttaggtaaagtaagaattgaaaggtaagatagacaagtcttaacaaataaggtaaagagattaacctggattttagttcttaaatagacaaaaactaagaagattgctatacggggaatacggggggttgcgactaatctaggtacactcgaaaactagagacagtaggatttatagcatttaatggccatttcaagcgagggattatccaaatctatccacagattaggttggtagatacaacaattaaaagaaaaatttaatttaggaactgaaaggactcttaaaattaaatacaaagagaaatcatgattagatttactctgaagcaagatcaaacttgcaaatcgctcataaatgccactctacacttgcctggtcaaatgtcttcgtgaaccaagtaaatctgacctcagcaccttaagaataggtcgttgagcgttaatcaccttaaatgcaatgccaccacgacattgcaaagggtggaagaggcgtctggggaatcaaaaaggctagaagtggtcatgatgaccgctactattcgaaaaggaggataaagatacctatgaagaagtcatgctctcttaacaaaaacgaagggcgtctcagaaggtccttcttaaattgttctgaaccttatataacagcttataacatatataatgtatacttattatataacttagaaaaactaaatgaagtcaccaacaaaataacacatcatagctcaagttgtccttccacaggcagaatctccttgagtaatggaaaagcaaaatttgcaaattctccaagagaccttataccatcccaaatgcaatatgtaaatgtatttactaaattcagtaatttcactttgaattatgcatttttcaaaaattaccaattaaattttttgctttggtaaataataaattagattttgtattttttaaaataatacaaaataatactctgatattacatttttttacatctattctggcaagaagctagttttaagttgattatgttaaaaaaaatatgagttgcacgcttatgctgagcatgaaatgtgcgtcaaggtaagcttccaactaagtggcgctggttggtagttatacaacacaagtgtgacaccataatcttaatactaatacagaacagttatatgaagagtgaaaagtgaaagtgaatgaaagccagcgtaaggaaatcgtataattagaaaaatgtgaaacaatattgaaaggaaaaggccaaaaaacaatatatggcgtaaattcttcattaaaaaaatcaattttgagcactctaattttttaattttattttaaagagacctaacttaatagtgaaagagagtgtagtagactactctactcatctccaattagttttttttttaatataataattaattttattgctgaaagtcaaacaatacattggttattaaacaagcaggaatttctttcagctaagatacctcgttttccatctgtagtgcatatcatactcaccatgtactgcggtattactatttcgcattacatgttaaagacataaactcggaaagacaaataacaaagatctaaaagatctaaaaaaacaactccactcggagacactctcagaaagaaaaaatgaatagaattcacaataacttccaaattactctctacaaagaaaaaataaatgaaaaaaacccagcaacaaacaattatgggcttgaggggattgtcttagccgcatgaaggtgataaacatgtgtttgtgaagattgactccctcgaggagaaaatgttttaactgcaattagttttaatataaaatttcatacttcttgccgtacaccttgctctaatgaatattcaccaaccaaaaaaggaataactagaacaacacgccactatcccagaaagattagactagagaaggcaaagaataacaaacgaccgaggctgcagtgggaaaaatactgcatgtatctgtttaaaattcaaacatccaatatcacatttttatttaacatacccaattcaaaattttcacaaccaaactaatcactttcattttatttcttataaataaatttatgtatttgagacacatatccacagtcactcacatatatgtatcgcatcgcttacataaatgt

SEQ ID NO: 256345 - DNA, 1119 bp, Cannabis indica
gtatatatacaatcactcatcaattattatatgtttactaaaagaagagacgattagtactttaatttgttacaatttcatatataatctaagctattaaatttgattggttgcctataatatgacagtgctatatatataaaagatgggtttaaaaaattcatttgactttgatcacaccctgtgctaagatggattttagtaacatttacagtggacacctaattatatgcggcgtttatctagccattttaataattattaataatatattattcattatatatatgggaatgtatacatatatatatatatgagacttacaagatgatatatatgtttggtttaggattggagagatcgaagagcaaccctattgtttatctgaatagccatctatactatatagtctatatatatatatatgatcttgtatacatttggagaaaaattaagaagaaatgaaattgatcttttcagagaaaattaaagcttttgtatattttttgagaatacaacatattaacaaatatatataatataacaatcaccataatgatatacagaaactattaatcaattaataattaatcaaactaactaattacaactgtcaagatacttagaattcgtacactcaataaaacatcattataaatgtcatttaataggataacctaattgtacagtgattaattaatgatataataattagactatatgtgaaagcaaattaattcatttaaaatatatatatatattggaataaatcaaaataaattgtcctatttttaattaagtttttaattaagggcattagtggtgactagtatcaccatcgctatttataatattaaattttacatattttattcatttattttgtttataaatattttattaataatgattatatatagttaaaagaaaattctcattaattatttataggatgtcatcttataatagtattaaatattattggtgcctaataataatatcttttagtacgtattaaagaaatgctaaagggaccaaatatctacaatcaaattattattgaatattatttttgaaataaaaggatgttgttttcacgttgcggaaatattgtataat

SEQ ID NO: 256346 - DNA, 1171 bp, Cannabis indica
cacttgcaatattctaagaactggaggttgccccaggggaggttaatttttggcaaccttctatagtatgctatgtactgggatcaaatccccctctgcatatattagaaggttttgccaatcgcatatggaaagaccaggtggataaggtgcgaatgctctcctatggagtgtttatcattcggttcaggtctatggaattcagggatcaggtgctcaatggaggttatatctttttcaatcgcaggccggtgatcatgaagccctgggatgcagacactaacttcaaaaaggaggatgtcaagttggtccccatatggattcagattgagggtcttgaactcaaatactggggacagagatctctcttcaaaatagtggggcaaattggcaaaccagtgatggttgactcggttactcgggatagggatcgcttgaattaccctaggattttggttgaagtgcttatgaaccagaatttccccaatttactggagtttgaagatgaacatgggagtaatacaactgtgggagtgaagtatgaatggaaacctgacctctgtaccaattgctctggaatggggcacctggctgcagattgtaaaaagaggaatagtgctaaacaagaatgggttattaaagaagataaaagaaaggagacaattattgtagatgaagatggtttccaggcagtttcgaaagggaagaaagtgcaagaacaaaaatctgaggttatggaaccaagtacttcgaatggttttcaagtgctagctgatgtgattgatgatattggagatgttgaactacaggggactaatggtgtaacagtggataacacaagaggggggggaggtccctctcttggttatggataagttccttgtttggaatgtgcgaggagccaacaaccagcaaaagcaacaacagattaagcagtttattcgttctcaagaggctgggtttgttggtcttctcgaaacaagggtaaaggttcacaaacttggatccttttaccttaatgtctttaatgggtggtgtttctcatcgaacatagcttggcaccaaggggggagaatagttatagcctggaacccaaatcgtttcattgttgatattatcaaatgcacaagtcaatttatgcacttgagaatctcaacaatggatggtacat

SEQ ID NO: 256347 - DNA, 810 bp, Cannabis indica
tgtcgatgttatcttaccagactacaatgcttctcatgtggggtggtattaaaaggaaagctaatacaaacatgtcgagaatgtggaaagtctcggcaagcaacctgcatataaaacaccattaaagttatgaagctacctaagatatggtaaaacaaatccaacaaaagcctaattccccaaagaaccgaaaatttaactatcttctaaactcagcaacatacttctaagtacaacattaagaacaacacatataaccaggtaacctgtttcatgagaaataaaatggaaaaagcagatacattttctaaggtttttgacgaaaaaacttcagatacacagcccaattcaggttataacttaactgccacccataacatgttttacatttcaaattcttaacattattttgagttcactatccaaccaaccccggaactgatcacgacaaaactgagatttttcacaccaattagctgtgactgtgatcactgtccaaagaccagatcttcagccactaactaaatacaaaaatatcaaaacctgcaacatctgtcatgaggttagacgaaaccgtaaaacagttatctttctattctataccattgataatctaccatctcaactgacaattcatccaaattcaagcatgtcataatataacatcccgacactgtaaatgaatccatagctaataactcaatttcattcatactatcccaaacaaatgcaggtcctggttattttatcccaaaattttcctctataccaaaatcacaacttcaataaaccgagagagagagagagaga

SEQ ID NO: 256348 - DNA, 3130 bp, Cannabis indica
ggattagtaattggtccagctctcggaggttttcttgcacaggtataactattataataaataataataataataataataataataataataattatacagtttagtaattatttatattttaaaatacatgatattttaaaaaaacaaagtatttttaaatattagataataattattattgtttagtaattattatttagaacaagaaatttttagttagttatacaatataatatacactaaattctcatgagaaaaacttaacttacatgttcatagaagtggtgaggctaatacagcatttgcttgttatatggtggatggagataaggctcaactttgggtataagattagctctgtgtctacttagagctcatatataagtattatattttttaagataggagctcaaaaataattattttttataacccaccaaattttaaggccgaccaaaaatattttatggtttaaaattgtatggtgcacaaaataattagtggggatattttattttttaaaatattgtggtgtgaagaagtaaaaagaaaaaaaggttcactgtcacataaatagttgtggtaagtacactcaatgaaaatcccacctattctctaaaattacagaacagaaattaatgcactttaaatagttggaatcaaatcactattttttttttctttttgaaaaatggcataaaggcagcagtagtaaaaatgggcccaagtgtccatcgatgcaccccatctctttcggcatctgagagaatttttcaatttaatttttctcacgatcatctgcgttgtagttatctgggacatcttgcaaaattttgagaaatttagagaaaatttaactcgccaaaaatagagttcaaacagtttatttcacgcgtataaaataaaagagtcttgcgcgcgattgactatttgaaccctatttttagcgtattaaatttttccaaatgtctcaaaatttacaggttgtcttaaataactacaacgtagacaatcatcagaaaattggactaaagaattctctcagataccgaaacaaataagaggtgcatcggtgtacatcttttaagagggtgcattgttgaagcatcttttgtatatatataaaatattgtgtcatattataagtggagtcagggtcgaccctgagttgaaatgggccataagtaaaaaaaaaaaatttgagctcttactacaaagataaatggtatttttaaaaattattaaaaaatatgtatatttttttagaaaaatttttatttgggcccctaaaattagtgggccctaggcgcgggcctaacccaccttagcctagagccagccctgagtgagtgtgagtattattgggtatattttcacaaaatttaaaaaaaaaaaaatattattttgttcgatgcataaaagtatactatataaaagttttggagtctttaggtttgggtggaccctaagcatggtctagcccgtcttagcccagaattaggcctgcagtgatgtgtactgtctaatatccattcatgtaatatcactgtaatttaatttaataactggtatagaatatagttaaatataaaatgccacttcaatatcgtaataggctctaatagagcttaataacaattttaactttgtattatcaagattcctttagttatttggttattatattgtatttgcattaataaagaatcctctctataattattaacataataattcttattactttgaagaataaaacaatgcaattttttttgtttattgattaaattgaattaaagcctgcagagaagttcccaagaatattttccaaagaatctctatttgggaggtaagaatgactattccaatacatattattttcatactaattaagctcacttctaatttatggttaaaaataattaatgatgttattattatgaaatgacagatttccatactttttaccttgcttggtcatatcaacatttgctttggttgtaactattttgtgttattggctgccggtatgttaaatttagttatatgtaatctaaattaattaaggagaaattttgaggcttaattaattgcattgtatttatttgtttgttataggaaacacttcattttcatcgtaaaaaagatgaagaaaatttggaagaagataatgacatgggaaaatgtaatcatcctcaaaaacaaaatctttacaagaattggcctctaatgtcatctattatggtgtattgtgttttccaacttcaagacatggcttattctgaggtaattaatttaatcaattcataatattcttaattattaaacattacatcttattgagtaactttttcttcttaaaaaagatttttccattatgggctgtgagtcctaagaagtatgggggccttagctattcaagtgaacaagttggtgaagttcttgccatttcaggtacgccatttttcgaggattttcttttaaaaaaataataatttagagagtaaaattctgtaagagtcatagttcggaaagaaacaaaataccatttgtcttgatagttaagtgattagtttaataatttatacatatatgccattcaaggcaagtggtttagaagtaaaacatgctctagttaactaatgaaacacgttgacaaaattcatattaactacattcaatataagattaagacatataagagctctaaccataattcggctggtgattaattatctataccgataaaaaaaataagtaaggcattcaaaacaagtacatattcgagcatcattgaccaacttcttatcaattttaattcatttcaatatactataatcaagaatgtaagaaattcgattgactagaatataaaacttgggaacatattggtaatagatcaatagatcaagccattagaacaaatgttgtattgttttaaacacgacaagtttaatatcatgacacgacaagattaacacgagtaagttcttttttttaggttttgagaaaacacgatcgagtaggtcatatatcatcattttactttaatcttgtttaattaggacttttgcatttttttttttctaaaagactaacattaatcattgttctatcattttctagg

SEQ ID NO: 256349 - DNA, 1393 bp, Cannabis indica
tatatttttgctcacatactcagctcttaggcccaactaaatccaaattcggacccaaataagttcatgtgatggtatggtgttaaaatattgatttttagtaagagaaaattaaaaaatagttttaaaaaatttgtgcaaaatacaattaaatttttaaaagataaaaaactattttatattctcactttaaaaaataaaattttaaaaattaaaaattgaaaatacaactaaacaaattatttttccattttcttttaaaagagaatacaatgcttcaattaaagcttttatattatatccagctgtatttgtgttcaatattttacatttccaaaaattataggaagagaaaaactcaaatgaaaactatgatacgacgttagagtcaaatttatgctattaaaggacctaaggataaatttaatttaatttaatttttggaaaataatatgatacatagaagaagaggagtatcggggagcagtagcgggccatatcgatcccgctaattctggtattcagattaggcgacactccccacgtgtgcacaaaataacaaattcccaagtcgcacaccatgcagtcgtgggtcccactcgcccgccgcacgtagtccgatgtggcatttttctcgaatacacgtgcgcatttcattggcttttgtcctacgtgcctccagaccgtgttttcattattttcacgtgcacccatattagtctcgcacacgtactgatggaagcctcggtacaatcacagccgtcctttctgttgacttttcctcaaaaccgacctcgcttcgcatgaaatccggattctgaaaatggctgtcaccctccttattaacccaaaatacctcacacgtgtcactgattcacgtggctttgtttaatagaaactcaatttatttatactttcaaattaaggaaagactgttacttgaccaccaccaattagttggagagtcaatattaggtctataaataaataataataattacaaattttgttttctcatgtacctatgatattgtaatcatcctaaccagtataaatgatttggttttgtattcttcatatgaacagactaaataataattttttttaaagcaataaacaaattcattaaaaatataataatatcacacaggctaactataaatacaatacatttgatattcatcaaataaatactaaacatatcctgtttcaagaaaaaaaaaatactaaacatgtcagatttatcaaataatactatatacatcccacaaaaatatgaatagttatctaactcaacaagttgtttattcatccctaattaagttatagagattatagacaatcttaaaaatttggataataaaaatttggataacaaacttgcaaaaagtac

SEQ ID NO: 256350 - DNA, 2153 bp, Cannabis indica
aaaacctaaaaacaaaaaaataccatataaattggccaaacttaaatgtgctatatttatcataagaacttttaaaatctcatactaagtgtaatttcctctttataaattgacaaaactatttcttttcttcagtatcttatacgtaaggagcatgcggtttcattaatcttttgttcttatcttcataaattcacaaccactctctaattcccatcttcttgagatcatgtctagtattaacagtatcttcagactttttatcatccaagatggtgccaatgaaactatcacatatattcttctcaatatgcatgaagtctaggctgtattttaatttgagtgtactttagtactcaagttcgtaaaaaaatgctttttcttttccaattactttcactcacacttctttttcatttcaattctccaaaacttttatgttttcttgggatttgaggtggtagagcgtttacttgtttctaaaatttgcttgcacgtaaactttctcgggcacgtatttcttcaactttaccataaagtccaagtcccgcctcatctcatgattatggggaaaaatcgtctatgatcaacctaatatgtcttcccaatagcacggatggaagatgtatcttcattgcacgtaggacaagctttatacccctgaccactccattcagacaaactattgtgagcagggaaatcgttcactgtccacaaaaggacaactctcatggtgaacatagtattcgtattgccatctcttgtttgaacgccattactccacaactcttttaactcgtctaccaatggcataagaaatacatcgatgtccttatctggtgatcttgagccaagaataaaaatactcaacatgaaattattatctttcatacaaagtcatgggggagattgtagtttgccagcacaacaaactacatcttgtacgattgactctaatttccaaaaggattaaacccatcggcaaccaatcccaaatgtacatttctagggtctctcacaaaattaagatatctagcgtcaaactctttccatgcagacctatccatagggtgacacataaccccaacttctttcgatctcccaatatgataccatatcatcttttggttgtatgtcttaagctgtacattcttttttaaaagaggagtcaatggaaaataatgtatcaccttacgcgggaccttttgtcattgagtattaggattagtccatctgctagttccacacaccggacataaatttttcaaagcatgttctttgtaaaataaacaacaatcatgataacacacatgaatggactgatttattgagctttttagcttcgtagtgggtttcaagaatcgtattcccttttggaaatgcaaatttcaacaaactaagtagttgatcaaatatgttgttcgatattccaccagcaattttcaaatgcatcaacttagctaagaagttgagagaagatatccaattgcaacatggatacaactctgcttcaatatctttaaacaacttgtcataatactcgcccatacggtttccatcaacgccaaccatattttcatcacaggatggagtaaagacatcatcgatgacgtcatgcatctcatctacatcattctcatcgactaccgcatcagctatgttaacttcctcttcttcgtggaaaatctattgctcgtaactagtttgaaaattctaacgcaatatgtgtatccacgcacatccactagactgcgtcgtttgagattgacgcatttcacacaaggacatttgattttaccgttgttcagccattaataaaaaggttaagatacctctccagtaagtaggattagtgcgatctcgtaataatatccaactcttatcgatcgcgatctatgtgaaaatatcgagatggttaattttattgtcttattttaaaaaaaattaaattaaatgtattatgaagagttttaactaatttttttataattattattttttctaaaatataaatgttactactctattaataaaattaaagatttattcatttaatctataaaaaatattttaattaattaattaaaatattcaattattaatttgtaaacttatttttattttatttcaaattttaaatttacttttttttt

SEQ ID NO: 256351 - DNA, 1096 bp, Cannabis indica
tgtttgttatccatggtgtaggcataactaacacaagcctgaagacaaaacaaacaatgtcaagtgatgatataacaaaagaagttaatctagaaagggaataagatagagcacctactctaaagatgtcagtgacgcatctttaagctattatgtgtggagcctttgtgttaaccagccgatgaaatggagtattcttagccgtagcaccaattagggccttactatttgcaagaagctaggagccttgctcaagaaattgctccactaagtccaaactcgagtttggagcagcatgtttagaatcatctagagagaggtcaatcggagtcctctcattggtaccaacagtgtttaacttctccgtaccagaatcatgagtaggaagagcaaaattagcagttttactcctctttttgaccttcttttttaaagcagtagaggcagcaagaatgccttgcactacttcccttaccggaggcttagtctcctctagtgtcagaatcctcctcttcaagttcaaacacgaagccatggcaaccaagaaactcatattatctacaaaaaagtaaagaccaggggttagtacaacaaagggaaacaagtacaccagttaagaacacaacattgagtgtcaacaacctgttgtttacccattcttctccaaaacaatcctatcataggtaacttctctatcatcttggtctaagagcacagatattctccctgaatattctatgttattttgaagagaagtcacttgttccgtcacagtttaagacaaaatgatagttgcactctaagcatcttcatcccttttctcgagtggcatggtccaagactcattagagaaacctacatcaacatatattctctagcatgacatgattaattcaaccttcttaagatttttcgtgttaaaagggtatgaccttctctctcccatgatgggatgtcaatcaacatggcttcagctctcctctttatgtcaataagaggagcatgtcttttgacacagccagatttttggaaggtaatgtatctcgacagaagaacaggagtatagaaatactcttgaaagtaaaagccatagtta

SEQ ID NO: 256352 - DNA, 4344 bp, Cannabis indica
ttatctgtaatttagctcgattattttgattgttcttatgagactggcaaagcatgagttttcacagttatgaatatgagaaccaccatggaagttggaaaattggcaaatcgatatgcaacccagttgcagttttgccgcctccaaaaccccatttcagattctctagctcgacacgtacatgcccacatgattgcttctgggcttcgtccacgtggccatattctcaaccgtttgatggacatctactgcaaatcatcaaatttgacttatggtcgcaagctgttcgaccaaattcctgaaccagatattgtttcgagaacgacaatgattgctgcctactctgctgctgggagtcttaagttagcaagggatatattctttgcaactccattgagcatgagagatactgttttctacaatgccatgatcacttgttgctctcataacaatgatggctttgctgctattcaaacctttcatgacatgaggcgggctggtgttgggcctgatgattttactttatccagtgttctcagtgctttggggcttatagttgacgatgaaaagcagtgtcaacaaatgcattgtgcagttgtgaagattgggttgggttttgttacttcggttttgaattcattgatatctgtttatgtcaagtgtgcatcgtcgtcaatggcctcgtcatcatcggcttcagtgatgacttcagctaggattttgtttgatgacatgttggaaaaggatgagttatcatggacaacgataattaccgggtacgtgaagtgcaacaacttggctgcagctacggaatttcttgatgggatgactgaaaagttgggaattgtgtggaatgccataatttcgggttacgtgcaccatggccgttttcaagaagcagtgcaaatttacaggaagatgcttttgaagggtgtttctcaggacgatttcacttacacgcatgtcatcagtgcatgtgcaaatgggggtttctttcaacttggaagacagttacatgcttatattttaagaacagaagcaaagtccactccagaattctcactgccagtgagtaatgcattggttacgttatattataaatgtggtaagatggatacagcaaggaagattttcaataagatgtctgtaagagatgttgtttcatggaatgctatcttatcagggtatgtagatgcaaggcaaatcgaggatgccaaatcatttttcagtgaaattccagagagaaatcttctaacatggaccataatgatatctgctttagcacaaaatggatatggagaagaagctataaagatttttaaccaaatgagaacagaaggtttcgaaccctgtgattatgcattcgctggagtggttatatcctgtgctgttcttggggcattggagatggacgccaactccatgctcagtaatccatttggggcatgatagtagcctatcagctggaaatgcacttgttaccatgtatgcgaaatgtggattttgactctgcggagctggccttccttaaaatgccttatgtagattcagtttcttggaatgctctaattgctgcgttggcacagcacggtcgcggtcgtcaagcactagaactttttgaacagatgttgaaagaagatatccaaccagatagaataacatttctcacaatcctttcagcttgcagccactctggtttgatcaaagaaggacaacactattttgattctatgttgagcacttatggcatttccccaggtgaagatcattatgcccggatgattgacttgctgtgtcgagctgggaatttctcagaagcaagaaacttgattgattcaatgccattcgagccaggtgtggcagtctgggaatctcttctttctggttgtcggacgcatgggaatatggatttaggaatcgaagctgctgaacgactgtttgagctgagaccccagcatgatggaacctacgtgcttttgtcaaacatgtatgccaatgttggaaagtgggataatgtggcaaaaattcggcaactaatgagaggacgagggatcaagaaggaacccggttgtagttggattgaagttgagaacaaagtacatgttttcttggttgatgacactgcacatcccagggttcaagccgtgtacaaatatttagagaaactgggattggaaattaggaagttgggatatatccctgatacaaaatttgtgttacatgacactgagtgtgaggagcataaagagtacgctttgtctactcacagtgagaagcttgctgttgcatttggactcttgaatattccacaaggagccacagttagggtcttcaaaaatcttaggatttgtggagattgccataacttttttaagttcctatcaagagtggtggagagggaacttgttgtcagagatgggaagaggtttcatcattttagaaacggtgaatgttcttgtggcaattattggtagactaacagttttctccacatttatttatttttttaaaaaatgggccatttgattcaaaaattgattttattaagataggaaaagcatcaaatgttataaagagatacaggattttggcttatgacagtcatggcatcaccctgcgaaacaaggaatcatactttttaattgtttcatgtaaactttttactatagagagactcaaaggaattgaattttccatgttttgtagatggtagtcaaggagacacattttgctgttttaacattcgtatacaaattctcttattaatcccaagaaaagtaaagaatatgcctaatcttgggcacagttggaaatgtgaaactacttttttttttcttccaaaaggatacatgtggatgaactggaatttaaagaagtgggtattgatattgttagttttattctacacaatgaggaagtggtccaaagtgtgttaaaacaattatatcggttgaaaaacttgtatggattaaggtcctcttgtttttatcaaggcctttggaaatcatgtctacagttctcttgaattgatggattaaggttatatattgttcatcatggctaaaggagttcatgacaactccccctgataactagcaattatttgtttcaaatattgaagattgagctaatgtatttctttctttattatgattagacatttattacaacaacaatcattgctttacattaaaacaaaataaagtactcgaacaacctaatacatatattactcagaaaacaagtagcaaagctagctaaatatgtgagcaaacctatttccggaaactcatggaaatagtaaactagcttggttaataacttaatacaaacttaacccgggagctcccttgcagctgcagcttatacaaaacactgcaaaagtcacaccaagttccctccttaacaaatggacttgtatctaaatatagcatcccatattgtaccaagcaaccatttaggcagctaaccactagaaagcaactatcctcattaatcgtcatgatcttcgagtgcagttaggatcatcctgcaacatattgcacaaaggaagataattagtgtcacagtaaatcatatcattcgaaacatggtttttttgcaatagcaagcaaagtttttctctgtcacaataccaaaatatgcaaagaaacagttggatgatgagataaaagagtttgaaaagcctttgcttcttttctttatgaagcatgttgaatatctcagtaacatcaaccaagtgctgcttccgcgcatatctgatcagaaccaataaaaaggttacaccttttagcgtttagctttcaaaatctaaataatgacataacccaattgcattttatgaagtgctgcatagcaacatgtaggatgaatgagaacttacagttgcacgttataatagagatacggaccacacaataatgacataacccaatgccctgatagaaagaagaagacacacagcagtccttgtgtaatgaactcgggcaaaatcactctatttacccttgctgaagagtcataggggttgatataatcaaattctagatcagcaagacacataagctgcaattaaattaagtgttagagcaaaatatatcacttcgtttagaagaaagaatcagtaacattactccaaaatctagtctttaaactgttattacatccaagcccagagcacgcttaatgccaattttcataatggacgctttcagttaagttaacagctgtataatgctatctaacttctgacttgctaattgtatcaatggttatttgtgtacaaaataatgatgttcaaacctacaagtcgaacaatttcaagaccagactattcctaggaag

SEQ ID NO: 256353 - DNA, 1274 bp, Cannabis indica
ttactccagagggatttcaaactcatagtgcattgcggtttggattcaccataaccaacaacaaagtggagtgtgaggctctcctagcaggactatgattagcactagcaatcaaagatgaatcactcaatagtgattcacaactagttgtcaatcaaattcttggcaagtatcaagctggagggtcaaacataatcacatacttaagtgaagctaaagatccattagcccgacttaagcactactccatctaataagtgccgcgtgaacagaatgcaaatgcagactcactagctaagttggctagtacaacatgttctgacactctcagtgtagttcccatcgaataccttaccaaatggagcattattgaacactcagagcccttcatgatgattgatagcactccatcacggatgactccgattgcacaatactgagaacaagatattcttccaactgataggaatgaaactaagagactaatgagaaatgtaacttgcttcatcattatggacaaattaatgtacaaaagaagcttttaaatgcctcttctgaggtgtgtcatgaaggaagaagctaaactcctcatgaccgaggaacatgagggattttatggcaaccatgctaggggaaaatcctctcaaataagattttaagacaagggtacttttggtcgacaataaaagaagactcaatggactatgtcaggaagtgtgacaaatgctagaggttctccaaaatacccagagctgccccaaacaaactcaagagtatgcaaacaccctggccatttgctgtatgggaatcgacctcataggttcactacctaagagaaaaggtggagttcaatatgcagtggtggcggtcgactactttaccaaatggattgaggcagagcccttaaccattatcacatcaaataaagttcttgatttcgtggtcaagaatatcatttgccgattgcactcccatagaagatatgtcaaacaacagaacataatttgatagcgacctttttattgatttatgcatcagacatggaataattaagagtttctcagcgatttcctatccacaagcaaatggacaagtggaaggagtcaaccaaactcttaaggatacactaaataaattcttggagtaagcaaaagggaattggcctaaacaattgcccaaagtactatgggattattgcacaatagaaagacaataacatgttacactccctttgctgtaacctatgggtatgaagctatgatacctctagagct

SEQ ID NO: 256354 - DNA, 1174 bp, Cannabis indica
tctctctctctctctctaacactctttatctcagttcactctttctcaatctctctgctccttatctcttgatctattttggtagacggtcggacctcatcatcgaaaaaaatcatacacattcatctcaataatgggtaggtgttgtccaacaaatttcttaaacatttagattagtatgtagtttattttcgataaatctgtgtgattattgtttgcattggtgttattttgttagtttttttcattgaaatgatgagatctggttttctcgctaaattggatttttaacaaattatcgatgttttttcgattatatattgatatcttctcgataattaggataagaagataaaaaatgacaatttttcgataatttttcatggtatatcgataatattttaacttaggacaaaatataggaaaaaataacaaaatttaacacacaaggcagaatcatcagcaaaccattgatatactatcaaaaacctatcgataattaattaaaataccaagtaaaaaatgatgtcagcgtgccatcgataaaccattgataaactatcgataatgatatactatcgacaaaccattgataattaattatcgataatatcgatagtttgtcgatagtatatcgatggtttatcgatggcaggctgacatattctttgcttggtattttaattgattatcgatggtttgtcgataattttaccttgtgtgattaattgtactatattgtgccctgaatcgaaataatatcgatataccatccaaaaagtgtcaaaaaatttcatctcttaccctaattatcgagaagatatcgatatataatcaaaaaaagcatcgataatcaattaaaattctagtttggcgagaaaaccatatctcgctatttttatgaaagaaattagcaaaacaacaccaatgcaaacatcaaccacacagatctatcaaaaataaactacatactaatcaaaatatttaagaaattctttggacaacacctacccattattgaggtgaatgtgtatgatttttttttaggataaggtccggtcgttcactaagataggatgagagattgagaaagagtaagctaagatagagagtgttagagagagatcaagtgatagagagaaagatagccaagtgatagagagagagagagaga

SEQ ID NO: 256355 - DNA, 1004 bp, Cannabis indica
tgggatcatctactttctcagcaattttgtttaattattctttctgtttctgtatgttatctttcagttgaataaattctcatatggggtggagtgccttcagcattgagcaatgagcaacagattatggtattgtacaattgtgtaagtgttgttgtcatctaataaacaaaattgaaatcagtttgatcacaaattattgaaaaaggttaagaagaatcaaaacaagaagagtcaactgataaaactggctcatccaaaaggggatgatgaaatcaagataatcttcataaaaggtgcggcactctttccaatgataaaaaaacaaaataatctttgaatgaaaacctaatatcgtcagaacccaatcaaagtatccaaaatcattcaaataactggagtttggtttacaagaaaagatcctaataccatttaccatttattttcccacttaataaaaatatgaaacaaagaaaacctgagagcggaggcgctcatccagatgtcaagctcttcccagcatcttcatcactctcatttgcattaataaggtgtaccgttcaattctttcgggtaactccaagtcttgttcggaaatcgtcctccataagcggaaggccatcgcgcaacttgatctttggctcccaaccaagtaactccttggcttttgtgatgtctggcttcctctggcgagggtcatctggtgtgttttcgactgatatgatctccacatctgggttgataagctgaaagtaacaaaatcgcaatagctttagcttttcaaatatatgtagaatgtttcctactgttttgaggccttatgcaaatgttgaaaatggggttcgaaattaagatgactgacctccttaacagtctccgcaagctcaagcatagtaaactcacctacaaaatcaaaatatcagtagtgaaaacacaacaaacaaagccaattcgaattatgttgtcaaagatctttctggaaaacctggatttccaatgttaat

SEQ ID NO: 256356 - DNA, 1155 bp, Cannabis indica
tatatatatatatatctattagtttcaacgttttttaaaccgttagaatactacttttttcacccaaagtaaaacaattgccttatcttcttactttagataaagagaaaagtcagaaagaagataataagggaagagttttcattgggtcgtaatcgtatctaatctaatgttatatacttttttcaacctcatacaaacgttacataataaaattatcaaaaagcagtataataagtgtatcataaaaacttttgagccctttttttattttgatatcattattgtgataataatgtttcaattcaaagttgctactatgatgaataatctgcatatgcaaataattatatgaacagagtagtatatatctggagaagaagaaactagtaactgccattcatctcaaccgacaactattttattttctatataaatatatatatatatatttgtattatattatataatgatataatggccttcgaaataaacacatacatgataaaataatgtggtacatacaggacagctataatttaatgcgtttttaaatacttgataggacatggttgaaatagtatttggaatccaatattgcacttaataataatttggattcacaaaattaatttacaccattatatatatacatatataaatatataaaggagtagaagtagaattgagaagtgagaattacgtatattccaccgctgaaaaaataacagtacgtagcatttaattaatattagttttttcatgaacaaagtgatgttcttattaacttcagatgaatatatctatatatatatacatatcaagttttgagtacttcattcatacatatataccctttaaatttaaagatgtgggtgattattaattattcatcatattttagaattattgttcagttactcatgagctactctcaccaaacatgaagaaaattagaaaatgttgtatatggaggatcttatgacaatgatatatctccaatgtgaataatttagattatgatttgacatgttttaaagaaaacagagaattgcatgtcataatctaattaaatctgttctcttcttaaattccgtaattagtatattaattgttttttggggttatgtaattgaatatgaacattatacaata

SEQ ID NO: 256357 - DNA, 1291 bp, Cannabis indica
gcaagatttgggtgaacacaaccaacccaagaccccgactgaagctgtaacacatgacccatctctaaaacacccagccatacccaaatctgttagcaccctctattattgttgcatctacattaatcatgtaattatcatctaatggagcacaccattgctcatccccttcccccatctccatcagaaaaagagaaatattaaatgatttgttttgaacaagtaaccattgttcaagatcacctttaggaaaagcaacaacatctttaacagtactactcttcccattccacactttgttatttcgatcatgccatattgcccaacataacgtagcacccaattgcctatcctccttgctccaccgttgggactggtgttgaaaccagtcaccaaaggaggaaaacacagaattcccacgaagtaaaccaactttgcaccagcaagcagctgcaaagttgcacaaaactagacaatagctgatattttcagccgattggttacacccggggcaaatagaggggatttgaacatgcctttgaatgagctaagcacaagttggtagttagacaacgcttgccaaaggatttcttttacctttgagggaaccttcaacttccacaggtcattccaaaaaccagagttgccattaggggcttgaggatatttcaaatattcaatcaatttgtaggcaaatttgacagagtacttaccagatgtttccttgctccaataccaagtattggtatctcttgaagaagcaattgggatgctgaaaatcaactctctgtctgtactattaaacaaatcaacaataatctcacggtcctagcttcttgcatccacgaccaacaaacaacagactttttgatcacacaaactaggatggaacgatgtgacaaagggattatcattgtccggtagccaaggatccttagtgatggatacatccttgcccgtcccaacaatcaaacaaccccttttaagatacatctttagcttcaagaatgctcctccaaatatagctaggattacttcttaatttagcatcaaagaacgacccacgaggaaagtatctagccttgaacattatgaaaagaaataagaatgtggtgttgggtttcctcaaagagaaaacaaggaaagaagttgacagttaggatagcaaatttctgtctcgtgctggtaaagaagttcttttgaaatcggttgccaaatctctgtctaactatgcaatgagtgttttcttaatccctaaaggcacttgtgaggaacttgaaaaaatgatgtg

SEQ ID NO: 256358 - DNA, 2480 bp, Cannabis indica
ggatttctatgtagaatttagtaaaaacgtaaaaaaaaaattgtttaaggtgtaaaataaaaaaatctttaaatattaattacacaataaatacacatatatccatgattgggcattctatctccttcaatgatcttgatctattcttgatacaaatctgttcaatgttcaaacaactacgacaattactaaagcaagagaggatctaattgaaagcaaatctctacctaataccaccgtgaactttatgtttcttcatacctccaaaaacacattatatccctttcttggagcaaattgggcatgtttgggattagtattgtaaaatcgcgtatgttgtaatggctcgatttatatttattcgtgcttttcaaaaaatagattgtgttgtgctgtgtcataaaaaatatagggcgtgttgtgtcgtgccaacattggtaagcccgacacaactcgtaggtccagtatttttatgccatgctcggatttgggtccagtatttgcttgtgtcagcctgtatttcttaaacaggcccacctattttcatatttggacttaaattcgtgctttacttttcatatttttttttttcacaattactaaagtgtatatatatgtatattatataactttttaacaatgtaaatagtgataatcatataaaaaaattgtcagtatgattagaatttgaatatttacttataaataatttaatttttgtatcacattctataaataaattaaattttaattttttatattttaataattttaattatagaattataatatttagtattatatttaagttttattattattttaacttatttataatcgataaatacatatcttataattattattaataaattataagatttttttgtatgccgtatcgtgcttttcgagcttttcgcgtgtcatgctttttaggctgtctattcgtgcttcgtgttgtgccttttgtgcttctcatgcgtatcatgcttaaggatgtatttttcgtgtcgtgtcgtgataatttgtagtatcgtgtcgtgttgtcccaagcctgtattttttcatgcctagtcgttctcgtgtctttcgggctcgtgccgtgtcaaaaagcccaacctgtatttacaacactatttggaatatttatactaattatggattatgtatgttttttatgcactaggttaaatcattttatcatatttgtaacatattgtattaagaagaaatcgcacaaagtatgagaagatttaaagactttatttttttatggtatttttttttttaattcatttaggttatgagcttttacaaatatttatatttttatggtttaaaatagggatttttacaaaatattgaattttgagtaaaattttataattttattgtcacgttgattttttttttttttgtcaaaaatactgtcttttataaaacaatcataaaacaacaaaacagaacaattgaaacaacagttgaacaattaaaaaaataactgtggaacaactataaaaacttaatacagtacacagtataaaatttacacgaaaaaaaaatttgccccacagtaaaaagtaaaaaaattaataaatttcagtatgtggtgtagaaactcatttaaaataatatattttatatttttatattcccatatttttttttgtccaattatatttatacctttttccttttgtccgtacattcgacaattttgaaatagtcagctactctatttcctctgtcgtcgtctttttttatgggaacgcgatcagaaccaagtccttgctgaagacatctgattgtcaaaattgacatagtaattgaagagatttagaaaccagaagatatcagagagaaaagaacaatgatggtggaacaagtgacgaaagttttcttagaattcttgagatatcgacctcaaggattctcttttagatcaaagtagaatagcttatgctccacttgcaaagtctttgtcattcccttttattgatccttttttatttatttttttaggatctactttattggaaaattaggagataccaacacaagaaggaagatgtatatctttcaattaataatttttttttttttgtgtatcctaaaaacatgccaagataatttaagaaaactaaacaataatcttatacttggctgtaaagatgcaaaccatgattaaacggatccagtgtttcaagaaactcatcctacagagcatgacctccaaaaaatgtcattcgattttatcataagccttgctcatattaagcttaagagtcataaatcctcttacatattctcttccttttcaaataatggaacatctccaaagagaccatatatttatgaaaaatccctaaatattaaagcctaaaatattcatctcaacccaatatttatgattataataaactaaattataatattatcattattagaatctcaacaatttttagttcaactagagctac

SEQ ID NO: 256359 - DNA, 1977 bp, Cannabis indica
tggttacagcataaagcataagggatataaatgtctctctgctagtggccgaatatacatctcaagagatgtcatattcaatgaacatcgatttcctttctctgtccattctcacaccagcaatccctcacaaactcaccatcaattcaactctacaaatgtttctgtacctgtcattacacccaacctgttatctaataaccaacaacaaacaccaagcactactgaaccagtcaatcaatctcctatatctctccctggaaccatctctacacatacagaaccagctgcatcacctgtggaacctacaacaacatcagctccaagtaatactcaccctatgatcacacgtgctaaagcaggtgtttacaaacctaaggtctacatcagctccaaaacacctctcacactgcaagaggctatgaaaaatccgaaatggaatggagcaatgaatgtggaaattgtggctctcaaaacaaatggcacctacactattgtccctctgccacctggaaaaagagccataggatgtaaatgggtgtaaaaaaaaaagaaaatgcagatggtagtgtttccaaactcaaagcccgcttggtagcaaaaggctttcatcaagagtatggttttgatttttctgagacctttagtcctgtggtaaaatctccaactatcagaatcatcatcaccattgctctctttaaccattgggaaatcaaacaactagatgtgaataacgcattcctgaatggagacttgattgaagaagtctacatgcaacaacctccaggattcgaagaacaaggtcccaatatggtttgcaaactccacaaagccatttatggcttgaaacaggcccctcgagcctggtttgacaagttaaaaacctcactgcaacactacggctttcacagttctaaagccgatgcatcactcttcatcaggttcaccaacaaacacaccacctacatacttgtatatgttgatgatattctaatcaccgggagtgattccaatgaaatatcatcattagttacccaactcaatagacagttttcactcaaggaccttggagacatcaactactttctaggcatacaagtcactcctactgaacatgggttacatctctcacagaccaaatacataacagatgtactttgcaaggctaaattggaatgtgcaaacagcttgccaacaccaatgacaggaggagaaaaattatcctgcattggtagtgatcctgttaaagatccacagcagtaccggagtctagttggtgctctgcaatatgcaacactcaccagaccagaaatcgcttatgcagaacaaggtgtgtcaatttatgcatgctcctctcgaatcccactggaaaacagtcaaacgcatcctaaggtacttaaaaggcacgcttgattacggtatagacatgtctcactctacatctctcgatctagtaggattctgtgatgccgattgggcatccgacattgatgaccgacgatccaccactgggttttgcatatatcttggctcgaatctcatttgctggtcctctaagaagcagcatacagtgtctcgttctagcaccgaagccgaatacagaagcctcgccagcctcactgctgaaattacctggattcaagccttacttggtgagctaagaatccaaatcccacgaccaccaaccatctggtgcgacaatctcagcacggttctcatgtcagcaaatccaattcttcacgcaagaacaaagcacattgaacttgatctatatttcgtccgagaaaaggttctagccaaagcattggtggttaaacatactcctgcctatgatcaaactgcagacatcttgaccaaagcactctccaactcgcggtttctcttcttcgagacaaacttaggattgtttcactctccaccctaagtttgaggggggatgttaagaatataggatcacactgatactctgtttcctat

SEQ ID NO: 256360 - DNA, 1141 bp, Cannabis indica
aaatttaaaaaagaataatttaaatttataaaattattcataaataaataattttttttttaaattctttgttttctcctgactctctctctcattgataattactctctctccctgagccttattcttccttgccagatctagaaagctcaaatctccttcccttcttggtagcgattgctccaacggagaccaaactctctttcgcactctccctttccctctgcaactacttagcatcttaggcccaaattaagaagaaaagaaaagcaagccctatttcaaccctagcaacttcatcttcttcttcatttgtccttagcaaagaccggccacacgaccaaccaacactagtcacacttctttttcttcttcgttcatcctcacccaaattgcacgagactagcctttcgtttctcttccgttcatccttgtccccagccgcacaagaccagcaacaacagccgcacaagaacaccagctagagagccccagtcatccgctcctcctatggcctgtccctaaccgtcctctcctccaccagcttgtcccatccccaatcttgaaaaaatagcagtaagaacctatgatttgttcgatatgatgatggtactaagatttgttcttcttttaaatttcatatctgttgtttgtttaccgagaaaagaaaatctcctaataatattttaatttttagatataatgtttgagactttcaatcttctccatacattttgttgataagtaaatacaatcaagaatgtctaaaattgaaactttgtatgaagtttatgaaagattgtttgatatagttaggaccgattttgagttgaaatgggtcataggcaaaaaaaaaaaaatgggcccttactataaagataatgctatttataataattattaaaaaatatgtatatttttaaagggtatatggcggcaaaatccctaataattttattttacttgcaattaaccccccgaactcaaatttggacggtaaaaacccctaaaactacgatatcgttagcactttacaatttccatccaaatttgatagttaactgccatggtggattgtacacatggacatagtgtatacatggcacaattttattggtcaacgtaaataattatattaaaa

SEQ ID NO: 256361 - DNA, 1026 bp, Cannabis indica
gtgagtagatctaagattctagtaaaataatttccaacagaatggtcggacggtcaccagagagtggtcaccagaaagtggtggtagtggttatggcttctttgaagctttgaagagagaaagagaaagagagagaagtgggaattgagagagagattatttggtaggaaattgggtttattaaataaaatgtgggtcccaccacatttatgaatttatttttctttttgtctttttgtctactccatcaaaccaagtcttcaccaatttgattctacactattatatttatatttatattcttagataaatataatagctacggaataaataaaattaaggataatttatatatttccctcaaaaaaaaaaggacaatttatatattttttttctaatcctattttaatctattccagtgactaagcctgtcgagattggtacctaaaagtatctaaaatcactactataaaaagactaatcttagcaagctaggctccccataattaataggatttttacatggtatattgtatttggcattttattacttttatactgcacatttgagagagacactgaaattagaaattaatcaaataaaactaacaaaccaacaccctgaaaggaaaacaaaaaagaaagtatctttacagatttattaattcccatacatgtatattaacagaaaattccatagaaaaatagataaaattccaaaaatgaatgaaacccaaataactgagtgtaaaattaaagaagggaggtgtaccaaacaaacacgaagataatcaatcattcaatcaaatttgcaattgcaagagagagagaggagaggagaggagagataagctctgaaactgatcatttagggggtgaatagagagagagagaggaacagataagaaattacatttatactatcttttatactgtccatactgccactcgatcatcattttgcatgcctttcattattttatttattaattaattttttaaaaagttgttgatgtgatgctcatg

SEQ ID NO: 256362 - DNA, 1637 bp, Cannabis indica
aaaatatgggatttaggttggtaccatcatggagttactttcaatatatcctatattataatgcaaatcgattctccttggtcaagactcgtggggtgtcattttcccttttttttttttggtaaatggggtgccatgttgagtaatcatttttattttttatttatttgttggttccattatttgtcaagcacttaatatatcattactatggagtactttaaagttattatattaattgattatataataaatacccgctaaaatttgataaatatattattatgcgaataatatatattaagtgtgtaataaattaatgtgtaatatatagttttaacttatactttataacttatatattgtaacttgaagaaaaattacaatttgttacttgtaactcttttgtgatcacatataattaatgcaataaaagagttgaacttagagaattattttgtactattttataaaatataagatttgaattgcaatttaataaaattaaagggctaattaataatttttgtaaaatataagtccaaaataagatttacttacctaaaaataagttggattaaaattatgtttaagatatatttattttattttgatttgtgaaataaatgatttatttgtttttgataaaactagattagtgtaagttggatctaaaacgaaaaagaattagtgtaagttagatattaaaacaagctctttatgtaaataaataaagcaaaagataacgagagagaaatagaaaatagaaatattaaagaagtgagatttaacaccaagaaaaggtctttaatgtttgaacaatgaacatacaaaatactagctagcaatagcaagtactcaaagaatcaaaacctcctatataggttacaaaaatgattttattgcaagaagaatattaacttaagactcaagcaattcgataagggcaatccttcttcttcttcttcaacgaagtagatgatcataacttagctgaacccttagacaaagcgtgattgacgagctccctcctcaagatctttcccgccggagattttggaattgcattgataaaagcgacccgccgcaccttcttgtaaggagcaacctgtaataagaacaaactcaattttagtgtaagaaggttgctataaaagtattatacactaaattacctttactaaaaagtgactaaatttctattttagatacatgttgtaaactaaaaagtaacatttaaatataattctattcccactctaatcacattttgtttagtcacaacaacatgattataatgatattttcttagttgcaattttttgcaccttttatagtaacattattgtagtgatagtgaaactaatttagtagtgattgaaaaacatataaagcagtaaaaatgaaacttgccttttgggcaacaaaatctataacttgagcctcagtgagattacttccaggctttctcacaacataggccatgggaagttgtcctgctacttcatcagggtatctattcaatcaacaaagaaaaaaataagtaaattaataaaactaaacttggcataataagctttaagatcacaatttgaaattctaaaatcacagtatttacggtatcacagctgcatcag

SEQ ID NO: 256363 - DNA, 1429 bp, Cannabis indica
agatcctggtaaaataattcccaacacttacttccattggagatcacaagggacatggaaaaggtaatgaccaaattttggtggcaatcctcaaacaagaatggcaaaggaatacattggctatcatgggaccgtctttgcacgcataaggataaaggaggcatgggatttagacaccttcgggatttcaatttggccatgctaggaaagcaagggtggagactagttgttcgtcctcactctttggtggcaaaaattttcaaagctagatatttccccaatggcaattatctctcggcttctttagggaataatccaagttttgtttggaggagtgtatgggaagctcaacaactaattcgaaaaggtgttcaatggtgtattggtgatgggagctcaataagtgttttgaatgaaccatggcttccatgtcatgaaaatccttttgttaattcatcacatccggcccttgagaatgctatgttacaaaatctcatgggaaatgatgggagttgggatcaggagttgcttgctgacttgttcaacggacgggatagagaattaatcaataaaattcctctgttttcgtctgtggaggatcggcttgtttggcagcttgagtcttcaggtatttactccgtcaaaagtgcgtataatctgcttcaagttgatcatggaagatggcatgacaacccagatgctgcagcaaagttttggtcttctttctggcgtcttaaaggcgtctaaactacccccaaaatcaaaaacctggtttggagagcatgtagaaactgccttcctactctctgtcagcttcgaacaaaaagagttatatttatgcttcttgtccagtctgccagggagatgaagaaaccatacttcatgctttgtttacatgtccaaaggtgcaggttgtgtggaatagagtgggtattggcaccaggaatagatcatcgaatggaagcctctcaaccgaaggtatagacagtttttatgactggtttgtactcatttttactggggaaaacacggccaacaggttactaatgtatgctctatgttgggctatttgggatgggcgaaatgaaatggtttggaagaaaaaagagtcgggagtggatagtatagtaatgtctgctaaaagttatcttgatcattggatgagtgctcaaaattctcttattgagacatcatggactggtctacagtcgggtgatggtgccgagctttggtgtcctccaacagaaaatagtatcaagatcaatgtggatgctgctatgtttgatggtggaaactcttatggtgtcggtttggttgcaagagacagatacagccctttggtggaagctagaatggagtgtttcttgggtcgggttaaccccgaagtagctgaggctattggagtgagggaggctttaagttggatcaa

SEQ ID NO: 256364 - DNA, 1168 bp, Cannabis indica
gcataatttttaaggccaaggataagtgttaccatgggaaattgaactctgaagaacaaccaaatgagaaaccttattcaaagcattccaggcaactaaactacacactcggtggaacaattaatcagtcatatataaaataaaaaataattagtacttttgttaaaaaaaacttataatccttaaagatatttaaaaatagaataaataggattattacctcctaaagaaactagtaatatgaaaagatagggcaatgttagaaaaataataaaaaaaactaaaaagaaatcttcagactctcatcaacgtggttcttccctttcttaattttagggatggaaatgtcttcagcaatattaacctttgatttcttcttaacaggcttacaatcatttttttggtaggttgagcaaagtcttaatcatcatctttaacaacggactgtttgtcttttgatttgttagcaagagatgtaatacctatttttgaatattttttcggcaatggtaatgggaaagataaagaccgagtaatggccatttacaggaacagaaaaaagaagaaaaaaaaattagaaaaacgtggtcaagtgatggagaaagatagttgaggaagatggacaaaatcagtttttttgatttaaaatggttttgaccgttggaaaatttttcaaatagaaagctacgatgaactaaaatgaaactctactattttttggatttttattttatttgtatattaatctctcataattttgttgctaataataataaaaaaaaaatataaaaagtgtgcatgtacgaaaatttactatgtactggaaaactacaacaactattgatccatgaaaagactaattttagctacaaattaaatcttacaaaattgaaagttaatttttagttatcagtaaaaaggtaataaatcttattttagatagtttaatatgatctctaacatattcttaatatacaatcttaggttgtcctacatacaatcttaggttttcctctgtttcttgtacaataaaaattgaaatgaaactgaaaaagaatgatagaaaataagagaaaatagatagtgtgtgaagttggtataacatgtattagtgtaatcaaaacaataactctgtttgtagatgttttctctagaaagggcagagtca

SEQ ID NO: 256365 - DNA, 821 bp, Cannabis indica
taaaattctatatttaattacatcattataatataacacatcccttcaatatttctctatataaatagataaagaatagatacaacaccatcacaagaaatagagtcttgagcttagaagtagaaaaaatgaagtcaactttgatcactattgtagtacttagctatctttcagtcctttgtgtctcacatgatttttgatttcttcttctttgttgaacaggttttttaaactccaatccattcatatatctatttttttttcaactaaagtatccataaataatattactttatccttaaatgatgtgcagtggccaggttcatattgtgaagaacatggttgttgcaagccatcaacaggagtaacaccttctgatgattttaccattattgggctttggcctaagttcaacaatggttctactccttcaaattgcaaccctaataatgtctttgaccgaactaaggtacctttatcgtgtcgtgtgatctgctaactaaatgtgtatcatgctcgtatttaggttttctttggaacacttaataattgcattgtcattgagaattattatatctatcaatacatgtgttgtatttcgtgttgtattgtgttgtgttcgtgtttacctaattgacatcagggccggcccaagcattgggcagcttgggccattgcacaaggctctcatttttttaagcccaattttgttttttaaagaaaattgacataaacacaaaatgtttacacgagaaattagggtttagttgcattgtccctatgtgttgtatttcgtgctgtattgtgttgtgtttgtgttt

SEQ ID NO: 256366 - DNA, 1413 bp, Cannabis indica
ggttagttgcaaagggttacttgtaaacacttggaattgattttgtagaaacttttagtcttgtagtaaaaccaacaacagtttgaactgttctctctcttgctgtaatgctttcttatgtagcctcaaggttttgtttatctagagaaacctacacatgtctgtcatttgcataaggccctatatggattgaagcaagctctttgagcttggaatgacaagcttaagcagactttacttctttgcatctaggtcagattcctctttgtttcactttggttcaagtacaatgcagatcattttattagtgtatgttgatgatatacttataattagttccaattcatagcttatttccaaacttgttgaggatttgaatcattcattctccttggtgttgaaatatataaagattccagtgggatgtatctttcccgaagcaagtacgtcactaatctgcttgtcaagttacatcttgaaggtgctaaaagctgtccaaatcctacaagttatgctcataaattatctttaacagaaggggtcccttttttagatcctactctatatagaagcactttgggaactcttcaatatttgactcttacaagactagatgttgctttcatcattaacaaactgagtcagtttattcatgctccaacagaggtacattcgaaagtttgcaagaggctgttgaggtctaaagggtgcaatcttagatggtcttctactcaaacttgttgccaatcttcaactatatgcttattctgatgttgattgggctagctgtgtagatgacaggagatcttggtgagaatctcatctcatggtctgccaaaaagcaacaagtttgttgtacggtctagtactgaaagtgaattcagatcccttgcaaatacagctgcagaacttaaatggcttatcaacttgtggcatgagcttcatgtttctctttctaagcaccaattatttgggtagacaatcaaagtgtagttgcacttgctgcaaactttgtatttcatgctagatctaagcacattgaaattgatcttcactttgtgagagattagattttggacaaaacactctcggtcaaatttgtcccttcaattgattaagtggccgatgttctaactaaacctcttgcaacagatagttttctctattttaagggaaaacttcaagtggcttccattccttttcatttgaggggatgttagctaacataacctttagttagtttagttagttaattaattagaagttagttaactgttttttctgttttagtagagctctgttttagctctttactttgtccatttgtataactttgtgcttatcaataaaggacctctcattaatgagaggcaagcttttctgtcaatctttctctcttcttcctcttgcttt

SEQ ID NO: 256367 - DNA, 1872 bp, Cannabis indica
cacagtacgcacattaccactagaggagacatgctgccttttagaaaaaatagatgacattctattttcattgttggtgaaagttggtgaagtagtagtagcagtcgaaatggtagcagctgaaaagtccaaaggaatggacgtaaccgaagtggagattgttgaaactggaacagaatcttgagaataaagtcgacttatattgttaggaggaatgtggacatatgctggaggagttgcaactgaaagcataattgatgttgttgcagagacagaagccgagctattgatgttgccttgatgagaatttttaactgttgaaaccgtggttgaaggagaaggaaatgcagtggtagtggaacaagagatcggcttatcatcacaatgcttgtccaaattaacagtcgaggaaatactagccttggaactacttccttccaaagaagtctgaaggtaagtagattgtgttgatgcagagtggctattgttgtcctggatcatctttttccctttctctcgcgaagtaaccagttgtggaagagcagggaaaggttgaggatgattaataataggggaaatagtattacgagccagtcgagtgataaatggccagggccctgctttagaaaaatcctgtctataacgatcatagttggactttggaagaggagatccttcaagccatggaccataaggaagatcaggttccttgccttcatccaatttttctaggaaagaagggcacttatcaaaaacgtggcctataataccacattcatagcagaaatcggggagtcgttcgtaacgataatcaagccaaagttcatcagacatccaagggaaagtgactgtttggccacggagaatgggctgagaaacatcaataccaactcggatacggaggaacggaccccatccttcattgagcgagtcctcatgaacatcgatgtaagtaccaagtaggttcccaataaccttagccagagattcggacttactcaaaaagggcaatcggaacacttgaacccaaaagggagttatagtaaaagaactcaaaggagcatttgacagaacagttggagtgcatagaatcatatgttgattgtggaagtgccaaggttccttggacaaaactctcattaaatcaccttcccttcacagccaagccaaaggtgatcataaaagaactctcttcataggtggagacagtgacttcaaatctccctttccattgagtagtaaggaagttggtaaattgttttgggtttaaagcctctatgagagaaaatacgacagataattcgatgagagacaggtcgagtgggtggcctaggaaggttggacaaattgacaacttctctttcccgattagagagggctcgtgaaatatcaggatgaaaagaatccatatttgcagtggaaggaagcctgaaactgatgcagaagaagaaaccttgaagaaaaggaggttataatttaaaaaagagatgagcgggagtggttgagactcgatggggaggaggttatatttataaaaaccttggggcaggaaaattgaagaggaacagttaaaaagaaaaaaacggaaacaactgccacagagcaaattttaagggcagacaatgctcaaaaatttgttttgagtgaaacagggttaagtttaaaaatttagttccacaaggtctagttggcaacaaattattattactggtataagtgtctaaacaaaaataaataaaatactaaaataaagaataaaatttagattgcctcccaagagtgctatcattaatgtcatttagccagattcagaattcctcttttagagcggtgccaagaggagggcgaatttgacttgatcatattgaccat

SEQ ID NO: 256368 - DNA, 1723 bp, Cannabis indica
gtattctagagaaggccatcgattctggttctattagatgtatcaacttgagtagagatggaccaatgctctctcatctcttctttgcaaatgaccttatccttgtggacaaggcgactatcgcagaggccaaagacttttggcagtgccttgagaaattatgtgattggtctgggcaacgtgttaataagcttaaaacctctattttcttcagtaataacactagtgagggtatgaaaagatgtatcatgcaggagcttgggcttaacatggccactacaaacattaattacctgagactcccattgtttatatccaagcaaaaagatgttgattttaatttcattcttgagagccttgtctcgaagcttcatggttagaaattaaaaactctatcaaaagcaggtcgtgctacgttgatcaagtcagttgggctcgctatgccggtctacactatgcaaactactaagctttcaaaaaaagtagcctccaaaattgatggtatgatcagagatttctggtggggttgtgagcaaggaaactgaggtatctacttgaaggtgtgggattgtttatgccttccgaagtctaggggtcgccttgggttccgtaagaccctggaaatgaattaggctttgcttgcgaagtggggatgggcccttctcaatgatgagcaatcgttgtgttgtaaagtgttaagagctaagtatcttaaatggaaacctttcttggagggttcttataagagttcagactcttggttatggaggaatgtggtgaaatctaaagaaatcctaaagaaaggtgcttgtaaatttatttctgatgggaaagataccaatatctagactgatccttgatttttacatggaaaggatttctatccgaagcccatgaccccagacctgaaggggtgaataaagttgcgaagttactcctgaataacggggattgggatattcctaaactccaagccctgtttgactcgaaaacaattagtaacatcattaaaagagggaaatccagtggtcttgggggtggcatgtgggtttggacaaaagagccgattaatttattcactactaagtctgtttagttgaattaataaatattttattttactaagttattttaagaatttaaatttttactagcagtcgtgaattatgatatagttatatcataaatttgttattctgggtaattaacttaaataatataaaatacgagattttttaagtaaaatatatttatttaattgaatatttagtgccaattattaaaattattgtacaaaaagtagaagattctacactaaattagtgtaatttctacattaaattagtataactattgaagttcatcttagtaatacaatatctagtaaacatgattgttgttttttttttaaaaaaaaaagtaactcaacatatatattaaaaaaaacactagatttagaaattatagccttctaattaagtaagatagattaattatttgtcactaatattaaaaattacaattgtgacataaaaagaaaaataattgacaattaaaatatttagcctcaatccttttcaaaaaaaaaaaaaaaactaagtcctcaacaaaataaaaattaaaaacttactatactactagaatggtcactgaaaatgcataaactatgatatataaaaaaaataatatcttattattattaattttgtttttttacttaaat

SEQ ID NO: 256369 - DNA, 1089 bp, Cannabis indica
cccatatttgagttaccacctcccttttgcacacctgcatccaaattcattttcaccaactccctctctggtggtatcaaattggcttcctccctatgagaagctccaacccctctcttgtttgctccttggaaatcagatagaaacttagtgcaccactccaccatctcacctcgctaagcccccatgtgttacaatgtttctaatatacaaaatattccaagtaaccacaagaaaagtctcaaatttattttgttcccattgtttggaaagtctcattaagaagataaaagatctctcccccctctcccacctatcttagctgttgcttgatgccacacaccttctagtaagctctattatcattgcactcccatcccataatgtatggaaactgattcaactacacttgttgaacacctagagcaactcagatctaccagtacccccacattttctaagtgtcgactagataggcattcaagaatgtaccaatttctaaacaaagtgattcactttcgatagaattttcagcctccaaagcttccttgaccactgcaccacctaatgatcatctgattgatacttctcgctctccagatcactagccattcaattccccattcttaactcctcgttcttactatagtgccaaaggatcttatcttctatgtcccattcaaaacttaagaatttttaaaatcatctcagcatccattattgaagacaacccttacataaagtcttcatcccatttcccattcctttattttagatcaccaacatataactgttagggatttatgcattaattaaaataccaatgtaatttgtaacctatattattattatcaataaaaaagtagaaattattttgacttgctcaaaacacatgtcttattcatgattattcatttaatattaaattctattcaatcccaaagatgtagctagttataattattctgacctaaagaaaaattataattacatgatcaaaatattgaaatcttaattttagtaagtgcactagattactcgaacattttgaaaaaccgtgtttttgcaaatgtcagttgtatataagaa

SEQ ID NO: 256370 - DNA, 1067 bp, Cannabis indica
ttgaagttttttaaacacgtgtgataaactaaaataaagaactatatttttggtagtgtaaattattcaaaatttgttaaaaaatttctaggataaaattgtagctataataaatactattaagaaaaaaaaaattcttgcaaaaaatactcattaataaacaaatgttatatttatgagctctcataacatttcaattgtgctccaatatacaataatattttcaatacaatttggtttataaaataaagtatcattaataaatgtaaataaattaaatatttaaaaaaattatcaatgaaaatattataattaaaatatatgtgttaaagtatatcattagcaattaataacaaaagtataattaaaaaaaataatatttattgttaattaaatttaatataatactatatcttatatcgaattttgaactaatttatagcatgtgccaaatatggcacaactaaaaattattatactaaattatgaaaaatttaatacttaattataccaattacaataatataatagcttcaacacattttagcatttattataaaatagaaaaatctatagtacaagtacaccagttaataacacgatttatgcctctctcatatcctgctgtgtattggtcagtatgaccgttatttctgttagtggtttaggtgctttaatctgttcagttaggatatttctgttagttaatttttctgttttatttctttttctggttgttatcctctgtcgaggcctgggtatatatataccccattccttgtaattcattttattcattcaattcaataaactcagaccttggttttctctcacaaaggttctttcgtgatatggtatcagagcggggaagagaagcttcccctcgatcctgacctcgttccgttcatctccttcgctgtgtcttcttctccagcgaaggatctcttctcatgagagatctgtccacaaactttctctcttcattattctttctttcttgatcagcgttcttttttcctgatctgtttttaatttcgtttccaccatggaaaccgacaatcaagctg

SEQ ID NO: 256371 - DNA, 992 bp, Cannabis indica
tgcttgtttttttcattccaagtacaaatctggtcaatcaagtacctacacaaagaatggtctgttccttttgtcccagttcaaaagattcatgcttttttttctttaccattgaatttctgaactttcttttaattcttgatgcagggaaatcagctgcaattcattatggtactggagcaatttcaggtttttttagtgcggaccatgtcaaagttggtgaacttgttgttcaaaatcaggtatgtttcttttcaaaaagataaaatttgtatctggttgtttcataatatagagttgcacttaatgaatattacttaaactattaggattttatcgaggcaaccaaagagcctggcatcacgttcgtggctgctaaatttgatggaatactaggacttggatttcaagagatctcagtaggaatgctgttcctgtctggtaaaatctatccatctcagcctctacacatgccataaaacttcatttgaatctttcaatcctagctgtacaatgttcttagcggttacaactacttgttattataggtatagtatggtcagtcaaggacttgtaaaggatccagtcttttcattttggttgaatcgcaatatcgaaggggaagaagggggcgagatagtatttggtggggtggattctgatcatttcaaggggaatcacacatatgttcctgtgactcagaaaggctattggcaggttaactaaatagtctcccaacctctcatattttttaggccatttttcttgttaatgtgataaaaatttatttctcaactcagtcaacctttttgttttgtcttgttggcagtttgatatgggtgatgtcctagttgatggggaaacaaccggtaattacatggaaattctcggatcttgttctgttgagatatttattggttggctttctgtcttgatgattggttatggtactaagaaattatcattatcactattttcaggattttgtgctg

SEQ ID NO: 256372 - DNA, 959 bp, Cannabis indica
gagaaataagagaaggcaggtggccagagatgtcgtgtcatgtgtacattgtgtccatatgaacattacagcgagtacacattgcaaatatggaagttaacaactaaagatggatggcaatggtaaactgctaacagaacgtgggtggaacatgaacaatgtgactagatattgtcattaattgttgttaacaactagcaagtgcctctcctagcttctcattctttccattatcttcttcaccaaaaccaactatatgcacactcaagtctactaagtctcaaaaaaaaaaaagatggtttgtttgtttgtaactcactgtgaattcaacttcagcatgttctttgtccttgtaaagccttgtaatctaacatgacataaaccgaaaagtgctatggttaccaaatgaaggcttataaagaaaattaaactttgtgtatggttttatagtttccaagaccagaaaattgcattataattgtctttcatttttctttgattcttttataaagccagttttgttttcttttcatgaagaaagtaatcttgaacaacaagattaacatcattaacctgtagaaaattatgattctcagaccacatttaagagagtacaatgaagaccgagcaaccaagagggtttatatgccacaaaaacctgaaatagtttaagaaaatgactcataaaaaatctcaacatatggtgtgtatccattaaagggtaaggaaatctcaaaaaatatttttgctatctgcataactgtaatcgaagaaaagaaagccttgttaataaaagaattagaaaaagaaaaagcacaacaacaagagatacttacggaaaatagtcatcagttttcaatggccaagtctcatttgctgcagattttgcatccctgcacttagatggtgttgaatacatcacattaacccacctgtccgtcctgataaatttaaacagc

SEQ ID NO: 256373 - DNA, 940 bp, Cannabis indica
tgcttactgcatatctattttgattaataaaatgcaattgaagaaaataaaacagacaaattataccaagtattaaaattatatgtttaaattattaatgtataataaataaacaaaaacacataattaatctaaaggtttattttaagtgtattaatcctaaaagttttttataggttttaataaagtaattaaattttgactaaaaaaatttaaatttaaaaagctattttttttgtctctgtgtttgctttcgaaatgaaattgttcatttttatatgttaattagattttatcattaaagttttttattattattattatcattaaagaaaattttgagctaaaaaaattttaatatgaaaaatattaatggatgaagtgtaagtttttattaatataactaattttaattaaataagatattgatgaaatattatgttaaatcaaccaaaaaaaaacataggccaccttttatatttataggaaatatatttatagagtgataacttcacttcaataactgagtacgtttaataactaaattatgtctttataagatttacatgtttgattataaatatataacacatgcatgtacgtgtctctcaataattaattggtattctgtattttgctgtttaaatttaggttagttatgattttggaaagattgtgaggtttggaattcaatgacgaattatatattaagaaaaatttaattacataaattaataaataataactataaatctatcaccatctacttaacgtacacttcataatatgttgatcgttatatctctacttgtttttcaaaccctagctaaataagcttcttaatcaagttttgctagctatacaatgatatgtactttttgtcactttgttaaaattactagtcacgatattttagagtttaatttgagcgatatattga

SEQ ID NO: 256374 - DNA, 1660 bp, Cannabis indica
taatttgaaaaaatagttaaaaatcacactacccgcaccgcgaacacgaattaccagacataagatgaaagagtgttttggggctgagagcttacaccaaagtatcttctcaaaattaactcgtgttcctattatgagcgtctcatagaccttgctaatataaaacttaccacagtgacccacttgaagaatttcatttcaggagaatgtccccctaagtctcatgagcctcctccaataccaattcacatcggacttgtgaccatacttcttaatctttcaaaatacattgctaacccaattacctatatgaaatcttgcttcagtgtaactgtccataagtatttggccagtgatggtttattccaattctaaccctcaccaaatcccaatcctctaaactttctcaggttacaaactagttcccacgaagcaatgtgcattttacttgtgttgtttattttaccccaaagaaagttcttgcacattctgtcaatttccttagaaactttttgaggcaaaagaaagttcttgcacattgttggtctagggcacatatccaaatacttcatagggcatgcaccttcttttaaaggcacatcacaattgatcccatgtttctcaatctcattaacccctgctaggtagatatttgatttgtcattgtttgcaattattccagagtagctactaaaacgtgtaaatgcttcagcaatgcatccaaccgattcatccaaagccactactgggattgtaacacacctcaaatcttatctgcctgtctcataatagaccacaaactttttttgatctgatgctaaagccaacactgaggttgtaattgaccgttgcttcagctcttgaaaactaactttgtacttgtatgtaaggtattttaaaaaaacttagcaaagtttcttctattattagggaatacccaaacatgtaaaagtttcttctactattaagaatacccaaacataatgatattaaatagatcacaaagaagcagtacatcatatattagtttcattgctgtcccaaggtataattaaagtccaaggacacctctttccaaataacatagttgaacctccacatgaatgttcactactacattcaaattttgtactgtacaatattccctcaccataaattgaaggctcaaatgaatgtctatcatgatgcttatgtttttatggcattagttagtcgttcatcaaattggattacattttttttcaaataaaagagctcaatgagttggatacatacttttcagtggtaagtgtgtgtgagcgttttgtgaggctttcgagctttgctcttagttgttcttggcggtgtgtcttggtgtgtgagatctatagcagctccatcagaagctatcgccgaacatctttcaccacctccagcacgaggatgtggactggaaatggagttacatttctgtttccctcttcccttcgacgcacttgtttccaaacgaggtttctttagtagaggaccctgctatgaagtaaatttttaattcaatattaatgtacctaataagagtaacaaattcaagaatcaatccatacctgatcttcatcattgtactcttcttccacattctgaagttggtctgcttgtttggtttccctctttagcgcatcaa

SEQ ID NO: 256375 - DNA, 637 bp, Cannabis indica
gatttgtgtatgttttgtgcaatgtgactgaaattgtatatatactatatttgtaattaaatctataaagtaaaaaaattgtttgaatgatcatataatacatttgtaaggcacaattcattataattaagcacatattctatttattttcaaaaataaattaaaataatttaaagaaattactttatatactatggtttttttttaatttactattgctctaataatttctatataaattttaattatgatttattataaaaatgtaaaaataaaaacaaaaatctgaataatttattaaaagtagaattcgcactcaattacacaagttacggctttagtattaaaattattcaaatttttcgaaaacaaaaatacttaatttcttcaaatatcgatataaacaaaagtgacactcttagtatatatatttacagcataaatatttaaatttaactttcaattgcaaataaatagctaaatttaatttatagcggtaataataactaagttatatttcttggaacatcaaagaaaaggtttggaaactccttaattcttggaatgaaaaaaaattttcagtaggagggaaagaagtgttattaaaagctgttgtacaatctattcctacatatgc

SEQ ID NO: 256376 - DNA, 1579 bp, Cannabis indica
ggattcaagttattgaggtctgaacttccatcttggagataccagagtcaacttgggcacaaggctagggtcccctcccaagttgactactatggcttgggtctactcaatttcgtgacgtcatccttcatgccacgtgtcaaacattgatgtccacatcactagacaaagtttttgggtcaacatttgcccccaagtcaatttcacacttgtgtggagttgacttgatgacgtgcactaagcctgttttgcttaaaactacctgataggcataaattttgatattcttaggcacttgtatctgctcttcaagtattctcatctaaattagaacttttaacacttttgattagtccttggcaattttgaaaattcattaacaaagaaaaagaggaaaaaatcttatctttttttttcacttatcttttatctctttgaaaatttgaaatttttttcattttttgttatggcattaggattaattgaattggaatcctaatctttgttgaatatgccattcgaaattagagagagaaaggaagaagagaaaagacttttagccttttgcttatcatttattttttcctttaatttctctatttattcctaaattccaaaaacattaggaattgttgttaccttttaaaattgcatttctattcatagttggatagaaattgaaaattagtttgacaaaggagaagagaaaagaaataattattctttacttatcatttacctcttccttaggaagctttaaatttaaaagactccaattagctttaggattaagaaattggactcatctataaataagtgagttgagaaccaaatttttcacaattccttcttcacttcacacgcctatagcatttaatgatcaccttgagatttaatcttcatcaagccttcttcactctaagattgaaaaccacattctttttttttctttcccccttgacgccgattttttatttttttttcttctcttcctttgtttatcttattccaatgactcctaaactctaaaaaaaacatcgaaataattttttcaaacctcctaaaaatccaaaacacctttcttgtgccttgaaaaattcttccaagctacttagactttttccaaccaagtttgactttccttgagttgtaagcaacttgaattgttgaacttgagatggctaggatgaagagaagcagaaggttacctgatgaatataatccccatgctgctcagttcattagacctaagctgacagtgcgtaagtttaagaacttggacaaggcacgtggtggaaaagtgatggcaactgagcttctcagagctaccattgagagtgatgatctgagagatcgagcctttaagcttaggcctcttgtgtctggtacccttatcgagcttcatgctcaaacaattcaggatgattactgtcttccagaaactattgttcagaagcctcaacatggtgctcctaagggttcccagaatacttactggagtgcctgatcaagactccacatgaatgcaggtacttactattgggttttatgccctaaataaaactaatttcaatataat

SEQ ID NO: 256377 - DNA, 1728 bp, Cannabis indica
ccgatcaacagattgttgcaaccacatttgaagtacacgatggagattaacgctcttgctcgaaacatgttgattagcgcagggggtcttattgaaagtatttttgcacctggaaaatattgtctcgagcttagttctgttatttatgataaacaatggcgattcgatctacaaggcttgcctgctgacctagtccacaggtatcactacaaaaatcttatttttaatcataacaaacttgtgactaaaagtaaaaaagtaatgagtaatcataaactatcattcttatgttgtgactaaaaggttgtgactaaaagtattagtcacaaaaattacaatttgttgtgactaaaattgaattggtgaaaatttgtatataaatactatgttttagtcacaagtaaatttttaacatttattattttatttccaaaaatttgaagtttattaggaatacttttaccaaatgaattcaaaaaattcaaattttgtaaagatttgtgactaaatgtcacgtttcagtcacaaaaatctatattgcgactaaaagattgttactaaagttatttttttttatatatatatatatgcaattatatggttgagatttattacacattaatcgtagtgtttaactaatattaatgataattacaaaatgtgtagaggtatggcggttgaggatgaaacatgtgagcatggtctaagactgacaattgaagactacccttacgccaatgatggtctcctaatatgggacgccattaaagaatgggtcagtgagtatattaatcattactatgccaactcaagcgagattgagagtgatgaggagctacaagaatggtggaaggagattcgaacagtcggtcatgctgataagaaggagggttggcctgacctaaagacacgcgaagacctcatagacattgtgacgaacatagcatggatcgcgtctggtcaccatgctgctgttaactttggacaatatgcttttgcagcctatttcccaaaccgacccccggtcacaagaaccaacatgccttcagaagaaaaagagtcaaaacctgaggtttggaaagcctttaaggcgaatccagaagacacaattcttaagtgctttccttcacagcgtgaagctgcgttgaatatgcttgcgttggacttgttgtctactcatgcgagcgatgaggaatatttagggcatcatgttgagtcttcttggaaggatgattctaagatcttcgaatcattcaagaaattccaacaaaggatcaagaaaattgaagatattattgatgagaggaatgatgatgagaatcttaagaatagacatggagctgggattttgccttatgagtttcttaagcctttttcagagaaaggtatcacaaacaaaggtgtcccatacaacatttctatttaaaagaagtgtcataaatattatgaaagcaataagtgcaataaataacaaactattttaaataatggctagctagctatagctatagccaattggttgtaactcttattttcatgaacattcatatctatttcatgcaaatttataataatgcatgatatgtatgggaaataacaaattatcacaaattataattgggaaatttcatttttaatgctaaaaaaacaccctctaacaaaatttagactcctaattaatttatacaattaaatgctattattttcaatttttacccaaactaccct

SEQ ID NO: 256378 - DNA, 4465 bp, Cannabis indica
aagggctaaatatctgaacggaaggagacattatattccgctgcacctaaaataatttccaacatgtcccactcccaagaaataggacacctcctgtcgacaccatcaacggcggtgtggggtggacaaacataacccagctcaatttttcctcaaaattgctgctccgtcggggaaacatcgacgccagcagccacagtgggggccatttccgcctatcatgcctgttgtggtgtccgaaggcattgttcaattgactactgatcactacacgacgatataggaccaaatgcgggccttgcaggccaaaatcgatggacggagcaggtttcaacgtcttcctcaagtacccaccacccactcgaataatccgcaggtaaatacttttagacgatgaactatctgtactcacagggaatgaaggacaggtcaagaagggtttgatttttatcagccaacctcgagtgatcagttcgcgcggaaccttaaccatgaggtgcaaccagaagaggacccgtaacaacttgatctacgtagtataccccaaccgcggaatgaggagaatgacgctgagtctggctcttcatcttcgcaaaatcgcaccttgagtatgtacaccaggtcgtattcggtggaaacacaaggttcataggggtgatcttcgcgatcaccttaacgcagttttcagggcacgttctcagacgccccgtaacgatgaagagcctcgtggtccctgtttgagcaatcagggcataaataatctcaccaacccgcctcccgcaccatctgcgactactggggtggttatcctagccaatatagccgccgcaacaactgcacccgcgacgactctgagcaatgatgcctttcaagggagtatcgatcagagtattcttttgcaggctttaaagataattgagcaacaaagaaagcccatatacaaattccacgggacttctccttttatcgcggaagtgtgacaagctcggttgcctaagggattcaggctgtccgatcattaaaatataaaggtaccactaaccttatagattatctgaagaaatttaatattattatggaagtggaccaggtaccctagcttgtgaaatgtcgcattcttgtggcaaccctggaggacaatgcttacgattggttcggccatttgcctgaagcatctgtctcgacgtgggaaacctttgtcgaccttttcctaacacatttcgaagccacaatgacgtatagatcgccttatactactctggataacattaagcaaaaggtcggtgagtcattacaagactattttaaatgttttaatgccgaagtaaccaaagtagagaaggccctcgagtcttcgttagttgcaggctcgaaggctcgagtcgttagtcaagttctttgctatagctgagtcgcagaaaaggattgaaaattctctagccgagctagagaaaggaaagaataaacacgagtcacccatatcgcgatcaaaaacttgcagtcccagaggaaaaaattccagagggagaagccctagaagacgcagtccccaaatacagcggagtccaaagttggccaaatcccctctgaagaaaaagtcatctcctaagagaaaaggcggcccacgttttgtgaactatatagaattatcagtcccgcgggaccacatctacgtgattgaggagaagaaaggagtcttcacaaagcctcccccaatcaggggaaattgcgacaagagagacccaaagaaatgctttaagtatcataaaaatattggccatacaactttggaatgttggtttttgcaagatgagatcgaggaactgatcagacgaggaaagtttggcaagtacaagaatgatgaggaacgtcatgcttgagtgaatgataaggaacgtgagcggttcaagaacgcctcgcaacctcacatcataggggaatccagaaagtcacaggaatgatatgccatggacgcaagggatgggccactcactaatgtaaataatttgagtgagcagccagaaaaacaattcaagaaggagtgcgatgatatcacattcatggaaagtgacgccagatgggttcaccacccacattgccgatgcactggtcatcgtcgctaacattggacgagacaatgtccaccacatattagtggacaacgggagttttgtgaatctccttaactttcaagcttttaagcagatgggactacaggagaaggatctgcgaccagtggttttaagtatctacagttttatcgaggatatcattactttaaagggaaagataaaactcccagtcactttaggaactgcacctgtcgtggtcaagttgatgtctgactttgccgttatcgaccagtactcatcatataatgcagtgattggccgtcctatcctaaaagaaatgaagaatgtgacatcaatctaccatcttaccatgaagttccctactcctactagagtaggatctgtgcgaggagtcaagtcggactcgtgagaatgttacaatgtagcattaaaatcgcagagaagaaatcagtcaacatgatatacacgttagaagcaccacttcctcgataagcagtattcagatcgaggagatagcgtatgaagaaaaacaaaacttggatccaagggtcctcgattataccactaccacccaagctacggtaaccagatagggggaaattcccttgctttaaaactaatgcgacaagggtactattggccgacattgcgaatagacgcctcaaactttgcaaagaaatgcaacaaatatcaacggatagccacgtatgtcaaccaaccaccaagtcagttaaattccataacaagtcattggccttttacggtctagggcatagacctaattggagaattaccaaaagggaaaggaggagtaaaatacaacatagtcccaatcgattatttcaccaagtgggccgaagcaaaagcccttgcgactattacggctgttaaattgcgagagtttgtatacaattccatcatctatagattcagcataccttacaagttaatctcagataacggaatacagttcgactgtaaggagatgcgccagctgtgcgatgagttgggtattaaaaaagcattttccgcagttgcttacccacagagaaccaatcaaatagaggcagtaaataagataatcaagcataccatcaagggtaagctcgaagaacgtaaaggtgtatggcgagaagaacttacacaagttttatggtcgtataatacaactccccgatccacgactggtgaaacccccttctcgctctcctatatgtgtgaagccatggtaccagtcgaggttggggtagggtccctgcaaagagatgtgtttaaccttagtgaaaatatagaaaatcaactacttcaacttgatcttttagaggtaaagcacaaccaggctcatctgaaaaattcggcctatcagcgacaaattgctcgctatttcaattcgaaggtaagagagcgaactctacgagtaggggatttggttctgcaaaaagtcatgctgaacacaaaacacccagtgcatggagtttttggtgataattgggaaggaccataccttatcgctgaaaagaaaaaattggccacgcgacctatcggcttgcagaactcgatactgcgattcgaagtgcttgaaatggcaaaagtctcaagtattattatcaatagtactcgcactgtaaatatacttagtcaatttatctgtataaatgttctaagtataggggtagagcctaccatagatctactttgtactatttagtttttgctataataaaagttattagtttctcgacatttcaattttttttacaagtcttagcattttttagttattacaccaacctgtaattgaaaacacaaattaaaattaattctgtaaaatatgcgagtaccgcggaaagcaaacagataaataggtatccctgaagggatatatactgttcaaaacataaagaaagcaaagtgaaatttttcaaaatacaaaatgcgagtactcgtgcgttggaaattattttaccatgatcttagatttactcacaagtatgtttattaacaacctaaatatgaacttctaaaacgattataaaataaacacatataaagtatgagaaaccttacattgggtgcagcggaataaaatgtctccttccattcagatctctaacccttatatcctttctgtcgcagagtattatcaaggtctgaacctggatctctttctctcctttctttagtgctgaatctccttcttgttgaatgtctttcttcacgatcttcctcactatgattgaggcatcacttgctgtgtgtgggcactactctatcactaagaggtttgaaattattcaaggaagaagaggggtataggtggtggctaggttagagagagaaggctcaggtttttctctgaagaaaacaagatg

SEQ ID NO: 256379 - DNA, 1257 bp, Cannabis indica
ttgttttttttatgtagtcattttttaaacataagtgattttattttttaaatcttaaaaaaacccgtattaaatattgattttaggaatgcaactttttcttattattattattttcaaataatcataccatataaacaaacatatatgaccaccattatattgaaattatggccttgttaaggactaaaaaaatgtaacaaactcttattatatcatatcatatgaaaaaatggaaaacaccatatgatcaaaatttagtgagtatcgaaaaagtataatattttttatgttttaaatgacaatgtgttatatattgtagttatagaaagtattctataagtttttgaattttttttaaataatttataatttcaaaaacaagatttaaaataatttattgcacgagtgaaataattgttttagctctatatatatttagattgtaaactatacaaaaattttcaaaaaccgataaattattactataatttatgtagaaattaaaaatactaatatatgaacaaaagtgacagaccatcctgacccttgactaagaattttcccatataaataatatgatcagataaactagggtttgtattagagccgaagagattcgagatggagatgaagatgatgaggatcctcgaggtcgagatccatggcataaagtctagtccattctctggcttggtgtctgtattggtccaaatcggtttgtaaagaaaacaacttgtattgtaatagccaactgggtttggatccattagtaaagaggatatagagagtagattgtcccatcttcatcaatgtttggatgaaaaatctgtccatatcaaccatacaatacaattattattattattattattattattattatgcttatatataaaatcatatatatactaaataaaaataaaatataatattatagggtaaatattattttggacatgtattttataaaagttacagatatcactatatgttttgtttaatgataaattgaatgttatattttttaaaatggtacaaaatagtatcgtgaactcaattttcattaaaataaaatttaataataatatgatatgaaggtatctacgatgactagattgattatatattttacatctatttgtggtaaaaattaattttaggttgattgatgaaaattgagttcagagtattattttttataattttataaaatacagaatttaatttatttaaaatacaaaaaaaatcaatcag

SEQ ID NO: 256380 - DNA, 947 bp, Cannabis indica
tatttgactctaattctaaagtgcatatgatgagatatgtcattggttcccttttcattactagctctaactcatcatcatcatccaccaaaaggtttatcttcattttaaagtaaatatatatctaatctttggatcaactcaactattgattggttagtgataaaatgaaagaaaaatagagcaagtgaataaaaattcagtctttaaatctataaaaagagggagtgagtttcataaagataagaacaactccacaacaaaaattattgtataaaaataagtgctaaaataaccactaaagtgagagagagatagaaaaagagtttcatataaggaataagaacaatcccattacaaatattctcctaagatatcaaaactaataagtaataagtgctcaaagaattactcattacaaaaaaagtaacttgtaatatattatccccctaatgaaaataagtactactattactagttactaaaactactattataactaattagatgaatattgtacaaaattagtactaagactcttcagaaatactttgaagcataacttttttaggagaagaagaagaagaacaagaagtagggtttggagaaagatcaaccgaaacccgatcgaccggaatattaacaagctcttgggcaacatccttgaaatcaagctttcctccttctttacactttgataaaagcctagctgcatcttgttttgtcatagtaactttcactctcatcacttttttctcttcaatttcttcacaacaaaattgccttgttgtggttatagtagtagtagtagtaatattctcttttgaaggtaataagggctcttctttactcttcactaaagaataatatggtgatgagttttccttctttgattttttgtgatgattcttcttcttattcttgttattactactcaactcatctct

SEQ ID NO: 256381 - DNA, 960 bp, Cannabis indica
gagaaaaagagtggacagaggaggaaaacattagtgaattatattgaagaataataagattgacatttattttacacagcagtttacatccagaatacagtgaaaacccatctagtttcaaaacaagctagccgtcagcataatcaaactctaaagtgtatgtgtgagtttgtgaaagaacaaaatggggttaattaataaacaaaccatataacggagaaaaggagtatacagagtcctacaaagaacaataacatgaatatgatacaatcaaaaatcaagcatacaacaaattttcttaccctgaagaacattaatagatagaaattgtttagttcgtgattggctcgaatggtttacagcccatgtgcaaaatatttttctgtatacaagtttacaactagcacactttgtacacataaaaaaccagaaacaaagaggtccaaagttcgaacccaggcccctttccaccatcactactgagctaaaatataaaaaataaatttaattgctaaattatgaaaacttcctccaaaacattactttatagttttctctaataacatataaaatggtattcatcaaactctgtagccacagaacataaacaagcagaataatgccctttaaagttttctgcattggttttcagccctttatttaaccattagtaattacctattttgttaattgcccagctggggtttgaaccccagacctcttatacacaatgcacacccaaccacttgattagctcatctagactaaagtggtctttcagttcttattcttaaggtgtgtaattttgttatcatgagcaaataagatgtgaaagaacatagttattacaggaaaccgaatattgtagtggatattaagtgttagaaagtcaccaatcattaggttcgaaactcaaaaattcagacaattctaatgatcaataacgcctaattggtaata

SEQ ID NO: 256382 - DNA, 3265 bp, Cannabis indica
gtaaagtcccattttggaagctcctatgatcatggaagctcctccgatcatggaaactcctccaatcatggaagctctccgatcatggaagctcctctaatcatggaagctcctccgatcatggaagctcctccaatcatggaagctgctcaaatcatggaagcttctccgatcatggaggctcctccaatcatggaagctcatccaatcatggaagctcctctaatcacgaaagctcctctggtcacggaagctcctccgatcatggaaggttctcagatcacggaagctttttccaaggcagcaaaggctcaaaaattccaaattttttggcccccaaacctagctcccaacctaaccaaaagtgacccaaatttctagaaaatgaatttggggtaatctaaacataacccaaaactcaaaagcatctaaaacaacaagcaatgaaattaaccatggatgagcaaagcttcagttcacaaaactcaaacttcctcaaatccactacatatactactacttctaaaaacaagccataaacaactaaaatcaagcattaaaatagtttctaacacaattcaagctcaaagaaaactaaatcaccaaattccaaaaaatcacaaaagagaaccaagcttaaaacttcaaaaatagcaaggaataaagtttctagggcttacctttgatcttggcttaaggtttcccctcaagtcttgctaaaattggcttgcctatggaagcctaaccttggtttctccttggttcttctagggccgaaggtgaaggagagagagaaagagaatgagatagctttggtttttctctaaacttccctttttatatttcttaatgaattaaattatacaatcaatataaaacaaaggttgggagtttctccaatccataaatggtaaaatccaatttttccccttgcatttgtacttaagcaacttataggtctaggggaaaagtggtccaaaaccacaaccccgcctaaccccgatactccaaatatcaacatatgaataccccactaaataaaagattctaaactttcccatgtgactataccagccatctgtcgcattttccaccattgataagtaaaaatcataaaaattgtaaatttcacatataacataaataatgcacttaaagtttaataaaatctctagaattgtgaaattataactctaatgctttatttcctaaaaatgggacccacaacatataaaatcatgtataatcataaaatatcgataattaatgccaatcgcctttacttttgcatattctaatcatacggtcattacaataagtttaaagggggatcctagctttttgtatgggtatatgtatatatttataaaagtttaaagttaaattaaatgtttaaatatgtcacaatttttgagaaaagtctttgtagcaaacgtgagcattgtaattagaaagtcactatagcatgtctaagcattagggcgttccaatttcggtatcagagctgctaggttgtttatctaagactgtcaagacatgtacaatcatcatcagagataagctcaactcactattcagtaagcctttacttgttcattaagttatgtgactagaaaatcattacaggaagcatgttagtaatatgttatttgtttaattgtgttgcttaaaaatccaagaatgtggtatttaaattttatgtgatcgatgtctaacctacctgacttatgggttcatatgatatgtcctacaatatggacgcccagtgaaacacgagaagtcatggtaatatagtcgagactagaggttgttggggaggtcataatcctccaaatccttgtgggcgcagttgaggctgtggaaggtttcaagagggtggtcatacaaatccaccacaggcttctaagcattaggagcaaaggtttgcataaatgcaagcccaaattaaccggcaagatgaagatattctgaggttgagagagtatggtatgtctgcagtgcctccacaacatgtcccaaccgctttggttctggcagtgctagtagaacaacttgttgctggccactgtatggagcctttgtatgagagattttcgtaaataagcgcctagcttttttgggaggtccagatgttataaaggccgactagtggctaaaaatggtcgagagaatcctaaactttatgagtgtcactgagaatgattgggcaacctgtgccacatttcagttttgggaggacgctctcgtgtggtgggagtttgtgtccctcacccgagattccactataattacttgggaagaatttcatcatcttttcaatgttaaatattacaatgaggcagtctgcaatgctaaggggaaagaatttactgatttgttttagggtgaaaatatgtcagtaacagaatacactataaagtttgatcaacttgccaagctggcttcaggtatagtgcccacagacttcaacagaaaggaaaaataattgacgggtttgaatgccaggattagacatgatctggttattacaacaaatgacacaacaacctatgctaagatggttgaaaaggccctttgagataagggcatagtggaatttctttgggagccataagggacccttagtgttggtggaaccactgcccttcctacttctggttatggtaggcttggtggtgataccaaagtccaatagaagaggaagaatttttcaacatcagggtgttcaggacatagtaagaggttctatgggaaccaaggaagaagtggacgtcagggttattcttatcctgagtgaccttattgtgataaacataatcccagagaatgtaatcgaaaagaatgctttcagtgtggcatggttgggcattttaagaaagactggccccagttgaaaaaggcagaatagaaacaagaggcaaaacccgtacctgctcaggtgtttgccattacacaagcaaatgctacaaccagtcctttggtggtaacaagtcaacttcttatcaacgactccatttttattatagtgtttaactttagggctacacattcatatgtggcatcgagagcaatcaataatttgggtaggtcctgtgattttattgagatcgggttggaactctactacctagcaaacaattggttatggacttcttatccaagtattcggctagtattgagtgtaaacaaaaaatagtaacctttcagcgagagggtgaggaaccatttgtttatgtttggatcattctgttggaaatattttacc

SEQ ID NO: 256383 - DNA, 1205 bp, Cannabis indica
aaacaaatattattgtctttttgccaggaggggtttgcctaaaaattaatatctttcagtaatgatcttcttccttttcattgtcattattaagagccaatttgatcattagagcagcgaaagtaagacgtttatattggaagtaccctctgtgccaagtgccaaacaagaaggagtgacaagtccccacaaatacttctataaaagatggatatatatatatatttcattaaaaaataaaaaaccggccacgtgtagataaataatatatgaagagtatgatgcaattataaagggttggaaaattataatatgaggttatcatagcatgttctatcacatggtccccatagctctccacccactagacaaccccataaaataatgatcttccctatagtctatagaatacccacataagggctttcacatatattttgttataccaaagcttttgataatatatataagggaataatctctcatcaaatcgtttggtgatgccataatcactcaacttttaacacttctcttattattaaaaaaattactttgagatccccatgcaactttgaaattcatgactaattaaccctgatgttaaatcatcaaaacataacttttaggtatatatagtggagggaataattaaccttattaattacaatatttgttgcggttcacttttaaagctagtcttcctatagtatatatatataaataaactacagtacggttatatataaaataaaataaactataggtatatatatatttatatatagtcaggttagtggctctgagagagaagatcaaaaccccataaatattagattttgttataagtttatatatgtaaaagatggattacgatgatttagagcacttccatgttgggactatgggaatcagatccccatcgccaatatatatgttaatgctttaattacctttttataatattttagtctcttgagagtagtacttttgacacattatgtatctttaaaaagagaaacagttaaataatcgaccggacagatcataaggccatcaaaagattattattcgcacattgaactcatttgatgcatgtatactgatgatgtttcatttgaacaaaacccttcaatccaattcatatacttttcttaatctgaaaatgtgactgttcaaaatttttatatgctaataatccaatgtaa

SEQ ID NO: 256384 - DNA, 909 bp, Cannabis indica
gaatccccattctatgcggtcataagccttcgacatatccaattttaaaccaacaaatccgttcctaccgttgcatttccgaaaagaatccatgatttcatgagccaaaatggaattctccgcaatccatctgccaggagcaaaggccgattgtgttggggagataatatccgagaggagcggcttaattctgttggccagaagcttagcaataattttgtaagtaaaattgcacaagctaatcggcctaaaatcatcaaagcaattagcaccaagcttcttagggattaacaccataaaggtctggttaattttcctatccaattcgccagcttcaaaaaatttacaaactgccgcagtgacatcccgaccaacaatctcccaatgatccttataaaacttccccggcattccatcaggacccggggcttttagcggatgcatcgcccacacaacctccctaatctcagtggccgagggaattcgaataagctccaagttgatttcattcgaaatcataggctgtatcatattttgcagatggggaggaggaggagaagagcttgataacaccgaaataaacctctcacgaaagtaattccccacttcatttctaccggagatccatccaagcccatccggggagaccgtatctatgaagtttcgctttcttcgaataaccgtcgcagcatggaaaaaacgggaattccgatcaccatctttataccaaagttctcgagacttctgtttccaaatctcagattgtcgggtctcaacttcttccatttccaagagaatatccgcctcaagtttgaggttagcatccgagggtaagtgctgttgaacttcgatcaagagacgattaagagcttttaatttctccttgcacataccaaaatgcgttctatt

SEQ ID NO: 256385 - DNA, 1088 bp, Cannabis indica
aagaattattgtcaaaactctttcatataagtgtcaatatttattcactagtatacttaataaagttttagagccccaattgataatatttgtccatgaccaattacaaaataaatagttatctcgtaatagaataacattcatattttctcctaaaccaaattgtgaaatgaaattatgcacaaagcccacaataatctttgaaaatctaatttatcaaagttacataattttcataatttaagaaaatactataaaaatgatatattctaagcaatcaactattttcacatcgagattactaaaattaagtactataaaataatagtcaatattttggttattacaatttatcctccttaaagaaatttcatcctcgaaataatttacttttacccacatattgtcggggtatcattccctcatatccttacccattcacaattttcctgttagaatttccactctacatacaggaccttatctaggggtatactcttatattttagttcccttttctaccacgcctactaacgtgtcatataagcatctgtgtgggatcggatacgtaccttcttcacattgagatattgaatcagttatgcatattcactatcgtaggtgatagcgcaagtctatacactatttggccaacatgtgtaaagaacttatttatctcaggctttactcgcccttcctcttgaaatccataacatttctttattgaagtaaccttcaacaacatacggtcaccaacagtatgtaaccttttatcatttctaaatcatcatcatccgttagagcggcgagcatactaagtcgtatcttgtctactatttttgataattcttttacttcttgcagacttataggtggtacctcactccaagtaaatttagcactcataaaacacctcatagggtgccatacatgttgtggccaaccaactgtcatcataagagaatattatcaactacaaacactaactctaacttaccaagaagtatactatttgtaacatctttgcttcaagcctccattaggtccttacacccacaaaatgatggctcttatacacgagtacgtca

SEQ ID NO: 256386 - DNA, 1326 bp, Cannabis indica
tcagagcggaagttcttggtgattgtcggtgactacaacaatggaatcaagagtggatggattggattcgacattatctaagctgaagtcgatggaggcggcattggacagattggaaactgcgagaaacagaatcggtgataaactcgaatctatggtgatcagtcgaggggagttcaacagaagaatcatggatgtcgcgaagcttcgatttgagtttcgagcctcaaaaattgaattgtcgttgttcgacgtcggagatgaccccgatgaatgggcgtacatagctgaatggcacttcagtttgcagcagttgacaccagcaaaagaattagacgctgcaattcattgtctcggaggagaagctcggagttggttctgctgggaaaatcgcaggcatccttttcaatcgtggcatgagctgaaatccctactgcttcgtagattccgttcccaatccacacaggaaggttcagtatacgatcatggctttatgaaatcagagctcctaaaggatattgaggctaagattaatgaagagaaggatgttaaaagcgatgaagagatggacatggcaataagagaacacaaacgagcgttcgctagactcgacagcctcagagaaactgtcactggttctcaaacctacagccagcgtctacagggagtagcaccaccgtttcctgaagcgacagaggggaattcacgtgtgttggaagtgatgaatgttgctagtgatgcggaggttctacaatcagagagttacatggatattgaggttaaaaatgatgtgaaatctgttcaagcggaaccatcgattgttgttgaggaactctcaaagaaaaaagttgagatctcagtagatcagcaaacaaagtcagtattgagttgtcaagattctgaaatgaaattttcaatggagaagccacagcaggcaacattgctggagaaagaaaatcgaggtgggttcctctcgcgggatctgagtgtgcttccgttgatagaatctccgaaaactcaggctccactggcagcgtcgcttgagatatttggagctgtggagattgacgaaaaatcatctacggtgtcgcagtcggatctggaagttgttccatggggttcgatcgcacctcggcaacgaacgacattagagaagaacaaatcgttggggatagcacctgaggagaagcatctgctcgtggcgttgcttgagcagaaggatttgttgggaacggcgccggagatgaacaggaatgttggaggagaagaagacaaatggccaaagaagaaaacgtcgctgaaaacggagccggagaagaatcagca

SEQ ID NO: 256387 - DNA, 1003 bp, Cannabis indica
tgttacgtgtatttgtgagttacatgtaaaaaagaagactgtgatttagtatgtcttatgtaacatagaatatgattggaatatgtcttaatagtttccgatgctgacatttcattgtgtctatgtacttcaagaatatttggaattcttctatatatatatatataacaataacaataataataataagtttgtctcactttgttgctataaggtttttaggtagagttcactaaatattactactcagagagatcgtatatcttctcctcctcaagaatcatgaataaagaaagccaagatccaacctctgttcaacctaaaagttcatcatctgatgaagaaaaccaagacgaagactactgtctagaagaacatcgtgaagaacaggaaaagggtaaagaaactaagaaaaataacaaacgcactcgatctacatttgagacgggaagagctttgggtggccacgtgagcacacacaaaaacaaaggacctggcgataaagatcgtgtacagaacgaggaatcgaagaataaggtttatagttgtgctctttgcccaagaacatttgaacgtaaacagagtttggggggccatatgaagtaccattcaaacgaagataagaaaatgaaaagcgctgtatcttctctgctaatgttgtctaaatcttatgatcaggatcctaatttcgatcgttaggctgttttgaacgatatagagaaacgcattgatcgtatttatcaaaataaaaaaaaagactaaccaccctctgactcagttcatcatcactttattatgaattttatatggtattagttgttgatgatcgattcttatatagtacgtctataataatagtccatattcataatattgtactctttatagtctattttttattacattggtcagacaatttaaagtttagatatgttctttgttatattgatcagattgtaaagcttagatcttcttgttatattgatcagattgtaaagcttag

SEQ ID NO: 256388 - DNA, 2298 bp, Cannabis indica
acaaaaaataaaaaataaacctatttatttgttaatagattgaatcctcaaaccctgttgtcgttgtttctagctctgaagatgtttcccaaaagaataatcttgaaatggttgtttttcaaaagactcatttattacgtcctcagaagtgggattgggagaaaggaccaattttgaagtatccattcatggagcttacttctggtgattccaaatcaggttttacatctgtttcacctgatgagtctctttttaaagtggtaaaatatgttggtggcttgtgctcgttggacgacaagattggtgaaccagttgattcccaattggagtctgagtttgacatttggcttggtaaatggcttagaaagcaaaaatcaacataagtctttaagttgtttataatttcatttttgtttgtttgtttgtttgcttttatttgttatgtgatgtaattatttttccatcttttgcacaacaactaatgtgtattgcaagggtaaggaaaaaatatttctgccattttgttttggtgttgaggaagtgagcagcaagatgtggttccccaacctaagctatcctaattacttcctttcttcttctgtatttttttttattgttgtttgttgttgtttgtatttcatttttttttttcatttgttgttttatgttgttctgttgtttcttaatttattaaacccttaaaatattcttatttgcagcacattaacatcattttctactatcttcgcaagaaaattaattttgccaacgagctgaaaattagggtcacaacaactgattgtctttttaatgttagcataacaaacttgtatgataagtttgttaaaaaaataatgatatatctattttgtctgttgagcataatgttgcacagtacatccgtgatagtaagatattatgtgccactccttggcacttggtcgatcacgttattatgcctattaatgtgaaactataggatcattggatatgtggtcgattaaacatttttgagcgtcagatgtacttatacaattccttgaggtctagcaggtttatatcagttgccaaagaggcttgcaagcctttttttttgtgatcttaccatactatttctctatgttagactttcgagacttctacaatgaatcaaagtttagcactatggaaccgtttaccatatttctgttgatgggttacttgagcaggtcacagcgtaagttctttctcatctattatgttatattatttatatttttattttattatttactttatagtgttgttctgttgttgtcattcagtgactgtgggttgtttgtagcatcttttgctgagtactttattgacagcaaacctattccatcttctgattttgatgtggaagttcaccgtgatcgattggctgtgtcatttttgttgggattttatgccctagataaaatctatttcaatataatctgatttgttatcaatagaaaattaaaagtcatttatggttatatgtagtttttatgtttatggtttaatgtgtacaatttctattaagtccagaacatatagttattcacaaatacagtgatctcaacactgtagaagataattgggattatatgcttcaaaagttaacgtcccatgattcgtaagtgaactggatttacactgatgtgatagttagcgataaagcttacttacaccttggataagtgttatgttctttccagaatattagcaaagtatgctagcatcggatgtatggagtatatgttggactgagaccgatattgatcttggtaaagatattataatcttaccgttctatctttctaagtcaatatcactggttggtcttagatcaaaagatcttaatcctgacatggttaggttcgatctcaaaagtgttatttatgttctttaagtttttagtcaaagcctacgagttggtttgggtcacacgtatagcttgggaatatgatagttcaattgagtggaagcgctaatcatagatatgaaatttatagcgtctatctggacagagaagtgaaatgatgatttccttcgagcttagcttaatagagataaatggaagagcgcttatttcagtgattatattagtttactgaaatatcatttacaggaagctaagtgttttaaggataaaatacattgaggggtgaaacggtaaatttatccctactcggtgtaaatccctatagaggatctttgattattgggattagaacgatggttaaattttatagcatatctatatcatggaacatatagaacattctatat

SEQ ID NO: 256389 - DNA, 1687 bp, Cannabis indica
tctatatttcatgaaaggtcaaagcacattaatatcaaactaaatttcatctgagatatagcgctctcaaaacaagttcaagtaaagaaaatatgcacccatgataaccttgcagacatgttcacaaagtgtaatcgcagaaacaagcttgatcaatgcctaaatcaattaagcattctatattgttaagtcttgagtcattgcatcactggcttactgatctagtttaggtggatatgttgagaattagctcactaaactagccactagaaaaatactacaacatcggttcaacacatttatctattttttgtattcgatcggtagttagttagttggcttcttttttttctgtcccacaatctcaactaccaatacctataaataaacataacagcctacaatcaagtaactttagcatgtagaagatctatctactgtccaaatttctctttttctttctctcttgaattgtaccatgttttagagatttagtgtgtgaaggagggttttaaagggtttttggtatttttgatccacacttttcaatgtgaggaactgttgtaactggtattgtacaccattgatgagtgtaattgagtttaaaactctagttgtaatgtgatgaaagtcaataaaaaaatacattcttttgctgccattgatttcgagctaagttttaaattctttgtctatttttctggtttaagttttaattccaatttttatttttagatgtttgattcatatgagttgttattgatcataataataacattaatgtgaattaaattcacatcaattataagaaagcccatactctcttaattatcataaaataaaataatgagttacattaccaaaaaaaatactatactaaatcataaatatgattaaaattagagcattattataggcaccaatggtgtctagcaccacctaagggtatcactttgtagataattagcaatatttcataatagttattaatttaaataatgtgagacttgatacttaattaaattaataagaatataacacttttagttagtgttagacactactaagatggcaggcaggcctatatgtcttggtttcaataagactccttatgagcgttgtttctttctactattatctaaaaataattaagttattaatgagtggacgaaacaaagaaataactcctcacgtgcaaaattataaaagattccctttaagatcaaacaattccatcggattgattatgattgtatgtgtgatagcatctactataccaggaatatcaatgaacccgattattgaaatttctcaggatacccttttttagcttctaaaacctatttcttagttcaagatccctcttactaattagaattacattttagcttttctcatgaaattaacattaagcttgccaaaaaaaaataatataatgtattttacataacagaataacagaacataattttaaaattttaaaataaaaatataattttaaagttaactaaatgactaatcaaaatatgtaataagataaaatgttcttgaaatatttttttttaagaaaattaactcttattattggattttaacagttcttatgataaatatggcacacttaagtttgtactaatttatatggtatttttttattttttaggttctttcttatagtatttgtata

SEQ ID NO: 256390 - DNA, 1230 bp, Cannabis indica
atcttgtacttcgggaatgtcttcatctccattatttttttctcaagtcagtcgaatcaaaacctagacatttccatcaaataacaacttgtcacttagggatatatgccttttattaatgaatgtcatgatggagaattagtcaattagtacaacattttatgagtacctgaagaatgcgaactttgttgttatctcttgacactatcctgggaattgctaaatttgaaactatcctgcatgatcaatttcatgaataaaatatacaaaattaaagaataatattacaaataacaatgtattgtacaagtctaaccaataccttccattggtaaattattgttcctgaacatgcaattgtttaaataataataggaccccctctaatcacaggtctttcctaaatggctacattagaagtaacgatacatgtgatggcatactcataggctcatatttcgttttctctgagaaaatttcctaaacttttatgttgattacgtacaaggtattgaagtcctaattcataagtaaaaaggtcaaacccattcacatatttttagcaaatatacaaataagaaactataaagtacaaacctacaaatagatattttgaaaatatgaagagacttggtagagaggttacgaatagcctccgaaatatgctccttgccaaatgcatatactactggataaccaagaagccatctgaagcatatacaataacatcatgatgtgagtgtgatatcttgttctaattttgaaactgaagctacacagaagaaggattgtctatcttctaaattaatcaaaggtccatctttgtatgcaattacttatggataccacaaaacgaataggtaaaatactctaacattattaatgcagatgtatcttaatatagaaaattacccatttaaagttggtactgtgacctgggtgtcttgcagacaactactaagatcaataaaattgggactaaataaaacaactgaacaagaaaaattctacatcaagacaagcaaaatgtaatgcatagaaacaagttggaccttttttgtaggaaaaacagaggtgagattacagtacatattatttgttaccttttctttagtgctttaattgggttagtttcttttctcatatcataatctgaattttcccacttgaacagttctctatttaaagtttatgttggtatatattttcctaacaagcatgaaattctct

SEQ ID NO: 256391 - DNA, 536 bp, Cannabis indica
ttgaatatttgctcttaaggctacccaattggtattgctttgtaccaatatctagccagcttaacttctagagcaattttttttactttaataacacttaaaaaataggtgtgaagagtttttctctcgaatccacaaatcaaataactctctttcctttgtcaatcaataatagaaaagtctatctcttgtttggagttggccccaaacaactacattccagactttatttttcaatctaagccacaacttcgagtacaataaggagaccccaaatttcatttaaaaaaattctgctttctctaatttacttttgattatgtctttcaccataactaccttcctccaatatcttttactcccttgtagagccacatagctctaccaatctttttcttttaataagtaaacggaatgaatccaacgcacccactaattatcttataccttccaatagtagctatgttgcatctctcgattcttttcagtcccaatgtaacgccctaaataattaggcacgctacccaaaatgctta

SEQ ID NO: 256392 - DNA, 878 bp, Cannabis indica
tttaggtgtaaataaaatttctcccaaaaaatatatgttatttaatccattattttcaaaatacctctagcataatttctctctttttctctccattacccagcccttttaaaatttatcctaaatctttaaataatgaattattaagattgtgtgtgctgttgattttggtatgtgtttagagaaaattagatctgggtaaaaatcaaacgaattggatatttttttttcttaaattaaaagtaaactcgataaatcaatggtttatcgatgttatcttgatatggacttgataaagctgagtcaatagtgcttgtaggattttaggtttgtctaaggttgatgatgaactcggtacggactcgataaaactcgataggatatttttaattagtgaattggcataacttgatgaaactctgaagttttttgatgtcattcaattcatatattttgaatgactgttcaataataattcgatagagtttgataggaactcgatggctattatataattattatttttatgttctatttgtgtttgctcaattagagctcgataggaactcaatgtccatatcagaattgtatttttttttttgccttattggaattcgatataaacttgaacatagtatcacaaaaatttaattatttttccttttctcagcttttgcagatggttccacaattgataattctaactacaaatcactttacaattcatgtcacttacaggggcagtgaattttttgttggttttttactatagttaatgtagcggaaatatagtagtttcacacactgttggatttgcattcccaataactacgatctaaactcacttgctagccctcgagaacacttggcagtaatgc

SEQ ID NO: 256393 - DNA, 1194 bp, Cannabis indica
acacaattatatttgtcaatggcccaaataatgacaatttaatgataagtggtacaaatctaaagaaaggctaattatctacttttctattagaagacatttagcatatgagaatttgcacacttcacaaacaatcttaatctttaaatcaaatttcaataagtgaaattcccatacaaagaaaagaaaatcaatattagaaacttgtgtttaatagtcatgattttattttcattttacagatcatatattgttagagttaatactttgcatatctttcactgttgctctacataaaaataatttttaatttttctgaaaaaacttttgatttactatatatgtaaataaaaaggagatttttttttcataaataaccaaaaaaaaaaaataacattacaaaatacagatctacatttttttttttcaatatgttgacagatttaatattttttttacaaggacagttattttttactttgtttttgcaataatattatattatgttgtttggaaggtatattaatgttgtttttgtatttattttatactacattgtttataggttgtttttatgttgctttcattgggctccgtaagaatgtcaatttttttttttaaaaacaaatccataaaaaataataaatcatatatatggagagagagagagaaatttttgccggcataacagaatctacttttaccggtacatttttgcattagcaaaagttgttcacaaattcatgttgatactgaaactttttccagcacaaaacagaaagtgttggcaaaaatgacttttctcagtgcataaatgttctggtaaaagctagactttttccagcgcaaatgtatattgataaaagctagacttttttcagcgcaaatatgtgttggtaaaagtcttacttttatgcattaaagtgctgggaaaagtctaatttttgtcagcaaaaatgtgcgctgaaaaaagtaagacttttaccaacacacatttatgctgacatggagatgccggtgcaccgtttcctctaattgccttgaggctaggcaacgaccaaaatcctttcacatatcgtgaacgtggtggactctgcaactctatccatatcaagtgggtactagctcaaatcctcaccaatgctcgaagtagcaaatggtgcatttgtagatgtaaaactagttgcagacgta

SEQ ID NO: 256394 - DNA, 792 bp, Cannabis indica
caacaacaacaacaataggctaagaccaaggccagtactagctaaggtacaggctgaggagcttcttttgccaacactaaacaacagcaccaggttttgacagttaaaaagtaaaaaaaaagtaaaaaagtaaaagtaaaatgttggagaaggatgtggctgcatctctgggtgttttttcaaattgttcataaatatataactttgtttttatggggtttagagtagagggaacatagattaacttttgtaattaaagtagctcagctttttctatagagcaattttttatttgctctttttttgattttttttttttttgggtatgagttagattgattgaagagaaaggtagtaaaaaaagagactagtcaaatgtgaagggttagttggttgattattatttggagaaaagcttagttttttgagtcctcttcttcttctaactttcattgtgatgagactctaatattattattatgtttaatagaaaaattgcataccaatcatcatagaggattgtaatatgctagcttaaagaagattaaagctttctttttagttatattctaataattaaaagtagaaaatagctaaaacctcgtacatttccattggaaaagaactaatagaaaaataaaaaatcagaattaatccatatatttctcgtattatggtaatttagactatgatttggattagcaaagatttatttaaagaatcatttaacagattctttctcatgggttttttccatattttttaaaacttttttttttaatttttcctata

SEQ ID NO: 256395 - DNA, 1013 bp, Cannabis indica
tgcaattcctgccaggttaagccgattttggcttgagcttcaagctggcacacgattgttaagtactccgcatcaaggccgcttagaacgtttgaaatcagatgagattcggggtaagggtccccagcaagagctagactatctgcaagtgatcttttctgtcgtaaatactccgccatggttgtgcttcctttgcgaatagtctgtatttttgttcgagtatcgtccatcttggcccgtgagtgcgctccatagagattctccaaagctacccaaagagttctagctgaagtgcaccccataacctctgttgcgattgcttcagtcatagacccgtaaagccatcccatgaggagttgatcacaaacgatccaacgctcatagtcaggatttagttgttgctcgagaacaccagtcgactcttcatgacctccaggaatagctataaattctgtaggacagatcttagttccattgacatatccttcaagccgatgccctctgatgattgttgagaccagatttctccaaagtgtgtaattattcctatcaagtttgatagaaaaaggttgtgtaagagtatttccaaaaggtgcgttgctgaaacctgcagatcccatctgagcgccatactgaacattaccagtggtgatctgaggggagctgaactggcctggggtgttctgatgtgcaccatcatcgacacctgtgtggtgttctcctccgcgtggagtttggctaccggtagacatggcagtggcctatgtcggctctgataccaagagagattataatactattgagaaatacaaatgctcagctcaaatgagactgagggagacgagttgtatttatagctttagggttacaaatatttacagcaggggaatatactctgtccagctggcagagtgcaatgatatgaaaataatacaatcctaacagaattgaaaaagacaaagcagcataacagaaaatagaacattctcagccccttctatgcataagcttga

SEQ ID NO: 256396 - DNA, 1426 bp, Cannabis indica
tcaaatccacaatgaccatccccaacctccttgtcgcaaaccccgatctcctcggcctagagcttgcgctgctgctcggggtcggtcaaggggcacgagcggctaaggtagcgactgagccaccgcctatgacagcaatggtgtgccatctacgtcaacagcgagaggaggaatggcggccgacggtgtggtgaggagtctagggagaagttgaaacaggaatacaatttgaagtcaagatattttatgaacatgtatttcggtcaccgcttatgattcattaggtctagatacttataagaacacaattgaaacaagaatcctaattggaagatatcagcctaaaaattgtttgtgtggatcctatcttatcgtgcttagaatctgaaaaaaaaaaaaaaagatgatgtagcatttgtgggtgccttgtaacactgaatgaagttggtaccagagaagcaagagtgtccaaaagcatctggtttttggtgatcaaattgttaatcaaagagatgttttctcccctctttattgaaactttgttctgcattaaaaacctatatttcaaagtcgcagttggccggccccttttcataggtttactttaccttcttattttatcctaaaatgtttctttcattcttttttatttttaagaaagacatacgaattttattcacaatgacagaagggccaactctaatacaaactttgatagaataagactgaaatatttgccaaaaagatgaacttgagctcctaggcgccaaatctgtcacaccaaaaccccatcaacaaaaactaatataaaatctaaaatcaacttccccaaagaagccaagcattatcagaacaagcgactgggttccaatggagaatttgttgagaaaatggggaaatggagaatttggtgaactagtttttttgatgtgatctgatgaaaaataagagttttattttttttaaaaaaaaatataaggttaattttagttgatcacctctggataatttgttaaataaccaatagaagttttaactttttctatttaagtgtcagatttttttttttaatttatgaaaataaaaaaaattaaatatgctacatacaactacatgttaaacaatgttgaccctcaaatgtcatatagatgaatggtcaaaaaaatgtatgtatagtatagagacaaaactaaggtcaccactatagaattattccatactagcaaaaaactacgtgcgaggcacgtatattaaattttatgctaggttttttctatgttatttgaaagtgagattattattgaatactgaatgcaatatattagtgtttaagaaagcttaatgatttaaatatattcttaagttaatccaaaaataaactaaaaattgatgttcctaatatttaaagaaacattacttaaatggg

SEQ ID NO: 256397 - DNA, 773 bp, Cannabis indica
tttagtgtaatttttggtgttttagttggagttgaaatattttttgacaccaaatttggtgtctttggagatgctctaataacagtagtttgaaaccaaaaatcctaaataagcgtcaataaatggtggcttcttcttttgacaagctgaggcgtgctcttgaaattactgactgcaacattaggtggattcctagggaatcttacaatgctgcacatatttcagctaaactggagtttaggcaatgaacgtaatggtttttcaaacttttggaggttattcaccaccatcttttctaattaatgaagttcttttgaggtttttcaagaaaaaaaatggtggcagtccttagggtttatgttgtcttcgccttcagcctcgtctaagtatttcataaggataactttgaaaaataacacaaacccatccatttcattaggtattttctcatcaatattaaataataataaatctaaaccaaattttaccaagaaaaacaagagcgtgataagaatagtaagaattataatacaataaaaaaataaagatgttaactaggaaagaaaatctaagcaaaaagacatagtgtgatgaagtaactccatttggtgtactatttgctttacttatttggtaacatctttggtaaaccaaataataaggcgattcataataaagcagtaataatatttcagtcacctaggcagtgaatcccaactaaaccaccaaacacatcaatattacccagggaaaaattaaagggaaatagtgtc

SEQ ID NO: 256398 - DNA, 837 bp, Cannabis indica
ttttaaatcacattttatgggagatcgtgctaacggctgcactcccctataattgcactttttgctttttctacttttccatactgattttatagggaatgcattttctatttaatttttttgaggtaaattaaattaatgaggcatatatgaagccctttgtttttcttagatctcctcatttccattttttatcctcagaaaaaaaaactccataaagaaagaattaagaaaagctcaagaaaacttaaggttttcttcgtatttttctatcaaccatcctccgtgcaacaagaatccaactatcgtcttcaacatctaggccctagttaggctctgtccagtgagtatgtttcttaaaaaccattctttttcttttaaagttcttttatttttgattttacgccattgttggaggtgaaaaagcctccatgccgtgaatttagggaaaaccatcctcaatggatgcacgtgtgtattaggatagataaatgttgggattttagctaaaaataggttgaatcttggctttgtttactatatttttgattatgggtcttgaggaacacgaagaaccagggtttcatggtttctttctaacgaataggtttttttagatttattaggaaccctagccatcctattcaagatgtttttaccctggccgactaattatatgctgcccctatggtatttatgttgtctagatgttcaattcactttttctttagcacgactactgggtaggtgaacatcgaatagacacaaatctcctcagccttctctttaaggatcagctcgcacactgggcaagtggttctctatctgttaattatc

SEQ ID NO: 256399 - DNA, 1941 bp, Cannabis indica
gctagccaatccagtgttggtgcctaaaccgagcgggacgtggcatatctacatagacttcactaaccttaacaaggcctgcctgaaagactgcttctcgttgcctcgaattgatcaaatggtggacgccacctcaggatttaagttgctatccttcatagatacctactccgggtacaaccagattaaaatgcatgtcgcggatcaagaatgtactagcttcaagaccgacaagggggtatactattacctggtcatgccgtttggattaaagaacgctagagcaacctatcaacgcatggttaaccgaatttttaaaggcctcctgggaagaaacatggaagtatacgtagacgacatgctggttaaatccaaaacatgcatgggccatggagatgacctcacggagtgcttcgaagtggtccgaagatatgggatgaagattaatcccaaaaagtgcaccttcggcgtcaaatcagggaaatttttaggatttatcgttactcaatgcggaatagaagcaaaccctgaaaaaatacatgccttgttgaacatgccttccccaaagaaacacaaggatgtacaaagcttgactagaaaggtggctgccctaagtcgattcatctcccgatcaaccgacaagtgcatccctttcttcaatatattgaaaaaagtgtcaaggattcgaatagactaaagagtgcgacgaggcattcagaaaaataaaagaacacatggccaagctgttgatactgtcaaaactggttcacagagaagacttgttattgtatttggtcgtctccaagaacgttgtcagtgcggccttggtctgggaagaagacaaagtccaacacctagtatattatgttagcaaacgcataataggggctgaaacttggtatcccttgatcgagaagttagctttttgcctcctaatgacctcaagctaagaccctacttccaagcccattccatcaaggtacatacgaatcacccactctggcaggtcttacagaaacctgaagcctcaggaagacttctccagtgggccatggagttaagttagtttgatatacactatgttttgcgtgtctccataaaaggtctggccctagcagacttcatcatagaatgtaatgaagcagaagctagcaccagtacaccagcccaaaagatgccgacgtggaaagtgtacgtcgacgaggcgtcgaatgaaagtggatctgacgccggaataacaatgatatcactagatgggctctagctccagactgccctacactctgcatttttggcctccaacaatgaagtcgaatatgaagctctaatcgtagggctaaggctggccaaagctgtaggggctgcgagggtagaagtctttagtgattcaattagtggtcaaccaagtattgggattgtaccaaacacgtggagaaaaaatggatgcttatgtagcaattcttagggaactgctctacgaatttaaagaatacaaagtggaaagaatcccacgagagaagaatgctcaggcagactacttggctaaactagctatggacaacaaaatagaaaggctgggggtagtacctgttgagcaccttacggagccaagcatcaaaaccaaagaaacagtagctactaatgagcaagagccgagttggataaaccccatcatcaaatacgtaacacaaggagaactaccttaagaaagagctgtatccaggaggttacagtatgaggctcatcgatacgtaatgatggacaacgtcctttatcggagagggcttagcatgccgtacttaaggtgtgtgtcgaaccctaaagctagacggatcatgcaggaggtccatgaagggttctgtggagaccacaccggaggtccgagtctctcaaagaaaatactgagacaaggatatttttggccaacaatgaagaaggatt

SEQ ID NO: 256400 - DNA, 2241 bp, Cannabis indica
gtctatacaatacaaatatatgctgaatactaataaaaattccacctacatgtgtgcaggggcagtaagagctgaatctggagccgccaagtgagatccacggagtctaggatggccccatcatcactatgttggtaggccttgtgggaaacatcctggccagccacctcctccactggtgggttggccagcacctcctcaagggtacccgatgattacccctctcaatgagcaatggtctagtcaatctccatccagctttcaaacaatgccctctcacgggctagtgttttctccacaaaagctagactacccatgtatgacaaatcaactttagagatgtgcaagcaaaactcgaagtaagttcaaaggacaggtcgatgtaatcttccttaatggcctgctagccattgagagtctcctataacttcttcttatgttcctcaagattagtatgtaacccagagatgagagcatcttggttggtgttctcagtgttcttagcacccagcttaatctccaatccagagaccattctctgctagaagaacctctagctcagaatcgactttgtcttttatggcaagggatgtctccaagaccttcacatgctcctgaaaagtgtctgaagacccctagagctgtcacgagtcgaactcagcttcatcatggcctaaaaacaaagaaaaacaacatcagtatcaaacagtcaattttggccgcccaatcccctctttagattgccttggccgactagacccctatatggatgcctaaggccggacaggcacatgcaagcaacaccatggccggccagcttatacaatgccaaggagatgaacaaagtagaaagcataactcactagagaaagtttccaaagtctgacaaagtacagcctgtcaagcacactgccacctaactcctacaaagcctaatccaagaaaaggatagccctctctatatgctgagtggctgactcagcagccttcctaccagcacctgaccccgctccttataccttggccggccggttgaaccatatgttgtccggcaggtgcaggccctggtaaagggagaggcagtgatggtccactagcatctgcacagtgagaggtcctagccaccttggccctcatccatccggtgggctcatctgaaggcccacctgcgagacctctaagtctggaagacatgtttgcaaaaagaaaatagcgaagtcaaaatgcattaaaaactattcaatacaagaataaaagcatgatgttataaattatcaaataccatcatcatcaaaagaagagctatcaaagctcacaaccatatccttacccttgcccctagatgtaggcacagggcgtgtaggtctatcaaaagtcaggccttttagcccaatatgaagagaagtgtcacctacttaacccccacgggctaggcgcctacagagagctctctctctcctctctagattctgtacaatacaagacaaatatgcttcttcatcatccaagttaggccttgccatctccagggcaagccacacagtagctgacactctcacaaactgccaggaagcagggagtacaaagccaatacattcggaaagttgtccatgctggtcaaccgaataatgcctctctctgcaaagaaaggatgtgattcactttatcccttgtctccaaaagtagggatggaatttttgaagagcggcaccaattgaaattcatggtgcacaatttcgcaaaggccttgtgccattaagtattttttggcatccttgcccaactttgacatggctttgcagttggtgtcccccagccattggtgaccaagctggctgaaataaaagtagccagttctgctctgctttggcccaaacttcaactcaaaatagtaaccaatctcgtaaggggtaggtggaggccaaccaagctccctttacaagacaaatatcactaatagatatctaatgcttttttggcatgagctgtgtcgggcacatcccaaagtaagttgcgacatccagaaagtattgatggagcggcaacaccgctacctgttctatgtggtgccctgaccatgccaaccaaccgaactgggagtatgcgcctaataattcttgcgaggaatctcacaagagacacccctactatgccactagcaatgaccttatcaaaggcctcattagagagagcagaagctggcgaaacccaccttgtcttaggtggttttgcatccaatat

SEQ ID NO: 256401 - DNA, 1402 bp, Cannabis indica
aataaatttaattatatattatatagcttggcttgcctgctggataagtaatgttgtataaccctagaacaagggggggaccctatatatggttgtttagatcttaatatcaaaatttatcaatacattaatttcccatataaattaactaataaattttatcagattctgtttcaataaattagtctctactttatttttccatttttgtctttaattcatttaggaaaaagtaaaaaaaaaaaaacgtatacatactcaaatatgaaagaaattaataataaatgcttagatatatttaatggtacaattaattttctaaaagcaaatgaaatgaattggttcagattgtgtttgaaattaaagcactaataagcaaaaaagtggatatttcttattctattttcttctattggcgatcttgtaaaatcataaagttgagtatatacccaaaaaaaaaaatctttctaatataaaattataaatatgtggggatcaattttattataaatatatatggaatatatatgattaggatttttagaaaatgcactcaaactttgggtgtacacatgtgaaacatgcatgtatgcttcaagaaagagttgttaacgtttaaataagtgatgtgtatgagttttcttttcttcttttcctcataaagtaacgtatgtctaattaatatacactcctcatctctaattgtgatattataacttaattttaagtttttttttagtgaatagcccctttgtattcattcatgctcaaactttacaatcttgtgaaactaattacatgtattgcatattctagtcagtcatatactatctttctttcctaattatatatgtagtaaactttgaattatgttcactataaccttttttcttttttgtacaattagcaatatgctaaattaatagtgtaatttcgacatttcaaaaaattctattcctttcttttcaaattctatactacggtaacattatacatttaggttggactttttgacacggcacgaaatcagtataaatttgagtgacacgagtacgacaagacacgaaagaatatgggcttgggcacaacacgactcgaataaatatgggctcaggtacagtatgttatattattattaaataatataatatatagattaaatatgtgtaataaactaataatatgtaacatatgacaatttatattatttgtcattattttgtaacatataggagagttacttgttactatgagtaacctccactattatcaccaacattaagagtgtaaaaggtgttacacatcttaatttgaaattcttaactctataggagttatggtgtgcatgagttacatctctttattgagtccataacatccatggaggttaatttgaatttca

SEQ ID NO: 256402 - DNA, 1475 bp, Cannabis indica
ctgtaataaaatgtgacactaagacattgtttggacccaaatagcttactggtttgaaatgaaagtgactgggaatccatttatccacaccagccagcactttgaaaccatttccaatcttaaaacgcaggccctcaactaaaagttcacgtccccaatgaatgccctgccaagtaagtgaaggagagtgcccaagacgtgcctccaagaaggtgttgttggagaaatatctatgctttagtagtcggctgaggagggaatctggcatttcaaaaattctccaagcttgctttgcaaggagagcttgattgaagtggacaaaagaacggaaacccatacctcttcaaatttcgacttacaaagcaatttccaacttctccaatgaatcctagaaccatctttgtttgaaccccaccagaaattcgccatcattgattccaattgattacaaaaagttgttggtaaacggaaacaactcatagcataagttggaatggactgaacaaccgctttcaaaagcacctccttaccaccaactgagaacagtttttcattccacgcatgtaatttttgccaaatacgctccttgatatcactaaacatttcttttttatccctctctgaaaatgcagggagtccaaggtaacgttcatgacattcactaattggcattcctaacgtttgatgaaaaaaatcttgggcagcttgtgtagtgttaggtgaaaatgacatgacggacttcgctgtgttcaaaagttggcctgaagctttgtgatagatatctaagaccttgttaatggcccttgccgaactgtttgtagcttcacaaaagaggaggctgtcatctgcgaaaagcaaatgagaaattgatggagcatgtcgtgttaaccgcaaccctttgagattattggttgattcttcactttgtagcaatcgagacaagccctcagaacagatcaaaaatagataaggtgataaaggatcaccttggcgtaacccctgggaaggctgaacatgaccaacttcttctccattaagcatgaaagagaaactagtagagtgcaagcaattcatgatcagagaaacccatctattgtggaagcccatctttcgcataacctcctcaacataggtccactccactctatcaaacgccttactcatatctaatttgaaagctgagtagcttctgttcccccttgtcttatgctttaaatgatgtaccaactcaaaagctacaagaatattatccgtgatgagacgattggagagaaaagcgctttgtgtttttgagattattactcaagtatatattagttaatatataccttccaaagtcatatgtatagacggttagtaaaatgttcctattgtatatggaaaaaataggtgtacccacaatagaagtctcctaaaaatatatttacttacaacaaattataatttttgtaattattattataattaattataat

SEQ ID NO: 256403 - DNA, 2208 bp, Cannabis indica
atttgatctactccaccatcccaacacttgttcagtatctgcagtaatactaattattataatacaagccatcgttttggtttataccatatatatattgggttaaagaagttttataatattatgttaattaattacctcacagattgctctaatcatccttcttggaagttctttgtgcatgctttgataatgatcaggcaattcggttgcagccatattgttaccctgtttatttatttatttttttgaataaaaattaagacttcattgaaataaatcatttatttaatataaatcaagtatatattggtgcttaccatgataaatatttgaggagaaagatcatcagttacgccattattaaagatgatatccataatgttaagaagaggcctcacatgaagaatattacaatttccagagtcaagaatgctactactaacaatgtcatgatatacatcatcatcaccatcatcattgttgataatatcatgatcacccgcttctgcgttgttattattgttattatgtggtgattccatttggtgtatatgtagagggactcgaataagtggcatttttggctaccctcttgggtccttttataggcaacaacttaatctataacaattaaagtacttttatatgacacctctaaaagtaatccatactataagtgtcatttaatatgtagagtgttgttattgggcaccggtaacatattattttgcgattggttagcgatatctcttaaaagttattattacattaaattaattatatgaaatctgatatttagtttaactaataacaatattgacacataaaataatactagacactattaatgtaatgataattttcttttattaatcacaataaatataatttttatgcaattactaataaaaccacaaataatgatgatttaattttatattttaaatatataaatatatatttatataaattgttttttcatccggcttctcaaacttttatcaaattaaaatttatcaaatagataatatttttttattatgtgaaatggtaaaattaattacatataatgtctctttaattacaaactcaagcattaaacttatagcaaagtgttaatgtagtttaaataaatatatcatgtccaatattctaaactttttaacaagtgaaacatacatgcatggaactagttgtgttttaacttcaaaaaacacttattaaaatgatccagtagggaataaaggcaactaagaaagaaaagaaaaacaaaatagaaggtgaaaattcttttcgatcgatatgtataaataccttgcttcggatgtggttagattattatgatctattatctctgcctttttctttttctttttctaaattacaaacatttagaatattctatgcattgctttgatgttgggaattgggataatagctaaaaacgaaaagcatgaattgatttgacggaaaatttggagaaaagaatatcaagttagtagtaaagcttatgctaggtgaaatagggatcttcgttttttatattctttaccacatttctttttagagagagaggagaatagaaatttctattaatagacaagctaaataataataatagaagaatactagatcttcaaacaattttattattcaaactagaataaacaatcgcatcataaattatgaagccaataagaattcgagatacccctaatttgagtatgaacaaggatagtcatgctactaacacatacgtgctttgagctaattgagattccctcaacgctccaaaatgaaacaagactaaaattccctaccatgaataaataaagccttactaccataacaattggaaagtggtgtatggacactattattaaaactaaaaacaaaacgaaaagacaataaaaaattaaaaacaatataagaactgcatatgccacatggcaatccgaagtcccccatgaaaactaatgacagtcagaactcgtcaacgatatttaagttggaaaattaaaattataatgtaatttaagaaaaataatacaactccaaaagctttaaagagaatctctaagtaaaaataatttagaatttacaatcaaattttccaaccccctcctaaatggaggagaagaatttttatattgaggctctattggccttgtgttatatgttgattcttgtgctccccagagacaa

SEQ ID NO: 256404 - DNA, 826 bp, Cannabis indica
cagcaagccttcagcttctcatactacctattatgctaaaggagccactattgccgttgacaaaagagcatcatcacataaaatgtacctgtcttatacaagtatttcatggtgctgagaaatttcaaaaatcttctccctcatatggtacacgataccttcacattttgcggcaactggcaagtgtacgtgaaatattgacataaaactatccaagaaattgttcaagatttattgcgaaagaaaaatatagctaggcttcttcaaaggctacatacagaacctccccaatatatgaacaagagttcaactcaagaaaattaacccgaaaaaatctcgggggaggtgggcaaagaatcactaactaaatgagctacttacagctatccaatacacaaattacacgagtcaagaaacagaaaatatgaaaacaagaacacccagatgagattaaagtccgaaggcaataaggaatatagaagaaatgcgaaaaaatgaatggggttttaggttatagaaatggatactcactgaaattttaaggcgcctttttgcggaagtgtgggtgatgtattgagcagcaacgtcgccggcaccccagaggaagccggagctgatgacctgggtcttcaccggatgaaaagccaggcagttctggtaccacttccagagccttagcatcatttcgtgtctatcttgaggaaagaaaataaaatggtaaaagaaatttagggacagaaaagaaaagaaaagaaaagtagtaaatttgaggggcgggagtgaaggtcctaatcttatgaggcttttgtctgaaaatgtatcaact

SEQ ID NO: 256405 - DNA, 2286 bp, Cannabis indica
acacacaatgaagtgacattctttctctggatctcccatacattattcaccttactgataattttgatcatgtgcccacttcaccatctgtcttaccatctgcaacatcttctcccatcacaacaaattcatccccgaggcctacacaccaacagtccactgctcctatcgtgcctactcaccctatgattactcgaggtaaagccgacatttttaagccccgagtgttcatggctaactctcgttttgatctgtctattgtcgaaccagctactgtggctgctgccctccaacataaggggtggaatgctgccatgaacacagaatttggagctctcaaacgcaaaggcacctggatacgtgttcctccatctgatgccaacaatataatcgggtgcaaatggatttttaaaattaagtataatgcagatgggagttatcaaagactcaaggcacgtctcggtggccgaagggctttcatcaaagaccgggaatcgactttggagagactttcaatccagttgtgaaagctgcaactgttcgtgtggtccttacaattgcagccactctatgactgggaagtaaggcagttagacatcaataacgcgtttctaaatggagttcttgatgaggatgtctacatgtgccaaccacctggctttgaagatgaacacaatccacacttcgtgtgcaagttaaataaatccatatacgggttaaaacaagccccgagggcatggtatgacaaactcaagacaacccaatcaagggaaatttgagaattctaaagctgatacttctttcttcttgctgaaacaaacaaactatgtcatcatggtccttgtgtacgtggatgacataattgtgactgggaataacaccaaggaattgaatgtcttcattgacaaacttaatacaaccttttctctcaaagatctaggggcattacactactttctgggaattgaggttttcagagataacactggtttttatctctcgcaaggcaagtatattgctgaactgcttcaaaaggttcaaatggaaaacacaaagtcgagtgttacaccaatcactgctggaaagcccctgtccattagtgatggtgaaccactcaaacatccaacattgtacagaagtgtgattggagctctccaatacttgagtcacactagacccgatatatcctttgccgtaaacaaattgagtcagtttcttaagcagcctacagatgtccattggggggcagccaagagaatcctcaggtatctcaaaggtagtatgcatcatggccttcatcttgccccaagtgacaatctgtccatggtaggattctcggatgccgactgggcctcatgccctgatgacagaaagtcagtagcaggctattgtgtttttcttggtgaatccttgatctcttggtcttcaaagaaacaaaatgttgtagctcggtctagcaccgagtcagagtatcgggctctatctcaactagctgcagaaatagcttggctgcagagtcttctaactgagatgaaacttaagctgccctctgcaccagtaatttggtgtgacaatttaagtgcaagtgcacttgctgccaacccagtgtaccacgcaagaacgaaacacatcgaactagatgtgcattttgtaagagacaaagtgttggccaaagagttagaaattcgctatgttccatcacatgatcagatcgcagattgtttaacaaaaggcctgtctcctaccaggttcaaattcttaacagacaaacttcatgtgacagagtcaccctttcgtttgaggggtggtgtcaaagaatttgaatatactgatgaggtgtcatcagagggcaaatctgtcattgtgaatgagggaatcccgagggatattgtgtgatcatttgtgcaatcatttgctgctctaacaacctttctgttatgattctgtgcaatcatatgtgtaatacgtgttacttatgtattggtcattttatttcccctgtaatcttgttttgtctatttaatgaaatccaagcagcactctctctattgagctgagttttccatcaatttgttatctctgttaaattaaactcatttatgatgtcaagacaaatttattttattttattaccatttgaataacaatacattatttggttagtgagaaagttgatatttatttctcttattataattttttagttaatatttttaaatcatatgtcaaaatattttttttaattttttttcatagctgtatatgttatagttataatattaaatt

SEQ ID NO: 256406 - DNA, 1534 bp, Cannabis indica
aaaatattacataaaatataatttaatttaatactataaataataaggcatatcaaacgtaccctataagttctactttgtaacctcagctcggataagattttttatcgctgcactcacacactagtcagttttgttcagtgatcaatccatatgaaaagctctgactttgatttttcaaccttaaattcatttatttagtgacctccaacgtttttgaggtgaaatgcaacgctctctaattgatatttttcaactttcgaaatattttgataagttgttatcacttcttatcaaattaaattaaaaaaaaaagtagaatacacagttttagattttcgacaattttatgtatttcaaagttgccaacacataaattcattgtaaaaaactgagcagctttaaaaacaaaaggccaatggggaaacaagattccaatataatgagaaaataacatgaaccaatcatggttagcaattaaaacaaaaagcatgaacaaagtgcaatagtcagagtcttctaggcagattgctctgtgtgtgtgtgtgtgtctctccctccttgaccaaccaaaaacaagagcccacaagagaagaaaaacaaaggtggtagtggagttaaaaagataatcctagtagtacatatatgtcccaaggatcttctgtacactgaaaataaaatataatattcactcacaaatagtgcaaaacttggaccctttgttcggcctctatttttaccaagaatttcacataattaggaaggaggaagttgttttaagcaacctcttgctttaggtcatccaaaaattgcagtaggtaggtaggtaggtagtagttctcctctatagccaaaaataaaggaagtggatactgatactgatacaccaccttttgataataatatatatgtagatatatagtatataaaattgggggaaaatgtatagcttctattgggtgatattacgttttcaaaagtcaaagttagtcagctccatttgaccgggttctgctcaatcagagtccttagaaggacctggtgaggaagaatcaagttcgaagattatttcctcttgatttgcaaaagctgaagagattccttggttgttctcttcgtttccactagctcgagttcttcccagccttggccggatacttgtacccatggggaagggctcctgcaaaggaaaagaaaggttagttttctctgcagcccaagaaagcatgagctcaagtgtgattttcatcatgacctaaagcttatggtaaattaaattacaatgcagaatgcactgaatttgaactttactagattcaggctctcacacaagtttctatctgataaatatttaaatttgaaaccatttgcattcacggtgagtattaataaagaaccaacactaattaagaagttaataaatcaaaatcttactggatcaccagcatttgggccatctgtatgaaatagaatagggcgacatcgtttatcctcattcattaagcttgaattctgaaaatgggcgataagagca

SEQ ID NO: 256407 - DNA, 1544 bp, Cannabis indica
aaaatttttaacggtcaaaaaagctcaaagatatgattttgtacatgtttaactttggagagaaaaaatcctaattagccattaaattatattgaactcaattattagctagattagtaatgttctttaacatttctataaaaaaaaattactatttaaaataattaaaatattctcctcaatactaaaataattaggactctaccaaaaactctttatataatatacacttactcgttattttaaatggttaataattttttctataatcgttaaatttatagttttaaaatttaaaaaattttccttttcaaaaaataaaaaaattctaaagtggtaggaacgggaactatattataggtgacctattacatgtaatgagaaacaggaatacgacgtcgtttatggacttttgtgagttgattgtgattgggagcaaataattttatttttatgttttttatttatttttgtttgaacaatgaacattgtttatgtttatgttgttgtcgctttgttgtgagttgtgagtatggaatatttactgtggtttattggttagttcgtactaaaatttaataattgtgttttcgttttgttctgattatatcaacctgtactattaactttgctgcagaaaaaaatatattgtactatgaacttgtcccccaagggaaatatagccccaagtgggaaaaaatcacactaaatataggtatatttgaattttattggtttggcatgtctattcaaattatttattttaaaaattaatcctctctcatttgtgcattacttttactattactatttactttttatttttttttagaaaagtttcactactataggtgatatgcgtcctattactttctgaatgtctcttacaaaattgtggccaaagttcttgcaaataggatgagaaacatgattgatcttattatctcttccacccaaagtgcctttatccctaatagactcatatctgacaatattatggttgcttttgaagtcatgcattatttaaaacggaaaagaagaggtaaaaaagattttatggtcttgaaactcgacatgagtaaggcatatgatcaagttgagtgggactacttgaaagctgtcatggctaaaatgggttttgctagcaaatggatcaatctcattatgaagtgtgtcacctctgtcatatactctgtggttcatagcggtcatattttaggtcccattactcattctcatgggattcgtcagggtgatccactatcaacatacttgtttatcatctgcgcagaaggcttttcagctttaatcaaaagttatgaggctgacaaaatcatacaaggctgccgtgtggccaatggggcaccttctattacgcatatactttttgctgacgacagttatcttttctggcaagccacatctgatactgttgggagcatgaatagacttctccatacttttgagcttgcttctggacaacgtgtcaatgctaccaaatcctccattttttttcagtctcaatactgagatttcggtcaagg

SEQ ID NO: 256408 - DNA, 2302 bp, Cannabis indica
tctctctctctctcgctctctgtttcttcgtttctctcggcagtcggcaccaccaactccggcctacctctcacgaatctccaccaggtattttaaatgtttaatttttaagcttgaatcaatatttatgtatgttgtttaagttttgtgtttattgctgtaatttgttgagaaagtttgagtcttgatctgcctatttaaattttgaagagttgggattgagttaatttagggtacttttgatttgctcttaggatcattagcaaaaatttggtctttgcttctgtttcagcaatttgggtactcctccaagctccaacaaagttattcaattttgattttgagattgattttccctaattttgagctgtattgtattgtgtctaaatgtttggctataactttattttctcatcatgacaattaagagtttgtttgtattacttttattcaagattatattgtatgtaaatgtctataaatcattttgtagatagtattatctttgatatttagggttctagttcatacatgaaacagaaagaatgttagaatatcagactgattcataaaatgactgatcttgtaaagagttttattcttagagctaattaatgaactgatcatcttaacatgtttgaatgtctagactttgaagaagaaatgtaaacactattgaattcttgtaattagcttccattacagtaaagagctcacagtaatgtaacaaaatcactgaaacaaaaacacttgcaattctcaagctcaactaagccccaaactcaaagtctagatattaaatatctaaacatttggttcttattataatagtctctcaaaacctttagtcttgtggaccttaatacttttgtttagtctagattattagagttaagttcaagaaaaaaatctgcaagctaatattttggtttggcagtctactgtgaaacattttcttttttttgactgattgtaatttgtagtgaagtgactgtgtgtttgattctgcagttgtaaaaggaagtttcaacgatgaacaagggtaagatttttaagctagcaaaggggttccgtggaagggccaagaattgcataagaatagcaagagaaagggtggaaaaggcgttgcagtattcctacagagatcgtcgaaacaagaagcgagacatgcgttccctttggatccaacggataaacgctggcactcgccaacatggggtgcacacactctctgttacttactttgtttcacatatttgtagtaattttgagttagatttttatattttattccttgtctatacatattcttctaagggattgctgatgatggtatatagaccaaaactcattacaactattgagaggcttccttccccaaaagatttctaaattattctcttgaacttctgacataagtcattcttattagttaaatgtttctccaaaacttgtgtttgcttcgcaaaatttagttggaaagcataaggacctgccatttttctctgcagttcttgtttactttggttctgaataattgctgaaactggctgttaatacatatttaagaccggaaataacagcttcactctactctcttctctgattcttgttgttaatcgcctttcacttcttagcaagacatcacaaaatcttgattgttttgtttcaggttaattatggaaacttcatgcatggtcttatgaaagaaaacattcagctgaacaggaaagttctgtccgagttgtctatgcacgaaccatacagttttaagtcactggtcgacatctctcgcaccgccttcccgggaaacaagcacattgtttttcctcccaagaaagaaggcatttcaataaatgtataatcgaccgatagagctctattcatatggaagaaacagacaattaccacaacaattcttcatgggcagattgtttagagacaaattagataggaatggacatattttcacagtttttgtggtgtcctaataatctagttagctgagattttttaatgtacttttcaattgttgctattactgagagtttcttcagaacatttgagattatgataatgcaaatccacctatttatagtgtgagaaatgttgaccattatttgttatgattgatcatattggctttaataattggtatcttattatatctaaacattataactacattaacatgtatatacatgtatgaatttataaatattgaaattcaataccaatgagctaagtttttgtccaaaccacattttctcccaagtctcttgctaaagacatgaattcagtc

SEQ ID NO: 256409 - DNA, 911 bp, Cannabis indica
atattttctgggatattacagggcagatcactacggaagaccaagtaatttctaggtatgtctctcaaagtgttgacaaaggatatctttcagaaaagtgctcttagatttataaatacaagtatagatctttgttttttagtcccttccccttgtgaatgccttcactatttataaggggagagttgttacatttggctccgtaaaaggagaagacaaatgataaatatccctatattttaggaagcaattacaatctattgaatctccgttattcttagatatatttgttggatctgagtttgtaggattgaattatagatatttgaggaagcttattaaagacaaataaaggatcacgtatctctatctggtatcactggcagtgcaagatctggtcaacatttttgtcatatggataggtctctcgacagttgtctcctttagagatggtcttgtagaatcatccatgcagggtgttgctcccatcttatttggtcagcaagtggttgacccagcaaaatgcttcatgggacatctacagcctatggctgttacttcttatatagacctgccaaacatatttctaccgagaggttctctattaggtcaaagagatgtctagatcatggcacgtggaaggatcacattagctgtgcaaactttgggataacatagtgcaagatgaaagcttttttttgggaataagggctctggtttaaaatttgaaagcaaaggtttttgagaagtctaaaatggtaaggaagagaaattggtctgtgttggatctatttatagtcaggccaagttcatgtagttcaaaataaatggtttgaatcctccctccaaaaagcaatatttgatctaaaaaatggggagttgaaaagatagcattaaaaaccttctcaagg

SEQ ID NO: 256410 - DNA, 954 bp, Cannabis indica
gaagcggggacgttacatatgtatatacattaagaaacttatttgtttcctcaaaaatgtatttaagataaatgccctaattcatattaattatgtgggtaataagatcgttataatatatatttactccttaaaaagtggatagcaaaagagaattttttttataacatagtcaaaggattttatatatataaaaagaaaaggagagaataaacacacctaattaaaccaatctttatttatatatttatatctctaatatatatatatatatatcaacatcatttcaacaaaagacggtgcctacttttggacccatctcttgctgtataataatatataaatatatatatatataaatatttatgtatatattgtaattaaactgccgtgttcaacacttcactaccagtctactacgtactatagtatacttctactaattaattacaaaaattacaatacaattccgaccttcaaatttatgcaacaagtttaggcagatagagagtttattattatataataaataataatttagctaataattaattaattattattattagctagcctttgcaaagactttggaattcttggtagctagatataaattaattaattagtggactaattaatatatataataataataataatcgcagttggggttggagttggggggatgagaggaatgattcaattgataattaaaacacatgcagacatatattccagtggatcatgtgcatggtaaaatacttgcaccaacattttggaaccaaatgtcaaaggatgcatatgcatatgcatgccttttaagaatgagaatatatatatgtattatgtatatgatcactctctctctcacacactactatatactattagtactactactgcttaaatttaatatataaatatatcaaaataattgatgagttggtttccatt

SEQ ID NO: 256411 - DNA, 1605 bp, Cannabis indica
tcagctgatgatagcctgagcgaaggtcgatcttggaaaagactgtcttccccttcagttgatcaaacagatcatcaattcgaggcaaatcatacttgttcttgagagtaagcttgttcaactctcgataatcaatacacattcgtagagtcccgtctttctttttcacaaataacaccagagaaccccaaggtgagtagctcagtctaatgaatcccaaatttagtaactcttgtaattgtatcttcaattctttcaattctgctagagccattcgatacggtgctttagatactagatccggtcccggaaccaactcaataacaaactcaatctcctgggtaggaggcaatcccggtaaaacttctggaaagacatcaaggaactcgcagtaagttcatacttcaatgtaaattttaagaaatataaaaaaacaaatccaaaagaatccttcgtggatatcatatacattcaaaaaatatataataattagccaattcactctactcatccaattctttacatgatctccttagcaatatcttggagtcaatcatcaaattatgaaaaatgaaacctcttacaaagttaagacgcttcaaacattgtcattgtcatcatttgtaagctagtttagtttttcttttcattttcccattgaatctaaaatgaaaagagaagagagagaaaaaaaatatctttctatgaaaatatcattaaattttagaaacgtatattaaatcataaacaatcaaaagtaaacagtcaaatcttaattattttataaataatgaaaattaagggtcagtaaagaatatatttataattggtgaaaaaagttccacatcaaaaattcaaaaaatattctaattaattccaatcatcttcataaccagtttagtgcataattttttcaaaaatgaaacaaatagtgtcttcaaatgttatacccgaaattcggctgacacttaagaagatgacacacgtcaaccttggagaatacgaatcaagaaatataaaggaaattatattaaaagatactaaatggaataactcattaaatgcggagttaatagagcatacatataactcactgactgtatagtcttaagcaagaccaagatgtataaactattaattcacctattgacgagaaaccttttcgttttagaggacgtaatcgtaaggatgacatcgataatgcatagcgaggaatcaacctcgctatgtgtaaaaaggtgttaacaagaagttttggctcttagaacacttagcgtaaaatatacattacactaactaagtataatagcttgaagaacatggataacgattagcgagacacccatctcgctataggaaggtatactcttggtaccttcactaatacactccagacatctttgaatgagatgactgctctgtcgagttagtctctctcagaacgaagttgacattcaaatgatgttggctactgaagttcaccttatcaccaagaactgtgattgtcagatggagcgttaggtcttcaattgcaggaacgacaggatttgcattatcaaacctcgaaaagatatgggacaagctccagctcgctgctagggttat

SEQ ID NO: 256412 - DNA, 1886 bp, Cannabis indica
aaaatattgtgtgatataaaatgtagatatttacttgtgtttaattttatattatatattattatattattctataatataatgcttgattgattaaataatatatatatatttaaattagaataattagatctaaaatatatagatctcgaactcatattaaattatcaagattactctatgaatcaataagatagaagacatatctgattccatgatgtcatatacgagatgagattgtaggtatatgatcttccacagactaatattctctttatggattctcactcaattgatggaaatggagaagaagagtggttaagattagccttggggaccaaactctaatgttctttatatagcaaactatatatagtcctataaaccctaattaggtttactattaggtattacacattacaaagctcatactaaataaggttcatttaattagatcacttatttagcctaatttagaatattaactcagataaattcttaattggtaagcccattattaaaaataatctaataatctcccacttgggctacaaattaattcaaataacaattacattaatcttatgtgtgcacaagcttgctaattattctcaaaacatctccattaaataatctggtccatctcctatatgagaccaaagcggcattcgttacatttttttgtaactggacccatcaatgatcactatatcaaatatattaaatgacatagatcaagtatggatgtgtaactaaaaattacatgtaatgtgatcttagtcatgttgttataatacccatatcttaagtaattaatatggttatgacacatgaaaaagttgaaaaataaaccaaatcttgttataaagtagtgaataaattcaataaactcgtctcaaaaaatataaattgctagaaatattcaaactcaccctttcaacgataagggtgagtcgtgaataataactaccgctttgtgaggccagtgagacaaacaatcaatgtaaatgattcatctcaagatatagagaatatactaaagaacaataacctattggaaaaggtaaataataaattctttaagaacttgcatacttgtgagtatgttgaaagactaagaaaagtatctagtatagttcgtctcgttgccacattatgatagtgcctcgcatttgcctcttcgacataaaatagggacgtgagaagtatttgttgagatttatatgccctaaagacaagtaattaatagataacatagtagagaatatatgaaatacaattataagataaataatatattaattataagagtagaattattaaatatcttaaatttctttattcatatagagaagatataatcttataatgatgacaaaagagttaagattatatgatataataaaataagtcgacagtgtattaaagtaatgagaatctttaatatggaattgctaagtacggtttatacactatacttttagagtgtgtaattttgattcagatcacatatgtggataaacatgtagtaaaagtattgtgcataatttgatcatgtatgattggaccgatgtaataaacatcttttcattaatgtatcgtttatcataaaagacttattcattgttagaaaaaatagagagattacaatggaagataaaaataagatgaataaagactaagacaattacaactctaaacaaaatattaacaaggacaatatattaaataaagagttacaatcccaaagcacaaaatacaaataaaagaaaagagttacaactcaaaaactcaaagatacaagtaaatataaactatataaaaagcatatgaaaaatataagtgtatatatatatgatatagaatatatatataatagagtatat

SEQ ID NO: 256413 - DNA, 968 bp, Cannabis indica
gttatttatgattttagactaaaatttttccaaaaaattaaaattccactcatataaaaattaatataatttgagatgtattttatgtaaaataaaaattataaaaataaagtatatttatagatttttagagtgtaaataaaactatgataactatccacataaaattaacataacaaatattttcatttttcggccgtgtcaagaaccttgaccttctctataaaatgcataaccttatctataaaatgcatattaaagtcattaaaaagtaaactatatatactactaaataacaaatttatatatgatgttcataaagttttgaaattgacatcattccaaaaaaatatacatggagtattttactttataataacatctcccagtcataaaatatatgcttcggtacatatatattagtatatatttttaggatgatcatgataaatctttgggtcttggtagtaatacattgtttggcttgaagttgcttggtgcggcattccatcactcaatgtaagacctacttaattacgacaagaatacaattaattaattagcttttcaattctatatttataaatatatacaagaaaaatagaatgaaacttatacatatgataaagtaattaccttgagtattttacaaagtcgggtttcaaaaattttgggtctaaattaataacgattgtaaaaactgcgagtaagatccattcaaatgtttgaaatttattaatccacttggaagtgatatataaggtgtcattgtttccatatgttgttcctagattcaaaattttaatgtaaatatatttttatataaacataaattcaaaatagaaatttaaatagttgtttacctttaagatcatttttcttgtaaatcatgggtaacacattaagttgaaattgtggatacatctttcccttttcgttagcaatatcatctacaatattttactact

SEQ ID NO: 256414 - DNA, 1233 bp, Cannabis indica
aaaaaataagatttttctgccatggcgcacacgcataaaaatcttctatcgtgtcattcagggtgccttgtaaatcgacatgcccattatgcagcctagtattggcaagatgcatattttttgttactaattctaatgccttgatgtgtcttccatctgaggcgcacacgatgttttggtaatggtgtctctcctctcgatcgcgactacccttgccaacaagttagagtaatcttgagccaatgtagcaagttgttgttgtatagttgttggattcgagttacgaccctgagaggatagatttttgatcctatcgtctagtccatctagttctcaagcgattcgatcttgagagtgttgctcaccatcatgaacatttttaccaaaattccccttcacttggctctgatagcaactgtcacgggccgactatttagacactcccaagtagacgagacgtgcgacacttgctggcacactgaactagcaagtcagcttaaacgggcctacatgcaaaacacctaaatggttaggcattatacatgtctcgcatatattgagtgcaaccacaaaatatgagcaagcacaacataagtcattctatgaatcaatctcacacaattcataagtcaacgcataggcaaatgcccaacagaggcaacaaacaggcaacacacagagaacatcaaagcatacacaaggaaggatgaataaatatcgtttcattattatataatcttgatagggcaaaagagtatatataactggactcctatcatgctggtgaaaaagttcttcataaatcaccgatcacctcgtagaaggcttaatgagttttcaagaaaatttcaataatatggttttagctctccatgtgtgaagaaaattacaaacgaaatacaaaagggccctataaacatagctccccaatccaatgacgtacttggtgatagacttgacttataatgatcccatcgctaataatatttatgagtatttttacaagttatatatcattattatcgttaaataaaaaccctaataaatcaaccccaaatctgccgccaccccacctttgttctcttttttctctgctatgtattttctctctcattcttcatacttaatgtctttagctttccttgttctttggatggcaatggcactagacttcaacttggtgttcgacaagcaatgatttcacctaggctttgcgaagcacgtacactagag

SEQ ID NO: 256415 - DNA, 2940 bp, Cannabis indica
ccaacttattgcttcagctggacggggagagaaagagtatggctgctaagcatcagaataatttagtttggtcagacaaagtcccttcagtcacaagtgttccctatttggctcacgcatcacttgtggattggactcgtgctcaagatacaacccgaactcctactgcggcctatcttactgttgcagatggggcaaaaaatgggaaaaaccagcaagtaacaccttgaaaatcaacgttgatgctggcatttttctggtgttgcaacatacagctttgctggagttgttagggatgctactggtgcaatgttggagtggttcagttgctgccgagctgggattttgtaactagaaatggtggaagctttaggcatgaaggaagcgttgagttgggtgaaaaaaaaaaagattggaaagaagttgtaatcaaaactgatagtcttacagttgtgcaagcattgcaaagttcgacccttttgttttcttactttgtgagtattatttatgattgtaagatgttattatatgaattgtttgatgtttttgtcaattttattaggcggtctgtaaatagtattgctcattacttagctagaacttcttatttagttgccgatcgtgaattgatgtttctcttgaattgagtcatctaatcgctatggattttctttaataaagatgaaaaaaaaaaaacttaaataataataattacaaatctgattcaaatctaatatacagctatgcatacataagaaatgtatttatattattcataacaaataataaaataagaaaaaaacgacatggttttgtctcataggatctgcttatgcacttagaaacatttcttactagtttgaacataagagaagaacttatttgcatcacactcactcatggagggcatacagcacaggacagtgaaagctaatggaataaatatccacgtagcggagaaaggtcaaggcccactcatcctcttcttgcacggcttccccgagctatggtacacctggcgacaccagatccttgctctagcttccctcggctaccgagccatcgcccctgacctccgtggctacggcgattcagacgcccccaaatctcccgccaactacacctgccttcatatcgtcggcgatctcatcggccttatcgacgccatagcttccgatgaggacaaggttttcgtggtaggccacgactggggcgccgtaatcgcccggtacctttgcctctttcgccctgatcgagtcaaagctttggtcaatatgagcgcgccctttaatcccagaaaccctaggagaaaacccctcagtgccatgagagctgtctgtggccacgattattacatatgcagatttcaggtcagtattattattaattaattaattaattaatgtttattacattcctaattttgattaattaaaaaaaaaataggagagtggaatcatagaagaagagtttgcccaaattggtactgagaaagtgttgaaggaaattctaacgtatcgaactccaggcccattattttggcccaaaggaaaagccttagaatcaccaccgattgctttgccttcttggttatcagaagaagattttaactattatgtaaccaaatatgacaagactggtttcactggagggctaaactattatcgaaacattgatcggtatgagtttaatcttctttaattgggtattggttaaaatttatattgtgttaagttattgtttttggtaccagaaattgggaactggtggcgccatggacagggacacagataaaagttccagtgaagtttatagtaggtgagttggacctggtttacaattcctttaacgcaaaggattacatacacaatggtgggttcaagaaagatgtgccttttctgcaagagctgataataatggaaggtgttggtcatttcatcaatgaggaaagaccaaatgagattaccacacatatttatgacttcttcaagaagttttgattacacatttttatttgtttttgtattctcattgagtaataaacattgattttatgattattatgattgtaaataaggttaaatggaagtgactgtattcttctaaatgaaaattctgaatgttgttgggtgcaaaagcttatatacaggcaatttaagaaaattatctcaaatacatattttttttttttttttaaatttacagtttggatttctcaaataggatcttcagtagtttctgtatgggttgctatacgaattttgattgcaatttagaatgttccgttagttgcaatataagtttctaagtgaaattccgtaaaaatagtaaaaaaaaaaaaaactgtttttaagtgacaaaatgaaaaagccccccgcaatttatttgagtgtcacaataaagttgtcttgaaacattttatgatgtaaaagacatgggttaactctattgcttcttccttttctcgacgttgaagttaacatcgaggaggtctgtaatgcctgcagtaatcttttggcctgcttttaccggaccaacaccttcaggtgtgcctgtattcccaagtattaatgataattagccgcattcaagtgaataaatcttgccatgataacaacttgagaaagttaaattaggaaaataatctcattttttacatcttgtaaaacattcttatggttgctcaattgtataatatgagctatcattattcattagagtcattttgacaagtacaaaagggagaaaaaataatacaaaaatgggggagcatttcgaagagagcaacatacctgtaagtataacatccccttcaaaaagtgtcatgaaagagcttatgtggcttatgagatatgggatcttaaatatcatatccttggtcgagcctttctgccttatttcttcgtctacctatggtcaatcagttttgagttcatcaat

SEQ ID NO: 256416 - DNA, 944 bp, Cannabis indica
tttttaaaaaaataaaattaatacagtataatataatattattgtacatcataaggtaatctaacacaatctactagctaatacatgctttaatacaatatacaatacagtctaacacaatattatgtaacataatataatagaagagggtgaacacaccccatttgtacactacataagatccatggcatgcaattaatattatcttacatacttacgatgtgatgaagaagtacgtaacatgtgaaggcatgtcaattaaatgtatgtaactagcctaataaatgtaatgtgatgatttttctttctctttatttattgggtacacttcagtattatatctatcaagatattcttaataatatatatattaaataatttaatattaaaaaataactaattcaaattaaccgatccgatttgcacaatggatattggattagattgaattagatcaagttattatgtgaatttaattaaatccaaaatataaaatccgcacttatgagatgaacttaagtaaaatgtacaaattgaattggatgatcactcatactaactagatatacataaatatgaaacttaatttattacaataataaacaacttagattggaacttaatttcatatgatctatgttattgattagtattaacatttgtgacacaaattattaaattaaataggtgaagttaatgagctcaacagacatattggtatccccacatggagctcaactcaccaacctgttgtttttagaccgaaacagtagtgttatggagttctttcccaaaggctggcttaagctagcaggtgtaggccaattcgtgttccaatggatggctagctggtctggcatgcgccacgagggaatgtggcgagaccccaatggagaggcctgtccctacccagaggacgaccgtcgttgcatgtccatcttcaa

SEQ ID NO: 256417 - DNA, 1404 bp, Cannabis indica
tgttaaaaatcattatcaaatctagaatatgttagaatgttttacaatgttctaagaaatttgtaagagaaatcaagaacactctagaaagttttagagaaaatttagaatcactagaactaagattagataattctagagttgtttagaaatagtaagaagtaattaattagctagtaaattagaaaaatctagaaatctttagatacatcctttgtagcctataaatataagtgaggtgtgtgcttgagatgtaagtttgagcaagagagttcaagtgtgagaaaaagagtctaaagtgtgtgagttcttaataagtgtctaaagacaaagtatcccaaaagtgtgagttatacacaagtgtgtagtaaaggtgtctagtgataaaataaaagagtgagtgcttagtgtgtattgtggtcaagttaaagtgtacaagtcttggtgtaattgcttttacaataataaagtaattacattttcacgtgttgtggtgtcctacaaatattagacctaaaatttcattcataattaataaattaattttaaaaaattattaaaactgcacgcactaatcaatttcttaattttaaagaaaagaataaaaaagctattttcaatgatcgttgttactaattttttttgtcgtatattcaagtttcacacaatatgacaaaatgataaaccaaaatctaaggtgtaggtcgatatagatatagatttatacccatatataaatattattattatagatatagatttatacccatatgtatagccgacctattatggaaaggagtgactaagaggttacttcctttgatggtccattcaattttcaactaagttgatttttaatagctttcagcaaaaattcttggataatttcataaaaagtagaaagcaatacataaaagttctcatatcttgactattctttttttcccctcttttataattagttttctgatacattgaaattattccaagaggttggcctaaaatttgcaggagcaattaatatttctttgtttcattttggcagaagaattaatgttaccatttaagtattaacaaaagcacttgtttataaaaatggcatatgtttttggcttcaagctccaacaaatgtgcatgttcttttactttatttggctttaagttggtgaaagtttttgaagggttttcataagcaaaaagtttcatattcttattttctcgttttccttgtgttttcttaagttgtactttctttactttcaaataataataataaataactaaaaaaaataattgtactctattttgtagtatgtttggtcattaaaaacctccaaagtctatacagctttaaaattaatacaaaattctaaggtctattttttgaatcttgattgtcttaat

SEQ ID NO: 256418 - DNA, 1417 bp, Cannabis indica
tttttcttcctcgccatggagggagaaagcagagagaacgaaacaagtggataagaatgagatttattgttaatccaaataaatatattgttgaccttatttttggtcaacgacgcagagttaataaagtgacaatttaagtttttgaataattataataataataataatattgaagaacaataaatgacaatgacactgagatttatagagctttggtcccagatttggtaatgactaatgatctactctccttttattagtatttatttgagaaatcaagatcacaagaacaaggtcaagtgagctttttgacatctctcatgtaaggattacaagtaattttagtagagcaatgactctcttaggaaattaaaattcagaccctgaatagtgaaaataacccactatttatagggatgaaggtgtgagataattacatttaattacagaataaataattaaagattgattgagttaattcaacagtttcctcaactctccttaactctctcaatcccactagttctaggcatccaaattgacctattcttcaaggattgggcattaagaggaatcaagagctcatcttcgccatatcactagtcggtccatccgttcaagatgtcaccttatgagattacaatgacgtatcttcctgattcaatctggtcgaacgtctttggccgaatgagactattcgatcgattaacaactatgataggatgatttggattttctctaactgattcaacaattctaacatagtacgttgtacttctttatcttccatttaattcgttcaactcttaggtcgttatactccgactaactatataaatgaatgccacgtgtcactctccctaatttcacatcacttggagaattttcgggataacttttacctctaagtctgtgtaggaacgtcgggatgtacggggacttctcagctttagtcgttgcacaactaatcaagatgtggaggctcccatgtggtccgtcgtacagagtatcatacctacctaaagcaaatcctcctcatgtcctttcaaatctcatgccataatgaattttactctgaaaaccgtgcattgggagaaatgatgaggcttttggacttttttgggaaaaataatcatttctaatttatttcctcaaatactcttctcatactactataaatactccaaaatgtcttcttttcaaaattggcacttttaaatttctagagtaaaagagagaaacgttctacaagttcttgaagatttttctcggatcattcgttgcatgtaccaaatttttgaagttttcttcttcctaatgccaacccaaaaaatgagcaagtctgttttctctcttttacattgaaaaaccgtgtttttgcaaatgtcagttgtatataagaaaatataaaaac

SEQ ID NO: 256419 - DNA, 1165 bp, Cannabis indica
tctgttacattacatggtatcagtcacccctgacctacgtcttcaatggagtctacgtcaactgatcctgctcaagctcctgcagctcccatggcgtctccggtcctcactcaggctaccggcgccccacaaatccagcagaactcctcctggaatcctttttcgcactctctttcttcaaccttaacaatcaaacttgatcgttctaactttctctcttggaaatctcaggttcttcccacggttatagggcacgatctcgatgagatattgctcacagggattcctcctcctgcaaccttagtctctggcggtcccaatcctgcctttcagcaatggaaacgccaagaccaattactcctttcttggattcgatcctccatgacagagggagttcttgcttccgttgccaactttacttcttctcactctgtttggaagtcattggaacaaaggttctcaagccaatccaaagccaagctccttcaattaaaaggacagttctctaatctcagaaaaggaggcctctccattgctgattatgttgataagatgcaagctattaccgattctttggccattgctggatccccaatttcagaccaagactttgttcttcagctgctaaacggacttggtcctgaatttgactccgtagtttcaggcatcacatcgcgaagcgattctcttactcctgaggaggtgcaggctctccttctctcgcacgaaagccgcctggaacaccacaactccgtcactgacctcaatatgaagttacaagcgcatatggctctttctggttcacgatccaactcttacaggcccccacaaggttcaaaggttggctaccgtggaggttatcgtggagtcaatcaaaacaacaggcctcaatgccaattgtgtcttcggtttggccacactgcccctgtgtgccattaccgatttgacaagacttgggtacctcccaaaccaggctcaaatcctccaccaacactcccatccaacaatactcgtgcccttctcactgaacatgagtttgaatatgacccacaggcttatgcttcctcgttcttgcctgattttggcgatgactctggctggtttgtggactcgggagccaccaatcatatcagttcaggtgttgaaaatcttgacacagcaatca

SEQ ID NO: 256420 - DNA, 1774 bp, Cannabis indica
gttgttcacaatttgccatcctacgaatctatgctttggatggaccattctattccaaatgttccttgcatagtcaaccttgtgagcctgaatataagagagataaaacagtttagcactcaacttacctctttttacagcagctatgacatttgattcattaatagttgaatgaagacgtaggatttttttgaagtaccagctcgcatcttgcttgaattcaactgtccagaagctcaaccctctcagatatattgcatcaatccacctaacccaaaggttgtcttgtttgctagatatagcccagatatacttttccataagcgctatgttccaaaccttcccttttttgaagccaagatctcctgagttcttggggagacaaaatttctcccaagagggaatgtgaaatttgcttttgtttcccttggagccccaaaggaagtctctgacacatttgtcaatagccgtcgtaattttctgaggaagcaagaataaacccatccaatagttcctgattcccagcagaattgaatgaatcaattgagcccttccagcaaaagggaggttcctgcttgcccaagtgtgcaaattcttgtggagtttatcaaggatgataccacaatcagcagatcgccatttggttggtcttagattcacaccaaggtacttcaaagggaaagaaccctcttccatttgtaagatattagcaagtctctgtttactgtttataggaagttgggatacgcccaaaatataccgttgatttggctttgttaccaatcaggcctgttgcttcactaaaccgttgaaaggcatctttcaccatcttaactgatttgtcattgcccttgcagaagataataagatcgtctgcagagcgaagattgacaaggcctaaggatttgcaaagagggtgaaacccaaaccctttcttcttagaactctaaataagaagtctagataaatattccattatgagcacaaatagaagtggagacatcgggtccccttgatgaaggcctttttctcccttaaaagacccttggattcttccattaagcagaagggcataagaggctccttgaagacaacttaaaacccaggtgataaacttggaagggaagtgtagagcttttaagatatcagccacaaagcaccagtcaaccgtatcataggccttgcttagatcaatcttcatgatacatctagaagaaattttcttcctagtgtaacctttgagaagatcatgcaaaatcagaacattgtgagataaaagtctcttcttaacaaagccaccttggttttcatgtattagctcagggagaacttccgagagtctggtacaaatcatctttgaaatgcatttgtaagttgttgtgcaacaggctataggtctgtagtcaaaagctccttgaggattatcaattttggggataagagatatggatgttgcactcacttcctgaggaagcttaccagattggaaaaaccccaacaccgcacaagagaagtcatctccaatatcattccacagctctttgaaaaaacccgcaccaaacccatcagggcccagaattttggacgaatgaatgccaaataaagcttctttgacatccttcttactgaacggacgaattagattcgcttgatgttcgatagtaagtttattcccaaactcgaggcagtcctcatccaatcttcttgaagttgagctttgtctccccatgaaattgcggaagtggtttaaaaaatgctcaaccactttgtcata

SEQ ID NO: 256421 - DNA, 1838 bp, Cannabis indica
ggtgatcagtccgtcacctcatatttcagcctaatacaacatgtacttgtggtgccatggaagcctttcttgatttttataatcaaaatcaggtacttcagtttctcacagggcttaatgaatcctatgcttctgtgcgtgccgaaatattactcaattaacccataccacatctctcccgtgtgtttgcaatggttgttcaagaagaacgtgaaggcactctcggttcatctgaaaatccaccccttgcttcctctgttcgtccaacacccaccaatccaccaagaaacaagaaacctaggccctttgttctcactgtggcaaaccaaatcatttattggataaatgcgtctttatccatggttttccaccaggttatggtgacaaaaaaaagagtgacaaaggcaaggttcaagcacatcatgattttagcagcagccccaatgatctccctcaagcaccctcggctgcagatctttcttctcaatgccagcagttaatttcactactgagccaacaattgaaccaatctgctccccgagttgatcctgctgcaaacatggttgcctccaacatggctggtaacactttctctcacaattcttttcaatggattattgatagtggtgccactgaccacatgtgtttcaattttttatgctttacttcatttcagaacacatcattccctaaacatgttctgctgcctaatggacaacagattcctctgtccaaaattggtactgtctgcattaacacaaatcttactattcataatgtgatattccttatcaaccttttctccctcatagaattggttgatcacacaccatacaacattttctttaaccccactacttgtgttatacaggatccttctcggagtgtggtgattgggacgactaaaagatatgggaagctgtttctcatacatcaagatactcctatagcttctactagtactcctacctttgcttttaataaaacaaatgtacaccaatggcacaatcgccttggtcacccatctatgtacatttccaattttttcattaaaaagattggttcttctattgcaaaaaattctacacattgtcacatatgtcatttagcaaacaaatttgatttaatccacatggatatatgctaacattcgtttctaataataattttgcctcaatcatatttgatttaatccacatggatatatggagacctttttaaataacaagtatagaaggctttaaatatttttaaccattgttgatgataaatctcgctttactgggacatatatgctaaaacttaaatctgatgtacaaaccatcataccagatttttttcacatggtatatacccaatttgctcacagcattaaaactgtaagatcagataacgcaaaggaattaaatctttcttccttttatgcttccaaaggtgttatacactatcattcatgtgttgagagacctcaacaaaattcggttgtcgaaaggaaacaccaacatatcttaaatgtggctcgggccctgggttttcaatcccacatcccactggtttattggcaatatctaattgccactgccacttacttgataaatcgcactccttctaaactcttacaaggcaacacatcctttgagctattacacaataaaccaccaaaatatgaccatcttcgctcatttggttatcttgcttatggttcaaccttagtctcaaaaagacacaagttttcccaaagaagtcgtgcatctgtattcattggctatccattaggaatgaaggcatatgtctgttgggtaaatatttttaccaggtatcttagatctactcacagt

SEQ ID NO: 256422 - DNA, 1460 bp, Cannabis indica
aataagattatttctatgtgtatgtacacttaataagtggaacatctaagacatatgcattgggaaaaagtctttttccatatgcattttctgttagggcatcttaatataagatgtttcttaatttttttttttgaaatgaaatgtttcttaatttacttggaggagagttgactttccaccattgagaaaccttgctgctaagataaacgagacatttggtcttaacttcaaagagatggcacattgtttagatcttaataaataaagtattttattaattgagtttccttttgcccacttacctatttgtttaattttttcttcttcttcttcccaaaggagtacgacatggactatgactagtttggtatactgataaaagaaaatctcaggtagcatgcaaatttaaagttttgtatgtttcttcatagcatataatgaaagatgttattatgatttcaattgtcgaaaaacccttttgatattggtgtttaccttgttctttcttctattaatcacttgcaaatatccaactcttaaatgatcacattagttgacatattcgttcggttttatgacaacagacaaacggaagagcttaaagtttttaagctcacaccaccatcaattcagaggggtatatgcttctcactaaatgttgagatttttattaatgaaatgaatatactttattctcactgtaatcaaaattgttctttctaggaacgcttcgtttcaactatactctatcttgtttctctacaagaccttacatgttgcctctttagggttgcctctttagggtggtcaatgacgtaaggataagcatgtagtggtggaggaatgtgacggcgttaaggcacggtaagaaaatgttaatatcaaaactatttgttgtcttgattttgcacaatgcgaaaaaggtttgaaatgcattactaattatttttttttaaaatgacattatttattttattgaaactttaataagatagtacatcatacaataaaaatcaatgtatgtatacaatcatctacataaagttgtcaatatttatagggttggacaagatttaatccgatttaattgaaccgaactaatctaattacaaaaaatttgatatccaattacaattggtttggcttggatgtcaaatattggatgtcttatatgattggatcggctattagatgttaatctcaaaattcattaggttttcaatattaataaggttttgtattatttttttctttcatattttcaagtttatatgaaaaatttggtgtaattgaatatccaatttcaaaacctatccaaattaaattagtaattagataagattatattgaattttgaggtctaattggactagatcggatgatgaatttctaaatccaattactaattggattggatcggatgaggagaaaaacattgaattagatcagatatctag

SEQ ID NO: 256423 - DNA, 987 bp, Cannabis indica
attcttctgttgatcaataaacatattcacacatgaaaatgaagaactaaattaaaatggagaagagcaaagagatgcactactcaattctgtatatgaaatgcatatagtcaaagagttttacatcttaacttcagtagaagatgttagacatatataagattcatgtgctactcttttcattgtcaattagttttagaatggaacctcacgtatcttatcaaattttaatatggtatcaaagcaaaaacaaaccaaaaaaacttctaatcactataccaacccaaaaaaatcgagtaacttgtgattcggagatagtgagccaaaaagagccccaaaaaatccaaaaataaagatccaaaaaagtaaagcaaaaaaaaagtcacttgtgatcggagatagtgagccaaaaaaagaatcccttgtgatcgggttgtctaagatggtgagcaaataaatagctaccatcttaaaggaatattagaaaatcatatattgttaatgtgtgaaagattataacatatataaaatctatgggctactcctaccattacattttaagataaaacctcatccattttattaaattctaaccaaagaacatagatacataaaaataagtaaattttatttttgttttgatgcaagtgagcccatcaaagacaaagaacacaaataatcaagatgaaaaacaaagttatacacaagcaatccaaaacactcaagacaattctaaactaaactatcataaaactcagatcatacccaaatgcaaaatacaatactacaacaacgaaatgaaccacaatgacccaagaaactccactgaccataaaccccaaagcttcttatatactattttttctctttgttatcaaaaaaaatagagcttacaattcaagaaaattggtcaaattccattctaggatcatgtacttccttccatattaaaaataaagagtcatatcataaaaaagttaccttttt

SEQ ID NO: 256424 - DNA, 756 bp, Cannabis indica
gtctggttatgagaattttatgggagtttaatgaatagtttagagttagagttagagcatcatttgatggaagttgatacgcggttttgtgttgtacttttggtatttttttttaaccccacaaaccgcgtgaactgtaataactaatgacaacatcttttgtcagagtagtctttaagtattataaagcactatatatataaccaaaaaaaaaaagagtatatcaattatgctttttgtgccttttgttgtggtgtgttggttactactacttgttacttgttacaaatcatcaactcacttgtcagttttcacttctttgttttattggccactactcatctttcattctctctatatcttaattatgctttaaatattaataaagatattccatcaaaaaaatatattaataaagataataaggaattggaacacttttttttttcctctttccatttcaaaaataataaattaataatgaggatagttggtcttggtagatcacaaattttgttgtggtagaatataaaatagaataataatacttggaaaaaaaatcatgcaaatagtatttttaacccaaaatcattatataatacggctggcctccgatccatggctgcctcatcccggccaccgacgaccacccaccaccccgacccactgcacgaccactgtccgaaccacgcacccacccaccaccccgaccacgcacgaccctctctctcttcctctctctcaactgaaaaaaaa

SEQ ID NO: 256425 - DNA, 1569 bp, Cannabis indica
agtactccctaaagttgtggatacacttcgtggaactagtggggtggggaatactcctagtgtatcactccaacctgtagaagcctaccttctccttgtggcccctcattggttgggacatgatcttgtaaaagtgcaagatctcctccggcatcggcacatattttccatgattcacacaaaagaggtgccaccttgacagcaagcagtacgcctgaggaataagcagtaaaggtgatatttcggctacagcatagaactctacaaaatagcacctcaagggtaggtgttcccccatttcaatgtgagcccaactccaaacaccgaagcatccttctgcgcacttgttgggcctctccccgagtacagagagcctattccagaacaatgttagagcacttttgattcctcgtagggtctcatacttcctcaagttattggagttcttaaacatattgatgtgctggtccgattcccatggactgtcgttcaggacaaactttggagcgtcttctcactccattgcttaagcataagttttgtaaaaatagaagaaaatccaagaagttagccactctgacaacctagcatagaaagggagctgggggtcctcccccaaaaactgcttagagaggtcccaactagatatccagttttgaaaacttccaagaggttctcgttccaaataggaagtcaaaaatgacataggaagagagatgatagaaatcaacatcataccccaaacgagacgaattttgggtgaaaagaagaatttaccaacacttttgtcaaaaatcgatcaactctagaaatttttaagcaaaatattcaaaagataatgtggtttgtgatgattaaatctacctaaaatgatgatcgcacaaaaaaaaaccctaatttcatcccagaacagagcatccaagcataatttaaagtgatgaattcaaaaaaatacaacccatggacaaagagacaacatacctaatattgataatggagatgtttggctgatcgttgtgggatctggctgaggaagttgattgcaccaatcacgaaggtaagatgcaagggcgatcaacgaatcgattttggcattgaaatttaggttgccagtttcttttactacaaccgtcctaattactggagagggaagacatgggaactctcgtgccctaatccttagcagcaaatagaagcaaaaatccacagtgttttctaggttaaagaagaaggctctgattcaaattcggtttgtagttctagggatcgcaagaaaatttgtaaaccattaagggttgaatattttgaaaaaaagaaggaaaagtggttatcggaagttaccaagtatatttatacccaaaaaggtgatccacgtgaagaggagatatacgaccatgatcttctccccaaaaacacaatgtccatccaacgattacggtgtccaataatctatgtgtatcctagcatttaatgcactccagaatcaaggtcgcgacttgtcacacacaagcgcgactgacatgtggacacatcatcatcatagacaaaagccaacttctgcggtcgaat

SEQ ID NO: 256426 - DNA, 597 bp, Cannabis indica
actggtatcggccgtctccttggaaaccaaagagtagcatgtaaatgttacaacatatcattgacattcaccaagaaaaactcctcagctgtgctaacagccaaggggatgaggaagacctcctctactgtgctagcagccgaggggaagtaaaagacatctttcattatcgagccaaccaaggggacgaagaaggcctcttccattgtgaatacagtagaagggatgacgaagacctctatggttaagaccaaggataaaatggagaccgcacctataatcactctaaggtgcacacgagacggggaatacatcactcccatcttaggtatattaatttgggagttggtcacatactcaattgaccaaagaacagccaacaactgctataacacattattgatagtcgtcaagaagacctcctctattgtaaagttgaggagaggatgaagacctcctccactatgaagctgaggggatgattgttggaagttattttaccaggaacttagatatactcacaagtatgttgatttaacaacctaaatatgaacttctaaaaacgatatgaaattaaacacataagagtatcagaaa

SEQ ID NO: 256427 - DNA, 1581 bp, Cannabis indica
taaccaagctaagcaagttttctattttcaagatccacttagagatcacgattggaatgttgttgaagatgttaaccatcgaaaaatttaggacattaatgacaatgaagacgagacagatgttaatgttgtacatgattcaaactcattaaattttatgttgacggttgatctcaaagagttgattttacaatcggatgaactagctgtaattgttgaacctaacaaccaagcagtggatgttgaggaaaaaaaaacaatgaaactggatgaagattacgttgataaagaaattgatgacttactagttgaacttgttgaggatgaaaacaaaaatttggtgaatggtggaaatgatagtgattcctctttgtagctttaattttacttttgtttgtagtaagactctaatgattgaataacactttgtttctaatttgtatttatgcttgtgtcatcttttatttgtctgattttcatttcctggatttttatttatgtaaaattattttcacatttatatattgttcttctacaaattaaagtataatattagcttatatagagatgtaccacagtggagatggtggtggtatggacccctgatccttctagagtgccgttgtcctggcaatcaggtttcatatttttcatctcaatattattcttactctaaatacataattattttctaatgtactaatagaataattttttccttgaaaaataaagcccaaccaacaattagaaaagggtcgtgatcctgcttcaaacaatgaacttgaaaaaggaagaagggaagctgataaaccattagacgttcaggtggaactcagtacggacaaagtatttgagactgaagccaacacttatgttcaatttatgggccagcaagtaactattttgtgtccaggttatcattacaattttttcgatgtaccccaataatataatgatcaagtgattaatcgaataagagtgagtgattttcaattatctatggtttcaattattttataaagtcatttaagaattaaataaatccttatttactttatcatgcagttttattttgatatagacaagaattcacatcgagacctactaatgggaactctttatacgaaaatggcagagagatataatgagagaaagaccaccagacataagtagtttaagcaatattactcaaaaccagaagattgagagaaagttcttgacctgtgccctgaccacttgaataagaagagttagagcctatttacgaactgtacattagcgtattttttaaagcgcttaaaaaaataaaacaaatatacaactgatgaaatatccaacagcactagtcacaagattattggcttctataagttacacatttgtaagtaataatatttattatttattttaaaaatataatgtatctttaaacacattataaactcttttatttatttattatttttatataggaaggtccaccaaaagagcatgtggtcgatgcatggagggtgactcatacgaaaaaactatctggtggttttgtacacgaagctgttgcagaagattttgtaagtaaat

SEQ ID NO: 256428 - DNA, 2399 bp, Cannabis indica
actatatttttgtaacgcaaaaatatcgtgtaaataacttttttttaaaacaatgtgtaaatagcagtctataaaataatagttcataaaaatataaaaatttcaaaattctgtaaaaacataaaattttagtatttttggatatttaaagaataatctctatcttttatacaatagtatattaaatcttctttcaaaattcaaagttacaattttaattctttataatatgtcaatgtacattgtaattatagttaatatttgactaatttagaaattttgaaaaaatttataatgtcaaaaataatgtgcaatcaattttcatgtatacctattttttttacaaaatataaaacagattgctctaatcttgatttccataacttatattattaaaaaaaattaaaagctcatgggatgggatgcttaaagtaactctaatatgaacttccattaaaaattaaaattataaccgttcagatattaaaaacatgaaatacccaatataaaaattacattataataaacaaatccaagtattgtagacatattattagtgctctttagcaattttccatttaaaaaaatatatctaaaatgacttgttttcattattttttttatttgaggacggtcgacaaatccccacttgtttagccaaatgttccattttgttggaaccttaatactttttctagataattattttaaagctataagcacacgtagtagtggtgctcataataatcatattagctaagacaagttaaggcatgacatgaataataattaaacttcatatgtatagttataaaattagaaaacaaatcaaaagaacatggaaatggaatataatccaaagggaatattgtggacggtatgatcaaaacaacattgagaatcaaccatttgtcgtttgaaataatgaatcttttgttgacttctaaaattggaattgaattatctattctgaccaatcaaagaacagaagtcctcttaaatctcttttttcttttttgatgaagaaagagagctatagttttaatttctttttaatttattacacgttagagtagatggagcacataatatgttaataaactccaatttatttttatacaaatattgcttatccaatagactatagagtccagcaaatacacccatagatatcaaagcagagttaaacattcctacaaagctaatttttttcattttatatagctggaatcaataaaaaacgaagtgaaaattcctttcaaagtttttgtttttcttttgctttttagtttggcacttaaagaaaaactcaaattacttgggtttttataaaacgaagtgaaagaaagaagaggaacaagggccttgctcagatggaagcttaagaaaacactttaaacatctgtttataagaaaaaaaaatctctctttaccaaacatgcatgtcccttattatatgctttccactttggtcgtgtatgtaccaattgaagttaaagagtccacttaccctaaagacctaggaaccaccaaccgcataactcgcacaactagaccctttctcttcctctagccaaaaacgaagtaggagaccttgtcctcaatttcgaagaccttgaaagcatcaaaacgacaaccaggaagctctagaaagagcaaccaacacctagctaggttgacacatgacttggtgcattggatttttctatccgattctgatttcgtctcgagcattcatctagttttcatagtatgcgagagctttgaactcagataagttaaattcacaacttcataatttcacttttttgcaaagtgacttagtcgcaaatctagtaattttgagtatcttgattctgcgaaacagcaacatttccaaaaactggtggacgacttcacgagaacatgaaaattggctaagtggtgtcaacacatcacttaggcataaaaaattacaagtgtcggacattttggcactcacccaacatccaggtagatgtcagaatgtcaaccctggcgccgggtgccaacctaggcgttgggttgtcaacctggtcgtagggtgatgtaccaccttcagtacaacaatcataactcactcaataatgacccgatagatgcaattcgacttattgttttgaagctatttcaatgatctattaagtaatgtctcacactccaatcgcaattctgaagacatcaagtctaaatttcgtactcaagagagttacgaatttcaactacaacttacccaaaagaggtcccgcaaatgcgattcaagctccaaaaattgacgatcgacctccagaatcaatttcaccgtttgatcatcatcaacggtccaaaatagcttaaatgtattttttcatatttttttgaatattttattattattttaa

SEQ ID NO: 256429 - DNA, 856 bp, Cannabis indica
taaacatgtctccatcaattaaaacaatcaaattgcactttttttttgagttggaacaacccaacaagattacaacagaaacaggtaggggtcattgccacttcaatactaagtgttatctaacccaatgaccatttatgctaaagtatgcgctgctgtattcccttgcctaggcaggtgatgaagggaatgggagtgaagataacaccttacgaagagagctcacaatcgctccatatgcagataaaatatcctccttagcttgaatatccattatgagattcatgcactccgatttcacttgatgaatttcaatgttattctctcggcaccaacataaagcttgtaataaagcccatccttcagctatttttgggggcatcggcccttgatgactcatagccatcgaagccacaacttgccccgaggagtttcaaatcaaagcccccatgctttttcttccttttttacttgagacttcaccattgacattgatcttcaatttcccataatctagggggaaccattccttctatctggtttggctgtgtgaggggagatgagtcttctgatgttgttgagattattggtagaaggtcaaaaattcctttgcttcttgatagaatctcgtgggatgctcctgttgattcttgaacataaaagagtttctactgttccaacacttccaaagaatacacatgaaaagatcaaaagtatcagtggaaaaatgggacttaatatagaacattttatcaagaatatgcattcctttcaaatcattcagagcgtgttggaaaagcgtacctgacaacaccctcttgatactcttacgacagactcaagatgcatgttacaa

SEQ ID NO: 256430 - DNA, 1048 bp, Cannabis indica
gtttggtaataatccaagtgtggctttttttataaggcttgggtttcattgtccatagcctcgagccaatgctgaaataaagaagcttcatcatagtttttgggctcagtttgagtgtaggcagcaagaacagcagcacgaaaaatagagtgaagttttagataagagagatatggctcaattggatgagcagtggtagatgtatggcacacataatcgaataaatgtgcttgttttttgcttgttcttccactagaagtagtgcgattggtggaagagttgatgggatgggttgatgcagtagtgttattgttgttgctgtgatttatagcagcaggatgttgttgaatgacaacagtaggctgctggggtgcatgagcatcatgttgattatctacattgtttttgggcgcacttacaacaggaaattgctgatgtgtagtagtgaggtgctgatgttcagcatgaagttgctgatttacagcagggatttgttgatttagatcatgggattggtgatctgcatcattatttttcgaagtgtcaacaggaatttgctgagtagtagtagggtgctgattttcagcatgaaatggtggagttgcagcaggtattttttgatgtgcaacgtgagattgtggacctgcatttttattatttgagttcacagcctgaattggctgatggacagcaggagttggctggtttgtggcagggatttcagtcccagtttgttgagttattggtttggaggaaggtaattgcttagttaaggcagctgtcaatctcagaatgaatattgagagttgagaatgaaaatatgtgttcataaaacacaacatctctagagatgtagatttgtttggattcgatatcaaggagtaaatatgctttcattcccgaaggatatccaatgaatatagatgccctactacgaggggagaacttgtgtcgtttggatgtgagagtagagccataggcaaggcatccaaaggaccttagattgtcatatagaggtggtttgatgtgtagtaattcaaaggaagtg

SEQ ID NO: 256431 - DNA, 870 bp, Cannabis indica
tattgtgtaaaacacttaaccattattgcaagtgcagcaggtttcgtacaatcattgtgtgtgattcatgattttagcggaatctctaccgtcaacgccatccgtatggtctttaatgggtttttttaattataaaaagagagagcatagagatgagtgagtaagagagagagttatttttctaagatgcaattactaatatgacggggtaaaaagggaaaagaaagttaaaataagcattattaggtataaattagttaaaaatttaaaaactcatgataaatatatttttaagtatatataatgaaatttctcatacgaaatatctcatgacattttgagggatctaaaacctcaagagcctaatagcattttgattgaattgttagtttcgtttttggggtttgatgataagaattgttaggggtaattagatttactaacaactatgttgattatattctataatctaacaccctaaacataaactttctaaaacattgaattaaacacttataaagttatagaaaatcttacattggtggaagcagaataatatggctccttccgctcaaatctccaactcttgttcctttcagtcgcaaagtaataacaagaactgagcctgaatctccttcaggtgttggaattcttcacaatcttccatactatgattgggtactagcttgatatgagtgggcaaggtactcttatcactataggggtttgaaattaatgaagaaagagagggagatgtatttcaaaatagatagagaaggctcttttctttatcttacaaattagattgaggagcttatgttattttgtcatgttaagagcttatcactatctatttataggatttcttct

SEQ ID NO: 256432 - DNA, 1429 bp, Cannabis indica
gtgccctctgaacttttttgcccgttaaaatttcccatgaactattgagattgttaaatttaaggacttttgtctaatttcattcaattttactgtttcagtaattgtttatgtactaaaccacgctccccagactttgatatctaccaaatcatgcctcttaaactttgatatgtactaaatcatgccccttgaactttcatccatgttagaattttttactaaaattagacaaaagtctttaaatttaacaatttcaatagtttggggggaatttttaacagccaaaaaagttcagggggtacgatttaatacatgtcaaagttcatggagaaaaattactaattagccttttagattaatatatattttttttaatgatggatgcggtaagttgctttagaattgttttagaaaaattacatattcttttagaaaaatgaacattgaaaaaaacaactaaattattagacaaaattcaattggtaatgaaggagcacaaattacattgaacaaaggccgaaaaggccatcacaaaacaaacacataataatattttacaagttccaaactctgtagaaacaaataaacaaaacaagccattgaagtcgaatgttaatttgcacattacaatatttgaacaattttaagttggattaatgctcaatttgtgagtccttaatctcttcatggggccagcatatcttaagatttcagggaataatgaagctccaaacacaaacacaaaaccaaaggcacctccaacaattatcccatttgtaaagctttcatctctatgtgattgatgggttgcctcccttggaatattggactttgtacaaataatatttgtgtaatcaccacatagatcaatatttccaacaaaacttaaacttggaaagcttgaaaactgaccccttgaagggatctttccatgcaattggttgtaagcaacattaaactttgataaaaagcttagactttccaatgatgagggaatcgtcccagaaagtttgttgtgtgaaaaatccaatgcctctaagtttctcaaccctgccaaggtacttggaattggtcctgataggttgttaaattttagatctaaataccgaagcattttaagattaccaaactcgggcaagattgatccactaagcttgttgtaactcaagtctagagttggtggaagactcatcagttgattgtattgcaacccacttaactcagttattcttattgggattttgccactgaatgagttgtttgataagtctaagtaaaagaggaacttgaaattaccaaaccatgaaggaattgttccatcgaagtggttccatgacaaatccaatagcttcaattggttgcttctgttggatattatattttaccaggatcttagatctacttacaagtatgttgtttaacaccc

SEQ ID NO: 256433 - DNA, 1896 bp, Cannabis indica
taatctggattacattgaaacagagttttatttagggcataaaacccaacaattattgcataaagtttcacagagaaataaaaaattgggcttcttttgactacatatatcaactaggaattgaatggcccgtgggttcccaagcccgcagaaattccagttaattgtaatcataatgattggtgggcctgaacaccaggacccacctgttccccgtgttttggaagcccaataacatcaacagaatgaaaattatttggctctgtgatacaatctgaattcccttccactaatatagctgcatctttaatggaaataatatctacccttttcctcttcaaatcaaaaagattcaaatcatctttagacataaatgtggattcgttctcatgaatagtcaatgttgcctcattaatatttttcaatttagattgacccgtgtgcctagaatcacggagagattgttggaaaatcactcttgatgcaggtggttgattgctctgcctgggtggactcacgacttcagcctgaaattgaggcacagaattgaatgcagtggatcgtggcagatcgctgctgccggtagagggtggagttggttttccagagcgaagccagggggatgccgtgagaaaattctggcgttttgaaggggcacgcatatcattactatacggtttcttaatctcatctgggggtgtgtcatatagtttactgcagaatctctccgaatgtcccatgattccacatatgaagcaaaatgtgggaactctctcgtatttaaaattggcatagaacacttctccattcttctttttgaacttcatgcgcctctttagaggtttgtcgacattcaactgaacacgaacacgtagatactcacgccaaacaccttgaaaattattaggatccgattcaataaacgttccgatgtagtttcttgcttgatgaacaaccctctctgttttaaagccagtttgtaaatcatggacctgcacccatatgtccagtttgtttagaggaatagttctcgggttttctccttccttgagtcgttcaataatgagttgcttgcgatcataagtccacggactacccgtaatgacacgctgaatatcaatttcatgataaaactgaaataagaaccggttttgttcgaggatcttaacatacatgcctttccccggtttccataaatctgcaattatgttttggaatatttggtaatcagaaattttcccagttaacaaacgcccaacgagacaccatcgatcatcaaattcaatctcttcaatctcctcttcctcgtactccacttcattttcttcttctttttcaagacaaatgtctttccacttctgctctagaccagatgatgaatgactgcttgatgccataattatggaaaacaatggaccaatgaagataataacacgacagaacaaaagaaaaacaactctataaaatagagactactcccatgtcagaggacatgacttttaataaaaatcaactttagtatttgttcaaatgttacttgtgactaaaatataatatttagatataagttgtcactaatttagttttagtcacaatacaagtattgtaactaaaaatacaactagtcacaataaattgtaatttttgtgactaataccttttgtaacggaccttttagtcacaacataagtaagatttttttgtagtgatgtgttataaaataatatagaataatataaaatagataagaagaagatgaagagagaaagaaaaactatatgagaatttatcagttgtttataacaaaaaatatgactaaaaagaattaggaaactaaatcaatgaaaataaaaaggaaaatataatcaaacattaattgtgataaataatttgatg

SEQ ID NO: 256434 - DNA, 1619 bp, Cannabis indica
ccttaattggttctgcagcgctagggagataattagattggggaggggctctctacatgacttgaacaaggtaagccgatttggaaaagaatagaccattcgtctccttagtccaaatccaaaaatcactaccctggctagaaggtttcccacctttcaaaaatagcgctcatcgtggcttggtcaaaaagataagtaagctttttggaaggtcccaatccccatcctgccttcagagatcaaccacaaaattgagaccaaaagtgggcgtgccattagacgtcgagaaatgattatcgttatgggtcacccaagggtcctcccagatgttagtgtccttaccgtcaacaataactttacaagcaatacgtaagagaatatctctagccatgaaaacccctttccaaaaccttaagagtcagagtttttatagttacactgaagaaaatgttgccctctaaggtatttggcatttaaaactttgcaacatagcgactcgttctgagaaatcatttgcatgctccatttagaaagtaaagcttggttcatttcataagtctttcgaaaccctaggcctccacaagatttggggagacagagcttgtcctaggccttaaggtatatccctttattacctctttcgtaaccccattagaagtctctaaccatactgttgattttagaggcaagtttagtggatatctcggtggtttgcattgtatagaccggaagggatagcccagcagatttaatcagagtaacttctcccgtctttgacaaagtcttagctttccaaccttgcagcttagaagttacattgtccacaatgaagttgaaatcaacatctttttgctaggatataaacatgggaagacctaaatatttaatgttactagttggatcctttactcctaggaggtctttaatccctatcttcatgcatttacttgtattattgctaataattaagcttatcgtaagctttgaccaaattaatttttattgcaagaaagctttctttgccctttctccttcaaaggaattgatgatttcttgaatgagcacattgttgtcctggatatatgttccttcctggaacaaaagccatttgggttgggaaaatgaggcgaagaaggatcgacttgattctattctcaataatttttttagatcaccttataggtcacattacaaagtgaaataaacctgaattgagaaaccttctttggatttgctactttagggataagaacaatattagtagtattgattcatttatgtgtgattcccgatgtgaagaattccaagacaaagtcacaagaatcctttctaatcgaatctcaatggtgtttaaaaaacagcacaaacataccatcagaccctggagctttatcactcccagtagagaaattataaagttcttttaatttcctctctatcagggacaagggataaataatttattcaagtcctgacaaaacggtcatggattaaatgatcaaggcaagcaagagtacttaggttggtttcaaaaaagatgctatcaagaatgtgaaatcctgaataatacgactctactagtgcaccaagtactatttttattctagtaatgttattga

SEQ ID NO: 256435 - DNA, 2812 bp, Cannabis indica
tagtttaacaaaacaccaacactatgagactttttgacttccatatgctctcttctctctcctctttccgagaacgggctatgcatactgggggcttccatggccctcttggccatggaaaacaccaaaaccccactagttttgggaagaaaaaaggccttcaccccactggagttggctgggaaaatttttctgatccaaatggtgatcagaaacttcacaaatattggagttttcgtactaaacacaaggcgtttatgatcaccttgtcaaaagatggaggttcggttagaatttgtgagagaacaagactttttgggtacgagataggggtaactattgatgcagcggcttggatgattgaaattctagaggaactaaaaaagaaaaatggacagcaaagggcaacattcaaaagattcttcagaaacactagtggaagctattttatggaattcttttccaactctaatggagcttttttgaagatctcaacattgaagaataacaaagtcagaatggtgattattccagaggaaacaacagctaaagggtggtctgagctatataagtgcctctctggtgtacttaaaaggaaaccagacatcgttcatggtggagtaacacagcaaaaggaagggaagttaggagaatgcaggatgaacactcaatcttgggttaatatcgttaaaatatcggggcaacatgctacgaaatcaatgggggggaatgtggtaaagaagatggagaaaatggcagtgaaggttcagcataacaaggatgctggggttcgaaacaagggaaaagtggaatggagagaattatatccagaaatcaacctcggcttcaaaccaaaaaatctatatcctgaaaagaggttttatcaacctaaattctatgaatacatgcgctcaaaagctcaaccaaaagattggagtttggcaattttccttgctagggacaatactcatgcagactggagcactattttctataatctgtcaagggagctagggagaaagttgatagttagtcaattatttgatgatagatgtattacttggtgtaaggatgagaaggaaaaagaagagttagtaaaggtgcagaggatgtatgttccgggggctcaatcttttgttacattctctccttggagttgggaaaaccaaaagaataatgtaaaggtggaatgcaaaggatcttggattggtgttcaagggctccctttgaacctttggcatatgagaatattcaggaaaattggagatatgtgtggtggattaatggatgtggacaaggatacggctgaagctagtgttttatctcatttaagactccaattgatgggtgatgagttcggttttgtaccggaatcattatctctcaatcacgataataggtattacgaattaaagcttttcaagctcaatgatttaagctacagattccatggatggttcaatacatgctggtatcaagattttgaccatgaaaaggtatttggtgagggggatgtaattgaaagagagaaaggaaaaggtggagatgaagaccgaatagaagaggagaaagagaatgaggaaatactggacaattgtgtgataatgatcggtgagaaagaaaatagggagtattcagccggagaggtagaaggtgatgatgattcagttgaggccgacaaggtggaaggtgagatggtggctgtcgacgacggagaagaagggcagtcggaagtggaaaagccagaacagaggagggctgaggcgattaatgaaagcacaggaaccgaggcagggagtcgactgttgagagtcgaaaggcagggaagtgcgagtcccaaagtcggcagaaaggaagatagggagtcgattaatattcagagggtattttctcgtattttgaatgatttgagccgaccccctttaattattcctcgtacctgtccctttcttttcattaaggacacgtggacaatggggggaattacagcccaattggatgtgggccctagaaattctgtgggccgaaaggggttgattgaaaatagggcttttaattgtaacaggggatcggatggggataggagggagataagtcctttgatgtatttccataatgggccttttagtattgttttggcccataaaagaaaagaaattaggcctgagttaaaaaacctcaagattcagaccttggatccgtgggtcaacaaaggaaaagaagacatggctatttgtttaaaaaagaatacagagcagattattaaggatttctttgaagggaaattaaagtcaattaaaccaaagtctcgaaaggagtttagagttgcaactataatgttttgggcagattttgaagtaataaaaaaatcagttaagccttctattctggaaaaaacggcagaggtagaacaagatgaagaaaaggggtttgtacagtttgggaaggtctatatcagaaaaagaaagtcaatgggacacaccagagttgaatcagcagtgttagcagaagaagaattttattttgagggggaggaggctgatgtagagtcatttgaagaagaaatgttggggataagttcagagagtgagtgttcggagggggaaggagtagactctgaggccgaggatagtgaagagcaagaagatattattggtgacatcaaagaactgtggagacagaatgataacgaaaagcagttaactaatgattatctcgggaagggacagaatacaagacaaatctatcatgaggatcactcgtggtctaacatcgttcaatccatggcggagatgggaatggagatcctgca

SEQ ID NO: 256436 - DNA, 1657 bp, Cannabis indica
gtgggatatttatttgagaaaaaatagaataccgggtttgggtggagttatagtttttgaccattttacccctgaccttaaattgcctaagttaagcaaaaatgggtattttagtaatttggaaagtggggaattgggtggcagcctaaggagttaacacctagctattatttcagcaaagattaaattaatcaatctttattcatttaggaaaataagagaaaacaagaaaagacaaaaagtcaaagaacactatctttttcctttctctctcttcgaacccaacaataaccaaggggaattgctgttgaattcttcatttcagcaagaaccaaggaccttgttcaaggtgtgagatttaattgtagcttaaggtaaccctaaccatccttattttgagaattcttgtgttgtaagcttgcttttggtgtatgatattatgttttggtggctgataggtttaggaagttttgtaattcattttctaagtttaaaattgagttaaaatgatgatttagctattggttttgggctgtggggttgtggatgaacatgtttgagtttaaaaactcaagcttggttcatccatggcatgttttgaatttgtgcaatttctgagttttgttgattggaatacttgtgtaagctcattataggtgttcaggaaagtttggtagcatttgggcatgttttgagctagttatgaaatgtttggggaaactggtgtaaactggttaaccggtttgccaagacctggttttgacagattccttgaacaattcattttcctcaatttgtgtccatttcaatgcctcgtttgggtgattccctgtttcctaagatattatagttccagttagtaataacagaaccttaagttgtaggtttgggtttcccgaattagggtcttgacgttagatttacccggttatgttatgtgattaaggcattcatccagcacgagactttccgttcaagtcggccaactcacttaaatttagaaaagaggtaagaacaatgtataatatgcgatatatataggcgagtgtatgtatgtgtgaaaatgtatatgcatgatggttatgattgctacactaccaatacttgtacagaaatggtatagagtgcattagtatagtgtatattctttaaagaatacattacgttgttaccagcacaagtacatgaagtacagggtgtgtgtggtataataattagtggtactcaaggtacgaaacaaaccctactagcactcgtacattgttggtacgaagtgtatgtggtacagtggttgtaccctagtatggaacatttttactcatttgttaagccttgtaaataggtgtatgggtgcctagatacaagtcggtgttatgtgatatgttatatgcttttcttactaagtatgttgactcacagctctactttcatgtgtagttaaaggaaaggccatggctgaacaggagtgagcttaagctaggatgaggttgtacatgtcatggcagcgcgacctgaagtgttctgtctcgggacatttggggttatcattttgtagtcgttgtgcgacttgattaatgtattttggaatattttgtaaaaagtttagaaacgagatcccaacttttgtaaataattatgtaaagtttataaagtttaa

SEQ ID NO: 256437 - DNA, 2446 bp, Cannabis indica
agagtcgtctttcctttttgagcaagaggcccctggattattagctttggtcgagacagtacttgttgaaacaatgctgggtttgcttcctgagctagtttttaacaagttcatctcttttcgagcttcttctttcgaacaaacacctgagccctctcgttgaactcggtgatgtttttcactagatgaccttgtaggtcgtcccacagtttgcctccagtagtggagagatcattagtgatccctgcctgaaggacagttagctgggtactatcatccaaatttcttactctcgcagcaaccacgctaaaatgacttaagtacgccttaagcgtctcgcttggttgttgctttatgttggtgagtgaggacacttcgggtcgcctatcccttgcggcctggaactactttttgaagtccatagatagttgttgtaaattttttgaaccagctgcttgctgctccaactagtgaggtgggaatcaaaatacaacgtagattttttgtaacatttagctcgcattatagtgtttaaagtattcaaatgcaagactggatcagtggtccaattatatgacgagacgtgggggtttttaaatccctaggggaaaggatattcatgatatctcgatggtatggctcgagttcttcatctgagtcatatccagattgttttccttgctccccgacttgatacctcctgaacttatcctccaactcatctattcgcaattggattgtatacccttgctttggaccgagttattggcgaatatcaggtttttctggttcaagtgttctcgcagatctggttggttataattgctaatggatctcgttctactcacggactgtgtcctacttatggacctcgtccttgagtgacttgcagtcttactcgtgcctgtgctttctttatcattgttgcaacaagtactttctcctccttgcgttgattggttgtgggttcttgtgcgccctgaggtgacactcgcctcttcacgccccgttcttctcccttgggtgtggttcatcgtgtgccccccacaagggttcgtatgtgccccttccctatgggtttgggaagaattttggcagttcctcgctggtgacctatgtgttctaggttgtgtcccatgatttccctcgtttccacaaggaatttcctgttccctggtttctggtcgcctcctattctcatttctatgagataattctggatgatcatttggctgttcatttttagagggaacctcagtttccccaggttactcgttgtcagggggaccctcagtttccccaggttgttctttctgagcattctgagggttctcttgagctgtctcttccctcctagtttgagagccgcgaggtctgcctcatggtcttctaactctagggtcaggttgattttgggtattattctcctatgccactctgccagcgactgtctcacgttccaactcgacgttctgccggtttgccccctccaggcagcgtctaagttggctgttttccaactcaacgatcggcgtgtatcttgttggatcgtaggcgccatcctcaccaactagactgggatgggctctaccaatgctcatttcatgttcatcataccttgttcccagattctgggttctccttgtacgtgtggttcgtgtacgtgggccaccctcaggttgggtcctcctggaacgagtggtctgcgtgcttgggccaactttaggttgagttctccttgaacaagtggtccgtttagatcgtcaatcgggaggcctctgggagcccattggctcttttccaggacggtgagtggtttcttcatgaggagtgttgacgttttctccgttgccagccatggagaaaattgtttttttatacgtatataaggagggttttttcacgaaggctctcaatgaaagtaccaaattgttaacgcaaatttttgttaactatatttgagcctaaattgtgatagatttgcacagaaaacaaaagcagtaaagaaaaaataagaacacagaggtttttacgtggttttgtagttaaaattttgcatagtccacgagtcaatcttatttagatttctgatgcagttctagggctttttctctaatgaatttttcgttcctttttcaatgtaaactgctcctatgtataattagataggagggcagttaattacagatttgactgatattttataacaacaatcccctaaaatcgtgggattggattacatcccacgtaaagtaaatgcggttaatatttgaaaatcacacaactgtgattggtcccattttactgggtcaatgtaaacatgtattaaatatgttgtaacacatattgttctgggatgtctccctgggaacatagcaacaataaccctggtagtgagctagaacttttcccatgtctttctgaggttgataatgtaaacctcatc

SEQ ID NO: 256438 - DNA, 1498 bp, Cannabis indica
tgggattcgtaggcccacgacggagagaaccttacgaggtttaatccatgatacgaatgcggattggttttttggcagaacgaaggttgggatggtggatatggagacctttatgaatcggttaggctttctcaatgtgattggaatccaatctgagggaattggtagtggcttttgcctggcgtggagggatgttggtttgattgaggtccgacaggtttttgactcggggttccatgtcttaattcctgagattaatggtgggacaaagtggcacttgttttgtatctatgggacgccatatgtcgataagaaggtggagttttggaagtggttgacggatactgtgcgggaatgtagggagccgtgggtggtgttgggggatttaaatgtgattttggatgactctgagaaaatggggggcaggagatttcgtagccgtgaaggggagttgctaaggaattttttacatgactctgggggtgtggatttgggattccaaggggtcaggtgtacttggcaaaatgcgaggaagggtgagaagaacattcgcaagcgtcttgacaggggtttagctgattcttcatggtgtacaagcttcccaaatgctaaaatcctgaatctccctatcttgggatcggatcattccccaattttactatcaaattcagaaggccagtcgaagcttaaatatccttttcgtttcctagaagtttggacttcaagcccggagtgcgaaaaggttgtggatggggcatggaagtttgaggtgagaggaaggaacgatgaagttttactcaagaaactggggaatacaaaacgagaactgaaaagatggaaccaattttcgtttggtttctgtgacaaaagcttaaagaaacttaaaacggagctgggcgaaattcaaaatcaatggccttctaaggaaaatttggaaaaggaggctactgttcaattgagtatcttggagatggaagctaatatggaaaggatttggaaacaaaaatcgagggagaattggattcacaatggtgatggcaataccaaatttttccacgcgtctacggtaattcggagaagaagaaatgctattgatatagtggaaaagaatggggagtggcttcttcaacgcgaggagattgggaattacttcagggagaattttatgcaagtttatgaatcccagaacccggtcattggcagggactttgatacccttttcttgtagagtgttacggatgaggaaaacgcagtcattagcagatgcccgactgtggaagaaatcaaagctgtggtctttcagatgcatcctctcaaatccccggggccggatggtttctcgggcatcttttacagaaaatattggcaaattgttggagcaaaagtgtgcgagatggtgcaaggcttctttgaagatcctgttacggatcgattgaaggtggtcatcgatagattagtttctcccttccaatctacctttattccgggtagatggata

SEQ ID NO: 256439 - DNA, 690 bp, Cannabis indica
gtctcagaaataaagagagacggtcaacgaaggaaggttcaaaccttttttctatcccgaatccactctcagtaagtcgaggggcctacccgaggttgaatagcctacacctccctcttttaataaggtcttctccgggcccgacctcttttctggctaaggaaaggtctctcgagcctcgaggtgacgaacaactttgatggagattatcccaaatcgacacctgcgatctcatttgaaattctcttctttttgggcgggtggatgcattcttttgatagggaaacaacctactttgagagagagagcctatttattttcaatcgatcgccggtgttggaaaaaggagcacttccagaaggaaaagagaagcaagtgggcgggaataagaagtgcgataagcagtgggtacgttaactccctcgtttgatcaaacaatttatcttgatggaggagcaactggtctatttcccataatcactagcattatgtgtgggtgatgatattgatttgatttgaaattaagtctagttaataaataaaaaaaatgttaaaaatcgagaacgagggatgtacatatgaatggtaggggtgttcgtagtgttggtggtgcggtttttaaccattttttcaaaccaactcgcacatgcattttttctaatttcttaaaccgcactcgtactgcgaaac

SEQ ID NO: 256440 - DNA, 595 bp, Cannabis indica
tctctctcttctgaaggctctctcacttttctctgtttatttctctttgctttttatgcactgtttccggtttggtaccaatatcagcttttgcaaactgtaaaagaggaaagagaaagctaatgcttcttgaagatgaaaataaaatggacagtaattaattaatttggtgttattgacttgttgtatttttttatttatttttggtaaatggtaagtgattactctaatttggaattaaaacttgtctcgtgtttcattttttaaaaataatataaaataaaatttgtgggaatataaatcttacacgaagtgaccaaaacacccttgtgggagggatttcaaaaatgttttgttatagggattaatgatgtttgactattgtattaattttctatttttagtatctagattgttctattttccccttacaatctgggattcttttcttgttttcttcatttctattaattatataaacaaaaaatatcaggtaaaatatatctgttcttaaaatatgcacaagggatttttcactcacttgagttagtggctgataacgtttttttttaaagggctgataaatgctttcccc

SEQ ID NO: 256441 - DNA, 1356 bp, Cannabis indica
taactatttcaaattattaattaaaataacaaatctataaatattataaaacctatatcgtataacttattgaatatatgaatccatacctatttataaaatctatacctattgactatattaatccattattggagatataggtggtaattaatcagttattactgtatataagtaactgttcttacaattagcaagttagtttattttctattattttgtctagctggtttagctgtcttgtaactaactcctttgtacaattccacctatataaataaagagatcaaaggccaatcaattgattgagcttcacagtattcattccatccattctctcttttctttctccatttcatcacttctctctcagctcaagaactctggtttacagagttccttcatggtataagagccatgtctaacaatggcgatcaatcggcaagaagatctcctccagcagacgaaagaatggcccaacagaatccaccagtcgaaatacaacctcctcttcccaacaacaatctcttgcccctaaatatcagattggatcgatcaaattacactatctggagatcccttgctcttgccgccattcatgcatatgatttagatcattttatccttggtctgaacccaccaccaccaattctgcttgcaggtaatgtccctaatcccgctcatcaacaatggcttcgacttgaccagtttttaatgcactggctaatgaagtctgtttgtgaaaatatgcttggacacgttgtgaattgccaaacctcggctgagatctgggctatcttctctcaattattcgcaactcgatctagagccagattacttcaacttcgtaatctgcttcagaccaccaagaaaggttcacaatctgtggaagaatacattctcaagatgaaacaatatgcagattctttatctgctgctggacaacctctctctgatgatgatctcatgttgtatattcttggaggactaggatcggaaaacgaagccgttgtggtaaatctcacatctcgaacagagtctctcaccctccaagaagtccaattcatgcttcaaagcagctcacttctgactcccttgtcaacattcaagctaacacagcttccacaaacttaaacaatggaggtcgaggctcttacaacaaccgtggttctagagtgccatatagagggggcagaggaaactttaataacagaggaagcagaggaaatcggcccatatgccaactatgtggaagagctggccatgttgcaattaaatgcttgaacaggttcgatattgccttcactggcccaccccaaagttcaaacacaatctctcaaccctccacaagtgact

SEQ ID NO: 256442 - DNA, 691 bp, Cannabis indica
ttggcggcttcaacaacgcaggtcttgcagttttctgttgacacgtcaccgcggcagaggcccagcccgttgacttggctgctgtcattgccattgccgccaccttgaccggttgagctgaccccgaaaccggtaggaggtactttgatgggcaaacggttattgaggagttcgtttaagttggcggcgaaagggctattggatgtgaaattttctttgttgaagcagaaatggaagagaggatcggtggctgtggctgcatgcagaaaaattagagagaataatagtgtggaagtgatgaagagagggttttgttttgagaacgacatgtcgttttggaaagtgatatatttgttttcagtgatggtggatatcgattgttcgatcataattgctataaatagagaaaagttatggtttggctaagtagggagttgaaatatttgacttttccaaatgaacaacatggtcaacttaattgcgtgtatttatttaataaattatatggccaaagaagatgagttttgtcaaattctccttattaataatgcatgcaatatatgaacccaaaaagcttagtcaaaacaggataaaatatattggtggatgaggtactttgtcaacccaattaacagccgtatataacgaaagtgtccaagaacggtttgtgtagttaattgtaaagcttaga

SEQ ID NO: 256443 - DNA, 3286 bp, Cannabis indica
attgtttccaaattgaagagcatgaaaatgtaaaacttcagctcaaagaatgccaaatacagctgcaacaacaaccattaaatgttgttttgcaacagacacaacaggaggctaggaccaattatgctgctatctataagaactatctatcctttttgcagcagaaagcaaaattgaattgggcaagagaaggagacgagaattctacattatttcacactagcatccgagagtaaaggaggcacaatcaggtgctcttaattgtaaatgcagaaggggaaagagtagaggaaccaagagacatcattgaggcattcatacaatattatattggtctattaggtactagtatgcagggaaggaagccaatacaacagtgcatactcaaagaaaggaacctattaacaaaaatacaagcagatttcctaatgacagattacactagagaggaggtaaaggaagctatttttgctattcctagtatcaaagctccagggccagacggatttggtagttctttatttcaggaaaattggaaggatattggtgaagaggtagctgatgctattatagtttatgctaattatgtttgcgagataataatcttactcattactacttagttaatcaataatatataataaatcctaattattcataattaagtctccaagatattacaccaggccttttttttggcacaaccttgccctgtggagcagaaagggcgtccaaccccgaaggcgtggtggccttttacgtctgtatgagctaattggcagtgtttacatttttcaatggaggtaacgaggcaattttggtatgaggttctcccaccttctccttcccctttgtcctttataggatccagggtttcaacgttggtggggtttgctctattttctccatcgagaggatccgcagaatcaacctcctcagagtcttcatccaggtcgccaaatttagccagaggtgaaccatcattttctccattttttgagagaactcttcctgaggtgctaacttttattgagttttaactagctcattggacactcaaagaagattggagtcctgtttgtagtagtatccatctttatagtagttgcctttgatttttacatcatcttcttcctccttttctacatcatcaaggttcttgctcacaaaatgttctttagacttggtgggctcataaactctgttgctagcttcaaatgcttccccatccctcacatggcttggctagacgtacactagagggagttggttaagatcgcccatgataactttaggatctgctcgaggagtttcttctaccgcagttttacgtgtagccaccattgttcaatatgtactgtagctttaagcttccttcaactctcaatgaatgcaccaaaatgtttatcgagattttagaatctaattaagtgagagcttcaagaatttaagtaaagattaagcaaaagatatggaggatttttacatggtttagacgttaattatccatagtccatgagtcaatctattggcctcttaggcacttaaatttattacaaatgagttttatagtaaggaaccctaactcttgctatatcatggtttctctaggtttctcttagagaagaagaaagcttagaattaaaaccaatagagcttttcgctaaagttttgtccatttttcatgaagtggtagtagggtttatataggctagagtttatgttggggcatacgcgtgacccattaaggttttattgtaaaaattagcgactaacgtggtaaaatacacaaatacatgactatgaggcccactaaggatatcaaagtcatggggcgacggtcccacactaataaggggaccgtttggtacaaaacatgtgtttcacggaggctacacctggcagacaaaggcattagaggagccgttagacaaaaggggtgtatgcaatgcgcacaataccatgatctgatacatgggacaatatctaattctatgttagagacatggacacgtcatcttaggggagacattttcttctcatttcacagtaaaccaccaactcccagtccgtggaaggcttccgagtgccctcttgtggtaggcgtccaagagcatctcacacggcctgtctctatgtatgcccttaccttcattaggaggtctttattccttccctatctaggaaggctatggaggctttcaggtctcgggggcgaaaccttgagacttcgttgggcttaggcccattccaagtctagcttagccttttacatgaggcaaggcttaggcctattttggatgatgattactttccgattgcgctatgtgtcttttctaaaaaacacaaataacacttagtgattgagaaatgacccacattaatcatgtgtgatatccaggacacagtggaagactgtgaagaacatcaatcacatatttagagtaaataagatccatattcatcacttgataaaatgttgctacagaaaggaatcaaaagatagcatgattgaattaaaggaatcaattgttttttttcccaatgttgtaattatactcaaacttcatgtgtttatattttgtgtttacaaaagcatgttctagattgttattttattaattcatatttaacatacttgatagtaaatgagaccttggtaaaataagttcaaacgataccccctgtgacaaccaccctttgggatgcccatacactattctcttatgccaccaaggatgatggttttgtcccttgagacgactccctcaaagttgtgtgttaaccttgaaaattcacatggtgtaaaatgaatttattgcaaatagagtaattattaataggagatacttctctctacgagggttttcaaatgtcaatcatgtgttttaaatcatttaaggtatttccaacggaggctgattggtacgagtaaaattagtgagaccaagttactaggtagaacttgtatgtggatttagatgatcttacatttagaagtggatttggtcataaacatgaaatttgtatatatctttattagctttctaaaacatcttcaattgtccgattacgagttatattgagaatgttatggcaaaaatactaagtcccactacaacaaaattaggatacaggtacaccgtagttaggcatggcaaaaaattgtgcctaaaggatatggttttagggccgacacgctaattgtcatgccaaccatgttttcactttttttttatttgaatacaaaagtgtttcttgcatgagaaggggtctcttgtcactg

SEQ ID NO: 256444 - DNA, 2134 bp, Cannabis indica
acctcattaacggttagagattaagggagtgagaatgtgagatgattggcttcgtaggtgctgggtgcgcaaggtggtggtgtgtcgctatggccatctacaatccaggaatccactttttatattatatgtaatgagaaatttcatttattattcttaaaataaaatccaattacaaaaatactcccctaattattttatacaattttattctaataatttcctactttacctgaaaaacccttcctatttttttaaaaaaaactaaataaacacaagcaatctctctcctttccctttctcatcagcccaaaagcgcaaccctaatctctttacctccctcctaccagaatgtcgaaagtaacccaaagtcatttccctcctcctcctccaaacccaccaccatcgtcctccattgtagcccagacttgtacctcccgtttgtcgcccctctgtctcccgaccgtcgaagacccacccgtaccacctactaattgaaagttggagcttgtgggttagtgggtaagtatttttttaaaacatcttgttaaataattgtaaaagtatagtctaattttggtaaatctatgtggttgttgtttgtatttttttgtttttgatatatttttcgctgaaatccgaactagttttttagagtatcctgtgtgtttgtatttttctcgatggttttttgatacgttctcgacacgaatgtcctaaggtcagggaagacctttctcgacagttgtcgatacattctcgacgatttcttaacgtgaatatcctaaggttaagaaagacctttatcaaaagtttttcggcaggttctcgattatttgttgaaatggcgaatggttttacatttgcaaccattcttgatatgttatctatgtaattttttgttatttttttattctgattcagttgttactaacacaatcctacagaaattgcacaacattttatatgaagagttggagattgacccattggagtataatatgaaattggattttttaataatatctcatgtgagggctccatatgctatcattgcatttttttttttataatttaacgatggtatattgatatgttctcgatgttttgtcgattggttgtgcagtcctttagaaaatttagtaaatattttctatgatagtttctcgatagaaatttgatgtgttctcgatggtttaactttgattagaaggaacaattacactaatcatctctaaatatataaatctatacaaaatatttttctaatagaaggatgctattaatttaattttcttttaaatacaattacttttatgttatcgatgctttcacgatggtatatcgacatgctcttgatacctcatatatagtagaaaaatgttcacttattcatatagagaacctaccgataattactcatgcctgttgataatcagttagttttatgttatcgacggtttcacaatgatactatattgcaatgctactatatcgacatggtatcgaaaatgtttacttattgctatcgaaaatctatcgataatatctcgatagttagtcagtgataacgaaccatgaggacaaattacaaatacttaatgtagtaatcaattgataataatgaactatcacaacaaagagcaaatgcttagtcccttcgataacccattgataattagtccataatagtcgataataacctaacttgcttcatgattatttccaagaaaatataaaattatatttcaacaataactatgtgccaacaatcaccaaaaaatatgtacctagtgttctttcaactaagattctaatagaataggtctacaaatcactgttctcgaagcatctgtatgttcttatccgtgacatcatttagggaatatttcatttttcagatgtttcacctactcaatcgcataaatatcacaatcaccattgcatcaagcgaccatgaagaaataaagccttcatgtgtttttaaacttttcaatgattgtagtgaatatttcacttcccctatatgtcacacaacctgtaaagtgggctgaagtgggagcaataagatctggagtcatttgtaatagataaacaatcgatttttcatcaagaactagtccaaaacccatcg

SEQ ID NO: 256445 - DNA, 2208 bp, Cannabis indica
aggatgtttgcaactctttctctgacaacgtgacccatgcctttacctcagttgctgatctttttctcccaggaacccacaggtggaatgaaagcttgattagacaatgcttctcttcgggtgtagctgaggtcattttacggattcggccgttggtgggcaaaaatggtgttgtgttttggagggctagcagcaacggagagttttcagtcaagagtgcgtattggcatgctcagaaattcaggtttcatgaggagaagagggtgtggaagagactatggaagctcaagattcataacagacagaaaaatcttctttggagaattctgagtggttgtctccctcttaaaagtcggctggggttcttgcaggagagtgataaactatgtgtgctgtgccatgatggtaatgaaaccgatactcacctgtttagagattgccactttgcccggagcttgtggttctccagcccttggggaattttcacctctaaccttagcagactgtcgtttgaagagtggtttatgtggcttgttgacacaaagaatgagtcagttatgttgtttggtgcttgtttagttgagcatatccggaattgcaggaataattttctgttcaaaggcacggttccaaatttggagatgtcgagaagatcactccttcgcaggtttcaagagttcagtgatgcgctgagtaaagaacaaccacctggagaggaccctgctgttggtgttggcctggtccaagggtgggaggcgtggttgcgggttgatgcctcatttatggatgggattgcaggcactaatgtgatccatctggtggaagcagaggagaatgcagtggtcttactgcagcacactttggtcgggagtgttcttgaagctgagttgcttgccattctcagcgcgctgacttgggcaagggaaagggacttcaagacagtgttggtggagtcggattcccaagttgctgtcaagactttaaacagccgtgaacttccttacgcctgggggtctttccctgctttccatgactgttgttgtttacttaacacttttgataaagtttcggtttattttatccctcgtgtgagtaactcggtttttgattccctggctaggtatgccagaatcgcgggagttaccatgagttgtgtgtttagggaggtagccccctttgtggcttccacttgactctgtgttggtgtgtttgaataaaggtttcttacttatcaaaaaaaaaaacctcagatacttaactaatcaactcccaaaacctcagttcatcttcactcctttacatgattcccatgtccaagcagctattatttgctcaaaacagctcaaattatacctcagagtccgaagtggaggccatgattacgagggtctctcctacgtttcacaaattgaaaccccttttttccttctagaacttgcaaacctcagaaaaatcgacgtggacatcaagaataaggcggcatggattcaagccggtgccaccatcaacaaggtttattacagaatttatcagaagacgagagtccatggctaccttgctggactctacaccactctaggcattggaggccacataaccggtggcgcttatggctccatgatgagaaaatttggtttgggagttgataatgttgttgatgccaaaattgttaaggcaaagggaatattacttgatagaaaagccatgggataagacctcttttgggccataagaggtggtggtggagctagtttcgacatcatattatggtggaagataaagctagtacaagtttcagccaacgtgacagttgctacagttagtaaaacgttggagcaaggagcagctaagcttcttcataggtggcaacaagttgttgatatctattcataagagtgattatacaatcggttaataaaggcaagaacacaactcaaaagactatttccacttcttaccaagctctttttctttgagacactattagactccttgatgttatgcgtaagaattttcctgaattgggtttgacaagaaaagatcgtgttgaaatgagctggattcaatctatggtttactctcacttatatagaacgctctgtatgttccacgatagagatacgctatcagttatccattgtgataatcataataatcaatgatcctctatagatgatttatattgagtagggacaaaattaccgttac

SEQ ID NO: 256446 - DNA, 947 bp, Cannabis indica
ttagtataaaattgaacccatcacatttttgtaaatgaatgaaataaatgtactgagatgtaaattttccaaaaaaaaaaaaacataggaagaaagattattagaatgccacatcatcttagtttgtgcattcctttatatatatatataaataaattaattattgttatttaattatttttaattactttaattgactcattatcgttacctaaaagcgcagtcaacacgtaatttgttgatatttctttttttattggggcaggccttgcttgaaggtgggtagtttgggcatgggcccaaaggcctcaaattattgccgtaaaataaaaaggcctaaaattctctttataaaatctaattttaattttttaacattatatttttgtatattaaaaataaataaataaacctcaaaatctcattttaatttttgtgcccaagacctatcaaatgtttgggttataactaagatgaaatgtagaaacttaattttttttgtatatgagaattattattactcaagaatcaattacacaagtacagattagttaggcattcttaattttccaaaccacagtttatcttcaaatctaattttttccttttcaagatgagaaaatctatcacaaattgctttcttaattttatttataatagcatgtacaatatagattttcctatcccaaagagcaatgttccttgcttcccatatatactaaactacaaagtaaacaactgcaatataaacttccctacaaaattttgagtgtctacagctcttaatccatttcaaacatgcttctagcttcaacttcatattattaagcccaacccaatcaaaaatcagtttacctatgactttactatattcacaagaaaaaaataaatggcggtgagatattcttgttcaagatcatacaacaaacaagtatcaacttgaatgc

SEQ ID NO: 256447 - DNA, 2381 bp, Cannabis indica
ctgttaagaaataaagccaagtccaaaggttgaaatgccaaaacaaaagacaagggaagatgaaaagcaagcgcttggaaaacttaccccaacggcttgcagctttgcactgtgagccagcatgaaagcatccgcgctgctataggacgccaaggtctcgatgggcaatttcgaggcgctcccggccatctggtctaagagctctgtagcaaaaggagcagcctctcgccccaacctttaggccaatcggctctccagagcctcgacctctacaatctgccccgctggaggcactacatgcatctcctccgctagttctgtcttgcagactgccgacatcacgaccgtttgtcgaaagatttgtagcctcttcgactctagatgcccttttcagggtcttatttgcctccttctccctctacatttcaagaaggtttaagggaactgccctcctagggaaggtgaaccacacggtaggcgttttggacgaagccgggggaagagacttgggctggcccgacctcagttagacataaggggagcagagtgatccctcgatccccctatgccgaagtccaataccacgagcttttgcctctttctggcagaagagctactccctgccgtctcagacagttcgaccttatttggaacagacatggtgtacctgtccacaaattggcacaacaaaaagaaaaaggtcatggctcgaccccagaatgcctaggagcaacatcgctgatcctagaagcaagcgcaccattcaaggcaccctccaaagctcttaaatagataaacaaaagaacttaccaattgcaggagggatgtcataatcaaagtctctggtgcagtgtaagtgacggaaaaacacaactaagaaaaagaaaactcaaaaattataacttgacgggcaagaagagtgaaaaatgaatcgacggttgaaagtatttatgggacgactagaagggatacattccacacgaagcagacatttcgattcgccttaagaggtatccgacatttagacgtgaggagttcaaaggagatctcacttcccaatggatgactcccatcattacatgcatcgtaaagaatactcagtaattaaaaaattgcccgagtccaatcatcgccgttttgagcttcccatagaatacgcatccagtacgcaagcgaaacccaaaggtcaacatttaaaaccctgacaaaaagacagaagaaatcatgcctcctacataatggcacttcagtttcgctgctggtgacgtagtgcattaaaaacttttcataagtcccatgtgcgcagagatccgtcaggagagggtactgcaagctcccggaccatggtatgtcctggaagcttaggggtaaatgttatccgtattttttacaaggatgacacgaggatattaatcaaggagtcattaggccgccaaagagcctcattcaacgccccaggtggataaaggcgccaacctcgcgagagaggtctccgtgaaagggagtctccctaaatactggccacagtcacccgtgggctaatgccttgctttgctctggaagacgaaaccttttgctcttgcgaagggaatggatcttttcaagacaagatgcctcagtccggggtatgcctttgatccgaggaagctcagcccacacgtgtcatgctacgaattgctagtataatgtcagagattgtctccaacaccacgctaccatgcagagaatgtgcatccttatgtaccgcgtagaatgatccaacgactaggtgcgggggtaattcaaacaagaaaagtcgtagaacgacatgcatccaaagtactgccgatacaactagtgcattacgacatcagtagaagaccacatggaaaatatgccacctaccaatccaacggtgggggttctcccttatgaagatccatcaacgacggtccttacgagggaatcgacctataaatacccccaaagacacacaaggcaggggatccgaacttcgacttcctctcctttgactcaccttttgactcttcaccttaagattaaaggggaatcctttgtaaacacattactgtaaccctgttattaactccagaatattgctactaagcttcctcttcttcgagaggaacacggtagatcagagtaaagtccatcttttctgtatttgtatcaacattcaccggtcaaagagcccaataaaagaaatcgtggactaaggataattaacgcatgaactacgtaaaaattggttgtctatattcctgccatttgcgtttttattacttgcataaactcaatagttatttggttgccgaaaaactcagtaaacatattaaaataaaggtctccaaatcgtttggaccagcctacttacaacttat

SEQ ID NO: 256448 - DNA, 1155 bp, Cannabis indica
ttggcatattcaagacattgtttattaaatatatatatgtttggaaacaaaaaccttcctttgttgatgaggttcatgtattggcatttacaactcttgatcattggagaaaagctcaagataaaacttctttatcatctacgcttcttagaaatgtagataatcaaattgagctctgggttctactgactacagaaaaaatcaagatcaatatcaatccagccttgttcgagaaggaaaactcatatgggtttggtattgtggctcgtgaccatcttgctcgccccattcacatcaaggcaagtaccatggaggcctttacccaacaaaagttgttgaagcaatgggtatcaaagaagctcttagttggaccagttctaagcagtggaaaggtgttgagattgagactgatagtatgctcgctgttcaacatattcgttctacccaacaattgtcttctgtctttagtttgattgttgacgattgtagaactcttttgtcttctctttctaatgttcaattacgttttgttagacgatcagtaaattgaatttctcactatgttgttaggcacgctcgatatttatctgatcatagcattcttaggcataatattccctatgatatttagactattatgtattcagaatgctaatttaatgaagttgcaatttcacgtaaaaaaaacttagaaccaaattaaatttcacgtgaggcgacccacttaatttgcatgtggcttcgccggtgatgacatgccatgtgctattgtaacaatccatatgtttgagtggccttttgtcttgtactcgagttgttagactttatctttagtttctaaacttttgtttaatttcttgtccatttacaagccttacacaagccataacatagctgggactacatatgaatatatatatatactaggcaccgaaaacgtgtcataggcacgtaatccctgttaaaatttgtaagttgtaattatatttgttattttcactaattatgtttaaataattattaaaaaaagaggagtgctaccgtcaacccagagtcgaccatagacataggggggctaggccagtgcctagggcccaccccttttgggggtccaaaataaaaaaaaatattaggcttttatttaagtaaaattaa

SEQ ID NO: 256449 - DNA, 1276 bp, Cannabis indica
aaatccatttaaactagacacaaataaaaacatagaaaattaaagaggaagaaaatgaaactagatagaggattgtcacggatcgcccacactcattccaagcttctccttcttgtgtttataggattctattttgtatacttcctttaaaatttgacccattttcattaaaataaagtttttcagtctaaaattgagaaaagaagaagttgcccatgtatcatatggaggcggtgccgcggccactaatagctttgccgcggcacctgtacaaatacagaaaaacatcatttttgtgctccctcgctgtgactaccattagcctcaccgtggtgataactctactttgacctctctcagtaaagtatgcataacttttacatacgtactcctaatgagctaattcagggtgcgttggaaagctgaaaaagagatctaaaactctatattttgactttttccaaaatttgaccaaaacatagccaaattttgggaccaatttatacattccaactgtcgaaacttgaaataaaaaaaaaataagcataattttgttccaaaaagtaacaatgaagaaaaaaattaactctaaaaatgacccgaacaataggctaaaaatagtctattaaattcttccaatctaaatccttacttgctcgagtaagactaacactaaaacacaaattaagctaacaaacaatgaattaagcctccatctaataataatgtctctgtcacttgtggaacttcaatcaattaatcaactacaatttggattatattctaacaattaattaagatggcttctttgaaatagatatatcttaaagtaatgtgagtaaataatgcaattttctccatcttatatggttgcctataaataagatcatcacctagttgtataagggtatgatcttggttttccggccattatgctgcaaaaatctaggaacctccattgttgtaagttcacaaaacaactctaattcaatgacttgagaagtaaagcttatttctataaccttttctcaaacactattaatccattcctcaattttcataatcttataattaatcttttgctaaaaaatttagtcaattgtcacaaatatagagtcatatactaaaatataggtactaaaataattcttacaatagctaaagagtaatttaattatatttaaaaaatatttgaccttatggtcctaatttttaatcttttaaaaaaatataaagtttaaaataatttttttaaaaatataaggtctaaaccgtt

SEQ ID NO: 256450 - DNA, 4720 bp, Cannabis indica
  modified_base (4087)..(4087): a, c, t, g, unknown or other
acaaaattgaagaaaatctagaaaaatcaagggtttccttgacatgaccctaccccaaaaaaaaacataaagatgtgcaaagtgttaccggttgaatcaccgcactcagtaggttcatttcaaaattaacggacaaatgtatcccattctttaatgtgctgtgaggcaacaaaaaatttaatggactgaagaatgcgaggaagctttcaaaaagctaaaaaaggatctgaccaaagctcaattttgtcaaagcctatggaaggggaggatttatacctgtacttggtagtgtctgatcatgccataagtgacgtactcgtgcaagaggaaggaaaggtccagttttcggtctactacataagcaaaagattgttgggtgcaaaatccatatacctaatgattgagaaattgaaattttgcttactggtcgagtctagaaagctgagaccgtacttctaagctcacgccataaaggtactaacaaaccatcccctccaccaggtgcttcaaaagcctgagtcttctagcaggcaattaaaatgagctatggaactcaaccagtttgacattcagtacaagtcacgggtgtcaatcaaaggccaagcccttattgattttatagtagaatgttccagcatgaatgacctcccagaggagccagtcccaaaactgtccacctagaaggtctatgttaatagagcgtcaaataagaaaagaaccagagcaaggatcattttgatctctctgtaagggcatcaactacaaagtgtcctgtagttcagtttttgcgccttgaaaaatgaagctaatagaggctatgttgactggcttaaagctggctaaaagagttggaccccaacacattgaagtgcacagtgattcccaacaggcggtaaactaaatctctatcgagtatcaaacaaaaggtggaaaatttcccgcttatgtcatgatgtcttgggatctgctacacgtattgaaatgctataagatccgccaggtcccaagggaccaaaattcatttgcggatatgcttgccaaacttgcaataaatcttgagatcattcaacacagagtagtgccagtttgtcacctagagaaatcgagcattgaggtccaggggtaaattctattgttgacaattatcattcttggacggaacctatttacaactttctgagtttgggaaatcttccaacagataaagctgcctatacgaaggtccaatatcatgctccgtgatacgtgatcatggatggaaagctttaccatcggggactatcaatgctatatttgaggtgttttgccagaaacaaaattagcgctgtaatccatgaaattcatggaggcttctttggagatcacacatccggtcctagcctgtcaaagacaatcctttgcgaagggtatttttggcccacaataaagaaggattgcattgagtatgtctggaaatgtgacaatgccgcaggctcgccgtaaaaaatcatgaaaataacattgagaaaaaactccaagtatgcaaatcttgttggctagaagagcttctgtgagtcctctgggcccataagaccattgagagaacttcaacaggacacacgccatatgcgatgacttacgggtgtgaagccgtaatcccaatagaagccacgagcccctcacactgatgagatacctacgatccttctcagagccatttcttgctccaagaatcgatagatttgatcgaggaactttaggaatagtcacaagtttagctcaaaatgtaccaaagaaaaatttcctgacactttaattccaaagtcaagaatcatacatttgatgttagagaccttgtcctgagaagagtattctcaactttgcaagaattggggacaggactgggccaaattgggaaggcccatagggaatactgcagaaagtgggccaaagaacatttcaacttaagagaatggatgaatcaagggtcccgcatgccttgaatgtagaccacttacatcgatactaccaataggttgaggtgagtaggccttaatgtctctcttaagtttcatgtaagtttttgtaaaattatcttcttaatgtaaacctaaaagtgtaatgaaatgaaagcaaaaggaattttcggttaaaatttatgtttttgttcttaggccacaaatagttcttttctaaaagactaattgctccctttcatgataccttctcaaggtgatagtggtctcgcccatcctggtgagaaccttttggctatgaatgaccggttttagggggaaagaaaagtctaactgtgggatcctgtcgaaagaactgttaggtctgggaggttggctagaggatgttggcctaataaactattgctctattatattttgagaggacaaagattgtgtatgtggttgatttggatgagacaaaactatttagtttttgacttgttgttgttaaaaaatttattattgttgcggaatccgttggtgttgtgggttttgctattgttgcttttgttgttatggttgttgttgttgtttcattggtggtggtgttgtagacaatggattggataaagttggggttgaaggtttttcctttttggcaccctagcttggggaagaggttggccctttgtagttagactttgttggtgtgcccttcttgggaaagaaggcccgttcagactatcatctgaacctcctatattcattggactggcataagttgctccctccactagtagagattccctaagtcttgctcgcctagagcaacaggttccttggatgcctccctgacagcaacaagagtcttctccaccccagtgggagccgaggaacctggtgccgcagcactttccttcgcaagaagagcaatttccctgacctctgacgatgatgaggttgaaggaggtcatggctttcaaatcgtggaagcctatgtctttgctttagccttccccttgtcctgggtgtctcctaccttggctaaggttgcagcaaacttgttgctcaaggactttaacatttgtgattcagaagtatctgcacggacagccacaataacaataacaagaaaacacaagccaagtcaaagcagataaaggaacaattataagacaacaaaattgtctaaaattacatgtgtgtgggtgcaaccatttagtgagcagctataaggttctccacaagcaaaagaaattatgtttctttgactaatgaagcttccatatcccgtggtcaggcaatgacatggtcacgaaaggatccaccctaacagtgtttgaggacgcctgaagattactagggctcctaacgatttggtctaccctatctatatagtctttcgcagggtatttatgacggtctaagctcaaaatatatttatcaactccccctgattgcactaggacatgcgtagaggctgggggtatagaacatgtagaagggtttattgcctcttcccgaagtactagctcccagagtccccacatctggatacgctacaacaaacctctttaatatttcttcttcatcagttaaggggtttggatggcgggccagccaatcaggttctaggagcttatcttctttagccacttcagttataataacggccacgttcgtggaaataacttccttcacctttttcggagcttggcgccgcccccggaggttaacgaggttgatactctagaatttttcaattagtccacacctccaaagtaaattggtcgtgaccaactccttaacttttaactggtcctgagtaaaggctttgcactaggcctccttcttggtaattttagcagttttagcactctggtatgatagtcctggcaaaaagtcaaaagtacacaaaaattccatcaataaataaaccaagtcaaaaatatacaagtattgtgcaccaacaatacttgttaattagaagttcaactagagtgagggcacccttttcaatgggatcccaaaagaaagaaccagtattcctggaggtcgtgggcgtggtcactgtgactaatgggacaatgagaatcaggatgcttgtccaatctgtagaacctagtttcttgttgccttatggtgccttnacactgtaaagtacagattcctccaggaagcacttccagatattcatcttagaaaaaatataccataccaccagccaaaaatttgatgatgacggggatcatctgaaaaggggctatctcaaccttggcaataaagtttgcaaagtaggacctcaactgaagatgcactctgttggaaatatgggaccagctccaagagcagaatccccccacgctcgtggatgcagattctctcgtggtggacatcctatgccacataaaccctaaaacattgtgaagtccagaaccgttggcatatgccaccaacattccgtaagaatggaaatagttcgccttttgatccatctcctagatggagtcattgaaaatttaggtagagggaggggtgttggccttccttttccctttagccttcacggagggttcatcctagatagattcaccctctgggatagtctcaaggaccacctttggttaggtacattagtaggaacctcggcttgggttccttccatgagcacctcttccgcgaggttagcaggtgcatcttcaatgatttccgtagcgcacaagtgaaaatcttggttcagatccattgctaccaacacaaacacgaacggaaaccaagctact

SEQ ID NO: 256451 - DNA, 4640 bp, Cannabis indica
aatctgattatgttgaaatgagttttatttacggcacaaaacccaactactcaatggttacatttttattgttaccgtgatggttgaaattttttttgatctgtaacagcatgtaaccaataggtaaaagttccttttttagaattaaattaatcataattaacaattttcttaaaataaataattttaatttaaatatttaataagactctttcaacaattaatatctataagtaattttatttttatattcaagttcctattataacatttttaacatttaaactattttactataatatttaaaataaaattctattattttttttacaaaatttcgacttccaccccttctaatataaatttttaaatacttaacaaacaaccgcttgactcatcttcctcctttataaaaaatattaaaaattaaggtttcaatttgtcctaacctaacattatgtgaatttttcacttcgatgtaatctcttacatctctgccacaaacccatttctctattctttttttttttttgttgagtcccatttctctattctactagctacagttagatttcttcttaatttttaataatttgtttgctgttttcctactgttttgcttatttgtgaaaaagaagcaacaattttaattaattgttgatctactttgataattttttttttataatctttagattgatgaagatgatttcaacgaggagcgaaaataattaataatcattaattttatagtcgttatgacattttttacttaatttttaattttttaacagaaaaaaactaaataacttgaaccaatcttggaccgacacactaatttggcacttaaaggtgttaaaaaataagatagactgtaaattacctctaattagaggtcattcatactattttttattaattaaggttatgtgtgtagtaattttaaattataaagacttttgttgcaattatttaaattatttaagttaaaaaaattgctaaaagatctttacttattaacaaattacataaaattaattaataattagtagtaatttaattttaattaagtttttatgaggaaataaagtatcaagttacaggttatttattattatttttttttatttctaaattgatcacaaccattcaacaatgatctaatggttaaaaataaatgtagccattaatgcagatcttcgttaacgataatgagcctattttcatgataggtttagcacagaaattatagaaattcaagaaagaataacaaaagcagaaataacaccaggttttttatgtggttttacagtttaactctgcatagtccacgagtcaatcttattaagacttttttgatacaaaactagggttctttacaatcagagtattttctttttctctctcaagaattttctgtcctttcttctgtatattctgcccctatttataataacataggttggcagttaattacattcaaattcgaatcccacaacaatatttccccaaaattatgggctttccattacgctcataaataaatgcagttattagttgaaaatcacacactataatttaacctgcttttctgaagggtcaattgctgacgtggactcagacacgctgcaaagcatatctcgctgaggcatctcgcttggtgcacgaacaacttgatatattcataagtcttccaacaatgacatgagcaccagtgtactgagcaaacttaaggactgctctttgaccataaggccttgcagactggaccatcatgtcttgggggttctcaatagcaacaataaccctagcaacgaattggagtttaccaggagcatgccttcctatagcgagatggatgcctcgctattcatcatatatgtccttcaagctgttacacatagttagtataatgtatattatacgctaagtatttcatcagccaactcgccttgttaacacatctctccatattgcaaggtagatacctcattatatattattgatgtcatccttgcgatcttgtaaatacgtaaatcaatagttcgtatatccttgccttgctgaagactgtgaagtctgcgagttataaatatacctattgacttcttcatttaaagagttattccatttaatatttattaatataattgccattatatttgttcgttcatattctctgagattgacatgtgttgccttctgaagtaccaaccaaattttgggtataacaattgccccttaaaaaatccttttaagtgaaaagtgctttttaaatgattacagagggtatatttgtcacaatccattttgaaaaaatgcatgccttcgatttcaccgattttctgattttaaggcacatcatgagcattaaataataatcttttccacttccctctcgtttctacctgttggaccgtttatattttaatctggcgaagatcaacccaatggtataaaaccaaaaagaagccaccttttcatcatcttcgtcattttaaaaaatttcttgagcttttttttgcggaaaaactctatcctagttttacaaagctttgcatgccatctttttctttgacatacttcttgcaaatttcatcggacttgcttttgcttttccacaagcattttgaaagatcatcacagcatttgcctcattaccagttgcagagccatctatcacaccaccacttgatttcaaacagtaattaagtacccatccttctctatctttttcttttcattcctggatctgatcattacttttataatttgcacctttgtcatcttatttggttttagcgattttaggttaaatttttttggataatttttagggtttaggcagagcatagacttttgggtttctcaatttataagcttctggtttgataaatttcatccaagaattgggattgctctcttttttgtaacaatgtcccaatctggttcaaaagtttatgctccagaagttttagaaacagagtgtcctagtgaacttgccatcccgtataaacccttaatttcaaaacccaaatccaaattagagataaatgatgcaaaaattagggaccacctaataaaaagccaccaagatgatatttctagtcttcataggcgtttcttacaaaaaataacaaagggtaaacctcatttcttgcgagatgttgcttagcttgaacctccgagtttatcatctattccttttgctaggcctttatttttacccagagtcacaatttctttttcactaggtgagctggattttgaaatcatgactttcaagcctcgtaaatcaaagactccccaagacaccaacattacctttgaggccgacttatcaagtcgagtgtacgagccattggggactatgtaggtagcatcctaaggacttgaggcattaaccaaaaataaaaatgccaggttagatttgtagcccctggtgagtttagctgttacccactacaacgacttacttgcgaggcactcgaggggaccagtggcgaggcaagtacgagtggctctactggaataggcacttggagcctcgagcatattagggctggggaaattctcgccctgcgtgattactttaaggacttccttaacaatctcgaaattgccccattctagctggtccctatttcctacagatccttgcaagtttaaaggttctgtacaaaattttaggatgggagtgaaccactcccctagaaatagtgtatctctctactcggtcaaggaagtccctacgaggaagaatgctgcaggaggcttttattatcttgggactcacacaggcgatcgtaagatcattgttgggttgccaaacaagacttctttcaaggaggacttcttctagacgactggcctctccccaatcaacacaaccatgtttcacataatacgtaaatgactatctacctcaaacttggtttttaaattattccatgcttttaactttagtctcgttgacttgtgatcttattattttaacagtggtgtcgaaaagaccaactcctactcccgagatggccgagcgacgcaggctcctactgggtcttccctatgatctctgatcagtcgcgttccttttgaacaaggccaacctgaggtccgtgggcctccttgctgagaatgagtatactagtgattttaaatatcccaagtatcgtcgtgccattaggttccggtcccagccaacgaggaaactcaggactatgtggcttgggcgcattgccttcagaacgcagtgcctcgggaagctgaagaaggagaatcccgaggtaatcaatgtggatggtcacccacagtgcttagggccaagcgtaccacattagtgtgtttcagagatagtcagtacaatttttacacctggaatccctttctcatagatcgcattgcacataggttcgatagttggtacccagaattccacgttcaaattagctgtacttactcctactatgggatagtcgagcagtagaggactatgcttgataggtcaggtcatatagattcgagctgggatttagaaccaattaattcctatgacatgttcaggaacacaggatctagagaatttagtgaatgctataatcctccttcttcgtcttgttatgattatggtaaatccctta

SEQ ID NO: 256452 - DNA, 3660 bp, Cannabis indica
gttaatgtattgtttacaaaatatattaatgtgttgtgtttttaaatttaaatttttgatccttttaaaaaatgataacttttaaaataattaattaatgttgcccatttatttttatttttaaaaaaattcaaatgcgaatctgatttttttataaaaagataaaataatttctttaaaaaataatattaattggatatttgaagaagtttagtataagtaaacacaagtttgaaataaaatggttaaagtcggaaacttcaaagcaaaatagttaggtattgtcgttaggcaatcctagttattaactaacttaattgtatatacaaagctaagctagggacaacaaaatcaataaaaatcaaagcttttgacaatttaacatgatatttaatgcaaaacatatcaaagccataatcttttttcaatattataaaccatacaaataattttagctatttaatatttttgtccccaaactataactaatattgtactattaactttcactccgttaaaaataacctttaaattatttacaatattataaagtggttctttcgtcaaatttttcacacgtggcaaatataataatgacgtgaatatttatattattatcacattagcaagttatgtgtaatttaaaattaatatatatatatttttaaaaattatctaagaaaaaaaaatcaattaataatttttaaaaaattcaactaaaattaaggtaaaaatttaaattattttttaaaaattaattataccgtgatgttttcatatcatcattatgtttgtcacatataacaatatctgccactatgacataataactactttatgacattatgaatagtttgaggactatttttaacggattaatgattttgggagcagaattatgtatagatcataattcagtgggcaaaaatgttaaatagataacaattttcattaactttctaaataaatattcaatccttaaaataattacaaaaagaaaaattataaaaagaaaacagctcacaccaataatgaagcctcatttttgccaatgtagtctttgtgtgtgtggagttgtaaccttttttatctaagatttcatcatctatgtctctataaacccaactttacaactatgaaagtggcaacaaattttgtgatctgggttttctcaatttttttttcgtttttcaaaactaacatccccgcctaaccctacaggtatcggggaattataacaattgttacataagtactcagaaaagactcgaacctcagactttatggacctgggtttttatgcttagggaagagctttagaagcttgattagctcgtaagtgcgcctgtcaccacccgaacacaggcatatatcaagaggggtcaatccattctgcaccaaacaacaaattctaaccattaatcttatgtttggtatgaaagaaaggaaatagatgggaaacaaaatgtaagagagaaagaaagtttatttctttcttgttgtttagtggacatgaaagaaagaaaattgatttattgatgtttataaaacttttcattccatttttctctccaaactggaggagaaaaatttcggtaggccccacttaatatttttctcctcacttttctcttctctccatttttctttctcaccaaacactctaccttttttttctttctttcctctcatttttcctccctaccaaacaaaggattaaagcaaagaaggattcagcctgtgttgttaccttgttttttaatgtcttatcagcgcctttgatcaataagagcttcacaacatctgttcttcgtgcttgaacagcgagatgtaacggtgtccatccatcctagtgagttctcaaacacgaatgaaatcaaaatttaacttaataaatcgtttgaatatgcacaaaaagttgagcaatagcaagaagtatgaagcttacattgtcctgagtgtttatatcgacattatacaagaggagaattttaattgcttgactcgaagttgttcagacagcataatgcatcaatgtcgctccatcctgttttacacaaaccataaccgaagtaaataaataaaagaaaacatgaaaatgggcactccatttcttctataaaaactcaagaaatgaaaacaccaggtcccgaatgaagacctatatcttagccaccccattctcagtattaggctatacctaatggatttttcgttttccataatgattgcattgcactcagacaagatctttcattcttcaatgcttaatgctatgctataatgatttatggcaacacatattcatagacgtttgcttctattgtagttcattgcttctatgatcatttacgaaattaagaataggcataaaaagcactgatgaagatgagtttattatatactcactttatcacaaacgaaagggtttgcatcttccctcagaagatagttcgtaacagcctgttttttcccgagtattgctttgtgaatagcagtccaaccatcctaccaagtaagcaaatcgaaagttctaatgaggaagaacaagaatgcagacacaagaaaacattttgacagtcattctattctacttaccttatccacagcattaacatcagcaccgtgtttcattgcagcgtcgacaaagtaaaattctcccgatgcagctagagtatgaagaggtaaccatttttcctggaaaatataaagaaaggtttatccttttagttaacaaatggttaatttttaaaataagaaaagggattatcgatagaataattgtcacgaaacattgaaaacttacacagatagcagatttcagatcaggtacccgcttatttagaagaattttctcctcctttgtaaacaacttccggggccctattatatattcaaaatcctaacttgagaaatgttccattatgtattggcttattactagttaaatcatgctgcacatttccatggttaatgatatgcatagaacatcacaggcaaacaatacaaaagataatcattctgcacatttccatgattaatcatgcctctcgacagattggaatagaagagacaagactctcgaaagcttgatttgtatactttgtcacactgttttgctataaagaattcttagggatttcactatttgtgtcatgatttctaatataatatttccactcaaagaaaattctatcataagaagaatattaatgagttcatctctaaaagaattgcactcatcataatttatattatatgcccttacctattttcaagcacatattttttctatggtttgcacctattattctgaaccaaagagtaattaggctaatactatcttaaaaatccacactttccatcgacaataagaagatttaataacatcacacaaacacacacatatatttaatcaattctatgctagcatgagatggtaatctgggtcagacacgataacacgactcgaaacctgcacaaaataaacgggtttggattgccttaaataggttttggtcattttcgggttgacacacttaactcgaaaatgacatgtaatgacctatgaaagagtatacactcttaagtttattatatttattacatgtaaattatattttttagttaaaggagctgagtttgggttttaatttttga

SEQ ID NO: 256453 - DNA, 2556 bp, Cannabis indica
atggttttggtggtattaccttcagacacaacagcgaaagagcaattgactactagagaatgtgaagatctgggtttcacaggccttgctttgtgttctgattgcaattctcttgctgagtatgtcaaggaccaaggttaggtttcccttttctacaattttgaattttctttctttcctactttattttttttttcttcttttcgattcaattacttgtttttgtgattttgaagattaggggttaattgaaatctattgcataaactccttcgagctttgttatgtttagagtatgttaaatttgatgcctaagatttactcatttcataacccaacattgataaaaaaatataattgagtgatccaaagcagaaagtattggctttaacataaaaattaaagacaggtgaaacaaggagagcaaatttttgataagacaaacttaaattagtaagaattcatatccttatggtttataaatgttggttttcagcatgagttgtagaacaatggatctgaggtttgagaagttaggtattcaattgcaagaatctttgtctggctttaaaagatattgcggattcctaattgcttcttgagccagtgttttcatcagcatagagacttgtgtaacttgtgtccaatattttgcatatttctaaaaagctcaattttgattgcagaactggtagcagaatgtctgaagtgttgcacggaagattctaatgattcttccagcaaggtatgaatgatgatcttttttcctctattaattattagtttaggtatcaagtgaaactatgtgtttgaagtttccttccttgcaaaactttaaactttagtttataaatgatatggttgcccaacctggttcgtgttttggcttccacacaatatgaactggtgttgtaatatggaaatttggaagttggtagtacttttttagttttaccctgtggataatagggttttcattagcattttacaatacacttggattttatttttctgtgttttacaagaaagaaagaattgcttaaggaactatattgaactacagataacctattctggtgccatattggaagtgtgcatgaggaaactggtgttctatcccgaaattgttggtttcatcgaagaagagaaggaccgctttccctttgttaaagttcaatacattttcaattcaccacccaaactgaacatgcttgatgatgctggccaacaaaaggagaccataaggtaagacccttttccacaagcatcaaagaaacaatcgtattggcttgccagagtcctgccacttttatatcctgtcacagacacatgcatagagaaacagtaaaatgatataaaaagaatagaatgagaaaccttagatgttggattttctgaaattttgaagaaaatggattagaagtgagaatgatttgtagacattttaagctcaaggcttgtataactcgaataaaggaattgattatacatgttaatggtttgccgaagtagttgaattttattgttcaagagatgtattcacccaaacttactgtggaaaatgttttgctgtgttgcagaattgacaattggaagcgtgaacatattctgcagttcctgcaagagaaggttaagcctacttcggcatcttgagtggtcttattctcaatcctttattgctcacatgataggaaagtttccaattcaaattggcacttgaacactgatatttgttaacaggggaatgattttatttaatgaactgactgcagatatttctatatctgatagttcttattggtgtctttcgccatgttattggattttcagcttgttgcaagatgattttaggtttataaatggttttagctcaacgagagaagctactccattttgtaagatccatcaaatactttttttcttttatttcggctaaatgcagaaaagcaaattttggatatgaatcgatcatgatgatgggtggggatgggaacaattttttgtgcgggtatcatcattcatttatttattttagatattattcagtataattataagtttaatgttaaatgtaattcagcacaaaagcttaccatctctgcatctgtagaggcaaggaagaaaagaaaatgtacaataagaacgtggtaaaattttatgcccaagatcagaaacagttagtcaaatgttcagaaataatcaaccaataacaatgatgatcgcgcatgcaaacaattgaaataaagccatcaaaacatgacagataacagtgagaataatgcaaaaaggtttattccggcggttcaagcatgtgtagcgcaatacaatttttcaagtcccaattccctttctccctctttgaacttgcaaaacttccatttgaactggtggaaagagatacactagtatatatagaccaagttcgagtagttgccgcataaaacttaaccaaaagttggttggtgatttcgagaagtaaatccaacatagaacattgtctatgttcgagtgtcataggagcaaattgtcaatcggagcaaagaagccaaaatcaaa

SEQ ID NO: 256454 - DNA, 2269 bp, Cannabis indica
tggaagatcatgctcgagaaatgtggtggcgccaagatgaccaacatcgtcacactcaagaagctatcaatttatttcgaagctattctaaccaaaacattcaagggttgggtattgacgcccacaacaaccaaatatctcaagaccaccaaacctatccacaagaagtccataccttgagaaaccaacgggagagggtggtctacaaacctgaagaacgcccgaggaaccaagtccaacagggttccccacaacaacaatcgaccgatccctgccgatgaacaagtcctacctcagtcactatatggttcgtcttttcaggtgcattcgttgtcggaggggcttgtacgtcgggaggcatcttagtcaacgttatcacagcctccattctggtcatgttgccaagaaaaatctcattgaactgatcttgttgagataatctcctttcggtcaattgtaattatcgcgccataatgaccacaaggttcaattcatcaagctagctttttactccaacattattctcagcggctacgtcctaagggtcgttttcctgcatgtcttctagtgtaccatcatcgtttacctcgacatcctgagaactactttcttctgcatcttccacgatgggagcaacttgatctcgatcttcattacgacgaccctgctggcgactggttacctcttggggatcacaagtatctcctactctagtattagggccagtgtaacgaacgccaaattgcgttctggtgagggtcatgattacgtgaatgcaattaaaagatggtctttactgctttcttcagctctcgatgaaagcaccaaaatatttcttgagattttcagaaatcgaataaaaataataagatctgaagaaacaataattaacagaaaaagtataataagagacaaaaaaaaattacgtggttggggcgttaactaaccttagtccatgagtcaattttatttaacgatttgtttacttgtaaatactttaagagatacacaggatgtatattcatatgtttgcctgagcaaagtttgtaaatgcattcaacccctaatccatgagattagtcgagtatttatagtagttagagaattacattagggttttcccttttccctctacgtactggggagtttacaactaaacaatctctttgggctttctcatgaagtccaacccatgaagaatatgatctactgactaggctaattagattagactgatcgaatcaaaaccgtgtccgttaatggtggaagattattctgaaatgactacatcacgcttgttatgggaagttccccctttaatcgtaatacgatattatggcgtgatctgagaactgacattttcttatttatatgcaggattaaataggaaaactaaaagggtcttctgggctcaagataccggaggcatcttttgggctcggtctgccgagggtggagagctctgcaagcacgaaactaagataactcttagaagggcatattaaagtgggcttgacccacattatccttgatgagggtcctactgatggatcttgaatgctgacttggaattcacgtgtccaatgttaaaaacgcgaataacgctttgtatgtcacttaaaatctgaagcataagccctttttgtaatagtgtaatgcacatataatcataaatattaatttaatcactaataatctactagtttgtatgtctaaatatgtggtcattacaggagaaaaaataaggagaagatatctgacaagcaaagagaaatcttgttggacttccgtgtgggcagtggacgaccagagcttgcttggcattttgaaagttcatcactcgggtattttgggttggaggtggctttcgtatggacaggggatgactagagtagaccagtcaatctgaagaaggtcgtcgctcatagaatgttagaagagagattgagtgggattgaaagaaaataaaagggttaatgaaagagagtgaaattttagagagagggagagggtttcagaaagagaagaagaaatggagaagattctggagttttcatttattcagcctcaacatcagtgataactttatcgtcactgatggactggtaaattacgacctgccaatctatcagtgatgactttttcttcactaatgctattagaaggaaaattatttccaaatgtcagttttcaaaatatatataattgataataatgctctcactaaaagggtatgtcgtcactgatagttaaatttatataaaaaaaa

SEQ ID NO: 256455 - DNA, 764 bp, Cannabis indica
tgtggtgcttctgttcttggtaggcaatgcaatcactactcatgcatacaagtgtatagaaacagagagacaagctcttcttaccttcaagcaaggtctagttgattatcagaaccgcttatcatcttggacaagcagcaacaagaattgctgcacatggagcggaatcaggtgccatgatttaactaatcatattatcatgcttgatcttcgtcctaattttacctattatgatgctggtatgcgttggggtcctatttatggtgaaattactctctctttggttcaactccaatatttggagtatttggatcttagttacaatggtttcactaaaatccccaactttatagattccttcacaaatttagaatatctcaatttctcagggaatcctctaataggaaatattccttcacaacttggaaatatcaccaagttgtgtattcttgatctcagtgacactatggctatgagtagtttgatttctaatagttttaaatgggtttctcatctctctaatttgacaatctttaaaatgagtagtacaaatttcaccaaagccatagattggtttcattcatttaaaacagctccctccttattaagcttacacttatctaattgtgaatttccaaagctagattatgattcctatttttctcatacaaattcttctaccaattccatcacaacccttgatgtatctcggagcatatttgggtctacaacaatttcccgcttgcttaatttgagcaataatc

SEQ ID NO: 256456 - DNA, 610 bp, Cannabis indica
ttaaaaaataaataaatcaatgatgactttttcgttattgaaaatattatcaatgaaaaaaaagttgttattgatagacttacggactaaaaaaaaataataaaaaacaagcatcttattgcctatgacaaagtcgttggtaattctttttatcaccaacgactttaaatgttgtccgtaatggtacctatcaccgatgaggtatcacaaaaaattttttactgacgacatgtcgccattgatattcattactgacgaaatacccacatgttactgacgaaaatttttctcattgaaaggcatgattcttgtagtgtttgctttgagatggtgctcagtaatgaacctcccaatatcaaaagtggtttcacattcaaaaattcttgtgaataaaataacgaattgtaaacatgatctctctgctctttttgatttagtgaggaatatttgtaattccttatcaaactttcttaaagtgtcagttagctttgtttctaggaataataatgcaacaccctgactttcagggacgccacgtgtgtgctttagaatcttattatcactaatctatattagtttaggaaaaaggtgtggttaggttttaaacttt

SEQ ID NO: 256457 - DNA, 1281 bp, Cannabis indica
gtaacatttcaattcacctaacaattccattcattttatggacacgacataataaaagacaaatattccagaagttgaaaatcttaggggaggaaacttacaattacaaaaccaaaaaaaaaaaatcaagaagtgatatgccccgaaccccatggaacaaatattaaatgcaaatactactaacagtagcagaattatgtaatttgagcgggggcaatctgtctttgaaaatgagttcaaaaacagatattacactaataactaacaattcatttttcagctacatacaaggacatgtattcttccaaagtctccaatctttaaacaaaatccagaacagaatattacattcttgattaaagttttaatgagaatcaaaaaaaaaaaaagtttcaatgagaatcaaaatcttaataaaattgccctctcactcagtgtcaaaatggcatatttctgcactgcattttagtaggtttccaaaaatttagtaagagccagattttactagctcacttgcacttgaccagaatcttcagtaaatcaatgacatcatggaaccaaaacttgtttctctcatgcaacatatgacattataaaactattctagagattaatttaaagatttatagttcattaggcattacagttttaaagatgcaatttcaaagccacattaaatatataaaattatgcatttagaacatgccttcatcagaattttcatttccaccaaaatatgcaataaaaaagtaccaaggtttagaaaaatcctaagatggttgtgacacaaggactgggtcatatgaaatttcagaacatcccagcaagagtttagaaaaactaaaaagctaatacatgataacaagttaactggaactttcagccgagggatgtatatatgtacgattatattatatacaatttcaaatgaaagaacagaatcacctttgttctgttggaaaataataaagtagacgtcctttaggacaccgagaacgacatagtatattttcaaggccttcatcctcgtccattttcatcactctggatactaattgagaaagagcacataaaaagtttgtaactgttagagcaacaaaatgacaagaaggtagccaggaaatttgcttatttacaaaaggctagtgtcttctacttgcttttacgggataggtacatttatttctttttatcatacatgaacacacgatgtgaaggcctattcagatatattttttcaaagtgaaatgaaagtcttttgtggatgtcaaggttcccgct

SEQ ID NO: 256458 - DNA, 1509 bp, Cannabis indica
aaaaaactctcataattatcgaaatcgataaagagtgtactaaaatatttgtttaagggagtgtactacaaatttaaccatatacaatacgtacaattatacatataggtcatccagcccatattaaaaagctcgtaaaaattaaaggggtaagttgaaaaatatcacttttattaatcaattaatcaaatttacctctaattttatatttaattaaaacaacctctttttatatgtattatacctaaaataacctgacataagagaatcacataaagagtatcttgaagtaatagggacaaaattggtacaatgtttaaaaaaagaggtaaaaatgatagactttaagaaagagggtaaaaataaaagagaacaatattaaaaaaagtatagagtgtaatttcctcaaaattaaataggcctagcccaactcatgtaaaaataagaattatgccaagccaactcatattttgaggtaaaagtcacccgacttatggtcacataatgtatgtggcaagctttgacggaccaaaatatgagtttttatttttatttttatacaagcctaaatttgtacatgttttctctttttctcaagtaaatttgttaaacataaatatgaaataattatgttgtatttttctaagcataaatgatataggctcgacatgtgttatcactaaggaaagtacaagtgatgcaacactcacctatgaaaggcccacatgaatccccaagcggatcaataaactttccctcaaacaaagagacaaattccacaatcatgcatgacagttggccttggagaagcgcccttggcatgtccaagaaagagttgctaaggaatacactgaaaatggtcccgggaaaagtagttgctcgggatatattgagctttgtgccctaaataaaactctatttcaatgtaattttttctattcaattatcaataaagaaacatatttattaatttcattacttctttaatgtgttatttggttcatgtgatcatttatttatttatttgatttataatttcattcaaatccttatcacacgctgatattcttgtttattgtgttgtcaacatagtagtaagtaagcaagattgtatgattaaatgtattcctatgatttattaagaatatagtttacttgcaccttggataagtgctatgtcctttccagggcattagttaaagtaagcttgggttggatgtatggagtatgaatcagaagggaccgatattgaacttaaatcagatatgataaacttactataatatctattcaattcaatatcacctagttgatcttagattaaatgatctcaatcctgagatggttaggttctagttcaattgtattatttgtcttcttcaatcagttcgttaaagtcgaccaaatggatcttctcgtgacatatatattaaggacatggtagttcaattgagtgggagcgctaatcataaatacggaatttatagcttctatccggacatagaagtg

SEQ ID NO: 256459 - DNA, 857 bp, Cannabis indica
accgccaaacacactaacaaaaaataaacgaaatagtagtcaaatatttattaatttagagaattaattagaaagagtagtaggtaccataagattaccaccaccagaagtaggtagaagcaatggacgggtgatcttgtaagtgccaccatcaagatgaacctgtgagccaccaagatcaccaactcccttcatcaaatgctcatcatcatccaatggagactcgaaagcatcatgaatagctcgctcaagagcttctgtgctgtccgatgtccctgttgggtctgctccgtaatccaccacgtgatacacacgtgatgccataagaacctgtatcaaaattaatatcaactataactaccatgaaaaatccaaggatggagaggagaagagaaaggagtgggaggaataatcaaatcctcattaaaggaacatagtaaaaaggaaaagtaagaacataatgaattcactctaatgtactatttaccatttagaattcttagaaaagaagtcatactctctattatttgttcaaaattacaaaattttcttctaaaagaattatcaaaaagtattatcaaataatttagtcatattgtaaatgaagagtttgtatatctatcatcattcaatctttttatctcctcttaccaaacaatttagaagaattaatactctcttcttcctcttttatattatccatcttctcttaataactctccacccattttattcttcttcaccgtaccaaacaatagcatatcatccccgtttctaatctatctttcatcgctagaccaatatagcttaattaatatcaaattaaatttcaattcttccatgatcaaaggctacct

SEQ ID NO: 256460 - DNA, 2466 bp, Cannabis indica
ttatttggggtttttcttgtattgattgcttttatgtttggttgaaattctaggtcttaccatcatgggtaattgttaactttcagtggaattgggaaaatttaatacctaattttcttcttctcttttgtgaactttttcaattatgatattttaggaaaattatcagtcggcgtgagtatgatattatctcttgaatttactaattttataaataatatttattcatgtggttaattgagtgaattagctacaagaatgtaagactctcttattttcgttttattggcaaagattgtgtatattctttaaaattaactagaattaaaggttattattttataatctagatatatatcaataattgtgagaaaaaaatcaatggaatcttgataattttattacaggtcaggtcaccagttgaaaggccaatcatttccaccatattagttgaaaatgatcttcttgggagattgtatgttgcaggaccagtgaaaacgaatcagatatctttctatgcaaatttgaagtattgtcaccttgttgccattgtttatactgtaatgattttgaagctaatctccatttattttgagcattttgtttttgaaggtgttcctattgctaggttgtatagtctgtattcatttatctgtttttgttcctgatgttgttactgcttttgtacattttttttttaattttgtcttgcctctatgatgatgcatttaataacttaaattcttctaggatatctcatgcagaaaactattagagacctgaattgaagaggcaacattatgaaattatatttgcgactgttcaatattcctttttgtttcagcaagtgttctactttttctttaaaaaatatgtatatttcataatgttagaagtcttttaacacggtatcttttcgttgtttgtgtgtggttttcagatcaaattaaagtttggattttagagacaagaaaatttcagaatggtgtatttctttgtttttagttacttgtacatttactttttcattatctttcactgtttctgtaggtactaatgtgtctttccttggattgggtttgtggttttgcttctccagtcggccaatggaagaagatataagtttatactttgctatgttgcttaataaatatgatttaaaagtatctttaatagtttgcaatgcttaaatgttaatgctaatagtagaagtcgatcgctgtaggttgtaggattattaggaatttaatacaggaccagtttctcaactgatgatgagtgtcaaaaacaatacccaagtaataatgctctcttgtgattacatagtgttgtttcatttttgtgctttgtaattccagtaaattgtttctaaaaaaataatattttatctgttgtcaaataggtgctcattaattgtcgaaacaacaaaatgcttctcagttgagtaagagcttttgacaggcactacaatgtggttctcgaaaatgttaaagaaatgtggaccactcgattcttgtttcatcattcatttatcatctcattatgtttcaatttcctcaaattacttttttcattgtccaggtactgaagactaggaaaggcaagaagaaggcacaaccagtaaacaaagacagatttatcagcaaaatatttttacatggagactcggttataatagtgcttaggaatcccaaatgaggtagtatagtgcttaggaatcccaagtgaggccaatcttgttatgttattcaaaaaatttcttatcgaaaaaaatatcaataaacttttaaatgttgatatttgtagtttgtttgttagtttatttttagattggattaaaaaattaaagtagccattagttactataatttgaaatatatgttataatctatataaaataaatttagtttttttttaatgaatgattccaattttaatttataattatagattttggtttttttttattttttataattaataaatttagtttacaataaaataaatgtatttagtgagttaaaaaacataatttgtgagtgataaaaaattaaagattataacgttgtaacttatatgtcaaagttttatattataaaattttaaaaattccaaatattttttttttgaatttattattgttattatttttcatatcttattatttatttaattaaattatatatgataatatttattaaaaataatatctttaaaaaaaaaattagtatctttatttattacttaaataaaacaaatcattcacataatcatacatttagttacagaaattaaaaaaaaaaaaaaataaccaaacgtgcctcggcacgtaactcctatctagtattattatatgagtgtacttttaatgggtattacccatgaatggataatattataaaattttgagtttttatgattaatttttctatttaattagaaaaaattcttatttttacattatat

SEQ ID NO: 256461 - DNA, 716 bp, Cannabis indica
atatctgtgataatattttattcctaatattttcagaaatactcaaaattagaaaaatcatttgaaagaactaatattcagctccatttatatcatccatatatattaaattacccccacaataaaacatccatctataaatttctggggaaggaaagaaactttttttattaaaaataaataaataaataaataattgtaaaatcaaacaataccaccttaaaggctcaaatgaaatagtgggtaactaatgggtacatgacattcaagcctaaacttattcaaatttcatttctacactgtaatcaatctcaatcatttaggaaacaaaacaataaaaactgagaatttagaggaaaaaggggcatctgggaatttatgaagtttagtttagttacctgaagggtgttgcagaggaagtatggatattggaaaaggaagataatggagtgaagagaagagagccaccattgttgggtaccagagctgtggacgccatctcagtgctttttagagttttcttacgtgttctcttccctatccatatattatatacatgtcttaatttatttgtttatttatttaaggataaatactattaccaactctattttttaaaaaagttatcaattagattttttgttttgttaaataataaaatttattatgtattttttaaaattgtacaaataaaactctgaactcaattttcaaca

SEQ ID NO: 256462 - DNA, 1784 bp, Cannabis indica
catttttggaattttattttggctttttattagtaattgaataatttgaaatttatttgagattagtgtgtgatggaatgataatttttcccttgatttatgctaggggtgaaaatcggtcggttgtggtcggtttttacaattttattacgatttttattttacaaaaatcgtaaccgaccgtctagaaattataaccgtataaaaccaactgtacggtttttggcagtttttggtttggcagtttttggcggtttattacggtttttggcagttttgacagttttttagtttaactattttttatttcaaaaactaaaactgaccgccatataaaaaaaaacgaaaccgaaaccaactgcaaaattcggtgatgacgtggaaccgaaaattcggttacggtctggttggtttgatggtcgattttagtttattggtttttatgaacacccctaatttatgcatatgtggtatattggtcgtaggggcattttggtcttttgactatttgagtttattttcaacaaaaaaggaatttaccttagcttgggttttttgacattttggtgcttggatttgtgaggagcttgaggaagtttttccacctctttatcttgagttttgttgctgaagtttggagttaaaaagtatgctttgatgttgtttgtgttcttgaatgcatgtatgtgaattgggttgaatttgtgatgttttagctaagttttcttgttagttaggatctctagttaatgctatgattattggaaagctcggattgagtttagaatgtgtgaatttaagtttaatcttgatttttgagagctggaagtttgttgtgaatcattgagcttgtgtatgaatatttgaggttaagtagtgtagtggaaactttgtgattatgagtgtaagtttgttgattgtggtaattctagaagagcttggcttaaattgtatatattgatgttgtaaggagcttgattttgtgattttaattttttgttagtgatggccttaatctatgaatattggatttgagtttgtacatgttatttggttgaggttggtgtgtgttgggcttggtttcgtgctgctgaaaagtgggttttcagggtttggaacccaggtgtcgcggcctctgctatgagcgccgcggccctagaaattctgggtttttcaacccaagtgtcgcgactcgcttggggtgtgccgcggcccaccttgaggtttctgggcagtttgtgtgccgaatcttgtttcgtgcataacttttcgatccggactcagatttgggtgttccgaatatcgttgaaaactcgttctaagctctgtatgtttattgtattgtgaatgcaaattttataattatgtggaagtggatttagggattaaccctatttgttaatcccagaaattgtgactagtataaccggtgcttggttaggagcacctagggatttagaatctccacgtttttgggacatcatgtaagacagtagttagcatgtagagttaagcgcagtggcgctcatgtttgatattataattatgattaattgagaactgggattatggttattaccctaaagtgagcggttatatggcctaggattattaccctagtgactagatgattttaaatcctatgccatgctatatatatcgaagtaaaaaattatgtattcaatgtataatttggttagactcagtaattagaactgagataaaccgttctaaggccttattctagttagacgcgtgagcataacactgttgggttttatgcc

SEQ ID NO: 256463 - DNA, 1802 bp, Cannabis indica
gtctctttagcccaagatttgcaggaatttaacaacttcgtagctggtgttgaaacctttgggttagcctcttgttcctcttcaattagggggaaatcaccataagtatctaattctagtgtattttggattgaagggagctccatcttagccgtagttttaatacttttattagtactgtataaatttaatttatatggtcttcaactatctctctagtgtgagtgttcccttcatttcgtgtgtgtcttgtgtctcactcttttgccctatattttcctctccttctttactgtgtgtttaggttagtcttgctgtggtgtgctttactggtttttagtgagttccttcttgtcttaagtgttgcgtctttttgtttgtctgttttctggtttgtggccctttatcatctttgtgtctgagttggttttgtcagcttttggagaggttggtaagattccttttggtgagtttggtttgtctcttaaaagctttgtttggtcttctttgtcgggtatttatggagccaataattgcttccaactccactcttaaaggcaaatgcttttcatgccttgaaacctcggtcaagcttactccttgtgacgcttctattaaagctttgtcctcttgctgtttggttgggaaagtatttgcaccaatggtggttgaggatataaatgttactgattttgttgcaaaaagctggaagataccagtttcggttgtggctttggaggatgtcgagaagcaagctaatgttttcaagtttggatttgagagtgccgttcaaagggactgggcacttcataacggtccttggtgcattcgtggatacactctggtccttcatgcctggtctccgacttttgatattccgacagccttcaatgtcctgcgtgtttggattcaaatccatcaccttccccatgagtatttttcgcagtcaaatggcagtatgttggggggtttggctggtaaagtagtgcaagttcagatcgatgaaggaaagcctgcttcatggagcaaatatcttagagttcaagtggatcttgaggttgataaacctctgttttcaggttgctttttcgacctagaatcgggtgtgaagaaatgggtccaaatgaaatatgaaaaaattggaattttttgttatttctgtggttgtctggggcatcaacgaaggggctgctctctttcgacgccggtgacggtggcgaatcttgatggtattccgtttccaatgtatggcccatggctctctgttttgtctgcatatccgagtgttttcgctggccctttatctggtagtgcccgaaagtccatgttatcggctgaggaaaaggagggtggttctgtgttgttgctgccggcggctacgggagatggtggtttgggttcgaagggaggttcgtcttacgtgcctcgacgtccgagccatcctgtgaaagggacagcccatgcggctgagggtcttgggaagacccatcgggctgtgtggttcccaaagaggcgtccttttgatgcagtgagaacagttgccatttctggctatggaggagagagaaacaacctgagtgtgagaaaggatactgcatccttacctgttttgccttcaaatagccaagattgtattttgtatgatggtcatttgaattctttgaccgttagagagaaggaagtggaaggtgggcctggggtcattgggccgtgtgggaatttcaacaaaaaggctggtcttgaggaaggtgataatgggcctagtcttttagctaaagataagtttggaaatgatgataatg

SEQ ID NO: 256464 - DNA, 1371 bp, Cannabis indica
ctagtaaagaacgttctactcatttgttaagccttgtaaataggtgtatgggcgcctagatacaagtcgacattatattatctatggtatgcttttcttaatgagttcatcgactcacagttgctatttctatgtgtaggtaaaggaaaggaaaaaactgaatgggagtgagcttcgagctaggatggtgtttgtacatgtcatggcgacgcgacctggagtgttcgttctcgggacaattgggattttattttgtagtgactgtgcgaccagattaaaatatattttgataatgttgtaaaattttaaatacgggatccaaacttttgtaaataaatgtattaaagtttataaagtttagcaattaaatctaaagttttaatgtgacatgattttcaagaaaaatcctttaaatagcaaaggtggcactgtaattgaaaaatcactgtagtgcgcctaagtatcagggagttacactactgttgtaacacttttcattcattggacgccattttttggtgttctagattcacgcctggttgactagcctttgtagggtttatatcttcattaagcttaaaaggaaggcttatgaagaattgttgagttttccataaaggatgttcacatttcttcaagaactctacataatttttgacacataagacttcgatgagcccttttttgatttggtgaaatgagtatggggcattgagaaatagtatggtatggcttcccatggagaaaaatgttatttgtaaccaagtccactaggaagaatacgcaaaccctttttcttcgtgtaaagatcaaaccaaacaattaacacttgtctgagtaattttgatccattgactttgtgagtaacaaaacatctggggaagaactgcaaccgtattggtttgctgatgagttctgcgcaaagaatacctccatttgtagcattaaattattgtttctctttcttccaatattctttaggaagaatatcagggttcattatcttgtacgatgctcccgtgtcgaaaaatcctaccacttttatcggcttggcatattttgttggaagaacttgcacagtgatgataggggatggttgcatcgtttgaataatagacatttgataacattctggagtgtccgaatcactccattgcttgaatggataaagagattctgagttgaattcatcatctgtggagaagattgactctatgtaattttctttaagagacatcccagtcgtttgttggatatgtgagagaagcttgactatttttcccttagggcattgtttggcataatgcccctttattccacacacataacatcgatcagattttttaagaaagtcgtacttctttcacaaaa

SEQ ID NO: 256465 - DNA, 693 bp, Cannabis indica
tacattaaaaatcacgctaacacgcctatactagttagggtgttatctcatcttttcttcttcaccaaacaatctgcttcttttctttttttcctccaacttttatccactatcaaacatagggtaaatataaaaaattagcgtacaaaataaatatgataataccttgcatcggagagaaaaaggtaaaatgctgtcttaaattttttaagaggagaatacatataagacttattaagtgcataaaaggggttaaaaaaaataaatgaatttaatgggtccaaatctcagcaaattagatttgttctcaaatgcaccccaaataaataaaataaaaccatattatttgtttcgattgtttaccaactcatcaagcaatagttaacacattaatttctacctatataagatacatgcagtagaaatatatgtatatattaaagtaactactagttagtatttattatattaatattatattatattattaaacatcaaagatttgagttgacatggggaaaataataattaggagtggtaaatttgcaaagttgtttatctgcttcaaacatggccatatcttcctctttcaagctaacgtaagcttcaattccattaccatcacttgtgtcaaaaaaagcaataattttatcaaaactccaagcacctgtgctagaccaatcaggcttaccc

SEQ ID NO: 256466 - DNA, 2263 bp, Cannabis indica
aaaaaaagaaaaaaaaaaatacaacatcaataagcaatagtgaaattatgaatttagctcaacatatactacaagctagttgggacttgaggtctcaattgtgtttgttggccaagcttgaaaaaaataaataacatgtactcacaagttgtcactaatacatatttgtggcttagattttgcttggactaatttacgtactcacaacaaattataaagttttgtgaaacacttctacatttgctagtgatgaaatgggtataataacaataatgtttaatagtcacaaaatttttgtttttaatgataaattatgttgttgcaaaatttttttggtgtgtgtgattaagactgtacaaaaaaattcgtaaaccgcctaaactaaataatctgcctaaaccaaaaccaaaaaaaaaaaaattcggtgcaagttgaagatggatacgtgaacaacctcatctttaactggcaactaaaggatgtacttatttgttttttttacgtttgttttattgttgttttatagttgttgttaattttgttttttatttatttatttgcattttcaatttattcattttttttatatgtttatagtttttttattttttgtgttgttgcagttaaaactgaaaaatatttttgcaacatcagaggagagagtaagtttaaacttgactaatcatttctcggatgacccgactctgtcctttattaaggttaaaggtaaagacaatcaagattaagattctaaatctgtcctgtaaaccagaacatgtgtcttaattagctgttctgttcttcggttaagatagtttagttttgtaattagtttgttaaagattctgttatgattttcttgctttgttatcttgtgcaatataaataagatcattagctaaccatttttggttaagctcttttggctattctcagttcttttgtgctctgcactttttttcctctactctgcaatttttctccagccttgagcttcttcatggtatcagatgcccttgaccaccgtcgttaatggcttccccggataatgcttctactttcgatattcaaaaccctatccctgctactgccaatcataccccaccaccatggaaccctttctccaattcgctttcagcctctctcaccatcaaacttgacagatcaaacttccttgcttggaaatctcaggtggtaccaactgtaataggccatgacctcgacgatattctgtttgttggtatttccccaccacagaatctggttaccggagctcccaacccagcatatttgcagtggaaacgccgtgatcagctcctcctgtcatggcttcgatcctccatgactgaaggagtcattggatctgttgctcaattcaccagctcctattctgtgtggagatctttggaacaacgattttccagttaatctagagctcgtttgttgcaactcaaaggtcagttttctaacattcgtaaaggatctttatccatttctgactatgttgataaagtacagaccatcaccgattctcttggcattgctggttcatctgttgatgaacaagatgtaatcttacaacttcttaatggattgggcccggattatgactcggttgtctctggaatcacttcaagaagtgatcaactatgtcttgaggaggttcaagctctacttcttgcccatgaaagtcggcttgaacatcataattctatatctgatctcactctcaaaatgcaagctaatcttgcatataacaactcaagatctggttcttcatgttcttatcaaccacctggccgtggttctaccactgatcaatcaacccgtgtgcaaggcagaggccgtggctctttccctccctctcgtcttatctgtcaagtttgtttaaaatctgggcatacggcagctgtgtgccactatagattcgataaaaattgggttactcccaagattccagcatctactcctcgtgcatttcttgctgaacatgaatcggagtgtgatcccctcacctcatccacccccattctgcctgactttggtgatgattccatctggtttgctgatacgggagccacagatcatgtcacttcttctctcggcaccatggattctgctattccctactctggccaagacattctagctattggagatggtaagagacttctcatttctcatattggttcagcttctttaccatcatctaataattgtcctttaaacttacaatctgtcattcaagtcccctctattctaa

SEQ ID NO: 256467 - DNA, 1211 bp, Cannabis indica
aaactctaccatcgtttttgtatcaatatctaactaaattctggattctacatctatcatcgttttagtatagtattgaagttaaaattttcattcaatggggagccaaggaagtgttattccgccaattttctaataattcaaaggaaactgttagcaatggtattattgaaatctctttcagttttttttttgtcaattacgtgtgaacttgtaatatgtgaaatatgttgaagatagaaaaagtattactcacttcaattgctgtttggagtagagaaaagacaccttagtgaattcttatcagagagcagcagctttagcatcaaggacagaaaagattggaactacatcaaaggaaaaatcccaaactgaatctgttgcgaacaaaaccacctgatctttatactatggttggaagaaaagagtcgggtgttcattagagcacattcaagtttttagacctattagatccaatctaattatatattaaatgttaggttttatcatccgatctcatctcattaattaatttcagttatctattaaatgtatttcatgtatatatcttttagaattagtttggatttatcacatgttttagatagagttttttggattggatccatctaatgttttagattgaattggatctattcaattcaacagaaaatggtatttgacggtcagttataattggattagtcggttgtaattagattagatttatttattcacacctctcggaagagtgatgagtgggtggaaaagggtggagggagaggtagaatttattgtttagtatgagggagaaagagagtaagtagagttctccctccaaatctcaaaattttaattcctctattaagtattgtggcataaatattttatgttttttaatttatacacttatatactatatctttttttaacacattaaatactttaagttgttttcttttatttctgttactactattctgttaaatatatctgaaattaaatatttatgtcacatgttactctattattggtccacatctcaaactttttttttttaaaaaaaaattattaattcattttaaaaattaaaagtgaattatatatatagggtaatattatggtaggacttagcgaaaattccctaccgctagggaatttttttttttaccattgattttagatcttgtggttattatgatgtaaggtat

SEQ ID NO: 256468 - DNA, 1543 bp, Cannabis indica
agcaccacccttgtagactaacacataatgtcttgtcctctttaaatatttcaaaatatgcttaactgcagtccaatgttcctctattagatttgactgatacctgctcacaattcctgctgcttaacaaagttctggtctagtgcataacatagcatacaagatccacatgcccaagaggaagtacacttggcctcaagtgaaagtgaagaggaagaacgagatgcccaagctcaaggtgaagaggaagaagaagttcaagttcctctaatgtctcaattcctccaatacaacattgaggatgatttccctcatctccacacctccattactaccaatttcaccaacttgagaagggaaatcaacacccactaaactaccctccaaaatgagatgaccaccatgagatgtgacatggccactatgaggagtgacatggagcacaggttttccgatgctcaagaggagatggcacaatggagagcttatatggactgttttggacctccaccaacttagcccccttgcatcatgtgttcacatcgcttttatgtttatgtttttcttatttatagtatgtttgcaaggcctagcgcatttgactatccacatgttagtttgtttttcttttggatgtttgaacttgactcctttatgcttgtttggatttgaatgtttatgatttatggttatatttcttcaatggatggtatcttatgttttttttttgccatttattttgtaaattccttagccacccttttttatgaatcataaggggaagaattctaagattgattttttttttttttggctaaaacctcaaattttggaccattaacgttatttgaatttaagtaataaattgagggaaagtttacaaaatcatgtaagataaaaccaaaaggtaattttttttaactcttgcacacattaagggggagctaatctaatatattgtttcaatttatcttctttccttttcaaaataatcaaatatttgatatcatcaaaaaaaagggagattgttgactcaaactcttaagtctcctcgatttgatgattaccaaatatttaattattatttatcactaataatttgttaattttgtagcttaaattaaagataattaagtattttaagtcaaaattgactctaaggacaaaatggtaattataccaaaaaattctcgaaagtgacccgaaaggaactcaagaaaagactcaatgaaggttttatacatttcatagtcttgtacaatgatttacaagcccacacctaaaatttctaagtatgaaatttggttcatgggtatactcgagagaaaagtttggaattcgaccgctccttatacgcggctcatggactcctttttgtttaggaacccctttctacattcaattatttattgagcctgtgtggaatcaccattattacacattcattgttggtctggttgctggtctagtgatccctcctagccgccgcctagagtgcaacctgcctgttgaagaccgtatcgtaagtaactcagtgcttcgt

SEQ ID NO: 256469 - DNA, 1100 bp, Cannabis indica
gtttaatagaccaattttaatttaataaatacataaatatttaaatttcctttattatattaaattatataagatttaatatttaatattatccacgtaatatatatttatatataaacagtgatatctacctaggaaaaaacacacacacaacacaataggataatatgtatataagttggaaacaagtggatgatatgataaaattaagtaataatttagaatagagatacgtacgatgacagaagtaattattaaatttgtttatatatatatatatatatatatatatatcccaacaactggtccaactggtccaagtggagaaatctactttcatgtcttaatcatattatttttatatgtatacataatgaatgtgtagagttgtgaccaccaatatatatatatataaatatatatttgttgatattatatatacgcgtatacacattcattcatatgcatttcacaatcaattcaagccccacttcttatagtgcaatgaattgatgcatttgcgcccaccaaaatgtgtttgggtgtcaacaaaattttgccaagaaattctatcacatccaaagttttttaatttcaataaatatatatacataaattattattaatatcgttttaatacttttttataagtggctctctttttataccaaaaaagatattaaatccgtgcgactgaaacttcctaaacccgtgcgactccagcgtctccagcgaacagaggctagggttcttcttctccgacttcagcgactacagcggctagggctcttcttctccgaacggaggcggcggctagggtacatcgtgcgattccagtggctagggttctcttcttcaccgaatggaggtggcagctagggttctttttccatgaacagaggaggcggctagggttctcttcttctctgaactgtggcggcagattggctcttcttctccgacggtcggttgttcacagtggttatattagggtttgtgccggctgttagggtttgttctgttgttgtcttgtcttgtgacatggtgtgattctttttgtgattgtttcttgtgttttgggtgtatgtgttgcttcttat

SEQ ID NO: 256470 - DNA, 600 bp, Cannabis indica
gttgtgaggttgattgtccttatcttggttgagctgagatggattgatcttagtattgacatgtgattggttaatctcaattagggaaaaactgatcaatgttatgttgttgggttaagtttttgaaagggtatatgttctcataaaaaatcacatctagtgaatgaatgatgtggttggtttgaatgtcgaggagggtgtgagccttcatattgtgagggtagccaatgaagacacatggcttagctcgagggtagaattttgttgcaatagtgacaacagatgcatatgctaggcaaccgaagttgcgaaggtgaatatattgaggttgcttgtggtgaaggagttcataggaggttttgtctcttaataggacagaagggtcctatttaagagataaacagcaatagtgaccatgtagctccagtattgcagaggtaagtgttattgaaatgcaagtgcacggcccacattgagtatgtgttgatgtttcctctcgacaacattgttttgctgtgggaggcctacacatgagttgtagtggaggacaccttttgtgggataaaaagtattaagtgttagctccttggcattatcagt

SEQ ID NO: 256471 - DNA, 2661 bp, Cannabis indica
tatatatttatagttataaaagttgttaatcaaaattttaaatttatcacgaattttgaggtaaccctttgattagcaaaggagtgcatagtaattgaaagatcactgtagcgtgcctaatccttaggttattacaattttggtatcagagctgccaggttatcgaacaaagatcgtcaagacatgtacaatcatcgttagagaaaatcttaactcactgtttagtaagcctttacttgtttagtaagttttgtgattatttatttgaatgcattgcctaaaaatctgtaagtgcagtacttagagaaatatgatgactgtctgacctacctgacttatgggtttgtaagataagtcctatagtatggatgccagtgaaacacgagaagtcgtggtaatttggtcgaggtcagggcggtcggggaggtcaaaaaacactaaattcaagtggacccggcagaggccttggaagatttcaaggaggtggtcatgaaaatccaccataagtccctcatgattgggagcaaaggttggtagaaatgcaagcccatattaatcagcaagaggaggaaattcagaggctgagacagtagggacctcctacagtgcctccactgtaagtgtcagctgctttggttccagcggtgccaacataacaacctattgttgggaatagtatggaacctatgtatgaaagatttcacaagtaggcccctctagttttttaggacgtccatatttcatgaaagtcaagcactagatcacagtaattcaaagaattcgaaatttcatgggtgttatcgggtatgaccgagtgacttgtaccaccttccaattttaggaagatgcacttgtgtggtgggagatggtatccctcacccgggaagtgatcactatgatgacttgggaagaattttgggatttatttaatgctaagtattataatgaggttgtttgcagctcaaaaagaaaaaggttcactaaatttgttcagggagagaccatgtcagtgacagattacacaacaaagttcaatcgacttactaagcttgctttgggcataatgcctacaaactttagcaagaaggaaaaatacttagtaggattgaatgccaagtttagacatgatttggtgattacaacgaatgacacaaccacctacactgagatgattcaaaaggctctccaagccctggtcacagtagaatttcatcaggagactcgagggactccaagtgttgttgggactaccacctttcttacttctggttatggtagggatggtggtgttacccatgttgatcagaagagaaagagctttccaacatctggtggtttagagcagaacaagagtgtgggaaccacggtaaaggtggacgtcaaggttattcttatcatgagtgcccacgttgtaagaaaaatccatctttgagaatgtactcgaaaggcatgctttcactgcgtcgtggtcgggcattacaaaaaagactgccctcagacaaaaaaggaagagccaaaataagatgtgaaacttgtatctactcaagtgttttctattacgcaagcagatgctgcagtcagtccttcagtggtaataggtaaaattcttgtcaacaactcctactatacaatattgtttgactctaaggctacacattcatatgtggcgtgaaaggtaattaataatttgggttagccttgtgattttattgagatagggtttatctacttctttcttcagagcgttggccttcactgggtctagcgggcgtctattttgttgtagtagaggcatatctgggttgacgttaaggacattgatgattacgtgggtgcttaccccaatcatatctccatggcaccaggcaaagacgtctgtagctgcctttatagtgtctatgatcttactctgctcctccagttctagattaaacggataaccttagatgtgtcgaggtcgcatactctcacttcctcgatgtcttccataggttctaaagtcacttctgacccaatacgggggtccaattcgtcctgttcttctgccaaaggctctacacccccttgcaccatttagaatcgatcgatgtattatgtcgttgtaacattgccttgcttctccttggttccccctcactgttcctactccagcctctcaggtagggaaattaaggcactgatctcgaatggaggtaattgctccaaagttgactagcgccgacctgctgaggatgacgtcgtaggcagtagggcaccaccacgaaagtgcagtatttaaaggtgctttgtggggggtcaggagacaaggtgactaggagtctcacctttcccatcgggatgagagttgtcccgttgaaccctgtgagttgtgaaccactgggagaaaggtccctgtcagtgagcccgatggtcgtgaaagcatcttaaacagcaaattaacggagtctctatgaccaggggttcatggtgagggaaacacactggctttgcgtcttcctccgtgaaagtgatgggctgatcaatgagtctaggcctctaagggagggagttgaatgacctcccatacctcttcgtcatgctttagggctcacgtagcgctttagctcgttcctaggggttcctccaatatgaggcccctctgagatcatagcgactctctat

SEQ ID NO: 256472 - DNA, 677 bp, Cannabis indica
aattaataatagaatgatattctgattcctaacttcaattaggcaaagaaagaaaattggtttggacacgcaaataagaacaataataataattttgaagtcggttttagaaaaaatggaaatgaatggacaacctgtttaactgctttttgtttaatcttttcttattacagggtcaccctgttctacagtaaagaattagatgctggggccttggtcaacggtccatatttatggaatatctccatctcactatttctttttttattaagaaaacagtaatacatcaattaaaaaattgtaaaaggaataattttcaatacgaacgatgagaaaaacacacgtttacattatctctctcattggtaaaatattgaattgtttgtcattagagttgtaaagtcaatgagttattttagtttttgattagacaaagtagcttgtgatgtgtttagaatttagtgctgccatcaattatatttgataggttaattagtaaggaatatgatttaatacatattaaagtttgaggggtatagtttagtagatattaaaatgtgggaagcatggtttagtatataaataatcgggaaatttgcagcaaaagtctccaaaaaattcacgttgatgctgattagtccccaaggtccaaaaatagcggcaatagtcctcaaggt

SEQ ID NO: 256473 - DNA, 1104 bp, Cannabis indica
cgcgtcgccattcatcagcgttaatatccgccgtgggctcctccattcaatgacggtaaactcggtagtagcacgatcttccatccaccaacgttggcttcgaatgctgttagcagacgaaaccaagcattcattccatttgtcttctccttcacaagtaaccttcaaatctgtaataacttcttgttttgtgtcccatctgtgagtaaatacccattgtcttgattatcacctctccttctactctttgataacaagccctttttgaattgtgcaataaatatgcctcatcctcctgtaccccctggcttatgattagatctatatatctagacgacccctcttctcttacagagaaccttagagatccgtaggagccactgtcaaatttgcagagataatcattcgaatgtctaatatggagaagttatgtttcgatgctttttgacccatagagatacctgtttcattccatgctctatatataactaaatctcctctgttattccctgcatcttgtacctttcagatactttttcttgatcgtaccctctttataacctggtccctttccttttttagcctctctatctcacgacatcacctgaacatggaagacctgtccaacacttcgaatgtagctttgaacctcactgagtttgaaacccaaatccattccttttctgatatccctgaacatcccgaagaagataaccgtgaggagccatcagcttttcttgctgtaaagctgttaaccactcgccattttaactcggaagctttcaaaaagagacttaggcagatgtggcctgagcatttttctatcaatgttctggagaaagaacctaattttttcactgttgagttcgggtgttttggtgatcatcaaagagtgcttgttggtcagccctgacattttgattataagcttattgtaatgactcctcttgaagcaggttcagttattaccgccgaaatgctcacttccacacccttttggatccaagtctctggtatcccgtttctaaaatattctcgtgctcttacacaaaggctcggtgaatgtgacagtcagtagtcctgtgatgcgtaaggggaaatacc

SEQ ID NO: 256474 - DNA, 1600 bp, Cannabis indica
accaatagacgagataatgctaactttaaagacccgaaatataggttaattataacctaacactttgcccgagtctccagaaatgtgggggcctctaataattacttgtaaatgtctatcactagtgaaggcatcaattggttttgactgttatttggttgtgcgaccctttgttcctggtcggtcttgacatatttttttaagtgcaggttatttttcctaatgaggaactttatttcccccttcaagttattacacttgttattgtcatggctatagtacgtgttaaagagacagaacatggtggtgttcctcttgctcgtgtctttcttcatgggaggaggtttgttatatttcaccatggattgggtcattgccaaaattttttctatatcctatgttaagatggtaaaactagtgaactttgaggcattctactgaggatgttgtttggagttaccactgatctacttttctttccattacctgttggttgccattatttgacatttttccaccttaactcgagctattatgattctgtaaatttagtcctgctcgatggatgtattagtagtagtgatgtgttgttggccatttttctgtccaattgtgtctacatgccaaactgcttctttgagctttataaattcatcaactgggtccaagaattctataatttatcctacggtgagtcttttgatgcctttccataattctcctagaggttcaatacctcttaggattgaagccagtctcccttctttggttaatcccttcactttcgcagcttcattcatgaatctattgatgtaagctcttaacggttcccccagtatttgtttcacttcaatcaagtattctaagtgagtcaggacttgtcgagaagaagagaactgtgcgtaaaattctgacatgaaagaattccatgaattaaacttccttggagctaacttgaaataacattggtgggcggcattcgccaaggtagctgggaaaattctgcatcgtacatctcctttcaccccttgtaagtccatctacattttaaagtatataatgtgagacataggatcctctttgcttgtatacattttttaggttggcatcttgaacttgagtggagatcgagggcattgatttctgttgataatgatgatcctctggtccggtcaagttttagatctatgagtattgcgctggtcaagccttgaacgaggctatcaagttgatctatttcggcttgcactaatggatcaacttgacctgcctattgacctacttgtgtcacatgtggatctcttagaatatgaacggacacataaatatctgtattgttggtaaaacagtctgaggattgttttgcctgtttaatcctctatgcaatttaaatcattcctaagatcgtgcacgtgcctaactgatacaaaccaaattctcatggaggtcttcacgtctagctgttatcagcaatgggttggttcgacatatccatcttagatggatattatactagtcattcctcctacgtaacgagttggaaaacttgactcatctaccatcgtggtccatagtttgactctgtgaccatggattggat

SEQ ID NO: 256475 - DNA, 867 bp, Cannabis indica
cacctcattgacactcaaaactataaatcaatattatgaaaagaatcaaaatatttcaatcaatatgaatacaacaacacattacatatcacaattaagaacacgattgatcaaagtctatctattaataattccatgcaagatcatattccatggagctaagatcatgacacattaccccagaaagattaaaattagactccataaacccaagatcaaagttggagtcatcatcatagattctatctttattgcccatttccatctcccaaaccttatcatgatcttgcccttgattctgataatttagtggttgtttttgttgaagaagatcattttctgggagcattttcgacgcttgaatgggatcaaaactcgaatcacataaccccatatcatccaataattctggtcttgagagacattgaatatttaaagatgaagatgaagaaatagtaggtgttgtaataatattatcatattgggagggattttggggcatgttaaaactcaaataattaggagtagtagttgttgaagtagtattagaagtaaaaatatcattattattattatttgggttttgatgacactgatcataattgaaggtagtgaatatgggagtagtattattattactaggtagggttagcatattattacaattattttgtgttgtgatctcattatcatgatcatgaagtgatgagttattactcacagtgaaaatatgagtttgttttggtattggtttggtgacattattattattttgtgagatgactacaaatgatgaactaaaaatcttattattctgagatttgttctgatgatgtgatgatgatgtcatcaaattatgggtttgtg

SEQ ID NO: 256476 - DNA, 1011 bp, Cannabis indica
aagaaatcatcaggagaaattgtggcttcaactgtggagtgttacatgaaacaatatggcgtgactggtgaagaagctatagagaaacttagcgaacaagttaaagattcatggaaagatctcaatgaagatcttctcaatccaatcactatccctaggccactcttaatgcaagttctaaagcttgtacgagtgaaccatgagatttatagagaaggagatggctttacacaacccactttgctcaagaatttgattcattctctcatcatcaatccaattgacttttgaaccataaatatatttatacataatttatagttattaattctaatatctattccaataagctacaatttaatttgtagcaatattgtttcactaatatattccaatatctactgtcaagagttttcaccaatagattttggttactatataattgttttaataaaagttatctataaacatttcttttgttattttcctaaaaaaatacaacaaaaaatttagtaaattgtatgttatttaagaaaattattcaaatattcaaatacaaaatataattaatttatgtataaatttttaaaaaattatgaggcaaaaaaggcgcgtgtagcgctcaatctgttcttcttccatagcgaagaagaaaagagttgtttgaaagccaattcttcgatcatctgtgcaagattcaattgaaggaattcgagatggtaacaataatgaggcaggggattcaggctcctctagattgaattcgaatgaaacagtacagaaagtgaacatgaactgtttgaaaacatttcccaatcttgtaagcctagatatatataagtaataatcaattcgtaggcctattgcccgacctttcatcaatgccaaatttaacaagtttcaaagcattcaacactaaggtggcgtttggttggaggtaatgaaatggaatggaatggaaaggaaacaattttattccattcctttgtttggttgcattttcaagtattg

SEQ ID NO: 256477 - DNA, 1117 bp, Cannabis indica
tcgaccttcgagagaaggttttacaaagctttcgagagattaattttcaagtattgcatcaggaggaggcaagcactcaaccttcaggagattgcttttcaattcttgcatcaagaggaagcaagcactcttccaggtgatcaaagtgatttcgagctcttagagttttatcaagattcagttagtaggtggaacacatcaagcttgcggcatataataagagggagtctatttatgaataagttaattactttgtattattgagaccgatctaatcaatcttatctttgggcgtggccccctggactagtaacaatctgaaaggattattgataccacgtacaaaaccttgtgtgtttttacttttttacactgtttttaattcaagtttcttctagaattacagagttgttttctgtaactacggaaaagctattttcagtaccagtttgattattctgcatttaattacagatttagttaaataataaaactgggaatgttaaaatacggaatatgaattggtatcagagcaagtcactaaattcttagtgagatcatgaggttattctgtttaattttttttgtgtgagatgtctttgtttgtagaaggaagctctatctctcgaccagctctgttatatgagtcgaattattcttattagaaggtcaagatgagagcattcatcaaatcacaagatgtgaaaggtttggacaacaatacttacaggctggacgcaacctactgaaagtgataatgaaggtaatactaaggtaagacctgaactcaattggactattgaagatgaaaaattgtctggttataataataaggctttacatgcgatttttatgacaatttttgttggagtcagtggaggctttattaaattaatttcatcttgtgaatctccaaaggaagtgtgagaaatccttcaaacttaatttgaaggtaccgctgatgtgaaaacatcacattttactatgttacaaactagatttgatgaattgagaatgttaaaaaactgaaactttgtctgatttttatgaaagattatttgatatttttaatgagttttttgccttgggagaaaaattagatgaatctatcttggtt

SEQ ID NO: 256478 - DNA, 1791 bp, Cannabis indica
ataaaaaagttaataatggacctatcaagggctcaaattctagctcaagagattgcgacggacatagcaaagaacaaaaattggagaagtgttgtactccaatcggagactgaaactgtactcaaatccaaaaatttcatatctcgtattgctttggaagaagcacacaataaaatgtaccaatcaaccaaagcatcgcatcaagaggagtcgcttaagatagcgaagcaactcaagaactcgcctcacacttacactcctattaaatggaccaaaccaacagagtagtagtgcttcgactagtctcgacccgaaaatcccaagcaactagggctaacacatttatcctttttgtttattttttgggcatggtttcttatgtttgtctagtttatggtggtgttatgccttacaaatattatattaacttgtttgttatttatttatttgttttgttatatcaatgaaatacttatatttttctctatcttttttttcttttcatcattttcataaaattattaacaggtatataaataaaattagaattttcactctttttttaatgcaaattttcacgttaaatattaaactttaatttcaaggatttcgtagataagacacattataatttcaagcaatttaatttcacgtaacatctctttaattatttttaccctccaaattataatttcagtttatatattctcatagtatattcccataggtattattaataatacctaaggtacttaactaccaagttaatgtacacgtatcattttttattggtacatttaaatcatgaattttaaagggtaaatactattttggaccatgtattttgtaaaaattataaattgaactttctattttgttaaacgaaaaaatatagacctaaaatggtacaaataggactttgagcttaattttcgacatatttttttaaaaaaataatcaacttaaaggcaattcctaacacgcacatatgcagaaaatttaaccacttttgtcataacacctctcggtcgaattattattaagttttattttgacaaaaaatcagttcaggatcatatttgtaccattttgaaaaatacaaggtctattttatcatttaataaaacagatgatctaatctgtaatttttgtaaaatacaggatctaaaatagtatttatttatttttaaataaaaaataaaaatttaatgagttggaccaatcaaggaccgccatgtgaccattgacttgacacttaacagtcaggtacctacataagttctagaaatataacttagatattacttaaacttaagtatttatttgcagagttaaacttaagtatttatactttaattacattttttgtataaatacattatgactcgaaaaaagtactgtctttataaaagtataatttactaaaaaaaaaatacaaaaatagcaacacaaaattacaaaacatcaacctcaaattgtatccattcaaaaaattatataagaaaaaacacaaacataaacacacacaaaagcaactagaaatctatcacaaattgtatcagcaaaaataaactataatacaacaaaacgtcaacacaaaaacaacaaaatatacaccccaaattatgttaattcaaaataaacaacaaaattacaaaacattcacatgttatgtaaatctctttataagttcaagtttaattacaatagttaaaattacaagtttgcccgaaggcctataacagttataacaaactactttcaattgcaacaaactaccagaaacagatt

SEQ ID NO: 256479 - DNA, 712 bp, Cannabis indica
taatcggaggtgtttggaattttttcgaatgggttggatggactaaaaattgcaaagttgtgaaagtgacccagtagagagaagtgttggcttttataggtcgttaggggtgcaaggcaacattgatcaggcaccatcgtacggtgaagattcgtagcgatttgaattctatgatctgacaagatggatgaatgggtgtgaagagaagaaagggcggttgaagcgtttgagtacctctctgacaccagcattaatggaagagtctatcaatggacgggaatcgaatcgttgcctacaaaaggaaataaaaatctatgatgacgatcataaatgctgcccacgctcctgggacacgtgtcactttatttattaagacaagagatggctcacaagtctcatttacctactactaaataagactagggggtaaatgttgccctggttttttcccaaaatacgtagccacggctatgtatgagacgtggaccaagaggacacctcaaccagaaattagttaagaattgtacagaggagaataagtgtggctcggggagtaagctcccggaccagtgcataaggcacgccctcttctccgagagttgagatatagtaaggcatctccgggacgagaagagccagtcaccttgcatttaatgcagtatggggaaagcatatggaaacgcccataagaggacgtgtcagacatcgtaag

SEQ ID NO: 256480 - DNA, 1202 bp, Cannabis indica
tttagttagtttggttataaaatttcatatttagtagcattaactttacatgtcatatatattaaaaattttatttatttatcccaaaaaattatttattttttattttttcatattttaataaatatccctttataaaaatacaaacttatagataggaacaaggataaaagcaaaggttaaggccaaaaaataaaataataaattaaatgggggcaaatacataattttttggaaaaataaaatttttaacataaaattgcttcaaaaaaaaatttaaaattttgggaggggtcatgccgcctttccatagatgggataattacataaaatattaatttttgtaaaaaatttacagtttaaagtttttttttaacatttttacagtattttataaaaatacaaaaaaaaaataattaaaaaactccatataagaaaaccacaacaaaacaatattaaaacaacataacaaataaaaaaacaacaacaaaataagaagagtataatataaaaaatatataaaaagattgtatttttaggtaaataaaatctaaaaaaccgtaaaaatattaaaaattctgtgaaatagtatttttgttaattttatttttttttataattttttgaaattattccaaagtagatcctgtataggaataagatatatagtatgtaatatgataaaataaaaaatttatctcacaaatttatcatatgattattatgatatgtgtatcattgaaatctatcaaaaaaaattattaattgaagaaattatactaatatgagattttaagttaactttgataaatgtgataattttttttgtttatttttatagttttacggcatttttttttattctggtatttaatttgttatgtttttttaatagttggtttaaaagtccatatttatatatttattataggttatttagaattttcgtcctccgaactatgatatatgtattattgtgtcgttgtaatttttttcctgaactattcagagtgttgtaaattagtctttctatcaatttttttgtcacacacgacaacaatatgatgccatgactactttgtcagttgtcacgttagtgtcatgtcaatgctagcgctacgtacatatgtaattaattttaaaaaaattaatttttttaatttacttttactaatttttctaataattaattaatttttagt

SEQ ID NO: 256481 - DNA, 1623 bp, Cannabis indica
actaaagatattcttaaaattattatattaaaagtctccataactaaaaataataaaaactattatattaaactatacaaatctctaccaccaaaattaatatttaaaaatactaaataccacaaacggtagcaatttaattaaattgaaagaatagtcgcattgcaagaaaaaaagtagtcctcttatttgaccacgaaacaatgacttttggcattgttttgaatctatttagtatgtcagcaaattaataacttttacaagaaaattattcagaatttatagtaaatgaacccaaattgtaagattatattaataaatttttttcctaaaaaaaattatattaataaatattcttatttcaaaatttatagaaaaatgatcattatagattatttattatttatattatcttttttttttcattagaagaagtaaatttattaaatcacaaaccagaaagaacttacaacaaagccacaaacagcaccagtaaagaaaaatgctagctacagaactctaacaaataaaaccacttgagactagttcaagtggccataggtgggtgtgtgtgttagaagtcatgggttcgagtcccaggtaaaacatggtttgtaatatataaacgcttaaataaataaaaaaaagaactctaacaaatagaaaagcttcctatccttgtctttccaattcaaatgagagtaactattaactctatatatcacttccttttttatcctatttataatcttatatacaatataagagtagctgttaaaacacaaacattccattaagccaaatatggtagatgacggcagagcagctagcagcaacaacttttgcagaaaaacctttgtccaagccttcaatccaaagctttcaagcttcataatcgagaggccaagatcgacctaaccagcttgaaccagcttcacaactctgagggagaactcacatctgagaaataaatggcaatggttctcagccatctcctcacaaacaggacagtcgccttccacactaggaatcaccaatcgcaagttatcccttgtgagaagcttgccatagacagcctgccaaacaatgaaacgatgttttggcacactaaaattgtcccaaacaaagttatgatttttgaccttctcaagctcaatttgattcgagtaaaaccgaccaattttaaacttcccaccatgaccagcagtgtcaatggcatgctgagaaaaatgctctcgaaaatggtacaatttgcgccaataccaacttgaatcaagattaagttggtagctccagaaatttcggccttttgaatatatagaactaatccatttaacccacaaagtatcttgttgatgactaatagcccaaatgtacttaccaagcatagctttgttccaatttgtaccatctccaaaatccaatccaccaaagatttttggtaagcaaactttggaccaagccgtgaggtaaaaattgcttctagatccattgtttccccataagaaccataagcaaaacttgtcaacctctttaataatgcttttaggaagcaagaagatgttcatccaatagttccgaaaccccaagagaaccgaaattatgagttgacatctccccgca

SEQ ID NO: 256482 - DNA, 3319 bp, Cannabis indica
aattagatagaaggattatactattccaattgatatattttagagggtatttttaactacacttataaattaaggggcatcatagtatagtgtctaagtacagggactaaaaaagctaaaatttgtaagtacctaatttttcaagcttaagaattattaccataattttttaatattacatcaaaaggtttaacttatgtatcaattttcacttacatacaaagcaaaagtgaataaataattaaataaagaggagagggcctttaagcaaagtgttctcaatgagtcgtctcctccaacagtccaactttggctcagcccatcatgactgagaatgagaacaacattcatggcggaagctcatttctcattcccaccatcctttatttcccaaaattcacaatacccatttcacatttacctcagttatctatacttttgctcttgtttactctctcttcttcttcatcatcatcgagtgttccagttccacccccactcccagttctccccattccctcagcttctcagcttcaatggcagctcagcaacatggccctcttcctccacttcggtcctaacaccttcacagacaccgagtggggaaccggccacgccgatccctccatcttcaacccaacactcctcaacgccactcagtgggtccacgtcgccaaggactcagggtttcctcgggtaattcttacatccaaacaccacgatgggttttgcttgtggccatctgaatacaccaattactcggtcagttccagcccctggagaaacggcaccggcgacgtcgtcggcgagttggcatccgccgccagggaagctgggatcgatttggggttgtacctttcaccttgggatcgccacgataaggcgtatgggaagactgttgagtacaatgagttgtatcttggtcaaatgactgaactcctcaccaggtatggagatatcaaggaagtatggcttgatggtgcaaagggagaaggggagaaatctatggagtatttctttgatgattggttcagtgtaattcatcagcaccagccaggatctatgatattttcagatgctggtcctgacaccaggtggattggggatgaggctggtgttgcagactctacttgttggtctcttttcaattgcagtaacgccaagatcggtgccactgatcctcagtgagttcacttcactttctttctttctttctaagctatataatcttcaagtttatttattgtcattccaatgatatttaggaacatcttgatcttgactgagaatgaatgaagttgttttagcattttatcatggttggtttggtgttggttgtttgttatgtgattgtcattataatcttgaactttattgtcaatccaaggatatttagaaacatcttgactgagaatgaatgaagttgttttatctgtcatcatcagcattctatcatggtttggtttggtgttggttttttgttatgtgattgtcattataatctttttgttgtcaatccagttgtatttagaaacatcttgactgagaatgaacaatgaagttgttttgttctgtcatcagcattctatcatggtttgttatgtgattgatttgtcattatggttaagggaagataaaaacaaaggattttattgagcattatcctttcctttcgaaagtgtattttcttttttcaacgtcttatgtttgtttcacttgaatgttgaattggttatttcttcaacagatattcgagaggcggagacccagatggacatgattgggtgccagctgagtgtgatgtctcaattaggcctggatggttttggcatgcatcagaagttccaaaatctgctttgactcttcttgacatatactacaaatcagctggaagaaactgtctgttgttactaaatgtgcctccaaactcctcaggtctaatttcacctgaagatataaaagtgcttcaagagtttagtgagctcagagtgtcaatattctcacataacatagctacagaagctctactttctgccagcagtacaagaggatcgcgtttcaacgcttataatgtcgttgaagaaggtatctacacatattgggcaccagcaccagcacctaagaagaatcaatcagactggtctttgtctatagactttaaagaaccagtgtccttcaatgttttacgaattcaggagccaattcaaatggggcagcggattgtcgagtttcaccttgagatatttgatgcagatgaggggtggaaggaggtagcaaatggcaccacagtgggatatcagaggctgttgcaatttcctactgtaaaatctcagcatttgagatttgtcattgacaagtccagagaagatccactgatttcgtacttgggaatttatatggatcggtattcatacccgagcaaccatgtattcaatccacaaggaagacactacaagaacaccactgcatgtattcaacctattgttgtcaacgcttctcatgccacaatgtaaatttttatagatacgttgttaatgcccattaacttttcttaaagtatatttttaaatgttatgtttgttcacattattaatattatctttggtggtgataagtaatgatagttatgaaaattcttttgagttgtattgttagtaatgttgtgtttcatgttatgttactgtatgttttgtttatgtttagtgactatattattcaattattcaagtagaacaatccattcctttgtaggcaacaataagaagcaagccaaaggccaaatcatccaatgctaatttataacaccaatggtcagtactgaagttggtaagatatagaattttgctatagtgttaatcatgtataatttatatgtcagatagatcaaaaggtcctttattgagtcagccgtgccttcattgtatgctagcaaatgtttatgttactcattttatgaacaattgagttgcacacttatttttgttttgttactgtgttttgtattttttttttttttaaaaaaaaaacaaacttattttattgtaaaattgaaactaaagatcgcagttaaaagcaatcatttattatgactttttttaaaacaaaaatcttatgtttatggtattttttttttacatatatttatgctatactaatttattttgaatttttattggatatacgtaatatgcattttaataacataaataattttgggatatttgtttagtatgtttaaatgtaaacatgtgtttaatatacacctattagaaatagtttatctgtagttttttttttttacttttttttttaagttttt

SEQ ID NO: 256483 - DNA, 1227 bp, Cannabis indica
tttcttatattgattactaatcagattgtaatgagttttatatagggcataaaacccaacaattaattatttaatttatcatataagatacttttaatataatacgtcaaattaaaaggataatgccattgtttaatttaaaatatatccaatattaaaatttctaaccttataattaaatgatatataaatattatagaagttaacaatttttaaaaaactaaccatattttaaaaaattaaataatcaatttttaaatttaagtctcaaaatataaaaaaaaaattaattagaatctattaaataattaaaatattattaatttaaaatttaaatttaattttaaataataaaaaaattattttattttgaaattgtggtttgaaaagcaaaaaattcgaaattggtggaaaatatcccccaaaaatcgaatttttgtgcatcatgcacctattgcccaggaaggttgcacgcagccttgggcgcacgaggaaataggagcctgcagcctccctgaccgagaaacctcggtcagtggtagggttttatgggcgagggaggcaacattaggtgtgtgtaaaggcagttgcactcgaagcttcaaacaagccttgtcccctttagccgcgcgcggatggctgccttgtccgagtgccaggtgcactcgatgcacctactcgacaccatatgcgtcctatttctcaaaacaccataacttcttcgttttcatcagaattgagttccgtaaaagaaaaaatcgcttaatttttcacaaggaatccaaataaattatttttcagaatgatcataaaattattttcatggaaaaatttcgtaaatcacatacattcatcaaataacacataaacaacgatgaacacatccaagtcaaccaatataacatatgcatcattttaaatccatattacatgaaagtaaatcattaccatgacattgaggccagttgttgggaatattttaccagggtcgagatttactaacaagtatgtggattaacatcctaaatatgaatatctctaaaacaatgaaactaaacagataagagtttagaaaaccatacattcattgcaacaaaattaaatgactctccttctgctcaaatctctaatcattgttcctttcagtcgcaaagtattatcaagatttgagcctcgatctctttctttccttctggtttggttaccactgtcttactcactatgatt

SEQ ID NO: 256484 - DNA, 2152 bp, Cannabis indica
tttttgaaaggataattttaatatttaatatttttagtttgtcattttattaaatccttcaaaaagtggacatcaaatttttgtaggtctccctccatctctcctctccctccctttatcccttctaccaaacaatgattccacctcccctttctactctccatcctcccatctctcctccctaccaaacatagtgcaaatgataaagttctaggaggaagcatcatgtgccaatttggtaggtgatgatgaaggtcagctcatggccatcatagccgaatcatcgttaaaggaccacagtggaatagtgtacacaagatttgagaagtcaatgtaaaagtcttccacgtaccaaattgtcaacattttttctaagattttttttttcctttgtcatcaacaatggtaattcctcaataaacatatttaagttatgttcatgacatgttttgaaacattaaagctttacaaataagaattttatcataaataaatttcaagagggtccataccagtagtagtttgaatcgaactacatccaaatttattttcaattcctttgaccttcatctcctctcttacagtctccacaccctcccacttccctgcagaagcataaatgttggacaaagctacataatcttcactagtgccattcaaagaactccgctctggatgtactcgaataaggagcttcccaaccttctcacccattgcaacatccccatgaattctggttgcacttagcaaacttctccacaagatagcatcaggttcaactggcattcccattataaactcgtacgcctctttcaagagcccatttcgactaagaaggtcaacaatgcaaccataatgttgcatctgtggggtgacattaaacttgctcatgctactaaacaagcagagtccttcttctacaagcccagaatgacaacaagctagaagtaaactagtaaaactcacagcatttggttttaatctagaagcccccattgaatccaaaagttttattgcttcttttccctttccatgaatggctaatccagttgccattgctgtccatgttaagatattcttctccttcattcgtgaaaaaacagataaagcactattaagacatccacattttgagtacatgtcaataagactggtgccaataaacacatcaatctcaggaacccaatttgtcttctctatatacccatgcatacaagtacctgtttccaaaacaccgaactgagaagctgcagagagaacactaactatagtagtatcggttggttttgccccataagcatcatccaacatatcacgaaacagaaccaatgcatcacgagcacttcctctttgtgaacaataccctgtgatcatggcattccaagtaacattatttctatcaaccatttcatcaaacacccttcgggctgagccaacatccttattactcgcataagaatgtattaaagtagtctgcaccatagtattcgaaatagtaccgcatttcattatccacgagtgtatttgtctccctgcccataatgtagggactgaaggtgatcgagcacaagcaccaagaacaaaaatgtaggtgaaatcatcgaacactaagtctccccttgatgcccatctgaagaaaacaagaatggactcttttggtggagaacatcgtatcaaagtgttaaagagaaacaaattaggcttgtcaaagtgctcgaatactaaacgggcattacagtagttcttctgttgagctaataaggtgcagtattgcttgataagtttggctgcaagggagggtgagttgagaccattgacaatcaactgggcatgtgtttgtttaagttggtaaatggataataatttgaggtgtataaagccagtagctacaactctagggagagaaagcatatggagtggactcaaatacagagctcattctttaaagaccacatttcctctgctttctcaggctacgaaatttgctaaaccatcaaatgaccaaagaagctagcataaaacaccaaaataagatgtgtgagctattgtagttgcgagtgcaaatatttatgatagaatgaatattgttggattaaaaatcatttgtgggcacatatgtataatgtatatgctattataaagtgtgatacaa

SEQ ID NO: 256485 - DNA, 629 bp, Cannabis indica
attacaaaaatcttatttttagtacaaaaaaaaaaatcgtaattaaaagtgaaaaaatagagactaattataaatcattattcttatattgcgactaaaacgtatgtggttaaatgaaataattacaaaaattacaatttgttgtcactaaaattaaattagtgacaacttgtatttaaatactacgttattttagtcacaagtaacttttttgttgtgactaaaagtcacatttactcaaaaaaaaattatgttaatactaaacagttggcaagaataaacttagctcgagagtaaatgaattgtgaatctttattgatagaattatcatgtagtaaagaattagatatgtctaagaatatcactcaagagtgattttcttattacatctcacaattatcatgtaattgtgtatctcacactgaaagatatcacttcaagagtgatactctcattacatctctccacacacacacaatgatcttggacaatctctctctagacttggctatgaaatatgaagtatgaaaattggagcacatcttgagagagttgaggcaaaatgtatttataagtgttggtgagactctcttttaagtttgtgataaagccaactgttataattaata

SEQ ID NO: 256486 - DNA, 1371 bp, Cannabis indica
tatatattattctatgaaatcaaaacacaattcgaatcgctatttctacacttgaatacctctcatagaatcattgtctaagtcgtaaccttttttattaaatttgtgaaaaaaaaaatgggcgtgagccattccacggccgtaaaaagcgggttagaatccgctgactaataacttattatttttttaatagaataacttttattttgtaaaaaaaggaaactgaaatttaaatttgaataaattaaagattgaagaggcggtggatcctttctatataatatatacagaggaccgttatatagcaaaagtcaaagaaagcgaagaaacagaaagagaaagagaaagagaaagagaaagagagaagagagagaagatatgggtattacgtatcttcgtggaagagcgagtgagagtaggagtgggaatgtaaagagtggatcaatggaaaaagtgtgcaaattttgggctgaaggtaggtgtgtgagaaggggtcgatgtcagtttctccattcttggtctcggggtgatctttactcctacctcgcaaatctccatggccacactaaggtattcttgctacattctttacagttgtttttttgattctttccttagcttcttgcttggttggattggattcatggattggaaaatggaaaatggaaaatggtattggttcgttataggcggtgactggtcttgctctacctgattcgggttctggagataaactctacacaacaagctacgatggtaagctttgcatttgggactgccacaccggtaaaaccactgctgtcatcaattttggagtcccagttgggtgtttgatcaatgaaggcccttggcttttcattggtctcccaaatcagatcaaggtttggaacactcagaataatactaccactggacctgaaattacaatcactcttgatgaagagggacctgttggtcaagtcaactgtatggctgttgtcaatggtactctatttgctggtaccgagagtggtcagatattagcttggcaagcttcctctgatggagcttctcctactgctaatccaattttcatccctcttggtgttccatcttccatgaaacatggaggtccagttgtttgtttgtgttatggtggaaacagacttttctcagcttctttagaccactcaatcaaggtacatatagattactcttttgcttgcatgcatatatacttgtattgttactatgttctaatcttgtattgttttgtaggtgtgggatcacaatttacaatgtgtggccactttgaaaggccattcagatggtgtcatgtcccttgcatttggtggatattatttagtctcatcttcattggatggcactatc

SEQ ID NO: 256487 - DNA, 1086 bp, Cannabis indica
tagccactggggatgtggaggaggtttgtgtttggaccccccctccggtctcttggatgtgttgtaactgtgatgtagctatgagtaaggatgggtctgtgatcgctacggtggctcgtgatgagaaggggtcaatcctaactataaaagcggaaaatcttctggtttcagacccaaaggttgctgaggcgcacgctgtttgtatggcagcggatctctcggtggaaagaagaatggggaaggtcattttccaaagtgacaatctaagggtggtgaatgccttttcggcagaattcaaaagtgcagctgacttcaacctagccaatcttcgcagtcgattccgtagtatctgcagcgcgctgaatgagtggaaaattgtccatgtgccgagggcaggcaattttatggctcataatatcgcaaagtgggcctgttctactggcactgtggggatcattcatcttgctagccttgatagaaacgtgctgaacgattatgtggaatggagagaacatgctgggtaatctttgcacactgtgtttgagttgttgtggtttggcagtggtgtagtagttgtttgctttgtgttagtttctgtagtagcttttattcctattgttgttgtgttcttgttttctttgtctgttgtgtttccttgaacgtttgtagctatgctactttgatgtagtctttgttttgtttccttaatctactgggtgcctaagcaccctcttttccataaaaaaaaaaaaacaaatgtatagactaaagtgtccttgtttacatataattattataattaagtaattataattaatttagataaaatatcctaccaattattatctaaaaaaataattctaccaattataatattttcttccttctacttataagttttgaaaaattattaataaacatatataagagaactacaaataaacagatattaattaataaaatatatgaaaattaattaaaaataacaaaaattcaaaaaaaaaaaaaaaagaaaagaaaatccttctatctttcgtttggatcttaaaagagatctaaggtttgctttacagtctttcaacttgt

SEQ ID NO: 256488 - DNA, 1050 bp, Cannabis indica
ggaaaaaataggatgtggattgatctctggaagtcgacctacatcctcgcctgaaacttcttctctggaagatttggtcggacattctgcctaccaaagtccgcttacgtatggaggcaaaacctgtgttttttgttgggggggaggaatggaatcagccttgcatttattctgctcctgcaatgttaccagagctctctggtttcagtgtaagtggggatttcgcacggattccttgaattggtcatctgtaatggattttgggcattggtggtctaaattattggatgatgaggctcaatcttatattgcatgtttgtgtgatattgtctggcgtaaaaggaataatataatctttaggggggactgctgtaatttgcagatcatgatcgaggaaatcagagagagagcagcggagatgcttctctctatggccacggtagaggtgatcgattccgagggagatttggtcactgaaccacttacccatcaggactttattaagtatcatactgatgcttctgttatgaactcgaaggcggggttaggagtggtggagctttcggatgaggctgttgaggattggtgggtggctacggattactctgaggtttctggggtgttggagggggaactacgggctattcgcttggctcttgttcaggcgagattgagaaatgttacaaagttgctggtgcaatctgattcgaaggctgcggttttagctctcagctgtgggagtttaccgttcgcctcgggtacttatcctgtttatgaatcctgtctatccttgtgtaagtactttgatcatgtaattttctcttttattcctcgagatgaaaatagggtagctgatactcttgcggggtgggctagaagaactttgtcctggaactctggtcatctcagggatgtagccccctctgtggctacaactctaatgtaactcctcttttgtttttctaataaaattccttttcaccaaaaaaaaaataaaataaaggagaagtatgaggtggtgatggaacgctttaaaattagcttaaatac

SEQ ID NO: 256489 - DNA, 2328 bp, Cannabis indica
atctgtctagtcaacattgtgaatctagacttcattaaagccaagttcattaccacgaaatattctttggacatcacacaacttagctgtagagatgaatgagatcatatcagaggaggaatcaaataaattaattataaataaataccatatatagatatagtataattattatataataaaatattttattttttccatataaagccacaaactgagaaacaatatattctcaataaatacacaacaggccgtgctttactacaaaggaaataataaaataataaatggaaaatattctcaaaaagaaaagcataatctgttcaaacagaatgtcaatccgttcaaatagattcactgtacttggacagattttcagcaaaaagtttccttatataaagaaaaataacaaaatatacattaaaaaatagctttacacgttttcttgactaagaaatcaaaagagaattaatgaaataaatataaagactttccttaaatatacaaagtaaataccaaatcatttaaataaggaaatcacatatatatttattcaaaagacttttcacactaagaaaagagaaactattttcgacaaaaattaaatgtaataaacaactaatttcgaaaataccaaacataattaattttatcatctttaccaaatataccaactaaagactttacaatctccctcttttgcaatttgatagacataattaattacaaaaccctgtaacaaacatgttaacgatacataaaaaatacctttcttgaatacaagcactaacacgaataaaacataaaggatttaaaactaaaaccataaaacttcccctcaaaataagagggcgtagaaacaacaaaccgataatggtttgtgcaaacttctcctactttgtgcctgttaggctatttttagcctatattttggatcaattttatgttcacttttcgttgttttaggacggaattatgcgtgttttatatgttttcaggttcttcggagtaatagaggcctcgggttgcaagagtgcaataaaagatgagcggagccaagaaaaatgccaattttaggttcaatgcacttttggccgcggccataacttgaagacagaggacacaatttttgatgccccagtcgccgcgacgagatacaccttcgtcccggccataaagtcagaatagaagcacggttttcagaagctcatctggccgcagcgaggaacattgtggccgcggcgagagcccgtacgaccaagggtaaattcgtccgacgaaccctaaaaattagttataaatagaaaactgcgattggaaattaggggaagcgatttggaaccctaaaacacagcagaaagcggcaagaagagcagaggaaatcaaagtgaagatccagagtcattccaccaacagtttctttctctattcctttttaatttctttatgctgaatattgttataggaatggttatggatttaattatgaactaaatttcccatttagggaggatgatgattgttgtttaaagtttttgcctagttaatgaataattgccattcctccattcttgattgtgaaattatctatatttgtgtttaattccatgtgtaagcttgatcaccttctacatgttctatgatctcaattcaaaatctgaaaagtgagaattgagaatgctaaaattggataatcgatgttctatgtgaaacgagagtattcacatgacttatgtgacaagtagattattgcttaatgctgatttcatgttagtttaattaagagattaattagagaacatgtgatttagaacctaaaagatctgaaaagagttaggttaatttataatctgtcattcacttcaagaaaaggatagcaattaggcattaacaattgggtaaacaaacaacaggattctcctccctattatctcatcttgctcaactttcacttgtgttatttaagttttttgaattactttcattcttttgaatcataaaaactattgattttccaaatagaattataagtataatttagtagtaattaatacaattccctgtggttcgacctcacttgcgtgagtatactacttgattgcgtgtacttgtgtagtatttaataatttttcgtaacaagtttttggcaccgttaccgggaaattgtataaagattgatattacataaaattatactaacttctgctttggtctatttttcttgctatttgctaatctgtttcttgcaatattttctttatctatttcaggaattctaagtgtatgcaccgtcaaggacaagcagtcatattaccagttgatcctgaa

SEQ ID NO: 256490 - DNA, 516 bp, Cannabis indica
tcgtcatttgcacgagtttaataacactcttcttagaaaacaagcttggagactacacacttgaactgattctctggttagcaagtttttcaaggctcgttattatcctcgtgggtcattcattactgcggaatcgggcaacaatccaagctttatctggagaagcatacttgaagaaaaatacctgattactaaaggaggctagttgcttattggtttaggtgagagtgtttctattttgaatgatccttggcttcctgatgaggaaaacccttatctttcctcttctcatcctagtttgtttggtcaaaaagtgagctgcttattggaagtgaatgacaaaagatgggatgtggaagtcatctgtgatttgttcaatattagagacaaggagttgatttatagaatacctatatctaccactaatgtgacggataagtggtattggagcaaggaggttttggggacctattctgtcaagtcggttttggggacctgtggatcacttgttcaaag

SEQ ID NO: 256491 - DNA, 1724 bp, Cannabis indica
ccttcttcactcatagaaggttttcaacatgttttacaaagctgcgatttggtggatatggagctaaaaggtcatccctacacctgggaacgtggcaagggatctgaaaactgggttgagattcgtctcgacaaggcactggtcactcatccctggcttgacacatttccaaatgcagtccttactaatggtgatgtctcttcttctgatcacacacctatatttcttgagcctgctcctacaatttcgactgctactgctcattttttttgctttgaaaatgtcgggacaagggaacctatgtgtgctcaaattgttcaatcctgctgggattcgaatacgcatctgccacttcaagaaaagatcaacatatgcagcaaacttcttggcgattgggggagaagcttaacctctgatttcaagaaaagaattcgacagagcaaagccaaactctcttcattgaaaggtaaaaccgatccttcatctattactagtttcggccatgagcaaaataactactttgaaattcttgcacaacaagagctatattggaagcaaaggtcaaaacaattttggcttcatagtggggataaaaattcaaagttttttcatgccatggctagtgcccgtaaacgcagtaataatattcaatctcttcaagatgcttcgggtgtttggcaatcatggagcggtggccttgaggaggtaattgttgattattacaaacatgtttacttagctggtgatgttgattggaatcaggttgtaagcggtatttcatgctctattactgatgctcacaatgctgatctgttgaagccgatttcaagtgatgaggttcggacagccctttttcagatgcaccccgacaaagctccggggcctgacggtatgggacctggattttttcaaaaacattgggatatagtaggccctgaccttgttgctgctgcttgtaatttctttgagtcaggtacttttccttgtaatttgaatgacacaaatctggtattgatccctaaaaagaagtctcctactaccatgaatgaccttcgtcccattgctttgtgtaatgtttcctataaggtgattgcgaaagttcttgctaatcgaatgaagcttatcattgatcagattatttcacccactcaaagtgctttcatacctgggcgtcttatttcagacaatattatgattgcctttgaagtgatgcattatctcaaaagaaaagtccatggaaagaagggctatatggcgctaaaacttgatatgagcaaagcatacgaccgggttgaatggggatatttacgtgctgttatggttcaaatgggcttcgatcaacgatgggtcaacttgattatggcttgtgtctctactgtgcaatactctatcttccatagtggccatgtcatggggccaatctctccaacaaggggtattcgacaaggtgacccgctctccacctatttatttatcatttgtgccgaaggattctctgctctaatatctcggtttgaacgagaccgattactccaaggctgccgtgtctgtcaaggtgctcctgtgatatctcatatgctatttgctgatgatagctatgttttttgtcaagctaacaatggctctgctggtagtattatgtctcttctccgacgatttgaatgtgcatctggacaacaaatcaatcttgcgaaatcatcagtcttctttagtccaaatgtcaa

SEQ ID NO: 256492 - DNA, 1917 bp, Cannabis indica
cttacaagtttccaaaccatatgactatcacatcgtagtaaaacttttaggtacgtaagataaaattgatttttattctttacattatacttgaattattttttttaataatcgcctacgttgtaattatttaagatttaattttaaatttttagaaaatttagcattagaaataagaatgtaaaatagatcaagtcatgagatctgatttgactatgatctgatccgaattagctgctgattcaacctgctgagtttacttttccgtgtcaaatctgtttcgatccgaataattcaggttggatccaacctgatccaaatcttaaatcctattttttttaatctaaaattttcactatagtctttattcaatttaatataagagatgatggtgggggaggtgattaatttttttttgctaatttttcctaatagattttgttttagaaaatttagtacgtttttaaaaattcatcatcaataaataataatatagtgtgtcaattacatgaaatcaatttttttataattaatgttaggttgttggacgttattaaaaaaaaaaaaaactgaggtgggtcgaatctgatccgatccgaataaatttctattggattggtttgattcgatttgagatttgtttgttttgatcgggatcgccccgtcaaattgggactctgatctgaactgaaaattcggatcattttaccatgcctaataaaaaataatgtatttaaacagttacttactttcgacgtaataaaaaattattgtgcgtgaaacaaaatatgtaaatcttattttcaacgtaataaacttatcgaaattttcttaaaattttacaatagtcttaaataactataacgtacactatcattacaaaaattagactaaaaaatttcctcaactcgaaatatataaggagtctactggaacacagaacattgttctatagtacttgattaccctctatatatacatatatataattacaatagcaagtacgcaactagaaacttttaccttacaaaaccaaaggatgatatatagaacatcgctcatatttgtgtagtggtgattgaatttatctttgtaaatatggttattattcaaataccatcagttgcaaaaaaaaagtttgtatacttttatgggtatttttagtaggctaattagtatttttgttccctaaactttgacatgtaccgaataatgttcctgaacttttaaggttgttaaaaatgccccctgaagtattgagattgttggatttaaggactttttttctaattttagtaaaaaagtctaacatatatgaaagtccaataaccatgatttagtacatgtcaaaattcgaagatcatgatttggtagatatcaaagtctgaggagcatggtttagtatgtaaacaatcactcaaatagtaaaattaaatgaaattagacaaaaatccttaaatctaacaatcccaatagttcaagaggcatgatctggtaaagtgaataattgtaaagagaatattagtaataattaacatatcatgagctataaatgtatacatactgttaatactaaagtgcctaactgtgtgtacaacatatattgtgagatagctcaccaacagctccagccctccaaagaaggcctttttgcctcccttccactgatctgcgcaggaaaagccgaaaaagcccaattccaaggaacattgaaaaaagaggagtttcaggcccacccaggcccaatgcaaatcttttttttttgaaagggatgtgttttcatctattcttcatcttctgaaaatggtttgtcatattagcaatgaaagacacattctcttgcaatttattttatgttttgtttcttaaagaccagaatgagaaatgatacagttaaattatttaactattaactct

SEQ ID NO: 256493 - DNA, 820 bp, Cannabis indica
gtggaatgaagttagattggatcgggatcttgctaattctcattggatgagtatgtttattaacgctcgtttgtctaatatgatttattctacttctgaccatagcccaatttttcttaatcattgttttcgcacacaacctgtttttaagaaagctctccgcttcgaaaatgtgtggcttcgtgaagcctcgtgttattgtattgtgaaagagtggtgggaaatttgtggttctgctatggtttaagataagattgcagctgttctagatcctcttagtgactagggaaatgatattattgttgaaacttattttactaggatcttattttttatcacgtatgttgattataaattaatagtctaacaaactagaacatacttttctaaaacagaatataaacaccttaagtttgggtatacttacagtgttatctcatcgaataattgactatttccattcagtactctaacctttgaatcctttctatagtagaatatcaccaagtaatgaatgtgaatcttcttttcttagaatatgtgacatgtattctacatagtcttccacaatgtcttgggtatcacacatgactagtgtaggcaatttctcaatcactaagaagaagatgatggcaaaaaaaaaaacaatgaggaagagagaaggaaatattttaaattccctatagcaaataggctattaaaaaattagcatagaaaagagaagaaaagaaaaccaattgtgtgttgtatattgtttttatccgtaattctggacgaatgacacgtggcataaaatgagaagcaaaacctcaaatggtca

SEQ ID NO: 256494 - DNA, 2354 bp, Cannabis indica
ttatttatttattttatttttgggagtaagcaggagcaggaacagttacaggaaatgctggtgacaatcgtgaggcttatttgcagttgtcaattactgttcttgctgcattttgccgagtccctgatattgctgcttctcaagatatggtttctaagattcctcttattctggaaattttatccaaagagtaaggttctcaatctcatgattggtcatacactgtattgtcttcataaagctaatgttttaatatgctgttttgcttttaccacactcatatgttctcctttttgtgttcaagttattgatctattttttattctaggggtgattttgtggttggacaatttagggatatcatatttcttgcttgatatagatttgagctttaataactgtactttttatttacagatctgtttcattagttatagaagagtgttacgagtttttgtatctggtatcatcgacttctgatgacgggatcctgaaattttatgaatccgggggcataaaagtcttggcttctcatatatctacctttccagatggtaagtattgtattctatttgcatctttttttatgggcatgcatatggcgcactgcgttgtattacttcatttgtttttaatagagaaccgtattgtgtaattcaatacaacactaaaaattcgatgtgttaactatttaacttatatagtggcttaacaaaggccaagtgtcttgtataaaattatataaactggcagcgtgattgataacgacatcatagactgaagttgaaggtttaagtccctccacttcactccactccaaaccataaaaaatatattatacgctatttttcctacttactttctcatgatctcatcactttatttctactcaaaacgccaaataacataattatctaagggatattggcgaaacactctaaatttcacttctgttatgatttttaccattttgttagattgttacagtaaaatactaagttggatagtctatgtgtatacaattgtacatgtgttatgtcatattggtccacataatttaaattattacaaaaattatttaaattttttaaagtaatttaaagtaatatttttttcttttctttttcttcctcctcttcttctctccttagaccgatggtagccctcaaagtcaatttgcttcaattttcaattaccctatttgaaaaaccttaatcccataacaaaacccaaaaaccaaaccacaagtccaacactataaaacccctaaaaaaaacaaagaaggctacactcaccagggaatgctctcagaagaagaaaccgtatctggttttctgcaattgccaaatgagaagcatctgaaacaataagtgtccatctaaaatggagaagaaagcaaaaaagaaatagaatttccaagaagattcataaattaggaccttgcgctatttggaggcttaatgagacaggagcagcgggggcaagtcggacctttaggaggcggggttggagactcgaggactgaagtgagacctttggtgcctagccatgaacttaggagtgttgtgggttgatcggagttattggggtttgggtaattgggagtttgggctattggtaagttggggtctgggtgattggatttgggttggggtttgggcgattggggaaggaggaagaattggcgaggattaggagaagaggaagaagaagaaaagaaaaaaaaaataaaatcaaagaaaattagaaacaaatttattttttattatttttataaattactttttgtagaaaatggtgaatgaaattgtgtttattattcatgtagatactaaatagcatatatttatacaactttagagaaactaaattagaaaaataggaaatgaagtaattacaattgaccttattttctaaataatctacaactaatattttaacactcaccctcaagctagagctgttacgaaaattataaaacagtacgcaagtgcatgtaatcaagtagtaaactcacgcaggtgaggtcgaaccacagggaattggattgaataccactaaactagacttatgattctatttggcaaatcgatagttttcaagattttaaacagaataaaaattcaagaaacttaaagaaacaagtaaagaaacttaaatggtggtggccttggtttggctggaattatcactgatttttgcgggacttatgatgtgcctcaattggaatatgacaacactgtggtaccgcagagaaagatggatgtcagtatggtcaacaggctcaaggagcctcatccttatggacaaccacccgctgatgagcaacaacaaggccaccacccgtggctcct

SEQ ID NO: 256495 - DNA, 2436 bp, Cannabis indica
tccatcttgagggggagtgttaagttgttagaattagtttttggttagttattagttagttgtaggattaagtgttagttatgacagctgtaactaaacatcagctactataagtagcttgaatatatctgtattctttactgagcaattgaataacagattcagtcatttccttctattctctttgttttctttctgctatggatttgtgaaagaaatgagaatatttaactcttttatttcaatggttgaattcttatttttaaatagtacaagaaaaactttgggaaactaaatcagtataataatagtaaatacaataaaattttaataatgagttttatctttgaggtaagtaattgattttccattatttttttaatatattgatatatttcatgacagtgcacatttaaaggtaatgcctattataaaaatttaataataaaattattgatattctctattaatttcattaaaaaaattagaattaattttatgttttgatacataatggatcaatatatgtatacgaatgtactctaatcactcaaaatgagtatagcgctttagtgatcagccaaaaattcacatcagaatgtctctgcactgaattcattattgtacggtgaagtaataagtacgtatagagaaacaacaggaattatttattggaaacaacattacacacatgtagttaataattaatacatattatttttatttaagcttaagatttggaaggcccaactaatgattgattttggatgtaggtggcggtgatcgcacgttttaatgtggcaggtattgatattggagatattgctgatcaaagtggttttttgggtaaaatggaagagtgtggtggcagtgatggcaaggagtgtgagacttttggtggcaaggatgggagtttcgggaaagagtgtgaggatagtggtggcagagatggaagttttggcagggatgacggtagcggtggtagtgatggcttaggtaatttgggtaaaatttttggtattaggaaacctttttgacctagtagtgaagatggattttgattagcaccttcatcatcgtaatgatcagcttcgactagcttggttaatccaatgaggcataacaataatgccacaacaataataagcttattgttttccattctcacaaactctcaatctttgttttatgtagttagttataacttgaataattttaaccagtgataagtgagatatgattgagttaattaagtatatcattcactatatatataggaaatggtgatgttgattattgatcattgtagcaactaataataaaagtttggtatgataattattacgttgtttaattatgaatagttattattagtgtgcatagtaaatgtgttaatttatttcagtttacgtcatttgcatattcacgtttaattattactacctaacctgtttatagaatgctacgtgcgaggctaagttttatactaaatgtgttttgttttatttaaaaataatacaatcaataattaaaaaaatatattattaattattgtttgagattattaatatgtatattataaataatattgttaataattaaaagtaaatactgcatacaatatatgaatgtttaagaaatctagataatctaactgcaatttattcttaagttaatccaaaaattaatgttcaaaaaataaagcatagacaatttaaatttgagttaaataaaaaagatattaaaatttaatctctaaattattgataggtaaagataacacatgtctaaaaagttgtaaaaaaaaaaaagaatactcttaatggttgagttttaattttcttttgcgcgacaacagtgtaatatttgtattttgcacttttcaatctatctggatctgcatataattgaattattaatttttctgtacgtggataatttgtatatgatagtgtcgacaaaattattatttttcatgtaagatggtaagatatagtgtaaataattaatttaataaataaaatctacttatgataatcaagtacatttatttgatttatttaaaactatatttgtgcagtaaagtgtattatttgggcagctatacatgacagtatttttttcatgatatctgcaaactgttaaaaatataaaaaaatattgtgtacatttttaaaaattaaggaaaacacggtataaaataaagtaatcaaggaaaaactattgtttattatgtttgtaaaaattaaattatataaatttttgttacaattatttagaaaataaaaattaaacaaataaaattataaataaaatgaaataaagagagctaggcactaatgcacgtgccaacctcacctagtaagtcaaaagaaaactccttagttttaatataagcctaatttaaaatgcatcatgcatttaatcgcaataagt

SEQ ID NO: 256496 - DNA, 1064 bp, Cannabis indica
attcaacatcactttcattcatcattccaacacagccaccctagcctccatacgattccaagctcgaccagtaacccccacacgaaccactgcccagtcgacccaccaccaactcgagccacagaacccagccaccatgattcaccaaccaccatcatcgcttctccaactcaactccaatcaccccatcttcaacccacgcctcactcaactccgccgctccattcaactcgacacaacaactcaatctcacgagaaaacccagctgtctccttcctcactacttagttcaccatcaccatcttcatctcagccgcaccttcgaaacaccaattcacccaagcactcaaccttcaccattccccttcgcccaaatcacaccagcgaaaaaaaaatcagcaccaaaatttcagaaccagttcaccaccagccattccatcatctctgttcaactcgtccagcaacacccgaagtcgaccattccagcgggaatcaccaacattcattcacaccaccttctccatcacgtcctcttcacgattcagcgaccagccaccattactagctccatcacagccgagaagtacagggagcaaccgattaactcactgcagtcatacttgtcttgaatttctctggtttgttggcaactttgctattatttggattctaattttgctatggtggccaagtaattgtgtgatatgtgaatgacttaatttgtttccattaatattctaaaatttctggtgtgaaattggaagtttggtgtgagtagaagtgttagtttggtgtgtggattctttgaattggataaattgatagttggaagtgttgaagtggttttgaaattatttgtgtagttcataattggtggtatggctttgcaacttttggtgtgatattggaattttggtgtggttttggaacaatagactatttgagggagtgattgttgtgtggatttggcgtagtatgaaaaatattggtgtgaatttgaaattcttggtgtgatttgagaagtgtaaggtggtgtgtgagtggtttcaaaaaaaaaaaaagaa

SEQ ID NO: 256497 - DNA, 529 bp, Cannabis indica
ttttttttttttttaaataatgttattttgacattgttatacgtgaaagtaatttaattttttttataatagtaggaaacagaaatggagacaaaaaattgtttgtgaagggggtaaagtgcaaaaaaaggtaatttgagggagccaaaaaataaatttttaataaaaaataaagaaaaatagaaaattataactacaaaaactgtaaaaaaaatatatatttgaggcagaacgcccccataaggtatatgcataactctatccttgatgtggagtgtttttctgttatttcagaacaatgttgttttagaacaatgtagatataatgttttgtttttatatttttacagcttttttaacaaaatacaaaatgttgttttttcgttgtttttgaacaatattattttgacattgctgctacgggaaagtagcgtttttctttgaaaagaacaagtgaaaacctgtaaaaagagcttgcgaatttagaaaggatggataaggaaaacctagaggtggtcctgaagagaat

SEQ ID NO: 256498 - DNA, 3563 bp, Cannabis indica
caggtcgacaaaacctaaccccgcgcctacaaagaccacaagaagaaaaaacacttgaagggaccatcctttacaacaaaatctgtgatggtacctggatttctcaactttagcatgtccaagtaactaggtaatttcaagtatgaagtttcaggtgtacccctaactaggtgtagtgccttctctctgcacctccaagccttttcataactcatttggattccgtaattgtggtgcacatctttcctaatatcagaggccaaatgatctgagtcgtcagttgtaatggaaaacaattctaagcaatgggaaacaatccttcaaataagctttgttttgatccgtgaagtcaatgcatatacaccatgttctgtttggtttaagtataaaaactaggttagccatccatttgggataatacacatctctgatgaaggtgtgggatagcatcttgtctacttccttctccaaagctgctgactttatcgcatccaaagggcatcttttttgttgtactggaggcatatctttgttaacattcaaaacatgagtgatgacattcgagcttatccttgttatgtctctatggcaccatgcaaagacatcggttgattctttgatggtgtctatgatctcagtcctctcattagggcccaaaccttttcctaagcggatcactttggttgggttttgatcacaaatgcttacttcctcaatctcctccacaggtttcaaaacagttttagagccgatgccaagatccaattcatcttgtccttcgggcaagattacttttctggtctcttggaccatgaaaatggcttgttacacaaccatattatagcactttctcgcttctccttggtttccacgaacagttccaacccccgctgcttgagttgggaacttgaggcacaagtgcctgattaaggtaatccctccaaactcaaccaaagtcaaacgtcccaaaattgcattgtacgccgtggggcagtctactacaacaaaggtacagtacttgagcgtactttgggtggtgtttgggcacagagttatggggagtctcacctttcccataggaactagagtagtcccattgaatcccgtgagttttgaaccactcagggaaaggtcttgatcagtacgtctaatggcaataaaagcatctttaaataggaggttaagtgaactcccattgtctaccaagatccaggcgacaatcttgttggcgatgggagtttcaattaccaagggtcgtgatgagggaaacgcaccatcttggcatcctcttccataaaggtaataggctgacctataagttagggcctttacgccggaagttggttgacttcccatatctcttcatcatgatccaaagctttagcataacacttcaactcattctgtgtagttcctccaatatatggtcctcttaaaatcacggccactctcccatttggtctaggagactgtctaggtgctagatggtgctgagagaggactcctagagggactggcccatttaggacttaggctagtaccttgggaggtgctagtgctctgatttgtccattcatgtgtggtaacctatctttgatccatccgtacaagtgacctagccttattaggctctcaacttcatctttcaaattcttgcattcattggtggtgtggccaatatcattatgatattcaaatcttttgttagggtctcttcgcgagctatctcggtatagaggaagcggtctctggaagtgggtgttttgccttgttgctaagtacacacattcttgggtgtccactaaatcggtatactaggtatactgagaggtgtaacctttcttttgccttttattctttgtttgcgtgcttccttttgaagatctcttgctctaggagagttgaggagcatctgttgcacttgctatgggaggtgcgaattaagaggatattgcaaacttactctgagagctaggttaccccttagtgctccgatttagattgagctggggtaaaagcaaggttgtgggtgtatcctagtgttgctgagaattgcacatgcaactagaaggataattctcagaaattgcgttctaggagcataccctggttcgccaatgggataataccctctgaaagtagttatttgcgcttcctctagactgatgtactttttagccctcttctgaaagtcctaaagactagcagctccttcctgttggatttcattccaaaaagagattctcgttcgaattcccacttgaagcaatgccaattgctgtccatcataaacctttttagtcttagaagcttcttccttaaatattttataacattttttagagttttaattggtagttgtttaatgttggtcaaagtgctgacttcaaggtttatttttttggccgccacgaacagccttcgaaagctaacttgcaacttgttccaatggtccatagatccaggttctagctgcttaaaccactcctcagtggaccctcctaaggtcagcaggaaacataaacactttgtgtcatcgctgactctcatgactgtcatcacgcggttaaactaagataagtggtcattggggtttgagtctcatgcgtacaatgccattttaggcattttgaaattctttgggagctccacttcaaggatgtatctagcacagggttctcggtcctcacaatcaaattctgaatcatatctcatttgtcttcaggagactttatcaatatctttttggaggatagtgagttcgaccaagattccctcattcaaggcactttctgagactactattgcttgtttttttcgctctaagcaatttctaagatcattgtgtttggcattgagtttctatctcaaatcgataagagggtctttgtggttttcccttttctctcccccggctcttggtgcacgaatacacttttccggtctccccagttgagggccagcattttcctttggaaacctgcccctctgcggaccttttgccttagggagatcagagcaaattttcggcaaatcttgagccttcttgttctttttaggaatggttgtggggtttgcctttgggaagccttttgaagggtatcgaatagggcttggctctcgatttttgtgccttagattatttggcggtggagactcctctctctcgttttgtctggcatttggatgcacatggatgcctaccgtttccatagctttttgcatggcaaccattatttcttgcatcctcctgttctgctccctttgctctgccaactcggcttcatggtcagcaacatttgtcttaatgccatgagttcggtgtaactgccatcatcatatgtatcgcactcttcttagtttttgtcgtattctatatcattagtttcatcttgttcttctgcttctacgtctactcgcgaagccaccttttcttcgtctagccccttagggccttggggatggacgtggttgaagtacgtggtttctagttttcaccatcgtattgagaatttacttttgatattcttcttatgtaaggccttctacaactcttaatgaaa

SEQ ID NO: 256499 - DNA, 668 bp, Cannabis indica
gagttgacatttgatggccaaaaagggatacgactgtaataaaatcgtaaaataaagtattttgttggtatttttttattagggtcatatgtataacaattgtaaatattaaggagtttcgccgtaaacattcctactaaatataaggtttgttatatgtcttacctagaaggaatggatattaaggggctcaacttttctgcaagcttaacagcttcttcctcagtattcactatctgattaaagcaaaagtatctcccacatgtagatgaatcttccaaagctctgatatgaacatcaaccaaaaagtccacatctacaaatgctaacaccccattctcatacatctgagcagcccctatatatataccaaattgaagagtgtttgtttgagaaagaaatcaacagaagttgtagtgaagagaatgtaatgtagttagttagttgtaccattgagataagatgttgttgagagtgggttttgttgagtgacacatgggccaaggactaggcctgagtttatggaaaccatgttcaccattctatccatagctaaagcccaagcagcttgttctgatagtgtttttgctaaagcttgccacaactacatatcatatttttacacaaagatataaaaagttagagaaagagaaaggtctaaacaatta

SEQ ID NO: 256500 - DNA, 1100 bp, Cannabis indica
tcttcttctttcttctcatctactttatattattttatattattttataacagtattatttaatacaatactatatttaatattgatttgtactaataggttatgtagaattaattataaattctttacaataaactctaccccaaccctaaccaaggcttggattcggaccctggagttggacccggacagagaccgggacctgaatttggacccagaccttggacttaaacccaaaccgaaactggaacccgaacacgaacttgaacactggacttgaattgggacatagactcgggcctgaactcgtgtttaggattcagggctaggttcaggttagggtcggggtgcaggtttgggttcaaggctaggtctgggttagggtcggggtgcaggttcgggttcgggttcaagtttggggtccaatttgagttcgagtcctggtccggggttcgaggtcaaatctcgagtttgagtctaggtctgggattagggttcgcgtctgggtccggggtctaggtctcggtcaggttcggggtctagggtccaggtctggggtctggggttcggttagggtcttggtttggggtttaggttcgagtttggggtttgggttttgggttcgagtctagggtccaaggtttggtctgggtcctggtttggggtatgggtccaggttttgggtctgggatctaaggtttgggtttgtgtcaaagtccggggtctgggtttgggtctgagtccttagtttggggctggggtcggggctgaggttgaccctagactctttgtaaaagtttataatacaagctaatacaggtcgtttgtgatgtattaaataatacgactcatattgtattaaaatttatggtattaataattaatacaatacaatattttatccaaacatgatgttatttattatttaatacaatacgatacctatataccctaccacacgagcacaaaatgttatataagatggatgagctactcttcttattgtccattagttataagattaaacctcatatacttttatcttaaattctaaaatactaaaagacacgagtaatagggtgaacaacggtcggtttggt

SEQ ID NO: 256501 - DNA, 1082 bp, Cannabis indica
tggtttataatgtggctacaaaagtaatttgtaattggttgagagttgttcttctaagtagcaatagtcaaatcaggatgtttacttcacaatataatggtgtgctaagatcttttgaggcattatggaaggaaaatatatcaaccctattgtatgatcaaaatggatatgaagaaggctaatgataccattgagtgagattttattgaagagatattgaatgccttcaatgttcctgctcattcactgttgccgtgatgaactatgttcagactatgaagttctctctcatgtttaatgaatctcttcatggcttcaaggggtttaggaaaaggggacccaatttctcctttgctttttgggattggaatggggtatttgtctcaagtgtttgcaaaagtggctctaaaagatgatttcaagttctatcatagatgtaaagatctaaagttaagtcatctttattttgttgatgatctttttctctttagtagaggggatccaggtcaagccaatcatgttatttctttgtagtttcaacaggttttttgaaaattcaggtatccaagccaatgcctccaaaacaacaatttattgctctcgtatgcaagactaatatatcgctcaaatattagagataacttttagcttcgttcgcagtttcttaccttttagatatcttgtcgtgccaataagctctaaacgaatttctactgctgaatgtcatgttttggttgagaaaatggtgcatcaaattagagtttggaatttaaagaaactttcttatctgttggtcgggctattttagtgagctcagattgcaattcattcctactaggcccaagtcatgattccacctaaaagtagtgttttgaagaagattgatatgtaggtctttactttggggtggttttgccaatttccaagggtcgggttatatggcttggaaagatttgtgtacgtcaaagaagaataggggcctagtcttctgaaatattgtcatttgaacattggtgcaattgaaaaacaggttttggcgattgttcaaaagaaagataatatttggatgaaattagtttcat

SEQ ID NO: 256502 - DNA, 1823 bp, Cannabis indica
cgagtgtaagagtaagaaaaaaacttgttaaaatttactctgaatagaagaatattttcaatttttgaactagggggtcattttaaccaaatttaaagtgaattgaattttcatattcatttcttagtagtacaaattaattgtgactagtggcaaaaatattccgagattggtctgtgccacatttacaaagggataccactatcagaaatatgagatttttactatttcgattaaaatatttgttagtgcttgaaaactactttttctctcaacgtgtccaatagaaaagtgatgcacaatggtcttggattcatccctatgaaacttcactatttttctagatgtgttgggtgagatttaagaaaacactaacaagtgtaagagtaacgaaaaaacttattaaaatttaccctgaatagaagaacatttcaatttttaaattaggggctcattttatccaaatttaatgtgaaactaattttcacattcacgtcttagtagtatgaatttgatgtgactagtgggaaaaaatatttcgagataggtccgggccatatttcacaaagaagaaccactatcagaaatgtgagattttttactatttcgattaaaataattgttagtgcttaccaactactttttttctcaacgtgtccaatggaaaagttatgcatgacggtcttggcttcgtcctgtgaaatttcataattttttgagatgtctagggtgagattttaagagaatactaacgagtctaagagtaaggaaaaacttgtttaaatttaccctgaatagaaaaacatttaaaatttaaattagggctcatttcaaccaaatttaataggaaaccaatcttcatattcacgtcttagtagtacgaattcattatgaatagtggtgaaaaatattccaagatgggtccggaccccatttcaggaagggatatcactattagaactgtgagatttttactattttgattaaattgattgtttgtgcttaaaaaagacttattctttcaacgtgtccagtagaaaagtactggaaaatggtcttgactttgtccctgtaaaatttcatgatttattgagatatttaaggtgagatttaaagagaacactaatgagtgtaagagtcagaaaaaaaaaacttgtaattgttaaaatttatcctaaaagaagaattttttaattttttaattaggaggccattttaataaaatttaacacgaaaccaatcttcatattcccgtctcaatagtaagaattcattgtgattagtggaaaaaaatattccgagattggttcgggccacatttcataaaggggtaccattatcagaaatgtgagatttacactatttcgattaaacgatcgttagtgcttaaaaatttctttttctctcaacgtgtctaatagaaaagtgatgcacaatggtcttggcttcattcttgtaaaatttcacgatttttttagatgtgtagggtgagttttaaagacaacactaacgagtataagtgtaagaaagaaaacttgtaaaaatttaccctgaatagaagaatatttttaatttttgaattagggggtcattttaaccaaatttaatgtgaaaccaatattcatatgcatgtcttagggggtcaatataacaaaatttaaggcgacactaatcttcatactcacgtcttagttgtacgaattcaatgtgacactatcagaattgtgaggttttcactatttttcgatgaaattgattgttagtgcttgaaaactactttttctctcaacgtgttcaatagaaaagtgatgcacaacggtctt

SEQ ID NO: 256503 - DNA, 1305 bp, Cannabis indica
aagagaatgaggcctaaaggaaaggttaccatgaagggccatcactagaagggtaaaccaataagtgacccatatgaggagcgagggttaacatgggaagaaattcggtccccaaaacccatgcacatgaatgcatgcaaaaaaaacttcttgccaaagatgatctggttggaatcaaactcgagactttagctcctttgccaaagacttaaagttaaatcttctaccattaagctaaagtaaaatgtgtgaatgaaacactcgataccacaaagtggtatttatagtaacaaggaagaagattctcaatcctttaatcaaagggcaatcaatagtggagattaacacacttgcttccatcaagatccatgatgtcaatgaatggtccatactctcccaaaaagatactgctaggatcatggatgatgtgtttcttgaaaggttgaagcatggagtagtaaaacataaagagtacaagagtacacaagaacacttgaaaagtgcactcataaactcatgggcagttgacccacaaattctttgagtaaggatttcaaattcatgaagagaaataaaagttaagcagtgaatagatataatcttactctttggggaagggtacaatctcaccattcagagattatggtcataaagggaccctatttttctcacattgggtgcatcatgggaaatataagggtcatacccccttttgtcgtgccattagataaccaaggaaaatgaggggcctcgcttttgtgcatggcaccgcgccacatgggtcacaaaagcaagacagggcttgtttccgtgcatggtatatcttgctcccctacattattcaacaccacatagaccatttgtgcgataaggatctcacctcttagtgagaagatgcatgaccctttaggggagatcccatgcaagttgtctttctcacctcaaccctactcccctcaaagtggaccttcaagaggcaccgtgaggataggtctgcaagcacacccatgacgcaaacaaaagatgagacgaaagagtggaggtacaaggatgtacctacgatataaggtagtgggagcatgatcccaggtgtcagtataacctgatacccaaccaccactactttaattctaatgctcgaacatttttttcaaagccattttctagatagtacatggtccctttagggggccactttgagcatctcaaatgcaacaaatgaaaattggagccccctataaatacctcttcactacacttgagaaggagtcggtaccttgtatgtggaagagctgtgatttgaat

SEQ ID NO: 256504 - DNA, 1345 bp, Cannabis indica
ggacaaaaaatgatcctcgttcccgcttcgttcctcatttagacagaaaattcttgccctattagagacggatccctacaaggtcatctcaatagaaaaaatgtgcattcctaaatgtttggtttgatattcaaaaccatatattactaaattatataaagttatacacgttttagtaagtttattttccaaattttattttttagtaaattagtcttaaactgtggcaaatttataagtcaataatttttttaaaattctctaattattttcctatcattaaaaaggaggatcgtaaatatgatttaaatcaaactcagcttattacatgaatatatggcttatgtaaactataaaaaaccaacatacaatattgatcgacttattttcaatattaataatattgaaacttaattagatatatgtattatgtactaattattttagcaagagagattaggatttccaacatcaacattcaattgctgacaatagttttggtagaactgaatccgactttgaacttttgtaggctctttaccaccacattcaattccattattttcagaatggttgcaccaaagccttggtctaacacagagtgaacattttccatccaataccacaaagaggctttaaacgaagtgagagggtcagtggccacaatctcaggggaatctaggccgttgaacgcgagtgctcggccagctgctccgtagttgtaattccatgtcagttgaagaggcccgcgcccgtagtatctcttactcgggttgcatggatactctcctactctctcttggtcacagtacacttttgcttggttatcactttcttctataaagcataatgctgcacagttattaaattaaaatatgtaagacttaagaattacatgtgctcttagcaattttctttacgaaagcattcaatcgaaatgtttgaaaatagaaacatataatattcttctttttaattacaccaataataattgagcattgttattaactataagactataaggtactcgatacaaatatagcaagcagttagcaatttttcatattatttattaaataaaaatgtgtgagacttatatatattgaattacaccaattaataacagtatatcatctatggtaggcattctaaagaagctcttagtaatcttgataaggataaatttaaacatggtgtttaagtatagtttatcaaatctctttatcttcaaaagttatgagcaaaaaatataacaaacaagttagaatgagaagtaataataagagaagacaagatgacacttacagccagtctcatgggtaacatgagcaaagaaggctgcaat

SEQ ID NO: 256505 - DNA, 1309 bp, Cannabis indica
ctaaaatgactctaataccatttttttttatataaatataaaaattaaagtaggggataattttgtcaatttatcatttattccaatattcattccaataacaaacaaaacatcttagaggagtgctaagggaactctctatccccctctcttttgcactctctctttaatgtaatgacaaatgtcatatttttagtaagagttagttttagttaataattagttataatattttaatgttattacaattgcgccattgctacttctatcataatttttgttttgagataaaatgccaatatatattgataacaaagttagaatacacaaggcattaatggagaaggtaattcctcccaccatgtacaattataatccaccgaaagagcaaatttggctaacaagtgagccgcattattagcagatctataaatgtgagagatctgtgccccaggaaaattagatactaataggaaaatattatttagtaaacaatgaaaatcagaaacatgattctgggaagcttgcactcctttaaccactaatagagaatcagtttctatgtagtgaacaggtagttgaatgtctttgagccattgcaagctataaatcaaagccatagcttccataacttctggttgaaagcatccttgaaaaggcatagccattgcagctattatgtcacctgtgctattgcgaaggactgctccaaaaccacttttgttattcattgtattacatgctgtatcagtattaagcttcagtcgacctgaaggcgaattcatccaaggaggtattcctccaggttattgatagcaaagaacaaggccatctcaggtggttttgttttagatccatgtctctctttgtttttctcattccaaatgctccataggatagtagcaaattgctctatttgtttagtggaccaaattaaggatacatgctgcaaaaagtccataagagacatattatttgacaaaaattcattgatgaagaaggatgatagttgccagattttccttggtcgtttgcaaaggaaaagtgcgtgtatgatagtctcatttgatgtgttacataaagtgcatatggccgagtcacttatatgccttttgtgaagggttccagccactgggagacattcatgtatagcacgccataggaaaatacgaattttggacggtaaagataaggaccagaaccttttccaccattaaagagagaggttataattattctactaattttttgtttataaaagaattaaccacattaaaaataaaaataataaaaaatatatatacatata

SEQ ID NO: 256506 - DNA, 2319 bp, Cannabis indica
agcaaaagtaatgctctatatatttgtttaaagtataactatagtattttatcatttttttataattaaacactaaatatatattcattagttggacaaataaaatgacttttttgaaagcaaattttgtggtttcttcaacacatttctaataattttttttttacttcttttagttagttatttttttaaatttaaatattgaaattgttttgaaattatctttttatttatttttatgtgatcaatcaaaaaaaaattgaataaaataattagttaactatacttagtagatatttactaaaaatagttacgctatataattaaattttttaaaaaaatatcaactaaaaatatctaaatatcttatacacttcatattgattttaatttaaataaataatcctttttatttttataatacataatactataaaaagtttgtacatatttaactattctcactaaatttggatattttaaatttttacaatatttatttataaataataattcaacaaatataacataaaattaataaatccttaaaaatatttaacaataaccgcatgaagggcggatatattgcctacttgtattatacttctaagaacaagaaaaaaaatcataatctccaaacgtgacaaatgacaataacaactctcagctaattcttaaaattcaagcaactcctattccaagtctaatcagtaatgttttttttttttctctcaatattgaatacctttaggatcaacgatttttatcaacctattatataaatatcaatatatatatataaatcatcgttctccatttcactctcaactaacaattctaatcctctcttcccacaacttctcttctttgttaaaaaatatgtcaagttctgtaattccatacagttgcgaggtatggcagcctgatcatattattgacttgataccaactacaaacgacattagtggtaatttgtcaccaccacaagagatgatgtgccctgagttcttgattgatgtgtttgtaacatatatgaataataatgatgatgtcgtacagcaccacacatcacaccatacgacaccaaatatttattcctcaacctcaaggtactttcaattcacaagtcaacgacaccattttgtagagagtagtatctcatggtccacaatttccaacatgctctcccacatgctggttccctttcatgctcagccacttatgatccaaaagatttcaactattgctcgggaaatcgccttgcaacctgaaaacttaggctgcaagactattccacttgtcatcgctcttgtggtaggacaagagcgattggaacaaggggaacagggagaagaagaagccgatcgagtaaaagtttccaattcaagcgcgggtttggagaaggtcaaaattgacgagttaggggagaataattgtgtgatatgtttggaagagatgttcttagggtgtgaagctgttagattaccttgtttccatttttatcatgaagactgcatattgaattggcttgagaagagtaatatctgccctttgtgccggtttaagatgcctttataagattatgcgccttaacaatgtgcttaattcattgtgaagaacaaggaaaaaagttgctaatgtatgcataaatattgtatacacaattataatttcaatcttaatttacttgttaagggcaatctttaattgtatcgtctgacttgttggttactattcattcctttttctcaaagtaaatttaatgagagagtttggtggagtcgaaacttggatgaatttttattaattatttctttttcttgtttgttttgttttatgtttaagtaacttgattcttcttttctatcagtaatcatgtcctgagttcaaagatttagatagtgtttatcagatattatttgagaaagaatctgcagaaactaaataagcgaaagggcatatttagccaaccttttgagtttgagttaggattgtttggtgaagtttgtggtttggtttttatcttgtttgactagctatgacataactaactatatatttatgtatattatatttaatatttttatgccggtcaatattcaccgagaaccaataaaattattggagttttgtctattttatagctagttaatgaagtagttaatatagttaggtaatattgcgagaaatgctaaatggcaccggtgcctagcaccttcctatgtgtcaatatcgctattggtacaactaagtatcgggtcccatataatttaatataatagtttttagggagtatcgctagccaatcgcaacgcgaca

SEQ ID NO: 256507 - DNA, 772 bp, Cannabis indica
ataagttatgcaatcagaagaatgttgggggccttggatttaaagatctaagacagtataatattgctttactgggaaagcaatcttggaggttgctgatgcatgattctgcattagtgacaaaggtgtttaaagcaagatacttccctaatagctccttcttggctgcccaactaggaaataatccaagctatgtgtggagaagcttgtttgagactaagaatctgatgttggcaggggtaacaaatagtattgctagtggtttacaaacgtctattttaggggatccgtggcttcctcatgaagagtacccttttgttcaatcggatcaccctgctcttagtaactagctggtgtcttctttaatgtgtgtcaatgctaaacaatgggatatggagatcatcaatgacctgttcaatgcaagagatcagagcctaattatgagtgttcctttgcctatgactgttcatgaagactgctggacttggagtaaagagaaatctggtttctattctgttaagagcgcttacgggtggctacgaaaccagtcgatacctgctggtgtggacgctggtttgtggaaaaatttctggaaaatcaaagtgcaaccgaaagtcctccacttcgggtggcgagctatatttggtatacttgctactaaagtccaacttaataccaaacatgtctatgttaacagaatatgtagcttctgcaagatggccgaagagactatcatgcatattttggtgagttgcaattttgccaagtcttg

SEQ ID NO: 256508 - DNA, 1407 bp, Cannabis indica
aaaattttattttaatattaatatttagtaaataattaaataaccaaaaaattatattaggtatctaaataatttttttgtggtaaaattttattttgcagtaatgtgattattactcattccactaaagttataggaaaaacatatgacaaattacaagtaattcattttagttgtgatttatgaaatatttttgaaaatttcttaataaaataataaaaatattattaatgttaaaattattttaaatattaattttaaatatccaaaattatttttaaaatagttgttaaagtcaaaaattttatttaattaattttaatttaatgcatataaatttttaatacttcattttaatatgacaatcaatatctcttaaaaaaaaaatggcaatcaatatgagtgggtcataattaattaaaacttaaactattgtttctataacgaaaaaaaagttgcctctatgtatatagacttgggtatgacaatttatactctatataaaatgaatcgaattgatatggtagagtagactaaattttggtgaaataattattttatattactaaatctgagttcgtcattcagttaagatttgaggctattattgatatcatgaatttattgaattctttttttgaccaaattaaccttacgatattaatttcatttatcccttttaaaagggagattacctccatatactttttttttttttttttttccaaatttacggttcgagtttctaaagtggttgcagcgctagttacaatagggttttctatatgattttttgttgcactttaggttgcagcgctagttgcaataggaattttatgtagaattccgtaaaaaataataaaaaaaaaaacaaaaaaactaaaaaaaaactgttttaaagtgtaaaaataaaaagcccctttttaaagtacaagttgcaaattattattaaagaaaggccaaatgtatattcaggctaacaaaattcccaaattggtattttttttgaattattatttggatgtaaaccctaaaattacataaaaggtataaatgttgttcatactttgtggaggtattttttgtaaataaagtgtccatttatattttttatgtaataattttttttttttttagttttaaccaaaaaaaataacaatattacaaaaatacttccagttggcaaaaaaaataaatatacatcccacataaaaaaattacacaaataccacttacacaaatcttcaacccaaaatccatgcttcttgggcaaccatcgcacaaccacgcaggaacccaacgcaactaaaatgaaaattcaatcagaaagagaaccaccattaattctgacgacttcacctgagaagatgactaaaatcaatcaaaacatgggctgtttcgaattca

SEQ ID NO: 256509 - DNA, 1214 bp, Cannabis indica
tgtggacatagatcacgatccatattccttaggatctacaatacactatcaaatggcctacaagatgcaaaaccatgctattgacatctcggtaccaggaagtttagattcgctaatgatagttgtcaatacaaaccacgtaccgacatacattcacattcctcgccagatgacaacggaagaactctaacaaatacttctaacttcatggatcaccaactatgaaaggacctaaaggccactaccagcagtccactcatcaaatccccttttcaggtctaaaaaggatggttctatcaaaatatccttcccaaagaatgaagcaactccaagaatcttctcaactcaatacatatgtaatcaatcatcctagaatgtgcggagatatcatcctttgataaggatgcttcccctatatatgccttcaaatccacttcagggcatatatactgggacgtttgcaactgtctagattgcgccacacctagtgagcaaaaagaagcacccaaaagaaaagcgctggaaagaagctaaaagaaaaatggaaaaacaacaaaaggatattggcccacttggtgaaccctcgaaaaaatttgactacctagtcaaatattcctacaaaccattagttcacgaggacattcaccagacatgatgggaatgtgaagattatgagcataagtcattactctcatgttacaaaccaagaaagtccaaaccaactgcctcacatctcttcatgctaaaacgtagcaatgataaattcccacttccattcaactttatggatggaactggaaaactcactcaccagccaaaagttctcaacccaaacatccgagaagctaatggtaccttaagaaaatcactctggccaaagttgtcctcaactggcaaacagagaataggctagcccaaaacaagaccctccaacagatagacgagaaactttctacagtcacccacagagttacaaagatcaacggagaattttaaaaatttgacaccattatgaccagattcgtctacaaaatttttcaagtgcacgaagaactactacaaatggtcaaatctaagcaagttccctaagagatctttcttgtaaaggaagcagagctaaagggtctgaagagccagtacgtctcgatgcaaactcaaactcaatttaaggacagatcacctctcactccaggcttagactctacaccatggat

SEQ ID NO: 256510 - DNA, 980 bp, Cannabis indica
tgaataaatctattagatatctaaattcaaaaaataactcaaaaagtgaatgttaaaaattaaaaatcaaatttcatatatccgtatattaggtttttttttttttcctttatttgcaaataatacaaaaaaaatcatactaaaaatttataaaatagcatcatacacattacaaaaaataaaattatgtatatgagaaaagaaaataaaaatgaaagactaaatcataataattattatattaattatataattaaacttattttgggtatgtaattatacttatgagttcgagaattgaagagagtaattgaggtcttctaattacctttaattatacaattattatataattacataattaaacaaacactttaactttataattaattacatccaattcaaattaatttaatataactttccaaacacacctttaattttataacacacccataattaagaaaaggaaaatttctaattattatacattaaatggatggagacggggcagtgtggattataaaattgatgcaagtgggtgttgtggtagaattaattataattatacattttattaattgactttaatcaaaataataaaatgtttacattttatatattatttatataatgtctcatatatatgagtcatgaatcagcaaaaaaatggtattgcctaacattatttactattaaccgaagtgcagaaatagttgacacaactgctagaagagaaaaaagaacagcattgaaacaatgccacatgttgttttcaattcttgatgtctttccctttacctattaaaatgaaaagtaattaaaacaaacaaaacacatgtactttttttgttacgagatatataaaatatgggtgattttacaatgcacttctttaaaagaatttattgatgcatctcttatttgtttcagcatccagaaaattttttagtccaatttttttttttaatatttatcta

SEQ ID NO: 256511 - DNA, 917 bp, Cannabis indica
tttttttatatacatatatcaccatgaataataagagcattaatatttttggtgtaattcttggaatattattgtgcatgaacaattactcatgtgtcaatgccaagtacactgtctacataatcaatttcttagatgtaaacacaacattgagtgttcattgcaaatcagcagatgatgatcttgggactcatattgtgtcatatggtgataatttcaattggagtttcaatataaatttctttagaactactctattctattgtgatatgagtactagtcaaggaggtcttaaaggtcattttgttgtttttgatgcccaaaaaaatgattgtcatgatagcaaatgttattggaaagtttcacagagtggattgtatctctttaattatcttcataatgactatgagttacaatattcatggccaaagtcactagtaatagctagtactagtgatcccaaattttgatcaacactcatgatcatatgcatctaaatgcatatggttcaaatttatatgtttctcaatctcttgaaatttttgttggatcattcaaataataaagagtgccttattattattactaatgtcttgctgcaaattgtactatatagtgtacacctcatttcaagcatattccaatatatacacctcattatgactaattattaattttaaattttatactaatattatgagtaactagctaactcaagatttttattgtagtggtgtttaattgtcataaaaaaaatatttaaatttattttgaataattttgtggaggctattttaatgttttgtattattgtgaacattgttttacatggaatatatggtagagtgttgagacatatacaagaacataagctacttcatttatcaccaattattttaagatggaatcctataatt

SEQ ID NO: 256512 - DNA, 1074 bp, Cannabis indica
gcataaaacccaacagtttggacgtctccaaatttgtgaccacttgtttaaaacatagtttgtgcaagaaacagacacgtgtgtttttgtgcaaatttcttctattttcatttcattacacctgaaggtttacattagggaagaaagtttacaaaaattcacagtcaactgcataggaatgtcatatttggatacccccaacgtattttttaataacaatgcaaatgatctacattcgaggcgttagggatttctgatccatccattctcttgaggtgaaatgttctttctcttactttgtgctgtatctcgtagggtccttcctagttaggtcctaagacccccactcccagttgttgcaaagttgggaagactcttctctcgacgagatcaccaatgtcaaatatatgacttttgactttagaattgaagtgcttggaaatcttgccctggtacattttgagttggacttgtgactgttattgaagtttttcaattaggtctaacgattcttggagtagagaatggttccagattgggtcataagtgttttttctatgagaagggaccgtggtttctacttggatgaccgcctcacatccataggtcgtcaaatatggtgtatgctccgttgaagttctctctatcattttgtatatctagtggactcgcgaaagctcctctggctagtgggctttacaagcttggagtttcttcttcaatgttgtcttcaggatcttgttcacagctttgacttgtccatttgcttgtggtcaggccacaactaagaagctcttcacaatttcatgttgattgtagaaattagtgaagtgatcactatcaaactacttcccattgtcttagacaatcttctacaaaagtctgaagcggcatctatatttttgataacaaagttgagggccttcttggaggtaaccgtattcatgggctttgcttcctctcacttggtgaagtagccaatagtgactatggcatatttgactcctcccttcccattgggaaggcaacccactagatcaattccccaaatagtgaagggccatggactactca

SEQ ID NO: 256513 - DNA, 1313 bp, Cannabis indica
ccaacatagactgccaacaattaagtagtgctaagcacatagcattactctcaaatttgctaaaagtttagtagtttagagggttttactaccaaaatttgaatttagaggattaattacaagtgaattgagagttcgaaggatttagccacaaattagtcttatgtataacatttctaactagtgctaggtatttctcatttttgcacccctctcgaattgcatcaacaagtactagaggatttattggtcaaacaattgaaactacaaaaattcatcaatcaaataattgaaataaactctttcatgttccaactaaatttaaaaaagaaccgatttctatatttatttgcacacattttcaggattgataactaccttatccctgtcatcactcaaaaaaattaacaaaaagattatccatttattttatttttggagaagtcctcattcttcaatccagcaagaatctacttggaatataacgaattgctatgccaatgtctaccaagcaataggagcaacatcaaataaattagaaaataaaaaataaaaacagaaccccaaaaggagtaacaatttcaactttatgttaaggaaaaaaaaatcaactttattacatgaaaaattaatctttaagggcttgtgatgtattgtataatattgtgttggattgtgttaatattatttaatacaatattatatttgatattgacttatactaatagagtgtgtaaaattataaattctttacaataaacttgaccctaagtccaatcacggcctggacttggacccaaaccctagaacatcccttgcaaccgaatttgaaccgagaccccagactcggacccgaatcttaccctgaactcaaacttggacagaaccccaaccttaacttggatccaaatctcggacccgaatccgaaaccgtgacccgaacttgaattgggtcccaaaccccaagccttgggtttgggtccaagttctaagtttgggacacgggtccgatttcgagaacggggtcgaggtccgagtttggggtctaggtccgtggtctggggccatgtttggtgttcgatgttcggggctagggtcgaggtttgagtcgagggtctgggactctgcgtccaatgttcagggctagggttcagggtccaagtcgagggtccaggtcttagtccaagtcaaggtcgacgtttgggtcaacgttcaagtccgagtgtagagtctagattcgaatccatggtcagggtatgagtatggatccgacgtccggggttagacccagacactttgtaaacattataata

SEQ ID NO: 256514 - DNA, 1074 bp, Cannabis indica
ttcatcatactctccattttcctaactctccttcttaatttcctccctcacaccaaatatagtagattgggggtgaaaataaacaatggattttttggctaaatgggaaagggatttttttctctattgttactttgtcttggggttggtctctttagtttttatttattttataatattattttttttaaatttttcattgatactgtttagcactcagtgttcttagagcatcttcaacagtaatattcttttaagagtgtcaaaaatatttaacattacttaaaattataatattatattttatttcactttcacattattcttgacacttttttattctaaaatgttccaagagtaagcaactctaaaattattaaaataatattatattattatttaatatatattaaatattttttttactttaaaactagaataataataaataaataagactaagaagacataaagaatgtcattacatgatatttttttggtattttttttcactacaatggtaaacatctattaaaagatgtcaaaaatgtatatatgttaccaagtattctttaagggccgctttttttttattgacgtgacgaatgatgattgggtggaatgttagttggaggtggaggagtttatctcccttagccggtaattcttgtaatgggatttgttgggaattattttatcaagatctagacttactaccatgtatgttgtttaacatcctatatatgaattatctaaaacaatggaatttaaacacatataaagttaagaaaccttctattgattgcagtagaattaaatgtctctttccactcatatctctaacccttgttcctttctgtcacagagtattatcaaaatttgagctcgattctccttcaggtgttgaattcttcacagtcttacacattatgattaagtactggacttgttacgggtgagcatgtactctttcactatgtggctcgaaaatttgaagagaaaaagagagagagaaggattcgaaaatagatatctattctatataaagtgtgcctatataacagaattcttggt

SEQ ID NO: 256515 - DNA, 1181 bp, Cannabis indica
ctattacgtaaattttttaaaattttacagacaaatattactatttaaaataatttgaaaaagaatattctaacatgtaattagcactcttgaaactaattttaacaatttagaatttccaagcaaacaattaaaagaaattgaccatcactataagtctcacttattttggggagtgccaaattggctgtaagattggaacaaataattttattacttaaaatcatattttaaacttgaagagaaatcttctttttccctttcatcttgctcttcaattttttctttcctccttctacgtcaactgtcatcgacgtcaaagtttttttttcattggtttcagtagtggccggtgtcggtgttggtaatgacaatagtagtggtaatagtagaagattaaattacggagtccaacataaacatatcacttataaactgtgtacacatgaacaaaccatatactagcgcgcgattaaaattaaccggcctcttaaattaattttactgcctagatgagtgagaaagtcgaaaagttaagtcaccaaattttcgaattgggagattaaagattttactgccaagatgttaactataaaagaaaccaacactccttttcgaaaacatttcagcattgatcttgatgcataagtatattaagaattgaattcagaaaacgattgaagttttgcataaaaactaataccttgtagtacaaataaaagttttcataaactaattaatatttacatcttctaataaataaatcctttaaaaacaataataaccaacctcaaatggttcgcacgtacgtgtgagaaagaagaaataatagaatcaaattacaatgccaaaatttaagctttgttatattagaaagtgaaaatctaaaaccacaccttaaaaactcttcaagttttccattgccaaacaaaagaagctcataaagagctatatatatatatactttattatcacttgatcgatcaagagagtttacaagtccaaaacaaatgtatgagattttgctaacattatccaaatgaacatatataggtaaaatgataattaagttgaatagaattacaaaatcacaaaagaatatatcatgtatatattttgtgtctcaaaagatacaaatcatactatttttcctttttatcgtaaacgaattaagcatagtc

SEQ ID NO: 256516 - DNA, 719 bp, Cannabis indica
tgaggttttggtagtagagatctaatatttagggtctgtttgggtcgtcggatgtgtgggtcgccagttctcggatgtgtcgctggtaaatggaggtcggtaggtggactgtcgagggttgagctatgtagggtacctaaatgaaggaaaataaatagtttgtttttttaaaaaaaataattcatctaaacatcaaatatgggctttaaaaattaagtttacacacctatgacataaaaaaatacaataaaataatttaaaaactaaaatatgctataaaagtagccgaatctaagaggtaacaaaattttagaaaacttttttaaaaatataatacacacactaaatttacacggtaataaatgtcgctattttttttttttacttttcttattacaaattttagctttttgatttttttacgaaaacataagtgttaactttttgtttttgtttcatatcgcaaagtgaaaaataaaatttttctaaaaaaaaaaatgaaaaacctctaaatgagaatcctaacaaaaaaaaaaaaaaaaaaaaaaaaaaaaaaaactactctaaaactatttatacataaataaaaataaaaaaaaaatctgatttttattacattgtgtaaattataataattctatatatgctcaaataattaataacaatacaaaaatgatttaacagaattttcacttgtagttgtaatgtaaattaaaatg

SEQ ID NO: 256517 - DNA, 1893 bp, Cannabis indica
atgtaaccattgaaacctctttcatataatataatataaaattaaacattcgtatcttgcacataacattatctaatttaatcatgcccgacggtctaactttaaaaaaaatatatttaatgaaatgtacatttttttaaggaatatttaattatgtacctctttttttaggaatatttattatttaattatgtactttaacttgtttcatcatcttatttgtttaatttgtcaaatatttataatattggctcacaattaatgcttacgtacgaataagttattgaaaatttctagtaatatatattttttttttatgtttaacatcaacgagtacaagtttacagaaagtgtcacctataccatatgaagtccacaagatgattttttttttaattgtttttagtgagaatagtttaatttaatttacttgtcgtttttggcgaccaaaatatagtcgataagggtgagaatgagagagtagttagagatggtttacctgaaatgagaaatataggaccatttcgttctgaaataactaacaaatattataaatatatttattcttgtccaaaatttatatatatatataaacatattagaaaaggctaaattaaactctaataataatgaagattgatatataataaattatatgtgagagtgagagcacactattaagtaattaaaaacttaatttttggttgtgggagatgaaatgatttctttttcttctttttatatttatacatataaccgctacatcatgatcaacccaagcccactgattttaattaattttcatgtctatattacaactacaaatgaaggaaactgtatttagggtaaactctaaagtcaaaatcctagcgtggacgccgctgacatatgcaaattaacgtatatcaactcggtttctctttttttttttatattacttataaataaattaatatattggaaaattctagtgcgccttttttttttaagctatagggaaataaattgaactaattaaacttttatagaaaatagaatgtataaaaattttgttggcacacgttaggtgattattttcttttatttttattttttttattattatttaatggatgtaattattttattattttcacttttattgttttatttaattgttacagtaggagcaactaatatattcgttcgttgggaaatatcgaccacgtaatacggaggggagaagtcgacgagtcgaggagtgagaagttgagaagcttctgccgtaactgtgtaggtgagtgagtccaggagcgtcgccagcgggtcatcgtccgttcggtccacgttgaccgaagtctccgatcaatgatggccaccgtcttgtcttttgtcttttgtcttccgttcggtttcgttaccgcaagtcttatcttttgtgacatggtgtgattgttttatgatctgagattgattcttgtttattggtttgagattgttctggtttttgccattgtttttctggtttgaaagtctcagttttctggtttgagagactaagttttctagtttgagatgttttatggttgtctggtttgagattgttgaaggcaggtttgggtggggttgcgtggctcgcgactgccatggtaatatcgtggaggttttcagtcggggtcatgtagggagggttcaatctgaagttgctgagatggttgacaaagaagcgttaagttggattgatcgtcataattggggacaagtaattttggaatcagacagcttggtatgcgtacaagctattcaaagtaaagtctctatgtcatcttcttttggtcttttagtgcatgatgtccgtgcgttgcttttatctttaaacaatgttgaattgcgttttgtcaaacgatctgcaaa

SEQ ID NO: 256518 - DNA, 1007 bp, Cannabis indica
gtgtcattttagatgagctgaacactctattcatctaatgttatctttgactatcacctaccaggatactgtatatcatttagttgaaaaccttagaaaataatttaatatgtattattttggtatttttgcaaacatgtcttcattacttgttatttcctgaatatgtgtatgaatttatatgaaccaagtaattgatttctattttattgatatttgtagtgtcaaaatattgtttaacaatactcaccctaatcttcacatactcaacgcatttgtaaatgagctcaaaagtgcaaagatgactctggtcagagtatccttcacacttgcttatgatgaacttgaaattccagaaagcaatcatgttgggaattttgttatcaaaagagaaaatagttcaatttgttcttaatagtttatctcctgagtataaccaatttgatgtatcctttatgatcaataatcagaacttgtccgacatagacaagctggacgctaaactgcgtgcttataaaatgacaatgttgaatgtaaggagatccttctccagtactgcaagccacaaaaaaaggaaaggtgagaatataatgagattttgaatgtggtgattgaaaatcaaatcgttcatttgaaattaacacgggggctgtggggcatagcttttaaaaccaggtggtattgagattttggatgcctcgattgagaatgactattgaaagcaaatcattttttggagtttttttttttaaacgtagtaaagctaacattctgttacaaaaaaatctttaaatcaaataatttcattaagcaactatttttaatatataaaaatatttaatatttttgtagtaataaaaaatgttaaaaaaaaagtaaatactattttagactctatgttttgcaaaagttatcaattggacacctctgttttgttaaatgacaaaatagaccttgtatttcccaaaataatacaaataggatcctgaaatgattttttgtcaaaa

SEQ ID NO: 256519 - DNA, 1488 bp, Cannabis indica
aaaatttattaatttttaatttgaattattattatttttttaaaagttaatttgaattatttttatataagtatttattttcaaaaaataattttacttaggaattttactatcaatttttttatactaatagttaactataataaaattgactacttaagtacttttattaccaatttatttagatacataattctactataattattttttaaattaatttgcgttattaattttcttttatcaagaatgataatttctattaatcaaatcgagccaattacatccacaaggggattctcctttaaaagagaagcttacaactcaattttatttatgctggacaacttcttttcttgtacaattttataagtctacttttgaagttctctttaatactactatctatataactcaaattcatacactttttttttattatttatacacaaatttgggtttagccaaatatcataaattgcaccttttaacacatttttatgaatataatataatttttatgacatattctattttttttttcatttttaaaattatatgtgttttttttaaacatatttttttttttcagtaaccaaaaaaatttaaaatacgaagaccattaacttaaagtaagaaaaaaaaagtttgttcatgtatacatacacagtacacaccacatatatttcttttgaataagttgagaaatcttttttattactaaaaatctaccaattaatattctaagtcaacataaaattagtgttttaattatgctctaaactctatatataaaattattcatctcttaccatataatagataaaatagttgagaaaatgagtctttactatttttttttttaagaattatgcagtacttggctcattttcttgaagttttgtttttcaaaataattttttttttttatatatatatatatttatatatttgaaagcatatgtgggtaaagaattttgattccaattctgtcagtagcatgtgattatttttttgtagtaaatggagataaaaattgtgacaagttaaatttacacactgagatatcaacaaactagtcacaaattaggtagtttcaaatctctcaattttgcaaaacaacatctttgaaaattgatgaaattactttaccataactaagaaattgatttagtgacgtcaaaaagtcaattaggtatcaacaatataagtctatactcatataacgtcccgattgacgtaatgacattaacctgggtgcaggatgtcattctaaaggctggttgttaatgtaagcgctattattaaacagtctttaattaaagagtcataactcacttaatcttgacacgactaataattataccgttcttatatttaccataaacgtcttgacatgatagtacaaattgtgtatcataggatgtatataaaatgactttttttatttatttgcttttttcgatttattttagcatataataatat

SEQ ID NO: 256520 - DNA, 934 bp, Cannabis indica
aaacatgctctagtgttggataatgtttgtacatggcttgaggatttcccctcagctattctctctgttattgtaaaagactctcttatttaataataacagttctatttctacaaaaaaaaaaaacttaaatatttatttaagattaaaaattaaatttaaatatttataagggaatttactcaataaaatattaatataaatgaagggaagaacctccttaatctcatccacacatgacactcacacactccaagcaccatcaccattcccactcgcaaccaatcaaaaccctcatcgtctccacttgccccaagccaagctcaaattctagccggctcaacatcggcttagccggctctatgtaagttgcatttgttggtttggttgagttgagaatgagaagccaaaagaaggaagccagccgccgctgtttagtcgacaccaccgtcagacgtgtcaccccttgcgttacaccttatctatacctttcttcgcacgtttacacgtggcgttttggaattttctttaatttaatctaatctaagtcctttctgggaggcccgactctcaattaataataataataatatttatgtattttttttttggttttaattttaaattgaattttatttatgtgaaaaataataatgggagatctagaaaagattataggttggtcccacggtggggccacgtgtcagtagtagtgggggatattttccaaaagtaaaacaaaaaaatcacatgatctttcggtacgttatttatgtcgttgttcccactcttcacgaatcacgaggttagtttcatttttagttccccaataattctaagttagatgtaagatataaaaattaagctatattttgtaaaaaaaaaaaatattttgtgataattttacattaatttttagggatatgattttgtc

SEQ ID NO: 256521 - DNA, 835 bp, Cannabis indica
attttaataaaaatattaaatttgacatcaaattttgtaattatatattaaagtacaatattaagaattaatgatattattttttttattaatatagcataattttttacacctcatacatggtctaattttataaatagatgattgttttctaaaaaattaaagttttacctaaaaaaaaagtgattacatacaataaaatttatcctaatacaaattgaatctatatcagattaaatattaatagtgttaggagtcaatgacattcaataataaaatataattttaaacggaataacataaaaagtgtgtataatttaaatataattacaatcattatttttattttaatataatattttagttatttattggttgttttcctaaactttgaatttagaaccaaaatcaataaggtatgtctattatcaatcttatctttagcattacagttttagacatatattttcctagattagtgatatgtacacactcttttttttatttctttttttcatttttattcttttgaaagggaaatatcatttcgcgtttaaaattaaatgacaaactaaattagaacaaacatagttgttgcataaggaaatctacaaacatccaaacaaaataaagagagaatataaaaaactaggtattggagttgcattgtatttatatgcatcttaaatgacaaaataatagtaataataaataatgaaataaagggtgattctacaatgcaccccataaaagggatgtattgatgcaccctttacttatttcagcatttaaaaaaaaaatttagtctaattttttttcatattcatatacgtta

SEQ ID NO: 256522 - DNA, 1131 bp, Cannabis indica
aaaaaaaaaaattaaagtaataaaaaaaaaaaaaaaaaaagtacctatttttttttctttttcccctttctggaattaaaaagtgaaatttattattataggtgcatcaattactgaacatgattatatatatacgcattatcatgtcttattttaaaagcagcactataattcaagaagaaaaaatctaaagcactcaagtcactattaaattttactataaaatatatcactgtaagcaaacgtgatcataaattctggaaactatctgaagtagtgcgtgtgccaaattttaagtgcacttattttcttattcctactttcacataactttcatatttgagaaataactttgatcatggtggaacgtggtcgacacttagcttgaagtggattagtcaaggacaaactaagtcctctcacatattcactcatatccaccattttatggctcattctttcccattcaaaacactgaataatggttgctaaagttagtcccatcatacgccaagctaagttctcaccagggcagaccctccttccatacccaaatggtagcaatgtaaacccttcccctagtccttcattttccaaaaatctctcaggcatgaacttatctggctcagcccaaatcattggatctctatgaatggcccacatgttaaaaagtaccatacaaccagctggtaccctgtgtccactaatggttgtttcatctgatgatgcgtgtacgatcactggcccaggcggaagtaatcgtaatgtttctttgatgattgcatgaagataaggaagcttagccaaatcagactcattcaccaaacgatcttctccaacaatattgaccaactccatatgtgccttctccatagcttcaggatgattcaataagaaagataaggcgatttccatagttgtcgttgaagtttctgttcctgcagccaataaatcctgaacataaaattagtcattattacacacaaaaaaaattagtcaattaatttttgtttttataaatggaaaataattaaacaataatatatataccagtagaagacctttgataatctcatctttgtagtattagaatatttttatttaaggaaattattttctaattaaggaaat

SEQ ID NO: 256523 - DNA, 1010 bp, Cannabis indica
acacgatcccactatcagtgtactcagcctcaatcccacgatccttgcatccagcattgatcacacgatctttctgtttatgcgcattttattttgcgacatgattttttacggtagactgattagtgtaaagatagtgctagaaatgttaatagtggtcatgcttagacaatggagtgggcgtgctactagtttatagctgcttgtgtgaggacaacactttcaggaattatcttgggtgtgtataacccatgattataggatgccaccacggaactgctgagtgtgagtacagcgcaggcagggcaatgatgtctcgtgggaacggccgagtgtgagtataccgcaggctagactagatgccaccgtaggaatgccgagtgtgagtacagcgcaggcatattacatttcgtatcaaatcaacatgacttgttaatatttgtgtgtatgtgtataacacgtattatgttggtgtgatacatatctcacaatgatagttatgttatatatttatttatgtatagttgaaaatttcatgattttttggtatgggggttatgtcctacatagctcttcttactgggcgttagctcataggtactctgtgtgcaggaaaaggcaaagcaaaacagtgagtggtgcgggctcgaggcgtggacgaaacatgttagaggctgggcacaattatttatgttttagaaataaatgacattttttttaacttttagatttgaaattattattttcttatgttgttattaaacttagagtccaacatttttactttttttaaataatgagatctcattgtgtgtcttttaaatttttaaataaatattttatttggtatattaaagtatttctttgataagttttaaatggactctagaagtaacgtctcaggaaatcggggtgttacaatatggtatcagagccttgacccagccagaagtgtggtcgacgaggacgtcagaccccgtaagggggtgtgattgtgacagtcagtagtc

SEQ ID NO: 256524 - DNA, 2228 bp, Cannabis indica
cacgaatgatcataggatcatcatgaggttactcaaacaaactaagttcaaagatgatttcttttggatgtctgacctcgccctaatcaactatttttaatttattaattgtagacactttactaatttatcttagttttattgaaaaaaatttcaaaaaggcctatcccaaatcccgagatggaagaatgacacaaaactcttttaagtcttccatttggattgagatcagctgattttttactgaacgaggccaacttgaagacctacaatcttcttggcagcaagcaagctacttgcgactttaaaaatccaaaatattctaaggtgggagcaggttccagtctctaatgacaaggaagatagggactatgtggctcgtatccattacttagaaaaacaccaacccctcgggaagctgaagaaggtgtctcttgaggtaataattttggtatttttggttggtctcctaccatgcttagggtcgagcaaataactttagttaaatttagggatggccagtataatttttatctctagaactacatacatcaaattgctcataggtttgatagctggtatcccaaatttcatgtccagttaagttgcgatagctcctatttttgaattgccgagcaatatggtataaactctgatagagcgagccatccagactgagatttgtctcctttaattacctttgatctcttcatgatcactagttctagggagtttagtaaatattatagttcttcttcgtcatcaaatgatgattatggtaattttttgagtgggagattacctctccacgttttccttatttactttatgcaagtgttgactctgtcttttgcctcgcagatatatatggattttgagagccttgttaccagctcgggagaaaaaggaaagaagaggattgcagcttcaaagacttccccgggagcaaacctagagccattaaagatatcaaggaaaatgacggctaataaaaaacgtgcctcgagtcaaattattatcaagccaagtgataatcaagtaatctccccaatcccagctactgagatcctgatgaacaggtcttaggatcaattcaccaggttaagttcttaggttcacaaccagagatggtcttattggagccttcctgcccctttcctagtcatgcaggtatcatcggcttgcaggcctgctcacagtaggctacctcctgctggcgtcattataaatccttctaatagggtgattgggacttgatcaacaatggcaacttcgaggagttatctaaaaggattttggatctctttctctctctcggttagtctctttattcatatcatattttcattatatattctttcttggttatccttcttctgactttatctttactgtaggcatctctggtgtcttacttggcccaccaaagaggccttcagcgaatcaaacagttagaatccaaactttgcaaatcaattgaacaacatgaggttaaggggaagaaatggactgatgctcaattggagaacatccaattgaagaaggaagtcgaggagcagaagagaaatcttaaggctgagcttgaaggtgctcaaaaagaagccaagaatctccacaaagcccaccaaaaagttaaggaagaacttaacgaggccaataaaaaacttaagggtgccgaggccaatgctaaagataggcgcaatatagttgtgaaacgctctatctatagagcttggctggtcaatcccaatatggatttaagcttcttggagagtggtgctgcggagatgttggcttattgcgagtgacaaagaaagatgaagccgtggatgtcgaggaggaagaagaagaagagccatccaagtctccaaccatgtggacttggttatcatttcattttttttttatttttagaaaaatggacattaagcggagacaatggttgccccttgtggcattttgtaaaaacttttgcattgttggatgaccaactttgcttatttatatatttttacttttatgcctcacatcttgcttttgagttatatatgtttatttattgcattttatttcacaatctaaatatttctctcgatttagcttaagatactttgagttgcttgcatctccaatgtcattttctttgagatatatgagtagttaataatctaccatgtcttttgcgagtcaatttttaatctgccttgttttacgcgagcagtttataa

SEQ ID NO: 256525 - DNA, 1424 bp, Cannabis indica
gtatgttatttttattttgttttcttgttgattttatattgttttcgtgttattttttaaaaaatcgtaaaaatgtaaaaaaaacattctttgaacataaaaatgtaaatattttacaaaaaatagtaacttatgtaattattttttttttgtcattttgtcctgtattcctccacctccaaaaaagaataataaaaaaaaaaccaagaaaatgtaattttctttgagtccttttcttttctttttctattattttctttcttgtcattttctatttattttcttaaaagaagagtctttttctctcactctcattttcctactaaaatataaagtgggatcattaaaccatttgtcataagtgacaaattctatgggcttgagcttccaagttttaaattttggggtctttttctttgttttctccaactacatttccatgttaaacttcaaaattcaaatgtccactctggattatttcataaatatctaaaaattatatttttaggaattttaatttttttacggattattaatttttttttataagaatacagatcattatttttttattgttataaaaaacattatttttacattgcaataatttactatgtttttgcaacttaaaaacaatgttgttttccaaaaaaatatatttaaaacaacagtccgtaaaaatatgtacaaaaaaatccataaataaagtattcgattttaggtattttgtataaattttctttttatgcatttattttacatgcttaattatagtatattacagtatatgtttatgttttacttgtaacaagtccttaaaccaaaattcttatatgtcctcaatcaaaaggacttttcaaatatacccaaaattcaattagaaaaatgcataaaaccttttcatggtttattcttttttctttatgaaaaatttattagaattaatctcacattgttaatatatggaaataaaatattatatttaagatgaatgaattactcatttcattttcaattagttttaagataaaattccgcgtattttatagattctaatatggtatcagagtcattaaaaattttcgccgccatcccctttgatgttctacttttccaagtaaaatatagttaatgttctagtaattttttatttaaaaaaaaataagaaaattgataaaaacaaaagggataattatataagacattattttttgtaagaaaattatacttttacgtttaaagaatttgttttacattttttacagttttctatagttacaacaagaaaactacataaaagtaacacgaaaataacatcaaaacaacaacaaaaataacatacaaataacaaaaaatcaacaacaaattaacaagaattcaatataaaaatgaccgtatttctgtaaataaaataaaaaagaaaa

SEQ ID NO: 256526 - DNA, 2294 bp, Cannabis indica
tggattaagttggatgggaggagagggagggtggaggcgtggtcgcgtcggtccgtcggtccgttggaggtggaggaagtatttagtggaggaagaagagaggggttttagggaggtgagttgctggaaatggctgtgaatggaaatgaaaatgtggatgtgattgagttggaaaatgggatctaacaccgaagacaagatgtggttgtttaattactaccattaccataacatcatcaattcattcatattcttatgctaagcttctctctctcctctctcccctctccctccttccctcccacggtgaacaaatataaacttttctcttttattttcttttcacaacacgtaactttgattaaataattgtttctgtcgctttcaaaaaaaatttaattaaattatgtttccaaatattttaattatatcatcattcaaattattaaatttaaagatttttatttaattcagcttaattttattaaagcaacaattatccatgaattaaatggtgtctttggaacttaaatatctattaaattatatttttgaatttcaacatacttttgaattttaacatgtactcaatcatactctcttaacttttatctacgttagtctttcattaataaaattaaacaaaattttgaatttaacaatttcaataattcagaaagaattaatttttttttagaaaatagtctcaaaaaataccacccaagagcaacgagctcaaaggggtcgaaagctaggagaattcattaaaaaatagcatcaaccaaaataaagtttcgaatacaaaaataagtaactaggccaccaaactgtacttgcaataactattaaagcaaacttagttacataatcagctaataatctaaaacaatgactaaaactcacaatattaaaatgagaacataaaattctaatattgtcaagaattaaacccataaaaaaatctaaagataacaaattattaagtttatgaactaaactttagcaatcagagtcgagttgaatattgttaagatcgagtgtaatgcattgagacgtgacattttgaattacaagtgcctttgcaatttcaaggacaataatgtcaggcaccttccaagcggcagaagcaaatacatcatcattagaattttgaatcaccatgcctaggccccccactacacctaccaaatcgatagttgcgtccgagttaactttgaacaacccatggggaggagaaacccagcgagggaccacgacaccgaaattcaacagctgaacttcgaagatggttaatgcaacactgttgttatcagtgtggtaggcaaggagatagtcggctgcccaaggaccaacaagttttggcaacaacaacttttgttcatggactttcttgtttcgtcgataccaaattcttcactaagtggtgaggatccattcaatttcatggtgaaggagatgttgaataaaaatacaaatgaaattataaatgccactcacaatgacggatacgtcaccaagattgaaagagtaaaattttggaacttgcacaagttggctagatccccaaagagcatgatgagctatttctaaatgtgtagagcacattgggcaaatattgtcattaaagaagtcatgtctttgaagattaatcataatagggatccaactagatgataatcttcaagtaaaactttttaccttaggagctaaaattaagaaaaagcgatggactcagttacatcacaaatagcttgccaataaacgctttttactgaatgcttctcaagacaccacatgattttatttggagtatctcccaaaggccaagatatagacaaaatggttgaagtctcctcagggtcgtctcaaggtgatgagaggcctatggcgaaatttgaaacaaggccttttcttttaataaaaattaaaataaattttaattaaattttgacacaatatcaattttaattcttttatctctatgtaataaataattttttgcattaaaaatgtacgttaatattttaaaattaaaagtcctttaatatattttttcgtatagtgtaatacaaatatttaagttataatattattatttatttatttttgaaaatgctaaatttttcaaaaataaataaatatttaagttataatattgttataatattgaaccttgaacctcgaggctaacataagctctacttaccatctgtgttggatgcttttcatgcaatttattgagttaaatatttatatattatatgtttttatatgtatatatatattttaatttt

SEQ ID NO: 256527 - DNA, 629 bp, Cannabis indica
aattttgagtgggattcaaaaaagttttaccatgccaatctttctttgtacactgttaattatataagaacagtagttttttttttctttttttcttttggtgattcattaatttgtataaattataagaagttctttgtaatcaacggtggaaaaatgaagatagaaaactctaattatatataatttaatccaatttgatggaagtacttcatgtttaaggaaccatataatatataattaataaagctgcaataattgcttaatataataaagctatacatggaaagtttacataaccttaagacactattatatatgtaggtagctagctatagtattttagtacgtgaaattaaatttggtgttaattaaacacggaaaaaaaatagggcaattactttatatattatttttttttattttttttttttttttataattttaaccacaacactataaaatacaataaaaaatatcttcttattattatataattttaccactaaattttttctaattctaactaaaagatattattcaattattaaaaagtaaaaaaagaaaaatatcctgttctacaatgtctataattattattaatggaacactataaactctcaatattt

SEQ ID NO: 256528 - DNA, 701 bp, Cannabis indica
tggaatcaaggcatgcaggcaaaaaagatagatgtgcctgcctaccatccaataatccatggcttctaaaactttttgggttagctttaaattttgaaatcaagacaaaatattatttcattataaatattgctaatcattcatgatcatcactatgttctaataagcctttctttccctctttggtttttaataaataaataatatcatcatggaggtctcatcagtttgtaccttttcatttcaaactaattatcatactttattaaaccctcataataagaatcccaaaaactcattattatcttatcaacaccccaaaacaccaataattaaatcctcttatgataattttccctctaaatattgcttaaccaagaactttcatttacttggactcaattcacacaacagaataagctcacaatcaaggtccattagggtaagtatgtgtgtataatatatatatatatatatgaaatttaaatttgtgatttcattattcgttattagatcaaaatttgttgatatttttaaaattaatatttataattaaatttgttgagtaactattcatgggtacgtaatagccattaagaagtgttccatatatatatatttatattttatattatctcaattataattatagaattgtgttattaatttacaactacggaaaaatatgaaaaaaaaaataa

SEQ ID NO: 256529 - DNA, 2978 bp, Cannabis indica
tttcttctttcaggataactgggatattgtggaaagtgtattatgtgaagcagtgatttcattgcttgaaactggaaacattttgaaagagtcaaattctacagtgctcactttggtccctaaggtgaaatgccctaatacagtgaatgatttcagacccattgcctgctgcaatgtgatctacaaggtggcaacaaagctcatttgctcaagacttaaacatatccttcctaatttagttgcacagaatcaaggaagatttgttaaaggcagatacataggccacaacataatgatatgtcaagacttaattaggcattatgggaggaaatctaataagcgtagttgcatgatcaagttagatcttcagaaggcttatgatataatagaatgggttttattgaggaaattttaactgcatttgaattttctcctcaatttattcaccttgtgatgaattgtgttagaacccccaaattctcccttatttaatgggtcaatgcgtggattttttgcttcaaagagaggattgagacaagaggaccccacgtcccctctactatttgtgttgggaatggagtacttgacaagaatcatgaaaagagtggagagaaaatgtgacttctagtttcatgatagatctgaacaactacaacttaattatctcaactttgtcgatgttgtgttgttattttgtaatggtgataacaaaagtgtgatcgatttactgcagggtctgaaacttttttcccacactttaaggttgttcccaaatgcagctaaatctgcaatatactgcagtaacatggcagggcatgatgtatctagaatacttgcagcttctggcttctctcaacaggagctaccctttacttacttaggggtaccaatctgtgctaagagaatttcgagcaaagattgttcaattttagcagagaagatgactgcaaggatcagaacttggagcactaggcatttatcttttgctgggagagttttcttgatcaattatgttttgctaactatccatgcctactagagtcaagttatgttgctacccaagaaagtgatcaaggagatagaggcaatatgcagggccttcttgtggaaaggccagcatctgttccagggtgtagggctcatagcctgagacatggtttgctagacaaaagcagctagggggattggattcaagagagtaaaagaatggaataaggctgcaatggctaagcatgtgtgggcagttgcaaaaaaagaagaaaacctatgggttaaatgggttcacactgtctacattaaagagcaaaactggtggagctaccctatcccaagccatggaagctggtattggagaaaattagtagccctcaaaaaatcagtttagctctctttttgatactcagcaactctagggacagagagataccaaatttctacaggctttaatctactatgctctgtccaaagataaacagaggtggaatgagtaggtttggggaagattcaacactcttaagcatagcttcactctatggattgctatgcatgggaggttgagagccaaggatagactttgcagattggcattgttggagattcttattgtgtgttgtgcaacaatcaagaggaaacaaaagaccatctattttttggctgcaacaggactatgcaatgttttaatgaaatagcagcatggatgcaatggagacactcagatataacactgcctaggctaaccaggtgaatacaaaggatcaacgtaagcaaattctagaggaaagagatggcagctattcttgctagtcttgtctataacctctggaagacctagaatgaagtaatatggcaaggaaaggatcctaatatgacttaggtggtgaaaagaattcatgagagtgtgaagcaaaggattgtactagtatggcctagaaaagtaagccaaaaaaatgaggaatggttcaatattacattgtaaacgttgtatagatatgaaggccataactaacttgttagggtgcttatagattgtaaaaaacatagataattgtgcaataaaatttctgatttataaaaaaaaaataataattaatgaatacaaaggattgactcaccgcggcgtaatttgatttttccaatatccaagcctataaaacataaaagacttttaataattaataatttatattaacatcttaattaaaatttaaaatcattcatgctttaacaaacctgatatactacccaaattgccatgaacgcatgagaaagcaatattactttactgttgaaaagctgcaacaaaataattcaagtatatactattactcagtaagcgaacactttttaaattaataatctttaaagcttaataaattctggtcctaatttgagacatttattctagtcctaataagaattaagttatacattagaattatcgtgatatttcgagttatgacaattttactcatagtatgaaagattacttaaaagtgaatgggtagtttagtcttttgtcacttaagtttatccttaatgtttgtttgtaagtggatttattctagactaattgttagagctgaatagataaagattaattaaattatcttcacacaaaaaaaccctcctccattctcctctctttctctcggctagaaccaccacaagaaatcctcaccctaaatcagaaattttcaaagccattttacatcaaactaactaaggaattttgctggagttagtgttgaagtggaaggaaggatcaaagtaacctagttctcccttttctttgtgaattttggaagaaaaaatttgattttaagttgaatttaatagttttggttatgtatgaagttgtatgtaataggttaagtttctaagcttaaatattagtagtttgagtttttgaaatccaagcttgagctttaatagtcttttgttaattttggtgcaattatagtttttgagttgtggtttgt

SEQ ID NO: 256530 - DNA, 1772 bp, Cannabis indica
catacatagagtaatgcgcatgcgtcttccgagctctgggaagccctaggatctcttgggcaacctatttcctctggtgaactgcaggtaatggcttctgaagcaaagactcggactcctaataatataagcagtggttcggtaagaacttcctaactggtttataatctctctagttgctttctctgatgtaactctggggttgcaatcacaccaggcaacagaaaccttctgagcgaactgtgccaaaaatggcctgcctcaaccaacagtaccataaccaggcctgactggaggcccaacagacgccaacgatactgatggtctcctctcaccagtcgccatgataggataaatttttgacccactacacaacccagcgcaaaggcaggcgaagtagttgccggacaatagatttggccctcacatcaacaccgacgtcagagtctcaagctggattgagttgttatacctgacgaccctccctgagttagtccttgtaaccacatcgggtcttagtttctttgcctaaccccaatacctttggcacctctccgtgtctgcatagtcgtgttttaatggacgatgaggaacacgagcttgaggatcccaatggccgatcatcttgccagggagttggctggccagatctaggtttttaggggcaaacacgagcatggtaagtgtctctaggctgcgtgcattcatcttctgcactttcttcgagcgactaagggtgtagacccttagtctgaataatatctctggccaagaccctcctgacgtttggcggaaacttaacaagcagtcaggtggttttccttcttttttcttcgcacaggcttttctttttacgggcttgtgccgggcactgtcgtgcatgtttctttcctcagccctcaatgaaagcaccaaaatgtttaccgagtttttcgacaactaaatatttttagagcttaagaaagtgaaaatagagttaatagcaaaataacaaataaaagattttgacatggttcgggcattaattatccttagtccacgagtccattttattaggcccattggccggcaactgtttatacaaatagagatacaatggactagaactcttttcgactgtgttcctcttgaagaagaggaagcttagtaggaatattctagagttacaaaaatatgtttgctcaggatgatcaagaatgggtctttgatccaaaagagaaggtccccctcccttgtgctttgtttagggaatttattggctgacttctttgcatgggatcccttagatggatcatcgttggggcaaaatcccactgtcagattggtaggtcgcgtatttcccatatgacatttaagggtgtcagatcgtacgagctgagcctcagatgcatgtcgccttaggacttctcccttttgaatttcccttatccctagctgttggatcatttggtctagtacacaaggacacgcatgctttgcacgatggcatgtcatgggagacaacctctgacgtcgtacttagaaaaccctggtccctaggttcgtagtttgacacgtatgggtgaagcctttgtgggttaaaaagcataacccggttcaccgtgtttcagaatgccttggcccctatgggcaatccatgctcctcgaagggatcgatagccttagctcctagaatggagggggattttggttcacggatacctttcatgtggcttgcagtcggggactccccttcacggagactcttttgcgaggttgatgcctttatcttc

SEQ ID NO: 256531 - DNA, 3055 bp, Cannabis indica
taaactctagaatctcttttcttcacaattaagccctagcttgggagaaaggcttataaattaagatgcaatctaatggacatgtatttgagtgattagagaatgcgatcacaaagtaggttgtttactaaaaattggattgcataattgaggctaaaatgaattttaaagtgattaatcaagtataaagatagtgaagcatcctctgttccaaatgcacctagacaagagcttgggaccggatggtatggattctccttttttccaaaaacattaggagatatttggtcatgatatggtgaggatggttcgagatttttctaattgtggtgttctctcggagggtcttaatgcaactaatgtggttctcattcccaagaagaagaacccttctatgatgggggatttgcggcctatttctttatgtaatgtgttggtcaaagtgattactaaggtgttttccagtagaatgaaagggttgttggatgttattgtgtctgatactcaaagtgtgtttattctggctcgtctaatctctaacaatattatggtcttttttgaagtcatgcactacttgaaaagaaaaaggaaaggtcgggagggtagtgtggctcttaagttggatgtgagtaaggcatatgacagggtggaatggggttatcttcgtgcaattttgcttcaaatgggattcacgaaaagatgggttgatttgattcttacttgtgtcacttcagtgtcttatactattatcatggtggtagatagatggggcatatctttctaacttgtggcatcagacaaggagatccattgcctccttatttatttataatatgtgttgaggatctttcctcattgatttgattctatgaatttcgaaagtggattagaggaatcaaagtttccaggcaagctcctgttatctctcatatatttttcgctgatgatagttatatcttttgcaaagcttcccctgaagatgctacgagatttttggagttatttcataagtttgaggtggcatcaggttcgcaagttgattttacaaaatctaatgtcttttttagtgccaatgtgacggggccaagtcgattgaatctttgcactgttctatggcaaaagcttctgaacacgatacttatcttggtttgcctaataccttgggtcgttctaagtctgtgattatgggcttcttgaatgatagaatttggaaaagggttcaagattgggacgggaagcttatttcttatgcttggaaagaggttctgattaaaatggttgcttagtcattgcctacatatgccatgagtgttttcttgctccaattgatgtgtctaaagatttggagagaattatgagtatgttttgttggcatttcaaaattttctcatggtggcagtattcattggatgatttttgaaagaatgagtagacataaaattatgggtggaatgggcttccgtaatcttcgtgacttttatttggcaatgttgagaaagcaagggtggtgtttactaacaaaactaaactctttgatgagtaggttatataaggctcattatttttccaggggtgattttctttcagcatcccttgggaataatccaagttttgtgtggaaaagcgtctttgaatcgcatgagcttcttaagtcttaggttcgttgggtaataggtttcggtgtgatggttgatcttttgcactagtcatggcttctggatgatgtgtgtccttttgttacttcagatgcccaatgtttggtgggaataaagtgaacttgttgatgtgtacagataagagggaatgagatttagatattatcaaagatcgtttaatgagcgtgatcaacaacatactttggcagtttcattaagtctgaatgtagttgatgatctttttttctggtctaaggagcatcatggtttctactcggtgcgtagtgaatacaagttgatacaagctcaaaaaggaaattggattacagttgactcttctgagttctggtgcaagctctggaatttaagagtaccaccaaaagatctcaatttggtatggtgggctgcttcaaattgttttcccaccttgacttaattaagtggtaagagggtcccagttcaactcatgtgcccgatttgtcaaatggttaggaaactattttccatgcgcttatttcatgctcagtcactgctcaatattggcaaatgattttgggtggggttaggccgattgttactgctaatttttacagctggtttgatcaaattttgcaaaggtgcagtaaggacaagtgtggggaggctattagctgtgctgggggctatggaaggctcagaacgagttggtttggagccaaaagtatggtggttagttttcttatctcatctatgagttgtcttgcgcaatggaagtcagcccaaaatagtagttcaaaggcttcttttccagtttttaaagctagtgatggagctgaattttgggttaagccacaggagaatacaatcgaaaggtagttgttgatgttgtcatttttcgtaatcgagtagcgtttggttatggcatagtcgctcgagactctcaagggaaagtagtgatggctaagtcgggtagctttacaagtatagccgctctggatttggctgaaggaattggtataaaagaagcgctaagctgtattaaaactcaaccatggcagaaagtggagttggagtcagattgcttggtagcagtccaagctattcgaaattcattacctacgctttcttcttttggggttattatagaagattgtcgtaaacttcttacatctttaaacaatatttttttattttttattaaacgatctgccaacatggttgctcatagtcttgccagaggatcttattctttcccaaatcgagtgttcaataggagtgatgttcctgttgaggtacaaccttatcttttggttgatttggtaaattaataaaatttctatatttattttcaaaaaaataatatgagacatgcatttatagtatattttatttgtcatgcatgtatattttttgaggttttc

SEQ ID NO: 256532 - DNA, 1432 bp, Cannabis indica
tgttcaagaatgaaagcacaagcaacattatcaacacaagaacctttcttcaataaaaaggtaattacttaatttttgtacctaacattttaaataaatatttttgtgtacgaatattacttctttataaacccataaaataatttaatttagctaaaactctactggaaaaaattattattgttttatcctatacttcagaaataaattagatatgcatggtttattgattccaatcacacaaatcatgtaaaaacttgatgttgatgatatatatagcagtttaatggaatcaatagattaatttagtaatttgtataatacagtttttgttgatatgtaattaatgggtagatttattattgtcatcttatatatactctttttattcaattattacaataattaatatatttgcatgcaggtttgttttcctaaattggaggatttgactatgatgggaaccaacatagaaaagttatggccagaccaacttatggtatcatcatcatcatcaagttcttacatgcaaaacttaacaaccttagaattggaaaggtgcgataatttgaagtatctattctctttctctcttgctcaaaagtttgtaaacttacagggtatacgagtcaaagattgtgaggcaatggaagacataataagagtagtggatcaacctggagaagaagaaactactcatcataatcagatggaaatgattaatttgtttcctaaattagaatttcttcagcttgatggcctttcatccctccaaagattttgtagtgcaacagattcatcatcgtgtatggtatttccactcttgtcaaagctaataatagaaaaatgtccagaaatgaaggcattcgttagctgtcccacacaacccttttattctgaaaaggtaatatttctaatttatacctataagttaagtgtatattattatttcttttataatactttttactgaaactttatatacaaaaattacaatggaaaacatattttagagctggttaatgacaatggaaacctttacatagtgaactggaataatacactatacacaatatacaccagtgatgttattatattgtgtttaaatccaagagcccaatcatcgtatagaataaccaatgaaatcgtgaaatcaaccaatgtcttacttttctttcatcatttccactaacaagtggaagaaaaaaaggaatttctttcatttttctattttaatatactgtcattttaatacctaaattattatatttaattatttatagaattaattgtatatttacgaatttgacaattattattaattttacacacacaccgtcttcaagtgagctattgtgtaggagcaagactccattttggatgaagaaaactctgtaatttttaatatagagtagatttatttattcaatta

SEQ ID NO: 256533 - DNA, 2399 bp, Cannabis indica
cattactttatagcagtatagactcatgtctattcaaaagcttgtctgttcttggttaggtggatgcattcttatttagttgtacccctacaggcgtccataaaacttaagatctcgtgatcatctatttcatccacaagttgattgattcttatgtggaaagcaatccttaggacacgccttattgaggttggtgaagtcgatacatactcgccatttattatttggcttgggtactagtgcggggttaaacacccaagctgggtggaaagcttcaatgataaacttgtttgtgtggagcctttctatctcttctttgagtgcctatgcataatcattctccagtaacctccttttttctagatgggatggaagtctagatcaatatttagggcatgagacatggcagtgggatcaattccgactatatcctcatgtgaccaggaaaaaatgtctaggtttgctcttagaaattttattaaggctaattttatttcaagcaacaaaccttttccaattttgagcttcctagttgggattgctggatccatctccacttcttctaactcttctactggccctaaatttgcatttgtttcctcaagtcagggatccatgtcttcatctctgccttgggaaaattcctattgggcaatgctttttcccttctttaaactctggttagaagtattttcctttttgacctagcaaggttgtagcattctcgtgcaatcctttgatttccctttagatagctcactccacttttagttgggaacttaacgcgcaagtggaatactgatgtaacaacttttgagtcttatagggttggtcggcccaacgtgactttgaaagccaaagggacatcaattactaagaactgtgccattactgttatacttgtgagagcttttcctactgtgagttgtaggaaaatcggtccaagtggtgctacgctttggctagagaatccgtagatagttgagtgcaaggaaccaaatctttaagttgggctcccattttttcatatgtattcttgaatagaatatttgcggaagctctgttgtccaccatatttagtgccacccttttgtttgcaatctgcacctcaacaaccaaagggtcattgtgtggaaaaataatgtggctagagtcagctttggtgaatgttatgattggtttcccaacatgtggtaatttaggttttctctcctccacgaccaggactgcatcgttttgttcatattgcaaggctcaggcatacttttctccaatttttcccaagtctccagcaaggtgagggccccaatgataacttgaagatgctcgtccactagtggaagcattaactggtttgggttagtgtctgtttgggcagccctttgttcttggtcggtcttcacatattttataggtgcgggttattttttctaattaggaattcaatttttcgcttcaaattattgcattcatttgtgtcatggtcatagtctacatgaaaatgacagaacttggttatgtctcacttgctcatgtcctttttcatggtagagggcttcttgtatgtcaccatagactgggtagttgcatagattatttctatgtcttctattaggaccaaaaaggcagtgaaatttgaggcattctccctaggatgttgctcaaagccgctgaacttgcttttcttcccattgccctgtctatttccattgttcaatctctttctactttgatttgaactactgagatgttgtgaattctgggtggatgcagcgactgtagtggtgtgttgctaattttcttttgtaccaccatatctacacgccgtactgcctcttctagtttaatgaatctattttctgggtccaaaaattatgccattgatcccacggttaatctcttaatatctttccacagttctcccagaggctcaatacctccatgtattgcggcaaaccttccttcctcagtcagccccttaactttcgtttcagtcatgaacctgctaatgtaagcccttaaaggttctcctgggatttgtttcacttctaccaagtcttctaggtacgagggaagctgatgagaggaggaaaattgtgcatggaattcagatgagaaaggaatccatgaatttaactttcctagaggtaacttgaaataccattgttgggcggcctttgctagtatggtcagaaaaattatgcatctaattttggattcaaatttaattatttagttaaatataaatgagaaccgtttggtcaaattaatatattgattaatttttattttaaggtaccaaataaaaattattaaaaacacaatgtaccaaaatgtgttttcaaaaaaaaattcccttttgttaaaaaaaatgtgttttcaaagaaaaaatagggtac

SEQ ID NO: 256534 - DNA, 829 bp, Cannabis indica
tatagttgagatatgtgaaaatgttaagtctaattctaattttgtccatatgaacaaaaactaaaatttcccattatatatatgcatgtgggggtgtgtaaactttaaccaaataatatgaatctttgcagtactctctcacatctttatattatttatatatggcactatatgtgttttctagtaatccctctttgcactcaattaagctggttttagaaaacaaagctagtttcgagaatgaaagtaagaagaaagcacagtacaatactttatttacacttttctatacaaacactaaatttaacaatcaattaaaagaaaaaaaaattgctcacggtttatataattaatattaataataaatagggtgtcctgtggaagatgttgaatgttaatgcgccataatcccaagtcctaataaacagtcatctgtcgtagtcttcatattcatttataataatatatttgaatatatattaactagctatatatattgtggctgtggtaggaaactgatgctcaattagtagacaacccaagaaaaagaaagtaatatataaatagattgtaatactacggataacttgttaactagtttcagtaaaattaaattacaaacatttgagtatgcactacatcatgatattttctttaggaaacataaatgtaagaataattaagtaatgtatagtgggttatataacagattaatgtattaatttttgctttaattaatgatcattgcttaattttattaactaatgtgtgtgagaaacttattcctataagttatattaattacgccatacactaactttttatattt

SEQ ID NO: 256535 - DNA, 2882 bp, Cannabis indica
tgtaaatacatatgcatatcattatactaatcttacctcatttttgaatttaggtgcgccgggcaacctgagtggaacagctgctcgatgaattacaggctcttaaatcacataattcgtgaaactgataagtgacacgctaaatcactttttaaggacttaaacttaaaactaaaagttttcctattgatgaataacatggcaataaccaaaatattgcaaaaacgagaaaaactaaggttccctaaaatgccccaaccggtaggccgattccccaaccggaattccagttctgtggggtttcctggggaccaaccggtcgatcgattcctataggtccccctgaactagcattttggttcaatgcaagaaacatacaaaatcaccttacatcctcaaatcgatcccaaactccatacaaacttccagacctgtcatttacatcataaagaacataatccatgcaataaaacacctcaacatgaccagaatcacaaatcaccattagagagcaaagcttgagttcagaaattcaaaccttgctcaaccaacacatgcaacctcaaaaccagctcaatccaacataaacaaccttaatctaacctcagaatgcaaaatcaaacaaccctaaaagcctaaactcacaaaatcatgcaaaatcttaacttaaaacttaagaaatccaaggggaaaggtgctagagaggttatcttcaattggaaacaccaagaacttgctagattttctagaaatggagctgaaaattcaaaacccttgctgcttctagggtgcacaagagaaagaaagagagaaaggacaaattgtcttgatttttctatttttgataaaatgagtaacattaatgttattcaacctaattaatcaaataaaatcatattaatttactaactaaaagccactggaagacaaaactttaatttaggccaaagaacaaattttaccccacttaaaccaaaaagtctcaaaacctcctaggggtaatttggtcaattttaaaatctcgactaattcaatgtctaactgtattgtcccgcgactactaaaatactaaaatatgattttactggccaaacaccgcattccaatattaacgggcacaaaacatgcataaacataaaatttcatatatatcataaacaatacaccctaaattcaaataaatctccataaattaataaatcataaataatattctaatttcataattaaaccctaattatctactaattttcaagttaaaactatgtctctttacaattaaccactagtgtcccttgatcgatggcccttccaggagtttgagattcttctgttgccatggtgttggccttttatgctcttataccaagtgaagaaaaaaccataaaaaaaaaggaaaacatggcagaaagaatgaaatctcagttcaatgagcatgagcggctgtattgatattttatagcattagaaggattatacaattaccaagtgtaagcattagacaaaaagaatattgcaaaaaataatgctaacgatttctcataatccaaggcataacaaaaatcctaacggcctgggaatgttctagacagaatggacactctggcagtgccaccaaggcaagctaactcacgagcagattcaccattatttcttacatttttcacatactattattatttattatttattatttttttatgctaaaatatatataattaaacattactttatcgagttaatttatgttgcgagtaaaattatttgttatatgaaaataaaaaaattaaaattgatatggtctcaaaatttaaataataaaaggtgattttaagggtaccttttaagagtgtgcattatagaattttttaataatattttttttaaattttgtaaatttttgtaaaagaaaaaaacttcatttcaaatttggtcataggtttaacaccttgagacagctctggttataaagtctgtcatataaaagatttccaatttttcgttattattgcaatggagatgataacattcttaattttattatttttttctaaaagaaaaaaaaaccaactgaagctcacaatagttgttgagttttctaatcagttgtacttgtttgtaatgttttgaaggtgattccaaagacttattggcttcgacatcatgaccatgtgatctgagccattgattgtgataacatagttaggttgattgttaataagcatccatgcttccacatctttattcatcactttatctttctctgatatgatatagactcgatcaactgacccatatttgtcttcgctcaaggttaactctttggacatgtcctcgtcgctaaacaatggtaatggtctcattaacatgattgcaagttccaaatcctgttataccataaataattttcttattcacaacatccaagaatgtttgaatgattatgctacatatcaaattattattggtcttactcaatatacacatgttaaataattatctgttaacctcattaatttgtttttaaaatgaaaatttatggctacatttaaaatcaaagtttatttattaacacagatattaaaatgacattatatgagaacatatttaatcttttttagataaaagaacatacttaattttaagaaaagtgtaatgcaaaaattgtattttaaaattgaatggaattgcactaatatgtaattacgaaatatgttgaggccggtctagaggatcttcgaatccacaaattcatggatggaattgttgagcttcttttttatccatgacaaccttcaaattcatcaacaacatgagagatccatctccattgaaggtagaactaggtgtgagatctgaaggttcgagttaatgggttgtta

SEQ ID NO: 256536 - DNA, 1657 bp, Cannabis indica
gtgttgcttttgggctggggtcaaggagttaattaattgttataacttgtttttgctcctcaaggatgaggtatagcacccgcaagcccccagctgatctcgtcatatttctcttactttgcctttgcatggaaacttgataacctggtggtaagacgaagcgactgccttcattacatggatccatggtcggccgaggatgacattataggctgatggaaaagccacaattaggactttgactgacttgtttattccattagcgtagacaagcagttgaacgagacttcaagcgacgacactttcccctaagaatcctaccagagtaacttgtgtctcttgggcctttaaatcttcaatgtccatttccttcaaaacctcagcaactagaatattggctgagcttccggtgtctacaagcattcacttcatacgaacgtgggccacatctaaggtaatgattagggcatcatcatggggtgttctagcttagaagcctccccttgattgaatgatatctgcacatcgggttcttcattatcaattactgtcattgccttgatggagtggatctggcaagagtgggccaatgaggctcggactaaattcccaattaggtctgatcctcccgagatcacgttcatagtcttcttgatatatggagggagggattggtcctgactcttatcatgtccttgctgaacatgcagtgttgaatccacagtccgacaatcctggaagaacccttctctaactagcctgttaacctcgatcttcagttgtctgcattcataggttacatgaccatgctccccatgaaaggcacaatactggcttttgtctcttttttcgggatcgatagccattttggccagccacctcgtttccttcattcccctcagctgcctcattaactcagttaatgtgatggtcatttggggtagctcctcatcgctccattggctccccagttgtcttgcttgtcccatacttgtcatcacggctcctctggtatttctgtcattggcttgccggtccttgtttctatggtgtgatcgtgtagctggcacccgatcttttgcctcgaataggaacgcatccctcagcgttgatgtttcctgtgatacttcctcaacatgccatatttcttctaattctgaagccacgtacccccgtgccatggttagggcccttgtcaaagacaggcctggttctactattattgacctttttaactctgagtcatgcaataacccttgcagtaatgcctttgttgccactaaatcagtgcactttgggatgctggcatattcctcgctgaatttgttgatgaacttttccaaaggctcgtctggtccctgatgtattagcattaagcgtgtgtccacctttgtagtcctgacacttatcgcgaagtttgtctgaaacctcaagatcaagtcttgatatgagttattgcaactgatgtcagattgtgtaaccagcgcagagcaagaccccttaatccctgagtgagggtcttgcattatattgcctccaggtcctccagtgggaccgacagagttaacattttttgttcaaactgacatacatactctgatggatctcccttctcgttatactctggtaacttcggagctacgtaacgttgtagggc

SEQ ID NO: 256537 - DNA, 1577 bp, Cannabis indica
gtcactgataatgttagttttttatttattttaactttgagggcctttaatgacgacaaaatcgtcactgataacactatcaatgacgactttatcgtcactaaatatatgttttaaaataattattagaatttaattatttttcattattttttaattaagcattttttcttccttccaatttgtaatttttttttatttgtttgaatttgttgttaaaaacataaaacaacaataatttgttttatattatggaaataagtagtgttgggtagtgagtcgaacctcttctgttggtttctcatcgaacaaataccagttttccaagttcattgagtagcccaatctaatattttttaagaggcccaattcaatatatttgaaagccttagttttttaagaggctctatttattgtaacttataaattggatttgaaaataatacataccatattattatttcaaaattaaccttttggttacctacaaaacttaaaatagagcctaattacctttttcataaaatgttttatttatagtaataccaaataatgtataagttacaataaaatacatgaaattaccatgtaatttattaacaaaaatagtatagttactttttttttttcttcatataactaattatatgatgattaatatattaaaaagttaatactgctttagatcttatattttaaaaaaattactgatcagactttttattttgtttgatgacaaactgtatcttgtattttttaaaattgtaccatagcctaattttcgaccatttttttaatataattaacttgaagataatttgtagcatgaacagatacagaaaatatagttgtcataacaactctatatcaggttattattaatttttattttaacaaaaaatcagttcatgatattattttgtactattttaaaaaatacaaagtttaatttgacatttaacataatagagaatcaaatctgtaacttttacaaaacacaatatctaaaatggtatttacccaatataatttggtttcctataagttttttagaaatctatcaaaaatgctctataaaatatgtgtacttaaaacactatttttgtaaggttattcctttataaaatatgtttatttaaaatactatttgatacttgtaaatataaaataataaaatactttttaataacttattatgaagttggttaatgactaaaaataatttttagtaacccataaaatttatttaccaaaaaataaatttctcatttaagattccgctcctcggtatttttgtaatttaggattaggcgactccaactaatttctaattcttatagctccctcattgagtgtaatgactgtatagttatgaattattaaattttttacataaattatttttcttatataattattttttttttttttaccaaacataaaaataaaactccaaagagatatttattttttctttttcttgatctaataaaaaaggagtcgtctacgctcttctctaccattctttattacaatttctattgatacttgttatgtgttattatctaccattcttt

SEQ ID NO: 256538 - DNA, 1353 bp, Cannabis indica
ctgcactacataaatatatatataaatattattatcttatgtatattataataataaagtttttaaaaaataattaattaaaatataccatcttattagttactgaaagatcgatttcattgtggaatttttcgcagacctgaaaattaataacaaagaaaaaaaaatattatggggggaattacttatttaaatattaatatagagcaaaatcaataaccaatagttttgttataataataattggaattatgtacgtaccatttcacagaatctggttttgcaaatatcaaccaataaaggtttataaataaataaattacccttgactacaattttctcaacaggtaaaaatattatatggaaagttcttttgtattcaaccagttgtgtccattgcttaacaacatcaatcatgaataataattttcctcaaagtacttattaatttccaaagaaggaatcatcacctgcatacaccatgcaccaaattaattaataaaaataataataataataatttaactaatttgaatctatacacatgaataattcattatattacattattacttatatattaatagttttttaaaaaatctaattaattattaagcttacttacatagtttgaaatcctttgtatgacaatgctctcatatttttcataataccgatctattgcaaaagaatgaaaatcttttacctcattcgagttgatataatttcgtaaatcattccaggggcggagccagaatcagaaattagggggggccaaactattttataactttagatgacaaatgtttgagaaacattttattaacttcataattaaaatttctttcaaaaaaaacttcataattaaaattaaaatgcagaatctttttcttgcatatcacaaaaattatctgataagtgaatactatttttttttaacgattttttctttttcaatatacaatactaacaaataactattaaatatttatttttcatcttgttacaaagtgtagtttttactatgtttataactaaaaaacttattttgtggtagttctagaagtgtaagaataaaaattatcactaacacaattaaaaaatttgaagtagtacttcaaaaaaaattgaagtggtatataaaaatcaattactaagaagaaataaatgttttaaagaaaagaaaaacaaatagatttttcatataaaataaataaacaaataaaagatggtaaatatatatatcaacaaaaagacaaaaagaaattaacatttacaaattaatttgacttttttaaaggagtgctatacaataattagcaaaacaaattaagacatatatattgtgggggg

SEQ ID NO: 256539 - DNA, 959 bp, Cannabis indica
taaaaataaaaaacaaatatttgggataaaagtatttagattattatctttgttacacttaattatgtaaattatttttaactgtgacaacaaaaatcatgtctagggtttccactccaaagcattaacaaatttaaagaaaataatatgtaaatgttttaggtttccaattgctcactcacacccttaagacaccaaaagtttaagatgtccaaatactatatgatatattaaattcaaattattaatagcaattttttttgataaataaattagtaacaaagttacatactcaaataaaatattaaaaaaaactcaatattaaattatcaacggagttgttcttagtcttttaatagcgtatttggtataaacggaatcaatggattcacaatcagaaacttcttgatatccaatgtgatgtgcgggtgggttactactacttttgtttgtaattttcatgaagctaatgcgaaggtgacccgatcatcttgtttttggtttcgatgatttcctgcatgatcgctaggatgttcttggcgtctcctaccatcccaagggtgtgcatccttacctggctaaagccatggcaattctccaagaccttttactttgtttgaggcttggctatcgtgacggaggtaaagatggactgtcaatgtattgccatcattttaaataagaaggaagagctcttgtctcagtttggttcagttttacaagatatttacaatatttgtaaggctatttaggatttttgtcctctaaattatgaattatgcatgattgtaacccttgaatttcgcaactcgttaacaagtctcagaactatttacaatgttgtattgatcattctctcacgttttgtcacacgtggtaaatataattatgacgtggatatttatatcattgccacattagtgtgtaatttaacattaaaaaaataaaaattatatttt

SEQ ID NO: 256540 - DNA, 1468 bp, Cannabis indica
cgagaggtgacatcctttgtcactcctctccaatttggtatatttatagccgagaatgatcaatttcaataacaagcccaatgtttgtcggatattttcctaggaataagagtgatttttgtagatatttatttagttttacttttttgttcatcattgggaataagatacgagattggaaagtgagacatcccgacatgtcgggcatcactaacaaaccctaagcttatataaagatagtgatggggtagttataggggagggatcgcctacttccctactaagaacacctcatccatttgttcatctttttcctaagttcttcatacagatacgacactaagcttccattgctcaaacactattgatatacatagttaccaataacaagagaccattttcttttcttgctcccattagtttattgttcccaagaacattacaaccatcatccttatcagatatgtgaatgttgggactcccaagagccttgtgttcataagtctcgatacaaatttcaccaaaaaatccctttttatattattatccacacactcttgagaacataactctagtgtgtcagacctaattaataaaaacaaaatagacgtagctccattaccatcacaacatgggggttaactactaccaattcctggtgtcttttttatttattgcagttttatttagtcatatcaattcttcctagtcctgttatttttttacgatcttcttagatctattaaccaaaaaccccatcaacaataggaggctctaatggcctttgttatatgctcagataccctaagtttttcttgggaccattttcaatttatagactgattatagaatcagttttgggtatttataatttggtccctcattaaattattaatttatggtatctacacattatttctaatatttccatcataaattaatattcttttagacccaaaatagaagagagaaatgttaatgggcaccttaaggggtgccaagtactttaagatgtagtatactgctattggtgcaattcactaacgggtagccataattttttgttttttttttgctgaaaaccaaactttcattaaaccaaaacaaagagtttggtgagcacatggggactcacctcccaaaaatgtaaaaaccattgcatttacaacgcatcatatgaatatagtgttggacactttaagcagggccgaccccaaaatacagtgggtcatgcggcataaatacctaatgttttagctttttatacacttaaatacctaatgtttatttttggtaggcaaaaataacctattgttacgattctcttacaccgttactactattccgttaactcataaatatagacacgtggagggttcagatgcattacatttatttttattttatttttaaaacttaatattcttaatatcagaactaaatgctacttgttcaaaaaaaaaaaaaa

SEQ ID NO: 256541 - DNA, 2093 bp, Cannabis indica
gtcttcgatgtggtatacattggagtcaggctaaccatgtattgttattggtgcacaaaaaaactgctagtcattaggttatggggaggcttgacatgagatttagaaatatataattgtataattctctaaggatctcaaagtacaaggctgctttcttacttgctttggaaccttattctgtcatgttgccatagtttttctctctgttggatatttataatgagcttctttattctttaccagcatctgtgaatcctactgctcctttccctattgtcaatgttgaagtacttcataaacaagtggataagtatgtgattttattgtttcttttatatttttattgttgtttattatgtcttatgttgcttcttgtttttgtttctcctagtgattatggggcgtttgttgctgcttttgctgagtattttattgaaggaaagaatattcctgctgactttgatatggaagagtatcgcctaaggctttttgtgttgctaaacaagtttagagtaatgaaacaggttaagaatgttgtaagtaagtcagaaagcccacctaagtctccaaagaagagtaaggcgaaagcgagagtgaaagcgaaagaaaaaccaagcgatttaaagccaaacaaaattgtttatgtttattttttattgtttagccagaatataataacatatgtcgataacttaatgtaggctttttttatgttgtttagccaaaacttaaaacgaatgttggtttcttactcatgactatttttatgttttttgtgttgtttagcctgaactacaacaatgttggtttattatggaatcttaatattttatataatgtagattttatgtatagttatgaataactgtttattattttttgttagcattttaaatgattatcaatattttttatacaacttaaaaacaaaaaatcaacatgttctctatttcctaatactttttttacatgcttatagctaaattaagcttaaagttttactcaagcacacagtaactaaacaccgatttcgagttgtcttataattttgttcttaaactcaaaaagaaaaaaaatttcatatcatataaaatatgtttaaagtaaacaacattaacaccaaattttcatgtttttgcaacagtaatcaagtcctttgataaaattcacagttaacctatccaatatcaaattaattcatataaaataaaattcacagtttatcaattcaattgtattcaaattcacaattaatcaattcaatagcaatcactctttaaaattcattgtttctattgtatgctctttgtaactataaaaatattgtattcatgtttcttttttattgttgtagtattttgttgctggtgttgattcagtctagagctgggttcttgcatgtccttctattgtgcccctttcttccacattttgtgtatttgttttgtgtttttgtctcccaaattgatcttgttcttttcttttttggtcttctcactttcatcctttcaagtggtggtaatatttcaatatctttaatttcttgtggaatgttccaattgcgcagatttcttactgggtatacgattgcttcataggttctgagccagttgtttgtcatatagtattctgaatagtaattgtgtgggtcgagatacatctctttcatcactgcaaaagcatgcgcacatgacatttcatcgatttgaaacctattacatgtgtatattttttcttctagattcaccacccattatcttttttactttgtacactttaaatatgtgttcatttgatgctctaacatgaaaataaatatattttgtgtatatcttatcattgaaacatagaaaaaatattaatacaacatgatgtaattatgattcctgaaaatcatgtacctttaatttcaaagcagctttgtagtttcccctcattttcatctctacagctagagtcaattttgtgaatgttccttgtgtcatttttcctgtttttggatgtccactcttggagtaaagtcctcaaagcctccattagtgttgtattggcagttctctagttgctaggtttgctgcatttaatgattc

SEQ ID NO: 256542 - DNA, 1342 bp, Cannabis indica
aaagcgttgtaaatcctccgcaggggtagcacgctctcaagctctgggaacatcgttgcccacccttctggctctgtcagctcaagctggggtggcattacttgccccaagatcgggaaccccgtatcctcccagactggctccaccaccggtaaacgaacatgttgcaacaatctttggtggacctcatctccccgaaaatacctgcaattcacaaaaaagatgtttaagggaaatataagatgggaaagtgtgtgccctggcgcagtctcctgctcaatgccccaggatgttaaatcagcccatcatttttaccgaggaagatgctaagaatgtgcgtttcccccacaacgatccacttgtaattgatgcacaaattgctaacaaatgagtctctagggttctgatggacaatggcagctctgttaacgttttgtttaaacttgtgttccaggcaattgggctcactaaagcaaatttaaccccttgtcccattcagcttcagggtttcaacggtgacaccttaatgtcaatgggtaagatccaattgcagtcactctcaaagggaaaaacgaggcgagtgcttttaagcactcaaactttgttgtggcagactgtccaatcgcatataataccattttgggccggtgacctctgttcgacatttgtgcatgaaattctcatgtgacaatggatgcattggcatgataaaaggtgatgagagaagcacaagaaactgttacaatgtttcgacgaggatcgtgttcatggtctgagaagaaacacttgttgcttctggaatagaagacttgatggatactaaaactgtttgggaggagtttctagatgagttagacccaagaattgggattgaaaaaaatttggaaccaatggaagaggtagaagaagtgagtattagtgaggaagaccccacgaggaccattaaagtgggaagaaatctaccctcctccataagggaaaatgtcataaatacggtcaagaggaatcatgatgtgttagcttggagctatactgacatgacagggattgattgttataccatttgccatgctttgactatcagagaagatgcgacccctattcaccaaaaaaggaggcccttagacccggtcagggctgaagcagtaaaggcagaagtggacaagctaactgctaatgatttcctccaggaatcattatacctagtatgggttgtaaatccaatattagttttgaaacccaacggctcatagaggatatgcatagactttaggggtgttcgcggtacgggtggtgcggtttttgactacttttttcaaactaacccacacatgcaattttt

SEQ ID NO: 256543 - DNA, 3023 bp, Cannabis indica
tatcagataagggtagcgagttacaactcagcaagagcaacattgtccgatatggccaaagaagacagcccaacaccaccaccaaatccacaacatttaattaattaattaatttttaatagtacttttatggaattattggttagttagttagttaatatagttgaactgatgagttttaatgtttatttaatgacttttgagtctaaagctagcttataatatttgtagttttgtttaaatggaaatttttggatttgttttattcttcttattgagaaagaaatacataatataattagtgtaatgatagttcttgtaggaattatatgaccactaccatgatctctttttctattcttcttcttctttaattagcaaattaattagtgtactcatagttcttgtaggaatgaatcttttcagtaaattgacaaagatatgggctaagaacaatatcaaattattatatttcaatggccaattggtcatctatatttctttttgtcataaactagaaaaatattattattaaattaagataataatattagtgatagttttatgtaatttacttgctattttggtttttttttttaaaaaaaaatgttaattaagtaagagatgaaattcatatctttgtgaaaaaaaaataaaataaatctaccaatgattatttagcattcatataaaatgcactataaattttttcaaaaatatcatacaataaaaattatagaaaaatttatagcctaccctctgaaaatgaatgtatcaatttactttgtttgtattttcaaattaaatataattttaattatataataatgtataaatttagaataatttaacatatttatgaaaataataacatttgtgcttcatcaaagattttatacaaatgtgaaataattaaatcatatcttatatcttatgtattgtccaaatttcttaaaattttacataatgtgttaagtaactacaatacataatattgttaaaaaaaaacttacacccactcattatttaggtgcaccctaaaagcaagcaaaattatattagaaaattttacaatttactctttaaaaaaagtgtactggtgtatttttatctgtttcagtatttaacaaaaaaattgaatctaatttttttaatagtcaaatacgttgttattatttaagatgccatacaaaattttaaaaagcttagaaatatttagcacgtcaaaaacaaaattcaaacagtttgttgttcatctgaaataaattgtttgaacattaatttttatattgtaaattattatgaatttctctaaattttgtaagatgtctaaaataattattatatatatagagtacgaaaagtttagactataaattctttctaaataccaaaatagaaaatttaatgcacattttttaaaggagtaaattgttgaatcatccaattatatatatatataccaacaaggaagtggtaatttttaatgaattggtttttcttcatacatatagaaaagtcggttaattgtctaatccctctctctatatataataatagagaattaattaaaacactaattaacaatcaaacaagaaaacaaaatgggtagtgaagaagacaagagtagtgatagtaagaaaataattattcgaccaagaaataatgcatttttgcccagccaatctactcatcattctggtatttacttaattaattcttcatcttttaattatatcaccatcatcataaattaatcttttcaagaaaagaaaattatcaacaagtactctctcttgattttatatcttaataatttcacaagaataatgtaaatttatatatgttctttctgaattaattcatttctgatttttctttgtgtgtggatatgtacacagctttgaaatctttgactcatcgtgtggtaactgtaaatgtgggtgaggtaataataataataataatataatctggtttatatatcataattatttcatcaaaatgtatgtattatttaattaattttgttgtattaatttgtaggatattgtggctaaaatcaaagaattggcttctacttgtgaatcgttgaccattcttggtgctaatggcgtactgtcatctgcagacattatttattctaatggaatgtttaaattcacgggccaggcatgttacaactgtgctttttaattactaattttgattatttattatgaaataaaatgaattatttgttacattacagggttggtttcaaattgcatctctgacatgttcaaccaaagctggtgaagaagtaactgtgaatgtttcattgtctgattatgaatctaaatcaaagttttctcgagtttttattagtggtgttgcacgagtgttaattactgctaaaactcctactgaactggtaattgattttgattaattattgttcatttatttgaatcctctgtttactaatttatgatccaattataattaatgtgtcagatcattgctactagtgatgatgagaatgttaggtactcatcaacaacggtgtcatctgtggcaacaccctcacaggcacatgcacaagcacctgcatggacacgcgcaccagtgcaagcatctgcattagcaccagcgtcagcgcatgcattaccatgggcacctgcactggtacaagcaccctgcttagcacaagcgccagcacttgcatcaatatgggcacatgaattggcactagcacgagcactagcaccaaaccaagctcctgcattagtacaagtaccaaactaccatcaagttcaggcaccaccattacacttacttcaacaacaccaatatcattatcaaagaccaatacacttacctcaacagcaccaatatcattatcaaagacctgaacagttactacgacaactacaatatcaatatcatcgaagaccacaccagcacttgagaaatgatcaaagaccaccaccagcagtagcagcagcacaaggattatctgagcaaaaaatgcttgaatatga

SEQ ID NO: 256544 - DNA, 975 bp, Cannabis indica
aggaggatgagttgatctattagtaggttgaacgtttggaaactcattattcttatgagatggccgttgaccttttggacggatttgtctagaagcagtgacaccttaatctcgaggaccctctctatcaacatgaacctcccttgtctcccctggttgttgctgcattcaaaatgttctttgtaacattgggaccttatgccattcagtactcccctcacaacagtcgctacacgttctacttcctcgtttctttggtttgacttagcgaagttgaaaattttccaactccacaattgggatatatcttgtggagtcataggcttcagaacttgtcctttctagaatctctgtctcgttattatctctattgaaatcccattcagtaggactccatctttaatttgatctgtcttgggtttgagttccttgtggttcttttcctggatagcgcactacctcttcttgtctcacatagtcatcttgttgattatcttccattatagaaaaactttcaagttttcttttctagggagatgcacctttttagagtcatagtttaaaaaaagaggctctcaattgaaagcattaaattgttaactcacaatttcgttaacaataatgagacctttttgtatgaaataaagaaataactttaataaagcttcaaagtattaataaataatatcataaataacacacaatattttacgtattttgtagttaaatctacatagtccacaaaactatattatttttgagtgcttttcttacagaatacaaggtatgaatttttaggaaaataataagattcaaagatgatttgtctcagggtcttcccttgatcattttccatccttcactcagtggtcttctttctatttatagaatttctcatatggcggttattttttttggacttatcttaataactacttatgaaatatggacaatcctcctatttcaaataatcac

SEQ ID NO: 256545 - DNA, 857 bp, Cannabis indica
gtaaataaaaataaaaaagcaagctcacaattcgcatcccatcaacttgcatcagtattcttaatcaacttgggaaatatcaaaaggcattagccgtgctaggcaacacctttagaacattattactagatattactccctagcaccatcacaaggtagcattttgttaatgattaatattaattaattgtaaaattcgatatttaattctaccaataataatatcatattattattaggtggtgttagatagtatctttagcattttttgagaaattaagtagaaatatgctaatgagcagattacggtgccgcaccaaaaaagaatgtgtaatattttaatggtagatttcagttcgaacaaattttaatttaagggatttgttaacgggtacattaaggtatcaagtaccacaaaaagtgagatattactattagtataatttaatatcgagtcccatacattttgatttaataaataatatagaaattcattagctccttacaatgagccacattggtaattaaagtattaaggtttctaatagcaatgttcgtattataataaatgataagagaaattgttaactaattgtttgatatcatatcaatattgtattaggcacattaattaacgtgccaaataatagtgcttagttcagtatcaaatcttacatattttttatttctttcaaataatgtccaacaaattgtaatttaataattatgaaatatgctaataagtgatgactatgcttaataacaatactctatttaaaaattaatttgaatataaaataaaaattcatgtaatacaaaactatttttattccaagctgatgtgatattttttttaa

SEQ ID NO: 256546 - DNA, 1476 bp, Cannabis indica
agaatggagtgacaattcttctatatacagatatctttttttttggtttgtcaattttcactaataattataatccattttcgaataacttttattcttagccacacccactacctagtagaaacctcactacggaaaagaaataaaaaaaaatagaagcctttagtgagcacttttagtgataatataaaaatttgtgataaaaaatataagtaatgtttcatatgaatgaatagaaataaaaataagaatgagaatataaatgtaatagaattaaatttaaaatacaataaaaaaattaaaaaaaaattattaaatttttctcattttttattgaaataatcattaattccatttcaaaatagaatattcattttattaaaatgatggaaaagtttcattaaaataacatttcaatattttaaaatgcaaccaaacaaaataatataataaaaattatatatcttttttattccattacatttcattacctctaactaaatacccatatgtgtctatttccatccttttaaagtaaattaaaatttaaaacaaaaaccaactatcaccctctcattattttattcgttaattaaagtagcatgagtatagatagatctagtttattgcaaaattaatttcattcaattccttcaactaacaaaatccaataattttgattctaataatatatgcaaacaacatattattcaatactcttattggtagcttaaatataaagaaaatttcattaattttggtattaataaagattctcggtgtaagagctaaaataatatgttgagaaatagacattgacttcagatttgagttgagttaaaacaagagaatagacaaaaggctataattttgtctataaaactagtgccaagtggtgcttgaagataaattgaagaagataataataaattctagcatacaacttggtgttatgtgatattttcaaattagaactttcaaaaacctatcttcttaattggtggggtaaacatttttctgtattctttacatgtacgtttagtccggaacaaacatatatctgtgttggagaacccacttttttttttttttgaagaaaagaaaaacagacataaaacagattgatagagtgtctgaggctgatggggtcctcgtttggaaattggaaaaagaaatcttcttatattcatttcatgttgaattaagttcaagaataggacgataaagaatttgagaaattatgttacactacagttttgtgtgtataatgtatatgtacattctcatagctaaatgatgataatatatattattatgggggaaattccactctatactctttttatattgttctgtttcatttttactatcttttttaaaatctatcatttttacctctttttttaaacattgtactaattttgcccctgtcacttcaagatactctctatgtgactctcttatgtcagggtattt

SEQ ID NO: 256547 - DNA, 1070 bp, Cannabis indica
atgatgtgtttacacactaacacttcagctttttgcctaatggtgttgtcacgggttctatcataccgcaacggggattgagacaagggaatccactatctccttacttgttcttaatttgctttgagggcctctcaagattgttacaatatgaagaaagcattggctgattgaagggttttgctgtggctcgtagggcaccttctattaccccacttattttttactgatgacagtctcctcttctgccaagcggatgatcggtcctatggagctattaagcgtgccttagatatttatcattgtgcctcgggtcaacagctcaaccttgataaatcaattttgtcattctctcccaatactacaaaagttgttaataactcttttcaacgtattattgggatcccgattagtgagtgtcatgagaagtacttggggttgcctgcatactctgaacaagataaaaaacaacttttcggggagatcaaggaacatatttggaaacttatgagaggttggaatgacaaaatgttctccattggtgggaaagaagttcttttaaaagcggtagtccaatctattcctacatatgttatgagttgctttaaattgccttctactttctgcaaccaactagaacagatgatggcccaatattggtggggttctactacggataaaaagaaaactcattggaaaaagtggcggctactttgcaagtctaaatcacaaggaggaatgggttttcgttcgtttgtgcactttaaccaagtcttactagctaaacaagcttggcgtcttattgaatatcccaattccttgcttagacgtgtgcttaaaggcagatacttctctaataatgactttgtgggtgttaagaatggtggtatgtcctctctaacttggcaaggtatctgctggggccgtgaacttttacttaagggattgagattgaaagtgggagatggctctacaatcatagtggtgtcgatccttggatacctcgtaattcggacttcattcaccaacaattttcgggcagcaatgacacttgtgttgggttttatgcc

SEQ ID NO: 256548 - DNA, 556 bp, Cannabis indica
aattaatcttgtttgagagagatccaccttctaagcattttgtttgtttgatttaaatatatatagtatgataaacacaaaatgatatatgttagatatatattagtaatattcattttatttttaaatgcagtattctaaatgggaaccattcgacgcttggattccatatctggctgcaaatatgttcaatctctacgtctgtaaagaacaggtacttcattaattaaataatgccatgattttttcaaaatttattgttgtttcactctaacaattattaatttcttaggttgagtatgaaagtgaaacaagcattgatctcattgccctatgttgtcttgacattgcttggaaaacaagagacaaatacttttccattggtcatcttaaggtatgttattaactaattagttaatctgttttaattgagtatcttccagtctcataattaattaattcattctgttgtttaatcttgctatctagctgtctttagctgaattagttaatggttcattagctaagtaagcttgtttaggcatgtctttctctt

SEQ ID NO: 256549 - DNA, 1159 bp, Cannabis indica
aataaatatgtttctttattgataaatgaatacaagagattacattgaaatagagttttatttaaggcacaaagcccaacatttatagtagtatgagaattacattaggttttccttttccctctactggagactttacagtaaagaatattcgtgggctttctcatgaagtctagcccatggagatgacgatctgctaactaggcggattggattgagattgaattggtcaacaccacatgcacaaattgtgggtaattaatctgccaatcggagtttccttatttatgtccaagaatataaaaggaaaccggaagggtcttctaggaacgtatcgccttgcctctccggtctcgtggtgtcaaacatatcttttgggctcgatttactaaaggtggaaggctttgcgagggtggttacacaacatgttcctggaaggtaacacccaaataggcttggcccattttgtctttaatgagggtcccactgatgggtcttgaaagctgatctggagtctacgtgtccaatgccagaaacgcggataacaaaaatcaatgcaaaaaaaggattattaagaaactcacctgaccggaccttgtgatcttagtaattcattctaagtaatacaataaaaaatggagtaagctattactattatgaggtgtcgaacctctataaacaatgtgtgttctttttgctctttattattattaattgatctataattactatcaatttaaagacttcgtatcgttgttcaaaagcgaggtcaacaataacttctacatataattttacacttaaatatattttatcaaatgtatgtatgttacaaacctaatattcaaatgtgtaattcattatgttacaattttatgtatattattacactataatgtaacatttcttatgtcataaaatattaatttaccttatatattatttacttaataatgtattttatatcacaatttaattctaatattatattatttattttataatcaatattatatatgaatgtgaactagtttgattgaatattttttcaatatttctttatgacttatgcaattttgttcactaaaatggtcattgttcaatactaataataatttaattcttttttttttctagaattaaaatatattatatattt

SEQ ID NO: 256550 - DNA, 1078 bp, Cannabis indica
aaatctccgagacacacctctacagaaagaagacgagaagaaaagaacactcaagtagaaagatagcaacaactctagtggaatcaaaaatagtgtaggaatcaacaagatccgaccaaagccacaccgtaaggccgagaaacggtcaggcgagccctagtcaagcaaaaaaaaatcaagcaatggctatgaacttctaaacgaaaaccctaaagagaataaaaaaaaacctataactatatgttttaacaaataaataactatcttaaatattatattcacctcataaagattgccaaaaaaaaattaattttgattaaaaaaaaactttaagtgtagtttgctatctttctcaataaataaagagtaactaatttgttaaatgaaattcttcaacaagaattcaacagtcataaggcgaatggtttatattctcttggagctactgatggctttaagccaattattgtgcactagtgtgggtgaagcttccagatgagattaataaaatgaattgtgttgttagtttggatattgcaaatgctagagctgcttttgtcgtggtattgcaggattcttctggtgaggttttagccacgaccacttttgatggtgtgcagactcatgtgatggtgttagattttgtgtttgtcttggctattgctcatgtttggtagaatcagattgtcttagtgtcataaatgcccttaaaattcatttggtggatcattcttatttagggtgtatattagagatgctgaaagagtttatctatgcagtaagatctaaaagaattcaaactataagattgcaattcaagattatgcaaaagctgatttattattaagctttgatatgtttatatagggggcaatacaaggaagaacaaggaaaacagaataacagaaaagaagttgttacaagaattggttattaactatattaaccaactaagggtagtttagtaatagtagtagttgtatggccgtctcaaatattttagaggccctgttctaattttaaaaagtaggccctaaaaaaaaaaaattataaatttgtaaataatatttttaaatat

SEQ ID NO: 256551 - DNA, 1481 bp, Cannabis indica
acagcttgacttgcatctgttggtgagtttgtttctgtaacttcctcctttgctttggaaggagatccaagagcctcatcaacttgacacatcttctcaaactcttcttctgtccactgctcttcataggaacgaacctattgaagtatattaaaagtaatattaataaaaaaatcaaaaactacaaggcaagcacgtgttaaggccacaaagtacacctctcttgtcctcttgccccttccataatgttgagtatcaagatgatattcactcttccgcttaactccaccaacatttgaccctccatcagcttttggcacttcatatatcttcatggcttcatagaattcctgcaggtcatcctctgtaacaagacgagaaggaaggggaggtaaagtttcagaattgtctgtcaactgttgattgatcaactttctccatgttgcctgcatgacagtgtttaatatcccattagaaaagcagaaacccaaaacatattcacagcctaagttgcacaagcttaaatgcataccgcttctgcatcccgcctttgcttgtcaacggattcaaacacatcaatctccgattcactgcagattaaaaaattagttggaaatttcaactatgaaaatttcacatttgtttctggtcctatatggaaggacctagaggacaagtcaagcaaaccaatgcaatattgcttcaaggctatacacagaaaggacaaaggtcaataaaaccaacagccaacaaaaccatctggttataaaaattttaacccactgggaacattttcaaggatactttaagacttgatcaaaccagacaatcacagtgaacagatttcacataaaggctaaaaagtagtagtgacaacttttgtaagcccaatcaaatttaagttccacataatacttacctgcgagctaaaatatcatttaatgcatcatcatctaacacaggtgcagcttcctctttcttacactctcgtaaaagggactctagatattcccttcgatcctcagcgctgtaattaattaatcaatgtcaaaattcttagaccctagtttaaacatgaaaatatagtagtctagtttacttgacattacaaaattctaccttgtattattatcaaagaaaccagcagtgatactctgattagcaacaccaagtttatgctcagccgaagctctcacttgttcttcaacagtttggaccttattatgacaaaaaaacaaaagtgagcaataatccagtagcaacagatttggtcagatagtaaaatttattatggaaaaaaatatagtaactagtgatgaaccggtaaatgagaattttaagaggcaaataattcaattgtcttgttattgctgataatgtaataaactgattaaattagcttcaaatataatgcaataacattacttggaaaattctccgaagtttttatgtaccgtgtgaacaacacacttcaatcattt

SEQ ID NO: 256552 - DNA, 1469 bp, Cannabis indica
ttgttctccttgaaagctattaatatagagatttgctttgttgttcaacacactaataatagaaaatctcaacctatcaattttccactctcttgggtttctttggttgaaactccttcaaagctctttaaaatctatgtgtaaatagtggtttagacagtatatagtttgttaggagtagaagcacatgtcttagctgcattgcatgcttatatattgttttatttaaatgtcgttaataatcatttagtgactcacaagaaggcgtatatatacctaactttttgaggaaacaggctgttatatatatactagacttagtatcattataaaaatggcatttctattattttctttatttatagtaatggacattaattgattattgaataaataagatttttatttctttaaacaattacgatttatacttttttattattattattatagtgttgtctacctaataaaataattataatcatatatttcaaactatttcgttttttgatttacgagtatattagatttatactgacatgacaataaatgatatgatttgcttacacttgtataagtggaatgtcttttcatgagcattagcaaaataaacttgtatcaaatgtattggttatacattaaaatggactgatattgaccgtagaaaatgtattagaaatttatcgttatatcttttctaaatcaattttacttagttgatcttagatcaattaatctcaatcctcagatggttaaactttaacctatagtagtatttgagatctttaatttgttcattattaggttacccatcggactaacccatacttacatcttggagactcggtaatgcaattgagtgggagctttcattatagatataaaatttatagcttctataactatttagaagtaaaacgatagtttacttagaaattgactaaacgagataaatggaagaattcttatttaggtaattatattagtttactgaaatatcatttataaggagctaagtgttttaaggataaaatacatcgataggtaaaactaaaaaatttatccctactcgatgtaaattgtctatagatgatcattggttatttaaattgaaacaatagataattcatagcgtttttatactgaatatatagagcgttctatgtaataaagagtgcacttctgaatctatgcttgagttaggaggaattaataagttagaaaatttatttagtaaatttcatatctacttattgggagctcgatttcgtaggcccatggtccccacattatctggaataatatcatcttgaagactcaattcattaatttaataagtcaattagaattcaaaaatagattgtcttatttgtagaattttcactaaggttggaccaatttgagaaaaaaaaagagagaagagaaataatagttattgttaattaagacactttgtggtctaataataa

SEQ ID NO: 256553 - DNA, 1141 bp, Cannabis indica
actttcctttgttggagctcatggaccaaggaggagctcaagggctaaacctttcccgaaaatcttaaacttataaccaacggtagcctaaagacaaacaatctaatactgcactaaaccttgagaaaatatggaaactagggttttggccttgcaaaaatcggcagagcgaaatccccaaaccggtgaaccggttttttggcctgtctagggaatcggttaaccagttctacagaaccggttaaccggttctcttgcaagaaaacccaaatctttaaaaacttcaccaattcaactccaaattcaaccatactctccaagatacctgtaatactagcctagaacagttttcaaacaaaaacaacaaagaaaactcaccagaactaaacatgacatagttgagccaaatttgagttccaagaactcaaagttgctcaaacccaaaatcacccatcaataatagttcaatcagacataaaacatcattaataacttgtagataataaccctaatcgaatttctaccaaacagaaacataattttccaaattcacaccctaagcctaacaacaccaccaccaaacaaagaaaagagttttctagggcatacctttacttgaatcactttagattcaagccaaaacttcaaaaaattgagtgattgaagttggtttcctactgtgtgcttagaaccgaaagaagaagaggatggaaggagaagactctaggcttattcctccaatttctcaccttcctcctaaaatactattgctaaaattttaattatcatttacttaagaaaagccagatgtcccactaaacaaaaggcacaaaacaaatacatttagaaatttcaattctacccttgcttaagcataaatttatgaacggtttaggggtaaaatgatccaacaccataaccccgcccaaacttcatacttgaacttatacacactaaaattatctatagaaaggttccaagtttacccatgtgattaaaataactctctgttaccttttctattgtctccaagctagaatcacaagaataatacattttgcttttgacataaataatcacatatctataacttctatataaaagaaaatggttttggttttttatagttaaattacaataa

SEQ ID NO: 256554 - DNA, 703 bp, Cannabis indica
gtgtcccttttcgactggtccacgtatattgggcgaattcaggggcaacacaaataaacatgatgtgggtgattgtatttttttaagctagaccgagtttttgtgaattatcattggttggacaagtttcctgaagttgaagcttgcttcaaatgggatttcgtctcaaatcacagtttctgtgtgattaaaaaccaggagcttaaggtgggtttcaaaccctttaggttttgtaatcactggccttcttataatggatacaaagaaaatgtgttgaaagttagaatacaattactgatcaaggaggagcccttcgtaaaactattcaaaatctttttcgggccaagcatgttctgaaaagatgttataaaaataatgttggtgagatagctttggagtataagatggcaaaggaggaatttatcaaagtcaaggaggcttatgcttcaaacccaataaaccctaagttgtacaatacagtttcacaagctcagcagtagcttttggagttgtagcataagtattcctgctttcagaagtagcaaagtaaaattaattgggttagtttcagtgataaaaacatgaggtattttcatgttattatgaggaaaagaagattagaaaatagaattacaactttcacagttggggatagaataaaagaatgattactcggaagatattaagcacttttgctcccact

SEQ ID NO: 256555 - DNA, 1465 bp, Cannabis indica
ttttggttggaatttcgttatgagcgattacccgagttttgctttgaatgtggtaccattggacatccttttgaatcatgtcataagtttcttgaacaaatttacaatggaaacgatccttctcttgaatatggtccggcaatgattggctctcctcttcctgactctggctatgatcgctacagaacagattttttcaaaggtggagcatggcctttaatgactagacttgccaaaaattccttcactgctgctattcacttcctttgccattaaatatgaccactaaagaatcctcatcatcctccaaattaccatcctcttcacatgttaccatgccaattacttccactcctttatctgttactacaccggcttcatatcccatatcctcagatacaacaccagttataccattcccttcctatcttcccattacaccaatgattgccacctatccacccaattcacactcagtcaagcctcccactcgaacaccattaatgcctgctacttttcctctgaattctcccagttttagcacagttgtatccttaaatgtctcaccaacattacactctcccctgtcaaatgctaaaggaaaagctatcttgtctcggatgatgattttgaaaatgttaatcctaataagcaatttaagagacagcttgactcggaatctcttcgcaatgttcttaaacgatgcgatcaaatactctacatatccaatcggactcttcagcaccgagtggtaattggccaactccgaatgttcccaggcctaagaatttggattcagaggagtttcagtctgaagtttcagcggttgttgctccgcaacaccgcgcacagccatgaatatcatcagttggaatgcccggggtttggggaacccgagtgcattcaggtatctgcgcttgcttgttcaagagcaagctccctgtgttctttttataatggaaactaagttgcaatatggtagtatagatagatttcgtaatacattacattttcctaatggcattgaagtaccaaggcaaggactcggaggtgggcttatgctactttggaagccccatgtcacactttccattaacaatttctcacaaaatcacattgattgttttatggaaaatcaagatggaccatctttgcattttactgggttttatggacacccttgtgctgctcaaagacatctcacttggactctgttacgacgatgctatgatatttctccattatctccttggctggttttaggagattttaatgaagtcctttctcatgaagataaaatcggtggaccaagaagagtagaagctcagattactgctttcagatcagctattgatacttgtaaactcagtacaatcccttttcaaggtgaaagaacaacttggactaacaagcatcaaggaaatggaaatgttaaagagcgccttgattatggatttatcaatag

SEQ ID NO: 256556 - DNA, 2439 bp, Cannabis indica
cttcttatttaatattttacattaatatattttttttttcacaatttcagagccttgagcgtttgagggcccgaggctcacgcctagcccgcctactctcagagccgaccttgcatatacattatacatatgtgcccataatagaattttaatccaaaagagagtgcattccttagaaaagtctatgcccttgtgcccatcacacctccagcgtcacctccctctccccaaagctcccatgcaaagggtcattttggtttcgagattggttttccttcattcctcaaccccttagactagctaaatctcataatttaataatacaattcatacaagtgtgaagctattatttaaatccttagattattttatgttgtatgatttatttttagacatgacatgtctcacttagcctactaaataatatttgataaattaaagcaaacgaaatagaatacattatacacattctttttcttcacacaatgatatatatttaatttttactatagatttttattcatagatattatatcacttttaattgtgtaatttagatttattatacatcattgcatataaatagtgtgtaatttaagcatatcacactcatcatctgtggttaagatgggtgcgagatggcatgttggagccggtttttctataccggttctcaatcaaccatgacttccttgtaaggcacatccgtatgttacttcttcttatgtggctctccatgactgtaaggtcaatatataatttattaaaagtgggctctcttgagtgggatgaggaagttcttcacgatttatttgttcagaggaatatttatttgatctgttgtattccgttgtctccgtcttcggttgaggatgcttggttttggatgttggagatgcatggggattattctgtcaaaagtacttatcgcgccttacaagtaagcaatggtaggtcgaatactcaagacaattcgggtttttggaggatgttttggaacttgaaattgcctcctaaggtgaagaattttctttggcggggtcttaccaattgtctccctactcttgtgtctctgcggtctaaaagggtccacgtgagcagattgtgtccgacgtgtaatcggaaggatgagacaatttttcatataatggtcagccgcgcttttactaagagttgtctggacagggggctgggagggatgatttgagggggtgaagctgctatgtttaacagctggtttgataatatttgtaaggtgcagcctatggattgtattgagaggcttgctatgcttctttggggagtttggggtgctcgtaatgacttggtttggaataataagactttgtcgttagagagggtggtgaatgctgcaattacttaccttgattcttggaagaatgctcaactggagagtaggtgttgccaatttctggtccgaatacttccgggtgtgagcaatgggctaaaccttattttggtgagattaaggttaattgtgatgctgctgtctttaaggatgacaatagtctcggtttggggtgaattgctcggaatcataatggtttattcattgatgcgctggcagttaaaacttatggtcaacccaacccatttttggctgaagctatggcgttgaaggaggcccttagttgggtgaagggaaggtgggttgagggggttgtgcctgctggtgtggttatggagtcgtactcgttgctgctggtgcaagccgtgcaacaaaagaagcgtttgttgtctccggtggggctttttaatttcagattgtgttgcttttattcaatcctctcttttgtttcatatttcaattaattttgttaaacggtccgggaaccaggcggctaacattttagctcgttcttctagttctattcctggctgtgtttcccgtgggggttttgtccctgttggtttggaagctatcttggtagcagatttggtttaataaaagttaattttttggctcagaaaaaatactctctatttttatttaaattttagctaaaatagctaaaagattaaaacagggaactaatttactttaatcatgtttttttaatatttaattattttaataatattttatagtttaaatttgttaactgtaaattaatttcataacataatgaaaaatagtagcattttttttataaaaaaatagcaaaaatgtatagagtcattttatattctacattatagagttatttttataggacaaatatcattttggatcatgtgttttgcaaaaattatcaattggaccatctgttttgttaaatgataaaatggactatgcattttccaaaatggtaaaaatagtttttgccaacttttttttttttaatataatcagcttaaagacaattcctaacacgaacagatacaagaaatgtatacaattttgtcataacacattta

SEQ ID NO: 256557 - DNA, 1325 bp, Cannabis indica
gtctatttctggttcccatttcggttgaagaggtacgggtctaggtctgggtccgtgttggggtgtgggtcctagtttgggttcgagtttcggtctggtgactggtctgggttccagatccaaacatcgaatacgagtcgggtccaatcctgggtctagatctggatcctaaacttgggtccctgtctagttcttgtttgggtctcgggtcccagtctgggtcctaggtttgagctcgggtctatggttgggtctcgctcctagttttgaggcctaggtcctaactttggatcccctatcttggacccaaaactaggtctctgtctgattccaaattcgggttcaggtccgaagtcctagtctaagtctaggtccttgttcgggttcgtgttcaggtttgggttcgggtcccagtctcagcctaagtccttgtccactttggtttctagatccagttttggttctcgaggtacgggttcaggtttgggtctgggttcgggtccgggttcaggtctggtcttggtccatgtttgggttcaggtttgggtttgggtttgggtttgggtctggctctgggtcccaaatccaaacactgactatgggtcgagtccaagcttggggtcttgatccagatctcggtctcaggacccgggtctcaagtttggtcctacgtccgggtttaggtctggggttgtgtcccaagtcctagtcttaattctagggcccaattccctttcccggttctggggcccaagtcccgagtcctagtttttgggccatagtctcgggtctaggtccctcatccatgtatggctcctaggtcctagttttgttcaaggttcaggttcaggttcgggacccaggttcctatccgactctaggtcttggtttgggtttgggtttgggtatgggtccgggtcccagtcctagtccaggttcgaatcccagtccgaggtcctgggtgtgagtctaggttcggctcctagttgcaattctgggttctggtttgggttcggatcctaggtctgtgtctcgggtctcgggtcacggtccaagtctaggtccaggttcaggtcaagctcctggtccgagttcgggtcctaatttgggttcgggtgtcgcgtcccaggtcctgttctgggtctaggtcctagtctaggttctggtcaagattgggttcgggtttgggtccggtttcggtcgcagttctcgatctaggtcccaatccttgtcgagttccagtttttgtttcgattctgaggtctcggtcggggtccaagtcctagtctgagtcagggtctaggtttgggactgcattcaagtcc

SEQ ID NO: 256558 - DNA, 2255 bp, Cannabis indica
tttgcccccccaagtctgtatgggactttcaaagttgcgtgtatgacacgtgtcaagcgcgtctgttcgcgactcgatatgaagttgactgggcgtccctttggttttcggctaataaatgctctgacaattaatatttcgaaatccaattttctctcaccacggttgacggctacacttgattacttttgatttcccatattcgccttttgggggaaccgaggcgtctgaggttcctttgaaatgattaccctttttcgttgtttggctataaataccagtgagcatttttccacaaactcattttcaccaaccttccttgctaagtaagttcagagcaaaaagagaggtttttggtttcaagttggctgaagtgctttcatcaaaactgctcatttggcttggcagaacttgaatccagacatttgttctttgagtaagttttcgatttcctttatgtttactttgcacatttgctttctgaatgtactttcgattttgttgtagaagatatgttggaaaccctaagtttagaaactctgcgattttcctttgttacggttcatccaatttcattgtcagtaatgcttgcgttttgaaccacataatgcctgtctttcatttttcttattctaagcttcatgaaattttttgccataactcgcaaaaattttagacttcctgagttttgacttttcgttgaatattctcattccctaatctgttgagtactcctagtcggcatatttgcttgttttaacgttcgatattctgaccaaacactcatcttgtgtgttgtcttttgtagatgaaccaaggtgagtttcggcgaagcgaacaccgaatcgaccaggacctgcttcaactcttgcacgaggatcatcctcatcgtcgttctaccccaacttcttcgagtgacaggcattcttccttaaataatttgtccagcaattggatgatggcttgtacccaaaagacaatgcgtaaggttaatgcatccgaccctcaagtggcccggcacgccaccttacccagccccgaactagttccagccgtctaggaggaggaggatcatgaaggggacgttgaggtccaggatattgaggagcaggacaatgtccgtcctagcggtccctctgaggcggaggaagcggaggaggttgcaccccaaaactatgggggatagaatgaggccggggagccaattgatgctggcggcgacgtcctggttgagggcgtggactacgccagtgaggaacttactgctgcagttcctcatggaaggcaaggtactttgggtgccaggtgggtgagccctccatccaaggttactaaggcgcacctgcgggatctcgaccaggatggctacctggccgaattggactgttacattcccgccaacaataattgagccataaaccctgaaaggggaatgtgcgcctggtcgggtgctcatgcccagcaaggggcattgttgcctttgcacccgtacttttggaatgtggtagacctcctccgcttctgtccgatccaatttactcccaagggcatcaaagtaactgttcgccctctttgttctctatgcctcccaaaagtgggatatgccttctccccacgaggttagctgattttttgatttgaagtccaccccttagaaaggcaggtcggggtacttctatttctctcaaccagatttcaagtgattgacgggcaccggagataagaccattagcaaaattgggcgttttgttgatgagtacttcatggtggaaggcatgggcaccacccatactcggttccagcagatccccacatatcaccgccctcccttcactcttgctcttagagatagggctcaaaggcttgctcaactgctaggggatgaccagaatatcattcaactgagctccgaggacaactttgtgaagtacgggctctatccaaaggatttcattcctaagccagtgaaggagaggattaagaaatctggtgctgaacgggctgagagagctcatcaggacgatgaactcattcaacttaagcgtgaagctaagttgaaaggaggtgcaagggccaaatagtatgctcatgagcccttgaatcctgaaaatgaggctgaggaagagcaggtgactccgctcaaaaggaggaaaaaacttctggcccagcccaggcccgttgatcatgcaattcgcattagggagcccagttcatctgctcgaccaccttctcccgtgctaggaaaagggaaagct

SEQ ID NO: 256559 - DNA, 1236 bp, Cannabis indica
tcactatcagaatcagcatatatattagagaagtaagatctagtattaacaagcaaaattcctttaagttccttctcgaagagaccttggcgacccgaagtggagtcttctgagaccttctctgttaacatcttcgttaagaccttgaagcagaactttgacggcatcttcaatagccatagtctctggttctaccctcaaaacccatctcatggcaacttaatggaactcctttctcaagctcctcatggaaatgtccctcatccaaagcacccatttgaaagaacaacgaattaaacccaggaatgaattgaatcccactcgaagagcaagagcttggttagaacccagaagagaacagatcgaataacaaaatcaaatctctgagaagaaaaaaataaacaccagggtagtaatgaagacagagcataagagaagtaagaaccggaagtatcaaagattgacccaaaagaaaaaaagaaaactttatcgaactaaattgaaacccagccaaaataattaggaaaatgatattaaaaatcaataatttgaatggtcagaaaatggaggcaaaaagggtaagaaaagagaggctaaagacgatgcgagaaattgaaccaagggttccaaggcaagagctgatagatacatttatatatataggattatgggatctgtcatcggaaaccaggacccaccaccacaaaagccagtaccagagtcggcggcttctcttttctgctattttccttatctccaatccaactcgctctgttctctgctatatatatatatatatataaatattaatgcattgtagagatcaaggcaatgatgtagggtggggatggagacctgggctgggattgaattgagataccaaccagccaatcggggtatggccctgttccactactcttgcaccgttaaacgtgttgggttggattcagctttttttttttattttatatatagaattttttgaaagtaaatattgaatttttattaatttcttaaatcagcctcacgataagattactcagaagtagtctcttttcatacactattttttaaaaaaaaaatttataattttcggtaatttttacgttagttgctatataaattttggttaaattttaaattgttctgtcaattgctatgtaaattactaaatttttgtaaaaataataataataaaaaaattcattaaagatgtaaaaatgaaaaaattcctat

SEQ ID NO: 256560 - DNA, 855 bp, Cannabis indica
caatatttttgtaaaaaaatgtcagtcagtataccatataaattttcctaaaatagttactcaaactccaataatattattattttcataaatttctatttctacaaagcgtgtgagaccctgaatcactaaaagagaagcagttaaaaaaataacatactatatagttatttttttttttttttgagagagaacatagtgtatagttttagttaagcaatagttaaaaaaataatgaacagtagttttagtttaaattaagggtgtatctattcagtattttatgttttataaaaatataacattaggagaaaatctattgtataccacagagtgttctaataaacctctatttatttcatttcaccatttaaaaaagtttttatctaatttttgttcatgattttgttggaaatattttaccaaggatctagatttactgacaagtatgttcattaacatcctaaatatgaattctctagaacaatgaaaataaacacatatgggtttaagaaaaccttacattgattgcagcagaatataattactccttctgttcaagatctctagcccttgattcctttctgtcgcagagcattatcaagatctaaacctgaatctctttctctccttcgggtttggttaccaccatcttactcactatgatttagtacttgacttgttatgtgtgggcacgacactcattcactcaaggttcgaatatgctagtgaagaaaactataggatttcaaaattagaagaagaaaggaagaagatgaagtctcagaaacctagttgtcaaagagaaagaaaactaggcttttaacttttgaaacattagttggataatgagac

SEQ ID NO: 256561 - DNA, 1035 bp, Cannabis indica
atgaatgtataaaattaacattcgttgtatcctgtaattgaataaattatttgttatattattgtttttgccatcatcagaaataaatattattttaactaaatttaatatttataactaataataataataataataataatataacattattaatatatttggaattaataaaaaaacataggccatatagcgtcacttttctagtaacactatacatataaaataaaaaagaaaattatatagtgacgctttttttgagagtgtaaatagtatttttcttgacacctacaatagtgacatgcattgaagtgacacagaaagtatttagagtcactcattgtgtatcactaaaagtcatttttgtagtaatgacactactacaaataaccaaatttgcgacggtcttgagaatgatttttttcgaagactgtcgctaaaaaaattaagcaactgtttcaaaccatcggaaaaaatgagtattcccgatgttttttaacagtagcttaaaaaataggcgacgatttttactaaaaacaggaatttaaaaaagaaaattcacccctatacccaacggtttatacccccttttatttttttgtatatattaataggaatgtaggttggtcgttattctttttgggtattgattcatatataattgttcatgaaacgtggataatccacacgtttcatttaaccacacatgggataatatctaataaccacccaactgctctttatttttatttattagccaattatgctgacttggaaggttgtgtcttgatagacaagagttatccttcttgtccatcttgatggaaaaaatgctaagtgttggaagataattcatctcgctgtaacctttcattgacattaggattgcgaggtgatcttctcgctacgtgtaacgcgaggcagttgtgtgttgctacatttagtctgctcgtgtaggagagtatcctcttcttgtgcatgtaaatgagtttattccgaagcagatttatgtctcgtcaataccagtttaatagt

SEQ ID NO: 256562 - DNA, 918 bp, Cannabis indica
tgaggacgtccaaacatatgacatgtgtacgataaatatcataaattaactcagtcaacaagaaaaccgaaacataattacctcctcaaagtatgaaagtcatacacgctcttctcgagataaattgacatatgcaacattgagtgtgagatgattaacacacccataatatgaaactgatggtgctaagcttgtcaaggcattcaaggatattcctgattttgatattgttaatgacgagaggcttaattttcttgagcctactcttgttcatcacctcagagattgtgtaattaaagttaaggtgttctccaagaagcatgtaattaccggagacacatacccaagtataagcgtaatccctgaggactatacatcaacaatcaagagcctcgacgataacatgccacaaaatataaaaaccaattctaatatgtcagttatgttattttaaataaaagggttataagttgcttctcgcctatgtaattaaataaaatattgaaatgtccacattttatgaacgactgtatagataagatcaaatgtaactgctattctactcctataaatatcagcaaaaatattgtaaagataccacacaatttcgagtttagacaaaactctaccaaattataaaatcaaccaaaagttacttagaaataatatagactcatagagtgtagattttaactacaaaattacgtaaaaaatcattgctttcttcattattatttatataattaatttcaagcataaattatcaaagcctcattaatgttaatatttacaagtatataagaaaatctaggttgatgtggtttgtcaattttaaaaataaaaataaaacatatataataaatatggaatatcaaatatttttttaaaacaaaataaaacaataagagattttttttt

SEQ ID NO: 256563 - DNA, 1214 bp, Cannabis indica
tttaactactgagttctctaatttgacttcactttccaggtttcttccccacttggtttgtattatgaagtctagcgtcctgctactaaaaaaaaaaaaaaactcattcctcatccgatgtatctaattgtaggtatgtagtactacatcccctacataagtcattctatacctacccaacattaatacatgactaacaccatgtatttctgataatgctgggaataaatttagatagtatgctacctgtctatttaatctcaagtcttaccttgtctcttcttctgaaatatgtcatacctcaagttggtgagactcgtgaggtaacacctccaacctacactttggatccatataacttttctaactactagaaaagtatcctttcatttttattctcattataatatcattagctgttgaagtgattctggaaaacaacactttatatcatatttttcacaaggagtcacccctataataatttactaatcatagttatagtagaaatccaattccataatcccttggaatttgtaacaccatttcataagtatcttccaaaatctgcgccacctctatggactggccatctattaaagacatagagttgtaccaaaatctgtctcatacttgtggttctttagagattctcttttaacttagaagtgaactcgtaatctgttcataacaatgaacctcatcatttcaagttgatcgactatcttttgaatttaaactcatatgcactgcttcgtcctgaacttaacttccactaaattggaaggacgttaactttatgagatgattcaccataacatgagtgaatctttgaactctgtggtcttccaataaaataccatgtatgcttctaatagattttcttgaagtattcaatcactacatttgtttacaacaactttacacataactcattcctgtcaaccattaactttgaagaaatcattatagcaccctatacctgtatgtaaattatttcccatttcaaggcgtcaactataatactgacttccctaaaatgacaatacatcatataatcataatccttgattatctctaactaccatcttagtctcataattaaatacttcttgatgaagatttacttgagactcttgtagttagtataaacttgctatttccctctgtcgtaatgaaactacgaaaccaactgcaaccaccactatggtgag

SEQ ID NO: 256564 - DNA, 1811 bp, Cannabis indica
tttaaagtttttttgtagttgaatttataagtttttaaaggatataattactgtatataaggttgaaagttgaatcaaatatgctgttttggaaaaattcttctttttttttcagtttcactttaataacaggaattgtgacattaaggaatttatgtttagaggttttgaattctttgataaaggaatttatgtttagaggttttgaattctttgataaagataattttgctaagcttttgggtctgctttgggcaatatggaatagccgaaataaagccatctttcaatctactcgtagcactgatttcagcttggagaattctgtcagttgttatttgcaggaatacagggatgctcaactccgaattacttctccgtctcccagttcgcaaccggcttctacaaacttccaaatcccaagcaaaatatttcagcttagtgtgtatgcagccctttctccctcctccaacaagcatgagtatggagctgttgtcactgattgtgagggtaatgctgtagctggtctttctgctccttcaacctcaggtctccctccaatttttgccgaagctgaagctctcaaccgggcgttgctttggtgtcaggcagttcggtttccacttgctgctattgcctccgactgtcagaatttggttcatcgactacagaagttttctccggatcgttcagctctctcgggtattattgccatgattgcctcctctttgtcttcttttccaggtgcctcgcttcattatatcacacgaacagcaaacacaagagcctacaaccttgcacgagcagctcttgaaacggaaaaagagatagtttggaaccatttcagttctcctttttgaagatcattgtagtagcttctttgtttatctttcgtctttgatcttcatttttcaaaaaaaaattaaataaaaaaaaacaaaaaataaaaatttgttttcttgcccacagcagaatattctagtaactgaatttaatattctatttattattatttttttaaatggaaattcaatcttcttcttctggatattgattttttttttaaaaaaaaactttaaaaaaaaaaaagtaaaaaaagtaacgtccttttactttaacaaaaaaaaaaagaaaaaaaaaataggctttataaaataaaagtcttgtgcaatagtccaaactgcttggttaggctaaccttcttcgttattaaacatgaagattgtgctttctcttaagaaattaaaattcctatagtaataatgattagcattcctagtctatggacaaaatcaaatcttatgttggattgaaaaacaaaacagtggtttataaaaggaagattgagactcattagtgacaattgagataagctaggtttcgcatactttttttaccctaggcgtcctcaagtgggattgtgattaaagatattatcaatgttagtaatgatttctttgatgttaaatttagttatttgtcgaagagaaaataatacgcatgcttttggccaatttgttataaatgttattctttccctttattcacggatcaaagatttattacaattattttcttatatcgcacgttggtatttggtaggctgtaaatacggacaaagctttttcacatgacacgagcataatctgacacgaaaaaatataaatttgatggacacgacatgacacgatacttcaaagtagcacggcacaatatgacaaaatagatttaagcacgacacgataagctcgaagacacgacacataaacacaaatagactagcctaaaagcataatacgttaaaatctctt

SEQ ID NO: 256565 - DNA, 516 bp, Cannabis indica
aagaggtaattcattagttgtgtcctttgctctatttatttcataatgtaaatataaaatttccatagaagaatcttaaaatttagtctttctttttgtttcaacaaaatctttagcaaccaaagttgaaggaagagatttggtgacctttttagtgtttctttcattgctttgttccatagaaattagaatctaaatgacatctgcaatgacttactgaattcaaacttgaatttaaagagatgacctttcactatgttggttttggtatagttgagatcatatcttgttacttcttattagtcttaatagtataactcattagattttatggaggctgagttgtcaagtccttagtggctgtgttcaatgtttttaagtttgtgtctgatacttaagactgtttttggttggctagttaggattatttgttagtctagcttataaattctgagagttaagtcttgttggagggtggtgaattttgtatgagttatttagagtaaaatattactc

SEQ ID NO: 256566 - DNA, 1574 bp, Cannabis indica
agaaatgggaagaacaccatgttgtgacaagaagggcttgaagaaagggccatggactgctgaagaagatgagactcttgttgaatatatcaagaaaaataatggccatggaagctggcgttctctacctaagctggcaggttttgactctttcttctcttcttcttcttctatctgtttttttctttttcttttctgttttgttttctagctttggatctttgtttgttgtcctgaaacatatgcactatactttggctttttggaagaaaagagaacaaaaagtgtgcttcagattgtagttttgttctgagtaataagacaaagagtttcaaaagttgtgaaaggacctccaaatggggtagtagaaaaatgaaatgttgtctttaaagaaattaccttttcgttgacttttattcttttgctactgagtcactaagtggtttgtgtttgttcaagtactctttttttctttttttgtttttcttccaggcatgttgagttgatgcaatttttgtcttagtttttgatggtttcattttcattttctcattttcttcacttttcaatgtccttgcttatcttgcttgagctgcaagaaaatctcaggttacctacactatacaatcctttttaggtgagaaaacttgatgtaacactgtataagtctgtaatatccttccaacatggtattttcttggagggaggtatagtttaggtccttcaagttttaaatcaaacggtttcttatctccaatttcttacagattcttttaaagtaaaaaataaataaaggccattgttttgttctttaagctttgaagtcatttgccgttttctcacatatatgcatgcagactaatagcaagttctactagttaacccctaacccttctttttggtttgctttatgagtcaacttaataatcagtatgtaaactaatatcaagttctctgttgcttgctttttctcaagaaggcattttcagattttcttagttcattttttggggtcttagtcataatgctaaatttatgcatattttaaaacagcatctatgctatatttgtattcacaaaaattatcacacctacgagtgaaactgtagtccattaaataaaaatagtagtactgaactatttctccaactgagtctacagtaatattgatctgaactatttctcccactgggtctacagtaataatattcacatttccattaaatattttaggtcttctctttgtttttaggtcttcttcgttgtgggaagagctgcaggcttaggtggacaaactaccttagaccagacattaaaagagggccgtttactcaagatgaagagaagcttatcatccagcttcatggcatgcttggaaataggtacttatatcttatttctttgcctacttcatgtataagaagaaaactaatgtaatatgagatagacttcaatttgatacttttagctcaactatttctcagtacatccattcaaaacagttattttttttcttataaaatacttacatgatcactacatcatgtaatctgtgtgtttacatttcaggtggg

SEQ ID NO: 256567 - DNA, 2484 bp, Cannabis indica
ccaaataagtctactcgtagataaatgtgctcgtagatatctatggtcagatataaatattctagtagattttactagataactgtgctcgtagataaccatgctcggagattaatctgctagtaaataattttgttcgtagataactatgctcatagatcaatatactcatagataactctgctcaaagatgactcaatcttcttaaagataacccaatatgttcacttaagaaatggagatactctatagtgaacaacttttgttacttagcgagttgaacctcaacaaactaaattctttttcgctagggggcatgctcgaagatcattaattaaagtagttgtaattgaagagtaaaacttctaatctggtcgtaactagaaaaagaaaataatttcgagtttgattatagatatgaaaaaactatatcatgatgaaacttttcacgtgacactttgaaaatatgtataaattaatatataatcaacctgatctagaatagaagaggttaaaatggttacatagaaaagaaaaatgtacaaaatgtgaaagttaaactaacacgtgtcttataaattacttataaaataatatttaaataataaactaagctcatcatgtttatatatttaaataaacatttcattcaggcatatgtattacaaattattttttcaattaagttttaagtaatacttcaagctcatcatgtttgtacgtataaataaacatattagggcatatatatatattacaaattacttttcgaattaagtattaagtaatactctgagcccatcatatttatacatataaataaatgtgtcattcagagtatttgcattacaaattacttattaattaaagtttaagtaataattcgagctcattatgcttataagtttaaataagcatatctggtcgtagtaaatacttttaacgcctctagctgtagtacatactcccatgcttctggttgtaatacatactcacatccatctggtcgtagtacatactctcatgcatatggtcataggacatgcccccatgcatatggtcgtagtacaaactcccatgcatctattaatagtacacactctcatgcaaatgatcgcaatacatactcctaatgcttctggtcatagtacatactctctgtcttttggttgtagtactatacctctcattgcatctagtcgtagtacatgctccaatgcatctagtcgtagtacacactctcatgtatctagtcgcagtacatactctcatgcttctggtcatagtacatactcctatgcttcttgttgtagtacatactcccgatacatctagtcaaagtacacactcacatgcatctggtcgtagtacatgctcccatgcatctggtcgaatacatactctcaatgcttctggtcgtagtacatactttatgcttctagtcgtagtacaaactcccaatgcatcttgtcatagtacatacttccatgcttttggtcatagtacatggccatagtacatactcccaatgcatcttgtcatagtatatacttccatgcttttggtcgtagtacatactcctgtgcttctgatcattgtacacactcccatattttaagttgtagtatctactctgtcatgcatcagtcatgagaaacacaattgagttagtcgtaatacacatgacttagaacaagtaacacccaattcgtatgttataaaatgagctacttggagtggtaccaaaaagaatgggaagacaacgtataataagtcaaatttgtgaaaaccacaaaaaactaacttaggggaaactgttatactcattttttggactatttaatgaaagagctgaattgaatgccacatggcatagataataaattcccacaacaagtacattatggaacaggttggaaaaaactcagaattcaacctgtgaggtgacctcatctaaataaagatcacaaggtttgtgaaatgaggtattatagtgttgttgggatgttattttagtaaaaatacaacatctcataatacaaagatctagcatctcctcttattttagaatcggtgatgcattctcgtaatacacagtcagtgatgtatcacctcgtaatacacaatagtgataaatcacctcgtaatacgcagccggcgatgaatctcctcgtaatacacaacaatgatgaatcacctagtaatacacagccagtgatgaatcacctcgtaataacagctagtgataaattacctcgtaatatacaatagtgatgaatcacctcgtaatacacagtccgtgatgaatctcttgtaatgcacatccagtgatgaatcacctcgtaatacacatccagtgatgaatcacctcataatacacaatcaatgatgattcacctcgtaatacatagtcagtgatgaatcaccttgtaatacacagtcagtgatgaatcacctcgtcatacacagtcagtgataaatcac

SEQ ID NO: 256568 - DNA, 754 bp, Cannabis indica
agaccctgttggtgtactaggggcattttcgtagttttgacccaaaaagagtaaaatcataatttctatgatatatcgtgcttgtggactatattaatatatagtacatttgttctgtctatctgtattttttgataagtcggtgcgatataatcacaattaagtattttgagccaaaatgagttcggggcccgaaatacgtttttggggtttaatttggcgttaatatgataattttgaaatctgaaattatgttttatatatgggtgttatgaaatgattagtttgcccttggttgcatagatatgtttattattggctataggggtattttagtaatttgacactatgatgtaatattcaacaaaatcaatttttgtgtaaaatgaaatgtaattttctggttttggatgccctaggcgaccctctccttctccttctcatctcttttaaaattttctcatttaattggaagaaaattggtgaggaaattgagtggttttgcataattggagcttgagtaattgtggtaagcttccaattcatcctttgtgtatgcttaattttttatatttaagctttaaaaaaatattcgtgtgttcttgagatggtgatgcatgttgagaatttaaagttacattttggtgagttttgtgtgttttgtgtgataagtatgaattggtatttttgagctttgattaccgttgcgatggatgttaatattagtataagttgtctttatattgaatttgag

SEQ ID NO: 256569 - DNA, 1485 bp, Cannabis indica
aaaaaaatcatcttacccacatatctctctaacaaaccatatatccccaaattatcaaatccaattctctcgctttggtttacgatattgggtgacaataataataaaaaaaaaatcacaaactcatacgtggccattccaatagtatacaatatatgtagctgataaattttgatcgcaataaaaatttaccaagaagaaaaaaaaggaaaaaaactgcaattgcttctcatctctttcctttcctcccgtctaatgtatttcgaccattatttttccagatccaatccatccaaaaaagagtcaatgcatttgaggctttcggctacgatgtagaaaaagggaaaaatctttttgcttatggaattaagccatcatcgatgtttatgtcaaggcttccttactcctttcaggtctgtccattctaactttaaatatcactcttatcggtttctttgtcattttgatttttgtttctgaaattgattgaattcttgtaagtgtagaaacattgtcgaaccatttggaggcgtggttataaagaagatacatggcggccacaacaatcgactcttcctaaaaagttttcttttgctgttcaaatgaaggaattttgacttgattctaatctcatctgccaaagctttctccatcggttctaaaatctaactttatttctcaagttttcttaatctttcttagcagccaatcagagtagtatttcttttgactaagtatttattgtgtttctgtaggggtcttcgattacttactaaataatgccatgcagtgaagctattctcaaagcatatgaaggttgaagaacaggtagtcttcaatttcttggttcatcattttggttgatgacttattactatatcttattcacgaatctgcttttaatgagctagagcctagatcagagagttgattgtaaggttttaaaaggttgtgattagtgtaaccatataaattaaagtgtgaatgttcagatgatgtctagcagggggatggtgttgcgattagtcaagagttagtttagatatttgggctctgttgtgcgaacattgtgatagaatcttgaatttacattgatctaaaatttgttataaatctattttaaagtatctagatgtttcttataggaaactggtctgcttgctaaggatatatggttatgaaaatatgtgcacctaaaatatgcacacaaatttaacagacaagttatttgacagtctttaacaaattacaacttttctaaaatgaaacttataaaaaattataccatgttactgtgtaatatctggatgcacatatcataaacttataatactacttcatataatactgctgataatgaaattagttcaatttgcaggcatgatcaaatgaaagaattgaacacgattggttaatttggttaagaactttgcatccccctttgcattcaaagtgttaaaacaagtcaactggtttttgtggtgt

SEQ ID NO: 256570 - DNA, 949 bp, Cannabis indica
aaaagaactaagtagaataatctactactccaataataaatttatttacaattttataattacactaatattatttttaatacattattaataatatttcaaatataaatatttaattttttcaaacaaaaaatttgtaatctttaaaaataaaatacattcacaatcttaaaaagaccgaaatcttaaatgaaactagcaatacgtggctcggcacgtacattcacctagtatatatatatatatgtatgtgtatgaagctcttgagtgaggtgaatggtgagaatatttttcacgtgggtttgtatgaatagagatatatttaaaagataagaatgtttgttcctgaaatcctttctcaaatagttaatgaataaatcagaattcaaagctgtgtgtggggactgcaacgcgtcgtttgtctgttttgtaatgcaccatactaatttcacattatacatatttgatatattacaattacaattacacatactaaacagtcgcgatgaatttattattatgaacaaaacaaatattagttgagaagtaaaaatgagagaaaaatacagctagggacagatagtgggacaaaagtaatataaaacagcagcaacaatcagagacattatgcacttcaaaatactcttcctttcctttcctttttccccttcaattccagtagtaacaactaacaacaattttatgataaaatttgatttgaacacatgatgttagtcctcacacttctcccaaggctttcttgatgtcatcctgtgccaaaaacatcatggaagagaaaaacaaaagaattttagttgctccaaagagtttttaacagtgcacaagtgtgtgtgtgtgtgtgttttagagagagagagagagagagagagagaacctacaatggacaagaggagcagtgcttgtgccatagcgctctatgacttggcca

SEQ ID NO: 256571 - DNA, 3000 bp, Cannabis indica
tttttttttttttgaaatgtattattaattagtttcaactaacaaaacttcacacctaactctaaatttatagttttaaattaattacatctttaatttgaaatttatgtttatttttaattaattttattctctacttgtaagtataaaatattaagttaattaattctacaataattaatataactaataatataattatagtgtaagtagtaaaattatcttatatcagagttcaattttttcaaaaataatgtttttctttttaatttaagtttttaaattaatttaataatttgaattctttattttttctaaataataatttaaatttctttaatattttctaatatagaacaattattatactgtaaaaattgtaaagtttgtaattattatactgaaaaatcttaaatttttatttgttaatataaattaatgattgtattacagaaagtataatagtaagcaaaaaaatgacacatgtaataataataataatatctgaaaagttgaataataaattttttcaaataaaaaacagatattataaatagaggaaaatttttgtactaaaagaatatctgaacgatcttgatttactatcgatcttatccaaatttgatagtttatgacaactttagataattatgaggtgcttcaaatgtactataaatgatcgaattgctacccttgtaaagacatgatttatttattttatttattattaatttaacttttaaattaattttataatttaaaattcttgtgttaaacaataatgcatggaacaattatactataaaaattttaaggttgtaataatcgtggtggaaagtcttatattttttattgttaatatatatattgactgttgcattacatgaattataaccgtaaagaccgcttagctttgttttggaattagcaaataattagagtttatttatgaaatttgaataataattatgatttactattgtatggagatttatttgaattcatgatgtattatatttgccatgtatggaattttatgtttttgcatgttttgtgctcgacaacatcgaaaagcgacgtttggccattagaatcacattttagtattttaagtatagtggagcaatatagttagatattgggaatgtcgggaatagttgagattttagaactgaccaaattacctctaggaggttttgtaactttttggttaatgtgggggtaaaatggtctttttgccctatgatactttgtcttttagtggaataatatgagtgctatatgctgatattagacgagttagtaaatggattattatggttttattttattttttttcacccaaagaaagaaaaatcaaatttgtcttctctctcttttcactccctctctctcgaaccccttggaaaaccagcaatttagggttgtttttcctgcaattcagagccatctttgcttccttgttgaagttccaatcctggtaaaacttcctaaccttcttctttatgttttcttaagcttcaagtagtgagtttttgcatgaattgtgaattagggattctgtagttgttcttactgtttgagatgatttttcgaagttcaaattaggttaattgagttgttttgaagctagttcatggcttgttgtggttgttagacaaagtttgacttttagaactccaactttggtctttaatgataatttttgattctgattgtgttatgatgttttgttgcatgaaagatgtctattgtgatatattaagcaagtctagaaggtttggtaaagtttggggtcgaattgagggtgtagtgaatttttgagtgtttcctacactgaactgatcgaccagttcagggggacctgtaggaaccggtcgactggttggtctccaggaaacctcacagaactcaaattctggttggagaactggttcactggttggggtatttttgggaaccctagttttcctcgtttttgcgatatttagggtattgccatgttattcatcgatagggaaacttttagtttcaaagttaagtccccaaaaattgatttagcgtgtcactcaccatttttacgaattatgtgattaggaacctgtaattcgtcgagcagctgttccactcaggttggccgacacacctaaatttggaaacgagttaagattagtataatgatatgcatatgtgtttccatgtttagcatgcatgttagttaagattgttagattatattataatagcaatatcaatatatttagtattatatttgatatcgataaatgtatgttggctcaagtactattcaacagtatcacatcggtatgactagagtatgactagcgcaccgagtataggctaatattatggtcgatagtactgtactacttgacagtatcacattggtgcaactagagtatgactattgtacagagtatagactgatattatagtcagtattactatcgtacgatcattcttgactcagaaccattttggacacggggatagggttatggttaggtgtatgggagcttgattataatccgagtctatgctattatttatgcttttcttactgagtctgtcgactcacagatattgtttgcatgtgtaggtaagggcaaagctaaggttgagtagctgtgagagcgagcagatgaagattgtacatgtcaggactaggcctggagcgtgcgatctttaggatagttgggcttattttgtagtcgctaggcaacaaacttttgttatatgcactgtaaaatgtttgtaaatattttgtaaaacgggatcccagtttgatacaactatgttattttggtatatataattagaataataaagttttaattatttacgattttcaataaactcgttgattagcaatgagctacacagttaagttaaaaatcacgttaacacgcctaaactagtaaggcgttacaatttggtattagagccgccaggttgtcttccgaagatcgtcacgacatg

SEQ ID NO: 256572 - DNA, 1073 bp, Cannabis indica
taagctagccttagtggctttcaacaaatttagcttactatcttcaaaaacggttctcaggtaacgaagaaaccactcttgattggccaattagatacaaaatcgccattggcgtggcgagaggtctacactatcttcacaagtgttgcaagcaccggatcatacaccgcgacataaaagcttcaaatgttctccttggaccagattatgaaccacaggtaccaaaacaaagaaccaaaaaaattagtacaataaatttcaatatctattcatttttttaaaaaattacattgttaatacagattactgattttggactagcaaaatggttaccaaacaagtggactcaccatgctgtgatcccaattgaaggcacatttggttacttagcaccagaatattttatgcatggaattgttgatgagaaaactgatgtttttgcttttggagttcttcttatggagattgtaactggtcgtagacctgtcgattcttctagaagaaatcttcttatttgggtaccaacattttttatttttacctatgaactttattataacactatttggttacatttaaattaaattgtgttgtgacattgttttgtgtaggcaaaacctctaatggaatcaggagatattgctagtctagctgatccaatgatggaaggtaaatatgactctgagcaactacatagactagtcctcactgcttcttattgtgtaaggcaatcctcgatttggcgtccatcgatgaacgaggtacgagtaatttgctaaactaacaacacgaaagtttaaaattagcgaaattatatcattgattttgtactaactcgatgtgaatttagggttttggatgaacgtttaaaaatcgaatatttttgtttttcgagttttatttctagggcgtttgttttgagtagttgggtacgagtggaaagagaactcaaatagggatttattacccactaaaaaacatgtgggtcccacaaaataccgaaaaattttcactttaaaagttgagacgaacatgaaaaagattcaacacttattttcccaccgaactaaaca

SEQ ID NO: 256573 - DNA, 1759 bp, Cannabis indica
atgggttctgatgacgataagaaaaacgatgatcaccacagacgcggacttaacgtcagccacaaggccaccctcatctccgtctcgtccttattcgccttcacactcctcgtcatcctcttctttctatacatgaaataccgtcaaaatcgccgccgtgatagacgccgtacagacttcatttctcgccttgtcaccgctcaaatcacaccttctgattctgttatacacacgaatcatatcccaaaagctactgcccgcggccttgatcctcagatcatagactccctgcccgaattcgtctacaaatcctcctcggcaaagaatagtcgaaaagggcggcgtggcggcagctgcggcagcagcatcgatgtagtggagtgctccgtttgcttgagctcaataactgacgactccaaggttaggctgttgccgaattgtaaacatatgtttcatgtggagtgcgttgatatgtggctcggctccaacacaacttgcccactttgtcgtgctgccgtagagcctaaagtcccagccgagcccgaagtaaataatagctcggtggagagggttgtggttcaaccgtcggctccgccggtggatgagctgagtttgcttcatggagaagaagatgtgaataaagcgagtggatcgggatcatcgtcaaggccattaagctctttcagaaagatgcttagggagaagtcttctagaagatcatcgcttggtagttgttcggaattagttggagtgattgatcatcatgattttgagaggcagtaatactcatatgtatgttatattatacagtttctttttctttttctttttttaatttttggcatgttggtaatgagtttggagttttacagtagcatagcacattgtttttccagatgtgagcaataaattttttatcgatgctttggtgatgtgtgtgggaaatattttctgtaaattataccgatgttatatatgtaaattgtgagacatatttgatttgtttgattataaatatagatttaagtgaaaattacatcaaatatggttttttttcaatcaatatttgataaatataggattatttttttgctaagtataaataatatagcattatttggttgatgagtatttggcaaaaccccactacaagaaataatatacgttttcttagggattttttcttaaatatccaaataccactaattaattatatttatacggagcaacctatttacaacttcctttttttctttaaaggtattgctcaacaaatatttacaaacacaaataacaattcaataaacacaaagctatacaactatacccctcatatcaattacaaccttctgtacaaatttcccaaaaccgattcttatctcccatagaaattttactacctaatacacctattaacttatttaaacaaattaaattttccaaattgtgtgcttcaccgcccacaatttttgattccataatacctaattctttacctgctaaggacatttgctactaatatggacagcaacgtgcttttttagattttgctcagttttttggctttgggtatcctacacacactacaaaaatttaattgcattacattaattgcatacaaaaatttacaattcaaaaataatatgcaaaataatctttcaatactttaaatagatgtatgtaattcatcttttaatataataaagtattacataataatatatattgtaattagtttaaaagtttgacaatgagtata

SEQ ID NO: 256574 - DNA, 1303 bp, Cannabis indica
cctgagttgaaatgtgtcacaggtaaaaaaaaatttagactattactataaagataaatgatatttataaaaattattaaaaatatatattttttaaaaagtaatttttttatttaggcccccaaaatgagtaggctctagacgcggacctaacccgcctatacctaaaactggccctgcatcattcataattaatgcccgtcttaaacacaatattttgcaaatatagatgattattgttaattaattaaaagtacacatttttcataattaattaatttttgatcttgttcatcaaaattaaaaaaaaaaaaaaagaagtagaaaattaatgtgtattaattgagtatacaatatatactcttgcattacattcgtacccaaaaactataccaactcaggaaattcgcctgattagaaacccgaaaaacctaaaataaaaaacaagttaaaaaaattatagggtgtgttcaagttacactcggttacccactagatcgggttcggattctgaaattgtgacaccctaaaacccgggtcaaatcccaaactcacccgtgttctgaaattctgaaattttgtcctctgaattttgaaacatatatcaaattatgtcctctgaacttttcaggtcgttaaaattttcttttgaactattgagaatgtcagaattaaagactttgtttgattttaccaaagagagtctgacgtgcataaaaaatttaggagcacaatgcacaatttagtacatgttaaagttcatgtggcataatttggtagatatcaaagtttggggcacaatttagtatatggacaatcatcgcattagtaaaagttaaggaatataatttgttacatgtcaaagtttagggaataaaaatcttaattaacttctaattaattaattaatttttttaagaattaatttattatttaatattagtcttaattaaatcttcgtttaattatttttacttgggagattaatattgctattgctatatatggttgacctcatatctaaattaattgaccaccatgcagctagctagcaatcttttctctcggaaaatgacacaaatacccctaactacaatatatattatataatgagaatgagccattaattaattctttctcccatgtcccggaagacccagacaagtgtagcgactgtctatttgtctaatagtgagtattgagtaataatttttccaacatataaatattaataaagcattattaataataccctacactataatatacattattaattggagattaattaatacaactcaaa

SEQ ID NO: 256575 - DNA, 676 bp, Cannabis indica
aagactttgaataagatatatgatatatctgttgataaaaattctcatctaataattaacaatatgattaatttaaaggtcgatcggcaaaaactcttttcttgttcatgaaaaccccaccacactcaattaagtcaattttgcacaaactacacaaatatcatgcggcttcattttcgcttccattttcgcttttccaacagctccataggaatattctgcttttgtgcgagttatctcagtcgactcgggtgccggattcgtcattgatataatctgtacggcgatgatggtcgtggccgaggtgtttggggttcctagctacgtttactacgcttctggggtctcggtctcctcttccatttccaagccctccgctacgaaaatggcgtcgatccctctgagttcgcgaacgattccgtcactgagtgcgccataccgaatttcgttcagtcagttcctaccacgtctttaccggaagttttggtgttcaaagattgggctcctttactattaaatcacaccaaaagatacaggaatggctgttctcgtactctctctctctatatatatatatatatatttagttattcatttgttcggtggttcaatttttctttacaggttcaagttttaatttcttagagtttcagggatgattttcagtggcaattta

SEQ ID NO: 256576 - DNA, 2961 bp, Cannabis indica
tgaaggcgaataaggacgagacagagatggagggtggccttgtggctgacgtatataatctgcgtctgtggtgatcatcgttattcttatctttatcacgaacccacggttactacaccactttagattgatatgttttagaaggaaattaatataatatgtttgaccaagaatatggatgcaccattacaaatttttaaaactattcttttttatcgttaatagtattatgaagcaatattattctaacacgattttaattaataatatagatggtggatggtagatgaaagttaaccgagaatcgttaaacttgctgttacttaggcacaaaaatagttaaactaagaattaaaaaatcattataaaaaaaaatcatccaataatttttcataaaccaagaatttgattatatagccacattttatatagaatagaatatatgctttgtccttagattagttaaagaattattagtgtgtttattgtattgactcttttttctaatctgtaatttttgtaaaatatataatttaaaataatattcatcagaacataaaaaaataataaaaataaatcaaattaacacacgtatatatagataattttaatttcattagtcttttgccttttgttgattgtttatctacctagtacctatcgtattcaaaaatattttatatagcacttaaaggggtaataattataaagtgctatctatcatatattgtttttaaaaataaataaataaataaataattccaacacgattatatggtgatgatattaataaaattaatggagttacattggataattaattaattaactaataccaactacacatcacatgcatgcattcatgcaaaaccaaaaaacattctcacttccacataaaaaacatgttataacaaaacttacccaataaatttagtaagaaagagaggcactaatacaattaagtacctagctacgtctataaatataggttgtgttttataacaacctctcatcgttcaataataatacaacaaatatatatcataatatctctagaatgtcgtggacacctgaaattccaggagtgccaggaataccagggtcggcgccaggaatgccgggaatgccaggagtgccagaaacacctggagtgccggggatacccggggggtcggggggaccgaggggtgccaggaacatgggagacaccaggtgtgccggggaggcctggatcatggaattgatcaactcctccaccaacgcctaagaatttataagtgtgcatgtgtgctaaagaataaaatattggtattgttattttgttgcaaaataataatattaatgaataacactgcaactcactcacatcactaagttgtagagttattatatattgtgctattgatttgaataagtcaaatgttatgtattgtcagttttatatttcatttacaaaaataaagatatgatcttatgatgatcgttcattcatgattcatccttaacttttttatagtatttattaattttaattttatatattgaaaattaaagatataatcgacttgattttcaataacttttagggaagacgagagttgcttcagtgatcaaatcaaaatcatctcttcagtttattcaatgtacttctactttattcaaacaactctcataactttcattatttaagttattgtcattaaaacattctgaagtaattatgcacccttaaattatcacatatagaaatcttactatggttaccatgtgattaattttttttttcaagtgatagtgtattcttctttttctttggttgaatttgggtaacaaagaaggtattggtgacaccgaccctgaaggatgaatcccagtgccaatcgtaatcaaaatctgtcatgtcattcaacaaattcattacatcatgatttttccttaacaaaagctctccagttacctatgttctataatccatccagtttcttatttcatcattaagtctgttataaaagaatagagtaaacactcacttaagaaattaggataacatctctctccaagcttcttaaatctccccaagcaaaataggatgattcattgtgttgttaagcaaaattcacaaaataagataatgatcttaataaagaatttggattttttagagatcataaggctgatcccatctccgaaaatgttattaaaaccctcacttgtagcggagaaataccatcgaaacaaagctttagctcaaaacgaactaaaacaaaatagcaccaaaccagtacaaatacaacactgaggttcaactgccccaataagaaaaaattacaacaaagatctcccatctctactttaagtctaagaaggacaaatgctcaaaaagcttagtcttatacacccaagtaaatgtcaacggtcttatcttatgccaaagatcatccgatgtacactagcaccttcaaaaattctgttatgatctctaaccagacagcccatagaactgccaggattgcggtcctccataacaagtccttctactaccatccgacttgctaactatcaaaacaacttcccagaaacgaagttttattattctgctactaatgttgactcttcttctgttgcaatacaaacaatgccattattttttggaaccttggagaccttgaaatttaatggactgcatattctcgaagagtggtcattaaacgaaggtggagtttttcctcgtcttaagaatcttcatcttaagagttgctatagactcaaagtgacattgttaggaaattattttccttcattgaggtgatagtgaggaactaatactatcattactctcaagtaggggtgagcataaaatcccaaaaatttaaaaaatcgttcaaaccgacctaccgaacaccgttggaaccgaaaccgaaaaccgaaaaagaccgccaacggttaaaactgccattgaac

SEQ ID NO: 256577 - DNA, 1897 bp, Cannabis indica
cgagactactgactgtcacacaagcctttgtcaatgacagaaggagataatgaacgcctagaggccatcgagcagttttactagaagaggcgtggcagcgagtatgaagagatgaagaagttgaccaacaacatctcctctagacgtaacgttgagttcggtgactacaataagtgggatgaagcctgcgctcctcttgtgaacatggttgagttgatagagaagcttcatcctcgtattggaacgatgtgtcaccattttcggctaatctattggaacaaaatgctactacaagttgtaggctcggtgctgataggtttaccatgatggcaagcacggatccaatgtacgtagccgatgctatgaggacctaggctaatgctgaagttttaattttcctttgtcgtgaattaacactttgtgtttctccattgtttgatttacttttatattttccttcacaggttggcttgatggccgagaggaattgctccttagtcatttaactggcctatgatctagaggtgctgaggacagagcatgccgatgccgagctaagaagagaggaagctgccaatgctttagctgaggccaacaccaagatggaagctactgtaaagcaaaaggtttttgaatctttggataaacccttgacttgtgaaaggaaagagaccaagatagagagggaccctggtgacgggtacaaggacttgcattccacagctcttaccaaaatcaaagagttggaagtcaacctaaataggccaagctggatggttaagagaaggacaaaatattaccactgtacctctggagtacgataaacaagctaaaattatccaagaaaaataatttgcgagactactttggagagaaaggtgaagcaccatcttgagttgcaacagactgcggaggaggctgaggtgaaagccattcagagggttgagaaggctgagactaaattgagtgcgtccatgaaggcttatgaagaattccataaaaaggtcaccgaagcagagggtgaaaacttagatttgaagggacgtcttcaacaagcaatctttgaaaaaaaataggagcttgatctgacgccttcccgaacagtttagtcaattggttcatgatatctgcagccatgagagtattggcaaaccttgttttcaaggtgtcgaccatgctagacagcataaagtaccgagctttgttgttagcattctaccaaagcttgaacttttcattgactgtcttggttgcattctcacctggctgctcaggagcctctttagtcaacacaaacagggcattttcacctatgagagcaatattaatgttctctttccatttgataaagttagctctagagagcttgttgtcaatcaacagtgacactatggggtagttcatagtcatattgtgtactacaaatatcaataaatagaaatcaagtaaggtttaatacaaaatcatacactttcaaaaattattaagcacttagcaagtagaaatgacaagtgaaaatactaaaacaaacaatctttaataatttccaaggtttccaacaaattgatacagtgcttcgtattgggcgagagtcaaagatatcagtctttgaatggagcagtcagctcaaaaaaggacaccattttagtaaccttttattcgatcgaaaagagaatccaacgttcttttgttttagttgagagtcaagatcattcttatttcatgagcttctaccattgttttataccttgtaagtcctactcttagcagccactattcggatggacgatactaagaataaaacacttacaataatatttatctttcgagattctaagacgttaaattgctaatgaacgtctatttattgggaatgaatctcactaaaacaagaact

SEQ ID NO: 256578 - DNA, 966 bp, Cannabis indica
tttttctctatttttttccccaactataataggagtattatttatttatttattttatatgtaatttatattataattatattagatatttcactagtttttgaaaattctaagggcacatttggaaatctaagagagatttggagttaggtgtaattaaaggtaattatataattttgcatgtttgtctgactatataattacaatgtaattacgtaattagaagtaattaaaatatttcaattacactttccaattctcatactcttgatgagaatcgggtgtaattactaaagactttctatttaacatattaagtactataaattattatcttcctgtatagttactaactattttgctaaagaaaacattagaaattcataagtaattgccacctcatatacaaataaatcttgtattttaaaataaaaaataattactataatgtgtaattactaccctaataataaaactacttaataattacacaattactttcaaatgcatcttaaatcatttacaatattaaaaatcaaattcaaaataaacaattgcatccatttaaaaaaaaaagtgtgcaactaaatgtctaaattttatttttaacaatataaactattctaaattttataaaaatatttaaaatatctgctaatcatataattaaattcaaagtataattttattatatgtagaaatatcctcctagcaaaggtagaaccctgtaaaaaattcctacaaatatttatatagaataattagtatttttattctttgaacttttgacagaacttgattttgctctttaaaacatacagtttgttaaaatttgtccttaacatataaacattacataattatgctctttctgttaggttttcgtttcttttaccgttaaaggttaatattgttaccctctaaactttgaccaatacaaaattttaccccattttaatataaaaa

SEQ ID NO: 256579 - DNA, 1139 bp, Cannabis indica
aatcacgtaatacgcctatgttagttagggtgttacagtatttcaatggagaaggctcagtggccgtgttcagattttggttctacctacaagtacacatacgtgtctcttgcaaaaatcattaacaaatcttcacagttttgtccatttcaacaagcctccctctgaattagtgcccaaattgttatgcctttcatgtgtgtcggaacttacctaccaaaagggcctacattttcaaatatatgcaagaataaatacttttcatagttagaccattcaaaaatgtgatagatcctctttcacttatgtttatgcttgaaggtccaagaaagcaaatggtaaaggtgcaataggggagtaatcggctagctaaggaaaattatgtgagttgggtttgagtaggcaaggggagcttgtttacagtgtgactgtggagcacaatactctaggaggttagaataaaatgcatcagtgagatctttgtaaggtatggagtaattagtcccaagtgggagagaaccaagctctcaaattcctgggtatcaaattatcaatacacactcattttctcttttcctcaatctgttctttgtgttgtataaactaaccaattgacaggaaattacaatgcatttttttttaaagaattcacataacataaaaaaagggcgggggttattaaaagtaattttcaataagtttaagtttcttcaattttccattatatggtgctttgattttcaatttagcaagtaaaattctcctgctaatggcaaaccatgcttttaaaactatctccatcaagtgagaaaatgtgggattgatgaacagcactgcttctcaaaactccatggattccggcaaacttcaacacgagattccgatgatcttcaagcccgatccattgaagggttttgttctcttatacctcccaagtttaaccatatcattcactgtccaaagcggtaacagaatctcgtctggaaatcaattgaaggttttgagacgcggctttgactgaatcgttctcctcgttgacgactcgagtcaagcaaggcttgtacgagtggaggtttcagagggtggtcgttctttttcgtaatgcacatgtcgccatttggtaatgggaagaccgacgt

SEQ ID NO: 256580 - DNA, 1905 bp, Cannabis indica
ttaaattattctaaatttctacaaaaaaaaattaagatatcataaatagctataacgtacacaaatatgaaaaacttaaactacaatatttttttggataatgaaacagataaaaagaacatcaatacattatttttaaaatagtatattgtagaaatatcctataataaatagttaaatatagttttaattaagtcaccattattcatatacgtacgtacgcataataaaatatatatatttttaagaaaaaaaaggtggtctcattttcatgatctactcatatatcttggaatcataagtagaaacagctagaaaaaaataataaacatgtcattatattatcttagaaaatgattattagctatgttgatcaactgatgagttgactgagaagtagtccactaagaaatgcaatagggtcaacatggaatataatttgaatggaagtttgttagcaagtttgagtcattggtaggtaaactttgctcttggaattttctttagttacccttaaataatatttaaattaaaagaggcgaaagcgaaactaataatgcctgcccttatcacaaatatacgcaattaggcaagttgtttgtgattgtaattacttaattaagataatgtaaagactaaactcgaccatgaaatggtgatcacaacaataaataaaaaagcatattatttacttaatccaacttgtcaactcctcttgatccacaacattttaagtagcccagaataaagtagcaacaagtttctttataaatacaattttaagggtgagagttatttggaatataccatgattaacaaaataatgattattttatgttaggaaaatcaagcaaaatccacacaagttgatccaaaatggaaccttattattgcttttttaagaagctgaagttgaactttttttttatacatatataaattaacgttgttgcaccctttcatctacacataaaggcaaacctgcctaaaattgactaaacacacacataacataacatgcatgttgttcgtatccaaaaatatatgcatcaaatttgtataatattaatttggttgcaacttacaatgtctttgaaacttgattcaaagggtcaaatgatccttattaaaaaaagagaagaaaaagaaagagagtcagtcaaataggtacacacacacaaattaattaacctccttttcttcaaccatgcttgaccaacttatcaagcatcgtcgtccacttggtgaccaaaagccacaacttgaatatttcattttcattaatgtcccttgcaatcggaggcactttagaagttttgagctttttgacttaaacaaacatcaattattgtaattgtacaaaaactactaaatataatgccccctccactgacttgaaatgtcgttttattttatcttttctcaaaccaaaatggttggtttatactttaattagttttagaatagtagttgaaactttatgcatatatagcgagctatctcgggagattaggaaatgtatctgttatttttcaataagaatcaattctatttaatttaatataggtcataatataactcgaaaaacgacacaaaattaggagattgggtttagcatgaataaatacttgtcataagttaaacacaattaaattttaggttaattaacactagctagttaacttactaaatccgaagtcaacacgtttgacacgttaaatgcatagtaataaacaaattaatcaaaaattagccaatgcattgatcaattaataaaactataataggttatctaaattaaaatgacaaatttgaactttttttttatgtgagtaaaacatgtattaactttttattgtgactaaaaattatatttagcaacaaaaaaatttatgttgtgactat

SEQ ID NO: 256581 - DNA, 1546 bp, Cannabis indica
agaagaagaagaagaaaacaatatggtttttaactctttctcttttgaggattatgcatggagagtttaccatgagcgtcttcacctcaaagatcctctcgataggtaccgagttatgacctaagtaataataatatttatgtaatttttacctaataattccaactagtttaaatttttggcagagtacagatacataagtcatttatgtttttctttggttccaattagctagattgattcttggtatgcgttatttgatttatttgttgagaaatgctaaaaggtactatagcagcggtgtttagtattttccaatgtgttaatatcgttattggtttaaataagtatgaagtcccatatagtttaatataataacttttaaggagtattgctagccaagacgacatatctcaaagtactagacaccattaatgcacaataacaatgctctaatttcttcttaatgcattgggggtgatgacataaaactattacaaattccgtgtgttgtgcatttttgctaaatggatgaactacggttctgaagtatatatacactaccaatccacacatcagattaatttttcatatagtatcttacattattcattgtcaagaatatgtaagtttagtaaatttgggcgtaagtcgtataagaattatattatattaaataataaataagactatgtttgaataaagtaatatattgtataattattatgaccaaaattttttatacaacgtaacttgtattgtttaatgcatcacaaatagtttgtataattagcttgtattataatatttacaaaggatacaggatcaatctcaatctttgacccgaatctagggacctagacccgaaccccgaaccccgaacccgaaactcgaacatggacctagacccagacacggactcgaacttgggacccaaataccgacccgcattcggaactggaccctggacccggacccggacccaaacaccacacccggacttggacctggatccagacctcggacccaacccggaccggacctcggacccaggacccaggacccagaccaggacctggaccacaaacccagatcgggctagacaccaaaccccggactcgaacctacacccacacccgacccatagtcggtattgggtcgagtttattgaaaatatattatctttacacaacatattaatacaagtcaataccaaatatagtattgtattaaataatactaatacaatacaatacaatccaacataacataacataataaaatataatataaatacgatgtaccaaacgagccctttaaatcataacttatctacatgtatataaaatacataaaatataacacttaaaagtatttttctctctcgagtttcttacagctcttgagctggaaccatggtgaaaacaagagctagagtgtaggggaagctaaattcggttaagaaaaaagaaaaaaggccctaattcaattttttatgttcaaaaaacaaaatttatggatcctgtccttggaataaatccaattg

SEQ ID NO: 256582 - DNA, 910 bp, Cannabis indica
agagagagagaaggaaggtggaagaagaggaggtgtgcattgtgcaagaccataattcacccgcacgcatggccaattctttatatattattattataaaacactctctcgctttccaataccattgttcagttttacacgaagacgtagtacaaaacacacacatgacacacgagagaaaagaaaaaaacaacattacatatttataaacaaattcatactgtttttttttctgtcactctcacttcacttcttctgtttatataatttttttctttcacatgaacaaagatctacttgcaattccattaatctctttttgcagcttttgacgttctcaaacccaacactacagctctctgttttttttctttctttttcctctccttataataaatctgttctctctgatctgtgacttgactagactgaagtactagagtgagaagtaatctattctgagtatggataagtgggagaaagaaactaacccacgaaggagaagaactccatctttctcttcctctcttcttgacgttatctaccgttcgattgacgaatccaagggtggtgatcatcaccaacaagaggaagaccaagctacaactactactagagtagctgtgaagaaaaagcagaaagaagagaaagagagaaccaatctacgccgagctattatgatagagagttggatcgagaaacagagcgttcaaagttctactctttcaacttcagcttcaacctcttcggctgattcaagctcaggtgctctgtggtcttcctccgaaacagagtcaacccgaaaatacagatccaaaacgaagccgtttcgagtcactactactgatactactggggtatcatcgtattcatcgttctcttctgagcagtcaaagaaaaagatcacatc

SEQ ID NO: 256583 - DNA, 815 bp, Cannabis indica
gtatatatatatatatacacaacaagtcacaagtggttgatcgatgggtcatatgttgaagcatatgcaaggatctttgtttgacatataccaagtttttggctgtgggctactactactactagtactaataactatcaactaaacgacactaaacaaattatattaaatatacataaatatagtaatatttttgttttgaggttttgcatgctacttaaattttaagccatatgaacgaatctaacatgacattgaagatctgatagatattcagtgtctttttcttataaagtaaattaagttttgagtgaaatgtccgaacgggagccacttaaaaccacgtattcaacttaaggcacctttaattttagagaaatactaaaagatattagcgtaaatgttagaggtaataaaataaaatataaatttttattatattattttattcggttgcatattaatagtttagtgggctaccatgaaatctacaacactaaagatgctctaaggatgcatcgttacaccctttttagggtgcattgtaaatataaataagagtggagggagggagtcttatgtagggatgtgtatcagttaatttggtgaggttataacatatttttattaccttattaactcataatttcgttaacaataaataagacatttttatgaattaaatagaaaaatttcaataaagctttcgaagaataataaacacaaaatatttatatgattttgtagttaaatctacataattcacgaatcattcttattttcggtattttgtttacagagtaaaaaaaaaagaa

SEQ ID NO: 256584 - DNA, 1381 bp, Cannabis indica
tcacgtacatgaacatgagaaaaaatttgactaaaaaattatttcgggtgctaaaacagataaggttgcattaatgtatctattttaagagagtgcattgtaaaattttcctatactatttctaatttagtagtatattaaaacaatatattttacatttaaacacactaaactacatttcctcatttaaaaactgccgtgagggagggaagtgaataaaaaaaaaaaaaaggataagggttcaaacacaacactcttaaattattagttgatttgattttagtactgcgtgtggcagtagaaaagatattatatatattgtctaaaatcctcaaattaattatatcaggttataatactcattatatttatatagttttgtcccatgatccatttgagcggttatatgagctatcgatcgattccaagttgtctttggctgctacactttattattataacaaaataaaacaaaaaaaaaaaactacaatataaaatagttaatctaacatataatgcatgttacagcacagttggtgtagacgtaaaagacatttctcaaagtttatccttttggttgttctaccttcatattataattaatttattttaagtaattagagtactttagagctaacgaggagtcattttcatacccctgtgaatgttgtgtagtgatattttaatatatttttacatgaagaaagaggtgtgaaaagaaacttcttttggatgatgagttgaagattaattatatatattaaaaattcttggtcggactgatgagcagagcagtggataaagatgaaacaagtggttaaagaaatgacgtagctagagacttgtcccttggtggaaattgagtcatatgatataaacaataataataataatgttaaactaatcatgatttcatttatatatttactcttttagggggttgagtggagtgactttcatggctacccaacatccctatctgcttatggttacttcaccaagacataaataataactacgtacacaaatatataatattatatataactcagctagtttttttttaatttatttaaataataatgtgcagcaaagagttgaattaattatttgtgtactgcgcactgtgcgcagtgctttcccgcatatgtagatgcaactatgcactttaggcttgcgacaaggtaacagactagattgggccgatatcttggcttatgggctgtctcctaataggtgtatttactataaatatggaaaaataaaaactagtttacatgaatataataagaaaataaaaacttaacatatatgggatatactattttaaattcccatacaaaatattgaaatttcttttatatttttttgggaaatttat

SEQ ID NO: 256585 - DNA, 1089 bp, Cannabis indica
atagttggttagcagtttctcatgtagtcactaaatcaaaatttgtgagacgcaatattaaaatacaccaataacggtattgtggataatgtgcctaaacacagctttgtattgtagatagccatacgaaaccgattgagaataagagcttttttgttccagtcaaagtttcctgagaagaggacaaaagatttatcttcattgcaagtttgacctaaccagacttcatacaaagacaaatatttgattatttccatagcttctttttcgttagaacgggcaaataattgaatagtatcattagcaaacatcaaatgcgaaattggcagggtatttcttgaaattttaataccatggatgagacccctatctttagtccttgcaagaatcacggatagcacttcttggcacaagagaaacaacaagggagaaagaggatctccctgacgaagcccacgatttggacagaactttcgtaaagggctcccattgaggagaactaaatacgtaacagttttcacgcactctaaattaataatactacagttcttctcattgaagtcgtttgccaaaaaaactttatgtaggaagctccgttccatcttatcatatgctttatgcatgtcgagctcaatagccgtcaaacctcctttaccctatttatggcgaatcttatggacaattttttgaatgagaatgaaagattctgcaattcatcttccaggaataaaagcagattgatagagagacaccaaaacattcattaaaggtcttaagcggcttaacaaaatttttgcaattaccttataaaggaaattgcataaacttatgggtttaaattgctcaatcctctttggattcacagactttgggatcaaacaaatgaaggttgaatttaaattttgattcatagattccgtatgaaagaaatttattaccacatcacaaaaattcccgccaacaatgtcccaatacttgccaaaaaaaacaccccaaaagactgtccgaacctatggccttgagaggatgaaggtgtacatttatgcttgatccaccactacaaaagtgacttttctcaacggtttataa

SEQ ID NO: 256586 - DNA, 1524 bp, Cannabis indica
catgaggattaaaatgcttgactaggatggggatgggagaggaatcccccttaattcttcgcccagtactatgtatccctaattctaatgcaagattagaaaaaaattagattataaattacaaacataaattatactaataaacttataaaaaaaaatactattatactaaaaaatacaaacataaattataaaaaataaatcattaataaaaagtaggaatgaaaatttggtagataataagcaggtaatgcagcacccaaccccgtccccgtaacctatttttgccccatccccgccccgcctcacttaatccccgatgggtttgaggtaggggaattcccattggatatggagacccattatgtacccatcattaagattaaaacaataatattaagaaaaaaataatgtaatgtaattcaaaattaaaataaaaaataagatattgattttaaaataaagaaacattctatatattaaaaaaatctttattacacattaagttagggaagattaatagtcaattttgtaaatatagtcaataactttaatatgtaataattagaaaaatatataaaaaatttggaaactatatatctgagtcgaatatagggtaggtagtatcacccctgaccccgctctgaacctgcaaattacacctcacacccgtcctgttacccattaaggcaagtaatccttgccccattcgagggtgggtacctctggggaaaattttcatcactaataaaaaggcttgtacttagatgagataattaatatattgaataataactaatatgtaataatttagtttttatataatttaatatttctaaacatttaaatttttgatataaactttactaattttatattaagagattcaccgccccatttcccatagggaatatatgagaatgaggattaaaatttttaatgggcatggggacgagaggagtactcttcgctaattttccctctcgaatgcatccttaattccaatggaagatcagaaaaaatttaataacttttttttatcaaatttttaatacattttaaatttgattccatgcctattcttattttaattctcatttatattcctatattttcattattttcaatatcgtctaaatattaatttcacataatttaatttaataattattataaaatatcattataacactattaatacttttgttttatgagaaatgctaaagggcaccagtggtgtctagcaccatcctatgtgtcaatagcgctattggtccaactaagtatcaggtcccatataatttaatataatagcttttagaaagtattgctagccaatcgcaacacgacatatcaaaaaggtgctagacaccactgatgcctaatagcaatgctattgttttattttacgacacgaaaaactagtctttttttaagggaaaactaattatttaatcaaggctcttatataatcctcctgttctccttccccaatgttttcgcttgaagaaagttcctcaaaac

SEQ ID NO: 256587 - DNA, 1740 bp, Cannabis indica
gacaagtttagtgaactacatatacacggggacttcaatggcgtttcacggggttctatggtagcccagatccgggagggcggaaagatagttggaagcttttggagcgccttcttccaatgttcaagggagtctgtggtgggaactttaatgaaatgtttagcaattctgaaaagcatggtggtaactccaaaccggactatctcatgtacaacttctgtaaggtcatttctaagtgtgccttgaaggaaatctctaccgaggggggcttgtttacttggtgcaatgggagggctgccaacttagttttcgagaagctggacagagttttttgtaacccggattggcttgaaaaatttcacaagtgttctgtttctcttttagattggagaacttctgaccatagacctctagtattcaaggctcaagtttctaatgttggtcataaggagaacatgccgtggggttctcgcttttattttgagaaggcttgggcggataatgatgagtgtttggaaatcattcaagaggtttggagtaataagtgttcaaggcagcctgtggataatctgaattttcttcttaaagggtgtggagacaagcttcaaagatggaataaacttcaaaaaacaacccttaacagtagactcaaggaactcaaggaaaaaatcaatcggcttgctcaatcttgtaacccatccgattggttggttatgcagaaattagaacatgatcttaattgtgtagatgaaaaaaatgaggtgtattggaaacaaaggagtcgtgctctttggctgaaacatggagatagaaacactaaatttttccactataaagcgtctcaacgaaggaagaaaaatgctatttatgggatgtttgatgatcaccaacagtggcagacttcttttgagaagattacggagatatcgattaactattttcagaatcttttttcaaaatccaaccgaggggttgagttatatgatactttacatggatgtgtcccgaacccaattagatatgaagaaaatagaaagttgcttgagccctttgatgagaatgatgttaagaatgctttatttcaaatccatccattgaaagctcctgggaaagatggcctcccgagtctcttctttcaaaaacattgggatattgtagggcccgatgttaccgaagcttgtcttgaaattttaaatctgaataaggattgccgtagcctaaatgagactctgatttgtcttattctgaaagtaaagcagcccactaaaatgtctgaatttcgccccataagtttgtgtaatgttgtgtataaagtggtggcaaaatgccttgctaaccgaatgaaggggagccttgataatgctatctcttctaatcaaagtgcctttattggtggtcgcctcattcaagataatgctatccttggatttgaaagccttcattgtatgaggaaagggagatttggaaatggaaaaaaaatggctctcaagcttgatatatctaaagcatacgatcgtgtggagtgagacttcttggaagccatgatgacatgtcttggataggaggaggcttggatctcaaaggtaatgaattgtgtcaaatctgtttccttttctattttaattaatggctcaattaaaggcaattttaccccggaaagggggttacaacaaggtgaccccctttctcctttcttatttttattatgctctgaaggtttatcttgtttgttgcatgagg

SEQ ID NO: 256588 - DNA, 994 bp, Cannabis indica
ttaattaattaatttggagaatagcaatgaaaaaaatacttaaattacataattatttttcattaaattttttttatgattgataagaccaacgtaaatgatatagtaaacatggtttcttcttaatttatttcgtatattataaacattgtagttaaaattacaagtctaaccatgcatgcatgtaaatgcaattgtagtagaaaatagttaataagaagagtacaaaaatatcttaaattattagagaaaataaaaataaaaaaagtgagaaaagcacaaaagagattaagaggggaacactagtacaatgtttgaaaaaagatatagaaatgatagactttaaaagatagagtaaaattaaaagagggcaatataaaaaaagtatagagtttaatttgcttcgggttcaatcccaagattccaaaacctgaactcgaaaactcaacccaatgtgcacctctatattcttagaattaatgtttgtatatttaatttcaacaaattgaatttgaagtagattaaggttgttaaaaaccctttgtactacaacactatatgactatgagtatatgtgactcataaccacataagtaaattataataatttttacagttgttatttttgtaataaaaaaagtgcatgagacaataatatacgtaaatcatagttaagaaaaaaaaaagttacatttattttatttttttatttaataattgtagtggtcaaaaattgttctaagcccaacgaaaaaggcccaacgatcgaattacttacgaagtccacttataagtcaaaaacaaggaacccgtaagcccaatggctcacatgggccacgcccaatccatgccttttgggtcatacccatattcgaatgtccaacccacaataaagcttgattttaaagtgtaatgttagggttgacacgtggaggaagaagaacgttaaatttcccaactaacccacgaaaatagcgatcttccctagcatagc

SEQ ID NO: 256589 - DNA, 1512 bp, Cannabis indica
aggtcagaggagaaaatgttaaatagagaccacaattcatttttttattgtgccataatatagaacagagcacagataatgaaattaagtgtaagtttcaaataaatttcattaagcagtgacatagagcacataatagattactttagtctgcattaagccaattaaaaaatgtacaacaaagagaaaacatcacatgaacaaaatctattacatattattcaacaacaaaagtgactcaattcttaaattctaaatagtacaaatggatctgataaaaccataaatggtatcagtcgaaaaccaatgtctagtcaggaactcaagtgaaacgatatatgtatttatttgcaagtgataaaaaaaagaacatgtaactatactcaataagaacaaaatcaagctctggcactgaagattaagcttatactgatggaactatactcagtaatttggtatgtaacatgtaagaattctttaccaagccagaattggagaagttttcttatattatggtcacctatgtagtggtatgataaatcacacagaaaaagaatacataagcaaaggcatacataagaatgccttgaaaaaatgcacataaacgtagagacaacttgagaaaagtttctacacttaaaagaacatgagctttatgctgaaataacttcaatttttcttaccagtctcttgttcacagagcctgattgaggtgcttctttaatatattcctccattgttgacagaaatgagggaggaggctgattagatcatagaagaaatttagttaaagaccatttactgaatgtagattcattaatttgacaggtaagatatagaatgcaatttcaaatgtattggataataaataaataaatgtaaggttttagcacaagaatatattgtgccatgtaaatatcaagtatactttagaaaaaatagaaaagtaagaatattaggcagtaggagtttctttctttttttcttttttcataaagtgacatttgaaatttgaggacttattcctaatccaattctgttgtgtaagttcttagtaaaaacaataataaaacctcaacataaacatactaatctggaaaaaaagtagaacctgtcttagagtaggaaattggaaatttctagctagatccagtcccttgcaatattcataaaaatcagcaagattttcagcctgcacaaggcaagaagttgcataatctagacaatttagacaatgaccaatttagcggatagcttatgtagaaattgtttccatcatatgctgaatttttttccctaataaaaacttcataaattacctgttgaccagctcttttgtaaatatcaagagctttaactgcatcatgtcttgacatatcaaagaactgcaggaaaaatattcaattacatttgatcactggaaacaattgctttcacaaaaaaatatattatatccaaataaaattgacaaggtaacggatgtataagcttaccatatctacaagatttata

SEQ ID NO: 256590 - DNA, 1569 bp, Cannabis indica
ttttattgtaattattgaatacttacccttataaataaaactaaatacatttaatgaagaagtttattttacaaaaatactaaaatagagcatttcatcacaaatttgacactctcttaaaagatgatcatgttgatgtgtagttttgtttttttttttacaacacaaagttggcaataataactcgttatcattatttattttggaacatgacgaagtgatgaggtgaaaaattggattcaatgtaatttgtctagattcaatgaacttatactcgactgaggagtagttgatttttttttggaagtatattaatttaaagctctagatgcttttttgtttacaaaataatacaaaaaattctagatgttttattttttattttattatatttttttagaggaacaaaaataatgcatttcattttgtgttcgtaaattatgttcatgtcgtatgaaggtttaagtattataaaaaaatatcaaactaaaacccaagtcatttattaattatctcgaaaactgaaatccaaacctaacttgtttataatcggctgacctgatcccgtttgtataaaaaatcatgcttaattttagttaattttatcaactcattaaaatgtttataataaatttaacatatttacaatcttgttatggtatatttatgggtaatttgacatgttcttgtcctatttaactaaaaaatataatttacatgtaataaatttaagaatgtatactcttacataggtcattatcgtgttattttcgaattaagtttgtaaactcaaaaataatccaaacccatttaaggcaaacttaaacctatttatttcgtgcgggttttgagtcgtgttattgtgtctgatccagattatcaccctttcatagtctcattaatcaaaatgaataacctcaaacattagaaaggaatcataagcaatccaaaatttaacaatttctaattttagggcatactttagtagcacttaaaaagatgagttagtgaaacataaagatacaggataaagcctagccttttccctatatatcagtcaaatcgtatttatcaaattcctgtttgataaaattacttaaaataccactgcctctgtaggtcacacgacctgtaaaatgctcaaagaatggaactataagcttcggaggcatctgcaaaagggaaaaaggtcagccacataattaaaaaaatatcaaaaaactatggacaaaattattattccttaaaaatcaaaacacatataaaaaatcgacaaaccattgatagtagtcgagaaaatatcgacaatatgtcgatattctatcaataatttgataattatccagaaaatataaagtacaagcaactttatcgacaaacatcaacaaaatgttgatgtcctatcaatattcaataaaggaaatgaaaaaatagataagctaacactatcaattgctcaattgataatagtaaaaaaaaacaagccataggcaaactagaaataatcgataaatcattggtaacagtcgagaaaatactaagaatatgtcgatatcccatcgacaattc

SEQ ID NO: 256591 - DNA, 585 bp, Cannabis indica
gtgtttgatgggttaaccatagcagacagaggagtgaaaacacttgatagatcagaatattccagtttatttttaggaaataaagtcttactattggccacagatggaacaaatgatgttgtgttaagtgcagagggagggaatgaaatcactggatgagtgataacttttttttccacgagattcagcaatgatgtccacatccttaacatgagacggagcatgatgtaaatggtctgcaaccgaacttgaagaaacatgcagatgacagttattaattgcagacaaaggatcggaactttggttaataggaaaactaacatggctgttagtgttgggatcgtgatcaacagccaagtgagaattgtctgccttaatgatgtgctgagaggattcccctgggaacaattgtcttggtgttggttgagtcctattattaatttgtggtagtgcagaggtaagggatttttttgccagtcgagtaatgagaggccaggcctgacccttagcaaagtcagtgcgatagcgatcgtatccagaggttggtagtgcagatcccttcatagtcggaccatattccagttc

SEQ ID NO: 256592 - DNA, 666 bp, Cannabis indica
tctagaattcaaaattaaaaggaaaaaaaaaaaacagaacaaaagtacctaaaacaagcttcttttttctttttcatgaaaaagatgcagaaacaaacctgaaagcatccccatgtgctgagagctgatcttagtttctccagctcagtttctgtagagagcatacttaaatcaatgactggaattggaatcaatggtggagatgaatccacagcaccaaaagcactctctttgacgaagaattccttaggtgggtcatctctattcatgtcaattccttgagatacttcttcatgtggaagaaccaagccagccattgttggagctatgaacttgctgctcatatccaagctctcttacttttatatagatgagatttttacaaagagcgttactgagtttctgagcaattaacttttaacacgtatgagctttcacatagaaagtgtatactgtttttgttttttgcttttcttcaatgaaatttttatgtataaaggtgagatttttatgaagagccttatgggcttgttgaacgattatgagccttcatataacaagagtttgatagctttaacaatgttctactcttctgtgctactgtcatttcattgatgaagactttggcatccttatggaaagcaggtgtgtaaggtttggagtact

SEQ ID NO: 256593 - DNA, 1040 bp, Cannabis indica
aaagtaattatttaactttcaatttatattagatattcaagtgaggattaccaaaaattataattcagattaaatttacattattttttggtaaaagttataatttaatggaaattataattgagatattattaatcaatttagtattaatttacattagttatggccaaaagtccctacaagaaagaagacttttgcttgtgtcggtaaaaatagacacaacctggtagtgattttttgtcggtgcatattaattaccagacacaatgcactagtaactttttgccagtgcatttataaatacgctggcaattcctaccgccaatattttttttttcactaaagatgattttgccggcgtaatttgtaattatggtagcaaaattgctttacaacgtcacatttcttcactggaaaaaagtagctcgccgttattaagtgttggctaaataatcactgaaaagttgtatcagtgtaattatgcatcggtgaaagttggcaagcttttttatttggtgggttatggtttaactagcgcatctgtaatattcagacatctgagcaggattgttgagaagacttccaaccaagatgtagatatgtttatgtcgagcgaagcatgaaatatggcgatttcaaagatcaatcttgttgtttctaggctgcgaaaatgatccctataattatgggattgagtcagagaataaaggcaacacactctaatttcctatttcttgcattgcaattatggaattaatgtagttttttattttactcattataggcaaaagggaaactattcctcatgtattaagtccttataaatagtggcctaacctcactatgagggagatcaagaaaactacttcagaaatacattcaagagagaaaagagcaatctaagagagaaaattactcagagatcaattgtaagagttttcgagagaaagaacacttcattccttctctcaagtcaatacaaacacaagaggattaggctattaccatacttacgatgtcgaacctctttaaaatctggt

SEQ ID NO: 256594 - DNA, 1243 bp, Cannabis indica
cttgagttaatttggaccctaaaaaaaataaaagaataattacataagatactattttttgtaaaatatttatatttttacgttcaaaaagaatattttttttacatttttacagttttccaaaaaataacacgaaaataatataaaatcaacaagaaaactacataaaaataacatgaaaataacatcaaaataacaacaaaaaataacaaacagataacaaaaaatcaacaacaaattaacaagattacaacataaaaagaccgtattttctgtaaataaaataaaaaaaatcgtaaaaatgtttaaaattacatgaaaccgtatttttgtaattttttgttatttttatgtttttgtgaaataatctcaaaaataaatttttaggccctttctataagaataaataaattttttaaaaattattaaaaaaatatatgtatatattaaaaaaaaaattatttagcccctgagatgagtaggccctataagcccaggcctaacccgtcttggagtatctatatgtatacttttagtatagaaaatgaactttatagatagaaaaaaaatactctatttttcacataaagttgatacatttcttattttaacaaaaaattaccacttcattttatatcaatttttatctttttgtctttaagaaactttatccttttatcatctgtttaattatctaataattaacgttttaccaatgatatttttaaatagtactataatccaacaatattaattacttcatctaattaatatatcatatgtacataatataggataatggcttaatataatttagtatcattcatatactatattttaatttttatcatatgattttgtgacaaataggagagacttttcgatgtgacaatgtatataataatgttgtgtgtatatatatatatgtgatatgtatcacatatatgatatatattatttgagaaaggtatgtgtagtgtggcttaattaagtaattattatgtctttaaataatgatacatgcaaggtttgaactttgaattttttgtctagttgatgtatatattgggtttatatattagccacacacaatataattaattatttatataaaagaaatattatgtatataaggatatgattttgtcccgtgatgtaatttcatggaatattttccgtgatacattagatgagtctcagggtacattaaatgagtgttagggtacgtttctactttttaaac

SEQ ID NO: 256595 - DNA, 1083 bp, Cannabis indica
gttctgttggggtcgattgtggaaggcttgtcctagatttattagtactcctgtaacagctgatttaatttaatatgatacaacctttctttacaaaaaaaaaaaaatggattgtgattgtttaactatatttgccatagtaacgtttcaactcttatttacaaacaaaaaaaaaaagaaaagaaaagagagagactactttttcatttaattgaaatttaaaagactatctttttaaataaacaaaatacaaaatatttcacaagttttggctagtgtcatgtaacttgggaccatattcatcatgtgacaaggaaggacaaaaaaaacttatattgtagatacaaacacaatccccatattaattattattggacaactataaccaataaccatcagagatatgttatatgacaccacatatggtgggaagttcctttgggaagaatgatattgttattagtgtaatttaatatctaatcttacttattttattttaataaaaattataaaaaattgctaagaatacatatgaaagtaactatataattattagattagtaattacactatattttaaaatacaatatgtatttagataaagagttataattacatataaatttttaatattttatttaacaaaatagttagtaattacgcagaaaaataatatttttagcagttaatatttaaaataaaaactataattacactcaattcttatagaagccataaaaattggagatataattggaaccgttatctcccattacactgttatagtataattatattgtcatacaaatataccaaaatgtctaattacctctaattatatcaccactttccataaatgtcctaactatttatagtgcatcacctcatagtgatgtgtactctgtgatatcaatatgttctaactaactataagagcatctcctatgatactttatatattttttttagctaaaatagctaaaaagtcaaaataaatagtcatttttattgttgttgctctaagtatgctctttactataattagtatttaaataatttaataattttttataattaaaattt

SEQ ID NO: 256596 - DNA, 1329 bp, Cannabis indica
agtcaagggtgcatcagtacatcagtacatccatcttaagaggatacattgtagaattaccctaaaaaattaataacaaattaacatgaataaaacaaataactagaaaataaaattataaatgagcaatggtattgttcaccctattacaatgagaatagccaacaatattaaccttaaattttgtggttagtggcgccgagtaaatcatttgttaaaaatgaagttttttttttttcattccataatttatgaaattatgaagttataaattccttcttttggatttattaatattaaacaaataaaatttttaagaattattacatagaaaatataaattgacattttatttacaacaatacttttataaggtaaaaacaacatttatactttttatgtgatattaattaccaaaataccacttacacaatgagatgatggttgcagggcggttgctgcgtggttacgcggtagttggatcagacgatggttgctaggtggttggccgaaggttgcatcagacgaaagtttatgggtggttgctggatggttgattgaatgttacatgagacgaaggtttcaatcagaccaaataactatttgcaaaatgtttatgcaattgttgtaaaacattaaaaatcaaaacagcgtttctacgtacgtaactttatctacatgtctctttatgatttaatatgaacaaattcaccattaaaaatttagaaaacaacgaaaatacactaggttatatattttatcatagtattgatgtaattttttttttattattatatttgagttagattgtttgggaactccagttcatttttttgagatctgcctttcatggatctgaaaaattgaagtcagcacattagttttatgcaaattaaactggaattctagttgaattttagttttgtagtagtttttctacactttcttttcaagaattcaaaacagtccctgttttgatcgattgtagccgtcttctcaagtgaaatcgctagaattaatggtggttctttttctggttgaatttttgtttcggttgcgttgggttactacgtaattgcgcgataattgcctaggaagaagcatgaattctgggttgaaggtgtgtgtaagtggtatttatgtaatttttttttatttgggttgtacatttatttatttggccagctaaaaatatttttgtaatattgttactttttttattattaaaactgaaaaaaatccaaatttttatttgataagtcaatatttccctaaaaaaaataaaataaaagaagttattgccatcaatttagttttagtttttttttt

SEQ ID NO: 256597 - DNA, 2279 bp, Cannabis indica
atcaggctgctatagcgctgagatgaactaattaattccttatagttttggttttgtgtttttcgtgctcttttttgagtataacatgtccttttatcattttatttatttatttattttggttgtgagaataatctaacatattccttagaacagtcaattatagacattaaacgtcgaatattgtttttgaagagtatagtatgcagctagccttgtaattaatttctacacatgcgatctttaaatatatacatatatagataatgataaataagatacgattgtgtaaaatgaattgccaaatcaatactctcatcaatatcacaaaaacgtacaccaactaatgaatgaaaaataacatttatataatatagaaacgcatatattttagatatatctgatcaagacctgaacttggtatgacaagcaccttggatgactttagaatttttggagttccaacccgttaacttgatcttgcaaccaacaaaaatctctttcttccaaatctccaagatccaaacatacatccgaataggaatatctaatttcaaactcagagcaataggtaacttatccttattaaaatcttgttcacgtaatttctcctcgtggataaacactcctttggatccatcaaggacgaggcgtacggtggtgctgttaaaatcccctgtttgaaacattgaaggatacgttcctttaccgatgttcttatctctaaaagtcaacgacgttacgctaccttcttgttggtacgagattccagtgttggagtttatgttgtctaccttcacgtacacagcgtaagattgtaaattattattattattattactactactactactactataaataaaatctattaataaaatcattagtagagttttctgattgattcaagagatgcacattttcaaccgagaacttgggaggtttaaggctcaaagaacagaacataaccaacagagttagcccaattacgaggcccaccaccagtaatgttattactatgcatagcaggaataggcatgcacggttggtgctcttacgagctttagaattgtttagaggtttacgtaaacgtagttcggctgttcgggcattctctggaggtggtacacgataaatttgatccttggggatttggattacgtacgtttctgggagccgtgggagtggtggttctgacgaagggtccaattcattattggcgcccgatgactcttcgatattgtcggcagcagcggcggaggaaggcggcacccgcccctccatcgagaaatgggggagcggttgttaatggatgagatggtatgggtttgcgacttatgtcatgtaatttgatggaacagagaaaaaatagttttcatgtgtaaaccattcaattattgataattgggtttacggccaagacagattaggtgttcacatgttgcaaattttcttatgacaacgcatttggtctctgtctatagggagagttttgtttttcctttttttattcttgttattgttttgggttagagatcatgattacacatcctatttttgaacgtatattgttttgttttcatgggttcggcagccaacatcctatttttggatcgctcttttggtttagttggattagtttacagctttcttaattataataataataatactaataataataataataataataataaatattattattatatgttcattctagataaatagtgtgtatatctattctatataaaatttggtgaattcggatcagcatacatgtagttagttaaacctaaatataattaatccacctaagtgtttcaattaataataaatttgttaatattattatttatttttttattaaaaattattttcaaattttgatatttaaaattagttaaattttaaatattattaattttaaaattatgatattaaaaaaactaaaaattaaaataattaaattaacatacgtggattggcacgtaacttctatctaatatatatatatataaatctaattcttaaagttgatcattagctatctatatatgtctattacatgctcaaagtagtgggacgtacttttttctttgaaatgtttacatcaaaaatataaaatgataactttattatttaaataccactacacggtaaactaaacatttataccattcatctttattttattactattttaccacatgcacactcttctcatgcatcaaacatgtgtgtgaccactatcaatcaatcaatcaaccatccat

SEQ ID NO: 256598 - DNA, 1064 bp, Cannabis indica
attaaaattaatctttttgaaatcagtgtaagtgtaatgagattttatcttacgatgtagagttgacacaagaagaaaataataaagatattgaatctacagttttttttttactttgagaaggggattaaaacttgagacctcttatttatgaggataaatgtgaaatccactctcttttgaatgacaaacaagtactactggactgacattatcaattattgacaagatctgttctcgttttgaagggtggaaggcgagattattgtctcaagctgctagagcgacccttatcaaaagtgttataacttctattcccatttatactatgtcagtttttttgctttcgcgcaaaattactgactggatcgattccattttgatgaaattttggtggactgggcactgtaaagagagcatgtatctctctttgaaggcctgggactccatttggaagccttatcctgtggcggcctcggattcaggcattcaaagaatattaatttttgcttactctttaagctcggatggctgttggcttcaggaactttgtctctctggacttcggttattgctgctaagtattgtagacactcgggttttttgtcctccagccttccttctaaggcctctcctgtggctagaggtatttgggcatgccttgaactgcgtttggatcatcggccaggattcctctgttgatatttggtgtcaacaatggaagtgtggggatggatcgattttgaatgagggtgctattaatcctttgatcaaggaaccagttttggtgggtgaccttgttggtgacagtgtctttggatggaactctcaattggttaatatggtttttatccctgaggtggctgatacgatttcctcctcacacaggaatgccctgcctgtcacggacctggcttgttggaaatcttctaatgatggtaatttctctttaaaagctgcttattgtgatcttaataaggatcgatttgaaactaaggatgatgtttgctcccgtatttgaaagatgagaatgcacgaacaattcaagctgtttatctggaaat

SEQ ID NO: 256599 - DNA, 2424 bp, Cannabis indica
atattagatttaggtaaaaaaaatatttagaagaaagtttaagaatagaaagttttttaaaaagattaattgtttagttattagttttagataataaaaaaactaatttggtttacattaattgtttaggtattagtcttaagtattaaaacaaaaataaatttatatttgttttttaggtattagtttgatttttatttaattatttattaaattattatggaaaatatttttttagattattaaattttatttaaactgttattgaaaaaagttattagttatataaatatgtaaatgtaatattttagttttttttttttttttttgtttatattgttgattttttagtcgttgctaaattttgtcgaactcctcctttttcggtaatcttttgagagtgcttcgtactcggaaatatatgtgtatttttatagtttatgcatatttatgtttatataagttgatgatagatataaagattagaatttaatctatgttattgtttaatttgataagtttataaatggaagtcttaagtttttttttttgtaaaaaggcgtttatatcatagattcataaatagttaaacctcgcagtcattacaaaaaaggtttttcgggacagagtcaaccgggatagacccaaaagtctgatgggaaaaagcccacctagccacattatgaacggcaaaattataagacctactaataaatgaaaaacaacaactactaaaagagtgggatgacttagtacaaaatgagatgtagttatctattgcccaacgagaccccttcccattgatggcatcaataaccacactcgagtcactctccactattacatacttcgagccgatatccagagcaaccgtcaccgccaaagagcaggccgccgcttcaccacaaagaacatccgaaaagttctcccgagctgtctgaactctaattactctgccaagatagttccttgccacaaccgcagtacacatactatccaaactcacttttacatcacagttcatcttaatccaatcctgaggaggaggggaccaagcttcctttaaagctggggtaggactatggagcaaggtatcatacatatctgcataagaattacaaatattatcaatacatttgttaaaatcaacaggacaattattatggaccttctcattgcgcaccctccaaatagtatccactacaatagaagcatataagaaaatgtcattgacacgagctcctctatgtttaagatcccagatgaacttgacccagtcccaagctcggattcccgtatcacacaccggataaataccccaaggagatgaacgccagagatgaagcgccacctcacaggatagaaacaagtgttcaatggattcaacacatcttccacaaaggggacaactttgatcctcaatatgaaatctagtaccgaccacagctcttaccgagagggcactggagaggatgcaccaccataagaccttatgtcgctccaaaattttgctattccagagtttgttccaaagctttggggcgacatcacagtggggagctctttccaaggcttgagcaagataggcagacttgcacgagaactgcccatgactctccagagtccatatccatctatcaaccccgacaccagaaggttgccctcctttgagaatagctgtaactgtttcatggtcaaaacagtgatggagcttttgggtatcccactgcccattatctagcacaaggtctaccaccaggttacaggtgggggggcatcccttctcggtttcagacagaaacctttgaaatgaggaatccaggggtccctccagatacttgtagactctccattagcaattaacttgcaagcccctttcctcaatatggaattggctttcacaacactcttccagaaccaagagtcagaacttttgtatctgcaagtgagaaaatctttgcccttgagatactttgctaccagcactttgcaacataaggattggcttccgtttaggatattccacccccattttgataaggaagcttggttcatttctctagttttcctgaagcccatcccgcctaaagatttcagaaggcagagtttatcccaagccttaagatgaagaccatgatttcctttctcgaaaccccaccagaagtcacggaccagtccatcaatccggttgaccattcgattagagagttttgtggtttgcatagcatacattggcagcgacagacccacagattttataagggttgcacgccctgcctttgacaaagtttttgccttccatccttggagctttgctgtgaggttgtctaaaagtaaagttgaaaatcaacactccttttccctagatctgaatagaggtagacccaaatattttacgcaaccctctggataatcaatgcccaa

SEQ ID NO: 256600 - DNA, 641 bp, Cannabis indica
tcatgtaattttattaatagcaatcagttaaaataatattctgtaatctaatagggacatctccttcgttgaaaatacaattaggattaaaattagaaaaaatgaattaactaattggccacctaatttctaaatcgtttgacaaaaaaactaaaataaaatcagataaaaaaagattatagcatcacagttaactttaagaacactaattatatttagtttcttccaccgttcacaagtacacgacagtagatctgtaacagtaggttcattcaaccctttagtttgagcactcaactattgtgtatgtaacattgcaccactaacaactcttttagccacagagaacttgttattcccaaccactagtatcaatttgatggcgaggcatcgaagaataaaaagaagacgaaccaacaacaaaataaaataaaataaaatcatgccacagagacaagactaatcgcagtatgttaattaacaaaagacactcaaaaccatgtcacacagacaagactaatcacaatagcagaatcatagaccttgaccaagcaatgcctaagccaaaaaagggccgatgggcctagccgaagaaaaaaacaaactctggcggctaatgatttaataagagaaaccctagc

SEQ ID NO: 256601 - DNA, 1775 bp, Cannabis indica
tcagtcatcacagtagaaaatcagaaaaatgagagagtgtgactctctatccaatgttgcggctattgcgaaaaaaatgagaaacttcctaagttttgtctatgaaatgagttggagctatgtttcctttatcattcaaatgtagagaccaatttagagcattagatgaaggctaggagcataaggcaccattgaaggactccaaacaatgttctttctcatctatctttatcttttatgtttttaattgaatctttgttgttttagaatgacttttaattgctaattttctttaaaggactattatgtgaactactttaatttattttatggatgaatatagttattcaatttcatcttcttctcttaattcaattttatatactttgttttaactttataattatttgttggccatctataatagttatctatgaattcaaattaaaattttagaggtgagatttgaatatgctttgattgttatggatgtaaattaatttaggacgaaagtacctaggttgttttatgattttgttattttatatgcttaattctatctttgtaattaaacttaacatatgaatataaaaagtttttatgaagattagatttataagtcttactcagattataaacttcttaactcaacttatcaatttaataggaagaagagaatttggataatttcataaaataaaagatagttggagattataataatccttgtaattaatacatattttttttgcccttgattgatttacttttctccaacaatttttattcatcaaatagaactaaaaaattaattaattggtaattgataatcaattcccgtgtgaacgatactctatttatcattatattacttgtttcgatcgtgtatacttgcatactaactttaccgaacaagtctttggctccgttgccagggattgaaaattatcaatatcagtttaattaattttatttttaatttgattatccttttattttgttaatatttttattgtatgagtttgtcttgcaatgtacatcaaaaaaatgttacatcaagattaccttgtgaattttttccaacacaatgagccattctatggtgcttgagggacgtaattaataaattagtagagagatgtcatcataaattttcaaggatctatctcactttattcattcacaattgattgaatgataaaatgaaaagttaggtaagttatggagcaaaggtgactggaaagccattgttaagaagaagtcatgatgacataatgcatttgttaaatgatatagatgattttgactaccactggcattaagaagaagaagaagaagaagaagaggaagaagttcttggttttatgtatagttgagcttaaatgatattttcatctacctttacctaagcctaacgtcataacttgttaaagtgctttcgattttaaagcatttattattgacattagaggagaaggttaaatgatgaaagcacattgaaaaaatggtttgcggaattgttatgtatgagttgcgcatatctggtggagtctaaatattaggattatttgtgattcatattatttaattccctaattgagctttaaggttgaactttgaggcagttgagctaaaaatttgattaaaaattattattatctcaatttttgcactctgacgtggcatcacatgaatggtgacacgtggagtccacttggaacatctgctcaggaagcatagttcgagcaggacgcctcgctggcatgcccagagca

SEQ ID NO: 256602 - DNA, 1893 bp, Cannabis indica
taggtatttataccgcaaattatactttaaaaatcatacattttcttctaactattatttggaaataacctttttatacatatgtccctaaattttttgcaaaaaattttaacaaaatatagtgtgcctaaaaatgctatgttgcaaaaagtttttgaaaaaacattgtacaaatttgcatttttttttcttacaaaatactcttcaatactctagatggttggttgaaaattttcagatagctagtcgaaattttcaaacagcttagacaatcggtcatttagacagattatattttgcaaacaattattaaaaaaaaataattttaaaatagaaatcatttgactaattgactactaaatttcagacaggaccggctctaggttaggcctacactttttgggagttcaaaataaaaaataaaaaaatttattaagtttttatttaaataaaatttaaatgtattataaattttaaatatttatattttatgatatattattcaaaatcattaaaggccggccatttcagactgcatactacaactcacttattttttataaatacaacttacaaaggtattgtattgtgtggtattgagataattttgaggaaactcgtaccatatatttatttattgggtcagtaataaattgagagttcccatactattattaataatggcaccgctataatataataatgtcccaaaagataagtataatctatcccaagaaaaactgtagtaaataaaataagaaagaatggtaggcgaagcatattaaaaataaaatgttgagttatgggcatagagagaagagaagtttggttattcttggaaacttggaaccacgtagtttttccattggtttgacacgtgtgcaatgagtcccctccgagtgagtaaaagacaaggttttgtaacttttggttccatttgttggagggagggagggaccaacaccaacttgtttgttgttactctttctaatgatgcagctttttgtctaaataataaacaaatgctaactagtctaatcacccatgttacagtattgtcctaaaatatttagggttgtttgtattatacttgtattatataatgttatattgaattgtattttatataatatttttatataaaattacatgtggtattaatttttatttacacctaaatatataatattttactatataataaaatttaatattatattatataaaaatatgatatataatccaactcaatataatataatataatacaatacaacctaatacgacgttacaaaccaacctattgttatcgtattatatatagggaaatttgattttctatacttacatatacttaatattttatccctaaactaatacagatcaccattgaaaatatatgaccactttatctaaaatttaaacctctcaaatttcccatactttttttagtgcaaaaacataaaaaaaaaaaaaaaaaaaaattaaatagtagttcgatagggtccgatggtcacttgatgttacttttgtatgtacataaacataaaaaaaaaattggtagcagatctggtccgatggtcacctggtgctattttttttatgtattaaaaaaaaaaaaaaaaaaatagtagcagatatggtccgatgggtcctagtggtctaatgggtggtccgataggtggtccgatgggtccgatatgggatccgatgtgtggtccgatggggggtccgattgtgtaaatggggtgatataaatggggggtattttagggatatcataaaagttatcatatcttacaaatattagttattatttgtttaagaaattttttttacccaaatgtaagcataaaaaatcaaatttctctatatatatatagggaaattact

SEQ ID NO: 256603 - DNA, 517 bp, Cannabis indica
aaaaccaaccacacattttggagatccattattacatatttgtcttttcacttgtctctatactctataatttgttccctttacgtacactctcccccaaaatattttcctataattttttctattttcttatgtatattttctatatgtgttttttcttaatctatttgttttttttttcatttcgtcaatctgcaaatacttaatggtgattggtgagtgaatagtgccccacatccttcaagtctttccgtaatatttatttggaagtttgcttagagaaattccaaaggaaatggaattgtgtaaataatatatttttgacattttaatatatttttattattaaagtgaaaaagaaagtctaacaatttcatcttttcatattttactattactattttatcataaaataaaaaaagttaatcatttaatatttattaaatagtaatataatattattttaataatttttaaaaggcatttattattaaaatatctttatatataaaatgtg

SEQ ID NO: 256604 - DNA, 1680 bp, Cannabis indica
catatattttaatgtttattgtaatattattttctactctgtgttttgcaaaagttatagattggacctttaattttgttaaatgagaaaatagaccttatatttttaaaaatgatacaaatacgaccctaaccttaatttttgacaatttctttaatataatcaacttaaaaacaattctaacacgaacaaatgcagaaaattcaatcaattttttcataacacctctatgtcggattattattaagttttattttttgactaaaaatcagttcagatacctatttgtactattttgaaaaatacaatggtaacaagccttcatagaattattgaataaggagttgttcacttatttggtgatgagggcaactagcacataaccgcttgaatcgttcccaatattcatacaatgactctcctgcaacctgcttgattctacaaatttttttttttctgatgcttccaactttaaagactggaaagtaatgctccaagaatacattcttcatgccattccatttctcaatagtaccaggtagaaaatagtacaaccactctttagttgcatccttcaaggagaaagaaaaagcccgcaacttgacttgttcttcagtcaccgaaagagattttatactagagcagacaatatgaaactcctttaaatgcttgttaggatcttcaccaggcaacccatggaaagacgacaacaagtgaatgaggcctgattttagttcaaaattgacatcgaaaggtggataatggatgcacagtagttgttgatcaagatttggcacgaccaactctttcaacgtcctatttttagccatggtcttatgagaattgactgagtcgtcaaaatttgactcgtgatcaactaataatggctttttgacaggaccaagaggttgaaagagaggattatcagtgatatattttgacgagagagagcaggtttactcatgatattctctcttgagtatcaccttcactagacatgtacatctaaaattgccaaagtgaaaataagttagtaaaacaaaaattaaatatgaataatagaataaaacaatagttcctgacaacaacgccaaaaattttatatgtgtcatataccgtatcaaatttactaataattttttttaatacttccagttatttaaatataacagcaagtaagggtcgatcccacgagtactatacttattaatgacaagaataaagggaggttttaattatgaagatcaaatatcataaattaaaaagcgaatagatgtggtactacgatattcaagaaatagttaaaggttaaccctcaacaatcatctttaattcctgataatgaatgttattttagatttccaattaatatcgatcccgcagataacgccgaagcagtcaattatcataatcttcctattacaagtaatcaaggtgaatcatttattaattaactcttttacctaagcagtaaatttatgaagcgtacaatttatttaagttagataaaactttaaaatcaatggagatagattaatctaggctataaattggtaaaacatataactcatttaacgtaggttctattcttcatcacaattaataaatacattgtaaaatattaaaaattaacagtttatcacagacacttagaacctgtcaggttattttagttattaa

SEQ ID NO: 256605 - DNA, 749 bp, Cannabis indica
ccctaataatgtcaaaccacacttactacatttcattttacaaatactaaaggacgaccacaataaattttcttgtccattcacgtagcaaaaccttttgtgtgtccacattattcggtgtccctattgtaaaagtcacattctttaaaccttttgtggacctattgatcagctatgtttttgtggacctgttaatctatattattttgtcaaagttgttttcggtaagttcattggatttttagaaagaattaccatttaaatcataaattaagctctatccctttgcgatgcacccttctcaccattcattctccgaatctctcatttgagatatcttctacaacctacactatcatcatcacattcacatcttttttcatctattaatcattatattattactaaccgtggtgattaatgtaaaaattaattaaaaataataataaattacttataacttaataataacctaattttattttatttatcaatatattttactttcttataaaatattaatcaagactaattttattttacattaaatttaattattaattatttttattcaattaattattaaataagtttcttttaataaataataattttttgcacttaaattattaaaatatttatattaataaatcttctaataatttaaaattattatacatatgatccttctttaatatttcttagcaaatttgcttctctttttttcccataacataaaatgacttatt

SEQ ID NO: 256606 - DNA, 852 bp, Cannabis indica
catgtcaatactcaaagtgttgcatacctcgacttgacaaatgaccttatcccaaatgatattatgagttgtgtaacaaagtaagtgttataattttttttatttagattatgttaaaaattaattcactaattaacttctttttgatttagtgttgtagacatgtacataatttgaaaaaatatacaaaataaaggtccaataaatatcaactcgtacatgtatcgacagcagccgaatggattataatgtagttattatgttatggagattgtccagagcttcatgatgattgttaaacctgcaagttttttaaaaaatcatgtaaatatgaataactcttctttaatcaatttttattttaattatactttcaatgcagtgcgggatgcatgagcccaatttgtgaatcctttgatattgattgtgtattaggttaccactttttgttatgatacgatataaattttatgattgttgcttaactcttttgcattatgtgattagtttatagtaagtttttatgatacatggaatataagttttaggattgtttctatcaataattttgatattatgtaattaattaatagttagttttatcgtcatcgatcgtagaattaatcactaattataaaaattttatataagttttataatcattattttaactttttttatattatgtatttattgttatataaaacgattctaaaatttggaaatacaagtaggaaaaattacatggaaatcagcaattttctcttacttatatttatgcttcagtttataactgacgcaataggtgaaaaaaagtatttgcagcaagttatgcgtcatttaagaatcgac

SEQ ID NO: 256607 - DNA, 1365 bp, Cannabis indica
agtggatgcaagaagattatgagtgtttaacccaaattttgctaatcttcatgcgagtctatttccagatattgaatcgcttcaaattgacctaatataccccttgccagactaaggttttgacttccagaccagttgcaactgtctaaccaagtgggctcgaaggcttcaggcaaatttttacaatagcaccccgtctcgtcttcacccagcaagtaagtactttaatccctggttgcactttttattatttcttgtttaagatagagatttctagtttgatctagggttgggactatttgcatgttgaatagataagtaggctacgtgaattttttttcaactttgggatggacctgtttgagagacgctttgtcatgaaaagggggttagaaccgtgtggattatttttttttttggctatttagatttcataggtttatgcatgtatatagatttttggggtttgtcaattggaatgcaactttgatgaatttttgttttaggttcttagtttgtcgcttaaagtagctttgtttcccttcatttttgagttgttagcaatggatctgaaccaagattttcacctgagtgacgtggaaaccgttgaagatgcacctactaacctcgtagaagaggtgctcgcggaaagaacctaagtcgaggttcctactaatgtatcccaacaagagatggttctttagactatctaggaggatgaatctatctcagagcatgaaccctccgtgaaggctaaagggaaaaggaagactaagacccctcccactgcccaaattttcaatgaattcatctagaagatggatcagaaggcgaaatatttctattcttttgaaatgttggtggcatatgaaaatggtcctggacttagcaatgttttagggttaatgtggcataggatgtccgccacaggagaatctgtgtccacaaccatggatggattcagtgcttggagctagtccaatatttccaatagagtgcatcttccattgaggccctattttgtaaacattattgccaagattaggatagctcattttcagatgatcccctcatcatacaagcttttggctaggtggtatgttttttgcaagatgaacaatctggaagtgccttccccagaggaaatcttttacttttacagtgtgaaggccaacccaatgaggacaaataagaagaaactgggcttctacaaattggacaagcatgctggttctcattatcccattagccacaacaactgtacccatgacctctgagaactattagttcttttattttaggttcccaataaaaagggtgccctcctccaactgaacttccaattaccaggtattgtcgacgcac

SEQ ID NO: 256608 - DNA, 1088 bp, Cannabis indica
tattaaaaaagttggaaattactttgtatactctactttattttatctgttttaatttttatcttcattttttatatttattaagatatatcaatttttatctattatacccattagattagtgtaaattatgtgctatatagaaggcaatgatatattagacaacccagctagattttaatgaaatatgatatgaaggtatttttgattaatggatacaaaaaggtagtattcttattaaaaaaaaaagtagtattctttaacttattcccttttgtaggactataattggacattataacaaaataattgttgttattcttagtgaaagggaaaaaagagtatttgtttttttgttatgaatttgaagatgctctttatttaattaattattctttgttgtggacaaataaaatttattactaagacaaactacaaggtactaaaatggtataattctatatatgaataaaattttgcattatatgggtaaactttattttgataaattcatgtcatcatattgttgttcattcattcatgaaaatttaggataacgttcaaataatacattggcaagttttttcaatacttgtaaaggttattctattcaaaataataattaatcacgtataggatgatttttgtatccttctttcattaagttttcaaaaaaattgtatcacacgtgtacatattattttagtctgaataaaatccttgtaatcttggcatcttaaatcttcagaacattagtttgtaccaacatgaacgattctccccaaatatgtgttgaattataatgagaagcatgtatgacatcaaataagtccttcatcaagggcatgactactacatagaaatttcaaaagtattgggaaaagactttttagtttttaggcttatgactattccaattttcttggacttaaggtacaaaatggaacattattttcttaaaatttataaaattgatcaatatatgattgaaattgagaagccttgttataacaaactggatgagcataaatctgtgtcttcagattgagagaaagatatcaaaaggataggtattagtattaggactg

SEQ ID NO: 256609 - DNA, 1497 bp, Cannabis indica
tataaagattatatttattcttaaaaaaataataaataattaatgttaggaaggtagtagaattgtaattttaataattaacatacattttatttttctagttctaagttctaataccaaaccaaacaacataaagaagagctacttctctccatctttcactctctatccttcgatcctttccttctatcacactctccatccttctaaccaaacatggcctaaaatgtactaatagagtctataatagaacttcacgatatccaattttacattatgatatctaataaccaaacatggcctaaaatgtatttattaaatatttaattttacattataatagaacttcatcatattatttctcagttaaaaatggaaattcaaaaaattcagctaacacttcaatataaaatacattgtcttagccacaaattaaaaaaaagttattttattatttgttgaaaagattagatattttccatttagatatttacctcagcttggacacctcatcatttgatataccatgagttgtcaattagagatttctagaattccctaaaatcttgggattccttttattcagccaatcattggcaaaggaatattttactgttaggaaaagatactcttccatgtactatatattttccattaacgttcctgtacattcattgaggatttaatacaattaatacaatatacaccagaagttttgccctgttttctctctgtttatttttcttattttttgtccttatttagcttggtatcagaggtaatggcttctccttgtgattcctcagtcaacaacaccagatcacaagctgttgacgctcctcctccagctccagctccggcaccagctgctccaacgcttcctgcacctctactacaacctttggcccccatcaccattcgcttggacagagacaactacccttattggcgttcctaagttgtcccagctgtgcgtgctcacgatctcgacgactttctcttatgaaccagaccatgtgcgccccaatttctcgatgctcctgtcgaacaaaatcccaacatgcagcagcaggtaaatcctctgttcacggtttgggttcgtacaaatcaggccatattaagctagctcttgaacttgatttgagaagccatgcttggccatgttcttcgttgtcgcatctctaatgagttatggtcccttcttgaaactctcttcaccactcaatcctttgcccgtatactacaagtgaggtttcaactttagtccctaaagaaggggtccatgaccattcatgattacattcttaaaatgaaaactttggctgacagtcttaactctgcaggacaagctgttactgatgatgatcttatactttatatattgggaggccttggcccagaatatgaccctgtggtcattaatcttacgtctcgaggagaccaactaactctctttgaagtgcaatttctttatcaaagccaagagatgcgtattga

SEQ ID NO: 256610 - DNA, 1146 bp, Cannabis indica
acatttagtcacaacaaattgaaatttttgtgactaatacttttatctacggacattttagtcacaacacaataatgataatttataattagctacaactattttatctttaatcacaaattttattgtgactaaaagtaaaaaaatttgtagtgtcatttccatcaaacataaattaggtacaacacaaatatagttaaaataaggaacttgtagttgtactgtaaaaataataagccaaaaccaactatacatgtaaattaacaatccaatgtgaccaatctacaatgctatttttgagtcaaaaaatgagaaacatcaatcatttaaatttaaatggccatgcagcatactttaatttctatatacacagtaacaaataataaatactattcggtattaggtatacatcaaatttaagagactcacatattgtgatagatactcttaagtatgtatgtttgaaattatatatattaattcgtatacatatacttatattatattatttattattatttataattaaggaaaaaataattaagcgtgatgtgtttgtctaacagtaacatataataggaggttataaaattttaatacaattataaaaaagagtttgcgaattctcgaaaaatgatgatcataaaattgtgtaattcttttatccacattaccactctaattaaattagtaaaagatattactaattgtttatgagtgaaataattgatagttattgaaaatgtagctgttgtagaattgatttatttatttataaagtgtataaatagttcaaaattaagtaatttggaacactttagagaaaaattgaccaaactaaaaaaattagtaacttgtaaccaattactatttttcttttcatcatatcaattgcatgtattattgaatgttgagagtttttctaacaactcaaaaaacttttcaaatcacctaattaatactaacacgcgcccactttataattggtaataaccaagaagctttatggtagttattcattttcatataagagtaaaaaaatgacttcataagacgacaaaaatcattaagagccttgattaagtttattgtgtattcttgagtattcttgttcttattcttttctcattattttgtaatcttgat

SEQ ID NO: 256611 - DNA, 1422 bp, Cannabis indica
tgaggtctatgaattcaagaatgataatgtattattccaagggaattaaacagattaacaaattgcaattctttagcactgtcagacctaacacctttaatggggtcttttgatattgagttttcacaagttgaatgaaattgggaatggttgtttgtgcttcagacttagttttaataaaatgaaccccaagtatatctagaatgaacatccacaatggtaatcaaatacttatctccctcaatagtaagtgtattgtatggcccccatatgtcaatgtgaattaagtcaaagcattctttagcaatgttgtgattagaagcaaagggtaactttctttgtttaacataatgacaaatagaacaatgaaagttaggacaagaatggttctgaaaattgcaagcttttattcaatgaatgaagtttgatacaagaaggatggcttaatctatagtgccatataatatcattattgatcttagaattagaaactaaagaaaaaaataaaaggactgattttctcattatgcaatttcagatagaaaagtttcccatgcctttcagccatcccaatcagttgggtcctcgaactctcctgaattacacagttatcagaataaaaggtgaatatgcaagtgttagactctagcatggatgaaactgaaatgaaattgatatgaaaatctggcacatataacacattttttagagtaagagtaggtgaaagcacaatggttccaagacatgaaaccttagtagaatgtccattaggtaacttgacagaagaaatggacatatctgcataggtatttttaaacaaggctaaattgtgacaaacatggcgagtagctccagtacctaagacccaagaatgtgaaagttttgaaagtgttttaccagataattgtgacatagatggttggctggtttggacagaattggatggcttaaaacttctttgagacagcatgttcatgagtttttggcactgagcaaaaatttccataatgtcttgttgcacattctggttttgttttgttgttcctccatcttcttgcatactagaaaaatttgcagtgggagattttgtaggtccttgagcatttctattaggaaactttccatgcaatttatgccctggagtttatccatgtaacctgtagcatttttccatgatgtgaccagcaactccacagtttgacacactgttttgggcttatgtggttaaacacgaccaacaaatagccctgaattggatgaagatgctgctggaagtttttcttcttaagtaactaaagtaatttctctttgcctttcttcttgaacaactaaagcaaaggctttattaatgttggggaagggatcttgcatcagaatctgggatcgtgcattactgttggattcatttaatccaattaggag

SEQ ID NO: 256612 - DNA, 1464 bp, Cannabis indica
tagttttttttttattttaaattatttttaattacgatgataatttggatcaataaaaaattggtatgtgacattttattagtatctaacaaatcaattaaaaagaggactataacggatttataaaaaacgtgcatcaggtcttatgtgcatcaaacataagtttttaaggacttatgccacaatttccccttatttcaagacatttgtttaattaagaaagatggtaatccataaagctgtaacatcgagaaatagggtgaataaggttttgtcagtccagagttatgacacacttgtgaattgaatttttttattattatgagtaattaaacagcaactaatggaacagtataaaatccagacatataaaatgcatattcaataacgctaagactgacaggcattgtgaagtgatgaatttggttaactttaactgaccaggttactctaaagtcaccagatagctatctcatggtcactactagaaaaaagtttattcatgtcggtcctcaaatttattttattgaagacggtcgctaataaaattatgtgattgtttaaaattgtcacttataattaggtattcttgactattttaaacagtcgtaagcaatctcgacgatttaatataatcacataaaaatttagcgcagttctttaataggtatccaaaaaaatttataaccatcgtctatactatagccaacggttataaaccgatgcctattgtctatctgtgtcaaaactttcaaaaataatctaaatattgctcatttgcttaaaatattttagatctcattcactcctactctcaaacgctctcatttccatttctatcaaaatagggagacccaaggctctgctccaatctctgctcatccctcctcctccgtccctctcatctccattttgattcgctccattttgatctccactcgtatcgagaccaaaggtgcctccattcgttccacccacgcacgagccacctcaaatggtatgatccccactcgtcatgagagattgaaggctcctcctactctatttatgttgttcttggaattagttttttttttggctttgaattgtgtgtgtgtgtgcaggaactagttaatttgaaatttgagattatgtgtttggattttttaattttatgcatctgtttcatgggtttttatttattttaagtctatgttcgtctggtttgatttggtggatttgagcagatccaagctcgtgtgtagctcatatctaaattttttgttttttttttttgtgtgacggttttaaactgtcggaaatagtggctcactatagttgacgagttattgtcgacggttttaaatagttgatacatgttttcgtcgattgttttcaaccattgcatgttctacctagttttgcaacagtcgaatagatgataattatagagactgacaacgatacattacctgactatttaaa

SEQ ID NO: 256613 - DNA, 725 bp, Cannabis indica
aacatttgtaaatattaacaagttgtaacttttaaggggcatgatcatgaaatgctatgagtttaggagccaaaaatacaaattatttgtttgtttgtataggtaagtgctcacctaaagtgaaagacaaagaaaatggtggcatgatctagtgtgcttgagttcttattaatatgacaaagaagatgtcgcttgattaccatcgccacatgcagggtaggccttgacattttgtgagccataggaaaaataatattttgggccttaattttgaaaaaaaatgtgttaattttcaaaatcaataaaaaaaatatgtgtaattttaaaaggaaaataaatttttaggaccttgggccatgtaagccataggcacaagcctaagccgcctataaatgttagtgcattttgacttctagtttattttttataaccattatcttagttcagtctaatttattttataattttcttagtctggttgtaaggatggccattatacctacgggtacccgaccttatgtaccacgatatacatacgttatgattatccattgttagaatgctaatagtcaaagatcctctatagatgatttacattgaataggaacaaatttactgttgtacccttcaatgtattttagccttaaaacacttagcaacctataaatgatacttcagtaaactaatataattactgaaatgagacctcaatcatttatctctat

SEQ ID NO: 256614 - DNA, 1190 bp, Cannabis indica
actttctagagcttgcactatgcttagaaaaacgtgcttacgcattctaaatcttcttcaaaattgatattctgtatagaccagatgatcagaaaagtagtcatcaaacaaacgttggtgtccttcttcacaactcctgtctatgtgatttctctttcgtccttgccttgtagagctacttctaacaaagaattcattgtaatatttttcatcagaatcgtcaattaattctgaaattaagatatcattcaaactcatattttcgtacggatttggagaatttggtgaatccatgatcaaacttatagtaaattaaatttgataaatataagaagtaggttatatttgataagtataatgttgataaatataagtagattacagtgaaagattgattaaaatgggaactaaaatttgatatttatagatgttaaattgctcaactaatttagaagtaattaaaattctaagtgctcaactaacctaattaaatttacaagtacccaactaacttaataattaaaagttagctgcctacttcctaactaactactgcaatcgtatattaaataaaatatatgaaagaacatcaaaaaaattcattaccaataacttttttttagctctctttaattaccgatgtctctaccactggataattagaactttttttatgccttcacattgatgatattatcaaaagaattcaatctcaaaaaataatatatttttagagcattgaaaaatgaaatcatttcaaaccaaaactcaatcatatttatttatattacattatttaagttaatatatatctattacctattataaaagagtgaagtttggtattgaaatttgggttaaataattttgtcttttgctaattaaatttttatctttttgtttagtttttttttattttatttcaagttttttaagagattatatttgtttttttttcttttttaattatatttggcatgcatgtcatatttgttataaattttaaattaaacttctaaatatgaatgcatagatatgttttctataatgatattattggcattgagtaataataaataataatagatattgttggcaaccattagaaattcttaaatataaaaaattaaagttgcactagtgtaaataaaattaaaaaatattaactaaataaaataataaatattaat

SEQ ID NO: 256615 - DNA, 1821 bp, Cannabis indica
ttttgacgattttttaatttaattatttttttatttcgaaaaccaaaaccaaccaccatgtcaaaccaaaaaaaaaaaaaaaaaaatccaaactgaacacggctaggttaaagtaatttggagggtacgagatttgacaatagtgaatgtttctttttgtatttagtgtgaatcaaaggtgtttggttggagagagaggaaagggttcgcattcgaactagggtttagggcagattacggtaaccaatgactcgcttgagctccgaccgtgttctcagggataacaacactcgtgacccttcaaccattgaagctctcactctcaaccatagagctctctccgatgtaccacgttttgtgttttcatttcttccccactctctctgcaccctccatgtcgtaaattaatcaactttaatctctctgactctctctcatgtgaaatgttcaggtctcgtgcttgaaggacttcaagatcttggagaggcttgacctaaggctcaacaatctcacttctcttgaggtgtgtcattcacttctccatatttgtatgtggtagagtgaaagttatatatgtaagctaatactgaggtgaaaggggtgctttctgtttgatttcaggatttgaagctgtgtacaaatttgagatggctatcggtcacgcagaacaaattggagagcttgaaaggaattgaagcacttactcagctcactgtaagtgtacctaggctttccacttgtaatattcactctaaagttccataataaatttttaagtcatcctttttacaatagtgttgaaataaatggcactgatggatgtggaagtattcatgaatgtttgaacagtttagattgaacagtgttgattaatgccagttcagtgtttctttctggtttggttggttctattgtgagatcttaatatcttctgctttgtgttatttggccgtaagagattttagtacaagtgattctacttgaggaatttttttcttctctgtttttattattgaattatgagttaacaagagtactatggactgtgtttttgctattttacttacctgctgcaacttacatgaggctctattaactcatgttgttgatatgtagacatttaatatactttcttatgccttagaggctagtgagacatttaatggttatggcatgtagatttaccgatattgtaatacgatttaacgatatgtgcacctaaaatatgcccacaaatttaatagacagtaatatctgggtgcacatatcataaacttataatactgcttcatatatcggtgatagaactttcatatatgatttcatttgtagctgagtgggtttatttatttatttttttaatggaacaagcgttcagctgagtggttttaatttgtatgttatttcttgtctttttcattgtttatttttacttttgtggaagcgtttgtaaattgtaatagtatcaaaattccactaaatatattgttctatcatccttatatgttctgagcacaatttttttttgtaatattctctcaacattcatggtctatgtccatgaaacggtaaataagattacttaattttggatttgatgacttggttttctttctgtaaatcaggtcttaaatgcaggcaagaataagcttaagtctatgaatgaggtccgatcaattacatctttacgagcaataattttgaatggtgagcttttaaaagtattaaattctgttttgtaaaggtttataggttttctgttcaagccacatttctcaccaataatttctcatttttttctttgcagataatgaaattagt

SEQ ID NO: 256616 - DNA, 1523 bp, Cannabis indica
tgtctaaaacccgtccccaaaatactaacatactaagttgtgatttctactgagccaaacgccgcgttccaaaataccggacaccggaaatacgaaatataaaaactgctgatgacataattatgcatatctgaattccataaatatcaatgataaattatttaaatagctataaataatttcctgattatcataaataactgctaatttccaaattaactaagcgggctttacaatggagctcctcacaaagtttgaacaagcttcgggataatagatgaatattgctaaatcttctatcttttttatcactaataccttagagataaaatgtgcttgagttcagaaatttgggtgatgtaggttggaggtgatcaaagtttctatttgggtcttcctaatattatgggcaagaataagaatgttactttaggtttcctcaaagataaaatgcatacgtgagtgagttgggacaaaaagtggttctctatgtcaggaaaggaagtccttttgaaatctatcgctcaatctctccctagttacgttatgagtatttttctgctttcgcttaaactttgttctaaaatggagcaaaccatgtgtaagtatttaagtagtaatggcccagtattcattggttgtcgtgggagaagctggtggttcataaggataatggcgggctggggtttcaaagtttacatgattttaatctagctatgttagggaagcaagggtggtggcttttaagtcgttctggtttgcttattggtcgtatattttaagcgcggtattatcctcgtggattgtttttgtctgcggagttaaggtcaaatcctagtgacgtttggagaagtattcttacttctcaagagttattgaaaagctagttccaaatggtgtgttgttgatggttcttctattaactttctgggccaatcgtggcttccgtgtgaggagcaatctaagattacttctttccatcctagtttggagggggcgaaggtcaatcagattacagtgggagggcccaggtgtgggatgatgaaattcttgaagatttgtttaatgctcctgatcgttaatttagagtattgtgttgaatgataatcttaggttggatcattggcattggtttaaagagactttaggggtttattcggtgaagagtgcttacgagcttctccaggtgcttcatggcaagtggtcagaagataataatttgggcctttggacggcattatggaaacttaaaattcctcctaaggttaaaagcttacttatgagggcatgttttgggtatttaccaacactgacctagttaaaaggtcagcatgttgatgtggtcgttatttgcttggtgtgtcaaggtatgaatgaatcaatccttcatattttggttgaatgtcctttagtcaaagcttgtgggttgatggggccatttgcaacctttcagccacagaattttttaggatagttttatcaactggtcatagcatttccgaagactttggtttgtcatgttg

SEQ ID NO: 256617 - DNA, 4950 bp, Cannabis indica
acaatcgtcctcctcctctaaggctcaaaatactttctgctttctcaacaaacaaacaataataatttaattcaaggatttaattcgtctcaagaacacaaataatccgagaaatacaaagaacaataaagagaattaaacgagaaataagagagaaagacatgcactaaggatttacgagttcaaacttagtacaatgctttacatttcagttggaacagtagtcattaatatctttattaaacacaaagttttacaaatttacaaggttaatccagtatgatccttttaaatctttcagcaagtccactgtgttcaagagtctttctcatagacttgtgcctagctattccttcattcttacaaaatacttcaaacttatctgaacaatattctaaaccattatatgttctaagactttttactttctttccaatttgattttcaagcattatttaccatagcttaaacttttcaagtacttcagttttactttttaggataaacaccataattttctcgaataatcatctataattgagagaaagtacctactccatgatcatctaacatttctacagagatcaaatttcttttgagatctagtactaatctcacatcccttagtactttttccatgccatcatgtaatttcaatctcacaattccaatttccaccattttacaagacttgttatatctctcagatatacattcccataattttgaattcttcgaaccaagatttatttggtgtcataacaaaggaacacctagaatccaagatccactcagaatctgaattcccaaaggtaacaagtaaggctccaactgaatcatagccatcactcatgactatactgcatctccttcagatctgtcatcaccaaatattttcctttcagaacaaatgttgggccggcccaactatcaagcccattgcaattagacttgggagaaatatgcagcaaggctcacgatcggctaagggaagaggaacaagttgagatgcagagttcgaaggagccgagtcctgagaatgcaatgtccgactcaagcggaggcaaggaggcgagtaagatacgtgcgcgtggaacccgagcgcgtgtgaagcccaaatggctggaggagttcgttaggcttgaagccatgtgagtggagagtaattgataattttgttgctcatttttattctgctgcatctctctttctgttgtaacttgaattgagcttgggtataaaacccaattgggattgtaagccatttttcaggcatgttttgaatgaattttgcaatttgattgctggagatttgtcttgtctcgaataagactaactatcaactggtgctttcattgtttcttcaggtatgaagaacgaagaactcgcagcgatgatccaagccttggaagcaagcttccagaagcataccgaacagcagttcagccgtatttctgagaaattggaggagcaggtggctcgtttggatggtcgggtggaccaattgcaatcgccgatggccaaaccacaagttgataatgggagttcgagtaacaacggggagcctattcatgggtatcgctctgcgttcaacagtgaagctagagatgcgaacttaattttgaagaccatgagggtgaaagttccgaggttcgacggtaatggtgtggaggattaggtatacaagatgaacaaattttttgagctgcataatgtttcatctgaaatgagacttgccacagtagcatttcacttagagggagctccctcaacatggtatcaatggatggagaagggggccggtttcccagattgggaaacattcttacgagcattacgatctcgattcggcacttcaatctatgaggatcctctcggcaagatagcgaaattggtacagacgggaagcgtggcaaactttcgcgaagaatttgaacaactaatgaccagaatttccggagtgccagagcaatacttcttgaattactttgtttggggattaaagacggagatccgaagagaattattactagccaagcctactgacttagccgatgccatgaccaaagcccagttgtatgaggatcgtcaagaagatattatcaatcggacccgtagtgatggattcaagtccacttggacacccagatcatctccatcgagtactccttttccaggatcagcttcagcacatctaccatccaaatttattacaccaaaccccaatctaccagtgaaatcacccaccccctccttaccagtaaaaaaattgacaccagcagagatcaaggaaaaacgagacaagggcctctgtttcacctgtgatgagaaataccacgtgggacacaaatgcaagaatcgtgtctggattttgtgcgcacaagatgaagaaggcagagaaggtttgagtgcggaagaaaccgattcagatggatctgagggcgtggcggaggaggtgagcttgaatgcgttatcgaatgccagtaatccacgcattttccgcatcatcgccaagcacagagcagaagatttggaagttttaatagacacgggcagcaacaataattttattcaggaggcattggcaactcgcttggctctacctcgttcggaaacgaagaaattcaaagtttatatgggaaacggtaattcactatggtgttcccaaatctgtatgggtgttgagttatcactacagggacacaaattcaaggtggatctgtttgttctaccaatttggggattagatgttgtattgggaatgcagtggctgcaaacgctggggccgtgccttcatgaccataaggcattgaccatggaatttcagtgggaagggaagactgtgaaactggcaggaacttcaagttcagcgactcaacaattgtccttctcccaattgcacactatgatgagggacggggaagtacgtgatatttttatgctgaccactatttcgcaccaggaggttactaaggatttatcccttcaacagattgacaataagttgcctcaagaagctcacggcattttgacagaatttcaagacattttttccgagcctaaatcgttaccaccatataggagttccgaccacagaattttcttacagccgcactctcagcccgtaaatgtcagaccttaccgctacccatatttccaaaaagacatcattgaacgactagtgcccgagatggaagactgtgggttcgtgagaccaagcactagtccgttctcatctccggtactccttgtcaaaaagaaagacgggtcttggcgcttttgtgtggattaccgagccctcaacaacataactatcaaggatcgttttcccattccaacaattgatgagctactagatgaattgggaggtgcaacaatattttcaaagctggatcttcgggctggataccatcaaatccggatggacccaaaagacgttcacaaaacggctttccgaactcatgagggtcactacgagtttttggtcatgccgtttgggctcactaacgcaccatcaacatttcaagcaaccatgaatcgggtatttcaacctttacaacgccattgtgttattgttttctttgatgacattcttgtttacagcaaatcaacgatggaacatattgctcatctatgttcggtgttccaacttttgagagatcatcggttttttgccaaacttagcaagtgtactttcttccaatccacaattgagtacttgggtcatttggtggcggcagatggtgttcgagcggatccatcaaaaatcacagcgatgcttgattggcctcaaccttccacactcaaacagcttcgcggctttcttggcttaacaggatattatcgaagatttgtagctcattatgcctcaattgcagcgcctctcactgagctgctcaagaaagaaaatttcatatggacagaagcagcttgtgcagccttccagcaactgaaacaagtgatgacagttacaccagttctggcacttccagatttctccaagttgtttgtaattgaagtcgatgcgtctaatgtgggaataggcgcagttctcatgcaagaggggcatccagtggcgttttttagcaaaaagttgggtccaaagttcagtggcacatcaacctatttgcgggaattgcgagctatcgtggaggcagttactaagtggcgccaataccttttgggccgcaaatttctcatccgaacagaccataaaagcttgaaagaactacttacccaagttatacagacaccagagcagcaacaattcctccgaaaattaattgggttccactttaccatcgaatataaactgggaaagactaatgcagcagcagacgccttgtctcgtcaacatgaagttccaaattcactgctagcaacagctcaatcaacagccagttttgaatttttggaagaactctgtcaagagaatacaacctgcccagaactccgtcacatacatgagcagctagcttcgggtattttgacagattctctatattcggttcgtgatgggctcttgtaccacaaacaccgccttcgactaggttcccaatattctaatctaaagcagaaagtactcagcgagtttcatgagtctttaatgggaggacatgcgggtccagaacgcacttttctccgtttaagtgcaaactttatgtggccaggtatgcgcaaggaagtacagcagtttgttcgcaattgtattatctgtcagacgatcaaatactctcccacggcaccttatggtttgctccaaccattagaacttccggaacgtgtgtgggaagatttatcaatggatttcatcgttgggttaccaaaatcgggcagtgtatccaacattctggtggtagttgacaggtttaccaagtatgcgcattttagggcattatcgaatcaatacacagcaaccaaggtggcggaattattttccaacatggttat

SEQ ID NO: 256618 - DNA, 715 bp, Cannabis indica
gagtagtgaaggtagtcaagtttggacataattgattgttctttctactaaatgaaaaccagtaattggattcatgatcaactacttgtaatctcactacataagcctttttaaaggggttgtttgtgaccattttgataatgttttgggttattgtccaaaaactcattctctttctttatgtgattccttgtagtgttgagttctattgcattgttgttcttactcgaattttaaattcgaactatcttcactttcaaaaagcttagtaccattttcttgaagaataaacatttgttattgaattcatccacacgcttgtttaagagacagagcttatttgatcaattctatgaatttcaattgttttttaaatgcattaacatctttactctctatacgtgttggaacaagatgatatcttttacttttcttttgtaattctttctttacagagagagagaaagagtgaatgactcagaaaatagaaaggaaaggaagttttttctgttatttgtgttaattgaatcatttaataaaacgacatgtcgtttttatcttttataatcactaagtaaaatgacatgtcatttatttaatttttctttatatatttaatttttttaaatggaaattattaactcttcatactgcttctatcataaaaaatattcatataattttatttttattttttttttctaacgattggaat

SEQ ID NO: 256619 - DNA, 1391 bp, Cannabis indica
tcttttaaaacgtttttcccccttgaggcattcttaggggggcttacctatagtgcaccatattttcaggtcaccttgtacacattctacctgtgtgtccaccaagctagtgtactctgtgtactttggctcataatccttccttggcttctttaaagtttcacttcaatccaggttcttttccacttcttttactacttggaatgacttacattctattttaaaacttccaaatctgaggcttcgactgttcgggagtgatacatccggactgtgctgactccatacctaaaaaaagggtttatgtgggtgtctacacggatgtagaaagtccaaaggtagtcggggtgtattgggttccaagaacaggggcttgtagagcaaacccagaagtggatgtggaaagaaatggttttagatggactttgaaagcctacttgtaagcatcttccaaattaataaagccttctgctcttgcatgaactcaaacaatatatcgacccttcttctttgcatttctccccataataaggagccaactgtgattctagattttagggccacaagcttcatgtcatcagtcaccttaattttagctgctacctccatcatttgttaaatgaagtttttcaggctttctcccaactgctatttaatcttggtgatggatcccatttccatgtcatagtcacgggcagctatgaactgcttctggaagtcagactgtaattccttctaggaatgaattgatccaggagccaacctcctccaccaatcctcatcagacttggtgagggtcagggagaagcacaagcacttggcatcttcacttacgcttgccacttgcatcattttgttgtacttggccaggtggatctttggattcgtgcactcatcatacaactcgatttggggcattttgaagttctcttggagaggagcttttgtgattctcctgacacatggcttcgggtcctcatcctagagtcagtgagggccccactttgcttctagacattagaatattgttccctggtcccactatcttggtttacagaatcactgaggcaatttttccttccccaaggcctaggtacttgcgtaccagtctctttttgcttagcatgacctttcagagcagaagggcgttcgagcctgaaggcatcggtggccttctgcgcctgagtgtgcctattagttggattcacatttttttgaggacgtatgagagttgaaggattctgagggtcacctacttttgcttttccctatcctgtacaggagcaaaggtttcagtattagcaaggttttcccattatttcctctgacacattccactgaggggtcatcatccgaatctccctcatccaaatctccaaacttagcttgga

SEQ ID NO: 256620 - DNA, 1391 bp, Cannabis indica
aatgccatagaaatatgtcaggattcatttttcttagtagtgtttcttaaacccaaaaaaagtattattctgagcttgttgattttggtggataaaagatttttacggatgcttttctttttggctcttaggaatttgtaccttttagtttttgggtagactttaaaaaatttcttgttccccttttttttttcttttcatctcatttataaaaatttaaatttcatatataataactatagcaaaacgaaaatattattttttgctgatttaaaacgaaaacattattgtgtgttcctatattatcaggattcaatatctgtagccagaagccaagagaatggagttgtgattgaggaagtcactagcattattcaggcagttgatgaagtggattctatcaacaggtatatttatgagatattaattttttttttaaccagaagaaatattgatgataacatattattgttatatatgagctaggaagctagacatctcaattgcacaagatttttttggctccttccattgttgaagatgttgctgcaaattgtggaacaggatacactaatagttccggaaactaagtcttcatattcaaccaccagttctatatggaagcagaaggattgtgaagcccccaagagtgagtttagtctatattttgtaacatggtcatcatatttgtaacatttgatattgatattatcaactactcaactaagagtagggaacccacaacaaatatgatattaaatttccttctttgtctggagtatggagttaacattaggttggatttttttgggcattattgtttagtgtttgattagcatttgattatgtttttgatgagaatgaatgatgtgatgaaaactatttattatacatcttatttttgctgcagttggatatagctgcccctgcacttgctgctttgaaggaacctatagtgatagctaaagtagatgcagacaagtttaggcggcttgctacgaaattcgacattgagtataaccttttccccaactccatttgatttattttcattcctctgtgtttcttgttatcgaatgaaaatgttatgttaccatttacataaattagggttctagattcctttggaaggacctaatatgatgttattgcattgatatgtttttttattcataaaagattattgggtatcaactgtattacatcttagtcaagccatttgatatagcactttgaatttgtaactaaacaagtttaaagatttatttgaatactgaagaattttgtctctgtgaccatgatacagtggatttcctactctgaagatctttatgcatggtgtcccaatggactacaatggacctaggaaagcagatttacttgttcgttat

SEQ ID NO: 256621 - DNA, 1183 bp, Cannabis indica
aaaaaggtaacacgatcataccatgcacggagagcttattttaatccatacaatgctttgttgagcttggacacatgattgggaaagtacgggtcgtcaaattcttgaggcttcttgacatatacttcctctcaaattacaccattgagaaacgcatccttgacatccatcaattatagtttaatcttcagtaaacacgcaataataagtagtagtcttagtgattctaatcgagccactgttgtaaaagtctcatcaaaatcaattccctccacttgaagaaccataatccagacaccaagtcttctaatgtttcccatttcatcttgcattgcagccaaccaaaattcatccaatagggcatcacgcttttgggctcaatttgagataggtagcatgcaaatgccaacgaattctgaagttttctcctggttaccatggtgtcattcatatttcaaatgacaacgactagaggatgagccttttgaacctaggagggtggaccatttttgtatggtttagcatgttgtatttctttggccacagcattgctgacttctggttcaccattttgaccactggtgtctgcttctatttcatttgaggatgtaggtttagagttgagagacccagtaggagttttaggatatacttgaaggattttagtagtaattggtccaggtccaaacaaaactagggcatcatcatcagcagtcgattcttctatcatttccaaatcatcaacttcacgttcattgattttgttactgagagagttcttttgttgaaaatcctgtaagctcgattgttgatagagtagccaagaaatatcccctcatcacttcaaggatcaaacttccctaagtgatctcgttcattaagaatatagcaaatgcatccaaaaatgtgcatatgacttacctttgatggccttcctttccataactcatatgccgactgagatgttccagtacaaagatgaactcgattgcaaatgtagcaggcagtattgactgcttctccccggaaacgcttagacatgtccttggcttccagcatcaccccagccatctcttgtagtgttttgtttttcctctaaacctgtaatgaccactctagtaatgtggattagaaaaggcaattagcactaatttttattattttattactttattattatttg

SEQ ID NO: 256622 - DNA, 1499 bp, Cannabis indica
aaaaaaaaaaaaaaaaaaagtcaccattcatgtgagtgtggtagtattgctagtggcaccccttttcattatgttccctttttatgatttttattttacttatcaagagaaaaaaattataaatatgtaaatttgttaaagcaatgtatagtgttagactcacttagagatgagccagcccacttaccaatatttatatatttattatatacgatctgcaagtatatatttgatggcatgtgttgttttgtggtaatttattttgattttttccttccaaccgttaaatgaatctcactaagaaccaaaccatcaataactggatatagctgtctcaaagatctataatattccatcatataatatgcatataaaaattataaccatcataaatctaactctccaccatcataaatctaactctccaaattaggtcaatcacttaactttatttttatttttatttttgtaaggatttccaataagatcaaattgcttagtatatccttttatatccttctggaaatcagtgggaggttgcagccttattaagaaacatgtatatcaagatctctctagcaggatgttgatcccgtctttgatcttctgtgcccatttcagtttgtagttcagtggtgttttggactttgtttttgtctaaatcttgctatctctctcattgcatttaatttagtctcattttctctgtttttcatttattgcttactaggcaatgaatctgcgcttcgcgcggtttttgtaataactaaaaaatgaatgtaaattgtatacaataaaaaaaaagaaaaatttattttaataaattgtatgactgcaaaattttcatgggagtcttgttttctggtactcatcacgaaagaactccacagataagcaattttgacctagagtaattttaagatgggtgacctcctaggaagttttcatgggaagcgtgcgagtgaggacaaagcatgctggaaacactcgtgctggtttgtagggctaatcgtcagtccatgaaccagtcagagtggcgtacccagttatgaaagccataaacccatgggggaaggcccaataaaggcttgaagcggggacattacagacaatatgtcaacctgggtgctgggtgctgggtgcctggggcacctggtgctccgagtgctcaaaaatgaaagttctccgaatatgattctaatgccttaaatatgttcatgacatgtctagttcatgtccaagtataaaatttgacccatttgcactaagacggtcccaaaaactgaaaccctagttgggttgtcaacgtgggtgcttagttgattttgtggtgttattttgtgaattttgaggtcccgagccatcaactttaatgctccatatctttatggtacaaaatactaaaagatagtgagttagaaataacttggcaggatccaaacacccatacagagttctcagagttaacttaggcgtagggttagggacccctcccaagt

SEQ ID NO: 256623 - DNA, 1620 bp, Cannabis indica
cattcttattccattacattaccgttactattacattacatcaaacaccacatttcggtattttaaatacttgaattaatgcaccaaattcttatttatcaacctttctcataaaattatggcatctattagcatagacaaagtcaccagtttgagacccttcaaggctctttgaataggagaatccagtaccaactggtgcatctagaaatattatactggccacctatgaagtctcatcacaattgttacacaaggatcagatcaattatatttatatttatatacatacacttatataataaatatgcctacctttgtccatgagtacggattcagttccaatgctggtaaacttccattgtactcaacattcttaaactttaaagggcctacacaagaaaaaacaaaatccgaagcattattctaaccaaaaaattatgtaagtgtaatagttaaatttgaaagaacctatctcaaaggcaagtccagagagaacagagcaaccagggcctccactcaaccagagcataagaggattatctcttggatttctctcagattcaataaagtaataaaaataattaacatcttctttttcatctactctaatatatctgcaaacgaagaagataagaaactaaggtgagctgtttacgtaccaaggacccaacttaacttagtgtgcgaatcataaatgtcaagtcaaaacttacccagtttgaagtttgaagggaagagaaccagaaaatcctgggagggttttgacaatgttggtggaaggaatcactggatttgagtaaaacaacaacaaaataacctgaagataatgcaccttcaacattttttcacagtaccatgacaataattagtctctaactgtattcaaagtcgacccttttattttagagacgcattgggataagcaaagtattattttacggacataaattaaaccacgtggtctcttacaaaatattattttagagaagtattgggataaccaatgtataataatcggtcattgttgaaagagcatttttattagggagcagtgctgcatggcatcttctcgatatgtcacgtgataattgactagcaatacttattagttattatattaaattatatagaacctcatacttaattagactaataacaatattaacatataggagagtgctaagcactagctactagtaccctttaatatttctcttgttcaaaatatatatgtttagaggccagtcatcactctcactcataaattatatatagaatatattaatataggctaattagtaattttttcttcccgaattttgaacatttttgtccgttagaaattttccctgaactattgagtttattaaatttaaggacttttatctaatttcattcaattttactgtttcagtgattttttatgtattaaaccatgctacccagactttgatatctaccaaatcatgccccccaaacttcgatatgtactaaatcatgcctcttgaactttcatctaggggtgttcataaaatagtcgatccaatccaatccgcacgatccaatccaatccaatccgtaaagtgcggatatccgcacttgtgcgcattagattgg

SEQ ID NO: 256624 - DNA, 1451 bp, Cannabis indica
gaaaaaaatgcattcccatcattactcaaatattcaactaatacatttttttcaaccaccaaaaaaagtttctttgagtttcggcaaaaataaaataaaatgaaactcatgaaaatgtttatttatttttttgaatgtggggtagagtacgttggcaatacatgaaatgtccatgagtgactataaattggtggttcctctttttttaattctatatttactctattttaatatttttttcaatcgggagaaacatttattaatggaattaaaagcttgataaaagggtatgcagcttaatgaaaaagactatatatttctaaataaatatgtatttacgtagaaaaaaagttgaaaaaagtttcgtaagtgggtgtgttttattatgtcaattgtcaaatagtggatactccatataagcatttaatttgaagaactatcacccgaaaaacaaaataaaagttagttcattttaatttaattagcagaaaagaaattaaagctttttaatttatttcaatactgttgttatattatatgtacgaatctcaccaaacaagaatgacttgcattacactaaaaccaataattataaactaaaagctaaaagctttataccatccattactactcttccctcaaaattttatagtgcaacaaatgaaaactcaacgcaaataaacagagctcaaacccccaccacccatactggaccaattcttcttcatcctccgccatgcctcaccgccgtgatcgttcttattcctctccggttctctcccctccggttctcatcattctcttacccattttaacatttgtgtttctcttctttgctattcctcccgttgtttcttttacttctcacatatttcatccattcactataaagaagagttgggattctttaaacatattccttgttctgtttgcgattctttgcggaatcttcgctaagagaaacgacgacgattcaactggtgctactgctactactaccgaaaacggtgtcgttttcactccgaatgtttcggaccacgttgggaatgcgaggattggtcctccaattagtgtctcggaatccgtttcccaagatggtttggattttctgatcaaatgcaagcaaaaatagtattaataatcgtatggcgatcaaattaatcggacgccgcctggttctgcaacacttcggttgaggaggaagtagtagctcgtatccagatctaagacaagaatcggtttgggatgataatagagacgatcagaaatttcagttccgattctttgatgatttggagatcaagaagtaccgccaaacgatgtcgtttgatcatcgacatcgatcaaggcaacgaagcaaaagttgaagaagatgaaattaaagaagttccagttgatacttttgttgttcgtccttctacgccccctaagtcgccggctcctcctcctcc

SEQ ID NO: 256625 - DNA, 1517 bp, Cannabis indica
gacggacttgtttctcccaagctgcgccgccgactccggtgccgtaaaaagcggaggataagaattattgcgagtgtgtagacggctgtggtgatcggtggttgaatcggaagttaacggtgggtaatttagagtgaagaagaggattaaaacgagagcgattagtaaagttgctctgaagagaagtttcgatgatgcggtgagaagctttgtactgtttactcttcgtaagtagctgttgtagcgttcgagcttcatggttttgcttgtgtccggcggagacgccattaatggcggcgatttaagctttttttttttgtatgacttaatatatatatttatagatttttttttttctttttttaattttttggctcggaaagatatgggtttagtgttttttttagtagagagaaagaagagagagagaggggagttttgagatggagccctgaagtttgtgaagagtgtagagagattaatataaagaaaaaatttaagtgaagagaaatttaagagagagaaaaatgttggtgttggttggaaaccactttcttttatttttattatttatttatttatttttgtttctcattgttattagagctgtgtactagtgttaattattttctgtctaataattaattagctatatattttataaattatatttttaaattatgtgtaattgaatatttaaaaaaaattattaaaaagtttataatttattaatatgtcatttataaaaagtattgaacataattagtgtttaacagtaatattcgatacttaattatactaataaaataattataatattttttaataattttctttattattattattattattaagtcactttctcaatcaaacagatggaaagtgagactgaggtgaaaaaatattattattattattattatttagaaaataaaaatgttataagtaagtattaaatttatatatttttattttataggtattgtaaaaaaattactagttattctaataaattgttgttagacattgtgcataagaccaattcattaaaacatcaagaccaaatttaattggataaatctaaagagaaaaaattgtaatagacaatatcattaagaatctcttgttaaaataataatacaatctgagtaaccagactaccaaacatactgatcatttaaaaaaagtaaaaacttagctaaagtgtgtatcatactattagcagtgttagaataacacaaaaacgaaatatcaataaaataattacaatgtacaatgatatctctaacaatgtaacctagtaggagcagacttacatagaagtgatgggagacagcgctcccttaaaaaaatcaagaaaaacgtaagtattttagttagttaaaatatatatatttgtaataaaaaatgatatttatagacattgtaatctagataaaactgatcaattaaactgtaaaaaataagaggtaagttgaaaaatacctcttttattcatcaattaatcaaattta

SEQ ID NO: 256626 - DNA, 808 bp, Cannabis indica
aaatagactaaaaaattcttctggatgtcgaaacaagtcaagggtgtatcagtacatcccttttaaggaggtgcattgtagaatcacccaatcttattttttctaataaaattttcttaaaattataaaaagcagagattatctgatttaatttggtttaattaattaatagaatgttttttttttgtgcaaggtaatagtaaattaaggaaaatacgttaggagaaaaagaaaaagacgtgttttttaggagatgacgatgttatattattaagaattttttgcagttaaatcctctcaagtattaactttttaagtttaaattttggtggtaaaatcctctaaattgctgaattattaacaaattaaaggtgacatctattatttacagttaactactaacatagactgcttatatgtacatttttgtacacctaacacgtgtatattggtacacataatattattattaaaaaattataaaagaatatttcaaaatttataatattttttatttttttaacattctatttttatttttataattttatttaattttaaaataataatatgaggtgtactaatataaatgtgccacgtatataagagtgtacacataaacagtctatagtgatagttaattagatgacactttaaatttgctataagtttagtagtttgaaaggttttatcgttaaaatttcaacttagagaattaagtgtaagtaaaactataattgagagggtttaaccgctaacaactctattataaaattaaaacatggttatacataataataataataat

SEQ ID NO: 256627 - DNA, 510 bp, Cannabis indica
aaatataatcaattattgattttttgttatttcgatccatttacccaataatgtgtattatgaataaaatattttatattctcccatttatttagcatttaaatttactatttaaacataacatttttcattacataataagcacatgaattatagcagtagatcctcattatatgacgattattatcttacatgtattaattacgatatatttattacataagaatgtattttatgtgggaatgtatttaagtaaataaacactaaactttatgtttattcttgtcctttaaaattttctctaataaaaattaagatgtgcataaatatatgataacatcaaaatatataagaattttactaataatcccatgttgtctacataatttttgaatttataaggtatcaatccttttgtcataggatcaacaatcattaattcattgttaatgtgttgaatgaccactttattttcttaacacattctctaatagctaagtacttaatgtc

SEQ ID NO: 256628 - DNA, 1356 bp, Cannabis indica
aaaaggtctcctaccccatttttcactaaaataagaagaatgtccggagtagaatttgtcttcgaagagcagaaacatgtgaaccaggtcgtatgtcaacctaagcgcaaggcctagcacctatgtcaacctgggcgttggggccctattttggctcccaaatgatctcgtttgcttcccaagatcgtttgtatctttgttatttctagaaatgaaaaggatgcctagaacactttttggaaaaatactttgaactagcccaggttgacaaaatgtcaacctagctaggtgctgggaccaagcactaggtcaacctgggcactaggtcctaatcttgatcaccagatgctttcgtttgattctcaaaaatacttgtatcttgattgttggtgaaaacgaagaatatgcctggaaaatttcttaggtgaaatgtttggaaatggctatgtcaacctgggcgttaggcctaacaccaagtcaacttgggcgttgggtcccagtccacttccagaagactctgtttgtttctcataagcacatgtgtcttaattgctgatgaaaacggggaatatgtctgaactactgttggaagtggcttaggttaacaatatgtcaacttgggcgatgggtcctagttttagcctccaggtcgatctctttcttccccaaaagaacttttttcctcattttggatgaagtcaaagaaaattctcgagatactcttttagtatggtggttagaagcgccccaagttgacagcatgtcaatctgggcgctagttgcatcaccaggtagcccatgcactaggtgcctggatattccaaataggaaatgttccaattctgactccggtgcctctaatatgtgcatttttagtgtatattttaatttattcctgataattttgttgtatgtatgtgttattttgtagatgtagatacatatattacccattatatcatatactctattttgaaattataagatttattatttctattattaatgtaactatttatttaacttctaaaaaattaattatcattttaactgtcactaactcaaaaatgaaaagaataaaattgaatgtatgaagttgtaacaacaaaaaaataatgtaagtacagtagtagtataaaatgataaactaattaagttgtcaaaattaaaccgaaaaaaaaaaaattgtaaatacaattacatgtagaggagttgataatattttgcatattgtaacattgatgtcttgttatttttttattattttatagttattttactgttattgttaaagtattttatgttattttttttattttattaaaatttctagtatttttataattttaatatttt

SEQ ID NO: 256629 - DNA, 565 bp, Cannabis indica
ttttctatctgcaaactactacaatctacaagatatagatattttcataaaatatagtgataactatttaataataataccatccaataataaatcttaaatttagccttaaattaatacaaaaataattgaattttaacgttaaatattttttatttcaatcataatattaaaaattacactaaaattatactttttattattatattattatattaaattattattaactctaaaataattaaattttaaagacacaataaataatcttatatataggataaattttgacttattttttctttctcacccctcatattaataattacatctaaaaaaaaaacaactctctctctaactcactcatctctctcctctctcttactatttttttttaaaaaaaaaacctattaacgaccatgatggccaccgaagattctactaaagccacgaaccacgaacaatgaccgtacgaaacttgttgcacttgcaataatggtaagtgttttacacaatgattttttaaatattttgaagagtatgttgttgggtttttttttttttt

SEQ ID NO: 256630 - DNA, 2489 bp, Cannabis indica
ttttttttctttcttctttttggaatctctaaggtgaagaaccccataagacctctgcaacaatggtggcagcttcagcatcagaagcagaggcttctctcactctaaccaaaatcaattgcttcagagctctcttctctctctgtctcagaccttctcctacctctagctgaacccaaaacctagctacacagctcgcaaatggatgactcgccataaacctcttctctctactattctctcttatcctactctgaattctgccaacgctcacttctctcttttcattctcattttcactttcattatcttcttcgtccatttcgaaccgacccaaatcgattaaatccccacccagctccgatctctgcaactccaccagttttcttatcaggtcttgctcgagcatggcgtcaatggcttccttgcgtccaaagtaaccgatttcgaggacgcagtcgaaggccaggactcgaatttgcaggtctgggctgctcaggaagctaatgattttggggatttggccgttggattcgatctcatcgaccaaaggggacttgattgaacgaatcagagaacagagtactccgatcgagttagcggacgccattgttgtgatcagagctttgatcgtctgacccatcaacacttggccaacaaacacgtctttgttgaatcgaatcagagccgagatggccatggcggagtgttcccgaatcgtcatggatacggaaatgttagggttacagagaaccgattcaagagaagagaacagtttcgatttcagtatcaaatcctgtaactcgcgattgaacccttgagagactcggtcctcgaactgagtcaagagcttcactaactcgtcctcgttgtgctgagacggttctcgtagacatcggcttagacactcaacgctctctctgtcaatccaggactggatttccgactcgattgcggcggcgactcgggacagggagtgagtcgtgagtcggcgagttacgaacgaggcaagtccgtggcgagcacgggagctttggagggactggaccagagctttgaggtgagagaggtgttttgatagagtagagagatttgggtccttggaaaggatgttgtcggattcggtctcgagctcaagcagaggtttaatggaggacgagttggaatcgtccgagtcaagactcggattgttttgtaagtcgtgggaagcttgttttagagcttcgaggactttcaagactgatgggggctcttgtttttgcgagtcctccatggatgttaagctcttcttcttcttctacacagaattttatcacagatgttttggtcttgactcttctctctccaaaatctttctctctcaacaaccagtcatgtttttatttatttgatttaattttaataatattattttcgtaagtagaactaccaaacacgtttgttaataataataagctttctttttatttatttattagtattatttttggctattaataagacagccacttggattctgctcttttaatattattatatataatgatagaattttggtttttcatgtgctttctagtctttcctatctttcattctgtcttattttatatattaaaacaaacaaaaatgaaacgggtaaatcatgacatgatgatgcttttgaagattttaaaagggttttaaggagaatatggtggaactttcaaaaatcaattaataaagagggctaaaccctctcaacaattttgacggtaaaatcctttaaattagtgatttagtaataaatttaagatgtcatttggttaactatcattatgggctgtttatgtgaacattcttgtacacataatatgtaacgccctgactctcagggacgccacgtgtgtgcttttataaacttattattattactaatctataaatttttagaaaaagtgtggtttaattaaaacctttaattaaattcaacataaagactttcattttaaatactgttgtaatatggggatcccctgctaagaaaattcttttacaactaattacaaatccatttgaacaagaataggttatacatcaaatcatagaaaagggttgatcctgcttcacgaaagccaagacaacacggttgatatgtacactgctggaagacctctgacccatggccgaacagaactgctaatcttcttacctgcaccatgaagtacccgtgagtcacagtgactcagcaagaaaagctactagataaagaaaatcatggaaaataatagcaaattatagtaccacagattatacataccaagagatcattctctttcaacgtacatatacaattcaacgtctatacaggcaaacttgttacaaaattaagagtatttatagttatacataatcaataacctcagtgtttcataaaacaccctaatcatatagtattgtaaacacttactttcaatgcttcataaagcactccagttcacacattaacatat

SEQ ID NO: 256631 - DNA, 2354 bp, Cannabis indica
catagtgtgtaagactgtgaagaattcaaacaattgaaggagtgtcgggctcagatcttgattatactgtccaacagaaaggaataagggttagaaatctaagtagaaggagtcatttaattctgctgcaaccaatgtaaggtttctcatactttttatgtggttattttcatcgttttagaaattcatatttaggatgttaaaaacatacttgttagtaaatctaggtcatggtaaaatatattccaacaaaatctacaactaaaaagtactgtgcttgaagacactaacattattttccccttttaggttgacatgtagttggattttccccattgacatcaacgtgtccccattaaagccttacagctggattcgacaaggtgataggttttctttagtaagcccaatcgcttttgttgaccttaagtttggccaactgcaagtggagtcgtatttattactaaaatcaccacgcgtacataattagaataagcaaacaaaaaggacacaatatttttataaaggttcaacccctttagttagcgggtaatgacctacgcccctttcggttatattgatatgagaggtaatacaacttagatcacaattgttatgagttctagagtggctctctttatattacaatagtgagaataagagacaaatctaaggtagatgagatgagggagacttagtctcttctaaactgcaaatattacaattgttgtatagcagtctcacagacttgaaattaagatcaactaaacacctaaacgaaataaaatcttcggccaacgattcctgactagaataactaatcccaacttcgcttttgacatttctatatcttcggaatacgatttttagaagaggaaccactctcaaaggttggcttttaatgaaccacgataatcaatagattcatccaaaaataagccatccagtttcaaagacttcctttcttcaacagaaggatgaatgttctccaacattaactggaaaaaaagttgcaaaagttataataaaaaacaacaaaaacataaataaaaaagattaacagaatgagaaaaaacaataataaaatagtaaagaaactaaaaatcacctactttaacggcaaatcaaatatcttgccttacaaatccctaaaagttagatttttggccccgacattattggtccaattgagaaatcttagaatcctagatgcaactcttttgcaaaaaaaatttatcttcgtgggataacattcataaaacaatacaataaacacccacggacaccccaaagcgctataccaacaatcataagactgaactctctttttctcttatatttcttattttttttttatcttgataccatgttcaactatacccttaaatgaatcaattatcaactcaaatgactccctaccccaacaatattcatcccaacgaccgctattaatgagatctaattctgacctaacaacttccttctcaagagtgttacttagaaggcatcaatgtatgaaataaagaacggtcaatttcaaacaaagagactcatcatggccccacctagtgcccaaaaaagcatcttcaatagacttatagtcaatggttttggttcctggaaaatatacatcaactaatcggtttgattcctgggtaaataacaatttattgtaataaacattccagacatgaaatcaaataaaatgctttagcgttaaaccgtatacaacgaccagcaacctttcccaaaagtctgtcggattggccaggttaacctccctcaatagaaggctgcatttaaataagaaagataaaataataaatggacaaacaaaagtttcaaaactgtaatacacctaaaaacaaccttgaaaaaatagtcacacagaggaaaaagtaaaaaaattacataagcataaacatagatgaaaataaaacttaatatgaacaacaaaatatataaaaacacatgacatacataaatatgaaaagtactataccgacccaattaagctctttcaatatcaattactaggatagttcttatatttactccttgatgttatatatatatatggataccacagagaacatatatgataaaagaagtgaaaaatatacagataaatatgatcaatacttaaaaatgttatctaataattaatagcgtttaaactataaagcaactataaaaaaattataaagaaacaggcacacagatcaaatgaacaaaataaaatcaaacacaaaaatacatttgaaaatcaaaacaaaaataaaaacaacaaaaaatataacaaaatttaaaactggaaaaataaaaaggaagaacataataaactaaacataaat

SEQ ID NO: 256632 - DNA, 1104 bp, Cannabis indica
ttaaagcaaaaatagaactctccattttcataattaaaccctttaattaattttgttaccatattagtcttggtaggaactcagaatcaagacaattataagtttagaaatctcagtccacctaattttttttcagcagcatgtatgtacttcatgtcctgcacaaaagtatattgttaaagtttcattattttctatagaatgggattgcatatcaatgttaatgaaacaacccccacccaaaaaaaaaaataaaaccagtataaacatgtttataaaaatcctacacctacaaataatagcctcgtatcaatttagtatcttaacaatataattatataaaaagatagccaaacaataatgattgcattatagctaacctcaattaaattctataaattcgaataattctcaatcagagatggatatataccattgatttcttgatgagtttaacagtttgtttctatagttcgaaacgagtcacaatattgaaaaattttagcttggtcaatgacagtggctcgcgactgtgctgccctcaagagtcgtgaatggtgcaacgaggtactggctttgaagttcaaaccatggggagtattatggtggtagtggtttatgaaaggctgaaaaatcagatcttggctaacaagccatggaatctcacatataaataaatatatatatgtgtgtgtatatataggttagctacgaaaggcttgaacaatcaaatattagctaccaagccatgaaatctcacaaacataaacaaattaataatcttttctcctaaattcaaaaccagttgatgacagagcatagaaatgcacggaaacgaaataaataaattaataaaatcatctcaaatagatgtcgaagtaacgaacaaatttatatcccaaaaaaattaaatccaaattccaataaaataagtaacttttaaaacataacaaaatccaaacaatctgaaacaaggagaatgaaatcagtaaagataataacaaataatctgaaaaagaagaattggtaagggtgcttactgtaatagttcatccactgtacttttttgggaggtaccatgcaaaaacacaaacataaaacatg

SEQ ID NO: 256633 - DNA, 2091 bp, Cannabis indica
agaactgctccctcggatcctccttaggatcccatgacggtagatctcaatgttcgtgtttctcccaccacagaaggtcctactaatctggataacattgtcaatctagctaatcctacaaatcttgttaatcccgccattcctccaaggataggacaatccatatgatctgttacggaagagcatatcaacatggaacaacctccataaaactcaactgaggctgttccacgatgctatgcaaaacaggtcatggaattggtgacccaacaattggtaaacctcgcttggacttgggggatgacattgagctggccatgcttagagaagttgtaggccaggtcattttgataggacaagaagaatcacgtgttgctggttgtgatgcttacgaccagcacatatacaactttttaaggtagatggaagactaggaggccatccttcgagcccatcatgcgaaactaaatcaccgtaatagggaagctagtgacctgataaggcggttcaatgagagaactgccggaagaggtcaggatctgataagagatcctctacaaggaaggctcatcgataggtcaggcagggtctataggaaggtagacagaaagtccaaccaggttccttgtacgcgaggacagacccttccctgcctaatgacggtcaaatcttatcaaatagactgtatggcacaaacagccaattcctagcactaggaggcattgaaggataataaagcaactccggagagggagtattatatactagttaggccctgatatcatatgagttgtatgaatccctccaatccagcatgctattgttatcttggatgtattgttaacgatgttaaatttctagttgagtatcgggatgacaatcgtaacacctaaaatagtggtattttggtgcctagataaggtggtataaatttttatggtgtactcaaacaagtctataagttcatttacttgaaggattgtagtgttattattttttggtggaagtgatgggacacaaacagtaacatgacaaaaagtgatggttttttcactagtgtctgcctcacctatcaatggtaccaaaataaagcattcatacttgcatcctaagcaaatttaatatattacgttcccgacttgaagaatggagttaattggaagcttgcaaatatttacagcccccgcaatgtctgggattttccaaatgaggatgatgatgagaccaagaaaaaaactcttcgagaatctagttagtcattcaacttttacaactagacgatgtcgaatatgtccgtgatgatgtcgacccaattgaagtgactagtaaggaccttaagtagcctcaccgttaaggtttatatgatttcattgtatataatgatgatgaagacactaggatagtgatatagtgatagtgataataaaataatgtaactgttaatgatgatgatgacttgtagactttaaagtattataatatttaaacccacaactaattacatcaaatacatgtttcttttgttaataggtttattaattaattatttgtagcttgtatgtatagaatggttgatgtgggtgcaagcaacaataagaaaaatagagttaggagaaactacaaagggaaaaatattaaacaagaactagccaagcagcctgcgagatagcaattaaaatttagatttcataaggggattggggccccaatagacgactatggcaatgagtttaataattatatcaagtttcttgttcgaaatactattcctttgaacaagtttaagtttgaggacgttgagaaacaaccattcagactatcgggatataatagcggtaacattcaaatttttattgtaatagatcaaataatactattatacaaatatatatatatatgactttaatgtttttttagaccaagtttgaattctcaattgacaatcctatgttcgtgattacgttcttaaatcaatatcaaaagggctatgtaactggagagtggacatggaaaaagtatgaaaagagaatattgagaaatatggagaggttatcacatactagaaaaccccaaaacaacaggtctaaaata

SEQ ID NO: 256634 - DNA, 1864 bp, Cannabis indica
tccaaccaaacgtcaccttagtgatttctctattttcaaaatttatgcttaaaattgactactctaattgtaatctctaattttcttttatataattagtgcatactgtttattttttttttttttgaagatgcatttcaaagttttaggaaatagatttaagcaaattatacttttacttgagaaattataattaaatagaattttagtaaaataataaaatcaaaatattaaaaaatatgaaattgaacaataataacaataaacaatctttaggtggtgtttggttacaaaataaaaatggaataggaatgggaatggtaataggaatatgaataggaatggaatagaatgtctattcttttgtttagtaaagactatggaaccaataattgaataagaattgtgatgattggtatagtatagaatgaaatgaaatttttattattttgaccaaaatatcctttacttttttaaaataatttttgttttataaaattaacattatagtacagataaaaaaaataatatatatttatgtattattctcaaatttatattttttttagatctaattatcaagtaatgaaatataaataaatatctaatttaatatatagtctattttatattaaatatttaagtatcaacataaatattattcatacaatttaatcatcacacatcgtttatccatataataataataataataacaataataataatattgctttcttataattttgtacaaaaaaaaaaatataataaacatattattgtaatattaaatgttgtagatgtatgttttaaaataaaaaatgttaccaataatattataattataatcatttatttatgagaagggtagataagaaaaaataatttttggttggtatggagtggcttttcaagtcattttatttaggaaaagtaattccttaatttacatgaattacaattcctatggaatgagttttccaagaataaacaaaccaaacacttgaaagatctttctttaggaatagcaattatattcctacacccattcatgtaaaccaaacactatatcataataaaaatagttttaaataaatataatatttatgtattttttaaggaagctcattttattcattattataggtgtgttaatatagtagttcatacattagctaaatatgctattccagtgtctcttagttctatttgatggcttgattacaatatgaatcacatgattatggctaagactattagggcttgtttggtacgtcgtattgtattgtgttggattgtgttgtattgtattgtattagtattatttaatacaatactatatttggtattgacttgtattaatagattgtgtaaagttataatatatttttagtacattcgaccccaacactaactacgagtacgggtccgggtccaagtctgagtcccgagtttgggtattgggtccgcgtccgagttcgagtccgggtattcaagtttggggtctaagtcccgagtttgggtccgggtccgggtccgggtccgggttcgagtcccaggtttgggtccgggttccgggtttgggtccatgctcaggtctcggtccgagtctcatgtccaagttcgggtcggagatttgtgttgaccccgaatcatttataaatattataatacaagctaatacggaccatttgttatgtattaaataatacaacatacattgtattaaaaagtttggtcgtaataattaatacaatacattcctttatccaaaatagaattatttattatttaatacaatacaatttttatacagcctaccaaaagaacccgttaatgaataaatttattcttcggaacccct

SEQ ID NO: 256635 - DNA, 1058 bp, Cannabis indica
attaaatgtaatttttaattacatgcaacttgactaaaatgttgtcattagtttagttttgtgactaaaaatacatttaatcacaataaattgtaatttttataattaatatttttagtcacggacttttagtcacaatgtttgaataataatttataaatagtcataatttttttactattaatcacaaattttggtacgactaaaagaataattttgtagtgaaacatctataaatatgttgttataagtttggcaaatatctcgtactagagtccataatttcataaatatatataggctagaccaacaagtggtgtttaacaagtatagtaccaaatagtaattatcataaatatatttgaatccaaatcacgtattcaatatcatatataataatctatcgattacacacctgcaaagccagcaaagggatagaagaaatttcggtagagtagcagtcgggggccgggggactgagcttggagagatccgaagaagaggtaaaatctccaaggtcgtgtatgtgagagttagtctcggccacgacaaacaacacaccgtcgtcattgcagttaatctgaagacgacggttgtggtcgtggccaagacggcctgcaattggataaaatggaacgagaaccttagcaagagattttttgaggagagaagggtcgaaaaagtggttagatgttggaacttcttcttggttaggcttattatagaaatagaggcatgtgctcatcctctttctcatttcctcataaatcaagtccaaatctgataatggaataatgttgattgggcgaggagggccattctgatcagctggcttcactagagtcctctccttcaccttcacttccattacattcatattcatcatttgcatgccctctataatgatataagtccccaacttataagatatctatatatactagtgaaataatacgtgctctccacgtgagttactcacaaaaaaaatgggtaaatattatcttggaccctgtgttttgcaaaagttattaattagacctcgtgttttgtaaacaata

SEQ ID NO: 256636 - DNA, 2565 bp, Cannabis indica
tgaagcggggacgttacaactcccttgggatgtggtggaagttatattttcaaaactgacagtcaagtctagaatagttgcagccgctgtttcaagagtagaaaaaaactattttgtctttgggcttagaagatggaatgtggtggatgtgtgaagaatatttaggattcaaagttatttggaatgaagcttgggagaaagattcaagatgaattttgattcgtcagagctccaagaagatgaacaatattttcaaggatatatgttcgcaagtggctgtgaaggagtgttctattttcaaacggatggtacacataaggggtgcaaaattctaattagccattttttccagcaggttttaattctacctcatatcctcatgcctatgccatatgaaaggagcagaacagcccttgatgttggtattagtggcaacaatataattaaagttctttgtgtcatgagtactttaatggcaactactattagtagcattgctaaagttttcacaggagctcaagaatggaggccagtatcctgcccaaacatgcttgtatgtacccacacaatacttgtatttgaacatggttttatatactggaatttggctaagagcacccaacttctatgctttgatgtaagcatggaaatttttacatttgtagctgtaccattaagaggtcttctaatagatttttttggaaaagttgaaatatcaaatgttgttgacgttttgggatttgtaataatagaaaatgatgtaaaaaaagatgatgatgaagaagaaaaggatgaagaagaagaagaagaagaagatgaagaaaaagtccaattagttgatatttacatgtcagaattatatgataatcaaatgaagataaatagtaggagtgttacatttactgtgactttacaaccatctttgtggtaacctcaagtgattggatatgatttggacaagaacttactcataggcaatggtagaagtcttctttggtcatgcaatccaacaacgggacaatatcatgatcttcttgaaatgccaatgacacttaatccaagtactactatagatgaggatggctatgaatttaaaacttatcgtgggggtttgcattcattgctcaacaatattgtgggacctaatttgttggaaagaatatcaattcaacacgaaaggtaaatatcatattttctttccatagacttctatagttaaaaaaaactaatcatttgtttgaataagagtaaatggttgaggattctaatctttgtttagtttttggtcagacggatgtgttgttggagccgctgtaattgagctcgctgtgatcgtggatgaaggtgaggatcatttgtgaatattgggtgtttgaaactttttttggactctaaatttgtttttctcaatttgaatagatattgttttattatttcaataaatttttgtttagattttaggttttttgtctctgaatttgtatgaataaatgggtcagaacactttgaataagctttttcttttctttctcctcctgtaatttgggtgtttttataaatttttgttcttgagtttcttgttttaataattttaacttgtgatcttgaatattttaattgatcttaatgagtttttagttggagattttacagttataacatttgagtattaaactgttcttacacttcaaaaattgtggttatatccctgagtttattactatttttcctgtcaccaaaaatattaacaactacctttgctttctttacttcttttctttctttccaagtcaaaatctcgcccaaacctcaaaactttctcaactttctttctttctataaattcaacactctataatctatagtgtaagcgaacataacacattaatggtttttggccgaatctaaggttttctctgttttaagatgtattttttctttctttaatttactatcacactttatattttaaagaatttcattttttgaattgggtatgcttttgaattgctagttttaataaagacaggttcttttcaatcatttatagtctttggttccttatcaaatgagttttgggtttaaaagtgtgttcatataagcttatgtttcttagaatcctcaatttatttattgtttttgctccattggtatgctaatgttgccttaaattaaacttgactaatttaattttttgtatcaaatgttcaatttttttattatcttatcattgtgaattattgttattatctttaattgctaaagagtggagtagggattaataattttctttttgtaaaattttattagctctgggagataccatggattgcatagagcctaggaagaagatgtgagaacgacttgtactgtagtactgtagataaagatggttacgagttcaaaactcattgttctacacttacttaatccgttggaaagaatatgaattttgtatattatatatataaaagactaatgactacgctaagaattcactacccccatatacgaaggtaaatatcatattttatttttctataaacttaaaccaatcatttgaat

SEQ ID NO: 256637 - DNA, 893 bp, Cannabis indica
atattttttttatatatatataacagggaagaagaagatggggcgaaagtgatgagagtggaaaatctaaacaacccgtacaagaaacagtcgaatttcgattggagatttatgttaacaatgaacaagatttacgtttggagtttagtggagtacgaaagagttgttatgctcgattctgacaacattttccttcaaaacacagatgagttattccagtgtggtcaattctgtgctgtgttcattaacccatgtattttccacactggactttttgtgctacagccttcgatgcaagtgtttaaggacatggttcgtgggttggaaaatgagagagagaatccagatggtgcggaccaaggcttcattggtagttactttcctgatttgcttgataggcccatgtttcatccaccttctaatcccaccactttgcttaatggcacatttagactgcctttgggttatcaaatggatgcttcttactattgtaagtactgtatattttatcaattaattaattaattaataataataattatattatagatgttaattttggtgtttataattataattaattaattaatcagatcttaaacttcggtggagtgtaccgtgtggaccaaacagtgtgattacatttccaagtgcaccttggttgaagccttggtattggtggtcttggcctgttttgccacttggtatttcttggcacgaacgacgtcgtcaaactctcgggtacctactatatatatttataacaacttctacatattcaaattttaagtaacctaagaaatgtagggaatctgggatctagtcaattccaaaagtttatgagggttcaatacaatttttaaagtgatttttttttatatttttatgaaaat

SEQ ID NO: 256638 - DNA, 739 bp, Cannabis indica
ccttattgaccatctcttccacctcacattgtctttgttgtatatagattgagccaatttcaacaatttcccacctctgaacattagaatgtttgcaaaagaattttgaggtactttacagtaacacttgatataggtttaactttcaaccctagctttagacttaatctacagtttcatagatgcgagttgggcatgttgttatgatgattgaaaatctacctctggttgttgtatctttttggaaggcaacctagttaacaggtattttaagaagcaaaaggatgttgccaggtccaacatcaaatccgagtataaagcacttgctttagccacagttgaactcatttggatacaatctctactttcagaaatcggattgtttcgtcctcaatgcgctattctatattgtgataatttacaatcatgttctttgacatctaattcagtgtttcacgcacgtactaaacccgttgaaatgaaccttcattttgtgtatgttaaaatacgggtcaacaactcaatgttaaatatgtcaatacttctcaacagttggtatacaagttaacatatgacatataacactgtcaaggaaatgtgaaaatataaaattagttagcttttagcagctagtgtaattaataacagaaagttggttaggagtttgtaagctttcttgttctactattttataggcgtgtaatatcaatactttctattctcctataaccattgagta

SEQ ID NO: 256639 - DNA, 715 bp, Cannabis indica
taccctcttttgtattggttattgtttgtgtcgcaatatgtgtaaatggcatcaatcaaatttatgatctcgacatcgacaggtatatttatataaatatatatatatatatattaccataatataatttattattttataattagtttggttgtattttcgtattgaaaacaaaaaaataatgtcaaacatgctttaaaacgctataatatataaaacaacctctaaggttaaagaaaattatgacctcatcatcgctccttaagttcccgtgaactcttagatctcgtcactaccttcaaaatcccaatcagtaacgaagaaaagaagaagaggcataaaaataaaatcatttgttcaatgccttaaccatcaacaattttcagttgcttcaactaaacaacttataatttatttgtttagttaaagcatttttaatagagtgttaagaaagtggtatattgctatattttagcacatttaaaaaaaatactattccaatagtgttctaaaaagtttgccaaatttaacacatgtttaaaattgtgtcaaatttaacacaaaatatagtattgcgccaaatttgacctacaataaattttatttttttatttactatagtgtcactaattattatgattcattgacttttatataactttatcttatttatttactatattatcattattatatatatactataatataattt

SEQ ID NO: 256640 - DNA, 888 bp, Cannabis indica
atctccagaaataggggaaagaggcgcagtcatatccttaaacttgtccttttccactaacaccactattccctttaccgttgtggtttccgcaaacaaaccacgagttaatcgatgcaacaacactttcattttcgttactattatcatttcggaaaacagaccaccagtcagtatgtgtagcacttgccctaacaacaccaacattttccttaacaataatagtaacgtcatttttgtatataaatagattaatgtctagttatgaatatgatatgatatgatgtaatttttcaacaatggctcttatttatagggattagggtgtacttacatgcatactacataagtgatagtagattaattaatagtacgtaatataatatttgggattattaattaattaatccatatattaatatatttacaatcaatacctgtacagatccgttattatttgagatctcatcagctaattaacgaattaattaatgatcattaattatgcatggtaggaatgatatataaagtcattattaattgttatcagcattaatttcgatacaaaacaatactaattaaagattaagattattgccttaattattacatcaattgaaatagacatgcatgcatacatattttataatattatatatgataattttacaaagtggagaatacgtgcatcatatcaatattattgtttaattatttttattataattaattaaaataatgttaatatttaatttcactacatatacataaaatgtgtgacgtcatatgtcaagtgtttacatacgtcgtttgctgatctgtaacttattagtaggtatgagaagtcaatgcatgtttccatcctaaaaaaaagataattagggtatt

SEQ ID NO: 256641 - DNA, 1065 bp, Cannabis indica
taggaactttcacagaacgatcaactaattgaattgttatagaaattggttttaattctcctagaccaagtttataataccctaagattaaggaatcatattaacaaaccctaactagttatttgtgtattaatgtggaattatattattatataatttaatatatatatatatatgaattatattgataaatgacatgttaagaccctattggtgagcttggggtattttcgtaattttgactctagaagggtaaaattgtaattttaatgttatagtgtgcttatggactatattattatacagtatatttgttttgtccttttgcaggtattttctgacaagtcggtgcggtatagtcacaaccgaatattttgagccgaactgggttcggggcctgaaatacattttcaggattttattttggtattttataaataattgaataatatgaaatttatttaagttaggtgtgtgataaaatgacaattttgctcatattgtatgcatatgtggtttattggccctaggggcattttggtcatttgaccataagtgatattagcaacaaaatggaattttgttaaaattataaaactcttctgctgaagttcttggccttgactgacccatctccccttctactttcccttttcatttctttgatcttgttggatttttggcttgggattggaggtgttcttggtgtagatttgcattttgaaggcttgtaaactttggtaatgttagaaatttattggggtcacaattgtttataatgtgtgttgggtcatcaaaaaaataagtcaaatttatgtggtctattttggtatatattttatgacttaagggcataattgtcatgattttaatatgtgaataccataaagaaaatttctaatttgatgaggagccaaattataaatagttaataaatatcattaactgttttaacagttggtagtataacaggtaatggtccccatttgtatcgtatcgtatttttcagactttctgaatccccatcatcaggaaaataagggcttcaaaggtttttgatgtcaa

SEQ ID NO: 256642 - DNA, 787 bp, Cannabis indica
atcgatattgagacctttcttatttaagctctagagaaactttacccagtcccacatgcgtataccatttccaacaatcggaaaaatatcccagtgagaagatcgccacaagtggaatgccaagttacatgagagaaacagatgttcaagtgattcctcctcacacccataaataaggcagctagtatcctccagcctaaatcttttgctgagaattgagcgcatcgataaagctttagacaagatacaccaccataagactttttgacgctccaagatccttctattccacagtttattccaaagtgtcggagcaacatcacagtgcagtgcttctatgcaaggcttgggccaagtaagcaaacttacaagaataccttccatgcttctccaaagtctaaatccaattatctttgccctagcccgaaggctgcccaccttttaaaatggccgcaacaatttctttatcaaaaaggccctccaccttcttgatatcccactccccgctatcattcagcagctcagccaccttagagacatggggagcattaggatcattagaggacgacatgaagtttctgctgtggaaaatccagggatccacccaaatattcgtatttttaccatcatccaccaatttgcaagcacctttccggatgatggaattggccttgatcacattcttccaaaaccacgagtcagaattcttatacccacagttaagaaagtctttcccttttaaatattgaaaaaccgtgtttttgcaaatgtcagttgtatataagaa

SEQ ID NO: 256643 - DNA, 779 bp, Cannabis indica
tgagtatgaatatgataaataattctccttttcattatataaaattattaattatgaggttgaggtgggtgctgctcctgctagactgggttgcccttcactaataattggagtgtgcttgtctgtcctttatcaacattataataataataaataaataaataaataaacaaaatgatactacattatttgtacacgtggacgtataatggaatggagaaaagccttcatgacagatattttcaacaaaatttagacaagttggagattaacagcatttttgccaaccaaaaaggaaaaatatcagaaagcagcaggtctagttctagtcaaatttttcatccaccttcatataatattattgaatattaaccgccaaaataatttgggtttatttaataaataaataaataatttcgcaaatttcaacttcatagtttataggtagggagatataaacccctttagggttgtttagagaattcaatgactttgaaaaactcgagcaaaagagttctagtggaaaaggaaatgaaatttggcataatttagtgaaattgaaaatgtttataactcctttgtcaacttctttttgtttttttttttctttctttctacatattcattgtaatcatcgctaataactattagagcatctccaaagaaacactaaatttgttgtgacactatcactaaatttggtgtcaaaaagtatttctactccaaccataacaccaaaaattacactaaaaaaatattccttattattatattaattt

SEQ ID NO: 256644 - DNA, 879 bp, Cannabis indica
tatataagttcagtcatgcttttcttatgtaagttaggctattaattattttggtatatttattatattgtatgttgtttactgcattctgccaacagtggtattttgtcgatttatgatatataatatgatatgatgttaagttagaggtgagatttaatttatttaagattatttaatttgtgcttataatatatatcttccagttgtaattaatggtgtaagattgcaactgtgttttgaattaatatcggtattagaataagatttgcataactacatttctaccttaccaaactctttatctgattaactttctcatatcatcatttttattattacttcacacatttatatcattttctatctatactaatctttagttgtaatttacctcccagtggatacgacatatagcctgtttactaccgcgaccacagtgtaactaattgggcgacatcatctatcttgcttgatgtagtgttcaattgtaaaatctcgatcgccactagaagtaaatggcgtaaatgtcgtattacatggaaaccaaggatctttagcatagcaaactttatttccgaaaccaattttccagtgaaggcccttaaccaacaaatctttcccatcgtaaatactctgccaagttagagatggcatgacacccttagtggcagttgttatacccgaagttcggtaagcacatcagaggaggacacgtgtcgagctgggaaaaacttaaacacgcaaacgacaaatatgctcgacatggaacgacttgttggaaatataatttgcagggtatgtttataactcggctggctgaatagccttttaaacttatgtattggcgagaaactcttatgcaagatcaagaagggg

SEQ ID NO: 256645 - DNA, 1685 bp, Cannabis indica
ttaagtaaataaattatttggactttgattcatttatccaatattagaggtcaatccgattgagtgcaaataagctcacgttagtgatgcaactgtagaaaataattccatttttatcaagtttagattttctatttacagggaacttggtattggaatagtggcatatagcccccttggtcgtggttttttggtggaaaagcagttttagaaagcttgccaaatgagagtcttttggtaagtatgaataataagtaaacaaagttcctctatttcatctattgaaacaagcatgacctcaatcttagcagtgcataaacatggttcgttcaaaactttatcaacctgtttggtttttcacagtcaatgcatcctagattcaatggagagaatttagagaagaacaaactcttatacaacaaacttgccagtctagctgccaaatatgcttgtaccactcctcaattagctttggcatggcttctccaccaaggcaatgacataattccaatccctggtatgattgactccctttcattgatgtctttatatgatgtctagtgaacatggtcttaactaagatgagttgctctactcattaactggctgtttcttatcgtctttgcaatgattttacacagggacaactaaagttaagaatttggccaacaatattggatctttggctgtgaagcttacaggagaggacttggaagaaatttctaatgctgtaccaatagatgatgtcagtggtgaccgagattatgaagttctaaccaaatattcttggcagtttgcagataccccatcgaaataattctgtaatatttctctgttatctcgtctctgtcatttcacattacatatgtttgtattctatatacaatatataaaaaattgttaatttcttatgatgaagttgacaaaaataaattgtggtttgttttcttatcttttagtacatatttcaactttgtgaaaagacaatatgagaggaacttttcttatatataaagaaaatgtcggcttgtgatggtggggtaggtagtctggcataaatgaaagtaaatacattaaagtaatttccactgatctgattgttatactctcaattcaattacaagaggctttcacatacaagaataccactttcccaggatttatcactaagatcaatcaaacaccttagaacctgaaaccaatcagatgattaactacactattccttacaagtcaaaataaaatcaatttctttctatctcaattagtctcaacacaacaaacttagctaaattacatctccaatgagctgcaaattgacaactttaactaaattttaagcactcaaccctcgcgtaagttaaatttagggattaaactattgcttgtttcagtaccagtttatacgcttttcgtttaattatcactaaaatactatcatcttttttacaaatcaatatagaaacactaattagattaaaatttattttcattattactaaaattatctcaattaattacattatatatttacgtccaacttatattgtgaaaatattggttcataaaagtgaaaatgaaaaatggttttttgtgattttctttttctttattttatggtgttaaacttaaaagggttcaactagtttaccttggtagtggaagataacaaatttacaagcaat

SEQ ID NO: 256646 - DNA, 1045 bp, Cannabis indica
aataataataaaaataaaattttatcgatttgtatttcgtagcaagtagcaaccaacaactgtattagtagcatacctcagaaatttctgcatttccaggaccttccaacctaaagatgcgcgcacacataaaaatttcttattaaagacttacaaatacagaaaactttacaaactaaataaataaaataattcgaaaccataatagaagatcatttatccaatgactaaagcatgaccgaatctagtaatttcagtttcagaattcacacatttacgtgtagatagatattacaagcatacgaacagtacgtatatgataatactatataaaatgtacagataaacaagtagaattgcacattttgtaaagacctttaaaaagcacaattagagttatacagccagcccaggaagcatagaattttgatcaaaaatcacgaggataagaaaaaaaggaagtagagagtgaggtcaccttaagcaagaagaaaatggaggaggtttgggcgaagcatggttgaactttgaggaagaaggagagcgttgccattgaatcgcagtggtggtggttatcatcaacgctttcattctctcactcactctccacccaaattcacaaaactacagttcaattttcttctactaaacattcatttcattattttggaaaaacaaaaaacaaaaaaatatagaaataaataatcaccattcacgggatccgagactctacttctattatttaatttttctatattgataaattagggaaatgattaatggaaaatgaaaacgcacgtggaggtagtaattagtggaagtttacccaatttgctctacctttgttgttcctgaatctaggccgtgcagaactgtctttttttttcatttattattattattatttatttttcctgataaaaaagtatacaagacgtcatgatagaagaaatggaagctctaaagaagaacgaattatgccttcctaaaaacatgaaattatgccttcattaaaacatgaaattataagacataagtaatcaat

SEQ ID NO: 256647 - DNA, 716 bp, Cannabis indica
aaaaaattgagtagagtgtgatggagataccatattaatgtaaaagctatatttcgagagatattattaacaagccgtatattttagaagacacaacttagtagtgtaaaaagtttaagaggcaaaaatactaattattctaaaattaatttcaagcacatcattataacaacataagctttatttatttcggaattatacttgttgagaaaataagtcaaccaagaggcattttatgaaatcctacatgtacaatagcaaagcaccacactagccagtagcacagaaaatagtagcgaggtgggggcaacaaaagttacaaaacagaaacaactaagctggtttgatgcttactaattttaaactacaactcacatacaactttcagaagagaaaaggaaatacaatgtcaaatcaagatggagcatttttcaggataagaacaatgctaacctgaaaaattccttctacacgcatttcaccttctgctacgactatagtgttctcggaaaaaaatcctgtcgttatcttgtattggttgtcaaagaaaatgatgatttcacatttccaattttaagggaacataaagttccagattcatgtatttcaggatttgagatcaatagttaaataaattgtttgatataccacgattaccagatgggacagctttcagaaaattacacagttgatgagtaacattttcaaaggatatt

SEQ ID NO: 256648 - DNA, 1188 bp, Cannabis indica
tccatctctaatggcttcaatttggatgttgttgcttactttagataatttgtcaaactgtctattctgcctgtagttacttactgcagacacaccaatgacaagaaaaacagcaatgaaaatactcaaaccatcaatccaaccttctttagttccatgcactttcatgccgaagccaagagagagtgcagcgcaaactataagaatgacaatagtaagatcctgaaaagcctgccacacaaaatgaaagaagctcttagtaggcggttttctatacgtgtttgagccaaactcttcaactcttcgggcaatgtctttgtcatcactatgaattccatgctctgcatctgttttcagagccttggcaaggccatcaaccccacccaactcttcaagttgagaaagatctttgtctttggtgagctggttgagcttgttctgatcgatttcgaaacagttttctgtcttcacattcacaatagtgtgggaataaggaaagggtggtattttggtggtgtagctagtttgttgtggtgatgaggaagcttttaaagatgaggagaaagctctagagcagtagatggtaacaaaagccgaatgccatttcttcttgttttggttcagaatttttggacttagaccaaggaatgtgtcaatgcaatactctgcattatgtaaaataggactacttgacaccattttgaatttgaagaaacacaaaacagggttggggcttacaaaaaagaataagagaatattagattgaaaatacttgggctgcttgctttattattgtagtattgtattctgtatttgtcacagtgatgaaacttaccagaattggcaagcaatatatacacatatgttacttcaccgcgtttagaaaaaggtcgatgcatatgaatatgatagtatgatacctatcaactaaggaaacattttaagcttacgcggtttatatatattaattttggtcgaaatagtaataaatgcagggggacccacatagaggcgaggtggggcaattacccctgaaaaaaattcggaaaaaaaatatatatgcattttagttagttacaacatttatttataaataaatgtaatatttatgaatataaataagttttggtataatggcaaaacaatttcatgttaataacgggtatcatgagttctaatctcaataaa

SEQ ID NO: 256649 - DNA, 1152 bp, Cannabis indica
ccccctcaaacttagcataggtaggatcaccaatggaaagtttgtgtcaaaaagatgagaacagttaacttgagataggcttagttagaccatcaacaatctgatcaaaagctggaacatgttttacttgaaccagtagctgaaggatcttctcacgaataaagtagaggtccaattcaatgaattcaagaattttagatgagacatttagtgtaaagtgttgctcaagagctttccaaatttggcgagctaagttacaacccaccattcgagttagaaggctctcagtcatggaggagagaagccaagaaacaaggagttgatcttggacctcacaatccacaaattcaggattgaacctgtgagcagcacgatcgacatcattgagaaattatagaggaggtagaacatcctggatgaatttctgtaatcgattaccacgaatggctgctagaatctgttgcttccacaagaggaaattgtgatcatggagcttgatcgagacagtgtggttgaagtaaacaggagttgtgtgtcatcctgagttctggtgcgatttcttgaggtagcaaattgagttccttgtgatgcagattaatgatttgagttaccaggatcaacaaaagccatgttcgtcgttaatggcaaaaatggctctgataccatgtgagaggtattcaatctctttaatatagttgctttagaacaaaaatagaggaagaagatgaagaaagaatgagaaagaaagaaagagaaaagagtctcttattgatcaatctgagcatttataagtttatatacacacgaataatgaacaaagcaattaaccacataaaacaataggtggttaggtagttaactgaattaactaccatccttactaactatctaacaacctgtcctaacacagacacaagacacaactctgtgacataatttgccacacataaaatagataaatgttacatatatttttatttttatttttctattatcaataagtacttttgaatttatatggagaattatgaatttggactcctatgaacactacaagaattatgggcaataccaacgccattattaccaacgcctaaaagtcctcattaaaaatgaaggtatcaataacgacattttaatgtcgttgggaaa

SEQ ID NO: 256650 - DNA, 2088 bp, Cannabis indica
tcgagcatctaagacattatcaattgtgagtccatgcattctcatcattggtccatatcctccgccactaatgtgtccaccagtacaaactccaggacataccgctgctgagaatccatggattggactagtcatccctatcttatagtacagctcgccaaggctggcagcagcttgaacccaagcagtttgatcactatagtttatgttgatggatcgaaagttaagcatatcgaggatgatgaatgggacagtagagaccgatgagaggctctcaaagtcatgaccgcaacttcgaatcctaagctgaagattgtgctgtttggcgcataatattatggttttgatttgggtctcgtggttgggttgtatgatggcaaggggtttaggggtttggagtgtggtatatcttttgttgtggatgcgtgagagtaaaatggattggaatgttgagttttgtggagtgataatgtttgacatgaatttatcagagttttcttggaagcattctaggaactcgtttaaaggtgttgatgaagaaaattgtgagagaaaaatgaatgacagagtgaaaaatattaagtctcgaagtagtgtaatatgcatatttggattgaaatgtattgcttttgtcaaaatgtaggaactacttgttcaaatgatgattttgacactatatgtatgtgctatatatatatgtgtgctacaaatatgtgtgcgcaaatgagctttcattagtcatcaaaaatatttggtgagctgaaaatggtaatgaatttattattattattattattattattattattattattattattatcattatattattatttttgaattaagatacgctgtcatcaagtaagaaattaggtaacatatatagatttgattccatttttagttaacaagctattctgtgtggaaaattgctatcaatggctatgaatttttctttttatttgttttttcttttgtgcatttggatataattgtcttgaaataaggaattaataacattaagtaacataaattttttttcttgttctttttgcaaaataggtaacatagatttgttttactttttggtttacaagattgttatgtgtctatttttattcttttttgtggaaaatttctaacactcgttatgaagggtttcttttcttttctttttttgtttccttttgcatttgaatttatattgtcatcaaaatatgaaataatacaatataggaatatagatttgattcctttcaatggattagaagattcatctctgtactattgtattattgttatttaatttgtgtggaaacctccaacaatatgattatgagatttattataataataataataattattattattattattattattattattattattattattgaatggaatggtgaatgtaagggacgatgtggtaagtaatatcaatgatttctaataatgtgctgtaaaatgtaattgtactaatttaattgttataaaataatgtagaaaaaggacctcgatgttcaagatccccacgccaccctgttcggatcaaatcttagaccaagagaacgaaacttgtcactgattaggacaagaaaattgtcgaaaagattgtaagtatatatatattaatccttaattgagaactaataatgagttaatataaacactttatatagtaattgcttgaatatgtgcatcaggctcaattaaaggagcaagttactcagggacaaattcaggtctatggccaaaatgatattctgacgtaggcgctcgagacacaagaatatcctggacgtgtcagggctgctgggtatgctagcacttgagaaatgttatttccttagttatacaaaataaatcatagctaattttaacaaatgatttgcaggttccttactagggcatctaaaatgtttgccaggaagaaaatggatgtttctgatactgtggctcagtaacagaaagagattgataaataaagtacgaatacaagtcctttaaactagaagaaaaataattgtccaaccaagaggtagaacgagaggtggagtgatcatacgtatgttctac

SEQ ID NO: 256651 - DNA, 4154 bp, Cannabis indica
tttcttttcttcattaattttgttcaaaaaggcttgcagaatactaaaattatcaaaattgaagatctccaatgatttttccttaaaaatcaataaaaacaaaaattaagcataaaactgcacattaaaaaaaatactaaaacataccctaaagtagactctaaaaatgcataaaaatgaatctaatacctctttcttttttgaagagcttccacctaatgtagacatactatacatagagaacatacatttagatttaaaataactatattcacaacaaattaaataagagcacatgaccttttttggaggctatgttgaagaaaataggtttttgcctagatggattggtttagccatgatatgtgtttcttcaacctattacaaagtcattcatggttgccatgagatgggcctgatcatcccatcaagaggtatccaatagggggattctctttctccgtaattcattctttgtgcggaaggactgtcatctcttatgcgtaagtatgaaaatcacggcttgattcacggttgcaaggtggctaatggggcaccaagagtatcacatatgctcttccccgacaataggtatctttattgctaagctacaatggaggaagcagcccgtatacaagggttactccgcaagttcgtgttggtctctagacaacaagttaattttgctaagtcttcaattttttttagtgttaatacggaagctaatttgaggagccaaatatgctcatttcttcacatggatgaggcggcagaaggaagcctttatttgggtctccctagtacaatgtctcgaaataagactgtggtcttgggatatcttaaagaaaaagtctgtggacaaatacaaggatgggaaggcaagtttttgtcaagagcgaaaaaggaaattttggtgaaaataattcttcaagccctactaacttatgcaatgagtgtgttcttacttcccttggaaattagtagagacattgagcgaatgatgaccaaattttggtggcaaacatcaaaggatctacgcaaaggtatacactggatgtcatgggataaactcagcaaaaataagaaagggggtggtttaggctttcgtgacttgcatgattttaatttggcgatgctgggtaagcaaggttggagactcctcaccagacccgagtcattggcttcaaaagttttcaaggccaggtatttctcaaatggtaattttctgtccccccaacttggttccaatccaagttttgtttggcaaagaatacttgaatcacaagagctagttcgtaatggtacgagatggtgtgtggggaacggtcaatctatttttgttttgggtgagccttggctaccgaaccaaactaatgccaacatcattaagagtgcatatggtctattacaacttcacaaggggttctggtatgaagacactgcttcgaccttctggcataagcttttgagtctgaaggtgccacgaaaaatagctaattagatatggcgtgcctgctccgagtgtctccccacattagtacaacttcgtgtcaagagagcggttgtttgttctttgtgcctattatggcgtgaattagaggaaacagccctgcattgtttggtcacttgtagagcagttcaagcctgttggaaccgtgtagaaacaggcacaaatcctacatctggtgcatcatttcttcactggtgcattaatacttttcaagcagttggtttagagcagaaatgtcttgtggctgctgtttgttaggctatatggggagcccgtattaatctcgtgtcgcaggacaaagaaattaaccgaggtaacattgctacgttcgctaaattgtatcttgatcaatggaagaatgcaaaaaaaatccaacaaggatgcatcatggtctgaatattagattggtgatgggagagaggcattgggacaccaccaaatgataatagtatcaagattaatattaatgtggatgcagctttgttcgagggtggtcgtagctatggcattggccttgtggcccgagattctaatgggatgcttattgaggacagaacttccttttcccataacatggttgatccttctcttgctgaagtcgtaggcatcaaggaagctctcagttgaattaaagaaaggcaacgaaagaatgtttgtttggagtccaattgtctatgtgtgattcaagctattcagagttctttaaaatgatttctgtgtttgaattagttattcaagattataaatctttgcttgatactattggtaatgtttctgtctcttttgataaacgatctactaatgtagtggcccataactttacaaaggctgctatattatttcctaatcgtcgttttagtttggaggatgttccaactgatttgttatcttgtttggtggttgaagttattggtttttaaagcggatttcttattcaaaaaaataaaataagaaaatatgtgatcattattgctattataacatcgttacaattacaatttatcatcatcatcatcatcagtgacatacataatattatatcatcactatcactttctaactctaagcaatcatcatttttttcttggtcatttgaaccttcctcatcgtcatcgaaaatgaaacatctaattgttgagattctgtattcacaaaatgaatgtttcgaactttagttgggtcaacatcatgaaggacatagtcaacaccatccaattgtggaagttgaacaaataattgagttccaactgaattattttctttgtataaaggatgtatccccatcatcgtttgggaaatctcacacattccgcgggatgtgctcattcacaatcaactagtctttaccgttcttaatatcagagatgtaatatatcaattttgcttaagatgcaagtatgaatgatttattttggtaccactcccagttgatgcaaacgctagtgaaaacaccatcactttctattctactcccattagtgtgaaaccatttacaaataaataaaaaaacattgtagtcctttaaataagtcaactacataatttttttaagtgtaccataaaaattatgttcatcttcaccgggcaccataacactgttattttatattttgcggttgtcatctcttttcttaactaaaaaattaatgttgtttactatgcactcacgataaaaataaattattggatttgttggattcataatagcatacaactcatctgacactacagcagggttgttcaatcgttgttcattaatctaattaaaaaaaaatgacaattattaaggaaagtttaagtgttagggtgaccaagattatgaatatttagacgtaacaatgcttactcgagttttgaaccattcagaaaactcaatctcttgcacattttcaatattgcctacaccactcggatgaagcaactccttatgctcactaaatcaaaatacacttggtaagttaaggattttttaggtgaagttaaatattcttgcttacttttaatggaaattagacttaattgatatacagctcaacctctgtgcaatattcaatatgtaccactatgccttatgcttgcttatcattggtaaggtgtcaactgttctcttacccaatggtcatttgacatgcttgaatataaaaaaatcatcgagttgtcatgtttggaatgatgttattgttccatttaggatggttgaatcgagttttcgcttcacaaaagtacattgaacaaaatattaatgcctcattaaccacataagatttagcaataaagccttccaggcaataacgattcctgacatatttcttgtacacagacattgaccactcgatgggatacatccacttgtagtgcaccagtccacctagtatggtttctttagggagatgcataactacatgaaccattatgtcaaagaaaactggtgggagaatagtttcaaacttgcacaaattagttagaacatttatttcggtgttttccacatcaaaaagtgttcttaaacataattgtttgaattacacacataactcaatgattgtgtcccacattttttttttcaagtacttacgcatagcggcatgtattaaacgttgtaacaacacatgacagtcatgggatttgggtctgaaaaatcttt

SEQ ID NO: 256652 - DNA, 737 bp, Cannabis indica
tttataaaagttgtttccattttaatattattttatttcaaggttatactatttctattttataaaagttatttttcaaggttatgctgaaaagttaattatgacagcattaaataaaaaagtgcctatttattttaggctaaaattttgtccatattatattttgtgcaaaatttaacacacatttgacaccactattggaattaagagtgtctataaattgatctaatctactgacaacctaccgtcaaatatagatattaatattttattttttggattggatggatccaattcaattcaatagatattggatctaaaatattggatggttctgatccgatccaaaaatataaggtctaaaatattggataaacacaaattaaaccaatagataacataaaatatatccattagatagaactgatctaatctaacatctattaaatgttgtagattggatgactgaaattaattggatcgaatctgataattaatataatatctaatatataattagatcgaatgtgtatagacctaaaatattaaatgtagtatagtaagcactctaaagttaagttttaataaaatattttaaaaaataacaatacactatatttataactctcctgtgcttttgtgaaaaagaaattctttaattttactaatgttaatataaactacttttgccattagtaatttttttccttacaaatatttatatttttgtaacgacc

SEQ ID NO: 256653 - DNA, 2101 bp, Cannabis indica
attttcgtaaattctttcctttccaagtactgaaattgttttatatcaacatgaataatcaatttatttaacctctattcaagaataacctctaattttttataattaaatcaagtttcaatttgggctagttataaataagaataacttctaaattgtaattatttatacattctttaagtcccgtattaacaaagtatacctctatataagaataattacatcttaataaaatagatacatatgttttgtaaatttatttacctaaaattaataattttatttcaaattgtaatatatgtattaatattatatttactctaaaataattctattataatatagtattaataattatttattattattattattattattacattgatattttttagtattttaatttttttcttctagtgtgactttatttagttataatctctcaattagaatataatttgcttagtcccaagtttattcttgaatagaggttctactgtataagtatatattggagatatttataataaatatatttttgcatctaagttacaataataaatttactgttagtattgcatctaaagatttttaatttttctattattattattttcaagtattttgagtaattttttggttagtaataggtttgataaaaaccaattcattacttttgtttatataaaaaaggctttatttttatgttatacaatttgaaatatattttggttacttctaaaatttatttgtatacatcttagtaattaattggttatttgtaaattatattatggtagattataattgaaaatacatttaattaactttaaaaatagttgtcgaaactaatgagttatcatgtaatatatcaagctacaatttttaaaaataaattattttgtatatcttttttattttaaaagttaattagttattgtataatttaatataatttaattaataaaattttaaaataaatgttaacaatgattttaaaagaattataaaacactaactaatcaatatatttatattagtaagtaaatggtttcttttcttgaaataaagaagaaatatatacttcttacattttgaagtattcacatttaaaagtagattacaatgatttttttttaagcttatttgattaatgacatggaaaaaattatttttaaaatttatgggaagagagagaaataaataagaaagaaatgatataaatgaaggtattaaaacatatccaaccaaataaaatttttattaatagtttatcaacttatttttgacaattacattaacaataaaatatgaggtgtaaaatgcctatataataaagatgatcttacgtgataaatgacgcctactatcggaagaattttcaaaatggacaccatgcaattgtttgatgtaattaattacttttattgtttagttttgtggagacaataatgaagttccattcaactaagattgtggtcctgtgtaataagtaccactcaagtaaaactctcgtaggacctctatatatcttttgttgttacattacatacatctattattgattttctctcgatttacttttaactaattaataaactaaatgaaaatatgatatttatatgcaacccatatgaattagaaacttatttgagggagctcatctacttttgtattggaaaaaaggacaaaaatagagtgtatgtgattaaaattatcaacagaaatttgtgtcatttctacactgttctttggtgactaatttatggaatttatattagacttatagctacaaaacttgataacgagatcaataaatactatgaatgtgaatgaaatttcactactacaaaacaaaattttagagacgctttttcagcataataataaataaccgacgctataaggtcgaaattttttagaagagaatttaactccacttttggcgtcggttatttggaaataactgacgccaaaaggatttataaccctagcccatcgcttcgtatttctcattcgaccagccaacccagaaacccccaaaccagagaaatctcaaaccctctccgccaacaaccatgaaaaatcacctccattt

SEQ ID NO: 256654 - DNA, 1048 bp, Cannabis indica
aatactgtctttttgtaaaacaatcgtaagacaacaaaacaggtaaaataatagtagaacaactaaaaattccaccccgaaaaagtaaaaaattgaaaacttggtgtaaaaatgtcatttatgaatgactacgaaggcccaattctaatattttgggcttggaatattgagcccaaattaatgtggctgagattcagatttttggtggtgcaaatttgaggtagaagacgagaatggagatatgaaaatattatgaaccagactacaaacaaaccactaaactgagctcaacaaaacaatgaagatcggcggaggattggtgtacggagccccacgcgccaccgctctacccaaactactatttagccatggaagcaacagacttcgttgctctgcttcttcttcatcaactggtacaaaatatgtttttttttttttacactaatggagttgggtgtgttcataaatattctttgtgtattaatgaaaatggaaaagtgggatattttggtgagtttgaatgagcatgtgggcatatatttgttttgggatttaacaagttttggtacaaatttcagatcatgtaagtttcataaaggatgtagctacaagtaagcctcctcagaatttgtctcaacttatgaaaatgctcaaaataagaggtgggttattgcttaaacactcaaattattcatttatggatttaaagattgtagctttattttggtttaagaactttcattcaagtagcttgctactttcatatgtgtagagcatgattgatttgcttgttatgtgatttgagagaatgttgaaaaaatttaatccaacaatttgattaattcacttactattccatcaaataactttagtcctagtgaataagtcctctcatatttaggctattagtaaataaaattttgactttgtaagtggctagaccagtgactttttttagtggcataagtatcaaatttaataaaactgtaattttcgtctaattctataaatgcagactccgttaggactccgttagtatcttaaattt

SEQ ID NO: 256655 - DNA, 590 bp, Cannabis indica
aacaatctcaatagttcaggtagtattttaacgaccttaaaagttcaagaggcatatttaatatatgtcaaagttcaggaacaaaattataattagcttaataataataataattgaggtgaacaaaatgaccccatgagacttacgtatatatttaattaggttgtaaatttaagaattttcttaattacattacacataatattattattattattattattattattattattattattattattattatccccgtttaaatacaagagtaacatcttcagttttgaaatacgtacagcattattatttacgtaccttgggaatctgatttgtagtgggggagccagaaatgagaagccattgcagtaagagaaaaggtagtagaaatacaataatattagtcattggaaataattaattataatataaattatacattaaactaaagtatatattttaagtagtatatgtgtatattttgaatatgagatcgagagttatatatgcagctattaaaaaccgatcgatatttacaatgcgtaaggcattaattttggtctgaaaattaggccaaacatgcacactaa

SEQ ID NO: 256656 - DNA, 553 bp, Cannabis indica
aatcaaaagagaagaaaaagttgcattatatcttagtttcattgcaaccaaaaaggaagttgtaagaggaaaaaagttttagctattacttaccacatgttctaaccagtctcaagtacaggtactgaaatgagcaactgatactaattatggagcaattcaagtttttaagggaaaaaaaacacaatatcagtattagacaaaactaaattttgtaaaataacatgattagtttaattatgtggtaagatatgtactcaaaaaaaaaaaaaattagtcgtaagatatacgtatatagagagtagtactattagtgttgtaagtttgtggtggtcaggtttatatttattcgtgtttttcgaaaaatcggttgtgtcatgtcgtgccacaaaaaaatataggatgtgttgtgttgtgccaatatctttaaagaataggttcggtacagcctgtagaccaaatatttttgtgccatacttagagtcaaaaaataaaacagtaatccgtccgaaaataaagtattttgtgtagagggcctttagtcatgttttac

SEQ ID NO: 256657 - DNA, 1290 bp, Cannabis indica
aacattgatttgccaactcccttttgccacacatcatagtaaattctattttaccagcgcaatactaacttttagtcagcacaaaaatataggtaccaaaagtgacatttctttaaccaacactaaaataaatcagagaattaaaaaaaaataaaaaataaataataataaatcaataggagaattaactagaatcacaagacgctgttctttttaatgacgatcaatagtgcacccttaaaatttaaaaataatattatttttattagttgacatttaccacaataaataatgccagtttttccatgaattaaagtacttatataaattcacgaaaaaaaatacttatataattgcattctgaacaattaaagaaataagggaaaacccacagccaagagatttctcataaacttaaatggacaacatgtgatagggttgacctttacatatgtattttctttcaaataaaataaaatatttaattaacaatttgaattggttctaataataataataataataattaactaataataatggtaaaaaagcaaaagtaatcttaaatacacacttaaattacacacataataacacaaaaataagaaatattaactatttatatttatattttgaaacggtaccacatccattttaaatataggggttgtaagattgattaatataacatattattgtatacaaaaattatataatttaatttgtccaaattatttcagcggaaagaatatatatatagtgatagttatataatattttatcaaatttattttatatgtaataatttttttttcaaaaaaaaaaagttaagtaatactataattaaacattgcatgggaaaggaaacccccatcgtattgagaatgactagtccactgagttacagtctagcttgactacaattacgcatctcctttgaatttttgtcaccaagaaataaaattattggttctgtcttccaaaaaaaaaaaaaaacttcctaattttcttcacacgatcagtcgatcactaaaatttattattactacagttttaaaggctttaatttaggagtggtattaggctttgactaatgcttcaaactacaaccaatttagcatgaaactcaactacatattaaaggcggtgctctttcgttgttagaattaaacttttgtagttgaacaaatattagggctgttcatagaaattggaaaatcgcggtttaaattcagaccgccacaaattagaccgtaattggggaaaccgcttttggtagtttggttaatc

SEQ ID NO: 256658 - DNA, 1149 bp, Cannabis indica
aattcaaacctaaccctagtggaatgctataaatagatagtgaatgctataaatcatgtgaaccatgcaacagaaaatacagtttctgatctttattaattagtaaatctgattatattgaaatgggttttatttagggcacaaaactcaacactctccaccaccatcacctcctttgttccaccaccatagcatcatctgtgccaccaccatcacctgtgaagaaatttaggtattcactgtcgctcgaagtcctcttttctcagttcaagtagaatacgtctctgcaagtatctactctccattgatatcagtcctcgagtctatctcttccttaaggtatatacatatacatttagttttttcaatttaaatattattgagaaaaaattcacaatccaaaaaggaaacaaataagaagaattcgataccatttctctggtatgacatatgaaaaatatacagccatgtattttcttttagattacttttggaatgatattactctctattaataaaaccttttaccactttattttcttcaacatcaaacacctaatttatttttcatttcttatttgaaaatttgggattttgagcttttgtacttttgggagaggttggtttatgacctttaatttactctaactcaggtcatatgaagcacattagagaaggtgtaatgccctaatgctaaggcacgctaccgtaattttttaattgtagtgcaatctttgctaaacaaagaattttctcaaaaatcgtgacaaattaaaaattttgatattaactgtggaactttataaactttgttaaagtatttacaaggggatcccgtttctaaacttttacaaaataaacatgatacaaatgtcaggtcatacaacgactacaaaaaggaaaccccagatctcccaagaccgaacactctaggttgctccgctatgacaggtacaacctcatcctagctcagactcactcctgttcagcttttgcctttcctttacctacacatgatagtagaactgtgagtcgacagactcagtaagaaaagcatataacatatcacataataacgacttgtatttaggcgcccatgcacctatttacaaggcttaatagatgagtaagaacgttctaactgtttgt

SEQ ID NO: 256659 - DNA, 1701 bp, Cannabis indica
aaaaaaaaaaaaatagaactaatagactagtaagttagatgtgtgtggccatttgagggaaggcatggcatagcatccaaacaaacaaacaaaaaatgaagaataaaagcaaagaaaaaagagaataaaaagaagaagataagttgtgaacaaatttggtgttttagatttttttgtcagaactcagacatcaaccaaaaacaaaacttaaaagagttaaagaagaaacaacctatacacttttagcagaaaaaaaaaaggaacaatttatgcacatgctataataatcttcacataattaaacaaaaactacagaaccacaaccatataacactagtatacactttatgatatataatttaaaatttgaatgttgcatatttcattttaaaccaatatttataaaaaaatatatagttttttaaaattgtatgaattatattgtgaatattgtctcacatgaaataaatacaggaccgaccttaggttaaggcgggctaggcctacgcctagggcccacataaaaaataccttttgaaaaatatacatatttttttaaaaaaaaataaaataccatttatctttatcgtaaggacccaaaaaatttttttttacctatgacccatttcaactcagggtcgactctgaataaaaggtagagtattgagctatatataagaacatgagcttctccacttatcactaatggattttaagatggaaccccataattttcaatatggtatgacagccacatcttttacgggcatgtgatcctatctaattcgcacttatacagatagtaaccaagtccactctgatacagttcaagattggtgagcaaaaaaaatagacaccgtcttgagatggaatattgtggatattgtcccacatgaaataaatagtagagtagtgagccatatataagaacataggctactccatttatcactaatttattttaagatggaatctcataatttttaacaatgtaaataacactaataataatatattattatatgaatggtcttatatataccgaaaatttctaatatataaaataaaatatttatttaaagttgtttgaaacaatgacttattatttagaaattgggtattttttacacttgttgcctttttttgttcctttttttttttacttttttgtcaatactcagttatttaaacttttatacaagttttatttttcaattttacattttcaaaagtttcataattacaaatatacctatccccatgcttatgtcatggttttatctcttcttactccaccacttccataacttctccttttttttttatttttttattttctatttctctttcctttgttcttcattaccacaacccacgatcatcccgtccaaagccctaacccacaatttttcaacctcccatctatgtcactatctccattatcttccataaactctgtaagttgttcctcccacatattgtcttctcttcttctataaatggccaccactaagtcgggttcgaagttaccttccccagctaaaaaaatttctaaaatttctaagaaacctcctacaaattcatctaaagttgatcctaagatgagtttgaagcgcattgcgaagaaaggaatgagtgatgttgcagagccatctggttctaagaaaagacctattctagataagattgagtctcgtaagg

SEQ ID NO: 256660 - DNA, 813 bp, Cannabis indica
catactctgcagcaataaatgtgctctattgaacttgtataattttatcatgtaatatgctctgaaaacaatattttgtaatagcatagaacttcaaataactaaacttgctgtcattctcttaggattctacatacaagtattttgagataatcttggttgatgctgctcacaatgcaatccgtaacgacccaaggatcaactggatctgcaatcctgttcacaagcacagagagcttcgtggactcacttctgctggaaagaaatacagaggtctgcgcggtaagggacaccgataccacaaaaacatgccatccaggagggcaacatggaagaaaaacaacaccgtctctcttcgacgttaccgttgataatcgccatgactttgatggtgcgtggatctgtaactgttttatcttcagctctaggaagtttaagccggaaaagactatctccatgtttttattattttattgctgagacatggtcagtcatattgttgttttggctgtgaagttttgttcttagtaatttagtttttgaattttaacatgttatatcgcctgtgtaatcattcccaatggtttgatttgaattttttgttcttaaacatagtcaactatttggtgtctatggatgaaaacaggatgatgagcttgcacgagagccattcactgaacacagctgagcttcttgcaaaggccatatgttctaattttattcaaaaacacataagaccttctctgcaagatctaaaatttatgttaaatttgacacaaaaaaatgagtttgtgctatatttagcccactatt

SEQ ID NO: 256661 - DNA, 1022 bp, Cannabis indica
attcttattcttaaaaaaaatagactagtaaacaagttaatcaaatttgttctttattcccattccttgatcaccttttgttttggacgatagactaaaatgcaccaatatattggtaagagtgactatcatcccaaatgaaaaatagacttaaatgctacaatatcgaaaaataaaataataataataaaaaaaattattccatatattatttttttaatttttttttttcaaatttacggtttgggtttttaaagtagtttcttcggtgtggtttttatgtgggttgttatacgatttttatttgcgatttagattgttccgttagttgcaatatgaatttctatgtaaaaaaccgtaaaaatacaaaagaaaaaaaaaactattttaaagtgtaaaaataattgtcaattacataatagtgtattagaaatttaacaaatccatggagtaaatacttacgaaaccatttaagataattgtttaataatatttttcacattggtctttgacctattgtgatggcaaatttattaaatataaaaaaaagaggaaaagtaaaagaagagacaaatgtggtgaaggtgcttcggaccgaagctatttggaaattaaagcatacaatactgaggatgaatgggacgccaaaacaaacagtttggtggacaaaacaaatacaaaaaaacttaatattatataataataataataaaaaaaaaaaaaaaaaaaaaaataataataataataataataatgtactcatcatattgtgtatttatacatatcatttttaccaagtctacaacaagactattatagaaccaggaaaagtagtcaatgcctgattgcgacttctttaacaattttatttaattataccttcttcttactaattaattaatagtatataaaaatttgatttggcaaaaatgcccatgtgagtcccaatatatatatatgtgtgttcaaaaactttggtctcgactttatggggtggtggtaagtgtatggaattgtcttct

SEQ ID NO: 256662 - DNA, 819 bp, Cannabis indica
agtctttaatccaccaaaattcaagtgatcatagcaaatatgtcatagccatgatgcatctttcaatttttgtgataagcacaaattagtggtattgtagagataaagtgggaacattcgattcaatgtcatgttaacttgatcaattaagctcaactttacatttttgatccgacatactctatttttgatagaaatctcatacccattttcttatagttgacccacaataagtaaattggtttttaaatctagaacaaaaagaatattagaaatagtgtaagtaaagttttctttagtttggatagttacctatcattttcccatgacagaaattatgaagttgtagccaaacttgacagcgttacggaacgatgtagtgatttaaaataaacgctattgaattatttttatatatctatattatattaaatgtgagtataaaatagaaaatgttgtttatttttttaaaaaaaaatattacaatttaaatttaaaactcattacacatatttcttatcttttatcttatattacatgtggttatataacataaagtattttttttaaaaaaaattataattcaaatttaaactcattacacatctaaaaaatatctttctattgttactttttttacccaacccacaatatcttaaaaaaaatatatttctattataattttctttttaaacaataaaatataaaaatatttatatttttttaaagaaatactattgtgatgtgtcgcggttatttattacattcatcaaaaataaaaaattatctttctatcaaaattttaaaaataaaataaag

SEQ ID NO: 256663 - DNA, 935 bp, Cannabis indica
aaaacattgaatggagtagatttgattaaaaaaaaataaatacataatttaaaatattaaataaatttaaattagttcaataaatatgtatatatacatgaaatatatctacttgatgaaactaatccaatgtaacattacagtggattggattagtttagatggtataaatggattgtttagatggtagacaaactaagtaaatagaatcggttggtaaaatttaacgtgcaatgtataattggctcgaatttgaataaatctaaaaacattagatgtgatctctctcaaattgatctgtacatacggactcaatcttaaattaagaccgattaaatctatgctaaagccctaaacttagggcccaaaaatttatgcacatgtatgacattatagaaaaattaataattgttgtttgtgaattagttgtaataatacccaagctcacctacctatattacctttaataaggatggaaaaagaaattatggatatccgttttttcaatttcatttattaaaatatgttaattttcaggctcaactacaatatcatacaaaacacttgctttgctttttattattaggtatataacaatactacaaagacaaattaatagctaggtatgtaataaggtagctatatagcatatatatatatagctacataaacaaacttaaccaaatatatatgccaacattttggaaccccaaataactataaagagaaaaaaaaacattacttagagatgatgtatagcttgataaagacctcgctcgtgaagtaaatcatcgtacttaccatccaaccaattaagagagaatgatcaatacattgcgattcatccttgaaagagagagtgatacaattaattaattggctgggcgtgggggagatttgtaaaaagtaggatgattggtgttggtgttggtgtt

SEQ ID NO: 256664 - DNA, 1095 bp, Cannabis indica
tccttctatattatcagtccacacaatttgttcatcgagtatcatttcccatttttctttgggtaagtcactttattcttcttgttcttcctttttatatttttctctttcatttcttggttttgatctagatattgtaattgttggttctcgcatgtatggactagcgaggtgatagatttgcagaaaccaagttcactaagaagcaagtcatggagcaccatgattgcattgtttgatctgggtatattgagtatttatgattttattttttatttgagtttctaatttagatatttagttgtcgtacggattaactttgaaataattctaagggtatcatgcttaaaaaattactaatatgtattttgtatactctcatatattatttgatgtgtgttcatatatatcttaaatatattatattattttttccctcatttctttacaatcactaaaccctttctttttatctattttatggattttattattgtattatttgattttaaattttgattaccaattgtatctcattttcacatgctcgatccttgttgtttcacctgcttgagctccattttctctagaaggaagtaccaaatccaaatctcaaacgaggggaccgtcaaaactagttatctcaagaacgtatggtacgtcatttatgttgttgtatttcttcttctacagaaaaataaaggatcataatacaatttcggaatatggcttttattcaattctcttggtattgatttgaatttatctatcaagtgtagcaaaagaatttttattgctttgtatctttgaaattggcagaaaattaacttaaacatgtgatttctttaaataattacaagagcaaatcaatgtttaaaattgtatttttattgcgcacctcagtttaaggaggaaaaaaaatacactattgcatgcgcctcagtatttaggggagaggcgtacgcctcaaacttgtgaggcggtagaaaatcgcttgaggcgtaaaaacatgtgaggcgcaagtctcaaaaggaaaaccaatactatagggtgttttcagctcatttttatttaataaacttaaaaaaaaaaaaa

SEQ ID NO: 256665 - DNA, 2083 bp, Cannabis indica
ctaaaaattacataagtctaattataaatttctagaagatatatttttgagaagtgctaataattataatttcttattacaacttttttagtaaactttcacatctgaaatcacatgtttagaatttattttttttatagtgatactcgttatagttatagtatcattcttgtaaatttttgaaaaattctgaatggtttacaatgtcgaaaacattgttcctgatattcaagtttactacgcacgttcaaaaaacttcaaacagatttttggcactgtaaactatttgaaaatttttaaaaatttacagagattatgttgtaagcataacgaacaaaaccataaaaaaattcaaaaaaaaatattttggcatgatttttgggcacgaaaaatgactaagaaattataatatataggaggttgacagtagcacacatctatattttttagaactcatatgccaaaaactccaatttctcaatctaacaaatagaataatgacatcttatcaaacctaattcccttatttataatataagtttttttaatgattatttataatattagtttttttttcaaagaatatattcttataattctcaaaaagccaaaaataaaagattaatacaaaatagtcaagaattagagacaagacggtaaatcagactatcgaactcgagaagagtgcaagagaatgagtcgtagcactttgagcccctttacaatgagtaagggaaataaaagagaaagaagactaagtatgtaaatatcaatccttattattattagcttgagcaataatataattagttaacattgttttcttttgttttagttaataaagataattaaaaaaatcaaaattaaaagattcagagagttccaagactatttactactcccaacatctcatttagtgttgtaagttcgtgcctgtcgtgctgactcaactcgtatttatccgtgttttacaaaaaacgtgtcgtgtcgtgccacagaaaaatacgggtcgtaccgtgtcgtgctaatatgggcccgatacggtctgatatttttatgtcatactcagattcgtgtcgtgctttgctcgtgccgacccgtatttcttaaacaggccagcccattttcatatctcggcttaaattcatgctttacctttttattttttttacaattactaaattatatgtatatttatataacttttgaataatattttacagaaaatcatataaaaaaaattattaacatcattagaatttcaatatttacttataaaaacttaaatttttatatcacaccgtataaataaattaatatttaatcttagtttttcgtgttttaattataaaattataatatttaatattatatttaaaatttattattattttaacttatttataattaataaatttatatcttattattattaaataagggttttgaatatgtcgtgtcgtgttttttgagcttgtcatgtgtcgtactttttaggctagtctattcgtacatttcgtgtttctcgtgttgtatcgtgcttaaagatatattttttatgctgtgtcgtgccaatttgtagcatcatgtcatgtcgtgccaatttgtagcattgtgccttgtcatgtccaagcctgtattttttgtgcctagtcgtgctcgtgccttctgggctcatgctggtttctgttaaccccaaaaatttgctcttgtaatttttaaggttagttgaacaaggcatgaggatgacaatggcacttagtcttaagagtgagaaagtcactcgacctcaagagtgacaaaagtcactcgacctcaagagtgacaaaagtcactcgaccaagatagtgacaaagtcactcggccatgagaatgacaatgtcactcggccatgcctcctgcaaagtcacttggccatgcctcttgcaaagtcactcggccaggcctcctgcaatgtcactcggtcatgacattgcagaacttggtgcaaccttcccaagcaagaggagagtgaagcaacaagaatacaagcacaaggttagtgtaacaccctaactaatataggcgtgttatcgtgattttt

SEQ ID NO: 256666 - DNA, 1242 bp, Cannabis indica
tcatgctggtttgcctgagaaggctttgcagttacttggcaaaatggttgttgaaggaaaattgcctgatctcattacttataacacaattgtttatgcctactgtaagcagggaaaggtaaggtatgcaatccaactattggaaagggttggtggatcaaatgagtggcatccggatgtaatgacatacaccagtctcttgtggggaatctgtagttcgataggtttagatgaagcagttgtatgtcttcataagatggtaagtgaagagatctttcctaacattgctacatggaacgtcttagtccgatgcttatttgattctcttggtcatttggggccaatatacattgtcgatgaaattctgggtaacaaatgagtctctcttgaatttgattctcttgaagtgaatcaactcatttgtcgaagttcattttgaaaggctatgaattttgctggggctgccctggttgtgttctcaggtcaaatgcacatgtaaggacaatgaaagagggattctgccttctgaggacaatgattactttatcacttggtgtcaacctaagaaatttgagttatcttttgccaactttggcacctaaatagcttaaaattcatgagtgtggtacaagtacatactccagttacaaatacaagatcatactggcttgacatgggctactgtgttttaggaaggtggtgattatgaataatgggtgtctctgctaaagatttatattacttggaatttgaagatgagggcaaataattcgaaatgttttatttaccaagtttacacgtttaaattgaaaatttaagaagaaacatacagtgatgaacaacttgtaaaatcagttgtgatgaaagcagaaaagggtgtgtttttcttcggaggccagagttgttctagatatgttagagaagctgaaaagagaagattttagctctgatccaaaagtagaaacaatcacttctgactttggattaaccaaagaccgaagctgtgttttaaatggcatccttgattttgtaaatccttgaatgttttttttctacattgtcattacatatttactttctccttttgaagtttattatttaaataagataatatgctcttttgttagcatttgaactttgattctctaatatatacggaaggtagtttaaccatattaaatcaactataattacaaacatgtattgtcactccaatttttttttgaagggggcatgtgggta

SEQ ID NO: 256667 - DNA, 1479 bp, Cannabis indica
tttttgtggtgcagtttctgcggtttttagtttcgcggtgcgggtgcggtttgaattgaaagaactacataggcgagttggtttgaaaaaatgttcaataactgcaccacccgcaccgcgacactcctgctatatagagtatgatattgagtcttgtcttttgatatggttatgatgttctctttatagtgtgttgtgtgttgtgttattttccctattgagtgtttgtcttgttatttctctgtttgtctcatatggcttcaacaagttcattgctaaaagcgattgaagatcagtatactaatatagaaattgaagctgaagatgatagtaattttgcttttgacttcatagatgatggaaaccaatctgttgatgaccgatggtgtattgtggagaaattcctaacaaaacgggcaattgattttgatactatgcgtcacatgatggcttcccttttttaactaggtagagggatgtatgtcaaagaacttgagctgaatcggtacttgtttcaattttatcatgagcttgatcttgaaaaggtgattgaaggtagtccttagacgtttaattgtatccagtttgtctttgaatgtctacaacatggctaagatcctcggtccctagttattaacaaacatgatatgtgggttcaagtttatggcttacagttggggtttaaatctgaacatgtcctacgtgagttagggggctatattggaacatttgtgaaaatgaatcaaaagaattttcagggcatttggcatgactatttactggttcgtgtgactctggacattaccattctgttaaaaagaagaaagaagcttcgacgtactgctaccgaggaaggtttctgggctatttttatatatgaatatgttcctacattctgttttatatgtgagataattacccattcggataaattttgtgcgcaactttttgtgctacccgcggataaaattgttaaaccttatgtgactggtatgcgtgctcaaccaaggagaaggaatcatttgatcggagctaagtggcttagaaccagagctgatgaaaacatagctttctggtggcatgtctggctctgtttctctcccctctgtataggttcacggtcaaccatcttcaattggagggattatggttgaaaatcgtggagaatcaagaggaagtaaacgtaggagaatagaggagctacagtcatgtgggccatgtgtgttggacttttctgatattaaacgtaggattctcaacttaacatttctgatattaaacgtaggagaatagaggagctacagtcatgtgggccatgtgtgttggacttttctaaaaatgggtcggccgtagagacagttaaagacaatatagaagtacatgaaagtgagattattgtaaatgagggttcaaaaatgggttgttggtgggtgctggttcccaagcccaccgctcattatgagtatactaagctggaat

SEQ ID NO: 256668 - DNA, 663 bp, Cannabis indica
taaaaaatcaaatttcccttctcaaattttgtcacctatttaatatttcaccataaatcatcaaaactccctctctttttctctctctcaccaaatagccaaaactttgaccttaaaaaaccaaactcaaaaaccgcccaaaaacaaatttcacctcccttttcccttattccttccttctaaaacttcattccctccaaaaataaaaaacttccaaatgtaaataatctatataaattagctcaacccacctgctctataatctcaccaatctcacatttccatcaatcttgctttcaccattgccagtacaaccattaaaatggatctcactaatgtcctttccgtccgtaccaccaattacaacagcaacaacaacaaagagaataacaatgcttcctccatttcttctcccaagatctcaactttccaagaagatcaacaaaaagaagaagcttcagaggaagcctttggccgacattaccaactcatttaatagtaattgcttagctccatcgttttattcttttgattctgatgaatggggtcttctacctttactgcaaattcataatggttctgattcgctcaggatgagaaaggcttcggcgccgactcttactgctcctgctcggatgtccatctccaaatccttgagaataa

SEQ ID NO: 256669 - DNA, 1130 bp, Cannabis indica
gaaaaaataattaaacgataaataatatatctattatttataattatatttttaataattatagtaataaatcaatcatatttatttttttcttaaaaaaaatcaattagacataaatgcccaaccttaatttattgtgattttactatagaataaaataataaaataccgcgtcaaagaaaaaaaacaattaaatcaatacattatataagaaagcctattctcaaaaaaaatataagaaagtctctcttcttacccttcttcaatattcaatcatgacttttatgtaagacacaaaaactccaactactaataataatagtagagaatcacaataaagaagacaaaagatagaaataaagaaattggaaaagaagggcatcaaacaagtcaccttctccaaacgacgctctaatttgatcaagaaagtcggcgagcttagcgttcttggcgtgtctaaggtggccgccttcgtctgacggtattattgtggtggtgaacttttaattttcttcttatttatttattactaatggttattcataaatttactggtaattgtgatataaaataaaatagtatgcagtatatttatgtgtttttagttttgatcattaactaataaaaaatatttaataatatattttgaatattattttaatttttttgacagaaaaaaatatcatactattaaaaacgacatgatccacgagtgcgtctccaaaaggagaagagtttgacattcggagaaaagacgaaggtggtcggccaccctagatcggtgatggaggcacatggagactatatatgagggcccttaaattgttgtttttatatattttcatgtataataaatgcaacaaatatatatatatataataataggcccctgaattaattttttcacaattttttcctcagacactgccttagacacaaaagaaactgagctcgacgactttcttgaacaaattggagcattgtttggagaagttgacttgtttgttgcttttcttttccaatttcttgatttctatcttttgtcttccttaggtggttctttactattggtattattagttggagtttttgtattttccatgaaacccatgattgaatattgaagaaga

SEQ ID NO: 256670 - DNA, 1366 bp, Cannabis indica
taggtttagctactttaaacagttcgttatgtagggcaaatggttcatctggtcttataacataaagcccctgttccatggatgcaacacaaatttgaatgtcatttcgagatatggtagaaccagaacttgaaaaatctaatttgtattgtcgcaattgtagacatgaaacagaaatcaagtttctatggaaatttggaatgaataagacattgtctaattctaaaattctgtttcaatcactttattgtttaaagaatatttgatatctaataattactacttcatcaagaacatattatatttttcgaattaatcatattgaaattcaaatccaaatataataattcaaatgtccatctaatgaattcaataaccaagtcatccttctcttaatggatatgtttctcaactatctcatatacatgtattcattttcataatcaatataatttttaatatggttagagtttctcacttattaaaaatttcatatttaatatcatcttgatgtattaataattattgaggctattaccgtatgattattgaataatcacagtgcgttgcggtttgatttcactgcaacaaacaacgaagcagagtatgaggcactcctagcaacactatggttagcactagcaatcaaagctgagtcgctcaaattctatagtgactgacaactagtttttaatcagttctcaacaagtatcaagctcgaggataaaacattgtaacacacttagcaaagctagagatcaattagcctagctcaaacactactctatccaacaagtaccacatgaactaaacgcaaatgtagatcccatcctcatgatcaacaacaatccttcacagatgaccttgatcgcataatacttagaataaggtattcttccaactcacttgaaagaagctaaaaagtagatgagaaaaatagcatgcttcatcatcatagatggagtaatgtatagaagtgatattctatgccacttttgaggtgtgtcatgaaagaagaatccaagctcctcatagttgaggtgcgtatgggcatttgtggaaaccatggtaaggggtatagcctgtcaaagaagatattgaggcaagggtatttttgaccaacaatgactgaagactcaatggactatgtcaaaaagtgtgacaagtgtcgaagattgtcaaaaatacctaaagctaccccaaattgacaaaagtgtatgtaatctccctagccatttgttgtctaggaaattggcctcataggtttgctacctaagcggaaagtcagagttcaatatgcaatagtggtggtggattacttcaccaaatgggctgaagtggagccctttgttgggttttgtgccct

SEQ ID NO: 256671 - DNA, 676 bp, Cannabis indica
aatgtaagggacacatgtgtgtgtgttatatttatgtatctgtgtggctgcctccttttaaaagaatatgatgagattattgcatggttgatgtttttaattgtgttatgttgtgtgagtgcttgtacatggtatctttttttttattgagctttgtagctcaccccatatttactttccatgtgcagataagtaagcctatagactttccatggcaagtttagttttggcagtgtagagtatatctcgtgagatcatataactacgtgtggtcttggctatcttctgctgaaagttattttcaaattcataaaacttatttgtgaatattgtcttttagttttctattacttaaattatgatattttgatttcaattaggtacccaactttaaaaatttgtttttaataaaggaaacatacgcgaattcatttatggtattttcttttaattaataaatgagagtgttacaaatagggaacaagattacagttctaagaacatataatggacttgaattctattcagatgaatttaaactattctgtgcagataagtaagcctataaactttggatgataagttggatttaggcaaagtggggtgtatctcgtaagatcatgtaatcttagccatttcctctgaaagtcactttcaacgtgtggatgttgtcttt

SEQ ID NO: 256672 - DNA, 822 bp, Cannabis indica
atttatttatatataatcaattattaagtttggattttggattgaaattagaaaaaaaaacatatttccgactacttcggattgccaccaagatgggccttcctgattgggcccaccattttcactccaaatcacaacttaatttgaccagccactccacgagtgacatgtgtaggtcccgatgatgacacgtggaaacggtaaaagtgtattgacggatgggatttgtccagggatatgcggtgcaccgtcctgattgtgtggttttgtttagtgtgggccgtggggcccacattacggcccacattatgctttgttgtgtttgttctcttccagatcagaataaccatgtggaatgtttgtagccttaaactctcctgaaacgtgattagaaattaagaagagtaattaacgctcactatcattaatttattatttatcagttatgagattattatattaatttttaaaaaagtaaatagaaatattcattaattgacacatccacgtaattttttacaagtataatcatctaaaataagctaattaagtcgttataaaaaaatagaaagaaaatgttaatataaagccggccttgagattttgaaattgggttggttttagaaaaaaggtaaaaaagaaaattattgggtaacctgcctaaactaaatattacatcaaaaagagtgtgaaagagtgaaattctaatccaaataaatatataataacaaaaagtcataagtaataattagtctaaaacctttcactagaataaaaatatttctaaaaaaaattaggaataaaaacacataaaacaaggac

SEQ ID NO: 256673 - DNA, 572 bp, Cannabis indica
ggcatgcggcccaatctgagtcggcataagcttcaagcttaatttctgctgttgatgacagcataattccttgtccaggagtagctttcacgtactgcaatagtctttgagctgctgtcatgtggctaatctttggaacagcaagaaattggctaagcttattgactgaaaatgatagatcgggccttgtaatggttaggtattgcagcttaccaaccatttttctgtatagtgtaggatcagccagcccttccttggtatcttgggaaagttttagattagcttccatgggggtactcactggtttgcttcccaagtacccaaggtcttctaaaagttgaagggcataccccctttgagaaacaaatatgccttgtttagaccttgctatttccaatatagtatggatctctgctctgatcaaaacgccgaggcacaggatcattatcaagcactgaaaactgattcgcatcattgctggagctgtcacgagcaccttgactccgagtgttggtcgccttcctcgccatgaacacaaacagatcaaggaagagcagcacacaaaaatggtg

SEQ ID NO: 256674 - DNA, 1051 bp, Cannabis indica
attcaaatatatcaccataaatttatagatcataattaaaagtctaattccaaattaaactctaattatctgctaattctcatgctgaaatgaagcagtctttacattaaaggcaaatcaatacgaattttcactctaatccgtagatattctctccaaattccttgggtctgattcaagaaacattccaatatagttaccaacatctctagttacacgtgccaacataaagcccaatgtcatctcatgcagttgcactcaaaaattcaagcaattcaaagtgaccaaccgaggattttcactagattttcagagctcaaaaattaggggaacgtgatcaaaagttcagggacttccttcaataacccgatcaatatttatattgtggtagaactgaaagaaaaagtgattcggatccaattccttcacgtacattcctttacctagttgccacaaggtggccattttgtgttgcatggcttgaaagtcaatagaactatttgttaaaaaaatgtcctaccaaacaccatttgtcgtctatcttagaaagatcatctacattatcattgtatcgtataacagcatcttcatcctcaccaatattatcactcacaaactgtggttccatactagtaccgcctctttatctaggattcatagagataaatttttggccaaaaaacaagcaaagagacgctcactaacacaaagagaaaagctcagacaatgtcatacgacaagacataattttaattaatatgcacttttgcattaaataacttgaattattattatttaataaattattaagtgaacattacatgcatagtaaattttgaatcgaaatttacaactatacattgcagcacaaaagtaaagttgattcaaagatatcacaaaactattttttgtgttaaatatagctcaacttttacaattcttattggagatggtataacaaaatacaatttttgctataatgtaaaatttttatcatcatatacttacttctatgtcacttttattattttattaatatatttagttataa

SEQ ID NO: 256675 - DNA, 1752 bp, Cannabis indica
ttaaatataatctgtttgatattgattttcagcaaatttaagtagagtaataatatgttcttactagccaaagagtaatacctttggatagttatacttagaattttattgttttttagtaatcttgagcttgtgatttgggttgggttcaaattttgtttgtattttaatttttattttgaagattgtcattctaatataactatattttttggtttggtgttatgttttttcagtttcgctacctctgactgacgacaactattataatgggaagatattttttcaatatgacggagtgttgtttgaagactttataactttattgtcttaatttttggaggcagttttgtcccatgtggcttgcaataagagttttgcaactcatagtttgacaaaatatacccttcggttagacgatgagccaggcccggccttgggcataggcgggctaggcctgtgcctaaggcccacctagcccaggagcccaaaaaaaattttcctttaaaaattatacaataattgtttactgattttgaaaaataccagattttttttctattaagggtccaaaataattttttttctatggtccactaaatttcagggtcggccctgcgatgagctatcctggttcaaggaagttccaccgccatttatagtttactgtattattaatcatgtgactttgttcaccgcataaaaaaaaataggatcaaaatttattttaaattagtgtgaaattataatatttttatcatttcgaaacaaagattgaaaagtaaaatacaatttttttttattatctaattactttttaattatctatgctaatatcaatatcattttatataaaggtaatatattcatatatcttataatatttaactttttgttaaattttattatttgcaacatattattcatttctaaaactattaaaatatgcattatctatttttaatttagatggaaaaacgccaagagccacttacagccacttcaagaatagacattattatgtcaactcaacgggagtagttgttgatacccattggtctccacaaaaggatggggtagtatataatttttgccgaaccctaaacattactaatcttggctcttggtataacgtggaagtcacctttaaaattcaaacacaagatggttcttgggacaacaagaaagtcaaaaataaaatagtatgaagttccaaattaatctctttgttactcttatatagtgatttctatgccaattagcgaaggttgataatttgtttcttctcttttgtttaaaattaaaattctgaattacataagaaataataatattatgaaatatttaatctatactctcaattcccatcaacactataatataaaatttataagcgtaattggtacataaaagtattatggagatttttatgtccaacgtaattggtgcacgatatgaaagtgttatggaaattttcatatccaacctaattggtgcaggacatgaaagtgtgatgaaaattttttcatatccaatattaataatcataaaaaattgctagacatgaaaaaggttagcatatgtaatacattatattttaacttatttattttgtcttgtccagcttgagtctcattttaaaaaaataataatagaaatgggttgttcaccacttcacctcacacatattacacaccctcaaaaagtacaattgtgtaaacctattgtaagaacccaacattttaccacaaa

SEQ ID NO: 256676 - DNA, 1422 bp, Cannabis indica
cgccaaggagatccaatgtctccacttatctttatcctcggtatggaatacttatcgaggatcatggataaagtgggaaggaaaaagaaattcaagtttcatggaagatgcaagggacttaagctcaatcacttatactttgcagatgacgtattgcttttttgtcatggagatttcaagtcaattaatttgatgcttaaagggctcaaactgttcttggaaacctcaggtctgaaaccaagtgttgagaaatcttttatatactgctcaggcatgaatcaaattgaggttcaacgagtgatggattcttctagctttgcacgaagtcaacttccatttcagtatctaggggtgcccatttgctcaaggaaactttcacaggctgagtgctcaaatttaattgagaagatggtcctcaggattcgattatggagctcacgaaacatttctttttcaggaagaacgacactcataaatgcagtgttgatagcaatacatgcgtattggggacaaataatgatcctgccaaagagggtcttgaagaaaattattgccatttgtaagtccttcctttggagaggcacgacaaaatataatgggtcaggctacattgcttggtctggtctttgtaaggatcgcaaggagggaagcttggggtttcagaatttactactctggaataaggctggacttggtaaatatatttgggcattggccactaagcaagataacatatgggttaaatgggtgcatagtgtgtacttaaaaggaagtaattggtgggactataagagtgccatccaaagcagctggtgcgacatatcaatatgcaacaatttctccaaagtaggcatacaatcaagcaaggatactctttgcttgctctgaaacatgaaaataaaagttggtatggagaggtacggggacgattcttaattcttaaacatcgattctttatatggcttgctgtacttaatcgattacaaacaaatgataggttgcttcatttcaatagttacagacaagagacgcttgatttgtgatttaggagatgaaagcaatgtgcacctattttttgaatgccattttaggagtaagtgctttaaagacactgtcaattggctaggctgtaacctcttggcagctgctacactctcatagatcttgcgagagatcaatcaaacagcacataccaattttcaacaataggtttgtgcaacaacaatagtcgcaacaatctatcttatatggagaagccgaaatgaagttccatggcaccaaaaattgagtacaatacaggtagtaactaagagaatgcaacaagaagtgaagttgtgaatcacaaagatatagccaaaaaagatgaggggaatagatatagaatggtttgaacaattttaattagtatataaaaaaacatat

SEQ ID NO: 256677 - DNA, 832 bp, Cannabis indica
tggctcgacacgtacattcacctagtatatatattagctgccaatttctctagtcttattttgtattaccatttatcaatttttctttgatttagggagtgtttagtaaactaaatcttggcttagacttagattcacactcgcacttacaattagatcccaatttcgaccccgactctagactcaaacctcaaatctcgacttctggcttagacattgaatttctatttattttctctctcttcacttaaattaaaaaaatataattacgtaatagatttttctttctcatttttaaaataaaaaaatatagtcatcgaacatatttttattttttctaaattaatatcaaaatataaaatgatatatttattgttttaataaaaatcttaccaaatgcacatggatagattttttgtttttgagtgcctcaatagttgaactcacttgtgagaaggtggcaagtagtggcaaccaagcataggactggggtggtttatacccacctaaaattttaatatttaagttttttatttataatttagttttttttttttcaacgttaattttataaatattcttatatcactattctctttcttgtatatttctttgacattatatatactttttaaaattaatttttattatatcttaacttttacgtttattttcctttctaattttttttttcacctgttaaacaaaattcttggaccagcccttggtggcaagtactgtattattttaatatcgactctcactaaaaaaaaaaacttataaaaaatacaaaaaattattaactaattataaagagtcatattaaaataaa

SEQ ID NO: 256678 - DNA, 902 bp, Cannabis indica
atgacttttatggtctttgtgaataacttaacttgtattgtggatatgaattcttttctaggcttttagctttgattagctaatctgtattttggatataacttctgcttttctatgtgtctgactgtactgtagtgctctgatagttctcaatacaatattcattttttaagtacttgtgtttgattcaattgctggttttcaacatgattagcatcgtatttatatatttctaaccttatctaacgaaaactatctcatggtctctttttccttaaatatttatggtctaaattagtttctgatcttcatagttcatagttcatacttttgtagaaagtttttaacatttggaggttttttcccaaatgatatggtcttgtagtcaattttgttctttaattttggtaatttagtaatcaatactatgatagatactttttcttccatatttttcaaccattcgaagcaattttgtgacataatcgaaagttcttccgaagaagaggatcttacaatttaacatgtctaccatttgatgtaggaaactaggttggccttcaaaatatctgtataatagtgtgattcatctatcaagaaatttttggatttccaacaatccatgtcggtactggactatgggaaatgatgaagagggaaagtcggctaaatccgacaaaatttctctgcctgcaaccccggtaagctgagggcagaaattttctttttctgatttagagaaagcatcagtcttgtttgcttcattataatgtaggtttcttttattctaggtattaataattaattttatttatttatcatagtatatattatagtggaaaaataattatataatgatttttgtattttttttagagttagatttagagagaatttaagta

SEQ ID NO: 256679 - DNA, 1292 bp, Cannabis indica
attgaacttagaatttaattatacttatcattattattaagggccaaatttttaagattagaacagggcctctaaaatgtttaagacggccctggtggtattagaatttttatttttatatctattaacagaatttttatttttatttttatttttgcaaatatgatttatctattttattgattctgctctccttttaattgatatatatatatcattagaattattatcttatttttactaatggaaatttttattttttcctaaaaaaaaaaaaaaatcgaattaatatgctaagagtttcagcatagaaataaataaataatgaatattattttacaagtggggtacttaagatgcatcaagtagtgtataattagtaacacagtcaccattttattccagaaaaatattcctgttatgtcatttaatttttaatagattcgaatacgactttttaagagtaatttataactatatttttgaaacaatttagtatataatttttttctgaatagatttataagtatataattttaatttaaaaggttatggaaaccctttagtttcataatatgtaggaattaaaaattgctttgtaaatgaatttgtcaacaagtgaaaagtgatatgagcaaaaggtaaacaactactagttatgaaatttctccgttcaaaataattaaataaataaataaaaaataatgaaatttcagaacttaaaaattttgattttctgatttttttttttttttaagaatcctcaatttgatcgtctgtagtaaattcattcttaatttattgacaaatatttgaatagattttttttatataaaaataaaatcatagaagctcttaatttttaaaacaaaaatcatatttttgtaattgaatcaataatatgagtttgattggaattttttttaaaaaaaaaccatagaagcttttaattttaatcataaattttttaatttttttaccatcattcaatttattaatatagggatgcatacgcgcgacgagtaattagttgagagtactcttttgtcttattacggttaaaaattttaataaaaagataactaatatattaagcgggtatcatccacttccttgctctctttgctattcgaagataaaaaataatcctcgtttccactctatttcactatttagattggaaaataaccgccgcagctcatatctaacgtaaaaaagtacactccctttaataattttaagttctttttttttagttattttattttttttttaattttgtaactaattct

SEQ ID NO: 256680 - DNA, 603 bp, Cannabis indica
ggatggataaagcttccttgggcggatacagtggattcacattcccatacttcaataactattagctctttaagttctttaaccatgcaagctatctctccaatggaccatgaagcttgcgaatctgatctcgctggaacctcatcttttgatagcgatgttggaataaagctatcatcttttttaggttcatccacaaatgctcctccatcagagttgaagatttgattgtctgagagatagctcatctaaaagatagaggatcttttcaacgtgctgtgcgtgaaatttcaagaaaagtgtcctcacacgtataagttgacaataataaagcaagtaaaaataaatttccaagaaaatcacaagtattcatgctgtttttcatgccctatgtgaaaaacctataggcatgtacggacattcaaagggttctacctaaaaggtgcaagcatccgtagttcataacaaaaaagatgtgaatattcaagttacaagtaaaagttttccaaaaaagtccccctattggcttattcttcttagagatttattgtccaaaatctatcctatcgttttcatacaatttctacccaaaaaactacagaa

SEQ ID NO: 256681 - DNA, 2400 bp, Cannabis indica
atttttcatattccaattattttaactatatactctgaaattcttagtggtgaaaagccatttaagtattttagaatgtggtcatgacacacacagttctcagggattgtttctaagatctggcagcagcaaattaaaggtactcttgtgtactagctggtgacccgactgaagatgcttaaaacagagctaaagaagctaaataaagaatcattctcaaacattaaggcaaaggaaataaaaataaaaaatttactcacagcctaccaagaggagttacaaaaggaccctttcaacaatgaactgcagttgaaggaaaaaaacaccagggaggcctacattcaagcacagaaggatttgtattcttttttgcaacaaaaagctaaggtcaactgggttaaagggggtgatgacaacactgcattttttcatgccatcattaaagataggagaacgcaaaatcgaattttatccattgaatccaaagaacgaacaagatgtgaagacccaaagcaagtgactgaggcattcctagcttaattactacaaaagcttgctaggaaggaatcttagcaacaagaagcaagtgaagagtaacattatgagtcagggaccactggtgacatgtgaacaggctgaaatgttacttagggacattacaaaagaagaggtcagagaagttttatttggggttcctagatctaaagccccaagcccagatggttactcaagctacttttttcaggagaactgggaaattataggagatgatctctttggagcagtgtcctcatttctttagtctggtcagctcctcaaagaaataaattctattgctattacacttattctcaagattaagtgtctaaatacagtgagtgattatagacctattgcttgctacactgtcatcaataaaatagcaacaaagctgatatgttctagactcaaacacatcttgccagaccttatagctcagaatcaaggggggtttgtctcaggtagattcatagctcacaatataatgatatgtcaggatttaatcagatattttgggagaaaatcgaccaaaccaggatgtgtgataaagcttgacattcagaaggcctatgacaccctggattgggactacctggaagaaatcttgcaagctttcaagttccctcacaagttcataaagcttattatgacttgtgtaagaactcctagatactcattaatgttcaatggcactatgcgtggttattttgaggctagcagaggcttaaggcagcgagatcatatgtctcctctgctctttgttcttgaaatgtaatacctatccaggatcttgaagaaagcaggggctaaagaaaagttcaaattctttgaaaggtgtaaagatctcaatcttaaccacctatgcttttgcagatgatgtgatcttattctgccatggtgactttaaaagtatctattgtatgctgcatgctttgaagttgctctctagctcatctggactacatccaaacccttcgaaatcagcaatttattgctgtggtatggaagaaagagaggttcaaagggtggtagatatttctggttttagtagaaaggaaactccctttaagtaacttggcattccaatatgtgctaagagaatttcaagcaaagagtgtgctttcttggtggagaagatgacaccaagaatataagggtatagagttcaaggaatatttcatatgctggtagaattgtgttaatcaattcagttctgttagctatttattcatattggagtcaaataatgatcttaccaaagaagattataaagaacattgaagccatttgcagggcttttctttgaagggccaatacatgttacaaggggtaggtcttgtttcatgggattcagtatgccagtctaaaataacaggggaaattgggtttagaatggtggaagattggaacctaacagctataacaaagtatatttgggcaatagcaaataaagaagataaattatggatcaaataggtgcacgatgtgtacattaaaggggaagattggtggagttatcaagctccacttcaagcaagctagtattggaatagaggattgtggcagccaaggaaacagccaggcaatccatggattttcagcagctgatgagagaaagtaagttttaaatttcaagagcttataaaatggtcagaccctaaggagaaaaggtgcaatggtctcagattgtatggagcagattgaatatgtccaggcatagtgtaaagactcaattttgaccgagtcaaatatatatataaaataataattaaataatatatatatatgtatgtataaaaaaaaacaaaacaaaaaaataaataacagaccctccccttcgtcccctctctctctctatct

SEQ ID NO: 256682 - DNA, 1734 bp, Cannabis indica
ttaacacctttttcggtgttatatcgctattaatataattaagtattaggttgcatgtaacttaataaaatgacttttaaggaatatagctagccaatcgtaaagtgctatctataaaatgtactaaatactactagtgttatataacaatgctctctaaatcattaagtttacatttagaataatgatagtactactactaattacgtgtattgtatcagactggccactattgtaaaaactcgtgaaaatgtggattatgttatattagactataaaaaaaaatgcgtagtatcaactgtatcaataattttataaagtagacccaacacgacctgtaaacataatattttgtattattttatattcatgtcgtactttactcagaccaaattatttttcttaaacatacatgttcattttcttatacggattcaaattagtactctacatttttatatttttattgccataagtgagctaactataaaactatatgtattttgaaaaaaaaactttaattacttttatataattctttaacaataattatacacaatcatataaaaaataattataattattaaattgtgaatatttacaattattttaattgatgtataatagataaataaattattattattatcagattattgaggctagtttatttgtgcttatgtattgtgtctctagatttattataactgtcatgcttaaatacatattttccgtaccttatcatatcaatttgtaacatcgtgtcatattgtgtccattctaatactttttcttgtcataacgtgatcttacctcctaggctcataccctgtcaaaaaatttggttcgtatttaaaatatttgataacactaaaaaaaattgtgtcaaaactaaaaatatgtgaacactaagagagaaaaaaattgattttcttatacattaagaagccaattttttttttagaaaataaaaaataatattatattatgaagggaattcaaatgtttagttgttttagggtttttttatttttaaattttaaagtagttttttctctttatattttttatagtaaatttataccgtaattcacatagtaattaatggagtaacttaaatctatatagtaacccacaaagaaactatcaaaataatccaaatggtaaatttaaaaataatataggaggtgatttttttataatccaaagatggagaaagttattttaaaaattaataaatatataaaaactttacaatgtgtgcattttaagccaatttttattttttttatttattttattttttttttttattgagccgagccgatgggaacctttgtagttgttgtagtagtgtgtagtagttcggtaactagggcacaagaagtggggcctgcaactctgcgcaccgtgtacacaaattaagtaggacttcatttgacataaatacccctatgttgagcttagttttacctatttaccctcttgcttcagtcttatcttttttcctatatttatttcttttcctaattgcttattcttctcaaaatattccttgcatatatttaaaagaatggggtaaaaaaaaatctgattcttcatctgaaattagtttttaataaaataggtatcttttgaacttataacctaagtcaatcatcaaaatccaacaacttcataggctaagaatcagtactagtgttatagttttttttgtcaagaaaaacaagttcg

SEQ ID NO: 256683 - DNA, 1449 bp, Cannabis indica
agagagagagagaaaacagttatgcaatactaatgaaacgataattaaaaaagtttaactgctaaaaacttaactatatatttttgttctcttaatcacgtttgcttttttatctacccataaatctctccatttcattcaaaattcgtgcatatatgcaaaaataaataaataaataaataaaaaacaattattcagttcacaatttcggcagtttttgctgaaaaagtataatctttgtttatgataaataattatgcatgtattcaaattaatttttcgctctctattagagtgatttcttattcttattaacttagttttgtttattttgatgttttggaagaatttgaaaatgaaaaggaaaatatgataaaaaaaattgaaaaatatttactgcatataaattaacaatgaagagattgacacaaaaaaaaatgcgatcctttctaaaactttctattaattaaaatcataagtaaataagtgagataaataagaaatcataaacaagatagtatgccatttcaaaataataataataataataataataataataataataataataataaacaagatagcatggagctattaagttataacattgtaaaccaaaaacttactattaaacttacactgctattgacaaaaaataaaataaataaataaaggggaattactctatatattaattttttaattttttttttcaaattcacgttttgagtttctaaagtggtttctccggtagtttctatatgggttactatatgatttttagttgcgatttaagttgctctgctagttgcaatagaaatttttatgtagaattccataaaaatacaaaaagaaaaaactattttaaagtgtaagaataaaaataccccattaataaactgctcctaaacatgtatatttatatatgtggaacaattctcaataagtattactagttattaaacaagttaaactataaatattaattttaaaaatattaaccattagatttttcatctaagaacgaataataaatgtaacacctactaatttaggcatactacaatacttttttcaattactgtgtaatatttgttaaaagggtttaataaaaatgtgatttaatttaaactttaataaatgtacataaacttcattacatttataaaattcaggatcccgtatttatatttttttactgtacataatcaaaagatgtcgcacaccgactacaaaatcgtgaaccctagctgtcccaaagatctaacactccaggtcaaaatttttcgatatgtacaatcatcatcaagctccaaactcattgccgttcaagaacaaccatgccattacctgcacataatatagcatcagtgagtcgagagactcagtaaaaaaagcataaaacataaacatataatcgacatgcggctaagcacccatacacct

SEQ ID NO: 256684 - DNA, 1835 bp, Cannabis indica
tgatgttgaataaaatggattacattgaaattgagttttatttaggccataaaacccaacagatgcggccactagggtgaagacatcgataaccctttgaggagatactatatcctttaaagagacacttagaagatcggaaagatactttgtgactctcatagggcctaagaagaggaaaacaactacaaccaaagacgtttaaaagattgtagtcaggtttgtgatgaaacaatttttcatatggtgaaacaaaattgagaataggggtaggtaacctgtttattaagtaagcagccgatgtgaaagcctcccaccaaaagtgtaaaggcatttcagcttgggtcaaaagggtgaggcctgtgtcaaccatgtgcctgtgttttctttcaacacagccttgttgttgatgagtgtgagggcatgaatttcttttgagaatgcctaacttagtgcaaatcttatagagtggttcatattctttgtcaagatcaacttgtatacttttaatttttgtttgaaaaaatcgttcaacaaagctgttaagttggcaaaagatgttggtgacttcaaatttggttgtcataggaaagagccaaacaaatttagtgaaatcatcaacaaagctaacatagtatttgtaaccatcagtagatgtgtgaaaagaaggaccccaaacatcagacaatattagttcgaatggcatagtggtattattgctggtacttttaaaactaaattgataaagcttgccaatttgacaagcattacaaaaatcaggttgaatgttggaatgactaggtacaacagtggacaacactttatttaagattggtttggagggatggcccaacctatggtgccaaacagtagcagtctgatgtttattgtaaacaggattgctggttgttgtaaaattgaaggcttgaggagtgttggaggcagcagtgattgtggagaagtccttggatttaggggagggcacttgtaacttgtacaggccttcacacaggttaccccgaagaagaacttgcttggttttcttgtccttaatgtgacaacaaacatcatcaaattcaagaatgacttggttatctttggtaaattgggatatacttaatagatttttggtaagacttggcacatgtaagatatcttgcaaaattaaagattgtgttgtgaaattggtattaactgaactagaacctatattagagatagagagagaggatccattacctactagaaccttggccttgcccttgtaatctgcagaagtgctgagattttgggaatcatttgtcatgtggtgagttgcaccactgttcaaataccaagcatgagattggtcactgttggagttggtttcagtgatcaaggcttgtggtgattcatcactgatttttggtaagaactctgaaaacaagagtaatagagcagagtgaaaaggaaagagagaaacagggaagaagatgaaagatggatgagaatgctcaatctcaacagattggcttttactgatatttatactgaatgtaaaagtacatagtttgttacaacagaaaacaagaaagaaagaaagactaactaacattctgttattaataataccaaccgactttagcttaactaaactaactgttacattatttcaacaaactatttttttttaaaaaaattacgatttgagttgtttcagtagttttaatctgagttgctatgaattttagttgcaatttaaattgctttgttagttgttatgtgggtttctatgttaatttccgtaaaaatacaaaaaaaaaaaaaaactaccttgaagtgtaaaaatgaaaaaa

SEQ ID NO: 256685 - DNA, 1832 bp, Cannabis indica
tcatgatgcgaaagctgaattcactaagtgttcattgcttctgcacggatcgctgaatatcttactctggacatgccagctaggcatcctgctcggcctatcttcttgagcaggtgtttcaagtggactccacgtgtcaccattcccgtgatgccacgtcagagtgcaaaatttgggataacaactaggatgagattttagtagccaaataccgcgttccaatgttcctgggcacaaaacatgcaaaattatgaaattctatatataacatataaaatgcattccgaattcaaataaatcatcgtaaattagtaattcaaaactaataatcaattttcataattacaccctaattatctgctaatttccaaattaaagctaattggtctttacacaactactgattaaagattccataactttaatatattgctgactgttttattcatagctaagttggcttagttctctatacagctacaagccacaacctcatatatgaataaagaattttccgatatttaatataaattattcaataataaatattaataatttaacattcaataataatttaagtataaaaaatgtctttacaggctttttagggcataaatcctaacattgtttggatgacacatgtcttacattttacaacctctagtggataattttactcctagcaacccgcaaggattaatatgaagattcaagttatatgtacatagcaggatgaccgagcagagtcattaacgaacatcataccaactcgatcttggatcaactcgcatgtaccgaccaggggttgtgagttgacaatttcataagtgatcaatactatcttcaaacttgcatgtcacgaaacaatccctacttttgtgagattaattcataccttcaaagaataaaggaaataagcataaatttgcccaattttctcattgtagttatggaaacatgttaatttcctattttatttcttatagattaagggaaattattcctacgtaattaacccttataaatagtatcctcatctcactattcaggggacaaaattaattagagagaacactcaagagagagattacgatctaagagtaaattacttagaggtttttgtcagagcttccgagaaggaatatttcattctttgtctcacaagttaatacatttgaaaggggagtaggctattaccactatcacgaggtcaaacctctataaatttttgtattttctttacttatgattttttgttttctattatttatttaattatcgctttaattaagactcactgttgttggctaaaagcgaagttaacagatcatcattatgatatgaattaggtataaagataacttcattcatattggtcattgtcatatataatctctattatatacaatactttcacttagatatcatgctacatcagtattccgaatcgagattacttgcaccaaataacgagtatcaatcaaccatactagtaactattgttaaaagatttccaaactttaatatgatgttgattattttattcatggtcaagcgatattaattctctgtacaactacaagtcataacctcatatatgaatattttttttatatttatatatgtaaattgttcaatattaaatatggataatttaatattgggataattacataagcactattttttgtaaaaaaaattacatctttacgtttaaagaatttttttttatatatttttacagtttttcatataaacaacacaaatataacaagaaaatcacataaaagtaacatgaaaataacatcaaaaaaacaacaaaaaaataacat

SEQ ID NO: 256686 - DNA, 1438 bp, Cannabis indica
gcttcttcataccttgatgttttttctggcgcaaactcaatcctcccgcctcagacttcttcttctcgggctaaccgtgatgtgtttcggaggaagcctatgccggcgaccatgatttcgagtgggcgacgattgggtcgtcaggtcatggtggggcgtggttcgaagcaatcggagatggtgacaggtcgaacctcggctttgggtagacaggcgaatcagaaagtgtgggttcccaagctccttactgtcaatcgacaacctggggtttcctctctgggtaatatttgtaacgttggagaagatgaagggcaaaagggtatgcagacttttcctccttctaatttgaataatacttatcaagctttgactttactcaaaggcttgggccaaggtgatgggactcatagagaggttattgggcctgcattatcctctactgggccggccttaatttcaaaggaagaaactatgaagatgggcccttctcgtgctttagctatgggtgttaagagtggggccgacccgtttggtgctaataataaagaagtaaatggtggtgagttagatgtgggccaggaagttaatgggccggttgatggacacttggaatcatttgggccgtgtatcaaaattaatagtaacttgaacaatgggccggccttcactatttctaatgagagctccatttgtggtcaagaggtgaattttaatcatgatgtaaaattagctttgactaatttttttcaagctcaaggcactctgttacaagagcttaagaattttggaaatttggatctctatgagattaaatcaattagaggtgacattggggttcctacttcctcggaggttaatgcaagaactacccctttcaaaaagagaaagtttgaggaggcctctgcatcactttgctctcgcccttggaagctccttcgtccgcatccctgggctatccgtgactttccatgggatacggagggacgagctaatggtactaaggatacggaggaagacccctccgaggaaatctctctatccaatgatgactttactggcccggatgattggaagtccaaaggaaagaatgtgatctcgtcgagaccaatggagggtacttttgtgattgaagaatctggttcttttggttcggctcgttctcatacccctgtggaggagactactactcctccacaggagccatgagacgaatcgcatggaactgtagagggttagggcagacctctacagttcgtgagttgaagtccctgattcggtcgcgctctccggattttatcttcctgaccgagatcaaagttgatactacttctttggtacgtatgcttaactctcttcatttttattttcatattactgttccagctgtgggtagtgcgggaggcatttttttggcctggaaaattggttttgagtttga

SEQ ID NO: 256687 - DNA, 2206 bp, Cannabis indica
cttctaccattccaaaaataaccctccgtagggttcaccttctgaaggaagaccattccatttaatcctcttgatatgtagaaggagagggaagtgaacatggcactaaaggagcgctaggaggcagagaaggtacaaatttgtaaacgggccactgtgctctcggcagtgcgaaaggctgaaatcttggatggcctgtacaccttgccctctgctggaaggaccgtggaggtggaggccttagaaaagtgcctcgctttcaaggtagggagagaggctgccccctttgccatcaaacacctgaatcaagtggcctggattgctttagagttgcctaaggagacttgggcgtcatgcagcatcgtggatgtcttcgcccaggcggtcggggtaaggcctcaatatattcttttgcccttttcattcttttattagattctgaccaccgttctgacatttagctttttcacttcagcttatttagacaggtggccttgttggctaagaggattgcccacgaggctggcacactggtgactgagctagagcaagtcaaagctgacaatcgtgacttgcgcaacgctaatgacacccttctggccaagcttaccgaggccaagcttcagatttagagcttgaagaaggagaatcagctgttggaggccaattacgctcaacagacaaacctcatacacggtatgaaggccattcatgacctttactgggagacagtagcgcgactgtctagagcgaagtcctcgaacccgtctagtcgcgtccaatcctgaattgcagcaggccttttgaattgttgttgtctgttgttttttaaacatccctttcgctgcacttttcaattcgcgaagacaatttgactttgccctggccgcgggggctatttgaaatagtatatagggttttttttatgttcctttatggagatttattttggtagactttttaggggctggtcatgtctttgaaacatttggttccaacgaccagtgtttcaacttgtcctgttattcttaatcatctccttgtcgatccagggatcgttattaggttttaccctttcgtcctcggagctgcaatactttttactttttctcgctacttgacctcctgcttgggaagatgacttacttagaattcgctcggagatagcttcctttgcaaaaaggagcctttgctttttcacacatcttcttcaagctttagttcttttaagaggttgagttccgggagtaatgcccgcaaccgccttagacttttaggcattcttctgactttgattcttgtcagcctaaagttttagccatttatgcaacttgatgaactaaacttctaagaaattcatagagatttgtaagaaggaattagggcagatttttttttttcaagaattttggccaaatacgcatcttatatccccgaattcgtacttaagtttatcttttgaggaaagaattctagcgtgtttccctcgagaagacttggttgaaaatgtttcctaattttggttgcatatgtacattgagttaataaccttggcaaatggatgtaaggaattatgggtgtcagcaatcaagcgtaccatacccccaaatgagttgggaatttcggtctcaaattctcgatcatttttctggaatctaactcatcttgtttcttttttattcttgtctttgaggaggaggtccaggtgcagtcctgctttgctccaggaagcatactattcatctaggccatgtcttgcctctccatgatttcttggagaaaattcttgaaggtttaacagtgatctcctagctttcatggggaaaagccgtaggattttaggcaggaacctaggtggatggctggtcgcaaacggttccttcatgacatggacttcgtaagggaaagtataggctcttgcggcatggcaaacttttggtttcctggagggaaagatggtcctgcgtccttacatgggcaaccatcatgtgctaaggtccgcttcaattagcaagagtcatgctaaattttgtagtggcaaactttggctttcaataggaaaggctaaaggtgcacaaaaaaattcagacaatgactttgcttgccaaagctagagggtgacatcactaggcatgtggaaggctttaagcagtcctttccttctgcgaaggagggttgaagaggtgccatacccctagtgatcttt

SEQ ID NO: 256688 - DNA, 1653 bp, Cannabis indica
aatttctgccatgtggcagtatttttgtaaagatttggccgaaagtcagtatttttgtaagtttccttatttaaaatacactgagttcaatttattatttaacaaaatagaagtgcaaaccgatatcttctagaaaacacagagttcaaaatgatatttaatttatataaatacatacattatagtgatttatatgtataatatgtcattatggccaacgatgccatcccctcatgtacttttgaagaaatgacttccacttgtgaaaaaaacaaagcgaaacatccatgcaaaattatttaattattttaatatttaaattgaagacatttcataaatagagtattatttttttataagattgtaaactaatacttaaactatcctaaactagataatacatgtgttgggtaggtaagtgactatacagatttagtaaaaaataaacggtttcgttttcaaaaaaaaaataaatgactattttgtaattttggattgaatttgatgagacgtgagaacagagacagagcttttctttttatgtgttaaagtttgaaacttgaaatatattttagagaaaaaagagtgtagataatttgtgagagagaaatagaagagatagttatgggaaattatatagcaaaaaataaaataattatatatttcttaaacattagattaaatgattgataatcatccaatggtcattattattatttttatttttaaaaataaagaataaatatataaaaatttgtaacgtcattacactagactccaaaaatttgtaagtgtttggactttttgagttttgatatggcaaaagaaatttaattgattaataaattattaaagtaatattttaactgctaatttttatttatctatttttaaaaatacaagtgactaaattcaaagagtcagttgcttatattatctttaccatatagaaattttttttaagcacatcaacagttacatcatataaaataaagtttctatgataagttaattccacttgtatatatattttagagaatattgatggaaaatatgattttttttcatttttgtttattaaaaaaagataagcatgtcatgtttatgtttattaaattgtataataaatttctacacttttaatttttttttttaaaaaaaaattccttgtaattcctcataaatattaaataggctaatttggatttttgactcctaaaatttcgacacgtgccaaatcatgctctattctatcaagattgtaagatttaagaatttttgtataattttactaaacaaagtctaacatggatggaatatcccttaattaggataagcgtgtaagatttactccacactgtgtcagtagatcttgacctataacgatcaagtaagtttgaaaccatatcgtcatagaaaattatagttatttgagcgatccatcgagtagctagtttttgctattttgctacctgatcagaccatacgattgttgcgaaataccctctaattaaaataggcatgtaagatttactccacattgtgccggtatgtattgatctataacgatcgagtaagtctgaaagcatatcgtcatagagaattacaattatatgagtgatccactgagtagctagtttctgctacctgatc

SEQ ID NO: 256689 - DNA, 1851 bp, Cannabis indica
gtataattctctgatgttctctgcttcttttacatttcttttgcttacttaatatttctgaaaatgaccacattgcacttcttttcaccattttaacagtataaagcactatgcaagtatgcaatatcatttcagcagtagaaaacatgtctgttcaggaatattgagaaatcagtctaaagaggagagccactgagaaagttcctgtttgcagcttccatgaggtactttttctgatgtgactatttcagctcttcaattcattattattgtattatagcatgatcagtagaaacaaactctttcattacattaattgctcctttctctactgatgaggtcacttggacctgtaaaattgaagttgctcagctctaaccttcatctgccttggaagctgaatctcttgctttacaatgtttttcggattttcaagagcagaacaaagccgagatatgcatgggatttgatatacagatcttttctggtatgtaatatttagtttctttggtttaatcttcatagtgctgttgtagttgatttcattggccacctaatattattcattatttagaataatatgtgacagtactgagatgaggcatttgagcaagttttacaatgctcaatatttgtctcaatccttagttataatttttagattcttttaagtttagtaccaaatttagtgacaaatctctaaattgttgtacaaaactcatttgtctgacatttgttatctaagattaaggagtaaagagtggaaatttgacattatgattgggtgtttaatctttttggtgcataatgtcaatgacagtataattctctgatgttctctgtttctcttacatttcttttggttacttaatgtttctaaaaatgaccacattgcacttcttttcaccattttaatgaatcaataaatgggcactctttagtatcatttaagcagtagaaaacttctcctgatcaggaaaatcagcatcataattgacaactaagaaacccatttaagcaataataataacataacaaatataaaaggatttattaatgttcatgggattctctaaatttattctacagtttacagttataatttttagtgtcaaatttagtgacaagtctataaattattccttcatttctttcaaacacccacttgaagccaataattctttttgatttcttagtttatatatcaactaaactaaacccaagtctcattcatggctaattaaagattgccgttctttgcttccatattatattatagctgttaggctcttgagctctggtttgagtttgttacacataagaatgatacacatttttctcatacaaagtcttcaacttcatatattaccatttcatctttcaacctctgctctgctacaaggacaagagtcttctctgtttggtttatttaagtgtgtttttcacccatcaattaaggtttttttttttttgaaacagaacaaaatacaagagtacagaaattcaggaacaaactccctcagttgttaattgtcaaaaattacaaataccagtgctttaagggacttcttttaatgatttgatccaaattcagaatccaatctggtacaaaccttgcccaatcaatgcagaaagttgatcccaattccaataaaacttaaactcaaatgaaaaatggagtccttggttggtcaatgtactttgaaagtcctcgagtacttgcgaatttcatacattattaattttacgtaaataaatttacaaaatatatgtatattttttattaagatattattcttatatagaagtatattttgttaatatgagacttagaaaatgtataactaatta

SEQ ID NO: 256690 - DNA, 988 bp, Cannabis indica
tcatttccatggaatggcagccccgatttagcttgaatttcgttccaaaaatcttcccgatttttgtcactattgcgaccgcctgagccacattgtgaatcactgccacaacttccttgctaaatgcgactcctcttcggctccaccaatgctttgagatgatcattctttaggagccaaaatctgcatcacctccaatcctttttatattgctagcacacgtactcggcttaggccacacattgctagcccaacttctttggcttccacacatcaatattgtttacaccaaccctttatcatttcagaaggccatttcaatgaacctacctccgattatggtgtgcaacacttgtgccaaccacaaaccacatttgtcaatttctacagggaaatttgaatttgtatgcattttataaggggaaattggttaggaaaactaataataagggtaattttaaaaacatgacacttttataaaaactcctaaaatacccttctcataatttctaaccatttctctctccttccctctcaaacacaaactctctctctctctgccgaccacgaaatcaccacacccacatcccaccaccaaccgaaaccccatcggagcaaccctagtccgaccccaacccttctgacccaacctgaatgccacacccaccgtcatcaatgccgcacggaggagaccgagcttcctactcaccgacgcacaatgtctaaggtaacttttgaaatttctttttaaaaattcatggatttgtttgttttttgcatttaaaattcatggattagttttgtgatgcctgatctgtgatatgtgtgagttagattagattttaataattttttttggttgtctgttcgaaatcgagatagcttactaggcccgatggtggaccgatgtaagtccgatgggattgggtttgtaggaaaaatctaggtagaagatgaagtcccgatatatattaatttatttttttat

SEQ ID NO: 256691 - DNA, 4350 bp, Cannabis indica
aagtgatttagcatatcactcactagttttttgaataatgtgatttaggggcctgtaattcgtcgagcatctgtaccactcaggttggccagcacacttgaattcggtaacaagataagattagtataatgatatgcatatgaatttacatgtttagtgtgcatgttagttaagcctgttagattatattttaatagcgatatcagtatatttagtattatattggatatcgataaatgtatgttggcttatgtactattcgataatatcatatcggtacgactagagtacgactagcgtatcgagtataggctgatatcatggtcgataatactttactacttgatagtatcatatttgtacgactagcatatcgagtataggttgatattatggttagtagtactgtcgtatgaacgttctagacttagcaccatgtttgacacgggaatagggttatggttaggtgtatgggcgcctgattataatcctggttattgttaagttattgtttatgtttttcttactaagtctgtcgactcacagttattgtttgcatgtgaaggtaagggcaaggctaaggttgagcagccgtgagagcgagcaaatgaagattgtacatatcggggcggttaggcctggagcatacgatctttgggacattaaggcttattttgtatagtcgctaggcggcaaacttttgtatatgcatagtaaaacttttgtaaacgggatcccagtttaatataagtatattattttagtatttataattaattaagtaaagttttaattaatcacgattttcgataaactcgtttattagcagcgagctgcgcagttagttaaaatcattaacatgcctaaactagtagggtattacataattacaccattgactcaggaggatattcaccaggctgttatggccattggcgccactaaagctccgggaccagacgaatatcacgctttatttttttttagagattttaggatattgtgggtgaaagggttagccatgtacaccttgcaatcttaaatgatggtgctttggtgtgacagtttaataagtcaaacgtagtgttgataccaaaagtacaaaagtcaagattggttaaagagtatagacctattactttgtgtaatgtaatgataaaatcattgcaaaagctttatcactgaggatgaaaagtattcttggccccctcatctcatctttccaaagtgcatttgttcaaggggttcgatacatgacaacattatggttagttttgagctacttcattcactatttaaaagaaataatgggagaaggggatttatggcactcaagttttacatgagtaaaacatatgaccgggtggaatggagattcttagccaatatgatgcgccagtttggctttgctgagggttgggttaggaatatcatggattgtgtgacgaccctagagtacacttttttaatcaatggtcatcttaaaggtcgagtgattctgatagagggttaagacagggatgtcctttatctccttatctttttctcttctgtgtggaatcattgtcttcgttattctctcttgcagaggccagagttgaactgatggagttttgatgttctagatcagggccacgtgttactcacttattctttgcaaacgatagccttgtgtttggtagggctaataaaggtgatactgaaactataaagcgtatccttctaacttatgacgctacctctagtcaaaagattgactttgagaagtctgccatcacttttagtctgaatgtgcaacaagtggatcaagatggggttttgagcgtattggggctcacatcagcagctacttataacaagtacttgggttcgcctatggtgattggtagaaacaaaaagcaggcattcgaggggatatgtgagaaggttaggaagcatgtgcgaggatggaagcaaaatttctttttagctggtgggagagaagttcttatcaaatctattcttcaagctatttgcactttatatgatgagtgtctttaaactctcgtcaacaacttgtgaaaattaaagtctattgtagacaattttggtggggttcatcttgtgatcaagggaagattccctgggagaaatggaaaactgcatgttagcctaaggcgatgggcgggttttgattttgggattttcaactttttaatcaagctctgttagctaagcaagtatggagattatttctatatctagattcattgcctgctcaaattttgaaatataaatatttcccaaattgctctatccttgaggccactaaaaaagatggttcttctcatctttggtcgagtttgatctaggacatggaattgcttaaatgtggtcctcaaaggtccattggagatggaatacaagttaggactttcaaggatccatggctcccgcatccgaggtcttttcagcccatcacaagagggcttaatgataattgccaggtgagtgaatttatccttccatctggtacttggaatgtgggaaagcttcaacaagtttttttgccaatggatgtgcacataattttctctattccattagcgaggcgtggggtagaagatggttggtgctggcactatgatagagacagggtttataatgtcaagagtggctacgctttggcgtggtcgctctaggttgaggagggagttgcagattcatctggttatctcgttggtggaatggggtttgattcttaatataccaccaaaggtgaaagtattttttggcttatcgcaaacttcaaagtccttctcagatgaagaaaacttagaaaatgcaaagaaattttgagagttcgaaattcagaggagagaaaaggggaaaacaaaaatgagagggaaatgaataaatatcatttcgtattagggagtttaaatactaatatctctcatttattgggatggagacacgtggcaaaagaatgcctaaagtctctcaatccaatggttaccaataatcacgcctgcacaaacctcgaagggttctgatgatgtggcacctcaaaggattaaaagtaataattagagctgtcttttcgaaatcctcgacaagacaatcaaaggtcaccacctcgtgacaaccttttgcccgtctcgctctctctctctcatagtttccctcacgacatagctgtcaatcgtgaaactaggggcatgtgttatagtgtgaatttttcacctaaaaactcgagaccaggctctcataaagatgacacgtggacttgctctcctcgaggagtgttgagctgtcaaaaggagaccactcgagtataaacctcgcctaaaccagactcagcgagatgatgtgaccctaacagagtctagtcgtattattacgcctcacatggtgcaggaacaagaaggtcaggtttaaggctcgtctatatatcttgatgtctataaagatttttctataaatcagtaaagatcgattctttactttgcgagctggtccggatgacctaaacgcgctcgatgacccagtaaggacttgcacatcctaagtcatcgagttttacaagatatccatatatgcggctcggataggacgtagatatcttaacacatagactcgttagtcctttacgcatcctaggcccgcgagcttatgcaagaatatgaacagacaactcgcaccattaaggtcgcatacgttgttgtatttagtgaattgagtcgaaactgttcttcatttattccatttacgttttcattgatttaatgttgatattaaatgtaaaacggtttgataattaattaacttttgtataatcaaatgacacttgctttgtatataaaggagtgatccaatatgaaatggacagacagaaaaatccttgcaacagtggactaagtagaccgtgatctgactgaaccagtacaattcccttgtgttcattatattttccagtacgtctgtttgtttgctctttgaatactcgccattctaggttgagtactcgcactttttcattaaataattatatttttatttttatttggtgttgtcgaaattcctccaacaacaatatttggcgtaaataaattttaaaaataatttcaagaaagaaattaaatttaagataaattataaagacaaagaggtcatctatattccaaaataagatataaaattttatcttgatagtaaaatctgaaagtgtgggggtgcatactccaatatgagaatttgagatatgtttggtgtcttaaaataaagtgtaatttagacatatttggtgtctaaattagtgtttaattttgatatgtttggtatcaaaattattgagaatttgagttgtgt

SEQ ID NO: 256692 - DNA, 1565 bp, Cannabis indica
atttttttgtttggttgtagattaaagtattagaatgttgttccaataaaatgtctaatctacttttttggtagaatgattattccattttaaaatgaaaggaataactattccaatgtaagatgaaaaaaaaattaacattttttttattaattttaaatttgattccatttaccgagatttgcagaaactaaatatttgagaactaaaaaaaataataaaatgcaaaaaataaagagatgaagattttttacgtaattatagtgttaattaaccttagtccacgagtcagtctattagcctctaaagacgtatatgatgtgtttagaatgttttgcaagaaactttactttgtactcttagtttctcttgaagaagaagataaagagtgatattggcagagcttcgactacttaggttgtaatcctcccttcttatggaaatagaacggtatttatagagtaggagcgggtatggacatgcccatgactcgccttggatttctgctcaaaggtgatcactaatagggtaaattacatacaaaatgagagctaactattgtatcccttagaaataattgtgccagtgcgtgctgcagctggataattgggggccatttgtatgttgtggacacgtgtctctataggtttaacctttaaaagtagagggcatgtgtcgctcaaagatttctcctttaaaagtagaggtctgatataaccgtcttgtaaaaaggtggacaaggtgcgcgcactacctgcctggacacgggggacaagatctgatcctatgtctgaaaaagcgtaaccgtcacttggtgatatggattgcacaaaaagtaaatgtctatgatactctcaggcggtatgtatccgcataggcccttcgagtactcatctgggtatcaattgggtaggcttccacatttggaccactccaagtccaagagacaacaaaacttttgtgttcgggaagctaattcatcgtacctcttcactactactcaggcagggactcttatcctaagttaaaaaaaagtaatatgaatactttaatttaactaaattataatgggtatataattatttgttcgtctaaaaaatataattatctaaaatgtagtatctaaattaaatggattaatttggcgctgttggtattgttctttttttttatatataaataattcaatatataatttgcggtataaatatttaaatttaacttttagttacaaataaatacttaagtttaatttttgacaataataatacttaagttatatttttaaaactccgtaagtacttagtcattaaatcccaagtcattatttacgtgtcattgtttattgatatatttaaacaatttttttttataaaaataaaaatttaagaactcggactaattagagattggcacatgataatttacttaacacttaaccttagagtttgatgccacaacaaattattctaatgttaatagtaatactaataataataaagaatgaaaaaaaaaaataagcacttttaataaataaaaaaggtcaaatatcattttaaatttaa

SEQ ID NO: 256693 - DNA, 607 bp, Cannabis indica
atatctttaagaattagccttttaaaatcaaagaaaaaataccaatacgtgacattactgataataatagataacaaagatgtttgctccaaaaaagaagatttataattgttgtactcagagctctatatatatagttctattttgttctgattgatgtaagcagtgattaaaattataaaatttttatgtttaactgatgaaccaccataaggaacctgagaaaacaaaaaaaaataacagttctggacaataaattctgtgatcaattccatcacacaacctttacagtaattgtaactaactgaaacaagaacaataaaattgcactgagaataaaaaaaaagaatatgaaactcaaacacaataaactaaattctcaccaacttttagatgtatttaagatttaatcaattttataataaatacaattttacctattttttgttgatctgatgcgccttaaaattgaatttgtagaaatatattgaggtaaagggatctactttcttagttctacaatttaaataaaaagatagtgttaatatcaactcacatatatttcccacttagggaggcaaagtaagcttaccttagcggtatatat

SEQ ID NO: 256694 - DNA, 1003 bp, Cannabis indica
tggctctcgatgagcctcatcgtctggaaagctttccggagctcagttcgggagagaacaccgtccttgttcagatctagtgatacgaattgctcatccacgctcttgttgaactccggttcgtcgctgacgaagtcccttaccgtcgatccgtctatgatcactacgcccatgtttgatgctgttaggtttttaatattaatggtaggtatatcgaaagttgtaaaaggagacctttaaataaacaatttaacatcaaatacaaaatctcctgatgaaacggcggcgtttaatagtcagactagtaagaaaatcgacaataagtggtgagattcgagtttgctgtggcgaaaggtgaataagacacacgaacctttatcgttacgcgtccttctgttgtggcttattcactatcactaacttctattattctttacattgaatcattcttgatccactcgttttgtgctccgatgttttgtattttccaatttgttattgttatttagaaaatttttatggtatgtatgtacacttgttttgttttgtgcttatagaattgggacatttagtaaactatagattgacatgacttttgaagatacaaattaactacaatataatttaatgtaggagatttttacaatttcaactaaattaaaatcttaaaattttctttaaaaaaaaatcttaaaatttctcagaattagatgcatttttaaaataaaataaacctattttaaaaattaaatttaaaaaaatatagcaaaagcaaaaataaatttcgattgaaaaagaaaagaaaaaaaacccaaaacgttaaaacataaaatcatctttctgtttcttctcctatcttcttcatccaaaatatttaattatttattggcatacactctatatcgcgagcctcctcaaatattactcaaatcgagtcaaaatcatgttgacgactttaatggcaggggaagatggagattgcagacgaccgaaagtaacagac

SEQ ID NO: 256695 - DNA, 1100 bp, Cannabis indica
aatttttttttttaaaaaaaaaaacgttattgtcttaatatgcataaaaagaatttttaaaattttattcatcttccattgaaattgtttttcctttcaaaagtaggaaggaaataatcatttctccaaaatgatagaaaaattatcttgttagaatgatattctaatagttcaaaatacaataaaataaatttattttcattccattctatttcattacaatcgaaccataaggatttattattattatttaatttttttttatttttgtaatggaaacttcattcaaggatgatcaaagggaaagagccctacagtctagcacaaaaaccgcaatctcactaagggatgacaattgccggccaactacaccaattcgaaaggagtaataagctcaaatctcacacatgagcatctagagagacaaactccccaaaaaaaggcctaacgccaatgtcactagtgacataagtagcacatcaccgaaaaaactaaataaactaatagaaaccaaaccaaaccaaacaaagaaagaaaaagacagaacaacttcaacaatcatcccctaacgcacaagaggcaatacacaagcccaagacagacagaccacgagcactagagcactgccatcttccaatgagaaaagtccacgctctacctcttattgttgttctgaacaatgaagatgatgagaccagaaaaacacatctctttagggtaaaccccagtccctccctctacatctacaaaactctagaagctcaccaagaaccattgtgcactggagccaagacaaatgaataataacccaaggatgtacactgagatttgtaagaaaaatagaagagaaataccacaccacagcccaagcacacgcctgaaaaggaccttcgcaaaacgacaactcaaaaacaagagaaggagagccattagaagctcaccattgtcatcgcgacccaagagagcggctcaacttgcgacccccagccacgagcgagagatatctcaatagagacgcccaacaaccaagatcggcgaccactcgccagaaaaaccaggaacaatagagctggccccaggcgccaccaacctagatctgg

SEQ ID NO: 256696 - DNA, 2340 bp, Cannabis indica
gctctattaataaatattgatccacgcctgcttcaagaaaacaaagagagaatttgtagttttttcacttagctactaataaagtatttggagttaaaagagaaaaaatagaataaaaataactaatataagatagataaattaaagacatataaaggacaaacaaaatggacggcttaagagaacaagcagaaacctccaacacctaaactaacaaagcattacaagtatcattagcaacaaaccaacaacattagtcttattccccagcctcaaccaacaactaatttgatacttatatatttacatgtttactgcacagcttattattttattataaaaatataaataataaaaaaaaaatatgataactctatctgacattgtcatctatatatacccatatgaatataaatatttacagcaccctcctaataataatttgaagtcatggatgtgtttagtttggatgtttatgtagttgtgttatctagatggtaagtagtatattatactcttaccatggcctacacatgcctgtcttgtagctgccgctataaataaatcgtatttactaatgatctatagtatattaattagaaattcttgcaaacaaaaaaaataataataaaaaaaaattaatgtttttcgtgcgaatagatctaatatttatttgaagaaacacttaagactatattaaaatttgggataaaatgaataaggttcatttcaaaaccaattggtaatagaagaaatagctcattcatcttaaatatgacaatttaattatacacattaacaatgtggaactaattctaatagagctttaataggcccgttttagggatgttcataaaatacacaatttaattcaatctgtaaagtacggatattcacatttatgcggattggaaagtttaaatccacaattgtacagattgaatattaatttacgtataaaaagtaatcgatctaatctaatccacacatatttatatatatatattaaaaaaattatatatacaattaatattttaatataaaaaataataatttaaaaacttaatcatatgatataattaaataaatttcaaaacatagtacacatcttatttataagaaaaaaataagctaaaacaaaattaaatatttttttttatgcatacaactattttttttcttacttcaaatttgttattttttgttttatttattttaatttattggatacataaaataacaataatttattttattttattattagttatattaaaaaaaattaataaatattaaataaagtcaatattaaaaagtaaccaaattcacttgtttctttttttctcaaagtgtgataaagaaattgaaaagttgtgtcaaggcttcttatgggatttgaaagataatagaactaaaattcacttgacaaattaggaaaaggtgtgccttccgaaagtttacggtggtctcggtttcaaagacggctcaaaatgaaacaaagcttttcttgctagattcatatgggatttaatgaataaaaaagatcttctttgggttaaatggatcaactcgatatatatctcaaaggaaaggatttttggaactataatttacaggtggactcgagctggtattggaggaagttatgccaaataagaaaagattttagcgaggttgacttattaatggctgctggacaaggaggaatcttcagagctaataagctttataactcctctttacgccaggtcatggatcttactgctacaactgtttggagcagtctaaacatccctaaatagggatttatattgtggcaaacagttcatactaagctgctaacaagagatatgttagataggttcaacattcaagtgaataatctgaattgtgttgtctgtgatgctgaagcctagtcgcaccaacacttatttttttcattacaggctgtcggggttggtgctggaaggtatttttagatggctaggattttttggttggtcgtcgaacttcaacaggtggttctcttggttgtgctctgtcaagccgagctttattgagagagtttgtgtgttgtgtttgctgcaactatataccacatttggaggaatagaaataattgtttgttttctaacttctctagcacgattacttgtttagtgaacaaagttaaaaaaagatgtaaaatatagattgtatatgcttaaagatagaaaatgatccaaagtggaagtaaagttattacaaagattgatttgtaactaatgttggtaaggttgaggcttcttgttgtgagctgaagtgcttgagtttgtattttggttgttcgattaatgaagt

SEQ ID NO: 256697 - DNA, 731 bp, Cannabis indica
ttaaatatgccaaaaatggaattaacagagaaaatacaacatgtgtgggataataggcactgactataatacacgtacttgccaaaatcgtactaacatggatgcatctcgagctaattcaacaattgctatgtgccacataccacacaagatgatgagacattccacttctaccttactgaccatgataacgattttaattttgaatatgtttaattataagactatatactttaactgaataggtacaagattaaaagtaattttttgtattggtttggataagagtcattgcattgcttttttaaggatttattcttgctcaaacatgcttcatgtgcaacctattaatttatgtatcatatttttaataatctttcgcaaccataatttctaaattgtttgtttcctttattactttttttttatgaaaatcgatccacccttgatattttttcattgagtattgtgtaggtcttcaatattatttatgtgagattaattattggattaaaccgcggttattttatttttagtggcatttattgattaggcattattttggtggtattggtgattaggtattatctaaagcctatatattttatatataaagaatttgaaactgaagtcttctattttcttcggtaaaaatactccagagaatttgaaacaaaagattagagaagctttggaaattagaggatcggaagggaacgtaaaatatctag

SEQ ID NO: 256698 - DNA, 1085 bp, Cannabis indica
atatacgttttaaagcttgtgataagctttaccatatgggatataagttagaggcgaactatgtatttttttataagggtcttttcactttatagttcagtagaataaccctagtatctattcgggcattagagtagtgttttagagtaaacacttatccattttacattgtgacatagggcctctgttcagcacgtgaattttcattcaggttgaccgacacacttgaatcgggaaactaggtaagattagtataattatttgcatatgtgattacatgtttagtatgcatgtttatgattgcctgttaggttacattgaaatagcgataccggttggcttggtatttccgtctaaggacggatgttatgcttatcattccctcccaagtaacgggttggcaaacttgctcgtctaccatgtggcccatagtttgacttcgtggtctcgaattggatgatccattaacttgggtttgctgagtgtgtttatctgaacacccttctggcccgtgccgaggtctagtgggaatgtaagtatctgctactcgctgttggccgatgacttaatagactctcttgattagtacggtggcctgccttgaatgattgccaatcacttcttgttgggctctcatgatttcatctctcgatccctccactctttgagctggcgcctttgttcttcaaaagcaaaatttatagctgctctagtatcttgctaatcgtaatgaagagtgttattgtggccttgtattttccctagtgtagccagtaaatctgtagttcgttgtcatcaccgattggcctttaagaatttgtagcaaatgggattctagtaccgggggcagtttgcttggttcgagtactagtgttctagtttcttgcacgcccagagtgaacctagccagaggggtagtcactcattgccctactatttgtgggcttgttagtggctaaggataagttggagcggggtccgtcctaactagatctctagggtttgtagtgttgggctttatgccctaaatgaaactccatttcaatgtaatccattttattcaacatcaataaagaaacagaagt

SEQ ID NO: 256699 - DNA, 1883 bp, Cannabis indica
tacttgtgagtagatctaagatggtaaaataatttccaacaatggtccctttgatatttgcgactataacaagtgcgtcagcatgggggtgatgtacccatctggcatcactctccatgaaagttatttcatcgcactctttcttgaataaattttctagtcgctcacttaggttggtcacattggtgaggagtttttctcttgcctccttggcatttcgttcttgtgacttcttggagtctccaccaatatgtgggcctccaatagtggttagaatattgcaaggagtttgagagccacttgcattattcgtagaatcgttcttatcaacatggggattatcttctccattctttttatacttgtttaacttccctcgtctcattcattcctcaattttgtcttgaaggaactaccactccaaaattatatggtcgatatctttgtgatacatgcagaacttctttgggtctctcttgtcacgattgtaatgccctaacaattaggcctgctgcgacactcccccaagcaggttgtggcacctgggttgaaaacctaggatttcacaggggcgggccgcggtgcctgggttccaaacctagaaaaccccaattacaacttcgaatttcaggcctaaaaacataacaaaatctcaccgaacaagcctaaactcaaaaccaacttcaacaaattaaagccattacaacagagagtaagaacaccagattcaagctttaattctcagtaaaatatgcatccaagattagatcaccaacaatcaaagtaagctccaaactttgagataaaatccacataattcccatcataatcttgaacataaaaaccatattttcatgccttaaaacaaccataaacagagccaataatcaaaatccaaccacaaacacattccacgagattgacacgtgttattttttgaagtacagcctaatttcgggtataacaatttccccttaaaaagtgctctttaaatgattactgagggtatattcgtcataatccaatttgagaaaatgcatgcttttgaatttggtggtttatagtttcaaaccacatcattagcattaatgagcaatcttttccacttctcccttactcctatccattggatctctgtcctttaatcttatagtaattaagctcaaagtataaaacagaaaaggaactattttccaccattactgcctccaccttgtcattgacgtatttcctgcaaatttccttagatttaatcctcaatctcagacgtccctacagttcgtatagtcgtttgtcccaaaccaagatacaagtttctcccctgtgcagacgtacctctttcaccagtaagttgctcattctcttccatcttggtatattttttagtcataactaattgcatcatcgttcttctttgttttggttcgataatttgttatttaatttcttgggtgacttttaggatttatatgaggtaaaaacttaggtttaccatatttataagtttctagttttaataaatttctcctaggaattgggaatgctcttctcatagaaatgtcccaatgtggttctgaaatttattctctcgaattcttagaaacagactgtcccaagaaattagccttcccatttaaacctaacacccagaatatactctattaattttatatttaatgagttattccattttgaatttaaagatataatcattgttatatctgttggttcacattctatgagattgacacgtgtcactttttgaagtacaagtcaatttcgagtataacaatatataatatatagcttaaaaaactgtatttaatataatatattgttatttttaatatattatctttgtaataaaaataaaataattaaat

SEQ ID NO: 256700 - DNA, 784 bp, Cannabis indica
gaaagaaaaaaaaagcaataataagaaaaagatgggtttgtgagttgtgagatgtgaaaatgaataattggagaaacgagggagatgaagatagatttatataaggcgaagggtgaatctgtggtgtcccatgcaaaatggaggtttatttagtaaaattttggcgtgtaagaacagtgttagtttttttttgggtgtttgacaagaaataatagcagtaataatataaaaaagaaaaagagaatgatgagggttaattatagattatggtggagtcccattattaatttaagcttaattaagtagatgacagtactttccaattcacatgctatttattgctttgctaatgtaattccttggttctctcgtcagatacttcttcaattaatatttagaatttttcagtttacatgattgtgatatgagtaaagagtaatgcaataataaatgtctaattatgagtaaaatgttatactaataataataataaataaaagaaacgcagtggtttatgattaaaagtactggtatgtatggtgatggtggtacgtgttgacacgttttgatataccattttacaatattaatgattagcacatggatggatcagtgatgatcattttacgtaatgttttaactatgacgcgtattttaaccaatcggtataatgataaaatatcagcattgcagattgtttagcactttcttcccatgttacgtttcgattggttagcgatatttcttaaattatataagatccgataattagttggaccaataa

SEQ ID NO: 256701 - DNA, 927 bp, Cannabis indica
ttttgagatcattgtacacacattttgtaactccataatgtatgttacaattgaaaaaattaataacttgtcacacttaattatttaatctaaacattatagtatataaaataatataacattctcccactaatttaaataatatctcatttgcagcaaataagtttgtaacacaatattttattaaatcaatcaaaaattatattataaagtaatataatattctcccacttgattaaataactccgctctaatagaaaccattgtattggtgcataatgtaaattgtcttttgacatgaattttaccttaatgtaattattacaaagtttgtcaaaattttaattgccatagcattgaactactatttcttgataacaaaccggtgataacacacacacctttgttatgttcagtaaagaaccttatggattacttttgcaccgttaataatggccatgtgcacaaatccaatttatagactttctagagaataactcttaattctcataagaggcagcatcactcctagtccatataggtgaagttttagtgtctcacaattctttaccactttcttaaacttaagtgagttttcttaagcttaagctccataaaaaaaaccttttagttttaaccctctaattatcactacatgtactcatctatagattggacaattgagtaccataatcactttattgacttgttattacctattgaacataaaacttaatttttactagtgttaagattaggttacaatcaatgagtaaaacactaagagagtttaggtgccatctctcgaaattcatgctttaatcttgtatgaagattaagcgatttgctaacctcacactcttattaattccaagcgaatcttgctacctaaatatagtatccacctttaggttaaccactattccc

SEQ ID NO: 256702 - DNA, 1161 bp, Cannabis indica
aaatagatttttccaagttattgaagcaaatggatcggaactctactctaacttgtaaactctttttaagaatatacatatagggtgagtcaaaaattttatgatatataatttttttctactgctactaattagaatagtgatattgtaattgaagtttttatagtattactttttttccttttcttttttgcggtgtacatgaaatgacaatgtgcctatttttggaatagttaacaaagaagaacagattatagcttcgaagacgaactaaaattgtaagaaaatacttttaatatttgtacaataatgtatttgatggaataatgagaatgtatatgcttaaatctgtgttgtaagcataattttttttatttgaattgtgaatataaattttattcaaatgtaaatacattattataattatttttctaattttagaataaaatgattctaaattagatcgatatatttaaacaatgaatttatatagaaaataatgattaatttgtattgataattaaaaaaaaatatacttttaaatataaaaaaatatgatatatataattaataattttataataattatttataaaattaaattggcaacactttttataaaaatgttgtcatatgtattttttaattagcaacatattgcaacacttttataagggttgtcttctgctaatacttttagtaacactctaggagacaacacatttataagtgttgcctttttattttttttagtttaaaaaaagtgttactaatggtgtttttctagtagtatatattctcatattatattccttaaaatatatcacttttgtgagtgggctgctcaatatactctcatcttccacttaagtctagcacaatattttcattaacttaaagggtataatagggacatcatccataaaagtgggtatatctcaaaaaatatagaaataaagttaaaaattaaaacatgtaaagtaaagtgggtatacaatgtaacttcctctactttctataggtgacaccttataattagttagttatttcttaaaagctattttttttaagttatatgagatccaatacttaattacaccaataacgttatgacaacaagaaaggtattaaacaccaatggtaccttttatcaatttttat

SEQ ID NO: 256703 - DNA, 3902 bp, Cannabis indica
ttttttgtaatccatctcgtgagaaataaaactgaagtggacatagcttcattactgtcacggcacaaggattgaactactatgaattgttgtgtctccatacttatacttaactcataattcaatctcgccaatctagcgagcgggtgtagcttagtgatacgtgtccagatttttgcgtcaatattttggagctttcattgagagccacaactcaaggaaatcacttacaagatggtttcaacacgctcctcaagtgttaaaagaagattatagcaactagctagcagactgaggggcgcgccagtactgaagctggtgatgggactacaccggcacctcaggtgccaagtagaggcctcagaaccagctccactactcgtccccaaaggccacaaactgctcatagtactaataccaccgagcagattccacctggcaaaccacgtgtggaactagaagacccgagcagactgatccttgggttgaaagcttagccaaactatggctgacctacaacaacaactatgagactctcttgataagtaacacgagcagtttaaaaactagttcgtagagaactagcagaacatcgagagccaacaagttgaactggaacaacaaagagctatcttgtatcaacggatcagagaagcctatcattatagtcgcgaaactactcccggcgagggtctttcggagttggtgagagagattccctgacaaccaaccggccacgtgggcactagtgctcaagaagaaacctttaatgcacggaatagtgctaccacacttggtaaccattcaagcactaagcaagcaacagatgttgaaactccccaaaggaaacaaaccttgggcaagagtccgaaagggctcaagctcaggggagccaaccaatgggccctccacctaatatggagcgacaatggacgatggagagaaccaacaaaactactccaccaggttctcctcatttctctagtgacagcaagcctcgagactctgcaaaaagaaaaggaacctgctattcatactgaaggagaaaatcgaagactctactttgaaactggaggctatgagatccgatgagtaaggaccaatgagccacttcatactcaaaaatatttttgagatgaaagaggtgagttatgtcgttactttgcccatggccctagcggtcaacaatatgagtactttcctcaagtacatggagaggagttgaacttgagtaaccagcttaattctctccgcacttatgatccaactgaagactactttgagggaagtagtcactacaacgctttggatgatcgttcgcgcagcatattatcccaagacaatctggagttcattccaaaaacatcacaagtgttgtcttcacaaccccgtggttaggagacaataacaaggcctaagtcgactagagtacaagatcgacttagaagagagagaggcctgcatgacactctaaccaaaatacaattggtagaagtgggagcttctaggagagaccttaatcgagtaacaaaagttccaactgggatgcaaaccaccatccatggtgtcaacaggacagaagttaaacaacctagcagccacaataaaaggaatcacaaccacgaagttgttagaatttgactcgacagagagtaattcttaccaccctctgatcatcaaagctctaccaatccctctaaagttcaagaatctctcctggatagggaaggaagatctattgtctcacatccattacttcgaagtgcaaaccgatctgtaaggagtaagagacaatgtcaggtgtagaatttttcccgtcacactaacaggcttaactcagtggtggtacctcaagattccccatggatcaatcgactcatggaaagatctaatgcatgcttttggcaaccaattcactccttcccaatagtgtcaaatcgagcccaatgatttggtagacatcaaatagcaggaagatgagccccttaaagaccatattcaatggttcttagagtcagccgctaagacaaaaatacttagtcaggacgcaaggataatggcacttgcagccagactcaaggagatgagccctctatggtctaacctttgtctcaagtcagtctataccatgaatgactttcttgatagatcatatggctttatcaagctggaagaagctgtcacctgagtaaagggcttaaaagtcaagaagaagaagtcgccagactccccaacccttaacattggagtgcagggtaatgggaagaaatgaggttcgaacgaagggaagaaagccaatgggaaacaaggtaacttccatggtgtaaataaagccaaaaatgggggcaggctcatacgagtgtatgaacctcgtttcaccacctactacattatcttgactctaagagaggagatctatatgaaaacacaatcaacagtgtcttactgcaaacatcttctcttcaaagagatatgaataaatcttattgatgtcacaacaattatgatcatgataaaaatgagtgtaataatctgcgagacgagacataatttgtcatcaaacagaagcatgtttctctttagtggtatatacgacctaaaactctagttgggggcaatacaaatctctagcatacgccaattgcaggcaggcttgagattataattggaggtcatcgcctagatggtaattcaagaaagcccttagaagatatgcaaggtctttgcgacatgagccaagagcaaaagtactagaggtttcataacatcctctaaagtctcaacgctacgagtgtgatcccatcacatttggagactccgactcgtaccatgtcagctaccctcaaaatgaccccttggctatcgaggtgtagatagccaacatgatggtagtaagggtgatgatcgatgatggaacgtccttgaatatcttattcaagcaaaacctaatttggatgggtttgtcactcgaagaactggagccatgcgagcaactaatgtatggttttagcagagcctacatagctccatgtggcgagatcaaactaccactcgcagtcagcactaccccaagatagacaaccatcatggccacgttcatagtggtggatgtgaactctccatacatcgtgatgctcgaaaggccagctctatacgaccttcgaactatctcgtcaatataccacttgtccatcaagttcccaatggcggctggtataggttgtctccttaaacatcaaggaatgcatgcaagtgttataacattttattactcctcgctaagaatacctcctctgctactttcgcacaatggggacgaacaaggcctctcccacaaaagctggagagacgatgaaaacctcaggagtttaaactgcagagaagatggagactgcacctaaaaccacttaaaggtgcacagaagatggggatgatatcgacccccattttgggcgcaccttgattattatcgatctcatcaatagaataatatagtttattaattctattgttacttcactataaatatagaattgcactatttgacaatatagaattatatttacagaattcttacttgtagtccattaatataattaatataagtagttcaccctccaattattagttcataattagagttggtcaaaattatcgttttacccttctaattatctcttgactccttatgtaccattaattcaatatgaacagttaatctataacttttggattccattattgtatcacatgttcccaaccactcatgttattaagttcataaatcaaaagatgtaagaatcatcttctctgagaaactttaacgagtgaacaaagaactcaatggatacaaacaggagttcatgtatactcagaattcaggttgatctactaatgatcat

SEQ ID NO: 256704 - DNA, 1179 bp, Cannabis indica
gtgttttctaaccctaatctatttctgtttgtgtgtgtgtatgtggttagataagatcttgatagatctgatcttggctttgtgtttgtgttgggatttatgggtttcctagggtttggattcgagtttctcagagagaaactctctgctagggtttcgagaaaaacctaatgaagagagaaagcgtttgagaagattctcgagccttggggtttttgttcaaacacaaaacgaagtcgttttggtgtgctgactttgaaaagtcagggaaacagggaaaggtcgaaattgacctggaattaatactgattgcttaatgttggtgtagggcaaaattgtaaaatacaatttaaatttcctacaaagaagttcagaaaactttttagagatagaattcgacactctttcctcactcctttttacatatttataccatttggtatttttggaggaaaataattgtaattcgttagtctaactaacttagcaattatttgagcacaaactcgctaatttgatcacttagatcgatatgatatgtcagctaagttagttctttgttcacgagaattgattgtcaacagagttgggttctatttgtaaatcgactctagacgtactcaaaggctttaatttggacgcacaccttcgattctaaacgaattatgttattcaaatttttggtcgttgtgggtgttgtttttcttattaatttaaaacaatgaacggaaacattttggattaaacatttactattacactaacatgaaatatgtaaaattttaaagctataatttgtttttatgcaaactacaacactaaaaattaaatgttttattattatatattattttttaatgaaaaattatttgtttatgatattataacacaattattaatatatataaagaaaaattgtggcaatatacagtgataacaccacatcattaagttacctttgtgattcgattgtagtgaattttagcaccattttggtgctttacagttccattagatctgctagaggtgatgatgccctacatacatttataaacttttatcaatgaaattcatgaaatactttaatcgttatattaatcatcaaaaaagacaagaaacacaaaagttcaaccaaaaaggagcctaaatattctaaaatgcatccgtgttatttgtcaa

SEQ ID NO: 256705 - DNA, 941 bp, Cannabis indica
tcttttgatattttattacacttatgtcattttaactaatcactccactatttttttaagacgcatacgtgtctcacttcgcgcttcgggaagataactgcattaacctcgctcaacaggtctgcgcaagagaagtctttccaagtgcaggccacgagagagatgtctgtgagctaacaactctctccattttagaagacaggacccattgctcctgcgaggaatatggagcttccaccaggatgcactggtctagggtacgcctttgacccgcggaagttcagcctgcgtatgccaggctatgggcccgctaatcgtgcctttcttcatgtactatgttagaggttatctcccacgctacgcgaccatacagagcatgcgtgtccttgtgtattgtgctaagcaatccaacggctagggacgagggaaattcaaattagagtggccttgaggtgacgagcccccaaagcctcgctggtacagctagtacaatctggcatcagtaaagaccacatggaaaatgtgccacctgccaatccaacgatgggagttcatccctatgaagatccatccaaggtagcccatgcaatggagtctgcctataaatactccaaggaaagcacaagagaaggattgggacccgttcttcggacctcgacctagagactggagatccatttgtcatcaagaaaacacattctcgtaaccccgctacttactccaaaatattacctactaagcttcctgatcttcttcaagaggaacacggtggaataggagaaaggtccattgttttgcatttatataaaaaatcaccgaccaaagaacctaataaaatggactactggactaaggatggttaatgcctgaaccatgtaaaaatcatttgttcattattgcatatttacacattcattactttcttaagctctaaaattatt

SEQ ID NO: 256706 - DNA, 1127 bp, Cannabis indica
gatttttcttagatatgtatatccctttcttatgatgaatctaaacatatatagtattaggttaagtaaacagtagtagtagtagaagaggaaaagaagaagaattatatgcaattgggtatgtatatatatataattcatatattttatgtttttatatatatatataattacctggtgtagaggaagatggtattggtgttgttgtaattgggtttagaatattattgttattattattaatagtagaagaagaagtgatgagatgtgatgatctgagtcttttggtagtgttgaaatagtaatactcatgatcttgaatattttcttgacattgattaagattatgatgatgatgatgatgtcttcttctgtataaaggaacccaagtgctcttaatgtgagtttggcattgaaagcctttgctcttacaacaagttctacatctcatataaacacactctttcttagcttggtttccacaatcttgacatcttgaacataaattcacttctctcatcatcatcatcctcatttcatttcatattaatataaataaattagtgtaacagattactactcatcttttatttctctcttgatcactttttctatctttgtaagaaagaaaaagagaaaaaaagctgtcaatttcaggtgggaatagagtacttatatatatatatatacatacatagatgtttaattattttagtggggtgtgggtcattttggaattaagcttataaatgtttgtattagcttataatatatgtatatgtacatatatgtagctagggacagctttattcactcatatttaaatcttttattacttaataagccgcaattttgataagagtatagaatgtaactcttttaaatctcaaacaaagatgattaggcaagatgttgaatgtggtatgtgttgtaatggttagtgatttattatattattatttgttattaaattaaaatgtatgactaaattacattaataacaatataattctttttgtagtgcttgatatattaacatatctaataagtgctgaattacaatgctccccaaaagataaagataatatgttcaagtgtgaattatattgtcctgtctattgacatgg

SEQ ID NO: 256707 - DNA, 2320 bp, Cannabis indica
gaagtgttggtaacttggtattggaccgttacaacttactatagaagatttcatagcatatatattaggtgtattattatattgattttaagtcaacaagttcaaagacagttgtaattaaaatcaattgtataaacaactcaaatatgaacacaggatatattattcgggaagatcatccttttcctttatgttatctaatatctctcctatgccttaagaagaaagcgaaaaagacgatgagtacctctagacaaacccaactatttttttaattggaaatatcttttaacttattgttacatcatttaatatcagccaaacaaattaatgttttaggtcaggtggataagtctttacctgctctgttatattgaccatttcaaactaatgttgcaaattgaaattgacaatatgtatgaccaattatttacccttgatttatttattcttttttatcagtggatattaagagttagtcctacattgttaatgtgttgaaataaattatgatatataagatagatgggctacttctctcattatcaatgtatcaattagttttgagatagaattttattcatcttatttccaaattctaagaacaaaaaattaaaacatctaaactgtgaatgggttactatgtttggattgagatattttctttttgtttgtacgagttaaaattgtactattcatttgtttcccatggaaaagttacatccaatacccgtagaagactaatgattttgttttcaagcgaaagaaatctcgaggaggaactcacgcctaattccctagttggtgaggcaataactcaccaaggcattctagatcaatagttggttcgaggatcaccgacattttcttatttgcttcaagtctttgacattccttaaggtgctactcatcatccataccatatccatatttgggctcttataaagaattttacaaacaatttacatataagcaaatatacaactaaactcctagaatatgttagtattaaattaaaaatagaacttacatgattgcatgcagcgaaagtggaacaactccttcaatcttcttaacccttgtaccctttctgttagaggaaagtaacatgacattgaattgataaggaaaatttaataaaatatccattcattaggtttaaattttttcctaaactaaaactaattaatattggccaactaggccaacttttgtttattccctatattaccccttccatttttcaacacactcctgcctctctctcactctcttctcggaccgaaggactactactgaccaaactcctaacaacaaacatatcaaagtctctcaccaatccatgaccatcacggcatctctgaccctctctccaacccacgaccaccgaggccagaccatcgtaatgtcgaaagtaagattctgggcactctctttttttactgtgtttttgggttaaattgtatgagtttattgatttaggattaaaatgtatgataaatttctgtgatctgtaagtttatgttagatttagggttggtgttatacccgaaattcggctattcaccagaagctaacacgtgtactataaaaggaatatgaatcagttcaaaaaatataataattaaattgcattattaaatgtggtgtaattaactcgttccaattaattaaagttgatagaaatattcaaacttgctgattatatgtgttaagggatttagttagatcagtttattcagtttgtccaactgtaatctttctgttataaaggttgttacagtttgttattattctggtcttactgttattcttttcagttgtattgttcagtctattggttagttgtatatatattgtactcaacttccaatacaatacaatctttgattccctctttcaatcaatctttctttgttcatttctctctttctctgtttctttccttctctgtttctttcttgtttttcatgttcattctttgaacaacaatggcaaggagattcaattctcctgacatggtatcagagctgtggccacctctcgtggcaaacgtggtgagcacaggtcctggagctgctgcaaatggaggatcaacagctgctatggtggcaatcagaccaacacttagaatcggaatcgaaacagagatcatgatgaaaacacacctgtgtactttaatcattccatttctgtgaaacttaatgatcacaactttcttttgtggaaacaacaggtactggcagccattcgaggcaatcggctactcaaattcatccaaaactctgctcctcctccacagtttctcaatgatacagat

SEQ ID NO: 256708 - DNA, 2819 bp, Cannabis indica
acaattaaaatcgaagccctagtttttactaaccgttaatttccttaaattgtttctcctttcactgtttttgttattttctagttttgacctattcttaatttttatttaaccaaacagaagtaaagatttaattttaaagtacttaactacaatccttgcgggatcgacctcactcccggtgagtttattacttgttaacgatacgtacacttgcgtgtgcaaattaccacaaacaaaacttctttgtctattagttaaagttattcttcagtattatttaattatcaattaaggctcatttattagttaacgaaaatctgagttaacattttagtgctttcattgagagcctttgagaattaaacttttaaaaaatcatctccctccattaacaaaactttcatcatctcacgatcatgaaaaatactctaaacaatgattctgtacaaaataagggggaaatatgccgtcttggtaaagagcctcaagtggcaaacaccaaagaaaactgaaatgtaggaagaggtcccactgaatgggattttgaacgagatgttaatgaagatgaattctagaaaagaggaatcgcgctgcttacgatcaaaaccgctatgatgagccattggtagagttagaaaattccaaactttgggaaagattgactgagtctaaatggagaaacacaaaattagaaagcgaagcagctgcagcaaaaacagcgttgagagatgcacctcgtactcaaactggccagcccgtatgcaaggtgtcctcgaggaaggcctcgcgtttcgaaggctaggaaggcattaggagcccctgtcagtgatgataatcagaataatccaatgattcccaggaatgacaactgtgacagtcaatagttccaaggtctgttgggtacgaaggagtctttttgtaaacatgttctaattgatgtggtgcaagagggttcaatggttactgagaatcgagctagtttcttgcagcagtgttacattgaagatgaagtcaaggttagcctcttttcaattccgaatgataaggcccctgctctagatggctatggtagtgctttctttaagcagacttgagatataacaggcaaagattttgttaacgctattctttcattcctgcattctggaaagattctgaaagagatcaataccactatagtgacccttatcctaaagaataaatgccctctgaatgtgagtgagtatctccctattgcctgttgtaattttgtttataaagtggcgtcaaaattgattttttctaggcttcgtgagatactccccttatctcagagaatcgaagtgattttgtgaagagaaatttattgctcataacattatggtctgttagaatatggtgagaagttatggtaggaagaatgaaaggctttgtgcatgatcaatattgaccttatgatactcttgattaagaattcttttatgaaatgctttggcgtttaaattcccaactaagtatgttgacttagtactcatgaactgtgttacgactcctcgattctcctttatgatcaatggtgctctcactggatagatagaggctaaaagaggtcttcaacaaggagatcttatgtcccctttgttgtttgtgcttgtcatagaataccttacaagaatcttgaacaaagaagcccatgaattcaaataccatccttgttgtgagaagttgaaattgacccatctctacttcatagatgatttacttctctttagtaacggtgactttccttcaattcatcttttatttagaggttttcaattgtactctgagagttcttggcttaaagcaaataaaggcaaatcggccatttatggagcaactatgaatcaagaagtgtgtgggataccttgatttctatgatagggtttgtgaaagggtctttaccttttaattacttgggtatgaagatcaataataagcgtatctttaaggtgtgttctaattaattttgtgttgttctctataaacacgaactcgtctcaaattgttattttgccaaaaactattattaaaagaattaatcaaatttgttgtgagcttttctttggaaaagaaatcagattataatgggcccagtaatgtgtcttgaaaagagatttgtaagtctaaagctcaaagaggccttggcttcaaagatgttgcattgtggaataattgtgcaattggtaaatttatttggacaactggcgctaatgaggataatttgtagtaaaataggttcatataatagctggtggagctactgaacaattatataattgcaggtgtttacactaattgaaggagaatgttaatcgctggcattactcttttatttgggatcacttaagtgtgcctaagcacaaagttcatttcgtgattggctttgaaaaatagactaattaacaacaagagatcatttattttgttttagtatgacttttgatttttttgtctcatctgtgatcagcataatgaatctattgagcatttgttttttcaatgctattttaatttgaggagtttaaagcagatagttcttctgataacataatattcttctgataataatattacataatgctaacttaagagagtacttagcattacacaacataataattaataaacagaacaacattaagtacttaataacaaaatagtttaacacaaaagcacaacattatcataactaatatatatacttaaaactagaccccaaaagccaaagctgattgcaagactaactagctttgatcatgatttcggtccatgatttgggccaagatttccttaca

SEQ ID NO: 256709 - DNA, 1116 bp, Cannabis indica
tgatagtaatattcaaattataacaattacaattattttttatataattgtgtgtaacaataattgaaaaaaatataaaagtaactaaaattataaaatacacatattttagaatttattacatcaattgtaataaaaatgtaagagtattaaacacgaattcaaatccgtataaaaaacagattgatctatttaagaaaaacaagtcagtccgaataaaacacttcacgaatccgaacacgatacgaaattaccgcatttgtgaactttgtcaggtctaccttataaaattattgtagaatacagcatgactcatatttttttatagcacaacacgacttaacccatatttttttatggtaaggcatgacatagtccgtaatttaaaaagcacaaattatagactgaactaacacgacacacacgtaattacaactctagatgagcctatgtttatgaatgggtggacaattgcatatttttcccaccctaaattttcatccttggtccatccttactcatactctaatcatagacttaacaataaatcacaaaattttcgaatatgaaaagttaataaaatataagataacatattgcttaatcaggtgagaagctcatgttcacacagaagatacattattaagctaaagaaaatgaatgagtaaactataatcaatacatatttaattcaaaaaatacataaaaataagatttatttacattttaatgcatagaaaatttctgaaagtgtaaattctgtaaattgttggctttcatataatttggttatgctatttttgggagctaaatttcatcccagcaaaagagtttgaaatacgcaccagcacctgtaccagaaaaacaaaataagtttaaaagaagattggttttgaatttagtcagacccataattttggggtgaccaaatagctaattgatacctacctgtctagagttacacaaatggaaagtacaggggtgtagccaagacagctaatgttcattctgttttctgttctcaagctcatacttaatttaaactaacagttctccacaatgaaaagaacttcagcttttagcacttgatcatacaaagagagaaaaagcaaaaaa

SEQ ID NO: 256710 - DNA, 1424 bp, Cannabis indica
ctaattagccacctctaacccgattatgcattgggtcctaattagaactttatacaaaattggaccaagtcttttccacgaaaaaaactgaacacaacagattaattcttttcgcataaacatgacagcaatatgatggaaaatatttagaaacaaaatccctgtacagtgatcttcccttcatagtgtgttctttgtaagaaagctcacctccaacttaaatatagagaacaatttttcgttaaggataacagtgtaaatcgatcacaatggtcatccaccccacttagcaaacataggggatttcttctcttctcataataataaaaattatggaagatcatattgtgttgatcaatcaaacacagggaaaaaaatgaagaatttctaattttaattggaagatttattcaagcaataagttctcatgataacaagaaaataaaagcatagaatacctgcataggtaaattattaccaaactagtagaatgggataaataatgatggtaggtttgtaatttggagctccccactaacccaaccctacaatatttgggaagctagaaacttaaactgttctataggtgcccaaaagggacgctaagaccttgcgggaggccagaccatttgagctaattatgagacatgaaatagtgtccgagaacccagagaatgagttggctcctacatgtagtaaacaaaacaaatggggaaaaaaatagattcatgacggtgatttcaaatttcgataaccttcaccaaacttaagtaaaataacagaattttgattgttatgctacaagatccccaacatctggtttgcaatttatttactgataattaaaatcccagttcttttactttcctttcctgcacttcacttttaatcgagtatcagctatatagtgcccaaaacattacttttcctatcttaacaatcccagctacaaattttgcactgcccctttttccatttatttccttgtatctgtatattttgttaactgctgacacagcacgaagggactagaagacaccaacttagagttcaatgaaaaagaagaagaatcaggaactatgctaagttctcgaaaaagcttatattttgttgcagggttgtctaggataggggatccgtaactggttataagtactgccacgtttcatcggctctaggtactagaatgagtatcgatttcacctcctattcaccacggtttttaactattttccttgctatgattatgtaaaggtataataaaaaaattactttgggaaaaacctatatgtaggataaaaaaacaaagtatagaatccaaggatcgaaacaaaagtaatagatcaaacatggtgatccactaatcctacccgaaaggagaacaagcctgacagttatgaacaccttttcgatatatatggtag

SEQ ID NO: 256711 - DNA, 1336 bp, Cannabis indica
aaattgagttactaattgtattttttttttttttttgaagagttactaattatatctaaatctaaatgaatgataattattcaaaatatagttgttgagaacttagttctatcatttataaggtggataagtaataaaaattaataagaaatgttgcaatgttggaatgtttggagtgaaacacatgaaatggaaaaaatattaataagcactacagcgatatattgcatgatgggaggtgatatctatccaatttttagcatgttgtttttgttgggtgtacatccaaagttctacaatattagctaaaaatgagaagaatcttgagtatatccggatgaacgctatctacattataatgtagccttttgggatggtgggttttgattaaataaccatattgttcactgacatattaatttaaactatttattatgtaattgaaattttgttttgaacactatcaaggaagaaatgccttttataacaaatgttttgaaccttgtttaagtcgtaagtgttccacttcttccttttatttcttatttcttatgtaattgagttcgaatcttctttttcttagtttgcatgtaatcttgtaataatacattcatttgtattttgtatttgattgaaaccttcctattctctcaaatgtatgagttatttccaaatgacacactttctattgatgtaatattttttgtaattggaattattattatcattatattatttaatttaaaatttaaaacttgattttaatatgacattgtaattctgattacattataataaaatcaataaaaatgattaaatattaaaatataactaaaacatctcttttttacacccttttacttttattaaatatttatataaaaatagaaagtgcatataaattcttgcaagaatctaagggtgcttggtgtcaagatgctaatactgatttttagaagcggctttggtcattaaaattcctcctaagatcagtaattttttatggcaagctgcttcgggtgtgcttccaacttgttttcaactccaaaagcgtcatgttcctgtcaatgccgactgccctttatgtcactctagtactgaaattgttcaacatgcgttggtggaatgctcgtttgcaaaggctgcttggcatcgcagcatagtggatgtcgggactggggatgcaacgttcagtagctggttgctgggaatttttgccagggggcacgaagttgaaatggaggaagcggcaatggtgagttgggcaatttggcgtgtgcggaattactttgtttggcaaaagaagagttggtttgcttcgaatattgttacatca

SEQ ID NO: 256712 - DNA, 944 bp, Cannabis indica
ttgaagacgagtcccaaacatgccatgtcaggcccactcaaccatgggattctctccgggccaatggaaaaagatgattctgataattttaagagaagcttctcccaagggggtttcgcttttcgacccaaatcaaggaaagggaagctgattcgggtcctccgtcgagcaatttcaaagacgatttatcgtggtcataactcgatcgtggctccgatcaaaggggtcatcgtaatcaaagatccgaaatggattctcaacccgaagaagcacaatgagaacttgacggggagtaacatcaatttgagcagcgaaggtagtttggaggacgatgattcatccgaatctcagaatcttcattgggcacagggaaaagcaggggaagatcgagtacacgttgtcgtttcggaggagcacgactgagtttttgttgggatttatgatgggttcaacagccctaatgctcatgattaccttctttcgaatttgtactcggttgtacacaaagagttaaagggtttgttgtggaacgaagataagaagaagacaatggtggtgctggttggttgtttatggcagtgagaagaagaagaagacgaaaaagaaaagaacgtaaaagataaaagaaattatttgtaaataatttattgatttatttatttttattttattttttaaaattaaaataataatttggaccaataagatttcaacacgtggcaattttaaaaaagtaaacggctcagttaaaattaggactaacagacaactaaaaagcatgaccttgaggacaattactgttatttttcgaggttgagaacttatctgtatcaaactgaattttttgagaacttttgccacaaatttccgtaaaaatattaaaaaatctgaagttttgccacgttcacttttgagagaaaatgggtgagttttttttttttttt

SEQ ID NO: 256713 - DNA, 1001 bp, Cannabis indica
actattttcatttagtttaaacactatatttattgttctaactcctaaaaaacttgttaacctgatcattcatcttaaattaatagtgaaactataaatcctttgtaaatctttagttatatacttcctttatttttcattataaatctcatttaactattaattttattgagcgctgacgagaggaaaatagttaactaatcaaacatatagctaaataattctctgtcatatcacagagaaaaggatctaattttacaatgtaaaattagtaaaatactcttaataagttaattctgtgttcattgtttcatttagaacattctattggggaaagaaaaagataaattagttcattaatgagtttaagaagcaaaactaactaactcacataatatgtagtagtagcatgtaaatgctatacatagacatatggaaaaatatacgcagtatagattttaaaaattaggcaaactgaaagtaatttgatgataataaactagttattgacttttcgatacacaacacagacaacttgctttgagtgtgagtttcaattattgagtgtgagtttcaattatgtttggttatttttaataatctaataatgttgcttcataaattaagacagtttattcaagttaatattttaaattgagctaaataatacgtgatctaattaaatgagtttaataaacattttattggacatgatctggaatacccaatatatagtaaacttaattaagatttatatgagactctaattagtttgttatataaagaagtttggctaatctcaagcatttttctcctccattctcatcaattgagtaagaattcatagagaaaagattagtatgtggaagaccatatacccacaatctcatctcgtatctaatatcatggaatatcatggaactaaatatgtcttccattttattgattcataaagtaatcttcataatttgacatgagtttaaattttatataaattatta

SEQ ID NO: 256714 - DNA, 1668 bp, Cannabis indica
aagagaatgactgagaggaagaagaagaaaggttgcactcagattacgatttggcttgcgaatggggcataactgagattgctatatagtttaatggttattcagggtttgcaatttgggttgcaatttaggttggaactgagcatgattgagattgcaatatggtttaatggtgatttatggttgggatttgggttacaatttaggctgtgattgagcatgacagagaatgagatatggtttaatagtgatttagggttgcaatttggggtgcaatttaagttgcaacagagcatgattgagattgcgatatggtttaatggtgatttagggttgcaatttgggttgtaatatcaattgcaattagtgttgcaacatcagttgcgactgttatctagaatatattcattcgtgccactcattttcttagaagaaaatagagcaacatcataatcgggtgtttataaacattcctctctaatgatgtactatcttacacaattatttcttaatgaaatagctaagaggaaagctaaagagcaatttagattaaaataagaatccaacgacgtcccgtttaggcgagagttaaatttattcttcttttttatgagttctctattttttcaacattgtaaacactagtttaagtcatcatctttagggatcagtcaactagacttttcatttacataatacctatcttttgagatcttatactattagattatataacggatgaccatcctttagggggacgtcaagcgccacgaggtcccattaaaaacaatcaactaagtaagaccaacaatggagattaaaattgatactacaaaatttaataacagatattaatgctggttcaatagaaatgcatacacaatttctgaatatttataaacatttagcaagtaacaaagatatggaaaaaaaaatacaaaacaaatatatctcaaatattttctaaggtctttaactaaatgatacagtgtcacatttagacgagagtcgaagatactatttgttaaatagaatagtcagctcatctaaaatggataccattttaacaatcttttattcgatcaaaataagaattcaaagttgtcccgtttaggtgacagccaaggtcatttttattgtataagcttctaccattgtttcataggtgtaacccaattctaagtagtcattaatggaatggagctcttagaaattgaaattacaaaatacttatcttttaagatctaatggtattaaattcgtaatggataaccatcctttagggggacgttaagtgtcacgaggtcccattaaaataataaccatgtaagaccaacaatgaagaccgaatatgttaacttaaagcttattatattttttttaaaaaaaaaaatatttttttattttaaatattttttcaatttgtatattttaaaatatatttatttatttaattaaaattacaaatttagataaactaatataaattgtaatttaatatttattaaaatacttacctaagttgatttgaaaatagattaaaaaatttattgtccatccttagtatatattatatattttaaataaatattatgaaaattacttgatttaagttgatttaaaattaatttaaaattaattttaaactcaaatttaattttctataaa

SEQ ID NO: 256715 - DNA, 732 bp, Cannabis indica
acgtacgacgtacgtacgtacgtacgtacgtacgtacgtacgtacgtacgtacgtacgacgacgacgacgagagagagagagagagagagagagagagagagagagaaaagagagagcgagtgaccctggcgataaccccgaaccaatcctcaccgtgcaaagctcgtcgccatcccctccaccttctcctgcgaccgagagagaaactttgagacttagctttgttaagagagagggaaaaaagtgatgtgcggcaaaatatgttagagttagtgcggcgactgagagaaaagtgtgttagggttacttttttagttcttttttgtttaataaaaataaaaaatatatatatattataagattaaaaatctgatgtataaataagatattaacttatacacacaactccttaaatttagaacttacacgtgtgaagtatttttttaaaaaagttatgtaaaaaatattttctagatttttctttttaaatttaacaaaaataaataaaaaaatttgtatatataacctccaactttttttttaaaaaaagaaaactctataaaatatttttccaatctaataaaataatttattattttcaatttgatttttcacattaagattatacttttatatatatactctatttaattttatctttaattaattattttattatttatttatttaaaataaatttaaaatctaatagtaaataacatgttaaaaag

SEQ ID NO: 256716 - DNA, 511 bp, Cannabis indica
tcttttttatattaatgtgtggctcttatgtttgggcaaacattagtagtagaaattgagaaataaaagtatctaaaaaaatacttatacttagtagtagaataaatgaaaattggtttttaattgggaagaaattaaaaaacaaaaacaacaaaaaaaaaaaaaacacaataaaaaattagaaagaaatttttttatatatatatatatttattttagagaattaattgggaagaaatcaaattcaggaaaaaagaaaagtttttcttttttaattattataactagaattttatcttaaatatatatataaaaaaaaaaaaggaaagaaaagatattaaagagattgatttaagtaacaaatcggaaagtaaaattgatttgagtaacaaatcatcaactgtttcaaaaaataaagaaaaacaaatcatcaaacaatacaggaaaagaaaagattgatttaagtaacaaatcatccaacaataaagcattacgaaatttccaaatttat

SEQ ID NO: 256717 - DNA, 529 bp, Cannabis indica
ttctatacaatatgtaaaactatttaaatggaatcaaatcattccctgtccgagttacataaaggaagtatttaaatggtttgatgagttgaatgaattttttgatttaccaaaaatatgtgaagttgtggaattcggcttaagtacaaaatcattgttgaaaagaattagtgtttacgtatagttaaagcattttaatttttatagtagcattatttaaaagcactaaatattttcatattatttaaagatataatattttattttattttatttttcttttacattatttttgacacttttacttttaaaaacacttcaatattaccgcacgttttaaaaatactataattacaatctcacacattattatatacaagcatacctcattaatgactactcaataggctcgttaacataattaagtaccaagttatttggtaatgggctgttagactttgttatttttaagtgaaaattacatgaaatatgggatttcataacaaagttagaaaaatatggcattttt

SEQ ID NO: 256718 - DNA, 1089 bp, Cannabis indica
agatgtgtagatatttctcaaaaaaattcatagttattccagtgtcaattgttagccaagaaaatgtctttttttccttctcggattgcccagtattatagtatccagtttctcatatagatatttcgtttctttttaaaaatttaatcacactaaagtagcatttatctaattactaaaattttaaaatagtgttaaggcttggtaattttcttccttcttttgtgttaagctaagcctagtttcatgttaaaatgatagacgagtactgtgtggaacacaaaccgttgttttcattgtcgttttcaacttcattcattctttcacaatacaaaaggtggggaattgtactctacttgtctatttgtattgcttctaaactaattgtcctgctgtttgtagggtttgactttgatgattttgattagcttgatagggatagttctgcattcgtgtctttatttttgttttgaattttccaaggacaattttctcttgataattgttaaagtgattacccaaagttttttgatacctttctttgtcctttagaactgattaaatctaagacaaaaatttgaagaaactcaatgccactatttgtaattcaatattgtgttatatattttaattcaataatcgtaatagaaaatttctactctctcataaactatcattttatgatagtgttaatattattggtgtctttgtgtcctgcggtggttgcaaaatttattcttttgttttttcacattacatcaaagttttacagcacaccttacaacttctctattattttcattaaattaaatcatttaatttaatatttttatgtacttctatgttaattaaatttataaaataattaaacagaaatgaaataaaaataaaatatatagagcataggagctgatgaagtacattttattcatcattctttaaatttttaaactaagatactcttttaaaggagttgttgggagtgcaataatttggggttgaactccatctcttcaactctcttcctagatccaaactacatgagtagtaagtacgtaagggtggacatcattcaatccaattgaaccg

SEQ ID NO: 256719 - DNA, 970 bp, Cannabis indica
atataaatatatattttggggttatggtttggaacccacctggccaaatgtatcagaaatggcttgaaaaccttggccagttcggagatcaacatgaaaagcgagagcattgtggagcaaataccgaggaggatgattggaaaagtgggtaaaagcgagatcgaagtgagtaaatgcttgaagaacatgctgacccaagtaacctgtgcctcccaccaccaaaactctccctctccttccactcatctctgaattttcttcgatgggcatccaaaaatgaatgctgggaatgaccgaatcgactgattatttttatttaactttctattgatacttatgttatcgtaaaatcattagggaattgcgaatgacggaaactttacatcgtaagtatcttcagttgtttcacgtttactaaacaaaacaaaaaataattgttggtaaatataatttagggtgattctacaatgcaattttttagtctaattttttttcatattcatgtacattatagctatttaagatatcctacaaatttttgagaaatttggaataatttacaatatagaaaacaatgttcaaacagtcgattttacacgcgtataaaataaaatagtcacgcgtgcaatacactgtttgaacgtagttttcggcatgttaaatttttccgaattttttaaaattttgcaggatgtcttaaataactataacgtacatgactatgagaaaaaatttgaccaaaaaattatttcggatgctaaaacagataggggtgcatcaatgtatccattttaagggagtgcattgtagaatttccctataatttaattcacaattcttttaaaattaaatttggatatatgcaaacctataacggttaccacaaaaaaatgaaattgaatattgtttgaaaaattaagcttatacgtattaataattatatggatgtccaaatcttttatttattacc

SEQ ID NO: 256720 - DNA, 1197 bp, Cannabis indica
tctgcagatagatggagagagataagccatttaagagttagagcaagacccagagctttaaatctcttcaggtttgaaacaacttctaaggggcttagataaagcagcagtgatagagcttgtagaatctctcaatactgccccaatacctacaatcccattcgtttgttcaaggttgcgtcagtgttgagtttgagcttccctgttggtggagctatccattgaatctgtgcatggagcacctgttgtgatatcagctggaggcatattagtaatagcatgtgatgaagaattcataagtggagccttaacagcatgatatttttctagatatccagtagcaaaaaggagaattgcaagtggctattttgctggtttaccatggcattcagcattgtgttcataccatatactacagcaaagtacaagaaaaagttcaaactcttatgctgaaatgtttgcagaaacatacagtaaaaatttctcacaggttgttgttgaagccagcttaatattaaaggacatgtgagagaggcgccacacttatttggcccttctgtacaataaaaaaagtgcatgattgatggttcattatgtgtcttgcacaagggacatattggagttgcagcaatatgctttcgatttaattctgcagcaatatataagaccatatgaaaagctttccagacgaagatgtgaattttcaaatggatttttaacttccaaaaagttgtccaccaactctcaagagaagagctgctgcttattttcttttgttcagcaagcgaagtagcaaattgataccctgattttactatgtaatctcttgaagtagtgccgttccaaaccatgatatcttttatgggaaaaatacttagaggaatgctcaagattttgttgatgtcagtatggccaaagttagcagataaagttgtcaaatcccattgtctatgctggtcaattagatcaaaaatttgcagagctggatttgaacctttaaagcaatagggagtgaaacaggtatggtcaggaagccatgagtcttctttacaattaattgaatcacatgtgcccaccttccatcgtagtcctttgattaaaacgttctttttcccaaactatgcttctttatgtcaaagatggacaagctcccaagtctgttgtaagaaattggccattcaaaaaatatctatgatg

SEQ ID NO: 256721 - DNA, 1068 bp, Cannabis indica
aaaaaaagcatacacagtaaaaacgataataatgccgcttgaaagtataaatgtaataaattgagaaaagttagtaatttatgtaaatttcccttaaaatttagaggaggccactttcgctgtgtaagtatatgtggctccgtccttgcatggtttcttccttggattgggaatggaaggaagtgtaagtactcttcttacagtatttaggtgacaaaaatattttatatttacgtaattatttttcatatataataataattgattgatttaaaatatatttagtgtttaactttttttattttagaaaaataaatcaaatatagtatgtcttagtacaataaatcatatttttatcctattgatcttattctgaccatttgtaagtacagaacataaaatttttagattgaaaaattattttaggaaagttttctatgaattatagatgtatatgagttgtatgttatgtgtatattaattgttatgtgtatattaattataaatacactttatatatataacaactagatttaggatctctttcatctctttgaattttatttttattttgtgagaatagagtgtttttattttgtagaggagagtgagttccactctatctctatatttatgtattttatattgtcttgagtctgtaatcaagtctacagaagaagaagaataacagtgctatcttcagaagaatgttctacaagctttcaagagatagtttttcaagtcttttcttgagtggaagcaagcactcttcaaggagatcgaagggagttcgagcacttgaagttttagcaagattccgttagaaggtggaatacattaagcttgcggcatacaaaagagggagtctatttatgcataagtcaattactttatatttttgagacctatctaatgaatcttatctgtggacgtgaccacgtggactattgacaatctagaaggattgttaacaccacgtacaaaaatcttgtgtatttatgcataagtcaataagagggagtctatttatgcacacagtcaattactttatatttttgagacctatct

SEQ ID NO: 256722 - DNA, 1218 bp, Cannabis indica
aaaagcttctataatacacaatataatggaattatttaacatctgagaaataatatacttgatcaatgatttcttttttcgatttagcgtcttcgagaggccactagggtttctacttttgatgaaaattttacaaattttttctataaaattgttcgatcgacaatataataatattcattattaataattaatggtcgttaatgtttgagtaatattagagatatgaagttcatttataatcataccaataaaatcttgcgcgtacatcaatcgtatgacaatttttttagccacgtatacagaataaaaacgatgtaacatgtaacaggtacgtactctctctccatatatataaattggtttttggaaattaactattttcagtgatcagctagtgtatattatagtacatttttcaaaacaatattaatattgaattaatatatctataaaaatacatcacaactcaacctaatttgctagaatgtctcaacatgtttttaccaatattggatatttatatataatctttattcttaatcactagcttgtagttttctagagcagtagtagccaaaacttcttatacgtaatcactctcaaaggatcaaaccatacactaacaaaccatatatttagctcctcataataacaaattacaattataattctcacggccatataaaaaatcatcaatcgactctactaaatattaaccaatcaccatatccgtaccctatactatagaatcaaatatatatatcaaagataaaaccaattgatcggaacggtccaaaactggtggggtaaattaatagtaagtaatataaataaagaataagaaggattatatataaatatagtaatattattataaggtcacaacagaagggcacgtggtgggcgattcccttgctagttatttaaactactggcgactttcctgtaataccgttgagttccaacctcctctcaagccacagcctgtacatagctgtccaatcccttctccccatgtgaccccacactgcacaaaccccatagatatagatagatgtatagatatagtttatatctattaattattattcatattaactactattatttattattgggatctgtaaatgatcaatgttcttgtcgttcccctcttctcgtttcttgttcctatttccctaactctctctctatactaatttctcttcttcctgc

SEQ ID NO: 256723 - DNA, 1740 bp, Cannabis indica
ggggccccgtaagcaatccccctggggtaagcgttcaacttccgactcaatttgcaccagccaccagcatggtcggagcacatcaaagttcccaaagtaagaggtcttctaaaggtagtgtacgatctaaatataaaagacaaaggagagggtatacgccccaatataagcaatacacctagctcatagactctcagaaacgtgtatattttgccacccagaaaaatacgcattaccgaaaacttcctcctttgtacagggacaactcttgacgggaccccaacaaaaggtgtgactatcacaatgatattggtcataccatgaacgagtgcaaaaatttaaaagatgaaattgaaagcttaatccgattggtccacttatatgaatggatcaaaaataggttgccacacttaaatccagtccaaatcggaggcccagtgtctcagggaggaaccgcgatagcaccggaggatcaggtacctcctggagggatgccccttcaacaagcattcagactaccacatcaaactaacagagagttgctatgatctctagaggccctcatattggagggaccactagaaatgagctaaagcattatgctggggccctaaaacacgataatgagatatggaaagttactcaactttcagctcaaaggcctaggctcatggatcaacccattacccttactgaggaagatgcaaggccagtgcgctttccacatcatgaccctctgttcatcgaaaatcctattgcaaataaggtcgtggccacgatattagtgaacaatggaagctccgtaaacttgctattcaaggacactttcgcggccatcgggctcactgaccgagacctctcccctagcagtttgcaactcataggattcaacgagacaaccctcatccctatgggaaaggttaggctcccgattaccttgggtcctgacaccccccaaaactcgttcaaatattgcaccattctagtggtggactgtaacactgcctacaacgccattcttggtaggccggccttggttaacttttgagctattacatccatacgacacttgtgcctcaaatttcctacctgggagacaggagtagggacagtgagggggaatcaagcagaatcaagacattgttataacaccgcattacatttttcggtcctgacgatacaggggattggaccaattttggtagaagaacaggacgagttggaccctcgtattagttctgaagcggcgttagaacccatggaggatattgaggaagtgagggtgtgtgacctcgacccatctaaagttgttcgtctagggaaaagcctagaaccggaggagtggagtaaaatcatagacaccataaaggcatctacggacatattttcttagtgccatggggacatgaccggaataagtccccacgtgatcacccatgtcctaaatgtcaacccagatttgccttcggtgtaacaaagagacgtccactagggtgtcagcctttaccgggtctagtggacgtctcttttgttgcaccgaaggcaaatctgggttgacatttaggatgtatgtatgttttagatttgaccaacatgttgtatacctccatgttttgtcctaggagacccttgaacatccagttgaccatgcgctgataggttgctccgacatttttcaattcgaagggcatgaccagataacagtaaacccccttcgtcggtcctgaagctggtacactc

SEQ ID NO: 256724 - DNA, 1036 bp, Cannabis indica
agttgagacactttacaattggtcagtgccggatgattagagaccacacacgaattatcctcaagacaaaagccaagccacacacggtaaaatatttattaattaaccacatttacatattattctgaattataattaatttattatagcatgtagattgaagcaataataaattaaaatattgttaatttgagaagaaaaaaatataattttttttaacaaaaaataagcaaatttatttaatgggtctatctttaaaataaaagcaaggcatggcatatactcgcatttcatattggatagggataaacatggtggccaaggaataatgccttccttgaatctgtcccgtcttcatcttcatccctattttgttacaactacttgggtaaaattctctttcaaaagctactgccactcttgaagaaacaaaaaggaactctcctaaagaccatagcgtcattaaatcgacaaaaaagaaactctctgaggccctacttagggaagaaatacacttgaaacaaaaatcacgtgtacaatggttgcaggaaggcgacaagtgctcaaaaattttcatggcctccactatcattagaagacggaagaactatattcaatgtatcaagagctcggaggatgacagctggattcgcgaccaacaagatattgctgactgttttttggatagcttcagggagttgttcaagaaacatcccatctacttatctcctttcatgaacggtgtattccataaacagattgatggtcacgataatgcactactcaatgccatacttggtatagaggaagtaaagttgacaatcagcgaaatgggaaaagacaaggcccccggtccagaggggctaccaccaagtttctacaatcatcattgagataccatcaattcagattttattgatatggtaactcattttttcaaccacaccaacttgcctcactttcttaatgacacttcaattattctaatcccaaggaagacaacccgacttaccccaaggactatcgccccattacg

SEQ ID NO: 256725 - DNA, 933 bp, Cannabis indica
atgcaataataaacaaatggctcgtttggaacgccgtattaggtcgtattgtattgtattgtattatattgaattgtattttatgcaatatttttatgtaaaactatatgtggtattaacttttatggacacctaaatatataatattttagtataaattaaagtttaacatagtattatataaaaatatgatatataatccaattcaatataatacaatacaatacgacctaatacggcgttccaaacgagccctaagattaaaaaagactctcatacatagggaaacgaataagagtgtaccataacaattgtgataaggagtgtacttgaaaatcgcacaaaacaaagtaatttgaagttttttcttaaattaatgtagggtcatttttggataatgcctaacttgtttattaacaagttattttcgggttgacaactcaaaaataacatgacaactacctatttaaaagtttacactcttatatttattgcatgtaaattgtattaaactagtaaagtaggacataaacatgttaaatgattcataaatgtattaaaaaataattataaagatgttcaataaacatcatcttttatataaacgggttacacaattcaggtcagaccaacctatttatgtgaattttgtttggacactattaataattggatcaagtttgagacttgtaatactgaaacctcaacataacatgaacattacctaattgaaaaaaaaaatgaataggctaaacctgccgactttttttgagtataggtgcagcgtggtcgcggctgtattttactatcgcgattcgatttttgctattgcgattctatgacatggttttaagtgttttagtcttgtctttacggcacaattttgagtgttgtgtgacatgattttattttttgttttgtttcgttattggt

SEQ ID NO: 256726 - DNA, 860 bp, Cannabis indica
atcgtaaaaatgtttaaagttccgtgaaaccgtatttttgttatttttgtgcatttgtgaaattaatccaataattattctattttaaaatagaaaaaagactattccaatacaaaataagaaaaaaaaacaattttttattaatttttttacatgttattcttatgttttaattacacaaatttagatgactttttagaaaatatagattgattttccgccacattgccataccaaatttagtagtttttttttttcaaaaaaaagaaaaatgaaccaaattttattgcaatttacttaattagtaattcatcttgcaaataataaatcatctaagactactatttggaaatatggtctaatgcacaatatagcattaaaatacaaaatatatttatataattaataaataatacaaattaataaattaataattgaaaatatactaatattgtttataattaattaataaatttgatcaataccactatagacttattttaatttctcgatatatatatattatcccaaactatatctataaattcttcttatattatcccacttaattaattacacctattctaccgttttctgacagttgaaaaatcccaaattttcagtagtgtaaataattaaatatatatatagccctaattaaacacatatatttatttatatgtatagagatgcatacctggaagatcccatggctcagatttgttgagatcaacaacagcaacaggtttacaagtaaaagaagaatcagaaacttttgaagctaaataataagttattaattcttcatctgttggatgaaatctaaaccctggtgggagttcttccatattcatcatcat

SEQ ID NO: 256727 - DNA, 734 bp, Cannabis indica
cacaatcagcccttaacattgaagcaaactaatactaactgaaaaataaaaaaacaaactaaattactaagaccaacaaagtacaatgctgggaaactgcaaatcatgctacctccttatttatttatttatttccagttcccgtaaattttcttaggtagaaaattagaagctttacactaacaatccatttattgaaacaaatgcaaggtttttattacacgtctttcataaactctatatgggttattgaggatttggtgggcggctgttagcagcagatactcgggaaccccattccaacagttctttgctggtgtcatccttgtgcgcaaatacttctataaagcacagagaatccttttgctcatttgttgcagttgaaatggcatcgacaagatcctcctccgttcgaacctataaaagatcaggacattaatttgttagcttgtaatccatgttcaggctactgaaagatagttccaaatttcaaatcaggtttattcactttgtttgctctaagatcatgtgaaacatctttacatacttatctagatgagcactttgaactcgaagtataattattttatgaggaaaattgctatgtgaggggatactaagtagattctgagtcaaaccatcagttaacaaatgaactttttaaaattcttgtgaagataagagtttcctaaaaattagtgtcattaacaatctaaccttggtagtccaacatt

SEQ ID NO: 256728 - DNA, 662 bp, Cannabis indica
taatgaaaaagtagtcaaaaaaatctgctttccttcgtggtcctgtgtccattataatataaataaataatcggtgggtctattatttggttaaaattgcatattttttttcaaaagaaaagaaggctaaaatttagtggcttaactcaaagtagaaagagattagaagagatgagtgagcaagaggattggggtttgttgttgttggcatactaaaaaccaaaactgttcttaacacagaaaccatgaatactctgaaaagacaggtttgagttggagagagagagagagagtgaatgagtaaaagatagaaaagggttttggtttgtacttttatggcctctttggtcgtgtgaacgtgggcttactggagaagtggctcaactcaactcaagtctgaataataatattaaaaaaaacaaaaatataattttttaatttcatttaaaatatataaatatataaaatcacaccataacgtttaataattaacaaaatcttattattgggctaagatttagttgctaaatacaaattacttacacacgagtgtaagaagaaattacattcttactttattttacttattttaattttatttttatttttattattttttttctaatataaccacttttatatagataatatccttattagat

SEQ ID NO: 256729 - DNA, 761 bp, Cannabis indica
tttctgggaggccctgatgtgatgaaggccgagcaatgggggtgagaaaagggttcgaagaggagacccccactttcgggatatggttgatccggtgttgctccaagaggttcatgcgaagaaggaagtcattgcagtcatttcatgttgctctggcttgtacggaagcagaccctgagattcggcctaggatgaaaactgtctcagaaaatattgaaagggttggatagtaatttacattatatatatgtgagcttcgtataattaagtttggaagttctaaaagaaaaaattgagagggcattcaattaattgatcagcaatattttgattggttttggtagctttttgattgagattcatgaagatatataattcttttgaaaaatggatgcctaaccaaaccaaccaatcaaccataaaattcttttttgtgtttagttaggtgtagtttgtttttgtaatttaagtttttatagaatggttcgcaagaatgtgtttgtaataatttacttttgagttacataaattgggtcaatttccctttttgttcctattttcttcaactaatttttttcttattcaagtaaatactggtaatgttcttgtctcgatttagtctaatcttgctaccacttgttttctttgggttcggttttaatcttcattcttgcatcaatttgaactcagagaggaaaatatatgtgagttgagcatccacaatcttcaatataatttaggaaaattactccatatattat

SEQ ID NO: 256730 - DNA, 1290 bp, Cannabis indica
ctttttattatttaaatgaatataatttgggagtaaatttatattatataattttatactttattttaattttttttgaaaattaaaagacattatttaaattgaagatttaattttagaacacatgctttatctttttatttaattattttttaattttgttaagaatttttaacatttgacatgaatattaatgagttattttattctattttatgttttaatttagaccaaaactaacaaaaaaaatattcaaaataaatttgttaactgaaagtgtatgaagcaaatagactaaaaatgactattattttaattaaactttaattgcataataatatttcaattaaaactcaaactaactttttattaaaaaaacttgccaattataatatgaatatattattgttaattatctccaaagaaactcttcatattatatataaaaaaaatttatataactaataaagaagagaattaaaaagtttctattagtacaataaaaattagaatctagaattattattattgaatttttattttaaaaaaatgatgttaagaaaattaggaaatattagaaattatattatcaagatctagatttagtactatatatgttgtttaaacatgaatttctaaaacaatagaatttaaacacatataaagtttaagaaaccttacattggttgcagcgaaattaaatgactccttccactcagacctctaatccttgttcctttctgtcgtagagtattatcaagatctgaacccgattctctccttcagttgattggccattcttcacagtcttacacactatgattgagtaccaacttgctatatatgcgtgggcatgtactctatcactataagggtttgaatttttgaagagagaaagagagaaagattcgaaaatagagagagaatgagaagactcaaatttgactgaaggctagataaagctaaagcttcatcaactgtctatcatctgtcaatttgagtctatcactatctatttatagggattcttctaggtttaagtttgaattatttagcattaacaaattgataaacaaatagtaaaaatgagcattagtggccgaccataatatgtgggcccaccacttgcaattttgccatttttaactatttatcctattttttacaaatgctatattttccaattcaaccacttaaatgacaaaaatatttatttaataattaatataattatcaaataaaattgtcatttaatatactcattaattagacttaataaagtctcttaat

SEQ ID NO: 256731 - DNA, 2041 bp, Cannabis indica
ttttttttgtcattgttttttttcttgtgtgatatattatttgaagtattgataggtattgattttagagttataatgtataatgtatgtgtttatgtgtgcacggtgagttttgttagatttaggttcgattcaggttcagatctgcgatttgggaaaattgcagtttggggaagacgatgggccgatggggggtctgatgcttgtgctgaaaaaatttagtttggggtccgacggtttcgatggggggggtccaatgcatgtgcgtgactgggaaaaatatttttgtgggtccgactggtccaatggggaccctgattggggtccgatgcatgtgctgaaaaaatttttgggtccaatgggtatcttattttagccctgggaagctcgacagtaaagagaagaagagaaaggggagggggtaatctaaatgggggtatattaggaatattttaaaatatgtcatatcccacaaatattaagtgttatatgtttagggaaaaatattaagtatatgtaaatatagaaaatcaaatttccccttacaatactcaaaaaatatattgtataattatatgtgagtatgtaaataatttaaaaaagacacaaaaattatagtagttcactaagagcttgactagtctagtccacttttaaagagatcactttgtgtgtattttattattcaaccacaactccctttgaatggaggtggatgcacctattatagatatggttacaaaagtgtggtcacaataagacagcactactataaaattgggtttgtctgactattttaaatagtcgggtaaaatattcccgttgatctctaagatcgatgcttattcgaccgcctgggaaaactgtgtagaatatgtgacggtgaaaaaccaccaggtaaattttttctcgattctgcaaaaccgttaggaatattgagcaatatacactacaagaatcatgggcgtcaccaacggtatcacttacgccataaactccacgaaaagtatgagtatcaccaacgacatttaagtgtcgtcagtaataagaatatttttttttgttccccctattaatgacgaaaatgtcgttattgataaatatattaatgacgacaaagttgtcagtaaaatatttttttaaaaaacttaccgttgaaaaatgcgagctttttccctctaaaattaaacctcgaaccctttgatctaatctctcatttcatttttatctttattctcctctctctctctctaacctcattatcttctccaaattccaaaccgtctccatatctttccatgtccaaactctctccatctatctcttatcttctctctaaaaaataacaaaaccatctctatcacttgaagcttatccggaccaccaccacgctgctaccgcctccctctccattgcctgaagctttgtcggaccaccaccgcgctgctgccgccgccatcttttggtaatgtagttttattactctcattatcttctcataaatattagtttaatatttttatatatattgatttgtattttatgtataagtgtatttatatgtatactattttatatttttttattttattgtgttaggttttagggttcataccggagtcctagtggaagagtagaatcaaatttagttttaaaaaaatattttttgaatccgatatgaactttagaccccgaatcttatcacaataatacataacacaaatctaatttatttgtatagagatttacttttttttttggcctatatatcaggatttctttgctacttttcgtataaacaaaatgaacatccaatataagaactcgacataccagtgtcttctagatcagcctcaagacttagaaaaagagtgggcttttagatttaatgagatgaaaataattttctaatcacagtatatttcaactcatgagacacatgtgattgtgattgaaaaaaaaacacaacacactagtatgtgtgtatgtgagtcgtgtagagagagagagagagaagagagagagagagagagagagagag

SEQ ID NO: 256732 - DNA, 725 bp, Cannabis indica
ttctttgccagccttcgacagaagtctaataatcattatgttattaattataaaaacaacttacaatagatattatgatacaatgataattttttttctttcaatatatcgaattttaatgatttgtatctgactttattttaaattaattactatatttagatataatatagtaaaacttttatagtagatcctctaattgattgtgctagtagacttttatctatttcgatatttagaaagttcttttagtttttttttatctatttagtacgacttgtaaatttttaaaaaattctaaatataatgacaaaaaaaagtttaaacagatgtttaccatgcgtataagaaaaaaataatcacatatataataaaatatgtaaatcttattttcaacattgtaaattattcataattttctgaaaatttacaggtggtcctaaatacacgattatacaaaaaaaaaaaaaaactagactaaatttttttttgggtgtcgaatactcttttaagactgtacagtaaacttaccctataatatatgtacgagtatataatattctattttcattaatataatttatctttacgatataaattatataaaattaatattttaattcgattttattatacataaccatataaatatagtctagattcttaccttacttttaaataaatttcttaataattttaattaattcaaatatatatattttttt

SEQ ID NO: 256733 - DNA, 1985 bp, Cannabis indica
gtcggtggccgggcgtggtggtcgggatgaggcagccataagagagagaggttcgggatgaggcagccatggatgatttcagtttttgatttttttcaaatgagaggggtatttgtgggatattaagaatgtggtcatatattaccaatattattaagtatgtatttagagaaaattttttaagattttctaagtatagaaaattaaatttccccatataatattactctagattcttgaaaatattataataagctagtcacattaatgataaaaatcatagttatattagggtgaaatcgaaaccttgacaattattttcatctgagttattcttatctttaatttgttattcgcgttcttcctattctcttttaattttttaatatcatttgaaatcaattttttagataaaattaagctttaatattcactataattaatttctttaattacttttaatttttgtgggatgatattgatctcttaaccactattattacttgttggtttgtatacttagcatatacatataaaattcacaactagaaataaatgattcatttacttattataaagaaactaatgaaacatatttatcaaactaatcatggaaaaattaccgaaattccctcactacctgtatagcttcaaagtctaactatgggtaaaataacctcataattacaaactatccatgaatactcttaatactaaggatgcacacggggcggaaaattggcggggagggactgctcccccgtccccatctccgttaaaatttttaatcctcatcctcttttattttctattggggatagggcgaggaatctcctaatgaggaatcccctaataaaaataaaatttacaataaaaattaaaatattttaaaatattaaattgcataaaaattaaaatattacacattaactattatttaataaacaataattatctaaataacttaaaattcataaaaataatactaatatactaaaaaaaaatacaaacatacattataaattataaaatattattaaaatataaaataaaatactgaacgagttcctgtcggggcagaaagtgtgatccccgtccccgtcccatttaacattttgtgacaaaagttgatccccgtccccgctccgttcctcatttagacaggaaattctcacccattaggggcaggtcccgagcaggacccccatctcaatgagggaaatgtgcatccctacttggtaccttaaaaatactagttcatactattgtgatattactggccaatccatcgaattttcactgttgtcgatcataaaaacatgaaaaatatcaaatttcatgtataacatatttaacacacctagaattcaataaaatcttcaaaattgagaaattatatcaaatattcctagtttctaataataggacttattttctaataatacacatgtatacataattaattaatttattactaataatctactaatttccatatctaatcatgcgatcattacaattattactccattaaaagggtttcatcctcaaaatttaacctgaataaatctgaatattgtgtcctcatatcggactctaacttccaagtggcttcttctaccttactgtttctcatatgctacttggccaaccctttcgagtatttcaaatggtcctgtaagcctaaggctcaacttgtctttcttaccgaagtgctttacacccttcatatgtgaaacccgtagaaatacatgatctcctacctaaaattttatatttttgcactttgaatctgcataactattttgcctgctttgagaagcaatcattcgagctctaatcttttcaataacatcattggtcttctgaactgcttatgaacctagatactttttttcctcggtttcatctcaatgaattggagaacaatactttctttccttgtcgtatcactataggtaaaattaagtatcggatcctatata

SEQ ID NO: 256734 - DNA, 1343 bp, Cannabis indica
aactgtttttaaaaaattttgccaaacaacccctattagtttttaaaaactgttttcagttttaaaaaacacaaaaaacagtttttaaactgtaaagccaaacaacctcttagagtttggagttcccgaaacattttgtatgcgggtagaacagtactggttaacttagtcatgaaatctatctattcctattaggctcaactcatgataaatcctaagtctgggctgagtaaatgttatatgcaaaagttttttatggaaaggaatgtctcattcaaatgggttgggcctagtttcttgggatgaaatgtacgcaatacgaaaagagaaggaggtttggggttctagaagaatcaaaaaatagaaatgagacagaaattgggaaatatgtctaggctatagagtcgaagcaagattctttttgggtaaattgggtgaattatgtgtacattggaaaaactgattggatatcctatgagtccccaagttctggtagtgaaaacaagtagtttgaatcaagaacaagctcaggccatctcaatttccagtctaatttgttagatctctaagtctaagaggtcaagaggttgtttaactgtgttttcagtttttcagaattttattttcaaaagtgagaataaaaaataattttttgtcattttaaaaatttaatggtgcttggctgaggtttattaaaaatattttcagattttttttactaaaaaaatcaatattctagtccataccatgacatgaacctatgctaccccaaacccagacctagacccgaacccgaattcaaaccccaaccccaatccacaccgagacacggacccaaacctggactcgaactgagacccgaacgccaaagccatgacctagacctagacccaaaccccagactccgaacctcgaacccatacccgaacccgacccagaaccgtactcaaaaccggacctagaacgtccagaccctaataccctggacctcggacccagggctaggtccgtggttcgattttgagtccttgtctaggtcttggtctgggtatagggtttgggttttgatcctagttcgagtccagattcgggtccgggtttgggtctgggtccaggtccgaatctaaggtatgggctcgtggttcgtgtctgggtcttggttcgggttcaggttttggacaacacccgagtttggtccagttcagggtcccagttcgggtccaagtcgatttccaagtctgggttcgagttctggtgtgcgggcttaggtatgtgggcgaaaatgtaaaatataatatattagataaaaataaattatttttgaaaatagaaaataatatttt

SEQ ID NO: 256735 - DNA, 2132 bp, Cannabis indica
tatatatatatatatttgacaatgtttgaaaaagaaaaaatcacaatgtttgaaactttgtcactaattataatgtccgggaaacggtagttacttattaaaaccgcaaattaaagtttgaaaagtatgaaaaagtggaaactaataacatgattcctaacttgttgaataatatatctataaatattttttttgtagtcgtatcttttgatacgtagttgtctctctattttgagagtttgctgttcttgagtttgtcttgtttgtgtcgatatggcgtccagtagcatgggtggaaatgatgtgttgacaagtggggacatggttccactagaagaggaagagggagaggttcttcgggccccagtgaacaaagcagaagaagtagtaatcgatactagatggtgtttggtgggcaaactgttgacgggtcgagtctcggacttcaatgtttttcaaaatatgatggcatctctttggcaaccgggcatgggaatgtacgtcaaggaactcaatccgaatctatttttatttcaattctaccacgaggtggatattcaaagggttatagatggtagtccgtggacgtatgatcgtaagccttttatcttcacaaggttgaaagaaggggacaatccaaggctggtgaacatcaatcatgtcgatatgtggatacaacttcacaacctacaaactggaaatatgacccttagtgtgatcacggctcttgggaatttcataggtacttttcttgaatcggatcctaataacttcttgggcgtttggagggactacctacgcatccgggtaaggatcaatgtagacaagccgatcaaaaggagaatgaagattagcatagacgactcctcatggtactgggttaatttcaagtacgaaaggttgcccactttctgtttcatctgcggcatcattggacactcggaaagattttgtcctagactctttttaaaacctctgcatctccaggaaaagccatacggccttgaactgaaagctttaccacaacgacggcaaacgactttcggggcacaatggctccgttcaggggcggtggttcgcgggggaggtcaccatgattactccggcaataattcgatgcagcatgctactgcgatcccaagaatcacggagggaattgggggatcgaatgacaagaatcaaggggctgatttttctcctaatttggcaataaatgtgcaccaaaatagcaactttgaaaatctgggagataatggtgatgaggtggcattaaatgtccacaaaaatggggatttttttgactctaatcttaactctttggttgatccaaaaaggaaaaggcctgataatgggctgggagatatagtgggcctagaaggcaaagaacgtaatgatggaattgatgccatggatcatgacacggtgggggtttcaaaaaatggctttttggcgggctctggtttccagacccgcccagagttatgagttgtagggaacccgcgggccagacaattcttagcggaccttgtgttccaaaagaagcccatcttgttatttttgtgtgaaacaatttgtagtaaagttagtatggagaaaattagagcccaattgggttttgattgttgttttgtcgttgaaaatcggggtcacagtggaggattggctttgttgtggaaggtatcgcatgaagtggtgattcaaggcttctctttcaaccatatcgacgccaatatccatcttcaaaactccttgccgtggcggtttacgggtatctacggcgagccaaaacgggacttgcggttcaagacttggactctccttcgttctcttaaaaatgatagtacgcttccttggtgtatcatgggggatttaaacaatttgggctctcaacttgagaagaaaggtggaagggcgtatccggatagtctcataaccggttttgtgggggcgttgagtgattgcaacttggttgaccttcccattgttggctacccgtttacttgggagaagggaagaaatagtggagaatggatagaggaaaggcttgataaagctttggtgaaccccgaatggttggctttgtttgctaggccggttctatacaatcttgaattctctacgtctgatcattg

SEQ ID NO: 256736 - DNA, 1086 bp, Cannabis indica
aacaaaatattaataaaaaataatatataaataataaaaaatcaataacaaaataataaaattacaatataaaatatatcaaaaattatattttatataaataaaattttaaaattataaaatatttaaatttcgtaaaatcgtatttttataattttttatttattatttttgttatttttttttttttaaattatcaagttttttttcgtacctagagaccaaccacattaaaaaactggtccattggcagttggataaggcccaccattaaatgtcactaatgattttgttgttatactccaccaactcatatggataataccaaaataatttcaatttaatttgtagataaatatgaagggtcaatagataatttttagcaatgggtaggagcttgggccaagttagaagcaagattagggcaattatatgttttacacatttaattttattaattaggatttttattttctaaatttttgatatgtactaaatcatacatctttttctaccattaaaaatcttccctgactttgatatttatcatattatgcctctcaaagttcgatatgtactaaatcatgttctttagacttttattcacgtttaactttcctcactaaaattaaataaaaatctttaaatataacaatctcatagattttcataagagaagatgaatatgcaccaggtgaactagacatatacctaaggtccccatttaaaagaatccaatttttcaaagatacattttattttgttatacaaaaagaaccattctataaattatatatatatatacacatataaagtaatatacgacacaaatatttaagtttaactctctcttataaataaatacctaagtaatttttaacgataataacactaaaattatatttttaaaattttcgtaagtacctaattattaaatgtttttattttcttattagtatatttaaattaatttttaaataaaaaataaaaatttaatgacttaaaccaatcagagattgtcacgtgataatttacttgacacttaacaactaagtacttacacaagtttcaaaattataacttaag

SEQ ID NO: 256737 - DNA, 338 bp, Cannabis indica
gaccagatttgctaattatggcactagttttgagttaattatgctttgaatgattttaacttcgttgagttttgtgctttgttttgctttcttagtttgttgctactagctaaagggtaatacctttagctagattttctttggtttagttggaatttcgttctcttttttggtgacaactatcaacaaaggaagggtgttctttatagctttattgtctaaatttttggggacaattttgtcacatgtggctcgcgataagaactttgcaactcatgatttggcaaagcatgccattctattagacgatgaccccaactattattattattattatt

SEQ ID NO: 256738 - DNA, 1075 bp, Cannabis indica
tcaagacaatggtacaagaagttatctgatgctttaatacaagagggatttgtgcaatcacaagtagattataccctattcaatagaggatctcatgacagtttcattgaattattggtttatgtagacgatattatactcgcaggccccaaccttgctcttctcaaccaacttcaatctactttgaatgaaaatttttctctaaaggctcttggcacactcaaatatttcctaggatttgagatagcccgtgcaaaggaaggcttggtgttatcccaacgaaaatatactttgcaactcctagaagacaatggctatgttggaagtaaacccgccaagactcctatggaccctagaatcaaactagatgatcaacaaggagaacctctcgaagacccttctccctatcgacaactcgtgagaaaactgttatatctcaccctttctagaccagatataacttttgctgtaaacatcctcagtcaattcatggcatcaccacgaactcctcacctacaggcagtccaccattttctccgttacttaaaaggcagccctggacaaggtttactgtactcagcctcatcctctctcaatctaagaggtttctctgactttgactgggcctcctgccccattacccgtcgctcaacaactggcttctgcatcttcattggggactgtttaatctcctggcgtaccaagaaacaacctatcatttctcgtagttcagctgaagccgaatatagagcacttgcagccactggcagtgaactcacttggctgtaatatttgcttcaagaccttcacattcctcaagaccaaccagccttcatttattgtgataatcagtctgtcattcacatagcaaacaacccgacctttcacgaaagaacaaaacatattgaacttgattgtcattttatcagggacaaaatcaacaaatcaaaactaagactcagcccggttagcagcaaccaccaactcgcagacgtcttcacaaagcctctggcctccaccactctcaactctcacataagcaaaatggttgtatacgatgtataccgtccatctt

SEQ ID NO: 256739 - DNA, 969 bp, Cannabis indica
ggacatagcaaacaatagaagagctccagaaatccacttcttcttgtatatcctcttttgtgattttgattttctgtttggaagatgaaccaacaaatttggaatctaggttacgaataacattctcagatcttaggacaggacgaataacttccttacctcaagcgacaacattcgctgattgatgctgagctttactgaattgtttagcctccttaaaatgagcgaattccattcgaatctcatctcttcgagcactctccatctcctagagagctccatttcagcctctgcaacttgcacttcatcattcttatcttcttcatctggaacaaaataggctcaattctaaggacttcatccatggatttaatcctcctcgcatccaaagtagaatcaggtctgcgttttttcttcttcttcgctgttgattttggcttactatgtttgtttgctctcgtcttcgccatagcaccaactcaaggagctgagagaaagctagagagagaaagcccctaagttcatgattcatatttgctctcaaatagtaagaacttaaataatcaaaaattataaaatagtgtgaagacattatatattatacacctttaataaattaaaaaagaaaataattgaaatatgaatttggtgaggcattctagaaacacgataatatcttcatttgatgaagctccctttaaactggtaaactaagttttacaaatatatgctaatccattagaaaattctttatcaaatgtacctctaggtgcaagtttgcggtcttgtgttgtattatattgtattgaattgagttaggttatatattatatttttatataatactatgttaaattttaatttatactaaaactaggtaacaaagaccgcgcttgtcgcggttgttaatttttcttttaaagtataaacctaatatataattcgttattgtctgttattttttgttta

SEQ ID NO: 256740 - DNA, 859 bp, Cannabis indica
tctctctctctcctctctctctctctctctctctctctaaaccacaacataaaacccacaaaatctcatcactggcgtgactccagcgatccatcttcagccaccgcccagccccacacgctggaccattcgaacccccaagtgacggcgacttcaaccctcaagcggtgccgctccgtttgctgccgtaagcccggaatcgcaagtcaaagtttggaggttcaaactttgaacagattttccagccacctctggtgtccatttgacgagtcgtcttaaccactagactcagctcgtcaaggagaaaaacctacactaaaccatttttcctactttttctagtgacgtttttgtagctcttcccctttttgacgacttttcgataatatcgtgtactgttttgagaaacggttggcatgggtgtgatctactcgtcaaggtggtcattttgatatatactacccctatttttggtgacgtttccagtacaccaatttttattgccaccgatagttaatctgcaccgcttgtgtgaggttttggaactccaaactttaagtatagtcatattatatgtcgttggacttaattttgaatgtagaatgcaatgatgataattatttggccatttgatggtataggtgagagtaatatctaagattggactaaacaagtggagctcggttgttgagagcttaagatcgtcttttggacaaagtttaacgacttgggagaggtagggactcaacttgattattggacttgatttttatatgtgttgaataacaatagacatattccaatttttatgatttgcaaattgtttaaaaaaaaaattgaaaacttaatctgcacattt

SEQ ID NO: 256741 - DNA, 1169 bp, Cannabis indica
tgaaatgtgagggatattatggggataactaaaagttgacatataataccaatacacccctttaagttcaccacattaatattttttttttataaagacacccccattttattacaaaattagatcttattaaatagagaattacaccccaactttttaataaaaagaccatcatattcagttatttttctccatcgttaatctccctccctctaatgaaatttggtacagattgaacttaaaaaaatattgagaactcagtaccaatcaatagataaaaaattgaaaggagataaaaacaaacataacaaaccacacaagagaagatacattcagagtaagaaaatgaaataaaacaactgagagaattaagcaaacaaaaaaactgagagaaatatattgcatatggtaacatcaatggtatataaatttatttatattgtatataatgatataagaataacatcaattatatataaaaattcatatatatgctcgactacactaattaaatgagaaaatggtaataaaaatttaatactgttttgttcaattaataatttttttttttaatttttagggtttgaagatacacattttaactatctaatgaattttagtaagttaattaatttttataatgtaacttaattttttaacttgtctattttagtcatttcacaaaagataaaaatgtatttaaatatttggtacatttaataatactaggggtgtaaatataattcccctaccaattatgactacctttaatttctttaaccaattttactttaaattatgcatgaaaaatcaaattttccttttaatataataatgtttctaatgaaaagaaaaatagaagacattcagagcactagcaataaatatctctctcataaaaaaaaaataaataaacacctgctaaaaataacaaattcacatcatcattttgtaaaaactacttttgtcactataattttctatttccagagtaattattagggatgcacaccgggcggaaaattggcggggagtgctaccccgtctccatccctgttaaggattttaatccctatccccgcttattccccaccgaagacgggacggaaaatcccctaatgggggcagggatggggcgaggaatctcctaatcaaaaattaaagtttat

SEQ ID NO: 256742 - DNA, 1957 bp, Cannabis indica
aaaatcaaatttccctattattattccgattaaaattgatactattttagactatacgttttataaaaattatttattaaattttttattttgttaaataataaaataaattttgtatttttaaaaattatatgaatagaaccttgaacttaattttcggcaatttttataactcgaagacaattcttaacacgaagaaatacaataaacgtaattagttttgtcataacacttctattaagttattaaaatcagttcatgatactattttaaaaaatgcaaagtctaatttatcatttatcaaaacaaaatattcaattaataaattttacgaaatagatctgaaatattgaattaataatttttacaaaacacaatatccgaaatattatttaccttttgagaaatgtgattttattattcgaatattaatattagacagtatacaacttgtacatggaattcttctctatacaagtaatcatgctcataaatttacataaataattataataaaaaatgagtcatttttttcccttttattctaatgcatttttatgtaaaacaccctgatttttcttttattattttaaaatttcatatacaaaagttaccatttttttcattaccattctcaatttacacaatactaagcctaaaaactaatcaaagaatgcacaatttttttttcttcttaactttgaactcacaattctttacaaaacccaacttttcttcaattgtttatgtaattgtttcttctcttctaattttagatttaaaaaataagaatgtgatgtgacaacatactacaacggttgagatcgtggtcacattatttcagcagccaagactaaaccgcgagatttcttatcttctaattttagatttaaaagataaagatgtaatttgataatacactgcaacggttgagatcgtagtcacattatttcagctgccaaaattaaattgtgatataatgactttatgtattattatgcataatatgataatagaagatgaacgtgatctaaatacatcaattgaagagcgagtaaaagtgtcaagtccagaagttgagatggtagaagatgataatgctcagtttcaagaatttcttatcagacatagaaaaattaaaaataaggaagttcacacagagtttcaaaatgcattaatcgaacaattatgaaacaaatatgataactcacaaaattaatataatttaattaatttcaagtgtgtgttttaagtttgatttaatttgttgtaatttctttcgtcatgaatataatgtttattctctagtaatgtaatatttaattattagttaaatataataattgtagtaatttttattaattaatataatattaatttttttatttattaaaaatttaatataataataataaatatttttttttgtgtaatttctaatgttgtagttggaatgaaaatattttttgatattaaatttaataatagtgtaacactaaatttaacatgttcttaaagatctcttaaaattttaaatatagtagaaattaccaaaataaataaaaatataattaaaactcaattattttaatttttttttatttaaaagtagattcatgactatatagactactatatatataaagccacctacctaaattatttttattattattataaatgatgccatttgaagaatacttacaaaggaatcaaatacacaagaacaaaaatataaaaaaaaattaaaaaaaaataaacaaaataacaaaatttagtagacaacataagaaatagatgaatggggtcgatagaaatctcaaccttatataaaataatgaaataaaataaaataaataatactattattatttacataattaaaaaagtttttaattaatatatataaacttactcattgtctagtaaattactagctaaaaaaataatgcaaaac

SEQ ID NO: 256743 - DNA, 1305 bp, Cannabis indica
gtatactctttagatgtaaaatatatatgtatattatgctcaaaacatataatttttaaaaaaaataataatagcaatagatacaatatttttaatttatagttaggaaagtgtggttataataaagtatataaattattagaaaacttacatatacattatgaataaaacaaaaaattgtgtaaaattaaggtttaaacatataaattttttttacataaatgtgattatatatagatataatttttatttttaaatatgtatataattaaattaattttttatataaaaaatttctacataatttttatttttgaatatatataataatattataaaattaataaaatttattatattaagtaattgagatattttgttaaagttgacatagaaaactaaaaaattcctttaatcaaaaatttctttatataaccacatttatatgaaatagatataaatctctatgcgtataaaccctgagaaaaatctagctcaaacccctatctaacttggtagggtataacttggtagggtaacttgatttactcgaaaaagtgaatacacaaataaaatcaataccaagtaatttggttttcccttcatagcaacaaaaaacgctcacttggatgagtatgtaatttacaaattaatttacaaattaattggctttaaaacatcaaatcagaagaatattgacgagaataagatggcaaagaaaaggagtaaagttgtttgttatcaaaagtagggatgaaaatgaggtgtgtactaagtgggtaatgcacctcccactttcgtcctcattttttatttatgttctccatcacactctcatcccgtttaattcgcgatgggttcgagataaggatttccattatatatggagatcatgtagtacacataattaaaacaataataattataagaaaagaaaaattatatttgaactctcaataaattataaatacaattttaatggaaaacaaaattatatttttatttttgtacaaaattatcaaaatatacaattttaaatgataagtctattttaatttttataataattacacttatttttgcttataaaattaatattaagtattttcttcaagtcttaaaaaaaaaatcattaataaagaaaaacaattgaggtttcatataaacataaaaaaaattatatgtttaagtattatattatcaaattttttttattcaactatatataaatatatatacaaatataggcagtcgattttgtacctagaaatgcaaaatacaaaatgtattccgttgtacggcagg

SEQ ID NO: 256744 - DNA, 1052 bp, Cannabis indica
ttaagtattggaacatcaatttttagtttatttttagattaacttaagaatatatttaaatcattaagttttcttaaacactaatatattgcattcagtattcaataataatctcactttcaaataacatagaaaaaaactagcataaaatttagtatacgtgcctcgcacgtagttttttgctagtatatatatatttatatatatatatatatatattggttggaagagatcttcataatcttgaagcttatatatatgtgggaaattataggagaatcaaattaacaaaaacttaatcaataaataatttttaataacaagatcaactattcacacacaagtatcaaaaattaaaacagaaataaatagagtattaaaatcaaaaataataaaataataaaatcataaggatatatactagttcaagtcctataaattgatgtgatctatgacttacttcagaaatactaccgacactgcaaaaaatttgacttttaatcacagtaaaaataatttgtgactaagtgtattatttggtcacaacttatgacaaataatattttaatcataactaattatttgtgacaaattttaaatttttaaattttaaattgggaaaatgttacaactaaatgttgtgactaaaaatacattcagttataattaaaaatctttatgactaaaatgtgtgactaacactaatataaaaatagccttttgcttcagtttttaagtgacatataaagaattttcgtaagtttgtgtaactgacgttataactgtagacgcaaatagtcttattttttgcttcacttagtaacagactaaaagatttttgcttcagtttataaccgaagaaaatagtaaagccttgacgcaaattagtttttttgcttcggttatgaaccgaagcaaaagaataaaaaataaaaataaagcataaactttcagattaccacaacctttcagaccaccacaacaacccaacaacaacaataataaataccgccaccacaacaacccattgtaccaccaaaagcacatcgaac

SEQ ID NO: 256745 - DNA, 870 bp, Cannabis indica
ggacattgtgtgttaaaacaagatgttccacccgcctgtgtagagagagaacaaataaatatttatgagatttttttttttgcagaaaatatatttagaagattaagtgcatgtttgacatcataactaaaaaactgttttttgtttttaaaaactgaaaattgttttctgaaaacaatttggcttgtttggccttgttttttgaaaacagttttcagaaaataaagttacaaaaaaccagaatttttaaaaaccaatataatgagacttacttgtaaaaatgtgaacaagtgagttttattgtcgccatataaagttggattgacctaaaaaaagaaaaagttatgaatatagtatgcatgataaactaaacatatatataacactaataaaatatgaaaatgataagggcaaacacaagcttaaatcgatcatcttcactttagataggtcataggtgtcttgacgaactgttcttttaatgtgttttcacatgatttcttttttattgtttctatgttatttgcatgttgtatgaaaatctttataataaaatataacttaccgtccatccaacttgtatgctatcaggtccatttttaatggtcatttgagatgagctatattgagggccaacgacattaggttgataaatattcatgactgctccacctccattatatctccttttaggatcagattttgttcgaagcacagcatgctaaacaaaaatattaattattatttaattactaacttttaattttataagaagaacatcataaacaattcttgaactaaaattaaaattaatattagttaattttttttaaataaactagtttttattcttgtaataaaaaaaattaa

SEQ ID NO: 256746 - DNA, 558 bp, Cannabis indica
catgatcgtattcctagaattctgaattggtgtaatgatactgctccttttattaagcagttcaagaattctattttcggtgtttctctttctaaggtatttagttttaaaaatttaatttcaatgttactgatatgtttatttttatgtgttttttatgttttatttcctgttttatgtttgtttcagcttaaggtcaagaatttgttcccaactgaggaggaattattaaggttacatttggatggattctttgtggataagaatctagatggcatgggaaaagggaaatctgtgcagattgatgatgttggtagtcaaggttctgttgacaaaaatagttcatcttttaaatttgctgagtttcataagagattggcagaaatttctactaagctggaagcattctctgctgaatttttcattttaaaagaagattttaagaatatgatgcattctttagaatctgtacacaaaaaatttacatatttttgtcaaaacttcctctcaaggtttgtttgtaatttgttattaaacttttaattattgtttaattat

SEQ ID NO: 256747 - DNA, 1607 bp, Cannabis indica
ggactagctagtgtgacgtctcggaaaatcggggcgttacatgtaatgtttttatataaaatggtttcaaaggttatggccaatcgtttaaaagctgtgctccctcagttaatatctgatacacagagtgcctttgtccctggacgttacatgactgataatattgtgatctcttatgaggtcatgcattatctcaagcagaaaagaatgggaaaggaaggctatatggcgttgaaacttgactttagtaaggcttacgatagggttgagtggcaatttcttgaagcggtccttcaaagaatgggttttgattctaaatggattcaccttgttatgtcatgtatctcatatgttgaatacatggttactcatggtgggagacatattggaccgattgtgccaactagaggcatccgccagggagacccgttgtcttcatacttatttttaatctgtgctgaagccttctctcagttaatcaagcattatgaagtttcacatcagattagaggtatacgtgttgctaatggtgctccttttatctcccacatgctttttgcggatgacagctatattttttgccgtgctaatggaaatgattcaactaacgttctcaacttgctgcatgattttgaacttgcgtctggccagaaagttaacttttcgaagtcctctgttttttttagtgttgatacccaggcttctgtctgttcttctatttgccaaagtatggggattcaagaagctggtgaaaacagttcatacttgggactgccatgtacaagtggaagaaataaaaatgttgtatttggttttctaaaggacaaggctagcaagcgaataatgagttgggaagggaggtttttgtcaaaggcaggtaaagagttgcttctcaaaacggttgcgcaggctcttcctaatcatgccatgtcagtcttcttactgccacttaaaacttgtaaatcccttgagagtatcatgagtaagtattggtggcagtcttctaagcaaagtagggggtgtcttggatgagttggatcaaattatgcaggcacaaacataaagggggactcggctttaaagacttgagacaatataacattgctttattgggtaaacaagcttggagattgctggtgcatgattcaacattggtgagtaaggtgtttaaagctagatattttcctaatgggtcattcctatctgctagcttgggaaacaaccccagttacgtttggagaagcatattcgaagccaaggatcttattatggctggggcaaggaggagtatagcaagtggcattcaaactttgatacttggagacccttggctccctgatgtggaggatccgtacgtgcattctatacatccggggctggtgaatcaaacagtggcttctttaatgtgcgttcagtctaagcaatgggataaagagatcattgaggacttatttgatacgagagatcgtaacttgatttttagtatccctttgcccgaaactgtacaaactgattgttggtcctggagcaaagattgtacaggattatattcagtaaaaagtgcttacgggtggctacaaaaccagaccaatgttcctggtttggat

SEQ ID NO: 256748 - DNA, 982 bp, Cannabis indica
ctgtcccaagtatgtaacctctacttgaagaataaaaaataatactaataatcattttgaaataatactaatttattttgttcatttaaacatattttgattaatttgtaggttggtttgggtccttggtagaataagtagaacagaaattgaataaacaaaccagaaagcagagattcaagaagccattaataagtagaaaagcataaaatcccatatgcatagagaagagagatgaaaacttaaaaacaataaaattaaaacagatggttatgaaaaaaccattcttgagatgtgaacagaaagagtccctaagaaaagtaatatatgcatctataactaaactctgtgtcttagtcttcatccttactacactaggcataactagtatccatcttccaccttcatttctccatttctctataacaacaaagaaaatgcaaatgcatgatttaagattctgttccttgcagtacaccttctccatagccattgttgactgatttcttctctgacttagaaagcacagttggaggtggttggttgagttcaaaattcggaattttcatctcgccctgtagataactctttctagtgtcggagctcaaaacctgatcttgattcttagacttctcaccaacagcttcaatgccctgagagataatagctggtggaggtgtgtgtaccacttttgattttttgtttaccttcacattgtcaagtcctttcacctgtatggatgtttctgtaccaggcaatatctcagaaactggtgcaagtgaaggttcaacttctgaacttctttttgtgcctacttcattaggtcctttcaccactgtggatgtttcaatatcagaccttctctcagaaactggttcaggtgccactaaaacaacaggctgaaattgagaatgttggcttcggtctggaaatttaggtgcttgatttttcacctcagcagattgcttattgctgttttctg

SEQ ID NO: 256749 - DNA, 1568 bp, Cannabis indica
tcattttaacggtctttcatttgttagttcgcttttactttggttttaatctatgttttctaataaccatgacattgttaattcccaatgtgtcattttgtatcaatgtctgttaattttaaacataaattagttgcctttatatgaggtcttttgtattcaaaatttgtttggtagacagtttctattgtttgttgatgtgttccggtccatgaattctgtaagtactgctgctgtgtgtagcaacctggccgtgtagtctttcatttactagtcggcagcctgcaaaagctgctgaccaaccagtaggaaaatgccccgtcagccctttcctgtgtcttaagcgggatgatcagcttaacccttctgtgttgattatgttagtagtgctaagctactgagttgtatctataacatgatgtatgattacaatttttcgttattgttttcatcgatgcaaaagtagaaatagcaagcgttcttttgataatttcagttcagtacaattttgctaggaaagttctcttgatatgggtagactgttgttttgtataaaggtactgtaggtgaaaatgtaagttgttgctcaagttaattgacttcaactttgttgcacccttgcagcatgcacggatgaagttttatgtttgtttttctttgtgcttttgtgattacatccataatttttgccttttgttttttgttgtgtgcaggaggacactgctaggcccggcggtgcaccaggccaggctggacaacggccagcaggaggagcaccagctgctgctcgcacttgaacaaagtgacatgcaatgttcttgttccttgagcatcttctctttcgaggctttagttattggatgttaccttaaaaatcttttttggttacctaattcagttggctatgagacttcaatgtattagtgtcttgtggatttttgcttcaattttggtagcgttcttgttattggttaatgattgaaattacaatttacaagttcggaatctatctaatgaaaaagaaggaatatattatatttgttttttcctgtaaagatattccacatgtattcttctctggtttgttagtcaattttttaagttaaccagagtatgaaagagagtcgtttacctttaatatcgtcaatttccaataacagaatattttgtacgtgaacttctaataaaggtaaaacaaatggaaaaacgacgcatgtgaggtgttgtaaattgtaattctaacgtaaacgtgttggtagtagtagccagtactgctgctgccattatttcattccataatatatgttatgagcgtctttcataatccctaagggtatttgtgatgagcttgagaaaatgatgtgcaagttttggtgaaagttttcttcaaaagatggtactgcatacattagatgaattggaatcgtatgagtaccccaaaagagcaaggtggtatgagattttgacatttgcatgttcttcttggtaaacaagtgtggagacttcacactctcaaagattttttggtttgtaaattgttccagcctagctactatcctcgaggctcc

SEQ ID NO: 256750 - DNA, 1451 bp, Cannabis indica
atatgtacatcattacatatataaataattatccggatgccgtaatatacattaattaataatctccttctaaagggactgacatataaattcttaaagaaatgttaatagtgggaagcaccataggaagtgacatatatattattattggtacattttaatactagataagtttcacacattaattttgatttaataaataatataataaaaatcgttaaccaattataaaacatcacatcagtatactgttagacactttaaaatgttaaatagcaatactcaaatttcgaccctaaagtatatataatacatggtatatgtttgttatatttagtataatattatttgtgtgttcttagtcgagattgagttggtgttgagtttagaaagtttccgtcaagttgaaattcaagctgatggtttgttaaattggaataaagtaaatagttgtgatttgttttattaagcgataattttgtaatgtgtttatcgatctctgactatgtcgacaagatatagtcgatcacggactctctagctattgctggatcaccaattccaaatcaagatgttgttcttcagctgctaaatagacttggacctgaattcgactctgtggttttaggcatcactgcacaaagtgacactcttactcctgaggagatgcaggctctccctctttcgcatgaaagccgcctagaacatcacaactcagtgactgatctcagcatgaaattacaagccaatgtgaccttctttggttcaagaactcttgcataccaccacaaagctccaagattggcaatcgtggaggctttcatggagttaataaaaataacatgccccagtgccaattgtgtcttcgatttggccacactacccttgtgtgccattacatgtttgataagaattgggctcctcccaaaccaggcacaactagtcaactagctcacacatctaacccctctcctcgtgctcttgtcacagagcatgaatttgactatgatccacatacctatgctacttcattcttgcctgactttggagatgattcaagctggttcatggaaactggtgccaccaaccaaatcggttgtggtactgaaaatttggacactgtagtcacctacactggatcagaaggtgtagcagtaggaaacggtaagaaattgtcaatttctcatattggatttagcaatttatcctctattaattcaatacctcttagattgaattctgtgcttcatgttcctaaaatgacaaaaaatttagttagtgtgtctcaattaactcgtgataatgatgtgtttcttgaatttcacaaaacatgttgctttgtcaacgacaaacaaactgggaaggtgctgcttaagtgaatgcttaaagaagggttgtatatgcttgttgatcatgtccaagaaccagatgtaaccaaaatcaaacacagt

SEQ ID NO: 256751 - DNA, 1703 bp, Cannabis indica
aagccttattttcatgatgatggagatttaggattctaaaaaatatgatataatgcaaatggggaccattacctgttatattaccaactgttaaaacaattagtaatatttattaacaatatttcaatttggcctctcattaaattagaaattatttaattggtatccacatattaaaatcatgataattatatccttaagtcgtaaactttatttcaaaatagactacataaatttgattttatttatttaatgattcaacagacattttatatatacaattgtaataactctaataaatttctaacacgaacaatgtggaacccactgtattatcacaaccacacacataattaacaattctcagctgctaaacatatatatataattaagtatctaatctgggtttttcttgatgattaggctattgtggagccacagcaaccttttcttcatcccaactactataaagggtgtaccatcgtttatttattaaaagaaaaatacaaaaggaaaaaggggtaaatattggtgatgatcaatgatgataataatgaagagattaattttaaattaaaacaatggtcgactgctataattaattacatgtaaagtatttaaatgtacatgttttgtcaaaatatataatattaaaatgtacggcgtgggaattagaaaaataatattaattcttaattataatttatatgtatatatatacattattttatattaatcatgttataatgagattctagtttaaatcacatatgggttgtaaaataggacaagctagccatggaccatatatataccataaccacattaatagcaatatatatatatttgaaatcaatatatacatacatgtatatattttcaacatataaataatatttatatttggatccattttgcttggttgtattttgtctagtccacacgtgtggaattaggcttagctagctagtcggtgcattgtaattaatcaaattttatattaattaattataagattagatgaaaattaagtgcaataattaagtgactatatttttgtgtatatagaatagtcaatatagtgtagatatgtttgtttatttaaagggtcccttttaagcacaagtcgctagtagtgttactgaataatgaacccacaatttttttggcactatagcaacgtgaaatatatttattggtcattaaaagatgaaaccttttgtcattttatttctcttattagtaaaaaaaataaaaaatcaaaataaataaaaaggtggaacctatgagaatttggattttgtgagtgattgattctcaccattatttttctcaatatcattatatcaatgacttataaaaaaaaagtaaaaagcaaaaaaaaaaaattaaaatttttacttctaaactaaactttaacgtgtactaaattatatttattaaatttttaaaccgttgatattctttttattaaactatttagattgttcgatttaaattttttgtcaaatttcgtttatttttactaatatagttattgttattattataccaaattatatctttaaattttaatgtgtaccatattatattttgaattttgacatatactaaatcgtacatactgaatttttatctacatcagactctcgttatacttaaattggataaatatttttgaattcaacaatcttaatataatt

SEQ ID NO: 256752 - DNA, 1748 bp, Cannabis indica
aacctccttacaagagataatcttgtttagaaacacatccctatggccactggtgtatgtccagtttgtgagtgggacactgagacccatgcgcatctattctttgattgtccttactcttggagagtgttacaacatattaaaagttaggttggatgtcaactttgacctagctcctttgaggaactattgtgatggatgagtttaaagaggctgagaagactcatttttgacatttttatgatgtgttagctggtactatatatagcatttggctaaaccaaaatttgtgtattattatcaaaatttttgcactatgatgtgggatccatctaggtgacacgtgtaacatatttcataacctttatagatgattctatgcctagtagactgtacagattgttatgatgcttgaagtcatgaatagaagacaggatgaccggacaactcatgtatagactctgaccagaacccatcacatagatagctcgcatgcacagaccaaatgatgtgagttaacaatttttgagatatacctcatatatttccaagcttgcgagtgacggtgcaatccctacattcatgggatagattcgtatcttcagagaacaaaggaaatcagtctaagtttcccctttcttcattgtaattatggaaataaactaattttctattttatttcttatttcttaaggaaaaccaatttcatgtaattaatccccataaataatgggttcatctcactattcaggacatgaaattattcaaagagagaacactactcaagagagaaatttcgatctaagagtaaattgctcagagatcattgtaagaacttacgagagagaataagtcattcttattcattttctcacaagtcaatacaaccaaaaggggagtagtctattaccaactataaggggttaaacctctataaaatctagtgttctgttactttgtattatttactttttgttattttattattcttaatctctttaatttgacttactgttgttggctaaaagcgagatcaacattttggtgctttcattgagagtaaaaatatgcaagtttttgtgttaactaactttctgttatgttagttagttagttggtgctggttttgcacctatgttctagctgtgagttgtacctataaataggctattctttccacttttgtaaagagagaatgaagagagagtttagagagtgagtgcttagttttttaagctgtgaaaccatgttcttgaaggggtcaaaaacagagggtgtacttgggtaggaattgagaaactgagactgtttctctagtttgttattcgagtgttgcagagctatgttgctcttgaattggtgcttgtattactgttctcttattctccatgttaacgaaagaattggtgatgttttctcagctagagtatggccagggatcgaattgatctctaggaccagaaccaggataaatcttgttgtctccttctagttcaattctattttgttactttgtgttgttaactggtttatttgtgtatgttattgatgttcaagtttttgatttaatgcaagtttttgattgaattcttggtgttattgtagctcaatttacaacaaaatcagagctgcgggttcaagatccaataaagggaagtaaagaatcatgattcaatcaagactcatctgcaaccaataatgacaggagcagcaagattcaaacttgagatgttcaatgggacagggga

SEQ ID NO: 256753 - DNA, 1292 bp, Cannabis indica
ataagttcaaaggacaaaaaaacttagttagctatataatattctagaattaatcgtggccggtagtgagaagaatttattaggtaatatatacatatgggtcaataaaatggcaaaaggagaacaagagttggagacttgagagtaatataaatggtcaaaacagatcataaaacacgttcaaaatattttgaataaaaggtacagatccatatggaagataaaagatataatattcaatattaaacccaaattttgggttgttgttttgaaaattattgagagaagttgaataatatttttttataaattaattaaatttaatttaaatagattttttttataaatattatatgtacttaaaattattttcatactttcatataattaatacataattttaaatataataaatttatgtttttcaaagataaatgtataaatatgtaagaaagttaaggtaaaattttgattagagataaatgaaagtaattgtaaagcaataggcataaaattaatagaataattgaaaaaaaaaaagtaaacaaagaaaaaagaaaaaagaagtatgtattgtaattttcaaatagtttcacaatcacacacaaatgagtcgagcatagctatttatttgtgccaacgctgtaaatctagtttctaacgttttattaggattaggtggttagttatgttagttaagagattaatttggttgttatcattgtaactaattcttaattagttagacttattgttttactcttcttgctgaatatataaactcaccctttacttgtattgagattgaacattacattttctcaaataacatagtttctttctctatttctctgcaaaacctctcaaaggtttctcaatcctcatatggtatcagaagaaaaccttgcccaatattcaatggcaaggccctccactcgctcggaagatggtcttccgccatctacagcagagcagaacacatcgaaatccaatcccgattccacttccgcaccaatcgccaatccatccatggcttctcgtcgacctccaccttccagatctcgaccttcccaggaagaagatatcatcgaaccaaacctgtcgtcccctgctcaacctgctcctaacctcaatcaacctgctgcctctactcgcagactcgatcgactggctcatgaagacgtttcaagcccctttttcctcagaacagcagatcacccagggcttgttcttgtctccactgtgctcaacggtgcgaattaccagtcctggaaacgagatataacaatggc

SEQ ID NO: 256754 - DNA, 1114 bp, Cannabis indica
aactaatctgaagccaagtcctatacctatggtagctggaaaaccattatctttgtctgatggagaacctctcaactcaccaacagcctacagaagcataattggagctttacaatatctgagtcacactagaccagatatctcttttgctgtgaataagttgagccagttccttaaagctccaacaattgctcactggaatgcaaccaagagagttctcaagtatttgaagggcacaatgcatcatggcattcacatctcactaggcactcaacttaatctggttggtttttctgatgctgattgggcctgctgcccagatgacagaaaattcgttgcagggtactgtgtctacatgggggattctctcattacttgggcatcaaagaagcaatctgttattgctcaatcaagtactgagtccgagtacagagtactcgcacaacttgtctcagaactgtcatggttacaagagttattcaaagtaatgaaactgtttcactctgctccctcaattatctggtgtgataacatgagtgccactgtttggcttccaatccagtctaccatgcaagaactaagcatatagaactagatgttcacttcatcagagacaaggttatgcaaaagaaattggaaattcgttatataccctcacatgaccaagttgatgattgtctcaccaaaggtttgtcaccagccaggttccaatttttagttgacaaactcagagtgaaagagtcaccctgtcgtttgaggggtggtgtgaagaaatgatcaatgacccggctgcttactggtgcatgacttggttgcctacatggctcctcacttcttggagatattgtcagaaggaatattctagaattgtacaaattctgttacaacaaatattgtgcaatgtaatcattgtttttgtaatattcccattgcttaatcttctgccatctgtcctttgttcaatggctaagatcaactcttgtaatacttaaatatcaatggaattattcatgctcattgagctgagatttgaaacttttattttctctgttttactaataattccacttctaacaaataagattttatttaattattctatttagagttaaat

SEQ ID NO: 256755 - DNA, 951 bp, Cannabis indica
aggcttttcaaattttattttatttgtggaactcatttttttattttatttgtagccttgcgtgaaccagaacattgttttttcagtagcttgtaattctcaactttgagaaaattatagctgcaatccttgtttgtgatagatttaatatactgaggttgctagcgtttgttaatatatattacttttgaaaaatataactctaaggagattatagcaatgcttgcgaatccattttaagagtttaagttggtgtgataaaaccttctgcatatgcattgataatattaaggcccaaataaagttatccgtcccacagtttgtactgcatatattgtgtattagtctcttttagtagatgattgaaacttagatcattattttattactcaatcaaataagactagagttttattgctattaaagactttctccaagtggaaggggtgactgcacatgttgtgttagcctgcattttagcatgggctgggtttcaatccccagtgggactaacttcttttttttagtccaaataagattgatttctttagtccagtgacagtcacattttttaatgagtcaaaattacttatcacaaatcttgtaccaatttgtgtttaatattaaacttggcacattattttaaatcatgtaaaagaggagtgagctaacgctttcaactttttcaacttcttaaatgatgtatcaaatcttgagtggttggaacacaaattggtacatttttttttaaaactcttttagatatatatattattttttttttacttttaaacatgtttatttcatattttgaaattttagattttggatttttggtagatgtacttggaggtccttaaagtgttggttatcacagtttgaaatgatattagtcatttgaggtggggttttactgtaattgggacaatgccttaaatctgaggctaggcc

SEQ ID NO: 256756 - DNA, 2156 bp, Cannabis indica
ctctctctctctctctcaaattctctcagctcttaatctttattacaggtaagagacacaccaaaaagaaccaccttatcctatagttagttatgtctatttataggcataactaacttaactgacatacctaacaaattgatattacagttgctaacagaaatgggaaagtacataagagcatttatctaagacttagtttctaggccacattacaacaattccaccttggcatagatacttagacttagaagatataagaagagaatgttgaactttgatgggggatgagaaactcatccagtttccttaatgttgaccaagtttaaacaatgtctaaacttggtttgagtgacacattttgtgaaaatgccagtaggattgtgatcagtgctgattttcttcacttgaacctctccattggcaatgatctctctgataaagtgtagtttgatgtcaatatgctttgacctatcatggaacataggatttttcatcaagtgcaatgcactttgattgtcacaatggacagtcatgtcttcagagctgaatccaagttcctttgagagaccttttaaccagattgcttcttttatggcttcagctgcagccatgtactcagcctctgtggatgacagggctaccaccttttgaagattcgacttccagctgatgcatccatctagagcagtgaagatgtaacctgtcaaagatcttcttgtgtctatgcagccagcttagtcaaagtcaacaaacccttcaacttcacatccacctctctctcctgttttgtagattaaacccaggctaagagaccctttaacatgcctcataacccatttgacagcatcccaacgctttgaccctagatcagcaacaaatcgactgattatgctcgtggcataggccaagtcaagccttgtgcataccatggcatacatcaagcaacctacacagttagcatatggtatgttacccatgtatctcctttcttcttcagtctgaggtgcttgttctttagtaagtttaaagtgttgggtcaatggtgtcattactggttttgcatcattcatgttaaacttcattattactttcttcaagtatccttgttgagttaacatgataaaaccaggcctctttcttctgatcttagttccaagaattttcttggcttctcccatgtctttcatctcgaattcacccttgagttgacacttcaactcactgattttgtgtttatccttgcctactattagtatgtcatcaacatacagtagcaggtaaatctctttgtcaaagtaaacacatggatcatatctaccctttgtgaactttatcctagacatgaacttgtcaaatctaatattccattgtctaggtgcttgctttagaccatagagtgatttatgtagcaaacatacctgttttggattgccattgtcaaatccctcatgttgtttcatgtagatcttctcatccaaggtgccatgtagaaaggttgtcctcacatccatttgatctatttctagatcctgatctgcagccttggccataatagctctaatagaagcttgttttaccattggtgcaaatatatcattaaaatctacaccttctctctcagtgaacccttttgccaccagcctagccttgaacctcactgagtcttcattaactccttccttttgtcggaacagccatttgctttcaatcaacctctgccctggtggtctgttgacaactgaccatgttttgttcctaatcagtgacactttctcttcattgattgctctcaaccaatgttccttgttgctgcatttcagtgcctccttgtatgttgtgggttctgaattttcaagctcactagcagcagcaagagcaaatgctgagaaatctgcatagccaagctttgctggtggtcttatgtctcttcttactctatctctggccaggagatagtcacttagttcttcttgtgattcctgaggttgattatcatgttcatgatcagggttctcatctgcatctgaacattcatctgggcagtgtgactgatccacctcaagattaatctgctgtgagactcttctgtgtgcagtgttgggtttggtaggggcttcaaggccatttcttcttctctaaaaagtgacatctct

SEQ ID NO: 256757 - DNA, 706 bp, Cannabis indica
ctctctctctctcatattttagtgagtgttgacattttgtctgatgaaacgtagtccaagcttgagttagctccagcaaactatgattcttgtactactcttggttaccatatcaaataaatcacaactcaaaatatacctaagttttgctattgtcttattcgcaaggattggttatggtgtttctaataaattattttctcagcttgtggacatgtttggctgtaataattggcgttaaagctgcttttgattgtggaactgaagtaatcgaaagtagaggtaagatagaagatagtagtttttggtgaaaaggttgccatttgatcaatagaaaaaaagagaggaaagacaacaaaaattgaagttgatcgatgtcagttatattttaacattttaagtttagctatttataaataaagtatcacgaatgctttaatttcaggattatacacatattttcttttggtatatgcttttaagttactcaattgatgaagaagctgttagaaatttgaccctgctttctggctactgtggtttgagatcaagtaattccacctgagtgtgagttttaaaactaacgcatatatagtatatacctaataacatatgttgggaggaaattattccaagataagcaaactacatatatctattggtaagtaaagtgtaaacattcgtgaaactttttagtggctgttgg

SEQ ID NO: 256758 - DNA, 1216 bp, Cannabis indica
atgtctatatataatttagcttaataataattatattttaagaaaagtaatagtaatattcttttttttttgttagagaatgtagggctcgcatggtgtgactcaagagaaagatattctatctttgttgttgttaattcaaataacatattaaggcagtgccatgtggattattatatagttacaatcattcgaaacaaaatcaattacaaaaatttgtatgagtgattcttctactccttcttattggtactgtattgtttcggctttttttggtttgtttaaaagtctaaattaataaagactgtaataacatttttatgacttattttttcttcaaattaaaaaactttttctttttttgagaaaatttagtaatttgtaaaaataaatcacctaataatatttttttcaaaaataagaaaaaaataacactatttatttatcaaataatccctttataaaagataacaggcccaatcacattgcccaagctgaagcccaacttcatctatccattcttcaatcaacttgatattcaactatttgcatgagaagtccaagacttaatcaatagaagaggcccatctcttggcttggcattgtatcatgccacgtggctcatgtttcattcattgcgctacataaaatcttacttttagtcacaataaaatttgtaaccaaagataaaaaaattgtggctaattctaaattattattattgtattgtgactaaaaactccgtgactaaaaatattagtcacaaaaattacgatttgttgtgactaaaagtatttttagtcacaatatttattgtgacttacactaaaatagtaacaacttgtaactaaatattgtattttagttacaagtaaattttactgtgactaaaagtcatatttaatcacagaaaatttatgttgtaactaaaatattatcaataaaatatcagctttttttaattagtgatggtccgaccactttgctcctcaatttaagagtcacttcccactaaattgtacacattttggatttgagaattgctaaaacgaactcggtgcttaacactttttttagtattatattgttattgatgtaattaagtatcgagtcctatattataaagtttttaattggaatatttagtaaagatgataaaattcactacaagaaatgtcacttttgccagtacatttttgtgctggcaaaagttggt

SEQ ID NO: 256759 - DNA, 989 bp, Cannabis indica
atggtacagcgtccataacaggaggatcggtgctcaacaataacaagtaataaaatgcgactaggaaggattggaactcaagaactctagttcgatgttcaaagtaaagagtgtaaagggcacattccacaagaagtagacgcttcaattcacccccaagaggcatccgacaattggatgagtgagaagttgaaagggtacctctcctcccaatagacgactccaatcattgcatgcatcgtaaagaaaccccaacaaatgagaaggcttcccaagtccaatcaccaccgctttgagctttctagagaacatgcactcagctcgcacacagaaatctaaaagtcagtatttatgatcctgacaagaaaatagaagaaattatgcctccctaatcatgacactttaatttggcaactgatgacgtagtggattaaaagactcatcgcaagtcccacgtgcacaaaaaatttctcaagagaagatgctgcaagctcttagaccatgatttatttcggaagcttagggggtaaatgttatttgtatttttgcaaggattacacgtggacactaattaaaggaggtcaaagagccatgaaggtgcccacgtgcttcatttcatgctctaggatggtaaaggcactcaccttgtgaagaaggtctccacgagagaagtctccctgagtgcaggacacgctacaggtgtccgcaaggtaatatctctctccattcgagataactggacatttttctcctgcgaggaaagtggaattttaactaggatgcaccagtccggggtacacctttgactcggagaggcttagcctgcgcgtgacaggctatggacccactgttcgagatttttcatgtacgatgtcagaggttgtctctcatgccacactaccatgtagagcttgcgtgtccttatgtagtgagccaaacaatcaaatgactaggaataagggtaaataaatgagaacaaccctggggtg

SEQ ID NO: 256760 - DNA, 1425 bp, Cannabis indica
aattaagaattctgttatatagccacattttatatagaatagatatatatatgtcgattattaataagtattttttgctctaaattattattgatgtaatataatttattcaatctgctaaaatttgtcccttaatttattccaaatctttcaaagtggtgttatatatgttttatcacaaaatcaatcaaaatgttgactttatttatttattttgattattgtcacattaacgtcatataatttaaaataaaaataataattaaaattaaaaatatgtaattttaaaaaaattataaactaaaaactaattaataaaataaaaataaaaaattatgtcaaactaatattaaatagtacgtagtacttttaaattattatttcaaattatacatgtgtaacaatgaaccaaatagttatgtcaacattttggtaatcatatgtgacaaaacataatagaaaaattactttatattaatactttaaatagtttgacaactttttttaacgaaagaaagcaaaataatacatatgtcataattttataaaataaaaatcctaaatagaatgcctcacctcaataccacaacattttgtgccaaaaataaataaatatatgtagaatactaaatttatataccatatcatattatataaatatatattttatagttttttactataaatattttatagttataccctagcagcttatttaatcaaatttataaacatgtttgtattgaattttgaaagggagcttgctgttgctattaattgtttagttgagaaataaatattgttaacttccaaccacaaaataaattaaattataagattgagagtagataaatatttaatttcatcataattgtgaaagtgacaaccttaaatccagcagaaacctaaaaaaggaaattctgcttttaaaaagtgaatttaattatatcaaaatgagtataaaaatctacatgaattgatttttcttcttttttcttattacgttgcaacattaaaatcagacgaggactcatcacaattatatcaactctcagtttaattaattgatttaacaagtaatttataaaaagaaataaataaatattttaatcataactacaaaatgtaccttaattctgagtcaagacaaatagttgttctctttaaaacgttcatgttattgtttaagattgtgtaagcagactatcagtctctgtcgtcctccacaaaatacataaagataataacaggaagaaagtcgtttttgataataggaacattaaaactataatttaacaaataaattatctcgaaaaaataaggtgcaacccacaacagccaactcggggtcggacggacgtcgacggtgcatggtgtgaactatgttaataaatgcatcagtgtaccaacactaaacagaaatgt

SEQ ID NO: 256761 - DNA, 1059 bp, Cannabis indica
gatccgtaaaaaaattaagcggggcgggtcgaatctgatccaagatccaataactatccaaatgttttggatcggatcactgatccgacccgaatgaatagatatttttgccatgcctaggggaaacaaagggaaccaaagcaaaaataaatggcctggtacataaatatatacatatacatatatatatataaatctgtaaaaaatggattagaatgaagatattattaattacttaagtagcacagtgatatatacataaaacaattaataatgtcaaaacaagaaaaagatgtgtagtagatctgctttcgatgatttatagttattccaacatcgatctcttagatttgcttacttaacaaatttcatttgtttgattcaaacaatatacttatattaatatatgtatacaaatagagaaaaaagtataacaatataattaatgaaggtgaactcaccatatatatcagcttcaatataattgttatctaagcttcatcttccatcatcattatcatctgccattgttatttccttttctctctttctgaattatttcaaagcaaacattatctatccttacatctccatatacatatatatatatatatatataaaaatatatataattacttatttttattattcaaattttcttaaacatattttattattctctttttccaaccatggaataagaaatacacatgggcacatataattaattaattggacatttttccaaccatggaataagaaatacacatgggcacatataattaattaattggacctttttccaaccatggaataagaaatacacatgggcacatataattaattaattggaccaaggtcatcttgtaattattattattattttgtttactaatatatgcatgtggcaatgttgatattggttgttgaagttattaactgattattacttattttttttttacatttgatatgtacaatagataataggtggggtaaatatcattttggaccttgtgttttgcaaaaattacagattggaccctgtgttttgttaaa

SEQ ID NO: 256762 - DNA, 886 bp, Cannabis indica
ggcagaaatctcataaagaagaaaccttaaatagacaaaagagaaaatacctggaggagaaaggcttcacctcgaagctagagaagcctgaaagggggagcctatccctagctctgcacctggaaggaagatcgtgtgctgcagaaggacccaaaagaagaaggaacgacgggcaataaatgggtgatgggataatagggaaaatgttagccaaagattaggacctgcagcaataaatggaactcgagaaaagaggattagcaaccaaaattaaatgcaaatccaaaagatcctctttgcctctcagatcgacaataaatggttgatagcatagtgaggtaatgatgagataaaacatcaacaataaatgcaaggggaaagaaaaggaaagaaaagaaaagaaaactaatggggaagatgaagaaggaactaaaaactggagattgaaccagacgagaagggagatacccctaggaagtttccagagctctttcacttaacccaagttgagcttaacgatgagtgttccacaatcacgtattatttatctatcaaatttaggaagaacaaaagaaaatgattatgattctgaatatcaacaattgacaagagtaataattctgtgtaaacattaaaattgaaaattttaaattttgcccaatttgaaagaatgtgtctaacattattcatcctacaaataccttttttaggcgccagaaaatgataacatagaattttagagagagaaaccctaagtctagacagagactagggtgtgcataaatcatccaatctaatgataaccgaccgccaaacatcggatatccaattgtgattggatcggattggatgttatttttgaatatccaattggatcggatcggat

SEQ ID NO: 256763 - DNA, 1048 bp, Cannabis indica
cccaaacaagaatcaacacaacatcaaaaacaaaacaaaagatcaagaacttaaactgaacataaaccagcaaagataataactaatgaaagcataaaaacaacacaaagaacttacgtggttgtgctacacaatcaagatgatcatgaacttaatctacgggagaaagcatcctttaatggtcctggagatgatctttattaagtctgaacaaagattacaaaattagagataaacccttcactcaatggagtcttgatccttacaatgtgtctctcttgtggttctctcaatcaaacacatgagagaccatttacaaccctcaaacacactttgattttctctcaaaaactctctcattttagctcatctaaacacacataagtgtgaggtatttatagtcactcgaccagcacactaactaacaaaactgtcaagttagttaggttagttgagggagttgttcaactgtcaaaactgacagtttatgtacacttgttcaagggttcaaacctcaacaataacaagttctaaaactcttaattattgaaccatatatttacaaacattattggtgaagttatttagtagcaagaagacatttgaatctcgacaaatttgaaaattgtaatctaagataaaaatgtgtacacaacaaaaatccaaattagaaattggtacatttatgataaaaaaaattatgtgtgttgcttttgattattttgtaatttgaaaaaatttgacgttgagcgtgtgggtgtgtacccaatctctaacttgtgtggccaaacattgttgcacctagtgacgagcatgtacccttgagttggtgcttttaatgctctcgcctttcttgccattgtgttaaaaatatgtgaaaattacgtggaatataagattttataaaatagttataaaaatatgtcatttataagtttattgttaattcttttgtttgtgttctagcaaagtgtagcacatgctcttcctcaatttgctttttctatcgatgggcaccatgtacagtggcccagtgaccatgattgta

SEQ ID NO: 256764 - DNA, 1501 bp, Cannabis indica
actctactcttcaaactattgaggttgactctaaggagaaatatcttactactaaacggaggtacgcgagttacatgcaacatattacaaaattcttgtggttgcattatgctgattaaaattcgagctatttcatgctagtgtcaagaaaagaaaagggcagaaaaggattacaaccttcattttgaatggtaaaatcattgatgattataatagtgttattgctcattatcttaatcacttcaagaacttcatgctcgcaaggagttcttcttctaaaaagttgaataacaattgtttggttcatggaaacaagctttctttgcaataataaatccagcttgtccgaccttctttgaataaacaggttcaggatcctataattgatatcaatcatatcaaaagtatcagttccgacaggtttgatgttggctttttattgggctttggactgagataggggataaaatcatagaggccattctttcttttttggaaaaagggcatattccagctgatcttaacaagacttccatcttgctaattccgaaaaatagattatctttcctctactaccgagtatcatcgcattgccgaatacaacacattgtacaagtgcatctcaaaaatgatgtgcactaggcttagtaaaatcttacctgagattgtccatagtaaccaagacgcttttatcaagaaaaggttgtttgtccaaaatactcttatctgtgaagatctgctcaaaggctatatgagaaagattttatctggtcgttgtttgatggagatcaatttaagaaatgtgtatgacacggtcgattagggagtttgtcttgaatttattgaaggaattttattttcttttaaaatttattatttggattttagtttgtctttgtggcacctccttcacatgttgcatggtagattacatggatttgattgatggtggagcagttttcaatttcaagaaattatatctctccctcctttcggttccaaagtttaattataataaggatatttggcacaaacacaaagtgccaaagcattatttcataatgtgggaagctatcaatgaaaacctcttgaccagggacctgctatctaagatcttttcggttgagtcaactctttgctagatttgtgttgaggagatagatctcactctcatctattctttgactgcattttctctaagaaagtgattcaagaagtcactatttggattgggaaatttgattggccgttgaatcttgttgtggcttaacaagctgggagaaactttgaaatgtttggttggtgatttaacttcgccagtagtagcggttgctgtttatcacatttggtgtaatatgaacaaatgtatttttgaaggggtttgtaatttagttaaggctattgcatgtttattaagattagcttaaagatgagtactttttgaatctttatgtgtaacggctagagaagtaaaatttaatctcatggttaacaatttttg

SEQ ID NO: 256765 - DNA, 1273 bp, Cannabis indica
gtaaaatatttccaacatattgtcccgctactactaaaatactaaaatgtaattctattgaccaaacgttgcgttccaatattgccgggcacaaaacgtgcaaaaatataaaattttatatatgacataaataatacaccctgaattcaaataaatatccataaaatgataaaacataaataataacctagtttcataattaagtcctaattatctgctaattttaaattaaaactaagcagtctttacaagccaaatgtaaataaagaaaatagaaaacaaatattttcaccgtaggttgatggagaaggactggtaataataataggtattgtgtgaatgcttgagtaaggtttaagtgagtgaagatgagatgatccttcaggactcctgagttctcctttcatacaacccctgatggtcaaatttatctattctgaagaatgaacgtgggaagtggtctttcccttttctaggaagaaggatcgatcctcatggatcagctatagactcgttattatcctttgaatttgattggtcttgtagctattgggctcgtttgagctttagtatttagtcaaagcacaatgtactttgaaagagtgaattgtatttattgacttgatgtgatagattgtaattttaatttgaaccataagatgcatttaggcttggtgtaatttttggccacaacagtttatcccttactctttgagtcaagtgtggttggcttaaatagtagttgcatcgatagctggcaaaaaattgaaataattgtattgacaattttttattttttattgtatcgactggcttgaaaaatgtataaatattgagtttgtagtagaataaattagatgtataatatgtgtgtatagatatctataacctctatagaagtgagaataattttaggcttttactatgtaaattacactattaacctttattaaatattcaattacaaactttccttttggatgaacaacaaacccattaatatatttttatgctttcaaaaataaaaaattatattataatcatctaacttacatctaattaggaaatgatttatttattattttattaaataaaaataaataaaaaatagaagttcgcttatacatgtataagtgtatataagatatgtttttttttaaaaaaaaaaactatatatttatatcatacataaaagtaaaaatatttttgaacatccactaattgaattacataattagccttaaattacaaaaaaaaattgaataaaacaagt

SEQ ID NO: 256766 - DNA, 2242 bp, Cannabis indica
agagagagagagagacagagggatgagggtaatgggtttgattttttttattctatgaaattatccttaattctttaatttaaacttaacataatcattaatattcagcttataatactacaaagaattctagaaatcacacttactaaatccaatataaatgttaagacaaaactatcaaaataccctttctttaccttgaagtaaccttaaagtctagggttaaaatggtcaaaatccataaccctgctcaatcctgacattctaaatgtccaaataacttgccccattaattctaagatactcaatcgtgtctatgtgactctaatagccaaatcatcgaattccaatatcatcaggcataaaacatgaaatgctaaaatttataattaacatgcataacacacctagaatacaataaaatctctataattgagaaattatttcataaatgcctatttttgacaataggtcttattttatactaatgcacatatataatataaacagtaatgaaagcactaatgagctactaattttcatatataaatatgcgatcattacaattgttcccccacttccctttccagaggctcagtttccttcgacaccagaattttcttcttcaagtttgaacaagatgccatagcagccaagaagctcatattgtgtacaaataacaaagaccagaggttagtacaataagagagaaaaagacagcaagttaatagcacaacatggagcgtcagccacctgctgatttcccatcctttttcgaaatagttttagcagaggtaacttctccatcatcctggtctaagaacatagatattcttcctgaatattttgtgtcattttgaatagaagtcacttcttctgtcacagtttgagataaaacagcagtagcactctgagcatcttcatcactttgctcaagtggcatggtccaagattcgttagggaagctagtatcaacatacactctttgacatgacatgatcaaccccaccttccgaagatttttactactaaacagagttcgcccatccctctcccatgcatcaatctcaagcaacatgacatcaactctcctcttcatgtcaataagaggagcatgtattttgaatatgccaactttttggaaggtaatgtgtctcgacagaagaacaagagtatagaagtactcttggtagtaaaggccacaattactgttggttatattttctatgaatgggcattgatggaagtggtaaaagccttgttctttgtggttggacttcttttcaagtcacagagaaagtttatctcatgaggagttggaataggccagttccaaaggcgatagaatatgaagaaggtggcaagaatcctatagccatttgggtttatcaggtaagggcagacaccgaagaaattagctatggatatgaaccatggatgcaagggaaattaagcacccacattcatgtgaaatcttgaccaggcactatagcaagtattctaagagcccttgggagcatgacattgaggcttccaaacaacagtttcagaaagaaagtaatcatctcaaattgtttgagcttgaagctcagtgatggtgctagacacaagaggcctaagcttaaaggctcgatctctcagatcatcactctctaatggcagctttgagaagctcagtttccatcacttttctgccacgtgccttgtctaagctcttagacttaggcacagtcagcttagctctaataaactgagccacatggggatcatactcatcgggtgatcttctgtttctcttcattctagccatctcaagatcaacaactcaagtttcttacaactcaaggaaagttaaaattgggttgaaaaaagtcaaagtaacttggaagaatttttcaaggcacaaggagagtattttgaattttgggaggttttagaaaaattgttccaagggtttttgggagttttagaatccttggaataagaccaacaaaggaggagaagaagaaaaaataaaagaaaatcagcatgtaatttttttttctaccttggagtgaggaaggcttgaaggcttgatgaatagggatgtaaatggggtggggcgggtgtggggattgctcccccaacccaatacccgacttcttaaaattcaccccccatacccgccccaatacccgtttaaattaaagcagggcggggcggggattacccgatggggaaaggattcccatcaggtacccat

SEQ ID NO: 256767 - DNA, 1349 bp, Cannabis indica
tctctctctctctctctctctctctctctctctctctctctctctctctctctcctctatgttgaatgaaattgaatgaagagccttatatacggttagtagtgttaggatttaaaataccttaatatgggctcatatgtatattagtgtatttctatttgaagtttggcccaaaataatgtgatcattttagtaattgtgggtcattgggtattaaagtgtcatggattaaatgtgtagatatcctaagcgatatttctaatttattaaggtgctaaattagaaatacttaaaattaataacctagctatgaggttataaattggtagtggtccccaagaaataagagtcaatttctattctcatcgtctgccattaagagagaaaattagaaaaccctaagttttgttttcttagaggatcattacccaaaattactacaaagattgtctctacaagatggattaagatcatcaatatctatggattaaggtacgcttccactatttgagtttttctcttcaaatcaacaaaggtactctttagatttctatttttcatacttataattatatgtaatatgtttatctatagaattgaatcttgttattgcatattttatgagtgataaaaaactctaacaagcaaaccctaagattgtgtgtttggttcaactaacccaaccgactttccaaatttggaaaagtttgtaacagaaaaaatagttggaacaactgtttggagacaaaacaaggtaaaggttttaaatggatttttttccacaaattccaccttaatccatgtaaaactgaaccttaacaatacatgactacacttgggggagttatcatgtagaattagtcaggtcctatttgagcaaatccaaacaatgttggaatatgctcactgacaaagtcttaggcatgcatcagcatggttctcatcacttggcaccttatcaagatcaatttcaccatcctctatcttgtctcatatccaaaacattctgatatcaatgtgtttggatctatcatgatacataggttttttgcttatgtgaattgaggattgattgtctaaaacagtcactttgcctttcatcatctgcaaatctcctagattcctttgatcgatcagcttccttgaatcctctatgttgccatgaactctgcttctgtggtaaagagagctacaactggttgtagttaagatttccaacttatgcagcatgaattgagatttctagcgggttcaacccgaacccgagcaacccgcccgaacccgaaccggtgaacccgcaattttttttttaaaaaaaaatgttcggacgggtcgggttcaacccggta

SEQ ID NO: 256768 - DNA, 4232 bp, Cannabis indica
tcaaataaaaaaacctctttttttcatctgtttatagtgaaaaagcctcacattttgtggcccctttgtattcatcagattcttaagaacataaaaatttgaactttttacataatatcccaaatctcagaacttaaacagaaaatcataagattaaattaatgaaaggttgaaactttgaatagaatattataagaatagtaatattaccagaccagatgtgtgaacagaataaccccagaaacagatgataaaacaaaccaagtgaagaacaagtcagagagagcaacactccaaacaaagaaaaaacagatgtatagaatgatgatatgtattgtaattgtacaagaaagaatgaatggaaagaaagaaaaactgaaacaaaattggagaaaagagagatgtaattgatttgattttttttttttttgtctaaagttaaggaaagttggggttttaatttgggatttttggaccaatgtttgtgctccacccaccacctattctattcatctcttatttttacatcacttaccacctatgcagctgctgacttttcttttctaaattaatattaattatatatttgtttataagaaatgctaaatggtactggtggtacatagcacctttataaattgtaataaaaaaaaaagagaattgttaaataatattattggtgtctagcactctcttcggtgttatattgctattagtgtaattaagtatcaagtctcgtataacttaaaaaaaacaactttaaaaaatatcgttaaccaatcgtgaggtgtcacttataaaaggtgttggacaccactagtacctaatagcaatgctcatagaaaaatactaaaggataagatataatataactattagtgtaatctagtctcgagtctcacttattttaatttaataaagattatagagaaccgctaactaattataaaacgtcatgtcatagaagtgttaggtatcttggtgtaacatagcaatgctcaaaatgtaatatcgctatcagtataatttaatatcgggacccacttattttactttaattaaacaaaaaaaaaaaaaaactagtgatcatttaaaatatatcacgtgttagacaccttgataccttgtaataatattctttgcttatgtttatgagaaaatgttgaacaaaaacaaaaaaaaaccctttaagattttaaaaaaaaaaaaaaacaataaataaataaaaaaaagtgaagaaaaaacaaaatagattaagttgtaatggaaaacgcacttgtagattttgaaggaaaaaaagtcgaggagaattttacattattataagtaggaaaatgtgtatacaatttacatgaattgttgtgatgaatgaggccaaaagaataagagcaatagagaaataacaatggaattgagatgctattattattaataataaatcttagtcatttgtcaatcttatcatatcatataatagagcaaaaattaaaatatcatttcataggttttggttattgttagatatattgaattagattagatgataatgttgataatctctatcttagtcaagtcaaccaaatgtacaaagttgttgggtgcaaacttgatgaaagaaaggccccacttgagttaatttcattgaaaattgtagggaagattcttcattgacaccatatcataccatccttatattgatttttcaagaagggtaatataggaataagaaaaaatgtgaccaaattacacttttttcataatatcatcaagttccatatttactctcatactattttagttgattatcttcttattttcactcatttattttcacttgtctgtttaaccaattacaaaccaaacaactctagaataacaacctatctcctcacatgacacactctcatcaatttgatcatgcaccgcctttaacagagggcgagtgaacttcatataatgttgaccgaaactgcagcaagcttcaaccacccggggcagggcaacaaaaatttatacacttgtcgtttcacttggttttgttattagttaccagcctcatttccccaaacattgtcccaagcaacgggtgcagaagaagccttaggtccctcgatgaagttctggttctggttttggtgtccgggtggtccaggtagtggaagtgggcgtccatcaggacctagttggtgaaccttccttgactttgttttgatccctagaatcctaaatacaaatctggcaagctctccatacaacacgccagaccgctcaaaaagctgcaatgaaattcgagtaaagtaatcacagaatgaaaatagcaacaaccgaaaaaatcttagtctaatagatagagaagagtttagcatcaacctgaagaaaagcagtcatgaacaaatgaaaagcttgtgtattctggtcaatgagaattgatatgcgaccgaaaaagtttactacaccatgcatctgtatgtagtaacaagaaaggccaagtataagtagcaaaacaataaagacaagctttttattgctaaaagatgcttaaatgagatgattatgtaatgtgcattaagccatttaatacttaccacccttagtactgacatccaaaatcccggaggagatggaggagcaccatatggatcatttggatcttgagctccataaggaccacccatgcccattccatagccacccatttgtcctcccataccgataccaccattgtacatcccgcccccatataatcccgaagatccataaagtccccctccataccctcctcctctatacatgctatttccatacattcccccagctccaccatatgtgccaccatacattcctccaactccaccatacgagttaccgtacattcctcccgctccaccatacgagctcccatacattcctccaactccattcattgtagaaccataacctgtaaaatgtcgaaaaaagaatccatatcaaacagagcaaaaagaaaaaaaaaaaacacctaatcttgctatgaaagcccaaattatacctccatatgtattgctagtcccgtagttttgctcccaaggtcttgtgggaacaggcctagaaagtgtgtttctgttaagagtgttagtcctatcagaagtcgaaacaatttctccaggtcttgcagttcccgaagcctcgactacatcgcttgtgcttcccggtgatggaggcttgaatggtgcagggccagacgatgaacctgcccgttcccaaggttttgggggaggattactagctgcaaaaagcataacacacctcaaatttcctttctctgaatttcaaattctctaaataaaagaaaaaatgttttaagttgtcataataacaaacttcaagcaaagcaacatattgttatttatcagtcaatgaaaataatcaactcgaataatagcatcttagtactcctttcataagtgaaaattctctaaatgaaggaacaaacaatccaaacaaaattcaaccaacaacttacaagttataactcaaataatggaaacaataaactcaattctttttacatgattatgatttagtgtctaatgcaagatacaccaaaccatcttctataaataaagttgaagatgaagaatgttctaaataacaaataatatagctatgtcttttaattgcatttttaagcctaaatcaagaacaaattgaaagattcccttgctggtcattggatgcaaagataagaacacaaaatggtttatgaaagccctaatccctaatccctaattcctaatacatcaatgactttcatttcacttaattgtcaaaacaacattatgcttctctaagctgatcatatcagacttaacaacagagtaattcacaaatttattattatgaaataaacaagacccaatccaaaactcaaatcaatccgaaaaacaaaacctcaccagtattcatcaaaatcccaaatcaatcaaacaaaccctaaagttgttttctttgataaataaaaatcgcctccaaataatgattcctcaatccaaagcacaatcaacttcaaacacttcaattggaaagcataaataaaagattttatatatattttaattgagaaaagtgtaattgataataatatagaataaaagataaagattagggttagagaagaagaaaaagaacctgaaggcggttgttgagaattagagtccataggaggaaagcactagagtgaaatcgaatcaaag

SEQ ID NO: 256769 - DNA, 683 bp, Cannabis indica
aagtttcccaacccaccaaggtctaaccctaactcctttcttgccactattcgactctctgatgacatgaacaagcagcttgatgctactaaagctatgaaccacaaacacttgaaggaggccataatataataatatatatcacttataagagatgagtaggatcaatataacttatataataatatagaagaaaatgtaatgtgcgtgtgtgtgtttgagagagagagagagagagtttgttttaaggtgaagagtagtagtgattagaattagaaaattaatgagtggtatttatagaagagaataatatgtagaaaggtagggtttggtgagacaaagcgtgtaaaatgtacaagaaagaagttaattagttgtatattgtgtagtgtggcatgctagtaatggtgacgcgcgtgacaattttggtccatacctatgtctttctcgttttataataaggttttatatatttatttcaaatattcattaaaacatttgctaaaggagattgtgtctaacatagtgtcatgctattggtgtaattattggtttgttaactatttataaaacttcattttatataagtgaaagactaattagctatttttccttccgaactttgacatgtactaaatcatgcttcttgaacttttttgctcgttaaaaatttcccctgaact

SEQ ID NO: 256770 - DNA, 968 bp, Cannabis indica
aagtcaaaatatcacaaaaacaaaatttgggtacaggggtatgaattacctctgcatgcgcacacgagggggaataggcgagacaggaggctacaagcagcctatttgaccaaggaaccttagtcaaatgtggcttcaaacacgggaggtccgagtaacttcagacacgaggttgtttgaactcggtcttaatcgagcagctcccagccatccgcgcgcgtaggctagaaaccctagcctagatatttccaacttcaaaaaatcataactaattaattcataaaacatccaaattaagttctgtaaaagcctaaatttattaattttttatctaatttccaggaaaaatattttcagaatgaaacaaagaatatttaacattataaattgcgatatccatacaatcatcaagtatgcatataaaccaatataaacacatccaaatgaacccaaacattgttttaaatccatatttcatcaaagtaaatcattaccatagctctaaggccagttgttggggatttttttaccaggatctagatttactaccatgtatgttgtttaacatcctaaatatgaatttctaaaacaatagaatttaaacacatataaagttcaagaaaccttacattggttacagcggaattaaatgactatttccactcagatctctaacccttgtatcctttttgtagcagagtatcaacaagatctgagcccgattctccttcagttcattggattcttcacattacacactatgattgagtaccaacttgcaatgcgtgggcatgtagtctattactataggatttgaattgaagagagaaagagagagagaaggatttgaaattggagagagatagaagactcaaaatttgactgaaaggcttaaatgcatcaactatcagttttgagtccatcactatctatttataggaatccttctagggttaggtttgaattat

SEQ ID NO: 256771 - DNA, 916 bp, Cannabis indica
gcccaaatatgactctgtagtttcgggtataacatccagtattgagtccaaatctatggaagaagtttgagctttgttaatggctcattagtgtcatcttgaacgtcataacattgtttttgatttatcttctatgatgtcagccaattattctattgggtcttcaagaatcaatcacccaggtccttataagcctccatttgctcgaggttcagcttctaaatatgcataaagaagtggtaataagccctttttttatccattttcttcaatggatctagacccttgtgtcaagtttgcttaaaattgggacacactgctgcaatatgtcactatcgatttgataaagctttcattacccctaaagcttctcatcaacctcgagcatatcttgttgaaactgaatctgctactgaatcccaagtatattcatcctcaaccataccatattttgctgatgactttatgtggtatgccgacaccggtgcgaccaatcatgttgcctttactatggaacatcttcataactccactccctatacaggttttgagtctcttactgtaggaagtaattagtaatttctcatattggtcatgttcttcatcctgcttcctctaaccctcctttacaattaaattctattttgaatgttcctgccataactaagaatcttgttagtgtttccaagttaacagatgtcaatgatgtgtttcatgagtttcataagtcttattgttttgtgaaggacaaaaaatctgggagggtaccgctgaaagggaaatgtaaaaatgacttgtacatgcttggagatgagtctcattctttatcaacatctagtttgcagtgtcatctggccacttcttcgacatctctagccatgtcaattcaaccctgtagtcttgagtcaccatcttg

SEQ ID NO: 256772 - DNA, 1077 bp, Cannabis indica
tttttttttgcatgtggttcttgatgtttcgctttgtcatgatttttgtgtaaagatttgtttttatatttatttcttttagatctgattctttattgttaggttagttttatgtagtttttttttttttggcttagtttttagttttgagaatttagcttacttatatttagtttttcaaaatttagtttactttgttgttgtttttcctttttagtaatatttttgtgattgttattttggttgtttgtatatcagtttactcttttagtaattttaacattagtttaatttatttttttaattatttatattgtagtatatcaaatttagttttcctttgtttttttttttaaaaaatagtttactgtgtttgttgttttttatgttataagtgttatgatttattttaaagtttagtttttttatgttcatttttggtagattgtagtttattgtgttatcaatgtaaataattttggtttacaatatttatatttattgtgtatttgtgtttgatttgtcaattagtttatggtttatatgtattctatttgtagttttttgttttccttattttatgtgttatttatactattttgtttatgttagatatatagtcggttattctgttaagtcttacccttgacagttaagtttgttaactgtcagttttgacaccaaatgacaaagctataaatagctttgtctaactcagttgtaactagttttttcagtgaagacacatattgtaaatacaagataattcattcaataaaggagcattactgctcaaggtttttctaagtgttcgaaactggtttgtgattgttcttggatcagtgtgtttgattgcataggaatcttctcattccttacaaactggtatcagagctggacgagttcttgagcttcgaagagacaagctcagcgtggtagtacttgaagaacatccagggtaacaatggggaatgcaaagtttgatttggagaagtttacaggaaagaatgatttcagattgtggagggtgaagatgagagctttgttagtgcagcaagggattcaggaggctttact

SEQ ID NO: 256773 - DNA, 1484 bp, Cannabis indica
aaaacaacaacccgtgaactcgctcatacatgtagcgcgtccaacttgacttgccaataataaatgagtgttttcaaatgcatgggtttcacgagccagaacccagtcaaatccaatgtaaatgtttagcccaagaaaataatactaaacacccccagaaaataatactaaacacctgttgatatttaagccactaaggctagattagttgtggggagggatggaaaaaaaggggagattatgtgttctaaccctagatttttaaattattaagttattaattgattgtaaaatattattatatatactacactcaaaaacaccccttatattttttttatttaatttctgttttaggaataatgaaatgaaagagatgttttgttaggctagctatattaaattagaaataactatgttaagtcatacggcatggaagttgtagttaactaatcaaaatatgtggctagtaaattacaattctaacctcatataaaaaaggaaagtgccgccctaccaattcacccctatttccttgagcatcacctcttttcttttatatgattgtttcttgatcagcaaactttgcttactttgtctaatgtcaaagtctacaactacatactactattattattgttattgaaaaaagaagtctttgggattatatgggctgtgttatttgtcaaaaatttgtgctccattcatatcattagagatttttttaaataactacaatagttagagagccggcatggaaatagcaaaagatgacaatggattgaactggtattaataagaattaacaataaataaatcaacatgcctataagattgtaaatatgtgcttaattgctgtatatttgatcttaacaatttgtataatttgaattaattttttaatatatgtatatttttaattacttttaattttgacgtttgtttttaattaatttttaatttatgtattttgctaaattattatttgtttgaatagataaatgtgagtgtcctaaatatattatgaaagtaaaatatcctatttactttaatatttatatataatcaaaaaattaattcaaacgattttattatttttttcttctattgattttgataatattctttgctgatgacatcgatattaaatataatagcgactataagtgagatgtagtactgagaattgtgactttaaatgtagtgatgactacaagtgaaatacgatgatgataacgactttgaacatagtgacaactacaagttagatacggtaattacaatgggtttgatagtggcgactataagtgagatgcagtactgatgataatatatttgaatgtagttgttgctcctgattttgcccaatgtacgtggaccaaccagacaaggacacgtggacacaaaggttttagcactcaaattaatagctaagtctttataaagaaagacattatcctggatatgtctcccggagaaggcat

SEQ ID NO: 256774 - DNA, 724 bp, Cannabis indica
ttgagttcataatgtattatttgaatgcatgtttatcttttaatttcttaggaccaatgatatatttttcttagattttttcatgtattgcggaaatcttcactgatcataataattattgtaaatttgcttgaattgtatttaacttttatttttacagtttgtagatattacactgttgtgatagtacaggtaaaaaagtacttgcataatagtagtatgataataaattttaaaaaatatatttacattcttagaattatgattagtaccaataatatttaatttttgctaacttttagttaagttgattattatattgtaactctttatctcatataaccactatcacattagcaaactctttaagaaaagggattgtaataaattgggagatcttttatcattaaaaaatgggaaaaaaaagagtgtgaaattgcacaagaactaggatttaggatgacaattcctatttgcgcaaattctcatacataaatgtgtgaataaaatattaaatgttacaaatgcgaagataaattttctttctcaagaaaaagctaattttatttgtttttatcatataagttttgagaaatgctaaaaagtatgagtgatgcttagttcttttcaatatgtcattattgatattggtccaattaagtattgggtcctatataataacttttaggtagtattgttaacaatcgcaagacgatatgtctag

SEQ ID NO: 256775 - DNA, 1584 bp, Cannabis indica
tgtagcaaaataactataactccttctttatatatgtttcattaaggtagttgaggaatgggtttgttagaatttaggataaaagtagctaagatgcattaggtttcatctcaaatctaattgacaatgataagaatagctcatgtatcttatatatagttttatattttcacaccttaacaatgtaggagtctaacaacccctcaagatggtagctagtttttgctcaccaattttagacggctcgattacaagtgacactattactcagagtggtagctagtttttgctcaccaatcatagacggctcgatcacaagtgacaccattagctcacagagaataaaaaatgactattttttggctcttctttttggaccagcaacactttgggctcacaagcggctcttttatatctcatatatttagaccgccatcaattttggctcactatccccaaatcacaagcggcttcttttggtttatttttttggaccgacgacactttgggctcacaacagatcacaaggactcttgtgtctcattttttttggaccggttattagatttgaattcgatactcgttagagtttagtttgactttgataccatgttagaacttaagatgaaagtggctaaagtgcatgaggttttctatctcaaaaccaattggcaaagagatggggtagcccatgcatcttatatatgatattgtattttcacaccttaacaatgtgggactctaacagagttataagaatcaaattacatcaaattaaccacatccctggatccaaatagaaggcttcaatccttaagttccactttgacttgaaagaaagtcttcgcaacaccaagaaaagatcgaagagatggccagtagtatttctattaggcaaaccgcaaagaatagaagattatgagttgttgccaaaaatcacctcaagccgagatccactaggaagagcattagggagcactttccataagaatagtttgaggcaagggtaaagtttggatccctaaaaaatcctataaagctcatcactaccattaaaggtattcacattaagagtcgaacaagaatctttgagagagaaggtcagcttatagtttccacacaatcctcctggaccaaatcaaaaggagaaacaaataagattttccttacatcattaggagtaaacttgtcaaagaatagagatggaatcccacttgacaccatccgtgcaatgccctatttaaaagaacgccacgtgttgtattatattacacaaatccagttaatcgagatcaataagccaagtaatgaaacacaaaataatctaattaaataaaacaacttttaaaaataagatttatctttaacttaaagcctaacacgaaagtatatttgagtgaagagaaatctttgtattgaattgaaaatgaatgatacagagtagcaaggggtatatatacatgatgctcaaacagagcacaaataaccgaactaacagaaataacgaactggtttataaagactaaaatacccttaacagaaaataactgtaaggatcaatctaacccacatgtacatacagta

SEQ ID NO: 256776 - DNA, 983 bp, Cannabis indica
aacttatgtatttatctacaattaagacttaaactaaagtatttaacgccacaaattatttacaaataaattaaaattagttagaaatttagaatagatctcttatctgttagtaggtaaaaaaaaaaaccccattaatttttataatggcgtagattgattatataattttttttataaaattctaaataatttatagtgccaaaaataaagttaaagttatcgcttaccacatgtataaaaaaaaataatcgtgtgtgcaataaaatattttaacattttttagcactgtaaattattcaaatttttttaaaaatatagaactaatcttatataattataacctacacgatcagtcgaaacaaataaaagtgtacaaaaaatacccttttagacagcgtactacatatcattcctataatttaatattttaagtaaaatatgtttgcttattaatttttataagaaatgaataattaattgtgaatatcacttcatattaatattgatattaggtattagtaataccgatacctaataaacatgctcaaataatacctatatttaaacattttgtcatatataaaagttttttagtcaatttttttacgatcgtgtgtatgttatagttataggatcatttgtaaatttttaaaacatttcaattagttcataatgtaaaaaataatatttacatattttgttccacacgactattttttcttatacgtgtggtaagtaactgttacaatgtacgtgatcatgaaaaatattaaactaatattttttttttaaataccgaaacagataaaaaatcttccaaaacgaccttttaaggggttatctactacaaaaattttcaataaaattttactaagtaatgtattggaaatattttaacaatgtttaccctgtcttttttttcattcttttttcttttaaccaatttttaccctattctctttttgtttttttttctttct

SEQ ID NO: 256777 - DNA, 912 bp, Cannabis indica
ataaattatcatatatagatatgtatatatttagtaaaagaaaaaaacaatattattggattaaattaactcatgacaagaaactgaattttcacctttttctttttaacaaaccacttctcccatgattcttaatttaaaaaaaaaaattgtatttttttttaattccctcctaccaattttaactgtaatttttttctctatttttaaacttttatttcttaattaaataaaaaatatttatatttaatatataaatatagaacctcttcttatgtttgtgtaactctttgtttgtaataattaaagattagaccattttaatttggttaattgctctctttatcttccaagttttagtcattaaaaactctcaattgtaaaatatgtatacactcacttaaatatgtattaggaaaattttaaaatgcatctcctaaaatgatttactgatacacttttatttattttggcatctaaaaaacttttttaaactaattttcttatgatcgtgtacattacagttaacacattatgtaaaattttgaaaaattcaaaaaaatgtagtacactgaaaataaggttcaaactgtctgttacacgcgtgtgaaataaactgtatgaacattactttgtataccgtaaattattctgaatttctcgaaatttcacgagataaaaagaatgcattgtaaaaacatcatatgtattattatagctctttcatttattatttgcatcaaaaatcacaaattcaactatttcatattttactactatggtttatttcatttctcctatgttagataaaataaccatactattattgtacaaacataatacaatataatatatagatatatatataaccacttttatttgttagctatgaaagttgtattaacatccata

SEQ ID NO: 256778 - DNA, 1320 bp, Cannabis indica
aaacaaaactgttaaattgggtacctatagacgataactataatttttcgagattaggacttgtctacattaaaagtaatttttttagagacttatctgcatcaaagtaaatttttaacacgtgatattttaggaagaaattaatagacctgttaaaaagaagaccaatagacttacaagtattagaaagtattcctgatatttgtaaagttggaaatttatttagatcaaaataaatttttaagaatttttgcccaatttttcttaaaaagtaataaaaatagttcattacagcacttttacatttttaaataaagaaagcctgttgtaagtgatttgcaaaaaattgacttgttgctacagtaaaaggcaacttgtcttattttacttatttagtttgtgtttgacgtagaaaattcgatcaattatgtcaaaatttctgatgtatattaactttttgtcttgaagatgtatacatcattacatctatttggactagacttgtggtttttgagaggccgcgagagtaaatatctattttaccccttgactcgtcgcaccattttgtttcattcatgtctcaaagttttattttttgttcaaaaaagttattcaatttagtttaatttgtaccaattaacggaattctaggtagaaatttttattgtgaataattgagtaatttaaattataataaaaatcgtatagcaacttatataaaaactattgaattttttttttttaaaaactcaaacggtaaatttaaaaaaaaaagttaaaaaataatatatcaagtaaatttccttttaatttaatctgcaccaactaatttagggttgatatatgtgcttgtttaaattctactgaaaaatttaaaattccaacgtaggagaacaacatgttaattatttttaatagagaattattgttagttttttttttttgttttttttttttttttttttaaaaaaaagttatataattacagtagagttttatttgcactccataaaattataaatacacctcattattaaaaaaaaaatataaacttaaaattttttaaaaattactcttaatattttttttaaattttttcctcacattatattatgttaatttgaatatttatttgattttattttcataattttttctaactcatgtatatatatattttttttctaagaaaatttcatataattttttattttaatttttttatcataatatttaaaatataatttaattttgtttgatagatatattttttaagaatataaattaaaagaaaaagtttaataaagatataaattttat

SEQ ID NO: 256779 - DNA, 1434 bp, Cannabis indica
agtacatggagtacaggaaattgcccaagttgtcttctgagatcaatgcccagaataagaatttgctaactgttggggttagcactgagggacctgaccccagggaggttgagttgtatttggaggaaatactatccttgatgcaactgggtgaggactatacagagttcatggtttctaagatcaagggattgacttctgtggatccagagttactcccacgagccaccaaggcttttaggagtgggagtttcagcaaagttgttcaggatattactgggttttatgtcattctagaaggattcttcatggtggaaaatgttagaaaggctattactattgatgagcatgtacctgatagtctcacaacatcaatggtggacgatgttttctatgttttgcagagctgtttgcgaagggcaatatccacttcgaatataagctctgtgattgctgttcttagtggggcaagtagcttgttgagtaatgaattccacgaggcattgcaacagaaaatgagggagcccaatctcggtgccaagttgttcttgggtggtgttggtgtacagaaaactggaacagagattgcaacagctttaaacaacatggatgttagtagcgaatatgtcctgaaactgaagcacgagatcgaagagcaatgtgcagaggtaagtctgtggcttacattgatcataatatatttatattttctccttgttgctgatggcattcatttgatcatgattcatgcattctatatctaattctagtggagactctagttgcttgtgtgaatcggaaatgtagataaatgattgctgaaatggaaaattcttgcaaacctgttctatttaagctatatttagaaaccatttttccttggtggttaatcgagaaataaataatagatagtatgtttggtgatcaaattgctatcacgtatatctatctatttcaccaatgtactctagtattattttcatgtttgcaccccatagactcgtccaaactctctcctggaaagtttgcgtagtctgtttttgcttgtctggacaaagtccttagaagttggcaaaattaccaaaactaaactataaataacggatccatttttcagattttttttctgatacaggtcaccaattgtcgatatgtttccatagttgatccagttgcttattatcttttctcacttatcttacactgtttgatgctaagaagattgtcattaaacatttttcacataagagatataattatttatgactaagccacataagcacattttggccagtatgtgatttaaagtcagagtctcttttaccaaaggaggcaaatggtccatgaagctgttttttttttctggtcaactctaacgaatatggcattcacgggtttctagatagggtatacattcatttgataattgtacag

SEQ ID NO: 256780 - DNA, 2059 bp, Cannabis indica
gagaaacaaaacaaagaaagctaatcaaattaacataccttctgcgagttaccatgctttcttcaggatttccaagaatgagatcttttggatgattcagtttgactctggtgcttggttctttctgaatagagtcagtgatgatgtttggatgagtcaagatagacggttctggttctccagtttcagttgcagcagcagattcgtcatttgcagcatcagcaatgggttctgctgcatcaggatctgctgttgcaacttctggaggagtatccatgagactatctatcttggcttctgtggaaaactctgaaaaatctctaaaatcatcaacaaccacattagctgattccaaaacagtttgagttctcatgttataaacacgataagctctactgtttaaggaatatccaataaacacaccaacatcacttttagcatcaaatttaccaatatgctcacgatctctatagacataacacacacatccaaaaacatgaaaatgacttacattggggcgcttacctttccagatttcataagatgtttttgaggaacaatctttttacctgagatcttactctttttgtaaattttggagattttgcggcagcagaaactgcttctgctacgacaggttttgaaactgttgcagcagatttcacatttgtagcatcaggaagattcgttggaacacttgattttacaaacttcgtgattccagaactttccataccatttgatccaatgccagcaaaacctctttgagctgcattctgagttttttcaaaaattgttgtttcgatgaagtttatcgcccattgatttgagatggcccattgaatattatgagtcattgcattagcctccatctcaaaaaaaaaaaaggtactaattacaactttttagtcaatttttatatttgaaatcacgtgggggaaatatttttaaaatttttttcatagcgatattacagtttacagtgccgagaatggagttcttgatattcggaataattttcggtactgtaaactatttgaaatttttcaaaaatttacaaggatggtgttgtaagcataacgaacaccactgtgaaaaaaaaaattgaaaaaaaaatattccaacatgtatttttgaaacgtgaaggttgactaagaggcaaaatgagtatagcagttgtatttgagtttcttgagttgttggagatttttgattgattgggaagcctggcgattatgctcaatgtgattagtagcaaaagaacaaataattcttgttggtttaggcttggtttcatgtccttctttatttcttttagaccaaacacacctaatcttttgctcttacacacctaaataaagcatgaccaactaattcttaaggaagctacacaagttaagaccacctttctatgaaacagattaacaacagttggaagagcaccattgatgtaaccaaaagctccttaccataacagatattaattgggcatttaaaaaatcaccatctccaaaatacctcatattaagaattttggtattatgaagaaatagtagtgttaattaatctaactatatattgtacttgtttgaatatctgccagtacaactcttctttctctaattaaattatatgcatgaaccataaatattaatagatattttgctgtaaatatccttgaataattaactatgatttccacattatataaccttctagaaattccttccctttaccttctccgattcatgaacctaaataaatcttttcagttaaattttaaaaaatttaatcgaattgaatatattttttttataattatgttttggttgtgtatttttatttatttattttagaaaagaataatttaattaataatatttcacattgtacaggtccttctagaaatttctttccttaattcactttctccaaattatattgataaactaaaatatatcaaaattcaaattattttgttaagtgaaaaaaaaaaaaaactaatttgtttttttaattagaaagatcaaactcagatattttccttttattaattttg

SEQ ID NO: 256781 - DNA, 1657 bp, Cannabis indica
tctatcaattcagtatatgtagggaggaagaaaaacacccagattgtcaattttgtgtgtgtatgtgtttttttcctgctcacttgacttgacttttctcttcaattaccaatttttctaagcccaaagaacacatagttgataaatatcacgaatgatatgatagacaccaatgaatattatcaactttatgtaatcttttgaatcatatattgtggtgaaatctgaaatggcattgttggtaagtaaagataagtaataagagagagagagagagatttacaggtgagtgatgtggcaagtgctgttgttgtcgtaggtacaattacatttgattcctggattgtccatgtcttctcgtttgatattgtcatcaatggcggttccactacatggatttccacttatattccatgtcgttgtatttggttttattctccactttccaaataacgtatttagtgctctcactgtcttgttcataaaatcataaattacatatatatcacaaacagctgcaaatcacccattaatcacctcttaaactacctaccttaatttcttttctgttttttttttttaaattaaattctcattaacaacaagcaagagtttatacatatcaataagaaaaaaagaataatcctcaatctaagctaattcacaggtgcatgtacaactaattcatcagaaacgaacatgaactagggatatcttagaaaaaaaactgaaaagcaaactagcaaaaaaaatcaataaaaatctagggcatttcaaaagaaaaagtgctattgaataacagaaaccaaagctaaataaaaagactctacctaacaaagagaaagaacaacctgtataacttaacttatacaaaacaacgtaatactcatcacttttatactttaaactcctgaaaagctagaagacttaaacattagtctgccacctttttcaaaaaaaaaaatctaaaaagaaagacaaaaaaaggataggaagttcaagttggaattttgttaatttttcagaaaataaaacaacaatccaaaccaaaccaaattacgcctttcttaaattgaagctctaatgaaaaatttaactccctgatttacttgtacatatattctatataaaagtcacttataatatgaaagacagagatttgaagaagaagtaaaaggtaaagaaagatagatatgtgtatacaaaccttcagaaagatctgttgtggcgttttgagtttgagccatggagggatgaggtggcagacaaattaagaagaagacgatgaaggagcagcagaggaggctccacttaatagtataattcacataaaacatctcttccaatttcaatatttctgattcttctttacttgccttcccaaaccaaaacacatatcatcaatcgatataattattttgtacccctaattcatctcctctctccctagaaactgtgctacttcaacttgttgtgggtactagtgttgagagaagatgcaggacaggtgtgtttagtattattattagacattacattacattaaaatatttatctatgtttttgtgtaatgtttgtcctttttcgggtgagaaaggattacttcaaagttcaaacatatataaggtttgagggtcaactatatacatatcaatat

SEQ ID NO: 256782 - DNA, 1141 bp, Cannabis indica
gttagttagggtgtacacatgcccaccacatagaaagaaagtcaagtactcaatcatagtgagtcagacggtggtaaccaaacccgaaggaaagaaagagatctaagttcagatcttgataatgctctgctacataaaggaatcaagggctagagatcttgaatggaaggagtcattatattctgctgcaatcaatgtaaaattttcttaaagccttatgtgtttatttttattattttagagaattcataattaggatgttaattcaacatacttgttagtaaatctcgatcctgataaaatattcctaacaccatgtgtctgaaggatgccatgtaggatggctttcagatatttctatatgtctcctcagtttcctgttttaaattaccccatgaaggaaatttggatacttcttgatggaccttttttcctctagacatgatagtctttctctgaccaaagtggtttggcttgtaagttggacttgcatctggacacgaagtcatagcctgactctattgtgggctaatttattaatttgattaggcccagagatgggcccatattggctaattttgggcattggaagtacacgtttcattaattcaaaaacaatgataacactcacaaacttacgtacatcaaacaacaaagttatctctaagatttcaaaagaaaccatagaattcaagaggagaaaggatacctttgtcatcctcttctagctagtctagctccacaaaactaactatctaaagctagaacttcaaatctaattctaattcttcaattcctcaagaaattaaaaaagaaattttttttcactacaacaaaagtgtgtttttgcatgagttaatgctaaaaactgatgcaaaaaaccacaataaatttttttgtcagtttggaaccgacgacattttatatcaatttaaaaatgacatatttgacattctcattagtttataacagaagcaacctagcattaattagaaactgacgcattaaataaaagaaaaaaagctcacttcaataaaggtccaattgacacataaaaagcctacatatataaactaatataaacctaaaccaaaaatacaatcagtctcaccccatttctcccatttctctctctctctct

SEQ ID NO: 256783 - DNA, 736 bp, Cannabis indica
ataactaagaaaactataagtaaaaagaatctaaaaaatgaaatgtatcagagaagagatataacaaaacctagtttggttacttgataagaccacaagagagtataattttctagagcaaaaagaaaaaataacaagacaaacagaaaagaaaatcttccaattattatttgaatatttgctttatgatataattataattatataaaaaaattagaatttcatttgtaatgtgtagaaaagttttaaaaaaaaaatacaagaaaacagtgtgtgaaaacacccactgaaaaaagaagccgaacaaagatagaatgacattaggtagaattgcaaataactgctaatatctgataatttacaaaaataaatagcagtatttgaaaaacacaaattcaaaactttagaaatatatggaaaaaattacttggttccacatttaagttcaccctatcgtgtgtgcatatgtgtatattagctttagtgcttagaaatcaaggtgtaaaatcttttcatttttgtttgtttggatcagctaagtatttaaaccttgttaataattgaaaatattacacagaaatgattctacattgtccattgcaacaacataaactaaatgaacagaacacaaaagaatataacgcataaactatatgaaaagacagtaaacctttttcaacgccaagataaacggatcgttctttgggaggaacggagccactcgaggtgttcgcga

SEQ ID NO: 256784 - DNA, 589 bp, Cannabis indica
attaatttaattaattaattttattaatttcctttaattttgcctataatttttgaatatatatgcactcaaattacttattaacagttaatttgaatcttgaatctcagtattaattatgagtaatataaatgcaaacgataccaataaaagaatgaaaacaagtgcagctagaaaacaataataataattatactaattaattaattaaggttaatttgttcagccattaatgaccgcaatcataaaaggactctctcatgaggccctctctttgaacttgtgtcttgtgctatcgaaaactcaaaaatcttcttcacagtcacaagtgcttgttaattatatatttgtaaaactactcttaataagatttggtttaatatatgtatatatagtgtatgtatttctgtatgttgatgtaaacaaaattacattttcacatagtggaagagtactgaaatttgagttttcattgtacgcatcttttttctttttttgaacaagtcttaattaaagtgatacattgataagtccaaacatccaaaaaataaaatggaaacttttggagttgattttgaataagttgact

SEQ ID NO: 256785 - DNA, 1157 bp, Cannabis indica
gaacaaaaatcaattcagggtccttatttgtattcatttttagaaaatataatgtactattttatcatttaacaaaataaaggatccaattggtaacttttgcaatacacaaggtccaaaatgatatttatttgggttgtatatttatttatttgtccagctaaaaatatttataatattattattattattattactttgttaaatacttaaaaaaaaaaaaaaattattttttttttactgtttttattttcttttttttttaataagttttatttcattatttattaactttgaccaattataataaaatgttaaaaatgttaattcattgagatttggcattaaattcattttaactacaccctaaattttattttaaatataatattgtctataatgtcatactaatattagtaggacactataaactatatcaaatttttttattacaaataatatatttataagtaaactttttgaataaatattatttgtttttatttataatttaataaaataatataataataaaaatataattttagtgtaatttttagtattatgattatgattaaaaaaaattattattaaaattttattattttggtgttgatttaacatctaatttgacatttaattaattttctttagaaattacaccatgttttttctttctcttcaaattaatctcatcaaaatcaaattatatagagttatttgtggcataaccttcttaagtggccaagtttttgcaactaaccctcaattctaaaattttggtggtaaaactctctaaactcgtgttctgttagcagtttaatattttcatctatttttagctgttaactgccatggtggaatatctacatgtacacagtgtacacgtggcataattttattggtccacgtaaataaatattaaaaaataaaaaaaataaataatttaaaaaaaaaaaaaaaaaaaaatttttctttaaaaattcaaaaaatcatttaaaaaaaaactcaaattttccaattccctctttctctttgaaaccacctcaccattacacaaccattacataaccatcaccgaaaccacctcaccattacacaaccaccattacaccaccaacattgaaaccacccccaccacaaccacaccaccacca

SEQ ID NO: 256786 - DNA, 1843 bp, Cannabis indica
taagttgtagcttaaattcgtaatgcccttgggatgaaatttggagacgatagcttcagaactatggtttaaatgtgaaacattacttgatagagcattgaaatagcttcgtaatgcaagtttaaccgcatcaatcgaatcaatattgagtgagttatggaaattttactgaaggttgttctaggcccagtgcccaagttgacatcccagcacccaggttgacatcccagcacctaggttgacatttggacactagtgagtggaaaaaggcattgagaatgtattttttgattcctaagtgatattttgacatcacttagtgcatatatatgttctagcaaagctggtcacaagttctcagagatgttgctattctacagaaataggagactcaattttctgagtaaatcaccttatcgaaaaaataaaaatatgaagttgtgaatttgactattctcaattcatggctctcaattattgtgaaaactatgaacggttgagactgtattagaataaaataagcagaacctaacgtactaggccattagtcaacctgggcattgacaaatggcctagtatggagtttgttgggtttttatttagggcattgacaagtgggagtttgttgacgttaaaatatatttttagaccgccacgtcaccctctcatacttctcatttatatatatatatatataaaaatatatattagtaatatttgatatcttattatcgatttaatatttataattttttactttttataattagattggttattttattttttattttattaaatttttttttgagtacgtaggatacaaatttgaatttgttgtttttattacttaatatatttgaagatttttttaataatcataaattatagacttaattaggataattttttaattaatttttttaaactatatataaatattaattaagaaataaaataatattaaataatttcaaaaatatatatatttatttaaaatatgataaatttatgtagagacctccacaaaaataaaaataaaaaatcataaatttacaaatgtatgttataggaaagaaaaattagaaattgtagaattattatacagaatagagatttaaaacaaaaaaacaataaaacaataaatctatattaaaaaaaacttatcatataaaaaatacatactatgaagtactatatacatgaattaaaataaaaaaaattgaatccaactcctactattatacaattaaattagactggtatattatatatacaattttttatattttaagtatagttaggtaaagatttttaaaataaattaaaaaaaaaattgatattaccaaatatactttaaattatactaaactaaaaaaaatggtccatataagaagaaaaaaaaatctaataaaaataaaaataattaaattattgaagttaactgctaatactactaaaggtaaattaataatctttccaaacataataaaaaaatggtaaaaaactccaacaaaatcttaatcatttaatataagtattatacatttataaaaattttggtgacattgtgaatttgtgaaagaagatatgtattactattggtttaatatacctcatgagtcatagttggaaatagagaaagggaagtttttatataatattgtttattattaattgtatagcatatatataggtatgctcagtgctcttgatgggtattacccaaatatctaatagttgatatttataatcattaattaaatattaaaaaattaatatttcctattttgccacttctttctttgattttgttattatctatattcctaaaatagataaa

SEQ ID NO: 256787 - DNA, 2391 bp, Cannabis indica
tgcgtatacttgcgtagtgattacaaatttagcaacagtaccctccgccctcggcagatccaacctagaagatagctccgctatcatgagcctggaaggaaaaagagttgcgttctcagaagactcttccagtttccctatttatattcccctataaataaggaaatttcagctgtcagattgggctagaatattatatcgcgattaaatgggaaacttcccataacaagcgtagggtagttatttcagaatattctcccattataatgggatgcggttttgacctgatcaactcaagcccaattagcctagtcaacaattgtattcttcatgggttggacttcatgagtaagcccaaagacattattcagttgtaagctctttagtagagggaaaatgagaaatcctaatgtaattctctaactactctaaatacccaactaatctcatggattaagggttgaattctcacatgtacttttgctcaggcaaacatacaaagatacatcttgtatacctttgagaatatttacaagtaaacacattactgaataaaactgacacgtagactaaggctagttaacgcctcaactatgcaaaaaattgtttgtctcttattatactttctctttcaattattgtttcttcagttcttattattttattccattttttaaaatttcgggaaatattttagtgctttcattgagagttaaaggaaacagtaaggaccaccatccaattacgttcacgaaatcatgaccctcaccacgaatatttccagtttgattctcaatcattatcttctagtgtttacacttctcaagtacttccgtctaactcttcaagataaccacctgtaattttcttgaaaaattatcaactatcgaaagaaaatacctgctcccgacgtgtgattattcttgaggatccccacagatcactataaacgtagtccaatattctcttggtattcctttttctagtcccaaacttgactctacaagacttattaagaacacaatattcgtagaaatctaactgttaaagatttacttttccaagtaatccatgtttattcagttgatacacccatctttcacttacatagccaagtctcctatgccatatttcagtctcatttctgtgcttgcttaaaacactcgcctttatatattattattgtgatgccttttaggggataaatcctatatgcttttctaccttttatcaccaccatagaacctctacaaactttcataatttcattatcaaatttgacaataaatccttgatcatctagcattccaactgagattttttttttttttttttgagatttggtaccaatttgacgtcctttagtaccctttccatgccatcatgaactttcaatcttacagttcaattcctaccatcttacaagacttataatcaccaagatacacaatcccatagtttctaagtctgaattcttcaaaccaaaatttatttagtgtcatatggaatgaacatctagaatccatgatccattcggaatctaaattctcaaaggtagcaagcaaaacactagctgagttataactgtcacttatcactgctgcatctccttcagatcttgaatcatcttacttcagcctctccaaacacatctttcatacatgacccactttgttgcaaatttagcatctaatattcttcaagctatcagactgtgatttaaatcttgattttcattttaaacttttatgactttccaatttctcactttttcctcttgtctacaatccaacaccacttcccgagttctttagctcactcttttgattcagctcttttaaatttaaggttgattgaacatcatcgagtgtaatcgactctcttccatatagcattgtatctttaatttttccaaataacttctaaagaactgagtaacaataaggcttgatcctcgtcttcaatggtgacactaatgttttcaagatctagaattgttgctcctaaaatcgcccaatatacgtggaccagtcaagaggggacacgtggatcaaattacttgagaagaactgctaagtctttgtatgacaccaggaagcattattcgcatgggtcccggaagatgtacccggagtacaaggtactcccggaagcgagcatagcttaaaggcactccgggatgtgtcaggtctctcccgagaaatcaagtcgcatttaatgctgcatgggaggaagcgtgttgggactgtaacacgcaataaagtctgacggcacaacccccaaacagcagcgctacagtaatgatcatttaagtctagcgacggctactctgcgaagagtcacgtcaatcataagcaaaaaaaggacattctccataaaaaccctacacgc

SEQ ID NO: 256788 - DNA, 1751 bp, Cannabis indica
gaattaccctcccttcctcaatcaaccaagtttttgtcatcagctttttttcctcatcaatttcaatttcctattaaaagggtaattttgttacgagattttttgttttaggaaaaaagttctcatccgttattaataagttttgaatgcaagtaaaattctctaaccgtcaaactatatttttttttacagtagttaaagtaagtttggctaaagcatagacaattccattacaggatctattacaatgaataaatttaaccaaagtaagtttggccaaagcatgccaatgtgaacaatatcatctagaacaagatccaaagagataataataaaagcattgtttttcaatttacacaatattcaagcaatcagacttaataataatgttttcatacccaagggagatgcattggaccaacgccttgcgaatagccaaagcttcagcaacttcaggaagaaagtagacatccatatgccaactcgcaaacgctacagctattcccaaataattacgaatcaccatatccaagccactacattcgcccaaggaattgatagtggcatctgcattgactttgagatcaccaagctaggaaggtttccattttgggaccatctgagaagggcatgccgagataccatcccaccaatagggacgtcagtcgcctccatacaaatgggagccatcaccaaggcatgtttgttgtgaaacgttcccagataatcacgagcctaatgcacagtaagctcgagagtcagctcaacgttgttatggattattttattacgtttgaaccagatcctccatagagtcaccataaccaattcaatcaactcctttaaaagggggccaataaccttgtgaatgaaatcaaaaaagtctacacaatgaacaaaaggatcccccaacgcaaactcgcagtgtttcctacaatgtaccaacgtagagcaccccaaaagaggatgatgagtagtttcatcttccaacccacacaaaagacaaagcccatcagataacaaaccatgacgtgcaagattaattttagtggggatccaattaagtgacacttgccaagcaaagattttaatcttaggaggaagattaagggaccagatctttttccaccaaccagaagcgccaccagattgaaaagcatgaggcgtagccaatttgcgaaggctaaaccaataaccactcttaacagaataccaaccataattctcaaagttccaaattattttattaggcacattatgagaggaccaagggatagaaatgatatattcagcttaatggggcaagaaattggattgaatcaacacattatcccaatcacctatatctttccttaacactaacaccttactagaaccatcaattgactaggcgcagataacatggatggcagcacagaagggatccaattgtcagaataaatagtgatgtccttcccatttcccacacgccaaacagcccagaagtcaaaaatttcttttccccataaaatatttttccactcaaaggagccactcttagatttcttgatctccgcaaaggaccgctttcgaaatacagaccttttaacacacggccagccaaagaattagggacattgggggatccttttgttcattgtgcaccaatgcaccttttttttcacttcattctcaccccaccaaaaccgagcacacatatgatggacattttttataaaggttttcgaaagcttaaaaagattcatagaata

SEQ ID NO: 256789 - DNA, 1392 bp, Cannabis indica
atgacagagataagaaatttcattagaagtaccaagttcaggggagtacaagattagtctaaatcaatgtaaacaaaagaaaatggtcacagaacctatgccatggtttctagatatagttctagaagcaaactttcaagtttaatgagtcaaatatctctagtctatttcatgcccagaataagtaaaccaagagtgataagagtatacaattcatcatgctatgcatattatattaaaaagaaagtaaacaacactggaagtgagccataaggagagattgactctatgatctttaagaaaaccgactataaaattttgtacagaatagaatcctaactcttctttttgtatttacttccattatgcttcaagatataattgaaaagaaaagccttcaatcatcagtgtaagtgagtcaacattgtataaattttggcaagttttgtttgatttcgattttgttagataaagttccttcaaatttagactctagtcacattcttctctaaaatggagttgtcaatcctattaatgtctatagagtagtggtgttaactaagacacaaataactttgtcttgactttgatagtgtagatagatatactaaattaatgtagtgaactctaaaaataacaagctgggatggaacaaacaaaagaaagaatgaatggaactaataattgcactacagctgcatagctatagaaagttaggaaccttcttactctctttcctcattttgttttcctaaaatggcaatatcataataataagcatattatataaaaccactattgacttgactttaaggtatccaccttttctttttttttgaaaaattgtaactttcattagaaataaaccaaaaaatacaagttatattcttaagaagtgtgaaatgttattattctacacaaactcttcagcctaggagtataccaaatagttacaataagaagatttgataaagaattacaactatatgtgctaaaattgaaagatccacttcattacatatgattttataaacaagtaactttgagtttgattcaataattaaaatgggaaatttaattgccatacaccactttacagcagctttgagagcaagtccttcagcataagttgagtcaaaagccctttggggcaggaatagccaaaacaacaacaacattatcattctcatcatttactacagttcccaatcccagcttgttatttatgtttgttttttaatgttagtttgtcatatagaaactttgctacagattcttatataagtcaaaccaatgagacaacaaagtattaaagcaaaccactaaaccagcgcacccattagtgctgttacatgtttttatggcataataatcgcaattgtctctgtaaat

SEQ ID NO: 256790 - DNA, 1427 bp, Cannabis indica
tcactcacaaccttgagtgtagattagtggggatcaccttgatttaaacaaggcataacacctttgtcccaaagcttatcaccgctaactctaagcacaaagagaactctcatgaaaatagcattggtaattatcaagcctttaaaatttctaacaaaatgcttttttctttatatagaaacttcatcattttaaataaacatattagactattatttatagtgtttaggatgatcacatctcacttttttaacattcatgatactccatgaatgttatcatcacataaatgggtaaaaagtagggctatgaatgttggggaataacgttgggattaaatctattaaaatcaatacattaagtagtttttttttttttttttgcttaaaaacaccttcaggcgacatgttggcagtcatagatttcaacatagacaaaaatagagttttgtaactcctttcgacacctcttcagtttccaatgtttcaactcattttaataacttaaataagtcttgtaacaccctcaaacaactatctaaccataaactttgaatatcataattaatttttataacaactctcttgttacacttaatttgtgatcaaccaaagagttacaaatgagtaactaatttgtaactcatctccatgttacaatgcataagttacaatatgtaggttaaatatttaccaaaactgtaacatacattgttcacataataatatatattgtaacattttaattgatatattatattataaaacaatataacaatcctctactaaattaaaatgtgtggcacactattgtaacatttatttaatcaatcaaacaagcattatgtcacaatatagcattctcctactttgattgaataaatatatactattataaaagtattacttaggtgcattaggtaaaatgtctttcgacttaaattttactttactgtaattagtacaaagtttgataaaattttagttgacatagcattgaattactagtcctgtaaagccctactagattagccatgttatcgtgatttccaacaactatgcactctgtaacgccctaatcataaggcacgctacagtaatttttcaactgcagtgctatctttgttaatcaaagaaattttcttgaaaatcgtgtcaaataaaaactttagaattaactaagaaactttataaactttatatatatttacaaaagtcgggatcccgttgttaaacttttacaaaatattccaaaatgcaatagtcaggtcacacagcaactacaaaatgaaaaccccagatgttccgagaccgaacactctaggtcccgccgccatgacatgtaaaacatcaccctagctcgaagctcactcttgttcagcctttgcctttccttttcctacacatgaaagtagaactgtgagtcga

SEQ ID NO: 256791 - DNA, 791 bp, Cannabis indica
ctcaagcattcatttgtattggagaaacactataatctgatttttatggtttaagaaattggcggagagtgttctctcatttccgtacccactaaaaatttcaatccattttcccatatagttccatcattgatgaataggaaactcctacgttaactcattgtagcagtaacatttatattaaaattttaattatataaaaattaatatgttgtacattatttattatccaacatactaattaaattattcaaatacaacttaaaaatatacatataaaaaaaagttaccaatatactaaaaaaaatgtataaataataacactagcaaaaaataaaataaatattaaatgattcctgttagggtaagaagtgatatttttgtctgagtcttgtttaacagataaaaaatgctctccaaccctacttcctattgctcatttagatggaaaattttcaccccattaaaggaggattgccacaaggccatccatgagaaaaaattagatgtttctcattttgatgaaaagtaatattatatttttgtcgagacaatttgtctctgttggtggttctttttgctttcctgtgttgttgaatgtagtttattgtgattgtatcacttttaggaatcatcagattgaaattttgataatgtgtgggaaggaggcatcaagtttctattttatcaaaaaattaaaatttccatattttatatgagtgtttttgttattaggaataggaacaataacaattatgtttaaaactaaaataataaatactactctctaa

SEQ ID NO: 256792 - DNA, 1042 bp, Cannabis indica
gggttcagtttcatttttttgaacccgcgaaaccctcgaactcgaaacccagtttacctacctgatgttcagccatattagtggtttcagatcaccttagtttggcaaattaaaagatctttagtcttatgaaggttggagagatgccttgggatgaagaggatcttaaagacatctttgtggagcaggatgttaagctcttaggagagacttcttgggatgaagatgatctttgagacatctggcaatggataggtaaaaactctggtgctaattcggttaagagtgctcatcaacttattcaggagcttaaaggagaatcatctaaagttggtaactcaattttttggagagagttgcgagaattgagagttcctcctaaagttaaggatttggttaggatggctgcttccaattgtcttcctactccagttcaattatgtgggaaacatgtctctcttccctttcatttgtgatgaaggtgctttcgagttgttgtgtctgtttcacattgtcttgcagggtgttcttttgcttttgcatgctggagggtggttggtatttcgatagtggagattggagacaattcttttggaggatggctgttggaaattttctcaatacactttgagagaataggaggattacagctaaatacacaaaatacataaaagtattacaataatattacattggaagaagaagaagagattacaactctttttaataataatacatatgagtacaaagaagagaggaatatctctcaaaggcttaaaccagaccaaagacctttgtcttaaaagtcattttctccttcacatggatacttaggaaaactctaaaaatactcttaagaatttatcaagcctcatgtgctcagcctagtgtctataaggatgagcatatccttacaaggttctagccacagcaagtgattttaaatacatgtctcacaagtgaataatatgacctctatttatagagttttccctcccatttgaatatgaatagtcaccataaagcccttagatattaccaa

SEQ ID NO: 256793 - DNA, 1449 bp, Cannabis indica
aatttctttggtaatagcaagatctgagcccaatatgcatgtatggatatgagcacaacattaatcaaagttactcttcccatataggacaagtttcggatactccacactcttatcctaccaaccattttctctaggataattagacattcaggagttgatatcttctttgagcagatcggtatgcaaagatacctgaatggtagagaacttcttttgaattgtgaagcctcaagaattcttcccacttcctcattttgacatgcccgagcaatatatagcagatttttgttcaattggcatcaaaccagatgtagcagagaaaagcttgagacccctcaacatcaacatgactgagacaaagtctccatgactaaacaccaatagatcatcaacaaaacagaggtgattcaatttcaaagatgaacatctgtcatgaaacttataaccaggccagtcaccaatcttctgaaaaattcgagacaagtattccattcctaatacaaagagaagaggagacatgggatccccttggctcaatcccactttgcattaaagaatcaacacatagagtcatttactaagagtgagaactttggtgtcctgatgcaaatcattaccaacttaatgaaatgatctggaaaaccaaactccatgaacatttcttcaaggaattgccattctacagtgtcatatgccttgcttagatcaatctttatcatgcaacttggcttgcaatttttcctcccataaagcctcacaagatcttgacaaaccagcacattatgaggaatatacctcccatgaacaaaccctccttggttcctagcaataagatccggcaagaccctccttcacctattgcaaataaccttcgtagcagtttagtaaaggacattgcagcaagagattggtctgaaatccaccacactctttggacaagtaaccttaggaatcaaggtaatagttgtagtgttgatctccttcagcatcttcccagttgaaagaaaagataggacaacagctacaaaatctgttctcacaaaagtccaattgtcttgatagaaagcacttccaaacccacctggtcctggtgctttgatgcctggaatggaaaacaaagcttctttaacctccttctctgtgtactcagccaacaaaatagctttgtgagcctctataatccttgggcccaagttcaccactgactttaacaccttccttctattctgcatactggtacccaataaggtttcatattatcccaagaaagctttctgaacaccttctggagaatcatgccaagtcccatgctcatcctctatcgagaaaatctggttatggattctccttgatttcagagaagcatgaaaataggcagaatttttatctccaaaagtagcccagctgatttcgctttttgtattggtctatcttcggttaaaaaaa

SEQ ID NO: 256794 - DNA, 2422 bp, Cannabis indica
gagaacgcataatcttcaggatatatgtataatttatatatattctctatcatataataatttatttaattttctaaatttttcttatttatttttctattatttttttagtaaatcagtgtaattcattactccaaatatcccttttatatcataatatcattttcaatttgaagacctatatatattttttctagctatacaatatttctctatcagcctctctattacattttgtgctcctataactttacaatatctgaaaaccattctttatcacctgtagagacattttaggccaaacatggatgattcttctcttaacttcttctttagtctggcaggtcacttgtgtctctttcggcaactcagaattccatagcaggccatttttcgatctccatacctggtatacaagcgcagccataacaacatacaatactccattcctgaattgacttagttttgagtgctctatccatcttagtattgcattcacttcagttgactccatcctccaatccagccactctttaatatgcattacacattgtagagaaaaggggctctatccatctggttgttgccagcataacaagcagtgatctttagcaatgatattatattgttttagtcttttccttgttctaagtctgtcctggattgcagtccccaaaacaaagctatgccgtgagatattttgtctactccatactccatggccctaatttacttttcctttaggaggacagagtattttgtagccattagagattttgtattgtgtgcttatgaactgttgtacattcattagagtattttttgattatttaaatatttaaagatataatatatttaaatggtgtagagaaaaataaaaaaaaaaattaatgtatgtaaaagtatgaattaaaatatctagggctttggtgatgtattatttgtgaaggatatagaattaatatagaatctattgtggatgagatatcaaatatttaatagttaaaaagacaaaaatataaaggtttaaaagatccatccaataaatgatgtagagaaggatttataaacttgaaatcttttatatatactagtgtgggctggagcacgtaaatagcatataagatgtaaaatattgacattataggatagtatgaataggtaaataagggaatagagtgggtatgcaagaattaagagattgttctccacattatggagaaagggtaggccctagaaagtactttgtactgaaaatagtaattcaaaaattttaacctcaatttttcaaatatattaaaactattacagttgatttacacaaagatttatttgaattatatatatatatatagacatacaaccatacaaccacacaaaaacactactacttttagaaggttttgataacttgatgcatgatttagttgaattaagattgcaagtacaatcatataatttgggaagcatttaaactacaaataatctcaaaagaagttcatttgtcaaaacaatatagctcaccaaacagctttaaagactaaaacagtaaaagcgcaataatcaatacaaaattaagtaatatattatgcaaaataaaatgactaacctttgaatgctaaaaaaatacttgatagtgaaaccaaatgcatttttgattaaggaaaatgcatttgaattacaatcagctatcattctaggcaaaagttaaaaataaattatgggaatactatagtgttgattggtaataaaaaaaaaggttgttagactatttaatattaaaatatgggtataataaaaattttctcatgtaaatttctcatcaagttataccaattgaaacccaaagaattcggcccaaaagctatcaacacaaaagaaaacaaatcaacaagagtacaagactctttctctctccaatcaaatattactctaattcacactgtggtttggtcaaaaacaagagtcaaacactgactctcctcatcttcagagtctggccaacaagagaatcagcccaagtagcacatcccaatgatataaccctaagtataaaaggtaagtttctaaaccctaatatcactactcggcagccacaaaattatctcaaaaatattcaaacttttttaaactttttctctcttcaacacaaatggcagctattgttttatgggttttctaatattttttttttcttcttcttgcagcagccgcactcaaagggttagggtttcttttatttttttttctctttttcttctctccaatatcacgtatggcagctaggcttctaaagtcttcttttctattctaatggcagtaaggttttttagtgttgaagatttttatttatcttgctcttcctggtctgatttttgctgtaaggaaaatgcttttgcattacaatcagctatcattctag

SEQ ID NO: 256795 - DNA, 1292 bp, Cannabis indica
tatatatatatttattatatataatctatgtataatataaatatttataaaaagtagaaagttcaaactactatatttctttcatgacgattgatttgaactttgaattctgtttatatatttgtctcattatcacaattaactaaaatataacaattgaatatgaaaaaaaatattagtgtttttttaggcgggttaacccgactaaactgaccaattcattgggcaagttgaaattttattttttcttaattagattggttgcaagttaaatttttgtaactcgatctttatgttggattgaattgaatgtaacgtaaactaatcaaaagcaattagaaacaattggttgtttacatcgtatgccacaacaactaacattgtgtcaccatgcttcatcttcaaaaatgtgtcatagatacttacaacatgatgacagaaattaaaccccctcatgcatgcatgcaccaagtgataaaaaaaataatacttgaagtgctcatcctctatatatacaagtcaataatagtacttggaatcttctattacaacatgtacaagtatcgtggtagctttatataggaaaataccgacgtactcctaacatacgtaagtgtcttcttcttacacctcacgccttcacataactcatttggataccattggcatcaaacatattcatttgtgtgtctttagccttgtacttagttccatcttggatctggatacgttctgaagcttgagaaattaaaattttggaaacactatagacaatctatcaaaaaaccatcaacatatcatcgacaattaatgcaaaaatttcttgtgtgttgtgtgtgctttattaatttgaggtaaatacatatataatttctttttaattttttataaatactttaaatattctagttaagaacaaaattcttttgaacaacatttgaccctttccaaaatacaaataaacttacaaaaatttagctaaaacatgggtacaccaattatggacaaaatccaaacaaagtatactaaattacaattattaggtgattgtgacattaataataaataattggtaatttttatagtaaactacttaaaaaattatttatggtataaatacttaagtgtaacttctagttgcaaataaatacttagtttaatttttagaagtaataatacctaagttaatatctctagaactttgtaagtacatggttgttaaatgttaagtaaattaccacgtgacaatccctgattggtccaggttatgaagttttatttttttaaaaaaa

SEQ ID NO: 256796 - DNA, 906 bp, Cannabis indica
ttttttaatttatgaattattttaggtaaaaaaatccttatttaaaattaaaagaataaaaaagaaacgcacgtggaagggaagggtgaatcgagcggctcatattcaatctcaaattaaataaaataaaaaaaaataaaattaataaaggactcctcatgtaacacgtggataagtatactttggactcttcaagaagaggttaaattgttaggtaaggtaaaaatatacgaatttacaataataccatttccactcttctactcttaccttgcgtgttaaagggcaattttggaacttcatacgacgtcgatatagtacattagtctacaatagcagaaattattttttctttttttcttttttgtaacaaataaaataaaaaaaaaatatttcgattttttttttttaagaaaaaacttcattaaagaacaaagcatggaaattctgtaaagagcagaaaaacacaaagaggtaggtcctgaagctatataagtaaataaatttagttaatatatcttgaaaaacagtcctttcaattaatagttttgtctttctcaatctcgagaaaaataaataatatttattaatttaatacgtgaaaaatgaataaaaacctgaaaataacagtctaactaatcaattaaaaaaaatcctcccaagattaaggataaactattttaaagtttattattattattttttaaattacaaaaaactaattatttccagactaattgtgataatgaaaacaatggcattattgtaatgtcactttcatttccttaagctgagtagcctatattccatatttccatttagtcttagatattctattctgaagagagacgacgactcagactcgactcgactcatattgtgtatttcttcgttcaaatccatctc

SEQ ID NO: 256797 - DNA, 1124 bp, Cannabis indica
aagtttgcacatatgacatggcacttacacgtggcataacctagctagcctttaatataacaagggacctttgggtagggatgtgcctggaagatcctatgtgagggcagggcccatgaactatggtttgccttctaggaagtagttgggcgagccatcattatactggctagagaaaggcaggtcagtgtatcctccaaaattgtttcgtgagtaacttcatcaaaaaagacaagtctcgaggaaggactggcggggtgaccaatatgccagccagaagaaacgatgtcaagagtgtcgggcaaggctacacgagccttgatttcttcatcaacaagctttcacaaatatctcaaactgaatcctacaaactcggatccagtcaatctatccgagaatataggagcttcaatagatcataactgtaccctagaatataaagatggttactttttaaccactccttttatggagccaattgtaacaacctcccctataattagtaaatgaattggcaaggagaaggaacttgaaatcacattcacacatctaagagcactttgctaaaagatattctctataaacactttgagagttgtagctagaattcactttgtcttccttagtgatctgcacggtattatctaacgatcaatacaactaaaaagggagttgaacctttataattggtgggtgttcttatttatttatttattattttttactccttattggtgattaaccagtgattatttgactctgagtcagttggctattttttttcaatcaacagacttcatttgaattgctgatggaagtggcccaattcaaagggaaaaatatccttatgccccggaggaaactcaacgccctagggactttgggcgaaattcgtgcctagtaggcccaaccgtttcccaaataaggccacctcccatttgactgaatgatgaacaaatcctccctgaaagggcatatggtgggaccaaccagatctaagaccttcccagggatggaggaagggggaagatatcccacccaggcaaggccaaagtatatctcacagtggagaatcttaccccaacgaggatggtgccactcaccaccctattgatgagctcaat

SEQ ID NO: 256798 - DNA, 652 bp, Cannabis indica
tctataaataatgcacccgaaccattttccctattttctccttctctctacttctttaacctctctttccttcttccccaacctctttctctctcagtcctcctccagtctccaccggtctttgtccgtcccatccattcgcccatttgcttccgttaagttacatttacatttacatttacattatatatataagttatgtaatggtgtcttctccgcccgctaattaatgaaatgtataatactgtggcagatatatttacaactatacgtgagacattaggaagtagtctgacctctgaataacatgccaatttatacacggtttaaaatctttattcaaatatacggtcaatcgcaatctcctggtggttcgtcttcttagaattatgctactcctccacaacatcaataccaaccttctccgtagcaacaccagccttctctgtagtagcaacaccagtttggttcgcaacaggaaaatcaattcgaatatggaacccagcccctttgcagtcaaaattttgctgattttgagatatttgagagttcttcgtaagagcaataattttttcgacccctatactcaaccaagctgtgacagtcagtagtcccgtgctccgtaaggggaaataccgggtaagctgtgcaa

SEQ ID NO: 256799 - DNA, 1990 bp, Cannabis indica
ttacacaatttatttaccaaacacctaatacatattattcacataataatatatattactacattttaatctacacttattatataataaaataatataacacagtacaatatacttttcttgcctttaatccaagttcatacatgtcggccaacccaagtggagaactatccccgatgatctcggccctatgccacaataacggtaaaccaataagagtttatcccaaaacactacttaatactcacataagacaatctagggttttctaccaaatctcgtggcataaatacactacaacactaccaaaacttatccaaattactccaaacttcacaaggcacatatataccataaatattaccatctttatgtaacaaaaattaaaattgagcctttaaatgaaaaacaccatcaacgttcggactaagctttaaaatattccaaactaaatttctaactcaaaatcacctcagttttagcaagaaaatatcaaaattagtcctatgactacccaagaacaatcccataaggtcagaaccttcataactattctaattcacaaaactcttatacaaaaataattgtttttaaacttaaaacgaaattaaaccataccttaagctttctctcttcaagaattttctatcctgctactatcagagcttagatcgctaggtttcgggttaaaaatcgaagaaaaatatagagggagaagattttgtcgaaaagaggagaacgagagtttcgtttgttcatttttgttttcgtttatgtttactgataaaacttataatatagactagttgcaaagcacattcatgggatgtgctgccatttttttatttcattttattttttaacttttaataaatttattcttttcaattattttttttttaaaaaaaaaagaaaaattaaaaatttataactaacaaaattaattattattatcatgtaatcactaaaattgtgtggttaaataatttaaaaacagaagaaagaatatatgatattaaaattaagctctaacagcttcaaacttattgcttaattaatttaacaatttaaaaaatagaatttggatacaaaagaaaaacttaaatcaaagagaattaaaaaaaatgataagttaaaaaaaataaaattatttcttttcataattataaaataatttaaattcacataataataattattattattatttgggtaaatatcattttaaattttatgttttacaaaagttaccgatcaaactttcaattttattttatttattaatttttttttttttgacatgaactttcaattgtattaaatgacaagtaaaccttcttttttaaaatggtagagaataatatcatgaacaaaatttttgttagttattttttaaatataatcaacctaatactaatttttttattattattttgaaaaaaacgtaatcctaatttttagctcaaatgtatacaaaaaaatagcattagtcggttagaacacctctaaattaggttattattatgttctattttgacaaaaaaataagttcattatattattttataccattctaaaaataaatagtctgaattatcatttaataaataaaaaatttgatatgtaacttttacaaaatattaaatctaaaataatattcccctttattttgttctctaaataaatatttgctaagatattatttattcttataaataaaaaaagttattaggagatttactaaatttttttaataaaaaatacatctagtattaaaattttaccattttaatctttttcatgctaaattgaatgtgatatagtattagtactgtaaataaatatttgtaagtgatttagaaaaaaaacattaatacaaaatattgattaactttttaacaaatttttatgcgcatattaaatataatgaaaaaactaatgtaaatgtagaaataattaacactgctgagtttattgtagagtctaaatg

SEQ ID NO: 256800 - DNA, 898 bp, Cannabis indica
tatatatatatatatatgctagaatttatgaaagtgtgcatgttgaaaatgaaatttagatcttaagatgaaggttgatcagtgttgattggttagttttaggtgcattttatgaagtatttcagaggcatatttcagttgattatattcaattttgtgcataattatatttgttttctattattttaggtttaaatggaataattcataatatgaattaaaaataagaaaaaacatgtttaataagatgaatatatcatgaaatttagagttctaagatataataggtgacaaactctaagttttggatactcaacactctccatatgtgatcgacgattttggtaaggcaacccatcttgaatgggggagagcgtacgatttgggtcttggcaaacattccagcacagggttgaagctctcttagtaacgcccaaagaggggagtcatactagtagcctctggtcccctttttttctttctaatatcaatttgctcattttatatatgggattatgtttccatatattatcaatgtgagattctttaatacttttaaggaaattgataatgagagaagtaactcatgcatatatatgaaattatttacctatatcaatatgagactctttaatacttttaaccatcaatattatttgttgaaacttttttacaaagtgaatgaattttttataaaataaaaataagtgtcctagtgtgcttatatgtaatataaagagtctcacatgagacatgagcttttgtttacaagtgtatataaagtgcaattatgatacttggaataggactacaaggggtatccaattttgtgtgaatgagtgaggacacaagtgcgccgttcaaccagaccgagttggttggtgtgatgtgacacttt

SEQ ID NO: 256801 - DNA, 2668 bp, Cannabis indica
tttaaaataaataatttatattttattttattattaacaaacaacatcaacctaaaatttctcttatatacttgagtttctaaatttttatacatttcataaaacataataaaaaaaatactataaattatttttatcaaatgcatataaatttatatttgaaaaagaattaaaaatatataaaaataaaatattatataaaatatattttacatatttgtgattataataaactaaattataacattatcattattattataatagatcttaacaactcacagtactttgaaatttataatttaccaaacactcagctgagcttttttctacagttttgctacagctgttttttctcacagcacagctataactgctttttttcacagcacagttgtgtcaaactggccctaaaccttttatatgcagagtacattgataacaaactgaatcaaaagctaccttaactaccataacagaattaactataaactaactaaatcgaaaataacaaaagttagttaatactgtttacatccactctcaaatgagaaggggtattagccattttgagtttggacttaaggtagacaaatcggtccttggacaaaggctttgtaagtagattagccacttgatcaacactaggaacaaaacgtactgatagttgtttgaccagaatttgatcccttacaaaatgtaaatcgatctcaatatgcttcaatcgagcataaaaaacgagatttgctgcaagtgttgtagcactctggttgtcgacccaaataacagggcattgagaaagagtgatattcagtttagatagcaaatagacaatctactttaattcagcagctgtgtttgccagtgcacgaaactcactttcaatgctagatctagcaaccacctgttgctttttagcagaccagctaattagattttcacctaaataaactagataacccccagttaatcatctgtcatcaatgcaactagaccagtcagtatcagagtagcttgctagtgtcaatgatggtgctgggtttgatcagcaaacctctgaaatggtgcctttgagatatcttagcaatcatctgtaggcttcccaatgtgagactgttggagctttcgaaaattgactcaatttgttgattgcaaaagcaacatcaggtctggtcaaggtgagatattgaagagcctcgattgtacttctgtataaggttgagtcttcaaacaattcccattattgagagacagtttggaggtgctactcaaaggagtagaacaaattttggcaccttccatgtgaaccttgagtaagagatctgtgatatactttgtttggggacaggaacatgccttgataatctcgatgtatttcgactcccaaaaagtaatgtacttcacccaaatccttgagtgagaattctttgttaaaatcagtgaccaatttagtaacgagagatttatttggtcctgttaccaaaatatcatctacatataccagaagtataagtagattactttcagtaccatgaacaaataatgaggtatcaaatttggaggaatgaaaaccccattgaagtaaacaggttctgagcttgtcattccaagctctaggagcttgttttagaccataaagagctttatgaagaaaataaacatggtctggctttgattgatcaataaaccctggtggtcgttgcatgaacactgtttctgttaatgtgtcatttaagaatgcattaatcacatccacttgagttaccatccagttttcagtgacaacaagagttaggacagtcctaactgtgactagtttaacaacatgggaaaacgtttcctcataagcgatgccaggagcttgtcgatagcccttagcaacaagcctggacttgaatttatctaaagaactatcaatatttagcttaattcgatgaacccatttattgccaataatgtgcataccctgttggtaaggtacaagagtccaagtactagcctttgttaaagcatagaactcactctgcattgagttaaactagtttggatcttttaaatgcaacttgaaatgatcttggttcacatggtaatagagattcaggaaatggatgtttagttgccaaataagcttttggcttaacaatgccattcttggatctagttatcatgagacctgtgagaagtgttggtggactgagtgttttctgagacattgggtgggttaatgagactaggattgagggaagtaggtatagattgaacaggaacaatatcatctgggttggtatttagttgattttggttctgagaaggtggctgggagataggttggggatctgtttcacctagttaagaggctagtagggacagagtttgaggaaggagttaggaaagtgtttgggatttgatggatgagttggttgagacattggtggtgggaactgaggataagtatttgtgattatgtcaggttgtattgggagagtatgtgtctcataaacactagttggaaccacagaaataacactagtattagaagttgaaaatgttgcaataggaataaaactagtggtatgttcagagtgtacctgagtttggttattggtgtgagaatttcctggatagtgttgttcatttaagaccacatttctggcaatagtgttgttca

SEQ ID NO: 256802 - DNA, 1021 bp, Cannabis indica
tttttttttttttatttctttttccaactttgaaggaggcatgctttttgatatcttttccccactttatttattctcctcttgtagcctttatgtttttaaaaagaaatttttgttgatttgattaatggaactctaattgtcgttgcttttcaggcgattgacaaagttaaaagaaactaagagtcgatcagccatcaggtacatgattatgtgattgtaataagtagttctacaacactttatcctatattcgcctaaatatatacaacttttaagctcttggaccctgtagattattttttacttgacacaaagttatcatcttctatgtttttagataggaaaccacctggagtaggacgtggcagaggaagaggtagggacgaggaaggcaacctaaagggattggctatggactagatgatggaggtgttaaaggccctggtggaggctgtggcaggggtggatttggtggtagagctggtggaaacagaggtaagacttgtctatatactatattatatatcctatttttctttttcaagtaagattgaaaagacctttataaattggagtgtgcatgaaacatttttaacttttatgaagtaatcactcatgcatagagacagtcatggaagaattcaactatatattatgatttatttaaatttataattgataataaggaaaatcttcggttgcttttgactgaaagcaacacaatacaacttgaattttcaggcattgagaaattctccagcattcgttatatttaatctacaccaaaatttaaaaatgttactgaggaaagagatttatattattgcttgaacaaaaaatgatgtgaaatatattctgtcatttagacatttcagtgagtcagtactcatttttaatgcactattcgtcccagtcccattcatgaagttaaaagggatctaatttatctcatttgacatatttatatgttgtcttatgctatcaggtgggggacgaggtgataatatttatttttaat

SEQ ID NO: 256803 - DNA, 1221 bp, Cannabis indica
ctctctctctctctctcaatggaggaactccaagaattaaattacaaaactcaagtcctactagaaaagttagacaagagtacaaagcagtttttcgacgagttgattggctgttttgaccttgaagacacttcaattcagccccgaattgaagcgaaactggaatctttcgtgaaggagattgaaattatcaataaagaaacaaatgatttgaaacaaattttcattgctaatcttgacaagatcgatttttcaatttttctccagtctttctcagaacctgagcacaaggaaattttgagcaagtacgaggctctaatgaatgtaatcaatgcaaaaaacaatggaaggagctggatggagttggtccaagaacaagatcaaaagtctgatggtcatggaactgaattcaattcgataagggctgttgctatcgatgttgggattcaaatctctgtgtttcttgcgcaatatttctttctccttgctgaagaattggatcaggaagtaatggggagcaagattcgatctgtcaaaagtagtattcgctctgaaataaccgaaaaaaagagttccacggccataactgacaggttcgtctctgtaatcaatattcttgaggaagaaatggagttttattatatgaaaaataataccatggaaagtgggttcattggtgaaatgggagatgatgttcttggtatgatcttgcttgaagtttcgaatctggaaagagccattttcactcgattgtttccagattggtttaacagcatgaaggctattgaggctgttgaacgaggtatgaaaaaatcatttcttcaaaactaaacgagattggttggaagattcaagagctcaagaagaagatgaaggagaacaatgaagagttgggaaccgttcatcatgaggattggaatttgaagttcaaggaaattcttgatttcaagattccagcaatatggcgcacactggatctaaatgtaaagatcactaatgggaaaaataaggtagaagccttagctagctagctttagaattagtatatactataattaattgtgctactataacaagatttggaaatctcggatgtatacatgaatttttaagttttgcactctattaacaaagctggattttctagtgacacatgttttaattgtcataattttgttgttagtgtccgagttaagaacaatttggaatatttacataatc

SEQ ID NO: 256804 - DNA, 1268 bp, Cannabis indica
tttttacgtaatttttagttactcatattagttttgtatacagtaaaaatttgttcatagtatacaatcgtaggaaaaagtaaaataataaacatgtgatatgaataggtgtagtatgaataaactaaaatttaccatatactacaaagttggtattcagttgtacaaatgagctgcatacatttgaactataataatggagcaattacaattattaaggtttatagtttattgttaatgtaaaagtacttagtactaattagttaactattagtactgattacaattagttaacaatttgattagtactgattattattaaataatcgtgtttaacaaaattaacaaacatcatatttatttattttaaaaaaatcattaacaaagtatatatgattgcacaaagggatttcattttaatgtgatgcatttttaactgtttttagaaatcgaactgtataatgtgttatagtctatgaagcagtagtatgtatcgaaattgaattgtataatgtgttagagagatgacgatttgtttgttgtatacaacaaaaaattagagagagatgataaccgattatccaaattttagatctgtcgagttctccgtcaatagagttttatcgtttagtttcttttggtttctattttttgaattcgtgtattattcctatgatacatatagctttccattttaatcttgcaaaccacgcgcagggaaggccgagaaaagtggagttgtgggtgggtctctttcatcgccggtgattctaaattaatggcggtagtaacggtacgcttgttgacgtgtcgtggtatattaagacatggtttttatatatcgttttgttttgtaatattaatgtatatttattaaaattttcctaattttaaagtgtcttataaatgaatttttctcttctaaaattgtgggtagttgtggttttggtgtgtatagttaattttttttttattattattatttgagagaaacttaaaaaaaaacaattttcttttaaagcaaaaaacgaaattgttaaattaaagctgaggctgaaaaatgatgagtctgtatggatgaatgattgtcctcgatttatttgttctcatggacgaaaaatttcttaatgaatgtgttttctcactactagaaaaaccccctttagaggcagtttttcacgaaattcgctatcgacgctaatcagggcgacgctaaagggtttttaaaaactgacgccatttatgcccctatggtgtcggttattagc

SEQ ID NO: 256805 - DNA, 1367 bp, Cannabis indica
ctttgctaaggacaaatgaagaagaagatgaagttgctaggattgaaatggggcgggcttttcttttcttattaatttaggcccaagctgctaggtagttgcagggggagagggagagtgcgaaagagagttcggcctctgttagaccgtccccggtaggaaggaaaggaaatttgagcttctcagatctggaaaggaaaaagaagactcagggagagtaagtgagaaagagagatcaaagagagagagaaagtcaggagaaaataaagaattaaaaaaatattatttatttatttatttattaataattttataaatttaaattattctttttaattttaaaataaatttagaaaatatttttttttataatttttaaataattatattaggttggccaatataaatgtaccacgtgtatataatggtacacaccttaaatttactatcagtttaaccgtttggaaaaatttaaccataaattacttataaaataacaaaataagatcagaaatccaattgcatgaagtcctaaatgtaataaatttaaagtttaaataaagttattaaaaaagtaaatgtatcttgtgtgagtgacactctaccgtatatattgtgtaccatattcttttaaccaataaaaataaggtacgtagaatatatacaattcacttgaatattagaagtacgccatatgtaataatattaataataataatattttaatattaaattcattactatacaattcaattcgctcaaatagctttaaatccaataacacctaaaaaccaacaatcaatcctctcccaaagccaccagaatcggaaccacatttagccgcagaagacgccggcggtagcgtcggagtagaaggcgacgccggcaatctcgaagagaaatccttaagacgaaactcatcatcgtcgaaccggctattatcatcctcgaaattcagcgaataactcgacagatcataactgaaatcggaggactggaacggttggttgttatgccgcctgatcttccaacgttggatcagattacggcaacgctcccgaatctccggcagatcgttggccgtcgatttgagccaggtgcgcgttcgaaacgacgatgctctataatcgttattgttccccaaaacttcgtggtgatggtggacaccgcggctagagaagcatctggagagtcggccgcacttgaaagatttgccttgctcttcgcccatcattgtgtagaaatctcgatcaaattaaaattacagtgcttgatctagagagagaaagatgggtgagttgaggagtgagagagaatgagaatgaaagagaagaacaacacaagaaatgtgagtgggaatataaatg

SEQ ID NO: 256806 - DNA, 1566 bp, Cannabis indica
gtggtttgaacggagattatcgtgtcataccgggcatgggcgagtttggagaccgatatttcggaactgatgatgatgactggcaagaagtgactcactcaacttaaaaacataatgatagtaataataataataataattaataataataaaagaaagaaagaaaaaaaaaagatctccatacttatatgtcttttatttttgtccactccaatcatcctcttatccgaaaatcagctaaacttgcttttgacttatatataattctgctggcttctctacttttataagagttgaaattttgttgacttcccttggcagattcttgctcttttatataatcctataaatatatatctatacaatatatacttcttcacacactttggggtttgttttgttctgtttttctttgtcttcttattttcattttttccttttggttaaagttttcttaccataatagggttgtggacattagccaaaatcaaattaccataataaggatggactctagtgtttggatatgaattggtcatattattaagaataatattgtacaaacaatattgtatattacttggtatgacatagaattaaaaaaatagtattttctaagaatgatcatccaaaatcaatctatatatacgtaaaatgtattcacaacccaagatgtatatacaaaaaaactatttgataacatgtatatatatatgtgtatttatcgattgtggtgggttgaagttttgattcgattataggcggtggtaatatgattgacaacaacctatatagcaatgccaataatgagtaatgagaattgaaaaagaaataccaatggctaagagtagagtagttagtagagtccaaaagtagtactttgtctttgtttgaagctctttttatcaagttgtgatccaattatttaacggattagagagtttagctattccacacaaaattaagagctcaagtttttgagagataagtacttaaggatgatgatgccacttggcaaggagagtgatcactcattactctatccgaggatgataacccttgttgggctaatcttttgacacgtgtacatgcatggtatgactttgattctgatggtatattccatatgacagtggttatctatatagtttgatggttgtgtgtgtttgttttttgccatttggtccttcttctaaactactcattgtgtttgtatagttgtaatatatatataaaaattcattgtggcaaaacacaaacacaacaaccatgtcggcctttattggaaagtatgctggtataatttcaatcccaatctcaatctctcaaatcaaacattatatgtatatgagagtttgattaatttgctctattatcactactactcctatctatgctcttacactcaatctgtttttgctttcatatttgatttttgataacaattcacaagtacaaatatttggttggtagaatcaaaattaccatgtaaattaagtaaaaagtgtatgtataaatgattttttcacattacattaccttttttgataaaaagtagtgagtgag

SEQ ID NO: 256807 - DNA, 1372 bp, Cannabis indica
agttttcatttccatatgagactgtgtctcaacattctaacactcaaaatcacacagccccttcctctattctcagtggtatcattcccaaatgttctcattataaagaaccttataccatgacagatttaatacaccaagctgatcctaataccagtcctggtactaatgacactgctgttcataatgagcctgctgttagtaataatcctgttgtctctcatactccatttcatgctgaatgtgaccaacatgctgcaattgacaatacctttgtgcctaacagcttgcttccagatcagtctcagtttgttgatgcaggtacacattctggaacgtgcattgaccattctggtgtgaacaatgctagctcgagtggccatgttgttactgttccagcttccaatagccctgcttcagcttcaactcaggaggctggtgggaattctggtattccactcacttcagcaacatcaacacttcttcctcctgttctagcagacaccagaactccccctatctgttcttccccagcagctttgccacttatagctggttgtatcaatgctcctggtaaacataatgttcacaagatggcaactcagtccaaacttggaatttacaaacctaaggcctttttggcctcaagagaaccatcatctcttaaagaagcacttcaacaggagcattggaacaatgctatgagtgatgagattcttgccttggctcgaaatagaacatgggtgttggtgagacttcctgaagggagacaagctataggatgcaaatgggtttacaagatcaaagaaaaccccgatggtagtgttttcaagcacaaggctcgactggttgccaaaggctttcatcaacaagctgggtttgatttcactgaaacatttagtccagtgatcaaaccagttacaataagagtggttctaactctagctttgtctaatgggtggaatataaggcaacttgacgtcaacaatgcttttctcaatggagaattgcaagaagaggtttacatgcagcagccccccggttttgaggtccctggccaagagcatctagtttgcaaattaaacaaagccctttatggacttaaacaagcaccccgtgcttggttcgacaagttgcaccaatgtttgctgtcttttggctttgtttcctccaaatctgatcattccttgttcatcaatcactctgaaacatcaacaacacttgtgcttgtgtatgttgatgatattcttattacaggaagtgatctcactgtggtagacaaccttgttactgctcttaacacgagattctctttaagagaccttggccctataaagtactttctgggaattgaagttgtctataatgaaga

SEQ ID NO: 256808 - DNA, 857 bp, Cannabis indica
aaaaaaaaaaaaaaaatgaaattgggtatcataatcataccatcactatcatgaagagtactcttaatagttgagttaaaataactcattcttcaaagagttagaaaaaaacaaggagaaattctactcaattaatgaatgaattataatgagaaaaatgttaaaggcacgaccactctagatctagaacatcatgacatatcgtcttgatatgtggaatttattactaaatcacgccatgctatgatgctagtattaccttaggcggagtttatattacattatttaaagagttgtttcggtaaattttttatttgtttcggtatgaagaaaaaatttagttaaagtttttttatgatcacatatattacagctgtataggattacttgtaaatttttaaaaaaatttaaaatagtatacagtgctgaaaataaagtgatatttaattgcacgtgcaactattatttctttatatataataaactagagaatagtaccgcgcttcgcgcggttttaataacttttcaaaattatatatataacaaagttaatattttattttattatgaataaaattttaaatcgaatattattttattattaaattaataaataatatgaatactatataataaatctcttttatatgattagcacaaaattaatcatcacacaatataaataaaatcgtcttttgtatttctttgtggccaagtttatcacttaaccctaaattagtcgggacatatgttattatcactataaaataagtaataatatattcatatataataatcttacattattgaatttttccttttaccaaaaaaaaaaaaataaataatagatatagtca

SEQ ID NO: 256809 - DNA, 547 bp, Cannabis indica
tatacctttacatctaatggcatgccatggaattggcctgcaccttctggtggtgtccaattgtatacagcacaaggtaaaaataacactgaagcacccccaacatcctcaaggaaaggttggggtttcgaaaatcttcgtgtgtcaaaagaaggatgagatttcactacccatgcaagagctaattgatccccgagcatacgagaagcatttatgtattttaatttgtaaacttcaagcactctctctaaaaaaatctttgccctgcagaaacaatgccttggtttcaagttgaatgcaacaggcagagaccaattggagacaaccagatataatgcaatttaaacacaccttgaaattccatcaacagtccccctaactgcaatgaatcctgaattcagaggctgatccttgttgtttctgaaggtaagagccagatgaaaattcggaaagtcatgaaataaagaccctaaattatccaccacagctatatctgagtcggtaaaaatgtagtgtttgacatagtctggtctccgagaaagctcct

SEQ ID NO: 256810 - DNA, 1346 bp, Cannabis indica
tttctcaaaaattgattgatcactcaagcccaacacctcactttgctcccactctaatgcagtttcttcaaaattctcaaattggacttaaaagtcaaaaggtgcaaatctatttcgggccttgagcacatatattgttaaactttgggccttgagtgaaaaagggcttaaaaaagtccagttagtctaatgggccacaatgcccttcatttgtgggccaaatttcaacaaagggccacaacttcaattgacactttggtttagccttgtccttttcctccgttgaagggtcattattttctgaccaaacaaccaaaatctggattgtggcccaagggaatccacttgcagctggtctcatccaaatggtgcgtaattaaatataaaccacgtattatcgttatatagtttgttaatccacttttctatatttatgtattttgtaggcagttttggtccaattagttatttatattaaatgctttttgaaggtagtctcgagttattttgtctaaattttcgagattattgagttttgtataaattgttttgcttgtaataacttatattctgactttgtatatttttggctaaacaattagcttgttgattggaaatttcttagtgtctatgattgtcatagtatgattcgtatcactctctatataaaaaaatatatatatataaaccacgtattaatcaaaattaaagattatagaaaattctccacttttagatgcatctaggcactttatatctgctttcacatatagaagaattatttaatttttttttgtatgattgtgtatattataattatataagatatcttgtaaaattttataaaaattcgaaaaaaaattaacacgcctaaaataagattcaaatagtctgcaagtgttactcttttgttttatatgcgtgtgaaatagattatctagatattgctttctatatagtaaattgttgtaaataattttgtacctaattttaaatatttttaataattttgctattttaaaatttaaaatttaaatacatgtttttttttattttaatttttaaaatattttattcattaatattaactcaataaatattaataaatttaataaatatatatattttaaataatataattaatatttaaaactgtcgtacaaagagcgagtatactatttcgttatacataaattaacacatttatatttatatggttttagcgaattcaacacatttatatttactagttaaaagttacgtgccgaggcacgtaaatattaattttatttaaggtttaggtctttttttttatttagatttgtatctaaaggtatgattttacg

SEQ ID NO: 256811 - DNA, 2074 bp, Cannabis indica
aacattaaatgttatttctgatctatattaataagtaaatctggttatattgaaatgagttttatttagggcataaaatccaacacctaaatcccaacatacataaaggggtaagtgatacgctaaatcactttttggagacttgaactcaaaactaaaagtttccctattttttgggtttagctggatcttattgccagtttgtagaaggattttccaagattttaatgccttaacaaagttaaccaagaaaaattagcggtttatctggtgagacaaatgtgcaagttttcaaaagttgaagcaattattgactacatccctagtgttagctttatcgttagatcaagaaaagtttgtggtttatttttatgcatccaaacaaggtctaatgtgcgttttgatgcaagatgataggattattattaatgcatctcgtcagttgaaggagtatgagcagcgatacccaactcatgatctagaactcgactcagtggtctttgccttgaagatttttatgacacactatctctacggagaaaagtgtaaatatatagtgaccacaagagcctcaaatatttctttacttaaaaagatttgaatatgagacagaggcagtggttggaactagttaaagattacgattgtgaaattttttatcaccatgggaaggccaatgtagtggcggatgccgtaagcatgaaaggtccgagaggaagatttttagtatgactatgatttctccccatttggtggctgacatggtcaaattaggtattgagtttgaggatggaaaacttaataatttaacagtgcaatcaaatttgctagaaagaactaaaagcgctcagttggtggatccataattggtgaagattcgagaagaactattagttggtcaagctaaggatttctcagtgtctgataattgatgttattttatataacctgagtatgtatcatgagcaatgttatacttagaaagtgttggaattatttaaccaggatctagatttactaacaagtatgtttttaacatcctaaacatgaacttcaaaaacgatatgaaataaacacatataaagtttcaaaaatcttacagtagttgcagcaaaatttaatggcttcttccactcagatctctaacccttgtatattgtatgtagcagagtatcaccaagatctgagcccgaatctccatctcttgaatctggattcttcacagccttacacactatgattgagtgccacttgatgtgtgtgggcacttactctaatcactctagggttcggtttgaagagtggaaaagagagagagggtttcgaaataggaagagtgaagccggcacaaaattttactgaaggaaagagtttgaatcatcttttctttgaggccatcacaacctatttataggagaccacatagggttaggttagatttatttggcattaaaataataaaaaaataaaatggtaaattgctcctcaagtgaccagccatggatattggaccccactttgcaatatttccatttttccaattattcatcttatttcctcaaaaaggccatttttccaatttaacaacttaaatgtcaaatctaattatttaataattaaaattaattattaaataaaattttcatttaatatatttattaagtagacttaataaagtctcttaattaataaataaaccctagaatctattttcttcacaattaagccctagcttagtgaaaattcacaaactagacatagtctaattttagaattataattgattaattaaaatcaattaactgagtcttacaaatagtattgtctcaactagtatgtggaccatgggcctatatatatctgtgcttccaataagcagatctagagtttaccaagtaaatccactaacttattaattcctcgttgcatccaccatataacttggaatcgcactctcagttatatagaacgctttatatattccacgatatagatacgctattaattatccattgttataatcccaataagcaatgatcctctatagatgatttacattgcatagggattaatt

SEQ ID NO: 256812 - DNA, 1615 bp, Cannabis indica
gagagagagagagagagttgggattgagaaattgtattgagcaatattattgattatattggctcaggttagtgagttgatgaatgttgagggattactccatagatgactttctgtgattatttttcttgtagctcttgatcttgatatatctaattctcattatcaataaagattggtggcaatactttcaaactggagcattaccaagttcacattgaacttaggatccaaactagtataaatcttgtgtgttgttgtgtctggaagctatctagattcatttgtgctatatttttctagcttaacgtgtttgatagtttttgttactgatttgtttgttttgatttaacgtttgtttgtctaagtgtgatcttaaagcttgaattacagaggttaattcctatgtatcagagctaaattttcttacaaatcagaacttggttcttcgatcatgaagggagattcaaagatcacttgctttcgcaactagcactcattaagaattcatcaacaattcattaaggaattctacaagaaaacagattgaaggaggatgttgatggcaaggttcgagctagagaactttgatgaatcaactgatttcgcacaatggcgagagagtttgaagggtgtacttgtgcacaaaaacactactacgaaattagcctttagaggcactttttttagtataataataaataaccgatgccatagggttgaaattttttagaaggaaatttaacgccacttttgacgttggttatttggaaataatcgatgccaaaagggtttataaccatagcccagcccttcgtcttcctcattcgatcagccaaaccaaaagcccccaaaccaaagaaaccccaaaccctcttcgccaaccaccacagaaaatcactcccatttcaccattttttttttttacaattttagctcatttttatttctaaatcttctatttttcatacctaaaactatcaacctgaaaagatcacatttttcctcattttttggagtaaaccgaaggtagaggtagtggttgtggtggttatatatctctgaccaccatttttttttttgatcaagaaggataaatcttcattaatcacaaacaattacaacctaagcaaacaaggcagcaaagtcccacaactacttacagtataaactttctatatatcttttttcaacactttttaatctcccttttttagctacttgtaatctatagaaaacattgtctttaatatcctgtacaatcttccaaaccaagctcgagtaattgttaaatatacaattgtttctattgctccacaagttatagattgttgctgccataactgtgatgtaaactcgctgccatttatccttcttgatcttcactaaccatctttgccactcttgaaagtcacttggccaattggttgtcccaagctaactgcaaacccgagagagaacctgctgagagagctagcaataaaaaaaaaggtggttgttggactcaacatcagccccacaaactggacaaacagcactgtccaggacaattttgaagcgagcaaatttatcccgggttagaagttggtcgttagcagcctgccagaaaacgaac

SEQ ID NO: 256813 - DNA, 1611 bp, Cannabis indica
cttggtttttaataatttgcttgctattttatgtttatttgtgaaaaataagcaataattttaattaattggtaatctactttgataatttttttcttataatctttagattgatgaagataatttcaacaaagagcgaaaatagttgttattatatttttttacttaattttttattttttaaaagaaaaaaaaactaaataatttgaacgcacctaaaagtgttaaaaaaataagattgagcgtaaaattagaggtcattcatactactttttattaattaaggttatatgtgtaataactttaaattataaggaattttgttgcaattacttcaattatttaagtgaaaaaaaaaacaattactaaaagatctttatttattaacaaattgtatattaggaattattattaatgtaattttaaataaaattaattttaattaagtttttataaggaaataaagtatcaagttacaagttatttattatttatttttttttaatttttaaattaatcagaaccattcaataatgatctaatggttaaaaataaatgtaactatggtggttacaaatttgatgtaaccattgaaacctcctccatatatatatatatatatgattatttttatataatacacatatataattaaatagctttaaagaaaaataaaaataataaattacacatataactaaataaattatatttaatatatatttataatgacttaactttccataaataaatatattaattttgaactaaaaaaataacaacttactaatgtgaaattaataaatacttctcataacgttttaagaagacttctacatgattgatcgaataacttcccaataaattagtaaccagaaggaagagtagagagtaaagaatgtcaaaacatatattgaaacttaaaaaatatttataaattaggattgatgacaaataatctatagcaagattgctactatccttcaaaaattaaaacacaataaaaaaataaaggaaatgaagattaagagaagaatatgtgtgtgatgtatattaaatttattaatattattaataatattaaatttataagtgaaaaccttgtatatatatatagatagtttagattttttatttttaaaagaaaatacatatttacatgttataataatatttagttatatatattttaagagattttagagaataactatttgagagaataatggagaataaaagaaaagaaaagatagatgtatttaaagtgattttagagcgttataccagccttagaaaatagattttcatgtaggataaacgaaagacacattaattatttaataattgattaaaaaaagtaaacagaggaaaaatataaataaaaatagtaatcccctttttaaaaataaaaatcatatcgagacttattgtgacagtcagtagtcccgtaatttgtaaggaaaaataccaggtaagtcgtgaaatcctacatcgcctagggaaggtcaagtgtgatgattctgagactgtgtaggtatgggactacacaattaaagatgacttaaatggattgattggtactacctatatcaacaaggtgcatcttgtttt

SEQ ID NO: 256814 - DNA, 1086 bp, Cannabis indica
attatttattattatttatttagtgttgtttaagaataatgttgtaagttcccgcgttttgttttgtattggcctgacctatatttatcctaacgttttttgaaaaatagattatgtcatgttgtatcacagaaaaatataggtcatgccgtgttgtgttactatttttaaaaggtagctttggtattttcgtgttgtgcttaaattcatatagtgttttgttcatgtaagttcatattttttgaataagccagcttattatcatatccaaacttaaattcgtgctatacttttttatatatatatttttttgctattactaaagtatatgcttattttatagcattagttatatttatataatttttcaacaacattttacaaataattatataaaaaaattattagcatcattaaaaatcatatagaaacccttattgcaacaagcgcgacaaccactttagaaactcaaaccgtaaatttaaaaaaatagtctatggagtaatttcccaattttatatcacactctataaataaattaatatataattttagttttttatattttaataattttaattataaaattataatatttagttttatatttaaattttattattattttaatttatttataattgagaaattcatattttattattaatttttaatatatcctgttgtcttgtcgtgtctttcaggttaatctatttgtgcttacgtgtcatgccttttatttttcttatgccgtgcttaaggatatatttttcgtgacatatcgtgctaatttgtagtatcgtgcgatgtcgtacccaaattcgtattttttcatacctaatcgtgttgtaccttctagactcgtgccaattccgtgccttgttaaaaagtccaatccgtatttacaatactatttaagagtaaaataattaatttttttttcgaaaatatatatatatatatatatatattaaagagtaagattattaataagagtggagcttattaagttattatattggggttgagattttcgttaataatttaattcagcttgtgttgcatccaaactaaggttatgagtct

SEQ ID NO: 256815 - DNA, 895 bp, Cannabis indica
tgtacacgtatacggtgccccccaagtgaccgagcagactttatgacttcttggtctacttataattttttgcaagtatgctattttgtttgttcagggttttggtcacttaaaaagttggtgtcgtcatcccctaaaaagctatccaagggaagaaaccaactcgacgtcatgtaggaagattgataaaaaagaattggtacaggacgaccagagcccatctgggacaaacccaaataatgacttaagttgcagaaataaaagtttttagcattatcaccccaccaagaatggggcatctaaaaactatagaatctgttatcaaattccactgaccttaattcagcgtagtcttggacaaaaggaacgaagtgaatattcaaacgagacttacaggctccggaggtgcttgcactaggggcaccagagttagggaccgagaatggaaatttgggccagaccgaagttttctccttcctaacttcctccttggagaccctcccagaggcagctacagccaagcgtacgcgagctcccgctccctcttatatctataattattgtatttatcctgtacggataaaatgatgtctaccctgagcgccttctcactcccagaattccggacgttgaggcagaggactttggacaagttgaattcatcaaaatattgactctctagaatcaacttggccctcctgcaattgacagtaggcatgtcaaaaagatcatttagttagagcgggttggagctccaacccaacggattacctctgatccaaaacattcggatacttattggatcttggatcagatccgctctgccccacctaatttttttctggatcggatctgatccgacccgatttcaatttatttttaaaaaaattaattc

SEQ ID NO: 256816 - DNA, 720 bp, Cannabis indica
cacagggtggcctcgagatggttatgtagaaagtaaaccccctctcactggagcagaacgaccaagcgaggcgagaggcggggatacttctgacataaacgttcaaggtggggggcctaaccaaccagcatgattatgttggcagtggcaaagatactaaagatcatgaagtggaaggagtagatgacgagggttgcaagagatgggttttacaaagatggccactgttatgaacacgatttcgaggtgacaaaggttttcaaggagttgtttgaaactcagcaaaatctggctcttcaggagagattttcttaaaagatggaaaaaatattgggttgcctccaaagtaagttcagagatctatacgaaggagactctgatgacgatcctttagtagaatgtgtaagaagaaataccaaggagaagcccactggtgttagaacctctactcctgtacatgagaaggggaaggccaaagtgggtgaaccaaaaaatccttgtgcctctaaaccaccttggaagaacatgaattaggataatagagcctcccaggtgcagaagatgaccaacgccttagggcttgtgcatccttcagcctagaaaggtcccataacaccgaagaggattggtaagaaagtaccagaacctgagggaaggaaggactaccctagtgatttggtaaaccaggatgagggggcggagtagcattactatgacgat

SEQ ID NO: 256817 - DNA, 614 bp, Cannabis indica
gtttttttttttttttccatattatttctgattcaaatgactcttttgactctaattttattttttggatcggtttattgaatttattttaattttttattatgtttggtataaaaatatgttccatttcacaatctttcatccattgaacaattcattattaattcttaaatatatgagaacttgcatatacacaagaagaagaaaaaaatcatatataaaaatcgagcaagatgaacgaaataaaataaactttcttaaaatggtttatcacgatcaaatttgatattaattataaagaaaatacactaagacagtatataattaatatagttattatctgttactattttatattccttcttttaaaaaaaaataaataaatattttgtttttaataaataaataattaataacagctagctttgaactttgacccactgaaacacacgcagtgggaagttggtcataattttgtcatctcccacatgaacaaatatcatcatcatactcttaataagctagagcctactcactttagggaaaaaaatatttttcatttcaaataatatatataatagtaattttttaagagataattagactacatattg

SEQ ID NO: 256818 - DNA, 1921 bp, Cannabis indica
tgcgctcagcctcctacacttcgtcaatcttcttttccctcctggtaccaacagtctaagcaaggaagtatcagacgagataacgacgacacaatgagtatagataatgtggacaaagttcatttcatctgaagtacaaaattaaaggggtatttttaatgtaacttaggatgccaagtatattagactacttaggatataacattatcaggtgtgatagtgacttaacatcttatggattagggatctggtgaagttgtaaagtgtcaagggctcattataaatagggcccttgagtttactgtaaagagaggtttttttttagaatgagaaaaacagtaatttcttgatataggaaagcttatgagatttttaattcaaacaatcttctattaagtttttttttctttaaaagatagtcttgaatcctaattatattgttgacgagttctaactgtcaacaatttgtcaccgtctgtgggaagtcgacacgtaaaagcaacaccgtttccctacctggagtcgttgagaagatgtcgagatgttctcgtcactgctaggatgtggaagtgcgacttgataaccatcacttgatcgcttcaaggcccactccgcccatgtctgcttctgagagaggaggtgacggagacctagtgtctcagaatgaaataggcatgaatggtcaaaaaatcctaggcaaaagaagagaatgggtggcctgaggatgacccaaaaaaacaaccagcagaatgggccaactatctccatcaccccggaggtagacgacgaaagtgcaaaggccgaaggctctgtctctgatatgaccactgcagccactgaggtcgagagaccccaaaacctcacaccatcagtcgaggatggaaaagcgagcctactcagtgatttctagctcacgaatctgactacacaatgaagagatgaacgagctgaggataagcaacttgcgcttggaagaaacagttgcaaacatgcaaatggcgttagaggagctcctgggaggccattttgagtgccaaaaataggaaaaagaggagcgagtaggcgtgaggatggggatattaaggtacttgacaaataacaccactgaatcctccccacgaagagcttcaactcgaaaaattccagaaccctcatcatgacccaaaaagaccgagtcaaaggcggtccaaggagacttgagagaaaagccctgtcagaagaccacagttgagaagcacacgctaacagtggaatcacttcgaaatgaaaaaaaaaagcaaagcatgccaccacggacctacaagagaagttaactaaaaggaggaaagagttagctaaggagatggagatctttgacagaggatagttttggtcgcatctgagcattgtaactgggacgatgatgactttgacgaggaatccccagtctcaagggagattcaagcatagcctttgctcgtgaactttaaagagcccaacatgttaccatatgagggcataacgaacccaaaacactgcatggatgcttttaattaaaaatgaagatgaagagggtcacaagcaaagcaagatgccagtgcttttcggtgatgcttagagatgcaacatacaagtggttcaagaggttggcgcctaggactatcacctcttcgaaacagttcactattgaattcttagcccaacagcatgcgtccacacactacaccatcccaagaacaaacttggaaaattttaagcaaggaaaggccgaaagccttaagagctacatagagcacttcaatgttgaagcagggagggttgggaggctaaccaaggatgagcacaagatggccatcgctgtggaaatccgtctggaaagtaagttgtggtacaacatgcgtaagagagaactagaagacggacatgagaatctcataataag

SEQ ID NO: 256819 - DNA, 1185 bp, Cannabis indica
tttctattattttaatgccaaataaatctaacctaaacctagtgattgcctataaatagatagtgatggctcacacttaaagattgatgaaatttcttgccttcagggaaaattgagccttctttctattaagccaaaaccactccctctcttttcttcttcaaattttcataaccttgagtgatagagtgagtgcccacacacatcaagtggtatctcaatcatagtgtggaagactgtgaagaattcaatcaataagaaggagaatcacgctcaaggaaggagagaaagagatccaggttcagatcttgataatgctctgctacagaaatgaatcaagggctagagatctgaacggaaggagtcattatattccgctgcaatcaatgtaaggtttcttacactttatatgtgtttatttcattgttttagagaattcatatttggatgttaaacaacatacatggcagtaaatttagatcctggtaaaataattccaacaaaggcatcttcacaatcccctcaaaattgtacaacaaataaataaagaagaaaacttaccaattgacaagtgaatctgggggttgacggttttggtgcaatgtccacggcagaggagtccgtgtctgactgtaatgttgatgaagtcttacggaacacgagaagatttggaactcaaagagctctggtttgacaagcaagaaaagtgaaaagttgatggatgaatgagaagctaaggagatatgtcgcttcccaacagtcagttccaccattggatgcattgtaaaaggcacacaacaaatgagaagaaagcacaaatccaatcactgctgttttgagcatgccacagaatacgcgcccaccatgcctgcaaaatttgaaagtcgacatttaagacactagcaaaagaatagaagtaatcatggccattgagtaatgatgtaaagaccgcttagtttaatttggaaattagcaggtaatcatgtttaattatgaaaattatttatagctatttaaataattatttatactgttattatttaagtccaagatgcattttatgtcatttagtagttttcataattttgcatttccggtgcccggtaacatgaaactcggtgtttggctcagtaaaatcacaacttagtatgttaatggtgtgggacggtttattagacattggga

SEQ ID NO: 256820 - DNA, 1300 bp, Cannabis indica
ataacgacctatgtaaataggccacccagccaattgaattctatcactagtccatggcaatttgcggtctggggcataaatttaattggtgaactgaggaaaggaggagtaaaatatgttgtagtcattgtggactacttcacaaaatgggttgaatttaagcctctcgcaaccataacagcctcaaaattacgcaagtttgtctacagtgctatcatctgtaggtttggcattccttacaaactgatttctgacaatggtaagcaatatgattgtaaggagatgcgtcaactatgtgattacttggggattcaaaaagctttttcagcaatcgcatatcctcaaagtaatggacaaacagaagcaattaacaaaatcatcaagcatatcataaaaggtaggcttgaggaaaagaaaggtacatggctagaagaacttccacaaattttatggtcatataatacaactcctcgcttaatgactggtgaaaccctgtactcgctttcttatggatgcaaagccattgttccagtcgaagttggagtaagatctttgagaagagatgtctttaatatcaacaacaatacagaaagtcagttgctacaactcgatttttcggaggaaaaatgagatcaggctcatttgaaaaatgcaacctatcaactgggaacaactctactttaactcaaaggtgaaagaacaaaacctacaattatgagatttagtgctgcgcaaaggtatgcctaacacgcttaacttagcacgcggcgtatttggcgataacggggaagggttgtacctaatcgctcaaaaaatcagggatacgacttatcaattatctgatctcgacggtacaaccatcaaaagagcttggaatggaaaaaaaattaaagtattactatcaatagtactcacatgtatttatacttagtcaatttattttgttaaatgtactaagtatagggggtataaccattaatattgtactattgattatttaacaaaatccatcggctatttcaaccacctctgctccaagaattgcaaagtcaaagttaggcagcttggacaaggtcgtattaaatgtaattagagatggcttgaccatactgcttcttcctgacctcattttcattttcaaggtcgcgaacgagtttgccaactcgtgattctaagagtttaaccttttcctctaccttctccttggctttcccaagatcctcgatgtctttatccttcaaggtgttagatatattttaccaggatctagatttactaacaagtatgtttcattaacatc

SEQ ID NO: 256821 - DNA, 1947 bp, Cannabis indica
ccatgataagcatcaaaaggtaaaattccttttctcgtggtttgaatttaatttatgtaatcatattgagatccggattatttcatattagattcaattcaaattatttttataaaattaccgattttgctttcaactctgatatagagcataaaagccaataaatttatcaccaaaagtatgaatatatattatgtggttagctatgcgcttagacaaagatagactattcaagttcaatattagtaatgatgataattttttgatttatgcacaaaaagtggaaacaacaagccaccttgtttttgtatgttattatagcaggaagtgtttagagactatttcaaaatagcttggttgaaggcccccacatctgatgaacattggatcatgtttgactattacatttgtgattattccaatcaaaatatttgtgaattctttagtaacctttgaaacaaagctcaacatttttgtaagaatcaagtacaacaaatgatcattacattaatttcacgattttgctatagaagaatgctcataaatagaaggaatcaaatacaaatcatcttttctcctcattgtaagaccaaataattctgtcatatccaaattttcatggttcattccattgggaagtttccaatcaaaatggtataacaaatatgctagtgaaagctcaatattaataacaccaaataacatgcctggacatattctccttccagcaccaaatggaatgtactcaaaattgttgcccttaaagtcaatagagctttctataaacctctctggcataaaattctcaggttcattccaatactttggatctcttccaattgcccaagcatttactattactcttgttttcttaggtatctcataaccattaatgttacatttttccatactttcccttggaagtagcaaaggagctggaggatgcaaccttagagtttctttaacaactaattttaagtatttcatctcactgattgaagattcattcactgacccttttgtaccaataacttttctcacctcttcttgagcctttttcatcacttttggatttctcatcatttctaccatagcccaatctacagataaagatgttgtttcacttccagccacaaagatatcctgaaataaagtcaccatttctcactgcattattttccaataaaaacatataagatcatatttaactcaaaaaaaatgagtggatactaaaatttgagatcatttttaacaattgtgttctaatgcagaaaatataattcaattcataatttcagcatagttattaattaattcttttttggaaacatacataaaaaaatgtgtgatttattatgttgtaacaaatttggcctatatcatataatttatgtcatattttgtataattttgaataccctattacacctaattaattaaagaaattattaaaaaaaaattctaagatctcacatataatttttgttaagtgttgaatacaaataatatttatgatacttacccctaggctaaacatgtaagtttttcttttacaaaggtgtcaaataactatattgagaataaaaaaaaactttacagttatattttatatatatttttttcttaataatgaaatttataaaaaaactaattaaaatattattattactaattaaataagattagattgtaatgataaaaatacttcctttaaccattatatatgataagaaaaaagttaatatcgttttgaatattatattttacaaaattacagattagaccttctattttattaaattacattttgaaccctatattttttaaaataaaacaaaatagaccctaaacttaatttttcgttatttttttttaatataacaacatgaaacttttttttagcacgaacaaatgcaaaaaaaattgtaattattcttgtcataatac

SEQ ID NO: 256822 - DNA, 1402 bp, Cannabis indica
aagaaattagattcaatcaataagatttcattcaacattttcagtactttcacgtcgattttgaaaaattttgtagctattgctaatttaaaggtcactaaaagagtatgagataactgaaggcataaatacctcgaggggtgaatgtatgttgattactatagaggccatggccccgaagattatagtatcctacttttatatgtataatttattttttataattaatctgtatcagttatgtagtctatggtggccctattaaagttaaataattcttttttttttttaaaaaaaaagagttgaatataatgaataatatgttagatacatactttatttactactaggtggcaactacgtacaaggaacgttatatattttttggttttttttaaattttttatccatataaaaaattaaataggttaagtaggttaagtttttcattattgtttttaaattattactaatatgtaattataatctgagatgaagatttattagcaacttctccttgttttggttcttcaatagagtatacattaaattttttatatatttgagtgtttattttctcttcattagtataaatttatagtacccaacactttgttaacaattcattaaaaacactttcaatatatttagttctttctcttgataaaaaaaattataaatgttggtagtattgtcaattatttgaccatacattcttgcactaaatggatgcatcttaattgtaaatgtatttttatttgatataataatatgaatattatttataagttttattgtacatatttacataaaatattattttacaaattatgtaagtcttaagttctatttctttagataagatgtttaattattttaaaatattacataattaagattgttattctaattcttaaaatattagttatatgtaatttataatttaagatgaagatttagtaacttcctcttgttttacttcttcaatatagtatgcattgaaattcttgtatctttgagcatcttctcttgataagcataaatttatagtatccaacatttagttgtcaattcattagaaatacttttaatatatttagtcttttcgtgaaaaataaattataaaagttggtatgttagtctacaattattaattattttagtatatactaaataaataattatgtgtagattaaaatcatatctcttcagaatattctattatttttattgcctaacaatctcaaatttattctgtgttgtgaccaaacgtaattacagttacacttctagtgtcgtctttcatttcatcatatactcttgcactgaaaatataattatatttatatatattaaatatgtatatattataatatatatttgcgtatatataaatatatat

SEQ ID NO: 256823 - DNA, 1087 bp, Cannabis indica
agcttccaaccaaacaacttgattcgagggggaaggttaagtcgccaccatcttttccaccactcatttatttgatccatgttcgaacagcgggtaggactaaggtgtaattctcgagctaccctatatccacatttaaccacatactccccattggatgtgaaaggccatacgagtgagtcctccatatatatgttcacgggggtgcccaaaatccaagggacatcctcttgatgaaaataggtatggatagcctctttagtccattctccatcttcatttaaaagcttgtgaattgtagaattaggagcaagcctcgggttacgatatgaaattgttccattatgccaagggatccatttatcttcccaaatgcgagtatttcgaccattaccaattctccaacgtgccccctcttgaattatttgtcttccccaaactattcctttccatatgctagaagctccttgagggcatttggccgtgaggaagtttggctccgggtagtagtaactctttagcaccttagttaataaagtatgcggtttatgtattagacgccacccttgtttggctagcaaggcttggttgaactccatcaaactttggaatcctaacccctcttctttcggtctacacagtttatcccaagtactccaatgtatctttttattttcttttgtatcgccccaccaaaaattggccgctaaggaatggagactcttaaccaatttttttggaagcggaaacaactcatgaagtagcttgggatagcttgaattaccgctttaatgaggatttcttttccggcttgggagaacattgttgctttccaacttttgagtttatcccacactttgtctttaatcacctcgaacacctctttctttcttctacaaatgaaactaggcagccccaagtattttgtatgatgaggaactagttttactcccaaccgagaagcaaggtgttgacccatttgtgtagatatccggcttcccatacttacttccgattttgctaggttgacttgttgccccgagagtctagagtaacggtttaggatttgtagcaaggtatcacactc

SEQ ID NO: 256824 - DNA, 1074 bp, Cannabis indica
taatagtaactaatgaagtaacttaaatcgtaactaaaatctatatagtataactcatacacatagaaactaccgaacaactcaaaatgtaaatttaaagaaataaaaataatatataaaataattttcttttttttaatctaaattcgtaaggataagaactttagttatcttttttattctacttttggtgatactctttaagagtcccaatcagaaactctattataccatagccccataaaatttagatgtaactacaaaataataatttatatggtacaaatttaatttttaaatgtaattacttcgcaatgcagatagtagacttgtttttcaaattaaattgtaatttctgtaaccgtaccgtaagattaaataatgacaaaaattacactataaaaatatagtgtggtacagtgacggactcagaatttttattttgtaggagttaatttattattaaaaaatatttatatctatattataattactcttactaaatttatttaattttatggagactttttctactatcttaatctataattatgaaattaaaaaaattgcatttaattttttaaaagacagtatttttgttaatggggctataactcccacatcaatcaaagtgggtccgtccttggtgtggtacatacggtgtaatttgagcgatttacactattatcattattaaacattataataaaaattcaaaaatcaatcttataaaattttaacattaaaaaaaaaattaataatcattacatatctattctatataaagtgtgcctatataactgaaattcttggtttatgagaaattcatgggtgactttattatttttatttaataaaataataaaatattatttatatatcataaaataaaaataaaacaaatcctattaatatttgaactgatatttaacatatttcaactctatatataatcacaactataactctagaaattaaaaatatatataaaataaattgaaccttaaaccgcatatacaattagtttgttgagagagatcagaaaaagaacgaattatatatagaatttttttt

SEQ ID NO: 256825 - DNA, 1520 bp, Cannabis indica
atggatgaccaggagtacatcttccatctcatcaggaagagctagaccatcgtaatagagaagctagtgacatgataaggcagttcaatgaaagaactgtcgggaaaggtcaagatctgatgggagatcctctctaagggagactagtcgataaattgggcagggactacaaaaaaatattccaattaagttcttcaggaacaaggacgaactaccccctgcttgaaggtggacaagtcctgccacatagatctggtggcgggagtagccagaccctggcaaccaatggcatgggagtcggccagggatctcaagctcaacaacacccttacttttctgacctttggtctgccagccctttagtggtgcacccttggtcggccaacaaagcgagacccctctctggaacattcaagagaaagtcgttctaagacccatctttaactagcaaggtccaagaacaggtggaaacacccaagacaacatcaactcaataagtgagaaaaatcacttccggaagatagatccaccaaatcccaacaattggtgtgatataccccctatcgacacacagccagaccctccaattaggagggaacgggcggttagacattgcctagcatagagctagctagccatgtacaactgcccatggtagggctggctgaccttggttagcttcctaacccagggttggccggccaaagtcagatgtcaagcctaggacttgccagccttgaacataccctttcccaaggtatggtcagccaggtcttggccaatctagggttgcagcccaatcaagaaaggccaatcaaccaagctcttgccgtatcagatccttctatgcaagcacagttggattaaataagagacatgttaaaaggcttggctagcccgaaaccttaaaaccttgaattgaataggtcaaggggctcttaattctcaacatgcatcaatactttgcccttgcccaagttctgtcgggatggaaaatttataccaggaaagaaaaccctttggcacacatcaagtactttgagatgcaaactgatctccaaaaagttactggtgatttgcagtgtcgaatctttctagcaattttgttggaaagagctcaacaatggtatttcaagctggctccaagaagattcaattctcgaaatgaattttcccaagaattttacacacaattttcgtcctcaagactgataccatcgcagctggaagaccttgtcgagatcaaacaattataaggaaaacctttgaaggattatatccaaaagtttatggctgaggccaccaaggtcaagggcctaatagaagaaggccattatgcggccatactgggggcatccttcaattaagtgacttctagaaagatattcagtgggtctcaaccaacataatgaaggatttccttaaatgagcaaacgacttcataaagctggaggaagccgtcagacaagccgagatagggcaagtcaacattaggcagtctcaaggtgttgtacaagccc

SEQ ID NO: 256826 - DNA, 1303 bp, Cannabis indica
gcttcgttgtgcttcgaaatcacatattattactttgcttataagtgtttatgtgtattgacactgactcgtaggcaatctcaggtttggtgtatgtccaaccatgcatgtgtctcaattactacagacacaagtaaataataataataataataaattattacagctaaaacaatagttcatgaatttctttacatgtagctctatccattgaataaactcatcaatagaagccctaactattcatccataaatattatttttttaaaaatattatttattatatgtgtgtgatattattatatttatttaattttaaataaatataaaaaaaatagaaagacataaatattttaaataatataaagaaatagaaaaagttagatttccgtgaagtattattgaaatttttgtccttccgaaactttaatatgttctaaattgtgttttctgaacttttttaaatcgataaaaattctttaattttattaatatgatgattgtctaaataccaaatcatgtctcctaaattttaataagtactaaattgtaaatcgtattctttgaactttcatctatattagaaacaacctaaaaatatttaaaatcaacaccaaaattggctactaaagttataagctttttgggtttagctgggtattatcgtcgtatcgttgagggtttctcaaagattgttgtacccttaacggagctaactcgaaagaacttgaagtttgtttggactgatcggtgtgagaaaagttttctggagttaaagcagcgcttgattaccgctccaatgttaactcttccttcagataaggaaaagtttgttgtttattgtgatgcctcgagacagggtctcggctgtgctcttatgcaaactggaaaggtaatagcttatgcttctcggcagttaaaggagtacgagcggaggtaccctactcacgacttagaactcgcagtagtagtatttgcgttaaaagatttgatggcattacttatatggttctcggattaatgtcttgttggatccgtggctcccagttgatgataatccaaggataacttctattgatcctgctcttgttggtcaaaatgttaaagcgcttttggaaactgattcgctggcttgggatattgacttggtgcatgatttgtttaatgaaagttatgctaatttgattcttagcatttccttgtcttcaagtcgtttatgtgatgcttggtattggagttgggaaagctcgggctatttttcagtcaaatcagtttacaagttcttgcaagtgagcaaagaatt

SEQ ID NO: 256827 - DNA, 1747 bp, Cannabis indica
ttattttatcaatgaaaaaagtgtgagtttagtatatgtataaacaaaatgaaacattgtattttctgtgataaactgtaaatagtactacctgaagaacaaggaacaaagaccacgcaaaggttgcaagtacaaagagcgaacaaccaataaaccatgttttgttagaagagatatgaggttggtgtgcttgttgcggatgatgatactccatggggtgatggtggagaaatggattcaagtgagggcctttgtaaaaagtaagagtcacaacaccacccacgcaagccactagccctgcaatcttcactatccctgctgttgtctttagtgttacattctccatcctgtaaattaaatataaatattttgatgttttcctcaaataataatcttcatgttttgttgttcaagttacaatttaagatttatggatagtcattttcaacacactgatttgtacagctataataaaatcaacaaacaaaacaaatgttactttttgtccacggaacaagaaacagaagggtaaaagaatcaatgtgagaaatcaccacctgctttaatcgaagttatgaaagactgaaaaaaaatacaagttacgagaattcaatgcatcttttttacaaccttacaaaaaaaaaacaatgtttctttttataaaaatactctgtcttgatgtgaaatacaaaatgaagatatataacaaatgcaaactaataattaaatcgataaaagtaccgtaaaagaagagccaagcagaatgttgcaacaggaaggcagttcaatattgcagcacccaatgttgctgttgtgtaggcaatcgcaacattagaagcattaatgggaattgtcaccctgccatggaacatttgcaaaaaatatattggtatagttttaataaacttatgaggatagctactgatataaaataacttaatttcatgattatttaacatatagatatatgtaattatatgtatatactaacaaacataccccaacaaggcaagcatgaaaatcttgcagaaggttagaacggaaagtggtgttgcatttcttctgaaatccaatagaaagatattgtcatttataacatgccatgatcacaaaattgaattatcataagacaagagattatcaagaaagaggaaagtaataaattaattaaagaaaggggtcaccgtttaaaaatcaaagcaagaggaactaagacgacagttccaactagttgtcgatagaaagtgaagatgtagcagttcataccaccattaaagattgctttggtaagtaaaaccatgccagcatatattgcctgagatagtatcacagccaaataaaccttcactccccccatattttagtgatagtgatgagctatttttctttattttgtttttttacatttcctctacttcaaattcagattgaagaatggatactgaatatatgatgaaaatgttcatataaataatatattaatacgtccgtcataaaggaaaaagcaatttcagatgatagaagttgcgtttacaacaatttgtgttttgtatattaatatttaatttaagtaatactctatactaggggtaggggtgttcatccgatccaatcagaacttttttggtcaaacaatatccaatccgcactaagtgcggatttcatattttggatccaatctaatccgcataagagtttaaatccaatccaatccaatccgcaatagtgcggattggatcggttattt

SEQ ID NO: 256828 - DNA, 735 bp, Cannabis indica
atttttgtaaatagcccttatataatcgtaacctaaaagtcttaaagtgatgatcatgtgtataattttgttgtctggtttttggtaaatcttctaatcctgattagggttgttgggggagttgggtttataacttgtatagaattttaatatgttctaagcatatttaaagtttgattttcaaggtatttgaatgagctaatccaatatatcacttatataaccatatcaagtttgattttgaaagtcatttatttaagaaaatatgaagaaattaaagcataacatggaagagattaaagtttttatagttagtgcttaactacgttaaattttatttagtcatcaaaatatatacacaaatagtcttaaaattattacaatcatgcataatttaacggactatttacaaaaatataaaaaataagaaaagttttaatatatatcacatacaagaaataccataaaaaaccttaaaattttttatataaattttacttctatataatcaaaactagtttcttttcttgataaagaaactagtttagttgatgaaaaatccaatttcatgatgaaaaaactagtttcttgatgaaggattttaggtgagttttgctctaacggattgttgccggatgggtagatcgttgattgccgtttgtcaagtgtggagctagtgaacgaaggtggataggtgaaattgttgaagggtgtggtggaggtagagtttgacag

SEQ ID NO: 256829 - DNA, 1825 bp, Cannabis indica
ccaactagaactttacttgtatctttagccttagtgttctcatcacttcttatctccattgtgagacttgttgaaaccttgctactccttgtacttcttgcaatatctttcgaagtttttggaccttccacaatactttcgagtttccttctctttggatttgatcttgattgaaagtgatggtgtgtttactcttcaaagttaatttcttgggtgatctccctcttgccaaatacacttctttcttcttggatttcttttccaattgtaattcaaaatccttcgacttaagtgcagcaagaacatcttctaatgtaatcatatatttgccatatttgatggcagccttgccttcttggtatgtgattaggagctagcaatctcaataaaatgatggcctgactttcttcatcaactttatgatttatattagccaatcctacaataatctcattaaacctatcaatattatcatcaaaagaaagagaagaaatcattctataatcatataacctttctaagaaattaatcttactagcaactgatggcttcatatagaattcttcaagcttgttccaaattcctttagtcttctttttgtaacaagctttctcctcatactattggacatgtacatgatgatcgtgtaataagccatctcctcgatttctgctttctcttctgatttcttctcagccagtaacttctcatctccaagaacattggagaatttttagtaaacaagaattcctaattttgaactttctctccattgcgcaaagtcccctattccatcaaacttctctaatttgaatctccctattaacaacattaattatttccccaagaatagcaatagaaagaatctttattatgcgtcctcttgatcgattaccaaactctgatttgtgagaaaattataactattgtgcagaatcaaatcaactaaaacttaatcaacaaacaattaataatgacaagattaaaaattcacacagaataattgaagattaaaacagagatgaacaaagtatttaaacaagaaatcgtagagtaataaaacaataaaattaatacttagatatatatatatattggctcaagtcctatagattgatgtgatctatgactctactctagttctgaaataccactaaatcttctttattgattgagcaggaatagggtacaatacaatcgagattgattctctgttagattctctcaaagtgtttatctctcacactcttactctctatagaagattcttcatacaaaatcagaacccaatctctctcttttctgaatacctctctctctacctctcaatctttctctctcaagatcacctctcgaaactcgtctgatctcattttatcttaaaattataagtgtaggtggtattgtagattagggatacggatctcaaagttactggctgcaaatgttaagttgttaagttagttacaacttaacgaactcctcgtaacaatatcttcacgttagcataagataaagagctttgagtagaaatatacgcttcttggaagaaagactaaagcaaaccttgaagggacttcttggataggaaattaaggtgtcaactagatttgactattcgggactcccttcaagaagagaacaactagccatctgaaactcttttctggaggaagactagttttcctgaagactccttctgagtggacatgatagacttttgggaacgtccttttggatgacatctatcattccacgagacttcctccagatggacaagttagtcttccgggaatgcccttctggatgtcatctaactttctat

SEQ ID NO: 256830 - DNA, 1216 bp, Cannabis indica
gagccttaggcacaaaaatattttttttcttgggacttcttggacatatatatttcgtacttccaaaaattatcctccatggcttgcttagatatctcttcagcttctccagaaaacccaagtagatatctaagatggtctacctctacccctttggagatgtagtaatcagtgcaacacccaccaatcttggaaatcttcttgttggtggtaccagtcagccatgaaaactccagttgggaaaagtaaaaataattagaccaattatgatgtggatttgactcaaggttaaaaaactagttaaagtcatggggagaaggcatttcccatccctacttggcataaggcacgaacaatacgagtagatattttattccctttggacttttatttgagttaggcagatcccgtagtatttggccaccttctggaagtaagggtgaaggggcaacaaagcaccatcctcagcatgaggccccaaccaagcacaaatcccttcaccagggttgtgggccaactggtcctccatcaacaacaatgctacaatatatctaacccaacctttggcttagagaaggtttgaccttttgatggtgagcttggacagtggtgattcccaacgcgatagtggattcgacttgggaggcatcggttctaccgccaccaactcctcctagatgtaatcctcaccaaggacgagtagttggctggatgaaggagtgggtcgaccctccttgttgactccctcatagggaaattattcatcagcttcaaattccacctcttcctcaagaacctttgggtgttcatgttcctcctgctcctcatgctcctcaagctccacatatactgcagcttgcctaacaacaaccatgtatctagcaatgtaaggatcgtcgactaatactgcatggacaatttgctttgcacgggccactattagtttgacctctaaaatcgttctttgactatgacgagcaacagtgacgtctattttggccttcacagggattctcttcaaaggtcttggttgaccaacaggcagtgtgttctgcacgtctgtctagactttgtacatccaagagggtggatgaaattgcctttaacctctcttcaactcccacacaaaatgcacgtacacttttccatcgatctggtcggagtagtggtggtattgagtttcaacatctcatgaatcactactgacttcccactc

SEQ ID NO: 256831 - DNA, 1401 bp, Cannabis indica
actagcatactttacttatgtcctggaaagaacataatacttatctaagatgtaagtaagctttatccaaggtgtaagtaagatcttttgaagcataaccttccactgtgttgactgtaattgtgagtaactatatgttctggatttaacagaaattgtatattaaaccataaacatgaaacttacatgtaaacataaatgacctctaatcttctattgataacaaataagattgtattgaaatggattttatttaaagcatacaatccaaacacaagtaaccattaaaaaagcttcatcacacctatacacaactccaccatgaacaagagaccattttcttttcttcgcttctttattataattgttctcaagaacatcgatgaaaattatatttattgttgagtttatggatatatattttgtctcccataagccgctgttcataatcgttgacatagatttcacctagaaataattttttatattaatgaccacacactcttaagaatataattctggtgtgttggaaacaatcagtaaaatataaagtagatgtagccccattactatcgcgacatggaggtgaactactataaatcctggtgtcttccttagtttttcgcagtttttattttgcaaaagtctaattagcgtagtcctctaattttttacaatcttattagaatatttgacaaaaaactgcgtcaatagtttggtgatttcattaagagcgctacactgaaagattttgttatttttctctgaaaaatcaattaactcactattctcccaacaatggtgagtaccataagaacaaattttaaaggagatattgaagtaccaaggggtgaagttaatcaaccccttggtgaaggaaaatttgttccttcacaaccatgtggagaagaatcctcgcgacgccaagaaaagtgtcccatgccacctatggtagatgataagcgaaaaatccaagactgtgaaagtttctcatccgcatctaggatgcgtccactaattagatccatgcccgtgcatgaggtgtataccaagagaatgaggccctttgtgactaattggctgaaagtttatgtaacaacaaggagcttcaagagcaagctcaaaggcatggggtccaatctcctccattaatggagccatctcgccctataagaaagagaggttgcccctaaaagggtcatgaaaccctggataaccaaaagaggaccaacgaccaagaaaaccaattccatggggttcatggaaataccaattccctaagtagaggtgacaatcaacctttgccaaatattggcgtgtatgcatgcctaacataatcgttccactgatgcaccattatatggagatggtcatgacccaagtggaatccaaaccttaccc

SEQ ID NO: 256832 - DNA, 1401 bp, Cannabis indica
gttaaccaatcacagagttttgccgctaaaaaatactaaataccactagcgtccaattaaaatgctcatgaaatatattttgtgcatcaaaatattaaactcaagtcttaatctcatttaattaattaaagtacaatgaaagttactcacactatttttttttttattgaataaggaatcttgtattgctcaaactatcaatttacatcacaagttttgtaccaaatcggctaattactgctacttactgctataaatctaaacttcctacaaattcagcacccaattcttattaaatgattaatacgttttttaatctttattaaatgattacttctgctactaaacaaagtagtaaattagttggaacagactccaaactgaaacaataatcagggaataatgtagcaactatagcaaatcaatggaccactacataaactaatcgcttaacaaaggaaatataaacattatgcaaactagcaagcaaattcttacaatcttaaatgactagaccaaacaaagaaatcatacttaacgagccttgaattgcttgcaccacgctcaagcagtcgatttcgacatgtacattgctccaaccactgtctttaatccaactaagcacttctcgaacaccaattgcttcggccacaatcagttccaccataccagaaaggagtttagttcgaccctgtattagtaaacccgaggcatcacatgtaaccatacccaaaccatagctttctatattattaaacaacgttgcatctacattgaccttgatagtattaccacacggtacagtccaatgcttaggtacatcttcagcccgtaagaaaggccatgatgattccacctcggaactttgagcacttctccattgttcaaggtaacgattagcaaacacaataatgttatcttcctttacctcgttccccttccaaactaagtcattttttgcaccccatatggcccaacaagttgcagcaattatgcacattagatcagtggaagctttgtgaaaaccaccacacaccagtcgaagaacgattgcccaactcgtactaccgtgcttattccggccctattccagtagtttttaatcacacgacaggtaacaagagcgtgtaggattgattcttcttcgtcatggcagaggggacacataggactaacatcaacatgtttggttcgtagctaaaccatagttggaagatctgtacaggcacaccacatcagattctgaatcttagaagataattttaaaccccatagaatgtgtcggaagtgcgagtcactatcaccatattgttaggctatttttagcctatgttttggatctaatttatgtgcgttttgcgctgtgttgggacggaattacgcttgttttctatgttttca

SEQ ID NO: 256833 - DNA, 873 bp, Cannabis indica
aaaaaaataagttgcaatcccctaaccaatataaatatattattattacttattattaaaagaatataaattaaaactttcataattaagaaataaatcaaaataatgaaactcctaactcctaagctagtcgaaaacatcgaaatgaaactctagccaaggcgctcacaaaattagacctcaacctgagcggaccggatccccttttctgctcatcaaatacaaccgacttatcttcgccgcttaggggggcgatcgtcgagacttttccgctgcgactctgccttttcctcatctcagtcagctccatcttgggcggaatcttagtcaatccaaagaaaacgttcctagaccaacttctaccactattattactaaccaacttatcagactgacaagaccgggatttctcggttcccggtaacctaagggagctacaacgacgtggactagtcttagtcgttgtagtagaacggactttattgttgaagcgacaggaatgaaacgacgtcgttttttgaggaaggggaattatgggttttgaagatgatctacaaggaatagatttcccacaaaagagaacagacgcgtcgtcatcagatgaaaatgtttgatcaagatcaagagagtctaatgaggattcagtggtggttctagagaattcgaaatcatcctccgaatcagaagaattttctttgtttgatgaaacgatgttagcttcgtcgtcgctgttgcctagtgagaggttacagagagaaagagcatcgtcgtcgtcttctaatgaatcttcatcattgtcggaataataataataataatcaaaatgaccatcattgaccagaacctctcgtagggttttatcgattttcatgt

SEQ ID NO: 256834 - DNA, 806 bp, Cannabis indica
cttatctttcgatctcacaccaccaaagttgatctacctgatgcctaattgttcaaaagtttccttgagtaataaattttacaatctagataatagccctaattataatcacataaagcaaaaccatatataaatcatactcatgacaacaattaaacaaggtaaaattatattggactaaactaaactttacatcgaatcataaaatcaaagtcataattataaatccatgtaaaccctaataactaagaaaattagccacacatagtatggtttatcatctcaaaatattatttataatctaaataataactaagaaataaagttgaaagaagaagaacatatgaaaactcttgaatgcaggttcaaattacttatttgagctctcaatatatattccttctctaaaagtgtgtttctctatcgttgtatatcattctggtcatttttaggatgttttataggtcaaaaatcgactcctagttgaatcaggttctaaaacatgtttaaaatattcatttgtacaatgggttgccacattagaggcgatgggtcgccactttatgaatatttgactactttcgaccttgctctgtaaaacatgcatagtttttgcgtccaaactccaaatgagatgatttaacatgttttgaaaaattgggaataaactctatcatgttgggttttataagctcttcaagaaaatgatgggaacatggtcaaaattagtttaacgagtttgagccatgtgcaatctctacatctcggtcggaataacagtagtcatatctttactgatatcagta

SEQ ID NO: 256835 - DNA, 936 bp, Cannabis indica
attatgtgtcactactttatatgttgaagttgacagcatttgcttttataattcaaagttataattcagtgcagatagtatctcaagtaatattcacttgaaagtgaacggtttgatgatactaaaccttgtaagaaccttaagtttacagttagggacgatggttgattgtttcaactaaatgctatcttacaagttcttttttgacttaattttttttttttttttggttttctagaaaattttatcaactagaggaccttgttcacccacttttatcaccacttttccaaatcaaagttaattttacctactttcaatattctattttctgaattataatgtttttcatacaataatgttagatattgttttagatggcttggattagcttattatggtttcttttattaattttgctactagactaagcaaaatcaacttaaatttggtttaaccttttatattctcttacaacttagtagccaatattatgttccttttctttggagttttcatgaatgaaggtgaaaatattgttgtttttgtcgattgttgcttgcgacttgcgagtggcggacatggtgctggttttatattgataaaagaatatgaagatgagtttagtaaaggttcaactaaaagaaagcccaaaaagggtatctagctttgtgcaaataagtgaagatacacatatttgacccactagacatatataaagttgttagtttgtttataagttgtgtctaaaatatgtaacttgaagataatagaggtttagatatggtgtgtaaatcataaattctcatattctagtatttcacattattctcaaactttgtgattaattattcaaaaatatattttaaaagaggtgaaagtttaaattttataaaataatatatttttattgtaaatattataattaaatggttt

SEQ ID NO: 256836 - DNA, 1398 bp, Cannabis indica
gtatttaactacaatccttgtaggatcgactttgtgagtctataacttgataacggtatcggtacgtatacttgtatgttgaaaataccacaacaaaggtgtgtgagagggataattaatttgaaattcttttttttttgggttttcccccaaaatggaatgttagcactcattacaaatagtacagacatcacgcatgaggtatcatgtaaccgtcagtccgtaatttgaggtacaactttcaaagtagcattaaatgtccaagacattgaagagacgttcgatcaagtcacgccagatcaaagacaagaatcgaacacacgttacccatccagaaagcttcgtggccgaggaagtccacgtgcgaccaaatagattccatgcagacttggggacaaatgttatccaaatttctgcactatgacgtggcatccatctaggtgacacgtagaacatatttcataatctgggcagataattctactcctagtaagtcgtacaggaaggattgattttcaagctcacagacagaagttgtgatatccaaacacagtatgcatatatatatccgaccagattccaccacgaatgttgttcgcatgcaccgaccaacgggtgtgagttagcaatttcagagatatatccaatgcatctccaagcttgcaagtcacggtataatccatgcattcatgggatagattcgtgtcttctaagaattaagacaatgagcttaagcttcccactttctttattgtaattatggaaattaaattagtttcccattttatttcttaatgatttagaaaaatcaatttcatgtaattaatccctataaatagtggactcatctcactatttagagggacaaattttatttagtgagaaaacactcaaaaaagagtaaattactcaaaaattattgtaagagctttcaagagagatcaaaccattattgctcactcttttcacaagtcaatacaacaaataggggagtaagctattaccaactataaggggctgaacctctataaaatctagtatgttctttactttttattattatattctgttatttaattattttcaatcattttaatttggctcactatcattggctaaaagcgaggtcaacaatgtatcttgtagtttttttggaccatttatatatttacagaaaatgttgaataatgttcactgcaaaaaaataaagtttaattgattaccactcgtataagaaaaaacaatcacacatgtaataaaatatttaaactttatttttgtcacagtaaactattcgaaatttagtttatttttttaatgatagtgtacgttttagttatttataattatttgtaaatctaaaaatatacaaatgattttaaataactacaatataca

SEQ ID NO: 256837 - DNA, 1359 bp, Cannabis indica
aaattaatttatatgggtcaaccaagctacatatgcttttagtttatataaaaattgatcaatgttttttgatatatttatatttatcatgttaatttaatatgataattaacatatcatataaatataaaataaattaacaatatcctagaataataaaaagtttgatattaaaatttgacatgaagatataaaatgaacagtaaaagtaattacaattacaatttaataaaatgatataaattatttttaatcattaagtaagtaattttaattttaggtatactataaaacatttctcctcaattttctcacaaagttttgaaagaagaaatttggcgagtccactaattttttttccactcatttttctctttcactttattttctttctaccaaacataaaacttcttcttcttctcttcacttgtctctacaaagttttctttctctccattttttcttctttaccaaaacatgtaggattagtcaactctctaacatcatcccctctaatcatttttcattcttcaaatataacatgttggttaaaatttataaaagttatatattatccaacttattgagctccaagctcatcttaactctcacatggtatgatattttttactttgagcctatagcttgcacgaagttatttttgagcaccttcccaaaaatctcatactaatagaataggtggaatgtatattcaaggcaattcttacctatttctttcatgtgggacatgagttgatactccaacagttcttctcttaaattaaggacctcgtactcttagactttccctccaaatcttgtactactactaccaccaataaaacttgccacctaactatcaacattgttaggaagactttcgacacaaacatagaactctatttagtttcgctgtaatcaccaaataaacacactgcctgaccgctataaattagaatttcgatacaagagaccatacagatcttcaatcgtaagttcatactgagggcttctcccactcaacgcaaatgtagtacactatcccaactcttgaaatggctttgatactaccacttgttgggccacgttcattcaacttgtcagatcagcaagctcaccttaactcctacattagtatgatattgtctactttgggtctagcctacacggatttatttttgagcatcttttcaaatgacctgatactaatgaactttatgtgaaatacttatatttaagacaattcttatcttgatgtgtgggacttgggttgatgacccaataaaaatctataatgaaatatagttgttgaggacttatagatttatcatttataaggtgtagagagagagagagaga

SEQ ID NO: 256838 - DNA, 1370 bp, Cannabis indica
cattctcttgctcaacactgaacgaacgaggaaagcattagaaaggatactccaccaaagcatcttataacgttcaagaattctactatcccatagcctattccaaaaaaaaaggagatcacacggagggactctttgaagagcttggactaaatacgtcgacttattggaaaatcgaccattgggctccttagtccagacccaatagtcacgacacgaccttggcccgagagtttaccccttttaagatagcaacaattatttcttggtgaaaaagatagactaatttctgaagatcccaatttctattttcagtccaaaaatagctactttgttatcccttgaattgacacccaattgggtttcgagaaaaaatcagttccacaagtcaccctcatattatatccattaataaaaaattcttttattatattttattaaaatatacctacttttatgagtagcttgtctagtatatccctactctttatttaagtctagcatataatttatattaacctaaagggaacatcatttataaaaggtctaatgggaacattatttataaagtgtgtattccttgtaaagttccaactatcatccttacactcattacaataaactttcttaacaaaaaaaactagcaatagtagtcatcattataagaaattatgtattattatcaaaatattatagatatttagctaaattaaaacatgcttggtttatatcatgttgaacactcaaaataactcatctaatcgatgtgggactaagaaaagagaattaaaagactagcatgttacctattttgtaaaactaaaaaaatgtagtaaaagactttttttttggtaaggtttatgtaatgttaattatttaatgactacatcttaagataatcttttcattattatcataaatttaagtattgtggaaatggacaaagttcatatgaatcaattttttttttttttgtttaatataacaaaaatatatgtatccggtcaatattaaacaagcaaataaaaaagaggaaattacacttagtatgggattttaaaagttcttatgataaatatggcacatttaagtttggccaatttatatggtatttttttatttttaggtttttttatggtatttgatatgccatatatatgtaattaggtttctaaatcccatatttaatgtttttatttgtttaggaatttttatttgtcattgatgccggaaaagtcaccggagtttgctgccggtgccggaaaagtcaccggagtagcggtcggtgccggaaaattcgtcggagttgctgccggcgccggaaaattcgtcggagttggcatttttgccggaaaaatcactaaaaaacg

SEQ ID NO: 256839 - DNA, 1014 bp, Cannabis indica
aagttgacgataacactcttcttcatcaatatatatactataatgtattcggacgggtcttggagaaacttaaagaattaataaaagagaaaataataaataaacaaaccaattcgttaaagagttgtacaaaaactcatataaataattaaatcaaaacaattcccacaagtaatttgttgatcaaatttttaatttgactgacaattttcaactttaaattctttccctttacataaatttataatttacttcctttaacaatgaaatattatattttttttaaggcattgaaaaaaaaaattccaacaaccactgcattctatacaaacaagctacctaaacaacataaaataaataaaaagaattgatcaaagtaattacatctttctcctttttattatgattagagaaacaactctctttcgctcttgcttttaaaagccacttaaacactaaaactaatggccttaatagcattacaagcactaatacaaaaagtattgttcccataaaacaaaccaacaccaaaaccatcaagccctcttcttttaaccgaattgataataaacatggcagatttaacatcattcttggtgaacggtctaaaaagattcagttgctggttgatatttgttgtgaaaacaacacctcagcaagaacaataaaagacaagaataaacaatgaaaccagttagaaattagcgaggaatgacaccaatcaataacagtgacacaaacatgtataaaaaacaatattgaacacatgaacttaatgagaggttcgaacaaggtaacaatgcatcaccttgcctacactcccggccagaaaacagccacagtagggctgagagatatctttatttactgatgaaaagaagagattacagtgttcaaattacacaactcgagaagcttaattctggtacaaaacagctatactagtggtgatgatgattcaagttacatcataccattacaatctcaagaacactcacaactctctctctctct

SEQ ID NO: 256840 - DNA, 1197 bp, Cannabis indica
ccttaaactctttactttgcaagtttgattacttgttatacattattgtttgccatattacttgcatttatttgattaagtatttagttgcatagttttgtgttaaaagttttaatttaacgaaattagcttaaatttccaattcagctcccctctcttgaaaacatattttgggctaacaaaaccaacatgttccacttgagtggactcgaagggtcgatccactagtggtttctgagagtcagtccacttgagtggagttcgagagttggttaactcgacgggacccggggaccttcgtcatgggactcgaggaacttggtcatatccaaggaacttcatcatgggacccagtcacctgagaaccttcgtcatatgaacatggggacccttggtcataagacccgaggattagcttcaatgacctccatgtcttttttgtgatctcttttgatatcttaaagaaaaatgcatgtacatatttatgttaaatttattgagggaaaacaaatggtataatagtgttcaatattgttataaagtgttatattgtgagttgattgaatctgaaatattttacttttacaagtattatagatctaatattgctaataaccaataataaattatgatctcttgatcgtattgatcactatactataatacgtaacaataatactctgatatattaaactaattaatcatattcataggaaattgcaccttatatcctttttatattgtcctcttttatttttacttttttttttaaattctatcatttttacttcttttttaaatattgtaccaattttattacggtcacttcaagatattctccatgtgactctcttatgtcagaacattttaggtacaatacatatgaaaagaagtatgctttaattaaatataaaattaaagatcaatttgatcaattgattaataaaaaaagtaagtagtatttttcaacttaccccataaataaatattaatttttttcgttaatttctgctataaacaattataaaagtttttataattatagtatcgcttgatatatatggagatctataacataaaacagcagtatctaataaatgggcatcttaattcatgtatcgtggcagtagacattaatagaagaatgaagaatttctccattatataaacatcgagctagttaacaataataaaata

SEQ ID NO: 256841 - DNA, 1947 bp, Cannabis indica
gtgaaattacatgtaaatatgtaatcacaacagaagcaataatactctgatttgcaggtccaaccaaccataaatgagtagtggaattaatgcttctaattggatgagtgaacaatgcaacaactcagtagtcaccaccaaataaacacatagatttgcttactttagtttgagtgtggtgtgtgtgtgtgtgattgtgaataataatagtagaagtgattagagtagtgttgtgagatttgggttttgattgtagaagaggccgacatgacaccattgttaatgtttttctacttgtgatgagacttaagctgtgcgtaaagtaaaagggtgtcgcctctcttaatttgcttatcgttgcttgtcactcttattgtaatgtaaccaaagaccaagaaagtgatagaataatcctagagtagaaatattctataattatttccgaattcctctaatgatcttattttgaaaaaagccacgaagttacaatattgggctttcgagaggctcatctcttcgagtctactcttatctaattccaagctaatctagatgaggttgctccctctctatttataagcatgagtttcaaaaagacttaggctatgtacgttagagactaaatatttcatttcaatcattttgtgatacacaagataagtcttaggcttatcaggaagtttgagtgcggtgtgtgattttgaataatgataataattagctatagagtgagtgattagagttactgttgtaagaaatctctccttaatataaataaatcttggtcacatgtcaatggtactgcattaagtctttcttttgcaatattaatctttgaagagtattctgcatttatacatgtcattttatgattaacttccaatttatgattgaagctttggtatgcacttgctaaaatactactgcttagaatgtgtttttgtggatttttatctttaaataaaagactaatgattatgtagttaaagaccacatattaatggtgctccaagttctattttgctacgcaaatatttcactcttaattacattaatcctttctgaggtgtcactcactgtgtagcactaaatatgcatgtaattttaattaaagatttactttacaaaaagaaggattccaatgaattattgctttgatgaataatgatattacaatcaatgaattgttctgcttttactattatatatatatataacaacagtaaaattgtgataacgtaggtcccatatatgatagtttgacccttcttctttttttatatattttttttctatttgtatttgtatttgtattttatattttggtatgttctgatgcaaacacaacacaagctattaattattgtgtttttgcaggatccaagtccaacaatcaatgagtagtggaatgaatgcttctaaatgatttcgattgagttgaagaatgcaagaagtcagctaccaccaaataaacacttatgatgacttaatttgcttatatttagtttgagtgttgtgtgtgattttgaataataatagctatactatagagtgagtgattagactactattgtgaaattgtagaagaggttgacaccattgttaatgttctgtatgtactgccattttctcagattagtgtagagcacaaacaaccattactacctttgtttgtctctccttaatataaatcatggtctccattttctcttattcttactttcttttgaaaattttgtccatacaattgcttggaattgactagtttgtgtccataaatattgtaacaagagcaactgaagttgagtatgacttacaaggttgtggaaagatattgaggaaccagatattcgtgagtaccatagtttggttaaggggttttgtgagattgaaaagagcaagttttatcattaagtatttaaattatgcatatacatatataatgtt

SEQ ID NO: 256842 - DNA, 1643 bp, Cannabis indica
ccaccatcactcttgtctttttattttgttctttttgggctgcgatctcagcttcatgatcagcagccttttgccttaagagcagcacctctgtgtaactatcttcgtcgtaggcatcatactcgtcaaagttttcctcgtacttttcatcgttggcctcctctcgttcctcagagtcaacgttgactcttgaggccacttcctcgtcttcaggattttaagcgtcttgaggaggatagggttgacgtgtgttgcgagtttctaccattgttgctttggtttataagttagttgtctatttgaagacgcttcctttagctctcaatgaaagcaccaaaatgttgaccgaggttttcggcaaccaattaaataatatatataagaaagttgtagaaagtttaatgcatgtaatttttacgtggttggggcattaacgagccttactccacgagtctttgttatttatgagagtatttattacagagaatgttcttggtgaatctctctcctattttctccctttgattcctatgaacccagaattctcgagccttgtttcagtgtatttgtggggtatttatagtgtttttctggggaggtccctcttctgtacagagatagttcacgacgggatcccaacaaaagatgcgaataccacaatgacattggacacagtgcaatgagtgcaaaaatctgatagatgaaattggaaacttgatctgactgggtcacctctatgagtgaatcaagaaccggctgccccatctcaacccggttctggcagggggcccattgccccaagagacattaggaagtgtacccgaagcgttggccccagctgcgccctcaggagtaccaatccctcagcaaacccctggccggccaccaagacccaacggaagagtggccatgatctctggtgagccccatattaggaggaccactcgaaaataattaaagcgctatgccggacccattaaacatgacgaagtatgtgaagtcactcagctcccagctcaaaggccccgactcatggatcagccaattactttcacggaagaagaggcaagactggtgcatttccctcaccatgaccccctggtcatggagactcccattgcgaataagatcgtggctagaatattgatagacaatgggagttccgtgaatttgttgtttaaagaagccttcactggaataggcctcacagatcgtgatctatcaccgagcgattcccagctaacgagattcaatggaaccatgcttatcccaatgggaaaagtgaggttgcctgtcacattgtgccaggatacaccctagagtactttcaagtactgcacatttgtggtagtggatttcccaacggcctataatgcgatccttggtcggccggccctggtagattttggcgtagttacatccactcggcatctgtgcttgaaattccccacccaggaggctggagtggggaccgtgaggggtaaataaggtgaggccagacagtgttataatgtcgcggcccacttaccagtgttaatggtccgtgagaatattgagccagagttggcagaagaagatgagttggatccccgtgtgggatccaaaaaaattgtagaccctatggaagacgtcgaggaaatacc

SEQ ID NO: 256843 - DNA, 1509 bp, Cannabis indica
tgtgtgggctactgcaattgctattgtcgagcaatggtaggtgaattttttttttattttatttttataatttttctataaaaatgtattaatataatatttaaaatactaaaagtaatttaataatatattaaataatagagtgtgagtctattcttatgacttttaaaattgcttagcattagagtaaaataatcaaaaataatgtgaatgatagaaaaaataaaatacaatattttaagatgatgtaaaaattgttagttattttttagaatgcttgcattggagttgctctaataggtgaggagcgctccctctatttctattcgcattaactattttaatactcatccttatatattctctatcgggaaaggggcaatgaattcctattgggatagtacgggagacccatttatttagataaaataaaattataaataaaaaagataaattatataacacttgaaattttttatagatgttaataatttaaaatatacaatattaactaaaacgaaaatatttaaaaaatttactaataaattacaaaaatatataaaaatatacatgtaatagtaaaaataataataatataaaataagtataaagttaaacgggttcccgctccgtttattatatggagataaaaattgtcccatctttactccattccccatttaagcggaaaattcctatcagggttaaatttccacccccacctcgcccaatatttacatccgcccctaattaagtggcataagtttagacttattttgagtaactaagcatcccaaagtctattatttgtggatgaaatggtcccactagatctgtttgacataaactcaagtgacataaattgcaaaatatgagctaatatatgtttgaaaaatggaaactaagcaataagaattttgtgaacgacaagaaacagaataactaataactatactttcataacgttaggcacaaaaaaaaaaacatcatcaaacatagtggtttactatccacaatgcgaagaatttttctagtggcaagagatagttgaggttgaggctctcagtttttagaatcaactacgctattcaattctttatcaaaaacaaaaactaggctatttaattacacatacatgctggtgtcccatatttaaactgatgttttgtactactttgcatacttacctcatccttagagttgttatttttcatgttaggaaaaataacaactgatgttttataacaacaattaggggtgttcgcagtgcgggtggtgcggtttttgaccatttttttcaaaccaacccgcacatgcagtttttccaatttctcaaaccgcacccgcaccacgaaactaaaaaatgcgaaaatcgcatcgcaaaaaatggaacggtgcggtgtggtttttgcagtttctgcggtttggactattaccaaataaccaaactatcacaaatacaataaaactttagcaacacttgtccaaaatactataagacttgacaat

SEQ ID NO: 256844 - DNA, 962 bp, Cannabis indica
tttttttttattatttttacagatacggtcttgtctcccccttcttctccaatatctatataaactattctctctcttctgtaaaatattatgtctttttcaaaccactccctttcctccctttttttttttctctgtctctgtattagttttttctactctctcaactcagctagctcacattttgacaaaaatggtggaacttcattttctctcttggccaaagaaaaaaaaaagattgaagcttttgaaagaaagaaagaaaaagatgaagatttaactaaaaaacaaataatgggtcatcttgactttaaataaataaattaataattaaatttaaataattgtctagttttattatcaatgagtggaataatcacaattagttactttccatattttcaatttttttttaagataaatggaatttccattaattggaataatcacaattagttttttttggtgaaagaataatcacaattagttactttccatattttcatattccttggagtttatttattttacttttttactttaaaaaaaagaaggaaaattacatttataagatcttttgatatttatatcaaaaagggaaattaatgaaaacaattaattttttcctcaaaaaattaaacaaacaaaaaaaaaaaaaaatctagtgttacactatcttatatttcctcaaaggaatttctaaagaacttgagaaatttctctttttttatcaattaattaaaaatattatcatattaaatttcattaaaatatactaaaatgtccaatatagcttcaccatccacttaacacataatttacattaatctaagaggtataatggagatatcatctattaaagtagatatatcttaaaatatgaaaataaagtaaaaattaaaacaagtaaaataaaatagatatacaatgtaatttcttcaatttctaaattaggaaatgtg

SEQ ID NO: 256845 - DNA, 1115 bp, Cannabis indica
catgaacaaatgtatatatatatatgttctgaacttaatggaatttatacattaaatataattatgtaaataaaaatatcaattcacaaatacttttaataaatcacacaaaacaccatgttagaatcaaagtttgagttcaaagcccatttttcccaaattcaattcaataaccaacaaatcatacctaaacaaacctaactataatttagatacgttctgaaccttaacaacttatacaaactcgaaatcatcaatcaaactctaacttaaaattacacttaaaacttaagaaaattcaatagtaaagtgtgaaaacttaccccaacacttagacaacttcaaaacctagacaattcttcccaaaattgagggattagctgaagaaaaaatccttgatggtggctggttcctagggttcaaacaagagggaagaaagaagaaggaggttgataatgaacttagttttttttctaggttaatcttaatctttttttcttaaaaaaaataataataacttaaataatctaatactcatatcagccaaaagcccgtaggacaaaatagaaatcctatccttaaaaatgaccattttgcccctaaaaaattcttaaacctaaaatcaaacctaggggtattttggtaattctaactaatccgccaaaccgacaacctaacaccctaaactagtctggtataattctaattcgattcatcctttcttgtcgtgatatttctgaccactccatcaagtttaatggtcgtcgggctcaaaaacattttatctcataaatagtgtttattgttcccacattatccaagaaaatcttcgtaattaataaattatgttttattaatcacccatcaaattttcactaattatcacacaattagtttaagtaagatcataatcttactccattatcaatatcatcacatatttaataaaatatgcccaattaattatcataataatttctgggttactacacctttggctgattatccttaataattttatgttaagaattaataaaaattcattattcattttaattaattagaaattatacaaaaaaacaagcttatccctgaagctctctctctctttctct

SEQ ID NO: 256846 - DNA, 1641 bp, Cannabis indica
cttggttgatagacttggatctgttggtcatcctctcaccccaaaagaacacattacttcgatcttcagtggtcttttctcaaattatgataccttaataatttctatcaactcccatcgtgaggagtatattgtggttgagatcgagtcatttttaatggctcaagaacatcgtatagaaaagcactctactgagctaaattctaatctcgctgttaatttagatcataatagaggaactttcatgatcagatctagctactctaatcagttagctagaaatttcaacaataattcctctgcgtcaatcgtggtttcttacccctagcgccttcacatgctccttcttggcatccatatgctacaggtaattgtggaggttctcaatataattctggaacctcttaaggttcattctctagttaggctagcttttgtcctcctccaacatatcaactaagtggaagagttaaacatatctcatttaagtgcagggaagcctgacaaaggatttaccccaatgcaagctataattacttcttctggcactattaatgaaactttctggtatcgtgactcagtgacacaaatcattgcacctccaatgatcataacctaatgcaaaaaccaacaatactttggcacagataagatctatgttggtgattgagctggactcgcaatccaaaatattggtaagtcattctttcaaccatatcctaattctaaagttcttattcttaattaactccttcctatcttataaataactcataatctcattatggtttcgcactttgctcatgataatcaagttttctttgaattccatcatgatatttgccttgttgaggattatgtttctccaaccacattctgatggagggcaagctccataatgatttgtattccttctcattagaatctcttccaatcgtttagtaagcttcttcctcaaagtcatctgttctacacaactccattgtagctataccaatttcatctaattgtagtcttgctactgctgttaagatactatgcccgaaataaaactcaattttattgtaattttatttactttcaatatagattagaaatcatatcttgaccttatcatatgctttgttcacaagttttatacatgattatatgtttaatatataagttttgttaaatcttgaacatatagttgttcacaaattacaatgatgtcattacagtgttcgattttatggttcatatcagagttagaaaagcaaaagcaaacttgataaaaaatagtttttacccaatatgaaccataagcccaaagatctcaatataatatatacttttatatagattaaatctagactaataaaaagaaggtaatacctcttgtagtctatcaagagatcctcgatatcttttagtataataaacgatcatccaatccaagaactattgctgaagaattcacatcgagacctcccaaaagactggagatgcctgcttggtgaacctttcatagtggttccatctggtccactgcagcaattggccttgcctgcacagcaggggcagtagccacctgttgggattttatgccctaaataaaacacatttcaatataattttctttgttatcaatagaaaattaga

SEQ ID NO: 256847 - DNA, 1565 bp, Cannabis indica
aaaatagtcaaaaaccgtaccactcgcattacgaatacccataatagtaatatcattatgagatgagttataaatgacaaaaataattaataattatggtaatgagagaataattaattgcatgtcataaaaaatatgaaagtaaaacaaattaaaaagcactatatcaaaaaataagaacgaaagtatagaacataaccgacactataactaacacttgcataataataatttttttttttataaaaataaaagaaataagtgaaagaaataaataaggttcataagggtaaatctaactaagtaaataagagttgaccgatgatcatattgaagggaagatataagagtataaatataaataagtaagtgatagcatataaaatataaggaaattattgtcattaaaattatcacacaaacactacacttttataatagcaacatatataaatgtatgattatttttaattctcgaaatttgattgtaggcatctaaacctttttttttaaatggaaatttaattggttatatagctagaaatgaataaatactaagattatttttaaagaacacagaaaattaaaaatttaaatcaatgctctcaaaaaaaaaataaaaataaatcaatgttgtttacaccgaaagtattcttgatgacgtggacatcaatatttgacatgtagcaagaaatatgatatctcagagttgagtagtcccgagccatagcaagtcgacctgagaggggtccctagccctgcgtccaggttgacttcgagaactccgggatggaagttcagacttcataacttgtttccaactcactatctttcagtattctgcaccatgtagatacgtagcaatcaaatccaagccccaagagtcggaattacacgaatctgtaacctggaagccaacctgggcacctagggtttcacccagcgccaaggttgacattcccgactagggttacaattttcgggaccatcttagttcaaatgagtcaaaacttgcattgaaacaccgactagacataccacagacatatttgagacatcaaaatcagaattagagcaagttcatttttaagcacccatggccctaggcccccgagcaccctaacgcctaagttgacaatttgtcaatttgggtgccttccaagtatcaaagtgacgatcaatggacatcttcttcatcttcatcaaaaacagagaaataagtcttttcggggaagaaacaacacttctttggtgccaaagtaaggcccagtgccggggttggcccaacactcagagtcaacctgagccaatcccaatgaatttttctgagaaatcctctaagcatcttcttcgttttcaaaaaagattgagattcaactatttccggtaaccaaatgaaatttctgaaaggccataatagggacccaacgcccaggttgacatgttgtcaacatgggctgtttccaatcaagttcacgaaaaagtattccaagcattttttttttctgttattagaaataataaagattcaagaaaactcggggagaaaatcacaaacccgagcc

SEQ ID NO: 256848 - DNA, 1067 bp, Cannabis indica
tttttaaaatttctatgcttgaaataatacgttggaaatacttttaaatttttttcatagcaatattcgtatagttaaatatcatacccttaaactttaaaaaaaattctgaataatttacaagtgtgaaaatagaatttctaatctttcagtctacttgcgtgttcaaaaaactttaaacttattttcaacattataaactatttaaaattttcaaaaatttacagagatgatgtagtaattataacgaatactatcatgaagaagatttcgagaaaaaaaaatattcctgcatgtgtttttaggtacatatattaactaaaaaattgcaataaaaagttgacgataacacttttatataatattcatgaataatattgtatgcaatttaaatgcatgtttattattactctacatatattctgacttttaaaaggaatttttacacaaatttttgctttataaaaaaaactaattgtattttaatcaaaaaaaaaaaattaaaattcttaaaaatgttaaaaagaattttagatccctattttttaattcttctttatcattgtgaagtatacataaaaataaatattttaaaaactcatagaaaaaacaacattgtagcttcttgaaaatcttaaagtgcaaaatcaaaggcatggccaaccaaaaccttcaccttatccaaaacttaagatatttaaactttttaaaaagggtaaatatttatttttcttgtggaactataaatttagtataattttctctcaaatttgtgtaaccaaaattcccactaattttcttttgtttggctaaaattttcttataaccattgcaattactacaaaaacacattttgatcaaacaaaatacgattataattcactaacacaaagagtttatttaacaaataaaaattatacatattttaaaaagaagcacgctcgtaataatttttacaattcaaggagaatttaactgagaatttaaccattcggggttaaattttaattacaccgaaaaagttctagatacaaactctacaaaactcataattcaagaaagtaaaa

SEQ ID NO: 256849 - DNA, 1342 bp, Cannabis indica
cctacaccgagaataatcttgagcagaaggaacacgatgaaccgttaagggagacttaacggatttggatgtactggcatcaggagccccagtgttggggacagggagaagcatcttaggccgagaaggtgccagttctttcccagcttctatccgcagggtcctcccagcagcagcctgagccttgatgtaggctaactcttgttccctcctaaagagggtacttttggtactggtcctctgccgaggcaatgatgtccggccggagtgccttctcagcgtccagggtaagaatgtttgggcagaggaccttggagaggttgaagtcgtccacggattggctcccttagatgagcttggcctttcggcagtttttcgttgtgaccaagtcccccacgttaagaccatttctgtcataagtggagaaaaccttagcatgctggaggaaaatctgggtaggagtagtgtgatgtagtggagggatcctgacccactccgtgagaagctctgggcaatccacagcttggaagccggaagagaagaagaagcggtggcggtactccttaacattctttagaaaataataagggatcgggccgtcgttagtaggatgggcccagagagtgaaaaagccgtctttaaacttgtcccccttcttggggacagatagaacttcataaaagtataaaatctctgccgggctaggtgaagcccaccttcgggctacataaaaaataaataagcttgagagcaggcagtaagcttgaggaataagttggtaaggtgcaaggccgacaaaaacaaggaaatttataaaataatcttgaagggggagcatggcctcagagatgagatgcgtctggctctaggctccaaaacccccgtagttgtgattgggcgtctcttcgtcccgatgcaagcgatgatagaccccaaacacggactgcttaatgccagctacggtcacaattttctccaattggtgggcgcaagtcagggtggagcgaagctcgtccgcctcccaaccgttagaacggcacgtgtaattctcctgggcaactgggcccttcacaacttccttcagggtggccaaagtaaccgcccccttccgagaagatatggttccagacgcaggggtagacatttttgttctgaaaaaagaaagaattcaacagttagcccccaaaccaaaccctaatgttaaaagagggaatggggatcccctaaccgctggaaagaagccccttccgaatgtttgccaaaaattgaaacccaaaggattttcgttagcaaacatcgggtgcaaaaattccaaaggtagcgaaagcagaagaaaagtgaa

SEQ ID NO: 256850 - DNA, 554 bp, Cannabis indica
gcggtgtgggattgcacagcttacccggtatttccccttacggatcacgggactgctgactgtcacaaatataatatatatatatttaattaggaatgggatcccaatttgtaaacatttatatacagtttatttttagtaaagttttatttttacttaattacgcttttattgtaaaactctttgattaacaaagattagcacaatgattagaaaatatgtaacatgccttagatattagagtgttatagaagcatctcaaaattctcaaaatactttaagactatatagttaatatcttgatattcttcaagactaaaattctcaagtgatcaatttgattattaaattattattttacttaatgtttattttcgttgttctttttagttttataacttggaattgtgctattttcaattgatattcttcaaggctaagatcttcaagtgatctatttgactattaaattataattttacttaatgttatttttaattattcattttagttttataacttagtattatgttatttttattttatttaatatt

SEQ ID NO: 256851 - DNA, 549 bp, Cannabis indica
aagagaattcaatatcttacaaatttttgattcacttattgagtaattattttaggtaattaatttataacagaaaatgattcacttatgtataaaagtgagtactttatttgatttattttacgtacaaaatatactaattgggaaggatattaacgacgattacaagtgaaatacaataatgacattattaaatgtagtagtaactataagtgagatacggtgatgacatttattttgaaattatatgatgagtttttaataaatttacggtcttctttctgttttatatctatttgtgtcagtattgttcaattttaattttttttactataatatacatttgaagaaaaaaaaaaaaccgatagagtttctatataaattttttgataaatatgcattttaaaattatacacataaaaataaatttaaaattattttaaaattttattattcaataaatatccatacatataatttaaaatgtctataaatagttgcatgcgaagcgcagcctattgactacttctttaatatttcgaaaacaat

SEQ ID NO: 256852 - DNA, 1527 bp, Cannabis indica
ttctcgtggccattctgacacttttttattggttttttgaagcagccaggccaatggaggagcttttggcgactcttgcctagacctacagtcctgactccgctcttcttcaggcgccagaccagatggtgaccccagggtggtcttcttccagcgtccccttaggccaaattattttgattgatgaggacagggaggtcgaggaggaggaagagggcgagattttggcccccttggaccggaaacacagggtaaaatggtggaggctgaatcttccaaaaagcccaagaaggttgatactccggctgccagctctgactcggggatcccacttgaagcggaggaatacaatgtgcctcccagcatcgttcttacccctgttcctgctgatgaggagaggcaacaactctagatcgccaagcacaattatgctatggctgaatatacgaaggggaacaccgaggtggaagctttaaaataggttttaagggaggccccgccgaattccttgcgtgaggaatcctttaggaacgcttgggacctgaacatggaccccctgactgacttgttcaactgctttatcggacctaccctcgctccatttacctcagagttgacgagccactttctctccaacctgacccaactcccggccaagagatatgcagcttgcactttcacgaactcgatctatcagattcaggatatcagcgctgctatgacagctgtaggcctctgttagtatttttgggtcttactttatggcacctaatcttctgtaattactcctttttcttgtattgccagattgctgcagagactggtcgcctctcaaagactttaattgatcatgggtacgtcatgcccgaattcgggggcatggacgaggccatgaagattataagagacttggaggctgagaggaaggaattccgagaggaggcccagcagagggaggctcaggcgaagcgaaggctaaggctgaggagttgaaggctcgggatgaggtcatggctagggcgaggcgcgagcttagggaggccaaggaggcagtggaagatctgactgccaagctgaagcccctagaggagctgcaccagactgacttgcagacgactgaaaatctaaccgttgaagtgaaggagcttcgtaacttcaaggctcaggctgaaaagaaagcgaaaagagatgagctcctggtccccgttacttgtcagcactgcaccaaacacttcgatgatggcgtctttatggcctggcagactaacggtcaaaaccttaagcttgacttctatccaaagccttaggaggttctcgtccgcttctgggagaagaagaagagacttgacgccctgttggaggagcacagggggcctcgtcttccaccccgaattgattaagccagtcgtttattaccattgtcattataattatctctctcttttttttcttttctatatatatttagtccttttcctctttctaagacaatttatattttttcttaaggggagacacttaaggccc

SEQ ID NO: 256853 - DNA, 1070 bp, Cannabis indica
cttatacaaacacaaaaaaagagacaaataaaaggtggtgtctttgagcaatgattgtgagtttaactcttgtatgatgatcactgaaacttaatatcataacaatgaatcaagcaaaaggggcatttctcagatccaaattgatgaggaaatccataagattatataaagaaattgatgcatgaaagtcaacttacagatgatgagatgagaaaaaggagaaaattaagaaacttggtaattgaaaagagaacaatataagaaataaagagttgggcagtaattgaaagggaaaagactcacctttaagatgaagcagcaggagcaagcaccatggatatggaaatggtcctatgaatattgagaaaggtcaatcaattaatattcatcaatgggaatttatttgtttggtaatacaatagtagactcgtacacccaataccaatatcaacaacactttctctttctctttctctttctctctctttggaataaaaatatgagcttttgcataagaagaagaagttgaattttgcaattgaatcaaaaaagggggttttaatttatagcaataattagcgggaaaacaacaaagcaaaggttgcccctttttcagttcactaacttcacttcctccaataaataaaaatagaaacttgagtttcattcactccaatgaaccaaatatctcccaaataatgttttttaagtaccttcctttactaaccgttaagtacatcagaacttacgtgtcacatcattttgattggtcagataatttatttttaaatattttaaaaattcatttaaatatataaatgaattaatgaaattgagaggtacttactaaaataattatttaagagattaaacaaaaaaaataataaaccataaacacaattacaacaaagaaatcatgaatcatgggaagcatgaacccaagacaccccttattaaatcaacagttggtctcatggataaataagggaaggacacattcaacttacacacacttcttacatataattgatgtgtaattaatctcaaacatataattaaaagtgatacag

SEQ ID NO: 256854 - DNA, 617 bp, Cannabis indica
ttaaatattttgtttttcagtttatcttaattagtaggaatttaaccatcaaatgtctattaatctcaattctatagtaacaattcattttcttagcttctaatgtgtatagcgtatatcatacttctgtgactagacagaagaacttacacatttgtggtcatggttgtacacttattcgagaaaggggaatttataaatatggaaaaaaaatgttagttgataattttatgggcataaaatttcatattaatacattatgtgcttagtacacatattatattacattaaattgaatttatagaaaatttacaactaatgctaatgtgcatataatcaagtcaaacttaaagataaatcaaaaattaattagtaatgacaatattaacaaaatgatgaactagaacagaataattaaaaccatataaacaaataaagaacgaaaacaacaaaaacaatgtcaagatatatattggtttaagttctatagatcgatgtgatctatgactctactccagtcctggaacaccaccgaaatgtctttattgattgagcaagaacaagggtacatcagttattgacgctaaaaagtgctcaacatcagctcgttagattga

SEQ ID NO: 256855 - DNA, 1600 bp, Cannabis indica
attttttttttaaaaaaatttgaggccatataaatactgtgtacacctatgtatacttaaagctaaaatttcaaaaccaatacagtaataatttaattggtatttaacaataatattcagcttttaccactaaaaaaaaataaaaagaataactgtataaaatcaaaatataatggagtttctaagcaaataacccttacccataacagtttaatttgttggatatatatagtttttttttttttgttaacaaatagatgtgtatacttttgaatttttcaggttttgaagtatcaaaaaaagggtgttgtggaactggattactagagacagcgatactttgtaacaagttcagtcctggaaaaacttgtgccgattcatctcaatatgtgttttgggactcacttcatcccacagaattagcttctaaagcaattgtttccaaactcattccacaactctatcattaattaattatgaatttatttcttttcattattatttatatactagtgaagagtctgtcaagtgttattattaattatgtttggacacaaggtcgcgttagctggtcataataaattatgttcacatgcacaacaagtttgatcgattaaaaatagcacatgtatgttctttgaataaattaaaagatttttaattgattttggttaaacgtcacgcccatcttaatgtgtgcaaataactttatatatatatatataaatatatatatatatatcttattcgtcattaattgactatgatcacttgatcaggacagatctccaactaattgacttatagtcatgaaaatacaagtgttatcgtagtgtctcatctttgtatgaatagagaaatcaatgcgatgtgatgatatgagagtccaagtttggccacatgttaattaatatctactaataacatgtatgtgatgtgatcatagctatatatataataaacaattaatgaaactttgggggtggtaattacattaatcatataatttgtactcaaacaacatgaacgtataattgttggaaatatatatatataggtgcactcttgggtattacccatgaatgggtaaaattagaaaattttgagtttttatgcttaatttttctatctaattaaaaaaatctctcatttttatatcatatgggctgagattgttccatcggtaaaaaaaaaatttaaaaaaatttttagcaagaaaataagaaaagaaaaagttgagtttgagttaaatatttttgtatgaacatatttttgatatagtgtaaaaagagatattttttgatatatttttttaattaagtagttaaattaagcatagaaattcaaatttgtgatttcattattcgttattagatcaaaattcgatggtttgatatttttaaaattaatatttatagttaaatttgtttagtaaccattcatgggtaatacccattaagaagtgttatatatatatagaagggagatgagacccaatgaggcccaatttagtacagttgtgttgtggagaaaaagggctatttacaaaaatatgggaaaataaagataagttttgatatatatggcataaaaatttaat

SEQ ID NO: 256856 - DNA, 661 bp, Cannabis indica
atagatttagggtctgatatgtgcatttttggattagatttagggttagatattgtgtctaagatttttaggcgagaaaacacatttttaggctggcccaatgcatccccaatgcaggcccgatgcatcgtgatgcaaagttagttttggggttgaagataaaggccttatatagggcctgatgggcctgatggtcaatctgattgtctaattatcttccaaaaattttgacttggctcgacaggcccgatatagggtacgatgatgcccgattattatatagagttttagtttttttgttatggcctgatgtgggcccgacagggtacgatatttagtccaaatgtgttttctctttcaattttttgtaggtttcggtccgataggcccgacatagggcccgatggtaatttagaatttttttgtggcccaatatttgctcgaaatagggtatgatgtttggcccaatgtttattctctttcatattttttaggtgagggtctaacaggcccgacatatggcgagataggttcaacacatggactattgtagtccgatgcttatgcacaaattttctcactgccattttttcttgcacacttccaaagttccacgccttttacttctagtgtcagaccattacactggtcgtgtgacttg

SEQ ID NO: 256857 - DNA, 1230 bp, Cannabis indica
ggagacatattattctgctgcattcaatgtaagatttctcatactttatatgtgtttatttatattcgttttggaagttcatatttaggttgttaatcaacatacttgtgagtagatctaagatcctggtaaataaattccaacagaaagttctcccagtgagtggtcaaattgtccttttgtagtacagaccctagtagcgtgcggaggacaaaaccctaggttggtcacgggtatgcccttcaccccatgtgcgcctataaatatcctcgttcgtacgaaggtaaggagagaccttggatgtgtcatcaccctactaacatcttagcggtataacttcttctaaactagggttttcatactgtaatactctgtaatcaaacactatccacccaaagaggctaaaaatatagactcgtggactaaggatctttaacgcctggaccacgtaaaaatatgttgttcttattaatcattacttcttatttcctttattctctcaaaatatttggtttctgaaaaactcagtaaacattttggtgctttcattgagagttgaaggaagctcggtggtgttcatcatcccccgatcatggtgaaaatgcaacaaaactctggcaaaagaactccattagatatggttatagaggaaggcacctctcgtgcaggcgacactgatacactatttttacttcaagcgtacaatgttgttatagtaaagttttaatattagaaaggttgtcgaacccagagagattgattattaaattttaccaattattatactttttaattttatactttaattagataacacaaattaaattataattaaaaatcaagtaataagataaatagaaaaataaataaagaaacaatgatttttaatcacaaagtaaaaacctagagcattgatttccctatttcaaactatgaatctcaatttatcctataatttgtagtttcaagaatcttaatgtaacttattaacctctctcaagcgatgatagatttaacttaaattagctaatacgatatctctattcaatgttaatcaaataagcactcataaagcgatatgattctgtttaaatgaaactcgtagaattagtggaatctctaaatctcacacttttcctatgtcgtacaattctaagtccggttttagataacctctctcaagtgtaaaacctaaaatctctataccaattaatggtgattaagcattaa

SEQ ID NO: 256858 - DNA, 1424 bp, Cannabis indica
gtgtgactaaatgaatttttaatcacaatacttgttttgacttaaaaataatattgacaatttgtagctaaatagtatgtttagtcacaagtaatattttgttgtgactaaaagtcacatttagtcacaaaaaaattatgttgtgactaaaaagttatcactaaaaatggcaatttttttgcagtgtttgatattcggtcaaactttttgaagttcatgaattgtaatctaacacaaacagtatgaattacgtgcttaacaattacatgaatcagtggaaacttttgatcccataagactgagtttttattatgcgagatactatatactacaacaatacaacaaagataatacttagaatcaccatccttactttcgagagattacttttctgcaaccaataatggatcaattttttcatgttagtacatttgtaagacaaaccacaccaaaaagctatttcctcaaggaccttcttactataacaacaagcaaaaaaaaaatagttggtgctgtatcttcatccccaaccaaatctgagtaatcgatcagtctctagttaggagtctgtcacgtaaagcaagccacatgataactctatgcttgcacacaatagaactatcgcaaatcataaaatacttccatctttccatatttaaattttgcattttgtcaaatagaccaaaaatggagaagttaaaattctagaactctgtttgagagaagaaggtaattttattttttgtttacactagtctcctccaataccaactcacctaaagtgaaacttcatagctccacaatctttatgttttatgtattgggtttatggtactaaatcaggtacttaatgaaattagaagttttgattatcatcgtaccatatccctaagatcaccatatgtatatatatatatattaaatttgaaagtaaaaatatgaaaaaattatttaccccttgaagcctatcagggtatcctcaagcctttttgtatattgtatcattggaacactgacgtcaaaactcacacattgatcttctagatcttccaccacacacaagaactagtgagggctagtaggataaaagtgtgtatataaaattcttgtattctcagtacatgagcaagaacaattctgttatagtaatggagagaaaagaataattagattaattccttttaggctttcataaaagttacgttataattctcattctaaattttggtttgtacaatatattaaatatactcaataaatatattgcaagaacaattctgttatagtaatggagagaaaagaataattagattaattccttttaggctttcataaaagttacgttataattctcattctaaattttggtttgtacaatatattaaatatactcaataaatatattttttaaattattaaaatta

SEQ ID NO: 256859 - DNA, 914 bp, Cannabis indica
ttttttaattgaaaataagttgtattcgagaaaaagagactggagagtgaatagcatatgaatttccaaggctttgaaaggagggaagtgggaacaacatgcttagtaagaagaaaggagagtatgtgtaggatattaggtagttttgaaattctgtcctcttcacccatcaacactgatgttctaccactactttcacccatgatcgacttgtaacaagtaaaaacgaaaacaaagcagaaatcatcaacaacaatacatttcggtttgaatgaggaacggggcagggattcctcatctaaatgggaatggggcggggacaggaattgaactgtagttactcatttagttttccatcgtttaagtcattgtcattgagttttgttcagtttgcagataagaatctttgtttagcttgagaatgtaactttgaatatttgagcaatttcgaggacacagggctggtgctcattataatctcgtgtcaaagcttgaaaagtttcaatttaaataaaagtgtccattataattaaatcagctccaaaattaggatcacttttttaaattatcaacagcgtcatctaatttgataaattttgttttgaatcttaattgcatgttgacccagttgagctatgccaattgctaattgtcttattaagtataagggtgtttctaaaagtttattttattagtctattttatatttaacttgtttgccttaattttatatgtgtaggccccagaaaatctcaagaaaatatgtccttatttgcttaattgggagcatcttaaagtgtttactgaacgatattcgacttgacacttgagagatcctttgaagtggatttcactttctttaaaaacaatatcaatagaaaaagggaaattttttaaaaactgtgagaaaatta

SEQ ID NO: 256860 - DNA, 1177 bp, Cannabis indica
tggcaattcggagtagttgcctctccttatctgcggggaccggagtgagaataatgtcgtgcggcacagtgtactcctttgcttcagaaggaatccctaaatcggaactaacgaccggggtgtccctcctcctgggcctcttggaagactcgacctcgaccatcttacccttccgcttacggtcaagggaagctgcaatctcactctcctcctcctcgacctccccttcctcgtctatcaagacgattgtgtctatgggggcactggaagatgacctcccaggggtcgttagttgggtaggagccagaggcagagaagggtccgggctgtaggcctcggtgagaatcgccagaagatcttctattggcttggctgctgctacaaagaaataaacaaagttttagaataactataagaaggcatgcgcccaacagcaaagcgataaatctagtcctaccctgactctctaactcagcgctagcaaagtcttgaactacacgctaacttcgtcatcccaagaaagctgtccgagggaagaaaccagttggaggacaagtaggctgtatgatccaatggaatgagtgcatgaggtctagagcccatccgggatcaacctaagaaatgacccaagtgggaaaaatagaagtctttggcatgatgcccccaccgagtggagggcatcctaaacttaaaaaggcgctcatcaaatcctataggcctacgtcgggtatactctcggacagaggggacgtgatgaatttttaaaggggacttaccagagccatacgtactggcgtcaggagctcctgtgttggggaccggggccagcggtttaggcctagaaggcacccgacctggacccacctccaaacaaagaacccttccggcggcagcctgggctttgatgtaggccagctcctgttccttcctgaagaggtacttctggtaccgttcctccgcgaagtgattttgtccacctgcagtgccctttccgcaacaggagttcggacatttgggcagatgaccttgaaagattaaagtcatccaccgactgattctcggagatcagcttagctttccggcagttctccgtcgtgaccaagtccccgacgttgagggccttcctgtcgtaggtggagaagtgttgggtttttgtgccctaaataaaacccattac

SEQ ID NO: 256861 - DNA, 824 bp, Cannabis indica
ttttattttatatttcttttgtaagataatttattttattgttagttatgtgaaaaaaaatttgataaatattaaataatttcatactaaaaagtaaccaatctgaatggtagacttcgtggttcatttcaaggaagaaaggggctttgacaaggagatcccatttgtcctcttcttttcgttcttgtcatggattaccttactcgacttctaagatatactcaggtaccaaaggattcggatatcaccccttatgtaagtctctaggctcattaatctttgttttgctgatgacttggtcatcttttgcaagggcaatgtgtcctctcttcaaattgtccataaggctttttctgacttttgagatgctgcgggtttagtagccaataagtttaaatcctctatctactttggaggtatttcggctgatatcaaaaagcacttatggagattattgatatcaaagaaagtttatttcttttgaattaccttggggtaaatttacggcctacaaaatagaagtatgctgactgtgttggcattattgataagattcagaaaaagctgcatgggtggagtagtaggcacctttcttttgtaggttaagcgccattagtccattctgttttaatgagcattaagaattgctgggtgagcataattatcttgcctcaaagagttactaaggaaattgacaagttatgcagagattttctctggggattctctggtagttgatgcaagctccattttgcctcctgagaaaaagtgtgtttccctacctaaggtgtatgtaggtttcgggtttagagaagggaaaaaaa

SEQ ID NO: 256862 - DNA, 998 bp, Cannabis indica
attattattattattatcaatttcctaggaaccaaatgctcctaatcggtaagagaaagaagctaaaggcaaatataccagatgacaacgaagttttttggagagagcaggtcccataaattctttaaccctatatcaacagcttcaatgaaagaattgtcaagattatcaataactgaaactgaaaacccttctttgaagagttgaactcttgagtggcttccgataaatttagtgttgccagtcacgagaatcctctgctccaccgaacctattattgatattttcccaattcacaatcgaaacaaaatcaattcacagtgtcgtcgtctttgtcatcatcattggtgttgactgctaaaccagccctcaatcgcaaagaagcggctattaaaaatttcaattgttgaagttttttttcttgctccctcaatcgcattcaatttcaaatgaaaattttaacaatagcaaaattctgtttttataattactaagagaaattatcaaaccattttaaaaatgcgaaactgtaatataattgtttgaacattagttatctctatttagaatctgatagaacaaaaatatactgcataaagtaaaaatacagaaaataaaatcacacaatattttatacgtgacattagcaactctttccaatttctcctagtccacggggccactcccagagaatgaaatttattagatgaatctcaagtgcttacaaaactaaattgacttatgcaaataaagaatctgttagtgtcattattttgtgacagttttgttctgttcaatgtctagtcgtgtctggtgtttttagtctgttatatctgcacttgcgttctgttaagtcagtttctgttaagtgttagttagtgccaagtggactagtttgtggatatataaatagtcggtttctgttagtaaaaagtttatccattaatcgttcagtttgttaattctgttgttcgtggagatagtgtcgtatcttgctt

SEQ ID NO: 256863 - DNA, 1655 bp, Cannabis indica
ctgttctacaagcattattgggattctgttagcgctgatttttgtgaggcggtgtcagacttttttataactggtaatatgcatagaggcattaatgctaccaacattgttctcattccgaaggttcaaaacccgaaaagaaccagtcatttcagacccatctctctctgcaatgtcgtgtataaggttatttccaagatcctggcgaatagaataaaacctttgttaccttccttcatttgtcctacacaatctgcgtttattcccggaagaaacattcatgacaataacgtcattgttcaagaagttattcattcatttggccggaagaaaggtaaggaaggtttttttgcgatcaagattgatcttgtcaaggcttatgatcggctgagctggcgttttgttgaccatgtgttggagtgctgtgggacccctgtcagattccgtaattgggtctcgcaatgcatatccaccactactttaaatatctgcctgaatgggggtcaggttggaaaaattatcccttcgtgtggccttcgtcaaggtgaccccctttcgccctatctgttcatttgggcagcggaagtgctttcgaggctattacacgatgccttaactcaggggagcattcaaggcataaagctaagtagaggtggtccaatcctttcccacatcttctttgcggatgatctaattctgatgggtagagccaatttgaacgaagtcaggggattctggagttgccttgaaaaattctgtccgtggtccggtcaacaggttaataagctaaaaacctctattttcttcagtaacaatacctcgtcaaacatgaggaaagagataaaagaactgttggggattaattcacctgaagggtgcatcaagtatttaggcttgcccctgttccggtcgagacaaaaggacaccgactttaacttcattcttgataatctcgcttcaaagctgcagggatggaaggcaaaggttttgtcaaaggcgggcagggccaccctgattaaatcaatgggcctctcgatgccaatgtatgctatgcaaaccaccaaactctctaatcgtatggtcaaccgtatcgatggtctggttagggatttctggtggggttttgaaaaaggaaatcgtgggctccatttaaaagcttgggacaagttgtgtcttcctaaatctcttggtggtctcggttttcggaaaactagagaaatgaatcaggcgtttctggcaaagtggggatggcatatccttactggtagccaatcgctgtgttgtagagttttgacggcaaaatacttaaaagggaaggatttcctaaaatataaatataaaaactctgactcttggttctggaaaagtgttgtgaaggcaaactcgattttaaagagaggtgcttgtaaacaggtggctaacggagagaatacagctatctgggaggacccctggattcctcattataaaggtttttgtccaaaacccaccagggaaggcgcaaccaatctcaaccgagtgtctgacttgttactttctaatggtcactgggacgtaaataagctgaaggaaagctttgatcatgaaactgtgaaagccatcttgaaagggggccacccctctggtaatggcactgatagatggatatggactca

SEQ ID NO: 256864 - DNA, 1860 bp, Cannabis indica
ttactcatgtcagagacatctcttcactatttctttttaacaaaactcatgaaatgaaaaaaattatcttcatctatttgctataggttctatgtttttgttgtcaatcattttcgatgtaagtgtggtggagagtgaatgaaagaggataattgagagtaagactttagttaattagaatttataaattaaaaaaataaaaatcaagactttaaagattaattaggttttaattaagtgtcaatataatatcatcattatttttttttttctattttatatagattttctaaggaaacatactttaaaatttaatcattcttaatatatacaatctccatttgcccaaaaactcactaataaaatctcttgtcctttttaaattcattgcgaaataaataaaaggtaaaatgtgaggttgatttttgtgatgcaaaaatgacattactttaaaaatttatgaaattattaagatgtcactaataaatatccgatctcaagacaatcaactaattgataatacaaatttggtaactatcacttttttaaattcattgaaaaataataaataaataataaaatactaatactaaaatctatgatattattaaggtcccactaataaaatcaatataatcaactaattgataatacaaatatgatatcatcttttcacattcattgcaaataaataaataaatgagacgattttaggatgaattttaatgtgatgcaaaaatggtattactttaatatgtatgatattattaagatatcactaatatatttaatataatcaactgattgattattttttttttaaactaaaaagaaaattgattatattaattctgacaaaaattaatagaattctcacatgcatcaaatgcagtattaaatattcaaaatacataaaaactaaatcaaaaatttctccacattatctcacaagcataaaaattgaaactttcctaattttactttgatagcccaaaattctttcacaaatatggtaagtatcaccttttcacgttcattgcaaataaataaataaatgggatgattttaagggtaaattctaatgtgctgcgaaaatagtattactttaaaaacatataatattattaacatgtcattaataaaatcttttgtcacaagataatcaattaattgataatacgattctcgtaagtatcatctttccaaaaatatagtttcccgtttcataaataataagggatgccttaataataaattacataaataaatagaatgttattaagttgttaattatggaaactacttaatttagtgcttgccatattctccggtagcacattcacattatgtatagaatataaaatcaaacaatcagtacatacaatttcataaaattttacttgttcaatcattcacaagatatgtatgtgaaaatttcaaactcttgtatatctctcatatgtatttaatttctcctctaatttgtatactattttttttttaaataaaaagtttaaattgtagatgtattttgaccaagaagaaaaaatgtatgtttttcaagcaattgaacgcttggagaagaatgtatcatcaattaaagaggatgttgaagaactcattcaatttcagcgagaaaaagagaagagggaaaaagatgttaaacgagaacttcatgacttgaagttagaattaaaattaaagagtttgtgttattgaaatgaaaaaagatatgggggaagtagatggattatttggaaggatggatgaaatatttgaaaagagctcttatacaacttatggtgatctttctatcaagactccctctactcaaaccaaaaagactaagcttaatacaac

SEQ ID NO: 256865 - DNA, 1148 bp, Cannabis indica
taacatcacctaattgaacctaattaaaaaaaaaaactaattatcacgtaacatcaacctaatataaatataaattcaataaattaatttgttgattattaagtataacaatatgttattttgagttttagaatatatattaattattaatatagatttttttaatgtaaatttaatttcatgatcagattaaacttttaaagtaaattttaagaaagaaccactaatcttggcagtgatttgctaaaaatgtgaagcactataatactagagaattttaaaggttataatataatgaatgagaaaattatattttaagtatgcatattaaaaggctaaaaaatattaaactcttttattaccgtatctagcttatagtcactgtgtcgctatatgtaaactcgttattattattattgtatcttatttgtatttactagaacatttgaagtcgacatcataattatatctcacttgtatgtacattaaaaattattattatcaccatacattatcaaaatttatagaagaaaaaattaataaaatctttatgattgctaccacactgtattattacataacttataaatatgtatacataaatacattaattatatacgtgacattaattatatttcttaacatgtatgtttaattattaactataatttaacaccctaaatataaatttcctaatacgatgaaataaacacatataaagtttagaaaacattatattgatggcagcggagcaatatgactcattccgttcagatctctagctattgattcccttttgtagcagatcattatcaagatctgaacctggatcttctctcctttagtttggttaaccacagtcttccacactatgattgagtacttgacttgctatgagtgggcatgacactctatcactaaagttttgaatttgatgaagaataataagaaggatcaaaatcactatgaaggaggctctcatttactagttgtctgacagagaatgaaaactaggttattggttagatgagaatgagagccatcttatttcttttatagtatttcttctagggtttaggatttaattatatggattaaaaaaagataaactaataggcaaaaataacactaagtggccgaccatagta

SEQ ID NO: 256866 - DNA, 583 bp, Cannabis indica
ttaaaacttagacaaaattttaaatgtctaaattttagaaacattaaaagtttttcataattataactagacataataaatatagtggagacatgtatatagtaaagcaatgaaagatcaacaatgtttaatatataaaaactcatatataaatataaaatatttaaaacttacaatatttccatctgcaatttgatgtttaatcaatcagtcaagttcactaaaaggtgtaccacgatatggatgattagcaagggcatggttaaatctaatgtgttgatgcctataatgattaataatatgttgcggggaattaaatatctaagattattttcagtgtaagccccactaatctgatcatatatatctcctagggctactacctgaacagtccaacaagtatgaaaattatcaaactagtttcatatgggacccaaatcaatagaagatgacaaattcaatctataaacttcttcggcctgtaaaacaaaaacaactaaaatgtatagacctgttaaatataaaacaaaaagaataattttctttagattattacaaaattagagaaattaaacactaaaaa

SEQ ID NO: 256867 - DNA, 654 bp, Cannabis indica
acttcaagtagtccttccatttttaggaaggagggttgaagatgtgccatacccgagcgatctctcttgcaaaaagaaaacatagtgcatgggagagtcatgttaaacttttatcgtgcttgggcttccgtgaaagaaggctgaagctgcataaatattcaagcttagattttgcttgaaaagatcaaaaagagaaagcaccaaggggagtaaggcagacttcaagcaatccttcctttctgagaaggagggttaaagacgtgccacacccccaatgatatttcttgaatgaaaaacacagtgcatgagagactcacgttaaaattttatgaggcaaactttggtttctgtgaaggaaggctgaagttgcataaaaactcaagcttagacttcgcttgaaaatatcaaaagaagaaagcaccacagggagtaaggcagacttcaagcaatcctttcattttgggaagaagggttgaagacgtgtcatacccccagtgatctttcttgaacaaaaaacatcgtgcatacgagaatcacgttgaatttttatgaggcaagcttcagcttctatgaaagaaggctgaagttgcataaaaattcaagcttagactttgcttgaaaagatcaaaaggagaaagcaccaaggggagtaag

SEQ ID NO: 256868 - DNA, 694 bp, Cannabis indica
ttgaaaagtaattatagatatttgtgttggttgagatattctctcaaggtagttgagagattccgttaagtagttgagagattctctcaatcgattattaaaaataaatatctataacagaatttgtttgtattatttatataaataattaaatatgatttaataaattattagaataattaattaaataaaaaatttattgagtttatttattataccgtataaaaccaaattctgtcatagaatttgaaataaaattttaacgtaattttttgaaaagcctaaaaaggattaatctaatttaagattttctctccaaaacactatagaattgttcgtactcatgtgttgaaaatccaacaagaacttcatatatattttatcctactagcccacattactccttgtgtgtggtgtggaaaatctggaagatcaaagtgtgagtttaacgtcaccgttccgaaaatacaaaatacgaaaggactcgagaataccctgataggcttcgagacataaactatcttttcatctattttactttcagatttaatgtatgtacatatggtgatcttgggtttatggtatgatgataatcaaaaacatttattttgtcgcgtacctgatttagtaccataaacaaccatggtattaccatcaggccataatgggagggacataatgtactaacacgctc

SEQ ID NO: 256869 - DNA, 723 bp, Cannabis indica
taatagagctatgatgatgttatgttataatatataaaagtcagaattagttttttttgtttttttttttatttttacatacataacaaaatatgtatatgtgacatagattgttaatttgtatttattgtaacagtcttgctaagactagcgttagtgtgttcaacttttcatttgtttccacataatacaactaacacgttgtattttaattgattacacaactttgactattttagataataattgaccatatgagtaatatattatacaatttttatgggtgggagtaatacaaatatatatgaatcctttcaaaaatatatatataaatatgttatgtaatcactaagatttacttaatatgtgttgcacaatttaccgggactaatataatattttgatataaacttgatgataaaatacaaataatatacttatattaatatgcttaaataaacactatataatttatagagataaagaaaattaaccgtgaacgcaattccaattggaaaatatctgagacctgtgtagtgtctcccagtaacaaggcgcactcccgaactctataacctaattactttaaagaggaagatttaattgtttatgttataacttgtttattaaaacaagatttgatgtaatttaaaacaaagcaaaaaggctcatatatatagccttggaattgccaacaattttacttcaaaaagatgtgggata

SEQ ID NO: 256870 - DNA, 2527 bp, Cannabis indica
caacaggatcatctccaactccatactattcacaggaagaattgatgattgaaaaattacatcgacccatttaactatctgttggagcactcagaccaacaaaatcaactcataagtgaagatacatttagtttcacaaatgggtcgaatttggcgattggtcaagaaatcaagaataaagatgaggtgaagtttacgttgaaagatactgcgatgaaggcttactttgagataaaaatcgcaaaatctgccaagtcattatatgtgaaaattcattgacaagtcatgaaaatgggcagtgcgtgtagcaaaagttagcaacttaaagcatttctcaatacaaacttattgtcccactcacacttgctcccttatcagccgattgagaaagcattgtcaagcaagtgcagatacagttgctaatgtcatgaggtactattttgacggtcagagagagacaccgaaacctaaagcaataatgaaaattatgcaaaacaatcacatgctgataaaatattagaaagcttggaaagggaaaaatattgcaaacaaccttcttagaggttcacatgaattaaattttccaaatcttccaacttacttgtacatggtttgaaagatgaaaccaggcacgatcacacatttggaggtggatgaagactctaaattcaaaaatatttttatagcatatgcaacatgcattaaaggatttcgttgtatgagaaaggttattgcggtggatggaacttggttaaagagtaggtacaaaggtgtaatgctcattgcaacgacacaagatggtaatttttatcaatatcctattgcttggggcgtagttgattcagagaatgatggtttgtggtcatggtttctcacaaagttacatgaccttataccggattagagtgaattggtcttcattttagataggcatcaaagcatcatcaatgggttgtcaaatatttataagaagtcgcaacatgggcactgtaggtggcatttatctcaaaatattaaagcatgtgttagagttaaaggtgtcgtaaaattattcgaagaaactgctaatgcttataaagttttcgagttcaaccaactttatgatgaattgaagaataaatattctagagctgtgaattatcttgaagagtcaaatgtaccacttaggaaatgggaaagctctcactttacaggttgtggctacaatattatgactacgaatggtgttgaatctattaatgcagtaatgaaggaaccaagagaatatcctataattgcattgttgtagggtatgcaagcaaaagtctctgaatggttcaaaaaccatagcaatgttgtggcatctatcaatacataatgtacacctttaagtccactgagcgagaatatcattttgaaaagattcaagaaaacattggaaatgaatgtcaagtagcttaatcgatttgagtatgaggttactggtaagggcaacgatgccatagttgatttgggtcaaagacaatgctatggttgtttttttgaccttgataaattttcttgcgtgcatgcattagcagcatatgaacaagctggaatagaagtatatgatttgtgctacaattattataagttggaaacttgggcgttggcttatgtggatacaacttatctagtgcctcaatgaaaagattgggatatcgatgaagttgaattacttccgaaggttttccctccaaatgtcccaatcaagcgtgatagaagaaaaacgaatagaatcccatcaattggaaatggcaaaaaatggattaaaaggtgtgggttttgtggaaagtctggccattccacaaagacatgccccctaagagccacgaattctaaattctattttttttttttatggatatgcttatttcaaattactatggttaattccattaaaaaaaattactatggttaattaatttatatcaatgtatttgaatattttagtatttttgtgtctttactttagttaaaactcgattggtttgagttaacttgaccatttgttgttgagatttttatatatttaccagactttgaacacagggctctattgacaatagttgagcttgacaatgtatggttgagatttacaattataaaatatattttcaagaaatggctcaactgacattagttgagctcgactttaagtggttgatattagtatagattaaaagtatcgggcttgagtgaattatgtggagcttaactatatatggttgagatttataattattaatcaaattttcaaaaaatagctcaactgagagtagttgagctcgactatatgtggttgagattagtaaaaattgtaataatatgactcgactgtaattagtagatcttcaccatcacatatggttggaattcataattattaatcaaattaattttcatattgataaaatattgtggttagaagtgacaatagatattataccattttgtaaatagattaaaattatcaagattattatgaaatgtaaagaatgtagcaata

SEQ ID NO: 256871 - DNA, 762 bp, Cannabis indica
gttcaaaaatgctccgttaatctctgagagattgaaaaccggggacgttccaagggcattgtggctgcatcacctcaaaatatgggttcaattgcatgatattcaggcgggttttaagacggaaagggtggtttcggacgctgcgaactatatcggaagctttgttaaaaccgatgagaataacttcaatggtgtttggaggaaatatctcagggtgcaggttcggatcgatatcgagaagccattaaaacggcggatgaagttgcagctaaccggtggtgagtggttttggataaatttttgttatgaatttgtgccgactttttgttttatttgtggagttataggccacaccgatcaatattgctctaggttatttatccaacctattgcttctattgtcaaaccgtatggttcgttcatgaaggcggtccctcagagaacacaatacgctatgggatctaagtggctccgattggcgtttggaggggttgggaattttggtgcgtcggcctctggtggtgttgggagttctggtacgtcggggcatgtccagcaaggtggtgaggttttccagccgagaggagataggagattaaatgcccatgattttcggagtgaacagcaaagaaaaattccacaaatggagggtcaaagattgatgcatgggaatagggatgtggttggtggccatgcaagattcatgggaattaatgccgtgaatagtgatgtaattgatggggagatatattaggaagtaat

SEQ ID NO: 256872 - DNA, 1502 bp, Cannabis indica
tgtacctattttaggccaacaataattttcaacattattctttttcctttttattaaggaacggaaaatttgaatttggaccttttttcgttttattttttataactatataaagtatatttaattatatttttttagtcatgactgcaatagagtagactagcctcattagatttaaaaaaattggttacaactctaaagaatcataataaaaatgtcaagacaaaacaaaatgcctcgaattggaatttggaatcgagaatattactaatatattattgtagaaaaatagtgtaatatatagtttatgcttgtttaaagtctcttataaacattattataaatatatttattatttggatagtatagcataataatataatgcaaatatatagaatgattaatattatatgaagatcacgataatattataagaaacacggctggacaaataaaaattgatttattgattaaacttattatttatgtcaaacttaagaaaacctagacactttttataccttaactaaataaacaatcaattaaaaataaatatatgggaataaaaatataactgaactaacatatatataaataatataaaatatttttgttatttaaacatgtcaaaaatagaagtaataattttcatatattatcacaaaaaaatatattgttatttatgcatgccaaaacatagttagacaaatttttcttgcaaaaaaacaactctaaaatatagccactctatcattcaaaatatattaatatatttttatttaatttatatcaaaatttttaattatatcatatatcatttttttctaactttttaaatttttttttctttgcattatgtaaatattatatcttaactaagtagtcattgagagagaaaaaaaaataacaaaagaaaacaattatgaaggagctctaacctttctttggatgtatggttgaaaagaaaatacaatttagatcacatttgatataataatatggctttatttaaaattttaaagaatttctttattataaaagtcatcaaatacaagtgttcatcaaactagttggttctaaaagcataagtattgtaaatttttttttaaattttactttagtgtaaaaatacacaaacatcataacgatctaaaataatattagagagtgacaagactaaaaaaaagacaaaaacaatgacttttggaaatgagtgtgattgagggagtatatgtggtgttatccgataatagtttattaaaactagtgtttttggaattactaaatgtcaaaatatgtcactataagattctaaagcaattctcccacttacttatataattcaagagtttatagaccatgaaacacaaaagagaatatcctttacccaaaaatacacaaaattataatttttaatctatctcatggcatgacgtcacaccctttatagatttcattctcaccatccgattaatctttataggctcatattcattattaat

SEQ ID NO: 256873 - DNA, 2345 bp, Cannabis indica
ggtggcctaccaaacattacagtcgagtggcttccatacatggtggccggtacctaccaagcatggtggctgagtggcttccatgcatggtggccaagtggcctacaaagcatggtgggcgagtaggttgcccaaaatggagaccaagtggcttaccatgtatggtggtcgggtggcctccatgcatggtggctgagtagactttatgctgactggctcgctcgacatgcataaccgtacattcagatggatctttgaggtgtgtacccattgatattctgattaattgtcggatgatcttgggagttggccctgctaatttttgggtttaataagttccttggaccatatccaaaaatagtaaaaacagtttgcccgcacaaccaaaaaaatcaagaatgtagttttaaggtcttgaaatacatccatgacatcataaaatctataaatactggcaaattcatagatagcgaaaaagtaagtatttattatattaatcaattatgtaatatacatactaataaatatttacttgttcttttaatgtttggtagttgcaatacgataaaaaaatgacttgttaccgttacaccaagattgattgaggttatttaattacgatgattagaacatttatataagaatatctttttttagacaactcttaaacaattagagtaattttagaatattagtgtaatagatttacttagagtaatgtagatgtatacttatttagcttgttattttaatttttacttatgcttattataaaaaaattatacttaatttaaacgtattattaaaaataaaattatatattgttgacgcgattttttgtcaacttaatctaagaagaagaataaattcaagtaaagaagagacgaaaataataaataaacaccatatatttttacgtagttttgtagttaaatcaatatacttcacgagtcaatattattttgagttttggttgtgtttataatttggcaaagtttctataaatcataattgtctccccctatttcccttttagtgaacccctatttataagaatgggatggtggttacttaatcttatcttagtgaaaagttataatttataggtggttctacgttttacatataatcaaatatttagataaatataaataattgtttatatttaaaatataaagaagtggtctttgacttggtcagaccatgttatttttgagtagatgcattgttgtatatttaatacgaggtgattcatcactgagtgtgtaatacgaggagatgcattgtagtgcatgtattaccaggagatgcgcatcactgttttgtattacgaggtgattcatcactgttttgtattacgtgattcatctctgctggtgtaatacgaggtgatgcatcactattggtgtaatacgaggcaatgtattgttaagtgtgtattacgagaagatgcatttgtgctatgtaatatgaggagccaatacgaggtaatgcattgatgagtgtgtacgtaatacgaggagatgcaatgctactgtgtaatacgaggcaatgcattgatgattgtgcattacaaggagatgcaagatctttgtatttcgagcaactacaagatctttgtattacaaggaactataagatctttgtattatgagtagctacaagatccttgtatattacaagtagctacaatgtccttatattacgaccagctagaaggttattgttgtaagatgctgaatgtttattgaaataacatcccgacaatgttgaaatacctcacttcatgaaccttttgatccttatttagatgagatcacctcacaggttgagtcttgagtttttttttcaaccagtcccacaatgtatttattacgagatttattatttatgtcacctggcattcaatttgaatttttcattaaatagtctaaaaatgggtacaacatatatttccaaaaaaaaaaaaatagattttatatcaaaattacattaaaaaaattaacaaaatttaataaataaataaattgaagccataaagcttcggttattcaataactaaacttgtatatataatctatatgactccggttattttataataatagaagtcgtaggggtttttttatgcgtgagcgaagcccctatggcatctattattatgtaataaacgtcgccatagaagtcctctatgccttcagttccttcgctacaattttagttacctatacaatgcctacggttgcgaatttctcaaaaactgcctctaaagggccagaaaaatcgcatctcaaagcttgtcttgtaataatagttttactattattactcttacaatatagatt

SEQ ID NO: 256874 - DNA, 826 bp, Cannabis indica
tgaacgtgtctcataaactaatacaactaagtattcctactcaattttaattaaacatgtttcttaaaataattaaatttgtttgtaaggtcagcttagattggtcaggcggcgatggcgtaagtggtaaattaagtgtacgagttctcacctatttgcataaaactggggatccttccgccccaacccaagtgacaagtacacattatatacactattataaataaatactcatatcccatgtaagattttatattttgtcaaaatttgtaaaaagttccaacaagtactattcgttattattaaaacattaatcaactaaaatagtttataatatcaacaatagtttctaatattaaatgtaggaattttagttaattaccaaactgccctacaccaacaaacaaattaatcagtttaccaaggtcaatttcgatttttaccaattcctaacttttcaaagtcaacagggtcaatatgaccttgttttgccttagacaaaacccaagagatcgagaaccttcccaatcactttgcctcagccctagaatttgctcgaaaccctagcagagagtttctcagagagaaactcgaaaccaaaccccaaacaacccaaaaattccaaatcaaacacaaacacaaggtcagatctaacttaatctgacctatccacaaacacacacacaaaaccagaaataacagagttagaaaataccagatttttcccgaagttcaccaaataaatttggctacatctccattgagctgctcctcagattgagagctcgattccactataaaaatgatgtttagagttacaaggatg

SEQ ID NO: 256875 - DNA, 581 bp, Cannabis indica
agtaaaaaaataaaaataccgtctggcagtatttttataaaaaaaatgacaaaagttagtataccatgtaaatgtcccttttttaaacccaatatcctccataaagcccactttatagtccatggttttgttttctagtgattgatttacatgcatccctctaaacttcatgttgagtaattttgtcctagataagtagatattttaacaaagattataatattgacaagatattgaatagaaattgtcaactaatattttgcagtaatagaatattgagcactctctccatggttgaagaaagagttgctctacccctaaattttctcattagtgacattttaaacctaccttgaattccctcaaactaaaggcatggagattcagatactaacttttctatgactttctgagtcactagcctacccaaacttatagggttgccaagatttggaaggtggcaatttttcaagaaagggttggtttaagcttattttaattgttttcattgaagccctcaaacttattttgaatttgctcaaattaaacatacatagacttaattaggcgactagaggatc

SEQ ID NO: 256876 - DNA, 1728 bp, Cannabis indica
gaaggtggtatgggattccgatcttttgttcattttaatcaagcactcttgggcaaacaagcatggcggatatttgatatgcccgattctctactaagtcgactcctcaagcatagatacttttcaaattgttcgtttctggatgcaaacattggtcactcgccttctttgacttggcaaagtatctgttggggtaagaaattgcttctcaaagggctacggtttaaaattggtaatggtagaagtgtggatagtggaaaggatccttggataccaaaccaatcagcttttaaagctctatcccgatgtcagtttctagttttattactgatgaccgtgtttggaatgtctctcttttgaatagctacttccagccaattgacattgatcgaattttgtctattccgctagtttctttgctgataatgaccgcctaatctgccaccactcaacaaatggcatttataatgtcaaatctagtttccatttagctacatctttggaagaacaacatacctcctcaacatctaatcaacatagtgaatggtggaaatacttttaacttaaaattgccccctaagattagaatctttgcttggaaagtgtttcaaaatattttaccaacatcggctgcattgtttaaaaggaaggttttagatttcggggaatgtgctctttgtaagtcgatttgggagtcaattggtcatgctctctttgattacaatcatgctaaagatatttggaaacatacaaagtttcagattgattatcgacaagctaatagcatgttcaatggtgattatttgcaccatttatcttccacatactagcagaaagatttcgaaactatcttatgtgtgttgtgggggatttggacaaataggaacaaagttgttcacggtggggatcctcgactgccatcagcaattgtccagtatgctactcgattctatgaagactttactcggcatcaggctcctgttagaacgaaagctactgctaacaatcacaatgcagcaaggccagaatcaacgacagagaagcatgtccaaaagtggttgccaccacaggttcatggcttcaaactcaacgtggatgttgctactgatttgaagcaaaaaagaatgggtgttggggcgattctaagggatcataatggtttggtggtggctgctctttccaaacatgtacaaggaagctttagatcggatgaaatggaggtgaaagtgctttttcatgccattaattgggtgatgcaatcacaattacctctcactcatatagaaactaatgcttctcgagtttcatctgctttaaatgtcttaaccacagatttatcatgtttttcggatcttattatggatgtacgttgtcttttatcctttttccctcaagttttagtaagccatgtgaaacgaactgctaataaagcagcacatggtttagctaaatatgctttagggttggatgatgacatatgttggataggagaaattccctatcctgttttctctgttgttataaatgatttcaatctataataacagtgaaatttacaaaaaaaaaaatgtgttaaataataatattttaatattattattagagaaatgttaaattacaacactactattgatgtatatatagtattattatggattttataaatatggagtgtcatataatttattttaataaatattagtaaaaaaaaattgttaattatttata

SEQ ID NO: 256877 - DNA, 924 bp, Cannabis indica
caaaagaaggaattgcttgaataaccgatttgatgagagtttctttacccgcccgggagaaaagcttttcattccaaacattgagtttagaggaaaccttttgaatgaggtagtggaaaatagaattttttaccctgccaatacaatgaggaaccccaaggtatttgctaatgaaaccttcaccattgagcaaaagggatgatctgaactgggattgggtatcaggagaggtattgggtgagaagagaatggaggatttatcccgattgacagattggcccgaagcttggaagtaaaggtgcaaaattctgtttatggcttcagaagattgagaagtgacaggaacaaagaccatgctatcaacggcaaagaggagatgagaaaaggagggagcaccacgacagattttaatgccagagaacaaggcagcatcctcatgaatacggatagctgcagataatccttcagccacgattaggaaaagatagggagaaaggggatcgccctgacggatgtcacgggaagaggagaaaacattttatagttggccatttaaggataattggtaggttacagtggagaggcatttagttataagagaaataaagttgtgaggagccccgatatggtgaagaaagcaagagataaaagaccattcaactctatcaaaagccttttccatatccagtttgatagcagcccagccaattttacaaaggttgttagtcctttttttatattatttagaattactataaattttttaaaaaattaaaataatttatcatgccgaaaataaaatctaattattttattgcacacgtaactattttttctatgcgcgtactaaataattattttaatattattttcggtataataaattattgacaatttgttaaaaatttataaataatcataaat

SEQ ID NO: 256878 - DNA, 1377 bp, Cannabis indica
ttttcattcattccaatcaaacgctacatacaaaaataggtaaagaatcctaaatcaaacatacatcacctgacgtaaaccaaaaggtaaaatagagaatattgtgttttatttagctatatccttggctacatgtaggaagtgatagaatttatatctgaggtataattattgtaggagaaatgttaaagggtaccagtggtgcctagcatcttcctatgtgtcaatatcgctattgatccaactaagtatcgggtctcatataatttaatataatagcttttaagaagtatcgctagccaatcgcaacgcgatatattgcaaaggtactagacaccactggtacctaatagcaatgctcttatttgaaggggaacattcaatattagacttaataatgaaaatcataataaatataattatgataaattaattgctattaatacggttgactagaataatccttttcttcttttccttccatccatccgtctttgtttttttttctctttctaatgctaaaggacacccgtggtgcctagcacctcctatgtgtcagtatcgctattagtccaactaaatatcgggtcccatataatttaatataatagtttttaaggattatcgctaaccaatcacaacgtgacatgtcgagaaggtgctaggcaccactggtgccttatagcaatgctctaacaaaatatataggttttatcatttttattaactttctctctctctcaatttattatttcaaaaatcttttcagattaaattattaattattttgatctaaaaataatattattgtggtctatttttttttaagataattaatttgatatatgaacaatatatatattttttactatttttctagataacttaagtcaaagtgaaaaatttatttaaacactttcagccattacaatagacttgaaaccaacagagacattatgctgattaaaaacacaatctgacgaaaaacaagactctctagcaagacaatgagcagccctatttgcagatcgtttaacaaactttaaagaaacattattcaaagacgaaagtaaagcccgacaatccccaacaagtaatccaaactgagaaggcattaaaattgagctattaatagcttgtaccaccaccaaagcgtcagtttcaattactacactggaccattgttttctttctatccaactcaaggcctccttaatgccaattgtctcggcaatctcgggtttaaccaccccaaaccgagaggcagaaatagcttcaaggagcattccattcgtatcacgggccacacacccaaagccaaacttattttgtttctgaaaaatagccccatcaacattaatcttaaccatatgagaa

SEQ ID NO: 256879 - DNA, 738 bp, Cannabis indica
tcaaggaaagtcaaacttggttgcaaaaagtctaattggcttggaggaattcttcaaggcaaaagagaggtgttttgggtttttgagaggcttgggaaaataatttctaaggttttttggagttaaggagcccttagattaagatcaaaaaaggaagagaagaagaagaagtcaaaaaaaaaaaaaatcagcgtaaaaaaagaggttttctaacttcaagtgaagaaggcttgaaatgcttgatgaagatgaaatcccgaggtgctctcaaagtgatatgggcgtgtggaatggaataagaagagtgaaaaaattggttctcaactcacttatttatagttgagtccaatatcctaatccaaaagctacttggactcttttaaatttaaaactttctaagtaagaggtaaatgataattaaaagatataattatatcttttcccttctcattgttaagtattttgaattcctatacaactaggaataggaatacaaatttaaaaggtaacaacaattcctaatgctattaggattatagaaaaattagagaaatcaaaggaaaaagataaatgataagcaaaaggcaaaagtcttttctctttctcccttctctctctaatttcgaatggcatgtttaactagaattagaatttcaatccaattaatccaaatgccataacaaaaattaagaaaatctcaaattttcaaagaaagagattgataagagataagatttt

SEQ ID NO: 256880 - DNA, 2118 bp, Cannabis indica
agtaaataaaatctattataagatagatatcacttaatcgtaatatatattatattgttatgtattaatataataattatatatatattaatttaaattaaaaaattaatatatgactcggtgttattaataagtgccaaatcacaatatgtttagctaagtaattttagactaaacctgtaaatgaaaccctaaactttttggtaataattaaggtaataatatgtttaaatatgataactatttcatccgacactaattaacaacacctaatggaaagatggatccttcattaattagctaaagtgggggtaggtttggatattatatatttgaatcaaatatcaaattattcatatatatacactccaaaaataataagtagtgtttataattaaccagcatgagtcatccttcactcttcaaaaataataattgtcaatatatataagataaaacaagtaagaaaagttatatataaatgatcacaatttctcatgaatccccctgtctcagttcatcactccatcaagctttattgtaagagagagagagagtgagagagagtaatggacgggccgtgtgaaatgaatggggcccaaggagcccggtctcagttggggccttgcttggttgctcctatatctgattgtcaagtgttttggttgatgacgtatgttattctttttaattaaatacttccaaagttgcgggttcactttctcattttacctattgtttaaaccctacttgacaaaataactttttgatttcaatattttactttatatattaatgatttttgcaccaaagcttccaagaaaataagtttgtatagtcccatcttttaaattatttaggtcaaaagttaagaatacaagtacacgtaccaaaggggccaaattaataataataattaagactataattaaattctttgaaacaattttggccatctctccttgggactaggaactttgcctttagttgtacgttatcaatgagtatatatcttcattcttttttccatcaaacgggaaaacatatactatatataatcctaataattaaggaagtagctattttaatcagaggacgaatttgctagtgctaagatcatatatttatttataattgagaagatcgataaccctaattaatcttgttccgaacaaacattaatcatggtgcatatatatagcagtctaatattataatgattattataactttaatccattcagccaaatgatctactgtagtttcttagcaaacaaaaaaaaatgatttactatattaaattgttatgttaattgttaattatatatttaaacaaacttcttatcaaacaatggcacttaataaaaataagagtagagagttaagtgttgaaacatgaatacgatggatacaaagcctaatgacagattctattctattttatttactatatataaaactgttagtgttataaaattctccaaaaatataaataaccacatatttaactatatttcaagtattttaatataaaaaaccttaaatcatattttttttttaaaaaattttgctaaattaaaaaaagaataacgagatgagcagaaacactagcctgaagtcattgttggagattgcacttacgatcttctaaaaatactctattactttaaaacatttttctttgatggggaatgaggaaatacatgaacctggggaccactacttatttataagctcattatagaatgcattttagatatttataatttgactctcaaacaaattataaattaacttatggtatgtacaaaatatttttatgacaatttaatacctttttaatactcataacataattagtcatttaattttgtatcatattttattgtagcatatacattatacatatgtacccacaataagattttaatttaacaatctcctacttgggcaacatatgttaccttataaatttacaacattatgagctcaaaatttactattatgtaaaggtattcagaataatctcgtccatcaactatactcatatatatatataggatcaaagcggtcttcatatcaatcatgactaccatcaatggtcacatatacaaatat

SEQ ID NO: 256881 - DNA, 776 bp, Cannabis indica
agatttctgatactcttatgtgtttaatttcctatcattttagaagttcatattcaggttgttaaatcaacatacttgtgagtagatctaagatcctggtaaaataacttccaacattaaccttgtcttgaatctggtaggctcattccctgaaccttctttattcttgaaatgccatttacatcctaccaacttgtagaactctggattcttcacatctaagtgtgtctcacacatccaccgcaattctaaagtttcatgcctcaaaattgactcgcgaactagtgtaggatttctgagcgaattttgtgcaaattttcttgtcattttattataatttaatttgacttccttccctataaaaaagagctttactttctcccctaattcatttttcacactttactttctctctacaaggtcagagcttctctctcttcacactttctctctatagaaattatgaagcaatgctagattttgacattttttcttgaattcccttgtaaggcaattaactttttatgataataaaagctctaagtagatgtagctctattaccttagcaataaaaagagtaaactactataattgtagtgatttcttttaattttttgtttataaatttattgactactatcgcttatcagacgatatgaagttgaacacttttcatgtaatgaccgctctaagaatttagattaagtaagggcaattagcactaatttttattattttattattatatgtgaattaatttaattgtggaccccaa

SEQ ID NO: 256882 - DNA, 1612 bp, Cannabis indica
  modified_base (107)..(107): a, c, t, g, unknown or other
ttttttttttttttagtgtttttgtacatacaaaagtagcatcaggtgaccatcggactaccatcggaccccatcggacttacctaagtttttttttttttttttanatgtttttgcaactaaaaaaaatatggaaaatttgagaggggtatttttgggttttagataaagtagtcatatattttcaatgatgatatgtattagtttagaaataaaatattaggtatatgtaagtatagaaaatcaaatttcccaaatgaaatgacacttctatttgttcatttttcttgaaaagaacgacacgtcacgtcctctaataatccaaatcaactaacgatccctaattttccccaccaagtaacatattttatttattaattaaaataatttgttaaaaaataataataataattattattattaaaaaaaaaactctgacttaccaattagcattgttccatatggtgccacgtgttccatcatcacccgccagttcttgggtttcccactacaaaataaaataaacatataacaaaatcacgtctgtgactactgaattcactccattcaatttctctctctctctctctctctaaaacagtggttgttacttcccacagttccggcgtccgccatggacgcagcttctcacctcgtttgctacggtatcgagcctctgcgtcgaaccttcccgacccgtagatcctcttcgtacggaagaattcggatccccaaacggactaccagtcgagttcttgcggtcgctaccgaacctaaaccacctccgacaggatcgtcgaaacctcctccgccggcaaaatctgttaatggagtttcctcggtgagttaatatttgtgattgttgttatttattgtgtgagattttgctttcattttgcttgattggttagtgaagttgaactgagatgagtttaatttgtgctttatgtagttttatttagtatttgtactttactggttttgaaatttgcagaggattggagatatgtcgaaggaaattaaaagagtgagggcacagatggaagaaaacgaagaattggcgatactgatgagaggtcttcgtggaacaaatttaagagattctcagtttgctgaggataatgttgagcttcgccttgttgaggtataattacttttactcattattcagttgaatttgagttctttctcccattgaaacacctcattatgttgagaatactggaatagaattcatgattgaaattaaagcttttatgtgaagagggtgagactaattagtgaatatccaatccaagttgcaattcagttattatgcttctgtgttataattattcagttttcaaatgtatagcactagtaagctaaatgtgcaactttctataaaggtattacttatattggttggtggttttgtgttattctgcttatgtggtaagcgaaagcagtgaattctgcctttggtatatgatcctgctagcatctctgcgttattggggaaaacgtccacgtgcgtgttgctacacgcacttgtccaattaactgtctgttgcaggggggtttctttcacgtattgcattagatgtcataaacaaaaaaggtcaaaagtagg

SEQ ID NO: 256883 - DNA, 1082 bp, Cannabis indica
atttttttaaaaaaaaaaaaaaaatcaaagaacattaattagccaaaccaaaattagatcaatgatttagttggcattccttataggcacttcctttttcttgacataatcataataaaggtacttttgccttaacattatcataggatctttgttgtcttgggtttaaggcccatttttgtttcttattccaccaaaacgttgcatttgcagcagaacagtcagttgtaccgtattcacagccattgatctcaaactcttgataatgggcctgaaatggggccttggcccaatctgcaccagttccatttgaggcccatgttccctcccatatacttgctgagataaacatttcatttcctggataatttacaccatagttggtccaatttttatacacccttatgggggtattgtccacaaaaaacctgaaaaaaaaaatttcttcaaagtaaacagactattttaaactttatttttgacactataaattattaagaatttcttgaaaatagacagaatacctattataactacaatatataacatcatataaaaaaattgaatataatttattaaaagtacgaatgatgttcctacccaaaaagctttccaaataaataaatagaataattgataggttaatttaatttaattacactatttgatgagtattccaaagaattgcataagaatgaaaatcttgacttgggtcaaaccaaagatgaatctgttgttctctgcctccataatcgtttgagtaaacattagtctgtaaattgtaaggagggccttctgtgctcaaaaattcaaagtccaattcactgtgaccacagttggacattgactcatcacatttatttcccaactgccaacataaaaagggaaaaaaaaaaaagctcacttaaaaataaaaaagaaatgtaaaacagcaaaatgcacatttaagatagtcaaataaaaagttaaggaaaaaaaatattaaagctaataataagttacagaatatactacaaaggttgaaataggttttaggaaaataatttttttgattcttattatataaaataaataatatttta

SEQ ID NO: 256884 - DNA, 1694 bp, Cannabis indica
ttatttataaaaataggtttcttagtaaaaaaataagttgtttaacatttttattgttaattgttttataatttatttatagttaatttataattgctatgtgattaattttcatgttgctttttattattttataatttatttttagttgatttataattgttgtaagtttcatttttttcggtatattttagttgttggagaaaaatatatttgtgattttgacttatttaaaattgtatttttaataaattaaatttgtaaatataactgtaaggaaaggtgtgggtcttaaaaatgtaaacgaaatatatatagaaaaaatgtatttatgagaaattcctaagttttttgttaattttttttattattatttttactgaagaaaaataataaaaacataataaattatcaaacaattaatcgtcatactcattaaaaattaaaattttatattcaattattacataatatagtaaatattaattagcaaaatttaatcacaatttcatacgtaaatgtagggaaatttacgctaaaaaaggaaaattttgaaataaaaatagcaactaatgcgcattatttaatcactacaataaataaggttcttgcccgcctaaatttgcaacgacaaattttaacaagcgcataattatacaaacaattcttgtcgaaaacgaattaacactgacacttttctttgttggcacaaagtgacttgccattgttaagtgttagttaaatattcactgaaaaatttttgctagcgcaatgatgcgccgatgaaagttggcacacttttttattttgttgggtaaaggttttctcatcgcaaatttgcgccaacgtaacttgtcacaacccgagctctaaggtcaaaggtcacactttgaccctcaaaggtcacactttgacccttgtaggaagatagcgcttataaataatcttttaatttatatcacaaaatatttatttaaaaataatagattaactcctatatcgataagaatatattagtaacaaaatcaggaccactcattaatataaaagaacaataatatgctcatagttatgtagtcaacaaaatactaaaataatatctagcattcaccattcctcatttgtaaatagtacataattaatttaagtcatctagaccatctattcgagcttaaatacaaaatcagtttcattggaagtttaataagtagaatacgactaaaagaataacgactttcttcctcaacggtaacatcctcatccactagcatcaaactgagttcctgaaatgggagaaaataggcggtgagcttataaaacccagtaagaaaacaactaatatcaaaggacccttggtttagtaaaaattcccgcatgattagattttaaaataaaatatctcatcaccattatcaaaatgtataaacaaagtagagagaccacaaataatcacaaaatcaagtgtcaaatgcatatcacaccgtctactagatccctagctctcaataacaatagatatatattggggctcagattcaattcactccctggacaaattctaagtctttcacctacaggtgagtgcacacttaatctacctgttatacccaaaatttgactgccacctcaatgaaggacacatgtcaagataaagggaatgtaaatcgataccatttcttttacggaataactca

SEQ ID NO: 256885 - DNA, 1541 bp, Cannabis indica
gaaaaggaaagtttagctccggttttctcttcaagaaacctgatcttagaaaatgggaaactcaacacaagatcagaataacagctggttagcaaagaatcaatgtgtaatcaaaacttaccatatttacctcaatttccataaataggaaagctagtcaactttccttccaagtttagatatacacaaatagggaaaccatatcaatatatgccagccgaaatatacaaagaataataaaatatttttgtcaattaaatatgccaaaaatggaattaacataagagcatctccaaatggaaagtataaataaagtgttgaaaagttaaaatatagttcatttaacaaaaagtgtgttctaatagtgtgccaaaaaagtgataaatttggcacatagtaaaatttgtgccaaatttggcacaatatttgctatgatgtaaaatttacaccacaatcaatgcactactttttcatttacatttatatcatttctattattttattagtatatttaactatcacattaaattatgaaacatttatattatttttttattatcttacatataaaactaataataaaattgattataaagttattagatttttttttaataaaacattaattagatattaaattttacatcaaaagtttacaattgtgcattggagcacaaagctaaaatttggtataaatttaccacaaaactactttttgtgctaaatctagtacaatttttatatctcctattggagatggtctaaagaaaacccaaaacttatgccttcactactccaactttccttcaattttgaaggatatattgatgtaagttggatagccaactttggggataatttatccacaacgggttgggtatttactatggctaaacatttagacccgcaaatctagaaaatccaaccacccaccccgacccactgctaaaaaaaccaaaaaattaaaaacctgtgtggtcaggtcgagtccaacccaaaaatgccctacacgggtttcgagttcgggtatcaaaagttggttttttattagttgggttctaacccgtaactcgaacatagtaaaaaaattaatttttttattacatttaataaaaagttaataatattaattttatcacattttagtttcagttcactattcattcaaactattcgaagaacaagacacaagacccaaaaaaatcctagaacttcttcttctccgagagaggcagcgactgctttttcttttccaacggggtcgcatctcagcggctagctcagtcttgcgagcctcatccctaacatcgaaagtcaaaaagtcttctctgcccgtgtctacccgtgcccctcacgagtgtccacctgtgactgctgagttctgaggtggcgaggtatcaggtatgtttgtttcagagttttcgttttagtttcacacttcacaatttctttcattcttgatttaatatttatattatatggttttacaatttttattatatatattatcagtgacggatccaggatttttactttgtggg

SEQ ID NO: 256886 - DNA, 943 bp, Cannabis indica
attcctaataatatttttaattatatgagaaacaaaaataatcattactaacaaaaaagtttgactaaggtcgatgatgtctagtgtggaattaaatttcataggttttatatatagtaaacaactataagatcattttggaaaaacatatatgtctatgactaaaataatacttttctttgattaatgctagttagttatgtcaattttttttccaatttgttttgggacattggataatgtcaaaatctatactcaatttggctaaagaaaatgatgaacaaataaataaaaagtaaaagggtttgcattgcaaccaagtttgatgtcaaaattgcacctatgtcacatataataataatatgttatattaagaagagaccaatagctatgttgttttgcacttgttaggaggatatatataagatatttatttaagagataggtatggtcaaaggaaattgagaattaatttgacccatttgatttgcacttaattaattaaagtcttaatatgatataatcaatttcatctttattatttgagtactttttacccaactagatagctatggtcaacacacccatatagacccaagtcaaatatatatgcatatttcaacttgggtcatgttatgtgtgtttatgcactatacccatataataccactaataataataatattattattattaatctcttaattatatgcacttttcattatctacctcatcaattaatatcttcttaagtgagcttttctagcatggtcttaacaataattttcttctgttatagtaagatttttactgagtttaaaatgcccatgaaatagatatttttcacctaccaagcaaaaaaaaaaagtagcataaaatggatgatctttgttgaattaagtgattctccacctaacttattataggtattttttttctatag

SEQ ID NO: 256887 - DNA, 792 bp, Cannabis indica
actctgattgagaaatatatatagcaggcaaagaagagatgggaataactctctttctaccaggaaaaaaaattggacaatcaagagaaatcaagaatatgaaatctagatataagtctcttgtgaataggtgggagtttaaagcctgccaaaatatgagtctatgcttacgaacgctcaaacattcccaaactgccttcttatactccacttgattatcatttaacaagctattataaaatttccctactcgaaatttacctctacagcaagttgtaactaggttttgcttgttgaaagtcttcctcatatgacatagctttcgccaataacaacttgagtctgaattgaagatattattattatgtataatttaacttttcattcctaatttatgtgagttaaatgcaattttttaaatgtaatttcttaattaatgtattttagaatttttggcatgtattttttcaattctttatgtctctttgatcagaaattccctatatcgtgtgaattataattttcaatacaatttaattaatattttgttgtgttatgataaattctattcatgtggttttgcgttttgtcatgttatatttttgtgagtttatgaagatgtggagatttttagaaatttttttaaagatgataaaatccttacagttaagttttcttcttatttcaattattatattaacattttattttttaattttatttatttatttattattatttttatttaggaaaaatgtatattcttacctctattcatttttttgtgtgtgt

SEQ ID NO: 256888 - DNA, 761 bp, Cannabis indica
taatttatttttgtttgataaataataaaaatagaaaaaaatcgttaaaaatatatataataaatataactttcatataaaataaaaattattaaaattaaatatcttcacaaattttttttagagtaaattatatccttttaattcaacttctcataccaaataatatagaaaaaaactactttgctttccatccttcatattctttattcttcatatcctttccttccatcgtactttccatactaaccaaacatatgattagggttgtgcataaattgatcaaatccaatgagaatcgaccgatccaattacaatagaccgccaaacattggatatccaattatgatcgaatcggattggatgttatttttaaatatctaattggatcggatcggatggtggatgaggcgtctaaaaatcgaatacatccaacatccaatcgaactaatttgtatttacatttactttggatgattaattatatttatattgttatacgtcatatctatatgtatatatgaaaattaacattaaaattttactctttttttcttgattggatggattcagtccaatccaatagatactggacctaaaatattagatggatctgagatcaaaaaaaatactaggtctaaaatattagataaactcaaattaaaccaataaatatatatctttatacattaaaagtgcttatctaacggcatttcttggtttaacagaatataccttaaaaataaaagaatattctgtta

SEQ ID NO: 256889 - DNA, 506 bp, Cannabis indica
gttcttggggaatcttcaggctttgagggattgaagttttactggagattacgttgaggcgatgtggaagatgcttcagcaggagaagtcgaacaattatgttgtggcttttggaaatgtgggtttgaattggagagatcatggtctatcgttgagtggctttatacaggggcttcgttgaagaagacgaagaaaaaagagagaaaaaaaagaaacaggttggggttatgggttttttgggttgggggttttcgtactcgcgagctttatatgaattaaatattatatgaatacttaaaaaaataaaatatattaatataatcattttgtcaaagtattaaaattaaaaaaattaaactatttggatttaacaaagaataaattgaaagaagttaaataaataaaaaaataataaaaatatcaatatcaaagagtagagacttaatattgctaataaaataaaagtttgggaactaaattaccaaaaaaataaagtttagggataa

SEQ ID NO: 256890 - DNA, 808 bp, Cannabis indica
aaaatagactgtttgaacattgtttttatattgtaaattattttgaatttctcaaaattttgtaagatatcctaaatagctataacgtacatgaatatgaaaaagaaaatagacaatttttgtttttcatctaaacaagtagagagtgaaaaatatcaccctgtatatgagattgaatatgaaaaattatatcaccctgttacatgttatcaataaagaagctatgattacacttcaatatatattagaagaattgtttaaatgaaaagaaaaagttgtgcactaatttagtataaatttaacatcatttgatgcactgcacaccaatttgatgcaggtataataatgtgaagatttcattggtggaatgtgtaccattgaagatgcttaaaaaaaagtacatgtaagttgtaatgtttaagtgcactcttcataatatattatagtaaaagctaaaactaaaaagatgcgatacatgttaggccaattctaattttattttaagtgagaaaaatttgaagagaaaaaaagtgttataaaatatattaatcaataaaaatcagccttgcaatagcaccaaaggtagtaatcaacatttttttttcacttttacagttactaattcatctccaaattggaaaaaaaaaattactctatttttaaacatcagatataaagtaattttttttttgggaagaaaaatataaaaattaataatcattttacattgaacaattgaacaatgaattgttttttttttttttttgtagtatattttctaatcaattcttctataatattatatacc

SEQ ID NO: 256891 - DNA, 936 bp, Cannabis indica
agtaagttttatttttcttctatcttccttaatattttagataaataagaaaaaaaaaaataatgtagagcaaaactaaaagaaataatgagttttggaaatgagtgactatggagaaatctaatgctttaaagtttaaaaataaggctattattgattttttattgtaaataactaaatttaatttttggttgtaaataaatatttgtgtaattttttatggtaataataattgttataattggccgccaagtgttagtgtcaaattaatatctacgtatcattatttttattggtattttaaatgaatttttaaataaaataaaaatttaatgacttcaagttaattttggttaaaatggttttctaatttaaaattgaaaatgttcttttttttttaaagaaaattttaataagttttttcctcactcttatacttgttagtgttcttctaaaatctcatcttatacatctaaaaaaaatttaaaatttcaccggcaagaagccaagactgttgtattttatttttctattcgactcttggagaggaaatgtagtattctaaaacttataagacatatacctagaagttctaaaaaaataacttaagtatcattatcataaaattaaatttaaatatttacactataaattactcttttttaaaatgatacataacataatatatattaaaaaaaaaatattgatgtacaactttggttcaagtgacaaatgacaatcacttatttaaatatggagttgagaagatttggaaatgatattatcaatacattttatattgaattatttatatagaatagcagccacctctacattgtcggtggaataatataacatttctcttattttcaaaataataatacaaaagctataaaaaaaagaaaatacaaaaatatttttccattaccacattgc

SEQ ID NO: 256892 - DNA, 1286 bp, Cannabis indica
cctagccctagaattattcaaacaacaaaatcaaaattacacaaacaacaaaaaaaatgcagatagagaaacactaaccaaattgtgaagataaaaagaaaaatcaataagaaaagagaatgtatcacttaccgcttgttgggaatttttgggtagaagagaactttgtgagtgaagtctcgagggttgagaagatggatcttgatgatttctagaactgaaaaaggtgatcagatgtaatatgcaagaaaaatgtaagggataatgagggcatacaaatttggaaagaggacagttgaagttttttgcaaaaatgctcgaaggtttgaagaacaaaaatggtgaaatagatgatcagttttaaatctatacccaataagtgatcatcgttcaatcaaagaaaatctgatctaacgggtggaaactttgcaaaataggaatagtcagggcattaaatgctcaatgatgtgcctcaaagttttgaaccgccaaaactcaaagcacgcaatttttcaaatgggttaaatacaattatacccctaggatcatttaaaaagttctttttaatcaaaaaatactttttagggagaaatttttatacccaaaattaggctatttatcaaaagctcacaagtgtcctacaaaggaatatgaaccagcttgaagaatataataagtaaattgcattcttaaatgcaatttaaataactcgttccaattcattaaagttgatagaaatgttcaaactcgttgattgcttattttcaatagtattttctcatttctttgatttgtataggaataataactattaaatataattgacgaggccatatgtctggctcgagataaacagagtatataataaaagcgtgcaagatgagacatcaaggagtttacggctcgttattcctcatacttggaaataaaagctttcaactcatcaaatcacacaattgtacatggagaaaattacgttgatccatctcgctctcaacgctacttcgcaaataactttataatatgagagtgctgcgagaagaagcatgtctacacttagtatatttttctctaaagacggataagaaggataactcattctgagcgagaagcaacctttttagtcagcataactgtttaaaagatcaagacaaggagcagttgagtagttattagatatatcccatgtgaaaataaatgaaaggtgggaaatgtccacgtttcatcagcaattgtaaatgaatcgatcgcaataaaaataactgtcaacctatacacctataaat

SEQ ID NO: 256893 - DNA, 812 bp, Cannabis indica
ctctctctctctctctcttgcaatctcaagaattgtacttcttgcagagtgagattgtcacgggaggtaagattgacaaccacgacttcatattgtggacccaaaccagcaagaacatataagatgagttgatcatctgtgattgtatttccagctgcacgtaatccatctacaagattcttcatcttgaaaaaggtattcatcaattggcagggagcctttcttggtgttttgaagttggctcattaagtgaatcaaacgagctttggaggtggtgccaaatatttgtttaggtgttctccatagcttatgagccgagttgtagttaacaacatgtcccaacatgttttaagagatggaagacattagccatgataagagaaactgatctaaacacatccaacgaatatattctggattggttacctaagtagtattttctagtggttgtcgaatgcgttgttgtggtgggttcaaattctacaatattggttcaagatcatgcgccctgcttgctagtaacacttgtgatcgccagaaaaaatagttgttacgattgagacgcagaggaggaagaaacattgttgttgggacaacaaagttgttggtaggtgctcctgaggaagatgccatggaagaaccttgggtgactgataccaagttgtccacaatctccccaacaacaggtccacaagatctcaagaaagtctcaccagaaccactgcgagttcccctacagtcactcaatccagggccggccctgacttttagtgggccatagaaaaaaaattattttgggcccttatttagaa

SEQ ID NO: 256894 - DNA, 1040 bp, Cannabis indica
aaatttagaaaagtttaacactccaaaaattatgttcaggacgcgtgattattttattttatacgagtgtaaaatagactgttagaacattgttttctatattgtaaattattctgattttttcaaaattttgtaagatatcttaaatagctataacatacatgaatataaaaaaatttctggatgccaaaactagttaaaagtacacccgtaaatctcttttaaaggttgtattgtataatcaccctaacttttattatattatctcattaattaatagcggttataaatatagtgtaggctaataaaaaaggttctatacttctggcctataaaaggacaaccccattggccaaaacactaccacaacactccatcatcgtcatcatcatcatcaatttcatggacagttcctctgtaactccaatgaaaccagacaataatggccaatatgatgatcaagacaacaccaacaacaacaacaaactttcaactacacaaacaaaaccctccaaaggtggctggaatgcggcactcttcatcatctgtaagtagtccatatatatatatatataatctttaattaattattctatttataatacaaattaataattaattacccatcatcttcttaattaattatatcagttgttgaagtggctgaccggtttgccttctatggccttgccgggaacctgattatgtacctaactaacattctccgtcaaccaatggccactgcggccaaaaacgtaaacttttgggtgggtgtctcatctcttttcccaatcctcggcgccttattggccgactcattcctcggccgattccacaccatacttttctcctccatcatttatttaacggtacttaattttcaccatatttatccttttcgtttaaattgaaaaaatgtatttaattacgttacaatgaggtaagatgaatggagttttctttttgttttattttttggattggtaaaatgagttacatttttttttttttttactttttggctcttgtcggatagttat

SEQ ID NO: 256895 - DNA, 467 bp, Cannabis indica
attgatcctcttgaacactctttttgggaagcattcaatcataacccaataagtatatatgtaaggaaataaggacatatatatttgattagaattaatccacctgcatgccaccaaatgagagttttgaaaatcatcttttcaaccatcccttcaaagtctttaactcacattttcctagcacaaatagctaggcaactcctaataatcatgcatgtttggttcgtgccttgtcaaaagttcaaaatgtttttgtagctctaatctaaaagacaaatcttcgaaaaccaaatttacgcgtgcttttttagttctaataataagatgttttatatttgaagaatgaaggaagagtcttaattattatatgggttattgggacttatatagctagctaggttgagaactgacaatttatttatttattttgaacaagagaactgaagacatttggtttgttatagttg

SEQ ID NO: 256896 - DNA, 769 bp, Cannabis indica
atatttacataatattttttttttacacttataacaaaatacattattaaaataataagagattataactatgcactaaaatcaagaaatttcataattacatttagctaagtacatgaggtaaattttgagttattttagctcaggatatatttttttaacttttttttgtttaaatctcttagctattttttatggaaaaatactaaaagtatagatggtgtgtaatatttttgtggggtataatattgatattggtgcaactcattattgagtcttacttgtttaatttaataaatattatagaaaatttctaatcaattataaggtgacaattcatcgtaaaactaactataattatgagtatcttataataatattcttttttactttttttttaattattttatattagttattgtgagtgctcttctaaaatggtacacaataatttattagagctcgaactttgtcaaaataaaataaaagttaatataataaattgaattagaagttttatgaccaaaattgtaatatattttttttgttgtcaaacttaccatatgttattagttatattataaaaatatatatgtaaaaattaaattcagagcattatttcataatatggtaaaaatattatttactctatatattaaaaaaaagtgaatattgtggtccatttaatcaaaatttactgtattcttaacaaaaaaaaaaaaaaaacaaaatttaactgtagaaattatgtggtgcatatattgtaacg

SEQ ID NO: 256897 - DNA, 1808 bp, Cannabis indica
atcacctacaagatctccacacccacaaaccccaaaccccatccctattgaaccaagaatccatgaacccatgcgccgacgatgtaacctatcaaacaactacgaacgtccaacaatggtcgcctgtggagaaaatagaagaataagagaagagagacagatctgtgttagaagtaaaatgcacaaaaatgatggctaggccatgctagccattctcggtcgtcaatcgtcaaaggactcaatgttacctttctagctcccaaaacttctcgatccgtcacaatcctctcttggcagctccaatcgcctagctccgatgtgcagtagatctaacgaaacaagcacgagacagatttaaaaagacgccatgcctccaatatctctactttttttgaacactcttcgatttgataaagtatttttgagaagctatttttaaaattaaaataatttatataactcctaatctactcaaaattatttttcttaataatatcactacaaaaaaacttatttcaccgactagttttttggtcattaaaactcatttattagtcacccaaaattttttgcgacaaattatttttagtcactatttagtcgctgaaagtcggtcgtagaagaaatttagtgactgatatatttagtcacaaataatgttactttctatgactaaaatttagttacaaaatattttaaaattagtcacaataagattaatatattagtcacataaataccaatatgcactttcaacaactaaaatttagtcataaaaagggtaatattttgtgactaaataatttagttggcaataataaataaaaaaattatacaaattaattattcagtgactaatatttagtcataaaactaatttatatttttttttaatttagagtatgttcatttaaattatatattaaaaataaattattcaaagctatatttaaataacattatacaattttattcattacataaaaaattacaatgtcaatcataaaaatttcaattacaatataattcttgatttgtactttgtccataaacattaaaacaacatactcaatgaatcagagttacgaagaagaaaaataaaataaagtacccaatacaaaccaaattaaatgaacaacaaaaaaactagcaatacaataagcaaacaaaaaaaatgtgaaggcacctgcatgccctcaaactcttaaaacattctgtgagaatttgtaggcatgatctgtgatgccagtattacttgaactgcttattgggagtcacattgaaagatgatctcaagcaccacaagtccacaaccatgtttgtatttctattgtcaaatttaacatctctatagataaatatgttagtaaacatctatgatacaataaaataaggaatagaaaagtattatagtaagaggcttattttggaaaacaatccaaataacagaacaaactcaatgaacaatggaatgactaactccacaatcgtgcacagcacacatgccactcctctctattataggctgttacttttgtttggtacctataacagaacaaaggaatgtcaattagtgagaaaaatcaaaatatatctattatttattttgaaagctcaaaactgtgtctaagaatacataatagctgtgtttgtgaaccttcggatacagtcagaagatagtctaattttccaggaaacaatatagacctaattggctgtaaatatacacaacaaaaataaacatgtggtggttgaatattttacatacatgtgccaaatctgagaccttccaacaatcaaatagcaaa

SEQ ID NO: 256898 - DNA, 910 bp, Cannabis indica
gaattatataatattaacattccaataaggaaataaatttaaataccctattttaaaaaatatatatttgttttctaatcttaatccgaaattaaatccgtactttaaaaactttaaaaaagaagataataataataatcattattataatattacataaatttaaatcccattttcaaaacaatttaacatttaaataaattatattatatatatatttgttatctaatcctaatcaaaaaagaaactaataatctttgagtctgatctatataaatacatataaacccaaaacacaaaatcataagacgaacaaacattagacctcggagcttccataatatatagtcccacgatacgatcaatctcacccatttttcaatttcttcagtgaaagcttttcaaatgggtttttggagaagaaaaactaacggtgcttataagcaagattaccacagaatgagatcattttccaaaaatcaacctcatggtataatataatacataaatttaataattaatgttttattggtttgaagctttgattctctttaattaataactcggtttatttggtttgtgattaaagtttcttgttttaacaattttgagtattgatatgatcacttctacttagtttgtttgttaatttgttttggaaaatttatttgaatgtactttcaacatcataagagaattttatgtaatgcttcaatagttgtagagagttgtttgtaatcataaatgaacttttttttttttaggaaatttaagtatttgagattgatcatttgattagattagagttaacaaactcttgaagaagagctgaaaattgacatttttgtctgatgataaagttgtagtcattttaatttaggaaaaacatgcttaaacaagaatgtggttg

SEQ ID NO: 256899 - DNA, 881 bp, Cannabis indica
attactgtgtagttaggaaccaaattgatcattttattgttttgtaacgaattgggcagtgatcactatgaagcttatgagtgaaagacaagattatttttttgataattttgctttgaaatttgcttgattgcaatgtagtgcttctagataccaaatctggattataacatgtatgtacgattgtgttatatttgtattcaaacaagatttttggctttgttcaatctagctgttttatttattgattttatcctaaaaaactaatgattagggaaacactagattgataaatttgtagcacaaatgtaatatgttctttagttgttgttgtgctgtttgtaacacctgagtgatggtatgcttttttttatttattgtatctgttgagcgccatctcaatcttgtctgcgatttattttaatgcagatttttggagttgcttatcttggtccatttggacattacctgcacataattctagacaaaattttcaaggggaaaagagatacaaaaacagtagccaagaaggtaaaccattctactcagccttgagctttagtttgttccttgaaagccttgatgtaatgacttaggtgttggaagaatctaactcaacattatttattacttgtgttagtaatgtaaaaattctgaaatacaatctctccggtcaggctgaaaaggaaaccttcagtttctgatgcttcagtttttccattttgctgaatatacttgactggagaaagaactttgtaggatcaataaggtgtttctaaaatgattttcctgaatgagttgacagtttggttgactcaagtggtagagaaaagtaaacaatcattagaagttaaatctaaaaagggcttgtcaaattgtca

SEQ ID NO: 256900 - DNA, 2357 bp, Cannabis indica
cgagatcagaacctaggacccagacctggacccggctctagacccagactcaagacctgaacctggacccaagcccacaccagaacctcatccaggacctagaccttgactgggactcagatcgtgaccccgacccagccctgaacagggacctggaatcagactgggacccagacccagactcaaacctaaccttgtactgggaactagacttggacccaaactccggatcaaaacccgaagctgaacttggacctagaccgggacctaggatctggacctagatgatggaccggggccctaaacccaaacctagacccaaacctggacaaaggatgtagacctaaatggggcacttagacccgaaactgggaccgagacccaaaactcgactccagactcgagacatgagacctgaccctggacccagaacccagtacctgactaccgagacacaaccccgaacccgaacccaaacccaaacttaggacacggcccaagacctgggaccccaattggaaacaagattgagatctgaatttggacatgagggtttgacctgacccgtagtcagtgtttgattccaggacatggacccaaatccgtagccagacctagacccagacccagaccgggatccagacccgatccgggacatagaatcggcatcggaccaggtctgggactagaaccttgacctgggacagtaataggacccaaactctgactagaacccataccgggacttgtacccagactggtacctgtgacttaggacctaaaccaagacaaggaccttgaccccagacagggacctggacctggaccttgatcgagaactcggacaaggacccaaagctggaccaggacatagacttagacccaaacatgggacacgaaactgaaacttgaacaagaacgtgaccaggaccctagaacacaattgaggctgtgaccaggacttggaactggactagcacctagaactagaccatatccaagcccgaaactaaagctcagacccagtcccgaacccggtcccggaccaagactaggagtgagggtcgaacccaaacccaaacctgaactcgggactcgatttcggatccaaaccaagcccttgagcgagactgggatttgcaactggacattgacacgaacctagacccaaaaatgaataccgacccaaacccaaaccaggatcaaaacacaagacctggactcggacctagacatagacccaaacctataatcagactcaaagctagacttgcacccagaccgaaactcgaaccaagatcggtatcgaaacacaggacttagaccaagaacaaaacctggactcatatcgagatcagaacatgggactcggaccttgacctagacctagacccaggactcaaacccacactcggagcatgatccaaacatagactaaaatctagactagaacccaaactcaaacaaggacttgaatccccacccgaactcgaaacctcactcaaactcaaaatcacaacaggaactagaactgtaataggactaggacatggacaaggacctaaacccgaacccaaaccaagattaaaacccagaccaagacccaaacttgaactgagactaggactcaaacctgaacctagagcgggacccaaacctagaccacaatcaagacttgcacctagaatcgagatagggacctaggcaacggaactaggatcaagacctagtacccgacgcaagacccaaacttgaacgtaggacctagctcgtgaccgagcacccaaaatgcaaccagaccgggacccaagattcggatctggatcttgacccggggcatggatcgatcccgtagtcagtgtcaggatctaggacccagccccggacccaaacccagaccaggacccgaaccaagacgtagacctgaacccagacccagacccaaacctagacttgaacccgtaccctatgacccaaaattagaacaaaaactggaagtagaccgggacccgggaacgggacaaacataaggacttagacttggaactgtaaccgtacttggacgtagacctagaaccgtaaccagaccaggacctagactccaactcaaacctagactcgaaccaggacccagacccgaatcccaactaagacttggactgcggacccgaactcatacccaaatatggaacctgactcaaacactgaactagggcttggacctagaaccgtacccctgtctcaatcctcgaatctaaactacagacctgggacccaggccttaacgatgaacagactgggacccgtgactaaagatctagatcttgacttgagatctaggaaactagagcttcgaa

SEQ ID NO: 256901 - DNA, 563 bp, Cannabis indica
gtgtagagaaaaaataataaattagaaaaacataaataaataaataaataattattaatttttaaaaaaaaaaaattaaaaaacaaaaaaagagagtgtcgctgtcgcacgcacgaggggtgcgcacaaaaaaccatcgaaatgcaaagtggatgtggatctagcacacgtgcacacctttgacgaatgagaacacggcaaattttatttattattatttttattataaaaagttatgtattttgactgaaatacccctgcagtaacttttaattcacatatcacaaaatttattgaaataattaaataattaaataaaatactaatttttgtaaaaattttctaattttatatttaaagtattttttttaatatttttatgatattatatgaaaatataagaaaataaaaaaaaaatatatgaaagtaacacgaaacaacattaaaataataacaaaataacagaaaaataatataaaattaacaacaaaataataataatacattataaaaaaaaccgtattttaagtaaataaagtctaaaaaaccataaaaatgttaaa

SEQ ID NO: 256902 - DNA, 1381 bp, Cannabis indica
cggtttagaaaaaattcaaatcgtgaccgcaccgcaaaaaatttcaaactacattttttttttttgcctgaacacccctaattattactgccaaaaattaaacttaagtatttatttacaactgaaaattaaacttaagtatttatgtcacaaattactctatttttttcctctctttatcaagtctttgtgattacatatccaagtcaatgcacaagaaaagaaaattcaacttctcttgtttgtccacttgtacgtacaccaataatgtattattaataataagctttaactgtgcatatatactccatactccatactccatacaaccacacaccctccaagaaaaaaaaaatatcatgagtaagctgatgatgaaattaatgttgctcttcatttgggtggctacccttttgtgttgttcactagcacaaaaccaagccatagataattcaagatacaaagcttgtgcaccaaaatcttgtggtacaggtcccaacataagctaccctttttacattgaaggtgcaggaaaagactattgtggacgccaaggcttccgaatcgcttgtcaaaacaacaaaccgattttccaaaccgatagaggtccttacatcgtaaaccacatcttctacaaaaacaattccctaaagatagtcgatttggatgtagttgacactgattgtgttgctcccaaccactatttccaatttaatagaggtctaaatttcacatttagctcgaaccacgggaacgttcaattcttctaccaatgcacaacgaactcgttcttaccaagtttggagaaatctttggttccttgtgcctcgaattcaactcattcaactctagttgctttggtgccaaacgacgacactttgaggactactaataatggttcggagcaatattgtgagaaacaagttgctgtgccggttgatctgagtggaaataattataataatcaaagtattaaaacggttaattatattagacttttgaaagatggatttactttgttgtggtacgaggcaaattctgatttatgcgaagagtgtgagaatagcggtgggcgatgtgggactcagaatggtggtcttgtttgtttctgtcctaatggaactcaatcctcaacatgtgttgttcaacctaaaggaatagaagctcaaggtgctaacaaaactactagtaagtttcataatctcattttaaattttgtgttttttttaatcaatatagtaatataggacctattttttttattaattattagttataaaggaaattacactcatatggttttttgaagactttgttacgatgtgtagataggttattttttttaaaaaaaaaatatcttaaaactatttcttctccttca

SEQ ID NO: 256903 - DNA, 1965 bp, Cannabis indica
ttttattctgatttaatcaaaaagtttttaattaaatcccacttttcataaactaatagaatagctaggaatatgttcgtaaaagcacacacatgtggcgtccctgcgggttggggcgttacacgtggcgtccctatttgataggtcgttacaacatggtattagagtgaccagtgtttaaagatcctgaaggttggtttgatatgtacataagctgtgaagactagttcgactcatagttcagtaagttttaattattagattatctgttaattaccagtttgcttgtttatttggaatatgctagatgttagaaacatgtgaaaagactgagatatatggaaatacttattagtattgtcatttcttggaaatgtgaccacaggtgtatagattatgcacccgaggcggtctggtaggggtaaccgcgagcttgctgggctcggagttggtggtgagggcgagaacccccaaactgggaagagttatatgtcgcgatgcaggagaccatccggcagcagggcaagcaaattcgtgagctgagggagcataatcctgatcctccagcacctctggtagtgccataggatgcagggaatcgcctggcaccattgtatgagcggttcaggaagcagaacatgctagtgtttgagggtggtgctgatccactcaaagcagagcagtggatgagtatgattacctccattttttatttcatgcgagtcgaaaataatgatcgggtcagatgtgctatctacatgttgcgagatgatgcttgtatctggtgggagattgtgtctcagggtcatgacctgggatgctttctgaacaatgttttacgagaagtattataacaagtatattcgggcagcaaaagcagaagagtttatacgattgacttagggtatgacggacagagtatgccaccaagtttgatcaactggcaaaatttcctttagatgaagtggatactgaagctgctagaaaagcaaaatttatttggggatcggatgaacacattgcacgggatgtgatagttgctgccaaacaacctgggtttgttcggacttatgcataaatagttgagttggccctagctactgagggtgcagaagatcagatacgaaagaaaaatattgcgagagacatctggtgcgggttttggtaggggtaatgaccctggtgatcgcaagaaaaggtctaatgaaccatcagcttcaggcccaaacagattccaaagtaaccaaggtttttgtcatggtggaaacgaaaactagcagatttttcctgaatgtccaaggtgcaagaggcgccaccagggcgagtgacaggccagggcatgcttttagtgcggggtagtgggtcacttgaaaaggaatttcccacagctactgcgaccagaacagaagaaggatgacacatatgctcctactcgggtgtttgccctaactcaggccgaggctgatgtcagcctttccactatgacaggccaagtttctattgccggtactttattgactattctaattgattttagtgcgacacattcaagtagggtaattaacaatttgagtagacctagtgttatgctttcaagaggttttggtaccttactgcctactagggaagtggtcatctccaataggtgggttaggtctcatccaatatttgtggaaggaagagcgttgtcagttgatctgatagagttaaatctagaagattttaacgttattttgggtataaattggcttgctaaatacaatgccactattgattgtaaaagaaagatggtaacttttagcctgaaggccatgacccctttgtatttgtgggtaaggtgtagggatcccaaatttctctaatctcagtgcttaaagcaagagatctgttatgtgaggggtgcatcggtttcctagcaaatgtagtggatactactagggaaccactagcgggaccagatcatgt

SEQ ID NO: 256904 - DNA, 843 bp, Cannabis indica
aaacactcgtgttggtttgtagggtcagtcatcagtctaggtcactttgtgagaacaatgtgttttagataaagaactgataagattctatgaagaattaatgaaggaagagaggtttagagtcttggaagccttgataacatatgagacttaaagggagagaggtttcacacttgtgggaggcttcatggagcatgagagaagacttggagagaccttttaatgcttgtggaatgacttagccccctagagtgatctaataccctttatatagagtaaggcttacaaagatcctaaaccaaataggtaaagatatcccttcaaaatagggattttaacatctttttatctattatttaaatcacaaaaaatgataactaaattcttagaatataggattaatatcttgagggaatatctctttcttcatgggttgttgaacctgttgtggactttattcagcctattcggagttgtttgcacaaattggccaaccaagaatgtttctgccagcctaggtatgtgcctgctagcctaggtatattcctgccagccttggtatgtgcctgtcagtcttgatatgtgcatgccagccttttccacatagctttgttgttcagctctccatgtaagggccaggcttccgtggttgaacatgcctctttggtctgacaagcatttttggtcagccaacttgttctcaagacatagccgccctaaaagcttcccttggctggctagacatggttggccaaagtcttgatgacctgcttaactctttttgcttatcttgcttgacagttttgcttgatcgctttgaaacccttgacagttgacatgccg

SEQ ID NO: 256905 - DNA, 1357 bp, Cannabis indica
caaaataacaatcagttgtattgcctttcagcttgatagattgatcatacttaatcttcttcctcaaatagtaaaataacacatcaatgtgctgcaaatgaaaaaaaaaagtatcaaacaaaaagaataattgctttattatatgcatttcttacttatgcaaatatgagaaaactaattcctaagataaaactaacaaacaaaaaattaacaattaacaaaaaaagaaccacatggcaacaacagtggggactatgtgttattgagtcatagtaaacaggctacaatcttccaaaattgaggagaagctttaaaagatcaatgactaataatagtcagtcaccacagaatagaacatatcataatataaaatatgagtcactcgtataagaccaaattactttgaaaaaaaatcagaaattaaagaatcccaacattttattagaaatattttattaggaactttttttcttgctttagatattttattaagacttttttttttcttaaattgcacatttcataaggaatatttgagagaaagctacctattctcttacaaaagtttcaatcaaaccccaaacaaatattttcacaattaaatattaaccaaaaaatattaaccaaagacatgacaaaacttcatttagaccacatgacaaagataatgccaaaggtttgattttcataatttcagtatacaataattgactaaaaaatagttacaacgagaaattaaagcactaatttcaactttctggctgccaactctttatgctcatgggatgtttgtgtttttgaggttataaccaagaagccagcactacttcaagtgtcaattataagaaatgatgattgatgtttagttattaatgatgctttctattatgacattgctaatttgctattagggtgatcatatttgtcttagtctaatttgattgtttttcattttaaagttcaaaccctatggagcttctttacatctttctctctctactacgatggatggaatctatgatgagctcgaaatctttattacaggactttcaattttaatattgtttagaactagcatataccaattacaacacagctcctgttattttttgttttcctacctattattaaaatttattttttaaaaaatataatttcagtatacaagaattgactaacaaaatagttagaacgagaaattaaagcactaatctcagttaaaattctccaagtatgaaaatactatcacaaaaaatatgcattccttacttatgcaaatatgaaaaaactaattcttaatataaaactaacaaacaaaaaattaacagttaacaaaaagagaacaacatgacatatt

SEQ ID NO: 256906 - DNA, 1475 bp, Cannabis indica
gggtaggttataaaaaaatcaacaggcaagatattatattaataaagtattatatattatttaatttaatatatatttgttaatacatatatcatatattaatactttttataaaaattcattatttaactttttgattcaaattttatgttatatttaagtattgttgaaatatatatatttaaaattttatttgttttatttattattagtctcttaaaactaaatacaatattatgcctaattcaatctattccaattcaattattatcagttcaatccaattcgatagcgtaccaaatagattatcataagcaaaaggtttactcaaatcatgggatttggttactaaaaatagaaccagaatcatcacctaccccattacaagttacctgtaactcattattagaattgggtttttatccatatcttcaccattgaaaactacagaaatagagatgattatatgtcattagcacgaaaaaaggattaattttatttaatttaattttgttattgttgaagaagcaaattaagaaattagtatagagataagattgaataaaataaccggcctagctaacaaattaattttcattaataaagtttggtaaatattataactaaacaacttcccaaaacaagttataggctctctatatataaatacatataaacatatacaaaatttcaaagccttaatttttacaaaaaccaatataattaaagagttattagcaaacaaattaagaaaataatagtaataacaatggagattaatgggattaatggtgataacaaaaccacaggcaaggtcatcacttgtagaggtaacaataataattatcattaatacaacatttttgttaaggattaatatgatgatattgatgattaattaattaattaaggcgcggtggcttatgggcccggtcgagccgcttgtggtggagagattttggttgagccacctcagaaaatggaggtcagaattaagatcatgtttacctcaatttgtcatactgatttgagcatttggaaaggagaggtatttatatttattattgataaattaagaattacatattaatttcatttctatgtgttaattacttttctaattattattatcttagttctttttttgatttgaattatattgtatggttaagtttattctagaaaaagagaggagagactcaaattaaagttaattatgagaagaaaaaaaatattactattagtggtgcttaatattatcatcagataatttcttacgagttaacaataacagtatatatagttcacaaaagaaaaataatgtaggagtgtccatatcactttaaaagtttaatgagagagatgactatttttttttaacaaaattaattcattaaacagcaatatccgctatcacaatagactgaagagcatgtggaacattgctcatgaaagagatgactattaattctact

SEQ ID NO: 256907 - DNA, 780 bp, Cannabis indica
attatgacttatcagttttttttatgtatatatttagaaaacaattaattagggtactttcaagagttatacgacatatattaagaattaattagtatatatattaagagtcgatcatcacacattaattaattccctcttctttctctcaattaattttgtgttaattataaatatatgacatgctctccaaattcctacgttatcaataaatttaatgtatattaattaacaaatataatggctttttcattttttacttataggcaacatctaaatatacgtaaggaaataacggatataaatatgtatttgataataaattatgaaatatagtttaggtgtatatatatacatgcatatataaagtccaaattaattacggaattaattagaattagatagctagggagtgtactagggtcaaaaaaaagataatgtggtccttttgatggtgtacttatatatacctatacattatctcttcccctttatatatatttgcatgcatataaaatattaataaaaatcaataataataatgaacggagcattaaacggagtagaaatcggccctaatcatcgatcgagtcctgttctttcttttttctatacaatttgtagcttaattctgactttctattatacaattaataaatagtggcataaatatttcaatttaacttttacttataaataaatatctaagtttaatttttagcagtaataatatctaaattataatattggaatttcggtaggtacgtatttggtgaagta

SEQ ID NO: 256908 - DNA, 899 bp, Cannabis indica
ggccaaaaattaaacttaggtatttatttgcaactgaaagttaaacttaagtatttatgccgtaattactctaatatatattattaaacttttgttaacagaaaaataagctccatatttagaattttgtaatctatttttttttccatccaaatttagtatttttaacattttagaaaataccttgtagtgttgaggtaatcaactagaaaattgccttgaatggcattgagatgagatgttgggagcacatgagactcaggagtgacttcattcccaattaagggatggttgaaaagaatcattccaacagcaccaacaagagaagcttggtgacccttttcaagtgttgtagtattatctccaacaagacaaaccaaaatctttccctttgcaataattggttgaagacttttagggttgcagaatccactacacaaaacatatatacaattattattacaatattaatgttttgtaattgtttctatcaaaaccatactaaatgatataccttaaaaacttttacataactatttttattcatattagaaagtaagttaccacaatgtggaactaagtatcgtcactataaatttttttatttttagtcacaacaaaatttgtaattaaaagtaaaaaaattgtgactaatattgttcctatgttgtgacttaaaggttcgtgactaaaaatattagtcacaaaaatcacaatttattgtgactaaatatatttttagtcataatacttgtagtgactaaaattaaaatagtgataagtacttgtatttaaatattatgttaatattagcatttttatattgtgaataaaaatcacatttactgctaaaaatttatgttgcgactacaaaaagttgtcaatacacgactcttttt

SEQ ID NO: 256909 - DNA, 882 bp, Cannabis indica
aacataaaatgttatttctgatctttattaataagtaaatatgattatatgaaatgagatttatttagggcataaaacccaacacttcaacctccccaaaaatgtcctcttccttagtagtaggccgagctttttccacgctcggcattgtagcaagccaagataagtgcaggtcagttagagaagattttcgcacggtttgtttggttcgtgccatcatcctattcttggacgaaaacttgttcgtatgtcttgcgatggttacagcgaatttttccatcgctgtagctgtagcggcaggatttggacggcctatgggttaggtgtcaatagtgtcttgttgggcaatatttgcctagtttgacagtaaatagcacctcctgttggattatgttttcctaggatctatatttactaccatgtatgttatttaacatcctaaaactgcatttctaaaacaatgtaatttaaacacatataatgtttgagaaaccttacattgggtgcagcggaattaaatgactccttctgctcagatctctaacccttgtatcctttctgtagcagagtatcacctagatctgagcccgattctccttctctagttttagattcttcaaagtcttacacactatgattgagtaccacttgatgtgtgtgggcacttactctatcactatagggttcgaaattatgaagagagaaagagagaagaagggttcgaatagcacagaatagatggctcaaaattttgactaaaggcaagtattttcatcacctcttaagttgtggccatcactatctatttataggaatccaactacatttttgtttgaattatttgacattaaaaaatttataaaataaatggtaaaaaacccc

SEQ ID NO: 256910 - DNA, 571 bp, Cannabis indica
cttttcaaaccattcacatactatttttgtgttattttactattaagaatttttttagagaaccactaaaaactcatgttctttaattggaattatgagttattattttgcaaaataattataattaaaaaattaatcacataaatacaagaaaattaagaaccaaagtgaaaaaagaaaacctaatcactacatagtaaaaaaaaaggtatctagagcttttacattggggtgagacgttttttctcttgcttagtgttgaattcttgagtttttcttttcaagtgtttgttttgttggttcaatttatgtaactctttctctttatgaaaaaaaattaaagaagaagaaaacaagttcaatcactctactataattagtttgatcaaaatcatcttaccttatcacattatataaaactagcacaatcaaatcatcttaaaacaaaaataaaatgcaattggtcgggatgaaaacaaaacttgatctgtcccacacttatggtcaggggcggaggtagtttagggggtggtgaggccatggttcctccaagattttatacaatgtgtaa

SEQ ID NO: 256911 - DNA, 1743 bp, Cannabis indica
gaagatggtgatgaggccatggttcatgtgaaaagaagttgaggatgatgatgagatgagagtgaaggtgggcggagggttttctagacttaggtcaatttctgggtttggtgatggtggggaaagaagagaggagaaatgtgattgggggtctataataaggtttctagcgaatgtaggtggagaagggtagatggtgatcggggtggtcatggttcaggcgaggagaaggtagagacaatgtggctatggtggtcagggtatttgagattgttttggttaggatattatttgagaaattatgttttggttttgtttgtttgtttttcttttcgaaaattccttcacaactcgtgaagaaccctaacttacgcctgctgtagcaataatttcgcaaagatctagcaaaaatattttcgattgctccttaccttgtaccacttatgctaaaactttgctaaaaattgctacagcaggaaaacttttccaaatcaacaacaaaagtcttttgttcatgcccaattttgttgtagcaaaattcaattaaaaatctagcaaaaactttaaacctccaaatcacatctaaaactctaaattatgctctaaaaatacttaaagtatcaaaccaagtgtaaaatctacccaaaaactaaaaataaaaatgaaagtaaaacaaaataaaataaaataaaaataaagcaagagagataaaaagtgtttttaaaattattaataataatataaatatataaatatatatagttagtaattcaaaattaagttaaaaatttaaatttaatttcttttaacatgaaatggaaaatattttaaatttttaatttttattatatataaaacaaactatatatataagttttttaatagaacataaatctatcatttttagctacaacttgagcttcaataatagcgaaacgggtcacaagggtcgacacgaacacgactcgattttttacgagtcaggttagggttgaaaaaattaaacacagagtcaaaaacggatcgacacgcttgacacaaaatatagaagcgagtcacataaaatataatacgaacacaacacgataacacattttgtcacccctaatttggataaaaaaaaataaaagctttttctcaatttaaaaatcttttggaaaatttaagatttgtagcttctcccctaaaatgacttttgagaaactattttgaaaaataaaatactttacataatttttaatttactcataaaagattttttttttaatgatatctaaagactttgaaaagtagttttcattaaaaaaataaaaataagacaaaatttatgcttattttataccttatacttctaactataaacaaaataaaaacttagccaaacaagaacagtatataatacacttgcattaccaagtgaaggttacaaagtgtacaataatgagataatgggggtgcatttttttctctttaagagagaaagcaaaagtaaaagtgattattagactaagaactatcctaataaaatcataatcacagccctgatgagcgattggcatattcttgaaccaatgctccaaaaagtgaaggcctttcaatcaaccgagacggtttgtcaaattctttggccagtcctgttgtcattcaataaagaaaagtcagtatttccaaagacgtgtatatatatatgtataaaacaccttgaaaagtcagtattagacctgcatcaacgaccaaaactct

SEQ ID NO: 256912 - DNA, 1915 bp, Cannabis indica
actagtacggtagcggtactaagtgcattagtacagtgtatgatgttcaaagggtacaatacggtgttaccaatactagtacagttaagtacatagtgcatgtggtataacactcaatagtactcagggtacggtttaaaccctactaatactagtacaatagcggtacgtagtgcatgtggtacagttgtcgtaccttagttaagaacgttcttaatcatctaataagtcttgtggataggtgtataggagcctaaatacaagtcggtaatatattacttttgcgtgtaggtaaatggaaggttaaaactgaacattagtgaatccagagctcgggaatgattgtacatgtcaagatagtgtgacctggagagttcagtctcgggacgacttaggcttcattttgtaggcactctgcgacatgtctgtaaaagttattttgaatatcgatgttaattttttttttaaaaaaaaagggatcccgattttatgtatgaatatatgtatatatttgtcaaagtctaaagttaaatcaaaatttaaaattatcactattttcaaaaaaatttcttctttgattataataaaggtgtgcattgtaattaaaaactataacattcctaatcattagggagttacacatatattttagttctattagcaaattcttatatttttgtagaatccaagattttgataacttaaaagatttattaggctctatcaatgcatctatataattggagaacctgttgaaaaactacttgggtacacaacaaaacacttgatggacatagactttttggtatataataaaaaaaatttgagaaatattttatatgtgaaatatttgtttatataataataataatatactagggccatgataagaaactattcatgcatatatgtacaatattatttttatcttggtttgacttcgaatatggctcaagcaacatctccacaaccaaataaaattgggaatatagaaaatagattagtaaaacgactatatctaccctctcataaaatcacggactcacgcatggtaaggcacaaaaagttttttttccaatcacaaacaagcttactaatgctgctgctaagcatattaacgatctgtatgtaattgaaaaaatattaccaaaaagctactattgaagaagatgatgagaagctaaacgatccaatcaatggtgaacttgacaaaaaatgaatagatttacttattacttttatatatttttatatatgtaaatgtaatgttaagatgataatggtagacattactctttttcttttgatggttatagtatggcacaattttcgtatcaaaatgtaaattattttctcttcaaaataatttaaattttgatgactactatactttttgtttagaagacttttatagtctaccattaactctatcttaaatatgaaagaactctttattattatgatgtcattttctaatttctattaaatataatttgttgtttattttaatatcttccttgcatattgttttaaatattaaatatattgtaataaggattctaatttcgtaaaacttttaaaattgtatttcttatattttataatataatatcaaataatatataaatactgattctaatttcttttcttaaacacatgatttgtactacaaattattgaccattaactttagattataatacatttaaaattcatctattgaaaaattaaccttcaaattaaaataatactaaaaagtccaaaatgatatggaagttgcacgtccaaaaactagttattgaaaaaaggccatgatataataataataatatcaaaatttttaaatcttgaatggtaataaaataaaataaaataattattagaaataaatcaattggtaagaaaattaacaaac

SEQ ID NO: 256913 - DNA, 1702 bp, Cannabis indica
ccatgtgaccatgcaaataggtccaggttagcccttagaattcaatcaaggcggacttgattttttgagccaaacctttactgatcttcagtcttcttgttggatgagtgggatcaacttccacttcctccaactcttctacaggtccaaagcttcttgcaggatccccaaagcaaggatctaagtctatctccctgccttaggctagacttcattgatccttcggggctcatcttctggacttctagcgggcatcttctccttcttagccttggataaggccaggttgtaacagtgacgggcagattgttggtctcccctcacacatgccactctgtgccttgttaggaatttgaggcacaagtgataaatagacatcaccgtctttaagtcgttgagggccggtcagccaatcctggcattgaaagctgagggaacatcgataacgacaaactgcagcatcattctacgagaaattgatcaatgctgcatcttctttgccaaaggagatcgtgtgcactatgggcttctattgtttagagctctagtcttcgacaactaggatcttgtctttaggctcgtgacagagtgttcaagcataacgctccctagctttgctagtttcaccagtaatgtgggggtcgcttattatgagccccaaatgtcctgccatgggtggtggtattggatctccatcttggcctccttgtgcctaggtctagtcattttgcacataacgacgcaggtggggattgttacgccttatcatttactcaatctccctcttcatattttaacactcattagtttcgtggccgaagtcattgtggtatctacaaaacttcgccatgtccctcttgcccatctcccttctgattgtatagagatttcggtatggtaccgtcccctgagtggccataaagatggtctcaggcttctctatcaagagagtgaagcaagtagacttccctccctgtttttctgtggcgtgggcgaagtgttaaacttttcctttttgccactgttcctcccagagctgttggtgatgcgcttgattcttgtgtttttacagctagaggtttgggcagtattgttgttgcccgcctgagcgcattgtaggtcaagaggctgctgggtgccccgtgactgcctgcttttgacaagcctcgcctaggcctatcgtatggcttcttctaatttgataaagtcgtttactctatcgagaagctctttcatgttgttggtcgatatccttctagaagttgcttagtgggagtatgcccccagtatggctgtatatcggccttcttcagtaaggcctttgactttggtagccttggccataaatctttaatgtagtcttttagaagttccccttgtcgttgtttgacttcgacaaggtcttccaactgcgatggtatgagtctcgaggaaaagaattgtgtgtagaattcttgtgagaactcaacccaggagttgaatctccccggggtgagcttgaagtaccattgttgggccgtctttgaaagagtaactgggaatatgcaacagcgcacatcactagtgaccttctagaggtcgagttgcatctcaaagtatttaatgtgagctagtgggtcctccgcccgatgtacatcttccacaccggcatcttgaactttggtataggtagggcatttatatatgtcgagaatggtgtatc

SEQ ID NO: 256914 - DNA, 1257 bp, Cannabis indica
tgatattcttgcaaagtgttgttaccatgtttatttgtttctttcattttcttagatgctaagttaaggtgagaaattaaagtgaagccaaggtgagaaaattaaagtgaaatagggtacgatagtttgtgattgacattcaatatcttattaaccatgctccaccaccctcaatgttaggaattatcgttttcaaaggatctttctcaaatttaataccttgccactatcttaccctttctttctcacattcacactcaaaagttcccataaaaaatataaaggacacaacaatttgtttattctgcttcccacaattatgggactttgtcagtttgcaataatgtgtctatgatgactcacatcatcagctcagcttttctattttttcatttatataatatttaaataatatacgttttgctatatacatgctcattggaatatttttgggtaagtatcaatggatgttttggtagattatttatttatttttgcatttagaataattttttagtttaatttttttatcatgtatattattgttattttagaaaggttaccgtgctgataataagatttaaatattttgttatatgtactattttttttatgcacacatggtaagtaattatttaaattttattttcgacattataaactatctagattttttttgaaaatttatacgcaattatgaagaaaaaaaattaggctagaaaacttttttgaatactaaaacagataaggaggtctactagaacatcgttttagagggtgtactacataaatttttattttatttattatctattattaaaagactagatattatttatgtttaccttagatgtggccaaccgatagcggaatcgaattaatattgatgcttgtcacgtgttacacaattagaattagaaagtaaaagaacacaaatatttttatataggttcggccccctgagacagcaggtaatgacctactcccattttagttgtattgatgccgatagataatactattcagatcactataggtgagatctgatatagttctctcaaggttacaaagtaggaatcaaagatggtaaatctcaagtgtggagagaagttatagtgggcgtgagagagagagagagagagaatgagttatcagacctagagctctacgacttagatcagacttaatgacctaattctcacttagggtttcagggttgagttaaggctctttatataggagagcttaaaccctaat

SEQ ID NO: 256915 - DNA, 1026 bp, Cannabis indica
aaaattacaaaaattatatatatatacattaaaagtataaaaaaaacctataatataatataaaatttataattacaattaaaaattatagccaaaactccaaaaatttggggtagagacatgtaacaagtttggccttctgactcagcaagcataaaataaaaaaaaattattatctaaaagtttattataatttttttctattattagagatggtatttaaacatggaaatttctccaaaaagacaaaacaataattattataaacatatttatataattatttctatacttttttgtttcttatctttgttatataagagacatactgttggctaaagcccaacagcattaattcaccttagttaagttatgtttggttattaattaactaattaattattaatactaatgcttatatactattaatttagaaaagacattaattaaaataatacttacataatattatatgatcattaggttgaagaaagttgcttcatcaaaatgtgaatgtaacaaagccgaaattattttgtatatgcttttgtgttttaaattaataagtgatcactgctttttatatgtatatataacttataattattaagtgaggaagccattaatttaatataatgattatcaaaactatctaaacataagaatattttaaagcatctattgaaaaccatgatcattttgcttttcaaaaaattattattattacttttttcttagctatagtgtgattgatctaaagttaatttcaacacggtatatatgtataaacatatataattacttgttaattattttgtttataataatgataaccctatggacgacaaaaaccactcgtgcactttgattatgttgttttaatgtcaacaaaagtagcttaattaatacttaaaataataatgtttattactaattagttaactactataatgaactttttaccccccattagttttttttttcttaaaaaacgtatattcactttttaaaataactatattcttt

SEQ ID NO: 256916 - DNA, 930 bp, Cannabis indica
gtaatcactcacatattacacatatgaatgacaattaattttaataaaagaaaaatctaaagaaaactaatagaaaatgttaaaaaatgtgttaaatactaaagtattgtattgtgtgtcaaattgtgacacacaattaaacttaatttatgttttattactatagtgtaaacttattaataataaaagataataattcttttatattttcaataaaatattaaataattatcaataccattatttttttttgtttcactcaatttacattttatgcattagagcatgcattagtgtaaaatagttaaccaaatatagtataagtttatttttgtattaaatttcagtacaaaatttacctcttgcattcaaaatagcaaaaatttataactagttacatttgttttagatgtacataacattactctaaatgaaaaaaaatgatattaattagaagtaattataagttaattgagcattgttaaaataaaattgttccattcgaactcacttctttatacccagctgtcgaggctcgacccgtggccttggccgagggccgggatgtgtgccctggagtttctcttaagagtccttattgatgtgtctaagagttttggtggtcgagattggagtttgagtcgcgactgtctagaatatggtaaaggtgatggggtcgtctttagataacttctatttttgatagtatggtatatatattgtggtactttgtcacaattgattcttgtcattgttttaagtgacccattcatacgttgttttataggtatttcacacttttactagttgaggttgtgtcatatgcaacgttgaaaaatattaaatgtgtgttgtttgacctattaatttcttgaaatttttatctcttcatcattgatataaatattttttttcatatttttcaaaaaa

SEQ ID NO: 256917 - DNA, 1146 bp, Cannabis indica
tgcagttgaagaaaagaatatagggtgggactggttaactatataagtaaagttccatgaaagtggctattcgattacaattccaaacgagctagcatgcataactctagggtttataaattataattgaaaatgctaagtgccatctcaccgcaccacgtggtatacatactgttattattagtgtatgttaatattcagttctatatattttaacttaataaatattttagataaccaccgataactcttaattgtgtctttaataaatattcagttctattgtctttctctttctttatttgtgacttttagtattttattctatattgagtcatttagagtgttgatagtgagaagttggtaacttttgaatgatttttgataaagaaaaggctctatgtggtgcataatttttgtgcaccaaaagtagttgtggatgattgctcaatccacttggaacaaagctttgaagagtaggagaaatggaaatataacgtagtctccatcattccatatttgtgcctggctgccttttagagagaaaaacacagcagcaaataggaattaatgaagaaaaggaataggagaaaagaagtacaaaagagaaggaaaaggaggattcatctctagatagttatttctcatcttttatttatgtattatttccttttttacttcttatttttagagtatttttgtgtttttgagtatgaagtaattttgttgtagttagaaacttttaatgaactttaaattgtaaattttattgatgttttatgaaagtttttagccagggaagttttgttcattcaaaaatgcttaattttatatcaatcaacttttacatgatcactaattgaggttagttaattttgattttagaaaaaaaaaaatgtgaaaatacttgaacgatatatacatataattatcacattaaaaaagtgtgatttgtagatagtatatgaatatattatttacatgtatgaccaattggaaattggtgtataatttgtgttctttaattctagatttgcataggaatatgttaaatttagtcttgagagctcataatatctagggaaaaaaacagaaaaatacaaaaaaggaaaaaaaattatacaaaaatactttgggccggcccat

SEQ ID NO: 256918 - DNA, 1101 bp, Cannabis indica
tcgggttgggcggtttatgaaaattttttgtacagccctagtttcaagctccaaaaggttttccaccaatccctgtgtaagtttgatgatgaagaatggtgttgttcttctatgttcgaagctaagtggaatcctgactttactgtatatatgcctgtggtggtgtgatgccaaattagtccattaccagaaggaaagaagcttagaggaattgtgacaattcgatcaatatccaattgtccaaaaaaaatcctaaagcaattggaagttttattcctgttcagctgtgataaaattggcaactggcaaggtatttggctcattgtaggcaataggcttgaactccgtatgaccaggtatccatttgtctaatccacaatatatattgaaaccattcccaactttgtatcgtagcccttgagcaagaagttcacgaccccattggatgctttgccatgtgagagaaggtgaatgtcctaaccttacttccaagaatgtgttattagggaagtacctgcatttcaacaattggctcaacaaagtgttaggcattttaaagattctccagtcttgcttagctaaaagagcttggttgtaatgcacaaatgatcgaaatctcatgccaccatcaaattttgatttacataataatttccatcttctccaatgtatttttgtgccatctttgtttgaaccccaccaaaaattagccatcatactctctaattgttgacagaaggtttttgttagacagaagcaacttatagcaaacgtaggtattgattgaaccaccgctttgagtaacacctctttaccaccaacagagaactgtttttcattccaatcatgcattaatttccaaacacgttctttgacgttactgaataactcttttttgtctcggcctgaataagaaggcgatccaagataacgttcatggcattcactaattggcatttgtaaagtctgttggaagaaagtttagggcagcaactggcgtatttggagagaaagaacataactaattcttattgtttagcatttggcctgaaactcgtggtaaatagtccaggatcttcgtattgctaaagactgacccct

SEQ ID NO: 256919 - DNA, 2448 bp, Cannabis indica
ttcatatttaggatgttaattcaacatacttgttagtaaatctaaatcctggtaaaatattcccaacacaatctctataaaatacccctgataaaaattgagaaggggataaaaaaaaaagagacccgaaaaatattctgtgtaagaaatactctcattaataacagagacttgtggactacgactcattaatgtctgaaccatgtaaaaatcaccttcattaattatccctaagctctcattattatcttatttaattagttgtcgaaaaatctcggtcaatattttggtgctttcattaagagctgtgggaagctttgtccgaaaaaatgacaacaaaagatctcaactacaatggtggaaactcgaaactacacacgccaacctcgtcccccccaggatcctcggaacccagaagacgaagaatcgacctcacgagtaaatgtgggttttgaggaacgagacgaatcgaacgacgaagaatatgaagaaagcccagaagggtataatgcttatgatgatggtagctataccgagttactggccttaagactaaaaacagttgatcatgaggctgaattggccgctcaaaaagagcaaaatagaaggacgcaagaaataatggtcgccatgcaaaaggccatggagacaactggaatccacgtgcatcctaaggctgtgccttaaggactagagaaaacacaagaagagtcgtcgccaagcacccaaaagcccaagactagggagtcaagaccctaagaaaaatcctacttcgttccctgaaaagaacaaaaaggcccaagatccacgaaaggttcgcgctgatttcccaaaagggaaaggtctgaagaggggcaatctcccttgagagtattggccctcaggaccgagaggaccgaaagagcgtatcagtgcatcaagaacctggggaaagagggaggaaaagtcgaaaacatccctcgactgacttaaggtaaaaacttaatgataaacatggtgacttgagaaagcacctggaacggaaaaagcaggcgataccggtgtcgggatatgccctgaatgagggaatcttggttgagttggcaatcctccacaaagacatcgctagagtctcgcagagacagaagggagatgactcggagtctaattgtgaggaccgggagccctgcgccaggaacatcctagaagtagaacttcccaaaaattttaaaatgcccaaaatggcaatgtacacgggggactcagactccagtgaccatctatcttgattcaatagagtaatgatcgtcatgagagttagcaatgatgcgaaatgtctatgctttccactgaaactaagtgggtctgtcgaggaatggttcaagaaattggagtcaggatcggtagactgttggaacaagttacaggttagtttttggcgacaattgtggcagcaaggaagattaaccttgaagtgagtgccttgaccaatatagaacaattactcaaggagactttgaagaatttcataaaaagattcaaggaggaggcctcgaaaacaaaaaaggttgacgatggacaataattagccatactccaagttggtatcctgattggaacccccttctagaacgagtaacaacaagaaggagcggctagcctccaagacttttagaagagagtccagaaatagattaacctggaggaggcccaaatagtggcttacggaggatattacctgacgggagtgtcaggaatgcagcaggagcacaacttcctagggctgcactccctgctgctcctcaaataagcggaatacagttctttgctactccaggatacaactagaatctcatcttggccctgacactgtcacactttgggacatccataagcaatccctctaggggtgagcattcatctttcgtcccaatctgcaccggccactagcatggcaggagcccaataaagctctcggagtaagaggtcttctaaaggtagcacacggactaaagacaagagacaacagagggagtatacaccccaatacacgcagtacaccgaactcacaaactctcaagaatgtgtatacatggatagctcccggagggaccccagcaaaaggtgtgctattacaacgatattggtcataccacaaacgaatgcacaaatctaaaagataaaattgaaggcttaatccgattgggccacttgtatgagtggatcaaaaataggctgccacacttgaatctaacccaaaccggaggccccgtgcctcagggagggagtgcgattgcgcctgagggtcaggtgcctcccggaggagtgccccatcagtaggcgcttggactaccacctcggcctaatggggagagtcattatcgatcgttcggaggtccctcatattggaggaaccaccgaagaatgagctaaaagcgctatattgggggcccctaaaaacagtgaccg

SEQ ID NO: 256920 - DNA, 1714 bp, Cannabis indica
  modified_base (241)..(241): a, c, t, g, unknown or other
ataactccaagatcgcgtttaagatgttgcagccgtttttcacagtggccaaatctcatggcattccacttttttaattctttctttgtgtatttcagcttgctgcataggatagtgcgctcatttcctgacgctactgattgccaagcgtttgagataatattgccacactctgatgacgtagtccatacttctaagaaacgaaatggatacaagagtttttcatattctccccaagctntttagtggggcatggtctgatccataaatcggcagatgtactaccgaggctctggggaaaaggagacacaccattggtccatccgcgataactctgtccagggcgtttacggatatgatgagagaaggatcttgcattttgccaagtgcacggggcaccttcaaaacccagatcgacacctcctgagttgaacataaagtctttagaatattcccttccgtaactggaacttaagtcccctaattttctcattttcatccatgataacattcaggtctctcattatagcccaagcatctttgcactgttgaacaatttggatcaaccaatcccagaaatttttcttcaaaacagcatatggaggaccattaatacagaacaacacccattgagggtagtcaagagaagcttctattttcaccttaaaacccatatcatacacctccaggatgtccactttcaccccaactcaccaagctacaaaaaaaccacctgcagtgccctccgcagggatacaacaggagtttacaaaacccaacctattcagtagttgaaccataaattccgtgctcaccttagttttcgagagaaataagaaatccgcatcattctctcgaataagtccccggagggacctttctgtcgtgggtcttcggagaccccggcagttccaagataagcacctcattggggaggtgggggcatgcttctggccgcctcctcgccttgaccaaaattctagacataactgatttgaagctcaaaacagttttcaagagcatcacttaaattcccatccaaacattgggccgatttcctcttacttcttgttttgactcctgagtttgcacttttcaaagctttcttgtctttgatacttctcctttgtttactcttcttttgactttgaattctctcctgctatagtacagccgcttgagaattttgcactagtatccagagctagtaatgcttcttctccaggtaaaacttcattcgaaatctctgataatttgcactgagaggacgatggaaccggattataccaagtgtgggccttcctctttcgggtacccaataaatgggttattaactcggaaatatcagggggattagagattaatgattgttgcgctttgaatttatcagtcaagtccggcccatataactgaagaaacatttgtccggcccatatcacttagatgagtattattaggatactcataaatatcttaacatcaaatattaaaataaagatatatttataaatttatttaaattttaaataaaaataaaaaaaatgtaaatccactccaaaattattaataaaaagtagtcattaattattcttagtcactcaagctcctataaatataacgaaattaaataccaaccttacattttttatatttctatctaaaatttttaaaaaatatataaagaaaaacttttgctctctatagctttaggcta

SEQ ID NO: 256921 - DNA, 780 bp, Cannabis indica
aaccctccaatgcttgtgtctacgttgcagcacgaagtgtttgaaattttaaagcctgcacaaaataaataatattctgattaattaattgtgaaagtttattatacataaaaataaataaataaataaataaagatggatgaagtagtagttaccataggcagtgggattggagatcaagtcaagaacatctggatatgtatcagcaaacataaaggctgcctttgggagacgtgaattgagagaggtaatgaggcttttaactttggagttgaattcgagtacccattcattcactcgctttaaacattgccctttttttgacttaaccctttgcgaaggaatgcacccaagtggaccaagaccatgtagtactatttttctagcatctagtccgtacagtctctgtttacacacacacacacatttatataaattttgatgaaaattaaaataattaaatacccaatcatgtctctgtttaccctaagttgtttgtccaaagtggaggttaatagttgcacgaattcgtcatgagtgtattgctgaccatcggccaaaaaaggttgtaaataattgttgacatagtcattgctgccttcacaagaaaaaacacaacagaaccattaattttttattgaaagagagagtgcgagcgagaaacaaaaacgtttacagagcagaaattaggtaccgattccgatgaagtacaaggcctcgttacacagctttgttgcattctctactccaattttgaacctcataacatctcttgttttt

SEQ ID NO: 256922 - DNA, 1057 bp, Cannabis indica
ggtcagctatcaaggtgagattcgaattctccaaacgtagaaggaagcaaaagctaagtcacaactctggggacacttggatttgactctgaaagaaagcgatattaagagaaggagccataagaacccagctccggttttcattagaaaaagatgaagaagcagaaaatcaaagctaattactttcggaaaatcaattgattacagcaaaacccagaatgataaactgagtttcggaattgagcagagacggttcaaattgggtcgttgaccgttgactgaaagaacccttaagcacggtgttatgtatttgtttattatttaaaaataagggaaaatgattgtcgtacattataagagataatattggcgcgagcattatttaagtcagacgtggacggcgacggtttggaatttggaattacgaaccatttttttttaagctgataaactaactaaccactcgttaacgacatcttttttacacaagctatttcttttctcccccaacgacagtcttagaagaagaaaaaagagctcatttttcaagaaaatgaaatgagaattagtggggaagaaaaaaggagatctttacaggtttaaaggaattattaaacaaggtgttttgagaaatctttgattcaaatcaatctaaacaatgcacttcatttagaaatatatcgtcaacaaactatttgaaattctttctcaacttccgtatctagaaacatgagtatttttttttttcatttttagttaaaatcattactatacatttttaaaatattttgaattagaattagccatgtacctaaagttacactttttttttttgaacttagctgtgtgagttacgattagagcatttattgtaaatgtatagcacagtacatttaatatttataccaattttaccgtataaataaaaagaaatgtataaataaacaaacccaactttaaataaataaaatcattaacaatagagtttcataattttaaacataattattttgattaaaaaaacactcaaataaatttactgcattgtagctattta

SEQ ID NO: 256923 - DNA, 1613 bp, Cannabis indica
ggacttttctgatgtggaaattgaaactgattctttagtagttgtttaggctattaatggttcagttcaaatgccatctcagtttggcctacttattcaagattgccaaagctttctctcagaattaaataatgtttttgtttcttttgtcaaacgatctgcaaatagggcggctcactgtattgcgaggcggtcttgttttatgtcagattgtatttatgatgagctttctgctccatctgattttctttcaattgtaagggatgatagtttttcaagttgattaataaaattccccttttacaaaaaaaaaaaaaaatattggctaattaaaattttagtctttcaattttgacatatataaaattttgcccccaatttttatatccttataactcttttcaagctattaaaattgttggattaaacaacttatatccaatttcgtacaattttactaacgatgtaattatttatgtaccaaattgtatctcgcagactttaaaatgtaccaaatcatatctttaaatttttaactccgtcaaacattcattagtaaaattaggagaaagtccttgaacttaacaacctcaatagttcgaaaataatttttagcggtttgaaaaggttcgggatcacaatttaatacatgttaaaaatttaaattagtctaaaatataatttatatttttttattttataggaaaataatagtagaatgtttactatttttggtatataaagaaattgtagtttattttttttatgacaaaaatattaaaaatactatttaaataattagatattatttttttacacaaatataactgattattttaaactatatttttaattaatatcgtaaattatttaaattttttttaataccagtaaaatatttcttataactatattatagaatgcatatatatataaaaaataagatataattttgctatgtgccaaaaatagaaactaggtctacaaaagaacaaaagtgatatcccatttaaaaagttccctacgtatctcgttaatttttttgtcttctaaataaccattcagttaaatcttaacagcattaaattaaattgttttaatttggatattcctaataattatccattttagaaaaatattcctaataattaagtcatttttaatgatgattattaagttaaaggttaaaatttatatttggattgttttttttaaaaaaaaattattgtaagcttttttcttgagataaaaaattattgtaagttaaatgaaaagcttattaatgattttttttttttttaaaaaaatggtatatcgtttatatttatttttcacaaacattgaacttaacaataattaagcatactttgaaatgaagaccatttcagctttgaattttgtttgattgttcaatgttaatataatattttcttaagaggtttataatttttcaaacaatattcttaagatataaaagttattacacgagtactttaacttttagtaaaaatttgttcaaaaaaaaactttcagttaaaatgaaattattttcatacaatattataaaaaaatattatcaactggattcttattggaacaaagtagacgtgtat

SEQ ID NO: 256924 - DNA, 1000 bp, Cannabis indica
taatagactaaaaaaacattattatatatataattggattaattatttggtggaattccattaaattattctcatattgtatgcttagggttataattgtatatatatattggatcataatttaatgtaatttattttagaataaaatttataatttaagtgtataattgttataattttaatgtgtaaatatacgataaagacaattcttgatttgataagggctcaaattaaaaataataaataaaaattagttacttttcgtcaattattaataacaagtgatgatcttcaatttgtatcaatttgtatcgtactattttatactcttgaattcctatcatcaggataataagataaggttccaaaagatttttgatgtaaaattagaagataatatacattctaaaatcaattttatgaactctaatatacttctcctaatctttaattttattatttaattaattaaaattaaattcaaattataatatttattctatcaatgcctattaaagcaaaagcatcgcccaaagtgttatctatattatttttctaacaatggaaaaaggaataatatatatagctagtgctagtaattaattaaaataaatcaataaaaaacatgctactttcatttagcttcacatgtcacaacacaactttcatatgatataaattatatattattcttgttctttgtgttctctaataaatatataataataattaaattctctagctcttgtggccaatttatacctttatacaatgggaataataataaacaaataaataaataaaaagtatatgttacataaataaaagttggtataagctactccaaaagcaattattaataaaatggaacaaacaaaatgaattctttttagaagtatataatatccttctttactatatagtggtaactatttttattaattaataatatattaaaattacgtttaagtgatgattctttaatgacaaaatatcacta

SEQ ID NO: 256925 - DNA, 1263 bp, Cannabis indica
aggcttacattgtagtagtgatagattgttctaggaaataaatcaacaagcataatctatttaacttaagtcatatgcttcatcacaattaagaactactttgacataatcaataatcataaaatcactaccaacaagaacaagaacaaggcaataataaaaaaaaaaatttgaaaacatacgaaatattcaattaattaaaaaaaaaaccaaaatattgtaatcaatgaaaatcgtgtttggggcattaaaatagcctttacactaagaaaaattactccataaaaataatcacaatcattgacataatcattattcaaggagtttaaggagaaagaaaagaaaatggattgatgattttgatgatgcgatcctctttttctccaaagctcctcagtttttctccacatgaacgtaatgatgatgccctaattaaatttaaaaaactcttttagggcttgtttgtcatgttgtatcgtgatgtatagtattgtattatattaatttatttaatatattacttagtttgatattggcttatattaagagcttgtgtaaacttatattatatttaccataaactaaaccctaactccgaaccctgtctaggtctaggtccggatcggggttcagggttcatggtcagagtctagggtctagggtctagagactaaaatcgggtctgggtttgagatcgaccgagaccgggtctaggttcggagaccagggtctggggcgaggttagtgtcggggtcttgggtatggggttttgggtttgggggtctgaggttcagggatcatggtttaaggtccagggtttgtggtttgggtctgagttggggttcgttgctcagggtttagggttctggtttaggttcgagttcgagtttgggtaggggtttggggccaggttggggctcgggtctggggttcgggtttggggtctagggtcgagggcgggtatgggttcgggtctggtctggtccaagcacgggtctagggttcgggactggggctggggtccctaacctcagaccctttttaaatgttataatacaagttaggggtgaaaatcggtcggttatggtcaatttttacaattctataaccaaccgatcgattacgatttttattttagaaaaattgtgattaaccgtttagaaattataaccatataaaaccgaccgtacggtttttgaaaacttttagtggtttttcggtttggcagttttggacggtttttggcggtttattacggttttt

SEQ ID NO: 256926 - DNA, 537 bp, Cannabis indica
tttttgcagatgagatttgccaaaattaggaatgataactcatttctttgaaaagttgatattttgggcatgttaaatttgcagataaactcgagtaacatgttggttttgtataattttgcaaagaaagtagtcgaaagccaatgccattttttgctgatgttataaatgtatctgttgtcacaggacaagtggtcttcagcttatgattgcagaactattcttctctctattcagagtcttttaggaggtttgctttctcttccctccttgagcttacattatcactcatttaaagagtaacgtttgagtacatattttgagtgcacacatcattactaatacgctttaatgtttatgttttacagagccgaatccagagagccctctcaatagctatgctgcagcattgttgagtaacaaggaaggttggatatcaatttcttccttctgccattcgtttatattttcaaaattgtagtagcaatttgtttacttggcatcttttttttcgaacctcagattacaggaaaatgg

SEQ ID NO: 256927 - DNA, 916 bp, Cannabis indica
aagtaccttcttggcctttcactttcatatcaggaagcttcttcattctcacaagatgatgatagcaaagtcctgacctgagaaaagaaaaatacaatgcaaacaataataaaaatatagcagaaaggggtcaacaacatcatcatgtaaaaaacccaaaaatagtaccaatataactaccagattcttgttttctctttggatgcgttaacttgcacaaacaactattacataagtatctaatcttaaaaatacgagtgcctgggacattaagtaagcaattacaggtcccatatcacaatttggggaagtcccctgtttattgatggcctaacaatatacttagtcctagtcttccagtcatccttcctaaaccgaggtccaacacagatcttctgaaggctcaaatccaaatattttccaggcattcttagcttcacatagcaggacttatgtcatgatggagaatctgcctaacccacaggcctcaacttcaatggccagtgaccagtgtgagtgtttcttcaacggaagtatggtttcccttttctgtctcactggaaactaccaaaggaagatttatattccatcatttccagcattcaataaagtagactgaagtcttgctccaagagtcattacagaacaagcatgtctggtactggtagctggcttaagttatatgaaaaaggatttgttttcctcaatttcttttaatctaaatgatgattttccagcttgaccactcacttgtacaaaactactctctgattcttcatcaccagagcaaatgaatctcttcagtggaacccgcattaatcaaaaatcttcactaccgttacccaaacttaaaagttgctacacagctaacatccgccactatgaaaacatcagtcctttcactctcataccaggg

SEQ ID NO: 256928 - DNA, 882 bp, Cannabis indica
ccaataatgattcacgactcattcaaattaccatgacatggcagtttaccacaaacatctttcctctcattaagggagttactgtcataaactaccataataaaaaactcctctttgaagccaaccatattgatcttgcaatgaacaaattgactatcttccataatcatccttccttggactaacttatcaatccatatcaacattattctgtaaaacatactctgacgagaatagcaattctagttgggtaagttcttcctcacactttttatttttcatggctgattttggtctcaaaaagagcacaaaaacaaactttattattcctgcaaatatctaacaactcaagctgcttttcttttttattcagtcctctaacattccaccctaagacattttatttatccatcattaagaacgattctaaatagtaccaaccgcctcttcctctacttttttagcacctcatatccgtcactaatacgggctctagtactcagattctgcacattttttgagccttatttcctaggagtgatccattggtttgaatcacttaatctgtcagagtttatccccctgctgttctctgtgattacatctattgatagcttctgcactaccctttcctcatttagggaccctgtaatgttcgcaccaacagtgtgttgctgaaccgcaacactatgttgaatttcctactgcatagaatcactctgctgctatatttcaacataggaattgttcaagtcataagttccatgctgcattggttcatctttcttaacaacatgttgtttcttcttccaagtcacatgttttcctttgatgcaattagctaaaatgtgccccaatagagaacaagatgtacatcttgat

SEQ ID NO: 256929 - DNA, 556 bp, Cannabis indica
tccaatccaatccaattgtaattggatatccaatttttataattggattggattggatcggttcggttcaattggattggattggatgatgtccacccctacgatttagtacataaaattcagggaaaaaaattactaattagccttaattttatttattagtagccataagataacaataaactatttattgagtcaatttaatgacttaagttgaaagcgtgaccagtcacgcagtggattccatatccatgtataaaatatatttatttatatatttatagctggagatagattaattaaaacatcaagcatatcttgttaaatttataattcaatgagcattacactaacaataacaatcaatgctcattaataatattcaagatcaaacaattaattttagagtattaatttaattatggaaatacttttaattttgatcttgatctccaattactatgttaattacatctctttaaatttacacgtatagacaaaagaaaacttgatataaacactacccttctattctctccacattatatctctctac

SEQ ID NO: 256930 - DNA, 948 bp, Cannabis indica
ttcaactctagtaaaaaaatgttaaacagtattgcggcaacttgagaaaaagaagaaaaaaataccaaacttgagaaggtaaacaaacacatgcgaattgtattactggcctgtggattaaaacatgtgggagtcatctagatagaatctctcccccctaaggcccataaaaggggaaatttacccctcacaaaaccccaccccactcttgcttgaaaagcatcagtactctctttctctccctctcttattgttcttgagtttttttttcttttttgcttttctctctaagagaacttaaaaccatacaacttgattctcgagtcactatgagagcaaatagttttgttttcctcaccaaacctccaaataatactactcgtgtccctcaaaatctattgaacaatgggtttgttcctaccttggagctttcatcctaccataaccaccatttcgatgatcaacaacatcatgctgataaaaatcatgatgaggtcccaattaatgggtcttctcagcatggttttggtcatttcatggctacatctacttcttctggccctctctatggggtttcaacacccactaatagccatgtctcttttgaatctgcttaatcattgttattctcatcacttgtctatccttttcaatcccaaaacaaaaatggggtcctgcatggtttagcttgcagtggtaccaccactgctgagtcataattctatgggtattaggccttcgtggcttcttctcccgcgtagcccagtaccttaaactttcgaaattttgcattggccaaaacagtggctgatgaccacttctcatgcatgaccacaactgtttctgcaccagctgctggtggtcaaaaggaattacgaaaaagatcctcatcatatgttgttgttgcccatgatctgaagaagaaaaaaaggtctcatatgaatcgaa

SEQ ID NO: 256931 - DNA, 707 bp, Cannabis indica
atataattatattcttatttatttaattatttagtttgataaataattattatggtatagtatgaaatttttttgtttgatatttcaataaactataaagatttgttgattgaatgtaaaaaataaagtgtacaataaaaaaaaaaaaaaaaaaaaaaacttaaaatctaatttataattattttaaaaaactgtcattatttcaaaataataatagtataatcattaataataactactaattgcaattcaatcaacccttcctacaaacttgttatgtaatgaccgagaggtctaattttaccaatttattttatgaacgcttttttatcaaaaaaaaaataataataataatactataagaaatacataaacttttaggactatcatattattttttgactttttttaaaaaaaattacggtttgagttattctaataatttctatgtgaattttaattgcgtttaaattcgttggttgctatgtgagtttctatgaaaaaaaaaaacaattttaaaatgtgaaaataaaaataccccaaacttttatgctcactctcaaaatggttacaccaatacataaaaacaaggtctataaactttgtataaatgcagatgataacaaacaaatcaaaacaagcataataagtttaccacctcacataatacttacaatccaagatttttaaggatcatagttcaacat

SEQ ID NO: 256932 - DNA, 1801 bp, Cannabis indica
ctccatccatcttagtggtttctttgggcgtgtaatcgtgttgaacacacattagggcgaatttatcatcgagtaaatcgacgagttgtttgatgtctgaaaggtaaaggaaatcgcagtcgacgaacatagcccagccttggtaatcggcgagatagggagtcaagaatcgagtgaaggaaaactcagtgctctcgagttgattcctttgtcgccaatagagagatttgtctctgagttgggattgaacaatggggataatttggagtgggattgaagagtgctttaagattgagtgtcggcatacctgataggcaatgtcttcgcgtggatcgtagcctacgaagatcttgaatggcggcgtgggttgaggttcagattgggaacccattgatgctggaattcagatcagatcagatcagatctggtctggtatgaatgagaggtgataatggtaatggtaatggtgatgatctgaaattgtattgtgaatgttgagatttatttataagataataaaaacgcgcttttttgttattattattattattattattattattactagaaattagaaattagaaattagagaattagacactcaaaatttgctcattgtttcatcaagcctccattctacttactcggccaatggtttttttaaggagtgtattggtgtacctcgtttcggtatctaaaagaatttttagtttaatttattttataattgtttttattataactagacggcaacacgtgcaaggcacgttatctttttttgagttttttttttaacaattcttttatccatttaaaaaaatacataagataagtatttttattataatttttaaattattacttatatgtaatttataatctaagatgaagatataataatttttttcttgttttgcttattcaatagagtatacattgaaattcttgtatctttgagtcttcatcttctcttgatcaatataagtttgtattatctaacactttattaacaattcattagaaacactttcaatatatttagtctttttttgagaaataaatgataaaagttagtattattatcatttatttaagtatatatttttgtactaaatggatgcattttaattatgaatgtattttttctatttaaaatatttgatataataatataaatattatttataagttttatgtatagatttacataaaatattatattacatattacgtaagtttaagttttattttttcagattagatgtctaattatttaaaaatattacataagttgttattctaattcttaaaatataataatataatttattttattttaatagaagtcgaaatttggtttagttaagttttttcttacctcttatcaatgagatatattttttgaattctttttattcaatatgttgttattacatatcttttggtgacttgacttgtattgcaaccgctaatatatctatattttgaatgttaaaatatttttgatttaataagaaatttgaatagaaggaaaatattattagtatattaaaactaaattaccaatttcttcttttgaagacatgtagaggtacaaatcattataattgactattttgtactccagttgtttgtttttgtcttctttttttgtcaattcttatatttttattgtagagattattatccattaatatttaatatagataatctttatatttaaaattgtcatgtgatttagtaacatgtgcattactatgtaatactattaatacataaatatatctttccaagttttaaa

SEQ ID NO: 256933 - DNA, 598 bp, Cannabis indica
ctgaagctataacttgtgctcgtcctctatcaaagaaccaacctagcaaatgtgtactgttcaagctgtgagagaaacgccaagtttcagcaagttgacttcgcttgaaaaacccacgtccaacatatgcattttgtgctcccgctcctgttatgcccctgaaaaatgttgtagaaaatcatgcttgaggtatcatgtggctggatgtagcttccttccaaatattttgcattaatttcatatttaattttctcctcaactaagagctccaacacagctgaatatctttttaattcgttttctgccttagaaaatgtctccttgcgcctttgaatataatcatcacaagctaaacaaaaatcatcccactgctgaagaagaaaattaatagccttgttgaccctccaattgagaacatcaagtcctttgaacatcaacaaagaaggaacagtacccatcacaccaatgcttgaaattaaatgctggatgaattgttccaatatttccagtaggatacaatcctcattatcatcatataaccaaagtgagatcagaaaattatcaatagttggccttatcccataaatgtgttgagtca

SEQ ID NO: 256934 - DNA, 700 bp, Cannabis indica
acggaatgtattccgtggtacattatatgggtctcagtgtacattaaatgagtgtcagggtacgtttctactttttaatcctaattattcctagatcaatctcagccgccgtcagatcaaataattccctcatctgacggctgtcgtacatcacggattacaatccgtgaaagtataataacgggacaaaattatatccctatatatataagagcattgtaattgaatattattagcgctcaatacttttttatagatataattgataatattctttaaaaattattttcttaaatcatataaaaactgatacttaattatactaatactaatatgacactaaactaaatactagacacaaatactaccttttcacacttctctatatataaatattattaattcgatgtgtctctgcaacctattaatgttgttgttttcctaaccgccaataatgtctgcctccattccttctttgttacttctaaaaagaaagaaaaaaaagaagacgccacaaattattctctcatttttccctgagtcctgacacgcacaattgcaatgtttttatttgactaaagacttgccccggcccaaagtctatagatttatgatatttatgtatagtgtcttatttttttaaaccctatgaatgtttatatatacttgttcttttgtttcaataatatatatattttct

SEQ ID NO: 256935 - DNA, 557 bp, Cannabis indica
ttaatcgctaaagtaagttaattctgtttataatcaatcttgtggcatgatgttgtgctttgaagctcccttattgttctttgtattttgcacaaaatctttgaatatgttctgaccttccacaaaagtaacactttcttgaatcttttcctcgagattataactcgaaattgaatgtgaatgattccttgagtggttctttgttggtgtcaattctctggcaaagtatgatttccctttcttagtttccttctccaattgcaatacaaagtccttagacttcaaagctctaagaatatctcttagagatataacatctctgtcatatttaatggtagccttcacaattgggagtgatctaagaaagataatatcttgactcttctcatcaactttgtgattaatgttgacaagacctagaatgattttattaaacttatcaatgttatcatctaaagataaagaagaaatcattctaaaactaaataatcgctaaagtaagttgatcttgctagagaagaaggtttcaaatagagctcttcaagcttttcccatat

SEQ ID NO: 256936 - DNA, 785 bp, Cannabis indica
aaatgtggaatagtacacaaaattaaacatttatgtatgaagaaatagatcgaaatactttcagctattgatattttgagttttaatcctacacaagttttagattcacaaaagaaaagaaaacttaattaatgtatcgagcttctaagcactcatctaactctcttagatagatttactattttttgtgaataagtagtaagctagaggaatgataccttatagttataggtgagattctccattagtatatgtgtcacattaattgttataatatttggacaattaattcaaaaaatcaaattaaaaaataaaatatttagtaaatcgaagtctgactatatttagaatatttacgtatgtaaaaaatattataatattctcctatttggtcagtatttaaatttggcacttaaactcaacaattgttcttgctatacaataaacatataaatcattgcgataggtcctcattatatgtcaagtgttatcttctatatattatgatatttttattacataacaatagcaatgtttttaagtaaataaaccataaattttatgtttattatgctcctctaaaatatatatttttttacttttaactaattattttattatttatttatttaaaattaaataaaatttaatgtattattatccttttattgaaaaatatataaatcttctaattttataaattctcaaagtaaaaaaaatctctttttatcaaaaaaaaagaaaaaataccttttttatttttaaatatgaaactttttctagta

SEQ ID NO: 256937 - DNA, 587 bp, Cannabis indica
ttactaattaaacaattagtccaaatttcaatgctactaattaattaatatatattatgagtattgattcttatacatcaaaattacatttttttttcatttttgttttaagaaaaacataaatattcattaataggtaaatcggacaaaatttattatatgaaaatattgcctctagagaaaaatcaacaataataaatttattaagctatttactataccatagaaaaaaaatctatactaaaattccaataagctatcagaaatcaaacataaaaaaaaaatacacatatttataaacaataaaatataattaaagttttgtgtttataaacttaatattttttagcagcataagtactcaatattaataaaattataatttttatttagttttattaatacacctataaaattttaactgacggaacctgtactgacgaaattagacgataaattatacttttactaacactagatactaataccgttaaaaaaaagtattaaatttatattgtttacaaacttaaaattctgaatattatatataaattatgtggtatactttagtattaaaagattatagt

SEQ ID NO: 256938 - DNA, 866 bp, Cannabis indica
tgtgctgggaacccaaaaattgagcccctcaactcaatttgacctgaaaccttccaaaactttccaggatacctattcatgtcccaacaaactcatttcaagcatcaaaatataacaaacaacttataccatgaaatcaccattagagctcaatattggagttcataaactccaattgactcaaacaacaaagtaaccccttaacttaacccaaaccaacagtaaacatcttaatcaaacatcagattacaaattaaaacaatccttaaacaaacagccacaaaatccatcaattcactccttaaaattcaacctagactagagaaaaacataaagaagatagctaggaagagataccttgggttggaaccttggaattcagctagaattcttgatgatatgttgaaaattcacagccactagctgctcctaggaaaatcgagagcaagagagaggttgaagaagagtgatagtttttctagggttttctaattaactcatgaataaaaggtaatatatatctattcttattattagtatacttagttaataagttgaaggtgataagaacaaaagaataaaagaccaattaccccttaaatagttaccgaagaaaggtttctaagggcactttggtcataaaaatatcccgactaatatccgatactatcaaaactaataatgatgccctgaaaataataaaatgctataacacacaaaatacaattctccaaaggcccaacgtcgctttccacagcttcgaaacacaaacaccaaaattaggaaatttacgcaaacagcatatttaatatatatatgcaattaaataattttaccaatatgtaatattataattaataattcaa

SEQ ID NO: 256939 - DNA, 809 bp, Cannabis indica
tttagatgctagtggtcctttccaaaaagagttttggaaggctagttcctctctcttaacagaaatttcgaatagtctgttctaactgattttgtatctgtctagaacatccttctaaggacatgctcagtgacggacccagaattttacttgtggggcttatttattattaaaaatatttatacatatattataattactcttactaaatttatttaattttgtgggggttttttattattttagtctataattatcaaattaaaaataattaatttaaattttaaaatataatattttattagtgggacctatagccctcacaataactcaactgggtccgtccctggacatgcttcatcttttcaagatttccatccaggaaggatgcttcacatttggagagatctatccaaagctaatgaggagattttattacaatgagtttgttaagcctattatgtcataattcacttaacaatttagttgttgcagccattgactttgggagtcatatcctaaatctacaaatatcaccatcctaatctttagaagaaataaaatacagaagataattttgagattgagattaagaaatatagaggtatagagaaaaaaaaagattggattttggtgtttgtatgaaaaagtttcttgggtaaaagtgtgagagataaacacttttatagaatcctaacaaagaatcattctcaattgtattgtactcttgttctttctcaatcaataaagactattatgtggaatttcaaaattggagtagagtcgtaaatcacatcaatttataggac

SEQ ID NO: 256940 - DNA, 991 bp, Cannabis indica
caacttgacctacctgttgaccgtcttgtgtcacctatggaccccctagaacatcagtggacacatagttgtctacaattattcattgagtataaggagggataacatggtcatcccaatctattctcatgtgattaatacgggtcctaacatgttgaagaattattctcttgggggtctccttgtctggccatcattaacggttggctagtctggtatatccgtgtgagggcgaaagttatattggccatctcctgcaagaatacaagcaagaaagactttctcatttactatgtggcccacaatttggttctgtggccttggattagacagtccattatcttgggtttgatgggagtagttggttggatgctcctctagaccgtactatggtccatttgggatataaggttctttccctctgtttgaatctcgtatgagaggagtgtcttccactggtagctgcctagttagatgataagcatctcaaaacaacccaagttccttacctagggaggttatcacttactacttgttgggctcttatgatctccgtctgttgatccacctcctcctaaaactggcactttagctactcaaatgccagattcacagctgcttgtttgtcctcctggttgtgttgaatagtgttggtatgatcttgcactgtcctaaggcctctcgtagattttgcaacttggtatcattgcttatatttaatcaaggctctctaattggtggatcctcggttcccaacccagtttctccattgtgcatactggtggtctcagtttcttttgtacctagagtgaacccagccagaggggttgttactcctagcctttttggatggggggactcatggacgctgacgagttgttggatcgggatccatccccaatgaatctctttgattccctggactttgcagattaggatctgtggacattggatccattcttttagtaggctagccccttctggtagtcac

SEQ ID NO: 256941 - DNA, 779 bp, Cannabis indica
gccgaggcctacagcccggatccttctctgcctccggcttcatcccaactggtgaccccctggaggtcgtcgtccagtgcccccttaggcacaatagtcttgataaacgaggaacgggaagtcgaggaggaggagggtgagattgcggcttcccttgatcgtaagtggaagggtaagatggttgaggtcaagtctttcaagaggcccaggaggagggacactctagctgttaacaccgactcggggatccctttcgaagcggaggagtacaccgtgccgcatggcattgttctcaccccggtccccgaagacgaagagaggaaaatgctctgaatcgctaaacataactatgacctggacgagatcagccggggatatgctgaggtggaagccctgaagaagatcttccgggaggagtaacagaacaccttgcgtgaggatgccttcagcaatccctggggcctgaacatggatcccctgacggactggttgaaccgcttcgtcggtcctaccctcgccccctttgcctctgagatgaccagccagtttgtctaccatttgactcaattcccaaccaagagatacgcagcttgcgcatcagtgaactctgtttaccaagttcaggacatcagcgctgccctggctgcagtgagttcttgcgattcattcctttcttttcacttatctcttgtctcaaggcatctgatttcattcttgtttcttttttcagattactgcagagaccgaccgcctttcaaagaccctgattgatcacgggt

SEQ ID NO: 256942 - DNA, 1334 bp, Cannabis indica
tttaattaaaaaaattgttaaaaggtattattggtactttagattttttttcagtgatgtaataattaagtattgagtttcatataatttaagaaaataattttataaaatatcgttaattaatcgtagaacgtcacctatgaaaatgattaagcactacagatgcccaataacaatactcttaattaattgccaaattatatatcttattttgaaaactactccatcttattaaacttaaagcaacccaagttaaagttttaagatactattatcttatttatttataactactcatcaaatttttagttatctttcaaaatttaaagtgatttttttattaattctgtttatataattttacacaaacaaaagttatattctttttttttaaccaaataaataaataataaagtctttttattattttttttagcaaaaaattgatatttttttggtatatatattgtaaaattacataaaattattattctattttttttaaaaaaaaattaattaagtgctagtatatttagtcaaaaacatacaatagactagagagaatatccaaatattgtgtcaaaattgatttttgttttctttgactgagcttatcattaattttggagaagggaaacacattttggcctattagttatttattttccaaaagagcctattattaattattagtcacctattttcttactttctcatcacattttccacttttttttagggtgattaaattttctatcttagttctcatgatttttttccccttgaagttgatgaatttttattcaaaggttaaaatggattacccaaataagttgtgattttctaaataataataataataataattattattattaataataaattatgctaattattgataagactaattttgggaaagaataattctatgagaagatatatattatatatctcttgaccaacttaggaattaaaaaaattaaatatacatatcttttattagtttttatgaagggcaaataccatttgaattttgtattttgtaaaagatactgaataaattttgtatttttttaaaatagtactaaatagtaccatgaatttattttctgtcaaaataaaatttaataataatctgatctagaggtgttatgataaaactgattacgtttattgtatctgttcgtgtataggaattgttttcaaattggttatattaaaaaattatcaaaaattgagctcagaattctatttatatactattttaatacaagattcattttatctttaaacaaagtccattcaatgacttttacaaaatacaaaatcca

SEQ ID NO: 256943 - DNA, 1472 bp, Cannabis indica
ttaattttataatttcattaaatattcctatttaagttgagatttagttaaatctatcaaatcaactttttttttttgaataaaggagtttcattaaaaattaacaggcatcagccttaacaatgtcacacaaagaaagcggagcatttagctcattaaaaaaaacacacttttttaataaggttgtatttttaaacgtacgtgctatattagagatatcattatcaaactttttcgcattataaattggaaatgatgagaataagatttgcctttgagatttttcaataaggtgccaaatatactaaccccgcttataatttagttcataaaaacacactttcgctagttgtattacaaagtacatactatcaaccacatatataattatttagtcatggaaaaaacacaacgatctcatcaaatgttcaaatgttttattggaaaaatacaagaaattaaatgctcaaaatgttccaacaacgtgtcatgagtggaatgaatgaaataatgagtcatatatggtgagtgtgaaatggcttaattaatattactagctagttcaagctcatcatcattatcatcatcattatgattcatgacatgagcaatttggcaactcaagctaattataagcacgtgagagccatatgctaggacaccactccgttgtgggcctcatcaggcattgcatgcgtgcccgaggttattgtctctgaccgcacctcaacccacccataggtcggcttgtgtttaatattgtaacaaaccactcacacaaccaaacaagttctaaccactactcctactagtgccttctgtactactcactgtttaccccccacgtacactataatactattgccttatttcatttcgcgcttgccaataatatctgcacttaaaaaaatatacattgtcgagtacacattttgatcttgcatgtcattactcacttattactactttctccagtcaatgttaatatatattgatgttccgatttactagtatgtgatctaatgttacaaagaagaaacttggatccaattaatccaataattctacaatttcttggccagattacatttacacaaatctggtttatcaatttcatatgctctagcatgatcatgaataggttcagtacggtactgatgagctaaataattctatacagctatacaccaattccaattaagagaatattctaacaacctgatatgctaatgattatacaatcaaataataacaaaatttgtcttgtcatcaatccttgtcactgaattctaagtgctagtgcatagtgttatgatgtgtacagctatagagaattattgaattttcttttccctgtcaatttcctgcaaataaaagggtaagattctcacactaagggcatctccaacgaagaaatttaaatttgatgttaaattaacaccaaaaaattattatttcaacactaaattttt

SEQ ID NO: 256944 - DNA, 887 bp, Cannabis indica
ttgttagggtataaaatttttattggttatttcattattctatatagttctttaatttttttatatttttatgatacaagatggttgggtcaatggaatattgagattattaaatatagtgattacatttaaatattgtctataagttttttaacattatatggtcatttagaactgtgtgaaaaaattggtatttcaaaaaaaatatatacgtatataacttatttttttttaaagatattggatcaatatcaattatatgcaatgttaataatgtttagttaaaaaatattgttatgagattgtttttatgttattttcttgtttaaaatcttgtatgagataacatggttattgttggccttgaaaagtgattagccgacagtgagatcatatggatttgatactttccacgggttacacaaatagaataaaaaagtaaagagcacatagatttgttatagaggttcaaccttcttttataatgggtaatgatctacttcccttttagttgtattaatactgagggttaatactattcacattgctataggagggatcttatatagcacccttaagggcacaaagtatgaatcaggattggtaaatctcaagtgttgagagtgcttatatgggcgtgtgagagagagaatgaagaagagaagagttatcagacttaggctttgagcttggaggctagtatcaagcttaatctgaacttagatttctaggttagagttaaggtttgcatagttaattaattaattacataataccaaaatacccttgaacataaatattattcaactattcctgttgtcgagctaatttcgcaacaccaaaaagtataatttaactgataaaaaagagaattatttgagagatga

SEQ ID NO: 256945 - DNA, 1111 bp, Cannabis indica
ttttagtcataataaaaattatttgtgattaaacataatatttagatacaatttgtcacctaatatttttagtcacaaattttttagtgacaacatcgaaatattattttatcattagttataattttattacttttaattataagttttactgtgattaaaaataaaattttgtgtagtattaagtaaagcgaattgacaaaaatagaaagaaaaagaaagagcccattatcaacaaagaaaagagataatccttaaaaaaattgtttttttttttctaaaagcaaaagattattaaattctggatttgtaaaagtaaaacgatgaaggattaagaatttttggtcaaaacatatatttatatacaatcaaagaatcatcgcgtattatacaatgattcaatccgaaaaatctgagtcttctggcgtagaaaagtgagaaaacattgttgaaatcataaacatatattgattgcatcgaggaataagaactcaactaacgacaattttgtattattgaaagtcaaaaggcatgataaatattgtcacaaaatggtatagatcgatcaacttgctaataatttgccaatatcaaactggtccatccatgcatgggcatgccagcttggtgacttgttttattggcttcaaaggaaaccatatatgcaggtttgaatgagatgacgtgtggaaatagctatacattcacaaattcacaaacttaatacatacatatagcaaaattaaagaattgctaaaacatactagtgatacttaatatttttttttttctgtgtcatattgtaattagtgtaattaagtatcagatctcatataatttaagaaaataatttttaaaaaatatcactaactaatcgttagcgtcacctaatgtaaaaagtattgaatacgggtggccaataacataagaattttaaatggtgcgttcttaatattttcgatttagataatgatatttattaaataattagggagttaatataataaatattgtgttttttatattaatagatataatgatttataggtattgatttaaacaaataacttaattttaactctagaaaactataatacaattataattttta

SEQ ID NO: 256946 - DNA, 3497 bp, Cannabis indica
ttagaacagagacgagtcgcgatgcactcgtacttataaggcgccgagttagtgagttcgcgcgctaagctaagccttgagttgaaacgacaagtcgttctcctccttgggttgtaccatgtgttatatgaatttactaacttatccttagtaaactgaaattgttaattattaaattcatattttcttttttatgaaagctaaatcaaatactataataaaattcaatacacaattaagcttttatatgtacatacataaaaaaaaatattgggtgtttgtagtgtgcacccactaaaagtggatgtgggtggcaggctcatgatttaagttaagtgggatgaattttttttataaaagaggaggtgtattatgtttttctatatgatataacatgttaaaaatttataaaatttatgtaaatttatatttttatagtattaaatgtagtttaaaataaaaaaagagtaacaataaaagttaacttcaataaggtatagagcgctcacatcttttacaatatatcgtcaaaacttttttttttattatttttacctcaaatttttatattacatcattttaaaaatttctctatttttctctacatcactaaaatattatatattaaaatatatatttattcatttaaaatatataatattaatttatacaaatacacatatataaaacaaacaaaaaataataatgaaataagtttagaataatgaatagtacttatcttccctacatctcttctctacatgtagataaacactattcattacttttaaaaaaaaaaatgtaaaatagctcacttgatgtatgccattttttgaccattcccttctctattttaaagaaaagcttattttgaaggagctaaatataagttttattaatagaggttcaaaagtaaactttaaatatcttttcttatattaaatgtggctattaaacggaaattattgatttaacgattttttttattatttttttttttttattatttttccgttaaaatttaaaggttaaagctacaccattaaatcaatcaattaattattatttttttttaaaaaaaataattttaaatatctaaattatctaaaagtatcaataaaagtaaagaattattttttttacataaatcacaatttaaatttgaattagacattaatttaattaattaatcatactttataacaaaatatattgtttaaaatatctaaatttatttatttagtttattgtttaataaatttaacttgatgtattttcttataaataaattcaaaactagattaaatttttatatatttaaaaaatatgattgaattgttttaaatttaatttttattattattatctaaattaataattaggtaataacaactctaatatgcaactctaaccaattatgcattgcatattactaaaacctagttaaaatataaaaaatgaactatgtgtatctattctcaagcctctgttaccctcctccacacggatgtacttcttcgctctttcgtagaagtcatctatgccatccaattattttttcagcatgttcccccatagtcaacttccagggtgtactccagcagctacgacgatcttgagttcatctttggataccttccttactttgctaacttcggcgttgaagcattggatgtagcttcacaagctttctgttccctgcttcacattggtgatacttgcgacatgcataacgtaatcacatgcaacttgatgttgttggaggtattctcctaaaaattgctttcaagatatgattgttcccgatcttagccttttgaaccacttatatatagctcatttcagtgtgaccgtgaagcattggcaccttgccttgcatgacacttttttcatcttcattagctcatcaaaagctctgagatggtacttcagatcaattataccatcatatggtgtcatatgttgctccttgaaattgggttgaaggagctagaaacggagatgcaagacctacatcaaaagatagctaccacctcaaagggagactagcttggatgatggtgagtttgatgaggaatcccctttctcaagggagattcaagttgaaccacttccacccaatttcagaagtagtgtatgacaccatatgtgacttcccaccaaggctgaaggataaggctttacatttgctttgctcttgggagggggtcataggcaaggtgccctctagcacgagagcttttaggtgaagcctcttcataaggttatgggatgtttcctcattctgatcttcttacggtgggtaggcttgagtcatctcgaaaaacccataaggtccttgtctcgcactggcccccttccaccttgaccttttgggttgctattagtgaatgacgtggagtcctctctaccaacatatacggttgggaccatgtgctcctatcagtggcctttgtactgaaagtgaagggcttgggttttgcctttgagtataccactcaacacattttgcatgtgttgcgaaatttttgttatgcgagtgcacatagtcgcaatttacaataaaattggtaaaaccaagtatcgtcctcaaggactgagttaccagttactagtcaatcaatatttatttctatttgatcaaacaatattcaaaattttcaaacagagaaaataaaatcatttgaaatgaaattttaataaaataacaatgagaaaaaaattaggacaattatgatcatctactacctactcttttacttcctaatgcaagaactcaaatcctcttcttcttattcaatacaagttgcaaaatagtttataatgcggctaagatttacaaactcaatctaaatgataacttccaatatttttatggcaagttagaccataaagaaggcattaaacataacaactctaaaaattaagcaaataatttagatattttgctctaaattgaatttgcatatcaaatttcactttttagattttaatttgattcatgaataacaattataaatgaccaataagtaattacaaggataaaatagattgtaaggaattgaataaaaaatgaagaaaaaataactactgcattaatccatgaaagaagtttaagaaaatcacataacaaccctaaaagagatttagccaataacaatcatcttaaacatccaaagattaaattaaaaacataaaagatgaagaaaatgagaaagaacactaactgaagtcctttaatggtgtttcctatgcttccagtcatcctcgatcccctgcccccaatgtctagaaaattcgaataaatcatgaaaacctagcctccactcgtttttagatcgaatcaggagagttaccaaaaatagccaagagttgcggcctttgatagagagtcgcaactcttggattttttatagagatgagatttttcaatttctccaaaggttgtgacttccaagggaaggtcgcagctcttgctcaatttttttttaaaaaaa

SEQ ID NO: 256947 - DNA, 790 bp, Cannabis indica
tttattgcacttttgtctctttaattttctttttttttttctcttctacagaccaatacgctccctaacataactcccagccctatccgaccccctttgccccttgtgcgatgtcgaccaaccacggcgaccacccccgaccatcccgacccccttgatcttttttttttaacaaagattacatctttagaaaaatcaaaattaaaatctcgttcatggtggtgaatcttaagctgggtttattaattttcaaccaaacttcttcaagcatgtaatttcggtctcaatctcatctggatgttcttaaacagtgaatgctttattatttttgggtatgaatctaagtaacgtgaagggatcaatgtcgacttcaacttccggtgccggagtttccgaccagtttcccgtgggtttaagagttttggttgtagatgacaatcctacttgtcttatgatcttggagaagatgattcgaacatgtcttatgaaggttttaattttatttttttttttgtagtttataattctcttatgggtttgtgtttgggtaaagtcttcttctttttttaattttatcacttattgttctaacagctcaaactttttttgtatgtaaaattttagactttttgtgagtgttgcaattttttgcttacagtgcttgttcatgggattttgaatcttggtgagaaaaaacccctaaaaaagagaatgaatttgactctcttaagattaggttatacccaagctaagatttaaatcatgggtttgctaagagagaataaaaatg

SEQ ID NO: 256948 - DNA, 728 bp, Cannabis indica
atgaaagtattgtcggttgttcgatttagctattttgtatcaaggggagggtaatccccctgtgattcctatcgactttcttaatcaatgaacacattgttctttaacaaaaaaaaaaaaaaactcatccatctggcaaacctggtcaacccgaactcgcgaaatcccaaaaaattagcaatttgaaaaatactgggtgagttcaagttcaacctagtattgtaacgtgccaagtttgaattctgaattgtgacaccctgaatacccgaatcaaaccaagacccacctaaaaagccggaccatatatattttttttaaaacatcatttttttagtttgatgaacttaaaggggattttaggttgtatttcatgaattctaggttttgtgtgttttataactgttgctcaagagtgatttctaacctaaagcatgaatttgtggtaagcttttttaatactttgttttggttcttgaaaagctttgatttgtggtgagtttaagctttttggttgtgattatgtgtgtatggttagcatggttgaattgatgtgaagagtgtttaagaacacttggatttcgtttagaaaccaattctagaacctatgtgaatttatgtggaaatagtaaatgtcataaaattaaatatttctttttgtatattagtttttttctttctttggaattttgttatttgtttattttgtcttatttttgattttgttatta

SEQ ID NO: 256949 - DNA, 1128 bp, Cannabis indica
ccattcctattcctatttatttcctcccaaccaaacgcctccttagaattcttcttggatggtggaattatatccgagaccacatcatcagaaacttaagttagagggacatccgaagtcttgtcaatagttagctgaggagtcttggtacttggaattatacccttgggcgtcatatcatccacctttgactgttttggtggagacttttggccgaaaacatcatagaacaagaatgtcacaacaagtatgattcaaacaagtacaaataagattaaaaacaaaatacaataccttatacgtggaaagggccacgctccgagacaagcaaggaagggttatcctcgtttgaagaatcctcctcttcctactcgaccatgatggcctttccctttccaaccaccgagatagaagattgagcaaccttcttgggaccatccttgatcctaatggcccactcaataggtacttggtcgcgtggaggagccttcatcttcttcttgttgctcgaagcctcctgttcagatacatcctctccttctcagactgacatcggatctcttgttgccttcttggtcctttgtacatgattagataggtaaagcttctacttgataaaattggcttcagttagctaaagagagagatattcggattataaaagaccgcatagctttaatttggaaattagcagataattagggcttaaatatgaaattatttattagtattaaattattaatttacgatgatttatttgaattcataatgcattttaatatgtaatatatagaaattccataatttttcatatttagtgcccgataacattggaaacgcagtgtttggctattagaatctcatcccagtagatttttttttagtatagcgggacaatatagttagacattgggaatgtcaggaatagtctagattttagagttgacatagatacccctaggtggccttttctggtttttagtatgggaggggcaaaatggtcattttgtccaattagtcccttctcctttagttgactttgttttagttaaaaatcatatttttaattaatgttaagctgagatttatttaataaaactaagtatttttctaatttctcaaaatata

SEQ ID NO: 256950 - DNA, 964 bp, Cannabis indica
tttttacctccaaaaataaacattaggtatttatgccgcaatttaccctttacacaatcatgataaaaaatagactaaaaaaattcttgaataccgaaataagtaaaagtacatcaatgcactatttttaaaaagttacattgtttttagggtgttatctttttaaatttcttaaaattttacataatatctaaaataattaaaatataactatataactataaaaaaatgagactaaaaaaagtttgtacgatgtcgaacatatagaagtacattagtatattacttttagaaaaagtgcaatatagaatttctcaaaattaaattctttcataaataaatcaaataatataaatatatatattaattaaatatatataaaaaataagaaatataaaaaaattaatcgtatttgtatttacagtgcacgaaatatgtcatgcactgtaacattaacttcaaaatgcagtcttcaatagtatctttttaaaacaaaaggaacgatatataaaatgccacttttttggagaagccctaaatactacaaaaatgacaagggaaatttgaaattctatacttacatatacctaatattttttctttaaactaatacttttctacattgaaaatatatgaccactttttcaaaaccccgaaaatacccctcttaaaaactcttttttttttcaaattttttgggcttttaaggggtcaggtccgatgggggcatttttttgggtttttgaagtcgggtccgatgggtccccgatgcatgggtctgatgggcattttttgggagtttttaaagtcaggtccgatgggcccgatgccgtctgatgggcccgatggtcccgatgcatgggtccaatgggctttttttggggggttttgaagtcgggtccgagtgggttcgattgggtgtgggtctccatcggcgtctcggtcggagtgggctgctgtgggt

SEQ ID NO: 256951 - DNA, 524 bp, Cannabis indica
tattttattaaatataaataaaaaatcacacccactaatttctcataaattaagaatttagttatataggcacactttatatataaatagagaatagatatatattaatgtataatataggttgacagaatcttagagtactgtattttattttttatttttttttaatgaaaaagaagtcataaattttggtgtatgtacatatattggccaaggccaacactaaaatattttattgagtaataatccaaaatttaaagatagtgcgttgcaaatctgatctctattatttgtttgaaatcttttttgtttaaggcggctagctaactaattatgagaactttcttatcatatcatctgtcaactttataatatattttttagtttctcacaatatttaattattcttgtaaatacatatgtgtatatattttaagaaaaaaaatcagtttgcggcattcaacgaatatgtgtatatatataattatagttgtatacataacatatctacatgagaaatttat

SEQ ID NO: 256952 - DNA, 820 bp, Cannabis indica
ataccctccatttagcacttcatccctgatttccacagtatcaaatcgaaccagaaagacaccataagacagtgaaccaactttgtccgctttcccattccaaacccgtctaataaacccttcaataatcaaaagaggtggattggcaccaaggacataacaaacaattgaggaactccagaattgtacctcatcttctaggagcagaactagtattcttgaaagagttatctaaatttcgaacaacattgccagacctaagaataggaggagtagcaaatcttgcattattatttatcctttgaaatactttctcttgcttatcttattaaattccttggcaaagagctgataacattaaatttatgcatgttttttgatttatgctgcatggcaagtgagaaagggtcccacagaagctatataagcttttgggagtaactctcttctcttttcccacatttcgttctctctcttcaagaaaacaagttaggaaagctcttcacttcccttgaggtggatgaccctttgtcttccagctccagagatttttgtgttatatcaatgatccatgctttccaccattttcctcaatagtttctactagtggataagctttcaaatcccgttcttcacttgtttatttagattttccatggtttccttgaagctttacttcactttgaacattctttgattctcactttagattgtagtttctactagtggataagattgtagttttagaatgcataatgtgtgattttcatacgaaaaatatttaattttgaccatcattgtgatttttgactcttcgaga

SEQ ID NO: 256953 - DNA, 1115 bp, Cannabis indica
gagctcactttttgtgtgagtcctaatttcctattgtatttctaggtatttataagaagaacaaatggcaatagaagataaaaaggtgtgtgaacttttagtctctaggtgctaccaagtctctttggtaggtgttaggtgagacaagatttgtcacacatgcggttgatatgacagtgcataactgtcactttttctcagccaaggtgaatgggtaatcagaataagtatgactttgtaatcatactaatcatgcgccattgtggtcatgtatagtaatctgcttcagaatctgtgttacgttcacgataatctccttttataataataactctatacagtgtgagtaagtatattacgagaagataagaaaaacgcgaataaactatcataggcaaagttcaaaaggctaattttgttacacaaaggttattgaagaaagaaaaaattgatacacgagcataaacaaattttgttttctaaattaaagtcatattatatgtaataaggaaagaaatttttgaggtttcatggtttggatatccaaaattagcagaagattgacaagaaatttgattgggaattaatttgggattcaatcactttttttaatatattgaaaccagatcatatatatttaatttttatatatattatttttgtaaatagtccatacatatacatcctttatagcacttcattggaagtgctctaacatgtcttctagttcatgcttctagttcagcactataaccccttaaccccccccccccccaaaacgtaaaaaaaaaaaaaaaaagccaacactgaatattataaatacatcttttttttgaaggaattataaatatatcttgaaacaattaaaggttaaaaaaaaaaaaaaataagctaactaaaaatattatatgaaatgtatgcttcaaatagtttatatccctcgaattacatttggaagaagaatgaatatatctattatctacaacatcagcaggggaaaattcagcaacattcagtaaaaggagcacagatgagacaaaaagaatgggtaagctgtataatggagcagcaaaaatctccaaactagacaaattttaagcaatgccaggggaaat

SEQ ID NO: 256954 - DNA, 707 bp, Cannabis indica
ataaacagtatatacaactgctcagagcccagtgcatgttcatcatctctattgcaatacccacaaataatcatttcttaaacataaatctaaattcataaaaaaaaatagggatcctcagcgattatgtttgtagatgtcatcaattaggagattcaggtctcaaagatttcatgccatcatcggaaccctaacaaaaccaatcaaatatttgcatacacaacagaaacaatcaaaaaaatcgataattggaaaaatgggctgaattcaaaggactaaatatagcagaataaatattcactgcgcctggtaaagttcgaaggcgaagtgactcaactttcctgcaaaactatgggcctcttttgtttttaaaaaatataggaccaaattaatccttaaatcaaccaaaacaagatctaaggtgtcctttaaagaggcacccattgaaaatttcagataactatgcaaccctaaattaaaacaactaccagagagctttgagaatgagatgagactagacgaattgcattgacgaagatggagtgggttggggtttatatactctgatgatttagaattagggttttctgtggttgaagcgatgggaacgaagttacatagtatgttcggccattggctctataaatctggcctatctgctttacgtgacctaatgggtaggcccaatccttggatgatgtcagagc

SEQ ID NO: 256955 - DNA, 1000 bp, Cannabis indica
taatggatcaatggagatccctgcaaggtagaggaggaggcagagatgacccacttgcatctccaccatgagaattctcagccaccttggcccttactcgtcccgtgggctcatctgaagatcccccaatgagacttctcagccaagaagacatatcttcaaaagaagagtacgaaattcagaaagcaagtcataaacattcaatgtaagacaagattttaaaagatgatgtgatcaactatcaaatacccaccgtcctcagaagaggaactgtcaaaaatcctctacaatcgccttgccttgactctagatgtaggcaaggggcgagcaggtcccttagaagtcttgcctctaggcccgatccagagagaagcatcactaactagacccccgctaggcaagcgtcaacagagggccctctctttcctctccaaattttgtgctatacaagacaaaggcacatcgtcatccaaatcaggaacctgtccatctccaagataggctccctctacaactgggactcgtgcaactccagaagtagaaggatacaaaccatacttctagaaattggccacactggtcaacctaagtatgtttctttgctccacagagagagataggatgtggcttgccctatccctcatttgcaaggtggggatagagcatttgaggaatggcacccataagaattcatagtgtccaatccttcgaaggccataagcaataaagtaccttttggcatacccgccaactttcgacatggtgtcatccaaccactggtgaccgatctgactgaagtagaagtacccagtcctattctgctttggagcagaattcaagccaaaataatgcccgatatcataaggtgtaggtttaggccagcctagctccctatataaaaaacattgtctaaaggtacttgatactttttagggtgatttgtgtcagtcacataccaaagtaagcagcgatgtcttgaaagttatgaagtggcagcact

SEQ ID NO: 256956 - DNA, 1106 bp, Cannabis indica
aaaagaagagccaaaccagcaaatgttgcagctaatataacacctaactggtcgttccctgagaaacatcaggattcaaatcatgacaaataaatcacattaaattttacccttttgaatataattgatggttgtgattcaaattacaatgtcacaaaaagccaagtgtgtgaaaaaaaaaaaatcactaaaagttaaatcttggaactttccacaaaaaaatgaattaaaaactcacgaacatctccttgtcctgaagcactagttgaattgtaatagaacttttttgttgaatatcttaagtaacagccagcatttaagatcctcccttcttcttttggagcacaagaagtaacgttttcaacagaagcagccaaacatttctcacaagcagttccagtcacaaactcccaacactgagccaacccaaaaacacttacattcccctgattcactaaccccacaaaaaacccatcattatttggtgcttcaatgctcaaattcctcaccaacttcaaaacattatctctaaaaacggtcaggttcccactaaaatcaccattagaacaaagggttctgtcttgccaacctaaactttcattgaagaaattgtaagaatcgtaccttagataacagccatcaaagaaaacacgacccccacgaactgccctctgaaaaggtaagcaccttaagatttgggtcttacagagagcaaagcagagattacaatcgtcctgagaaaggtctttcatgcactccccaaaagtgtaaaccgtggtattaccagtcccattaatcacagttgcgtatttttgttgagcaattaatggactcactgctgctaaggtggctaagaaatttgtggtaaagggtcttcgttgagccattgaggcagtgttattatttgtacatattataactgggtcggtagctcgaggatcggaaagaacagagtatggtaataataaacagagagaaagaagcaaaaaatgtgttaaagacattgaaattaacaataaaagagttggcttttcttcaaaagagatgattttggtacaatggttttcttctgtgagtggcttacaatggaatgtttatgcaatttt

SEQ ID NO: 256957 - DNA, 1588 bp, Cannabis indica
ttagctattaagaaatctctatttttagggtatttagcttacttcgagtatcctaaaataccccggtatttttaaaatcaacttatcccaataatcccataaatatttctaactaaaaccgttgtgacatttttggcctccaatcgagtctccagggtcgccgaacatgaaaatatttttatttcataaataactcatattatatacgtacgtatttcaattaaatcttcgtaattaacaaattacgcttatttatcaattattagatcttcagggtcgccgtttattctacatatagctcaatttacattcacacatgctatataaatctccgtaatttataaattacgctagtttaatcacttataacaaaatttaaattttatgttgaaatagattagtaggatcataatactacttattacctgattaactcataatttaaatataaaccttaattattcaccattagacttatcgagatattacaccttcgaaagagaagggaagggctcggtgataagtatttggtcacgaaccgcctggtatgactcattaaggccagtaagaaaccgaaggaccttttcttgattctgaaattttgtgttatcggcagatgcttgacaagtgcatggaagacgaggtcggagctcattgatctcatcccatatagcccgaagcttggtgaaatatgtagtgacagattcatcaccttggcgtaaatctgtaagagattcttgaagctcaaaaagacgaggtccgtttccttgactaaaacggttagtaagctcattccacatttcatgagcagtatcaagaaacattatactgctcttaatatccaaaaaacacaatgaataatccaagacattaccatttggttgcagcgagtctaagaggggaagagatgactagtaggatcgggttgagggagtgtaccatcaatgaaatcggttttgttcttagctctgagagctaagtgaaagtcccaacgccattgcggaaagttatggtcagacagaggtgtcacaagaatcaacccaggatggtcaccggagccaacgaagtacgaattgtcttcgttggctggatgatcgtgagaaggctacaaagaatcagagttaatgttttgaatgacagagtgagtgggaggagtgttaccattagtcaccagaggtacggatcttgaagtcacggccggaggtggaatgacagagtcggttcggacgtgctgagatggagacgaagtgttacgctgaagattcggagctgcgcgttccatcggagcatcgacatgagaaagaaccggttcttgaacgtgtggaaccatgggaacggtggtggaatcgtcgacgacgaagacgggagctgcaggaaggtccgagggaggaggcaccacaagaacggtggtggagtcatcatcgacatgatcagaggttgcagcaagaaggagccttcgtgttcgagccatttgaaaacgcaagggacgatcaacttcgtgttcgagacggagacacagatccgtaaattgtggatcttgattcgtgaaaagtggatctggtcttgagggagaaaatatctgatacca

SEQ ID NO: 256958 - DNA, 578 bp, Cannabis indica
aattagtttttaactaacataactgactttcccaaataggaaaggtttataatagaaaacagttatgtaacaactgttaggagacaaaacaaggtttagtttaaatggattatattccacaaattccaccttaatccatgtaaaactgaacctaaatcaatactagactacacttgggggagtgatcctgtaaaattagtaaggaccaacgttgagcaaatccatacagtgttggaatttgctcactggcaaggcctttgttcctgcatcagcaggattctcattaattggcaccttctcaaggttaatttcaccatcctctatcttgtctcttatccaaaatattctgatatcgatgtgtttggatctctcatggtacacatgatttttgcttaggtgaattgaggattgactatctgaaaaatacagtcaccttgcctttcatcatattcaactctcctagaatttctttgatccacacaacttccttgaatgcctctgttgtttccatgaactatgcttctgtagtagagagagctacaactagttgtagtagagatttccaacttatgtagctt

SEQ ID NO: 256959 - DNA, 945 bp, Cannabis indica
attatggttaggagatcttctataaaaatatctaggttaatttctaatttattaattatttaatttatcatataagataattttaatataatatttcaaattaaaaggataatgctatcatttaatttaaaatatgtctaatattaaattatctaaccttataattaaataatatataaatattaaagaaattaacaaatttttaaaatctgaccataatttaaaaaataaaataatcaatttttaaatttgaacctcaaaatatcaaaaaattaataatactatattaaaaaattaaatattattaatttataaatttgatatttaagtttaaatattaaaattattattttattttgaaatttgtgggttgaaattggaaaattccaaaagtgggtgaaaaatgtccaaaaaaaaaatggattttgggctgaaactattcaaactgcccacgaggaggctacatgcagcctcctacgcacgtgtggaagggaattagcggcctcagatgtgcggtaaaacacaacgccagcagcctccgtgtgcacgagatgcagcatctcgtgtttggagccgtgtgtgcgtacgagttcagacaaggaattgtccccagccacgctcggggatgcaccttcttattggagtgcttggtgcacaggatgcaccatctcgacacccatatgcatctgattttcaaaacaccatatctctcttattttttttatcgaaattgagttccgtaaaaacaaaagttgcttaagtttttacaaggaattcaaataaaatattttcagaatgaaaatgaaattatttacatggaaattttttgcaattcacataacatcatcaaataacacataaaccaacatcaacacatccaaatcaacacaattaatatattcatcgttttaaatcactatttcatgaacgtaaatcattaccatg

SEQ ID NO: 256960 - DNA, 2820 bp, Cannabis indica
ataaacaaccttaaaataacatcagaaacctatactaaagttcatccaagccctacaacaactacaataaaattttgcatgttgaacctacattccaccactaaaacaaaggaaaagagttctaggtttttaccttggatcttagctcccaataccccttgaattacagttggaagctactaaaattggttaagaaaattcctggttcttgatggttcttctagggccaaaagtgggaagagaaaggaaagagattgaatgtcttattttgtcattttttcaaacttaatcttctaagtaaattcataataaacttaacttaattaatccaaatattagctagctgctaacactagaagatgccacctaattacaaggtccaaaatgactaaaatgcccccatacacaaaactaaagggtaaaataactttaggggaaaatggtcaaaaactataatcccgtctaatcctgacatttccaatgtctaactagatcgcctcgctattctaaaaatactaaactatactaaagttactttataggccatacgtcgcgttccactattaccgggcataaaaatatgaaaaagcataaaattcatatataatacaaatagcacacctagaattcaaatatatttgtgaaatcgtaaaaataataataaaagtttactagttaatttagatcctaactatctactaattctcaaatacaactaagcggtcattacaattatccccccccattaaaaggatttcgtcctcgaaatctaatctaaagaactccagatattgagccctcatattggactccaactctcatgtggcttcctccaccctgctatttctccagagtaccttgaccaaagctaatggtcttatttagaaggactttatcctttctatcaagaatcttgactgaatgctcttcatatgatagatctggtataagctctagggtttcataactaagaacatgcgtcgggtccgaaatgtatttccttaacatagaaacatggaatacgttatgaactactgatagtgctggaggcaaggctagacagtaagctactagtctaaactttttaagaatctcaaaaggtcctgtaaatcgagggcataaccctcccttcatcccgaaacatttaatccccttcatctgagatactcgtaggaatacatgaactcctacctggaactctacatttctgcattttggatctgcataactcttttgcctactctgagaggcaagcattctagccttgatcttctctattgcctcattagtccgctgtactgattccagaactaagtatttcctctccccagttttatccaagtgaattggagatctgcactttcttgcatacaacatctcgtatggagccatctctatagtactctgatagctattgttgtatgaaaattctattagttctaaatacatactccatgagccttgaaaatctaacacacaggctcacaacatatcattcagtatctaaattatccccttagattgaccatctgtatgaggatgaaaagctgtactaaacttcaacttggtacccatagctcgttgaagactttcccagaacatagaagtgaactttggatctctatctaatataatggacttcggagccccatgtaatcttactatttctttaacatataagtctgcatactgatccattgtaaaggttgttttcactggtagaaaatgtgcggacttgataaatcgatccataataacccatatggaatcaaatattccgatggttctaggtaacccaaccacaaaatccatggtgatatcctccctcttccacttgggacgagttaaagtctgcaacaaccctgtaggtctttggtgctcagccttaatctactgtcaagttaaacatgaagatacatattccaccacgtccttcttcatcccgcaccactaatagaaaggttttaagtctttatacattttggtagtgccaagatgtaaagaatagggagtggtctgagcttcatcgagaatttctttcttcaattctagactactcagaaaacagactcaagttttataaagtaataatccactatctgatattgtaaagctcttagcttgaccagctagaacctcttcttgggctttcaataattctgaatcagttatttgagtagctttaattctgtctaataggtcgagtttgcaatgtcaaattattatatttacccacgacaaactcaatacctaatttgaccatatcatctgccaattgaggtgaaatcataactagattagatacttgtccgggacccttcctacttagcgcatcaaccactacattggccttcccgagatgataaaggatttcacaatcatagtctttaactaactccaaccactgcctctgtctcatgtttaaatctttccgagtaaagaaatatttaaggcttttatggttgatgtaaatctcacacttttatccgtagagataatgccaccaaatcttcaaagtaaaaactatcgcggcaagttctaaatcatgagttgggtatcgatgttcgtactcctttaactgacgggaggcataagcgatgacccgatcgacttgcatcaacacacaccctagaccttgtctggatgcatcacaataaatcacaaacttttgtttatcagatgggagagctaacaccgaagcattaatcaacctctgtttcaattcctggaagcttgcttcatattcgcctgtccacataaattgatgattatttttagtgagttcagttaaaggtgttgagatcttagaaaatccctcaa

SEQ ID NO: 256961 - DNA, 1092 bp, Cannabis indica
attcaacaaagttcccataagatcagaatatctctctctctaaaaatttgagttcatgccttagtcaattctcttgtaattcttatgagaaataaaaattccgtagtttcattattattgcgatacatggagtgaactactataaatcttatgtgtgtctctcttattaattacttaatttaaattttatcttgccaatctagagaatcagtgttagccaattttttacatcaacgatgataaagttattagtttttataattttaataaagatattaattagatattaaattttacatcaaattttgtaatacaaaattattttaatatatcacaatttttttatggtcttatatcatcaaataatataacactatgcccttatacctcacccatcatttgattgatgcatgaaagcaaaactattttgacaaattaactattattcaagtaaaagtaatatgccaatagcaaaccaagaatcaggcataccaaaatcaggttcatttataattaagtactagtcgatggattattgtaaattgtacgtatcttctataaagtcatttaattatattaggaaatgaaaaactgctaatgacaaagaaagaatgagatgagagattttgatccacacatacatttcatgatcagcttatacatatatatatttatttagagtagtgtcaatgtaaaaattgacaaccttacagtattacttcactattacatatatatacggttagttgatcaggtgccactctatagatcaaccaaaggtatgagtagctagtgtgaataacttatattaatttatatatataagctgtaggtaggtaggtattaggtagcttagtagtactagtagttgttgtttatggctagaagagtctgaaagtcatgatgagcattggtgcattttgaaggacaattcttgatctgattagtacatatacagtgtgggggctgtgaccgagagcatgcacacatcgaacaactttttggacaaaaaccctttttcacgtcattacacacacatgatgatgatgatttatttttgcacacacatttatcgcaacaggatggtgtgta

SEQ ID NO: 256962 - DNA, 932 bp, Cannabis indica
tattagtattataattgttgttaatttttaaagtgttatagtattagaatttgtttttttttttttaaaaaaaaaaaaagtgttaaaaataatgaaaaaaatataaaataaaatattatatttttactatagagattttttaatattttttaaaagatatgctacctatagtgatgcttatgcccctctccggattcttcctaatcctagctagttacacacatagggtaacccaattagttacaagttacaaatactttttttccctaaaattttcctaacatttggagtaagtacaaaataataattattagaaaaaaaaaacatttttaaaaagaaaatgtttatatatataattatacaaatgaccgtatttggaattaaaattaagagcatattgaaaataatgagtacttaccaagcgcatgagataactcctatgaatgtatacggtctttgaagtttccaacatgtgtgcccaaagcttaaaattttagttactactgaatatttagtattagattcaggaggctcagtttgatttgcagtatctgtctattaaatgttaacacaatattatttttcttaattgtaaaatagaaaactcaattctatcttatgtataatttaggaagaaagaaagaaagaaattgccatataaatatatatatctacaagcaagaaacccacacataccctaatggaattttttgcaattaataatgattttgagcatctgttttgtagatgaaagttcttgttggagcaatagttagagggaaaattattataagaggatgtaattattggtgttttggggtgttgatgagataataatgagctcttgggattcttattatgagggtttaataaagtatggtaattagtttgaaatgaaaagttacaaattgatgagagctccatgaggatta

SEQ ID NO: 256963 - DNA, 1071 bp, Cannabis indica
gatcataatcagtcaaagataataatcgtttcctatcatttccctcgatcataatagagtcacaaccaatacatatcgttactctcgattgagattatgtaacaacaaacacatatcgagatcttgatcataaccgaatctataattatcataacgttagccatatatggtgcttaatacttttcttacctcagtccagaaattaagcgtgcatgccggcctaagtggaaaacaaagctttacgactctgggccctatgtcacgacaacaaaaaccaataaataccttaaaccaaaactccgggaactaaccctaagttccataaccggacaaaacctaactttcattagctcaaaaataagccaaacaatactcaaataggctaaaatggatactgggtacaatcacgagcaaaaaatcaattccgaggaaaacctaaaatttttcccctgcaaggcaaccggtcgacctgttgtgctacactagaaccaaccagcccgccggttttggcaggatacaaatcttgggttttaacccccaactcgaacacaaacaaatctaaacctatccaactgctccagatcaataaattatcataattaaaacatatcccaagcatcaattaacaataattcattcaatcaatcaaaattgcataatcaagtgaaattagacttaataaacttcaccttaaccaaaccaaagcaagcagccattaactccaactgattcaaacctaaacatactccaaatccagtctacaaacacattctaaactcaccgaaacatcgcagctcaaaaattagacttaaccctaagcaaagcttaattcaaaccatggaaattcaaggtcaagaacacgaaactcacctttcaatcttgggcagcacttagacttagctttatccaacctagacttggttgattgaagaagagaaacttagttttcaactggtttcttaggatttttgagagagagaaagagagagcaaatatatgtatccttttctttcattttttttttttttaatttaaatttcctgcgcttaaataaaaaaaacaaagaataaa

SEQ ID NO: 256964 - DNA, 1392 bp, Cannabis indica
aattttcttcattacacgtccaaggatgtcttcctccatcctttgattggtgttaacatgagtagcagcagctacacttgaatattaaagtaatgagactacttcagaagcaaaacagtaagagaatattatcattagacacatacaagttttactttttacctaagaaaagaaaaacagaaaatatgagaaaaagaatgtaaatacattgcataaaaaggttcactttatgtttattgataaggtatgagctcattttatccaaagaatttgcacaaagttccacattgcataaaatacttcttgccatctgatgtaatttgttagagacgtataaacataatctctgagatgaatttcattgcagagaacacttgcactcacaattcgaaaacaatatttctgtatgtaactctttcattgatcacacattcaacagggtaaaatttcaaaaaaaaaaagaatgacgagatatcaaaacaaaaatcaatcaatgaaaaatattgggagcaagtacagtgagctgagcatgctctatgcgcacgggtgaagattaccttgatgcacctgtaagggggttctgaaatcagatgttgtgttatggttgttcccagcaacatgatcattgctcgatgaccatgcagcaagagttgctcgagtcctcaaaggaggaagttctctgttcctggctctgcatgagaatacaaaatgctcagcttattggcttagtcaaaaggtaaaaggcgttatcacctctaacgtaccttattcctcttggcggcttatttacttcatctacaagccgctgtcgtgctgcttccataacctgaactagtccccctagaacttcaaaggtttcagtgaccagcataagaagtccatgccgtacatgcacattacatatgacaacctacaactcatatgagaatgacctgtttaagtcggattatgtattggataacactcactgcaaaagaaaaggactaataataagaatacatgtgtcttagctatggccaagaaccgaaaagagacccctttaaagcaaaagagcacaactcattgtataaatttgttcctttgcactgctaagttaccttgcataatcatattatgcgttgatgtttatgctccattttaatataaccaatggctgtaaaggttacaaaatttatgttcatgtgccttcaaagtccaagtcagaacaccatgataaataaattataatgttcagctataattaaaatgtaaatgcatttgcttcatatgaagctgtcaatagctttcaaatgtctactaaaataaaacacatgctactaacaaatcttcaatgatttaatgtagattataatacactaactgataccaggaataatctaaataagctagagc

SEQ ID NO: 256965 - DNA, 2201 bp, Cannabis indica
aatacccctagagtttaataaaatctccgaaattgagaaattacaactctaatatttatttttaaatattggggtccaaaataattaaattcctaaataataataaaataatagaaattagtgctaattgcctttactaatccaatttactaaggcggtcattacatctaagtgaatgtgttgtatataatagagattatatatgacaatgaccgatatgaataaaactgtctttatcaaacatgtcatttactataaagacctaattcatatcgtaatgatgatcaatagtagatcgacctaaatcttgagtaatcatgaacttttattcattttattagtttctttgattcactcgttaaagtttctcggagaagatgattcttacaacttttattttgggaatataataatgtggatggttggaaatatgatctataattatggaatcctgacttaactaacggatcgaatactatttccctttatgtgttaattctagtactagaaagttgcgcacaaatttagataggatctgaattaaacttacaccaatgaattaatagtactaaaggataaagaagtaatatgaagggtaaattggtaatttgaccaaaattaattacaaataaacacaatgagggctaataactggaattgattatattaatggacactgtattatacttagtaaatataattttataattagtaagagctcaattcgatatttatagtggagcaatcatgaaattaataaataaaaattatttagttgatgagactcaataaataatctagtttattggagcttacaattataggtccatggtcgctgaatcgccaccttgaaacactgtcaagggaaaggataaagagaagtataattttgttcaaaaaatccattttgaattggcaaaattatttatttttgtgatagataaataatttttcaaataaattaattagagaaaatacaaaagttgttaagacaaaatttgtcaagacaaaaattgtgaggacaaaagacaccatccttatcttaattgagataatataggcacctaccttatagtagggtgtctctatttgttttgtctttttgagttaattaatttattcaattagacaaatatttgaatttaaaaagcggttaaagatattttaaagtagttgagacattctctcataaaaaatattagtaaccaaatccaattatatatattaatccaaataattaaatatgatttaattaatgggaaattaactactacaaataaaagtctaatttgagaaatcagtagataatttttcattgttatttttcaaatacagaggagaaaagaaaattatttttttctctcaaatagctcttgctcatgtgttgagaattacaaaaaaaaaaattatacactttaacttaatatcccacactattccttgtgtgtggtggatcaatttggaagactacagtgtgagttttggatcaactaaaaggatacaacatacgcgatatttcgaggataccctgatagtcatcaagaggtatatattatttccttgtaatttatgtttttgatttaatgtatacacatctagagatcgaatgggttatgatacaatgattatcatatatacgaatcttctcttgcatacctgatttagtaccataaaaacaacaacatcgtcatttcttgcagctatgactttaggggttgaaccacggttctttacaaaagttatcaaatatattgtttggcgtactgctatgcaaaatgaaattcgtgctttggaagacaatggcacttgaattatggtgaaattactgtctggaaaaaaaaacctctgggcagtaaatggatgtacaaaattaaacacaactctgatggaagtattaagagatatgaggccctgttaattccatttttggcatatttaattgacaaaaatattttattattcaatgtatattttcggctagaatgttttaatttgtgtccttattttgtgtatcaaaacttggaaggaaagttgtctagctttcctatttatggaaattgaggtaaaaatggtaagttttgattacacaatttattcttatctaaccagctagtatattctaatcttgtgtgagttttccattttcttagatcaaatttattgaagagaaagtgggagctaaactttccttttttataaaa

SEQ ID NO: 256966 - DNA, 953 bp, Cannabis indica
ttacatcaactataatgtcatgagttcaaccctttgtaaagacattttttttttaatttaatttaaacttttaaattaatttaatattttttttgttctaacaaataatttaaatttctttaatatatgtttttaattaatgtagaacaattcttatactataataatttaaagtttgtaattatggtgggacgtcttcaatttttctttgttaatatatattgacgatttaattatataaattataatagtgaacaataaaataacacttcaataataattatttgctgagatttttgaaaatcaatgaaatatatatgaaaactaaagaaattattagaagataaagaaataacaacaaaatttttatgtggttggagtgttaactagccttagcccacgaactaatattattacgatgagacttgaaaagccttagaatttacataaatgttcaaaccctggattttgcttgagcaattaaagaatgaaatttcaactctatacatgggttcgtgttcttatcatagtgttttaggattcttcttcattaaatattacccactaatgagataaatacaagtatatattaactttgagcccatatggtggagcctagccaatgaggcgctaattgtaaactgatgtggatgccatatcatgttaataattgtccaatttgtgtcctacaatcatagctaataaagatatattaactgcttgatacttaattactatttttctacatttagaagatacgatttgcagacgagatcttaggagctaaatcctgatatcgtgggatctgataattaatgagtatgacatggagctagatgttcggatgtcatttgactacttctacgacactttagctaaattcttctggatacaaactatgctaaaggactacttcacttggacgagttatttgtctgccatccagaagagtt

SEQ ID NO: 256967 - DNA, 1243 bp, Cannabis indica
tgagcttgcccaatttgtactttgtgctctaagaattccttgctaatgctcacttcgtctagttcctccatgttaggttcatctggatcaatcattacatttgactgttgtagttgctataaagttgattgtttttcttttagggtgctctgataacactctcgcactactctttgtgcccccgatatctgctttattccccatggtgtaggaaatttgataacttggtggtatgtggatggcacaacttttatctcatgttaccatggtcggccaaagatggcattgtatgaagaaggacagtcaacaacgatgaacttggtttggaggtttactccttcttcccaaacatataagttgacctctccaatcaagtgcttttgctcaccattgaacccgattagactatagatttgctggtgattgttgactcgccaactttcatatccttgagagcattgagaaataaaatgtcagcagaacttccattatcgatcaatacatgtttaataaaatagtttgcaatatataatgaaatgactaaggcatcatggtgatggtggagcaaatctgtggctttgtcattgagaaagctaatggtctgtccaacaactatctctagctttctcgactttccttcactgttgattggttctcgtgcatggcgtttagctgctgaatacgtaagtttactaacttcttatcctcttaagatcacattcatggtcctcgcattctgagggggttcaggtggactctcttatcttttatccccttctgctacggttgttttgccttgatcagaaaggaaatcttgtagttgtcctcaacaaagtagccctgcaatttcaaactggactgctatacaatcagctgtggtgtgtccgtgattactatgaaattcataccatttggtcatatctttcagagcttctggcttttgaatcttcccaggccacttgacttaatttcccatgccttttattatcgtaaccacttcattagggtctattgttagagtatactccggaattggtgctttatcttgacagcctctaaacttttgggatgattatcccctttcttggtaatcacgtgatcgttggggcggaactcttccaccgccttgaaatgacatggatctgttagtggggtatggttaaacatgataagatgacttgcgctctactcatcttggcccctgattctcacgaggacttaagtagttggagatcggttgcct

SEQ ID NO: 256968 - DNA, 947 bp, Cannabis indica
aaagagcaaacaaagacaaaggatagagaaatgcaaagaaaagattagagaaagactaagaggctgtttggctctgtttttagttttcagtttttaaaattgcgtttttaaaagtgagaatagaaaatggttttttatcattttaaaataattcaatggtgtttaggtcagattttttaaaattatttttagagtaaaaaaaaattaacattatacacgacatgaacccatcctactccggaccagacctggacctggacccggactcgaacccgaatctggataccagacccggggctaggttcgaggtcctgggtcgggtttgggttcagggtcggagactaggatcctagtccgtggttcggggttcgattcgggtctgtgttcgtgtttgggtccggggtcttggtccgagtttaggctcgggttcaggtcttggttcgggcccaggtcaaggtctgattctagggtctaggtcagggtttgggtattggtccgggtctgagtctgagtttaggtccagggttcgagtccaagtccaagtttcggtcttggtccaggtctgaggtttggggtctggatcttggtccagttccaggtccaggtacgagttcgggtttaggtctagggtcagggttcgggttctggtatgtgagcaaaaatgtaaaatataatacgttagacaaaaaaagtagttttgaaaatagaaaataacattttgatattttctattttctaatttttttaaactcaatttttaaaaaatttagccaaacgatccctattagtttttaaaaactattttctgttgttattggtaagctttctgacttccaattccatctgaggtgtaagagtttgagtgtcactcgtttgtgttttgctgataacttacttttcttctgcaaagagatttcaagtctccaactcttttattaaggggattc

SEQ ID NO: 256969 - DNA, 502 bp, Cannabis indica
ttacctccaaccaaacgccatcttaatttctagaggtactttaaatatctcaataatggatggttatagtttgagttgtggttgttaggatactaaagcccttgtaatgggtattatatggagttgaattgtgtctgaacatatgatcaggttacaatatttgttgtaatgtgtaaatggaactatcttttatgggcttggtagttgcatacatcttggccctttcgctgttacgaaaaagtaatttgacaacactggtcggccaacccttctacgaagatgccaaggctggtcagccccttaaagacacatcattggccgaccaacttcatgcaacagtcactatggtcggccaacctgtaataattccagaaaaatgagcaaaattaagtttgcaactcaccgtgaataaatcatgaaggccagaagaatagagcctatctacctcgatgtcatcaagctcctgaagctcatcgtgttggaatttattttaccaggatct

SEQ ID NO: 256970 - DNA, 777 bp, Cannabis indica
aatggctttccccttcccctcgacaggctgcacgaatctatgaataggtacctcttcagggtccctgatgcggatgggttcctcaataggaaaaaatctgaccctattggccttagtcttcttcttcttctttgtagcagatgggttggtcgactcagaaggcttctcggggaacaaactctcaggttttggataaagcatatacttagtcatattctcgacactttttagtaagacaatgcgctgagtaaacgtagacaagactaaaatgacttgggcactatccctaagacctaacgtgaaagcaggctagatatacatctttgctcgttggaaagtagtgaagttggtcgaaaactttgtgaccatatagtagtcttgaagaaaaccaccaatcttcatgacacatttctcattagcgctaattagtcatgagtatccatactgtgagaagtagaagtaccctgagcggtcactgtgcggagaagactttaattcaaaaaactagttaatgtcgtgcacaaaagattccccctacccttgctgcgcatataagatgaatgtgtcagccaagtacttgatcccctttggtgttaattgtattggagagattttataatagtttgccaatttcaaaaagtacgggtgaagtggtagaagggcaccatgttttgcatgtgggccataccacgcacacataccttcgcctgggttgttagcaagttgtccctcataagggagaaagacatgcacgtccctaagaagatcgtctttgtc

SEQ ID NO: 256971 - DNA, 1174 bp, Cannabis indica
ggaagtagttagagaagtctcattctaacactaatcacttggattggtgttgtaaaaatgaacatacatcaaacactcatcaaagttcatgtcaagccagcaatcaggtgatgaggtaataacttgtaccatggcttgcatacaattggaatcgaatgaagttgtcacgtaatgttaacttggtaatgattagtacaagtgcatctcctataactcaccccaattacgatatcgtaagattgattttccattatgtataatattcactgaccatttgtatatatatagtccttattattcaaggagagtttaatagtcgcatgcagaagcctaatttaattatatagttaatgtgtatttacttttctcattgactcctcatctgtacctttttagtataatatatattttttagggtaattcaatcccatatatattaagtgtttatattaaatactttattttttcttattaaattttcttatcatatttgtttaaattagttttatttttttttatatttatatttatgaaattacccctcatttataggattaattaacgaggttcttgcatgcgtgcaacttctgagatttatttcaattccaagactaatatatttagggaccaagcgaaaacaataataataaatactatgcgcacctgtgttaatggaaatgattattaaaatctttcaaattatctacaagattaattataaatgctacatacccaactcttcatttctttggttaggacttatgagtagtaaacaataaatagattgtattgaatcaatattaattatgtgcatacatacaatattaattacgttttttcatatatttatttatcatctttgtttcatatatttataagactaattaggatttacgttggaactttaactaaataatgacacttgaacttttttggtcattaataattctccccgaactattgagattattagatttaaagatttttatctaattttatttaattttaccctctcagtggttatttatgtaccaaatcatgctcaccacactttgatatctactaaatcatgtccctcgaactttgacatgtactaaattatacccctgaactttcattcatattagacttttttttttactaaaattggataaaagtccttaaattcaacaat

SEQ ID NO: 256972 - DNA, 1918 bp, Cannabis indica
aacttttgcaaaatacagggtctaaaatgatatttacccttctatttttcgtatatcttaaattattcaaaatttcttgaaaacagacctaataactactataactataatatactctctcatataaaaaaaaaaactataaatgtttaatacactagaaatgaaaggaattattacatagaaaatataaatcgacactttatttacaaaaatacctccataaggtgtggacaacatttatacattttatgtaattttaattaccaaaatacatcttacattatcacttacacaatcagatgatggttgcagggtggttgttgcgtggttgggcggtggttgcatcagacgatggttgcacggtggttggccgaaggttgcatcagacgaaggtttcaatcagacgaaagtttctaggcagttgttgggtgattggccgaaagttgcatcagacaaatgtttcaatcacacgaaataactattagtaaaatatttatgcaactgtaatccaactgtaatgcaactgttatgaaacattaaaaatcagaacagtgttccaatgtacgtaactctatctacatgtatctttatgatttaatatgaacaaattcacaattaataatttgaaaaacaacaaaaatacaccaggatagatatttactatagtattgatgtaatttttttttggattatccttgagttggattgtttgggtccagttcaactttttgagatctacctttcatggatttgaaaattgaagtcaggacattagttttatgcaaattaaattggatttctggttgaattttagtttcgtagtagtttttctacatttttttttcatgaattcgaaacaaccccggttttgattgattctggtcgtcttcttaggtgaattcgtcggaattaatggtggttctctttcaggttgaattttcgtctcagttgcgttggatttctgcgtggttgtgcgatggttgcacgatagttgtccataaaacatagatcctgggttgaaggtgtgcgtaagtggtacttgtgttaattttttttatcatgtttgtatatttgtttatttggccagttaaaaatatttttgtaatattgttactttttttttgttaaaactgaaaaaagcctaaatttaaaattatttacaatttggaaagtaagattgaaacaatctattttatacgtgtataaaataaaaaaaacaaaaataatttaaactttgttttcagtgctaaatttttttaaatttctaaaaaatttacgaaatgtcttaaataactaaatttacactattatataaaattttagataaaattattggaatttccaagatacaacgaaaatacattgatacactatcttttgagtggaccatagaattttctcatattttttagtcatattttacttgccccttatgcttttttttttttgaaagatgcccctcgtgcatggcgttagttattttatctaacatctccaatgattggtgtgaatttgttttttataagccatttatattttaataaactaatataggaaaattttatggtttttttttatttttttattattattttttatttttttgcattcgaacgtatatcataattatttaaaaatcaaaaataatttaacacagtgtttaaacagtctattacactacttatttttttttttttttatatattacataaaataaaagttaacactacttttcttattgtaaaatattttcaaatttctcaaaatattttaaagtacctttaaaaaactacaatgaacaccattgaaaaaaaattaagattataatttaaatattaaaagagaaattttatttacattctaaaaatttataaagacacttcattttaataatttttaggagaattacctcatatac

SEQ ID NO: 256973 - DNA, 675 bp, Cannabis indica
ttatcatctccaatagtcaatctctccttaccaccgtacggagtggattgaggtactgattgggatctgcattgtgattgtggtggttgttagcttctatctttaaaccaagcctcatgatcaataacctatggagtcatgacaaaggtagttggactgttgaatccagattgaggttaagtatttttcttgttgcaagggccacttcccatgaaggattcatcataaaggttatagcacacagctgttgaatggccatatttcctgcaaatttgacagattgggtgactgccattatttttggttgttctactgcccctgccacgagatctattagtacccggataacctccatgaattgcagcatggacattgtaaggttgattctattgttgttttaggggattctactgtgatggagttttttctacaagattataagatggagctacaacatctttgagcagcttagtgttagcactacaagaaatatcacttttaccagcatagttcgctactgtgttggttaaaataactttcaccagcgcatttcgcaaactgcgctggtaaaaaggttaaaatttaactagcgcacatttgcagtggttaaaatctaacttttaccagcgctttcattttgtgtgttggcaatgtaaaagttctaatatcaacgtt

SEQ ID NO: 256974 - DNA, 598 bp, Cannabis indica
tctcaaaaaggaaaaaaaaaagtagaatatgatttcagattcgtatacattttacataaatttatataaattgtgcacttaatatcttttacataaattataattggtataaaatcaaaatcaaaatgattatggtatcaattattttacagatataaatacggatggaccttaccttgaatgtaaggaacacaacagtacaatggatgtgacgagcatattaaaaacataatttacactcattatcttgagtaatgatgttttaacaatttccttttgtacacaataatctgtagtcaaattagcaataactcgattttatgagagattaaatttttataaatgaaaacaaaaatttacatatccttaacttaaataagaaactctcatgatgaaaaatataaacaataagattattgagcagttttttttttaaaaaaattatagtctttagttttggatgggctcaattgatacgccttataaaggtcgtattgtattaaataataaataacactatgtttggattaagtaatgtattgtattaattattacaccaaattttttaatacaacttatgttgtattatttaatacat

SEQ ID NO: 256975 - DNA, 1122 bp, Cannabis indica
tctcagggtaatttttcaatggaatatttctcttgtttgcttagcttagcatgttcttcttttcaattttaacgattccctcagtgatgatatttatttgattctttttgtaattttgtatttacaggcaattgctcatgagcttctgtcagtggaagagattcgtaatatgcagataagatttcatttcatggatactaccagaagaggaaggattaacttggatgaactaagaatcggaatgcatgagctagaagatcacattccagaggcaggtgttgatatgataatggaagctgtaagtacactagtcttttggaaccataaattttttctttgttaattctggtacaaaaacaatatgatataaacactagtttatgacacataatgatactaattcattcaagcaaattgtcggattgtaattgtattactgttttggatgaaatcccttttgttgtaaattctttgctcaaaatgacattaattagatcaagaatctaagggaacaattcacaaacagctaacaaactaagaggaaaaaaaaatcaaacaataacagcataaaacatgagcaaaaacagtaaagaacagtatgcgaaattgctcctactccagctgagcaatccattatggtgatcttcattagggtagacaaaactttgtacaagaagtgattacagtcaagagcttgattggaatctcgcaagagtatccctcgaacttgatactcaaaaccccgagatcaatccctatacctctctttctctcactctactctgttctgttgtaatgaaatgaaagcctctaagtatttataggctttggctagctcgaatagttgagctggtctttgctaaagaaccgaacccaactaacttaacagaattgtttgttaagttagttaggacggttagatggagaagtaattcccaaaccttttcttaatttcaaaaaaaaaattatgaacattaacattactaactggaattggatttacagggtgatctaaataggatggatatatggactatggagaatttgcaatcatatcattttaccttacaagatgcacactaaggatgagttcattgacaaagctttcaaatacttcgacta

SEQ ID NO: 256976 - DNA, 1502 bp, Cannabis indica
cgacttgtcgtttcatcacaaatgccaagtaagtatatcttatttagatttaggtaaatacaattttagaccctttgttttgtaaaagttactaattagagtctctgctttatcaaatgacaaaatagaccctgtattttttaaaattgtacaaataggatccattttttgtcaaaataaaacttaataataatctgatctagagatgttatgacaaaactagttacattttctgtatttgtttgtgttaaaaaatttcttaaagttggttatattaaaaaataaaattgttaaaaattgaactgaatgttctatttttactattttgaaaaatataaggtccatttgtcatttaacaaaacaaaaaatcaaattagtaacttttgtaaaacacagagtctaaaataaaatttaccctttacatttttactcaagtatatatttttttacaatcatataaatttaatattttttttaagaaaaatcaaattttttaaaaatatgattttaaaattttaaattataaaaatacttttttctcattaaaaaaataagtgtaaataattcaaaaataacaaaaaattaatctcacaacaacttaaaattaactataaataaattataaaacaatgagaaaattaacttgttgaaacattgtttatgaattattaaaaaaataaaaaggtacattttgaggtctttataagactaatcttacattgcttatttataagtatatataaataagttgtttaatttttattttatagcttaaatgaataatatttagatattacttgtattatggatttttattaaatatttagatatatatggataaattttaattttaagtaagttatggtatttttttattttaatttattatgtgggtttttttttccatttttttaacttttttttttatatttttccagaaaaccattttctctcttacctttttgtctttttctccaccattgttcctcttcacctctctgtcttctcctccatcttcacccctttcattctcaggcgaagcttcttctaaaactcatctccatcgtcttcgtcttctcccatcttcactcatttccttctcaggttggtgacaaccaggtgtgagtttcttctcaagcagagttagggttctattcccttttccggcgaagctagcttgtggttcaattccgacgaatcgagttgttcaggcagaggtgggaaatcaaaaatgggagaaggtaaatttgagcatctccttcctagtgtgactgttagttctttccatcaaggtgggcttattttaattatcatatttcttgaaaaattagaatgtttggatgtttgtgccaattctcaggctctaatttgtgatgcaagtaaatgaacaatgaacaatgaacattgatttttttttggaactttttttatggtgtcatacttttttacatgctctaataatttctctaaaactttttccatgtcttatgattttttccttc

SEQ ID NO: 256977 - DNA, 929 bp, Cannabis indica
acccgtaatccacgaagagtacgctctaatcgtacccaaaagggaaaatctggcaacggggacaggtttcccaaagggagtaactggcccacaggtaccgtggggattgtcgaaagtgtttatgtacatcaggaaccccagggaagaagagagtttgtgaggagggacccttcagtcgatttaagagtaaaatatcctaaatgaaggaatcctagctgagcttgctatcctctaaaaaagcataacgagagtgtctcggaggcaaaaaagcaatgattcagactccgattgtgaggaccaggatccatgtgcaggaatgtccttgaagtcaaactcccaaaaaacatcaaaatgcctaaaattatgcaatatacaggagacactgacccaagcgatcatctgtcacgattcaatagggtcatgacagttttgagagtcaacaatgacgccaagtgtttatgatctcattgactttgggaggatttgtggaagagtattcaagaagttggaacttattggtataaattacaaactattttttgaagatagttcgtcacaacaagaaagataaaccttgaagtcagggccttaactaatatcaaacaattgcccactgagaccctacagaattcattaagagattcaaggaagaagcttccaaaacaaagaaggtcgacgatgggcaacaggtaacattgctacatgctgggatctagaccgaaactcctttctagaatgagctccaacaggaaggtgcaactagcctgcaagattttcaaaagagggctgaaaaatacattaatttggaagaggagatcacaacttttggtggatattatccaaccagaggacctggatatacgtctaggatatagtataccggaggatcgcatcctgcagctcccaaaaccacgggattcctagtatac

SEQ ID NO: 256978 - DNA, 964 bp, Cannabis indica
tattttttcagtttatctgaggttcataggtgcatgcatgtatataaccttagggatttgtcgattggaatgcaactcttgcaattttttgtctgggtattagctggttgcttcaaaaagcttggtttctctttgtgtttgtgttggtatagatggacatgaactaggaattttaattaggcatcgtggaaaccattgaaggtgcacctattggccacgtaggggaagtactcgcggaaggaacccaagatgtggttcctgctaaattgtcccaacaagggatggttcttgaaattgtcccagaggacaaatccatcatggaggaaggaccctccgtgaaaagccaatggaaaaaggagggctaggacccccagctgcacaagctttcaatgactcgatttgggagatggactagagggctaatagctttcgttcctacagaatgttgacggtatatgctgatggtgctaggcttcacaatattctaggattaatgtggcactgggtgtctgctatacgagattctgcgtccatgagtgtggagggattcaacacttggagctggtcccgcatctccaatggagcacatcttccattaagaacttattttccaaacctgatggccaagatcgggataaatcctttctaaatgatcctttcatcgtataggctcctcgctaggtggtacatcttttgcaagatgaatagcttggaagtgccttccctggaggaaatcctttactttaacagcgttaaggctaaccccatgaggactaaaaaaaaagttaagctttttcaagttggacaagcgtcttaactcttactggccagtcagccacactgactgcacctgggacatctggagtattggttcttctcctctgggttccccgtaaaaagggtgccctcattccagctaaacttccaactgccaggtattatcaactcgcaaccttaatttccc

SEQ ID NO: 256979 - DNA, 1033 bp, Cannabis indica
aattgcctggtttaccaccctagcaggaaatagattttgttattgacctgataatgggagcagcccctatttctaaagcaccatacaagatggctccatctgaacttaaggaattgaaagttcaatttcacgagatgctagacattgggtttacccaacccagtgtatcgccatggggagctccaatattgtttgtcaagaagaaggatggatcctgtcagacgtatatcgattatcaggagttgaacaggcttacagtgaagagcaagtatccattgccaagaattgatgacttgtttgatcagcttcaagggaagacaatcttctctaagatcgatctttgctcaggttacaatcagttgagaatccaagaggaagactttccaaagactgcgtttcgtatgaggtacggacattatgagtttctagtgattttatttggattgacttatgctctagcagcctttatggatcttatgaatagagtactcaaggattttcaaaataactgtgtcatagtgtttatcaatgacatcattttatactctcaatcagaagcagaacatgagcaacatctccaaattgttttacagtgatttagagaacacaagttgtattccaagttcaagaaatgtgagttctggttttcaaaagtatccgttttaggtcatattattggtgagaattgtataatggttgatctaggaaagatagaattagttagaattggccaagaccaaagatagttcttgaagtcagaagttttcttggattagctgggtattatcgtcattttgtagagggattttctaagatctccatgccattgatagaattgactaagaagaacaaacgatttatgtggtatgataagtgtgaagtcagtttccaagaactgaataagtgactaatcacaacattggtgttagccttactgtcagataaagaaaagtttgtggtttactgtggtgcatttagatagggtttggaatgggttttgatgcaagctgatagtgtcatcgcttatgcttct

SEQ ID NO: 256980 - DNA, 648 bp, Cannabis indica
agcattaaaatgctcaaattagttgagccacagtttacatctcatagtgcctttgattttttttttcttcttttctctaaatcgtcacgatgatgcttggtaaccaatccatatattaaaaaaaatgaaaatgtaactcgaaagataagattgataaatgaatgaaaatgtgtgccaaattgttcctcttttaagtcaaagtacgtacgtaaataaatattaatggtatacaaaagaatgtcaaagacaatttttataccatctccatctacatttttctttttcttttttttttttttttctttttcttttttttttattatataaattttatctttctttttgtgaagaaaaaaagtgttttcgacattgtatattatgaagatgataattatagatataatcaaatcttatcattttcactatgtgtggcttatgttactattcattccagctcaaaataaagaatttttttttattattatttgaatgtactgaagatactatatatgtgcaatctcttacatattcatgaattattacaaagttaattaatttttatattcaaagctttcacttttcatagtaatataacttttctaatttatataacgttttttttcgataagattgtcttacttggtttta

SEQ ID NO: 256981 - DNA, 832 bp, Cannabis indica
  modified_base (99)..(99): a, c, t, g, unknown or other
ctttttttttattttattttattttattttacatttttttacagtattttctacttattttttaccaacgtaaaaatgttattttcacgatactacacncctagcagtaacgtcaaaaacataattgttttgaaaacaacgaaaaaagaacactctagtataaattaataaaaacaaaatcacgtttaatttttccgtaatataaaacgtagtaaaaataatatttttttaagaaaacaaaccaaaaaaaaattccaatattttagtaaaaaaaacataaaatctaattaaaattaaaaacaatatataccgaaaaaatgtaaaaaatttatcatttttaattttgtcatttttgcatatttatgaaaaaaatcccaaaaattattgacttttcaacttcaaatacaagtagcttccctcctgttgagcaactgtgatacttgttttttctaatttttgattggataatttaaatttttcttacatacaaaatcaggtagccagcattattaaagtaacccttaccttacttttggtagtctagtagaggagaaaagtgagagaggaacgaaagaaaatgagagaatggataaaaggaaattttgagattggtatatatatgagaaaagagaaaaaaaaaaaggaaaaatattagtgggtcccataaaaaaaaattctactaaattagagagagaagtgaatagaaatatttatagaaatttactaagagatcatttatttaaaataaaataaaataaaataaataatattgagaaaataataaataacataaattgtaaattttcttttttgttccatttttaaactcaat

SEQ ID NO: 256982 - DNA, 843 bp, Cannabis indica
caagcttcaatacagattaacctaggttaattaaaactaaaaatctaggcttaaaaataaattaattactaaaatttttcttaaaagaaaattatcaatttcaatggtttaggccgttggaattatgtaccatggaattataaaatagttgtgagaagtaaaataatgtctaagcataaagttgaaatcttatggttcgggtctttggaaccacaacctcagggaatgttgaagcaaaacaaacttagaaaaattaaatacattcgatgcgcatcaaatatctagtgagttaattgccaaacaaaaatgctaaattgtttacataaataagtcatacggcaagggtaccaatattgtctccgcactaataaaaaggaggaccctcatcctccaaagtaaagataaaaccaaaaaagagttgacaagtgttatcttattgctgagctggattgactgcttgctaaattgagtcagactagtttataaatggagcattagtggttggaacattttctaaagttggaacctcactagctggattagtctttgaggagggaagagaagatccttttaggaccacatcctctggtagaatatcttcaacattgttttcaaaaatatcattggaagcttgttaagtaccttcaatttctaggatttggggaagaagttttactctgtcatctttatccaatataaccagcaggtccttattcattttccaaagatggaaaaaggtcacagccagagacttcttcaaatcctcttggttctccacctccatgaggcacatttctactaaaggccgtctattcagaattttttgtcgtaagcttgaggtct

SEQ ID NO: 256983 - DNA, 613 bp, Cannabis indica
attttataattttatataagattattattctataaagatttacatgattttaagtattgttattttcttttcaatctgatcagcttatgagctttataagaaatgagatgctctagttcatgaattttggtgcactcattcttgaatctactattaattgtccaaaatcttgacaccatgaattttgttctctttctattcggatttggacttatgacattctagttaattgtctcactgctaaaagcaccttgaaaaatttcctatcacgctagctagattctaaatttagtgcctgagtcgcctacttgaataataatgaggcttccttctatttaaagtcgacattgatattagagaagttctctattttgatatacacatttccgtttgatgattataaataatagatactttttatatatttaagatattatgactttatcatctctcacatttaatatatttgttatttattttgtccttttttatttcttctaattattgtaataagtttgttcgtgattattttcataacctttaagtataaaattgtaatatccacattaaaatagtatttaaatttttttttctctccttgggatattaattg

SEQ ID NO: 256984 - DNA, 1042 bp, Cannabis indica
tttcaaatttcttaaaattttgcaggatgtcttaaataaccataatttacgaccatgaaaaaaattttgactaaaaaattatttcggatactaaaacatatagagatgtatcgatatgccccttttaaggaggtacattatagaatttcccaaaattatatataaataccaacaaaaatattaactaataaacaacatttattcaaatacaattatacgcaattaaactaaaaatggtttattaaaaattcataattagaaagagacaatctaatataatgatttgatgttggtatcgtgtacataaagtcttgtcttttgacatgttagaaagtttcattctcttgtgattgtattcccagtcgtagtgtttttttggctcttttgacatggcttccagtagtgttccaaacgattccctggaggatcaatatgctcaattaaatttggaggaggaggagggtggactgttgattacgggggatgatgaggaggatcaattggattttgacgataggtggtgcttggtgggcaagtttttaacgggtcgaataatcgattttgatgccatgagacatatgatggcttcactttggcaacccggaaaaggtgtgtatatcaaagaattggatactaatagatatattttccaattttaccatgagcttgatgttcagactgtggtggatggtagtccctggacatttaatagaattcctcttgtgttccatcgattgaagaaaggtgacgatccaaggagtgtgcatctccataagcttgatatgtgggtgcaaattcatgatttaagatctggctttatgatggacaaagtggttcgtagtgctggtgcgtatgttggggcttttgttaaattggatccgagaaatttcaatggtatttggagggaatttcttcgagttcggtctactattgatattgaaaaaccgctgaaacgtcgaatgaaacttagcaaggaaaatggtgagtggatttgggcaaatttcaaatatgaacacctcccaactttctgttttatctgtgg

SEQ ID NO: 256985 - DNA, 875 bp, Cannabis indica
aaacaaaagtgttaccaaacgaaacctaaatttttcatattttaaactttaattattttttaatcccatattttttaataatatttatttataccgtgtaaaaataaactctaccacattcttcaatatttataaaaaaaagacaaagaaaaactcgataaaattatgaatctttaagcatttaggaaaataaaaaatttgaacgagtaccctccaatccaatgtatagatatatatacacatcaaaattttataacatgacaaggatattttgttttgaaaaatccaaaatagtaataataatataggcaataattaattttgtttttgaaaagaacacacggcgggtgtgttgcatgttttctcaactgaagcacatggtgttttaattgattgtcatcacatgtaagagagggtgttcccatagaggacaattaattcaattcaataagtgattttagaagagagacacagtgcccccacaacaaaacacaaaacaacacaaccctcttttaccattgccccaacttgtttgtcatcaaagtctgtagttttcaatctactttttgtataagcaagtgggacactcacactcacgccctcttctaaggaattataactaatttccggacccctacctacttcatatatgctcatgctcatgccaaagtctattattttttcgaatttatattagtttggcttttgtattttgatgaattatttgtttagactttatgtatttttaaaaattcagctatatgtacttttaaaaaaattattttagacctaatgttttctaaaagataacatgattcactacaacccataaataagtattattaaaaaaggatgagtttttatgtttaattttt

SEQ ID NO: 256986 - DNA, 703 bp, Cannabis indica
tcagatagcaatttatgtaatttttttgtaaatttaattgtctaatatgctaatttctctttcattttgttagatccttggtataaaactattttctctctctcgtatggttgcacaaagatttattttgctgtaatatatttactaatttcattttccaccataacatacacaaagtatattggtacatatattccaacttcggtagttggcatccgactacatagtattttaaaaaggagtttccaattcaaggactttacatcacttaaattttgaaaggaataattttttgagctggaggattggagttacagtgcccaaggctagagcaagggacaaacctaggagtatggtaagggttttaattaggtatgaactcatttgtatttttgatattttccctaattgttgtgtaatggattctggttttgaagtttatattctacactgaaacgaaaaaccaaaagcatattttataaatggatatgaaatattggattttaaatatggcctctcacattttgagacttcttgtagcatttatatttttctatattcagtctgtcattatcaaagtcattatttttttattcactatgttagagagtgtcttttgtagtacaatatgaagtgactacaaaagtgaaacctaacaaattaatgataaaagtatatggaatgtctaatatagaaatggcat

SEQ ID NO: 256987 - DNA, 1133 bp, Cannabis indica
tttctattaccataataacagaaaaggggaaatagaagaagaaaacataatctacgacattaacagaccaagattgttagacaccatcaacagtagcaggagttgtagtattagtgtcacgttccctaagagcctggaaaactctagagcttctatcgaatatctgagcccttcgattgtaatcatttggttctctcccatggtcatcccccataatggcctctctctccaagcactcaagcaattccaccactcctctcccagctccgccgcacttctccttcaacctcccggatttcatccattccgccacttcttcagcgtcgtcgcccatctcgtcatcgaaatgatctgatgatctcgtcacctttacaggtcccaaattggtggcacactccgcagccattttcactctcgtgtttttaagtaacaaattattattagaccaccacattctcgaaaaacttacatcacggtggcgagtaacaaggctttggcagcaagaaacagaaggaggtgaggttggaaaacaggtttgagaaagtggaacaacttccataagagcctactggatcgaactagaagatgattcttgactaaatgatgaacaacgcaatgttgtacgtattcttgactaatatcccatactactctatactaatagaatatatataggccaactccagtagtccacgtagcgaaaggagatcacaccgcacacacgtgcaagggcgtaaggacacgtgtgaggaagtggatgaggagggcgttcgagaagataggcacgtgcgaggggattgtcatgtgtcattgtgtaagattgttttttatgtcgggtaggggtacctgcctacttccttccctaagctagtaacagtagtggtaatagtgtgaaactcttcctaggtccttaaagttgggtccaattttcttttggattacgttaagtaaacataggaatcttgttcaacttgtcaaagttatcaattttgagtagatcatgtcatgtggtccaaatttttaagtttaatttgttgcctactattactggatttaatccaaatacatttcatattgaggattaacataaatgtgagttatgtgacacaccatttgttacgtaaattttacat

SEQ ID NO: 256988 - DNA, 1944 bp, Cannabis indica
ttaaattaattttttgtagaagtgatattatttggttgaatatgaaaagtataattttttattgttgaaattgatttttttttttatttttaaaaaccattgaatattgatttgaaatggaaaaattaacaattaaaaataataggcataaaataaaatattaattacaaaaacattaatttttaataataaatataaaatttaattatatgtatttctatgtattatgagtgaggagaatatttaaaatctactccttttggccttacttagaatagaattgtagaaaaaaaaatatctagacatgaaaaatgagaatttgaataatatttttccaataatgagtatcgctattaggtattttaaggtgccaaacaatactataccaattaatattgtacggaaatgaaatgattataacattctataaaaattacgtttttctttttggtaggtcacagctgtaaaaatatcaaattgagcaaaaccagatgttcaattttgttttgaaagaaagaaaaagatgcttattggaggattttcagacgaagaataataataattcaaattgattgatgaatcctaataatacctttttcaattctcttcttcttcctatatttgcatgccatagtattttacatgtgaatcgtgactcaaaattgtattagcggttctattattagtaagatagtaatttcgctttttttgaaaattaaaataactgctttaagaaatattttttttttcataccatttaaattataaattatttaacataaaaagtaagatagatatttcttttcttttattttatttttgaggatttttttaaaaaaatatatatttaaaattatttggttttttcttctagaaaatgatataattaatgatagagatagggtgccggagagtgccatagcctgccgaatttttttattttaaaaaaatatatgtcaaaaaataatatattgtttttttttttgtaaagagtaatatttgatttaaatatggactctttaataaaaaatttccttaaaaaatataaaattatttcaactaagtaaatagtgattcattctacccaaaacttgagtgtgataaaatccttgtggaaaaatttgacaagttggtattagttaggggttgcaaaacatgatggcatgcatatatgcttttatgtttttctcaaccctaacctgattagtaaaaatttgtattgtatttatgttgacctatttttgacccattttgccactcgtagtgcagttagagttgtagagaaagagctagattttgaaatctaacttatattgccaacggatggctccgtttgatttccgaaaatactcgtatctcagttatttgccaaaataaagaatatcctcgaaagacttctcggaaaaagtgattgaaaatggcctaggtctgggcgttgggcccaacacctaggtcaacttgggcgatggtcccaattctggctcctacatattactttgtttgttcccctaaagcacccaaatcttaaatgttaatgaaaatatagaatatgcccaaaaaacttcttctaaattgttgttggaaatggtccaggttgacaaagtgtcaacatgggcgctaggtccccgttttggcctccaagttgatctgtttctttcttgaaagcacatgattcttcattttggtatggagatgaataaaatagctcgggataatgtttctaatattgtgattagaagcgccacaggttgacaatatgtcaacctaagcattgggtgcccaacgacacctacgtgccacgggtactcaacaataaaagtaatttcaaattctgattctgaagcctaaaatagtgacatgtcttatctatttcaaagtacaaagtttgagccatttacactaagactagctaaaaaactaataccctagttggatgtcaacttg

SEQ ID NO: 256989 - DNA, 888 bp, Cannabis indica
cctcattagcagcttcaaaaacgcaagtacagtacctgttatgagtgaagtaattgtttaaccgaccaaattcctcctctccgatctcggatcagctagtgaaggaggttgataagaaagccaaaaaggccgatatagagagagagatcgcggtacggagagagagccgaaaagttatgctatgactttggacgaaaccctaataaatatgactttggtttttcttgctaaaacattattgggctaactcaaacaatacaaatgggctttttttctatgttgggctaacaaaaacataaacatttatactacatattaatttcaaaaatactattttaaaaagaaaaagtatttacaattacggtagagagaacgagaaagtgagaactttgggtgtgttgagctttttcctcaacacaatagtaactcgaaaaacaaactttaaagtacaaaatcaattagatatgaacatattgaatcaacttacaaatcccgaaagagaaatcattaccaacttctacagattgattgaaaaggaaaaataaaagacgaaagccactacgtacctgaagataacaatgaataagtagttgaagtagtaaaaattgaagaagctgagtgagaaagaggcagagagaagagatcgaaaagtagtgatttagggttttttttcccaaactcctcggatcgacctcggagttgagaaataagggagtgagcgagtgagggtttgagatgagaaagaaaagggttattaaattgaaatcttttttgtgtttccgaaactacccctgggttttggaaaccgacttgggctcgattcagtacttatcgaaatatactgagaatgagacacgttttggaattttgttggtggatcaattcaat

SEQ ID NO: 256990 - DNA, 2248 bp, Cannabis indica
  modified_base (2214)..(2214): a, c, t, g, unknown or other
agcaggcgataaattccccggacgagatggcctcaatggaacattcttccaaaaaactggcatttgcttggaactgatgtcgttcaagcagctcttagcttcttgaacaacaatgtagatttatcgcctattaataataccatcatcgttcttattcccaaaaagagtcaccctcactccatcactgattatcgaccaattagcctctgctctacaatgtataagagtatttcacgtaccctagtcaatcgtcttaaaccaattatatgctgcattatttcaccagcccaaagcgctttcctgcccaatcgcttaatctccgataatatcatcatcgggcaagaagtcactcactctttaactcaccccaaacattgaaaagtgggttggatagctccaaaactcgacatggccaaggcctttgatcgtgttgaatggaacttcattaggaaggttatgacttgtatttccactgcatccttcaccttttatatcaatcagcaacttcttggatctatcatccaatcccatggcattcgtcaaggcgatccactcttctcgtatcttttcatgttatgctctgaaggcttctcaacactcataacccaaaaagttaatcaacaccttccaagaaagctcgctcttggcctaaagatttcccagactacaccaatcatatctcatctatttttcgctgatgacaacattctatttagtgtcgcctctcctattgcagccacacatatcaaggtaatccttcatgattacagcctagctttgggtcaacttgtcaaatacgataaatcatcgctgtatttctccccaaaccacaatgacttgattaagaattagatcacttctttgctcaatgtgcctattcgagaatctatcgagaaatatttaggtctccctcaatcttttggccgctcaaaaaaagaagcctttacttaccttcaggatcgcgtgtggtcccatttaaatagatggaattccaccttcttctcaaaaggaggcaaagaaattctcctcaaattggtggttcaagcgataacgtccgtttcaaattaccccattacttccacaaaaaaatggagtccatgatggctcaattttggtggggaggaactgaccacaattggaaagtttattgggagagttggtcctacttttgcaaatctaaattccatggtggcctaggtttccgatcaatgaaagctttcaatcaagcaatgctagccaaataggcttggcgtattcttgaggctccttcctctcttgttgcccaacttcttaaggcttaatattaccctcactcttctttccttgactctggtaaagggcaccgtccttctcttgtctggaatagcatctcttggggcaaatcactcctcttgccagggctacaaaatatagtaggtaacggtacctccatctctattttcaaggatgcctggatcctgggatacgggaaactcccctatcttcaaactccaaatatccttgacaggaatgtgtccagccttataactgccaacggatattaggatatatccagcttcaatattttttcccgagcaatgtgtgccaagctattcaaaccatcccaatccttaggccacctgcccaagatcgactctattggtcccacactccacatggaacatacactataaattccggctaccatcatgcttatgacattcaccaccaaattgagccctcaccctccactacaactaactaagaaaagtggtggagttctttgtctgtttactctggaaaatttggcattgcaggattgaagtatcacatcacaagccagaacaagacacctctatgaccatccaatggatggaagattatctgctccaatatcaacaacataatgtaacgaaaacaccacacaagcttcaagatgctaaaagttcctcattccattggcaaccaccacctccaggccagcttaagcttaatgttgacgctgcccaaaatatacaaacgaataggatgggctttggcttgatcgttcgaaatcataccacagatgttgttgcagccttagctattccttggaaaggtgttcaccaaccacttataatggaagtgcattctcttcaactcgctctcgaatggtgtcaagagaaactcacttatgattcaaacacatagaatctgattgtcaaattcttgtagatgctgtactcacaggtcacnccaatacattcatctccgagaattcattatcaaa

SEQ ID NO: 256991 - DNA, 1106 bp, Cannabis indica
agagagagagagatagatgaaatggaaggcgactctaggttatgttaggccttttatatttgtagggttttttaaaatgggttgaagcccaaatctattatttttattttaaaaaaaccaaattatttgcatcagttcacaaccgaagcaaaaaataaactatttgtgtgtcagttgtgaactgatgccaatgccttaaaaattgacacaaatcgtgcttcacttaatgactaacgcaaaattcgaccacaaatttattgtgtcaattttgtaatttcaccgaccaaaatttgaggttctagatgaagtttagcggtgattagagatatttttcatatttagagatgtttaatgatgatcgtagcgatgcatttgcgatatgagactaaaaaatgcaaagtacatcgccaaacatctataatcatcgtgaaaactttagtgtgttttagcgacatttagtgatgtgatttagtgacatttagtgatgcttcgcaacatcgtgaaaactagaaaacaaaatccagaaagagagcgatgggttgagaactatggcaatttcgagggtttcggggtggttcagcttgtggattttaggggttttagagtggctgagctcatggatttcaggagtttttggggtggttgagcttatagatttagggctttggggtggagatggagagagttaaagagaggccgtcacagaagaaaatcgcagggggcttgtgattggggttctaggtctaggtttgacagcaggggttctgggtcaaggttgaacgccaaagagtgagagagtaagagagttaggctatttttaagatgtaaggttatttttgggaggtaaagatactaaaagtatagataccctatttctaattgggtggtatattgaaagaccatgctttacatttaagcatgctaagcaaaatttccctttccataatctgaaatttataaaatacactgttaatacatttttgaaaaaaaaaagataaaaaaataggtttagttgacctttaaacaccacccccatcaaacaagaacgatcaccatcattggtagaataggagatctgaacactactgaagagagagagagagaga

SEQ ID NO: 256992 - DNA, 1413 bp, Cannabis indica
gagaaaaatagattcatggcttataaggcttgggataaaatctaccaaccaaagtctgtgggtggccttggtctaagacggttcgaggatatgaatagagctttgatctctaaattggcctggagcttggctcaaaatcaagactccccttgggtcaagtgtctcctgagtaaatactgcagcagagcctctttctgggctgttgaaccaaggaatggggattcttttctttggaagagcattctctcaaccaggaatattgtgctgaaaggctcggtcacacttgctgctgatggaagttctattgatttctgggcacaaccttggattccatggcttgacccaattggttttggtcattttatgggaagcttagatagaaatactctctcaattactactgttgcagatatctcaacaaatggaaggtggaatagagaggtggtcactgatgtttttggtgctgatattgggaggagaattttggaaatcccaaggattccccttcatcatcatgatcaggtagtgtggaaaggcaatgagaatggcattttctctgttaaaagtgcctatagtatcgatcaagaacatcgttttggacagaggagatcattgtggagatgggtttggaattcaaaaatacatcctcggattggcacttttctgtggagaatcttaaatgaagctttacccttgcgtagtaaattgcccttttgtgttgagaaaaattgtttgatatgtggtgagaactctgaaactagcatgcatattttcaaagaatgtcctgtggcaaaagcgatgtggttctcaggtcctcttcctatgtgtagtgataacattcctggtgactttttttggattttgctgaaaatctattattgactgcgcctaaggaggatagattgcatttgctctgttttatggggtgtgtttgtcaagaaatttagagcctcagaaacagaattttgtttaaaaggtcagggattgatatggttcaacttaagaatcagattctttccaaatggctctcgaaatgttggaattgtcacggactactggtgttcgattggagggtctcgaagataacctcaatctggatgggtatataccttcggatgctgctgtgttgctgatgacagatgcctcctggcaaagtggtgtaacaggtcttgctgcagttatgatagacttaaggagtggccattggtcttacatgctgcaacaatcatctgcaacctctcctttagaagctgaagctaaagtaatacaaatggctctatcttgggccgtagatagcaggtggtctcagatttgtgtggtgtcagattcggctgttgcagtccatgctttccagcagagaagaaaaatctataattggaagcttttaagcatttctttaagtattttagatac

SEQ ID NO: 256993 - DNA, 1412 bp, Cannabis indica
tttttaaaaaaaaagaaagataattatatagatgaaagtcaaataggtctaatggcattacaaataatattacttgttattgagaaagcttcacaagcatcagttatatttttcttaaacatctacttaggtaaattatggactactaaattaaaagatctagaaatctttacaaaattacaactcaataaggagtccataagacttctacattgagtaacatagttattaatttcccaccttgagtttaaatcattacttgaatcactttccacaatcacaaataatactataaaaaaggttttagaagcagttatttttgctgaaaataataaaaaaaaagaaaaagacgctaaagaattgtttatctattttagttgaaaattgacatttagtgtcggttatttcataatgaccgacgccatagaagctggcttagggttatataaatccctacagtattaggaaataactgatgtcatatgtgcacgcgatggatgatgcttgtcacttatggcgtcgattattatcaaaagacaatttcaaaaataaaattataaaaaataggaaactttaagaataaaagtttattttttatcaccttttttcttttaaattattttatatcagtattattataaacttttacaatatttacattattataaatatatttattgtaaaaaaaattaataaaaaaatctgaaaaatataattgttggaaaataataaccaaataacgtttaattttcaaaaactacaaaaacatttttattctctccttattttaaaagcaagactaaaacagtgtacaatgcacttaatttctctttcacgtgttttgtaattactattgattgatttctttatattgaaagataagtgtttgccgctactatcgtatttgtataaatcatatttcgtacaatttttcaaacttgattatagagcattattgcctattcttcatgatgtgtctgggcttgatataggtgattggtgatactaaacttatctcttaccgtttaaatacttgagcacatcttttcagattaaggagtagaatgtttttccccatgccacattaaatgcgtgtatagtaatttagcttggagcagtacatccctctatctcttctttgagttgagttccagaaaaagagacaaaactactatcctcttgatggatccttctagatgtgactaatcttctgaaactcctaccaagtattaaactccgaatgcaatttaatatgacatgtcttgtagtgagggttctattgttatatgacttactcttaaagtgtcaaatactttgagagaaattctaagcaagagtaaaattttatataaactataaaatatgatttatattattgttattaaataaaaagagacgttgtaacagaaact

SEQ ID NO: 256994 - DNA, 1072 bp, Cannabis indica
gctattcttttcactgcaacctttatggaacaaaatccatgtatatatatataatatttcaacatgatttcaacattaaccatattgtcatttctcagtttgtgttatcattcatgttaccttaaataagaataattgcttaaaatattttgtcacataagtgtgttagatttatgtgtaatttatatatgtatggacacatattatttgtgtgaccttaattaggccctaatacacactattgaggccttattttacattaaaccaaaatttgaggctatttaaattttatgcctaatttgctttatggttctaagttttagttacaagcaatacttttttactaccaatataggaaaagatctcatggcaagcattctttgagtatagcttatataattttcgcattgggtattcaaataatttagattttagagggtatgtcatataaataaattttgtattatatcttatctcatatattattggtccttatataaaaaagaatttatataaataaatataaacaaacaaacctttaaatctgaagttgttgaaagggaatctagtatgggggacattttcctccaagctccaaagtaacaggtgttaaatgcttagcagctgcagtcattactatgcgtccaatttgtgcactccctcgtaaagtatacaataatacatttcaaaataatttcatttctagtatatatactttaacatcacattaaataactaattaataaaaaagaaaaaaaaaaagaaaatcttttaataccagtaaaaaagatcttatcccacttgtgaagtaaaaatttttcacagatttgaggtcctccctcaatgacttgaatagctttggaatccatgtaaagagggataagattagcaagaacagaagaacaagctagggcgtgatttgatggcttaagaaccactgcatttccagctgatattgctccaatcaatgggtccaatgccaaagctattttgtatttattttgtacaaacaaacatgtatattcatattatgcctaatttttagctttattctctatcttaagaaaaataa

SEQ ID NO: 256995 - DNA, 940 bp, Cannabis indica
aaatcactcagctaccacattgattaagaccaatattacaaaaaggaaaaacagaataaaaagtgaagtactttatttattaaacaaaataatgaacaatatgttacataacaataaatttcaaaacatattacttttaattaacatcagttcctgtcttgacagtttctgttgagtggactgccaagtgacttgcgataactcttctagtataatctaccaaactttattcttgtcagaacgtctctccaactcttcttgttcttaatccaactgtcttaatataaaaggcaacgtactaagagggttcttactcatcgcatccacaatatcatgaagtccaagcttactatgcaactttttaatacatctaagattttggtagcgtaattggataatgttttttagtaaaaaaggataggtcgggtcccaataagattttttatattgttgatcatgaattatattattattattattatttgtggtgagaattgtggaggtaggaaattcaaataccaaaattgcccctacaccaactaaccccaagatttagaaaatgcaaattattcttcacattttaggcaaaactcttatgttagaaactatattatctgtgaaacttacaaccctctctctcatttgttgaaagagcaaaagcaacagctaagtatacatatagttttgttgattcataataataccaatcattatagcaatttttgaacaaaaaaaacatgaattgtaatgatgaaaagtgtcatcctggaatgatataaagaactctctctatcttgatcatcatagaatgtaacctcaattatggtatgcattgtgctattttttgatatgtgatcattccatatttgatttcttcaggcttcgataaaaagcttgagagaaagcttgttcattttttgtgaggacaaccattgtagtt

SEQ ID NO: 256996 - DNA, 803 bp, Cannabis indica
tgtaactctatttagttataacatctaaattagaatataatttatttggtcccaagtgtattcttgaatagaggttctactgtatatgaaggtccagcccaaagtccactaattattgtattattgaaacttatttttttttaatatttattttaagttttatagtatttttagtaagtgttgctcaagttttgttatatttgtgatagtggaattatttggtaataatctaaattgtaaaaatcgtaccgcactattttttacagtataatttttacaattttttaatttcgcagtgcgaatgtaatttgagaaataaaaaaaattgtatgcaggttaatttgaaaaaatataaaaaatcgcacaatcagcgctctgcgaacaccgttagttaaagataagaagataaataaagctgccaaattctagaattaagagataaaacaagttcagctaaaaaataagtagtaaaattatagctctattaaaatgagaaacagaaatactaataaaggagctccacacttgttgaatgtcttggagaacaatgccatattcagagtgattaacctccttacggataatatttggcacacacgaaagtaatcagtactaatccgaatacgaaggaagccaagacggagacacagagaagcatcccttgaagtaacagcagcaactttagctacatgagatactaatggtaccttcaaaggagttgcagcagagcatgtattttaaattatagaataaagaagctcgaaggttatactaatagtcctcactggagatacctttctctc

SEQ ID NO: 256997 - DNA, 919 bp, Cannabis indica
actaattctaaagagaaaataactcgttaatatgggagattttaggcctgtattattgtgtaatgtgttatataagatcatatttaaggccttagctaataagcttaaagtgattcttccgtatattattttggatacccaaagtgtgttttttgtgggttgattcattttgaataatatcatggtctccttcaaaattatatattatttaaagcagagaaggcaaggtaagaaactaagaattggtcatatatggctttaaactttagtaaaccatatgattatatggagtagggatatcttcaaaattataattgttggattggttcaattatgcaatgtttaacctccatgtcctacactttggttcatgggggagggagatgaacactgcggtctaattttaccttatttattatatccacaaagattttttgtaaaaattaattttatatttttacgttcaaatttttataatattttataaaagtaatataaaataattaaaaaactacattaaagtaataggaaagtaacatctaaacaataacaaaaaagcaacatataaataacaaaaaatcaacaacaaattaacaaaagtacaacttaaaaatatatcaaaaaaccgtattttctgtaaataaaatcataaaagtcgtaaaaatatttaaaattccattcaaccatattttcttaacttttttctttattatttttgtgtatttgtaaaaataatctaaaaaaaaaaacctagaaaacataaaaatattaaaggaaaaattataaaaactaatcattttttaaaaaaaaagttataataagatgtatcaattcatacaaaacttcttttgtttgctgtttaattttggctttacctttagaaataaagaaaataaaaaagaaaagacaaaccacaaat

SEQ ID NO: 256998 - DNA, 1198 bp, Cannabis indica
ctcagtgcagatgaagcttgtaaattgatgtgtgatttactgcttaaagcttaattcttgttcataactcatatcttgaaatcgatcaatttaaagatgtacaacttggtaacttgaatcattaaaatctacagttgcactttcagcttccatatattgcgagccctggtacaatcaataagagcatgagaaacagactcagtagtagtgccgcaaaaattacaggaaggttaaggaagaactttcttgtgaaacaaatttagagcgcacgacaaaatacaattgaaagctttccaggagaagtgtttaattttttgggggattggaagggtccagagagttttccaccatttttcaaaaggatttggattggaagaagaaggagagtgagtattggcagtagtagaagctagatggcagtgaggatgccagaatggtgaaatccccaaatgagagtatcagcaggggtatagtgaagggaaatttggagaatcttgctgacctgatatagaggaaggtagtgttttaatcgagaaacattccaagtgttatcagagttgatgaaaaaataaacaaacgaaagagatggctcaataggatgaagaatggtaggagaagaaatgccaggtatctaatttgaagcagataaggggatgttattgccagaacctatcttccagaccagaccacgcttgaggagttggcggccccagaggagacttttccagataaaagaagaattgtgaccatttggagcaacaaggaaatcagagtttttgaaatagtgagctttcagaatggaatgcaagagagtctgagttagaccaaatgccaagcctgcttggcaagaagggcttgattatggaaattgagagtcctaaaacccaaaccaccaaaaaatttagagaccgtgagactagaccaagacttccaatggattttacgatcattagaattagaaccccaccaaaatttagcagtcaatcgctgaatctgcttacagatagatttgggaagcagaaagaccttcagcaacaaggagaaaaagatatggagataaaggatctccttgtcgaatgccacgagaggaatgaaatgcttcagacagggaaccatttagagataagcgataagtaaccgtggaaaggcatttcatgatgagagaaataaaatgagtagggaagccaacatggagaag

SEQ ID NO: 256999 - DNA, 819 bp, Cannabis indica
aacactccttgcacttgtggtgctatgcaaaaagtttaaaattactacaccagacaccaaatccttcaattcttaattggtctcaatgaatcttactgaggcattcgggctcaaatcattctctttatctcaatgaatatgttggtgcttgcgttcaacaacaacgttctgttgaggtctacctacacatgaattgtggtgtgtagtgcctttcaagttgtaaaagttagtgagtgttaattctttggcattatcacttctaatagctttgatattgcttttgtattggatattgacaaaagtaaagaagttttggataatggttggggcatcagattttgcctttagcaggtagatccatgtatatcgtgaatggtcatcgataatagttaggaagtacctgtatccttcaattaaaggtatgggatatggtccctaaatgtcaatgtgaataagatcaaaaacagcagtagaaaaagtttgattagatggaaaaggtaattttttacttgccatatgacagattggacaatgaaatggaatagaagaatttgtggagaaatgtagctgttattgattttattagtaatgagtacagagggtgacctaggctaaacctcgcctgagatagagtcagcgagataatgcgagtatgaccaaagtctgatcgcatagccgtaactcgcattaagtgggactagagaatggatccaactcgcatgtatcaggatatgtgctagtatcctttccatactcatgcgaaagcatagagatcgactctctataatgtgagttagtcccaatgatctaacagcctcg

SEQ ID NO: 257000 - DNA, 906 bp, Cannabis indica
tcgtctttcatctcatatgaaaatttatatttatttccaagattatatatgatgataatttgattaatcgtttttctgagatattatgaatttggatccatattctggtgctcatcataatgatgttgttgatatttttaattccgtacatatttaaatttgttagttcaaataataagcttgttgggatgttctttctttgtcagtattttctaagttagcctatttctaatcttcatttgttatttgttctatgtcaaacatccttaccgtctggaggaggtttaacgaacagtctgattgcattatttgacgatgatagcaaatacggtgacaactgtaatcgttgaagtgaagatagttgttgagcgttgtttgagtgtggtggtgcaaacactattgatagggtgattggagagaagacaaaagttaggcattaaatgttgagataacgagggtattaaatttcgatttcttattttatttttttaatttacatttaattttttatcttcttaccatatttaattttattaattgtctaatttaaattttatttttaaaaaaattaaattatttgctcttatcttgtctaagtttattagttgactgatttattatttaaataattataagtgttttatcactataaggtattatctataatttatagttgagatattctgttattcttattagaaaattgaaattttggtttttagaaccatctctttaccataattttctctttttgacctttgattattgattatatatatattatcatacttttcttgattggtttaaattcctagcatatttcttttcatttgcatctatcattataattaatttgttataaaataatataaaataatataaagtagatgagaagaaagaagaaga

SEQ ID NO: 257001 - DNA, 534 bp, Cannabis indica
tatttattattattatataaaataatatttatattataaatataaataaaaaaaaaatcacccatgaatttctcataaacgaaaaattcagttatataagcacactttatataaaatagatagtaaaaatatataagtttaaatttaaccttgcataaactcttttaagatttaaaatgatattaattaaataacagatatacaattgattcttaaaaaaaatatggtgctagaattatacattctctttaaattattaaaaatatgatgctagaattttatatcttttttaaaaaataattagtatttttgttccttaaattttttacaccaccaacttgtaccgcttagaatatataacttgtaaataatactccttaaaatataatttttatggcaatgtagtcatttcatcatattttatttaattttatcataaaatgagtgactcggtggatagtaattgataaataaataaaattaaatatgttttacattttttacagtaatgattaaaaaataaaaactgaaaaa

SEQ ID NO: 257002 - DNA, 1040 bp, Cannabis indica
ttatagcttaaatgaataatatttttaatattgtgtctatcctatcttaaaattaagaacaaaaataatactttattacctgtctcattgaacaccaaccggtttccagcagtggaagagttattcccatcatcagtatcactagcataataggcctattatcattctgagtaggtaaatttaccgaaaacaacactaaattctcatcttaatacaacctcaactcaattctccctttcaaaaacacattcccccttcaacgtctcaaaacccttctccgcatctcaaactctgaccaagcaaaaacgtatcattcgggtgatcaaagctctccttaagcttctcagacccaaagatcacaaagtttcttttgccctgcataacagcgtgagaagcttctccgcttactatctccaaactccatacctcttttccttgagtatcaaccaattcaagtctccagtcagttgttaagttgaccagggacccccttaacactacagccgaggaatttgttttagtagcataccagacaactgctttgtctagtatgtttccataccatatagagagtaagaagaaatcttttaggttttcatgtatttgaaaattaaaagtgaattcagttgagggagagagccattgtgatgactgatgagttgttagttgaggttattgttacgtgcattgcacgtatacttagttatattgttagtattatttttgttatgtgtatttttaaaattttacaaattaaaggaaatcacttattaattttttatttattttttaaataatatttaaagttttaaaaatttgagaaaaataaatataaagtttaagaatattaaaattaaacatgctctctatattaaatttaacaataaaaaataataatgttacaaataatatatatatatatttaaattaacctaatataaataatattaatatttatatatttataaaactaactctactaacaccgttaaatttaacagaatatatttttatattaatattttgttaaaccaacaaaa

SEQ ID NO: 257003 - DNA, 1345 bp, Cannabis indica
aattggttttggtacgagaaatcaatgagagatgaacaacgtttttatagcgaaagcttcattagggttattgcttttttactttaagtaggtgaagtttatttcacgtggtttaaacaaaatcaataaataataaggatagtagagttataggttattgtatatgatgtttgaaaaatatgaattttctaaattaattacattaattaaaattgattgtacagtacttaattatatatattatcatcatagagtactgtatattatgaaaataattgaaggtcgtgaatatataaatgtcatttatataacaaaagaacatgtacatgcgcatatatacacaaaaggggtaaaaagtggatagcaaattatatttttaggtcccgtagtttttgatttaataaaatatataaaaaaaaaatgttaaccattcacaatacaacaaataggtataatgttaatgttcaaaattaaattatatgttagcggtaagaattcatcaacgaaactccatgtataagtattagaaaatgagaagataaatgagtttgatgaaacctaagaaaaacttagaaaaattttcagagcaatataatggtgaaaatgagagcattgtattcttagcttataagttaagtttaacacatttaatttaattatagtgaattacatgtggttattcactactacaaaaatgagttttaatgatattgagagactctaaaatactttagtgacacttcactgcgtgttactaatgtgggtgtcaggaaaagtaatatatagtgactcttagtatgtctcacttaatccttttagactctctcaaagcgcgtcactgtagacttttagaatctcaaattgtgagactctaaacacaagccacactctcaacgtgtcactatatctatttttatttttttaaaatagatttccccaataagaccacactatcagagtgtcactatatcatatttttcttaaaaaaaattacataatatatcaaatttattttaaatatccccaaatttattttagttctattttcatttttaataaaaaaaaaattaaatttaaaacaacaaaacaaaataatgtgtatattaacaattaaaacattaggaacaaaattgatgtgtatttgttttcttataattaattgtacctaaaaaaaaacaagtacatcaaaatgggtataaggtatgaaaaaacttgaatacaaattttaataatttaatccaatatacagattaatcatacactcacaaacccagaaatttacaaacttttaacccaaaacaaccaaaaaaaaacacaccaatgagtgtaacaaacccagaaatct

SEQ ID NO: 257004 - DNA, 850 bp, Cannabis indica
gagtttgtttgatgagcacagttagaatacaactactattaaaatgtaattcctcaatctatctcttcactttttttttcttctaaattttagtgtataattttcactcaagtgtaaagttaactaataatactagtcaatctaacttggttaccataaaaaaaaataattactactcaagtcaagagtgaagagtaaaatacattaatgaagaaaataacaaatatatttaggccaactaaattgattgtatttgtagccaccaatatattatatatatttagaagcttctttctctctttacttgttcatcatccaattcaaaaaccaatttaaaagacttagtttgactctgaattgcttgcgccaaaactttgaccaaaaaatctctctagaactacataaatgcattggctataatggctgctgcctaaattaaaattggttgtatataataacatcattattattattattattattattattattattattagacatagtattcaatatttttttttataagtaataccttatagttagttaataatatatttttttaaaaaatatttttttaagttatatgaaattcaatgcataactacacaaatattagtatatgataaaaaaaaatactaaacattaataataatttttaacaattatcatataagtaataatatatatatataaatattaaaggaaaaatacccatacatatttatgaagcttttgatttgtcaacgccaaataatttattggctttgtgatgtatatatataatagcagacatatgggacaatatgtaaaaaatatataatatggttacaaggcttgagttttgagt

SEQ ID NO: 257005 - DNA, 737 bp, Cannabis indica
tgacaaaaaaaacttacctaaaacaaataaaaaacattaaatatgagatttgaaaacctaattacatatatatggcatatgaaagactatagaaagacctaaaaacaaaaaaaataccatataaattggtcaaacttaaatgtgccatatttatcataaaagcttttaagaaaatcccacagtaagtttaatttcttcttttaaattttattttcgtattgtaaattatttaaatttttgtgaaagcatcgataatgtagaccatcatataaaaaattagattacaatctctccaaaagtcaaaaatattgatgtctttaatatcataaacaataccattttatgtaattttcacataaaattctagattttctttttttaatttttttttacgaaatatgacttatctttttacgatttttttaattacattttttacggaaaaacaatgtaatagtaatataatataatataatataatggcattcattagattgaactgcctaaatcttaaagcctaaatcttgaaaatattaccagatgaaaccaattaatgtgaaagaaaaaaaaaaaaaattcttttctgctacttaaatcataaaatttaagtaacaaccaattatcttcatatcccacttgttgccaaaacatatttcatttgttattgataagtatgatgattcaaattttcttttcttttaaaaaaaatatattaaaaagtaaaaagtttttttttt

SEQ ID NO: 257006 - DNA, 584 bp, Cannabis indica
tttcattctcaagtgtgccataagctcattttgctcttttcccatgaacaaaactggtgcttttgtcttcctattcaaatgcacttaattaagccctgcagatacaacatgacatatacatgctagatgattttatatacttcgttgactctacaattatttttgtttttcctcgctcaaaattttgatactgtgcattttcatacatttgacaggcagaggtaattgctaatgcacaagtggtgagaagtggaaggaatttgactgtaatatcaattgattttaaattgaagaaaacccagaagctggtctatacagctcgcgccaccttctataacatgcctgtttctaaattatgacattccttcgtccaggaatttaggtacttatgtttatgtaacaagcaaatgtgtctgtaagtcgtataagatttctccctgtgatgattctcattgttgaaaaccatataatgcattatcttcattgatgcctgcacataatttggaattctttttcccaatttttatactacatattatacccctacaatttcttgatgatattaatccatgtagatcatttgg

SEQ ID NO: 257007 - DNA, 1774 bp, Cannabis indica
ccacgaatcactctctcttcagtttcctttccgtcaactcatccgagacatcatcgccaaagacggtcgtccaccgctatgtataatctccgacgttttctttggatgggctatagacgttgccaacagcctcggcactctcaacttcaccttcaccaccggcggcgcctacggaactatggcttatatatcattgtggcttcacctcccacatcgccaaactgattcttcagatttcgctttgccgggtttcccagaacggtgtcgtttctgccgcggtaagctcaactcgtacttgagatcagcagatggtgatgatccttggtcgaggttcatgcagccccagatctccctctctttaaaatctcacggttggttgtgtaacacagttgaggagatagagcctttaggtctaaagcttttgcgtgattacattcatcgtccagtttggtctattggaggttcttcgtctttgtccaaaaaaaacacctacacaggcaaagaagtgaacatatgctcttataaattggagaaatggttagatgaacaagaacctggatctgtgatatacgtttcttttggttctcagaacacaatcggttcgtcccaaatgatagaattggggaaaggtttagagaggagcaggaagcctttcgtttgggtggttagacctccgctcggtttcaacattaaaggagagtttcgatcagaatggctccccaaaggtttcgaacagagaatgacagagacaaaacagggtttggtagttagagactgggcgccccagttgaagattttgtcccacaaatccacaggggtgttcgtgagccactgtgggtggaattcgataatggagagcttgagccatggagtgccaattgtggggtggccactgggagcggaacaggtgtacaattccaagatgctgcgggaggagatgggagtgagtgtggagctggcgagtggtgttgatagtattgtttacgaggaggaagtgataaaggttattgatatagccatggatggaaatggtaagggcggagagatgaggaagaacgctagttttattaaagaacaaataatagatgccaacaatattagagaggatgggaaagtgagaggatcctctgtgaaggcgttggaggattttctaactcatgccctaacaatgactagcaaagaggagattcagtaaccttttggctttactactgtgatagagaaagaattgctcttaacaaatttagtactacgtacattattcttagtattatatgtcagccagcctcatgatctcctaaggagtaaggcaaataatttattaatttatcagatcaacgttgcatgtgtacgtgtgaagaaaatggctgcatttgagcaagtattacttgcaataccacatttcacattgatgatgctttttttggaggtgttcatctttgtttatgcaaaccctgtgtttgaaaagtgttaaaaaaagttaaggagttcttgttttgtttatgccaacatgtgtttcagaaaatctgtttagaaatattaagacattacattacatgtgaaagctcttcacgttccaaggacatgatagcaccagaaagccatatttgcggagtttgatagtgagaagaaaagaaacgtcatcaaaaacaacaaaacaaactgtcaaaagagaattctatcaaatatatatggtgtgtgttaaaaatatatgagataaatcgatggaagaataaaataaggtgtataacataattccaagacaattaggatt

SEQ ID NO: 257008 - DNA, 573 bp, Cannabis indica
gcaatgggattctctgaaacactagatgaaattgcaaaagagataaataatggctgaaatgatgactttgatccttttgatccacttgacgagatcaatgctaatgcaagcatgaataacaatataccatcatgtcaaacaactcaaaaggctaagagaaaattaaataatggggattcattagttgaactgctttttaagtcaatgcaagaatttagtactatgcaagcttctgcgagtgtaactattagaaaacttgctgattgtttttaacatgaagctaatggtgctgctaggagaatgaaattatatgaggaaatcaaaaaagttgatggcctcacaaattcgcagcgacttaaaattagaaaatttctaatttcaaatcaaccccacatcgactacttcttcactttagaagaagaatttaaacttgattttctcttagggatgttagagtgagtttaatattgtcctagtgttggagtgagtttgatttcagcttaatttttttgaataaaaaaattattattaataaaaacaaaaataaaagttttgaacttaaatattttagat

SEQ ID NO: 257009 - DNA, 1167 bp, Cannabis indica
catcgagggctgatcaagcccgtttaatggctgcctgtgatcatcatacaagcataggggactgttggagaagacaacacaagtcttgtacatcctcctcttagcaggcagagcctcctccacctcggactcagtctctagactcttagcacccggttgacaacatgcacctcttcctggctgacctctcgatctctatcatcaagaggttgtgtggcctcctccactatgccaaccctaccaattattaccaccctggaaacatgaggattagatggtggtgcactacgatatgactgcttagttctggccatagtgtatcactgtcagtatagagatcactcagaaagtggcaagaggatagactggatgctatctcacaaaagtaagattgactggacctatgacaaagcagttgtcacctccccagaccaacactcgaaatcacctacattgaaatgataagggaacgtgagcaacttgacaaagctacaaggtagagacaaagttttggccaatcgtacccaagggtacttgctagataaattacattgtacaaggttgggtatcagcgaagtactgtctcaagtatacctacttagacaaatggtgagtcttaagttgtggattcaactataatggactcactaccaagtctgatatagagttcccaagggaaccatgtataagattaaagttgtatatccgtacaaggccgtcacgagacccttctcgtggtcaaaagagaataaataatttatcacccgcttggaaccttgcccttggccggccagggttcccgagctaaaagagggtcagccaagtcccatgacccaaccaagggcctaccatggaccctatgcacaggcattggccagccagcttctagggtaccccctacggctggccaaccctcatgatgaagacccatggtcggctaggtcttgaacaagacccctatggccgaccagggtacatgtcagatctaagtgtgtgttttttaagaactaaaacacattcttcgtgattcaaagagtcaagaatcacaacgaatgtcaaaatcagatctttttcgtcaagaaatcacacattatacatcctaagcccgtcatgcagatcaaaataccaaaaagaatacaatctaacatgagaatcaaaaaatattca

SEQ ID NO: 257010 - DNA, 906 bp, Cannabis indica
atatattgcgtgcactgtagccacacggcatatatgatgtaccatttgctgctacattggagagattacacacaccaaatttaaagtttagtgcctccttgcacttgctcttcacttgctcttatgtatgatttagaacccttttttagcgttactgctgtcgagactcttccactaccacctccatctcctctaccttcaggtacacctgatcaaccaccttttcattactaattatgttacagatatgtccctttaaacaaacaaaataacagaaattacaagtgattaagtaaaaagtgacaatctttatctaatactcataaggttcaatcagaagtcttaatagggcgaatatcaaatttctcttgatatttatcggctgaatatatggaaaataataattttatgttagataacaatagtattttatttcattttttctttatataaggtagtttgtatagaaataaattatagcctctcttttactttttttcatctcttgcactctttcaaatgataatgttagcagacctcgaaatatctctagattaaatagaataaaaaaatcctaaaacacttgaaaggtgtgttaaaagaaaaaaaggtgctcaccttgcacaatggaaccaccccccccccccaacaagcaaacaaccccacgcaaggaggagtctagctgtgggttgagctcccggcggccagcccccgctccttgctccttgcgtcagcacactcacctcgcttaacgtgctccctgcgttggcgtgccaacctacacgtgcacctgcttactcgctcacatcgcgtgtgctagcctgcccgcaccaagctacccgtgtgcttcagctggttgtacgtctagctgcccgtcagttagctagtcgtgcattagcacgccgt

SEQ ID NO: 257011 - DNA, 711 bp, Cannabis indica
agattgaactaaagacaaaaaatgggagaccgagaaaataaacaaggcaaaaataaacaatacaatacatattttgttatgaaaaataatctgtaatgaagaattttcttacctatatggaatctgcaaagcataacaaaatctttgatttttcatacagggaggcatagactgagaggtcttcttcagtgaaccaagatggtggtagatgagtagatgaatcaaaccaaagttcgacgctgagaagccaaatcacctcagtccacctgccccaaatcaccggagcatggccatctagcctgagcaggaggtccacgggaaggaaacaatgtggtgctgcgctgagaagaggaaagattgcagctttgttctgggcagaaagttgtcgactgagaggagagattggggctagcttcgattgagagaaagagggaaagggtgttgttggtcgtcggagaagaggagcagtagctccgattgatagaaagaagggagaggcagaggcttcgatttagagaaagagagagagacttcgactgagagagagagtgaggcggcacaatagtagggttttcttttattcaagagagagagaggcagtattcctattttattttttatttttacttgttttttttttaaagtaaattaaacttttttttattatttataattatttttatttatttattgtatatagttgttattttt

SEQ ID NO: 257012 - DNA, 1485 bp, Cannabis indica
atttgcatagtacattagggtttataagttcaatgtttggctcactaacttgtgcgataagttatttttcaaaaattacatgtatctttctaaattaaattttaacattattcatcttttaactaagagaacgcaactagaatttttaaaataggataaacgagctaagagttatgcgtgttttaagacgaaaaaattgtattttgccattgtacccaaacagataactgcttagcaaaaggtgaatcgtttggcccaggaaatggttagccgtttgtgaaacggtgaaccgtataagcccgaaattgcatggtttttgtgcacaatggctataaacgactacttttctcccaaactctataaaaactcatttgtatcacacttttgagattgggttgtgttattcgtatttctcgttagcgacacgtggagtcctcataagaaatacatcttaaatacttaaggtccaacaataggctcaattgagataattgggccaaatccatagatcatcagtcctttcggatgaagaataaataataactcgtccaagcgagatcccatccagcatggttaactttccgaagagataaaaccgcatacctggaagaagcctttagcacatatccgaaagcccaatataacttcctatttattaccagatcacgaaagatcagggattgcctctaataatctcggacaaaagatcatatctttctaaataaggaaagatggtaattggcaatcaagtaattaacgtgtaattaattcccacgaagatatgacatgattttgaaaaccaatatcgtgatgtggcatccacatcagcatacacaaggtgcctcattggccgagctttactagataagtccaaagaaaatattatttgtaaactccccattagaaggaaaaaaggggtaactagtatgaactctaagcactataaatactcagaccctacatgcaaagggttcgaatttatttactcacatacctaggaaaaagagatagtgctcatatcttcttataatctctaaggcttttctagcctaacttaataatattgactcatggactaaggctagttactgcctcaaccaacgtaaaatcctgagtgttcttatttctttctatttttgaattattattcattggcccatacatttatctttcaatttactaaaaatttgataaatattttggtactttcattgagagctaaaaatagcagtgatacctctaatgattacatattgtaatcatggtactcacccaaaccaaatttggccttcactactaggacacgtcgagggtgaagttgatcccaacactcaaagaggaacaataatcaatggagatcctactgaggtaactcgtcgttaatcaacatgatgatcgacatgtttatgatgatcctatcgatgaaggagaggaaactgtggatggtgaacctactaatcctgaagatgacgaaattggtaaaga

SEQ ID NO: 257013 - DNA, 726 bp, Cannabis indica
catccaagggctagtgagattttgactgttatagaaggaagtctagaagtgggctttgtcacatctaacccagacaatcgtctcattacaaaaattcttcagaagggtgatgtgttcgtgttcccagttgggctcattcattaccaaaaaaatgttgctcatgggaatacaatagccattgctaccttgagtagccaaaatgcaggggttattaccattcccaatgctgtatttggatctaagcctgacatccccattgatattcttgccaaggcttttcaattggacaagactgtggttgtgaatcttcagtctaagttttaaatagaacatatctcttttaggttttatgctgagtgttaaaatcaatacttagaaaaatgattgtgtgtatccacttgagggttaagatgtttgtgatgtatgttttctttatttagtttaacatatccaatatggttgtgtatttccttgttaattaattgaattgttggttttatttcatttgaaagatatggtagaaaaaagtccaaattattcatgcatataaaaaagtcttagattatttagggaaacgtattaaagacaatttttttttgataaatcaggacattatatttgtgacagtgagtagtgccgtgatccgtaaggggaaataccaggtaagctgtgcaattccacaccgcttggggaaggtcaagtgggatgattctgagactgtgtagg

SEQ ID NO: 257014 - DNA, 1254 bp, Cannabis indica
aaagaacatgaacaaacacataatgatgactggaggtcgggaaatgaggccggcgacggaggcccacatgaagaagtaacccacgaagaattgggcagctccagtcgccaggaccacccaaggcccgccgaaccacctgccgagggacgaggaacgccatcgttgcgtggtaacggcgtcgtacatgagaccggataagatacccgcgttagcaccgatgtccttgaaaacaaagacggtgtcgagtgttgattggttataaccctggctggacttgagagcggaggagtagattccgaaggtgtacgcgatgcaccgacaatacactagatccatatgctggccgctgttgtcacccacttgttgttgaaacttccatgcttataataatatgaagtaagagattttcttagaatataaatattaaaagaaaagagtactttgaacaattgtaggggcaggaagaggcttctctaatggaaccgggctcaaactcttctcatcagaagcacaaacatccttactgttctcaacttcttcttttcttcttttgcttcctccttcttcacctgttccgccgctaccggcgatggattttcgagcggttgaggctcaaccctcttggcttcttcctctgccataacgtattctcttaatttagccacagctacaaacactcaataaaaatttaagaaacaaaaaacgactttggtggtggctacaattctcaagtaggctagattagactagaccacactacaggaaattagttgtgaccaaaaattaaaactcaattggatttgaaccaaaattatgtgttggagaaatgaatgagtgttgcaaggaattttttttaagtgaataggtgattatagaaagcttgaaccaccctattccttttctttttttatcttcctatatattcctttcctttgtctattccttttcagttttacataacaattttgtgttttcagttcaaaacaacatgttttagtatcatcaagttcaattcattttgaaaaaagaaaagaaaaacctcctgaattatttatttgagaaaccggttttaatttaattaattcaaggaattaatttttaatttagttattttgagaactgattttttatttagttgattcaatgaactagtttttgatttatttatttttacttaactggtttttgtgtgtaagtttttatcttagttattttacggaaccatttttttttctctcaaatttttaactagct

SEQ ID NO: 257015 - DNA, 849 bp, Cannabis indica
aggtgaggcttgccaattgctgtctcgctaactcctgagcttgtctctctagcgtaaaatcagagttgagatctagttgtcattccagggggttgtcacccctaggtccttccttcagtgggaggtggaggcacgggcttcccacttggatccaccagggtgctcatatcaatttggccagctgtattggccaggcttgtagtgccaattgtggtaacaggattcaccacatctgtagtagtcatggggattcctgttgtgactagaactggagtgcttagatctgcaatttttgggtcttcaaggagacccaaagatgtagatggtgcgataagagtccttcttgtgttcaccatggaatttgatcagattaggatatccacgctctcaatgaaagcaccaaactattgacctcaaaaattgatcaaccgacaacatggtcatatagatctaatgattgccacatgtttgcacaaataagaatgaaaagtaataaacaataagatttgttatagaggttcggcccccttgtaatagcaggtaatgacccactccccttttagttgtatttataccgagggaaatactatccagatcactataggtgggatctgctatagtacatttaggattacaagttatgaatcaatactggcaaaactcaagtgttgatatgttgctagggtaggcatgtgagagagaggaagtgatgaagagagagagtttatcagacacttagagtttggaggcaggtttcatacttagatgccacttaggtttctaagcgaaggttaaggcctttatataggagccctcgaactctagttttacagttcaaatcccttaata

SEQ ID NO: 257016 - DNA, 1029 bp, Cannabis indica
ttttctagttacttttctcggcaaccaaacgcaaaatcaatttgagcgttatttttataatacctgttactgtcgactttggaggtttacatgagcttcgttttgggcaaatatggcgaaagagtaacaaaaatatgatcagcaatttttaacaatgagtaaggttaatttccctaatacccttcaagtttgggatctctaacatcttggtccttttaactttttcccattttcaatttaacccctgtatcatgaaatgctttttttttcttctttttctttttcttttgatgaacaatgaaaatgctcttttcttgtgatctacccaatcctaaatatttagtcttatgtaagtaaatttctttaattattttctatatgttttattggtggaacataaaaaaacaacaattttctttaatattaaaattctgttatctaatttacttagagaatctcttttttatgttagctttaattttaatattgaagtttatgaattgactaaatatatctattggttagataattgattcacttagaagaaattcctccagcttcatgtataatgtagttacttgagttattttaatcttttcaaattactcccaaaaaataatagattttgcaccacacaacattattggtgtggttaaacataacaacttgtagtgaactttcgaaatgtacacttaaaaatatgtataccttacaattactccttttgctttctctttatgatatatatataaatttattttgttatatgaaaatatttattgtagttatttaacatagtatgtaaattgtacaaaattataataatctataatggaagaggttttaatggttacatttttattgtaaacatcatggttacatttttttaagccattggaatactattaaatgactgtgattaatttggaaataaattacaaataaataataaataacttgtaacctgaaagaaacctaataatttatttccttataaaacttttattaagattaattatattttaaaat

SEQ ID NO: 257017 - DNA, 570 bp, Cannabis indica
gtcacaatgggctcctcctccctacccgatgcctacacaaggatgggctcgcccacttgctgccaccaatgggcctggagtgttgggtccacgcccccagcagcaagcatatcaagcgttcactgctcctgtggctccttttttccatggtgaaaatagttcgtatatgcctaccaacattgcgtcagctatacacaccatgactctcaatccacccgatcctacttggtatatggacaccggtgctacatcacatatgacctcgtccaatggtaatctcttgccttattttcctttgagcaattctaattctggtattcttgtaagaaatggtcattcaattcctattcatggctatgctcatacatatttgccctctcctcatcctcccttgtcattaaaaaatgttcttcatgctcccaaaataatcaaaaatctaatttttgttcaaaaattcactactgacaattctgtttcggttgtatttgatccatttggattttctatgaaagatttgcagacaaggatgtctctactgaggtgtaatagtcagggtgacctatatcctct

SEQ ID NO: 257018 - DNA, 1153 bp, Cannabis indica
agtcaactttccttccaagtttagatatacacaaatagggaaaccatatcaatatatgccagccgaaatatgcaataaataataaaatatttttgtcaattaaatatgccaaaaatggaattaacacttgtcaaccattatctgcttgcctatggtactcacaagcgcacttagagtgttcttcccccaatattgcaacccaagaccatttaaccgaacccaaattgggacagatttcaccattcttgctgagtccatgtccatagtccacggtctaagcacaacaggtttcttatcaaaatgaatgacccctgtttccagaatcaaatccctagtctcctcatccctgaaactcactaacgtaaagcctgagttcattcttgcaatccttttaatacccaagttcccccaaactcttttgataaacccctcaaagaccctaaacggtggatttgctccaagaacaatacaaacaatagagtttttccagaatgatgcttcacattcaacctcatctaagtccaatttagcaacagattggtccccaattttaataggttcagtgaattcaagacgtgtggatggagtacaaacctgattggtcttgaacctgctccagacgtctttagcttgagcactgaaatcctccctctcgacatcatcagcccaacgcactggtttgggggaagcaggtaacacagtcggcctctgaatctcagttaaaccctcttcgattggttctccttccagattctcgcacgtgtctaggaacacctcagtcgcgggttggtcatcgctttcaggtattgaggggaggtcaccggtctccgtctcgactaccgtcgtgctcttgatcggcttcgaaaccgtccgcttcttcttcaccatgagaggaaaccgagggtttcatacgccttggtttagtagcattccaaacttaagtatttatttgcaactagaagttaaacttaggtatttatgccgcaaattactctataataaataataaatggaagtgttttgctacaaacaatatttatgatatgatattagatggagtgttcattcaatccaatcgccactattttgctcatagtacatccgatttgcattaagtgtgaatttcatttgtagaaattacactatttatgag

SEQ ID NO: 257019 - DNA, 718 bp, Cannabis indica
tatagttcttctgttgaattccttaaatgcatcaatggtcaactttgtagttgcaaatttatatttttgcatttgatttcttttgtatcttctatttttttctagatctgccattattagcatttaattctcaaatatttttctttcaagaaaattcttaggtaaaggcaacattttgtcgttcctataaaagtatttttattttaggtatatgaagaaattataataagttaatttcccttcattatagtaattatacaacaaaattctgaataatttattatattaaaaatatgacttaaataatcgtacaattaattattttaatcattcaaaaattttaaaaatagatgaaatttaattacttatattatttattaaatgaaaatatttaaaatttaatattgaaatgcattaaaagctatataacaacttccccataatatttatcatattgaaatggggtaagttaaaaaataccacttttattaatcaattgatcaaatttacctctaattttatatttaattgaaacatacctatttttatatgtattgtactcaaaatacccttacataagagagtcacatagtatattgaagtgataagggtaaatttgatacaatgtttgaaaaaagaggtaaaaatgatagatttttaaaaagtgggtaaaaataaaagagaacaatataaaaaaatatagactgtaatttcctct

SEQ ID NO: 257020 - DNA, 2040 bp, Cannabis indica
taattatagttagagaatttcataggaatggtttgatgatttccactagtgaaggtttggggtcccttctttgcgagtccgttgtttaaaaatctgcacaaataaaccattgttgcgaggccaaatgatcaggctgcccaagattaaggatgagttttggattgactttcgctatgaaaggcttcccgagttctgttttgaatgtggtcgtcttggacacccttatgagcattgtgttgctttcatggaacgtatcgacagcaataatgatgacgattttcaatatgggccatggatgaaaggtgctaaactccctaccaatacttatgatcgatatcggactaattttgcaaaaggaaatgcatggcctctactcactagattggccagaaccacccttacatccactcttccatccctccaaactcgacaccaagcctgtcctaaggttctctttgaaggggaatcatctagcagtcatcttcacttgcatcatcaacattttactctaactcctttatctaacctaacaaccaaccacacgaacatacatcacctccaaacttcctgcaactttagatacctgatttccagacaattctatctcccaattcgcctaacccgaagccatatcaccactcccacaaccaattaccacaataattctgtccctgtcaatccgtccaacatctcccaaactccacttattactagcaattatcttgccacaccagatgccacttgcaccagcacactctctaacaaactatccccccttttcgctcactgtctgaaaattcagcaaccccacaacactgcaattccatcaaccaaaccaaccttttcacctgtttgcaacaccaacattcagcaggctacaacatccacttataacattagcagcaacctttcacaccagccccttacacacccttgcaacaacaaaaacaaacaacaaattctcactcccagcagtccgatctctacccaggcccttccttcatcttgcaatactcaaaaccagtaactcaaaataaatatgagcaacccttcacaccagaaatccatctcgccttcagtatctaataagaatcactctccaagtaagtctattgctgacctttcacacctttatgtgcctattttgcagaatcatacatttgctacatacccaccagcacttcatcccattcccattaacactaaactcacatctccaactcttaccatgcctataaaccttcccacttacacaaatgctaatgtttccaatggaaaagaaaaccagctgccttcatgcactttcaaaagacaaaatgattctctatctatgagaaaatttttgaagagatgttgcaacaaccatggatcatcatcctctcctttgtcaagggaggatgatattgagactttactttctgattttgaggattctaacttctccaatgactcaattacagaggttgcaaggcaaccctacaaatcatcatgaaaatcttaagctggaatgcacggggcttggggaactcgagtgcattgagacacttacgattgcttgtccaacaacaatcaccccaaattttgtttctaatggaaacaaaactgcctgtaaattcagtttcttgtttgcgacaatttcttcactttctgaacggtttggagtctccacgtataggtcttagtggcggtctcttgcttttatggaaagatgaagtagacctttctcttttgaactttggttccactttttttgactgctacatcacaattgaaaatggcccaacgtctcatttcacatgtttttatggtgctcctgaagttagtaatagaccagcctcatggactctacttgagcgatttgcggatgttgcacttcattacttggcttgttattggcgacttcaataagattctttataacagtaataagtccggaggagcactcggaaatgaatctcaaatggatgcattttgaaaagccattgacaagggttgccttcatgaaaatccggtggatggtgatcctttcacttgggcaag

SEQ ID NO: 257021 - DNA, 1189 bp, Cannabis indica
tgaatcaaatttttgggaaaataaggggtattttctaagagataaacattcatagtagtgtgtaagtaacatgattagaacatttatgaccttttttgttaggagaatagcctaaaaaaactcttttcagctcttggatctaactttgatctagatctacttacgaagataaacataagcagtacaaccaaaaaacttttagaggcaagacagaaacaaatctagatagaaggataaaaactttttcaaatatgacaaaggagtagtataatttaaaaccttagtgggcactctactgattaaataagttgcagtaagaatggcatcccccacaaatattttggtatattcatataaaacatcacgagcaatttctagtaagtgcttattttttcgtgtaacctctccattttgttcaggagtatctggacaaatagattgatgtaaaatactattttcttttaaaaaagtccccaagttattattaaaatactcagtcccattatcaactcgtaaaatattggttcatgttgaaattcgttttcaatcatttaaaaaaaaaattgaaaaaatttattcaacttcagatttctaacgcattaaataaactgaacaaaaacgagtatggccgtctataaaagtaacaaaaccatttttttccagaatttgtagtaacctttgaaggtctccaaacatcactatataacaaatagaaaggtttggaagattgataagaatttttagcataagattttcgttggctcttagccaataaacaaccttcacattgaaaagataaaggatttaatttcttaaataatgctataactaaatgttttaatttgaaaaactaagatgaccaagtctataatgccaaacgattatttggtcatgaacagaacgacaactaatattactaaacccttgagtaatttcattattagagttcttatcttcaaaatagtagagaccattaatcatcctagaactgtcaatcgcctttcccaaactctagtcctgaaaaaggcaatgagattcatagaaaattacacaacaattagaatctcgagatagtttgctaaccggtaagatttcaggaaaattgaggagcatggagaatagatgtaagatctatcccctaagaaattataattaagtattttccggcaatagatgagaaattaccatc

SEQ ID NO: 257022 - DNA, 779 bp, Cannabis indica
aaagataaaagcgtaaaaatgctccaaacatgatttaaactaaatagaaaaatgtgctaaaatgaacctaaatttaatactaaaaataacctaacagggttgccttactagaaaacaacagaaatggttacttaatgatgtaatgtgtataatttgtctttgttagtcaaatacttgtgtagtactgaatctatatgtatatgtgattgttgtgctaattatttgtgattatttggaatagtttgtgaaagtaatgtgtagttattgtatttacttttcttgttgagctttatgatttatgggtgttatgtggtgtaagtaaaaggaaagagaagttaggtcagtcataagtcatcggtcttctcgaaaaaatgtgcatatcgacctatctggtttgcgatactgccttgtcaaaagatgttttggcactatatctgtacgtataatattttagatataaactttgtactggatttttagtaaaacttttgcaatagaagttccacgaaacaaaatatttgtcgatgtaaccctttcagtttaaagtgaatttaataaaattttactttcataaaaaaatattaattaaatcgttagtttattattataaactaatttaattaaaaaaaacacacatgacgtccctaggggttagggcattacaggttagggtcgagaaaattaaataatgatccaaaataggtcgacattacttgacacgaaataaaaacaggtcaaatacgacacaatcagagatacccgacacatgacctagaatt

SEQ ID NO: 257023 - DNA, 1152 bp, Cannabis indica
ttaattaaataatcaaactgggaatattaaaatacggaatttcagtaaatatagatattggaacatgttgtcaaaggcaccgaccaatgcaattgctaagtttgatcatgttcacatactataacgtgttgtgtaagtaaataaatttttggtttaaattaataacatattaatctttttaaaatttggaataataaggcaagaccaactacacacagttgtgaagtgatcaaataaagagtaacccaattgttgagacttaaaaatataattgtgaccaccttattatggtttgacttaaaaaatagtacttgtaatctaaaaatatataatagatacgatctaaatatttccaatcccgtgtgacaattattttggtaataacaaatgtattgaataaagttgcgtattgcaggagtagtattatataccgtgttgtaacatatatttttggaatccttgtgatgttcacgtatgtcgatcctaagattataaatattaaacttataattaatcagtgttatgttacacataaagaattagttaagaattagttaattagctttacttttcttgattagttaattctgttgtaacagttagttatcgactaactcttttctttctgtaacaaattccttgtacaatgatccctataaataaagctctcagctcaatattattttttgagcttttctctgctatttgttctgttttgcttctggttttctctctggttcttaccatcaggttttacctcttcaagctttgttaagcttctacatggtatcagacgcctcccatggagtcttccaatccgtctggtcctgcggtttcttctggcagagccattgctcccaacaactcctctgattcaacgcctccgatatggaatcctttctcaagttctttatcttcttccctcacgatcaagctcgatcgtaccaattttttgtcatggaaatcccaagttgttcccacggttattgggcatgatcttgatgacatattattttctggtgtttctcctccgcaaacactagttaatggtactgtcaatccgaactttcttcaatggaaaaaaagagatcaacttctcctctcgtggctccgatcttcaatgtccgaaggtgttcttgcatctgtggccaa

SEQ ID NO: 257024 - DNA, 883 bp, Cannabis indica
ttgtaaaaattatcaattagactatttgtttagttaaataacaatcagaccatatatttttcaaaatgttaaataatattataatctaagtttttgtcaaaataaaacttaataataacctgactggaatgtgtcttgatcaccatagttgttacaattttttcatctgttcatgcttaagaaattggcttcaggttgattatctcaaaattaaaaatgacaaaagttgagctcagaattttattttgtaccattctgaaaaatacacggtccaatttatcgtttaacaaaatataaaaagtgtgattagtacttttcacaaaacacgtagtttaaaatagtattaacttcttttagcataacaaaaatagtagcaatatcagaacacaaatatgttaaatacgttgcttcaattaattaacatcaaaactactctattgtgatatgactagttgattttattttctctcttatactactctattgtgataaaaatactattgttttctttttaaaaaataatgagctagtagtgcttccaaacatatagaaataaaatatctcacagttagagacttggtcaagaaatgagacagtatgatagaatattgtaagaccaagtcgatatttgtagatcctctaaccaaatgattaagtgttatgttatttaataaaatattattgatacaggcattttgtaatcttttgttcctttgggttaatgggagttcttgttctatcatttgagattatatttatttgtaattttcttatatattgatgttatgaactatttggtttgtttgtggaccaattaatttttaattattggatgtttatgctttcaattatattttcttatattctcaagaatgatgaaatt

SEQ ID NO: 257025 - DNA, 1128 bp, Cannabis indica
aacaaaaaaaaaaaactagaaaactaacggaatatagctataaatcaatatttattaataaatatattaattaatataaaaagttatatatactataattaacctaatatacctaattgtatataaatagacgtaaacaatcttatttttaattatcataatcaaaccctaaagtctaataattaatatcatctatgcttcccttctttctctctttctaccctcaatcaatttattttttctattttttataagaaaattattatatcctttttattttttcgtcactttcgttagtattaatattcatacttgaataattttatacatattaatttagttatgttttgatttataatacataatatactaatatttaatcatcataaatttttatcttatttatttatttaatttttttaataggtattgacattaatttaaaatggaaagtggtatgtctctttttcgtcatgcttttttttttagcattattaacttaatttgttgaattttttttccattatattttttttctcttaaaataaaaaaaatcttatattttttctcgatgataatgatacatcaaaatcttttgaacatctccaaaacattgtgcaagtcgttttggtgtgttcattaaataaacatgttttattatttttagataaaacggcctcattaaataaaattgttggtatgtattaaggggagagaattttttctttaattcttctcatcttttgttcttaattttaatgaactcatgttctttcaaaaaataaataaataaatatatttttcaatagttgtgatccaaatattaaacatacattatttttttactattattattgatttcaagactttataatagaatgatttacatataaaaagtgagtagctaattcaatgtataatttattttatgtacaggtaaacttaataggaagaatagtgataactacaagtgagaaacagtgataacatcgattttgaatatagtaacaactactataagtgaaacacggtgataaaatctactttgaatatagtggcgactactacaaatgagatacagtgatgacaacagttttcatatgatgagttttctataaatttatcaat

SEQ ID NO: 257026 - DNA, 752 bp, Cannabis indica
gtgtatttattattttatagagtataaaataaaactcaccaaatttaacaccaatttcaagtgtttttacttctatgcaaaattactaaaataagcattgtactataaattttggtgctccatttaaagatgtttttagttaaactatttgttaacctgttgcttagttacaaattttacactgtataaaagttaaaaataaataaagtatcagttaaatcaaatagttgacagagtgatgagttaaaaaagtgattatctcaaatcattaaaaaaaaaaattgcactttcaattttatttgtagagagggtttttatcgaaactagttgaagaaactccaaatttaacatatgcatttatatttgtgactgtacaataatccataaaaagattttaaattgaacggtcgtttcgtttccatttccacgtagcaaatatatgagaactagctacagctaagctagcttaccaaatgcaatattttattgagtattgctattaagcattaaattagtggtgcttagtagaggtgggcatcatccaattcaatccaattgaacggaatcgatccaatccaattcaattacaaaaaattggatatccaattacaattagattggattagatgctaaaagttggattctaattggattggatcggttattggatatcaatctcaaaatccaattaaaaatcgatcaaatccaattacatttatacatattaaaaaattatttattattatattttt

SEQ ID NO: 257027 - DNA, 1248 bp, Cannabis indica
ttaattttttttaaagtttttttaaacatatatggtaaataggattatccaacaatctcttgtcgataatgtaaaccattcaaagtactagtaagtatgttgcactttgcatccagttgtttatagaaatgttgaattatatataactattaattgaataataaaattatatcaaataattttaaatatcttttatgtattagtttttttaaaaaaaaatatatatttattaaaaaaataaataaataaatctatacactctcttatataaaaaagacacaaaaaaatattttcaaaataatttttatcgtcggagcttatttatagtcacgactattaaagttgatatcattattgtattttactttagtgatattattaattaaataaggatctattagtactcactttgaatcattatattattatttaatttaattgaatcatttgttattatatacatgtaattatttttatttttaatttaattaataatatataatctcttattaaatattaataaacgtacttgcacttcgtgtaattatataataaagtaattataaattttagtttgatgttttaaaattttttgtttgttctctctatttagttaaattataacttagatatattattttacgaaataaagtataatgacaaagtgattttaattgtaatcaaatatttttacattaacattaattttttttttccaagccctcaataacgattgaaatccgatttatgatctaattacactgaaccgatctaattgcactgactcagtcaaatccaatccaattacaaaaaattggacacgcagttacaattggattggattggaagtgagtaattgtattttaattgaattggatcggttattggatttcaaagtctaattaaaaacactgatctaattttattacatataaggatgtctacacatttggtaccttatgttttatctaaatacaagttaggtactatgtatttttaataatgctaatcgataccttgtattttaaaatcatacatatttggtacactaaattcaatttttttttttgataaaattttatcaatacaatcaaactgtctaaaattttatgaattctgaattcaaatttaattatttgattacacataactgagatatgtttgattaaattgataaattttactttagggtatcaaatgtgtacaattttaaaatataaggtaccaattaagtaatattgaaaatac

SEQ ID NO: 257028 - DNA, 963 bp, Cannabis indica
aaccatgcaacataaaatgttatttctaatctttataaactagtaaatctgattatattgaaatggattttatttaggccacaaaacccgacagagacttgatctaaaaggagttttgatgaaatagaaaaaaagtaaccatgcctcagcataaatttttcccttagcacctaccaaaaaaaaaaccccaaattttttaatctagtacacacatgtatatgtaagataagttatacactccaaaatcaaatatatcaagggttggaaaaatgtccctatactattaatgacaaaatgggtgtacctatagtagaattttcctatatatatgaaaaaaaaatagattttaataaaagttaaaaaaattatgttaattaaagttgaaaaaaaattatagaaagctcctatggagtcggttatttcataaaaaccaactttatagggtccctatagcgttggtgaaataacagacatcatagggaccctatggagtctcggttatttcataataactgacgtcatagggtccctatggcaaaggttatttcatatccttttagcgtcatccagaacaacgtcgatagcgtattttgcaaaaactaacgctgaaaggtcttaaaaaccgcctctaaatcccaattttctagtagttgattatgtttttcttactgagtctatcgactcacagatatatttttacatgtataggtaaaagcatgcaaaagctggacagtagtgaattcgagctattggggattgcacatatgagggcggttagatctggagtaatcgatcttcgggacattagactcattttgataattgctagctggactacaacttttgtaattataatatgtggaaaacagttatgactttaaaataggatcatgtattatgtaaattattatatattaagattaaagtttaatcatgaaaattttaattgctcactttttttaa

SEQ ID NO: 257029 - DNA, 993 bp, Cannabis indica
ataataagactttgcctttttctttccaagactctgtttctcatacacacacccaactcccattttcacattttatcgtaatcataacattgtatcgaaactaattttctctttttcctctaatgatgctcttttaatttgtttctgttccaaatgtaatctctctcattctttccccctcgttttctatcaaatggagttagaatacctcatgtgtgatgaaatacttatttgtatattttagattattttctcattgttttagaagaattaattttttactgttatttgcatattctctggtagctaattattatttatatagtttgatttgaattttattttttcaaccttatttttattattcatcaataatttttttttaaataataaccaatgaacatagctttaatttgaattttatagaaaaaattacaattacaactaaaatagcaattcaaatcacaaaatcgcaactcaaattatacattgatttctgaaaatagaaacataattagaaatcctaaatcatcattgaaccttatcacaatttcagtcacaccccaattactaagcattctcaatgatgacaatgcaatgttgtcctaatttataagatttttttattcttccttatggtgcaaaaatctattcaatttatgcccttcctatttatgcacttcctacttgacttagtaattcttataaattttagtatattaaatatactatatgaagtggtattgtcaagtatgctttaaaaatttataattttaaaactacccaaatagataaactccctaaaaccttttttaagtgtaatcatcatgtaatcataaagaattaagaatgaagtttcaatggttacattgaatctgtaaccatcatggttacattttttttagccattagagtactattgaatggttatgattaatttggaaattaataaaaataaataataattaacttataacctaataatcacctaat

SEQ ID NO: 257030 - DNA, 1252 bp, Cannabis indica
tctagagttaataatagaatttataataatgtgtttacaaagattcgcctcgatctaagatggggagtcgaaaaaggattaaaggagaagaagtcgaagcttggatcagactcccccaacttcgtgtgtctctagggggtatatatacggtcgattccttcacaaggattgtcgttgatggatcttcatgaggatgaacccccaccattggatttggtaggaggcatactttccatgtgatctttaccgatatcagattgtactggttgtactaacggtgctttggacgcgtgtcactctagagccttcctcatttgaattacccctgctcctagctattagatcgttttgcatggtacacagggacatgcacgctttaggtgtcatgagagacaacctctaacatcgtacataggaaaagagcgagtggtgggcccttagcctggcacatgtagaccgaacccctgcaggtcaaaggagtaccccgaattaatactttttgatggaaggtccatgatctttgcaggagccaaaggtctcgccttctagagaagagggttgttgattcgcgaacacctcttttatggtctccatttgcgaggacttctcccacagaggtctgtgaagactggtccatagggttggagccctaaccctctgggatcatggagcgaggcccttgggcagcttgatgacttcttttctctccttaattattccccgcaggctaagcgagtgaaaagcaaataatatttacccccaagattccgagacatgccatcattgggcgtcaaattgtagcgccattaattatccttacttatgatgagccctttaatgtatggcatcattggccgtcaaattgtagtgccattatgtaggagacatgattttttccacttttttttagagtgtcaaatgctgatttttgggattttcatgcacgtgccgagcgcgtgttcctgggaagcgcaaaatggcggcaattggacttaggaaatcttctcacttactgagtgttcttcacgatgcatgcaatgatgggagctatatgttgggaagcaaagcgctcttttagcttctcacacccaatcactagggtgtctctcggggtgaactgaagcgtttacttcatgtgcaatgcgccctttccctatcgtcccataaatacgtacgatagccactttgtttttcactcttcttacctgttaagccatatcccttctagctttcttcttcccagtcacattgg

SEQ ID NO: 257031 - DNA, 773 bp, Cannabis indica
gctcaaagatcaatggctggaggtatatcaatccttcattgtgatatatattatcgatatgtatagtttttccgcattacatatcgtttatatatattattatatataatctaagagaaaagagatgattcatagaaattgatgactatgatattttttcaaaagtttacaaaatgtggtatatatgttggaagataaaatttgaggtttgaggctccgaaatttattgtttagtcctaattttaaatcataaataataaagtttctattataataattattggaattaaaataaagaagatattttaagatttaattaaattatattatgtatatctatctatttatctatatttatatttgtataaagtttctaaatgttgtagtaatatcattctcaagacaaacaactaagcaatcattcaaaaaattgtttccatcttgtttctaagctttgtcttgataatttttatgattgacaatgcatgttctatcaataagagtaagaacaagcgtaagtaacctgtcaataagaggatacataattcttccggcaaccactataaaaatttatttttagtcacaacaaaacttgtgactaaaagtgaaaaagttgtgactaattataaattatcattcttacgttgtgactaaaaagtctatgtctaaaaatattagacacaaaattcacaatttgtcgtgactaaatatatttttagtcacaaaatttattgtcactaaaattaaattatttgtgtctaaataatatgttt

SEQ ID NO: 257032 - DNA, 763 bp, Cannabis indica
ataaattggtacctctttatatatagatatttgacaacattagagactaaattgaagttaagaaaaaagaaaaaaaaaaaaaacctgaaaaccaacttggaaaatttgtgtgtattttgtctcatattattcgcgtgtgaataattaatgtgtttgtattacacttaataattattaaactttaaccttgttccctttcaaaattcataagaattagagtgtgtttaatggtgcactatctcactaaattagtgtgaaatcttttcgcatcatttcactttaagaatatactaaattttacattaaattggtatgcaccaaattttacacaaattttaagaccatctccaattattacaccaatttagactcatttgtaacattcttgtgagtcggattggaccccattcactgatcctacacctacaggtgtagagaacttcatcgtgaggtagtagattgacgtcacaatcttcatttcctttaagattgggaaaccaatcaccgcgttgtacgctgaatattgatcaatcactgcgaagttcgccatagacttcgttgttacaggtgcttcaccaagcgttataggcaacctgatcattcctttcaactcaattgtatctccagtgaacatgtacatgctcaaggttatcggcttcaaatctttctcgtgtagtcccatctacttaaatgcctacagattcaaaagcttgatggaactaccattattcatgagaacgcgatgtacattatcacctccaat

SEQ ID NO: 257033 - DNA, 883 bp, Cannabis indica
tcacaaatcctgataaatccaccaatctttgaactttttcttccttcatgccatggctgattaagatgcacttggaaatagaccagaggtttatgaaaataatttgagctcttgtagcataagatacattatttgcaacaccatgactaaaatgcaacatatcatctataaagtaaagatgatttaatttaagatcaacacaactttcatggaacttaaactcttcctcaatctagtttaatcatacaattagctttagcattcttctttctataatgtctaactagatcctagcaaaccatgatgtcgcaggcaatgaatcttccattcacaaaactattctgattcagggccacgagatccggtaaaaagttctcaatctcgaacatatcattttagtagctacttgataaagtacattacaacaatcgatggggcaaaagtctcttattgattcaggatatttacccttaggtataagagtaagtgtagttgagttaagttctttcagtatctaccccgaatgtaaaaaggtaacatcacttcactgacttcattgtcaactaagtcccaattatctcggtaaaaatagttactaaacccatacagaacaaaagctttatgtcttgggatactgaagattataattttaaattactatatattagatttttaaattatattacagtatgatatttatgatatatattaccattgaaaagtaaaataaaaaattgtttttgtacaagtttattattatatgatattttttctcaacttttgtcttattatccattatatcatattttttctattaatatgttacaatattattattacaccacatatattatatgaacaattttattgctttttttttttt

SEQ ID NO: 257034 - DNA, 1392 bp, Cannabis indica
aatatattatccattaaatacttgcttttagggcataaatccaaataatctctcactttcactaaaagtaattccaacacattctataactcttatagacgctatttgtcattctactatgcaagctaagtcttgtgaacgagactctccacataatataatttcagatcccagagaccaccacatcatcattagaataatatacagaatttgattcttgtatattttgcttatttattcttttatttccttgggttcatcttcttgattaattattttgttaacctagaaactttccttggtgacgtgtacattaatgtttgacacgtggcatgaaggaaaatgtcatgctattgagaagacccgagtcatagaagttgacctgggaggggacccaagccttgtgcccaggttgacttagagatttttgagatgaaagtttggaatccaataactcgaatcaaacccattatctttcaatattctataccatgaagacatggcgcaacctaattcaagtcttgggtgttgaaattacacgaacttgtaacccggaagccaacttgggcacctaggggttccacctagtgcccaagttgacaacctcaactagggttttagttttcgggaccgtcttagtgcaaagtggtcaaaaatttcattgggacatcaactatacatacaacagacatatttgaggcatcgtaatcaaaatcagagcaagttgatttttgagtacctagggccctaaggccccgagcacatagcgcccaggttaacattgtgtaatctgggtgccttttgaatgttcaatcagagatccaaattttgcatcgaatccaccttcatcaaaaatggggaaatgggtcctttcgcgaaaaaaaacaacaattcctcggcacaaattacagggcatagtgcccaggttaacacctggggctggccctgcgtctaggttgatattttgtcaacctgggcaatttaaattagagtattttaggcattcttttgagcatcttctttgtctttagaaaatattgagatttaacaataccacgagtcgacatctcttcgcagcaaatgtacatatctgactagtctttaggacctttaaaaccatggtcgctctgataccaagttgtaacactctaattcctagggaaaccacgtgtgtggttttcgaaacatagtttgtaatagtagattagtgatataataaaatcagtgataataataaaaacttcacaagaataataacatagcaatgaacgggatggcattgctaaaaatttgttttggggatcccctgttacaaaagttttacaaaaagggttgtatacacaaataggtcaaaatactcattaggtatagctcaaaacaactcctgacaac

SEQ ID NO: 257035 - DNA, 1439 bp, Cannabis indica
atgtcagcccctcgcacacagcatatgcaggcccttaaccacctcattcgctatcttaaagggaacccaggtcaaggtattctatatttaaccaattcatctctcaacctctatggtttctcagatttagattgggcttcctatccaattacaagatgatcaacaacgagtttttgcatttttcttggcaactgtctcatctcttggaaaaaaaacgaaacaagcccaccatctcaaaaagctcagccgaagcagaatatagggcccttgctgcaacaacaagtgaaattacttggctcgaatacttactttcagacttccaaatacaacaaacaggtccgactttcatatattgtgtcaaccaatctgctatccacatagccaactaccctacattccatgaatgaacaaaacatattgaacttgactgccatttcattcgagactaaataacagctcagcagttcgcctcattccaatttcaagcacattacaaaccaaacccttacccctgctactaccctctcatctcatattcgccagatgtttgtatatgacaatacagtctaccttgagggggggggggtaacaagaattagttctatttttccctttcctttagccaggttttggtatattgttacattaccaacttattactactactaacagttattttcggttatatctgttatttgagttcatcctgtgagtaagtgtgttcttgttcttgaccttagttagttggttgttatggttagtttagctctagttagttttgctaactaattctttccctcttgtatttaaactccacttctctgttttgtttcatcatgttcttcttgtaaagatttcattcaaattcaataaagctttctttcactttcgtaagaatacaaattttcttttattctatttttcaactctctaaataacttaaaaaaaatattattctctcttttcctctatatttttttccctccaataatttttatcttttctatttctttataaatgaagtacagacataattatatattaattggtgacttttaatatgtaaatatatttacaaattataaaataataatggattttttttaattaattgatcatgtgaactttcaatattggtgactttgttggaatatgttttacctaagatctagattctaacccttatatcctgtctgtagcagggtatcaccaagatctgagtctaaatctccttctcttgaaactggattcttcactgccttacacactatgatggagtaccacttgatgtgtgtggaacttactctatcacaaaggggtatgaaaatataaagagaggaagataggagtgtggttcaaaaatagcaggagtgatggctcacgaaattttgactgaaggcttgaatttcatcatcttttagtgtgagccatcactatct

SEQ ID NO: 257036 - DNA, 667 bp, Cannabis indica
agttcagggggaaaaattactaattagccaaaaaaaaaaattaattatgaatgcttaaaagtgtactcgttattaaaatttagactctcactattctttttaaagggtgattagaattataaaaagacaaatctcgatgcaaagaaatactcaggtaataaattaattgtttagcccaaaaaaatatacaaaattaaaatataaatagctataaaacaaagtaactaatataaaacttgcagagatggtggggtgatggtaaagaagaattgttcttctaaagaagttgatggaggctcttcgagatttaaagaacgccttgaggacggttgttcggaagcttcgaagatgtctaaggagttgaagtgcaggactaaagaattgtctaatcaggaggattcatattttccagtggccgaggaggcgggccttatcaagccccctaattcccaatgttaattctttcgtggaattattggggtcttggcaagcctcgggcattggactcgtaacgagaatcctgatttggttttcttaatggaaactaaaaaatcaagtactgaaatgggtgttctaagccgtaggttgggtttcttaggagttttggcaatgtctgttttaggttcagcagggggattgcaataatgtggcgaagaggatggaatat

SEQ ID NO: 257037 - DNA, 1755 bp, Cannabis indica
aaactttttgttctttttttagttaaaggatacttttaattactgattctctgggcaccttggattttgagaataaataaacctttattttccattgagactccactctccacccttttgtgtttctgacttgttaaacatttaggttatcttaaacactatttttatcattgtatttactatgtaggttccaataagcatgaagaataaagtgtgtcttttttttatttttttatttttttatggggcaggaggaggttcttctgcccatatgtatttctttaagtggaaaatttgaatgaaataattgttaatattaatttaaagaaaaaaaaaagtttaaacaatggacacaagatccgaaaattggcctgtcattataagtggttaaatggcatataataaaactgtaacaggttagataagaatattgctcagtcttatataatatataaatctatttatgttcatatatataaataatataatattgaatgatgctatctatacacacccatttgaaaaaaatgatgatgtacatccttgctaattatttacggatgtttaattttttaccaatcaacatagctaatgttagtttttatgcaattttttgtcttggctatcaaatcctagaatttgatcaaaggaatatggatatctaactctctcaatttcaaaaagtggaacttaattaatgataatcatatactattaatcatctttcacttcttaaagaaaaatcgtaatccattttagaactgagtatcgattggattggtcagttttttccattgtataaaaatctaaaatttagtttttagtctagattggtacaatttgaaaactgactgaccaatccagaacctatcttagaaccgaccattttaaacatcgatttggtcagtttaaaccgcccaaaccgaacttcttctttttttttttttttttttaaattataatcaaatttattctataagcacattattttacattctacaactacaaacatacaaattatttgttcaaaaattaattgtcttattatttttttaactttaatattaataaaataatattatattcttattatatattattagtagctacaatccataagacaaaaaacaaaaaaaaaaacttaaataaattaatatatatgtataacggtcggtttcggttttttcgatcgatttattacccaaaaaaaaaaaagaccgttcaatggcggtttttttagtttttaattctgccggtttcgatttcagttccgccggtttcaattctagcggtgttcggcaggtcggtttgaacaatatttttttttagttttctagattttatgctcaaccctatccattatatggcttggttaataagtacttaattatactacaaaaaaataagcttcaatgaggataaatttcgtcagcgaaggttgtttttttgtcagtaataaatgtcaatggcgacatgtcctcactaaaaggttgtcagtgattatgttgaaagtaagtatcaatgacgatattcaaagtcatcactaaaaaataaacatcaatgacgataatgttgtcattaattatttgtattttttttttaaaaaaaaaaaaaaaccattaaactattaagccgtcactgatatgtgttagttttttttaaaaaaaaataaaataatataaatctaaatatttttttttttataaaaccctaattttcaaaacccaaataaacacctcatctcttccctctctc

SEQ ID NO: 257038 - DNA, 1060 bp, Cannabis indica
ggatgtcaacctggttatagggtattgaacaaatttcacttaaacgatcacaactccctcaatattgacctgattaacgagattcaacttgtgtttcgaagctatttcaaagatttatcaagtcatatctcacactcatatcgcaattttgaagatttcaagtccaaaattcgccattaacatagttgcaatatttttagcagattgcccaaaaacaatctgacagacaggattcaaactccgaaaattaataactttcatcaagagtcaattttcaccatcgaatcatcattaatggtcaagatcatcattaatgttttatgttaccaaacacttaattaaatagacaacctcataatataaaatctttatttgttgttacttctgtaatacattttttaaaaaataaaaaataaaaaataaaaataaaaacaactacaagtatccattttaaaatctttcattctagataatataaaacattgaagcgtggagctaagaagattaagggcacatttgaaaactcaagaataattgaaattaaatgtaattaaaaacaattacacaattctacttgtttaactgaacacataagacacgtttgaaaaagtcaatgtacaatgggaactgagtataattcaaaataattacaaattttataaaattgaaatgtttgttcaatcaagtaaccatgtaatttgagataattaatgagtctcaattataagtttcgattacactcttcaattcttatgatctcttatgaaaattgaatgtaattacacaatattactatttttttagataattaatataattaaactgtgtaattagtaactcatttgctaaaccttaaaataaaaatttgtgcgcaattacaacttaacatccaaacagattgtattttaaaatagagtgtaactactctcaaatgtaattactactctaataattacactatatatataattgtttccaaacatatcctaattataccgtaactgtgtaattaaaaataattaagaagtctcagttaagtcttcaattcttatgccccata

SEQ ID NO: 257039 - DNA, 952 bp, Cannabis indica
tatcttagaggaaaagattttctcagttgcaaatataaagattctgattcgtggttttggaagaatgtggtaaaagctaatgcaattttgagaaaaggggcttgtaagttggtgggtcatggtagagatacctgcatttggagggatccttgggttcctaattttaaaggtttcgtcccgaaaccaatgggagaaatcccgtcaaatatgaactgtgtggctgatcttctcacaaactctggcacctgggacatttacaaattaaatagtcttttcgataaggacactgtctcagctattttgaaaggaggtaatccttcgggccagggagaggatagatgggtttggactttagagtctcatgggcgtttcacgagtaaattgacttacctagctcaagcattagaaagagctagtcattgtgaggtggccccgacgctttggaacaagttatggaatagcaaaattctagagcggcataagatcctttggtggtgcatcctttcaaaggcgctccttgttagatcagagattggaaaaagattccaaatagaggatacaagctgtcctctgtgtgggttgggggaggaaactctagaacacctatttctctcgtgtgatgtggcgttacacctttggcgatcctcaccatgggacatttatccggtctgtgacaatgggatcagtgtttgggactgggtgaaatttctttggaatcttaaaaacaatggtattcgagtggaggaagtcttcctttacgcttcgattacagattacatcatctggagggcgcgaaatgaagcagtacacaataataatcctcctgatgtcttaaaatgtattgaccttatttgtacttcttttgcagagttacatgcttctctggtgccaagcccgacgttgattttgaaagaaaactggaatccaccccctgaggattggattaaactga

SEQ ID NO: 257040 - DNA, 730 bp, Cannabis indica
caagtgctccaaattttcattgtcttccccacacaacaagcaaaattgatccaaagatgaatcatatttagcaatacgatcctttgtgtgaagtctctttcacatgcctagccacatcataaatttgtgcttcggggtaattagcctttcccacacaaatttgctccaacacaccttttcatctgatctatatagtatccaatgtccacccttaatattatattctaataccagctacaattcttgggattatcataatctcaccagttttgattcattaagtacacactacgcatctatttgacaaataaattatacttctttttagcaatcgcccacacatattttcccttggccgccatattccactcaagcaaaaaaaaaaaaaaaaaaaatccggagccaccttcttctttaggcatgcatagataattccaggccaccaacccaggagttgatgttgctgttgtgcccttttacaagaaagctctacaaagtgcttccacttcattgagtaatttctttagtaaactcataatttgagcccagtataaatggatagcaataagcactaaattaatgtgactcttcctatatatagaataggttcttagaactctaaattcggattctatttaggaatgtcagtcgggccgggcccggcccgacatcactttggcccggcccggcccggcccgactccttcttttggcgtagcgggtcaagcccg

SEQ ID NO: 257041 - DNA, 738 bp, Cannabis indica
atatttatccccaagtcttgctttgtaactttgtaaaatgagacttgagacttgcctttggcctcggggagtgacgtaatcaatattctgcacgcgcgtgggctatttattacttataatctttctacctcatttttggcaggtaacgatttaattcccatctgttcaatagaacctttcattaatgttattgttaaaggggtactcgagcatttcgatcgcctcttttttttttttctaatcatctgccaggctgtattgacctaggggtgagcaacggtcagttttttacacaaaatttgaaatttagttttcggttttcatggttataattcgaaaatcgaccgaccattatacaaatgtaaaaaaaatcaaccgcaaattttattttatttttttttaaaaaaataatttttaaattttttataattatttgaaaactaaaaaattagagtattgtatcaaatataatttaagaataaaactttcttagttaaataaataatgtaaaataatttttttaaatttgttcaaattatttgtgttactaatatggtattgagatatattaaaaaacttgtattattttatgaatgtgtatatataatatgtaaatgcatcaaactataataaaataaagcaatgaataattgacactttaaataaaaagatataagtaaaactagtttaataaaattgtatattaaatatgtacaaaataatatatattatatataa

SEQ ID NO: 257042 - DNA, 903 bp, Cannabis indica
ccatataaaatcaaatcaaggcattaaacatttaacataatatttaaattgaattaaaatatattttgacaattaaattgtcaaagagatctaacactttttttgcttttaaaaaaaatattttatatttatattttttatgtcaacaaaccacaccaaactagagtttcttttatatttaagtttttatttttcataaatgtaataaaaaataaaattgaaaaaatactattaattaattttatcaaatgcatataaatttgcagtttagacaaaaaataaaaaataaattttacataacataaacttttatatatttgtgatcataatgaactagattgtaatattattatcattataatataatcttaatagttcataatgttttaaaatctataatttatctaatattcaactaagttctttttcacatctactttctcttacagtatagctataattgtttttctcacaatacatttgtaccaaattggctcttaaagagattgagaaccttttcaaatgtgaagagtaaaattgaaaaaataatagaatttagtataaatttctaatcataattatgagggaaattattttgttattgaagccattttttttagaaagatcacttttattatagaatctcattttgttttttggttcctttccaaatatttgtgcattaaattaagagaaatgctataaaaggtattagtggtgtctagtactttcttacgtgtcaatatcattaattggtccaattaagtatgagtttcatattaatcctaatataataaattttgggaagtatcgctattcaattacatgacaacatatctactagtgcccaataacatacttttaagctaaatataacgacattaatttatcacaacttcgatc

SEQ ID NO: 257043 - DNA, 700 bp, Cannabis indica
ttttttttttgtttgtttgctaaatgtaatatattaagaattaattttgtcatatgctaactattaactaacaactttacataattcttttaagttcttttgattttcaaaaatatataaaataataataatatacataagctcattttatttggtttttttttataggttttttcatttttacacttcaaaatcattttttttttggtatttttacgaaattctatataaaaactcttattgcaactagcgcggcaaactaaatcgcaacaaaaaatcgtatagaaacccctgtaaatatgaaaaaaagttaaaaaaacagatatgggataattctttttttttcataataaactaatagtatattatttaatagttatttaagatatttcagacaatttttttttaaaaaaaaatcaaatttatggagaatcatgaaaaaaattcaaatttaagatatatatggtgcactttttatattgtagaattttccctaaatttttactgaatcactaatctcactacgtccatcgaaaataactcatggtaaatacatatatcatactataattagtatttaaaatagaacaaatatttaacacaaggcaaattatacaaatgtagcaaattttctaagaagttttggggtttaacattgaacacggccggccgtattttggggtcttgtgcaaaattttaa

SEQ ID NO: 257044 - DNA, 1723 bp, Cannabis indica
tctctggcatttatcacattttttaagataggccttggaatcttcaatcatcgtcggctagaaataaccttgccttagaattttcttagataaactctgcccgaaagcatggtttccataaaatctatcatgtacttcagacaaaagttgtgcagcttcttcttgggtaacacatccgagcaatggcatggagaatcctcgtctatacataactccctctactatgatgtaccgtgcaaccttccttctcatcttttgagcctcatttcgattatctgggagttccccaatgttgaggtaggttgctattatcgtcatccagtttggggatgtatcaatcatttcaatctctttcgtgtcagtgacgctaggttcttcgagaaactgaataggaatcagattcgctctatcacttacattactactcgcaagccgagctaatgcatcagcaatcgtgttttcttcccttggaatttgcctgagtgcatagcttttgaactgtgcgagcagatcgtgtatcttgctcagatacgctatcatcttttccacccgagcttgtattctctagatacatgattaaccaccagttgtgaatcgctgcagatctcaatatgttcggccttcatttcctgggctagtattagaccgacaataagagcttcatattcagcctcattattagattccttaaatccaaatttgactgcagcgtgcacatgttgtcccccaggtgtgacaagggtgattcttgcaccggatagttgatccgtagccgacccgtccacatgtagtttctaagtcagcttgtcttcactattacttggctgaggtatttgtactggctcagggttatattctgatatgatttcttccttgcccgtgcattctactacaaagtctgacaaggcctgacctttaatcgctgtccgggttgaaaggtaatttcatactgacccaattctaccgcccacttgagtaaccgtccagatgcgtccggtttttgtaatatttggcgtaacggttggtcagtgtatacctaaatagggtgatcctgaaagtagggccttagctttcttgttgctagaatcaggcagtaagtgagcttttgtatcaatgggtattggctttcagcctcaatgagtcttttactgatgtaatagaccgaatgttgaatgttgttttcctctctgatcaatacggcactcacatcatgctccatgacagccaggtatatcccaagttcttctctgtccagaggttttgagagtacaagaggttttgcgagttgtgtttttagctcctaaaaagctttttcacattcctccgtccactcaaattgtttatttcctcgcagaatgttgaagaatggaacacacttttctattgagtttgaaacaaacctactgagtgcagcaatttgaccagtaaaactttgaacttccttggtttttgttggcgatttcatatccaggagggcttgaatcttctctggattggcttcgattcctcgggcattgtcgataaagcctagaaacttacctgagctaactcaaaaggagtactttaagggattgagtttcatgttatacttcttgaggactttctagcattcgtacatgtcatctatgtgagcccagccttcctggatttgacgagcatgtcatccacgtacacttccatgttcagtccaatcaggtctttaaacatcttatttaccaatctt

SEQ ID NO: 257045 - DNA, 522 bp, Cannabis indica
aaagaaaaagtgatgaatctgccccagagttgcgaaaaccgacactcaataagaatgtacgtaactcctgataccaagcccagggagcttgtttaagaccgtaaattgctttcttgagtttagagacaagagtgggataatctttgtcaatgaaaccagaaggttgagacatataaacatcttcagtaaggttactttgtaggagtgccttgttgatatcaagttgtcgtatcaacaaaccattagtaacagcaagagacaacatgagttgaagagtggttggcttgataactgggctaaaggtttcagagtaatcgattccaaaacgctgatgaaagcctttggccactagtcgagcctcgtaccttttaatggtattgtcgggtttgtatttgatacgataaacccatttgcatccactacattttgggagggatgataaggtactagtacccatgtaccattacgaatgagagttgccttttctgtgttcatggcatcatgccattgaggatccttgag

SEQ ID NO: 257046 - DNA, 736 bp, Cannabis indica
tttttccttcttttttttttttttttcagtgcacaaattctattgatttttcctttatgtttattttgtaagaatccaaattccacaactgtatttatggagtccatcagaaatttgcttcaattgttgtcatcatgtcaaccaactatgtccaggccgtactaaaatatatgtaacaaggcaaaatcaaattttagaattaattttctttttgaaacaaagattgcaattttcattaaagcaaatcagctaataaaatagctttcaaatcagaagggacataccccttactggaaatacgatcaggacatgaaccagaagaacgagctaaccaattagccgcttagttcccagatcgtttaacaaactgaactgaaatatgaaaattagaaaaggaccgtataagattaatacaatccgaaataataagaccaagaggagaaagaatgtgactcttgctattgatagcattaaccaacacaagacaatccgactccaaaatcaccgttgcaggacaaaagtcctcaacagtcctgccttctccccaacaggatttaacccaactcaaagcctccttcatggacaacacctcagcaacaacagggtcaatttcacctcagagtttgacagcagcagcagcagcaacccagcatgatctctggcaatccatcccaacccatgactcctttctccagaaaaaagagcagcattacaattaaccttcaactctcccaaa

SEQ ID NO: 257047 - DNA, 830 bp, Cannabis indica
ttccattcctattcctattctcattcccattcctattcctatattttcattcctcccaaccaaacgcctccttaaatactgggtctgcgtgtgtatcccctccaacaatgccacacgcaagtgttacaacctctagtgcattgtgttaatatattatacaaattatatataaataataaacattttatcagctcaattattattatctcaagtgttcctaatttttttttttgagctcaccaacaacacttacaagataatgttacttacaaagtttttgttaaagcttccacccgctctctatctattttactcaagttcttagctttcaaagagttcactctagcacaaacactattagcaatacaattaaaagtggcgttaacaatagaaagtttttgctctcaaagcaccttgtttctagcatgccaagtgaaataaattgttgctgtaatgacactcaaaagaatctttcttttgcctctagaaacttttgccatctgaatctactttaggacatcatggagttctttttttcgactagtaataccaatccaatgccacacttgatgaatcaacaaactgatgtaaatacaattagaaaaaaaggtgagaatgactctccactccacttccacacaacaaacacaaggaaaagttgcatgattaaatcgactaagtctgtccaaggtagacaaacggtttttcaaggctagccaacttatgaacctgtgtttaggagtgcaaaatctatcccaaatgtcatcataacgccatctaccaacactttcatgaggtatcttggcctacatattagctatggaaaactg

SEQ ID NO: 257048 - DNA, 1049 bp, Cannabis indica
actgggatgagacaggggagaagaaatacctaggtccagaatcagtatagcggaccagtgaggcaattgagaagattaaagctagaatgcttgcctctcagagtagtcaaaagagttatgcagatccaaaatgcagaaatgttgagttttaaataggggatcacgtgttcttacgagtgtctccaatgaaggggatcaagcatttcgagaaaaaaaggcaagttatgccctagatttacaggttcttttgagattctcgagaaggttggacaagtggcatatcggttagctttgcctccagctctttcaacagttcataacgtatttcatgtctctgtgttgagaaaatacgtttcagaccctgctcatgtacttagctatgaatatcttgagctgcaacaaaacatttcatatgaagaacagccagttcagatccatgacaaaaaggataaagtcttccggaataagaccatagctttggtcaaagtactctggagaaatagctaggtggaagaagccacctcggagttagaatcagacatgagagcccaatatccagagttattcaggttagatttcgaggacaaaatccttttaaggggggatagttgtaacgaacgcttagctttaatttagaaattagcagataattagggtttaattatgaaatttgattattaatattgaattattaatttatgatgaattatttgaattcggaatgcatttttatgtcatatatagaaatttcataattttgcatattcagtgcccgacaacattagaatgcggtgtttggctattagaatcacatcttagtattttagtatagcggggcagtctagttagacattgggaatttcagaaatagttgagaattttgaagttaccaaaatacccctaagtgaccttttatggtatttagtttggaatgggcaaaatggttattttgtctcattagtttttgtcctttagtggactataaaacagttaacattctgattgttagattgatattaacttaagttaattaatcaaaacctttcttt

SEQ ID NO: 257049 - DNA, 1660 bp, Cannabis indica
gttcaaaatagtcagttttaagataagttctgtaacatactggataaaaataaataaaataactcaaactaattataattaaaatagaactggttctataacagagttataatgaatcatgttaacgcagattttcgttaaccaaatttgagtctcacaatattgattttgcacagaaaaaataaaagctacagaaaaataatatatgaacacagggttttttacgtggttttgcagttaaaattctacatagtccacgagtcaatcttattcagaaatttgagtatttttcagggcctctttcatatgagattttttttcgtcccccttcttcatcttgtctgccaccatttataattacatagtgggcagtaatttataaaagtttacaataatcgttacagcaattattccctcaaatcatgggattggattacaaaccacactaagtaaatgaggtttttattagaatccacacagttgtaagtatcccgcttttatcgggccaagatgaatgcgtaattaaagatatacgataagcgttatcccatagggatgcctcgctgggaatggagccaagttaacttgatggcgagtagttgcttgtcatttgacttcccgagattaatattgttttaactctgataactatcttttttggtgtcgagatgatcttcctcgcatgcatgccatcttctaacgagataaacacctcgttgtctgttatcttgactcgccaaactgtctacacttagtttatatatcgtgtaatatacgctaagtgtttttatcgttattgattctctttcatgcagcgaggttgaagcctcattatgcacacttgtacgcacatggtttctcgttgatacataagtagcaattcgtaagtttttgtcttgcagaaggttattcagccaaccgagttataaacattctctgtaaattatgtttctaacgagttattccatgttaagtgttgtttgcgtgtttgagttcttcattctttccaactcgacacgtgtcttcctctgacgttctcaccgaattttgggtataacaattgccccttaaaaagttcttttaataaaaagagatttttaataattacaaagggtattttcgtcatgttcctcttttttgaaaagatgcatatcttttgattttggcagttgtgcggtttcgaggtacatcagaattaaatgactatcttttccacgtcaactttgaatcatgtctgtaggatcaaatctttctctgatctaacgaagccactatcatgggtataaaataagaaaaaaggaaccacctttgcatcattttctctattttagaaagtctgagaaaaccttaaaatcctcgtcaaggatcaccattaattttatccaaggatttgcatgccatctttttccttgaccttcttcctgtgagtttcttctgacttcatcctctcaaagtgatcgttgcttcattcgaagatttgtagacggtataaccaggcattgccccaagacttaacttcaaacagtaagttgctttcttttttctcatgttttttacatagtgtggatgtgttacttagtttgcttgtatcgttgtcatctgatctggttttggaagtttttagggtttaaactgtttctaggttcataatagggttcag

SEQ ID NO: 257050 - DNA, 859 bp, Cannabis indica
tcggaaggatgagatagtgtgttctcgaaagtcccttttagtttccctttctactccttcacataaataagaaaattccagttgttagatcataacagaatatcgtattaggattaatgggaaaactttttatgacaagtattatgcaattaattcacagattaattgcccacagtcagtatacataatgttgaccaaatcaacttaaatctgatcctcctagtcagcagatcgtcttctttatgggttagactacatgagatagcctaagggtattatttactgtaaaactcccctatagagggaaatgaaaaatctaatgtaattctaaaactgctataaatacctcacaaatcttacggattaggagttgaactctcttgcaaactttgctcaggaaaacttgggaacatatattctctgtattcttgaaggctttttcaaactaagcacttactaaataatactagttcgtagactaaggctagtcaagcccccaaccacgttaaaaattgtttctcttttgattatttattcttcaattcttattatttatattctgtttcagaaaatctcggtaaacactcataaatttcttattttactatgattaaaataaatattattttttttaaatctaatatatttctctctttaatattatataagaacaatattttatttaactaataaatatagtttcatcaaataataaaaatagatcaataccactataattatacaatttataattgatataattgttcaaaataataatttggtgctaattagtaatttttttccctgaactttgacataaactaaatcgtaccccttgaactttttggccgttaaaaat

SEQ ID NO: 257051 - DNA, 535 bp, Cannabis indica
cagagctttggtggttttgtaggaaggagaagaagatctcaaagattcaacatctaaggaacaccaagaattcaagaactcaaagaagctggctgcaatggcttcatcatcaacaagatttgacctggagagattcgatgggactggagatttcagtttgtggaaagagaagatgatggctatattaatctaccagaagttagattcagccattgaagatcgaactgaaaaggatgaaaaaccagagaaaggatcagatggagtcaagaaagaagactctgaaattgtgatgaaacaagctagatcagcacttattatgaacctagttgataatgtactaagacaagttattggaaagaagactggacttggaatctggacaaagctaaatcatctctacatggccaagtcgactgcaacaaaaatcttcttgaaagggaagttctatggtctttaaaatgaaccctgttaactctttagaacaaaatcttgatgagttaaataaaattgtattgtcccttactaatatgggtga

SEQ ID NO: 257052 - DNA, 720 bp, Cannabis indica
gcttaaagaccttggcacccttcgtttcttccttagccttgaaattgcccaatgttcaaaaggaatttatgtttctcaaaggccatttaccttacaacttctcaaagaagctgactgccttggttccaaacatgtctcaactcccatggaacctaatattaaactaagaaacaactcaggggttctccttccaaacccaacttaatacatgagtcttattggcaaactattatatctcactataacacgacctgatataagctttgccgtaaataaaataagccaatacctccaaaatcctagacaacctcacatgattgctgcaacaagagtacttcaatacttaaacaattcacctggctaaggcctctatttttatgcttcccccccatccaaacttcagctccaagcttttgttgatgtagattgggagcctgtgttgacactagaatattgatctttggatattgtgtttttctaagcaaaacactcatttcatggaaataaaaaaagcagccaaccgtttctcgatcatgagccgaagtagagtatcgcgccattactaaggctacatgtgaactcacatggctcacctccattctacaagaactcaacatcaacatcagtcgtccttcaattcttttctacaacaacaatactgcaattcacatatcagagaaccccgtcttccacaaacgcacaaaacatgttgagatcgat

SEQ ID NO: 257053 - DNA, 1088 bp, Cannabis indica
agcgtggtgaatgatggaacaattcttgttactgaaactgtgtctggtgtgcaagagaacagaaacaacggttccgcacacagccaagacattcataacatgactgttccaccaggcatcaatgcctagacgaccatgggagatgcaactgaattgcaaaaccttcgtgttgcgcttggactcatgcagggtcaccacaataccctgcatcacgatcaggaggaattatgtgccgcagtaaaccttgcatttgacgaacagaggtgtatgttcgccgagtggagggaaaaagagatggaggcattaagggctcaccatgcagagatcgaagatcgtagtcggtaagcaactgtgctgatacgaagagcctgtcaaactgtaggacagcaggcgccgaacgtcattccccttggagaaaccgaggatgacccaacagtgaatgcttcccagacagctaacggttagccgtccaatccccagtcacgacttccactcgtgggccaagaggtaggcggacagaccttgtccgtgaattcatcaggaggagccatgctcgatggatccacgcaaaataatggagccattccacttgccaaccaagcggacgaatcgctaaggcagccaggttcttctgtgttcgaaaggttgggaacaccccgtgacctaaagggcgacctaaacagaagaaggggaacatgcgagcagaatactacaacgaatgtgaagtccatagctcatactcaaatccccgctcagaaagatgctgacgtagcccaactcgaccagaatgccaatcaagtcagcctagtcgtacaggctcagcttgacgaactaaagaatatgtttgatggcatggccgggcagcgtaataatgatcttgagttagatcgtgcacgtggaactcccttttcaccagaaatcaacctgctgccactacctcacaagttcaagatgccaacgtggaagatgtacactgggagagaagatactctctctcatctcaagtatttcgagatgcagatggatttacaaggagtgcgaggagacgtatgttccagaatcttcctcgcaactctgtcagaggccgc

SEQ ID NO: 257054 - DNA, 799 bp, Cannabis indica
atggattaagaaaatagaactttggtaattgggagattggcactgtctcgaaaagtacatttcggagatttgtcctgtttcgaagaggacccgttacctatcattggtgcttttgatagataatagtcctcctcaagatgggacaaatttccaaaatgcactttttgagacagtgtcgatctcctaattgaactaaagttctattttctcaatccatccccaatagtagctacaattacatatttataagctttcacgctatttttaaattactaataagcccttataatattttcatattctaacctgtgttaggtttaccctgtaataggaaatgaatgcataattgtaatgtgatacgtagtctgttgtgtgaagtttgaaattgaaactttagtacaactattgattatataatcttgttataatatataatgattggtaaagctagtttctttatttatgttgggaatgttaagatacttggatggctttatgattgaattccaactaatcccatgttaggaaatctgttaattgatttgggttttatgaaattacattgaagttttgtgctttcttctcaataatgtagaattatttatggtaatattggttgtagatcaaattgtttctcattgtttacacttgtatactttacatatccttgttttacatgtcatatcttgaatctgagcttcaactagtaaagctttaattttcttagtttgaaggttgttgatttctcgttattttttagttttcttgttttttattgagaaaaatgtatttttgtata

SEQ ID NO: 257055 - DNA, 744 bp, Cannabis indica
gaaccacgacagaccaacccacacaacagagaaacaaccctaaacaaaaatcccaacactggtggacgccatacccatgctaggaaatgtcatgtgcaaatcaaagcagccagatctagagccaaaactcttcccacgaagccaccgagatcaaggctccaacgctgatgagaacagagagagatgccattgatgttgaagacaaagtgcagaaactcctaaaccaccatatataacgagacaaccacaaaagaaacgccttccttcctctttctttttttttcttggaaactctttctcctgcttgcgcatgaaccatctctgccaagctttttttttttttagatctgccccatgatttcaagacagaattttttttctttgatttggagagagaggttggattgggttggggcgtagagtgggtgtttgtggagaaggcttttgttgggattaagggcatgttcggtgaagtttgtcattgttgttgttgttgtttgttgcagagagcaacaatggaggttggagactggagtttctaaaagaaagaaaacaagaacgaagaaggaaggaagaaaaagaaaaaaaaaatatttttttagtaaattaatttatttattaggagattaggattttttttttaatttttagagaaaaatagttttttttttatttttttttaataattaattttttatttttttaaatatttatttacgtggaccaataaaattgtgccacgtg

SEQ ID NO: 257056 - DNA, 1135 bp, Cannabis indica
aaaagacaagactaatgaaaaaattaattaaattcaacacataaaactaataattttaacccccaaaaatactaatatgaataaaactaacaacagtaaattaaaaaaaaaaactaaaaccaaaaactaataaccagtttcttaaaccttcttcatcaactgtccattccttaatcaaatcaaaaactgtctttgctcccctatatttaattaagttacaaaaccttcttattggatcccttaaatattcagtacatatataaagaacaaacaaatcttattgaattagttgcttatcttgatacatataagataacaccacttagcaaacatcaatatgtattcgactaaaggctgttatattcgactcaacacagctgactcaattatcgcagaaacgggccgactagaaaccaactcgactcgccggcgacgcacctggactcgacttgtcggcgacacttctggactcgacccaccggtgccgcttctggtcgtgagtcggttgtatgggtacgcagaaggttctcgacttcttgcgacttctcctggagattatgtgatgacatggcaagaaaatatcttgaatgaatcgcttcttaatttaaagagtgatgaattaatgtgtgttatctaagtctaaataaacataaatattaagttattatttcactaaaaataagatttgtagattttgtgcttaatctatctagtattattgatgaatgtgtatattatgcattcatttaccttttattttattttatttgttttctttgagtttttatttggattctatatgttttctcgaaatgtatagatattaaaagtcaaaagatgattttgtgattaattgagattttttagccaatttttgatcatgttcccataattttttttttgaagagattacaaaattaataataatagtgccccttctttaacttttcaaaatatattaaattatttcatttagaggctggaagcgaaatatatgcatgatttactgagtaagattaaaatcaaaattagtaaagtgacaaaccaccacctctaatatgacaacacaccaccacttaccgtacaaatatcaagacgtgtttttgaatctaattcaactatgagtcatttttgg

SEQ ID NO: 257057 - DNA, 621 bp, Cannabis indica
aaaatattttagtaaacaacattatgtaaaaaaaaatcatgtcattatatctaatatataaattttaaactaagagttgcacatgcaataaataaaatattttatgtttttgtatccactaatatctatatatttatataaaaaaaatcacaaaagaattaatatgaggtggcattctaaaatattttatatctattttatttaaatttcagtgaatttagttcatttgactcatagtaattttttttttcctttgtgaaaatttcacattatgagtaattgttaacttaatcttgcctaattagttataattttttaattatttattttgagttataaaatcaaaatttataatttaaaagtcgactaatgttaatttttaatagcacatctataaatttattatttatttattagcaatatttattaatttttaatattttttttgttagcatttttaatatttgtcccaaaatcataacctttctaatatattttaaaaataacaaatcatgttttcaattagaatactattactttgtttataatacacacgtcgaaattaatgttatactttaaattatattacacaatgcgtaaaaatatatatatattcatata

SEQ ID NO: 257058 - DNA, 562 bp, Cannabis indica
gaaattgaatttatttaaattatatatttattaatttaatataagtattatttaatttaaattaaatattagtattcttaaaagataaattaaatattatttaaattaatttcatgattagccaatatacttaaattaatttcatgggagcaattaaaaaaataacaattatattacataaatattttaaacttagtccaagtgttaacaggttaataaatgtaattacaagttacctaaaaaataagccagggaggaaaaattcttatacatttcagcatcaatcgtccaagccttcgtgaactaccgccaacaatcgttctatccagtgtcgcttaatggtaacaatttaatttttagatcgtatatcttcttttccgcaaactgtaagaagaactaaatatttatattagtatatatatgtatattattatttgttagtatgataaatatgataattaataatcaaaacttacaactttttggttgtttatataacggttagggtttgcacgtgcgatgatgtcaatcatgtatttcaaaacataaaaatcacattctt

SEQ ID NO: 257059 - DNA, 931 bp, Cannabis indica
ggccccctttggagctaaagtagttctgtccctgactgtcggattggttgcatgtggacacatagcaagtggagaaaggtggtgttggctgaatttgttgtgtcattagacacgtgtctcgctgatattggctgaaagtagagcaagtttgacaaaagggcgccacttggcgcatgaagaagagagaagacaaatacgtatttgactttttgaccatccttggcccctacgtgaaagataagcctacttgtgcgggtagtgtgtgataaacacacttggaccagctgtagaggtgttttacacatgcgcgtagggaagtgaaagcgggacaagggctgatggcagctgacggaggggctgattcgcgaatggagaggcgccacgtgtatgggctgtcttttggaggagtaaaatgggccggctgggcttggtctttggacctttattttgctcttcaaaaataccaactttcaagtacttgagcctcatttttatcatctttttttatttctttctttctttttataaatgctattttcttaaataaacacaaacacaattaaatccaaataaaatattttcaacacaaaatatatcacaataatttaaatgaaaatatttattagatctaattaatttgtatttctttaaatgaaaacaatgcattttcttactttctttttatttatttctttctcttatttgtgtcataaaatattattttcatacaaaattaactcaaaactataatatttttaaataaaaatatattacattaatttcatgaaaatattatatagaattaattttattttgtatttttacactaataaatatgaatttttgactacttaactccaagctcgaaggaaatcatcatttcacttatatgtactagatagaagcttgagattccatatctatgtttagc

SEQ ID NO: 257060 - DNA, 719 bp, Cannabis indica
gtaaggtttactaaactttatatatgtttatttcatcgttttagaaagttcatatttaaggtgttaatcaacatacttgtgagtagatctaagatcctggtaaaataatttccaacacatatctgatcaaatgccatggttagcacgaggagaactctggccgcaccattttcatcatcaagtcttttttgagatcctctaactacagatcttcatgtccatgttctagccaggactggaactcccatgaacactgcaggtgtggtcaatcctgccatctcggtaggcaccacgaatctggccactacaactagcctggatggcacaaacatcttggtagatctggacaatcggcccctgcctccaagggaagaccctccacatgcgcctcccactgaaggaaagacccttggggaatagcccccatgaacgacaactggaccttgtccctgttactatgcaggagagatgagaccaggaattggagagccccatgcgaacttaggagaagatcttgagttagacaaacttagagaggctgcctgccaagccagcctaactgaagaaccacactctactgattgcgatctattcactctgtagagacgtaaatttttgaaatggatggacggccaaagcatccgtcgatctcaccaagcagagctgaattgccgcaatagagaagccagtgaccttataaggcggttcaatcagagaac

SEQ ID NO: 257061 - DNA, 628 bp, Cannabis indica
aagttatataatataaaggcacgatatggatggagagatattggattttctgaattgattgtcttttttaaaaaggtgatgcctgaagaaaatgaaattccaatatctttgtatgaagcaaagaagacgttatcattattgggaatggagtacgaaaaaatacatgcttgcccaaatgactgtattttatatcgtaaagaatttgctgatgcaaataagtgtccggtgtgtacacgttcaagatggaaactgaaaaagaattcagaagaggagcgaaaaggtattccggcaaaagtgttatggtatattccacctatcccacggtttaaacgtttgttccgaaattataatcatgcaaaaaatttgatttggcatgaggaggaaaggataaaagatggtaaactacgacatgtggctgattcacctgcatggagaaatgtagatgataaatgggagaaaatcaaaagtgatcctagaaaccttcgtctaggtctttctgctgatggtatcaatccacatagttctcttagtagtacgtatagttgctggccagttgttcttgttatttataatcttcctccattattggtcatgaaaagaagatttacaatgctcactctattaacat

SEQ ID NO: 257062 - DNA, 509 bp, Cannabis indica
aaaaataatgagttgtcaatatccttgatagttagatcaattgtttcagcggctcagcacttattatatccttttgaattttaggtgatgttaatttcaaattctcaggagcatttttcaaggtaacaactttgacaatatcattatgctcagagagaaattgtaaaaggtcaagaaagttaccttggttgcttgaattctcagattcatcatcaccacgaaaagcaagcccttgtcttaaaagaaaacgagaaacatcaatggatgcacctaggcgagttcgataatcacaccgttcttgctccgattgctttaagaaaaatttctaaatatgttatttttccttcaacaagacattacacttcattatagcttcattgtgatcactagcaaacccctaacatgggtctgtagtctttcttgctttttaaaatttttgaatcccttaacaacaaaagagtctctcccaactttttgagatggttcgaaaagataacaatacaagcaaa

SEQ ID NO: 257063 - DNA, 745 bp, Cannabis indica
ggacatacatttttatctggttatatccagagtctgcatccaaaaatgacatagcccgtccccagcagttgcatccaccaactggtcgatcatgggtagtgggaaacagtcttttgggcacgccttattcagatcagaaaaatcaatacaagttctccaagttctgttaggttacgggacgagaacaagattggctatccacaaaggatgaaacacctcgcgtataaagtcattgaccaataacttgtccacttcctgttttagtgcccattgcctctcggaatccaagggtctccttttttgcctttttgctgggtagtttggatcgacatttaaattatgacagataatactagggtcaatccctaccatatctccatggcttcaggcgaactgatcctgattcacccttaagaaacttattagctactatttaagctgctcgtccaggttcttcccaatgtaaacacactttgtgggatttcctgggtcgagaataactcttccaattctttaattggctttaataagttctttcatcttgaacccgggggtcaagatcctcgtcctcttttcgctttcttctgtcaaaaccccaattagctgatgaccgacttttctatgttatagctctatgcgatagcagtcccgagctagcaccactcccacaccctctggtgtttgaaatatcaaggataaatgcttcatcgaactgaccccgtagtccgatcaatgctagacgacc

SEQ ID NO: 257064 - DNA, 697 bp, Cannabis indica
actattttccttacatcataagatgatagtcatatttttttacaatggccacaataataaacaccatctttgtaatcaacctttctcaaacatgtcttgcaagacacataatactatttaaatgtagtatctatttcaataatctttgcctttattaatttacataatacaacaatagttaagagaagagaaaatgaatagaaattaaaattccgttcaatttatcatcccattcagtctctagcagttctttaatgctcattcaattgatgaatatctcttcctcaagtgatacctcattcacattagagcttccaatatcttgcaccccattaacgatagttgaaaaccgttcaattaaagatgctacataatctatttatagatttatgtataattgggtagcacttgttgaagaaaaacttttttcacctatttatagtaattgtgaaatcatgtaaattataattgaaagacatagtaaaattttttttgatgtaatattgagacgaacatatagtaatgaccttgaaattgtttaattgtcgtagaagttactatcacaataaaagggccctcatcttttttctacacattcatatcaaacatctccgccaacttaccgcataaagtaatttttgaagtgattgagctgtaaaaacaggtaaaaatataaaaatatattaatactaaaaca

SEQ ID NO: 257065 - DNA, 808 bp, Cannabis indica
ggtgatgaggacaactatcacacatcctcttaaaccattcccaatattgataaagtgactctccagtaacttgccaaattccataaatttcttttctgatgcttccaactttagaggctaggaagtattgctccaagaaaacagtcttcatgtcattccatgtctcaatagtaccaggtggtagatagtacaacgactccttagcagcatttccaaggagaaagggaaagcccacaacttgatttgttctttagttattgatgtacgtttcatactagagcagacaatataaaactccttcagatgcttgttggggtcttcactagtcaatccatgaaaagttggtagcaagtggatgaggttgaattttagttcaaagttgacatccaaaggtggataatggatgcacagtggttgttggtccagatttggcgcgtccaactccttccacgtcttattttgagccatggtcttgtgagaagtaaccgagttgtcaaaatctgactcgggatcagttgatagtggtgtttgacagaaccaagaggttgaaagagtgggttgtcgatcatcgtctttgacgattgagaagcagacgatgactaaagatattgttaacccttaaaagtctctcttgagtatttcttgtactaaacacgtacacctgagattatgaaagtaaaaaaaaaactggttaataaagcaaaaattaatatgaacattaaataaaaaaaatgtccccaacaacggtgctaaaaattaatgcgtgtgtaagtcacataaattactaatattcatttccaatacctcc

SEQ ID NO: 257066 - DNA, 877 bp, Cannabis indica
ttcagcttgtcctcgcgattaaggcaacagtcatcgcccctccgccatgaactatagttttcacaaccagtaagaatcttgggaaccagactggctccgggatgatcactgttggatagaaaataaggatttctagcatcattggaaaaagatcggccaccaggatccaatgcagagaatcgattcgaatcttcagtcgagcttcgagtttgagctcctccacctcaagccatgaagaagaagaagaacagaaggaaacgagaatggattttacacagagtttggctccgataccattttaccaaacaagcaagaaaagagagaaaaagaattttgtgtattattgattcattgaaaaatgaacagagtacaatgaattggtttatatacagtgatgaaatgagagaagctaactaactgctaaccaactgaaaaataacagattctaactaacactaatagctgtcataacaaccttcctaaccaactaaagccacttaactaactctatcttgatagtctcattcaagataaaatatttattgttttggggacaaatttttttgtcttgtttgtttggatttgccacgagtatgctgatttgatgatctgactagttaatgcattgaagtttatttcttattagataattgctaaagtaagttatgagtaattgaaatggtaatatagtagtagtagttccttctaggctcatttgtcacgatgattgggcaccatcagcataattttttattaagttttctctttcttttttgtaacttttccaacattgtcacatgttgcttaaacacattgatataacacagagaactcttcagcaaaagtgttggggaagttgcatgggtgttgagcacca

SEQ ID NO: 257067 - DNA, 1655 bp, Cannabis indica
gtcaaatattgatgttcacatcagtgggatcagtttttgggttaacatttgcctccccccccccaagtcaacttcatacctgagtgaggttgacttgatgacatgaactaagctcgtttcatatgaaactactaggtgggcatcaattttaacaatcttaggtgattatgttctgttcttcaagtataggactaggatttcgaattccattccctattgaataggaaattcaaaatttctgagtgattctctttaatttgagatactgtgaaatcatgtccacgccagctttgatccttagctattttcttaattagcattggttctctcattacactggttgtttaagtaatatatatgtagtctttgttccctcttacgttgcatccttagagatatttagcattctttaggttgtgcttacagcgaaggtagtctggatcatctcctcagcttcacaacggatgaggccctcgtcaactccttagctttacagtgtaggaggtcttgatcatctcctcaactttacaacaaagaagatctttatcaactcatcgactttacaatagaggaggccctcttcatctcctcagctttacagtggaagaggtctacttggtgattgttaacaaagtgttgtagcagtcgcgggtccttcttctgtcgattgaagatgcgaccaactcttaaattaatatatccaagatgggatatgtcttccccgtcttaggctaaacttggagtgactgtagctgcgatcactgttatttccttggtcttaaccatagaggtcttcgtcatcccttcggttgtattcacaatagaagaggccttctttgtcaacttagctggcttggctgcggaggaggtctttgtcgaaaattgcattataattaagattatgtgtgttgagttaaactatcaaatcgatccaatcggtttatagatcgttgtcgatcaaactcatatatagtagctctcggtaatgttagttggtaaaagactctaattagtgtgtggtacaactatttttccttttctatttatacttaatgactaattttcccggagactatttataatttttaattaattaatttttaatttcgaatttatatattaatttatttttttctcatcaataattgtaactagaaaagtacaaaatatttaagttgtttaatcctacaataatcaatacaactaaaaatataatcatggtgtaagtcgtaaagttatcttacatcaagtataatggcatgagttcaatcatttatcaatatatgatttttttttattatttatttttaatttaagcttctaaattaattgaataatttgaattttttttctaaacaataatttagaaatgtaacatttattaatatggaataattcttgtattataaattttttaaagtttgtaattattgtggtggaaagtcttatatttttatttgttaatatatattgatagttgtactacataaagtattaattgattggatgactgaaattaaatagatcagatcgaatagtgaaatctaacatccaatgtatgattggatcggatttggataggccaaaaaatatttgatgtggtacatgataggatttatgccctaaaaaacctgtaaagacattatgatttataa

SEQ ID NO: 257068 - DNA, 1281 bp, Cannabis indica
gatgtaaactttaaatctcaatccagatatttaccattgaagtatcgcagggttaacctatttcctcaacaaataacttagcacatgaatccattttaatcatatcccgctcaaacaaagaaaactgtactgactttgtacatttgttccacgtacccagatagaatcatagaaacttactgttccttgacttgctaacaaattggtcatctaattcatacttcataatatcatctttcatacttagcaaaagggttttaacatcgtaatatatatcttagttacttccatatgtaaaaagtattacatgatataaggctcattcaaaaccttctattcaatgtccttatctcactggtacacaaactctatctttaaatcataaaattccttcagacaaaattaaaaagtcctctgccgaaccagttcccaaatctttctttatacccacggtaattcaaagtcaccctgctaggcttttattaattcttcctaataaatcaaaccacaatgtgatattaacaagttctcctgtcacgaactcaatctgtgctctgtttatacttccaccaaactttggtgaaatccctttctagttatatataaacctcttcgacctaaagcatccactactaattacttttcaagggtgctagaaaatcttacagttatcatcttcaactaaccctaaccattattgcggcttcatgcttaaatccttccaagtgaagatatgtttgaggcccttgtgattcgagtaaacttcacatttttcaccagatagataatgacgccaaactttcagtgcatgaataatcgctaacaatttaatacgatgattagaccaccactattcacactccttcaattgtccgggtgcgcaagcaacaacccttttgaaccgtatcaaaacataatctaatccttgtttaaaggtatcgcaataattcataatcttctcctcacggactggcaacgttagcactagtgcaataggtaacttttatttcaattctttttacttaattccattaaggacatagacatccctaattcaagaaaacctttaacttcactgtaaatttgagattaggaaaactcatgcttctgatatttagcgtaaagcttatgcttccaagaacgttgcaacaccatcaagagaggcacctcatatacctcctttaagtcgaaagaaatcacaatatcattaataaagacagctacagagccattgaatataaaaaaaactaatttaggagtatccttcctccgaaccttcaa

SEQ ID NO: 257069 - DNA, 1510 bp, Cannabis indica
attatattcttggaggaagatacaaagcacgtgaggtattcgcatgtcgatcctcacatcattacagctcaagtcgccaataagagaataaaaagagtgttggtggataatgggagctcagtaaatatcctttacagggatacgttgaagaaaatagggctacaagatgcaaaattaaaaccttgcttggtgagcttatgcgaatttactggtgatagtgttgccagccaaggcatcattggactcccattaactgtaggagagccaccattatctacaacactaatgcaggagttcttagttgttgatctaccatcagtttataacatattgatgggttgccctgcattgattggactaggggcagtcagttcaatcaaacacctatcattaaaattccaaacacaagcaggagtaggtgtggtgtgaggtgaccaattattggatcgtgaatgttatcgcatagagcttcaaaatagaagagccaaccatcaattaatggtggtcatatcaaaagaaggcgagaagaaagaagaggatctagaccctagaatccaagacgagaataaccagttaaaaccaattgaagaactggaagagtttgttttagatccagacaatcccactaaatgtgtgtttattggaaaaactaaaatagcagttaattaactttctgaaggcaaaccaggatcaattcgcctagagccattcagacatgatagggattgaccctaaggtgatctgccatcatttaaatatcgaccccaattacctgacaaaaagacaaaagaggcgacccttagattctgagagataaagggcacttaaagaagaggtggagaaattattgacaaatgactttatacacgaggctttttatccctcacggattttaaatcctgttcttgtcccgaaaccaaacagcacatggagaacttgcattgatttttcagacttgatagagcatgtccaagagattatttcccactaccaagaattgaccagttagtggatgcaactgtaagacacaagctaatgacatttatggacgcatattctggatataaccagatcaaaatgcatgtccctaatcaagaacacacaagttttgtaaccaatatgggactttattattataaagtcatgccttttggtttaaaaaatgttgggacaacatatcaatgactagtgaatgggatgtttgaaaaataggttgggcgaaatatgaatgtctatgtcgatgatatgctggtaaagtcgataaaaagtgaagatcacacgagggacctcgaagagtgctttgggatacttaaaaaatataatatgaagcttaacccaaagaaatgttcctttggggtctcctcagaaaaatttcttggtttcatagtaaatgcgagaggaattgaagccagcccaagaaaatcaaggccctaatcgagatgccttcaccaatgaagccgaaagaggtccaggccttaacaagaaggatggcagcattaaacagattcat

SEQ ID NO: 257070 - DNA, 722 bp, Cannabis indica
tttatcacaaagttagtattatttatttatttttatatgggtaattaaaaaacttaattatgcccaattagttgtatttttgttttaaagaaatgaatgcaaaacacaattttgcattttttatagggcacttatataaaacctcacttgaattttattgatttgttttgagtaaattagtacaataataaggttaaatgtgtaatttacctttattgggtagatgtatttatcttttaacagtgagtattttctatgaaggagtttgtattccttcgactatatgttagacaacccagcaaaaaagactatagagatacagtagatctttttttatttaattatcaagaaattttatttatcctaaagaaagataaaagtttcaaaacattacaatattagtaaagaaaactaacaacaatgggaaaccagcatgtgagctgcaattacattcaaattattatgagcagagaataaatgatctattgtaacattaattacaacaaatcttgtaaaaaagaaatatttttttacaatgtccaaacacaaaataattaaaagtccttactggccttgttaatgttcctcgaattgcttttgagaaaaatatgtacatgatatattagaagagagcataaatttaaagaaaaggtgaactccttacctttggttttgaaaaattgaataactaaaagcacgagaattcatttagtttggaagtt

SEQ ID NO: 257071 - DNA, 2212 bp, Cannabis indica
tttcctttttgctttgcctttgaatcagtagccttttattcttataagttatgttaacagctttaagaggctccttactattcttccacttcttcttctgcctgggtcgtaccattagtagtgccctaactaggagctttgtttcctcctttttgtggacctccaatcaaattctcaaatgtctgagggttgttgattaactcgtggaagtcaaaagtcaacttgttcatgacataatttgatgtaaagcgctgaaaagctggagtcaaactatttaagatcaaactcacttgagtttcttgatctatattagctccatgattctcaacttcctggaagtaacttgccatttggagtaggtgatcactcacgttatgatgaggttttgattcgtgcattgataaaattcttggtcgcctcaaactgagcttgatctgacgccatcccgaacagttcagttaactggttcatgatatctccagccatgagagtattagcaaacctagttctcaaggtgtcgaccatgctggatagcataaagtatcaagctttgttgttagcatcctgccaacgctcaaacttttccttaactaccttggtcgcattctcacctagctgctcaggagcttcttcagttaacacaaacagggcattttcacctatgagagcaatattaatgttctctttctatttgacaaagttagctccaaagagcttgttgtcagtcaacagtgacaccatgggattgttcatagtcatattgggtactacaaatatcaaaaaatagaattcaactaaggttcattacaaaatcatacacattcagaaattattaagcacttaggaagtaggaatgacaagtgaaaatacaaaaacaaacaatactaaataatttccaaggtttctaacaaactgatacagtgtcccctataggcgagagttgaaggtatcattcattgaatagagcaatcaactcaactaaaatggacaccattctagtaaccttttaattgatcaagatgagaatctggcattgtccagtttaggcgagagtcaaggtcattctatcttgtgagcttccaccattatttcatactttgtaagtcctactcttagcagccactattggggtggctgttactaaaaataaaacacttacaataatacttatctttcgagattctacagtgttaaattgctaatgagcgctcatccattagggatgaatctcactaaaataagaactatgtagaaccaacaatagagatcgaatatccttataataaagctcaatatttaaaatctattatcatctaattattttaatctatttatttattcaattaaaattattacataactttaaatataaatataaattttaattgaatatttataaaattatacttagatagatctgaaaataaataaaattattttccatcctagtaataattctcaaaaaatattacagaaattacttgatttaagttggtccaaaattaattaaaattaattctactgacctcggttttagccaacgacaatggatcttatttagtaagcgacaagtagtttataacgattgatatatagtaaagcaatataaagacacaggaattttatagaggttcatccctgagcagttcgacaatagcctaatcctcgttatatgtattaactcaagaacaaggagaaagattccttttcttatagctcttacaacattatctctgaatatgaattcttagataatatctcttaagtaaaatctctcaaccttttacccagtgagcatgcaccaatatttattaggctatgaacttggagaggaagtatttcccttctcgttacaatggatataaacagaaagattgcatgataaatacagaatacactgatcgtgggatttgggatttctttgataactcacgatgtgaaagctgcattcgctaagtgttggttgccatatatctgtaatctgatcccaaagttatagggatttatttgatgactcacgatgtgaaagctgaattcgctaagtgttggttgctctttgcggattgctgatcgctttgctttaggcatgcatatgaggcatcctgttcaaactgtattttccaagcagatactcgaagtcgattccacgtgtcacaatcttgtgatgccacgtcagagtgcaaaaattgggataacatttgccccaagtctg

SEQ ID NO: 257072 - DNA, 970 bp, Cannabis indica
tcattatgaaattgacaaaatttagaggagtccctcttgttgatgtccttcttaatgggaggaggcttcttgtacggggcaacaacttggtgtggccatgtagattgtttcaggagtttttgtcggagggtgaagcataaatactttttctccttctcctttttattttgtgttgtaggggaattgttaaactttccttttttgccactatctcagctagagctattactgttgcatttgcctccattaacttattgtaggaggtctgacaggtattgcttatgctagccggcaggttggacagaacttagggttgtataacaccctgagtttgctcgacaccgacctgtcttcctgtttgggcttgccagacaacttcttctaacgttatgaagccatcagctccctcgaggaactctttcatcttgtttgttgagatccttctgatatctttacagaattcactcaatggtaagatacctccaagtatggccgtataacaaccttcttctgttagccctttaaccttagtggcctcagccctgaacctttgaatgtagtttttcaagggttcgccttatctttgttttatttcgacaaggtcttcatgtcgtgaaagtatttatctcaaggacgagaattgagtatagaattctccagagaattcctcccaagagttgaatctttttagggacagcttgaaataccactgctgggctgtctgagatagtagtcagaaagatttgacattgcacatctctggttactttttggagattcgttttgatcttaaagtatattatgtgtgctaggggatcttccttccctatgtacatctttcaagctggtattttgaactttggaaggggcagtgcattaatatatgctgagaaaggtgatcccctcgacctgtcaagttctaaatgtgacaactttaggttggataggtctttgatcatgtatttgagtt

SEQ ID NO: 257073 - DNA, 1704 bp, Cannabis indica
aacttccaagtttctacgtctcgctgaacaggtaaaatttcttctggagttataacttctatcaagaagtcagccaaagcttggcccttgatggaagttcgaggatgatatgttatgtcaaattaccccaattcaatcgaacattttatcaatcttccaaaagcatctagattcaataaaacttgtctcaagggttgatcagttaatacttttatggggtgtgtctggaagtatggtcgtagcttacgagacgcatggactaggcacaacgcgagctttctagagggggatatctggattctgcccctagtaaccttttacttacacagtaaataggttgctggtgcttgccctcttctcgcactatagctgcactaatcgcatcttccgagatagctaaatagagaaacaacgtctatccagttattggttttgccaaaactaaaggtgttgctagatgcctttttatgttctgaaaggcctcttcgtactcttttgtgcactcaaactttttgttgcctcgcaatgtattaaaaaacggcacacacttatcagttgacttcgaaatgaatctgttaagtgcatccattcttcctgtcaaggcttgtacttccttaggctttgtcggtgatggcatatctattaatgccttgatttttttcaggatttgctttaatacccctctcattaactatgaatcccaaacactttcttgaggaaactccaaaggaacatttttttgggtttagcttcatgttatacttctttaatatcttaaagcattccgcaaggtctgaggtatgatccttactttttattgattttaccaacatatcatcaacataaacctccatgttttgccctattcggtttgcgaacatttcgtttaccaatcgctcatatgttgccccagcgttcttcagtctgaacggcatgacttcataacactagagtctcatgttggttacgaagcttttatgttcttaatctgggacatacattttgatctggttatatcctaaatatgcatccataaatgacataagctcgtgcccagtagttgcatccaccaactagtcaatcctagaaagtggaaaataatcttttgaacacaccttattcagatcaaagaagtcaatacaagttctccaagttccgttaggcttcgtgacgagaacaagattagccatccacgagggatataacacctcgcgtataaagtcgtcaactaacaacttgtccacttcctattttagtgccccttgcctctcggagtccaaaggtctccttttctgtctcttcactgggtagcttggatcaaaatttaaatgatggcagataatattagggtcgatccctatcatatctccatggctccaggcgaactgatcctgatttgccttcaaaaagcttattagctgctatttgagctgctcgtccaggttcttcccaatgtatacacaccttgtgggatttcttggatcgagaataaccttttccaattcctcgattggttttaataggtttctctcatcttgaactcgtgggtcaagatcttcatctttctcttcagtttcttctgccaggatcgccatcaactgatgaccagcttgttgggttttgtgccctaaataaaacccatttcaatataatcagatttacttatttataaagatcaaaaataacattttatgttgcatggtt

SEQ ID NO: 257074 - DNA, 601 bp, Cannabis indica
aaactaggggaaccccgtagcttgctatgggagatcctcacaagggttgtttgaaggtgagtatcatctcttgtgaatggtggtttgagtcagtttataaattccattagttttgtatgttttttgttgctccattaacctttttttttggtctccacaggaatagacatagatcttgtgagagatcttagaggtcctcctctagttggcgaggaatcccggaagaaggttggcatggttttagattaacttgggagggaagttggcgtggtttctatcagagaatccaaccaacccaagatccgagcctgtgccagtagacctttgcgccaacctctttctggtatcgaggaatttcctgaggctgggaatagagtcttagctgtagaaaatgggattttctgatgataaggagaatgaggtctgtgcagagatcaaggctctctacatgtagccagtctttctcgagctatgtgtagtcagtctttgtccaaactacttgtagacagtctttctcgagtttatcaacttctcctctcatcctttgtttaggaagatgatttaatggtttgcccatagtggtacttttgtaaagacaagt

SEQ ID NO: 257075 - DNA, 646 bp, Cannabis indica
attattcttatctttttttttttgttaagaattattcttatctttgtaaaattgttacattgattttacttctgatcagtacgttgaattaatattaatatagttatttttacatgctatgaaatctattatctatgaaactaatgcagctcctcctttgttttaaatgttatctatgaaatctatacatatttgtagtgatccaataatcaataattaatgttgttggagtagttggctggccggtacatgttacatcatatcattcatattattttatttcaattatttactaaattgtcctgtaaatagaaaagaaaagaaaacgaagagattcacaatcaaatataacaaaatatatataaatctcagaaattaattaaatcgggatgatgatgaagaagtttagctatggaatgttgttgtttgcgatagtaatgatgatggtggtgcaggagagctatggtgatcgttgttacatagccggggagtactgtcatgttttagaaggaaagatttgctgtggaggattgagatgtgaaggtccagcaataggttcgagtcgaagatgtgtgcctattcctgggtgtaggcccggcggtgctaaatgcaacgccttcaatgagtgttgctacccctatcaatg

SEQ ID NO: 257076 - DNA, 1330 bp, Cannabis indica
tttatttgaattaaaatcagctattaatagtgataaaaatctgatttaaaataaattagaaacctcactaaaggacaaattacaatgtgggaaaaagaccaaaatgcccttcccacaccaaagccataaaaagatcactaaggggtacttttgagaaattctaaaatccctactaatctcgacattcccaatgtctaactgtaccatccctctaaactaaaatactaagatgtgattcaactaagccatacaccgcgttccaatgttgtcgggctctgaacatgcaaaattatgaaacttctatatatgacatataaaatacattctgaattcaaataaatcatcatcatttaataatttagaattaataactaattttcataattaaaccccaattatctgctaatttccaaatttaaactaagcggtctttacataagaagtgcgcttactttgtaaacctatcaactatgacccacatatagtcgtattgtccagtggtcctaggcaatccaaccacgaagtccatggcaatgtctttccatttccactctaggatattcagtggctgaaggaaccctataggcctttagtgttcagcttcacttgttgacaagttaagcacttagcaacatacttaacaatatcactcttcatgcctggccaccagaacatggccttgagatcttgatacatctttgttgatcctggatagactgagtaaggagtcgtatgagactcattcaagatttctcttttaatatcatcatccatagtcacacaaacacgattcataaatcgtagcattcccgtatcatccactataaagtcactagtctacccagctaaaaccctatctcgggatttcactaactctggatcttgcaattgtgcttctttgattttctccaaaagagtagattgcagggtaatattagtcaattgccccacaactaactaaattttagctcgggtcatttcatctgctaactgttgggagatctgtttcactctatttatctgactctggccttttctactcaaggcatcaacaacaatgttggccttacaagggtgataaaggatctcacaatcgtaatccttgaccaactctagccaacatctctgtctcatgttcaggtatctctgggtgaagaagtatttcagcctttatgatcagtgtatatctcacatttctcgccatataagtaatgccaccaaatctttagcgcaaatactactgctgcgagttttaggtcgtgagtagggtacatctgctcgcactcctttaaacaccaagaagcataagctattacctttccagcttgca

SEQ ID NO: 257077 - DNA, 921 bp, Cannabis indica
ctcactttgtttctcaactcaagcccaacaaaggataaagagaatatgaaaagatgcatcataaccaggggctaagggatctctgaaagccaagtgagagagagtcaaagcttaaagtggcaatgatgttggagtagatattatttatgttggcacatttaatcttaaattacagtataatgttcagattgttttgaacaatactttcttgattcctacttttaaaagtaatttagtttcgcttccgctttgccaattatagtgttgacaatatgtttgacttcgaataattggtaactgtttttactctgatagtcttttcaaattatcattgacttccttaactgcatctttcaatgttgtgaatattgtgaataagacatcttatattaagataacatccttattattatggcacgatagattgagtcatatttctaaagaaagagttgatcgattacttttagctaaaattcttcctcatgttgatgtttccggttgggatacttgtgctaattatacttgtgaaaaattgactaaaataagaaagcagactgctaactatagtcactcattataagagattatccacactgacatcagtggaccttattccaccacgttgtgcagaaacaagtattttataacttttatcgatgtttttccttcttatggcctcacctacctgatcaaagactatccaacgcttttgataaactcaaaatctttcaatatgctcttgagaaacaattgggaagagtcacaaaatttgttcattctaatcacaaaggagaatattatggttgatataaagaatctaaacaacatactgggcccttttgctgaatattttcaagaaaatgatgtagtttctcaatacactatgtcaggttcacctgagcaaaatggtgttgctaaaag

SEQ ID NO: 257078 - DNA, 1085 bp, Cannabis indica
tgtttaaataacatacttgtgagtagatctaagatcctggtaaaataaattccaacagggaatggccaaccaaggtttgcagggcatggttgatgttcaccatacactctcccagggtatggccagccaacccctgtctctttagaatcagcagcctccctaaggaggactagttaatcaagtccccccagcaacagatccttctgtgcatgcacagttggaccaactcagggacatgatccaaggaatagctggcccaaagccttcagacctcgaacttgatcagtcgaggggatcaccattcgcagcatattgaaatgccctacctctacggaagttaaaaatgccagtatgtaagatgtataccagacgggaggacctgctggctcacatcaaatacttcgagatctagctcgacctccagaaggtcactggtgatgtgtgctgttgcatattcccagccacactgttagagacagcccaacattagtactttaaactcacaccagggctattcaactcttgggttgagttcacacgagaattctacacacaattctcgtcctcgagactcgtaccatcacaattggaagaccttgttaaagtcaaacagcgacaaggggaacctctgaaagattatatttagagatttatggccgaggcaaccaaagtcaaaggccttactgaagaaggccgatatatgaccatactggggggcatactcccactaagcaacatttggaaggatatcaggaggatatccaccaacaacatgaaggagttcctcgatagagcaaccgactttataaaacttgaagaagccatacatcaggcccaaggtgggcatatcaataataggcagtcccaagacacccagcaacctcatgactcaccaggtgcacaggcaggaaacaacaatgttgcccatacctctagttgtaaacacactagaaataagtgcaaggaggaacaaatggcaaaagggaagtttaatacttctcccatgccccagaagaccaaggaggagaaatatacttaacttcaaccctcctaactagagaagcctgagaccatcttcatggcca

SEQ ID NO: 257079 - DNA, 762 bp, Cannabis indica
tcattattaatatgtacatatctttattaacttcgattagaattttaaagtttttccttaaagtgttcaataacatatcaaagtggtacttaataattaattagcaatttttcaaattatttattaaattaaaatttgtgggagctataatatgaaaatacacaaataacggtatgatatcttttggggtgcttgacatcttgatgtgcctcttaatatttttgttattaatatatacatttctttattaattttttattaaaattttaaatattttccttaaggtgtgcaataccatatcgatgtggtacccaatagttgattagtaatttctaaattatttattaaattaaaatttatgtgagttgatattgaaatgcaccaataaaggttgctattttttgtggtgattgacatcttaatgtgtccccactactataaaaatagttcttttcgacgattttaaacagtcgtttaaagtattcccgtcggtttctataactgtcacctatacgaccgtcgcaaaataggcaacggttaaaaactgtcagtaaagtagacttcctgacggtttaaaagcgtcgcttataatagggtataggcgacagttttaaattgtgccttatactataggcgacggtttaaaactgtcgcctatagtataaggcacgatttaaaaccgtcgcttataccctattataggcgatagttttaaattgtcagaaatgtaaaaaaagagaaaaaaaaaaaaaacatactgat

SEQ ID NO: 257080 - DNA, 774 bp, Cannabis indica
agctactttacattccgatctaaaattatgattattctcgttctttgtagggtgtgtatggcttgttgacgattccatctgctcttgttatttttgttgggattgtgcttaaagaacctcacatgcctaatttccaatacagacaggtatttgtttcgattcaatctgtcacagcaacacagaagttcacacaatttcatgaacacaatctaaaccagaattctcttagaatagagaagaaaaacagtgcaagaaagtagaagaataacaccaggaattaaacgagttcgagctaagtgtaatgctctacatctcggttgaacagcagccattatcatcttcattaatcaccaacagttacagagttttagaagttgttctaactcaagaacacttaagagtttcaaaactcacttttctaggggtccaggatcataactgaattacctaactcaatcccgagccaatcaatattagtcctagttggaaactaacaagtatactgaatagtaacttgtaaccatttaccacagtattttgggcttttattaggctctctcttacttctatatcccatgttgaacaaccaggtaaagcagaagtttctgaatgctggcattgctatgtggacaacactgaaatctccaagtgtttggagaccatgtttatacatgtactcgtcattcgcattaagtttgaatatccttgatggaatgttctattggtacacagacgccaaagatggtccaagattctctcaggtatgaattttac

SEQ ID NO: 257081 - DNA, 2439 bp, Cannabis indica
acaccattagcaatgtttaacaaataaaatagacacatcactaacaccttccagcaatgtcttacaatcagagattacacccccaaagtatgaaaacataggaagtggactacgtaaagcttgaatcaccgtaagacaatcagactcaatggtaacccgattccaacctttctttttgagccaactcaatgcctccctcacacccatagcctcagctagttctggagttacagtccctatcttacagctagaaattgcttccaatacatgccccgtagcatccctagcaacacaagcaaaactatacctgttggggtcagagaaaagagccgcatcggtattaattttgatctctcctgttgctggtttttgccaagaaagagcaccatcagctgatgtcaaaaaagcagcagtaggaacgtactccttgtcttgcgctttactccactgttccaacatacttaagccaagatgacagtcgccacactagcacttttatccttccaaacacaatcatttctaaccttcatagcccaacaagtcatggcaatgagcttcctttgatctccctcaaattgttgaaagcaagcctctatccaacttgtgaaagtaccaacatattccaaatcaacttctattcccgcattgacccaacaagcccgagcaaaggaacaattcaccaaccgatgcaatattgtttcattattggatgaacacacaggacatattgtatcaatgttgacatgtctataccgaagcatgaatttggttggtaaacagtttgaagccgctctccacaataaatctttcaccttaggaggaactttaagtcgccataacttaccccagaaatcagaccccaccagctgcaaatcatcttcctttctttgttgcaaatgtcgatacatactttttactgaaaaattccctgagctctcaaaagaccagaaccaaacatcatcaatacgacttgaatttaagggaatactcaaaatgagttgagcatcccttgtattaaacagatcacgcaccaagtccacatcccaggttaaacatccagtaaccataagagcatcaacattatgatttaaaagagcaggatgactcgaactgattctcggattttcatcacatggaagccaaggatctaaaacaatattgatttcagacccatttccaacccgcctgcgagcccccattttaaccatgtctattgtttcaaagatactacgccatacaaaactgggattactacccaactctgcactcaaaaaattcttccccgcataatatcgtgcctgaaacaaacgaccaacaagtgtatgaggcctacaaagcaaacgccacccttgcttactcaaaagggaaagattaaaatcatgaagatccctaaatcccattcccccttttgatttgtgaaccgtcagcttatcccaactcttccaatgaatccctttattattctttgaagaggatttccaccagtatttgcacatcaattgctccatttcattaacagtcttcaaaggaagcaaaaagacattcatggcataactaggcaaggattgagcaacagtttttatcatcagctctttgcctgctttagacaaaaactttccttcccaactctgaatcttcttcctcatcttctcttttaagaaccccagtaaagcatttttatttctacccaagatgtttggaagacccaaataagtacttgtttcccctgcctcttgaaccttcaatacagaacaaattcttgcacgaacatatgtagggtattatttattaataagttattaataaaaagataactataaaaaaaatgagcaaacaaaaattaaagaaaaaaatatacacgagagaaaaatcttttatggaaaaagtaaaacaaaaaagagagagacacatcgaaaaaaaaataaaataatgaaaaaaaaaaacttaaaaaaaaaaaaaaaaaaaaaaaaaaaaaagaaagaacaaattttccattttgtattacttttttttggtttcggtaaaagtttcattcataccaaatgaaacttacacaagaaggggtaagtcagctaacacagctgcactaatcactgagggagtaatcctcttccaaataactaaagttttagactctaaaacttttttagctaataaatgaacaacaacattagtttctctaattgagaaggtaaaacattacaacttgtgcatccaatgttagggttgaaatctgtgcatccaatgttgttggcattaaccaacttgattgcatgaatgcaatctgattccagaatacagttaggaaagccttcggtttagccaaattaaggcctagttcaattgcagtcaactcggcaccaagaagggaagactagacaaggagaaaggtttgagaagcagctaccattatgcccaaacgagtcgcaaatagctaca

SEQ ID NO: 257082 - DNA, 466 bp, Cannabis indica
tgtgttcaagagtaaaatgtgctcttaatcaagatcgttgcttgagtgagaattgctaaaaaaatattgttggtgcttaatattttctttgatatcatatcactatttgtgtaattaagtattagaaactatataattttaaaaaataatttttaaaaatatcactaactaatcgtgggacaccatctattaaagttgttggacaccactgatgcccaccaacattgctctcctcaagttcaagataaggtagctaaatgttaaaagtttgattaaaataataattaaaaatttaaattctcaaatagctaaggatattaataggatctccaatttatggagctaatataattatattcaatctcttgcctcaatttttgattagaaacccaaacaaggtattataaaagttggacctattatctaaatatagggtttgcagcttcgttcctcttttacatcaaac

SEQ ID NO: 257083 - DNA, 871 bp, Cannabis indica
tttattaggctggagaaaaagctatctcaaagagttgagttttatccaagaattgcatcacaggcaagacaaggattttttgatttgtaattgttcaggtcatttgttaatacaaagagaaccaaaatagtacttttgatttttctctcacattaacttagtctgccctacacaggactgtggatgagcttggtatagatagttctatcataacaagtgagtgttctccccacttgatatttgttttgtctttaatctattgtctattttagcttttttgcatattgtgaatcaactttttgcaggttttgctagaagaattggaacaactactaaggggattgttatgatgaagattatttggtctcatttggggagtgcatgtcaacaaggatatttgcagcttattacttaaataagattggtgtgaaggcccgccaagtaagaggcaacagaggaatggtgatgagctctctttaaagggtgtctgagtataaattccatgctagtgttatgtgttgtggtctgttgaaatcgattgatgtgttgacatacatgttgaagaagccaaaatatgtggcaaccttcaagtctatagacggagaaattcgagaggcctttgtggccagagttcttaaagaaattagatcaagttgttgattaggttatgtaagtattaatatgtgaagattgatatggtcagttgaacattgatttggttggttaaattttgatttggtcggttaaactttgtttaatagttgaaactttgatagcgctacaatgtctattttaggtatgtaaactttattttttctaacaatttggtttttttttatgacaatttactcggaattaacattaatattcg

SEQ ID NO: 257084 - DNA, 1315 bp, Cannabis indica
tattattaattttctaacattatatacttaacacttgtttcactttgagcctcttaatactacaaataaatacttcatattttctaaaataattagtatacattgcaaattagattagtttgtgatatatgttggactcgttggtgtgtgatattgttaatgtggtagttttttagttatattaatgcctctaaaaatcatgcatttagatactgatgtggtattattttttgtcgttttgtaatttagtttctaaatttgtttagtgtaagattgatgatgtgttaattttttgttggtttgtaatttattttaggttggcgcaaaataaaattgatatatgtcgtttttgaggtttttgttggttgtttcatattggaatgacacactgcgggagttgatgttatggtatttttacgttgtttatatggtatatattttaaattttaattttggagttgttattcagttgtaatttattagttgttcaataaaaaaaatgaatatatgtttaattgttgttagttatttgcatgtaaaaaaacattttaatatatgttgaacaactaacaaacaactagataacaactccaaatcaactaactaatagtttaataacaataaaaatttattcacggtgatacgtttcaaaaaaaaaaaaagtacaaatcattaatataaactcattacattaattttacccagcaaaaaaaaaaatcgttaaattaacctaaaatataaataaacttaaaatcaacctaaaatacacatttgaaactaaacattaatctaaaattatataaaaatatattattataaattaaagaacgtaacagtaatacaaatatatttataatatatgtttagtttttatggtgtgttataagtaatattttgtaggtgtttttattttattaaattatttttgtatttattaggttgttgactcaatatattatgtctaatttatttgcatattaaagttgagttattttttaatgataattttgggtttatatacagttgttcttgtgtatatttttagtttatttttgacacattttgttgttattttgttttttgtcagcgtgttgtgggtttgatgtagaatttttttttaagaaaaaaaaatacaattagttgttataaaggtgatccagttgttttaagttatttttttgggaaatttacatacaagcacattaatattgatttatttacataaatattgtgatccaaattaatataaaaatattaacgttttccaataccgttcacatattaattattttgctttaagtatatatatgacatt

SEQ ID NO: 257085 - DNA, 1502 bp, Cannabis indica
  modified_base (685)..(685): a, c, t, g, unknown or other
ccgtaccttggagatatcataacagttatagtgctgaatcacgactttgcaacaggatcttatcaaaaagtcaaatttcaggctgacacagtacggagactaatagcggaaaaaattcctgtaagccctgttaaactagtacaccttgacttgttactttttttttttttcacattattactcatttggttacttggacttgtatcaatttttccaggttcgacttgctttgccacctttgctgaaaatttatgaaaatgctgtttcatctggggattcaagtttgacagcctattttggaatgttggcaaacttgatcggttcaatggatagaccatctgttagtggttaccatgcaaagatttttgaccttttgcttgcttgctctggatctacgccgtcaaaggccagcttccctccaggatattgattctagtgaaaaaagtgttaccaatacataatttctctgacaatgaaactgacggagactatgtttaagccccttttcataaggagtattgaatgggcagagtctgatgttgaagatgggtgttgtgggggaacactaagtgtgggatagagctaggtatcattctagtggtatggtaaataagcttgctgagaccagtaggtgagtcagttatccttaaatgcactttttatgtttgattttgtttctaaactntaaatgaaaaactgggtagtccagttttgacttcattaaccgcatgaaatctgaatgtctttttgtgatgctttcctttagtaaatcagttgtcataaatattgcaggtctctgtttattccatacttcaaatacttgcttgagggctgtgtccgtcttctcacagtatctggggatgcaaagacttctggtttaacacggaagaagaaggccagaattctagaagcgaaaagtacagaagataccagtatatcaattggaaactggcaccttagagcaacaattttgtcatcgttacataaatgttttctctatgatactggaagcatgaagtttctcgactcttcaaattttcaggttagttaacatctttatcttctgtcttttgttctctttggttagttaaacatttagcagtcagatttaagttttaccccacattcagcagtaaagtttacgtgcgggcagtcttggatttacttaaaatatgttggtacaaatgtgtacgagtgctgcattatctctactacctccattaaaatagtttatatagctgggaaaagagaggaaagtacgaaaatagtcagtgcttgcgttctatgtgtgaatagtattatctaccaggctgatatttttatttaataatttttttaaaaaataatttactattattatatttaaaaatattttactattattatttttaaaaatatttttatttaataatttattattattattttaaattcttgtctccctttaaaaattaaagtaattagaaagaattgtgtttggttgtttacacgttactttcctt

SEQ ID NO: 257086 - DNA, 1048 bp, Cannabis indica
ggggatcccatgtctcctctcctttttgtactgggaatggaatacctgtccaggattatgcaaagaattggatccaaagaagattttttgtttcatgaaagatgtgagggaatcaaactaaatcacttaagatttgcagatgatgtgctcttgttcagtaaaggtgacttcaaaagtgtttatctcatgctgcaaggtgtgaagctattctcactatcctcaggtttgcatcctaattctaccaaaactgcagtctatttagtggaatgaatgatagggaaatacaaagaatattagatatgtctggttttggtagacactatgccccgtttagatacctgggagtgccgatatgtgccaaaagaatcttaagcacagattgcaaagagcttgatgagaaaatgacatcctgaattaaagtttggagtaccaagaatctctctttcgctggaagggcggttgtagtgaattcaatcctcatgaccattcactcatattggagcccaataatgattttacctaagaagatagtgaatgagatagaagcaatatgtagagcatttctatggaagggccaacatgcaatgatcggttcaggtttaatagcttggaattttgtttgccaagctaagtcagaaggtggaatcgggttcaaaaaggtagaggaatggaatagagctgcaatgttcaaatatgtatgggcgattgctaacaaggaggataacatgtgggttcgatggatacacagtgtatacattcgggaagatgattggtggggctacaatgcccccgttcaagggagttggtactggaaaaaaatagtagaggccaagaatcaaattgcaacaatggtggatgttcaacaattcacacaatccaggtatcatctgtcccttggttataaactcttagtccctccacaaccaaaaatgcattggagtaaggaagtttggggaaagtttaatatcccaaaatgtagctttattctgtggattgctattcagggtaggctaaggacaagagagagattgcatagatttggtattat

SEQ ID NO: 257087 - DNA, 643 bp, Cannabis indica
ttccaacggtgttcggtagatcggtttgaacgatttttttatttttccgaattttatgctcacccatacaaaataaatagtgactaaaaattcaaagtccatactcaacacttcatagttcatccatatatttcacactaattattatccaccatagtccatacatattatatattgatatccttaaaaatgtctaactgaaaaaagtatttataaatttaatgtccatataatataaggcataagctttttataaaataatggatatacacatattacatatataatcttaaatttttcatcttcaatagataaaatatataacaaaacttaatataaaataatcatatttatattttaattttaattttcattcttacacataaacatagaattttattaaaatcttaaataagaaatacattatttattttatgttatatattaaatttttaaaaaaattagccagatttgtgggcgggtacaagtccaacccaaacctgtgggttaacaaaaaatcagacacgaacccgcccaaagagttggccaggttagaactgacctgctcgtagagaatggattttccaaaacaaataggttatcggggtcgggtccgagcgggttggtcgggtccgggtcaaac

SEQ ID NO: 257088 - DNA, 514 bp, Cannabis indica
tttatgttattttgatattgtttggggtgttgtttttccgttatctttatgtgatttttttattatttttatgtgtttatatagaatactgtaaaaatataaatatatatataaacgtaaaagtgtaaaaaaaaattatcaaagataatatttttgtgtaaatttccctaaaattcactttcactttccaattttacgagtgtcaagccctgcatatatcaccaaaattttattttgtaaataccgtttcctatccaatgtaactatggaaaacacagttttaaaagtacaattacataattttatttttttattgaaaaaaatgactgataaaaccttaaatgatgttttaaacaagaagtttttactccatatactgaaacttttaatttttttgctgtagagaagaatttttttaaaaaaatactgtgttttttttaaaaaatactgtataagttttaactttgtactgtattgagttttcacggttctttcacgattattttttagttgt

SEQ ID NO: 257089 - DNA, 571 bp, Cannabis indica
ttcaccttatccattcgcacattaagagcattaacattcaaaagtttatctatctccttttgagtttcaattacttgcttcgataacaatcaaaatctttgcttattcaaagttcacaggcaatttgcacagtgttcaagagattcgcaaagtcccaaagagtcggctacatgtagggtacatcattgccaagcctcaaacacaatggatcaacattcatcttcttaagccaatgaggttcaaaatggaattgtccttttaacttgcccatgactcagtagaaaaacattctcaagtttaatgactatagggcaatggtcagaataagaaagtcaccatggcacacttgaactgaaggatacaactcagaccaagcttgattgcacacaaagcgatctaactattcttgatgtgaaataccttgccttttattcatccaagtgaaacttggccattcgtaccccaagtcatctagcatacaggcatcgagaacttaatgaaactcaatcattgccataacatcgcggtccgtcccacacttttgtacatacatagataaaatctcattgaa

SEQ ID NO: 257090 - DNA, 1097 bp, Cannabis indica
tggtgtttcacttctaacatagcttggcataaagggggaagaataatagttgcttggaatccgttgagctttgaagtaaatattatctcttgttctagccaagctatgcatctctttgttgtctccacagataaaaggaatcaatgctttgtcacttttgtctatggtttcaataatgaggagggaagacttaaactttggcaagaattgatgctcttcaaaaccgatgtaccatgggtaattcttggggattttaatgacatccttgaaagagatgaaaggataggggctcggataaagtacaatccttcttcttttaaggattttattgttgcttgtaaccttgaagatgtcaaatttggtggtagtttttttttacttggaataacaaacaaaagttggatggattcttttcctaatgttgaagcaatctttcttaatgaggggttatttgatcatactcctgctctgcttacggtttatccttccatttttagcggtaggaaatcgtttaagtatttcaggatgtggtcaagtcgcccccattatcagcaacaggtggaatcgatttggaagatgaatgtgaggggcactaaaatgtatcaaattgtgaagaagctgaaagctcttaaaccggttttacaagagatcaataagcagggttttcatgacattcaagttgctgagaagaaggccaagataaatttggaagaggctcagaacgctcttcaaggggaccctttgaacattgatcttcagcaagctgagcaagatattagggagaattatgctattttacagaaagcttacatatctttcttacagcagaaatctaaggtggattggattaagaacggggactccaatacaacagtttttcatgccagcatcagaaatagaagagtttccaacagaatcttgtctattgcagcgagtaatagagagagagttgaggatcctgaataagtgataaaagctttcttggattattaccaagaccttttaggatctaagatgcaggggagattgcatgtgaaacatacggtgatagcagaggggccggttttatcagagtcacaagctgagtttctcttaca

SEQ ID NO: 257091 - DNA, 576 bp, Cannabis indica
taaacaactgctaatttccaaattaattaagcgggctttacaaattcggtctttaaagttccccgtgaactccttcccccaagcttccaacgccaccccacatccttcaattttgtcaactaaaccacgcccactcaatccctcccaactactcctcacgacctccttacacataggctcacgcaaccaagcattctcaaaacgaaacgttcgattatgcatcccaaaagagtaagcttcaggcattaaaagaattggacaatgatccgaagttgaaatctccacattatatagctttgccaaaggaaataattgaagccaagaatgagacactagagctttatctaacctttcctcaacccaatgactagaacctttacctttctcccaagtaaatggataaccttccaagtgtaaatcaaccaacccgcactgatcaagagcattacgaaagccatccactagccaattgggatagcttcgacctcctctcttctcatcttgaccccctaagttgttcatatctccaatcaagcaccaaggaagttgtgactccaaattcagagaacgaaaaag

SEQ ID NO: 257092 - DNA, 891 bp, Cannabis indica
tgaaggattgactgtcaaattgtgtgtcgttgtccgagactatcttgtatggtaatctgaactggcaaattatgtttttcgcaatgaagtcttggaattttttggaagtaatggtggccagtggctcggcttccgtccatttggtaaaataatcaactgcaaccactacgtactatactctgcctttgcccttgggtaactgtccaatcagctcaattccccaaatggcgaaaggccaaggactttgcatctgagttagttcatagggatgtgggtatttttgagaatcttgggcacttataacatttcttaatgtaggccttggagtcttcaatcatggtcggccagaaatacccttgccttagaattttcttggataaactttgcccagctgtgttgttgccgcagaatccatcatgtacttgtgacaaaagttgtgcagcttcttcttgtgtaacacacctgagtagtggcatgaagaatcctcttctatacataacaccctctacaatgatttaccgtgcagcttttctccttattttttgagcttcaatgagtcttttgctgatgtagtagaccgagtgttggatgttgttctcttctttgatcagtatggcacttactggatgttccatgacaaccacgtatattcctaattcttctctgtctagaggttttgacagtacaggaggttttgcgagttgcatttttagctcttgaaaggctttttcgcattcctccatccattcaaattgcttatttcctcgcaggatgttaaagaacaaaatacacttatctgttgactttgaaacaaatctactgggtgcagcgacccgacaagttaaactttgaacttccttggtttttgtaggcgatttcatatctaggagg

SEQ ID NO: 257093 - DNA, 640 bp, Cannabis indica
atttaaagtattaccggcagatagatccgctgctaataatagtgtgagtttaatgatctgacactattattagcggcgggtgtgtcagtccgccgctaataatagttattagcgaccaggtattaccagcggattattaccggcggacccctccggtattactctttagcggcagaaaataggattattaccagcggagtcgtccgcctctaataaccataattgttgtagtgaactcctttctggagaagggctagctattctgaagactgaactcagagtggacataatagtcattcgagaactcaatttcgaactcaacaatcattccacaagactccttctgaaatggacaagttagctgtccgaaaacaacattcaggagacacctaactttccaagaacaattttcggagacatttttatttagaggaactacaccacatatacttacaatgcacaaaacaaaaacttaatataaaaatatatatctgcatagataaatgtttgaactatatttttagtatcgtaaattacttatttagttttttaaaaaaaaccattgataaaatagctactataattataataaaaccaagtgcttaaagattcttcctctagtttcggagctacgaaactt

SEQ ID NO: 257094 - DNA, 772 bp, Cannabis indica
aatgcatattttttttccttattcagttctccaaaagaagcctagaggtatttcatctcttgtcaggaatattattgttatatgatgcaaattcgacatacaacaaaatcagtattgttacatgctggtcgtttgttacaacaatatgtagtagatatgtatgtaaaactagaaacttctcgattggattattttcgaaagaatcaagaagacattcgagctgaattatacaaagggatgattgacagcattgaaatgggtgaaagacgaggctttaaaattggtcgaagaattattttgccttcatcttttattggtggaccaagagatatgcgaaaatgatatattgatgccatgacattagttcaaaaatttggaaaaccatatttgtttctaacaatgacttgtaatcctaattggcaagagatacaagaagaattaggagaaactgatcaagtgcaaaacagaccagacttgatagcatgaatttttaaagcaaaattggatgaattgaaaaatgatttattcaagaaacaaatatttcgtcatgttattgcttatgtttatgtaatagaatttcaaaaaagaggattaccacatgcacatttcttacttataatgaaaccagattcaaaaattattaacacagattcatttgataaaattgtgtcagctgaactacctgatcaagagaagcatgcatatttattttcattagttgtgaaaaatatgacgcatggaccatgtgagaaacttaatgataagaatattt

SEQ ID NO: 257095 - DNA, 783 bp, Cannabis indica
attggtatgaacttgatgaaatcttgttcactggtcaaccaccacccaagaatcttgtcaatggtgatccaaatcctcagtactctcaatggaaaaagaaggaccacttacttctttcttggttaagatcgtcgatgactgaagtcattcttgcttcggttgccacctacacttcctcctcctctgtttggcgtgctctggaacagaaattttcgagccaaaccaaagcaagattgcttcaactaaaaggtcaattctctcgggttcacaaaggtaatctttccatttctaaatacattgaaaaggtgcaatctatttcagatgctctaacagtggcaggttcacttgtccaagatcaagatttagtccttcaagttctgaatggactaggacccgagtttgattcggtggtttctggtactacatccagaagtgacactctcaccattgaagaggttcaagctcttctcttctcacacgaaagtaggcttgaacatcatcaccaaatggatgatctatccatgcaaattcaagctaatctggcctttggttctgggagatctggaggtgttcgaccattttcccataccaaatctggtactactgatggttcaaattcttctcacggtcgtggccgcacttactacatttttactctctttctctcaaaatctctgttctggttcttggtgctctgcaccagtaaggaattcttctgattttgttctggttcttgtcacaggccctgagtccttggctattggaaatggtaagagattaggc

SEQ ID NO: 257096 - DNA, 654 bp, Cannabis indica
atctagatcctggtaaaacaacatccaacaatttcgccctttcttatccttcacaactaccaagctacctttcttgataattattttcactatcttttgcgggatagatacaagtatccaaagctcccaagagattaagctcctccttattgttggaacatgtctcacatcagttagtgttctcacaacaccatcaaacatctttaccttaacaattcttatttcaacaactttagagctagaatcattacccatcagtactaccatcatatgccttataattgtcaaagcactccttatacgggcacatgtgaaacgaacaactagaatctaaaatccaagagtcagaaaagtcagctatgacagagagaatattagagtcactttcaaagccttcaccgacaacatttttagaatttgatgtgtctttgcattcttgattcctcattgcttcaagatgcttggtaaactcttcacaatttcgcctaacatgcccctttttgtggcaatagtagcactctacttccctcgaagaacgtgattgagcgtgattgtctcttctatcatcatatcttcctctcgatgtactcctaccacgacttgattctgaccttgtcacaagagcttgatcagtatgagacataccacttggtt

SEQ ID NO: 257097 - DNA, 844 bp, Cannabis indica
ccatgcttcgcgtggtattgctaaatttttgtaaattatatatatttatatattttgtacttattgagtggtataatctaaaatataatattttaatatgtgtattataaataaattaataatattaaaatcaaaaacataatttcaaaatacacaaaaagataacgattttgtgataagtattaaatggtagaattaataaagaaattgcatgtacttttataataaaatcaaaaaaagataacaatttctaaatttaataaatcaggattgtgattaatgatgtaattaattttaatatattgtttagaccttatttttacttgatagaaagacacaatttaacatactatttatgaaagattttacattttattttgatggtatcggtagaatgttttctccacaaacgtaaatgtaagatgataactgtaaaatagttcgtcataacattatatgtttttgaaaactaataactgacagcttaatataaaaatattagtgatagaatatttttctatgaaatgtataataacaggataaattttaataagttatgtggatgtaaaatttttactttaaatgcaaaggaaaatcatgatttatataactgattatttccataataaaatatgtatttgtgttcctgtttgtggtaattacatgataagtactgtatgaagttagttgagcgctcacgtaattgttataatcattaaaaaatgtaagcaggtgtagctttgttgtgagaaacaacaactgtagcagatgtagaaaaaattagagttgagtgtttggtaaaatataaaattttaaaaatgtaatgtgaagttttttaagattc

SEQ ID NO: 257098 - DNA, 584 bp, Cannabis indica
cttttgacatatgcagtttgtgtggattgaatgttgttctctctttctctctgaaagtactatacttaaatctaattcattttcttgaatctttaagaacaattcattaacaaggtaaaatcacacaaataaattacaaggttctcctatcctagaacaaattctaggctgaattcaatgtatttttacaatttttcaattttgaaatcaaatcaacaaatacattgtcaaggtactcactcaagtaaatcagtttttaatcccttaaaacatacaaatcaaattccttgactcttcactcaagatttttttattagcgcagataactgaattctctttaaatttgttcagaacacgaacatgatctgcaactcagtttcacctctataacaatagtgaatctgcaccaaaacaaagaaaaagaagaatggaacaaagaagagagtgttttctctctcacacaaaaatcaatttgaaaggttagcttgaataatcaagaatcttctatttatagcaaccctaatttgtaactaacttcccaaacagagcagttagtaaagattaactcgcctaattaattcaaa

SEQ ID NO: 257099 - DNA, 886 bp, Cannabis indica
gccagagagatagaggaagagagagagttagggtgttagttatgtgagggttatttttgggtttttcataagagtgtcatatattttttattttgaaatgtattggtttagctataaaatattagggtttttaaagtatagtttttcaaatttcccaaatggaaactatatgtaaacataaatgacttctaatcttttattgatagcaaatcagattgtattgtaatgggttttatttagggcataaaatcccaacatcaccctcaccatctgctgggtggagatgatgaggtctttcctgacgggtatgatccttatgatgaagctctaactacccctatcgatgcaggtattatttgtataggtgatagtgagtcatagggtgaaattttaacgatagaggcacgatctggaggggttgagtgtgggaagagggagagaaatcccccatatatggtttaatgactacacgaagatgaagaagaaacagaggccttcttcaacgtttgatcccctagcgccaccggatgagcgattgttggatagtttctagaagtggtgttcttgactcattcctaaccatcggctttgtgatttgaaaagtggtgattacggtccgtcgttcttttagaagttgttgacactgcaggaatggcttacagatgacgtaagtaaactaatctataattttactacattttataagtcaagtaatatattatgttgtctaattgcttcctctaacctttatatgcatcatatagatgcaacagtccatatgctaaggaggcgacgcttcaactatccattgacatttccgcaaaagggtatcattctctccacatatgttaccagtatcatcagtagtgcatggacaaattacaag

SEQ ID NO: 257100 - DNA, 927 bp, Cannabis indica
tatgcaacacttattggcttcgctatggcagcccggaaaaggtatgtttgtcaaggagttggatacaaatcgtttcttgtttcagttttaccacgaaattgacattcaaagcgttattgatcggagtccgtgaactttcaataagtttcttctggtgtttacaagattgaagcctggtgagaatcccagattagttgcactgaatgaggtggatttttgggttcaactgcatgacttacggtcagggtttcgaacagtcacggtggctaaagatgtagcgaactacattggtaaatttgtggaatctgatgagaagaattttttgggcctttggagggacttccttcgagttagagtcactataaatgtcaataagcctctcgaaagacgtatgaggcttcggaatattgctggggttgagttttggacgaatttcaaatatgaacatcttcctactttttgtttcatatgcgggattatggggcactctgaaaatttctgcccacgatgttttgatacaacaacctggtcgttggttaaaccttatggggactggatgagagttaaaccaaaacctaccagccatatgattggaaagaaatggctaaaacaatttagagttgtaatggaggaattgcagacggatgcaggccagccgaattcagatcatgtttccagaccagctccggtgagacaattaatgtcgtatcctcatcctaatcaagcagctgtgatgaaggagaaaattgtgggacacgaatcaagcaataatgaggcagctaatagacagaaaggtgaatcaacaattgaagtaattggagggttgactgacactgattgtggggaacataatgacattaatgttgaggaagattgcttgatggtaattgattcaaaaaggcgtagaactgagatgggcagtggtgt

SEQ ID NO: 257101 - DNA, 1075 bp, Cannabis indica
ccctcgattcaagaaaatcagagaagtccacttgaagatccagccaatccctattatctccaccacggtgacaacccaggaattactctggtttctcaaccattgacaggtcaagacaattatgtctcgtggagcagagccatggtactttcgatttcggtaaagaacaaacttggttttcttgatggttctatccctaaaccctctcctactgatttcattttatataatgcttgggttagaaacaacaatattgtgatttcttggattttaaactctgtctctaaagatatatcctctagtatactttatgatgatagtgcagctacaatttggaatgatctcaaagtgagattccaccaaagaaatggccctcacatatacaatcttagaaagggattgatgaacttaaggcaggaagctcaaaccgtgagcatgtacttcaccaaattgaagacaatttgggaagaactatccaattatagaccttcatgtacctgcaatgggtgttcttgtggtggagtcaagaagctccaagaacaccatcacatggaatatataatgtcctttctcatgggactttcggacaattacactcaagttcgaagcagtattcttctgatggatcccttacccgaagtcaatcgtgtctttcatcttgtttcccaagaagagcaacaaaagggaaacaccattggaggtactgaatctaacatgacatttgcttttcagaatgataaatctgctggaaagaaaactgattctcagggttcaaaaggcagcaaacaaaaagaaatagacccttttgtactcattgcaacattcttggccatacgatcgaaaaatgctataaaatacatggttatccccctggatacaagtcaaatcaatccaaagaagctgctgcaaaccaggtgcaaaccagcaaagactcgaaagaaaattgcgacgaaagcataactcttttccctcaactcaatgctgtccaatatcagcagttactgaatttgcttgccaaccaaaacactggtatgaccaattcagatccaagtacctcaactggtacgacaggtat

SEQ ID NO: 257102 - DNA, 1093 bp, Cannabis indica
tttttttaaacaagccacatagaaggtccaaaatcttgatcattgggtctagacataaaatatgtagtataagttacttccaaatattcctttaatatattcaaaatagagtttgtactgacaaaactagaggaaaattacagttttacaaacattgggtacttatgccgttaaaaataaacattagatttatgccgcttacaaacttaaaacggtaggtatctatgccgctatttaccctaacttgattagtatatatgttatgacgtatatttttttttaattgttaaaattttattagactaatctttaatttttatattaatgtttaatagtgataaaccgcttaaaccgcactgctgtattttttcactttttcacgatttgagtgtggttacatttttagaaattacaaaaactatatacaatttggttttaaaaaataacctaaacccgcaactacgaagttacgaacactccctatttgcaatcctaaaaagtcttttccctaaaaaattaaaaataaaaaaaacaaccctaaaaaactcactcaattctcttctctctccttctgtagcgcatccctttccttctcgactccatctcttcttagaatctcagtccatcaaagggtacattttctctctttctgtaaatgttatctacccaattcgagtactgaggagaattttgtggtaatagggttaagggtgtccctgtctgtcgtcgttcctccacccacttctccggtcgcttttactcatcatcacttattcttcatttactcatgcaatcgactaaccgaggctgaaatttctggtttgcatctgaaaattttgagtattttcatttattagtagtgattttaaacatatttgctgtgtattgatcattaagtggccaccaagtgtttgtaataatgttcaaatgaaaatataattgtttttctatctacatgatgatttgtttattccaattagactttgggttcttttgttttgataagcataatctcagttaaactgactatctatgatgccatagttagtttcaaagtcttgttaattcaatttaatcgttgttagagattcat

SEQ ID NO: 257103 - DNA, 1201 bp, Cannabis indica
cagttgttgttctagggggctgttgcccctgggtccttctttcagtgggaggcaccaatggtggatctactcttggaggcgtgggcctgccacttggatccaccggggtgctcgtgtcagtttggccagctatagtggccagacttgtagcactttttgtggtgacgggattcaccacatctgcggtattcatggggattccaattgtgactggaacctaagtgcctggatctgcgatctgtggatcttgaggaagacccaaaaatgtagatggtgtgacaggagtccttcttgtgttcaccatgacgtttgatcagatcacgatatccacaatctcaataaaagcaccaaacttttgacctcaaaaagtgatcaatcgatagtggggtcgtacatattcgatgcttaccacatatttgcacaaatgagaatgaaaagcaatagacaataagatttgttataaaggttcgacgcccttgtgatagcaggtaatgacctactctccttttagttgtatttataccgaggtaattactatccagatcgctatagctgggatttactatagtacccttaggattacaaggtatgaattaatactgacaacactaaagtgttgagaagtaccagtgtaggcacgtgagacagaggaaatgagaaaaaaagagagtttatcagacacttggagtttagaggtaggtttctagcttagaggcaacttaggttttcagcctaaggttaaggcctttatataagagacctaaaactctatgtttacactcaaatcccttagtattcgtatagtttgttagatatttacaaaagaccaaagtgtccttgattctagatattatttagccattttgttgggcttttagggcccaattcatagcccatagctgttgtccacatgtagaagtgtccagcaaagcctgcagtgcactccttggctagccaagcccctatggaggccaggctggccagtcatggtgttgtcccaaggctggtcagccatagggccgcccacgggtggccgaccagctcttgagagggagctggttcgtcacttaatccccgtttgagtgctggggtgtttgtttgttcaggtgctgacttgaccttccttttagtgagctgttgtaacgccctgtccaacagggacgccacatgtgtgcaatttatttaaaataccaataattat

SEQ ID NO: 257104 - DNA, 1082 bp, Cannabis indica
taagtttagaaggcatcaagtcacgaaacccaagagataaccggggcatgattctgcttgagaatttgaatcggaagcctcaggatcaaagagaaaagatgattccaaaaggctgcccaaggataagaaacacaacaaatatattcctgtttatgctgaatataccgagcttagtgaaactcagaaaaatatcaacctcgcacatgtacgggaagtcatttttagcgagccaaaacctacgaaacatgcgaggcataaaagggatccaactaaatggtctgaatatcatggggatattggtcatacgacggaagagtatcgtcagctaaaagatgagatagaaggtctcatatcgcaaggacactttcaacaatatgtaaaggggtaggacgatgtccatagttagctcgatctatccaataactagaactactagggattataaccctcctctgtaggaggaagggacaccttgattatctcaagagggagcaagtcacaagaatacaaggggaagttgctccggtaaagcaattttgtagaaaaaaaaattgtgacgtgagtagataacgtgagtagatatcgacccactatggttgtcatatcaagctgccacgtggaaagctggtcgtcaaccagtagcagtcaaaaatagaaaactaaaaccaggattacttcacttggaaccccgggatatgtcagggattgtccctggatattgaaacaattctgagagtatgttagggattgaccctaaacatcaaaactcgttttattaaaaccagatactcttggaagattgataaaataaacgattggactggggaagttctatgagattaatgattataaatcacatgatgaaatattttgaacttcagttgtgaataaaataatcatttctttcaaacaagtaattataaagtgtaaaccctttaaaattacttgaggggcatgtatgtatgattaaccggaattaatttggaaatacatagtacaatgcaaacccatcatttcaaaaaataaaaaaaaaattgaaaactttttaaaaggtacctcgaccaaacctttttgacgaaaga

SEQ ID NO: 257105 - DNA, 606 bp, Cannabis indica
caaagaagatcttgagcgtagtatgagcgactcttagaggattggggcttggagtattgaacaaattcgagcaggggagatccttccgttgaaggattactttaaagactattgtaattatattacaattgctccattccaactggtccctaatgggtatagaatgttagcttgtttgaggtctttttatctacgacagtcagagtcccatgatctacaagggaaaagactgggagctgtacaatcccacatcgcctgggtaaggttaagtgtgctaattctgagattgtataggtatgggactacacagttgaagagggcttaaatggtttgattggtactacttatatcaacaagatgtatctttttttttgttagcccatcatgaaagaactccaacctaaacgtgcttgacctgaggtaatattttaggttgggtgacctcctaggaagttttcctaagaagcggcgagtgaggacaaagcacgctggcaaaactcatgttggtctgcagggccagtcatcattccatgaagcagccaagagtgacatactcatggataagagtcattagtctgtgggagaaggcccaatggaggcttgaag

SEQ ID NO: 257106 - DNA, 651 bp, Cannabis indica
ttcagttgatgaagttgtggaaacagaaacagaatcagtatccccagacctggcttgcttcagctgtgaacgcagagagccaccgacttgaacttgatgagagtgaaaagtaggcctcttgactcctaaagcacaagcaagccccttccctttgacattaggatcaggagtagcattctgcctctccatattggttcccaaatcaagagaaggaatagcatcagcaagtgaccttgcagccaacagaacctcaggatgctggaattcagaatgatcagagacaatagtagaatccgttggtgcaatggtcatttggccaggaacagaaccatacggcagaggattaacatactcagtaaaagtagaggtatcatgagtggtaagattcggattaacaggagtaggaatcataaggacactagaactgataggtgatcctaaaaacgaactaggccctatagtagaattcaacaaaccagtgaaagtatacgattgggccaagaacggatttagcgtcctttgattaggagggatagaatgcggtggcaattcagagatggataaggcaggaggatgagaatagtcaaaagggccagacttatccatagatttttctttccccctaagaaggatggtataggggctagttgg

SEQ ID NO: 257107 - DNA, 801 bp, Cannabis indica
tgaatttgttattttatttatttcaatttattttgggagacataaaaaagtaataatttattttattttaattgttagttatgtaaaataaatatttttaataaatattaaataatttaatattaaaaagtaaccaatctaaaataacatatctaatccgtacatttacgaattgaattagattagatttaagttattgtataaattggattagatccaaaatataaaatccgtacttagtgcaaatttaatgcactataagcaaaatagtgtgaattgaattagatgaacactcctacttcctattttgttttcaataaaatctattgtcctaatttgatattggcactgctcttccagctcttaatttcttcagagaaacggttctgccttaacataagttaaactttcaccatatgagtaaaaactgtgtatttgctatgttcctctataactttttaaattttctcccaaagtcagcttttgtgcatcaaattacaaactcccccctttaaaaaaaaaatacaaactcccaacattcaatactgttataccgaaattaaatacagtaaaattggaacgaattaccgatagaataatctggctgagtcgcggacaatgtcgctctctttaagacgtttcgcggctctgcccgaagtgtgcacgacagtctagcaaccacggcgtccccaggataaaacagcctctgtataagtacgatacgttctgcaccgaactgtatcgctctgtaacaccctactgtttgctctcagaaaaatcgtaaagaaagaaaagaatttt

SEQ ID NO: 257108 - DNA, 1373 bp, Cannabis indica
agagacttgtcaatttgcaaacaaatgttctctccctttctcttctaaatccttcaggttgtgccatgtaaaacatcctcttcaagtgtcccattttaaaaaggcattatttatgtctaattgccttatatcccagcctttagaaactgccatagcaaggatgattctgattgttgaggctttgatgactggactaaaagtctctccaaaatcaattcccggtctttgatgaaagcctttagcaactagccgtgctttgagtctttggagagatccatcagagttgaaattttctctaaacacccatttattaccaattaagttctgaccaggtgcaggaggaacaagaacataagttttgttggcttttgaggctgtaattgcttcattcatagcattgttccagcctttgtgtgcaagtgcttcagcaacacttgttggttccctagatcgagggttccaaactacttgtcccatgaacaccttgggcttgaaaatgccagccttggctctggtgatcatcgggtgtccagcagcagcctgagtagtggaagcagtcgactgttcagcaggagttaccgcagcttcagcaggatttaaggccgattcaggatcaaagaaggctgtagcaatgggactaggaggctgatgttcagataatcccctctcaccacctgaaggagagccagtagatgagtgagaagtgagaggagtgacagtaggatgtacctgagaattgtgagactgaggagttgaagattctgctccttgagtgcttaaagatggacttttagaagtgggccgagagcctgcaattggtataccagagggcaaaatagaccaagtagaactttgtatgatcactggtttttcagattgatagttgttaagaaatcttgcttgaaagggaaattcaagttcattaaacacgacatctcgtgaaatatagatacgaccagtaggacttaaacatttataccctttgtgtgaatcactatagccaaggttcacacatttggtggaatgaaattgaaacttatgtgcttgataaggtcttaggcaaggaaaacaagcaacactaaaggttttaagaaacttgtaatcgggtatttttttgtaaagtaattcgaatggtgtcttgtgatcaaggacaggtgtgggaagtctattaattaaatagacagcagttgagaatgcatcccaccaatatttaagtggcatgctagattgagctaacaaagttaaccccatttctactatatgcctatgttttctttcagctctcccattttgggaagaggtgtgaggacatgagtgatggaaattaatgccatgagtgacaacaaaattagacaacacttgatactctcccc

SEQ ID NO: 257109 - DNA, 546 bp, Cannabis indica
aaatgagattaaaagtgagtttctctcttaaaacgaactcgatttactcttagaatacatgatcacaagttatcaatacctcatgaactacgttcgatttgattcctttcaaaaggatacgtaggtagcctaattgctaaaattaggtacaatcgcaatttctcaaaaaaaatctcaaatgaggtcattcacctcagtaaaattcaaatgaggttgttaacctcaacaaaaactcaaagtagggtcattcacctcgaaattgtcaaatgaggtcattcacctcaacaaatctcaaatgagaccattcatctcaacaaaagttctaaatgaggtcattcacctcaaaatgacaaagtaaattaacttttaacaaagatagttagaactacgtttgacttaattcctataaaaggatacgtaggtaacttagatgttaagactaagtgcagtcaccgatactgcaaaatagtataaaacacaaatttaaaattctataaaaggtcatccacctatgtttttttctaaattttcaaatagcaaaggatt

SEQ ID NO: 257110 - DNA, 1543 bp, Cannabis indica
ctctttcttcaactgaggacagtctttcttgagatgtcccatggagccacactaaaaacaggctcttcgattacaagtcccggggtgatgtttattgcaacgcggacactcaggataggagtaagtctgacgccctcctttattctggtttccccgaaaccttttaccttgccctgaacttcccgaagatgggaaagttctctttttttgctcaaaagtagaatcaccactctctttcccagggccagatatagggagagtagtggtcccaccaacactaggagtctctcgggtttcttgcaaaaacttaactgctccttcagctcgaagagccttgtcaaccatttcagcataggttgtagtgtcattggtagtgataaccaaatcatgtttaatcttggcattcaaccctgccaaatacttctccttcttactgaaatctgtgggtacaatcccataggctaatttagccaagcgatcaaacttggttgtgtattcagtcactgacataccttcgccttgtaccaactcgacaaactctttccgcttagcactgcggatcgcttcattgtaatatttagcattaaataaatcacggaattcctcccaggtcattctggcaacatccttggtaagggataccatcacccaccataccaaggcatcctcctggaatttaaatgtggcacatgccactctgtcatttccgaccactcccatgaaatttaatattctttcgataacggtcaaccactattcagctttcagtacaccaggacctcccagaaacactggaggtgcttgcttccagaatctctcatataaaggctccatacggttaccggcaagatgttgctcagctggcaccgcagggcctgcaggaaccgcagctggcggttgcgggggaagctcaataggagcaccccgctgcctaagtcttcgaatctcatcctcttgttactcaatcctggcttgcatctcagcaaacctttgctcccagtcaattggagcctgaggtgggttctcctggccacctctcggggcacgaccgcggcctctactgcgtccacagggggttttggggatttctaccaccccgaccacctccggtctcaaccaaatcaccctgccttctaacatttcgctgggcgtccattaattaggacttagcctgcgaacccacaaggcacgtaggtcagatagtggtcaatatatttttcaagagcgcaattagggttttatatcatccattaaatcatatatgcaacatatcttaaaacagcttgcaaaaagaaaattaagcttacggaactatgagttgagctcgacactggccttgattgtacatatcttgacggtcttcagtggacaaactggtggctctgataccaaactataacgcccgtatttaaatatttctaaactcaaaagataacttgattatattataactttttacttatatgggtcaggatcccgaagcttaaaacatgttttaaaagtatttcactagattatacacatatatattatttttttttat

SEQ ID NO: 257111 - DNA, 933 bp, Cannabis indica
taaatatcacaaatacggggaaaaactagggtttccaaaattttcccaacctgtagaccggttccccaaccagaattttggttttggtagggttcctggggaccaaccggtctaccggttcctacaggtcccaccgaaccggtcgaccagttcagtgcaggaaccaccaaaattgccgctaacttctcaattcaagtccaaatttcccaaaaacttccagagtacttgtacatactataatgaacaaaattcaagcaataaatctcagtcataaacacagaaactcaattcgccattggatgtcaaactttgccaaatcatcaccacaacctaccaattcaacttaaatcaaccatcataaacctaatttaaccccaggagaagaaatcaagcaggttacacatccacaactcctaaactctcaaaatcattcaacaacttaactaaagcttaagaaaacaaggaatagctagatttgaaggatataccttagattgaaacatctagatactgctgtaattccttgaatcacaactaaaagtccttccctttcttgctagttcttgacaatttgaaagagagagagaggttctacgtttttctttttctatgattatgtttctctaataaaaggatccattaactaaatagtttattaaacatgaataataatgctcacaaaagacaaaaacctcccctagcaaaaagatccttttgcccccagtcaaaaattcaaagattaaattacaaccaagggtagtttggtcatttttccaaccccgacaacttccgatacctccaatgcctaacaataatgccctgttaataatattcctaaccatataaaatgacactctctaatggcccgacgtctcattccactgctaccgaacacaaaccgagaaaataagaaattgacatatataacataat

SEQ ID NO: 257112 - DNA, 735 bp, Cannabis indica
tatattagaaaatataaaaatatacgtatatgaatattttttattagaaaaatataaaaaatgagaaaaatagggagataatacatagacctatttgaactaatattagaatgctacatcactatttttcctttatatatattgatattcacttccatatgaatatgaatgaccactataaagccatttgatattaacaatcataaattgaatatttatggtatgaattgggtaatttagaggagttttgagctgttagaaagacttccgactttcaaaaacatatgcacttgtatgttgaaaaaaatagtagctagttaccagttaccatttttttttcagtttggctaatttttctccaaaatgttctcaatcactcctacttaattttgaattatttatacaccttataaatgaataaatcaagtctccaacaactatctttttaatatatatcattcattcacattcataaacaatttgtaacattttttactaaagagtaaaaaagaggtgagagttacatattcaagtgatcatcaaattaaaggatttacaactcttattttgtgatcattctatacacattttgtaactcttgtgtaactccataatgtatgttataatttgacaaaattaataatttatcacacttaaatatttgtgacttaattatttaatctaaacattatattatacaaaataatataatattctcccactagattaaataat

SEQ ID NO: 257113 - DNA, 1080 bp, Cannabis indica
tctcaagactttttcccttctattaagtatctgctccggttgttcctcaattgatagatctggctgaagtttcaatgcttcataactcgagatatgggacgagtctgagacatacttctgaagcattgaaacatggaacacatcatgtacagcttccagcgctagggacatagccaacctatacgctacttgccctatcctctcgaggatttcaaaaggtccgatgaaccttgggctaagtttctctttcttaccaaagcgtttaatgcctttcatcggtgatattaggagaaacaccttgtccctgatctgaaaaccaatatccggatgctttggatcagcataactcttctgtctactctgagccgctagcattcgcgctctaatcttgtcaactgcctcacttgttctctaaatagcctcgggacccaagaactttttttttcctacttcatcccagtgaataggtgatttgcatttccttccatataaaagctcgtaaggggccatcccgattgttgtctaatagttgttattataagaggactcgatcaggggaaggtactttacccatgatccttcaaagtcaagcacacatgctcgtagcatgtcttctaaaatttgtatagtcctcttggattgcccatccgtctgaggatgaaatgatgtgttgaactttaactgagtacccatagctcggtgtaaactctcgcagaatctcgatgtaaacttcagatctctaactgaaacaatggactttgggacaccatgaagacggacaatttttctgacatataactcagcatactgatcaatggagaagttcgtctgaacaggttagaagtgcgctaaccttgtaaacctgtccactatgacccacacagagtcaaactgtcccgtggttttaggcaaacctaccacgaagtccatagcaatatcttcccaattccactctggtatgttcagtgactgcagcaaccctgcaggtctctgatgtccagcctttacttgctgacaagtaagacactttgcaacatactcagcgatgtcattcttcatgcctagccaccaaaacatggc

SEQ ID NO: 257114 - DNA, 999 bp, Cannabis indica
atcaaaaaaagaactaacggcctatgagtcttgaccaaaagggaaagctggttaaatgctcgagagttccccagccctcgagcattccaactaattagagtcatttttctgggcgggtgtgcccagcaacacccgcctgttcagttggagttgtggaaggaggaacagaatcagcatccccagacctggctcgcttcagctgagaacgcagagagccaccaatttggacttgatgcgagtggaaagtaggtctcttgactcctgaagcacaagcaagaccctttcccttgacatgaggatcaggggcagcagtttgcttcgccatattggttcccaggtcaagggaaggaatagcatcagcaagagatctagcagccattagaacttcaggatgctggaagtcagaatgatcagaaacaatagtggaatccgttggtgcaatagtcatgtgagtggagacagagccataatgcatgggagtgacatattcaggaaagttagaggtaccatgagtgctaaggttcggattaacaggggtagggatcataagaacgctcgaggaagcaggcgaccccaaaaacgagcttgggccaatggtagagttcaacaaaccggtaaaagtgtaagactgggccaagaacggatttggcattccctgattaggaggaaaagactgctgaggtaactcagagatggaaaaagcaggagggtgaggataatcaaaaggaccagacttatccatcgatttttctttccctctgaggagaatggtataaggactaggtggtggaacaggattttcatcacatttttgcaaataagactgacagaacctacgagtatgatcaagcctaccacagtaaaagcaaaaatctggcaatctttcatatttaaagtccaaccatttagtaaattcccgccccatcttaagaaaacgaatgttaatacccctcctaagtggtttattaacatccagaaggaatctgccccttaagtaag

SEQ ID NO: 257115 - DNA, 511 bp, Cannabis indica
aaaaaaaaatacctcaatggtgattaaagaatttctctgtgccatggacaatgacatggccatcattgtaaatatttcagtgattaaccttcactctattgattataacagttccatcatcacgtacttcatccacaatgagattttgcttaacactagccgaaactagagttgatcctttgaataaggtttccttatcaacctttgacataacaatttgataatcaaaattgttccactctttgaatccgatggctttgtcgggcggaacaaagagagtgatagcgttgttaccataaatggtgaatctattttgacgatcaacaaagaataggagttcgtcgcaataggtttgaacagattgaagatttctttcgaaaatcgtcaccatgaaatcatagcctacgaattctctaagagcttttgtgatgttttggatttgtaaaactgtaatggtagaattgtgtttgggtgatccattggagtccgagtccaaacaacaggttagaca

SEQ ID NO: 257116 - DNA, 1731 bp, Cannabis indica
aaccattttaattcatataactgcttcttcaaatataatctatttgttagggattttgacatataaagattttctaactttttccataactcagacggacatgtttcattcaatatactatactttaattcaggagccaaacttaaacgaatagtgcttaccgcttttgcctgcaactcttcccaatcttcatcagtcatactctcaggtttctttccttacagtgcctttaggagccctttgcaccaacacatctttcaccgtactttgccataaactgaaattattcttcccatcaaaaagcttgatctcaaattttgtggaagacaccatctttgacattttctgtgttaatctgaaccttggctctgataccacttgttagggaaaacgatagacttcaagcgcagcaaaacaacaaagaaacgaagcaaagtaatttcctcagtttggtaaaactaccaaacccacaaagagagatatatttcacttattacttcaaaattacagacactctctatctcaatctctctacccaaatcacaatacaccatttgcttcttcctcactctcaccacataacaaactcacacacttctcttttcacaactcactatttttctgtcacacataacacatatttataaggttacaaaacttgggcatcaagacaacttggggaccaagacattccaaagcttccttaggaagacttttcaaaacttggccactaagactttttttcccataattaataattacctaaaaagaaattgtaactttacaaatataaataaataaataaataatttgagtcaaactctaacaaaatacgatagaagatgttgctaaaaaatttaagtgctcaccatgaaaagaaatttcctccatttaaaattaaaattcatatgaaggttacttatcaagaagaaaaaaaaatctgatccaaattctaaagattcatctttggtattttttttttaagtatgttaatttttttttcaaactatcatctcataattttatatatttatttttagttcttgaaactaattttttttaagtattttatgtctgttcaactttttagttggctataataaataactgatttccgtaaaattgatagttttttttatatgtaattaaggtttaagttttatattttttgttatcttaagaaacttgtttcattgttcataattttagttagctgataaatattattagtttctttaagttagattcaaacgtttgactcggctggcgattccggcgtcgaactccgacgacttttctagtgatttttttaggcaacaatgtcgatttcagtgacttttccaacacttacagaaactctggcgacttttccagcactgacagcaactcaaacgacttttctggcaccaatgacaactctggcgatcactgtaattttatttattttaattttttttttttaaaaaaaaaacatgatgggaattttaatattttttatggtaatacaaatagcatattccatatatatatgttaagttttttgttttaaatgtcatattttgttctattaaattttcttaccatatttatgtgaactaagtttttttttcccacatttttgtaaataccccttattcatgagaggagccctattcatgattccaccgttttctaagaggaaattacactctatatcctttttatattgtcctcttttatttttaccctctt

SEQ ID NO: 257117 - DNA, 916 bp, Cannabis indica
agcactctgaagtttgcacatgcggattttttctaatactaaatctaaggatgataacgtccaagtgcctctcaacgagcgagacaaggctgacgcagagaagagaatggacatcaataagagaaatgaagctatcactacttggaacaatacatttgatgatcgggacttggcctatatgggcaaaaagcaggagaaaatggggggtaaccttcccttttgaagaaattatgtgcatggcttagcatcttgacaagaacatgaacctcttaatctatggtagagattgttggtttctagggttcatattagagtcgcagtagaagagaataaaaatggatttaattaaaagaatttgttgaattaatatgaaccttaaattccaaatctcaacacaataatacataatacaaatccaactaattagaataaagatttacctcttgttgcctatcagggttttctcgctacttttcgtatatacaaaatgaacatccaatccagtaatagaacttgttgaagacttcacaccagtgtcttccagatcagcctcaacacttacgaggaaaaaagtgggcttttagattcaatgagatgaaaataattttctgatcacaatgtattagacaactcatgagacactgtgattgagattggaaaaacacataacacaatagtatatgtatctgtgtgtcatgtagagagaaagggagagagagtttgaaaggttgttttcaattttctgttctctttctgttttgctatcgtatgttttatctcctgttatgcattgtatatttaatgttataaataaactctttatttaattctataaaataaaagataataatattttaatttaaatttaaaattaaatgaataacagagataagttatatttttttattctatatta

SEQ ID NO: 257118 - DNA, 664 bp, Cannabis indica
gatgttaataccagatccctgattgtgcgcctgaacagattcactctgtctacccccaatatcggaacgttgatgactcgtctgggaggttgaactacaagaattagccaccggaccagtacgaagccaatcgacaccaatattatggtgtcttctacgcggaggagctttcagatcaaggttatacagcttctcaatcaaatgcataggggtatcaaaaagacgatcgcagaacctttccagaatggccaagaattccgcagataaaacaaaaagttggtaagtcttcatacttaaagttgacggtacatgaagcaccactcctcatctccaacttcatattcctgtgaagtggtaaatcgacccgcagtgaaacacgaattctgaaataattccgccaaacaccttggaaattattgggatccgacttaacgaatgaaccaatatagttccccacatccttaataactttttcagacatgaacttagatgtcatatcatggatttggacccaaagatcaagttcttccaatgctaataaccgtggattttcaccatgtttaaccctcacaaatattagtggcccatgatcgaacgtccatgggcttccttcaatcacacgttcgatgtctacctcatggtagaattggaaaatataatgatt

SEQ ID NO: 257119 - DNA, 2145 bp, Cannabis indica
gctcctaggatctccatatgtgtctacattaaaacaaaaaaaataaaaacaattagcttagagtatacctcttgaagcctaacagggtatcctcgaaacttctcgtatgttgtatcccttaatctagttgatgaggaattagcaatttgaactcacaccagtatcttccaaatcgatccaccgcacacaaggaatagtatgagctatgaggctaaagtgtataacctttgttcttgttgagttctcaacacatgagcaagaacaatagagagaaaaaaatagtttctttttctctctatagattttgaatttttgcagtgtaaaagagtgatcctgatttctcaaatcaggctcctatttatagtagttaaatccctttaattaaatcattatttaattattaaataaataaatatctataaccgaattcggttactgatatttatgagggaatctctcaactacttgagagaatatttcaacaaccttgaaatatctttaaccacttttcaaattagatatttacctacttgaattaattaaataaataattaacccaaaaagacaatctaatagggacaagaacaagctaggcacctaccactatctttaggacaaggttggtgtcttttatcctgataacttttgccctgacaattcttgtctcaacaaattttgtcttgacaaattttgtcttttttcctatttaattcatttgaaaaaattatttatttatattaaaaaaataattacgattttgccaattcaaaatatattttcttccaacatctttatacaactctttatccctacccttgacagtgtctcaaggtggcgattcgaggatcatggacctataattctaagctccaataaactacattatttattgagtttcatcaaccaaataatctatttttttattaattcaatgattactccactataaatatggaattacactcttagtaattatagaattatatttactgagttgaactatagtgtccattgatatgatcaattacggtgattagccctccatgtgttggttcgtaattagttttggtcaaaatactattttaccttttctaattattacttctttacctttattttcattaattctctagtggaagtataattcaagatcccttctgtatttgtgcacaacattctagttctagaattaacacttaaagggaaccaaaatttgatccgttaagaaagtcaggattctataattgtacatcatgttcccaaccatccatgttattagttttccaaaagagaagttgtaagaatcatattctttgagaaactttaacgggtgaatcaaagaaactaataacataaacaagagttcatgataacttaggatttaggccaatctactattgatcatcgttatgatatgaattaggtctttatgataaacgacatattgataaagacaactttattcatgtcagtcattgtcatagataatctctattatttacagtaccttcactttgatgtctcactacatccgtaatttgaaccaagattacttgcaccgaagaacgagtatcagtgaaccgtactagaaactattgattaaagattccataactttaatatgttgctgaatattttattcatagctaagtggtcttagttctctatacagctacaagccacaacctcatatatgaataaagaattttttgatatttaatataaattattcaataataaatattaaaaatttaacattcatacatatatcaaatgtttgactcttcatttaataattaggaatgtgttaataggcttttcagggcataaaccctaataatcttccactttccctaaaagcaaattgggcatctcccatagttccatattagctatatgacccacaaaagattttgctggtaatgtctttgtgaatggaccttccaggttatgttccgaagcaatcttcaagaccgtcacatcacctctctctactgtactccttagaagatggtacttcctctcaaactctcttgtggctccttggttctttggagttggccaccgctccactgttgtcacagtagagcaccagtggtttttctacttctagaactacttccagagctgtgtagaatttcttca

SEQ ID NO: 257120 - DNA, 553 bp, Cannabis indica
gtacttcatgtgctagcttgaggaaagctatcagggcctcgtatttagcctcattgtttgaggctttgaagctgaatttgattgctctgtgcacttgttgcccccaagtgtgtaagggcaatgcctgcactggacaattggtaagtgcagctttcgttaacatggagtttccatgctagatcttcgggattttgttgctgctcttgctctcacttcttctctggctcttgctattctcctgagtcttgaggggtctcaagagttgagttagtgcactcaaccacgaagtctgcaagggcttgaccctttatggctgttcttggttggcatgtgatctcaaactggccaagctaaatggcccatttgagtagtcgacctgacgcttcaggtttctgtaaaacccgttgcagtggttgatcggtgtagaccttaatggggtgtgcctggaagtagggcctaagctttttagaagataagaggaagttgtaggtcagcttctccaagagtgggtattgaatttctacatcgaccagtcttttgttgatgtagtata

SEQ ID NO: 257121 - DNA, 952 bp, Cannabis indica
tacctttatctttagaggctcaagcagaggcttgtttacttatgttttctcatacaaatctgttgtctccagctattggggatcccatttccgtaccaactcaagatatgcttattgggctctatgtattaacgagcagtaatcgctgaggtatttgtgcaaataggtataatccctctaatcatagaaattatcaaaatgaaagaattggcgataatacctataaatatataaaagaacccttttttggtaattcctacgccaaatacttttatgcatacttcttccggttgatctatagcatactctattctcgtaagatgatatacactagctaacagtccgcccggtgctacatcataggcacattgggaacgtagataattgtaaccatatacatataaaatgacagcaatggaatgccaatcctcgggctttatttgtaaagtctctattccttggtaatcgaaacccaaagatctatgaactagcccatgtttgattaaccaaacagacaaacgaccctgcatcttttttctctctcccgcatttttttgtttttttatatacgtattataagtaataagtatttcacatttacgataaaatttcttaagattgattcgctgtttattattctgtacaaaaggatcttcgttaattcactaattcgtcgaaagatactgaacttttgtatttgaaaaatctttcagtcgggatctctgaagtagatggtggttgatacagtaatccttgattataacttccagtatgagtactgcgtttaacacgaaacttgtggctggtagtaaaacaccgattctcctgttgagatcgaattcgatcttcatagatttctcgagatattttcttccgaagttttgttatagcatctataactgcctccggtttaggaggacatccgggtaaataaatgtaaagaccgcttagt

SEQ ID NO: 257122 - DNA, 299 bp, Cannabis indica
ttgtgaaataatccctttaattatacatatgatagtagactccatctatatttatcccaatttgctcaaatatgaataataatacaaaattaaattaaattaaatatctttaatcaaaataattttacaatagaaaactataaaaatatttaattaaactaattgtatatccataattaaagatttaaggggtatttaaataaatatgagaaaaataaagctagtttagatatatatggtaaagaaacgtaaaaggaaaaaatatggtatttaaaataaaaacttaacatatatgagat

SEQ ID NO: 257123 - DNA, 531 bp, Cannabis indica
ctctgaagctaaacattgatgcggcctttgataaaaccagcagtaagattggtgttggtgctgtcattagaaattatgtcggtcaagtcattgctgccctctctatgcctattgttggtaattttgcatctcacgaaatggaagctaaggcaatgtttcacggcatcaactgggttctacagcagcagctttccatctcaattgttgaaactgatgccctcttagtttccaatgctttaaagtctccagcagctggtatcttagccttcagtgatctaattatggacatatcttacctcctttccttcttccctaatactattgtaactcatgtaaagcgaaatgctaattcagttgcagatagtttggcaaagtttgccttagggttggatgagatttgttcttggtgggagaattttcctccttccatttactctgttattgtcaatgactcattttaatttataataacattgtttattctcaaaaaaaaaaaaatttaacaaacttaaaaaatcaaaattacaaaat

SEQ ID NO: 257124 - DNA, 961 bp, Cannabis indica
tatatatatatatataaattaaggatgtataatgtgtgttaattgaatggttacacaccgaagtggttgctccataattgtctctttactactctactctctccagcatattgttagtatgtttagacttagacatttttgcaagaggtatactttcctaactattcatactctctaaataaatgcttggatcttgaatagttttcgagcattattagataactatttggttgtagtgaatacaatgcttctttttataaatattttttaacattatctagaatatttttggaataattcttcaacgtgttatgtacatatgtatttattacaagtcacttttatttgatcttccaaaatgcaacattgtcggttgcacctgtagaacaaattataaattcatggagacaaatttgtaaggaaaaagcaactaccaagagaaaaatgtagagaagagaattgcattaacacctatacaaagctaaggaaataattggaacaattatagcgatagccttcaaactaaatgtcaagtgcgtaatactattgtaacataagtggttaagtgctatctttgcacacacataaatataatcagcagaaaatccagtatagtaacccaccccctacactaactggacccttagtagtttcgcccctgaggaggaccggtataaccaccgggagctcctcttgggccaggtacaggcatgccacttccaacatatggagggccacgtccttgtgctgggtattgaccactactatagccaccaacttggctcccagggccacgtccatgagctgggtaaggaccgccactatagccaccaacttggttcccacgatttgggtaacctcactctggtttccacttgaagggtatctgttaggaccagtaggtggaccacgaggctttccgtagtggtgatgactaggtccagagatactgtgccctgtg

SEQ ID NO: 257125 - DNA, 830 bp, Cannabis indica
agaattttgtttttcatacaatgtaaacttcaaacttttaattcattcaatgacaaaggcattattgcggccttgaagtatcagaaagaaaaaaaaaaagaatcatacttacttgtggtcttggtgatagtgtagtttctttgtatatattttattttgcaacagtgaaggttgttttcttcgacatctgtgaaaacaccatatcaaagaacattagtagttgaaaagaaacattaagtcacttgttacataagaaacatggatgtggtcatacgttgatctccatttacggtgttaaaatcatcaagaaagtagaaactccaatcgatgactctaataacaatccagaacagcagctgaaactccaatagacaactcaaattataatcaaattataatcaaattataatcgagatcgattttatatacagactcgatttcttaggagaattagtctcattcggatcaaaattacaattttttttttttttgggaattagcttaccatcgtaaacttttatgttttgtttattctctttagagttaacctgagagtagttttaggaagaattagttcaataagattttatatttatatatatattttatttaggagttaacgtgtaggttttagtttttatatattttattttgggagttaacggtagatatgtttaattttattaaatatataaatatatatgtatttcaaataagataccaaatataaaaaatctaataatagcataaaaataggaataggaagcgttcaaaaacacataatttttttttaaaaaaaaaaacctaaaaatagaaaataggaaaaaagt

SEQ ID NO: 257126 - DNA, 614 bp, Cannabis indica
tgtagatcatctatagaggatcattgattatttggattgaaataatagataattaatagcgtttctatatttgaaacatatagagaatattaagagtaaaattttgaatctatagtggagtcacgagaaattaataaaatagcgaatttacttggtaaattctagaactacttattggaagattgattacatacgctcatgtccgcgcactagttgagataatattggcttgtagactcagttaattggttttaattaatcaattagaattttaaattagactatgtcttatttatgaattttcactaagcaagggcttaattgtgaagaaaaagattttaggatttatttattaattaagagactttgtaaggtctaattaataaataagttaaatgataattttatttgataattaattatagttatttaataaatagatttgacatatatataggattaaaattgaaaatataacatcagtgaaagaaaacataaattgttaaataaaatgacaaaactgtaactagtgtgttccactaagtgaggtcggccacttaagctatttttagctatttttttatcttttttattctatataatttaaatcctaa

SEQ ID NO: 257127 - DNA, 612 bp, Cannabis indica
tgggctcccttatgcgaatcgcatgttcaacaggcctgggcgggccgggagtttcttcttcctcttcaatggagtcacctgctcttcctcaacttcatcttcaggattcaagggctcctgagcatactgctcaaccgttgcatctcccttcaaattagcttcgcgcttaagttgaatgagttcattctcttcatgagctcgttccgtccgggcggcaccaaatttcttcctcttccccttcacgaattcaggagtaaagtacttgggatagagcccgtacctcagaaagttatcctccgaggtcaacaagataatattcttatcttcccccagaagccgggcaagtttttgagctttattccaaagagcaagactgaggggagggcggtgattggtcaaaatctgctggaactaagtctgagtaatgcccgcgccatccaccatgaagtactcatcagcaaagcgcccaatcttgctaatggccttatcgtccgtgcctttcgaccacttgaggcctagttgagagaagtagaagtacccatacctgccttgcttaggggtggacttcaaatcgaagtaccaagcaacctcgtggggagagggcatacccca

SEQ ID NO: 257128 - DNA, 1119 bp, Cannabis indica
ataaattaattgaattgaactataacaacttaatgtcatgcttaattcattacaactaggaacagggaaaagtatctagaatcttagtgggagccatgcttaattcattacaatagtaaattgtggacaaaagtttaaatggaaagcaattggaccattcttatatgtaattcatgaatgattaattttaatattagttaagaaattctaaaataggtttattcataatttgtatgtataaagaaagaaacgagctgggaaatttgcattataacaaatacaaacttaccagaaactaacaattctgttgtaaattatttccccaagactctaaaatctgcagccaagtaccaaaaagaaactagatataatcaaagtagtaaaccaggaatagcatgaacaataaaaaataaaaaataacaattctgttgtaaattattacactcactcactcttcagccaattttctagcaaagtaatgcctcatgctatagaagacttgtggctaaaacagagaaaataaaaaatcagttgatatactttttagctcaatcaaaacaatctaccatctattaccatttttctttgccttttcaatcatgcctctatttaggcatcatatgctctcattggtttaaacaataaagggactctaatctggcaatggcagggagaggaaggacaaaaaacaaatggaaacccaaagcagtcaacatataacacccatgatatgatatataaacgtgtaagatatgaaatgtttgtcttaacacaactatgggctctgtgcaaaggagatgcatatacacaatgtgcagtatacacttcataataaaggggttcaccatgtttccagtttcccattctaaaatttaagtaaacaactaaatgggaataattatcacccaagcgcttcacattgaagtgaattagatgtcattaatgcatcatgtacaaagccatagaaagaatcataaaattcatgactcgtaccaaacaaccacatacccaaaatccatccactaattctcttacccctcctcttgagtccacttctccattctaccaaacacaatctaaaatgtattttcattaagaaagcataccatcctcccagta

SEQ ID NO: 257129 - DNA, 864 bp, Cannabis indica
gtaaaagaaggcttcgttttgggtcacaaggtttctcacaatggtattgaggtggacaaggctaagttggaagtcattgaaaagctaccacctcctaccacggtcaagggtattagaagctttcttggacatgcgggattctatagaaggttcatcaaggatttttcaaagatttcaaagcctctttgtttgttattggaacaaaacctactatttgagttcaccaaggagtgtcatgaggcttttgtgactttgaaaaaggcattggtgacaaccccaattattgtagctccggattggactttgccatttgactttatgtgtaatgctagtgattttgccattggtgtagtacttgggcagcgaagaggaaagattttccatactatttactattcaagaaagactctcatcgatgctcaaattcattactcaaccatcgaaaaggagttgctggctgtagtatttccttttgacaagttccggtcttatcttgtgggaacgaaggtgattgtctacaccgaccatttagccatcaaatatctaattgccaagaaacatgtgaagccaagactcatttgttgggtgttacttcctcaagagtttaatttagaaattcgagatagaaaagggacggagaaccaagtggcctaccacttatctcggttggaaacaggtggtgaaaaggaagccgaaataaaaattcaagaaacttttctgaatgagcagctgcttgttttagcccaagcaaacactccttagtatgctgattttgtaaattacttactgagtggattgcagcctcctgatttgaataggcagcagcaactaaaaaaattctttcatgatgtaagattctactat

SEQ ID NO: 257130 - DNA, 1191 bp, Cannabis indica
tgggaccaaatcctaaggtgggtctgtgtctgagtaggggcttggtccgggtacaattttgggtctgggtctaggtcctggtcctgttcctgggtcccaatccgcttctaatttcggttccattttcaagtcataaggtacggatttcgtgtcgtgtttgggtccgaatttgggtttcggtcctgattttgggtccggggcgaggttcaggtctatgtttcggtctcggttagggattgaggttgagtcaagttccgggttttggtctgggtcaagatcctagtaccattctaagatcccagtccgattccagttcaagtttcggttttgcttcccgagtgtggttctgggtctgggtatgtgttcggtcctggtttgagttcgagtttgggttgggattctggtgtaagtccataatcaagacaccgactatgggtcgagtccaagcatccagtctcggatcccaggttccgaggtgggtcctaggtccatgttttggtctggggtcgggtcttggatcccgatccatgttccgaggcccaagttctggtcccaattttaaggcccaattctagggtctgggtcccccatctatgttcaggtcctaggtcccagttcgggtccaagttcgtgctccggttcgggtttgggtcttgagtcccggtctgagtccatgtcccggtttgggttcaggtccaagttcgggtcccagtcctagtgtgggtccaaattttgggtcccaggtccgagtctccttcttaggtcctgggtccggcctcaggttttgggtctaggttttggtctcggtctaggtcccaggttttggtttatgtccctgttatcctaatttttgcactctgacgtggcatcacctgatggtgacacgtggaatcgactccgggtatctgctcgcaagacacaggccgtacaagatacctcatacatttgctcggacgaggtcctctagaccgagcagtgagcaatctgcgcaaaatgccaacacttagcaaattcagctttcgcatcgtgagtcatcaaggaaatccctataactttgggatcagatttcagagatatggcaagctgtccaaatcccatgattagtgcattctgtattactatgcaatctttttgcttatatcaattgtaacgagaaggaaaatacttcctctccaagcttatagccctata

SEQ ID NO: 257131 - DNA, 745 bp, Cannabis indica
ttagatgctttatgataattttaacatcttattagtagctcgaactactcaagtactatttggccttaaacttatattcggaaagacaagagtgttattcattgaaagtggaagcgtaagagttataaaacgtaagtagaaattccctttctttttagaaggttaatattttataccaaatgaatcaaccatgaataaagaatttcaaatttcacagagacaagctatcagcatattgtgttgtatattaagtacaagcaataatctatatccatatattgttcaaaaaaaaaaatctatatcgatatgctcttctactatgcaatagcttattgtagtaaaaaggaaaaaagacaaacaagaaagaccattctacagaacaagggagcccaaatcactccttaataacgaggtatcctattcctatacctacaagcaattacaaatgaaatgatatgtagcaggaacttctaatgctcagttcaatattgaagttcaagccacgaacataatgaatacaatcaagaaaaatatcagtaccccaaatattttgattagaagccacctatttgatgatatttggttgagattcctcagaagagcgctgcgagcaccttcaacattggtcaatgactcatccatgttatcatcaatcctgcttgcatcaattaatcagatttagtacaacgcaactgagaccagataaaatcaagcactaacaagctttattgatggtgcaaagttt

SEQ ID NO: 257132 - DNA, 1113 bp, Cannabis indica
atatatatatattcaatgattaagttgttaccatgtcactgtactattactaattatcaataacaaataagaatttttttactttaattatttgagtggcaaaacaaaaaaattgtaataatctaattttctatatagaaaatttttggttaggagcatcatttttgtttttattgtaagagaaattatatatatattggtggtgtatatattgtagttacaaacaccacttttaaaaaaaatcaaataatttgctatgccaacagtaaagtaataaatatattcaatactatataaggaaaaataattgtgtgtatgaattttatattgggtaaatattattttaaaccttatgttttgtaaaaattattaattgtaccatctattttgttaaataaaaaaatagattttatattttctaaaataataaaaaaataacaccatcagctcaattttcaacaattttattttttttaatataactaagtactttaagacatttttaatacaaatggctacagaaaatgtaacaaagttttatcataacatttctagatcagattattattaagttttattttaacgaaaaatcagttcagagtcttatttgtacaattttagaaaatacatgatctattttgtcatttaacaaaacaaatagtctaatagatttgcaaaacacaaggtccaaaataatatttatccttttattttagtattataaatttttcaaaattatttttctaaaaatattgtagaatgtgtgtctatattatataacatcatacaaaatatataaattataatttctcaaaatagataaaaaaaaaatcaatataaaagaaaaagtgatttgtaactaaaaatctcattaattataatcatattatgatatgaatttgttattataggccttctaactaggttatacttggtcacattatatatagtcagggattgacattgacaatgtcacttactaaaatatacatcaacttgttataaataaatatattcaacttattatttatatattaaattaggaaaataattaattaaggaataataaagttgattatttaacaaagggtgcaagtatgcaatctttgtcat

SEQ ID NO: 257133 - DNA, 739 bp, Cannabis indica
cgggcttgcttgattatgcaatgtaaaaatataagcatatctatttctatgcatatggcaagttataatatctactatcaaatgttatcgttaggacattatatatgatattgcattatgacactggcttgcttgatttgacaatgtaaatatatgaacatatctatttctgtgattggttatattacctactgttgaatgttatgattttgtattacctgagatcagtatattaatgcttattcatggcagatgccagtagtgacttggatttcatcttacaatgcgtaatggtttgattctgattgtgtattaatgataatatttgaataataaactatataattattattattgcttttcttgctgagtccttgtgactcacgggtgttatgtggtgcaggtaaggacaaggaaaagttagagctgccatgaggtgactgccttctccagcaatgtacatattgacctcatcgacaagcgtgtcgggttacaaggagttgttttgggctgtatccatagtgttatgatttttaggcgtcgtcattataatgtccatttttattgttttatgttagtcaaaatttttaatattatcacggtttttaataattaattaatctatttgtattaaattagtttataaaattacacgcgtggcgtctttatagattagggcgttacatgttacaattttattggtcatgtgaaaattatttaaaaaaattttaaataaaaa

SEQ ID NO: 257134 - DNA, 900 bp, Cannabis indica
gctatactaaaatactaaaatgtgattctaccgagccatacaccgcgttccatgttgccgggcactgaacatgcaaaaatatgaaattctatatatgacatataaaatacattctgaattcaaataaatcatcaaaaataattattttaatatcaataaataattttcataattaaccctaattatctgctaatttccaaatttaaactaagcggtttttacagtcaagataagatttttgatctttattgaaagtaaataagattacaatgaaataggattttatttagggaaaaaatcccaatagaattgacatttgagcaaaaaaaaacaaagaacacctagagatttttgagggcatggagatcatattttccctctatgttgggtcttctgtggatagagaaaggtagctggtctgggctgcaccacaagagggtccttcatgcggttgttagacaacgtaacagagcccaaaagaaatagtaacgttgctgagcctgggagaaagaggcagtgtcgcagcagctgaccggagaagttcagtccaacctggaagatgaaaacatagagaaaaattgggggggggggagagagagtgtggcagaagagagagaaagtgtagaagaaacagagaaaactctaaacctaaatgtctcctttatatgttcagttataaaaataaataaataaatatataaataatgaaaatatgcccaagaatctgtgatagaaaacactattaaaagttttaggatgtgtttggcaacataccaaataaccatggtggaaatgttgttttttaaggtccaaccataaagggccccctgttccaattacaaaagggtgttaaaaggtttctaaaagatattgtatccctttttgtttttctaagtataa

SEQ ID NO: 257135 - DNA, 718 bp, Cannabis indica
ttaaaccttgccaagaattgccactggctacactggaggggagaaatgaaacgaagaggcacgggctcattcttaaacaacgccaagaattgccgttgcctccacaagatagcagcaggcaaagcaagaggcctgaaactcagaagctctgccttaaacaatctctagagttgccattggctgccacacaagagagcaatgaatccaagagtaatgaagctaataaactcgaccttaaaccagaacaagagctgccattggctgctcgccgagagagcagaaaatccaggaggacctcgaagaccagcttgtttattgatggtagtcaaagcttggatcagttttatggagatttgttaaagccttggcttcttccaaggcttgaagcagagcattgtgattctgacgaagacgattggcttcttgggtcaaagcaagataacaagcaagatgctacaatacataaaaccgccaatgttgtgtcatgttctaggacctccaatttgtggccacaagctaactacttgccggaagctgacatttttggattgccttacaccgtacccttttgatatatttttttgttatttattatttgtagtttaccctttagatatttaactaactttttatttggtttagtgtcttctgaaccaaagacctgtagtatggaaatttcacattacaaagagctataaagtctgtacatattttacaa

SEQ ID NO: 257136 - DNA, 1034 bp, Cannabis indica
gtaactcaatagaggatcgtaaaagtctctaggaaagtcttgctagtattgagacgctgaaagatccgtggatcatttttggtgactttaatgcaatgtttagttttcttgaaagatgcggtggaagacctatccggaacaatgacattgtggatgctcaatcttggcttgccttgggtcaagttgaggaatttaaaagctcgggctctttctacacttggacaaacaagcatgaggttggggataggatatattctaaactagatagagtttttataaatagtatctggttgaataattttcctaacttagatgcttgttttaagtgggaggtcatctcatatcattgtctttgcttaatctgaaatgaagtgcaatgtaatataggggttaaaccctttcgatttgagaatcattggccttcttataatggctttgctaacactgtaatggaacaatggaacaaaaaagtggttggttgtggtcttgatagtttgatgcagagactttttagagtgaaacatgctctaaaaattttcaatagatatgaggtgggggatgttacaatagattacaggaaggctaaagaggattattgtgaaatccaggaagcagtagccttgaatccaaatgacagacagcagcaacttgaagtttcgatcaagcagtagaggtttcaggctgcaaagaacagatttgagcagaaccttagacaacaaagcaaggttaattggattaaatttagtgatgatcatacaagttactttcatgcggttatgaggaaaagaagacttgaaaacaggatcacaacgtacatggagggggacactatcattgatgattttgagaaagtggttaaattgattgatggggattgtttaaagcgcggtaaattcctagatttggagcaacaaattaaatgattaagccttttaacaaggggggtgtcaagagagctctttttcagcattcacgcaactaagagcctaggattggatgggttcgagtctagaatctacaaagacttatgggat

SEQ ID NO: 257137 - DNA, 1237 bp, Cannabis indica
tccaatgatgtgttggcttaggagggggtattttggtaattgtctttagtagtgagctaccttttgtatgggaaaggattgtgattttcagttatgcaatttgtaagagaaaactacttcttattagatttctgatagtttttcagggctttttttgtatgattttttcgtcccctttttgatccaacttgccactatttataatcacatagtagacaattaatttacaaagttgactgtcactttttacaacgattatcccctaaaatcatgagatctgattacatatcacgttaagtaaatgcgaattttattttaatttcacacagttgtgaatatcccgcttttactgggtcaaaataaacatgtattaaatatggcgtaagccatatcatattggaatgtctcgctgggaatagagtagaattaatcttcatagcaggctggagctcgtcatatatctttccaaggttgataatgcatgtttcgtcgcttttactttaaatttgacaaccacagtttctggtggcgagatgatctttttcgcgtgcatgccttcctgcggcgaggtggatgcctcgctatctctcgctttggttcgcccatctgttatacttagtttgtataccatatattatacgccaagtgtcttcattgtcgttatatctcctccacgtaattaacgaggttagtgcctcgtcttatacacttgaagttacctggtttctcatcgaggcacaaggcaacagtttgtatattcttatctcgcataagactatccaatcagccgagttgtaaacatactctgttaattatgcttttaacgaaaggagagttctggattgtttactgttaaatctgcttatcatttggctttctctaatcaggaccttccatcttcttcttcattttctgactctaaaaagttttggacaagaatatggtcttctattgtccctcataaggttaaactttgggtctggcgtttgttgtctaatgcaatccctgttgcttcttctttgtttaaaaaatgtgtgattaattctcgtttgtgtcctgtttgtaagatggagaatgagactaataagcatgcattgctagactgctccaggtccaggaaagcttggcgatattccaggtttgctgcttattatgatacttttaaacacttgggtattgatgagttctttcttggtcttgtacaaactttgtgttgaaatttattttactaggatct

SEQ ID NO: 257138 - DNA, 474 bp, Cannabis indica
tatgagctatttatggaataaaactattttcaagatcgacgaccttagggactcgatgggaggctaaaagtatcataacatatttaattaatagatttgataggaatataatgataagtttatagtgtaagtatttgagtaattaggagtatgtaggatttgacctagtgccttagaagtagagatttcttagtggcaaagaaatgataagataactattaataatgaaatttttattaataatattaatattattattattattaaagtctgttttataaaacttatctgattatatatatattatgtttttaaaacaaaatagttacgaacgaaaccttcttcttttggtgtgacaaaaccctctttcctcttaatctattttcttcgattttcaacccgaaacctagtaattcaagcttaggtagtagcaggatagttaatcattgaagagggtgttgggttttgtgccct

SEQ ID NO: 257139 - DNA, 566 bp, Cannabis indica
tttttcccacagcacagctgtgccaaactggcccttagtcattaacaaataactcttacaaatctaaataataaaaatctagaaactggaaaacaaattaagggatgagctctagcaagggtgagcccaggtccctcttcaagatcaaccttgtcattgaaccctttccactcaaagcattgaatcatacaagcaatacttgtttgaatgatcaacaaagcaagtgaaactcctgggcaccctcttcttccactcccaaatggcaaaagattgaaactttttcccctaacatccatgcggttgatatttccactcccatcttcacttagaaacctctctacattgaactcaagaggatttttccaatatttggagtctctaccaatagcccatgagttaatatacactttggtctttttaggaatatagtaaccattaatggtgcaatcttcagttgattatcttactattagtggcccagctgggtgaagcctcaatgtctattttgtatagcttgaatatatggaagatcaacaatgtctcactcctctactagtctggttttt

SEQ ID NO: 257140 - DNA, 621 bp, Cannabis indica
gttaaatgatgatatataatatacgtgcctgtttaaaatagtcacatcgtgagtatatatatagattaatgcttgtcattaaattttcacgagacttcttaacccttcatataatacatacacatatatttataggaagagagttaaatttagttgaccgaaccaattcttacgataggaggatttcgtatctatatacttgaagcacatatatccattataattttttttggccattatatctcaaatattcttctgccagatcatttatacaaggtacatataaactaaatatatatataatatcagtacatataccgagacccacatcaaacccctattttcataactttggtgccattattgaatctataccaatatatattcacaaagattaaaatttggcatgtatctatattgtatacgatttgtttttttttgttttttaaaggaatgatttattgtttgggatcactttgcacatcatgaattaatatttttttcataacagatatattgagcctttgtttttttttgcttgggcgatttcgaatcaacggggttaattgccaaccctttttttactagcaacttgtggcaccagtgaggtatgaatgtaat

SEQ ID NO: 257141 - DNA, 552 bp, Cannabis indica
ttaatcaacatacttgtgagtagatctaagatcctggtaaaataaattccaacaatctatgtaacctttatgaaatgtggaaaatccccacatttcatacatgtggataaaatgaaataaccattgataactatcttttgatattatctaaaagtagtcttttgttgccgaggtaacctattctaactatggctcacatctctcaatagtgttcaagaatagatggtcacattcttcgagacactagttaagatgtttgtccttgctatagcctttcgtagaaactcttggtagtcttttgaaattttaagattagttgtactttgcttatttctcttaatctttcaacatactcatgagtatatgggtcaatgagttgcaagctcttaaagaactcattatctacccttttagcgatagagtttcgatctgttacaccagtgaagacgtttacctttatcatatcgccatacgtttcttatcctgctgtcttattgccaatgcataacgcgagctagatattgctctagattttaccttatgcaaagaaat

SEQ ID NO: 257142 - DNA, 1637 bp, Cannabis indica
gatatatgggtgtcaggctatggaacgggcttgcctgattaaacaatgcaatattagattactagattaaattatcgacttgcctgattaggcaatgtgatgtaatcaagatggttcctttatgaggtaatatatataatatattatttaatgaatatgatttctattaatggtataatagtttatattacaaaatatctttagactgatgtttattcatgacagatgccagttgggaatggcaatcgggcccggcccggcccggcccggcccgccatagaccggcccgactcgatattgttttggcctggcccggcccggtccgacttctttattcagcattgcgggtcaagcccgacccgtattcctttctttttttttttaaaaaaaaaattcaatttattttatttatttatacaaatgctgaatactactataactctctatacatatatacgcatatgaatggtaacatattctcgtcactaaatagtcttatcttcactgatgttttgtaactaaaaatcattatcaatattcaaagtcgcgactaaaacaaacatcagtgcatgctagtgtttcttaaatattttttaattaatacgaaaaccatgcatggtgagatcagtagtataattataatgtatacgtacgccattatggtatatttaattgagagaattggaggcacggaatatataattaataacgggtattagatgattaagtagaatatatatgtttaattaagattaattaaataccaatacgtactatctctctcttctcactatgatatctctctcgtgctgattcagagtctctttttccctgatcaaataatgaatgtgcctaaaactctgcagtagacaagttgaaacaacagtcaataatatcatctactatatatgattgtgtatatatataagccctaaacacctaagctcacaaggtgggaacacgcacaccagagcaccgacttatacatatatacatatatatgttagaaaatgatattcatgccactggttactggttactctatgttacttgttaccattatttattcattactcatttgtacatgatttgtcaatcattgtaattgtaccttttctctctcttttcggttagtgtcagagtatattcttttcttttatttgatttgtattccaaccttttgggaatgatgtgtcccttctagattgtacaaagtgttgccctagtggctatataaatgaaagtataccccaaaagctcattgagctgatcttatcattctctgttgcattattttttacttggtatcagagcaccagtaaagttccatggcccctggtgagcatacccctggaaatgcatcagctcaaactggtagcaatgttgctaaccagcagttcagtacatttggagcttcttcctctaatgtctctgttcctcactttaggagtaccttaaatcagcagtttgctctcaagttagacaggaacgatttctccctgtggaaaacaatggtcatggccattgtaaggggacatcgtcttgatggctacttaacaggaggcagatcaagaccagctgaatatatttcagcacctagtgttgaaggtgaaccaggaactacttctgaaatgaat

SEQ ID NO: 257143 - DNA, 1207 bp, Cannabis indica
aatatttaaaattccgtgaaaccgtatttttgtaatttttttttgttgtttttatgtttttgtgaaataatccctttaatctttatctttgaaactttaatttcaaatttatcatttttctattaattatgattttaattttgaacattttatgcctttagttatattttaagacttataattagtcatttaatgaatttaatgactttattatgaaattatattttttttttgttatgaattttatgatatatattatatttatgaattttgtattcttattgttgaggtttacgcttcgcagtactgtgaaaaaacgccttggaacacatttttgtctttcataacatcgataataataataaagcgattttttattttttacacttcaaaaaagtttttttgtaatatttttacggaattctacattagtacctccataacaaataatggagcaacttaactcgcaattaaaatccacatagcaacccacataaaaattatcggagcaactcaaaccgtaaatttttttttaaaaaaattaaaaaatagtatacagagttattttcttaataacaataacaacaagaataataaaaataataataataataataataataatattaataatattaataatcaactattgttgttttcagttctatacatcgacaaagttatatattttaactaaagcattcaatttttggataaaataattattattttttttcctataaaccagaattattccttccaaaactatatatacacactatcaacaccagcaaccaaggcctgaattctttggttatctatgctacatctattctatataaaatgtggctatataagatttattatgaaaaattattgggttaatttttttttaaaaaaaaaataacaaattattagatgtggctaaagggtcagcatccatgtagttagttaaacctaaatataattaatccacttaaagtagtgttgcaattaataataaatttgttcatattgtttatttttttattaaaaattatttttcaaattttgatatttagaattagttaaattttaaatattattttaaattaaatttgaatgttttgatagtttaaccttttcattaattccgaagataaatttaggatgaataatttttttttaattactattacaaagtgtaatagtaatttttgtttttatt

SEQ ID NO: 257144 - DNA, 1016 bp, Cannabis indica
gaatgaattaaatctgctaaatttactgatccagaatgagtgaagatctgagaagaggtttaagctagtcaagctaaagattttacgatgtcagataacgggatgctattgtaagagactagggtttgtgttccaactaatgcggaacatagaagtgaaatcctcaagctagatcataccactcaatattcactacatcctggcactaccaagttgtaccaggatctaagaccctactactggtggtgcggattgaagaaataagtggtggaatttgtatcctgatgcttaatttgtcagcagatctaggttgaacatcaaagatcgtcaggattattgtaaccactaacacttcctaaatggaagtgggaggatttcaccatggacattgtggttgggttaccaagaaccatgggaatgtacgatttgatttgggttgtgatagatcaatttatgaagtctacagattttctaccgataaaaactatctttgtaatggatcagtatgcagatttatatgtgaaagagatagtaaggttacatggccctccaagatcaattatatcagatagagatccaaagttcacttcaaaattctcgcagagtcttcagcaggctatgggtataaaactgaagttcattaccgctttccatcctcatactaatggacagtctaaaggacaattcagatactagaagacatgttacaagcctttgtgatggatttcgagggtgcttggagcaagtacctaccactgatagagttttcgtacaacaacaactattagagtgcgatatggatggttccctgcgagattttatatggcaagaagtacagatcgcctattcactagggtgaaacgggagaaaagaaacacctaggtacaaaataagtgcaaaagactaatgaagttataggaaagatcaatgccagaatgcttgcctcttagggtaggcaaaagtgttatgaagacctgaagcgtagaaatatgaaatctcagttgagaggtcatgtg

SEQ ID NO: 257145 - DNA, 501 bp, Cannabis indica
tatgctccacatcttatatcctttcaccccttcaggatatcctagaaaaatacattttctagctctaggatcaagttttccctgtttgatgtgtgcataggccacacagccaaaaatcttcaagtgttcataactggtaacatggccacaccacatttcagttggagttttgaaattgattgcaaatgaaggacacctattgattaagtagcatgctgtgacagcagcctcaacccaaaaattcttaggcaaaccagagtatatcagcatgcacctaaccctttcaagaatagttctattcattctctcagcaaggccattttgctgaggatttcttggaactgttaagtgccttccaatgccaaacttcctgcaataatcattaaacaaatctgcacaaaactccagaccattatcagttctaagcttcttaattttcctaccagtttgagtctcaagcatggctctaagttccttgaacttgctaaaggcatcattttt

SEQ ID NO: 257146 - DNA, 869 bp, Cannabis indica
aaatggcagacttagtcaaacaatcaacaatcacgcaaatagggtcatgcttcaaaaatgtcaatggaaatccgataacaaagtctatcgtaatcttgtcccacttccactcttgtatagccaaaggttgaagtaaacctgagggtctctaatgctcagccttaacttactgacgaactatacgcttagctacaaagctagccacatctcttttcataccttcccaccaatattatctcttcaaatcttggtacatctttgtactaccaggatgtacagcaaacatcgatctatgggcctccatgaaaatggactccttaagattaggaatatctgtaacaactagtcttcccatatggtataggtatccttcattattaacattccacccatctagttgctcaccatcttggattgggtaccaaataagtcttagctttccatcttgccactgatgttgcttaacttgttaaagtagtactggtgtagccattatgttagagatacaagctactttgtccccttcatagtattgcaagttataatcacccattgtgattgtccttttacagtcctcaagagccaaacatgccaaggtaccatgaggctttctacttagtgcatcggctactacattagctttcccagtgttgtactgcaaagtaaaatcatagtcttccatatactcaacccatcttctttgcctcaagttcaagtccctttgagtataaagatacttcaagctcttatgatctgagtataactcaaactttacgcaatacaaataacatatcctaattttcaagaaaaagattaccgcaacaagttctaagtcatgagtacggtaattcttctcatgtggtttgaat

SEQ ID NO: 257147 - DNA, 756 bp, Cannabis indica
gtaaaataaattccaacatgttgttggcctctgtaccatgtaccaagcttggatggaaaattggaagatggatttgagtttcttgggagaatctgaggaggaaatccttgcttttggcgaaaagacaaaaaaggaggcagaagatgagaaggctgccaaagaggcagaaccgtccaagtctcctactatgtaggcttggttttttatttttattttatctaggttgatggccctaaggcttagacaatggtttgccccttgtggaacttttttgtaaagacatatttacaaggtttgatggccaacttttccttttattttatctttattgaatgcttcgtacttttatatttgtacttaatatatatatatgttttcttgcatttttattcacactttaaagaactatattttgataatatgcaaaatactttaggcctttccatttctcatattttcctctaataaaatttaagtagttagtaatctactatatgcgcgtgtagtttgttgggttttgtgccctaaataaaactcatttcaatataatcatatttactaattaataaagatcagaatcacattctatgttgcatggttcacatgatttgtttcatgattatatttaatgtataaattctattaagtccagaacatatgcatttgtccatgatcatagtgctgtcaacatagtggaatataatcatgattatatcttcaaaagtttaattccctgatttgtcagttcactgaatt

SEQ ID NO: 257148 - DNA, 1081 bp, Cannabis indica
tttatttagggcataaaaccctacagagagttgtcttcaactgttcgtaccaaacctgtggcgcttgttttaaaccgtaaatagacttgtgcaatttgcacacatggtgtggcctttgagtatcttcgaatccaggaggctgcatcatgaaaacatcctcatcaagcacaccattgagaaacgcattgtttatatcaacttgtctcacttcccaatcataagcaacagccaaagtgagaacaacacgcacggttgcagccttaaccatagggctaaaggtttcaccaaagtcaagaccaggtctttggtgaaaaccctttgccactaagcgagcttttagcctttcgaggctgccatcagcattgtatttctccttaagcacccatttgcacccaacaacattgagagcatcaattcgaggcacaagtgtccaggtacggtttcgaacaagagcaccaatttcatctgacatggcacgattccacccctcatgctgaagtgccatggccacgaaagcaggaagagttccattggaagagaactgagagtgaccaacaaaagtccgaggtttaaaaatgtcggccttaccccttgtgatcatggggtgagtagcctgtaaaggagcagcagcagtggtaatagcaggatgttcaagtgaggcagggatagggtcgggaagtgaaccagttggtgatcctgcaggtgttggtgaatgagagggaacaggagagccaatagcagaaagagaatcacttacagagttcactggtgaagcagggtcaggtgatgctgcaggaacactttgtgaggatgcagaagcatttggtgaagacaaagggacaataggcagagtgaaccaagactggggagtagacatggtgacatactgttccagttgcctagtattaagaaaaccagcacagaaaggaaactcaagttcgttaaaaatgacatgtctggtgatgtaaattcgaccgtgtggactgaggcacttgtagcctttgtgaacttcgctatagcctagatttacacacttaatagagtgaaacacgaacttgtggctttgatagggtcgaatgca

SEQ ID NO: 257149 - DNA, 768 bp, Cannabis indica
agaagcaaaatgaaaaaacttagtatttttatctccctctttcaaccaatgggttctagatctctgcttccaataaatctcttccttataaaggagagcatcaagctgagattgaagacattgaagtcgaaaccggttatcctgatcagtaaaaggaatatcttgaattcgagcaatttcgtgctggagatcagaaatacgagacttgagagaaagattcaaatttttattccagctctgaagagcagaaatacacagatcctgtttggacaaaaaaatttgaaaaggctttctagaactctggctagaaagaccacaatcccaagtgtccttgactaaagagaaaaatgctggattctccaaccaaacattctcaaaaagaaatcgtctattacgcctagaagaagaattacaactatcatccttaaggataagcttcaaagcccgatgatcagaaccaaaaaaaggaagatgatgcaaaacagcatcagggaaaagttcactccaagaatccgagataatagcccaatcaagacgctccttaacagaactatttttccaagtaaatttatttcccacaaaaggcaaaggagaaaggtgaaacttagcaagaaaatttgaaaaagcatccatatccttattatcataataagtactaccctctttatcatcataggataaaaaactattcaagtcacccattataagccaaggaagagttggagcattataaaacaatttatcaattaaagcccaagtaaaatgcct

SEQ ID NO: 257150 - DNA, 724 bp, Cannabis indica
tggaccactaaaaatttgtcacgtggacagtccaccatgacacttaactgttacaaaccgtaaagttcaagtggtttagccgccaatatcccaagtttaaatattttgtaaacttatgtagttttgataataaacttttatttcaataaattagatattgttataaatattattgacaaatctataaatataaatatgtgtgaaataatatctttcaaatttttattattataaaagtaatcgtaagtacaagtttgatttattatgaaatttattttagtcataatgtttaatttatcagtctaattgtaatatttagatacagttttttttttttgaaaagctattttcaagatatttaactttatgttaagtaatatttattaatttttaatatttaaaagtaaaaagttaatcataaattgcatgtgtttaggtaattaagaaattcaaaattatttaaaagtttgaaattatttaattttagaaatataccactaaaatacttaaattattacaattgaagcacttaaatgctaaaccataaaagtaaatatataattttttgtgattcaaacagtttatacttaagtctttttcttcatagtaattttgtttgatttcaaaggttactaaaaatatctattaatagacaaataagaattaattcattacatgaaaataaggctcatagagaaaaaatatctcatataagttaactaag

SEQ ID NO: 257151 - DNA, 1010 bp, Cannabis indica
cacaaacactatcagctgcattgtttaaaccctttattggaaacggaaggtctttagaggtgtttttcattgcgaatatttagatatcacaagctgtatcttacatatttcaataagttaaagtttgaaaataaagtacatcaatagttgtacagactacgtcacatcataaatacaatatggtatcacctcttaaccgaatatttagatatcactccatttttattgtaaaaattaatttggttgtgaacgtatattaaccaatggcattaaacaaactatgttaaccgaatatgtggcattgagtttcactatttcgaataagttaccaacaaccaattggaatgtcaaattttattaaataattcgctaatataataagtggatgtcatatcataataattatttcaatacggtaatgaaagatttttttccagccgtgtcaaatcaatggattttattgattatactttaaaggatttgttttttactttaagtgtacaaattattatttattataaacacgtacttcgctgagttttaaatatatatatgtcacatcatatgtagtgtaggagtttttattaacaaaaaacaaaaaataaacattggtaatcaaagtttcattgatattaacccagtcaaaatgtatatttatttttccaaagaaccgattgcagggtaagtcataaagtggaccttccctatttcaacacgttaaagacttacaataacgtacttcaatgtttatacagtgtacttcccatcaaactttcggtcaggcgtcacctctttactacatacttggatattatgagatttgattttaaattaaaacattattttctttcatatttacttcacaggtttgtgttataatattatccctaaatttgtattttttatgtttttaaacaaggtagtacatcctaccgatgtgaattgattattggaaattagtattccaataaaactaaaaacaattattttctcacaacttgtactaattt

SEQ ID NO: 257152 - DNA, 693 bp, Cannabis indica
tacggtaaatttatcatatctaatccaagttcaatatcaatctcctccaatgtgtaccccatgcatccaatactggtaaacttttccaatgcccttgaaaggacataacacttatccaaggtgtaagtatacctatcgctgattatcatgccagtctaaatccagtgaactgacaaatcagagaattaaacttttgaacatataatcatgattatattccactgtgctaacaacactataatcacgaacaattatatatgttatggacttaatagaatttatacattatatataaacatgaaataaatcatgtgaaccatgcaacataaaatgtgatttatgatctttattaattagtaaatttgattatattaaaatgtattttatttagggcacaaaacccaacagatgctactcatgatggaagcttgttttgatctcttaatatggatgcgtggataatagaggaagagaataataactcttcccaagttacttcgaccatggaacctgacctccgcctgttataatggtgagtccatttgggaatctagcgtggatgtaggcacatttatcgaggagtcgtcttccaggaataattatattttggttgttcactaactggcctaaaaatcaaaaaagagaatttacatcattacctcgcaccttaattttgaaaggcattaaatgcgg

SEQ ID NO: 257153 - DNA, 645 bp, Cannabis indica
tttagggattatttattatgtatcatttttttacctttctagttcttaaagattcaatttttataatatatgaatgagttattgatagaattttttatgaaatggtagaaatttttactgtgacaaaaataaatatttatatatatagtttgaaacttttgagttttagtaattttaatagtcttgacaatggaatggtaattgaaatagctagtaatgtaatgtaatgagttatatagttttagttagaaacttattttaatacttagtaagaaatattcatgaactaaaattattaattaggtgtttagttcattgtaatgtaatagaaatagtaataggaatagtaatgtaatttaataagaatatatagtaaataatgtgtaattatataagtatgtagtcactagttatatatttattagttacttgttactattctcacttaattctaatttaaactttttttgaattgcatttaatattgtaggttgtggattgttattagaaaataaatcaaatatatcggtgatcattgattgctagctaaaggtacattattgaccactaattataaagctattagaggagtttgattaatatgctagatattcatccgtattgaagtaggttctgcgatataaa

SEQ ID NO: 257154 - DNA, 829 bp, Cannabis indica
aaaaaactactcataaagctaaaaaattaagaaaaagaagattaggaaaaaaaactcatataagctgccacataggaatcttttgtgcattcctttattatatatattgattgattatatggcttggactggactggtttattattagttcatgtaattaattctaaataaatacagaataaagtaccaaagtaattaaatttatgtaattctacacactaattaattaaccatggatcctatccgctctttcagcctcttggataaggcaagagaggccttacgagcaaataagaaacatgtaaggcgagagggggtctccctgacgaaggccacggcttggctgaatttgaccactaatttctccattaatgagcactgagaatcaaagtgaagtgatgcagttcatgatcttgtccacccaccgtttgtcatagcccaagcaaagcatcattgcttcaaggaaactccaactcactctgtcatatgctttggacatgtctaatttgagggctatctttttcccattgtcgaaccttccttttttcatacaatgaagactttcaaatcccaatattgcattatcttgaatgaggcggccccgaatgaatacactttgattttcagatatgacttccttcaagctatctttcattctattggcaaggcacttggcgatgatcttgtagcttacgttgcataggcttatgggtctgtactcgccaactagttttggttgttttactttcggtatgagacaaaggagggttttgtttatctgcctgcagtcgccattgttgtttagtatttccaagcacactctagtaac

SEQ ID NO: 257155 - DNA, 560 bp, Cannabis indica
ctcacacatataaatataaataacaactattgaaacttgacaaataataaattatttaacttgataatttaaaatataattgataaaatagttttttaaaaaagccccaaaattgattattgaaactcaaataatgactattgaagtttgacaaataataaatgtggcaaatacctctaacaattttgctattacatttcatcgagttcagaattttcatcagaaagagatctaaaaattgtgaaacttcgtctcccgatgctcttttcaaaatttaaatcaacaaagtaaaaatattaaaattttgataatttctggaaaatgcaaggcctaacgatggtataccggtgcttggattgggagtagactgtagagagccaaagcacattagacttagttaaggactttcattattacaatcacaacactgccattgccaataactgagaattagaaatttaaaaggaaagaaaagtatctaagctgataagagaagagaacacagtcacaaatagaagctgcgaatagatttgtaccttaattccatatatgattgttct

SEQ ID NO: 257156 - DNA, 1348 bp, Cannabis indica
ccgtcttcctccctctctcgatcaccatttcttcttgtctctcacgtccatcgatctccacccacccctacctcccgtcagtctccctctacttttcgtcgcatacgtcggaccattaccaccttccgttggtgtccctctcatcttcgtctcatacgtcggaccaccaccacctcctgtctgtctccctctctctctctttctctctctccaagctcggtataaatacatttatttatttatatacttttttatttattatatatatttattttgttattgtataaatttaatgtgttttaaagttagttgttattgtaacaaaattaattagttattttattttaatttaggtaaaattataaagctaatggaggaaaaaatgggggaaaatatagatttttctgccattaattatttttttttgttttttacattcccgacagtttaaaactgtctcctacaacagggtacaggcgacggttttaaaccgtgccctatactataggcgacgattttaaaccgtcgcctatagtataaggcacggttataaattgtcgcctatacccagttataggcgacaattttaaaccatcgggaaaccctcattagcgacggctttgaaccgtcgcctattatgcccgttttacgacagtcgtataggcgacggttatagaaaccgatgggaatactttaaacaactatttaaaaacgtcgggaaaaccaaatgagagcccaacactcgtcaagttgcagcccaaaccggccaaaccatgatcccctgaatttgatatgtaccaaatcatggccctcaaattaattatgacatgtactaaattatggcccttgaatttttatccatgttagacttttttactaaaattggaaaaaaaaattcttaaatccaacaatcttaatagttcaggggacatctttaacgaccttaaaaagttcaatgggcatgatttagtacatgtcaaagtttagggggcgaaaataatttcttttgttgcaagtggtccacgcggagagagaaccccatgctcgggctggtgtgtgagacacacacattgctgggagtggagagtgacactcagttgggcatgaggaaagtgaagaagacaagtgagggacatgctctttgcgtgtcgggcccgtgggtgcagaagtttcccggcattgacacgtggcagcgaggagagagaggaggctagtggttcttggtcgaaaatttgctctctttcatgggctttgttttgtttttattcttggggtaagttgataaataacacttttattaatcaattaatcaaatttacctctaattttatatttatttgaaacatac

SEQ ID NO: 257157 - DNA, 562 bp, Cannabis indica
ataattttccagttgtacaaaacattcttaaaaaatttcctaatttgcaacatcagaatcgggctctgcagtagcaaattaaaagcagaaggaaaactttccaaaatggaccaagatcacgaatttggacttcaaacttgccaaataaaatttatttgatctgctctaatcaaggaaaaaccgaaatcatcaattagaaaaagagaaagtcaagtttctcaaagttagacaactttccattaagagaattctttctcttccaagaaatttcctaaaccaaaagagactagctaagaaggaatctttctgtaaaagaaatggagcaattagagtacgaatttgtcataataaaatcaatttaattgctcaataaaaatacattaattaaaaaatattttgtcaattaattggtcaaaaaggacttaacaatatttataaatattaaattactaaaattatcttattaagaattacaccaaaaatctaaaatgataaatttattacataaatacctattgtaaagcccgcttagttaatttggaaattagcagttatttatgtt

SEQ ID NO: 257158 - DNA, 619 bp, Cannabis indica
aaaaaaaaaatctcttattttttattaattttaatagcagaaaagaaatatattctctattttatctgtacataatcttttcgtagactaatttttgtcaaaaaaatgaaccaccttattctcctcacgaggaacaaagtaacaagaatcaacttgaaaaaatgcataaaattttaaatatcaccaacaagaatatcatctacatttatgagccttaatagcagtaataacatttttgtgatcattttcaaaatgtgaaaaaaaaattgataaagtaagcaccatttaggagctaatatttctattataaaatggtataattgttagtataatttaaaattaaattttacatattatggtttaatagtttttaagatgtaaatatatatacgtgtagtattagtttaggtgtagtccataatttttcgtgtatattttttaaaatataaatccattttatgtcataaaaaagtatagttcggtgttgtacgtctcgtgtcaatatatacatttaaaagagtaggctcgaaataaaatttgtaggctcaatatttttatgccgtacttgaattttgtcgtgttttattcgagctaatctatttaaaatccttaacttttt

SEQ ID NO: 257159 - DNA, 1037 bp, Cannabis indica
aaaattttgcatgatgtcttaaacagctataacatacacgactatgaaaaaaattggactaatttttttcctaaatgttgaaacagattaaaaaagcatcagtacattgtagaaacaccctatatttaaaatatttgtataaatctaaatatttaagtacaacaattctaaagtatttatcgttaatattctataattttacattgtttaaaatttagatgtaactaaaaatagaaaaaaaaaacatttgtgtgctcttaaacaggtccggctctaggctaaggcaggctaggtccgtgcttagggcccactcaaactcaaccccaaaacccaacacacatatatatgacctatgtattttctttaaaaaattacagtacaaaaaaataatacatataaaagggtctattttttaaaaaatttattaaagtagtttttgacccatttttttccaggtcatgctcttaatattaaaatattaagtacctagaacatttccaaactatacattaaatttagtgtcatactatcactaaatttagcgtcaaaaacttttttttatttcaaccacaatataaaaaattacattaaaaaatattttttattattatgtcaattttttaataaataaaagactttttaagattggagcaaggatgcttgtatttgtggtagaaaaattaataaattttaccaatatgattatcatcccatttttcttacagcaactttagtagcaacgaacattggtgttgcttttaaggacaattgcaaaatataataagtgctattccaatggtaaaataagtaattgttgcacattattgtggtgataacatctcaatattaaacggaaacttacaaaaatattgaaatttaagttaatttttacaaaaatactgtcacacagaaatctttacaaaaatactgtgttttataaaacactagtaaaatacaaagcagaacagctcaaaacaacagtagaacaccagtaaaacaccagtagaacaccagtaaaaacttaacacagtatactg

SEQ ID NO: 257160 - DNA, 1349 bp, Cannabis indica
acacagtaacctgctatagaacgtctgtcatcggggcaacatgcccagtccgcatcagagtacccactaatggttaatctgtcatcacagctgatgtgtaatcctttggtaatagtgccttttagataccttaagactctttttgctccactccaatgagttgttgttggagcctttaggaattggctaagcttgttaacggcatatgaaatgtcaggtcgtgtatggcataggtattggagtcctccaataatgcttctgtatgccgtgggatttattaataactctccatcagtcaaggacatgggtttccctgctgttgctggtgtgggacatggtttcagattttcaaaacctgttcttttgagtagatcttcgatgtatttgctttgcgttaggtacaatcccgtgtgatccctatacacttctataccaagaaagtagtgtagtggaccaagatcttttagagtgaatttcttgtttaattcagcaatgaaactttgtactttgctgctgtcattcccagttattatgatatcgtctacataaatcaacaccaaaatgataaccgtaccttgttgatagaagaacaaggatgaatctgacttggagttcttgaaattccagctgattagagtacttttaaccttgtcaaaccaggccctcggggcttgcttaagtccatacaaagatttgtttaatttgcaaacaaaattctccttgcctttctcctcaaaaccttgtggatgtaccatgtatacatcctcttccagtgttgcattcaagaaagcattgtttatgtccaattgtcaaatatcccaaccccgagatacggcaatagttagaacgattctaacagtcgtggctttgatcaatgggctgtatgtctcaccaaagtcgatcccaggcctttgatggaatcctttagcaactaggcgtgctttgagtcgttgaactgtcccatcaggattgtacttgattcgaagcacccacttattgcctattaagttttgatttgaagcagcagggacaagaacccatgtgttgttgcgtgtgagagcatggtattctgtgttcattgccttgttccagccggggtgtgcaagagcttcttcaatagtggctggttcagagaaaatagatgcccacttggcttgtcccataaagaccttgggtttaaaaataccagctttggcacgagttatcattggatgcccactggttcgaggaatttcaataataggaggatcagttacagggttacccgtgtgtgcatcaatagaagtagcagaccctattgaagaagagctatgagaagaagagctagaagagctatgagttcccctctc

SEQ ID NO: 257161 - DNA, 878 bp, Cannabis indica
aaaatctcaccctacacatcttcaaaaaatcgtgaaaatttcacaaggaggaagctaagactgttgtctatcacttttttattggtcaagttgaggaaaaatgtaattttaaggcattaacaaatattttaatcaaaatagtaaaaatcttacttttatgatagtggtattaatcctttgtgaaatatgattcggaccaatcttagaatatttttccccacaagtcacaatgaattcgtattactaagatctgaataagtatataaatttcgttttaaatttggttaaaatggtcccctaattaaaaattaaaaatgtcattctttttaggataaattgtaacaaatattttcttagtcttatactcttcagtattcttttaaaatctcacctatgcatctcgaaaaatagttaaatttcacagggagaaagctgagacaattgtccatcacttttctattagtcacgttgagagaaaatttagttttcaagctagcactaacaatcactttaattgaaataataaaattcttacttttctcatagtgataacctttggtgaaatgtggctcggacccatatctcaatattttctccactagtcacaatgaattcgtactactaagacgtggatatgtataaaagtttcgcataaaatttggttaaaatggccttgtaattcaaaaattaaaaatgttcttcttttcagagtaaattttaaaaaggtattttattactcttaaactcgttagtgttctcttatcatctcaccctacacatctcgaaaaatcgtaaaattttacaagtaggaagccaagaccgttgtccatatatttctattggtgacattgagagaaagtgtaattttcaagcattaa

SEQ ID NO: 257162 - DNA, 1278 bp, Cannabis indica
gtcccccgtcagtgatgaatgatgttttatccctgtcgggaggatgcatcattatttgattataccctgagaaagcgtccatgaagctcattagtttgtgccctgcggtggcgtcaattatcatatcaatgtgtggcagcagaaaactgtcctttggacaagctttattaagtcagtgaaatttacacatactctccactttccattctttttgggaactaccacggcgttggcgaacaaagttggatattgtacctcttcgatggtattgtttttaagcatttttgcaacttcatcatttactgccttgtttcgatctgttcccatttttcgcctcttctgtttgaccgggatgtagttcgggtttacattcaatttgtgagtaatgacggtcggatctattccgggcatgtctgagtgatcccatgcaaatacttggacataatccttcaataattctataactcgattcttccggtctccagtaagtcccgtgccgatataggttgtttttctgggtccgttgggtgtatgggcacttccagcaactcctctaccgccggtgatcgttctttcaccggggtcgaggagttgattaattgctataacttgtttttgttcctcaaggatgaggagtagcactcgcgggcccccagctgatctcctctggtctcccttacctcacccttgcaggggaacttaatcactttatggtaggatgacgcgaccgccttcattgcatgaatccatggcctgccgaggatggcgttgtaggccgacgggcaatccacgattaaaaattttactaatttgtttactctgttcgcgtagacgggtagttggacgaaacttcgagcaacagcgctttcacccgagaatcctactagtgtaacctgggtgtcttgggctttcaagtcttctatttccatttctttgaaccccggcgaacaaaatgttggcagagctcccagtgtcgacaagcatgagtttcattcgaacatgagcaacgtccaaggtgatgacaagagcatcgtcgtgggggtgttctaagttagaggcttcccctcggttaaatgacaagagcacgtcagggccatcgctgtcaattgacgtcatagcccttactgattagacccgtcgggcatgggccatcgaagctcgtactgaattcccgcccaggttcgaccctcccgagatggcatttacggttttcttgatgtacggtggaggggactcatcccggcttttgttactccccgttggacgtggattgcgacg

SEQ ID NO: 257163 - DNA, 588 bp, Cannabis indica
tcttggaatatggaaacatctggtatcttctctgtaaaaagtgcatataaacatctacaatctgtccaagggaactagaccattatggatgatgtttctagttggaaaaagctgtgaaaattggaggttccccccaaggttctgcattttttgtggtgtgccatctcgggatgtttgccaactaaagtgcagttgcacactaagcatgtaaatgtggatctctattgtccttcctgccttaattcttatgagaccatttcacatgtgcttatggagtgtcactttgctttgtcttgctggaatttagccagcccgagtgtgttacatggtttcaatcatgattatagcaactggttttttaatattcttgatgctaattcagttgaggtttcggtggatgctgccatagcgagttggagtatatggaatgctcgaaatgatattttttggaagaagaaaaagaaaactgctgctggtgtagttcactcagcctgatccactctgcaacaatggagtgctgcccgtgtggaaaagcttggctcgctgctggtgttcggtccacatacgggtttggagctttggaaaaaa

SEQ ID NO: 257164 - DNA, 545 bp, Cannabis indica
gggcataaaacccaacagtcaaatggtcccaggtcgcaagggtagtggctgcagtgtacccttggccgggtcctcaagtcttgcaagtctggttcctccactactcgtaccaccttgcttttagagcttgcagaagatatggccatacattccttgcatgcatgccttgtccttgtgaccatacctttgtcgctcaaatcttccctttcttgggagaattctactaagtttagtcatgttgttattgaaattccatgtcgaatggcatgctgaacaagtgacattgagcacacgtggctgagtgacattgagcatgcatggttgtgtaacatttaccatagatggacgagagacattgagcattcatggtcgagttatatttagaagaggcatgccgagggacatttggaaaatgtatgtcgagtgacattaggaagaggcatgccaagtgacgtttgtgaaaattcatgcctagtgacatttggaagatgcatgctgagtgaaatttatgagaagcatgtgtggtcgagtgacattgagcatgc

SEQ ID NO: 257165 - DNA, 600 bp, Cannabis indica
attcattcattatctgtaacaaatcaaattccagatagatataaaatcccaattaaatcaaataccaacataccgcaaatgatttctttaacaaagttctggatttctttgcagtttatatagaacccaaccccaaattacaatattcatactaaaacaacaaatataaaagaaagcagcaacacaacataatgaataaataaaaatataggcaactgatgtaagcaaatcccaattatcacacagcacaactgaaatccaaaaaaatccatagtaaattgaatcgaaaaggatgaatcaagctggactaaccttattggtaaccttgtcttctctttacaactcagatccgactaagcccatttgcaatttaaaacctaaataaagtaaatcaaaatgccaatatataaattgaacaattggaaatctagggtaatctttgttagaaaaaacgcaaactgagctaaggatagctattaccaactacagtcctccgctctgccaactgagctaaggtcggtttctggtgatttcaaacaaatttaataaatattgctttaaataatctgcaattattcttttttatataaaaatttaaaa

SEQ ID NO: 257166 - DNA, 1624 bp, Cannabis indica
agccaacctgtacgctacttgccctatcatctcaaggatttcaaaaggtccaatgaacctcgggctaagttttcctttcctaccaaagcgcttgatgcctctcataggcgatactcagagaaataccatgtctccgatctgaaaatcaatgtcccgtccctttggaacaccataactcttctgtttgctttgagcagcgaacattcgtgctctgattttatcaactacttcacttgttctctgaacatcctcgggacccaagaactttctttcacccacttcatcccaatgaataggtgatctacatttccttccatataaaatctcataaggggccatcccgattgttgcatgatagttttcattgtacgaaaactcgattaggggaaggtactttacccatgatccttcaaagtcaagcacacatgcccgtagcatgtcttctaagatttgaatagttctctcagattgtccatctgtctgaggatgaaatgcagtgctaaactttaactgagttcccgtagcttgatgcaaactcccccaaaatcttgatgtgaattttgaatctctatccaaaataatagactttgggacaccatgaagacgaacaatttttctaacatataactcagcatactaatcaatggagaagttcgttcgtacaggcaaaaagtgtgctgactttgtaaacctatccactatgaccaaaacagagtcgaactgtcccgtggttctcggcaagcctaccccaaagtccatagcaatgtcttcccatttccactctggaatattcaatggctgcagcaaccctgcaggcctctgatgttcagattttacttgctgacaagtaagacacttagcaacatactctgcgatatcatccttcatgcctggccaccagaacatggccttgaggtcttgatacatcttcgttgacccttgatgaattgagtaaggagttgtatgagactcattcataatctctcttttaataacatcatccataggcacacaaacacgattcataaatcgtaacattcctgtttcatccattgtaaagtcattagatttcccagctgaaacgatttcactaactttggatcttgcaactgtgcttctctgattcactctaaaagagtagattacagggtaatattagccaactgccccacaaccagctcaattgtagctcgagtcctttcatttgctaactgctgggagatttgtttcacagtatttatttgactctgtccctttctactcaaggcatcggcaaccacgttagccttaccagggtgataaaggatctcacaatcataatctttcaccaactacagccagtgtctctgtctcatgttcaggtctctttgggtaaagaagtatttcagaactttatgattagtgtatatctcacatttctcgccatataagtaatgccgccaaatctttagtgcaaatactactaccgcgagttctaagtcgtgagtagggtacctctgctcatactcctttaactaccgagaagcataggctattgcctttctatcttgcataagaacacatccgagaccttgtcttgaagcatcacaataaacaacaaacttttccttatctgaaggaagag

SEQ ID NO: 257167 - DNA, 530 bp, Cannabis indica
gggttaactgagtaaattcctttctttttgcacttctaactgctttgttgtaatactttgcgttggaaaactcctggaacttttcccaggtcgtagtagtaatatcacaagtcaaggacaccatgtcccaccaaaccaaggcatcctcttgaaattggaatgtggcacaggcactttgtcattgttggtaacgcccataaaattcaaaattcttgtaataaccgtcagccactgctcgactttcattacattgggacctcccagaaagactggaggtgcctgcttgttgaacctttcatacagtggttccattcggttcactgcagcaaccagttttgcctgtcagcaggggcgagagccacctgcatttttagagcaagcattgtaggagcaccctactgcctcatgtgtctgatttcttcctcttgctcgttaattctggcttgcattgccgcaaacctattttgccattcttgggtagcctgcagtgtgttaacatcactcgaccgcgtgccctacctctagggcct

SEQ ID NO: 257168 - DNA, 545 bp, Cannabis indica
attacaacattgctagaatgcttaagagtattggtgcaataatggacacatactaataggacaaaaacacaaaacacatatactaagctggcaccagctggagaagacatactgttgaaaaattacacatactcattgaacctggaggtaacatttacatttcaaattgaaaaattatggaacctaaacatccagtaaatggttaggtttttctagtgttgttttattgtttttgtactgttgttatgaaaatgctataaatgcttgttttttcttaaaaaaataaataaacaagttaaagcaacaatagagtatttgtttgaggtaacaagaatgaaagaattgtgaaaagtagacctcaaagaaagaacatgcacgtgcaacaggttccaaatagatgaaatgccctgcagacatgtcgtggttgtgctgaaggagatgaatatggacccatacaactactgttcagattactacgcaaaaaaaaattggctagcaacttatgcagagacagtgtacccaataggacaccaaagtgagtggga

SEQ ID NO: 257169 - DNA, 522 bp, Cannabis indica
cctgcccgtggtatctttggcttgctcttttcgacggccaaaatcacttcttcttgctcatgctgtaatgttcgagcatacctttcctgggcttttcctgaatttccagctatgtccggatctccaatgatgatttgcaaatgtccatctactggtggtagtagtaaatcttgattgttgttggccctttgattttggtcagccttgacatatttttgtacgtgcagattattctttcttatcaaaaattcaacttcctgcttcaaattattgcattcgttggtgtcatgaccgtaatccccatgaaaacggcaaaactttgtcatgtctctcttgcttgagtcgttttttcatgggtgcgggcatcttgtactgagctaatgactgagtagccatgtagatagtttctatatcttttgtcaggacagagaaagcagtaaacttggtacacttttctctggggacctatgcggttttgccaacgaactttccctttttcccattgccttgcctattgttatt

SEQ ID NO: 257170 - DNA, 614 bp, Cannabis indica
atgtttggagaaaaatgagcttcaatatcagtggataaaccttgatgaccatgtgacttctcttcaagagccttcatcactgccttaaaattgttttcaatgtcatttgtgcgcttcttcaaactttcaatttctgtttcatattttctccgtgtctcattttcataaataatttgtctctcatgaagtgatcttacaccaccttttgactttggaaaacaatctttaaatccaacattatgtcctctagctcgtacacgtccataggattcaggagtccctaaagcttgactaagtatatcatttgtaccgatttcaacaacctccccttgttttcgcttttcaaataaggagtcctgcaataataaaattagaatatgaattatatattaacaatcaggtgtaatatttcttcaagcaagataaatattaaaaacttactattgtgtcagctatttctttatcagactctttcgcatactctccttttttatccttgcgagcttccttccataatacagctctttctatttcttcctcagtgtcaagttgttgttgctatttacatcttaataatgttagcactattcatctattaaaaagtttagcataat

SEQ ID NO: 257171 - DNA, 1924 bp, Cannabis indica
actaagcgtaacaatttcagtttcaccatttttcactttttgtgagatgcaccattcccaggtttgacgtgggggcaaacccctaatttagtgcgaaattgtgtgagaggcgtgccacgtcagaccaaccccataaggttgatgtccgcaacaccccttggaccacccttttggaatactaattgggtatccataaatgtctttcagacagttggtaattcagctgtgttagctctctaaattcattggtccggctttgctcacagttaagctttaatcgaatttcgaccattcgttaacttttgtcaacgcatttggccaaatgtgctgataaaagtggcatttcttgtgtaggaattttacccttttatcctacacacaacagtaaacaaatcaattttcacaaggtcagaatagacctttcaccctgagtcaaaccttggttgactcctttgagttaagaacaaacgacagtcatcaaccttagactacaaatcgttttgcttaaccctaattacccctagaaccctctagaatcatttcatttcacacacgcacacaacttcagattgaaaccctagtagagcttcgagtttcttctcaagaaactcgaagactgcattcaacccagaaacacaacaatcaaacccttcccaaatcaaaataaactccagaaacatacacaaacaaataaacacaatagtaaaaaaacataaagaaaatgagaaagagtgcaccaggattttatagaggttccccaataatttctgggtacatcctcttcaagctcgcctcagaaaagctcgtttccactattggatcttcaagattaaagagttacaaagctggattccaaatcacaggcaagaatggtaattcttgtgtttttacagtgtttatttctctctctctctctctctctctctctgaatattgtgctaatcctcttcttcttctttctctgtgtatgtcttcctttggtttggatctctgagccctaaccctaggactccaagacttaaccattgtaagtctcctcctctccaaaattctgatttgttctcttctcttctgtgttgatttgcatgtatttatagcttgtagattagaagagagagctgggagttagttgcaacagttttaacaaactttgcagctaactgtttgttctatctgtaggttgctagaggtcgaaggccacttaggtttttcctcctttgtatttcttgttacatgctgatctgggcaatgcatgtggggatttatttaaacgtcttgtagtgtagtttttgggttgagataattattcttggtttattccaagtttttaattatatgtatgataatttttgcctgattgaatggccaatcaagttatatttaatcttatattccttccttctttttttcgacaagaagtggtggagtttagtcattagaaaaaacttttatatttatcatttttttcaagttacacaacttaatttttaaatgatttatgaattgcagctcgttgtattaactttctcatttcttattactcgttatttcctcaaatattaaaataaacttgaacatcttatacaaccaattcacaggtattttaatgttacagaccatatgcacgagcaattatttctctattcgtacttagctttggcgtactatttttttttttcaaaatcaatttatatgatttcgtttatagtacttgctaaaaatattctccaaataatttgatttttttgcttgcatttgccttacgtctttttcgaagtcaggcttttcgactttgttttcaacaactgctaaaaatattttgcgggtaatttgatgtcttccaacaacgatttgaaaggactctcaacatcttgtttgctacatactataaactacctttgctacatactttggactactgata

SEQ ID NO: 257172 - DNA, 1162 bp, Cannabis indica
cccaagcagacaacaaccaagacatactaatgccaccaccagtggacgggcatttacaagtcatcattgggggcccacacatcgctggagattcaggcaaagctcgggagaggtatgtctgaactttacaacacgaacaaaatgaagtagttttggccgtagaagaaaggaagccaaaaatgccacgggtaggggaacccactataaccttcactgaagaagatactatccacgttcgcttccggcacaacaatcccttagtcgtggaagtacagatagcaaataaaacaatggcccagactatgatgaacaatggagcttctgcaaatattctgttcaaaacaccatatgaaaagatgggactccaactcaaagatctgatcccctctacccaaccggtgtatggtttctccggccagagtgtcacacctttggggcaaattcgtctacctctcactgttggaaagctccgaggagcataattgtgatggcattgtttctgataatttatgtttcgtcgacttttattgttatgttaggccgaccagcctttatgacctaaagactgtcacatcaattttccattcgtgcatcaagttcccaacaaagaacggggtagggtgcctaaaggaaatcaacaagttgcacgagaatgttataaccttgccatgaccaaggctaaaaaggaagaatcctctggccagagttcggacaggggaaaagcattgccaaatagggagccgcccaaggcagggatgaagatgtggatccccaacttgaggaaccaaatacaaatgttgggccagtagaagaattggaagagatagaaatcgacccaaatatcccaaccaggaaactcaaaattggcaaaggtttgctgctagaagtaaaattagcattgataaaatttctaagagcaaacctagacgttttttcctggtcgcatggtcagtatcgatccttctataattttacacgccctaaatatttacccaaacttccatctcgttcaccaaaaaagaagattgttggacaaagaacaggcacacgttgtaaaggaagaagtagaaaagctgcgcaataacaacttcatcattaaagctttctatctggtctaggtagccaatcccgtactggtacccaagcccaacaagaaatggcg

SEQ ID NO: 257173 - DNA, 670 bp, Cannabis indica
ttgattgttgtgttcaaaatagaatgcatttaatcttcccttgatatggttttttcttttttttcattacgctgtgttttggttaaatacaatcgtgaattcttcttctttgttcatactatgtatgaatttagggtttttgggtgagaattataattgaatggcggaaagaaattaggtttagagtgagatattggtttataaaaagagggccaaagttttagcgtttgttttagtcctacattgaccctggacgatcattctgcatgtttagacctttgtgtaagggttctcgactctactgatcttctgttcttggtttggattttcttttacagtttttctagggttttaatagggaaagtttcaaaaactagtggtacattgttttagctgaatgggtcatacttcagcgaggagaaagccagcgaagggaaagagtatccgattcagcagtgcagttagccaggaatgtagtgataaaaacactgatgttaggctacaaaagcgaccaaagagaagttgcaccaatcaccaaagaattacccaaaactctcacatcagcgcaacgagagctcaattagagagcttaggatctgatgacaataatgactatgacttgaggttagagcggcgattggggagacaaagaacgaataaacaaataatt

SEQ ID NO: 257174 - DNA, 848 bp, Cannabis indica
tcaaatcagatcggatcggatgcctcaattcgattggattggatccgttgggtccaaatccattagatgtgatcaaatgagcacccctactatagtgtctaacatccttgtgaattgtgaaatataatattgctattggtgtaacttaatatcaaatcccacttattttattttaacaaatactatagaaaactataagggcgtcagagcaatgctctttcgcaacatagaatctaaaatgatattgaaccatttatatatctgctattagaatttttttttgtttagtgtagcaaccaattgctattttattgttacaaatattagtaactagttaccaaacattctgacatcgatatgtaattacaatccattctaaaacttagaacactaatatgaaattactctaatgttcttttcaaaatattagcacgtagttaccattcacccccaaaactaagaaaagtcataactcattactctgattttttttcttcaatacattgataaaattaataataataaaaaaaccattttagatttaaaaattacccaaagtaaccatttaccgtgttacttataatgacaaataataataagataattggttactatataaagtcatttttaggtatcttttttctctatctatattgaaaacctaagctataactggttactctaaactgtatttttcatatatttattttatttctttaattcttcacataaattattatttaaataaaagtatatttttgtaaacttcacaaaaaaaaaaagaagaagaaggagaagaagcccattttctacatatattacacgggcctgtatttctaagggcctta

SEQ ID NO: 257175 - DNA, 972 bp, Cannabis indica
tgggttggtaatagtctttttttttttattcatcaagttgttgtttatgtattttgttgtgtgtgtgttttcaatctgttttttacatatgtggaatatgttattttattgttgttttagggtttttattcgtggattttccttgatagtttttaatttttaattttgttaatcactctcagatttttaataaatttaatgttttattgtttagtatttactatttagtgtttagtattatgtacttgatttttatgttttttacggttgttttgttgttgatttgtgtttgtttttaaaaaattataggataagggtaaattttctaagtcaaaagtttcctctgatgatgatattgaagtgcccactagcaaaagaatgattgaggtatagtatttttttttttctttgtgatttttgttaattaattttttttgttgttttgttgttgttttatagttatttttttattttcattgttctaggattggagtcctaaatatttgtatttcgatcattcgattattatcccaattattatccacttgacgtggcatgtccgcctgatgtggcatgttcacatagtcaaaatagaagacacatggaatacaacatgtccacatagtcaaaacagaagacacatagaatacaacagattcgtccttccttcatataactcaatgtgtggcatcttaaagttacccggaagtagggtctcctggatcctcctcacacaaggttctgggtcctcatctttagaatctgagagggccccactctgctttttgactagcttggttagagctgctatatgctcctctaacattttttgtgtcgcttttgagaagatcacgtcctcgcattttataacttaggtggtttcagaggtcacctccacatggcctcgctttttcacttttgtacctttgtacttggcgtccaatctagtcaaaggtctacggtggactagct

SEQ ID NO: 257176 - DNA, 630 bp, Cannabis indica
aaattaagaaattaaaaaattatattttgaaaaaaattacaattcaccttattttcaatttatataatcataaatttatatatataggcaaccgatttatgcccatcttgtaaaattatggattgtattccgttgtgctgtataatgagtcttacgtactttattattttttaatattttttgtaaccggttgttctaagtttattagaccagctaataaataaatttcttttttatttattttattatatttttgtaataataatttatttatttaaggtacaattctttggtaaagttgacaggagcaaggatagaaatacaatagttgatggtcctcttttgtcagttcaaagggtaaaattgtcttcttaaacgttgtttttggcagacgttgtaaaataatttcatagtacaaaatctagcatacgtagaacgtggtttagtgtagtatatcagatagatgttttagtacattaaaaattttattgacctatcaaaaatgcttaagacatgcaaatataaatatttttgctgcatttattttaagttgtattcttatgatataaaaacctatttttggatatctaatattattttttctttattaatttatttatgttacttatt

SEQ ID NO: 257177 - DNA, 665 bp, Cannabis indica
acaatacaatatatcacagaacctactaaattactagttagtcactaaccatagtatactaaatataatttgtaactaactagtaactaattttactctaaattactaactatataataaccggcgctcctcacgtatcaatgatctatccataacgaaaattaatacaaaatcctaacaaccagagaaatttatatatatatataattttatcctaattctactgaaattttggcaacataaatgctataattgaatatttccaaaaaaaaattaaagttattaataacaacaaaaaataatctaaaacaagatgaaacaagtgatgatgacttagatgatttctaatcatcattgcatttcctattaatattttaattcgagttttatgagtcaagtgtgttctaggataatagaatttagggttctaattctagaaacataattatctttactttagttttaagttttttttttttttttgtatgaatcagaatatttgtattgctcacaatcaattttttacaaactaaaggcaccaatcaaggtccataatcttctatacatcagcaatgtattacacaagagaccaaaaactttataccttatactctgctgtacaatccctcctcctttctccctttctcttctttctttttcttttt

SEQ ID NO: 257178 - DNA, 668 bp, Cannabis indica
tactggtggcatgcttttcatacagcagccttcctcatcaacaggcttccaactcaagttttgcagcagcaatcacctttagaatgcttacttggtcaaactccagattactctatccttcgaccatttgggtgtgcatgttacccacatttgaggccatataataagcataaaatggaatttcgatctcaacagtgtgtgtttcttggctactcctctgcacacaaaggatatctgtgtgaaaactcccaaggcaggctgttcattgcaaggcatgtcatctttgatgaaaccaccttccctgcaatatcatctgcttcagctgctaaggtacaatctgaaccaattgtcaatctacctactgctactttttcattttccaaaaatgataatattgctcctccattgattactcctcctgtgacacactcggggtcttttgttactgagcaacctcaccaaatgcctaatcctcaactcaatattccctctctttctgcttccagtcaacccactacaccaaccattactccacctgctgtccctgctcctattctcccatcatccgaaccttcaactaacacacagcaaccacctgaaacactacctgtatctcaaccaccagttcctatacccactcgcacccacacaatgcgtacaagatccca

SEQ ID NO: 257179 - DNA, 794 bp, Cannabis indica
cggtgttatcacaatatagagtcgcaggcatgttgagggagatgccaaaatccttcagaagtgctatgatccaagttacttcagacgttgcattggcaattgcacggtattcggcttcggcagaagatcgagaaacaacttgctgtttttttgacttccaagatacaagagcctggccaagaaacacacaatagcgggagatggatcgacgtgtgtcttggcatgtgccccagtctgcatctgcaaaaaatgagagttggacatttgaaggagatagactagtttcagcaaaggctgaaacatggggagtggtgtttgatgggaagaaaagtccttccccaggagtgcgtttaaggtattgtagtattcgatgagtagcttgaagatgaggtactcttgggcatgttaagaatttactgagacgattgacaacatatgagatatcaggccgtgtaatcgtgagatatatgagcttcccaattaaactcctataggtggtagggtcggggagaacctttcctttgtctttgctgagtttaaggttaggttccattggagtggaagcaggcttagctccaaggtaacctgtgtcagcaagaagttgtagagtgaatggtctttgggaaatggatataccattctttgttcttcctacttctaatccgaggaagaaccttaaagtccctatatctttaagcttgaattttctgtccaaatattttttgaagtgggtaatagctagttggttattgctagcaactatgatgtcatcaacataaatgaggacaggaagt

SEQ ID NO: 257180 - DNA, 477 bp, Cannabis indica
attttgattttttttaaaatccactgttgtatttaaattattttttttatcttttcaaattatgcatgaaaatagtatttttgtaaaataaggcaaaataccggggcgttacaacatgagatgtcatttatcattattagagtaaagtattagattatacatattttaatttaattatgtacctgaattaattaagccattatgtaccactaaaatttaacactaatttcgaaaaacactcaacactcttttttttctaatttttctaagtacatatatataacattctatttaatatgttttttttatttttttaaaataaaataagtcatttgattcaatttacattcaagctcttgaaaaaaaaatattaattcaagcccttagtaaatcaaaattctagctccgtcactaactacatacactatataagtgttgagggataaagtctttctatacactacatgtaaagtgtaa

SEQ ID NO: 257181 - DNA, 631 bp, Cannabis indica
tcccattaacgttgggtgggtggatccgctgaggaatggttcaagaagttagaacttggatctgtagactgttggaataagctacaagtcagcttttgacgacggtttgtggcagcaaggaagatttacctcgaagtaggcgtcctgaccaacataaaacaactaccagcggtgaccctgaaggatttcataaaaaggttcaaagaggaagcttcaaaaactaaaaagtcgatggtggataatagttggctttactccaagccagaattcggatcgggactcctttttggaatgagctacagtaggaggagctgctagcctataagactttcagaagagggtccaaaagtatattaacttggaagaggcacaaatagtggcttatggcaggtattacccaacgggagtgtcaggatatacaacaggaacgcaacttcttggagctgtgctccctactgtcccacaaacaagcaaaatacaattttctaccattatgggatatgctaagaatcttgcctttgctccagcgctgtcacacttgggggccctagtaggcaatcccctcgggatgaacgtgtaactcccaactcagtccgcgccagccacaagcatggcaggggcgcccaaagtt

SEQ ID NO: 257182 - DNA, 675 bp, Cannabis indica
taaactttagctccacgtttccaattctgataaaaagagtggtgtgggagtctcctaacaacactttcttgtcttcagcagatgtgtatgttttaaacatagcacgatcatgacagacatggtaagaggtgccagtgtctacctaccacccttttgatccaccaactaggttggtctcaaaaatcctagttgtaaaagcttgtttatttaagttaatctgcatcgcagtgctaggcttgttcctacacttttgtgccatatgactcagcttgttacatttgtaacacagaaactgtgagttctatttaggaggtggttaccttccatgttggttcctattatggttccaactctgattattattttgagcaaaaggttttcgcagttagaattagaattcgagttgcggttgtgattcttgaaattttttccattaggcttcagaactgctagtatggacttattagtgttgttgtttgaaacaacatgtacttcatttttctggtcttgttttctcgcttcccctatatatgaggtgggtgatcaaaatttctaaggaaaattccttagtcttatggttgagagtatttttaaaatcctttcagaaaggggtaacttatcaattagtacaacaacttgaaactgttcatctaaaggcatgttgggttttatgcc

SEQ ID NO: 257183 - DNA, 504 bp, Cannabis indica
cttgaagacaatgcttaatacgaacaaatataaaaaatgtaagcagttttgtcataacacttttagatcgaattataattaaactttattttgacaaaaagtcaattcagggtcctatttgtactattttagaaaatacagggtccattttgtcatttaacaaaacacagggtccaattggtaacttttgtaaaacagatggtccaaaatggtatttaccctaaattataattaggacttttttcatgaatatagttgcagtaattttttttttttatgtacaaatatggtacctaatatgaataaatcagttttacggtatataagatttttttttaacaaaattacggtagtaattaaccaaccactccactaatctccaaattcgatgagtgtaccatttctctttatactatttccctttccatactcttttcttgattaaaccactctttgtggtctagggtttactgttggaaaaattctcattacaagagagaatag

SEQ ID NO: 257184 - DNA, 1157 bp, Cannabis indica
aaaagcacgataaatatgtgccaatttacatcgtttacactaaggttaatgatactcaggaaaacatctttctcgcaaatgagctgagccaaggagacatgcgagacacaaacgtgatccaataagattttttcgttttcataaagacatagggcatgcaactgaagagtgtcgacaattaaaggacgagatagaaagcttgatttctcgtggatattttggacaatatgtgaagcgccaaggaaatgaccaaaactaacctgttcagcccaacaacccagataaccaaagaatgcaacctccccctgttgaaggataggatatattggttatctcgggagggccgcatctcgttggagaaagtagtaatgcccagaagagatatgtcaatgaaatcaagaatgagcaatcagtgtttactctggaataactaaagaaattcaaaatagaagaacttccaattgtattctcggagaaagatacgaaacacgttaggtatccacacatcgaccctcttgtccttatagttcaactcgccaacaagagaataaaaagagtattggtggataatggaagctcgataaatatcctatacaaagatacgctaaagaaaataagactacaaaatgcaaagttaaaaccgtgtatggtgagcttatgcggatttattggtgatagtgtcgccagtcgaggcatcattgaacttccattaacaataggcgagccaccattatctacaacattaatgcaagacttcttagttgttgatctaccatcagtttataacatattgatgggttgccctgcattgattggactaggggcagtcagttcaatcaaacacctatctttaaaattccaaacaccagcaggagtaggtgtagtacgaggtgaccagctgttggctcacgaatgctattgtgtagaacttcggaatagaagagccaaccatcaactaatggtggtcataacagaagaaggcgagaagaaagaagaggatctagatcttagaatccaagaagagaaaaaccagttaaagccaattgaagaactcgaagaagttgttttagatccagataatcccactaaatgtgtatttattgggaaaaatctggatgaaaaactaaatagcagttaacaaattttctgaaggcaaa

SEQ ID NO: 257185 - DNA, 1022 bp, Cannabis indica
gcttcaatttgtcttgatcaattttatttgttcttttgatgcgttttgcattttagtttgtttagtcttcatttttgtttcattttgttgtattttttttttctgtttgtgttttccaggtttttaaatattttttcatttcagtttcgttttaatatctcttctcattttattttagttttttcatagttttttaatagtgtaatcactttctatatgttgttttttgggaatattatttggtctagttgtttcttgtctatttttatgtaatcaatgggtaacaatttgattttagatcattgcaatttatgttaaaagagttatttctgtacttcagtttgtttttggttttttaatagttttattatagtttggatacttgtatatgttatttgtttatatttgccacgtgtgttaaattgtaggtctgggataacaaattcagtccctctgatttctacagatcgaaatgtgtttgtattagtaatttctctgttcttgataatatcaagaatatgttatctgtcaatatattgtctatgtttcgtgacacccaatttggtcattttttggatgtacctaattttgtttttcacccccaagttttctatagcctacttttgagggaagtataccagtccaatccaaaagaattttgggctaaggttgttggccgttgtatacgatttagtgccgagaagttttacttgatcactggtattgattgttttggtgattgcaataaactgttgttttcccaggaatcaaaccagttgattgaggtttgtttccgtggtgtcaaaaccatagatcataaagctatagtggatgctttcttgggaagtaggtggggtcagaatgagtcacttggtttgaaactatctgtgtgttatttcatccaatgtttccttcttagcaacactccagataaagaagtttctaggtttgatctagatgttgttgatagtggtcgttgggatgagtattgttggggtagggagtcatttgaattgactatt

SEQ ID NO: 257186 - DNA, 1215 bp, Cannabis indica
gaagtagaaataggtacgcatatcttgaataatcatctatgaatcatacaaaatattgttgaccattccaagaaggtgtaggaaatggcccacaaatatctatatgtatcaactctaagacatctatagctcttttagcacctaatttatttgttttggtctgtttgcctttgatgcactcaatgcaaacatcaaagtttgaaaaatcaattgaatctaaaatttcatcagacacaagtctctcaactctatttctagagatgtgacctaaccgtttgtgccataaggaacttgatttttcattatccattttacgcttagtaccacgtgattccacattcaaggtttcattataagaagcaacagtgtcaagcaaatataagttgtcataaaccataagagaaccagttccaacagtatttgaattaatagataaactaaaacaattgtttccaaatgaacaacaataacccaatttgtccaaacaagaaacagaaaccaaattccgtctaaaagacggtacaacaaaagtatctattaagtccaaatagtaaccagtacttaacaacaacctaaaatgccctattgcttccacatttaccgacttgccatctcccacataaatgcttctttcagcatcatttggctttcggtaactcaggcaaccctgcatagaaacactgatgttagtagtagcaccggaatctaaccaccaagtgtttcttggtactgaagctaaatttacctcagaacagaccaaagtaagaaatgtacctttctttgctcgccatgcaatatacttagcacattccttcttcatgtgtcctttcatgttacaaaagaaacaagcatcatcattgttggcttgagtttgtttcttatgtgcaggacctttatccttagcagcctcattctttcttttcttgcccttatctttagaggtgcttgccaaatgagcactttcagtcttctcttgcttcaatctttcttcctcttgaacacaaaatgaaatgagctcattaagagtccacttctccctttggcagttgtaactgaccttgaattgactgaattgtggaggaagagagataagcactaaatgcacaagcaagtcatccgaaagctcaagctttagtgcctttaactttgaagcaaggtgagacatttccataatgtactcccttatgttttccttgcccctaaaacttcatagaa

SEQ ID NO: 257187 - DNA, 559 bp, Cannabis indica
ataaaatagattacattgaaatggagttttatttacggcataaaacccaacagtggggccatctagggatcttaagctcaacaacaaccccctttgtccatcctatggccgaccaaccactagtaggagtccccatggctggccagactcctccagcagtacctatggccgaccagactcctccagtagtatccatggctgggcaaactcctccagtagtacccatggctggctagagaagagaactctgccctaaggggagcgagtcacctgaagatcaattttaaattgatgaggaccgagagcgggtggaaacacccaaaacaacaatttgagaagtgaatttaatcacttccaccaaactccaacaattggtgtgatctactccatgttgacgcacaaactccactagccaggtagagaagtatgggcggtcaggctctgctcgtcttagggctggctgaccatgtacgagaattagactcagggctggctagccttgggtataccctctcccaaggtatggccggcaagattctatccaatttaaggctgcaac

SEQ ID NO: 257188 - DNA, 751 bp, Cannabis indica
ctcaatgaacgtagttcgaactacggttctaacgagtgacaccaacctggtagtactcagactatcactgccggtgtctatgggtcccgtgacacatagtatgtaatcaagttagatgtagtgtaccggattcactattctcgtaacgaactcacttaaccacggatctactcagtgatgccgatgcacaatggcagcagtcacactatcactgtaggtggtttgggctgagtatgtagcaagttagatgtagtttaccggagtcactagacctagctttatcacacactttgtgtctcataatactattgtattcagaacattaaactgtttttttattaaatatctatatttgtatattattcgaaaaattattataatctttattccaacgaataatactttaatgtaatcttaaaaaaattattgcaatctttattccaacgaataaaattttaatgaaatcttaaaattgtatttaataaaaataatgagttctcattattagtaaacatcataggttaatttcttattcatttgggcacacatatttatttggacataatattaggatatttgttgctacatgtgagaagtttatgtggccattgttgttgtttacggatgggaacaaaattgcacttatttaaatacagaatttttctaatcaaagtcaaccaaaccctaacaaaaccgatcatttggttggttcaaattacgtcttccaagggaaaatttaatagttggttgg

SEQ ID NO: 257189 - DNA, 690 bp, Cannabis indica
cgtagacctacgtgttgctctcacatgtctaaatacaataagaccttagaatgcttcatctcggttaggttaccgagtccaacatgattatgccttaaacacataatccttgaatatcattacatttaacatggcatggcagttacacatatatcactagggtaataaccctaggctattagaccgttcctattagggtattaaccctaatcccggttactaagcattcacacatatcactttcaatataagcgccactgcatatactctacgtgctaactactgtcttacctgttgttttgcaactgacaaagattctgaatccccaggtgctcctgatcaggtgccggtaatcctagtcacacgaatttgggattttcacaactatggttaactcctgatttcaaacacataaaatattcctatggcatttaaaattcagataatcatacagagctcggaacgagctttccaacgatataaagaactcccaaatcggagtttggaatcaaaagttatgaatttttgaaattcaactcaaaactgcccaaaaacatcagggcgggccgcggcatgaccaagtcatgccgcggaacctgggacaaaacccagattccgccaacaaggggcgggctgcggcatgcttaacccatcctgcggcacctgtgttgaaaacccagaaaaccagca

SEQ ID NO: 257190 - DNA, 704 bp, Cannabis indica
cagcatcaaaatcaaaattataaccattgaagaaaaaattataacccttacacttgttggtgttctgttaaaatctcaccctacacatctacgaaaaaatagtgcaattttgtatggacaaaacaaagactgttgtgcatcacttttctgtttaacacgttgagagagaaagtagttttcatgcactaacaatcattttaatagaaataatgaaaatttcacatttttgatagggatacccctttgtgaaatgtggcctggaccaatcttaaaattttttttggcactagtcacaataaattagtactactaagaagtgaatataaagatttgtttcgcgttaaattgtttaaaaaggccaccttattcaaaaatcgaaaatattattcttttcagggtaaattttaaaaggttttttcttactcttacacttcgttagtgttctgttaaaatatcgccctacacttctccaaatttcgtgaaatttcacagggacaaatcaaagattgttgtgcattacttttctatttgagagaaaacgtaattttcatgcactaaaaattatttttattgaaatagtaaaaattgcaaattttcgatagtggtacccctggcctggatcgatctcggaattttattttgcactagtgccaatgaattcatactacaaagacgtgaatgtgaagatttatttcgcattaaat

SEQ ID NO: 257191 - DNA, 571 bp, Cannabis indica
ccacatctattttagaaaattcagattaattatatctctcggaaaggtataatggctaatgacaatgatgtgactgcaaccttgtggtatgaaagaaaagccgatcaattataaaaagacttgccatggttgagttttcacttgtgcgagcatcaatagatctagaagctattgcatctaaaatcccatacatctcaatatttcctgcaaagttgtgcagcatacacctgtaaaggaaaatagcaacaaatcaagaccaaacagggaaattgtgcccatgaaattataaatacagtaagccaataaagaataaaagctttgaagcatcttgatacgttgatacctggaagagagtggcgagagctgaggttgcagcagcatatgttgaatatcacaataaaagcaataccactgggcaaagaggataagaaacgagatccttataccaaatttcaaaatctaacatatgcaccatattgttcaagtccactatattaaattagaaaatggagaaaagggtaatcataggttgagagcaaattacctcagcaattagaaattttgaaacaga

SEQ ID NO: 257192 - DNA, 669 bp, Cannabis indica
atggtgttacacctgatgtgataacatataacactctactgaatggtctttgtaaggctgcaaggaacgaagatgtgatggaaacgtttagagcaatgttggagaaagaatgtacccctaacatcgttacgtacaacatacttgtagaaagcctttgcaaagctcggaaaataagtgaagctatggacttgcttgatgaaattcaagataagggattagccccagatattgtttactttggtacattaattaatggtctatgcgataatagggatttggatggagcatacaaactatttagaagagctgaacaagaatttaaggtttctcacacaacttcatcgtataatattatgatcaatgctttctgtgaaaaactgaaggttggcatggcacaaaagctatttagtgaaatgggtgaaaaaggcactaatccagacagttacacttaccgagtcatgattaatggattcttgagagtaggtaatactgactctggttatgatttccttattgaaaagattgagaagggatttcttccgcggttgacaacatttggaagggtgctgaatagtctttgtgtgaaacatagaattcttgaggctgttggcatcatccgccttatggtgcgtaaaggaattgttccggaggttgtggatacaatctttg

SEQ ID NO: 257193 - DNA, 573 bp, Cannabis indica
gagagagatcgggtgggaaggaatgggtaagcctaaaaaaatgaaaccataaaagctaaatgttccttgtatatgtgtgtaaaggccaacaattaagaggcccagatatatgaggaccttttatcccagttcttagataaaagctgagataaaaagtctcacttaaaatgttaaggttgttttggcaaatgcataaaaatagccttttcaacactattttttgtttgtttgccaaacaaggcctttgtttttaaggttccgaatgtaaaagtgggaccaaaagttttatcccactttttagttttttcaagtgtaaaaagtaggataaaaagtcttttttgttgtagtgatgactaagaagagtaagacattgttgctgaaagaatagagaaccaatcagcaaaagaatccccatcaatacttttaatagagccattgaactaatcccaacatagcttgacaaaagagaagtctacaagtacataagccacgatttcactttcaatttgactgaagaggtttcgttcttttgctatggcaggagtcggcagcttcacgggatgagacaatgag

SEQ ID NO: 257194 - DNA, 846 bp, Cannabis indica
atgttactcatattaataaaattgaaaaaacagatagagttttagaaattctcagtttgtgtttctgaatctgaatttaattcaaaatcttgatcttcttgctgttttgagtgttgttctttcttgtcaatctttctttcaagattttctttccaattccttcctgatattttcccttgaatcttgttgatcttccttagccaaactaggctctgataccactgtaggattttcactcttttaccctacaccaacaaaagactttaatatcagtatcaaggtcaaaacagacctttcctagtctaactttaagtttagactaatacggcatcgtttatccaacacgacaccaaaacatgtgtcgtttggatcccagagtttaaagactctgaagaagggtctagaaaccctaacactcaaacacaacactcaacctcccaaaactcgaaaccctagcagagcaagattccaagcctagaacccagaatcaacctcacacacacacacagaaataggtttagcaaaatgaaaaacaagagtgaaggagagaaaacaccagatttgtttcagagttcacccaaaaattagggctacgtctctgtcaagcttgtctcggagattagcttgatatccactataatcaaaggtaaaatacaatgatttggagcttcctgtcacaagatctgatcaggtaaactcgattctttgcttgtacaagttttgtattgttttcttctgatttacatctcgatctaactcttatttctttgttgttgtgcatgtacttcctccgtcgtacgctcctctacctaaggagaactggtttctcatctctagtatcttgga

SEQ ID NO: 257195 - DNA, 699 bp, Cannabis indica
attcctacaacactaatagatgcatgccgttatgtctagtgagtgattctttcttcatattagtcttccagggtgacactatattttatacttatgatactattttgctccaaccatatttgtgcattgcatcctgattctctttaattgaaaaacaattgtaggcctctttaatttgcaaactttcctactttttaaattgcactgccaaaacctcctaatatttgaaacctaattatattccaatactaattagttacttttaactaaaactataccttatatgtgctaaaatatcataaatgcactggaaactctttaaaataagttcaaccctaccatgagttgttgtagcccaactacttacttactattgacctttaacaatagaataaccatacaatcttatactatattaatcaaccaagttttccacttccaattgaatgaaatttaattatttccaagatattggtttttgtctaatttcgactcaggagagtgctttcaagaatctctgttagcgctcctctaggttaagaaaacttccaatatatttgtcaaaattcatagctctgacgactttatcttttaacagatttattatcattctattgtcaagcccacctctttgcccaaaatcaacatatttgtgattttttttcttaatcatttttaagtacgtacacttcaacatac

SEQ ID NO: 257196 - DNA, 1152 bp, Cannabis indica
gctaggctcgacaggctctcctatgctttgttttacttcgaccagatctcctaggtgcaacaaaagttggcgagatgaggaaaattacgcatggaactgcgaggagaaagccttccatgagttaaaatttccgggtgccaactttaaataccattgctgggttcttttgaaagggtggcaggcaaaactctgcaacatacatctcgtcgtactccttgcaggttcatttgcatctcaaaatacttaaggtgggataagagatcttccttcccagtatacatcttcgaggttggcatcttaaatttttggggcaactccaggatattaatattgggggagaaaggagttccgcgtgctcgggccaactcgaaatagttgttcctctgaccggccaggccttggaacatatttttagttcgttcaactgtgctagcacaactagactaacctgttcggccttttggcagatctgagtcacatcagcatgattttgagtgggattttgagcatgggttccgggttgcacgattggtgtgtcaagttgatcgtccactcctcccatcctgtttagatcatttctgagatcatgagtcgtccccaacctatcaaataagaaaacgcatggttgtcttagtgactgattgatttggccaacgtgctgaccgacaccattaacttggttggaattattgggtatcacttctcctgatgacttactagataaggtatgaatgcctacatttggcccataggtggaacctatgaccggggatttgatgactgaccatttatagtgtgagaggtattcatcgatagatctttgtctgttttgcccaaggggatgacggtcacaggttgtttcgtggcaatttgataggcttttcgtatcaacatagtaacttgtcgactacgatcgtcaatgactgcttgctgagccttcaatgtttccaactccttgtccctccattcagtgaacatgcacctttgctcttcaaacatgaggttcaccgcagcatggagttcctcttaatcttgatgtcgggtgttggtatgtccctgcatgattccaagagcagcacggggattttggattttagtcttgtcacttttttggtacgcgatggttgctagtggcttgacttctgtccattt

SEQ ID NO: 257197 - DNA, 1888 bp, Cannabis indica
tctgtcccacaatatcccgccagacgcggacatgctcttaaaacatgaatgcagcacaattgactcgtttcgttcttgttactcccatgttatccacaatgtgggtaacagtgctcatccactattctgctttaataatgttagtacctcccaaaaatgttggaggttgcagcttgataaaatgctcaaaaattgagtctttgtgaggcagtacaaatccatggttacccaccactaaaataggagctggtggtaacacttgttcaactggagctacctgggccggttgcctaaaccgacgcaactcatcttcttgacaaagtacatttcaaggaatatatgctgctagtcggtaggtggattagcattgtcaacccccgtattaatccccaaatttcacagagacacaggaggtgccggtggattggtttggtcattagctctacaagctcgccctatggtctagttgattaattagggtctattttctcgcaaatagccctgaaatcaacaatctcggtgagttaggcaccaaaaccactcttaaacacttattgccttaaccctaactcacacataccattttttcttttaaattaatcgtttatcaatttaattaataatcatgcttttcatataatattttattttctacatgctcatatgccgcctataatggaaagtggtaagcatttaatatgaaaagcagttaagcatttactctcaatacttattgtaccacaagtcgagcttgtctttgatgataaatgtacatgttcaaaagtttaaaaaccttggcgctctaataccaaatggtaacgccctaacaataggaacatcacgcgcactgggactaaacataaactaatcctactaaaccggaatctactagagctaagagcggaagttgaacttttaaaatgtagaataaaataataacttgtaattaatacactttacaaacattcaaaagtttacattttatattttgatcccataatttttttttctcaaaatattacaagttatttatacacgccaacctaagcagcaaaggtggagattatgacctttttccttgagtagacccaaccctcatggtctagcttgacctaaacatgtacaataaagcacaaaagccatcgacctcatggctgatcaataacagatttaccctttcctgtacaatagagcatccgtgagtcaaggcccagtaaggcagtatagataaccatatgaatattaattataagtcacataaatattgatgccactgcacctattgttaatttgacataaacctacgcgttacgctcacacgtctgtttacaataaggttttagaatagtttatctcggttctgattaccgagtctaatctaattatgccttaaccacataattctttatatcaacatatacattataatattgcattcatattcacttaaattcaagaataataactctaaaccacataaccgctaaacttagggtaataatcctaatctctgtttctcccataacatacacataataacatacatgagcgtcaccgcactaaactctatgtgttaggttattgtcttacttggtactctaagtatgtggagattccaaatctttgggtgttcctgaacaagcaccagtaatccagtcacacagtcccgagatttctcaaatagggttaatcccaaattcatttttacacatatacataatctgaattgcatttatagattaacacatagagtctaaaatgagctttccaacgataccaagaacgtccaaaacggagttccgagtaaaattatggcaaaaacaagaaaaatgaagaaccacaaaaaagtaagggcctcgccgcgacagctccaacctgctagagccac

SEQ ID NO: 257198 - DNA, 689 bp, Cannabis indica
gctacatgtataataaatgatatctttcaataattctatacaccccaaatccaaaacccaaaactcaataaaaccacccaatatacacttctaatattaaattttgtcatttataaataatactattagaaatatgatattttacggtaatattaggagaaatttacatggtatactaacttttgctaattttttataaaaatactgcaagacggtattttttacatttttactgtattttttataaatttcatactgcagtatactgtgttaagttttcactggtgttttactggtgttttgtagttgttctactattgttttgagttgttctgctttgtgttttactggtgttttataaaaacacagtatttttaaaaacttttccgtgtgacagtatttttgtaaaagttaatccataatataagtccttttatcacattttagttaattttatcttaaaatataataataataattataaagttatcaattattgttaataaaattatgaattaacaataaaataaatcaaacaaaaataggtatagttttttttttttaattgacgtatagttatagaatgttattgctttttgatttaatatattcttagagtcaatacgataaacatttaaatgttatagaaaaatatgagatcaaaaaaattgttggaataattgtccaaa

SEQ ID NO: 257199 - DNA, 1579 bp, Cannabis indica
gtattgggcgcattgagaatgtgcgtactgagattgaaaataaagtctatttggaaagtagaaattacactatatgggaaaattataagagcttactttatggcatatataatgctaagtaattatgtgattttttatttttttacatttatataagcttttttttatgcatatttttgtaaaaaaaaatatggaaatcccatatttgtaaacaataataagttttactgaaaagaaactggcgccaaaaaagtcgtcggaaaagtcactggcgtcgggttagtcactggaaaagccaccagtgtcggaaaagtcaccagaaagttagtgttgctggaaaagtcaccatcgccgaaaaaaattactggaaaagtcacaagaagtagatgtctcaaatataaactaaaatagaactggttctataatataatgaatgaaaataaataacacaaagtaactcaaatcagttataattaaaatataaccggttctgtaacataatgaataaaaacaaataaaacaaaataactcaaactaattataattaaattagaactggttctataacaatgttataatgaataaaaacaaataacatgacgaaataactcaaaccggttataactaaaatagaaccggttatatgacataataaatgagtattttcgaggtagatatatatggtatggatgtaattatttggtgggttggagcatgttgaatgaatatttttgtttgagttattttagttaactgtttttatgtgtgagtttctatattagttgctttacggaactatttttttgtcttaaatttttaactaattgataaatataactcgtttctttatattatatttgagttatagtgtgttattatttgtatttatttattttgttatagaaatagttcttttcatatttatgcgtcaatattttttgaaatcgatctctatttttttaaaaaaaattataatcgattttacgagatattatgtgttatgagattttttattgtagaaatagttttgtttttatgtttcagtgttttaggaactgatttttcctttattgtttaattgtaatcggtttgaattattgggtgttacttgtttgtattcattatgttatatatataaccggccggttctattttagttataaccagttttaagttatttcgtattattagtttttattcattataacactgttatagaaccgggtctattttaattataactgatttgagttattttatgttatttatttttatttattatgttacagaaccggtaatatttcaattatatccgatttaagttattaatttttattcatataatcggttatatttttagttatatctgagatatttacttatagtgatttttccgtcgatggtaacttttataacgatttttctggcgccgttaacttttttggcgacactaactttttcagtgccggcaactttttcgccaaaacttattgttgttttacaaatataggatttccactttttttttcttacaaaaatatagcataaaaagacccatataaatgaaaaaaaaaaaaaa

SEQ ID NO: 257200 - DNA, 560 bp, Cannabis indica
aacccaaggtactcgtcatacaaatcagagatatccctccaagggcctttgggagagagacgacttcctttttttgtgtcccaaaagttatcagcctttccatatcgactcaacaccaccttgtgccacaacgagtttggttctagggaaaacctccacaaccatttcataagcaagcccttgttcctcatctccaaattcccaattcccaagccaccttcctctcgcggtctgcatacctcaccccaagccactaaatgatccccgcccgacgattcgcagccttcccaaagaaaatccctcatcaacttctccaatgctttagttacagcttttggaactttaaatagggaaagatagtagattggaagggaggataggactgactcaatgagagtcaatctccacgagataaaaatgaacatttccagccatctagtcttttagcgcacttgttcagaaccggctcccaaaaagcccattttctaggcgagccccccaggggcatacctaagtatgtcaagggccagctgccaacttcacaccctatctgagatgcc

SEQ ID NO: 257201 - DNA, 808 bp, Cannabis indica
attgaagaatcaaaacaaaagattgttaaattttcttctttgagtataaattacatatacgtaataatttaaaaattataatcaaaacttaacctatgtaattttttaatatgaaaaaaaaattctaaaagaaaaatacaaaaagaacaaacaacgtgccttgcacgtagttgccgactagtaatatatatatatatatatttattcaattttctctcattaaaattttccaaatataaatatttaaaaatctatttaagattctcttttgagaaaaattgaaaaatttataacaagaagtagcctatacttgaaaacaacaattaaaaaaatgtaattacatattttcattcgttttttcaaagaaaagacaacattaaaagaaacaattaattgttcctaaacattctttcttaatcgagtggaacattaattgttgttatactaggctcacttattcaaaaacaaagaaaaatctcatattaatttgaatgattgaatcgtgtgttttaaatagtgtactgagagttatatccaatatctcgatcaattgcattaattaagataataaaatcctaattaagccacttcatgtactcaatcatcattgttaatttgagtgtgcctactaatactcttccctatatctaggacactaactgtcataactgttttgacagttatgttcgttagtgtcatacctgtttcctatgtgtataaatagccaattggctttctagtttagatcatcacattgtaaaacattaagtatcaataagacatgttattttctcagttctagtcttag

SEQ ID NO: 257202 - DNA, 688 bp, Cannabis indica
tgtgattaaaaaattaaaaaacaaaagtgttaccaaacggcacctcaagtaaatatatatttacgatttattaattagtaatatatatatatatattattaattataagtacggactgatcgagagtgtaaggagattaataattaattgaataattaaataattagggaaggaagaagacgattaatttgacgactatttgagggagaaggaatcaactatggtatgttatgttatagttaataatattaatattgttggaattgatgagcaagttgcattatatatataatatttgtaataattgtaaccaaaacaaggaatggagatgggtacgtggaacctaatgcaattattattattattattattattattattatagtatatcatatttgacctcatcatctcaactgatcattcatatagtcatctattaatctcatatatggtcatgagtacagtaagtcaagtcaaacttatacccaattaattatatatatatatatattttttttcaaatttattagttaattagaaataagactaaaaagaaaaaacacggtcatgtacagtaatattgtgtgtgtatatatatatagcatactcatttgcttgaatttataattagaagcaaattaatatcgagagctagaatatagctatatcacacacataaaacacatac

SEQ ID NO: 257203 - DNA, 686 bp, Cannabis indica
taaacttaggtatttttgccgcaaattactctttacaaatctctcttgatttcaaccattcttttgatcttgaagagtatatttcgagcgtgaagtacttttcttcttcttctccaatctcaaatgcatcaactttcttgaattctgtagaaatgtgtatggaatctgagatggatcaaaagctaaagatataaagtcgtcatttacatgtgaatcccaactgattcccttattaaatggattgtaaatgtagattgttgggtcttgagtagggacgcaactcctgcaacaaatgagaccctaacacgatgacattaccacaacatcctcagagagaaaatcaaagattgtctatttgtattgaaagccttcttcatcaataggaatgtatgtgacaattttgatatctttgttgagccatgggaacttatcttggaagatgaatcttgagagttcaatataaaataatttttcttttggtcttaattgtactgcatagcaagttatattgcaacgtaatttatattattaagaatggtgcatagtaatttttgtggtatggcaatagttgattgtatggtgcatagcagattttattgttaaagagtttcaattatggtcttttacttgtttagtatagtgacacgtgttatacatttaattaatgatgaaatcttattttgtgt

SEQ ID NO: 257204 - DNA, 657 bp, Cannabis indica
tgggtttagctttggattggaagtgaggtagctttcttactgaatatttttattgaattccttgctgaaagtgttgtggaaaaagtatgaattagttgaaatattcttgtttatgcatgtatggatgaattttgttgctcttgagagattaaggtataaattccatgatttagttgtgattctttgttgttgagctttgattggatttttagggtatcttttttaggttgaaatccatgttactttggtatgtggctgctggaaaatatttgagattgatggatttttagctcaagttcttgagcttgttgaattgtgagttaaagcatgatttatgttatgttttgcaatctgaaattgggagttattgttagaaattgatgcatgaaataggttattttgaacccaggtgccgcggcatggtgtttagcatgtcgcggcgtgctcatttctttctgggcagctcctttttgccaacttcaaagagccataactttgtgatccggactccgatttgggagttctatatacctttggaaagatatttttgagctctatctgaatatctgaattttaaatgccatgtgaatactttatgaaagtgaaatgaggggttaacccaatttgtgaaatcccggattgtgtgactaggattac

SEQ ID NO: 257205 - DNA, 1068 bp, Cannabis indica
ttaggataggttttgggttgtctgttaagtgcgagaaattctttaggcccgatggtgtccgatggcagaccgatgtaggtccgatgggtgtgggtttgtagaaaaattctaggttgaagatgaagtttcgataatggtccgaaagagtctgattagggcctgatggtagttaggtccgatgttgtccaatactattcgatggtgtttgatgatgccttttagagtattgagattggctctgtccgatggggtccgataataggtccaaggcatttgtgatttatgacactgtcctgtgccctatgctttgtctgatggggtccgatggtgtccgatgccctcttatgtccgatagcttatttttattttatttggtttttgagtttggtccgatagatgtccgatattggcctgatagtgtgcagtaggatttctaacttgtattttctcttgtgtcatttttctagaatacaagaccgccacatcttataattccagtgtcagagcattataaaggtcgtctcacttggcgtggtggaagttattactatgtgaagatcaatgcaaagtttgacgaattctaattatgggagatattggaggaatctccttttaaacaagtcttcgagaggaatccgataaatttttttggggcattactccatcagttattcatgcataagatcaaatctgagaagccagacgaggtacattttttttgggaaagaagagatggagattcagccgcgtcgagtttgcattggtgacagggttgaacttgctactcgggcctacagaataagaaattgaagagaaaggaaatttggaccggttgatttttgagtacttcaacggtgattcatccatcagctttgaccaattacgcaaagtttttgagagttgcatagaagctgatgatgtgtacaagttggggatggcgttgtttgttatgggcgtcctcactggtaaggaggagaagactgttgttccttcatttgtgataagaatggttgataacctagaattcttttatgagtatccatcaggaaagatctccttcaacaagtt

SEQ ID NO: 257206 - DNA, 1544 bp, Cannabis indica
gagagagagagagatttcagcatgtataattaaccctagtttaaaagttggatttggaaagaaaataaataaggagaatgttagaaaacaaaattagaaactatggaatgaataatgagattttttttcatatatatataaaagtaattaaattacaaaagtatttaaggcagaccctgtaaacattaatataacctataaattaaatattaccaaaataatatttcttctactacttcagtcgcacgaaacgaaacaaacaacctcatgcacgcaaccttcgatcgaccaacccaacaatcctacacaactaaaacgaaatccaaccagaaagagaattgttaacgcatattttcgttaaccaaaattaaatagccttttagtaataaatattctacagaaattaataaataacaaaagatataataactcaaaatatttttatgtagttttgtagttaaaatctacatactccacgagtccttcttagtacagaatgcaatatctaattttgaataataataattatctttccaatttttcgtcatctttcccatggaatctatccctatttataggagtatagattagcagttatcctttctgagattaattcaagtataattgttcatgaaacgtggacaatccccacgtttcatttaaatcacatgtgagataatactaaataactacccaactgctctttagttttatcttttagatggttattggtgacgtggaaggttatatcttctcttattcgagttatcttccttctccatcttgataagacaaattgctaagtgttgggaagatttccatctcgctatgctctctttgtggcttttgtaatgtgaggtaatcttctcgctatatgtaatgcaagacaatttatgttgatacattcagtctgctcaggtggatgaatgttccttccttgtctgtatattttgaggtatgcatatgtctcgtttatctcagatcaatagttgttattcttgtctcgcttttgactataaagtcaatgagttttgaatattatttatttaacctttagataataatgagttatttaatatgcatttaatgatatcattatatcatttagaatcgactcgtattccttctattggacacgtgtcaacttctaaagtgtaaccaaattttgggtataacaagaaccaccattaattttggcgacttcacctgagaagacgaccgaaatcaatcaaaacaggggctctttcgaattcataaaaaaaatacagaaaaactactacaaaactaaaactcaactagaaatccagtttaattcgcataaaattaatgtgctgacttcaatttttagattcatgaaatgcaaatctcaaaaaattgaactggagttccaaacaatccaactcaagtataatccaaaaaaaaattacatcaatactatagttaaatgtttattccgatgcattttttgttgttttctagatttctaatggtaaatttattcatattaaattacgaatggacatgtcgagatagttacgtacgtg

SEQ ID NO: 257207 - DNA, 1240 bp, Cannabis indica
ctcagcttcattattggaagctgagaattcgaagcgtagagccgcctggagtcgaagtccgttcagagatatcattgctattccagctccggatatgttttcgttgggcgcttcgtccacgaatactttccatgttggagtttgtggcactggtatgttcgcgcttgcttctgcttcattgcactctgtatgaagtcggctagcgcttgtccttttatagacgtgcgcggtatgtagtgtatgtcaaactggcttaactctatagcccacttgaggagtcttctggatgcttccggcttctgtagaacttgccggagcggatggtttgtcaacaccttgatggggttagcctagaagtagggtcttaactttcttgaagccattaggaggcaaaaaaactagcttttcaatcactggataccgtatttctgcccctatcatacgtttgctgacatagtttaaagggtgttgggtttttttcttcttcccgaacgaaggctgcactgaccgcattctcggagacggccaaatacagtaacaagtcctctccgtgaatcggtttttatagaattgaaggtttggctatctgttcctttagctttttgaatgcctcctcacattcttccgtccactaaaatttctggtatttctttagaatattaaagaagggaatgcacttgtctgttgagcgggaaatgaatcggttcagggcggcaaccttccatgtcaagatttgcacatctttgtgcttcttgggagaaggcatgtatagaaaagcttgaatttttttcgagtttgcctctattcctctttggctgacgataaatccaagaaacttttctggtttgaccccaaaagtgcacttctacgggttaagtttcattccatacctccagaccacttcgaagcattccgcaaggccatctgcatgacttccgcatgcctttgatttgaccagcatgtcatctacataaacttccatgttccgtcctagaaggcctttgaacatccggttaaccattctctgatacgttgcaccaacattttttagtccgaagggcatgaccaggtagcagtatacccccttatcggtcctgaagctagtgcattcttgatctgcaatgtgcatcttaatctgattatagccagcgtaggcatccatgaaagacagtagcttgaatcgagaggtggcgtccaccatttggtcaattgggggaaaagggaagcaatctttcgggca

SEQ ID NO: 257208 - DNA, 979 bp, Cannabis indica
tcttcaatcttggtacatctttgtactttcgggatgtacaacaaacttggatttataggcctcaattaaaatggactccttaagatcagggatatttgcaacaactagtcttcccgtatggtataggtacccttcaccattaactgtccacccatctagttgctcaccatcctggattcggttccaaataaatcttagctttttatctcgccactgacgttgcttaacttgttgaagtagcactggtgtagccactatgttagagatataagctacttcttccccttcatagtattgcaagttataatcacccattatgattgtccttttccagtcctaatttagagccaaacatgccaaagtaccacgaggctttctacttagtgcatcagctactacattagctttctcgaggtggtactgcaaggtgaaatcatagtcttccatatactcaacccatcttctttgcctcaagttcaagtccctttgagtaaaaagatacttcaagctcttatgatctgagtataacttaaactttacgccatataaataacatctcaaaatttttaagacaaagattaccgcggtaagttctaggtcatgcgtagggtaattcttctcatgtggtttcaattgtcgagaagcatatgcaaccatcttgccattttgcatgaggacacctcctaatccagtacctgaagcatcagtgaataccacatatggttcctcacaattgggaacagtgagaacaggcgccgaagttaatctttccttcaattttctgaaagcttcttcacaactatcatcccacataatttttacttcttttcttgttaactttgtcaaaggcatagcaatccgagagaaattctctacaaagcgacgatagtagcctgctaacccaagaaaactttgaactttagtgacattctttggtctttcccacaatagaatagagtctatcttcacaagatcaata

SEQ ID NO: 257209 - DNA, 568 bp, Cannabis indica
catccagctggagactcaggcaaagctcaggaaaagtatgctcgagccttacagcacgaataaaaggaaacagttctgtttgtagagatgagaaagccaaaaataccacgggtaggggaacccactataacttttactgaagcagatgctattcatgcccacttcccgcacaatgaccccttggtcgtggaagtacaaatagaaaataagacagtggcccgaactatgatagacaatggagcctcctcaaacatcttgtttaagacaacatatgagaagatggggctccaacttaaagatttaatcccctgtacccaacttgtatatggtttctctagccaaagtgttgcacctctagggtaaatacatctacccctcactgttggacaagctccgaggagcaaactgtgatggcacaattcttgataattgatgttctgttagctttcaatgtcatgttaggccaaccggccctatatgacttaaaagctgtcacattagtttttcatttgtgagtcaagtccccaacaaagaatggggtagggtgcctcaaagggaatcaaagaat

SEQ ID NO: 257210 - DNA, 1107 bp, Cannabis indica
agttcagatgaagagcaagaacaagaacaagtgtcctctgagctcaagattatcaacttgtccgagacagagttaggagagatgtaagaccaccaagaagactaggttatgctgactccattgcttttgcacttgcagcagctgaagaaattgaaaatagtgaacctaccacctatgctgaagctgttactggaaagaatagaaagaaatggcttggtgccacaaactttcattagaatcatgatggaaaaggtggctatgtttgatcttgaaatggatcaaatggatgtaaaggcagcatttttgcatggaagtttagaaagagaaaatctacatggaagaactgagggatttaagaacatgaaggctgatcaagtgtgtttactacagaaatctctatatggcctgaaataggcaccaaggcaatggaacctgagattccatgaattcatgctgcaaattggatactcaagaagtgagtatgacccttgtgtttactacaacaagaaacctatctggttattactttatgtggatgacatcttgataatgggaaaggatagaaaggctatagacatgctgaaagaacaactcagctctgaattcaaaatgaaaaatcttggtgaagttaaaaggatactcgggatagatatcaagagacagagacctggttatgttttcttgtctcaggaaggttacattcagaaaattattgacaagttttgcatgagtgaggacaagacagtcactactcctcttgcctcacacatcaaacttgctcaaaatcaagcaccagataatgaagaagagaggttatacatggacaatgtaccctatgcttcctgtgttggaagtctaatgtattgcatggtctggtacagaccagacttggcttatgctctgagcatggtgagcaggtttatatcagatccaggcaagatacattgggaggctgtgaagtgggttctaagatacctaaaaggaacagctagagttggtttgctatacagagaaaatgcaaaatttgaaactaaaattgcagggtatgttgactcggattatgctaggagtatcaacaccagaaggtcaattactggttatgcattt

SEQ ID NO: 257211 - DNA, 679 bp, Cannabis indica
aagaccatttctttccaaccaacgtgcatggctttgatgatcattattctttttagtattccacaattatgctacaaagtaggagcatggatgatatagttagagaattagtagcatcacgaattaggtggtaattaagttactgtttgaaatggagcttttctctctactgttgaattaatcctaagtgttttgagcatgaaacatatatagggctgccatgtggatttaattaaagattggttcaatagttttgagtggagtgtggttaaattaactagagttaagtccactcaaaaatctataaatagagctatgtagtgcacttatttcctcactcatattcaaagaagccatcaaaattctcaaaccacgctcttactaaatttcatatctaaaacattcattttctttcttgagccctctctctaccgccagctatagtcactttcttctaatcccattaatcacttgtttcttgaaaagccaaaagccaaaatcactacaccaccatcgcctctcctatacatacatatacacataaatatatatagggctcatcacattcttcatcgtttcgacgtcactaccttcattgttttacattcaagtttctagtgctctactagattttatttgaaaactaaggtatcattttataatttgagattagtaaatt

SEQ ID NO: 257212 - DNA, 522 bp, Cannabis indica
tttgatgaatcttcgacaagaaagccaaagcatcagtatatactatacccgtctcaagactatatgggaagaattgtccaactataggccaaactgtacctgtaatggatgcacctgtggtggtgtaaagaagctccaagaacaccaccacatggagtacatcatgtcctttctaatgggactttcggatcatttttctcagattagaagcagcattcttttgatggatccactgcctgaagccaatcgagtttttcatttagtaactcaggaagaaaaccagaaaggtaatcttgtctctgcaactgattcgaactctaatatggctgttgcgtttcagacagataaaaacaacacttccaaacctgatactcaaggatcgaaaaataatcctccaagaagaaatagacccttttgcacacactgtaatgtgcttggtcatactattgaaaaatgctataaaatccatggatatccccctggattcaagaacaaatcgaaagaagcttcagcaaaccaaat

SEQ ID NO: 257213 - DNA, 562 bp, Cannabis indica
aacaacctacactaagctattttgcctaactcgctacttttttcaatgatatttttgtagctccgccccttttcagctacttttcggcgacatcgtgtactgttttgacaaacggttagtgtggatattatctactcgttgaggtaatcattttgatatacaatacccctattttcggtgatgttttcggttcaccaatttttatcgccaccgatagttaatgtgcactgtttaggtgaggcttcagaactctaaattttaaatatagtcatattatatgtcgttggactcgatttttaatgtagaatgcaatgatgataattatttagccatttgatggtataggtaagagtaacatctaagattagactaaataaatggagctcgggacttgagagctaagatcatcttttggaccaaactttaacgacttgggataggtagggactcaacttaattattggacttgaattttatatgtgttgcataacattagacataatctaaatttgtatgatttgcaaattgtttgaaaaattgaaaacttaatctgtatattttt

SEQ ID NO: 257214 - DNA, 774 bp, Cannabis indica
atcatataattcaaaaataaaaaatttgttttaattaaatagcaaaagtaaggatagaaattcaaattttttaaataatactcgttaaaagtatatatcatataacatccatagaaggatgcatcactataaaaagataaaaaaagaacttgtttttgtctttttgtgaattctttttatatttttttacaattttttttacaataacttatgtggatattttattttttactacattttgtggtacttggcaccaataatgatatgtcactatttatggtttttaacacatctcttagcattttcttatgaatgataatttttttaaaattaacttctgtggggttttttttaatgattttaattttttttttcttatgaatgatttttttatgtataatttttgtataatctttttttttcatgtattatttttattattattattaatagaacattattatttgacactttaatatgtcttacactatacagatatgacacttaataattggttaatttttatattattcaatgaatcaaaatttgtgagacccgataatgaaatataccaataacggtatgccacgatttatggtgtttaacacttctcttagtatttttcttatcatctttaataaatggtgtataatttaagcttaaaaaagagtcaatattatatttggcccaaatttataatagtgctataatgtaattagggtaaaattgaccttttttgataaaaatgtgtaaaaaaatcaacaaaaacattaa

SEQ ID NO: 257215 - DNA, 744 bp, Cannabis indica
ttcataattaatcatgattaactgctaatttccaaattaaactaagcggtctttacagtacacatggacaactaacttggcacttaattgccaaagatagatgaaaatggctaaaagctaacagaacatggattttggaaattttgcagccaaaatttgagttttgagggttaattgctagcgaagtgaaagtattgggggttttatcgcaattaactattttttttttttattattttacctcgtacatattaagtttaattaggtgatgtttagtgcaatacatgtatgtttaatctatataatttttttattatttcaattcaatgttaaaccaataaagttaaaaatatttacaatatgttaagtattttaaatttaaatttaaatttatttgtataaaattatatacataatttttatttttaaatatatataacaatattataaacttaataaaaaatattttgttaagtaatagtatattctattaaagtcaacttagaaagtcacataatatattttgttaaagttaacttagaaagccaaaaacgaccattaaaccaaaacttttgttacatagccacattttatatagaatacatatattacattatactttaatctttttaggaattattacatggaaaatacaaattgacactttatttacaaaaatacttccataagtggacaacatttatactttttatgtacttttaattaccaaaatacctcttacac

SEQ ID NO: 257216 - DNA, 638 bp, Cannabis indica
tattttggaggggtcaatgatgtgaccaaatttaagattcttgactaattagtttattttgaagaaggcaacttccctctcaaatacttgagaatcaatcttcgtccaaccaaatggaagctctcagactatggtgtgactatccttgataaaattcacaagaatgttaactgctggcctagtaggaatttatcctttgctggtcggatgcaattaattcacacggtattacttagaattaagaatttttagatgagcatattcattattccttccaaggtcacgactgccattgataagagttgtcaggattttctttggagaaccaaagggaataagggaaagcttcaccgtgtctcttgggaaaaagttcacctccctaaaagtcttggtggagttggattccgagaagacgaaaaatggaacaaggctctaatggtaaaatttctttagactttatctaacaaacaagaatgtttgtgggaaaaatggataaactctatctatctgaaagacaatgacatatgaagcttcccaaaaattcaagataccagctggtatttcaagaagttgcaaaatcttcgtgacaacacggatgaagccaagttaaggcttcctatgataggtactaagttcag

SEQ ID NO: 257217 - DNA, 1304 bp, Cannabis indica
aaatccatctaaagagagttgagagagcgaggaagcccgattacccatggtagtcaattttctttgcagatcaaagcttatgtgggactaaagctcaagaatcaatggctggaggtatttcgatccttattcatagtgtatatatgtttgatttaattccgcattttatacataaacatatatatttcagtttatacatataaaatgtctaacactaggcactatcaacataaagagttccctctaaatcatcacactaaaatacgagcttgccaacatgaagtatctattttgatgggattgccataaatccatgaacgctgcaaaacaccccaaaatatgaacaaaattgacaatcctaagctcagacatgccaagttgagatattttcaacaattcaagtatctattcattcaattagaatcatgtaacaattcaagttggtacaaatgtaagatatacccatgtcactatatattgtataaataacatttcaaatgtcaataaaagaattttaaattctattaattttattttcttaaaaccaattagtcacatttacaaagtgtcaccatttataaaaatagaaattagtattcaaatattatttatttaatttatttaattggggcaaaaacgttagaagcttacaaattttataatttcattattaaaatattttataattacaaaaaaaaatgtttttatatatacagaaagtaattttattatttgaagcaatactcaaatgtaaataatatcttttcccaaaaaaaatgtaaataaaatctttacatagtcatatcaatgacaatttcatcagtacataagttgaataataaagacagaatatcttcatcaaatataaataaataaataaaatgtatagcaagattgtccccattgttttgagactccagcaacctatttttctatttgtaattttcatttgttctcctttctcaaatgaattatcaaagaaaattagtctgtttttctcaattattaacttttaataattgttaataatttattaaaactcatcacaattcatgtaaatccacaatccatcattcacaagaatcacaaccaaaaagttcttaggcactcaagtttggcaatgttacagtatacctcaatgaaagagaagccaaatttttatgctatgggagtagaagctttaatggcagaataacccgattgggtttgaacaatatgaaaaataaaacatgaatataattatacatatacataaaaaaaaatataaatataatgcttaccagatgattggcaaagagagtcaa

SEQ ID NO: 257218 - DNA, 594 bp, Cannabis indica
gagaagatcgcgccaatgaatgcacaacttattagcagactgcttgacaaaattaaaagaaacatcagcaacaaaggctaacatagccttacactctaaaattatacgaccataaggagaggtcatatcttaatttccttgaagatccagcacaactctacgacaatccgactccactatcacactaggccaattgttgtccttaatccaactcagagcctcttttatacaaatggcttccacttcatgaggttgtatctgagtttataaaaaaataaaattaaaagtgtcacaattattattttatttagagtaaatagtgatataagtatttaatgttttgtgtttataatcgatataaacttaataattttttttagtggcgtaagtatacaatgttaataaaattataacttacctcaaattttattagtacatactccgttaatatcttaaacatgatacatataacacagattttaaatgagtaatttgcggcaacccccccccctctcccaactattaatttacttacaaaaaaccatctaacttcatattttggtgggacaaccctccaaagtactgttccattta

SEQ ID NO: 257219 - DNA, 807 bp, Cannabis indica
ctaaaaatgtatatgtccgcaatatcaccttcttacgtaaaaatccatctctttcttcatgtagtgatataacatatcttaatttaataactagcttttttctctttggaactaactagtaagtatgcgaacccgctcttttcttggtgtgagtctggtccctgtgataggggttttggttcacccagattgtttatgtggtggttttctctttgatttcatgtctaatcgaagctttcctctaataaatgagagcattaattgctctgagtattatactccttctctttccaatctcatttgtcttactccgtgcatttattgcatttcgattcatcttcttcttctaattaattcaacatgtcatttctcttccaattcttcaaatctttgcattaaaaaccatcccttcaccttctcttttgcccttggaagtcgtaagatggaggcggaagaaggatctcttgaagctcatcaaattcttttcatcattggagctactcctaagtttagggttatgattaagggatcttcgagagtcatcctacatagttattggttctacctctataaagaaagattaagggtatatcactatttctcatctctcacttgtctttccttgtttctttgctgtctctgtgatagggtatgaatattcactttatcaaatgggaggagtttatcaagtggctcgattttaaatatgaacggcttcctgatttttgcttgtattgtgttgacttgatgacactagaggtattttttggaaataatttttccaaagtatcttagatctactcacaa

SEQ ID NO: 257220 - DNA, 1230 bp, Cannabis indica
tcaaaaactctaattaagtaccagagtactactacaaaaaatagtatttgtgtcggtcaacgctactattcctagcgttgaccgacgtaaatagtgtaacaaaattattgctgtcggttactaaatgaagttataaaataataatttgcgtcgttatcaaaatgacgctacaaacacaaccgacggcaaagaaagcaaaaatatcaaaagtgaaaatgttattcccgtcagttcattataatcgaataaaagttttgcgagcttttagaaccgacgaaaaaacaaatgggtaaggttaaaaactgacgaaaaatacatctaaatccctataagtccccaaatcaatcccactgttcacattcatcttcaacatttcaaaagatgaaaaagctctggcgattggctgctcccctctcttcctccatcctcgattttcgctccttttcttcctctccattgttggccttcgctcccctctcttcctctccattgttggccttcgctcccctctcttcctttcaaatcctaccaccctaatactttgattttgacccactgcacccaatcgtttaattctctctctgattcacacaccaggtgtgaggtctaaaactccaaggaaacaaattcacatccacattcacaggtatttgcttttatgtgtatataatatatgggttttgagcttgcggtgggttgattcaatttcctttttcaatgcttgctgagaaacccattaaaggaattgatcaaacataatcaaataaattattagggttttgcagatttatttcctcctgtagaaatttaaggaatgcatttactttgatgatttagcaattttttcaactcgtttgtttagaaagaaaaaataaaattcttctagtttggttagatcattatcttaattctaaatttttaatagtttataatcttttggttagatctgttttatttacttttagtattgttttccctatttttctctgtgtttagtttgtgtaggattaggacctggagagttttttctttgccttggaagattgtagctggtgacttttactgctcttggtgtgtcgattgcagctgcaagcttttactatacactttccctatatttcttttttaatcctttgaccccctagaactttgacttatgcctcccttccttctatgtaatatgtatatgtaaatggccaaggaaatgtctaagtataatttaaattaata

SEQ ID NO: 257221 - DNA, 1761 bp, Cannabis indica
attttgttgttgagaagcagtagtaaatagagttgtgtatggaaattcttcttcattaaatttaacactcctagccacatatattctcccactaggatgaagacatctatactctttttgagacatactataccctatgaataggcattttgatgacctaaatgacactttgtgggattgataaggtcttagtaaaggaaaacaagcacaaccaaatttttttaaaagattataatctggtttttgttgaaaaagtttttcaaaaggagataggtagttgttgacagtagtgggaagccgatttatgaggtatgatgctgaaacaaatgcttcccaccaaaaggtgagtggcatattggcttgagcaagaagggttaatcccacatctactacatgcctatgttttcgctcaacccgaccttgttgttggtgggtgtgaggacaagagttcctaatcataaaaccagcagtaagcagatgacttttaagaggggaaaattctttaccaagatcactttgaatgcttttgattttggtattgaattgtctctcaacaagtgcattaaattgattgaataaagatggtgcttcctttggttttcataggaaaaatccatacaaatttagtaaaatcatcaacaaggcttaagtagtatttgtaaccatccatagaaacatgaaaagagggtccccacacatcaatatgcatcaattgaaaagcagcagtagttttattaacagtgggtttgaaactaaattgatgcattttgccaatttggcaagcatcacagaaagttacatttttacatttgacattgggattaagatgtgcaagaatcttggctaaaattggcttggatgggtgtccaagcctacaatgccaaacagaaacagaattagacttatcttggacaggattgcttgtggtggtgcaattaagggctgctaaactactgcatttattgttgttgctggtttggacacaattggaaggctgagaaggaatcttggctggttgaacttgaagcttgtaaaggccattattgagagtactctttagaagaacttgcctcgttgtcttgtccttgataagacaacaaacatcattaaattcaaggatgacattattatctttagtgaattgggaaatactcaacagatttttggtgacatttggaacatgtagaatatctttaagaacaagaaattgatgtggaatattgaaactaattgaatttgaaccaattcaaaaaataggcataaaattaccattaccaaccactactttggctttacccttgtagtccattgggtcctgtaggttgtgagagtctgtgatcatgtgatgagtagccccggtgtcgagaaaccatgctccaaaaagatcactagtggacagggtttctgcaagatttgcttgaggattttcagcattagtttcattgtttgtgttgctggaaggtgtaggtccagtataggttatatcaaacctatgataacacttttgtgccgtgtgtccagctttgccacacacctgacaaattggtctgttacctctcccccctcgattgcttgaataacctctgccccctctattgttgaatcattggccacgaccactgtaacctcctcgattgttattgttggctgacagattagccaaatttacttgaacatttgagagggtttcagctgagtgttgttttaatctgagttcatgacactatgaagcatgaattgaacctcctgtagactaagcgg

SEQ ID NO: 257222 - DNA, 775 bp, Cannabis indica
tctaccctcattcggtctgtggcggctagcactcctgtgtattccatgtcgaccttcctcctcccaaaatctttgtgccacgaaatggatcaggccattaggaaattctggtggactggcagtaccgagaaagatcgttatcttgctcttgccaattggaactccctgtgtactcctctggaggatggcgacctcaattttaaaaaatttgaagatatgaacctggccttggtagccaagcttgcctggaaattagctaatggggaagagtcattatggacaagggtcttctataccaagtattgggagaatggaattaactccttttggaatcccgaatcccccaaatccctatcctttggagctcggagtatcctagcttcccggaatctcattcgtaaggaatcgtgttttctcattgctaatgggagatcgattaacatgtggcatgcaccttggatcccttggttggagtgggatcaattccgagctgccttcaatcctatgatagttccgaactccactcttgtttcttctctcttcaatgaggacagggagtgggacttccaacaatctgctacttggatggtcccaagtgtagcaagttctctcaatttgatccctatgcttcccaataaccatgatgataagttgatatggaaggatgcgactagtggggagttctcaactcgggtggcctataaatcaatcatcaaaggtcgaagggctgaaaaagatcctattggggtaaaatctggaaacttaagatctcgga

SEQ ID NO: 257223 - DNA, 1134 bp, Cannabis indica
ctatatatatatatatatatatgcatataaacatttctatataagtttgccgaataattttatggattgaacatatacaaataaaggattgaatatgtatatctgctattgataaatgtaaatcccaccaatatgttaaccaagtttttagatctacaaaataagataaaaaaagaaattagtggagtatataaactgaaataagtagtgagctttggatgtaattcatatatttatataagtgagacattctattaaaaatctgtaatacaattaattgtcaaaaatattatgatattaataagaaaataaaattggaaacaaaattaaatgatgaccataaataaaaaataaatatttattcaaccaataaactattgactttttttttttggaatattaatcaattaaatgcaattaattaattaattactaaatataaaatattctaacaaattcatcaaattatttagcgtcatgatgatgcaatatattatgtataatatgcatccatatattttttttttaatcttctgcacttattcaaagtttttggaactaatgaagaagataaataaaaagagatttggaataataattttaaagtgaaaatagacgctgttgtttcagcaattatacaatacaactagtttgaagttacgtgcattatatttgattatatattagctgaaagcttttattcaatgctagagaaggaagcaaagacgagaatttcttcaatatgcagtagcttcataaaaaaaattaacaaaaaaaaagagaaaaaaattattatgagtttaaataagacaattcaataaaatttaaaataaaaatttgcgaaactaactatttttgtatcattccaatacaaacatcatttcatcccaatacaagaatgcatctgactcctaaattgacaatacctatttcaaagaagctctattccaaataatgccacatgggaataggaccaacttataaccctattaattttcctgttctccctaactcaaaacccaaactttgtagaaattaataagcattattacacactactaacataatttcaaaagtaaaataacagggaagcaaaaggaaaaaaaaaactctgaaatatgcaatttatataca

SEQ ID NO: 257224 - DNA, 704 bp, Cannabis indica
aaattgactccttccattctcctatctcagaagaaaatacttcaatacacaccttttccacatcaaaaagcacaactgtgtactccatgctagtatgctacaatagctatcgttaaatccttctatttcccctaattgacaacaagacttgggcatgcaaacaaatccaaccctgcattcttcatatgaagatgactcggggagtgaaacacactgctctttaatgggattgcaaatgcagatttgtggtcttggtgatcttgtttgttaaataatcggctaaataacattgggagcctgaaattagagatgaccatcgcttgcatactagactgcactgcattacagaacggttgtcagggatttgggtcaatatcctattagaaattaaatagacttccacattcctcttttagatattgttcaccatttgtggttctttctccttccaatcaattatatgtgtgcaaaaacctttcccaaaccaaacccgtagacgattcaattttttttctaatttgaatctgttaatgctctatttacttctttttaacaatttctaaaatgcattcaatcgaattcttaaactttttctctggacagattttttagaacaatggaagaaatggatttaagaaagtatgacatgattggatcatcctccaaaatatgtatgagcatatgaagatagaataccttatgaa

SEQ ID NO: 257225 - DNA, 828 bp, Cannabis indica
ctctctctctctctctctctctctctctctctctctctctctctctctctctctctctctctctctctctctctcgactcccacaaaaactagattaaaccagctcttagcctccatttttctagaaattcaataaggattcaaggtgtattcaagcgaaggtaaaccctagaactctagtcttttagttgttcaagctttaagtttggttttaccatgtaatttttgagaattagtgactgtttaggtttaattttgttctagtgtgattttctgaggttgttttgaatagaattaggttgcttgttgctggttatgttggtttgacaggtgaatgagcaagttcgagtttgaaaactattattggatggcactcaaacttgattcattaatggcactttttagtttttgtgtgtttttcttgcttttaatacttggaaactgttattggatgttagtacatgtgttttggaaagtttgaaagaatttggggcagaattggttgaatttcgaactgctttaagaattcttagaaccggttaaccgtttcataggcaggaccccaaaaaaccctatttatcaatttggaccatttttaaagccttagttttggtgtttccttgataattagggtattgtctatcgatagcaaaacttttagtagtgggtttcgatcctcggattgggttttagcaagttatttatctttttacgtgaatgtgacatagggtatccatccagcgcgtgatttccgtttaagtcggctaacacacttgaatttggaaacgaggtcaggtaagattagcatagaacatatttatatatgaa

SEQ ID NO: 257226 - DNA, 1446 bp, Cannabis indica
tactaaaaaaacttatattcaggctagttaggtcgacatataaatctcaacctatatataaatttttttactttcgtgataaatttaaacacataaaagacattaggcataaaaatcctaaatgctacacaaactatataggtactctcgtcctatatatcgaaatctatgtctattttactatagcataatcaacatcacttctcagatcttgcattgaaatcataaaatatttaattggtgatcaagcaattaaaagtaattaagtacgaataaaatagatgtacataaaaaattagggaaaaactaaatcatattaaaaccaaaataaaagtggtgtttggttggaggtaataaaataaaatgaaatgaaaaggaaacactcttcattctattcctttgtttggttgcatattgaagtattagaatatcattacaatagaatcactacaagaaatgtcacttttaccagcgcatgcattgtgcaaactgctctggcaaagaggtcaaagttttaccagcgtacatttgcagtggttaaaatctaacttttaccagcgcatttacgtactgggaaaagtcatttttgccagggcttttcattttatgctggtaaaagttttaataccaacattgatttgccaacccccttttgccaacacatcacaagtaaattttattttaccagcgcaataccaattaacttttgctagtaaaaaaatgtgctggcaaaaagtgacatttctagtagtgaatggtctttctactattttggtgtaatgactattacattttgaaatagaaggaaacattattccaattcatgatgaaaaaaatttaataattttttattcaattttttatgcattttaaattttattctattccattcatattcttattctcattcctattcttatgttttcattcctcccaactaaacgccaccaaagtgtcaaacaatctccatcaacaccctaataaaaattttagctactcatattcatttaaaatatcttataacaattaagaacataagaaaaatagaagaaaaggaagaactctttgaaaaataaattttgaaagtcttcaacacttctcccttctaattttcttactcccaaactcatcatctggaaagtattgaaaaagagtctttatatagctaaaaaaagattaaaaaaaccaaattttttccagtttagaataggcaggccgcgacactaccttatagtgtcgcgacacttgaagcttgatttttggcatcgagttttctggtgcgatgactgataatatttttggctataacaatttttaatattgctagaaattcaacgattcaagatgttttatagagataaaatagacgtctagaacttttattcacaatattttttcctcaaaaaagaacgcaacataattaaaaaaactgcttgaagctttaga

SEQ ID NO: 257227 - DNA, 632 bp, Cannabis indica
cttcccaggaggttatccatcctaaaattattccaggccaaggctaagcacgtttaaccgtagagttctttcgtgatggactaccgaaaaacatgatgctccttgttgatataagtagtactaatcaatccatttaaactctcttcaactgtgtagtcccatacctagatacacagtctcagaatcatcacacttgaccttctccaaacgatgtgcaattcgaaacaacaagaagacacaagatatcaaatacaaagatgcaagagagaacctatttcacaataccacagaatacccaattcctacatccacactatatgtaggatgacacgccctttagcctaaagggtatattggactcatcacattagtaatgttagactatgatttaatgggccatcctatagtcaatgtaattagttgttattaacaattaatagatactttgtctaatagttgtgaatatgaaatttatgttattagttctaattaacatcttcttcaacttaaaatataagataagcttgtatggcttatgttggtagttcttttactgctgtaattggaaaaatgcaacctgtattgtattagttagaactttcattccttgaagtttaaatagaccaaattat

SEQ ID NO: 257228 - DNA, 724 bp, Cannabis indica
cacctatattgttcagatcaagagaattttgttgaaatcatctaggtgtcttctgagttctttactgtcttccatcttcaaggtgtacaatctcttctttagatacagtttatttgcaagggatttcttcaagtaaattgtcccaagtttatcccataagccaagggctttttcttcatctacaagttctctaagtacttcatttccaagactgaggagaattgcagagtgtgccttggcttagatctccatctttttcttctcatcttcaattacttttagtgcatcaacattaatagcctctgaaattccttgatgcactaacaaggctctcatcttgattctccaaaggctgaagtcattggcacctgtgaacttgtcaacttcatactttgctgttgccatttcttgatcgagttcttggtgcagagttcttcaaataaacagttcttgattactccaattccaatcttgctctgatgccatttgttgggattaacaatcatacaaaggaggatcaagaacataagacaacaagcataaacaacacaactatgacaagaactagttcaaatttaaaccaaaaaactaaaagttaaaaacagatgaaaagagagatggagaagaatgactgcctttatttcacttcttgatcaatagcttgagagcattacaacttgggacaaaaaaatgaactgaaatgtacttgagatcattacacatt

SEQ ID NO: 257229 - DNA, 587 bp, Cannabis indica
aacattaaatgttatttctgatctatattaataagtaaatctgatttatattgaaatgagttttacttagggcataaaacccaacaataaataatacaaataacataaatataaataaaaaatgtagtgcatttattgtgatgtaaattttacatcatagcaaatgttgtgccaaatttagtacaagatttgctatgtaccaaatttacatcacttttggcacaccatggcacaccattggagcacacttttttgttaaatgggcaatattttagcttttcacaacttatttgcatctcaattaaagatgctcttagatcatctttaatggttggtgtaaattttgtactaaatttagttcaaaaaatgagttaacgttatatttagtcaaaattttacaattgtgctttaatgcactaggggtaaaattaggggtgttcattgaaccacatctaatgtttttaggcctatttagatccgatctatttatatattaatgttagattttaccatctgatatgatccaattaatttcagtcatctaatcgatccaacatttactggatattggattgggtcggttctat

SEQ ID NO: 257230 - DNA, 1324 bp, Cannabis indica
tttttttagatttaaatatttgaaaaatattaaatagtgcaaaaatatgtaaaaataaataatattaactttggaacaaataaaatacatataacctataaatttaatattctcatctcaccaaaaatacatataaaaatatatatttaagaagtcttattattctaataaaatatcatgtattaataaattaatatagttttaattatttaaataaataattataagaaaataatttttatatgaaaaaataattaaataattttattaataattattttaaatttaacaaatattgaaaaatataaaaataaaatatattttgcatttacttttaaaaaaaattacaactaattagaataatgatcaatataatgtaaaagtataccactcacaatgatttttaaactatgtgggacttttttaatataactcgcataagatgccatatcatctcttttttaaccttccttaatatatatatatagggaggtgattttgtcctgttatggcaaatgagggaatacaattctgattgtactgtagtcgttggattaaattggggcatgatctaagggttggggttaaagtaggggtagttagggtgcaaaaaattgtaaccggttggtattttattttaaaataattaatttttaaaaactgatactgattgatgattgatgtacgtactgacagtaaccaattttcaaaatacattagtatttccttcttcttcgtgggttagtgggttcaaaatacattcataacagttaggtttattttagggcacttgctctcattttcttcttattattcaaattttcttcttcttcttcacatttttgtcttcttcctcaaattttcttcttcttcttcccattttttcttcttcttcacattttcttttagggaataaaataaatttaaaatttgggtgagggaactgtagtagtttcagagttggtgtactagttttgtgtctccggctccgtctccgaccgaggtgggtttgtacaactaagtgtctccgaatgtacaaattttcttcttcttttgcatgttgttcgttctttactttggagcattgaaaatttgtctaacattgttaaaaaagatttaaactttggtaaagagaagtgttgttcttcaatccgtgtatgtgcatctcgtatttttttctgttccatttttggtttattgagtagttttaatccattttacaggccttaaatctgcttcgtgagcaagttttgattcacagattgctaaaaatcgaacatacattttatgttccccaattttacatacagagtactaggaagta

SEQ ID NO: 257231 - DNA, 1257 bp, Cannabis indica
tttcattttgaggaagcatggtgtgaggaggatgaatgcaaggcaattgtggaaggtcattggaagagtggggagccgtgtgcaattgcgggttcttttcatggtaaaactcatcgggttgggaagatattacatgggtggaataagaagaggaagaaggaattttatggaaggatcactaaggctaaaaaggttattaatgaacttacattgattcaacaacctgggatttgggcagagttaaagcaagcggagaagcatttgaatgtgttgttggaaaaggatgagcaatattggagacaacggagccgagctatgtggttgaaatggggggataaaaatacaaagtactttcatcataaagcttcagcaaggcgaaagaaaaatgacattagaggactaatggattcaatggggatgtggcaaacggatgcagttatagttcagcgacttattgaagaatactttgatcatatttttatggcttcggaggtgaactcaagggtggttggtgaggttctagcagctgtgacaccgaaagtgtctaatgacatgaatgcttttcttttggaaccgtttatggaggaggatgtggttcgggcggtcaaagatatgaatcctacgaaagcacctggggaggatgggttaccggcactattttaccaaaagttttggagctctgtcaacaaagatgtggtgcgggtttgtttgaatattctgaataatggggcggatctgagttgtttgaatgagactattattgcgttgattcctaaagtggagaaaccaactatggtggctgaatttcgcccgattagcttgtgtaatgtcatctataaagtggtttctaagtgtttggctaataggttgagggggacgctggatgaggttatatcggaatcgcaaagtgcttttgttaaagggaggcttattcatgacaatgcgattattgggtatgagagtcttcactgtatgaggaagaaccgattccaaatggaaagaaattggctttaaagttggatatggcaaaggcgtatgatagggttgaatgtggttttcttaggtgtatgatgcttcggttggggtaccatgtgaagtgggttgatatgatcatgagttgtgtgacttctgtgtctttttcctttcttattaatggggaaattaaagggaaagtgtatccgcaaaggggtatacgacaaggtgatccactttctccttttttgttccttttttgtgctgaagcgttctcgtgtttga

SEQ ID NO: 257232 - DNA, 780 bp, Cannabis indica
aacattgttcactggaccattctcctctggatagaattttctaattattttttttattttcagccggcttaatatagaaaaatggatatgctactggatgatttccttttgctaagttgggtaaaggatttgcaaatatatgatcagattccgccattaaaatgtacctgtagttgtcacatgaaagatctgtaactattttttcttattttaaaatataaaagatcccaaatgagctttaaaagaaattatatattatacgaacataattttaatttatttccaatagtgaaataaagatctgtaacttacagtagtagatttatagtagtgaagatttttcacaaaatggttgtgttgacagattgaccgaatatatctacttaattgagattacatgttctttgactacattgaaaactgtcccattataaagtttataactttcaccactttaaataaataagaggattttatttatctatcttaaggtgtttacagggtatcatttcttggctgcaattgaatttgacagcaactaatttgcagcaggtagtcacttacatcagcaaaagtaaaagggtgccgactgctaggaggagtattttaagggttgttatggctggtttggtgtattatatctggaaagccagaaatgatgtgttatggcatcaaaaattatggcatactaaggtggtcatacagagaatacagcaggcttgtactttgagaattcttggagtgtcaagcaagatcaaaacagaggagaaggagtggttg

SEQ ID NO: 257233 - DNA, 589 bp, Cannabis indica
aaaaaaaaaacaaaaaattgaaccgatttgcaaaggtttaaaccggctgcagtatatagtgtagtttgaggagagataattgtaaaaatggactttatgattcaaaattttattagggaattaatcttaaaagattaaattgcaaaacaaacatattattcgaacgatcttaaaatcacacaaattaaacgatcttaaaactaccttaatatgtttgcaaaaattttacacttccattgacgttaacattagtttggcaaattctgttgtgagaatgttttggctgaaccggtcgttcctccttcggcgcggccgtacgtacgtgtgtcgattagagtcagggccggccctaaaaatatatgggcccaagacgaagtaaattttggggccctcaaaaatatataaaaaaataatcaaaagaagagtgttatgggattagaacccatgaccttagacattatgctatccacctctaccaactaagctatgaatatttgttgcttataatacacttaagttttacttaaataaaagcctaaataattttttttatttcgggcccccggaaagtgtgggccctaggcgcggg

SEQ ID NO: 257234 - DNA, 2241 bp, Cannabis indica
aaaaggaaaattgaatatattacttgaagttttttcattctcattatcattcactgttgcgaatcgatcaactccgctctaaaaaaaatttagagaagaattattgcttgcgtgaatttgtaacaaccatagatatgacagtctcaatgctcagacacaatgagactacaaatgtaattgacttcacccacctaatcctacatgcttcaccacgtactacaaccaatgtttagaattctacacaagaaatatgtaccacaaggttgctgagcagcttgatttagagaataattattttgtcctaggtcaggaggacgaaggagagtggcaaatattcaccattgaaaagtttcaacatctggaagtttaataccgagttcattactgcgaatgccaacgagcactacactgtagctgaatgctttatgaaagtcaggggtacccttgtagacatttatgagctacaatggaaagattaaacatgagaagaatacctaatactcttctcatgaagcgatggagcaaaaccgagaagacaaatctccacctacattgtaaccacccggcacaacaacaacaacacatttatgagatggctaggtttggatcccttagttcactaacttataacttgactttatatgcatcaaaatcagaggattcatataaccgtgcaaaggaagagattgaacgactaacactaatgctcaaggaagaatttgagttgagttccaatctagaaggagagacaccacaacctagaagatattgtaacaaccccaacattattaaagaccccaaagttgtgagaaccaagggtaggggaaatccaagggaaggaccaaacggggagcagatcctaagaaactcaagacattgtcgcatttgtcgctcatcagaccatgattatcgtcggtgcccaaaccgtcaacagaataatggatctcaggggcaacaatctgcgaacaatcaagcaagatctgactcattcaatgaccactccaacgtgtattttccggacccgcctgcctccacacaagagtcatactatagtggttcatattactagctattttttccaattgatattataaattttatgacactaatcattgcttcaaaaatcctagttttatttacttcatgttatgcttggggtgtttaaggtaattatctcatcttgaacaaatctcaaaattattattgatgaacaactaaattattttaggtaaaaaaaatcaatcttataaaatgaaaaaaaaaaaatatttctatgataatttttaatataaaaaataattaaataaaataaatacaccaatataaaactcaatatataacaacacataatttcatgagttataagaaatttttcttaccaatgtactacgaaacataaatgaacatactcggtacgtgatatttcgtacacaagttttactcaacatcatgcagaaacaataaatgtacacggtacatgatatattgtactcaactaccatcgcacaaacatgtagaagatacgaagtgtaatatccgctttcttgggtaattaatttttttttaattacttttagtttattttgtttgtcaatgggaataatttattattttgaatatttatgagtttagtggagtatgaacgttaaaggcaaaactatacagtgagggtggcgagcttgaggcatggattacatgttaggggattgtcacgatgttttggtttaaatatatttctttaaagattatggctcgattacttttgtaaaaattaatgtttaaaaatttataaatgaatcaagtgtttttgttttaaaataatgagatctcatgctttggttattttcaataaattagtttattgtctttattataaataattttaaacggactagcaagtgttacgtctcaggaaatcaggcattacacgaaggaatgaaaagacgaaaataacctcactccgacaacatggacccactctctgcaatacgtttgtactattaactaccacaaacagtacttcgttgcactttttcgtaccttaactaccacagacagtaaattgattgtccttttttatttttcaattaaaaagtcaaattgacaaccggtaaacaaacccacaccaaccggttgtcaaataaataaataaattcaaacacatttttacataccatgggacccacctgccgtacaacagaatacattgttaggttatttttagtattaattttagattaa

SEQ ID NO: 257235 - DNA, 662 bp, Cannabis indica
tggtcaaacatcttcatgctctttgtccaagaattgctgtttagtttctcttgtaccctcctaaccacattaaagtcccctcctaagcaccacacatcgccacagattgcacttaatccagccaactcatcccagaattctaatctttctctataggaacatgggccatataccccagagaaccaccatggcctttttccttctgcttctattagaactgaaatggagaattcaccgaccatagaatccaatacagtaatgcttctagtatcccatactaacaacgtaccccctgatcttccaatagctggaatcaaaatccaagctttaaaacgagacctccaaatactaccaatgtacatcctgtcaacggatgccttcttcacttcttgtaatatcaccatatccggatttaccttactaattgtagctttgattgccttcctcttcatcttgtctccacttcctctaacattccaggtcaagattctcatgatagtctttttggaagcccctcttttttttgacctttcacataatttatgttaaaagccaattttttgagttctctattcctcttccttccacccttgagactctgaaccttttgtttctcttcattctcatttagtattaattgcattcccatttcttccatggaa

SEQ ID NO: 257236 - DNA, 1398 bp, Cannabis indica
aatagttttggcatttataaggttgaaattagaaaatatggtattattgaaagaagaataagtggttaaaataaagtgacaaaattatgactagggaatggtccctttatggcaggcccttaagtgattttttgtccaatattttattgttttttaatccatataatttagccctaagccctagttgaaacactataaaggaacatgatgctctcagtcatccacttgatgccttcaaaaaaatcaaacctagttttctatgtcagacaactagtagatgagagagttccttctatagtgatttcacctcgttccttgttcttcaccatattcgaacccttagtgatagagtgccatgcccacacatagcaagtcaagtactgaatcatagtgagtaagatggtggtaaccaaacgcgaaggagagaaagagatccaagctcagattttgataatactctacaacagaaaggaacaagggttagagatctgagcggaatgagtcattatattttgatgcaaccaatgtaaggttttcttaaactcttatgtttaatttcattgttttagagatattcatatttaggatgtcaatcaacatacttgttagtaaatctagatcctagtaaaatattcccaacaattggcatcagagccatggtaatgatgttcaatggtgtcgagatggtgcatcactggcaccaacatctcgaacaaggggcatgccgcgcgtgcatgacagggacatttcctgtctgaagcgcacgttgtcccctacttcgaacacgaccaggctgcatccgctcgagctgaatcctgcaagtgtcgtgaaccctccccatgacattctcctgccttctcctttcgcatgcatagagcctcctcgtgggcagcaggtgcatcttgcaacaaaatccaatttttgtggattttttctacaaattttgaattttcccaatttcaaaccctaaaaataaaataatattttattttatcatttaaacctaaatatcaatatttttaaattaataatatttaatctgtttgatatattattattattttaatctcttatataaaataatatattattattattttatatatattatttaattataatattttaatcttttttatatatattattattattttgtgatattttgaggtttaaatttaaaaattggattattttatattttaataatattttatataaaataatatattattattattattattttatatatattatttaattataatattttaatcttttttatatatattattattattttgttgatattttgtaggtttaaatttaaaaattgtattattttatattttaattatggtctagattttaaatttgttaatttctttaatattt

SEQ ID NO: 257237 - DNA, 775 bp, Cannabis indica
tgaacttgagcatgcttcaccaaagatccaacctcaaaagctcaaataaaaaccaaaaatcccagcttcaaacagtagccaacatcactaatataaacccataaattacataaaaaacatacaagaaaagcaccctacaccaattcctactcaaacatgcatgaattaacaaaatcacaaccatatccaattcaagcatatcacgagaattcaaagcttaaaaactcacaagttcttttcaatttcagcaagaattcaaagcttaaaacagtaggaacactacctcaattccttgcacacacactagcaccaagaattaaagcttccttggcaaaatcccaagcaaatttcttcaattcaagttgaaactcaaaaagggttaaagagagagaggggggttcaggtttgagagagaacaacccagaaaattcatttctttccctcaaaatttccaatattagcaaggtaaatcacataaggtcaaaagaccaaaatgcccttagggccaaatcacacatattcaccctcacaagggtatttatgtcattccatgcatatttaaatcccaattagatttcagattatcaaatatcaaataaaatgccaattcaacaatccaatttgcatttcagaccctaacccggttcgccccgaaataatcggttgtgactataccgcgctaacctgtcagaacatacctgaaaagacaatacaggcataccatataataatatagttccactaagcacgtaattaaattaattttatcatttta

SEQ ID NO: 257238 - DNA, 719 bp, Cannabis indica
caaacatgctcttaatttttaaaacttatatttaataaattgcttctaaagattattaatcaaagaaactgaattttttttacgaactataaaaagagtagaaaaagtgatcataaagggggaaatatggtgatgggtgataggtgactatcacagtgatgaaccttaaagccgcataactgtttattgttaagctgaaaattgactagagtcgtcgtattaatcaaatttggactgacaaagacaataattaacaataacaagaatcagtgctaataaattactccatatgaaaatagtgtagccaattgaattgaaactcaccaaataaatgtgtagatatggtattgtgtatcaaagtgctgggtacttgaaacttgaacttaaatgttccattttagtccttttcttcaactactctcacaattgcccatcacttatgtttggtaggaaggaaaaataggtggatggagaggggtggaagaagagtgatggaaggagaggttaaatcacttgtttggcaagagagagagaatgagagagaagagagatagagggagacattcttccttgaaactttcaaaatttaatccctccaaatttggaaggatggtataaaaagacaaaatatattttacaaaatacaatagcgataattttgtaattttactaattaattttttctccatccttcccaatactaaataatacaaaagaga

SEQ ID NO: 257239 - DNA, 947 bp, Cannabis indica
aaattacccatcttacgacattttcaaacttttttttcacttttacgttctctttttaaaattttcaattctataaacctttattgacataaatatttttattgacttttcaaattcatttttacatgcctcgaaaccactacgattcaactatttgatcgcaacttcaatctttcagggaagggcgtctttgtcgtcatcctcgtcgtcaatctcaacatccgaccctaaaaacataacaactcctctgtacacgcagcaaaaacctccctccccaatcaacaaggtccctaaagtcaaaattgaactcagagctacgagtactgtcgaggctgttgaaggcaacactgagcaagcgagcccaagacaccttggagcgagagtttgccaatgaagatggtggtaatggctggagattgctagagttgtgcgagagagagaggaagaagccgtataattggtaaataaagtgtatttgtgcattaatttttatttgaccgtataaatgaatgaaaaattacttataaaggtataaataaaaaaaatccctaaagattatagtatatctatattagttttgttaatttatttttatgtgaaagttatgttgatttttttaattttttatgagttgttgtgggttgttggtatatagattttgttatacagtatattttatttttgttatataatatattattattcttagaagatttattttttattttgctatgtataataacggtatataattttgttagcgtaatacaaatattttaatatatatatatataattttattggtatgctgtatttaattattaattttatatattttaattgtatgatatatatttgttttaaataatatttaattaatgattattttcttacatataatggtgacatataagggctcgtttggaacgccgtattaggtcgtattg

SEQ ID NO: 257240 - DNA, 670 bp, Cannabis indica
attacaaccactttcttaacttctatatccgaaaatacacgctgaatatttctttaaagtttaccatgttctaacttaaaaacaagtttaaagtttttcaaaaacacatggtaaactggaatatcgagaactttgtttttgataacgtaaactattcgaaaatttttaaaatttatagagataatattgtaacaataaagaatagccttatgaaaataataataatattccaatatatatttttcgacacaaagacaaaaaaagatggaatagaaagttataattagcattaatactataagaacaaaattattataaattatttactttgcatctccaccactcgttagcgtaaccatctacgattccaccaccttggacaattaaattatgaacattctcaaagttaagccatcgattaccatagttaccatagtctaatccgtcattagaggctactatggctccatgaatatcaaatacgagatgatcgaattcgcaaggacccccaaacttaattggattaacgtgatatattctatttcgaggaactataagaactacggttcctcgtgtagaacacgatttctcccatgctttcgtaaatgcctacataaagttcaataactaataaataattacatgtataacacaaccaaatacgatatta

SEQ ID NO: 257241 - DNA, 572 bp, Cannabis indica
ggaaatcggggcgttacagttttgttgtccaaagtctccaatttgtatcttttatgtccaatatatcttacaacatcatgatcccaatagtaagaagtttcggccaaaagaagggagaatgagactcataaataatgatggtagtgatctaattatatatgttagtataaacttaaaagtgaattattgtgttaaaatgtatcagaataatatcttccttttcatttgattctttgactaattttatttagttatgttcagtcaatctagggatgagtgtgttttggatgaaaagtcaccttcctcaaagtatcacaactttggagagcaactttgtttctttttacatcaaggacaatccaaaacatatatccaacatttacaccacctgacttgctttagggtgccaaaaaataaataataacatgctcaatcatgaataatgatatacaccttaagtgctctttagaaatctaaatcatataaataattattcattataaataataacaaaagccgcgcgttgcgcggtcttaaaatatcttaagctatatacattttttttttaaaaa

SEQ ID NO: 257242 - DNA, 1563 bp, Cannabis indica
ttttgccggcgcactattgcgccggcaaaacctaatcatagcaggttcaaggcggataagggtattttttaacaccggcgcttatttattgccggcgttattcctcgccggtaaaaggacgttttaccggcgcagttaatgtacgcgccggtaaaaagtcctttaccgaccaagcttcccagataagctttgccggcgcacaactgcgccggcaaagctttaccggcgcagtcagtgtacttttgccggcgcaacaatgcgccggtaaaagctggatttcttgtagtgagagccatagatcacatcgatctatcggacttgaacagtctatatcttgatgttgatttctttattttctgcaagtagtattttttttggttttaatactctatttgcccctgttctactgttgattattattctcggtttaataatcttgtcattatcaatcatttgattgtttagagtttcattaatttgagtttgcacattcaatcgtaatttcccataaatcagagagaacacagaatcaagattcttttcggtgcaatcttgaaggaacttgaacgtcatcaatggcaacattcaaattagagaagttccatggaacaggggactttcctttatggagagaaagtctgaagggtatccaagtgcattagaaagtttccaaagttcttggagacgagaagctgttggcagaaaagaagctagaggaaaaggcagaaatagaggagatggcatatcacacgatcatcctgtatttatcaaatagtgtttgaaggaaactcatcgcaaagaagacagcaaaaggattttggaataaactggaagaactatacttgaaaacattaattgctagtgttaacgcagattttcgttaactaaacttgagcctcacgatgataattcaacacagaaaaaataaaagctgtagaaaatagaaaaaatatgaacaccgggttttttacgttgttttgcagttaaaattctgcacaatccacgagtcaatcttattcagatttttgagtatttttttcagggcctctttcataagagttttttcgtcccccttctttttatcttgtctgccactttttataattgcatagtggcagttaattgcaaagttgaccaaaatatatttatagccattatccctaaaatcgtgggatctgattacaaatcaagtcaaataaatgaggtttttatacaggtatgagtatcctgcttttattgggccgagatgaatgcgtaatcaaaaatatacggtaagccttatctcatagggatgcctcgctgagaatggagccaagataactttgatagcgagcagttgcttgtcattttggcttctcaagactaatattattttaactctgataattataccttctggagttgagatgatctccctcgcatgcataccatcttctagcgagataaacgcctcgatgtctgttatcttgacttgtcctactatctatactcagtttgtatatcatataatatacgctaagtgtttttagtgttgtcgttttctctttcatgcagcgaggttga

SEQ ID NO: 257243 - DNA, 1603 bp, Cannabis indica
agatgttaatgtggaacccctcaagagatccaggaagaccactacaaataagaaaggtgcctcgcagactatagacgttgagactcttgaactgaatttaggttcatactccagccattccacatgtctaggagtcagtcccacaaactcaccaggccacaacttctacgagtaaggaacctgagactttttccatggaggctgggggcaccgattcagagtattgtgcgcaatttactgcgtcctactgaccccattttcgatatttccagtctagcgactgagatttggtcaacaagggcaacccaacagagatgcttgggaggagtcttacctttaatctctcgattagtttccttctttttctatttattttttaacatttctttcaagaacccataagaattcatgtgcattttttttttgtgtaagccaccttcttatcgcatgtcgcccaaattcgggtactccataaagtaagtcaattggaagctaaacttcataaaaccattgagcaacgcgacgctgttgctaaagaatggaatggttgacctcgcttttagccaatgacaacgagtctgatttagtcagcgataagtgatttatagcaattgatatataataaagcaatataaagacacaagaattttatagaggttcagccccgagcagttcggtaatagcctaatcctcgttacttgtatttaattaagaacaaggagaaatgttccttttcttatagctcttacaatagtatctctgaatatgtattcttagataatatctttagggtatagtctcaactaaactatttgcgaccttttgcccagggaacatgcatcactatttatagggctgtgaacttggagaggaagtgtttcccctctcgttacaatggatataagaagaaggattaaacgatccctacagtatacattgatggtgggatatatgcaaaatacattgatcatgggataaatgcagaatacactgatcgtgggatcgtgggtatgccatatctctataatatgatccccaagttatagggatttcgttgatgagtcacaatacgaaatctgaatttgctaagtgttggtttctctatgcggattgttgaaagctttgctctaggtatgccagcgaggcatcctgctcgaattgttccctccgagcgaatactccatgtggattccatgtatcacccttatgcgatgccacgtcagagtacaaaaattggcataaaatttgcccccaagtctatacgggacttctgaagttgcatgtagacttcaaccgagctgcttctgcctttggatggggacacgtgtcaagcgcggctgtccgagactcgatgtgaggctgactgggcatctctatagtatgatccccaagttatatggatttcgttgatgagtcacaatgctctaacaattaatatttcaaaatctgattttctctcaccacggctgatggctgcacttgattatttttgatttcccatattcgcttttaaggagggaaactgaggcgtttgaggttcctttgaaatgattacatcttttcgtgacttgcttataaatatcaaccagcattggcacataaa

SEQ ID NO: 257244 - DNA, 738 bp, Cannabis indica
gtagtaacaaaacaaagcaacaatataatattgtggagatttgaaatagtcaaaatagtatattatggcttatgtattcttgtagtttcttgattgttttattccgttaaatagtcccttaaatatttatattattataaatttgttatttttgaattttggtggttgtaatcttgtgaatgatgtttgttaatcaattggagattttgatatgagaaagtttagaaattaagagttttcttaatgtatatattgtatatattgtatatattgtatatttactcaatgttatatattgattcaacatatgttttatgaatttattaatttttgtaaaagagagcaaaataactaatttatttcaatctaaaaaaatcactagtaataaattaattatatttaaagtatagtattatttaattattttttttaattaagtttttttttgaacaactattatggaacaaaaggaaaaaagtatggatccataactttgaacaactgtctttttattaaaaaaaaaatcaatgtgtggattgaaatagagacaacaaataacaatggtgtgttttagtaaatatgaaagtctaatttcaagtgttcggtatgataatttgaagtcactatattggcaaataaatatattaaattagtgtggcaaataaatatattaaattagtttggatttgtttttgttcgttagtttttccaaatcaaattttgcataaattaagtatt

SEQ ID NO: 257245 - DNA, 742 bp, Cannabis indica
aatattgatcgattggaaattttcaatagacagctgatattaaagtgatttttattgattgccaaactttcaattaaacaaaagcttcagcgaatatatagctataattattatttatatttttcagaatcttcagtataataagttcatcattatccactccgtcgtggtttatggcttaatagatgataagaagtgtatctaaacaattatatgtacttttattttgtaattataattttcttagaaacttgatagatgatttaatttgaatgttccaatagtactccaactatctataatttctgatcacgagttttgtctataattattttattagataagtttattctttattatgatatatcatttcattctttacatattaacattatatctgtatacaggtcatatgacattatgaagaaaatggagtctacacaatcaagagtggatattgcctagcaatgaactctatacccgatttaaattcttcttcgttacttcctttagcaaagtggtggcgtgctttgtggtctctaaaaattcctagaaaaattaaggtcttcgcttgacgtgtttgtcatgatattcttcctactggctcagggcttttagctcatcatgttccggtttctagaagctgcttttattgtggttggcagtttgatgatgtcttacatgctattttcctttgccctctttcaatttaagtttgaaagctttcagatttttggaattt

SEQ ID NO: 257246 - DNA, 1135 bp, Cannabis indica
tgcttactagcagtagaaagcagtggcgttaaattgggcatgctactgctatagacgtttaccctgactgctcagggtggattgggagagcaaaaatgagcaagtttcggaagctcatctttgcagcgagtattactgggctggtatacatgatctggagtgcccgaaatgctaaagtttggagtcaaaaccaggtgcatccagatttgttgattcagcagcttaaatactcagtaaggcagcgagtcactctctgttggccaaaaagggtaaatgaagaggacaaagaatggtttcataagttgtagctaattgtaaataagaaattatagtcatctaatacttgtatagttattcttggcctttaaaaaggtgcaattagtttgtaaaaactttgttgtgagcaatacatattctttgattcatacaaaaaaaaagtaaaaaaaagcatttattgactactagcagcggaccccatggtttcataagaaggtatgatgacaatattttaaagttttaattcaacaatctatattcctctcatattaatacatttcatgtatttagatatatgagttacacaagcttagatctttgcaaaatggtgatgagttactcgcttcagcttctggctcagattacttagcaacattttataaaggttgtgtagtgaatggtgttcggtttattgcgactgaaagagatgaaaaacaaaagatacaaaattgtggtgttaatgttgctggaaatgaagggtttaattactacggcatacttgaaaatgtaatcaatatatcttataatggtacatatacagtgacactgtttgaatgtaaatggtataacactaatcctataagaaagaagacaatcactaaaaataatataaccagtataaatatacgagaattttggtatcaagatgagccgtacatacttgctaacaagggcaagcaagtgttctatctggaagatccactcagaggtcgcgattggaatgttgtcgaagatgttaaccatcgataaatttgggacattgatgacaatgaagatgagacagatgttgatgttgtaaatgattctatctcttcaaattttgtgttgacggctgatcttggagagttgattttgcaat

SEQ ID NO: 257247 - DNA, 785 bp, Cannabis indica
gttgtatgtttgtgtttgtgtttaatctttgcgggtagtaaaaattcacatttttactgtttgtctttgcataacagtaagtttgatttgaataattactgtctggctagctagaatattgtcttcctttagttaattagaggaccataactggtggtctatttagaacacgtatgtccggttggtgagcattattatggcgtccgtttttatgtctagttatttttggccaccttgagctttgatatatgtatatatacatatcttttttgttctgtctagccggtgttttactttctatatgattatgtttttggtgaactcgctcttagtccagtagctttgttctaggtgggttttttgctatgtctatcagcaaccatggtagttgtgccacttcgtctaataagatgaccagtttttctgatgatccttcgaatattcctactggggtggtaggttatgtgttggatgacgggtgtgaggatacggatgtctctcgctatatgtctggggttggagtagacactgatcgccctaggagtgatagtgagtagggcgatatactttcgagtgttaatcctaggtcagtaataaccttgaatgacttgccaaaaattcgtcgtcgttataatattcccatacacattagtttgtatgctccggctagtggggaacgggctgattggaagataccgggttggacgatgtttgtacaagcttccattcaagtatggtttcagatttcctctcccgagattgatgtctgaactatgctcctatca

SEQ ID NO: 257248 - DNA, 1630 bp, Cannabis indica
tttcaatttttgatttggtgaatattggcttggattgaagctttgaatttgaggatctttgagtttgttcttgaattgagcttgaggtaatcttctatgattttaatctctattttattgctgaaaatttattgttggagagcatgaaaatgtgttgtggttgtaaaattggatttgagatgcatgttcttgttgttgggttgtcttatgcatgcttggagctttaattcttgagtttgtttgggttaagtttggacagaaaattagaggattttatttgtgtatgttgctgttcttaagctctaaaaaattgattgtgtgaagcatgagttcttggcttaattttttaagaactcaagataagaatttcatggaattaaggtcaagttggagctttgattttcatgaattagtaatatgaaattacgggatttattgctggaaattgatgcatgaaatatgttattttgaccctctaatatttgttagcaaccctatttgatgatttgagagtttggttgtgaattggggtgatttgattgtgttttggagctgattcgtgttcttgtggctgattttctgggttttgaacctaggtgccgcggcatggtatttagcatgccgcggcgcgcccttttctttctgggcagatcctaatgcaaacttctaatggccataactttgtgattcagacttcgatttgggagatctatataccgttggaaagctcgtttcaagctctattgaaatatttatattttgaatgccaagtatataatttttaaatgtggaattagggattaaccctatatgtgtgaatccccaaatttgtgactaggaaacccggcacttggtcaggagcacccgaggatttggaatctccatgtttccgggacatcaggtaagacagtagtatgcatgtagagttaagcaaagtggcgctcatattggatattgtcattgtgattaattaagaaccgggattagggttattaccctaaaatgagcgattgtttggtctagggttattaccttagtagttaaaagatgttgaatgttataccatgataaatatgttggaataaagaattatgcgtctaaggcatgattaagctagacttggtaaactagtaccttgagttaattttaatgtggtttagggttattaccctagaatattttaaaggtaaggaagtaataatgtatggttatgttgttaattaaatgaaggaggaagtaataatgtatggttatgttgttaattaaatgaaggcataagttagggttattaccctcaataaatgttatttcgggcatgccgtaatatgttgtaggaatgagtatttagtatgcaagttggggttattaccctaagattctatatgctttgatatctattgagtgcatgcatatatgtcaagagttatgcgcataagacataacttggttagacctagtatattactaggataaaccactgaaagaacgtaatgtatggattatgtaaatatatatgaatagggttatgcgagcaaggcataaccaggttagactcggtaattataactaagataaactttactaaggccttatgtaaatagacgtgtgagcgtaacacgtaggtctatgc

SEQ ID NO: 257249 - DNA, 860 bp, Cannabis indica
ggaccgggacctagaactgcacccaaatctcggtctcgaatccaaacttgaacttgggacgcgagacctaaacaaaaaccagatcgggacacgtgacaaggatccagatctgggacttagaccaggacccgaacccgaaccaagacccaaatcggaccctgaccctgacccagacccgggacccaaaactggaacctgagcaaaaactgcctgacaaggaccctcgaacaagactaggaccgtgaccagcacccagacccagacctagaaccgaactcggactagccccagacccaaatcgagaccagaactcgggctcagacacggtcgtttacccagaccaggactgagacccggacccaaaacccaaacccgaaccaagacctagacctgggacccgatcccaaaccaagactcaaacctagatagggatctgaatacgaacctagactcgaacccaaacctagacccacactgagatcgaaacttaggacctagaaccggatcgagactctgacccaaaccctgacttggacccgcacccgggacctgaattcagacctaaactcgaacacatacctagactgggattcgaacttgaacccagacctagacccaaactcggacaaggactcagaccccgacccagacccggacccaaacccgaacctagacacagaatcgaaatcgaaactaggactaggacctaaacccgaacattgacccagaccgggaccaaggccctagacctggatggggaaccgtagacgtgggcctcagatcccagatccagattggaacttaggactcggaccagaacctggacctagactcaaaccctgatctagacgcagacggag

SEQ ID NO: 257250 - DNA, 663 bp, Cannabis indica
tacagcgaaatgctgaaagagtttcagtctcttagatcggtagagaccgattttggtaatgatgtgaagacaaatccagaagtggttgctaatatttatagttcactgttcgcaaagtttgatcacaattctgatggagtgataagcttgaaggagtatatgacagagacgaagaagatgatgaaggacatctccaccgcctcgtgagaaaatcactctgttgactggtcgacaatgttttatggtatttagtaccctttattatttttaaattggcggtgaaattcaataataaaggcgtcttccaaattggaattgggttagggttttatgggtttaatatattgtatataaataaaaagtcacccactcgtatttttgggatttattttatttttattttattataaataaataaaaatcaccctcatccaatcgtacttttgggatttattctgatatgtgtaaaaaatatttattgtatttattttaaaaatacttaaaagtaaatttatcattcacaaaaattacaactaattgggcaagattaaatttattaatcacccatagaaaatttaataatattaattttggcacaatataagtcaaagttcagtcatctatatataacttagaaacataacacccacaatagtttctaaa

SEQ ID NO: 257251 - DNA, 739 bp, Cannabis indica
tctttaattcctcaagcattcaccatgaagccaaagaacttgcttgagttgactctaaacaagcacttgaggggtttgagcttcatgttatattctcgaaggactttaaaacacttgtttaggtcctctatgtgccccaaaaattttggacttgactaacatgtcatccacatagacctccatgttgtggccaattaggtccttaaacatcttgttgacaagacgttagtaggttgctcctgcattttttagcccaaagggaattaccttgtaacaatacaagcatacattattaggaaacttgtatgttcttggtcaagaagatacatattgatctgattgtaacccaaataggcatctataaagcttaagatctcatgaccatttatggcatccacaagctggttgatccttcaaagtgggaaacaatcctttggacatgccttgttaaggtatgtgatatcaatgtaaactcgccatttattatttggcttgggtaccaatatgggatttgaaacctaaacatggtagaattccttgataatgaagttatttgcatgcaacatttcaactttactttcaatgcttatgctcactctttatccaatagcttttatttttgttgtacacgacgaaagtttggatctatattgagagtgtgagaaattactgatggatgaattcccaccatgtcttcatgtaaccaagcaaaaatatcaaggttttcccttagaaattt

SEQ ID NO: 257252 - DNA, 631 bp, Cannabis indica
tcattcaatgaccactccaacacatatttctcatacccgtttgtctccacacaagagtcatactatagtgattcatattactagctatttttccattgatgttttgacttttatgacactaatcattgcttcaaaaatcctagttttatttacttcatgttatgcttgaggtgtttaaggtaattatctcatcttgaacaaatcttaaaattattattaatgaacaactacattattttaggtaaataaaccaatcttattagagttataagaaatttttcttactaatgtactacgaaacataagagagcatactaggtacatgatattttgtacactagttttactaaacattatgcaaaaacaataaatgtacatggtacttgatataatgtactcaactaccatcacacaaatacacagaagatatgaaggaatgaaaagacgaaaataatctcactccgacaacatggactcactatctgcagtacttttgtactgttaactaccacaaacagtaaattagctgtaccttttcataccttaactaccacaaatagtaacttgattgtaccttttcgtacctttttattttttaattaaaaaatcaaattgacaactggtgaagaaa

SEQ ID NO: 257253 - DNA, 992 bp, Cannabis indica
catttaactatttatctcatatcctagtatcacattttaatttttttttatttatgctattttattctcataatcaaaactctcattctatagttcttgtcactaatttttgaataataaattaataatagttctcatgggatcgacctgtatttaccattatactgaagtaattggtaatgtagaaataaaaataattagtaaatttgttgtggtttacgacacacataaattttttggcaccgttgctggggactattttatttaatttattactctttattgtttatatatttttcttgttactaatttgttcttcaagttgtggttttaatttttaaatctttcttcagaaacatggcgatgtacaatcaaaaatacgttgatccatattatatctcgcaacaagtgtattaatatgatccctactacgacacttacacatacaatcaacaatggggggattattctagtacttcctacaatgggatcaatcaatatgttaaaccaacttcttactatcctcctatagcaccacaagatcaagatcattctcttactgatctgctcaacactttggtggcttctactatttagattaaatagaataatgcacaatttcaacaacctactcatgttgcgcaatataatgaaaaggcaactatttctaagctgattgaaatgttagcagctaataagttgcagattgaacaaaatactatgtagttttagtaaaacttttagaaaattatacagagcaccgaaaaatcattacaaaatatagagaattttctggagcaaatgaaaacacctatgagtgaatatgaaattcaatgttcaaacactatgccttcacaaaaggagagtaatccaatggagaatattagtagcatcactatctaaagtggtacacaacttgaattaccatcacacctagaagttaattatttaatcccatgtcatggagtcaaaaattcatcccttgaaggatc

SEQ ID NO: 257254 - DNA, 744 bp, Cannabis indica
gctcaaatcggaccaccaccaggaccatatcggaccccgttaaaaattaagtcaaaaaaccatgttggacagaaaatgggccaacaatcggacaccatcgggtcccatcggaccccatcggatccatctaacaaaaatgccatgaacccaattttcggaccccacatcaaactaaaatcgggcccatcggaccagactacaaaaattgtcccaaacccatttttctgatcccaattggattagcatcggacccagtatcgggcccatcagaccacactaaaaaaaattgccccaatccattttttgacccccatcgggtcaccatcacgcctttatccctgtcattcaacctcactacctatcaaaccaacatcagatgggcgtcggaccccatcagaccaggcgaaaaaaacagcacaaacccagcaacattacaacacacaaaacagcaaaataacagcaacaacccatagatcaaaaattttgttaagtataagtttaggagaaattttttaaggtaatgtaagcataaaaaatcaaatttcccatatgaaactattatatatagttgtagagattgttttagctttacacacttttcatatattctaatatattttaatatttttgctcatgatatatttgctctcatatttcattactctttctccttcaaattaattggtttgtaatttgcatagaagaggccaagaagaaatatatatatatatataacaggtacac

SEQ ID NO: 257255 - DNA, 1216 bp, Cannabis indica
gtgcatccttgaactccgtctactaggctcaggacctcagccacgccttggccgcggtaagcactttgtgatttacttcttttctcattattttacttaaggccttcactcactcttgcttccttttccagattgctgcagaggccagccgcctttccgaaaccataattaatcattgcttcgtcttctccgaatttgggggcatagacgaagtcgtgaagatcctgcaggacctgtctgctgagaggtcggcattccaagaggaggccgagcagaaggaggctcttgctaaggcaaagttcgaggaagaggctaagcaaagggaagcccaggcggaggcggcgatccgagaggaggtccttcggagggataggctggaggcgaagcatcgggaagcgttgagggcagagggcgaggctactgccaaggctaaacgcgagcttcgggaggccaaggaggccttagacgagatggccgccaaggtgaggtccttagaggaattgcaccaggcggacttggagtccagggctaacttggccgtggagctgaaggagctcaaggactttaaagaccaagccttaaagaaggctaagaaagatgagctcctctcccctgtctcctgcagccattgcatcaagcgcttcgatgacgacgtctacatggcctggtcgacaaatggccagagtataaagcttgacttctacccaaaacctgcggagatgattgccaaattccgggagaagaagaagaagcttgacgccatgcttgaggcgcgcattggtcctcgccttcctcctcgcattgattaggccgttctgaatccagcccatttcaaccaagatttttcttatcttttttttttatttacaactatttttcttttgtttaagacaatctttattttaatagctgttttattttctaaggggagacaatgattaaggcctgtccccgggccctttgtatatatatatttttttttacctgcccttagggccatgatttttatatatatatgatcctttttgatgcacatatttttttctttctggacccgccctttcggtcaggatgtttatacatatgctctttttttgatatatactttttctttttagacctgccctttgggtcaggatgttttacttttggcctgttttacgtctctccgtgcggtatgccttagtacccccctgagtggcatgaaaacttagtt

SEQ ID NO: 257256 - DNA, 500 bp, Cannabis indica
ttttaaaatactagactgtcataaacaagtcgggcccagtgggccatcaccctgagaaaaatgtgcaccacaactagtaattttgtcgacaacaaaggataaggacataagagattaaaaggaaagatggttcatttactcccttcaactttctcccataaatatacttgaaattcaggccatatttcaaatgaaattctgcctgagctacaagaatgcaaagggataactacgtctatctgtcatggcaagaagacttaccaatatttctctcacttattactcttcttctttccattctgttcctgattttcaaaagcttttcgggcacaaaaaaggtcaacttaccaccatctccgccgagattgcccataattggtaaccttcaccagatcggagaacccgttgaccgttccctaagagacctctctcaaaagtacggcccactcatgctcttacactttggcagcgtcccgactgtggtcgtttcgtctccagac

SEQ ID NO: 257257 - DNA, 1204 bp, Cannabis indica
gcgacaaatcttttgtaaatgaatagcaaacttttgtaaatatattttgtaaacatgatcccagaaatttataagtataatatgttatattttaattaaaaagcaaaattttaattattcatgttttttccaataacttcgttgattagcaatgagctgcagagtacgttaagaatcacgctagcacacctttgcgagttagggtgttacaaataatttaatagcatccccaatttttgcattgtattattaaatccatatttagtaatactatatattagtaattattcattattgatatcaatcactttattctctcaagaatatttaatatcaaataattactactttatttagaattcattatattgtttgaaaattaatcacatctaaatttaaatctaaatataataatttaaatgtccatcttatgaagtcaatgaccaagtcatccttctttaaatagatatttatctaaactactcatataccagtttgattaccataatcaatattgatttcataagattaaagtttctcacttattaaaattcatattcaatatcatcttaatgtattgaataattaatgagactatttgttatacccgaaatttggctaccattttaatggaggacacgcgtcaagttaaggagaatatggatcgatgcgtgtaacggtaattacatttaatggagtaactcattaaatatagaagtgatagagtatatttgcaacttgctgactataaggtcttatacgagataaagatatacaaactgctgtctaatgtgctaacgagaaaccatacggcacgcacaaggcgacacgtaaacctcgtcacgactgggtagacgtaagcgatgcataatgactgtgaaaacacttatcgtgtaatatacaaactaaagtatagcagtcaggcaaacccaaacaactaatagcgaggtgcttatctcgctataggaaggcatgttcctggcacttttaccaattaactgttgaagtactctttattattaagagttgcgattatcaaaatgaagtgttatgccttcgagcaaagaagcaactaggcgtaaatcatgaacctcgaaaaattaggggaaaagctccagctcgctatcaaggtcattggtagcgagttcctgtcgagacatcccagaatgttatgatttaaaacgtgtttaaatacacgatcatt

SEQ ID NO: 257258 - DNA, 1162 bp, Cannabis indica
tctcgcttcttctctggctcttgcttttttcttaagtcttgagggatatcaaaagttgagttggtgcatcaaccacgaagtctgcaagggcttgaccctttatggatgttcttggttggtatgtgatctcaaacttgccaagctcaatggcccatttgagtagttggcttaatgttttaggtttttggaaaacctaccgcagcggttgatcggtgtacacctttatggggtgtgcctggaattagggcctcaattttcttgaagtcaaaagtaagttgtaggtcagcttctccatgagtgggtatcgactttctgcgtcaattagccttttgctgatgtagtatatagggtgctgtacaccgtgttcttctcttctgaggatagcactcacaacatgtattgtgacagctaggtacaaacttagctctttattgtttaggggtttagacaacaacgatggttgggccaattatttcttcagctcctagaatgagtttttgcattcctctgtccagtcaaatattttgttgcctttgagaatgttgaagaagggtacgcatttgtctatagacttggacacaaatctgcctaatgcagcaatacgtcctgttaggctttttacttccttgacaattgtgggcgacttcatgtccaaaagggcttggatcttatctagattttcttctattcctttgttgactataaaaccaaggaattttctcgagcctacaccaaaggagaatttaaggaggttgagcttcatgttgtagctacgaagtaatttgaagcactcacataggtcctccacatgcccctcaccctttttggacttgacaagcatgcgtcgtccacatacacctccatgttgcagccgatgagatctgtgaatatcatgttcaccagcctttggcacgtggccccagcattctttagcccgaagggcataactttgtagcagtagaggcctaggtccgtaattaagctagtgtgctcctgatctagtggatgcacctttatttgattttaacttgaatacacgtccatgaaactcaagatttcatggccagccatggcatctactagctggtcaaattctgggtagtgaaaaagtgctttttggacatgctttgttaggttggtgaagtcgatgcatactctccac

SEQ ID NO: 257259 - DNA, 777 bp, Cannabis indica
aggccgagggctgtgccagtgagacttggtagtcatgtgagcttgcgtaggtcaagaagggtgttagagttcgcatgaagtttggagggttgcatcattggaacttagtacatctagggagccagaagggcgtgatgctagtgcgaatcaattggatggttgagtggagaattcatgcatataaaaattaacaagggtactatttgagatagttgactcaagagtcacatcccgcgggatacacttttagatggcatggtgtgttgaagagttgggcaattaggcatccgcatgtgggcatgttgtcgaggacacaaacagatgaagtaggggagagaccctcgtggttaactcagcagactaggtattcattataagcattgagatcagtatcatggagttgaattattgttcaagatgcaagtcaagaaggtttaggacacaagcagtgccaattatctatggtgaaagtcaccaggactcaggtactaagataacagtaacaccatggcaatgttggcctaaggtgaaagtcagcaagactaaggtactaaggcaacatagaaatgtcgagggggaaagagtcagaatgactgaggcattagttcaacatcttcatcaaagtgacatttggaatggagagaccgtgtacgagtatgcgattagcttgcgagctataccttgagaagtattcctctaagagagaagttcttcccaagttgaagtgggggagcccactaattcatatgtttgtagaatcaaggtactcgttcagtt

SEQ ID NO: 257260 - DNA, 530 bp, Cannabis indica
ggccaggaggatgaacttgcttttttaatgaggttgtcaaatggaatgagtaaagaacagtttgaactgtttatggttattacttggagcttgtggaatactcgaaatgcttgtatacatggtggttttgttccacagccggccgagatggttgaatggtgtcacaagctgctggaggattttcagggagggagaagtcgctcccaggatgtaatgcgcagggaggctgctgtttggaaggtgccgaggcctggagaagtgaagattaacgtcgatgcgggtgtgaagaagggggctgggtactcgggcttgggttgtgtaatccgtggtgagcaaggggatgtgctctttgcctcctcgactgctatacagcgggaatgctcgcctttacagttggagctgatggccattttgaatgggatacaagttgggctacagaggcatatacgacattttagcatagaatcggactgtttggaagccattcaattaatccaaaaaaaggaagatggctgccgagatgttgattg

SEQ ID NO: 257261 - DNA, 808 bp, Cannabis indica
aaaagacctttgattccgagaaagggttgtgacataagtggagagaggtatgtcatgcaactatattgaacattggttggtggaatgttggtaagagtagactgattgtgatatgtttttccaaagaagtattttgcatctatacataacaattgtttctaacttatgcaataaaggtaattcctagagtggttgaattgaaattctggcttagtcaattgattgaagttgcacaggtggtagtggtagttcaattttttggaggctcagttatctgttgtgtcgttgtgttgttttctaagtttttagttttactcaagggcgagtaaagattcagtttgggggaatttgttaggctatttttagcctatgcttcgggtcacaaatagagtcgtttttcgatgttttaggacagaattatgcttgttttctatgttttcatatttcccatagttgtggatgtttggggtttcaaaagtacaataaaagacaagttgagccaagaaaaattgaaaaatcaggatttggttcactttcggccgcagtagatttattaacggtcgcggccgaaatttggcagaaaggtattttttgcaactggcccagtagccgcggcgagatactccaccgccacggccaaagcagcactcgccgcggcaaggtaatccatggccgcagtgaggttccgtacaaatggaggccaatttcgtcttttgaaatccgggacgaaaaatataaaggaaactgcgagaaagagaagggggaaacgaattttagacctaaaagcagtcaagaacggcaggaggag

SEQ ID NO: 257262 - DNA, 954 bp, Cannabis indica
ttcttcttttgttctgcaattcgaattttggttcatgatttcttttggatttaattcactagaagacgttaagtgtggaaaatttggacaatattagggtggcagggtcagattcactgcatttcggaagttgagaaagtataattttctaaatatcctattccttgatgccaaatttgaagcttggtataattctcggctgagttttgtcaattttcccaagtgaacgagggaaatttgaggaatatttcctaatgtaaaaatttcaatgctagttttttggacatttgagaactagtgttctgtagtttgagctattcttttagctcaatcttttggcaatgagttagtaaatttttggaaaatattacaaatcagctggcgcccttttggttaaaacgtctcgtgttctctttctctggttgagaataaatatatggaatcacattgagttatacacatgatataccatgcatataactcaaatagtagcctaaatagatttgttctgctttccattaggttgcagagcattactataaattatagtaacaagttcacattaatgtacccacgttataatatatttaccaatgtaattggattatataatttacatcggtagacagctgttgctagcttagctatgtttatatggtttgagtttttagcttttttcttgatacatgtatatgcatgacaatattctctctttcaaacaattggttttaatttgcaggctgaaggatcatcagctgaatctatagctgctctggccaaagttgatactgttaagcaaaggatggaagctgcttatgacacattgcaggtgggtatttaatcgcagaaagttgtaatcagtgctgtattggcaaatgttgatgttgcatttgatatactcattgtgtatgggtcaacaggatgctgctgggttaactcaattaagtcaactgt

SEQ ID NO: 257263 - DNA, 534 bp, Cannabis indica
aaaaaaaattgaccctggttgctactccacttaatctttggcaaaagataagatccaaagtaaaactttttaaaaaatacatagaatccaaactttgaaaatataggatccaaaaatatttttgagaacctaaaataaaaaatcacactttccattatctatttgtaaatataagacaaaaactcaaattctacacctaattaacaattaaaacaaatctcactaacttttggtcggtaatcagcctatatatattataataatgatttagtaataataatatactaattcattcattaattcctccaacctatactgtatctgaattctgaatatttcttcaaccaaactcagtctttctcatctcccaaaatcgcgctcccaatcccataaacgttataaatatacaatttatatatgtatatacacatatcagtatatgaatcaaatcaagaaataagagattaaaaataaatatatcaagaaaagttacaaaatgaatattattgctattgaaaagagaagtagaagcag

SEQ ID NO: 257264 - DNA, 1157 bp, Cannabis indica
gtgtactgagcaaacttaagaactgctctttgaccataaggtctcgcagactggacaatcatgtcctacatgtttctaagttattacacttagttattataatgtagaatatacgctaagtgtttcaagagttgattcgtctcatcaatatttccttatatgtagtgaggtggatgtctcgctatacattacccgtaatttccttgggattatgtcgcccgaggcaagacggtctctcgttaatacaggaattagtagtttgagtatccttgtctcacctaagactatacagtcagcgagttatgaatataatctattaattctatataatgagttattttattttgcattaaatgatataatcataattatatctagtacttcatattccacttggttgacacgtgtcactctctgaagtacagtcaaattttgggtataacaattgtcatttaacttatttattaattagaccttacaaagtctcttaattaataaaataaaccttaaatactcttttcttctcaaatatgcccttgtttagtgaaaaaatcacaaacaagacatagtcttatttagaattctaattagttaattaaaaccaattaattgagtctacaagccaatatcatctcaactagtgtggggaccatgggcctatctaatcaagcttctaataagtagatctagaatttactaagtaaattccctaacctattaatttctcctgactccactatagatttagaattgaactcttaattacatagaacgctctattaccaaaaaagatgtgatttgaattacccattgtttcaatccaaatagttaaagatcctccatagatgatctacatcgattagggataaatttaccgttctacccttcaatgtatctcatccttaaaacacttagatagttgtaaatgatatttctgtaaactaatataattactgaaatgatatctcaattatttatcgtgttaagccaagctcgaaagaaatcattgtttgacttctaatagttatagaaactatagattccatatctatgattagcgccccactcaattgcactactatgctcctaagatggaagtattgggctgatccaattggtcagcttttacgaacaagtcaaagaacacaaataatata

SEQ ID NO: 257265 - DNA, 915 bp, Cannabis indica
ggttagtgtcaaaaaatttaaagttcaagtgatttagcctccaatatcccaactattttttaattttttttgtggggtatatgctttgactagcatgtgagcatatgtgcatatgactttaggctttatgtcatcaactttattgtaaatttttgttattttgttgttggcaggttttgtactttagtataaatatgcaccatgggagttcttggtgcaataaaaatagtttgaaacactatgtgggtggcactatgaccgagtttgacaagtgccatacaaatttgttcagaaggaggccagggggtcgtcgggctcatacacggtcggggttccatcgtgaacccgagctccatgcggtggtcgtatggtggtgcacgacggagtttcaagattagaaactaagctcacttgcaatgaatattacaccataaaatctttttatgtaaaattaatttctgaaagaaaaaaattacataaaaatttctatgccccataatgacttacattatttttctaaaaaaaaaacaaaagtaaatcctacacctaattttaactataaaattaacgattcatcatcacacatacattcataataaattatatatgaatttatattgtcatgtttgacaagatagttggtaattatagagcaatgaattaatattgtaacaaatacttaaaataaaattttatctattaattttaaaataaataaattctattcgtaaaataaacttaaatttcataataattttataacacatattttaaataatttttatctatattaagactatttgattgcttttgcctttcatatatcttgagttattatttaatgtatagttttctaaatttaaaagtttgagtatttgtcactcctatgttaattaaaaattaattataaaataa

SEQ ID NO: 257266 - DNA, 1854 bp, Cannabis indica
aatatctaggtgatacggctcaagttcctcgtcaaagtcgtacccagataatttccctaattcccgacttgatatctcctaaacttgtcctccagctcgtttatccgtaattggattggttcctcttgctttggaccaagctgttggcgaaggtcaggtttcttccgattcaagtgctctcgcagattcggttgggagtaattgctggcagatcttgtcttactcatagatcgcgtcttactcattgactttgtctttgagtggctcgcagatctactggttcccatactttctcgatcattagctcgttgagtactttctcctcttcgagttgatcgactatgggttctggatcacctcaaagtcacacttgcttcttcacactctgctccttcctcctaagagcggttggtcgtatttcccctattagggtatgtacgagtcctcgctctatgggtttgggaagaacgttggtgatttctagcaggtgatctctgttcttccagttgagtcccaagatatcctcctcattttcatgagggatttctcgttcatcagttttccgttgtctcccatctggctgttcgttttgattttaagggctgtctcattttccatgggttgttcttctcgggccttttcctgtctcctggtttgtgagccacgaggtctgccccgtggtcttctcactccaggttcagtttgattttgagcatttgtcccctgtgccgccctggccgaggctgcctcacgttctagctcagcgtttcgacgctgcgcttcttccaaatggcatctcaggcgtcgactttccttttcataagttctttcttccacagattgggcacctccatgattgtgctcttcatcccttgatctggggttctgaccattcccagggcgagttctcctcgagcgtgttgtccgtgtactaggaccaatgtcgggtcgagttttctgggaacgcatggtccgcgtgctggggccaccctcaggttgagccctcctagaacgggaggtcctgctggattgcgggtcggtagatcttctggagcccatgggctctttcccagaatgatgattggtttcctcatgtggggtgttaacattttctggagttttagcgatgaaggagatgatttttcttcaaaagaagggagggttattctgagctttttcacagaggctctcaatgaaaacaccaaactgttaacgcagattttcgttagctaaatttgagcgtcaccgtgatgatttcacacagaacaaataaaagctatagaaaagtaaagaatatgaacacagggttttttttacatgatttcacagttaaaattctgcatagtccacgagtcaatcttattcagatttctaagtaggtttcagggcttctttcatatgagttttttcggtcccttttttgatcttctttatcactatttataattacatagtggacattgaattataaagttgaccgaaataattttacagcaatcatccctaaaatcgtaatcacaatagcgagctgaggccattctcccttccgaggtcgacgacgtatgtcttgtcactactactaaagaagcctttagaggcacttttttcagcataataattaataaccgacgctatagggttgaaattttttggaagggaatttgacgccacttttggcgtcggttatttggaaataaccgacgccatagggtgtgcccgcctatggcgtcaattatttccaaaaaactgacgccaaaagggtttataaccctagcccatcactttgtcttcctcattcgatcagccaacccagaaacccccaaaccacgagaaaccccaaaccctctccgccaa

SEQ ID NO: 257267 - DNA, 1169 bp, Cannabis indica
aaaataagatgagaggtagaacaaaaaagggtcgggatgtgtgggtggcggagtagaccgtagcaggttggtttcgaggtcggcgatgggccggacggcctggcggaggtgctgtcgtggtctaccgtgagaggacgaaagagaaaggatgaggtgttgacaacatgtggctgggtggagagagacggggaggtccccgtgcatctggacggagggagaggaagctcgccactggcctcggcgtgttggcagctgcgaaggagaggggaagaaaattatgttagggttttttttcatgttaagtgtggctgcttagggttttttctttatatatgtatcacttgtgactttatttttttaatttatatattgttttttcaataaagctgaaagaatatagagacacacgtatctcaaagaaaaaagagagaattttatttattgattttaatttttttagaaaaaaaattcaatattattaaatactattttaattcataaagtggatatatggagtcattccatgagagacttggaatatgtgtagtgacatctttggtgtgtcactaaagccatgtcatagtcatttggttttagtgacgcgccagacaagttaggatacacattctcattcttgcatggcgtgactctaaaagtgagcattttcaattaaaaaaaatcataaaattataggtattactatatagtgacactttatatttttagtgactcaaattattggacactagcaataaaattttagagacaaattgtgcatgtcactaaaaattactcctaatcttttagtgatacacacaaatatgtgggtcactaaatagtgtcactaaaaggtaaatttgtagtagtgtgcaggccttgtcctaccagaccttggcaggaccatggctgacaaagattgacctggcaggattttctgtacaactctacaattggacaacacacttggactgcgaattgggccctaaaagcccaacagaatgactgaatgatatctagattcaagggcactttagtcttttataattatctaacaacctatgcaaatatctagggatttaaactgcaatctaggatttaagcctcctatataaaggccttaaatctaacctagaaacctgactcacatagcctctaaattgctctaagtc

SEQ ID NO: 257268 - DNA, 1721 bp, Cannabis indica
ggcttccaacagagtggcagggaagattctgcagcatacatctcctcgtaccctttgcaaatccatttgcatttcgaagtacttgagatgggaaaggggatcttctctcctagtgtacatcttccatgttagcattttaaacttgtggggcaatggcaagagattgatctcaagtgagaaaggagttccccgtgctcggtccagctcaagatcactgtttctttgtccatccatgtcgtgaaacatatttttaagttcgtctagcagagcctgtacggctgggctaacctgctcggcattctggtcaatttgaattacaccagcatcttttggagcgggaatttgagtacgggttccgggctgcaagattgtcggaagattctgatcgtctactcccctccttctgttcagatcatttcttaggtcatgggtcgctcccaacctttcgaatacataagcgcttggctgcctcagcgattgattcgattggttgacgggtggaatagcaccatttatctggttggaaccatcaggtatgacttctcctgatgaattactagacaaggtctgcccgcctaccgcttggcccacgagtggtgctcgtgaccggcgattgggaggctgaccacttgcagtctgagaaacattcatcgctggatctttgtccgtctcacccaggggaatgacgtttggcggctgcagacctacaatttggtaggcttttcgtatcaacacggtagtctgccgactacgattttcaatctttgcatggtgagcccttaatgcctccatctctctatccctccattcggcgaacatacgcctttgtttgtcaaacgcgagatttaatacatcgcgtagttcgtcctgatcatgatatagggtattgttatgaccctgcatgagttcgagagcgtgacggagatttcgtaactcagtggcatctccaatggtcgtctggatgttggttccaggagaaacagttgtgttatgaatgccctggttgggtgcgaaactgttattccctgtctcttgcacacccggcgcgatttcatctataggaactgttacaccattccccacgttcgtcggctgtccaagattaacaactggtggaacccttatgtttcttgggttttacaatgcaggatccatcgtctatgaatttgctggatcaatcatgcctctacgagtttgcaccatcgtctttgtgattggatgttgaataaagagcgattcgtgatccttctctcaatgaaagcaccaaaatgttgacctcgcttttagccaacaacgacgagtctattcttataaccgataagtgatttatagcaataaatatataatgaagaaatgtaaagacacaggaattttatagaggttcaggcccgagcagttcggtaatagcctaatcctcgttatttgtattgacttaagatcaaggagaaagattccttttcttatagctcttacaacagtatttctgaatctataattcttagataatatatttagggtatagtcttagctcaactgcttttacgacctattgcccagtgaacatgcatcactatttatagggctagtaaagcttggagaggaagagtttccccctctcgttacaatgcgtacaaacaaaaagatcgtagggatcaatgctgaatacaaggatcatgggatgtaggtgaatcacgtgatagtgggatcgtgtgtatgccata

SEQ ID NO: 257269 - DNA, 837 bp, Cannabis indica
ccaatcttcaaccctatactgcacccatcctcaccatcacattcacttccctcttctcagccgtgtgccttcactcaaccttcgaaccaccaagtcacctgaacccgtagccacacaaatcgcaccagcagctcaccatttgaaccactaacgtccccttcaccatcaaccaagtcgaactcttccctgcgcaatctcaacaacccagcagactcaaatcacaactccatctccgttcgcttcagcttgcacccatacgcccgagccgtctcattcgaacctcattcaaagcacacgacctaacctccatttcacctgaacccgtagccactgagctcacctctgtacaaaccaagaaactcccattcgaccaacacgacaacccgacagcaacacagcaaccgaaccaccactatcacctcttcgaccctaataccctccttcgcgtggtcgacttcaacacagtcacacctgcacgaatcactgcccagcaaccgagagtcctctgtcaagccaagtttctcagccaatctaagctaagttctgatttggtgatttaatttgaaaattattttggattaaagtgcataattggtggctgtagttgaactgctagtgttctattaaatggtgcttgagattgtcattgtgatttaagtgtggtagcagtagtgtgataattttgatttggatgatttgaattggaatttggtggaattgttgaagactattgggctgagaaagattggtgaatttgagaaaagtaatgattgtgagcaggttgacgcgtggcagatggcttagttggtgcacgagaggttaatttggttacattga

SEQ ID NO: 257270 - DNA, 546 bp, Cannabis indica
aatgagctttgggtcaaaccggtgttggaaactatcatgattaatgttgataccgctttattcgagcaggaaaattcctatgggtttaggatggtggctcgcgatcatcttggttcccctcttcattttcaagttgcgtatcatggaggctactttgcacctgaagtaattaaagctacgggaatcaaataagtacttagttggatcagggaaaatcattggaaaggtgttacgattgagagtgacagtatgctcgtcgtccaggctattcattctactcagttaatgacttctgtgtttggcttagttgttaatgactatagaaatttattatcctctctttctaatgttcaattacgttttgtcagacaaccagcaaatcgtgcggcccactttgttgctaggcacgcacgatcgctaactggttgtagcattctggggtcttttattcctcttgatcttcagactatatatcatatttttatataatactatgtcaaactttaatttatactataatattatgtatttaggtgtccataaaag

SEQ ID NO: 257271 - DNA, 952 bp, Cannabis indica
tagcaattttcctacacaccatggtgcctttaattagcatttttaaaatagagggtgtggtaaataagaaaagaattgcatggaaaaaagtattttgataaaaaaaaaaatatgtgattttaagcataatttagtagttttactattttcttcgttaaaaaaacgtcccaagttgaaattctacttccccaaatatcaagaaaaaaatagaaaataattttttttatattattatagtaatatattttaactaaaaaaagaagagtgttaattacaatttactattataattttttagtcaatttctacgtttgaaattatatgttgaaatatctttttcatagcgatattcgttatacttatagtatcattcctgtaaatttttgaatagtttacagtaccgaaaatagagtttctgatattccagtttaccacgcgtgtttaaaaaacttcaaacgtattttcgacactataaactattcgatttttttttaaaatttacaaggataatgtagtaagcataaataaatatcgctagtaagaaaaaaaaaaattgaaaaaaaaatattctgacatatattcttagacgtagaggttgactaagaggttataagattgacggtgttgcacttctcttaaaaaaaatactaataaatcctaaccaatatagattggagtcatgagatgatatctaagaggctctctcaattttagtttaaatttggctgaaagtaaaagcgcccacattgaagatgttataaatgtggttgtatatatataattttaactatgttctaaatttaacacataataaaagttatatgaaatttgacataaaatataatatgtgttaaaatttacactataataaatgtcatattttcttgctactcattaatataattaataattttttatatttttatttatatatttaatataatttttatat

SEQ ID NO: 257272 - DNA, 688 bp, Cannabis indica
agactatgctaacttgttggccagggcagctgcaatcgagaggagagatgctgctactggatcatcaggtgcaccacagatggaggatcgcatcagggcattagaacaagcaacaaaagacatgcagactgctatcactgtgttacaaaatgggcgggcatcattacaagactcccacagtgatacgatagaagattgtaatgtgtctgtcacagccattcgggaagagttagcaggaatgtcgaccaagctaaatcttaccatgatagcgccagagcgtgcaaataccagagggtatggaggtatggagtatggccgaccgagggcacccgagcccaaatgctatggaggggcgagggatgccaaggagctccaaaactttctgtttgacatggacaaatactttcgggtcgtgcggaccgactctgaagaagcaaagctagcaacaactaccatgtatttgtccggggacaccaagttgtggtggaggacgaactatgaagacattcagagtggtaaatgcaccattaacacttgggaaaacctgaagaaagaattaaagcccaatttttgccagaaaatgtcgcctgcctggctcgacgccagcttagagagttaaagcaagtcgagagagtccgagactatgtaaagaagttctccgaatcgatgctcgacatcaaagatatga

SEQ ID NO: 257273 - DNA, 762 bp, Cannabis indica
ctattgacaagttggaacctagacctgttaagaaaactttcctaggttatgccttaggtaccaaggggtatagaatctgcattttcaggaagggtaaaccaaaggttgtgattgctagaaattttgttttcaatgagttggaatatcctcacttgacctctgggaaaggtagtgtgtctttgtgtaatgcaagaaaaacaagaaacaagaacactacatgcatggaagtggattacggaatgaaactccaagaagaaggttcacaaacgaaagctatagtgtggaaccaaaagacaatgctcagacgaaagctggtgtagagatggaagataaagaagaccaaatagaggttctagaaggattcaaacaaaaaggtctagaaggttatcaattggcacatgatagaacccaaagagagatttaccctctgaaaaggttcgcagaagcagacttaatagcatttgcactagcagcagtacaacaaactgaaattaaagaacccgaaagctacgaagaggcaatttcatgtagaaacaagtcaaaatagcttcactccatagatgaggagatgaattcactccagaagaacaagacttatgttgttgtaccaaagtgagagaacaaaaagattacggagtgcatatagattctcaaggtaaaagagggaatcaatgagaatgaactagtgaggctcaaagccatattattggctaaggattttactcatgtggaaggaatagactacactaaaatattctcact

SEQ ID NO: 257274 - DNA, 579 bp, Cannabis indica
attattgatatgattacagtttattttctgcatttcatatcatttgtatatgctatattacatacactatattatagtctaacagaattttcttttttctttaggtatttctaatatatattatccaaagtctgaataggctcaaaacatcgatcaagaaattctgacaattgaactaatctctcttgtattaagcgtcaaaaggtaatagcaaatatcaaatgaaaaacagtgaatagaaaaagagaattaagtatttgattattcaagaaccccataattttggatatatatatattatatataaataatagttcaaagagaatccatgaaattattagtaaccataaacacaataagagtaaaattaaagaaaaacccaataaaggtacataaagcataaagacaaaaccaatgaagaattttcacccgatgtatggaaagaaatcaagagagaaagagaaaccttgcatggcctgttcttggtgacgatgtactattgagagtaataagctgattgtttattaatgaagaaaataaaggtatttatacagtgaaggctgatagaaatcagcaaca

SEQ ID NO: 257275 - DNA, 722 bp, Cannabis indica
aaaaagtcttcatctcgctttcttacaggtcattattatattcatattttattagttgccgaaaatctcggtcaacaggcttgatgtaagctgttatctctttgttgtcatgaagttcaggaagctctttaggaatgctgtcacttgccaataaaatagctattcaatttattagtaagagaatacttaaaatactaagtagactattttatcttaagtaaaaagataattgtgaattgagtaaaaaaaccttaattttggtattcatcagtgttgttacattacatgagtaatgtttctacaatttccccaaatacagttgttggccaggctgacaaatcagtaagttcaacatctattctgcacctacaagacataagtgttagtaaaaatataatttaaaaagagaagcaacttatgaaattaatttcattgcacaaaatgtacattgtatagattaaagtaaagtggtacatttgtatagattcaaacaaagtggattttttctagagaaagaatggtagcaatactatttgaggcctccgtatcaatattttttctttcctctttcccttattatatatacttatgtgtgtctatgtagcaaaaacatcctccatacatatatacagggccggctataagccagtgcatcctggtctattgcacggggcccatttaaataggtctaatttcttgccttctttttaggttggtttttt

SEQ ID NO: 257276 - DNA, 598 bp, Cannabis indica
gtcggccaacttgagtggaatagttgcttaacgaattaaaggcccctaaatcacatcgttcataacaaggataagtgacacgctaaatcacaactggggacttaggttttaaaccaaaaatctacctactgaaagtaaacatagcaataccttaaactaacagggaattaactaaccaaagctttgaaactaacacgaataccttagactttgtcccccttatggatggttattcgttgaagcaattaacaccgtaaagatctcttatgataagtattttgtaagttgttgtctttattaaactctcccacaatgattacttagagataaatttatgaagtatgaaacaatggtggaatctcataaaataagaataaccttgactctcgcctaccaggacagcattggattcttattttgatcgaataaaaggttgctagaatggtgtctattttagatgagctaacaactctattcaatgaatgatatctttgactctcacctaccgagacacttgtatcggtttgttggataacctggaagaacttcaacacaatctttgtaacctttaacttcatccatatattctcgaataaca

SEQ ID NO: 257277 - DNA, 1242 bp, Cannabis indica
tgaaatataatttatttttgttttgatagtatatctttttagagaatatgaaattagaagaaaaatattaagtaataaactaatataattaaagatatatatttgatatataaaataaaaattaattataaaaaatcgacatttataaatttttgggtagtaaataaaaaccccttctaacttaatacaccccactaatccgataataccacttactaaagtttgaaaactttccaactcttatccaaaataaagttatgggggcgtggaataagagtaagtttgggaggtgtgccgatcggttgggggcgtggaataagagtaagtttggttcgatagctaggctggtgagagaagcacaaaaacagttggatgatctccttagtgtgtcggcgcctttggttcgaatggatgaggttaaacggcttgaaactaaactaaatgatcttttgtcccgggaggaatgttattggaaattgcggtctcgtgcagattggttggccttgggggataggaatactaaatattttcataataaagcgacgggtaggaagaagaagaatgcgattgtggagattatgacagaggatggccgaaaactgagtatggaagaggatattgtaggtgagattgagcgatattttggcacaattttttcatcggcttctcctatagtgcaacaaatggagaatgggattaccaatattgataccagaataactcttgaggaaagcgccatgcttgaagctccttttacgggtgaggatgtggtgtgtgcggttcgtgctattggtgcaacgaaggccctgggaccggatgggtttcatgctattttcttccagaattattgggacattattggtcctcgggtttcagctgtttgtcttgcaatattaaatggtcatcaatcggttaggaagtttaacaagtcgaatgttgtgttgattccgaagatcacgaagccttcgtttgtcaaggagtaccggcctattagtctctgtagtgtcatgtataagattgtggcgaaagcgatggctttgagattgaaaggtacattatcaccgctgatctcttcatttctgagtgcgtttgtgccgggtcgagctattcatgataatgttatggtaggctttgaattgttgcattctctttttaagaagaataatggtgtcagggggtttatgtgtaatacccgataaaaatatacatatattttaaaattttatttgttatacaatttgt

SEQ ID NO: 257278 - DNA, 1322 bp, Cannabis indica
agatttttttgaacttccatatataacttttgtcccaccccttgacagtgtttcaaggtggcgatctagggaccatatggacctataattgtaagctctaataaattgaattatttattgaatctcatcaaccaaataatcttgtttattaattccatgattactccactataaatataaaattgaattcttagtagttatagaattatttttactgagttttactgcagcaaacattgatataatcaattctagtgattagccctccttatgtcggttcgtaattagttttagtcaaattaatattttacccttctaatttcttctttatcctctagtatcgttaactcattagtaaaagtataatctagatccaccctaaatttgtgcacaactgttcagttccaaaatttacacttaaagggaccaacattcgatctattaggaaagtcaggattctataaatgtagatcatgttcccagcatccatattattagattcgcaaaatagatgttgtaagaatcatcttctctgagaaactttgacaagtgaattaaatattaacacgaataggagttcatgattgctaagaatttaggtcgatctaccattgatcatcattatgatatgaatcagatctttatagtaaacgacttgtttgataaagacagcataattacatatcagttcatgtcatacataatctctattatatacaataccttcatttagatgtcataaaacattattaattcgaatcgagattacttgtaccgaataacgggtattagtgaactgcactagcagtcgtcgattaaagattccatagctttaatatgttactgattattttattcgtggctaaatgatcttaattctccgtacaatataaatcacagcctcgtatatgaataaggaatttttttatatttatatataaattattcaacattaaatattaataatttaacaaacaagtatacataaaaatattcaactcttatttatagctagaaatatctttataggctttttttagggcatgaaccataaaaaaattgtactattggcccatggactttgattttttttattattttcatttaatgaaacaattgtatctttttacaaattttccatttacctaatatttttatttgaatatcaattttatctattcaataattatacaattattaaacaaaaagatatttattaattagacttacaaagtgtcttaattaacaattaaacccttactactcttttcttctcaaattagcttaactttactaaaaattcttaaataagacatagtcta

SEQ ID NO: 257279 - DNA, 545 bp, Cannabis indica
agagagaatatatataccatgggtgttagagacataaatatgtgttatcttatactatatgagcagaaaatgaaactaatttatctagattcaacatattgaagaagaagaaataagaaaaactctaaacaacatcaaattaaatttacagtcaataatttcaatataattaccttaaattcaggggtgcaccaacgatcacacaatatctcccaatcttcttggtggtcatcttttagatctggatgtcgctttctcttggccatctcaacatcctcttctcctccaatttctttaaaatatgtatgtaacttatatttgtgactcctccaagcttttctcatttgctcatcaatacacttaatagttgtttcatcaagcaaatcaatatcatatgtttcctataaatatgaaatacaattaattttgaatttaaatattatatttaaatatatatatacattgaacagtttggagtctgtcggagtgagtaaattttttaataaaattcaaaatgattaatactaggttggtaagaaaattat

SEQ ID NO: 257280 - DNA, 681 bp, Cannabis indica
gtttcattgattgttacatcattaccccccttcctatcttccaaatcaaaaggagcattgaaatcccctgttatgagccaaggtttggccggcagaagtttacccacatccccttcctctcctcaccagtattgagatcatacacatatgtaatactcatagcattaatctggccagcaagtttaacaaagcaatgaacaaattgcggatctccacgaacaacaatcacccgagcaaagttccttctccacaagataagaatacggtattcaatcataggactagtataataatcccaattcatgaattttctacccatcatgtcactgattttagtccccctaagtttagtttccaacaaaccacaaacccaattttattcacacaacaaaattcataaacatcattctgcttctctactttatttattaccctcacattccaacaagcaatattggtattatccatgccaatattgagagtacctgaatcgatttgcacagtgccttcttggtctcccatattcatttcttgctgctcctggagcacactataatggttgctgatttgctcaactttttcccctattgcagcttgagcttttggtctctgtgtggctgtcttctttgggataatccactcattcttctgctggctgctattacttgccttttccatggt

SEQ ID NO: 257281 - DNA, 910 bp, Cannabis indica
aagaaaaaaaaaaaaagaatactctactttggagtttggacttcttcacaaaaaaaaaaaaaaaaaaaaatcataagtttttatatatttattttccttttacagtcaaaataagttaattagaattttttttttctctatcaaatcatactttttgaatttttcaagccattaaaaagtcttcctgaactattgagattattagatttaaagacttttgtctaatttcattcgattttactaattcggtgattgtcaatgtactaaatcatacttcttggactttaaaatctaccaaatcatgtccatcgaattttgatatgtgtcaaatcataccccctgaactttcatctatgttagatttttcttactaagattaaacaaaaatctttaaatccaacaatctcaataattcaagagaaatttctaacggtcttcaaagttcgggaggcaaaaatcttaattacccttaaaaatatcattattttttcattattttataaaattaatttatatttgacaaattcaaattataaaatattgttaaaataattaaatactataattggagcaacaatgataaaaatgactctattttaatttttttagctattttaactaaaaaaacaaatagtaccattcaagatgctctaatattatttttcttgttaaattggttgatgaagctaagttttaatccaataactaacctcatgattaattaacaaaaacaagagaaaacctataacaataattggagaacaatatgataacatactcatttttcaacaattatattgaaaagaaagaaaaaagttactctgtttttttatctaacattacaacagatctcaacaaaaacttaagaaaatacattactacatacaaatatataataataataattata

SEQ ID NO: 257282 - DNA, 893 bp, Cannabis indica
tttttttttattattttcttcattaaaaatttttttttatataattttaataaaaattaataatgttgattatggttacaagtttcgtcatcctaagagcttgttattattccaaaaagaagttacgggaaacttggtgttcatccgaaaagatttgttcataaagttgtggccagtccaatggttcttccggatagcttgtcatcaatccggagacatacttcgagatagcttgttgtcagtcttgaacgcacatctagaatgggtgtattctcttccaatttctctgtactgaaaacctatttctgaagttgatgtggaatttattgttgaggctgatttagagaatttaaggcggcattaattagcaacgatagaatcagagttaattttgacaataatagaaatctataaataactattacctttttaatccataaggaatcagaccattggacaacttgagtgaaaattgtgagtgtgtaaggttagagtgaaagactctaaactagagagagaaagtttatcttgtaatctctgtaatagtttgaaaagattcttgtaaccttgaaaacacaaatatcaataaagacatggttgttgttgttcggaccgagatatagagcattgcacaaggctccaactcgttaaacctactgttatcttttctttgttttactactttaatctgttctttggctcttgtaattctttgatagtatcgttcttgattgtgtgagtgttggtccagtataattacatcgaaggtgattgattgattcactacaaattagtattagagcttggttcataatcatgactgcagcgaaatatgatgtgaaaaagtttattggtacgaatgactttggattgtggagaatgaagatgaaggc

SEQ ID NO: 257283 - DNA, 1008 bp, Cannabis indica
aaactctgttgtagattatcatatcagtaaaaccctatgtactgataaatctaggaaactttattcacatagtcatgttactttccaatttgttgacagcacattaacaggatcaagtatgtgaaaagggtttcagatgaactcatacattatgtacatataatcatgaaataaatcatgtgaaccatgcaacattaaatgttatttctgatctatattaataagtaaatatgattatattgaaatgagttttatttagggcataaaacccaacatgttcttggttggtatgtgatctcaaacttgccaagctaaatggcccatttcagtagtcggcctgatgcttcaagtttttgcaaaacatgttgcagcagttgatcagtgtacagctttatggggtatgcctggaagtagggccttagctttctggaagccaagagcaagctgtaggtcagcttctccatgagtgggtatcgactttaagcgttgattaacctttcacttatgtaatatacagggtgttgtacactgtctttttctcttgtgaggacaacattcatagcatgttctgtgactggtaggtacacccctgactcttcattgtctaggggtttagacaacccaagtggttaggcaagttgtttcttcagcccctagaatgcgtttttgcattcctatgtccactcaaactttttcttgcctttgagaatgttgaagaagggtacacattttttatgtagacttggacacaaatctgcttaatgcaaaaatgcgtcctatttggatttgtacttccttcacagttgtgggtgacttcatctccaaaagagcttgaacttgtctgggtttgcttctattcccctagcattcactatgaagtcaaggaattttctcgagcttacaccaaaagagcatttgagggggttgatcttaatgttgtagctgcgaaggattttgaagcactcgcataagtccagcacgtgccccccagccttttatgacttgaca

SEQ ID NO: 257284 - DNA, 800 bp, Cannabis indica
aaagagttttatttagggcataaaacccaacagtaataatatccaaaagggcaggaattctagtttgagtgttgctattagaatctttaagcttcttgatgcgattattgctatgtctagcattcacacgttggtggaaaatttttgtatttgaatctcctgattgcagccacaatattcttgatcattgatgtcaatagtcttcttcttgtgcaaataactcatctataatagatttagagtttttgagagcatcaaaatggtcttggtaagttcttggaaaaattttaagagttgaaacatgttcatgagtttctttaatttccttctttagattttcaaatttggactggtgccatgattgaagtttggtagcataattagagatgttactagtcacttggccaattgaattagtagtatcttgacaccagttcttgaggataatatctgtacatgtttcctcctttaactaaattttttcaaagtgaaatcgtgacttttaggcacgctcatcaagctaatctccaagggcagtgacagtgactttaatggctctatgatcaaacttgtaaaagtctatgtgttaaacaaatggtgtgaggatggtggaatcctagaaatcattgaccaatccataatttagtttttctttaacattcttcactccttggcttttattactccatgtaattttttcaccttcaaaagacaattgtgagagataacaaccatccacagctgatttgaaagctttaatttgtgctacactttgtgttggaccaccaattttgtcttca

SEQ ID NO: 257285 - DNA, 573 bp, Cannabis indica
ttttttttttttgaaaaatttggtctatccgtacgacatgtcgttttcgaaaaatgacatgtcgttcgctggaagtgcagcgcagccctttacatgaaacgacacgtcgttttgtctgaaggagagcctaaaaacgacacgtcgttttgaggtcatcccttaccttcacctgggcacgcgggtcaaatccgggtcgtgcgatccgacagcgaagccgattttccgaccgactggaaacaccacctccggtgctccgtttccgacgtcgtttgaggggaaattcaccatttttcatattctctctttttcccaaactcatttcactcgaaaacactctaaacccgtaaatcacatacccatattcggccattaacaaacttttttaaaaaagcttgggttcttagcattttcaacaaaaaaggaaacgagaaatatggtttaaaatatagattaactcaataatcatcttccaatcaaattttctctacgaataacttgaaaaatccatatatataatttttttttttaaataataagccctaaaatcaaatgcccaagctcatgataccaatt

SEQ ID NO: 257286 - DNA, 704 bp, Cannabis indica
catgagatctctcattctccgaagatactcgagaatgtgcttcacaactatccagtgtttcaaacttggattcgattggtaacgactaacaattcgaacaacatagcatatgtaaggccttgtacacaacattgcatacattaagctcccaattaatgatgcataatgatattttctcatgtcctccatttcctggagttggacattgatccttgcataaagaaatttcatgtctagacgataactgccatttcttggaattctccgttgagaatctttctaacaccttatctatataagttgcttgagataatgttctcttctttctatctctatatattttgataccgagaagatagcttgcttctcccaaatctttcatttgaaattgttcagctaaccacttctttgtctgataacatttttacattgtttccaataagtagaatgtcatcaacataaagaaccaagaatacaactacattaccattaatgtatttgtatacacaagcttcatctttattttgttcaaagccacattagttttattaagtgatattctaagatctagaggcttgcttcaatccataaatggattaagaaatttacaaaccttttgatcttcaacctgttgcacataccccttcaggttgttctatataaataattttgtcacgatttccatttagaaaagcagccttgac

SEQ ID NO: 257287 - DNA, 705 bp, Cannabis indica
ttgaagatgatgatttagactttcgcctaataaaaaaaagtgattgttgccttgttaagaagaaatcgaaggttaatgctgttaaaaatatttccctcactaaagttaagaaagggaagaactaagttgatgagagtctaaaggtttctttctagtttctttatcgttttgccctaacttctcttatttcttaccacgatcgagttttctctgtatgagtcgtgtattgccaatttcgagccttgttttttttaaaaaataataatagtattgttgtagcacaactattattcaactaatatacaacttaaaatgcaactagaaataaaaaaaaattaaatgggcatcgtcatgaaaaaatttgtcagtgtttttttttcactgatcaacaatcaatcgtaccttaataatattatgtagaaaaacaactgttagaattttctaaaccaactttataacaaccaaatgaatatattaataaaactaatcatgttataatctttttcttaaagagctttgtgttggattgtggatatgaaattgcaaatatcataaaaactattgtatcattgatagtttgtaatcattgatacgtctagtttcagagcattggtaaaatatcaatgtaactgcaatgcaactatgcagaaacttaaaaactgcacaatgtttcaatgtatgtggctctagatgaattcaaatttt

SEQ ID NO: 257288 - DNA, 1484 bp, Cannabis indica
ctgaactttgtacctgtcacagcaagcctcaagttggcttcatccgtgttgtcacgaagattctacaacttcttgaaataccacctggtatcccgatttttttgggaagctccaaatgtcattgtctttcaaatagatagagtttatccactttacccacaaacaatcttgtttgttaaataaagcccaaagaaatttcaccattagagtcttgttccattttttatcttctcggacccaactccaccaagacctttagggaggtaaactttttcccaagaggcacggtgaagcttgctcttattccctttggttccccaaagaaaatctcaacaactcttatcaatggcagctgtgaccttggatggaataacgaatatgctcatccaaaaattcttaattccaagtaaaatcaagtgaatcaattgtgcccggctagcaaaggacaagttcctactagcccaacaattcagattcttgttgattttatcaaggatcacaccacaatctgagagcttccatttggttggacgaagattgactcctaagtatttgagagggaagttgccttcttcgaaataaactaagtcaagaatcttcaatttggtctcttcattgatcccccctccccccacacaaaaaaaaaaaatagatttgagattttgctatgttacccgataaccatgtagctttgcagaaacacatgaaagcttcataaataagcttcacagagtttacattccctatacatacagaaaataacaaggtcatctacaaaacacaaaatagtcaagcgcaagtgcttacacaacgagtggtaaccaaactcattcttctcaacaaactgattacatagtctaagatattccataatcacaagtcacaacaaagagtaatggggacatggggtcaccttgatggagacttttttccctttgaagttgccttgaattctaccatttaataataaatgacagtgagttccttccaggcaagtcattatccacataataaaccgtgagggaaaacaaagagaccttaaaagatcctcaacaaattgccaatcgacagtgtcgtaagccttacttaggtcaatcttcatgatgcaccttgctgaaatatttttccttgtataccctttaagaaggtcttgaaatatcatgatattatgagcaagcaatctatttttaataaattcaccttgattattctgaacaatgttagggagcattctgaaagcctggagcaaatcaattttgaaatgcatttataaattgtgttgcaacaagcaatcggcctgtagtctttagcagaagtcgggttggcaatttttaggattaaggagataacagtttcattaaagtgtttaggaagtctaccactagtgaagaacaccaaaattgcatttgaaacttcatctccaatctcgctccacgtgtctctaaagaaacctaagccaaaaccatctaaccctgggcttttag

SEQ ID NO: 257289 - DNA, 1759 bp, Cannabis indica
ggttctacatagttcttgttttattgagtaatcattcccaatggatgaacgttcattagcaatttaacatcatagaatctcgaaagataaatattatttgtaactgttttattcctagtactaatcaccataatggtggctgctaggagtaagacttacaaaagtataaaataatggtagaagctcataagatagaatactcctcgactctcgcctaaacaggacaacgctggattctcatcttaatcgaataaaaggttgctagaatgtttgtcattttagatgagctgacaactctattcagtggatggtatctttgactctaacctaacgaaacactggtatctgtttgttagaaaaactttggaaattatttaggattgtatgttttagtattttcacttgtcattcctacttgctaagtgctaataatttttgaatataattttgtgttgaatcttacttgatttctatttattgatatttgcagtatttaatatgactgcaaacaatcccatggtgtcactgttgactgacaacaagctcaatggagctaactttatcaaatggagatagaacattaatattgctctcattggtgaaaatttcctatttgtgttgactgaagaggctgttgagcagcgaggtgagaatgcgaccaaggcaattaaggaaaagttcgagcattggaagaatggtaacaataaagctcgatactttatgctgtccagcatggtcgacaccttgaaaacaaggtttacaaacactctcaggctatagaaatcatgaaccagttaactgaactgtttgggatggcattaattcaagctcgctttgaggcgaataagaatttcatcaatgcatggatgagacctcatcagaacgtgtgtgatcaccttctctagatgactagttacttccaagaggctgagaatcatggagctgttattgatcagacaactcaagtgagtttgatcttgaatagtttgactccagcttttctgccctttacatcaaattatgtcgacttccacgagttaatcaacaaccttcagacatttaaaaatttgattggaggaccacagaaaggaggagctaaaactcctagttctagcacttttaatggtatggccaaggctgaggcaaacattgcctctacttcgaaacccagcaaaaagaagaactggaagaatagcaagaagcctctgaaagctatgaaaatagttaaaaagaaaaaggctgctaatcccgatgcaaagaaaaaaggaaaatgcttctattgcaatgaaaaggaccactggaaacccaagtgccctaagtttctagcaaagaaacaaggtatttctttctatgctataaactcatgtgttttagagaattattatctccttgggttattaattctggatctactaacaatgtttgttttcttcttatttcagctctagctgcttaaacttggattgctatcctagcgagttaatcggatggttggacagaagggtggagattctccaagtgaagatgaagctcgaatcttcttaatttttgaattaattgttttaatttatgaacaatttagtttcaattattggttcgggattttattcccttttttatattattgcacacaatccattatgacaattttgagattatttataaaattttctctttaagaaattttcattatgaattgagctttatgttttctttatattgtctatgccaatactaattatatttgtatgtttataat

SEQ ID NO: 257290 - DNA, 513 bp, Cannabis indica
ttgtctgatttcgtagcttaaaaattattttcagtatttaaaaataaaaacaaaaatttataagaatatttggctaaattttttaaaaatgagttttaaaaaattagaaaacatgaaacatcaatagggacccgtacttggactccctcggctcggatctcaactcgaactttagcccggacctagacctggaactcagactcgaatccaggaccctggaccatgaccgaacccaaactccggacccatacagtccctgagacccgaacctggacccagaaggacctcgggacccagccctgaccctggacctcgaacccgagttcggggtctgagtctgggccggggtccaggatacgagttcaggttcaggttcggggtccaggtctctagtgtgaggcctggctctaggtccgagtccgagtccgaagtccgtaacaaggtgggatgggttcatgtcgtggtatagtattattaaaattttttattcttaaaaaagtctaaaaatagttt

SEQ ID NO: 257291 - DNA, 998 bp, Cannabis indica
aaaatctggctcgattctcagtattatatatttttgtagcaaactatgaagggtccatgaacaaagtgttgagcgattttcaacttgacaagctcgttatataggcctctacataatcaaaataacatattaattataattattttaagtaacgaacaaatttattagaacactatatatttacctcatacatagtgagatgacatatgcactgatttcttgaagatgcataaactgtgtaatatcatccctatcaagataaatgggtgacggtgattttccaaagacatcatcaggcgctgtaattgtgcacgtcaaagaacctttttgcttcaaaattattttgcccaactaagcaaactttttggaaagtgacttacaatgttgatatcattgggccttatacttgatgttttgacactagatgatgatgatggtatgtctttttaccttgcggtttggttgtaggtgctattggtgaactatggctcttctttcgtcttgttattttaatccttagtcgtgatggtgtctacaaatgaccaattatattagaaagtgatacaattgactaacatatagtaaaattaagatatatatgttacctcgaatcctttcaagactaaatgttctggccatgagagtaaagtaccattgcatctcctactttgataatctcatctaatattggatttggtatgtaacaccctaactaatataggcgtgttagcgtgatttcaaacgtattgtgcagctcgttgctaatcaacgagagtaacgaaaaacgtgattaattaaaaagaaacttaaagtattacatatataaaatcccaggatcccatttacaaaatacatttataaaagtttgctatacacatatacaaaagttttgtcgcctagcaactatacagcaaaaggccctgatgtcccaaagatcgtacgctctaggcctaaccgccctgacatgtcaaatcttcacatgctcactctcacggctc

SEQ ID NO: 257292 - DNA, 827 bp, Cannabis indica
tgttaatgaaacatacttggtagtaaatctaggccctggtaaaatatttccaacaggattaactaccttggggattagagagatcaccgtttcatttagacttttcggcagtcttccatcattgaagaaacccagaacagctgtggatgtatcttcaccaatttccttgcacagatttttgaaaaaacccgagccaaatccatccaatctaggacttttagacgagtgaatgccaaagatggcattcttcacatcactcttactaaaaggtctaatgagattcacttgttggatcaaattgaggctagctccatggtggagacaatctgtattgattcggcaagtagctaaacttttactagccataaagtgttcaaaatgagctaggaagtgatgtctcaccttgtcaaaatcatcttcaataaagttgccttgagaaaaggttgttattctgttctcgagctttcttttcattatagtcgcatggaagtaactacagttttcatcacaatacttgacctaagtaatcttactttgctgtgtgacaaagctagaataatttttctacatatgttgaagatgctgcaattgttgggaagctgcatgttggaggctgatatcagtgggatgtttggccacatcctcttgaattctgctataaaccactccaaaccatccaaaccactcctagccataggactttcccaagcatttaacacccttttgcttgtagttaagataatcagcccagtagttgcaaaatctgatgggtttgaaacccatatttctctgctcctggttttggattatgcaaaaagtatgatccg

SEQ ID NO: 257293 - DNA, 654 bp, Cannabis indica
atttttgaactaaacttcttagacattcaatcattaatgtaataggcaccgatcttgcagctgtgattgcagaattgattgactctgctatgtttgaagtcatcatagtgtacctccttgttgggcagtggcttctagtccaaatatgatgtcctatattttccaagtaaggtcttatgcgaatgtcaattttgtctatttctgacatgtaatgctcaaatgagctgaccctgtatgttttggcagctttcacaaagtttatagtgagctcatctccatgtccaccaaagtttgatttgatgttgttaagcaagtggaatatgcaagctccatgaaagtggtctgggtaaacattcttcactgctttttcaatacttttatgtctgtctgatattattgttaatcctgcatgttaaaactggttttagttatgtatgacatatatatatttgtattatgtcagtaactggtttcttcaacaggattaaaagtgattaatgatgatttttttattgaatttgaattttactgtaacttgttaccattcaaaaaatatatattatgtatatatatatatatataaataaacttaaaaccagtttttgatattgtaccttctctatcaccaaatgtttctcttatcttgttgaaaaa

SEQ ID NO: 257294 - DNA, 1023 bp, Cannabis indica
aaaaaaaatcccaaataaaaaatccctaaatctcagactctcaccttcgacttctctctctccgacgacagagcccaagctttggaagaactctgccacgactggagcagaggacccggcgattcgcactagcggcgtggtcgtgtatctctctactgctccacaacacaggcgtcttggggctgggtttatgtgctttctcttggcgactctgaagacctcgagcatcatcttcttggtatggtttcttttgctgaatcaatattcaattcacaggtctttctatattctgttttcaaatagatttctgcttcaatttggatttagaagtatcattgatttttttgaaaaaaacatcggagtaccatatgggtcagttttatatctttgagtttagatttagggaacatgaatttttctatgcaatttcgtgtgttcaatttcttgtctgttttattactcaaatgagtaattttctgtgcatatatacatatataaatatccaaacctatgtaataaggagatgatgcatacgttggtaagggtgtgtaactgccactagcactgtttttcatggttggaatcaacttgcttaatatatatacatgtatatatagttatatgtatttgattcttagtgattgagtcgtgcactccagtgttatggcgaaaaattttccccacttgttgacttgctaactgaaaataaaataaaataattaaattgatttatttctggttggaacaatgtgttgacgatttattctggtttttatacatattcaaataaaatttcacagtttctgttcttggcttcacttatttattaaataacttttcgtcttaatcctcaaacattttatatcatcagtctagtactgcatcttagtgttttagtaaaggatatgaccttaattatattttacttttgcaatctgactatattatgtggtcttcaaacatcaattattggctccatttgatttactctgttttatattttttttataggttttggcgttt

SEQ ID NO: 257295 - DNA, 1057 bp, Cannabis indica
cgatcatacgctttactgaagtcaagttttaaagccatatagccttcttttccatgcctcttcctctttaagtagtgcatgacttcatacgatatcataatgttgtcgaaaattaaacgccccggtatgaaggcactttggtactctgaaataagctgagggagaacctctttgagtcgattagcgattactttggagataattttgtacaagacattgcataaagagattggtctaagatcacccatagtcataagattctttttcttgggaattagaaccatattagtgtgatttaaaccagcaggtagcagtccagtacagaaaaaattcctcaccaattttatcacatctgctccgacagtgttccagttgcgttggaagaagcctggtgtcattccgtcaggtgctggtgatttgtcggggtgcatctgcttcacagctctactgacctcttctgcagtaaccggtgcaaccagctgtacgttttggtctgtagaaatcgaagtaggaatgttgtttgtaatagcttctgatgaatgtggaaaggaggtaaataactcataaaataatctttgataacatcagctagtccattttgccaatccacccaaaaacctgctgcattttgaagctttgacagagaattagtgcgtcttcgagttgaggcataagcatgaaaaaacttgctattttgatctcctgcctcaaccagagttgtttagatctttgtctccaaaatatttctcgctgagtgtaagtttcaaagagattttgttcagcttctttatgctttctaacagacaaatcatctcttccttttttccaacattggatttcttttttgagtcctttgattatatctttgaagttgcccgagtagctctctccccaggcttgtaacaagtgactgcaatgagctattttatcagtaatagcagtagatggacaactagaccagccctctttgataacttgagcacacattggttcacggagccaacaattctcaaatctaaatctctttttaggggttgtagtatcaaaagaattagga

SEQ ID NO: 257296 - DNA, 1002 bp, Cannabis indica
caaaggctaatgggcctgaaatccttaagagtgtgagcatgctgcttcttaggaataagagagatgagagtagtgttaacaacagaaaaatcaaccccctcattaagacaagaaaggacagccttagcaaaatcaacccctaaggttgaccaatttttttgataaaaataagcatttaaaccatcaaggccaggggccttatccccagaaagattaaaaagggccttcctaacttctttaagtaaaaagggttcatccaagaaagcataatcccactcttccaaaggaggacccaagcaatcaagaataaggctaatagcatcagcatcactaccatcagaactaaataagtaagagaaataagaaactactaaattttccatatccatatgaccagagacaatattctcatgatcatccttgagaaatttgatagtattattcctctttcgttgagaagcaaaacgatgaaaaaacttggtatttctatcaccagccttaagccactgagttcgagccctttacttccaataaacctcttccttgtaaaggagagcatcgagttcagattgaaggcacttaacccgaaatcgactttcatgatcaacaatcgaaatatcctgcaggcaggcaatttccttttgaagatcagaaatacgagatttaatggaataatttgacactttattccaagacttaagtgcagaaatgcacaagtcctgagtggacaaaaaggaatgaaaaggagtcaaagcattctgattggaaagaccactatcccaagcagtctgaacaacagagaaaaaatcaggattctcaagccaaacattctcaaaatgaaatctttttccattcctagagtgagaattgagtccattgttattgagaataagctttaaagcacgatgatccgacccaaaaaagaaaagatggtgcaaagaagcattagggaaaagatcactccaagaagccgaactaacaacccaatcaatatgttcctta

SEQ ID NO: 257297 - DNA, 760 bp, Cannabis indica
caagtaggcctcgtcgagcagcttcctgcaatgctttatctacatttgccatcttcatgcggttctcctgtaaacctactatgtgtttgtacatacaatttagaattgccaaggtacggtgatgatttagtttcggttccagtcttctttctgttgagatgagagaaaaagtaaatacatatggacagtttcagtttggcgaactacaccatgctcgataggaagattacctgcatttctacggttctgaggaacgacaggttcggcaatctgaggaacgaaaacttcggggttttgaggaacgaattcgtcggcagcttcaagggtctgaacaaggtccccagcaaggttcttgcaaagttcaatgccttcaacagggttctgggaagcttgagtttctctgagctgtctatcaaggttctggacaacattgactttacgagaaaaattctgggcttggaggttctggataaggttgtggacttggagacttgtaacaagcatcgagctacgtgcaacagtacggtgttcaatgcgatgggcaccttgaatcatttggacaaggatacctgcatcttcgagatatctggctctgagattcgtagcatagctcaaggcatcgttgacgtccctgtgaagcctctgggcatcttcaatgttttgggcaaggctttgggcagcttctaagtcctgagcttggaggttttggaaaagttacgggcatttgtaagattaaatgcaaatcctttgggaaagcttc

SEQ ID NO: 257298 - DNA, 560 bp, Cannabis indica
gttcatcaaggttcaagttataaccccagctaaaaactctttgtacattcaaaacagaaaccaaaatcttgttactgctacataaattcacagcaaacacagcatcttaatttaagtatctgccaaccaacttttcttaccttttttcaattatagccacttacaaagatgcataaatacatacagcaatattatttatccaagagagcttttatgtcacatcaacataatacaaaagttatggaattgttacatactgatgtaccagcaggtttgtccaaaacaacataagaatcagccacagctataattcttgatttccagtcaatttcatagcacctggtcaacaagaagagtggagcttagtaaaaaatgaatggatgcaatattcatcaaatgttgtgttctaccttggagaacgctttggatgcacatgtacgcgcaagtatgttccagtttcaacaagctagtctacatgtgttatccggaaagttttctgagcttctcgtacggttttacctttgatggaagtgttagataaattaacaattaacccaaga

SEQ ID NO: 257299 - DNA, 1941 bp, Cannabis indica
gagttttggtccgagtctaggtcatggtgtgatctaggtttggatcccagtctggatctaggttcgggtcaaggtccgagtttcggtcccaggtgcgggtctgagttcgggtcccaagtcctggtcttgctacacgaccgtgtttgggcccgagttgcagtctcaatttagacctggggctatgttcgagttcggtcctaggtctgggtctgggcccgagttccaaatcccaatctagggtcttggtctggttcaagtctaggtcttgggtcgggtcttgggtcccggtccttgtttcgctgccctggtccctatctcgattatgggtctaggtcctagttttggtctaggttcaagtttgggtcctagtcgttgtttgggtttggtcttggtctgggtttttatttgggtttgggttcgtgtctcagtgctggtccttgtcctggtcctggtcgtagtcctagtctgcttctagttccacttgcgattctgagctcaagtttgggttcgagtttgggtcagggttcttgttcgtgtcggcgtttgagtcttggtctgagtttgggtttgggtccggatattgttctaggtctggatcgggcttcgggtgtgggttagggtcctgagtcttggtctaggttcgggtttgagtcccagtttttgatctcgatatgagtttgggactagttccgggtctaagtcttgggtttcgatcccgatctgggtttaagtttagattcaggtgcaggtcccaagttcgggtccaattttgggtttgagtccaggttcgggtttggtcgtggtatgggtccaattttgggtttgagtccaagttcctatccttgtttgggttcaggccaggttttggctccgggtctaggtctgacttcgggttccaaggtgtaggtcaagtcctgggttaggttcgagtcctggatttagatttgggtcttggttccagggcgtaggtccctggtctaggtcccatatcaaagtctggttcttaggtcctggtctaggtccaagttcgggtttgggtcttgagtcttgattttagtccaggtctcagtgtggattcgggtctaggtctcagtccaggttcgagtcccaggtctcgggtcccagtcctagtccaggtctcactctaagtttgggttattttttgggttcggttcttttcttagctttgggtcctagtcacagttctagttctgattctgtgtccgggttcggttccaggttctggtctgggtccaggttgggtcagggtccgagtcttagttcgagtccgagtacgagtttttttgatctcggtctaggtctaggtttgagtccgtgtccaggtttgggttctggatctgggtcccaggtttgggtctgtgtctacgtctgggtccaggtcccgtgttacgatgccagtctgggtatgggtcggtatttgagtcccggtcttgttcgtatcaatgtccaggtctgaagcccagtttttgtcaggggcttggtttgggtctaggatcaagtcctgagttcgggttcgagtctcagtcctagtctgggtttgggactgggtccgagcctgagttctgaggctgggttctggtttagtttcttgtctcggtctaggtccaggtcctggtcacgatcccgatcctgttctagggtcctggtcacgttttggttcaagtttcagttttgggtcccacgtctgggtttgggtcaatgtccttgtccagcttcgggtccttctctgagtcccaaatgaagacactgactatgggtcttgtccaagccctagttcccaaatcccaggacaagatctgaatcccaatcacgggtcacagtctagtttcggttcatgtcctaggtctcgatataggtctcagtctaggtccgagaccgagacttgcatgcaattcttggtctcgatcccaattctgggtc

SEQ ID NO: 257300 - DNA, 1674 bp, Cannabis indica
taggccaattccagcatgtgcagttcctttgaccatgttatcaaagctctgcagaattatacctccaactggcacattaattcctttcattattgcttaaacaatcttgagcctatccaatggaaaatccgataaatgtttactaggcataagcctagcacttgcagaatacatccaagcacgagccacttggttcaattcacagcgatagagcatttgaggttcttcatccactttatgcaatctcaaccccgaaaacccaactgtttctgcctagtccacaaggtcaaactggttgcgcataaatatgttgtactgttcttcagtcattgatcgcatgccaaacaggttatggatggtgtcaatgtttacatacacatttgtcttgcggactcttacccttttgttttgttcctcaggccaatttgctagaaattcaagagccagagtttgattgattctttctggaacattcacgaacttctcccagcggtggttctaaatttgttgcctcatggtctcgaataatgggttattcgcgttgggattttcatcatattcgatacctcgatccataatgaaagctctcttttgtaattcaaagtatctttcttgtgctttcaaactgacaaatctatctttttcaaaagtggacttcgacgccggtgttgacggttttaacgatgaagcactcgattgccaagttctagtacgcttggaacccatgacaagcttcaaaattaccacacaaaaattttctcagaaaaattcggcagcacctccccttaatttcttcactcccgaaaattcaattattcaccaatatcataccacaataatccaataacaataatattccacaatattcaacaattcctcaaaagaaattcacaaattcccaaatgttataaataactattcaaactatcgggaaactcgcttaattaaccaaagttttgaaaagaaagagacttactaagcgagaatgtcgtccatcaacctccattgttgcatatccatggaaaactcaaggttgaagatgatgaatagtagcaatttcggatttgggtgaaaaagggtaatttgtggtgtgatttttgaaggaaaaggaaaatttatgagagaaaattgggtttttggtgatatagatgaaagatttgaagagaaattgaagaaatttgatgatttatagtatgaaatggctttggtggctgagaagagggcaagaatcgggtggcttttgatttttaggttaaatgggggttttatgcgatttggggtatttgtcctgcggaagggggtcccgtcgcgacgggcaaggtgccccgtcgcgacgggatttggcagaaagactttgatcttttttttcaccatctccagtcgcgacgggcaacacccccgtcgcgactactgtagccgtcccttttttttcacgattttcacggttttaattacaactaaaaatgtgcaaatctaaccttaatgcaatgaaacaaattaaaatgctacaaaacacttgcaattgtcttctaaaaattctaaagaaaaatagagtaaaataaattgggttgcctcccaatagcactgtagacgctgatttctgttttcaaagaggcgcagaatcatggcggacttggattggtcaatttgacctcccaagtagagctttaaacg

SEQ ID NO: 257301 - DNA, 975 bp, Cannabis indica
ggactaattagtttaatcacataatattgattattttccactgtgtagataacacactaatcatgaataacaatgtgataaggatttaaaagaatttatatatcaagcatatgaccataaaataaacatgtgaaccaagcatgatactaaacaagtaataaaataattatattccaatattgataatgaaattcaagataacattgaaatagaattttagttagggcacaaaatccaataaactcccgtttgcactaacataaaacaatcagtatatttccactaatcctagattttatctatgtttttcaatgcagtctctgtcaatgtcttggtgaatgggttagctaggttgtctttagtgtcaaccttttctaccaacacatctcttcttaccatatattctctaatgatgtggtgtttcctctgaatgtgtttactcctcttgtggcttcgaggctctttactattggcgattgcaccagtgttgtcataaagtaacaccagtggttctccatacctggaataacaccaagatctgtgaagaactttgttagccagaccagttccttagcaacctcagtagtagctatgtatttggccttcttggtagagtcaaaaattgcatattgcttgacacttctccaaacagctgctccacctccaagagtaaaaaccatcccagatgtagactttctgtcatcaagacaagcttggaaatctaagtcagtatatcctaaaggattcaaaacaccacccttgaagactaacacatagttccttatcctttttatgtatttcagaatatgcttaactgccgtctaatgttcctttcttgggttggactgatacctgctcacaattcccactacatagcaaatatctggtctagtgcgtaacataacatacaacagacttccaacagttgaagcataaggaatttttctcataccttctatctcttggggatcaata

SEQ ID NO: 257302 - DNA, 815 bp, Cannabis indica
ctaagaaagtaatgaaccacatttgtaatctattatgaatcacatttggccaactagtaactattttggacttgttaccatttatttatatattctctggtattttctagatatgagaatgctagaaggttgagagttgccatcatccatggaatggctagaatggctgcattaatggcttcaacatacaaagcttatttgggtgtaggacttggtccattatcggtatgtacttcacttctcagctttacactaactacgctaaattaatgatactttaccgcaaaccatttggtagagtggtagggatgcctagaaaatatatcccctgtcaagaatttgaatccactcaagttcaacttcacaagtggttacaagctcaacgcatcagtgtgtgtgaagctcacaatgcaacatttgagcctttgtagggatccaactcaagtccatatagttggttgttgatactaatgatttacttatataagagtaacgatatgtgcactcaaattatgcatcaaaatattagatacaatggcgtgacaatttctttcaaccaatcataatcgttttagataatacagtgttacgtcacagtgtgtaatgttttggtgcgtattttggatccatcttaagtagcgagtgatcttgcgaaaaggaaagagaaaaggaaaacatattaagcttcttttcttaatattaattacaagtagcttttgttgtactgcagtttttgacaaagtttaggataccacatcccggaagagttggtggaagattttttatcgaaatagctatgccattgatgttagatt

SEQ ID NO: 257303 - DNA, 615 bp, Cannabis indica
attacatctccttagttataaaatccttgatattgtagaaaattctttctatatgtttactcctcttagggtattggattctttactatttgacaactatatctgtgttgttaggaagtaacactagtagttaataactggaataacgccaaatgtgtaggaaatattttgccagactctagatttattaacatgtatgtttgattataaaactataatctaacattctaaatatgaattccataaaatattgaattaaaaatatataaaattatagaaaaccttacattgatgacagcagaataatataactccttctattcagatctctaacccttgatctttactgtcatggagtatgataaaaacactacacaatcttccacacagtcttgagtattgacttgaattatgtgaacaatcactcatacattataaggtttgaaattattgagaagaagaaaaagggaattcgaaaatagaaggagctctctttattttttgatttgtctgacaaagagttaatctatatataatataaatgaaagcacaaaataagtttatgtgtcatcttagattttttttttttatttatttttaaaattttgttgaatt

SEQ ID NO: 257304 - DNA, 1397 bp, Cannabis indica
tgtgtggatttgggactttgcccagacccaaacccgaacccagtctaagacccaaacctataccaaaactagtaccctgtgacctgaaattacaaccaaaataggaagtagactgggagccgagaacgggtcttgaacccggacttggacttggaacccaacccggacccagaacaaaaccaagacctagatcagaactggaactatgactagcactcggacctaagaccagaaccgaaccaaaaccataacccaaactcggaccagaacctggactgagaccttgataaagactgggacttgagaccttggacccaaacctagactgggatttggacgtgacttggtcctaaaccctcactgggacctgagacccgtgactcagaccgggatccagaccttgacaaggacccaaacctgaacccagacaaaaatagggaccaaaacctggacctaaatccagaccgagagctggactaaaacgaagactcgggacccaaacccggacatggacccagaccaggacctaagaacgggacattgatgggggacctagaccagggacctagtccccggaacccagagcaaggtctaaagctaggagtcgaatccaaactaggacctgaactggactcgtgaatcagaagtcggacccagacccacacccgaaaccttccccggacccaaaccagcacaggaacctggacacaaacccataccaggaccaaacctgaacctggacccgaactcgggacccgaactctgaccgaagcccagaatcagacccaaacctagagctacacccggacccaaactcgaacccagaatgggatggaacccaggatatagagttgaaactaaatgcagacttagatcgagatcgaaactttggactcggaccttaacccggacccaggaccctaacccacacccggagccagatccggacatagacttagattcaaacccgaacccaaactaagactaggactaggactaggacaagaagcaggaccaagaccagaacccaaacccaaataaaaaccgagaccaagacaaaaacccaaaccgtgactaggacaaaaccaaaaccaagactgggacccaaaaccagaccagacgtaggacctggacctagaaatgggatagggacgtgtgcaacggaactaggactgggacctaagacccgaccttgacccgaacttgaacctagtaccaagctcgtgacccagcacccgaaatggaacaagactaggacccgagatcaggatctggatctggatttggggcttggaccgaacccgtacgttagtgtttggagtatgggacctagccccagacccaaacccagactaggacctgaacccaaacccacgactcgaacccagacccaaact

SEQ ID NO: 257305 - DNA, 624 bp, Cannabis indica
caaaaagacacaaacacaaagaacaatcagagacccactcactcaaaattaaacctagatctggatctgcttcgatggtgaggaggaagaaggcgtcgatgaggaggaggttctctccatctctttctgggcattctagtgaaatagggctgctccgatggtgaggaggaagaaggcatcgatgaggagtgttcgcagggcgacgtcgatgagagagaagaacaatgacccatggttcctagaaggcgataagggatgaatttgaccccttgaatcgcagaagagagaagaacatgaaatatgttctcattcgcagaagtgaagggggagataacgtgattttaggggttagggatgggttttaccaataaatttattttcttttttcttttgcagaatcaatccagtcttgtttagagagaaatcttttattacatacttgattaaagaagagggcaaaatgtgccaattcaacagcctaatccacatcagcatcatcaaaaacaataaatggggatttccctccaagctccaaagttactggtttgagattacttcttgcagcaagttcaagtacagttttatctgtcacagttgaactagtaaaagcaagctgcaaagaga

SEQ ID NO: 257306 - DNA, 815 bp, Cannabis indica
atcaagggaagggataaagagttattttatgttgttcagaaaaatttattttgaattggaaaaaatagtatttatttatttttttaataaataaataattttttcaaattaattaaatagggaaaagataaaaattattgaaacaaaatttgtcaagaaaatatatgttgagacaaaagttgtcaggacaaaagacacaatccttgtcctaaatgagataaggtaggtgcctaccctatagtagggtgttatttaattagtttcattagataaatatttaaatttgagaagtggttaaagatattttgaagtagttgagatattgtctcaagtagtagttgagagattctctcatctgaaatatcagtagccaaattcatctatagatatttatttaaataattaaatatgatttaattgtagagattcaactactataaatacatgtctaatttgagaaattagaagaagcttttcacataggaatttttgaaattcgctggttgaaaagaaaaattgtttttctctctcaaataattcttgttcatcatgtgttgaaaattatcaagaataaattatacactttatcctaatagtttacactatttcttttgtgtggtggatcaattcgaaagactacagtgcaagtttctaatcaactaaaagaataaaacatatgagaagtttcttaaattttgtttaagtcaattattttgtacttgttgaaatttggctaatgaattttgtctctgggcgctatctcgtggactagtagcaatctgcaaaaattgctgatactctgtataaaatatctt

SEQ ID NO: 257307 - DNA, 741 bp, Cannabis indica
tggttaacagaattactagggcaatttttccttccctaagcggtaggcctttatacctgagtacccagcctatcaactcgctcaactctaccttgcggattaatcatgcaacttttctctggagcattagccgccttctttttcataaagtttggttagcaacattcgtgttattctatggagcagtcttttttgcaggttctcgcatgacaccttttttctttatcccttgtgggattaaaagttccagggtcttttggatttgttttcttcgtagcattatttttctaaggagcatgatcatcaggaatattttcatcgtgagctaaatccgctgattcaattctagcctccaatctggctaaagtttcttgcattttgatgggagaattcttagtgatctgcccattttctttttggtttcaacaagttctttagccattcaaatgactgcaggatttggctcatagtagtactcctcttctttgtctgttccatcattttcaggatcatcctctggatcttctgggtcatcttcattgatgggattttcatcaacatatttttcattatgttgagtcttcttggtaggatggctagtcacttttgatgcatctcctacaatacatcctttcacatgtacagtaggaagattcacatcatccataggagtgttccattcgagagaactaaatttactcgtcctcgagaaaacactaaataaacattaaacaagtcaat

SEQ ID NO: 257308 - DNA, 533 bp, Cannabis indica
agctgatccgtctgctttcaacaagactctaatcactttgattcccaaatttaagaaactaaggaatgtctctcaattgcgcctcataagtctttgcaatgtgctttacaaattggtctcaaaatctattgtgattcgcttgaagcctcttctttcaatggtcatctcagaatctcaaagtggttttttgcaatctcgacttatcactgacaatgtgttagttgcttttgaattattacactctctcaaacatttaaaaagaggaaaagaaggttatgcagccatgaagcttgacatgagtaaagcatttgacagagtggagtggcacttcctacgaagcatgatgattgccttaggatttgctccctcagtggttgagctcattcagcgatgtctcaacagtgtttctttctcttttttgataaatggctcaattcaaggacatgttacccctagtcgaggtattttccaaggtgatcccttatcaccttatcttcttatcatttgtgatgagggtctctcaagacttctac

SEQ ID NO: 257309 - DNA, 758 bp, Cannabis indica
tatcgagagaaaatattgttacaaaatttatattctcatggaatgacaactttaaaagtctcccactatgatcccacatcacattaaattaatgattttattaggtgaaaaataacttttttctaaaaaaaattaaaaatagaacaaaaaaaatggcatgtggccattgtctatattgagcaacacttcacataaaattgttcttaaaaattagaccacattgcatatatggcaaaattactcaaatggacaatcaccattggactaatttatacaaaaaaatactagtattctccatagatacccaaaataccctcctcatttaattttccctctctctctttctttctcactctctcccttcaacgctcgacccaaaaagcgagaccttcctcattggaagctaaaaaaaaacttccctctctatctatctctttctcactcttgctctctctccaacactcgatccaaacaccagtagagctttccgtgactcaagaatgcaggtgtacataccagagactagtcaaccatatgtttcatgacttgatcgaaaataatatggaagtctacgtcgaagacatgctggttatgtcaaaaaaatctgaagaccacatcaaagacatagatgagtgcttcagcatcatgcaagaatatcgaatgaagtgcaacctctaaaatgtgcctttgacgtccaataaatattttgatgacccctaagttgtagctcgttcctatcctcactacatgaaaaatgg

SEQ ID NO: 257310 - DNA, 719 bp, Cannabis indica
tcaatctgtgagttgcacgggtgtaaattttgagtggttttgggaagaatattgtggcttaatattattgagcagaaaacaaagatgccgagaaccaagcaaatggcttacaagaagctactggagctagatgaaaacaaacacttttcgactcctgaagccgaaaccaagtacaaccaatttattcagaacaaagagttctacattgaacgtgggctaacaactaaaatcaacaagtttgggcactttcctggttggcgagcggagaccatcaaagcgagaaagtgggagctttttgtatggactccagagctagcccgaagagagcttgtcaaggaattttatgccaactttttagatcatcaatggccaacgacagttattgtttgaggggtgaagagtccatttaatgccaaggtcataaacaaatattatgccttaaaagtgttgaatgccaatactcgaagtgtagcaagaatgtcactgacgagcttatccgagacattcttcctgagttagccaaaccaggggctgagtgggagattgacgagaatggcacttttcgatttcgaagaactgatctccaacatgatttgaaatgcttgtacatctttgtccaaacaagtatcctcccaacctcacatgattccacagtgagtatggagagaatgtggatgttgtactgtgtgatgaagcgaatgagtatcgatgttggcaat

SEQ ID NO: 257311 - DNA, 784 bp, Cannabis indica
catgcatcacttaatacaagattggatgaatggcctaacctcttatgccatatgtccttgattgaaattaactagacacattctcagtggtgttataagttacattcgagctaaacacaaaagtaagaacaacaaattgactaaacttagatagaacaacagagcaagtgaaagaacaatgatgaatttgattgtgtggcttgggataggtagattctaactgatagagcccctccttaagtgtcccttaaagaaacttcttctttgttgttttatccttcacacaaaaattattagatgagaatttaactacaagattgttatcattaatttaattttgaaatacttattaaattctttgttatttcaagcccatgtaagcttttttttcaaaattagaggttctctaaaattaattaaaatttcaccagaactaacatggtgaataaagagtttgttacccttttcaacagtcaaatctccttaccactgtatttttttcttctaattcatgtttcctgtctcaaatgtgacatggttgttagctccactgtcagcatccatgcatcatcttccaccatttttggagtggctataaggttgctatagaattctgtacatatcaaattaaagaccaagtggagcagatcccatataggctttatcatagttgttgtagcaatacggtgttgaatgaccatacctcttgcaaatctgacatgtggattttaagcctttaaatctacctcctctacctcgactaccactagatctacctcaatta

SEQ ID NO: 257312 - DNA, 1382 bp, Cannabis indica
gaatgcatttatgtactcctttcttatgtacgttccagatgtgggaaccaagaaggatcccaatgctactaacataaaacgtgcaacgaacacaacatcagcttcttcagagttggttataagctcgaccaagtcagtgcacctaatgtatttttcgaggctgcacaattcatttcgaactttgttgtcaatgtcaacataatcttcaaagttgattcctcaccaccatcttcgattttcataattgccttaaacgattcaatagtgaaaggataaattaccccatcttggactagttcaaatttttcaagattcatatggttgtacaagtaccatatgagagaactacgcactgacataatttcttgattaaggagggacccgaagcctatatctgaaatgactttcttttgtgcttcgttcaaaacgatcacaatttctcttaatctttctggactgcatctacgttggaccctacaacgatcttcgtcatagtcattctctactgttggctctttaattttttcttttgcagtgatcttccctacaattatcgatgcttttttttttgagtaaacattgcagtgcacgttcaagtgagttgtttatacattgttcctgcaataatgtaaaagatcaatttatttatacgttttacacatagatcaagtatatctagcaatacaatacaataataataattatgtgagagcacacatttacgtatacatgttaaatttatctcatttgtaactacattttccccttgtcagaggcctttgtgcgcttagcaagtgacttgtcatcttcctcgacactgcgctttcccgatgaaatctacaacaaacatttaaatcattaaaactaaatatcaacaaacatttcaagcccaagaaaactatatttttttgtcacttgctgatattgtagacaaagagtgcttataaggatggaaaaataagttatgatgagtttgttgcgatgatgaggtttgatataaaatggagaaaatcatcaaggaagtaatcacaagagcggttcaacaacagtctcagtctgaattggaagaaccatagagtaattttcttttgttattgttttcaaatgcttcaaacttgattttctgatttgagacatattctatgtttttatgttttgaagagggttacacaaagtgttgtttgtttttgagtgtttgatatgtttcatttctaccaaaagaatagctctattagaatcattgtcttttgttactctttctcctattatttagatgaaaaaacaaaaacctattaatgattagttagtttaatttggttgttaggtagttagagttcagttagtgttagttagctttgttggtgtgaagctgtaataactga

SEQ ID NO: 257313 - DNA, 615 bp, Cannabis indica
actcagaaatctattcctactgctcaaaatctctatgataggaagtgtcttaactctcccatttgtccccagtatcacctttactatgagtctgtacaacatgctttgtttgaatgtaagaacatgaagaaggcttggtcaggtacatcttttagctctgctttaaaggatttaaaactgttgcatatgttggacattatcttatacatgcagcaaaatttctcaattgattcttttaacctatttctctgtatgttatggaagtgttggaatagcaggaatgcggctgttttcaggaatcaggtttcaaactcaatgcaaattcaataagaggcccaagattatttggatttttatcaagcatctcagaaacagcacaagacgccgtctcaacataccacagactataatgtaatgacatgggaaccgccatctattggctctctcaaacttaatgtctatggtgcaatttctagccgctggagtaagacaggaggtggggctctagtacgggactcgacgggaaaagttatagcagcaagggcctcaagtcgtgcgggccagatgcaaccaaaagcagctgaaggatggacattattagaaggactccgatgg

SEQ ID NO: 257314 - DNA, 505 bp, Cannabis indica
tttgaaaatggtgcttttgttttcacggatcctaaaagaagaagagttgaggataatgatgagttgggccaggttactattcaaagcttagggccggcccaacagttggtggataatgggagtggtgaagaggttataacaaagacccatgtggctgaaagtgaaatgggctttattgaaaaaataaatgaggggggaatggaaaattgtttcggcccagaagaagctacggtggaaattggtatttttcaaaaaaacgagttaaaggcgggtaccaaaaattgggcccgccaaggattatgagttttttaagttggaattgccgggggcttgggaacccccgggtagttcaattcttgaaggaaattgtgttccaaaagagacccaatgtgatttttttgtgtgaaactattagtaaacaagaaaagattgagtttgtgaaaagaagtttggggtatgaagcttgttttgttgttgatgccgtcggtcatagtgggggtttggc

SEQ ID NO: 257315 - DNA, 721 bp, Cannabis indica
ttttatattatttttttcttacttttagtgagcatggtttgaatgaaattatgttaacaatgattgctcatgtttgatgtgtaattttactttgatgtcttacgcatggtcttgtggaaaataattttgttgatgatgacattcttgatttgtgtgatagttataattctagaaaaatgatagattctcatgatttatgtgcttaactcatgattaattacttctcaagctttattttttaaaacttttgcacatcagttgaattatcatatttgctaatgtttgaaaagataaatacatgtttgattttgatttaaagtctcaactactctagaacttgtttgataatcatttgaggcaaaattaataaattaaacatgattttgagatatgataaggcaaatttttggatcgaatgagcttttcatgcctaccctatttgttaattctctagttttacccaatttgagcctaaatgttgacgtcttatttttcttttaaccctatacaataatcttttgtgcctaaaaaaagaaaatctcttgttcatcatttttcacaccatagtatattgatattttatgtatttataaatctgtgagagttttgttgaggggaaatattgacggttatatataagtgatgatgaagaaaataattactcttcccttaaaataaatgtttgtaagttgtaagtattttaattaaaaaaactaaaaaa

SEQ ID NO: 257316 - DNA, 1247 bp, Cannabis indica
gacctaggataataagctcatgagcttagtcttacttcaccatcgagaaacgaaagaagacttccatatccaagtttaactcagacgtagctcgctttttttgggtgtgaagcagtgtcaaaccaaaatacccaacaagcattagctctccctgaaaaggaggtgatctagtcgtgccttccagtacggtagactatcttgttcggtcgtcgatggttgcctgctgagccttcaacgtttccgtctccctatccctccattcaatgaactgacgcctctgctcttcgaacgcaatgttcagtgtagcacagagctcttcctgatcatgatgcaaggtattagtgtgaccttgcctcaggctaagagcattacggagattttgaatctcagtatcatctcctatggtagtctggacattggttgcggatgggattctagtactgggagtattctgatcggctgttgagctggtgtttccagtctcttgcacatcaggcgtgatccagtcaaaggggatgtcacaccttggcccatagtaggtggctatgtgtttggttgttcaggattagtacctggtgggacccttgtattcccaggagtctgcaatgtaggatctactaactgtgggtcactctgatcaaccacgcttctgcgaatttgcaccaccattttatgtgtctgataaaacttaaggcaaagagcaaacttggctttcttctctcaatgaaagcaccaaaatgttgacctcgcttttagccaacgaaaataagtcaattaataggtgataagaaatgtaattaagatagagcaaaaactagtaagcaacaaagaacacaagattttaaagaggtttgacccttttagttcagtaattgcctactcccctcaaattgtaataactcgagaacaaagaatacattgtttcctctctgaaagatctcacaatgaaatctctaagtattttctcttagatctctctgaagtaattctttcaaccccttttacagtgaggatggatcactatttattgggctaaatgcatgagggaaggttttgttgggttttgtgcactaaataaaactcatttcaatataatcagatttaccaattaataaagatcagaaatcatttttttatgttgcatggttcacatgatttatttcatgattataaattttattaggtccagaacatatgtgtttgttgatgattatagtgttgtcagcacagtggaatataatcatgat

SEQ ID NO: 257317 - DNA, 746 bp, Cannabis indica
cgttggctggacgatcgtgaggaagctgcaaagaaccagagttagtgttttgaatgacagagtgagtgggaggagcgttaccattagtcaccggaggaatgaatcttgaagggatgaccggaggtggaatggcagaggcggctcggacgtgctgagatggagacgaaaccggagcatcgtgaggaggagaagccagttcttgaacgtgggaagacaccacgggaacggtggtggaatcgtcgatgatggaacgacgagttctggaaccggttcttgcttgttccatcggagctgcgtgaggaggcaccacgggaacggtggtggagtcgacgacgacgtggtcgacgacggagacgggagctgcgggaaggtctgacggaggaggcaccacgggagcagtggtggagtcgtcgacatgctcggaggttgcagccaagggaggtcttcgggttcgggccatttgaacgtgtttgatgaagaagatgaacgttgcaggcgcgaaaaacgaggaaggagacacagatccgtgaaaagtggatcttgatcgggaaaaaggggatctggtcaaagaagagagagagagagaaaatatctgataccatatgagtaaaagtatatttattgtattaaatgaaataatgtgtacagaatgagtttatatagggggaggatatccaaccctagaatacaccaaacccaactaggaatacccttatcactatacccaaacaccaaaagtaaatata

SEQ ID NO: 257318 - DNA, 1647 bp, Cannabis indica
ctttcttagggatgacgaagctagtattgtagtacaagactttgctagggctgaattagatagtcaaggtaggactagttttactgctatgtttttgtgtgcatattctctcatggtcacttctgacacttgatttgtttgtctttttgaagcaaccaggccaatggaggaactcttggcgactcttgcccaaacctatagtccagactctgctcttccttcggcgtctgagcagacggtgaccccagggaggtcttcttctagcgtcctcttacgccaaatcgtcttgatttacgaagacggggaggtcgaggaggaggaggaagagggtgagatcctggcccctttggaccaaaaactcaagggcaaaatggtggaggttgagtcttccaaaaagcctaggagggatactccgacggttagctctgactcagggattccacctgaagcagagcaatacactgttcttcccgtcatcgtccttaccttgttcctgcagatgaggagagacagcaactccggatcgccaagcataattatgctatagctgagtatacgaaggggaacgccgaggtggaggctaaggccttacgggaggcccaacagaattccttgcgtgaggaggcctttaggaacacttgggacctgaacatggaccccctgacggactggttcaactgctttttcgagcccaccatcgctccatttgcctccgagcttacgagccacttcgtcaacttttacctaactcgtcgggcaagagatatgcagctgacgcttccacgaactccatctatcagatttaggatatcactgctgctatgaccgctgtaagtctctgttagctagttttttgggtcttactttatggcaccgatctcccgtacttactccttttttgttgtattgccagattgctgcagagaccggtcgcctctcaaagattttaattgatcatgggtacgccatgtcccagttcgggggcatggatgaagccatgaagagtctacgggactttgcgactgagaggaaggcgttctgggaggaggcccaacagagggaggctcaagcagagcggaggcatcaggaggtgctgaaggccaatgctgaggagttgaaggctcgggatgaggccgtggctagggcgaggcgtgatcttagggaggccaaggagacaatggaagacctaactgccaagctgaagtccctggagaagctacaccagactgacttgcagacgactgccaacctaactattgaggtgaaggagcttcatgacttcaaggctcaggctaaaaaagaaagcgaaaagagatgaactcctggcccccgtcacttgccagcactgcaccaaacgcttcgatgatggcgtctttatggcctggcagactaacggccaaaaccttaagctcgtcttctatccaaagcctgaggaggttctcgttcgcttctaagagaagaagaagagactcgatgccttgttggaggagcgcacggggcctcgtcttccaccacgcattgattaagccaatcgttaatcatcattgctattatcacttatctcttttttttatttatatatttagtccttcttccccctctaagaaatttattatatatttcttaagggagacacttaaggcccgt

SEQ ID NO: 257319 - DNA, 702 bp, Cannabis indica
gcctttggtgtggttttgaggtagtttctaaaactttaatttcctttatgcttgctgaaattatgttggaaaaagtatgaaaagtgaagtagttcttagttttgtaatgataagagatttaatgcttgactttgtggattttggttgtgaaattgtaagttatagttgtgatatttgttggattgtatttgggtaagcttggattataactctagggaattttccatgttgaacctagttttatttgatattgagttgctgaaaaatattggtgatatgtgggtttgaagctcaagtttagagcttgaagttttggagtttgaacatgattttaagtttatttttacaatctgaaagtgaggatttattattggaattgatgaatgaaatatgcttatttgagcatctattatttgctagcaaccctatttgatggtttggaagttttgttgggatttgggatgatttggtgttgattggaggctgaaaattcgagttttgctgctagttttcttggctttgaacccaggtgccgcgggatggtatttagcatgccgcggcgcgcccatttgtttctgggcagattcttttgcaaacttcaaatagccataattttgtgatctggactccgatttgggagttctatataccgttggaaagcacttttcgagatttatctgaatatttgaattttaaatgcca

SEQ ID NO: 257320 - DNA, 690 bp, Cannabis indica
atttgttcgcattcgaaattatttcattgaaatctccaatgattagccacggttgcattggagcaatgtcataaagccgacggagcagaatccaagaatccattctatttcgcacagcaggagctccatagaaggcagtgaaatgaaacttggtatcactagcatcacttaaccatgaatcaaagtaacagggaccaaaagtattgagttgaagaacaatatcgtcagtccatagcagcataagaccgccactaagtcctacccgaggtgcttccaaaccatgagaaatttttaagagctgtttaaaacgatcaagagagttattgttgagtctagtttccataaggaaaaggacatggggagattgctggcgaacaagcaatcgtaaatgtcttaacgctttcgggttccccaatccccacgcgttccaacttaagattttcataatcccttgcgggattacaaagcaatctccgctgaatcgtctgagtcaccatcagaatccttagaagttgaggaaacattctggtgtgagcaatccccttttgacgagagagagggtacagctgtgtggtgttgattacgacatcttttaagcatttgcctcatggtaggcgcatcagtttgccttttaaacatgcgatttggatgaaggttttctttacttctttgagagtaagaattagggaa

SEQ ID NO: 257321 - DNA, 920 bp, Cannabis indica
tggcggtgtattgtacatgtttgggccacaccagaccacgtgggttgggtttaccagttgatgtattttgtattctcagtgtttcccatctaggtcagcatgtaaaaataacttttaatgttttgcagcggtttttacgggatcccgaaacgtgtgtaatcttttggaataattgtaaaattaaatagttgcaagttttatttttactctgtaataaatttaaagtttaaatttatgcttttattcctagtagtcccagtttagcaggattaggttatgtttaatggttgatcgtagcctgcctttcattaaggcattataatttggtatcagagcgccaaggtttttaaacttcctgtggactgaatgaacatgtacaatcatcgtcgaagacaagcttgactcatggtgcagtaagtgttaagagtaaaaaattcactgcctttgtgattatttatttactgcttttcattttaggcagtatacgagcatctagaaatgaatgttatatagaaagcatgattagtgtttaaattgataaatgtttatttcataagagaaatagaatgtatgagatagggttaaggcaataaatgctcaagtatggatttggtgcctcactcgctttttgatttcatggctatttgaaaaaaaatggaccctccacaatcatctagaccatagacgagcacgtagagcttggtaatgaccaagccaacccactggcactgcctgcgcttctgcagaatctgagggataatgcgggggttaataatgctaatccacctgctgactagcagcaaatgttcctcgaaatgcgaagcattatacttcgtcaagaagatgaattgcgacagtttaggcaaccagcactggaagctccagcagaacaagtgttaccaccagctcctgttctagtg

SEQ ID NO: 257322 - DNA, 839 bp, Cannabis indica
gcagcatttgcataacaaacaacaaatttttgagatagatggatgaccaagagtacatccttcgatctcatccgatgaaactagactgccataacagagaagctagtgacctgataaggcagtttaataaaagaactgctagtcgaggtcaagatctcattagagatcctgttaaagggagactaattggtagatcggggagggtctgcagataaactatccaaccaggttcctctggaaccaggacagaccttcctctgcccaaaggaggacaagtcttcccacgaagatctactgaatagaacagccagatcccagcaaccaacagtctgggggccagccagggatctgtggcacaacaacaccccgattagccaacctttggctggccagcctcttagtggtgtacctctagccagccaaaaggtgaactctcatcctagaacatccaagagtgagtaaccgaaaggctaatctttaataggctaggtccgagaacgagttcaaacactcaagatgaaaatagcttgagaagtgagaccaatcacttcagatacttagatccacctaactctagtaagtggtgtgatctaccccctgtcaatgcacatactacaccagccaattaaggaagagcgggcggctaggccctaccgagcatagggttggtcagccaagaataacttcccagagtagggctagccagccatggccagctccctacctagggcttgccaaaaaaagcaactactaggcttaggggtggccaaccttgaacataccctctccccaggtatgattgaccaagctctggcaaaatctaggagtgcaacccaatc

SEQ ID NO: 257323 - DNA, 870 bp, Cannabis indica
atacaatatatgtctatgcttatatatatttatatagatgcctatatattatatatgcgtgttgatttgtttatcatattgtattgtttaattttattttcttattctatattttagtattttattgtctatgtgttatattttgttgtacttttatattctttccaaagcttatgtatatgtctaataatttatactttatattgatatagttttttttatggcgaaccttgcaaaacttgactttgtggcacttgatattttttgaagaaattatttatcatggattcttgatgctgaaatctatttagataattatttatcatggattcttgatgctgaaatctatttagatgttgtgggtcttggagacaccatcaatgattaaaatacggaaacaaaacaaaataaggccaaggctatgattttcttttgtcgtcatctccatgaggggttaaaatctgaatatttaaccgtaaaagatcctattatgctttaaaaaaaaaattgaaagaaagatatgactatcagaaaactttcatattaccaaaggctaagaatgattagttgcacctgagcttgcaagattttaaatcagtaagtgattataactctacaatgtttaatatcacttctaaattaatattgtgtggagaaaaagttactgattatgaaatgttagaaaaaatatatactacttttcatgtctctaatatgctcctgcagcagcaatatagaaagcgaaaaaatattcagaattgatttcatgtcttctaataactgaacagaataatgaacttttgatttcatgtaaattattagtttattaaataaacttaaaagtaatataaatattgttacaaaagaaaa

SEQ ID NO: 257324 - DNA, 723 bp, Cannabis indica
tggtggaaagagcattccattggaatgacattccaatactttaaaatgcaaccaaacaaaggaatgaaatgaaaattgtttcctttccatttaattccatttcattacctccaaccaaacgccacctaagtgtagtaggaccattggctaatggctactggaatgtaagtatgacaataaataaatatgcacacatacaaagaaaaaaaaaaaaacaaccatgatttcaagtttaagcaaaccccaaaagtaaaaacattatatataagatgataaaatactataacccatgtttagataccaaagtaggtgtcaagggagactcgaacatcaaaaactaaccaccatttatgcctgaccatttgaacaactcatgaatattatagcaattaatgaatatattcaattcaagaaaagtgattgttgataaataaaaggatataataggaagggttattgtctttaataaaaactcttgggtgaaacagttaattatgaatgagacacaaccttatcgatcaacaagttgattaaaggataatgttagtgcaaggaggtagtatgtagggtaggttgtattcaggataggttatgtactcaactcctataaaaggaaggttgaggacacatcagaagaaaagaagagtttttctctaaaaatctcagttttcatcattgctccctgttctcttcccttacacacaaccatcccgtctcatcaat

SEQ ID NO: 257325 - DNA, 577 bp, Cannabis indica
cctcctcaggattggataaaatttaactgtgatgttagggtgggccttgaaagcatgtgcacaacggtcgtagcaagaaatcatctgggtgatgtgattcgaattcacatggctcggttgaaatttttggatgtgttatgtggagaagcagtggatttttgtttagctgtttcggtggctctagagttaggctttaagtttattttggtggagagtgactcgaggatagttatcaatgctctcaatgggacagaggcacattgggcgcttgagaactatgtctccttttgtattaagtccgctccctcttttaattgctgtaattttatgtatatcagtagaacttataattttgttgcccataatatggctaattggtcttttacccacaagttgtacagatgtattctggtctcatctattccggaagatctcttatgtaatgactgggaggtctaatgttatttaatcgaatgcatgaacacgcttatttccaaaaaaaaaaaaaattggttgataaaacataaccaatgatctctcaaataaggagtcatgtaacgtaatatatctgagaaaa

SEQ ID NO: 257326 - DNA, 725 bp, Cannabis indica
aggatgttaataaaacatacttggtagtaaatatagatcctggtaaaataattccaacacctttggcccccattcgcgcccattggagtatgcaatgcatactcccctatttcgcccttttttgcatttgtcaacttttaaaaatcgttttttcaatgaaacaaaattcaaattgtggtagaattttgtgtagaatctattttttcaaataaaaatctaataataagaataaaattaattttattagttttttaattaatttaaattagttttagatattagttggctttgaatttgaaaaatagaattttccacaaacttgcttttatggttatttttgaaattagattatttttggattgtctcgagggtcagaagggtgtctaggcttaaaagcactggtggccttctacatcctcgagggttgtctgaccggaggtgcgtctttttggtgaggtttaggattagttgttggagtatattttaccaagatctggatttactaccatgtatgttatttaacatcctaaatatgaatttctaaaacaatggaatttaaacacatataaagtttgagaaaccttacagtgattacagcggaattaaatgactccttccgctcagatctctaacccttgtatcttttctgttgcagagtatcagcaatttctgagtccgattctccttctcttgaattttgattcttcacagtcttacacactatg

SEQ ID NO: 257327 - DNA, 1210 bp, Cannabis indica
cagcaactgtattcaaccattagcaacacaaaacaacgtttccagtttaataaatatatttcaaaaacttattttttctagtacctagatttgttttttgtagcatgtacaggtatcttggcaagagatagcatgattctttagcatttccatgtagctggctttgtgctcgctctttactacgccatgctttcatgtaattcatgtgttattctgtatttgtctttcatttctccctttatatttgcaggactgtcctttgttttcaggttcaagaactttagttttacgaaatctgctatcaactttgcagttgcttgtcgttgatctccaaatctttttggaatcgcacatgtgctcttcttgataactccttattatgaatgtttttgtgtttccatttttgaagtctttaaactccatttgcagtttgagtccaaacaaataatattgtattctttagtgcaagatttcactactttgtattgaaatgttttcttgattgcaaagtagcataggacacttatcaatgtatctttgtccttgtaaatttgtcaatttctattgttttatgtcgtttatcagtgatgatatcatttctttgttgtcgacttctttttcttctttctgtttttgttgttattgttttctagttgttgtatggttgactctgatgttacagtcccagtatcgagcaaaaaagtatcatcttgaactgatccaattattgatggagatagttgttcttgtttgttgttgttgggttgttgcacatctgcttgtgctgagttgttgcatatgatgtcatcatcatattgttgcacatcattctttggttaggtgccaaaaaggtttgtgtctctgtgttgctgattttattcacacacaatgggtacagtgtgaaatcagtctctttgcttaatagctttatgtagaacaacggactcttgtcatcctttatttgtagtggttgacattcttttagttgatatttcaattgtatttgtgttgtatcagggttgcattggagttctttcatcattattttcactagttcatcaaaaatgcaatctcttgatagtaattctccacttgatttgtaatcaacattttttgttcatcccaatgaccactgttctgtaccgaattttgtagaggttcctgttggaatttattttaccaggatcttagatctactcacaagtatgtt

SEQ ID NO: 257328 - DNA, 540 bp, Cannabis indica
tcctccccatgcaagacttgaaaagcaatctccctaaagctttgtacaaccttctcccgaaggttgagtgcttgaatcctctcgatgcaagacttgaaaagcaatctcccgaaagctttgtaaaaccttctcccgaaggttgagtgcttgaatcctcccgatgcaagacttgaaaagcatctcccgaaagctttgtaaaaccttctcccgaaggttgcactgatgttcttcttcgttgtagacttgaatacaatctcaagacaatacaaactacaaataaacaaagtaagagtcaaacatctcttctctacaaaacaaagactctcttttctaaagatacgagagaaattcaaagatacaagagaggtaccaagaaaggtacaacaaagacactctttcctcaagatatgaatacaattctaagtgtatgaaagagatacaaaacctagttgattaatatacaccttattgacaacttacacgtggtgtgaacaacaccccagcccactacaaacttccctaaaataattcttcaatcag

SEQ ID NO: 257329 - DNA, 685 bp, Cannabis indica
catagagagaatcttcataaataacaatataggtaccaacaacattcagccatgcccttatacttgctaaagaaaggtagccgatgtaattgcatccaaaaaggagacaaattcatagtttcagcagtgataatttggtgaacaattggaggacttaaaacaatataatgattttgaaagtgccaaaattccaaaatagaactttccttaagtctcttatgtatccacaagtaactaagaacaagcctgagtggtgatcagtaatggtaatcgggtattagccttttcaatgaccattcattttaatacgaaaagtttttcgaataatatctcaagatgaaataactctcgcatagagaatatgaccttggtttattcaggaaggatttgaacttcacttttagaatttgttagcaccagagattgattcgtgtttgtaagaaaatgatccataaaatgaaagaacagagcaccgacaacgactaaagcaagaagaaaaaacagagttcgtttccagcaaggggttggacatagtggagggaatagtcagaaattgagtttgaaagtggtggagggaacattttcagaaaagagaaaaaataagttaaaagagttaaaaagaaaaaaggaacaaactggcatagaactttttaagagcacactgctcactaattttattttatta

SEQ ID NO: 257330 - DNA, 592 bp, Cannabis indica
ccaaagaaagttttttactttgggagggatctttagttgttacaacctgcaccaaaaatcaaaattattaggtctcgagtgattatactattttgcaatgattactatatttatttaaataaaaacaatacaagattttaagcatcattaccctaagttgtatggctcttgttataccttaattttacaaaaatagcaatcacaatcataatatttcacttaggtacctaggtggtgaaaccaccatgcctcatcaccttaacctacacctaggtggtggcacgacgtcaactcaccttccccaaggtcgaggtactcttcatcagggcatcatctcggtcgtagccaagatgcacatcctcataaggacatcatctcgacatcctcaaacatcctcacttcggctccaaaagaggcttatcaccttagctagctccaagccttgttcatctcagcacaccgaattcttcattttggctcaaggctaaagtaccatcttctcagactaaggccgagatcatcacctcgggttgataccgagatcatcatctcggaccaaggctgagatcatcaccttagaccaaggctgaga

SEQ ID NO: 257331 - DNA, 1387 bp, Cannabis indica
ggccatgctactactacgggccacactaacactatgggccaaattcatattgatccaaaaaacttgcattcggtgggttctagtttccaggcccaccagccattatgaatactttaagttggaattgccgtgggcttgggaacccacgggcctgtcaattccttgagaacattgttgttcaaaagaagcccaattttgttttcttgtgtgaaaatttttgcaaaactgatgttgtgactcagataaaatacaagctcggttttgaaggagcttactgtgtggaaggtcacggccacaaagggggtcttgctcttctttgaagagttaatgatgatgttcttttttttgggtgttcaagtaatcatattgatgtagttgttcgtgctcctaattgcatcccttggcgtttgactggtatctatggggaaccaaatcgaagctttcggttcaaaacttggaaactcattgattctttagccgcttcttctcaactcttgtggtgtattattggtgatctcaacaacattggtgatcaatctgagaagcgaggaggtagactttatccacattctcttattcatggctttcagagtgttcttggaagatgcaatcttgttgacttaaagcttcatggccacccttacacttgggaaagagggaaaggcacggctaactgggttgaaatcaggttggataaagcacttgtgtctcagctttggcttgattcttttccacaagctgtcttaaccaattgtgatatttcttcttctgatcatacgcccatttttcttcagcctgagccgactgctgtaactagctttgtgtatcattttaagtttgaaaatgcttggactcgtgagcctctctgtagtcaaattgttcaatcttgttgcgaggactttcctcatgcgtctttttcggagaaaataaagcaatgcagcctcctgttagccgattggggtaggagtctcacttgcaattttaagcagaaaatcaaaagaagcaaagccaatctttctgctttaaaaggtaaaaccgatcccacctctgtacatgatttttgtcaagagcaaaataattattttgagatccttgcccaacaagaattatactggaaccagcgatcaaagcaattctggcttaatagtggtgataaaaattctaagttctttcatgctatggctagttcaaggaaaagagccaataacattcatcaattacaaagagctgacgggtcatgggctacttgggataatggtttgcaagatattattgttcagtattttcaagatatctttactgctagaaatcctaactttgattatgtcacagctggtataaggtgctctatcactgatttacacaatgatatgcttttgcaaccgat

SEQ ID NO: 257332 - DNA, 692 bp, Cannabis indica
gagatttattcataggattatggaatgtgttagatttactaactatttcatatgtatgaatggaaagggtgcaagggtcctttgaaggtaagaaaaggcttgaggcaaggtgaccactatcgcctctcctctttgtcttagtaatggaatacctcacaagaagactctaaatgactgtcttgggtacaaattatagataccatcctctatgcaaatacttctgtcttattagtctttactttatagatgatctaatcttgtttagcaaagaaacaaggagctcaatgattattcataaagatatattagatgagtttggcaatacctcgaggttgcatattagcgaagggaaatcctaaatttattttgggggagtccaagattttgaaaacgtggcaatccttagagatttgaaattaagggatcatatccacttcgtcacttaggagttttgcttagaccaacaaagtggaaagttcaagattgtggcatcattattaaaaaaaatcagcagtgtctccattcctggacaagcatgcatttgtcttatgcagggaggattcagttgattcactctgtattgtttgggttgtgcaactatttgatgagtatcttcatcattatgacgcccaacctagctctgcatacaaaacaaacatcgctgagaggtatttcatactttatgaggtgat

SEQ ID NO: 257333 - DNA, 829 bp, Cannabis indica
aaatttgatgccatggctgtgacaaaacattcttcaacaagttgctccgagtgaaacttcaagtgacatggattttaatttacttcaagttaatttgacaaagaagttaaccggaaagaagtttttgattgttttagacgatttttggaaagatgattatgttcagtggactgaattgataaagcctttcaacagtggggcacgaggcagcaaaataatagtaacaacaagaaatcgaaaagttgcagataccattcgaactgttgatacacaccatcttagtgaattaacagaagatgagtgttggaaactatttgcaaagcacgcatcttgtggaaatcttgaattagaacgttttggcagagtaatcgctaaaaaatgtaacggtttgcctttagctgccaaagttctaggaggcctcttgagatcaacagatgatgctgagaaatggaaacaaatagccaatagtaatctttgggagctccaagataaaagaagtgagagtcttccagctgcattagaagtaagctatttttatcttcctccatacttgaaagggtgttttcttattgttcaatattcccaaaaggctatgaatttaaaagagaggagttggtgttaatatggatggctgaaaaccttgtgcagtattccaagaggactaggagaatcgaagaagttggtcgtgagtattttgatgatttagtatctttctcatttttgcaaccgagtaagtggggggggtcttgttttgttatgcatgatcttatagttgatttggccagaactatttctggaaaatacagttgtttgttggagcaaactgaca

SEQ ID NO: 257334 - DNA, 931 bp, Cannabis indica
tgatttttagcttaacaagaaataaaaaaattgcagaaataagaaactgtactttaaatggtggtcacctgacctgagtactttgtttcctttgtcaaaacccttgagcgtagttctcccagtaggccatttacttaggagtaaatgttcattcagtacttaatgtggtcgttcgacctggtactttattggtagtatttccttaaatgttccccattccgaatccgtggtactagaacgagttgcattttttcgtcatacttacctaatttgtatgctccgaaattgaggacttcgacaacttgatatggtccttcccagttaggtccaagtacacctgtcgtactgtctttggtgtttaggaatacccttctcaagaccatatctcccgcaaagaatttcagagccttcacttgtttgttgaaatatcgagctactttttgttgatgggccatcaacttcaagtttgtagtggctcgtctctcgatttcatcaagtgattgtgctaggagtatgtgattggtatcttgattgtacatcaatcttttgtgagaaggtggctcgagttctacaagcagcatagcttcatatccgtacatcattgggaatggtgtctgtctggttgccgttttctcaggttgccgatatgaccatagaacttctggaagctcttctggccagtttcctttggcatcttcaagttttttcttcagtgtatccttcaaggttttgttgactgcttcaacttgaccattcgcttgaggatacgccactgcagagaaacttttgatgataccatggttcacacaaaagtcagtgaaggattggctgtcaaactacttgtcattatctgaaactatcttgtatggaagtccgaaccgacagattatgttcttcacaatgaagtcttgaactttctttgatgtaatgg

SEQ ID NO: 257335 - DNA, 1020 bp, Cannabis indica
gagaggaccattcagatttttaaaagacatgttacgggcatgtgtgttcaattctaagggatcatgggtaaagtaccttcccctgattgagttctcgtataataataactattagacaacaatcgcgatggctccttgtgaacttttatatggaagaaaatacagatcacctattcattaggatgaagtaggtgaaagaaagttcttaggtcccgaagctgttcatagaacaagtgaggcattttataaaatcagagtgcgaatgctcgcgactcagagcagacagaagagttatgtagattcaaggtgtcgatattgattttcagatcggggatatggtatttctccgagtatcacctatgaaaggcattaaacgctttggtaagaaaggaaaacttagcccgaggttcattggaccttttgagatccttaagaggatagggcaagtggcgtacaggttggctatgctcccagccctggcagctgtacatgatgtgttccacattttgatgcttcgaaaatatgtctcagacccgtcctatattttgatttacgaagcttggaacttcaaccagatctatcatatgaggaacaaccagtggaagtacttgataagagagaaaaagtcttgagaaacaagacaattgcactgataaaagtattatggaggaacattaaagtataagaggcaacgtgggaactcgagacggatatgcagtagaaatatccggagttgttccagtaaatttcaagacgaaatttctataaggaggggataattgtaatatcctaagattaagaaaacggattagcaaaccctaactagttaaatatgtattaatatggaattatattattatataatttaatatatgtgaattaaattgattaatgatatgctaagaccctgttggtgagccaggggtattttcgtaattttgacccgagaagggtaaaactttaattttaatattgttgcatgcttatggactatattattatatagtatacttgtttttt

SEQ ID NO: 257336 - DNA, 1370 bp, Cannabis indica
tgcatcttgtaaaaacataggaagaaacaaaaacagacagatccagacctggtcacgaaggaggctgtagtaaacagacccatatgtgccattccccagaagatttgaatcagagaacccgtcagttgaggaatgtatttcctcgtacgtgaaaaccacaggcttctctacttcaaatacattagtcccaagagcttcaatgagtaaagaaaaccaatcagatatctttaaagctataggacaggatcctttcatcaaatacttcagaaaaagaagatagttaggatagtaaacctttgggaatcgttattgggtggcttttaggctctccattaggttgtttgtattctccagatttgccactgatgtatcttcctgaaccacaacagaaacttggcttccgaagaatatggaacctataagaactcttgccttccgaatcctttgactggcctcttcgcgcttcggtacagcagattgatggcctcagggaaacatagatcactatacctatcacaatgagagcaagaacaagccccaaactcccgacaatccatatatacggtgcatgagctttatgaattacttgattttctggggaaaaacgataactaagttacaatagctcactgtcaactgtcagctacaagtagtattatgactatttttcatttgaaccaatgagaaaccaagaggcattacaaaaaatacatctgaaaaaataattacagcgagaaaacaatggactttgcaaaatgcggtaattttagttcattatcactctcccttttttatacatatatagcagtcaacactgcctatttaatgtgattttatagagaaaactaagggtgtgtttgattgggagaagtgaaatagaggaataggaaagggaataagaaccggaatgggaaagggaatagaaataggatggaatacaatttaatatgataaaagaatttattgctattctaacaagtcactacattaaaatggcattccaatactttaaaatgcaaccaaacaaaggaatggaatgaaaatcaattcattacccccaaccaaacgtgtacaaaaaccacaagactaaaaggtattagtttagcattgcactaagaagtcttttgagggtcaaaagtctaagaaaaacagtacaaaaataactataaaaatatcttgcaactctccccatcttttcttcacagggatcacatgacatcttgcataaaggttgcagtgcgataatgatcttttcttacaacttttagagcattaaattccaaggaagctagaaaataggatactaactagctatcatttttttaaatggttttattatttacgaaaaacaaatattcagtaactctcac

SEQ ID NO: 257337 - DNA, 693 bp, Cannabis indica
ttattttgtgttttactggtgttttataaaaacacactatttttgaaaaaaatttcgtgtgatagtatttttgtaaaagttaaccaaaatttcaatatttttgtaaatttccctatttaaatgaaaggcccaattattttctagaaaacaagtccaactgaatttttttcctcaaagccctaagaacaagataaaaaataggataatacaataatcaaaacaaaacccaaataacaaacccaaacccaaataataaaaaggaaattttttaacatttacattagagtgttaattggactacatccaatatgtttaggactatccagatctgatctaattatatattagatgttcaattttaccatccaatctgatctaattaattttaataatccaatccaatcgatctaatatctaatggatgtcgaattgaatcagttctatccattagatatatttcgtgtatatttattggtttaatttaggtttatcctatatgttagagctagtatttatttgatcggatcagatctatctaacattttagatccagtacctattggattgaattggatccatccaatctaacaaaaaagtaaaatttaaatgttaattttcatatatacaaatattttttttacaaatctatttactcattcaaactaaataaaaatattaattagttcgattaga

SEQ ID NO: 257338 - DNA, 596 bp, Cannabis indica
aaaacttgttaaaattttccctggaaagtagaatgttctaaaattttaaattatggggtcattttatcctaatttaatgcaaaaagaatcttcatattcacgtcataggagtatgaaatcattgtgactagaggggaaaatcttttgaggagggtccaagcaaaatttcacaaaggggtaccactataagaaatgtgatattttcactatttcaaattaaaataattattagtgcttgaaaactactttttctctcaatgtttccaatagaaaagtgatgcacaatgctcttggcttcatccctgtgaaatttctctattttttcgagatgtggagaatgagattttaagagaacactaacgagtgtaagagtaagaagaaactagttaaaatctaccctgaaaagtagaacgttttaaatgtttaacttagggtgtcattttatccaaatttaacgcaaaacaatcttcatatttatgccttagtagtatgaaatcattgtgactaaagtggaaaaatattttggggtgggtccgagcacatttcacaaaggggtaccactatcagaaatgtgagattttcactatttcgattaa

SEQ ID NO: 257339 - DNA, 838 bp, Cannabis indica
agggcataaaacccaacatagggatagctcccaaagagatcccaataaaatatgcgagtaccataacaacattggccacaccaccaacgagtgcaaaaacctgaaagaaaaaattgagaacctaatctgattaggtcacttgtatgaatggatcaaaagcaggttaccgcacttaaacccggttccagtaggaggcccattgcctcagggaggaacagggagtatgcccaaagggcaggtacctcccggaggagcgcttcctcagtaggtgccctgattaccaccctgatcgaatggaagagtggccatgatctctggtgggcctcttattggaggaaccaccaggaacgagttgaaacgttacactgtagccataaaacacgatgaagtgcgggaggtcactcaactcccagcgcaaaggcccaaactcatggaccaaacctatcactttcactgaagaagacacaaaaccggtgcgtttcccccaccatgaccctctagttgtagaaactcccatcaccaataaggttgtggctagaatattggtagataacgggagctctgtaaatttattattcaaagaagccttcatggccatagggctaacggacagggacctatcgcctagtggttcacagctcacaggattcaatgggacgacactcatcccaatgggaaaagtgaggcttcctgtcaccctatgtcctgacaccccacagagcactttcaagtactgcacctttgttgtggtagactgtcccaccgcctacaatgccatccttggccgaccggccttggtcgatattggagcgatcacctccattcgacacttatgcct

SEQ ID NO: 257340 - DNA, 941 bp, Cannabis indica
acttctcccttctcccataatactatatttggtgattcgataggggtctgatggtggttcgatggtagcccaatgctacctttttttttttttatgttattgtacataagaaaaaagtagcatcaagctaatatcggaccaccatcagaccatattctacatttatagattttaagctccattccttaagctcgtcaagaaggcattgagccaccatcggactaccatcgaaccatagcatcgggccaccatctgaccgccatcggaataccatcagaccatagcatcgggccaccattagaccattatcggacattcttctacaacctttaatcattttaacaataggaaggcatcaggccaccaccagactatatcatcggactaccatcgaaccttcgtcttcaacctttactcattttaacaataagaaggcatcgggccactctcggaccaccatcgagcctagcaaaaaaaccagttttttcccaaaactcaaatctggccgttttagaccctaaatctaacatctacccatagataacaaatattaatcatacaatttattcctttgataatattgtcgatggtgaaactgtggttgatggagaagttgttgggttcgtaggtcgttgggtctatggtggtcattgggtctgtgggttgttgggtctatggtcgtggtggtcgtggagagaagggaccgaggttgtgggtggtgggttgtaggtcgagttcttggagtgagttcaaagagcaagagagataagggagaaagagagagaaataggtatttgaaatgagaggagtagaattgtgttttatgaaatattagtctattctaccaatataagttaacttaggtttagaaaaatagttttaatccaataaatatataaaaaaatcaaatttccctaaacaatttacatcctgggatcttt

SEQ ID NO: 257341 - DNA, 1017 bp, Cannabis indica
aactacccaatttccaagtaattcagcttgtcagaaaagtgaacataaaaagttgtgaatttaaatcttttgacttcatggctatcagttattatgaaaaactagacaaacgattgagacagaatcagaatcaaataaccagaacctagcacaccaggccgtaagtcaacctgggtgctgggtgcttattccagagctttcgagatgtcgttttgatatttctatggttttagaacttaaggatgaggtctcctaccctgtttttgacaattttagagagaattcttagagcaaaattggcatttgaatgatcaaaactagcgcactaggctgattgtcaatctaggcgaatggcccagcaccatgtcaacctgggcctgtgctcaggtttgaagcccttggaattgtggttttcgccctaattttacttatatcctctttatttttaatgacaaaaaaaatgcccagaacactttgttggaagactgattggaaatagcccaagttaacaatatgtcaacctgggcgctgagtcagttacatgccacctggaattttttttggccccaaaatagttgaatcttaatctttgatgaaaatagagaatatcccaatataatttttagaaaaacttctcgtaaccggcccaggttaacaaaatgtcaacctgggtgctgcccccttattctggcacccaagatgggatgtttgttcctcaaaagcacttatttcccaatttttaatgaagaagagaaagattcacgagtcatattttctatatgatgcttagaagttgtccatgttgaaaattatcaacctgggcaccgggtgctctggatgctcataaatgaaagttctctgaatttgattttgatgcctcaaatattttcatggtatgtcttgttcatggggttgtcaaccttggcactgggtgaaaccctaggtgcccaggttgatttttgagtgttgattcatatatttttagctcccgtggcctagtctggttgcttcatgtca

SEQ ID NO: 257342 - DNA, 714 bp, Cannabis indica
atattgtagatcttttcacaagctttaaaatagtatatagaacgactaaaatatacaccgaaaaaaaaaattatgccaaaatataaaaattgatctttttcggtactgtccattcggacctccagttggtatagcatgtaccgaccggtcgttcgatttaagggcaaaaccacctcaaaaattctcaacttttcctaaactgcctttaatcttacccaaatgctacaaaccctttcaggacatcaatatacaacataataaacatattccataactcaaacacaacaattacattaaaaatcaaaattcactaatattgagctaagtttgagttctaaaactcaaactcacccaaagcttgctacaactgctactactcttaaaaactaacaacaacaaacttaattcaagcttaaaaggagtttctaactcatacaaactcatacaaaaaagaattccccaaagtcatacaaaatactatgtttttcaacaaattcaaagaggaagaaagatgattagagctttacattgaattaagctccaaatcctctaattccttagttgaattttttattacaaagtcttgaaaatttcttgagttcccttgggctttggctaggccgagagagagagttgttttagttttttttttttaattaattctaatttttggcttataaaactaatatccagcattataactcttaattaaaa

SEQ ID NO: 257343 - DNA, 632 bp, Cannabis indica
ttaacttgtaaacataataaacatgagtgctactgtaaaatttaagttcagttgggttcaaaccaagtttgtatagcttcaaagtgtactatatgggggacttacatacaaggccagtattatcgatgtcatgcttattacaaaactcaagatcactgatgtcagcaacgttgttcactctttggctgcacaaaaggatccatatctaatcacaatcaagctgtaaaaaacctcacattgccttgcaatcaagcaaattacttcccaagtaactcttttcaaatttattgtataatgtagatgaaaaagagtcaatctttgaattttgcacctgaactttttaataagatcgtggcccccgaattattagattttgttagacttctgttaataattagcaattttaccttcaaaatatgaccactatcatatgtttccattgccaaatcgtgcccccgaacttctattaaacaaaaatggtacgatttgacggtgatataaaatcggtaaaagttgaggggacataactttttagggccaaagttcaagggtaaaatactcctatttattctatcttcaattcaactatggtaaattacaaaccgaaaaagaaaaaaggatcatatataaaa

SEQ ID NO: 257344 - DNA, 985 bp, Cannabis indica
ttttcttttaaaataatcaaatattcgaatatcatcaaaaagagaaaatgttgaccaaaagtcaatcactcacttattttgatgataaacaaatatttaattattatttgttactaatcttttcttgatcatttcacaagtgaattcacaaagtatcaatatttgctcggtaaagtcaaacataattaaagaagtggattcaacaagtatatcaacttcttcatactttataagtgcaaaagtttcatcaagagatcaataatagaagaccctatccaaatgaagacttcaaaagctcaaagtcaaaaatcaactcaaaagtcaaagtcaaagataactctcaaaaaaagttaactttagatcaaaacatttaaatcaagctagaaagttcatctacatcaagactacacacaatcaaatagtataagtttattttagtcttgttaaagtaatttgcatagtacattaaggtttataagtttaaaagtttggctcactaacttgtgcgacgagttatttcataaaatgatatctaaactttctaaatcaattttttaaaatcacatatcatttaactaaaagaacgcaactgtaatttttaaaatcgaataaacgagtaaaaaattatgcacgttttagtttgaaaaaattaactttttgcccctattagccatctagaattctggttcccatctagaattttggttcccatcaggaattctgtttgtaaccaatctaggattctggatcacggcagaatgtgcctaaaaaaatatgctaacggctataaacggctaggttttagtcctacactatataaactcatttttcactcaaaaattagggttggttaagcttctattcatcatataacatcattctaagtgttctaagctaaataattttcatctttttataaacacagcaaccacacacacttaagccaaacttgttcttatcttctctagtgtgcttgcaattctct

SEQ ID NO: 257345 - DNA, 1150 bp, Cannabis indica
atcatgcacaatagtagattatgcatatgcgaccatcatggtcttttatgttcttcaaccaatttcaaagaattttaatatgctctaaacgacaataaacaaccttgaatttacaatatgcgaccatcatggtcttttatgttcttcaaccaactttaaagagcttgaatttgctctgaacgatcataaacgaccactgaggtcacactgtctatttttaatttttttaattatgtgcgacgaccataaaggttgcatagaatcgcacatggtagcacagtctattttgataccatgtgtgaccctattcatttagttaaatttgtaatttttttcttatagtttttacatttatatttttatcgttatataattttttttcatttcacacattattattgtagatgtccaaaattatattaacagcagagctttcatgtatacctcgtgccattactactaatacagctgcaaaatctaaagttaccatcgaatccccgctgagtgtaataggacaacaaagtttgacaagactatttttaaacattactcccaattggatcgtctcttggacctcgacactaaagggattttcctaggcaccttagtcaaccagatagttttgaggagggtagattgtcaaaagaaggatgagttatggtttttgattaatggaaaacctgtgaggttttctctctaagaatttgtaatagtaactggattgtactctaatggtggcccaacaactgaagaaaaggagcttgtttcttctaagaacaagttaaagaaaaagtacttcaagaactcgatgtctattaaaataaaggatattagcagtgctctagatagcatatttagagaagcaaagactagggacagagttaaattgtgttttatctatttgctcagtgcatttctaataatggcaagtccttcttcgataataaatcttgaatgactacaactagtggataatctaccaataattgacaattattgttgggagaagttggcatatgagaaaataatagagcaaatcacaaaaaaaaatatgaagaataatcactctaagaaggatattatgtggaacctcttagttgtccttggatatttctaataagaaatttgattatgattatattttattcag

SEQ ID NO: 257346 - DNA, 1524 bp, Cannabis indica
ttgcaatccctgtggagacgatcttacttatcactttattacttgtgtgactgcgtatacttgcgtacataattttcacaacatgcagcagggaaaatcggttaaccggtttcacaggtatagtgaaaccgatcaaccagtttgccagtaggggaaaacctagtttttggcttcgaaactggttttgagcagggtgttcttcagagcttagattagggtattttattgatgtttgagttatttcgaattagtgggggattgatttgttcggttacagaattagggtttattttcggagtttggataagttgtttatcaagtttcgttatcgtgacataaagacccgagatcgtcgagcatggttccacccaggtcggcccgcacccttgatattggtttaaggtaagaaaagtgttattcaccgtttatggttaacaaatataattgtgatagtctcgattataatcgagatcccgatatgtgtttgttgtgactcaattttgatcaaggtaatatttaggaatgattattatcgattgtgactcgattatgatcgaggtaatggtatggaacgattattatcgtttgtgactcgattatgatcgaagtaatgatatggaacgattattatcgtttgtgactcgattatgatcgagtaaaagatacgaccattaccgttatgagtaattactcgttgaaatcacggataggtttcttacttattgttcattttatcgggcaacaatagtgacatacatagctcgtagacagcgagtggcaacgacactttatgaagcactacaattatgtgattatgtattgaatgaatgcctgcttagtgaaatgatgaagttgttgattataagttactatgattgtcttataatgcgtaatatgcgtgttggtatagatgttaaattatttatgcatgttgaataagtaataaattatgagtacgcatattatatcatgttgtgattacttgtgtttatcattgccttaatttaatagcttttcttagtgagtcattgtgactcacgggtgctttgtggtgcaggtaaggaggatgaaactgtggtcagccatgagtaagaggtctcccggtgatgtacatatcaaccgcggtgtttcgactgccagtggataggatccatccttttggctattttgtggaaatgtaaccctattctgtaaatttggttttgagctaaagtgtgaatttttttttaaacatgggatccccatacttagcaatcttttgaagaaaagatacgttttagtttaaattgaaagtttttaacgaaaccacacttttccttaactaatagattaactaagaattagtttgtaaaatcacacacgtggcgtccatgtgagacagggcattacataggaactgttaggttttattccctaaataaaacccatttcaagataatcagatttactaattaataaagattagaaatcgcttttatgttgcatgattcacatgatttatttcatgattatgtttaatgtata

SEQ ID NO: 257347 - DNA, 1602 bp, Cannabis indica
ttgtggaccattacataactaaatgttggcgtaaacctccacttacactgatattggacttaatacaaaggacggaaaaggaaatacatgcaaaatccctaatttggcatttggcctctaaaatccctagcagaaattagttagaatggatttggttaaatccacacctaactaatttctgtaactacctaactaacacattcagaagaaaaacagaaaccctagagctatatatacctgcatcaaagcccagatctacatggttgagggcattcttcaagatccagattgagagaacttgaagaagaaagaacaaaagcttgtacatggaaaaagacacaacagagagttagttattgagagagggagggattaaacacaaaatacttgtattaaaactagagattaccagtcaaaaatgtacctgtgacttggaatctcctctgatgtacttctaaacaacaagaaatagtggaatcgagctctcatcgttgaggagcagctcaaacgaagacgtagccaatttattggtgaactttgggaaaaatctggtgttttctaaacctaattcatttctgtttgtgtgtgtgtgtatgtgtatagatcagatcataacagatctgatcttggcttggtgtttgtgtagtgatttctgggtttcctagggtttggattcgagtttctcagagagaaactctctgctagggtttcgagcaagacaaagagtgagggagtgaatgagaaggttctcgaatccttctttggttttgttcaaagacaaaacgaagccgttttggggtactgactttgaaaagtcagtggaacagtgaaaggtcgaaattgaccttggaaattgatttgtttgttttgttggtgtagggctaaattgtaaaatgcaatttaaatttcctacactaaagatgaccacaatgatgaattctattgtgacatatgtgaagaagaaagggatccatacattcgcatttattgttgtaaagattgtgatttcgctgcacatattcattgtctacttattgaggtaagaaacaatttctattactatatttgtgtttctataagaaataacaattcttatttggaataaattataagtttttatgaatctagtgcatataataattttaggcattgctgttaaaaaaattaattttaaaattttatacttttacataattagttttctttttggcagtaaatatattaaatattttctaaattttataacatttttatacttaattttgaaaaagttaaaggaacatatattagtgacgaaacatatattagataatgattaaaatgaaaataatggttcattgaagccttttgttgaaacacgaattaggaatacattaattaatgtaggtacaagctaatatgtaattatatatatatatttatattaagaagacaaatcagacattgaattgaattgtagtgcaatgaaatattattaattattaataaaaaaacttgttgtaattcaacaacacagaattcaacatgaacaacacaaattataatcaatcatcaacataagaaccatgaaactaaaagcagaaaaataaagaccagaatttt

SEQ ID NO: 257348 - DNA, 781 bp, Cannabis indica
tattttcttttttatttatttttctacttcttcttcttcatcgaccaaagacccacgatttggtctagttttttttttgtttttttttttttttttcagaagctctttctttgttccttcttcaccttccacgaccaccatgactccatgagctcgaccaccaccaatttttttcttcttcgtagagcatagaccctccttcttcatagagcacgaacacagacaactcttgcataaaaaaacccagaccatgctttgagcttacgacttcccgtcatcgtcctcgatcccctccacggcgagccaatcgaccctcaccatcaacgtttatggagcatcttcacaaatcagtccccgaaagtgattagatcgagaccattgaagcccaaatcctctttcatctctctccttatgcagttgaagcttttgaaaagaagcctggacagagaagaagaagatgaagacgaagatttcaattcggggtatagtttgattttgtttcgatgtgtgggttaagatctgggtttggatttactgggaatgggagtttgattttctattttggttttttcttagtttctttctatcatagcttttgggggttggagatatttacaattttgtgtttagtttgtttgtgttgttgttacaggtttgatggggagattaatttcttgaagatatgtattaaaaggaaaaatgatatatttattagtgattgttgctataattttaaacactacgcaagtatacgcaatcaagtagtaaatctcacacaggt

SEQ ID NO: 257349 - DNA, 995 bp, Cannabis indica
gttttaaccctcaatttttactgcatgtactcatccatggatgagacaattgagtgccatatgcactctattaatttgttattacctattgaacttaagaatagatttttacgggtgttaagataggttaccatcaatgaaaaaaacactaagggagtttaggtcccatccctagaaaatttatgctttaatcttgtacgaagattaagcgatttgttataacctctcactattaattccatgtgaatcatgcatgccaaaatatagtgttcactttgtgaccacttttctcctttagtacttaagctttgaaaattccatgcaatttgttataacctctcactattaggttctgatgctttgaaacctgaaatcgctcctccccatcctcttgcaggtattcccgatcctcctgagattgtggaccttcctcctcgctatcctcaacgcatttataagtctatttgccaaccaaattttacatatttttcttatcatgcttcttttactttgtttttagcatctattcattgtctttttgagcctgtcctataaagaggcggttattgagcccttttggtagcgtgctatgaatgaggaactctttgctttgcaaaagactcatacttgggatttggtacttttgccttctggtaaacatgctattgattctcattgggtgtataaaattaagaccaagtctgataggtctattgaatggtacaaggctcgattagtggctaaggatttttcacaacagtatggatatagattttgaggggacttttgttcctgttacgaaaatgacaattgttcatacacttatatcagtggcatcagttcgccaacggactatatcttaaatggatgttaaaaatgcctttctgaatagaaatgatgacttacacgaggaagtctacatggttcctcctcttggtattcttcataatcaaggcgagatttggaagcttgaaaaaaccttgtatggtcttaaa

SEQ ID NO: 257350 - DNA, 692 bp, Cannabis indica
gcaaataattttcttaaaggtatttttataaataaaatcaatattaggtataatattgaaaagaccccatttaattaagtatacaatattattaataaaaaattacttaatttatatattaatttttttaaaaaaaaaaacacataaaccctgcttatagtgttgagagaagaaaacaatgtctacacactattctaaaaccaaacataaaaagctgcatatcataattttcaaagttaatatcactttaacaaacaaatattcaaagtgaagtctctctgctccaaatttcaaaagaagttagattataatgccaactcacatataacttgtaaaaaagaattattatttcttcttttcagtggctccaccagtagggctaaccctaggcataggcgggttaggctcgcgcctagggcccactcatgttaggggcccaaataataaaaattacctttttaaaaatatatatatttgtagtaattttaaaaatatcatttatctttatattaagggcttaaaaaattattttgcctatgacccatttcagttcaggacccgccctgttcactagatctgccaaaaaaccacataaaaaattaaaaaacaggaattataactaaaataaatcaatctttattgataatgcacaaatgaaccctgtttcaaaaagcaaagaaaaaaagaaaaga

SEQ ID NO: 257351 - DNA, 709 bp, Cannabis indica
attgaaattcgatacgcagctaagctaagactatattattatctaagaattatatattcagagatacttttgtaagagctataagaaaaggaatcttcttccttgttcttgagtcaatacaaataacgaggattaggctattaccgaactgctcggggctgaacctctataaaattcccgtgtcttattattgctttattatatatatatcgttacgacatatcctttatcgcttataaaatagactcattttcgttggctaaaagcgaagtcaacaaagtgaatcagttaaaattacttgcattgagatcagtctctggaactgccaagaggactatgatattatttctcatcattttctttcaagtttgttttccctaatcaaattggggaaattacagtttggttggtctaatgagtactatataaaagttttatgtaatcatttgatttaattgcgccatagataatttctatacaattatacccatcaagaatgataattctcttctacaatagtatcaatatgacttgagccccatttatcaagaaactataaacaaatatctacaactcatgggcttaggaagtaagtaatttagtactatgaacttataacctcatggttatcagagaatgtataagcatgcaattgaagttagaataatggtcagcagtattgacataatgtttacggcattgttgtcag

SEQ ID NO: 257352 - DNA, 1062 bp, Cannabis indica
ggtaaattagattgttatactttgctcaatcgtttatatgatgttgctccttcctctccttggctaataattggtgattttaatgattatcttgctcttgttgataagtctaccagtacaatgcctccttccaatgccatggttcattttaacacttttatctctaagtattctctctcccctatgcccttcaaaggaaacatattcacttataagtatggcaaaactcttgtgagacttgattgggctgtgatcaatgcgaattggtctgcccttttccctaaagcatccctaactcatctccctttcttcggctcagaccataggtgtctcaaagtcttacttactgatcccagtcaatccatgtaccactactcgggctttcgctttgaaaattcttggttctctgaaccagattttcccaatgttatactttccaattggcactcatctcctccctcccaaaacagtaattgtctttcttccttccttgccactcaatctcattgtatcgaccaactcaagcagtggggtaaaaacaagcaacattttaaacataccatccaacaacttcaacattctctcaacaatatctattcctctcctactcttactgacactgatattcatcgagccaaggcccttcaaaacgatcttgactgtgtcctctataaagaggaaatcttttggaaacaacgggctcgtgcttcatggcttaaggcaggcgacaagaataccaaattcttccatcaccgtgcctcttctcgtcgtagacataataatatatctcatatcactctggataatggcactgttatccatgatttcaatcaaatctaccagcatttcagaagcttctatgcttcccttttcacttcccagggcattgatttaactgctgtacattctattctccctggcatcactcgcactctcacctctagccaatattcaattctcagtcacccttttacccctgatgaagttcatgttgccttgttccaacttcctggagacaaagctccaggttccgatggtctaaatgctcaattctatcagaag

SEQ ID NO: 257353 - DNA, 617 bp, Cannabis indica
attaaaacaatcaacacaaaattaactcaaataaaatcaaattcgaaacaagtaaaacttcacacgacattgggaaacaaaaacaaaaccaaaattcatgtaaacgaaccccaccgttcattgaaacccttctacatctcatcgtccagacagaaacgcttcaatgaaatgccttttcattagaatcgttgaaggaaattaacaattatcattttgtcaagtaaagtgagctttgtgattcgattaccacaaattcctgcgattgtcatctaaataaatttgtgtgttaatttggggatatacgatttgttaggaggttaagattgtttaattttttggatttaattattgggtttatttattaacgggagatcaaacctattaacatcgttaaatttaacagaatattcttttatttttaaagtatattctgttaaagatatatatatattttttttttaaaaaaaaataacattccttttctattgtgacaacataatataatgtagcataacatgaaaataactatttatatttttgtataaaagaataaattcataaaatatatataaaaaaatgtaaattagtatttttgtaatttttaagtatttataaaa

SEQ ID NO: 257354 - DNA, 764 bp, Cannabis indica
aataatatgctttagtcacaaagtaatttttgtaattatttggatacgcccatcaaccaaatccaaaacaaaacttaattcataattgcccattccatcgatccactcttggaatattttatggaaatacttatccagctggagatacatgagtaattatttttaatataagtttatacgttataattatttacgatcacttattaatttttaaaaattttaaataatttatattattataattaaaaataatatttaaatattttattgtatgtataattgtttaattatatatacatgtagtaaataattgtttgaatttttatttcggtactaaagagaaaaaaaaaatctacattttttttcttatataaaatttttcatatatatctttgtatatcgtgatgtatttttttgtaatgtattatatatggctccaccacaccaatatattatcattttcaatttcatttttgggtggagtattgactttttttgcattattagctttttattattaatttagcagaagacaactatttatagtcgaccaataatgtagaataatagtgcaaataaacttatgatacggcaagatcaaataaattgatttaatatgtatatttattcttcaagggtttttttaggattagatagcaattttaatcagaaacacacttatctgtgggtaccctcactacaaaaaattattatatttagtgacaactttttagtatcacgacataaaaattttgtgactaaat

SEQ ID NO: 257355 - DNA, 784 bp, Cannabis indica
ggaggtgtgcagagcaaaacggaaccagaatttaggtagtttagccgccaaaaattcagtttttgtggttaagtgttacaaaccgtaaagttcaagtgatttagtcaccaatatcctttttaattaaaaaaaaatacataaattaataaggcataatagaatccctaaaaaattaaagggaattactatgtatactgcattttttaattttttctctccatttttacgtctttttaattttttttttttataaaaactgtttctattttgaggttaagctgtttttattttgagattattttgtttctattttaaaaaaggtgttttttattttgaggttatgatatttctatttttataaatgaataaataatcaattatgaaagtataaagggtctttttcatttttacacttcaaaccagttttttttagaattttacagaattttacatagaaactcttattgtaactagtgctacaacctaaattggaacaaaaaatcgtatagaaactcctattgcaactagcgctgcaacttaaattgcaacaaaaaatcgtatagaaaccctattgcaactagagctgcatccattttagaaatccaaaccgtaaatttgaaaaaaaaaaatagtatgggtaaattccccaagtataaataaaaaaaagaccaaaaaaaattaaataaacaactaaataaaaataaaaatttaaataattaatttattatatataaataatataatatatattttttatataattatatgtagttagtatagtttt

SEQ ID NO: 257356 - DNA, 642 bp, Cannabis indica
aataataaatttatttattcttctttttttttatcgttcaacaaattgcatccaaaaaggagacaaattcatagtttcagcagtggtaatttggtgaacaattggaggacttaaaacaatatgatgattttgaaagtgccaaaattccaaaatagaactttccttaagtctcttatgtatccacaagtaactaagaacaagcatgagtggtgatcagtaatggtaaccgggtattagccttttcaatgaccattcattttaatacaaaaagtttttcgattaatatctcaagatgaaacaactctcgcatagagaatatgaccttggtttattcaggaaggatttgaacttcactttcagaatttgttagcaccatagattgattcatgtttgtaagcaaatgatccataaaatgaaagaacagagcaccgacaacgactaaagcaagaagaaaaaacagagttcgtttccagcaaggggttggacatggtggagggaacagtcagaaattgagtttgaaagtagtggagggaacattttcagaaaaagagaaaaaataaattaaaatagttaaaaagaaaaaaggaacaaactgtcatagagctttttaagagcacattgctcactaattttattttatta

SEQ ID NO: 257357 - DNA, 617 bp, Cannabis indica
cgagatatgtatatgcggccagaattgtctaaacatttgtaacccttatgatttaggctgtagcctaagaaggtacatggagatgacctgaattgcaacttatgtttattgtagggccggatgtttgggaaacacttgcagccaaatgtcttgagtttggtgtaatctggttgaatagaaaaaagtttttctatgggagagacattttgcaacacaggagtagggagtctatttgacaagtatacagatgttcgaaatgcctcatcccagaatttgagaggcattgaggcttgggcaagtaaagtaagaccattttccacaacatgtcgatgtttgcgttcaactaaaccattttgttcatgagttgttgggcaaggatgtctgtgcatgatcccaaactgtttgagaaggtcagtaaagggtctgaactcacctccccaatcagtttgaagacacttgatagactctcctaattgaagctcagattcagccttgaattgagtgaaagttttcaaggcttctgatttttgtttgagcatgtatatccaggtgaatctagaataggcatcaataaattggatgtaatatttatatccattgctagaagtgtgtatggc

SEQ ID NO: 257358 - DNA, 770 bp, Cannabis indica
gtaatgatataaggtttatgctcagtatttttcctaaaatatattatttttttaacaataaactaaatttttattaaaagtaatgagagcagagtacaacaaaaagcaatgatagaaaaacatcaattcaaattagttaaccattcaccctaagtacatgcataactaatttattataagataaaaaataaattaaggatgccatagaaaaattagaaaataaactagtaataaaataaaatttaaaacttaatagtcatattcaaaagaattgagtgaaagctccaagcctaaacgaccaatccaaagttatcttaagagttaccctttcagcttagataactacgaaatttcttaaaaaacaacataacacataataaggtcaaattctacaaagaaaaaaaaatgaagtgaaacatgatacaataaaataacaataagatcactaggaatggaaataagataagaaaaataaacatgtgaatcttagatcgattgaacaaaatcctactaataagataacttataaaacaaatttgaaattaacattatttttgaacaatataatattttaaattaaagttcttgaactaaacacaaattttatcatgaaattgcttaatactttataatccgccactaatatataaatgtttacttatcaaatgtaatttaaaagccaaaatagttaaaaataaataaacaaaaatatggtaagaataaattatttaatatatattagtataaatataataaatattagataaata

SEQ ID NO: 257359 - DNA, 1237 bp, Cannabis indica
aaacactttaggcttgataaatctagaaaattatttccattctcctatgatacacttatggtgtatgcgtgttaagattactctcacatctcttctatatttatgttatttatatattgtatttcatgtgtagtttattggtttgagtggtaatccctctcttcatctatattctctactttatgtatagattttgtttagtgttgtaattttgttaatttgatatttttattggagcacaataatttccaatagtaaaaaaatcacttaataatatttactaaatattaatttaaaataaaatttatttttttgatattgatctacaagtacaagttaattatttgttagcgttaattattggtctaaaattgattaaaacaaaagttgcatatatttaatatttcccacccttaaataaaattagagcatgttaggtaatagaaaatcattaaaattatagtggtagttatgatcttagtcaaaatagtgtgtccatataatgtatttatttaattttttaaatgaaaggaattattatatagagttgtaggctactattaagtaaccatatagatatatagggaagcatgactttaaaataaaaatatatttttgtgtaccgaaaacagagtacgtaatgaaaaaaataggtggtaaattaacaaaaatttaattagcttgtgaaaattgaaaatgttaggtattaactatatgctaatacacatatgatcatattatgtacgtgcgtccataatgcatctcttaaaaagagagtatatttttacgaaattttatatagaaaccctattgcaactagcgagcgctagtaactaactttaaaacttaaaccgtaaatttaaaaaaaaaaaagttaaaaaaataatatatagagtaattctatatatagtgttaattatttaaaatatgttgtaaaattttgaaaaatttaaataatttacaatataaaaatttatattgaagcaatctattatatactcctaaacgcaatgcattgtaaaattttcacacaatatttaatgtttgaaaaatatcacatatctaccaaacatttcatggaattaattatcgttaatataataataataataatgaaattaatcttcacagcagccacaattcatgacttttcttttctaaataaataaaattgtatcactttatttgttctttcgtgttatatatatattaggttgggtttggtgtaaatgtaact

SEQ ID NO: 257360 - DNA, 790 bp, Cannabis indica
ctactctctctctctctctctctctctctctctctctctctctcacacacacacacacacacattgcccagcctgccgcccccttcttcttctacttctcttctaaaaaaaacgaagaggaaatagcagcaagttaaagcctaattttgctattacgataactttgcctcctcttcaattcgaagcccaaacccaatcagataaaataaaaactaggctcgccaagccgtagccaagctaatcggttcgatcgcctcgcgccgcagctcttccctactttcttcaccagccaaagctcacagtctccaccattatgcgacggctcctcccccaccccctgctgtcttcttcttctcaagaccgtcatcttcatcaatctccaaatatgagttctgctcagccatcaggtacttcaaataattcttcatattatccattttatattctccaaatatggttattaatgatattgttgttaatttgtgtgattattaattgggcagtttcatcttattcccccggacaaggcccatatgtggctccaccaccggctggttaccccaccatggacgcctctgctgctgttgggcaaccccaaaacagagttgaaaccaaatccaagggagatggcttctggaaaggatggtaagaagaagaatcatcttaataaaaacaaatacaaatattatacatctatatttatactgattatatatgctctgtgattgtgcaattgtgctgccatatgttgctgttgtatgttggatgcatgcttctgaggattcaggat

SEQ ID NO: 257361 - DNA, 564 bp, Cannabis indica
gaatttttgcttgactattgaagcttcatttccatttccagctttgtaaatatcttcatgtgagctgaatcgagttgaaccaagctagggttaagctaattgaattgtgacaaatcgtctagaggttagaaatggatcgttagaaacaaacttgaagactaccagctcgtctaaactctcattataataccctactagtttaggcatgtcaccgtacttttctaatttactgtgcactcattttctagtcaaatgatttattgaaaacatgaataattaaaactttttaaataatgaactttaaataaaaaaaatattactaaatacttaaaattacattattctaagatcccaattatgttttacaaacaaaactaaaatatttcttatataaaagtgtctcttgacaactaacaacatcttagcctactatcctgaatacctgaacactccaggcctaaccatcctaatatgtacaatcatcatccgactctagattcactgctgcttagcatttgtcttatccttacctacacatgtaaacatatatgtaagtcgacagac

SEQ ID NO: 257362 - DNA, 525 bp, Cannabis indica
gttgttgtgttatgtttttgttattggaattaccatgtctctaaatttttccttcgtatatattatgcatgtaaactttataaactttatctaatatttcatgaaaaaaaatattttatttataaatttgatagttagggtttcacattctaatattaagtttataatattagggtgtctaattattattattaattaaagtgtcgtttggtaacacttttgtttttaaattttttaatcacaaaaataaaagtaaaatttttgtttttaaaattttgtttttgaaagacaaaaatgtgttctataactacttttattttttaatttttaaaaacaaaaaacaaaaatagtgttctgtaaaatatattttcattttttattggttgtattttatttaagttcggtatccgaggcttggtccgagatcgacactgggggcgggtccaaggtctggggctaggtccagattcagtttccaaagtctaagttggagtcgaaatccataatattgattaaaaaaaaatt

SEQ ID NO: 257363 - DNA, 758 bp, Cannabis indica
gtgatttagggtttgtatgattttattcataggtttattgatgtaagaataaagtacatgattaatgtctattatctgtgagttgatattatatttagggtcgaaaatggtcagatttgaattttgggcaaaaatttaatttttttatcacgtccaatggtggcacgatcgatgtgtaacctactcagaagaacgctacgtaacgtgattacaatatactaatctcgttaatcgcgatttatataagctaagtgattaaaataaatattaaacttattgattaaataaataacatgcaataatacacgctttactttaaaccaaaatgtttaaagttacatatccaagatcgcgtaaaattatttttaaaatattacaaattatttcttacagatcaacctaagcaacaaaatggaatatctatacaatttttcgttagacccaactctcgtggtctagtttggccggaacatgtacaagtcatcttcaaaatcctcgaactcatagctaacccgatattgctttactcttggctgcacaataaagcaccagcgatgccaaggcacaacaagacaaaataataatacattatgagtaattataatatttatatttcatacattacgcctttgcatataaaaattgtgtcaccgcactatatatcacattatatttacatatataaataataatcactataattaatagtctatataagcatagacctatcgtgttacgcctacacgtactacaaatta

SEQ ID NO: 257364 - DNA, 946 bp, Cannabis indica
aaaaaataagaacaggtttatgagacttgatcatgtgggaaagccgattgaatgctcgagggttccccaatcctcgagcattccaacatataaggctcatttttccgggcgggtgtgcccagcatcacccgcctgttcatcatgaggagttgaaggggagccactaacatcaacatcaccagctctggctcgcttaagcatcgagcgcattgacccgcctacattagcttggcaagcttgaaaagtaggccttttaaccccagaagcacatgctaatcctttacctcgcacctgtgaatcaggcaatgaggtttccaccacagagacaggggaggcctggcaagaattaaggatcaaggagggcaaagcttcagcaagagaacgagcagcagaggtcatttcagggtttgcaaaacccggggtatcattaacaacaacagaatcagtatgcaatggaacaatcggagatgaacccgtcacagaaaatcccaaagagtaattgggatttactggagtagggatcatgacattctgggattgataagaaccagtcagaccagtaaccgaagttacactagagttcaacaagggagtaaaactaaatggatagttcagaaaagggttatggaactgatttccatgagaaaaatcagtaagatccatatcagtgatagtgatagctggaggatgaggatattggaaaggagattgcttttcagtaggtttttctttccccctgagagggagatcataagggcaaggaggtggggtaatagattcatcacacttctgaaggtatgcatggcaatacttcctagtatgatcaagtttgccacaataaaggcaataatcaggcagcctttcatatttaaaatccagccatttgataaattccctacccatcttaaagaaacgaacgttaatgcctcgcctaataggcttgttg

SEQ ID NO: 257365 - DNA, 643 bp, Cannabis indica
ctttttcaaattataatgtttagagttgtatatataacgtgcttatggtcatctatcagcattggttacggcatcaaaatatgtcatcatcttagccacaccatatctatgcataacctaattttttttacaaaactattatacaaaataataattttatataattcatttcaattgatattggcaatttttgcatgtttagtaatatgaccacgtttaacagccttaacccaacacccgcccgtctaccagattagactctttttctcaactatagtattacgtacaatctatagttgaagattataatattaataatggccgatacacacagcatgactctatgcacaagaataaaatgtatggtaatgatcagtgacggagtcagaaattcggttcagtgagggcttgaataatttctttttcaaggtcttgaatataaaattgaatgaaataaaaaaatatgttaaatagagtgttacatatgtgcttagaaaaaaaaagagttttttttttttttttttagaatttggtgttaaattttagttgtattacctttaaaatttggcaagaacaaattgagtgagggcttaatacacatttataataaataaaaatttaaatacatgtaacataaattttt

SEQ ID NO: 257366 - DNA, 1145 bp, Cannabis indica
caaaaatggttgcaactctgtacaccatgattataattcgtttaaaaaaaaaatatcataaatagcttcaatctttgtcacaatacttatatttttacttaaacagtaaaagaacatatcaacatattacaagacaaaattaatattctatcaactaacatttacatgcttagtgattttgaactatattgaagagcatgaaaccaacccttcttattaacaacatcaataccaagttgaagtccgtagatgattatgtcatcctcggtaaaattttgttctattaacaatcaaaaatacatttataaaacagataattaaactttttttcttataaaaacagataagtaaactttaaacaaataaaaagacaactaataaaagtatcacttatttcattttaaaaaaaaaaaagaagtttgagacttgtggtcaatattcagttaaaagtgcctataaatttttgcaggaaacaaaaggagcttggagtgtggacggcaatacgggtttttggaagactttatggtggttaaatgttcctccaaaggtcagtaatttcttatggagagttgcatctggtgttcttctgacgtgtttttagcttcaaaaacgtcatgtccctgttaatgctgcctatcctttatgcaatgttgttgtagaagttgggcatcacgccttggtggaatgtgagtttgctacagctgcttggaatcgcagcttggtggatgttgggggcgggtctgcaacatttagcagctaggtgctgcagttatttggcaggggacgtgctagcgagatggaggaagcgactgtggtgagttggactatttggcgtgcacgaaatgattttgtttggcaacaaaagagttgggctgcatcaaatattgttgcatcagcgaaatacatgcttgatcagtataaatgtgctcaaggtagaaagggtctttctttttctccgttgaatgaagggggcgacattctgagcattggaatgcacctatgttacagaagatcaaagttaatattgatggggctttgtttgatcaggacggtcggtttggtgtaggctgcgtagctcgggatcatcatggtaatatgctaaaagctttcactaaagggaaaattggacgtgttcaacctgaaat

SEQ ID NO: 257367 - DNA, 740 bp, Cannabis indica
gtggtaaaacattccctaacagattctttagtaatagaggatgaagttggccaatatttctcacaaagactgttaacgtcttgcttaaaatctaaacacactacaatcaccttcacaatctaaactagttatcaatgcaaactcctcaatgctaaacctaatcctaacaccacgaatcataacccacaattcaacatcattaggctgctgaacctcccgcaacaacaacccatgcaaaacttactgttgaactttgaattcaggaagcttaatgaaatgtccaaaacaggtttttgaaaacattttaagccgttcaagtgaaagacaagacttaatattatctataacctggtatgtagcagtggagacggctttcacaataagcagattcttctgatcatatatgtaatcccattcttgcagcagttcaaacaaaaaacatgaggaaaaaaataaaagactaaaaacatgaggaaaaaaaaaataaaatacaaaatacaaacaaaacaataaacaaaaacagaaatgtactattagaaaaacacaaaaaaaagacacattaggaggattttttttgggtaagtcaaagtcttcaaacttctctgagctcttagcatggacctgaaagagggaaaaacaaaaaaaacataagcaacaaatttgaacaactaaaaaaataaattgcaagcaacaagtaaaagacaaagaaaaaaaaaaacaaccaggaaaaaaccaaaaaa

SEQ ID NO: 257368 - DNA, 1032 bp, Cannabis indica
aatcaatctcatacaacaataattttagcaacccatagagtaaataataattcatcaatctcatactgcaatcatttaagcaacccttacaacaatcatattagaaacccttgtaacaattttatcgcataaaacaaccatattagccactcaagctgaaatatataacaacgatatgttagcaactaaatcatcgacaacaagtatgttaaaacttttatagcaacttaatctcatataacaaccatgttagcaatactaattacaacagctcaatctcatataacaatcatgttagcaaatctcatataacaaccatgttagtaaccctatcatatagaaactttgttagcaatacctaatctcatacaacaactatattgtagcagtaattacaacaatttaatcgcataccaacaactacgttagcaacacttataacaactcaatctcataacaaccatgttagctgcccttatagcaactcatgaatatcatataacaactatgttagcaacccttatagcaacacaatctcataagctatatacccaatctcatacaacaaccatatattagcaactcttacaatagctatgttagtaatctaatcttatacatcaaccatgttagcaacctgatatcatacaacaaccatgtccaatccaatgctatacagcatgtagcacaactcaatttcatacaacaaccacattatcaaaccttaaagcagctcagtctcatacaacaaatatttcttatttgaaattataatcattatacatcatttgattttttaagttataaagttttatttcattctcattttcgaaaatggaataacattgtgaaatactccaaaatatgtactttatcattctctgtatataaataaattattatcttgcctgaaagataaagaatcaaataagagcaaaatgaccaaataaaaaaattaaaagtagccaaaaaatcatgaataataattatatgttatatcacccttcacataaatgcagtattgcatacttg

SEQ ID NO: 257369 - DNA, 1125 bp, Cannabis indica
ttcatagaatagtacatatttatatacaaaactaggagactaaaaaataggaacctactaaatacaagttaccctaattctttaacacctaatatacagctaatattctaacattgaccaatttctggcagtcaagcaagggagtttcatggctaaaaataataaaaatgctatccggctcttagctccatttgacagcatagcaccagaagttcagttaggtacattttttactgggttagtactatcaataatggctgaaataactgtacaacgtccaagaaaagtggatggagtgatgtaaatttccttagaacagtcaagaatcgttcatgaaccaagagaagaagtggtaaatacttccaactcaaaagatattgagaggaaaaggatcccgggagcatctattatgggaagaaccaataacatttagtcagaacaaaaccatggagctgcaaaagtgccacctacatgggaatttcattaaaatcagattttcaacgatagaacttttgaaagaggagaatcaagaactcgttccagacacgagaagcgattaagagaactaaaaatgccaacatttgacatgaacaaaacaataatttggcagcaccatttgagccccagcagagtggaacacaaccaggctttagagagaggtctaatggcacatctcccatagtaggattcaagggaactcaacattcagatgggggatcctttgactgaggagaacaagagactcattttcgtcatgagaatcgccttaagttgaagatgccaacgtttgatggtgataaccccgatgggtggataatgcaagcagaaaggttttttttatttattattgattatgacgaagaagagaagattgaggcaactttcatttccttttctggagacgctttgctttggtatcaatatgagagcaacaagtgtgacatctacagttgggaggagttgaagaaattgttgctccgccatttttgagacaagcaagaagggtcgctgtacgatcagttttaactgttaaataagaggattctgtgttagataataagaagagatttataaggttattggcacctttgtaaagcaagttgatcgagccatacaattgagcac

SEQ ID NO: 257370 - DNA, 965 bp, Cannabis indica
ttatttacaaaaatacttttatatgttctctatttatggttgtttaattaaattagtatatatgatatgttctctgatttatggttgcttaattaagtattgcatatcgaataaattattcctctaaattaaataaagtctcatatttatgcatccacataattatcaataatttaagataattatgtaataattattttttcaacgacttaattttataatatgtaccaatatttattgatttttatttatgatcccaaataattaaacatgacgtatactcatcatttaccaaatggaaaatcattgccctatagctgatgttagcgcattacatccaataagcacaggtgttttcgcttacaacccaatggagaaccgagcaccacgacacttgcaaagatactatagcttcgcacacaagtaagcggtgggaaacattattccaatcaaatcatcaaggacgacaaaatttatagatcatggagggattgaagcaattatgacgttagatcacggagtgtgtgcaaaatacaaaatcggactgaaacatgtattttacaaagcttttggttgttacaaactactagtacctgttataaagatgggtataggaggttgttggttaaaattagttgaaggtggttattcctgttgtaccttctttataatgagagtcatatattactcttattctacctggaaaaccgattacaatgtaaggaaggtatacacataacttaccacctacaactaattataactaacactcactatattcatgcttaagaacagttactaattagtaacaactaagaacactaacaacatgaactactctaaattaaacccatttcaatataatttaatttgttatcaatagaagattagaaatcatatggttacatgtagttttcatgtttatggtttaaagtatacaatttatgttaagtccagaacatata

SEQ ID NO: 257371 - DNA, 598 bp, Cannabis indica
agttcggggggaaaaattactaattagccaaaaaattatatcaattattaagctagtagagaattcatactaaaagattgtaagtatgaacaactcgtaatctttggtgtgcgaccccacaaaaacaaccgtacaaattcagtactaagcaaaagatggataccaccaattaaaatattcaacaatgtgtcctcttcttttacttgtaactaaagatcaaagaaactgatttcaccacatatccatgacgcgtcaacacactaaacaatagcacaacaaccgttccaacaccaatgttcacatcaaaaataatacgagatcaacaaaatgtgggaatgcttaagaataacgcgccaaaaactgaattatacccattggaacaaccagcatagaaagaaggagaaatcgaaatagaagaaagtgacaacaaccaattcgacatagttgactatacaaattttgttgttgaagaaatggtagaaaattggaaaacaatagtaaaaaatagatccaaaggatgacattaacaacgcaaagctcataacagataaattccaccctgaagttgataaagcataggcatacaaagacaaagaaa

SEQ ID NO: 257372 - DNA, 972 bp, Cannabis indica
ttaacattttttatgaatcctttctaattttttttcttataatcttctataataagtaacttaaattatgtttttaaaatacttttttttttaaattaaaaatttatttcaatcctagaaataatttatttattattttatttaataaaaaagacaataaaaaaacacgcatttacttatacaagtgtcttttatttactataaaaaaacaaacttataaatttttgaaattatcaaaatttatatataaatcaacatttaatttgatacacgtgtggagcacgtgtgtctcctactagttgtatattaaataaaaatgaatgtactatttagtactaccattatagctaataactcaataaaaatattactttaaagttttatattatttaataggtgagtaatttaataaaatcataaattttgtattagaccaaaaatgtaaacttaatataactcatttatttagtaaatttagactttcaggaactaacttatatgtatgtggagcaatatattcacacagtgagtaataatttatctccagagtaaatattatatactcacgtgctaatattttatagttaagttagacgtatactatcactacaataaaatttatcaatagtcgcaatattattaaggatggacaaaattcgcccttaatagtggtagcattagcggcagaactagaactcgccgtaattttacttatttattttcttaaaaaaaaatattagtggtagactccgccgctaatagtattagcggagagccccaccgctaataatattaaaaaaattaaaagaataatcgttagaattattagcggcagagcattaacagcggtctcgctgctaataattgtatatatactcaaccccgactttcggtacctatttcactactttgtttttgctcgtaagcttttttagacacagtcaattttgtgagttcaatctatgccattta

SEQ ID NO: 257373 - DNA, 868 bp, Cannabis indica
gtacatgatttctgtaactatcagtaaagtcaaacattcccaatgaatatatcataggtaatgcgtggtgtaatccctaggttctgtagggattttatgagtgcagtccttcatcctttttgactgatgtgattcttcacagagtagccgtcactagactttattgatcgtagcctagtaggtgcagagtgggggttgtgacgtcaggctttattacgtatgacagtttcaatacgcctcctcccatgcggcattaaatgcgagatgaccgttcagatagggtctgacacctcccggaggtgctttcttgtggccttgctctccaggggcatgcgagactgacatgctttctccgggaggcatgtctaaggtaatcttgtgcttaaggagacttagccaatttatacaaacgctaaaccctttccacctacgtgtcatcatccggttggtctacgtattttaagcaaaattaggggcaacaattattattaaagaagtgttatcatcgaccttctattacaatcttttaccgtatctctaatgagagcaacatttataattgccaaaatacacatattatgctaaaattattatttttttattttctctctcatccacatataagatttgtcaattttttcttaaaaaaaaaaaaaaaaaacctactaaatggttgacaactttaaaagttgcccaccaccacatcatattgaattaatgacattttaaataaatattaacttttttaaaataaaaaagggaaaaatgaaaaagatgacatgtggttattgtctatataagagatacatgatcaaatattctcttatgttctctatcaaatattagaattttttaaatcaagtttttt

SEQ ID NO: 257374 - DNA, 2086 bp, Cannabis indica
tatgggcttaaattaataatgggcctctctttatcctttcgaaaattaacatgagatttttacaaaaatactgaagtttgagtaaaacttaacaattttattatcatacggaataataaaacagaacatttcaaacaacagtagaacaactaaaaaataaccataaaataatagtaaaaacttaacacagtacacaatataaaaaatacacaatatttttaaaagaaaaaaatcaccttacagtaaaaaaaagtaaaaaatattagaaatttgaatatgtagtgtaaaaaccccaattaacatgagatttttacataaatatctaaaatctatttttttttacatctttacataaagcaacataaaaagaataggtaaaaataataggtagtatttttgtaaaaacaatgaatacataaaaagttggagaaaactgctgatctgtcctttttggaaatcttttgtcatttttggaaatttatttatgaaaacaccccaattaacaattagttcttcttcttctggtatttttttttttttttttaaaaaaagggaaagttttattcaatttgaaattatatcatcccttacaataaaaagcaaatttgatggagcaaaaaactaatcaaacatacaatctgacataaaacaggattaccttgcaatgcaatgacagccctattagcagaccgtttaacaaaagaaataaaatattttgtaactcagacagtaacaaacgacaatcttgaacaagtaacccaaattgagatggcatttgaactgagccattaatagcctgaacaacgactaaagaatcagtttcaacttccacatccgttacttgcttcgtctttatccaactcaaggcctctttcatacccacaacttcagcaatcttaggagaaaccgcaccaatcctactgcctgaaaccgcttgaacaagcttaccatgcttgtctctaacaacgaagccaaaaccaaaccgattctcagcttcaaataggaccccgtcgacattgatcttgaactttgtaaaagttggtttcgtcgagtgctctcttccattaccaacattaacatttagtaatggaatggatccatttgattgagcattttgccaattgtcaagattagtcttagccgaccgaatcacctcaaaaactttggtcgatttattactccataacagatcattgcgtgctgtccaaatacgccacaaaatcattgcaacctcctctgctacaaccttactggcgtgcaccagaatgttacaaaaccagctaagaaactctccttaatcaatactaacaaattatattaaattcaggacataccccttacccaaccattcttacaaattcttaacacattctacaatttatttttttcattttagacaatttagaaaccttaacaaataaaactacttgtcttaatattctcttggacaagtagattaatagaatgatgtgacacacatttattttcaaaatacagataaagtttctattcaaaccactatgccatatgtagcatcaaccatatgccatatgtagcatcagccattgctgtttagaagacattattcaaaaggttcttgggtttcttgtaattcaaccactcaatccattctagacattaggccataacatgcttcctaaccattgtcgatgaggcgcatatcgcatattttttaataagaacccaattttggaattatttcaaaaatatataaaaataacaaacaaaaaaatatataaatgcaacggtgtgaaattttaaatattttataatttttaagatttatttacataaaatatgattttttgatatatttttatgttgtactcttgttattttgttgtaatttttttatatgtatatttttaatgttgtttgatgttattttcatataactttttttttgttttatattttttttttttgtaaataccgtaaaaatttaaacgtaaaatggtaaattctttataaaaaataataatttatgtaatttttttttaatttttactaaggaccataaaatctcagctactcacctagtaacatgtgagtaagtgaaataata

SEQ ID NO: 257375 - DNA, 1817 bp, Cannabis indica
gaaaacaatatttaaacaatatatttcacgcgtgtataaaataaaatagtcacacgtacaatacacagtttgaaccttatttcggtgtgttaaattttttaaatttcttaaaattttgcaggatgtcttcaataagtataacgtacatgactataagaaaaaatttgactaaaacattatttcagatattgttaggctatttgtaacctaagttttagatcattttttagagtttattttttttttctttgtagttactttttctaacgctttacgctttgttttttttttttattttaaaattcccatagattaagagacgagagacgagagacgagttgaaaattcaaagaaaattttagttgaaattcctgaagctcgtcgcggcgagcccttatctagtcacgactaatttttgctagtgagaatacattatggtcgcggtgagatcattaacaaaaacgttgaattttgacttatcacagtcgtcgcgaccaggctatatatgtggtcgatcgcggcgaggtgttccgtatgggatgaaggataattttgtaattttactattttaaagtgtaaaaaactgattgttgtaagagggtttcgaatttttaagtcaattattcagaaagagaaccctaaaaacaaaaagaagaagacttaggaagcgagtgtggcgatccgatcgagttcacatttaattgattttatttctaatttgttaatgtgtatttgttttttttgtttttttttttttttgctttttagatctttgtgatttgttcatatttgtgttaatacatgttcttggctacctttaacatgatttatgatcctaatataaaatttgaaaagtgaatattataaatgctctaattgaacaaatataaattttgatgtgaaacgagaatattcacatagcttgtgtgatcttttagattattactcaatacaaattatatgttattctatctcaaagatgcaataaatgatatataatttaagactttaatgatctgaaaagaattaaagttatttttataatatgtcatcacttaaagaaagaagattaataaatagcattaacaattaagtaattgaaacaacttgattcatacccttaatcttttatccatatttaaataacgttaatcgcttttttttttaaaatttttgacaattaatcaaataaaaatataagtccaatttaatagtattcaatttcaattgtatatagttcaacttaatatgtatacttgaaacgtatatattggttagtttataatttttataaaataccaaaatagataaaagtgcattactatattataaaattttcttatatataagttatttcttgttgatttcgttttcatacataaatgttccactttagaaaagtgaaaaaaaaaatgtaccaaaaaataggaatatgagatcgatatcaaacaataaatatatatgtgtatatatatatatatatatatatatattatactagtaaaaagttacgtgcgaggcacgtataccaaaatttatgctaaggtattttttattatattaaaaggtaatacacttaaaaatgtttatctcatcttggttcaacccaaatttatgttgttcccataggattgtgtgttagatatgagcttagaagaatagtattcgttagaataggtgctagcaatggcggtgctgatgtgagttttatcttttgggaaaaaatctagctactccgacattacaattacacctagcctttcaaaatgagcatcatcaaaaattcaaggattataaattgaaaaggatatcttgtt

SEQ ID NO: 257376 - DNA, 924 bp, Cannabis indica
ttttttttgcggtgcggtgcggtgcgggcggtttgagcggtttgatgtacacccctagaacagagtaatcacaaccataaacgattaaagttataaaacaataaaatcaacatcaagatatatattggttcaaatcttttagatcgatgtgatttacggctctactccagttctaaaataccaccgaaattgtctttattaattgagcaagaacatggtacaattactgtcaagattgattctctgtttggaatttctcaaagtgtttatctttaacactcttacccaagaatcttcttcatctaaagaagattcttcataaaaatcccaaatccaatctctctcttttctctgtacctctcaatctcaatcttcaacttcgaagtcacctctcaaaattcatcctcaccaaaatgataagtggtgatatttatagattaggtgtaataccctgaatttaataaatggattagcaaaaccctaattagatgattataaataattgagaaattatattataatatagttcaatatatgagaatttatttgattaattatatgataagaccccgttggtgagccatgggtattttagtaattatgacccaagaaggctaaaatgatgaaattaatttaattacgtgcttatgagactatattattattatatagtatgcctgtgttgtctttttcagattggcgcggtatagtcacaatcaggtatttcgggccgaaccgggttcggggcctaaatatattttggaattttatattggcattttattgatatttgaatattttaaaaattatttggataatgtggtgtgtgattaatgacattttttgcccttagattgtgtatatgctatgttatggccctaaggacattttagtcattttggcatttgacttattttgcaacaa

SEQ ID NO: 257377 - DNA, 654 bp, Cannabis indica
ttttttttttttaatttaagcgtctatctaatagattgtagactcgaactcaagacttccaatacacatgcaccctcctattaccacttgagctagcctcaagtagttgtgtatccgtaatttaatagttaatatttgaattttgagattttatattttgttaccgagagaatttttttacaaataaataaattacacaaagaattatactttttttcacatttacatttttttttttggctttttcatctttacacttaaaataattttattttgcatttttacggttatattgcaactagcagtgcaacctaaattgcaataaaaaattgtacagaaacccgtattgcaactagtgctgcaactactttagaaactcttttctaaaaccgtaaatttaaaaaaaaaatatatgaggtaattcttttttttttccattttaaagttattttatattttttaattataattttaggtgtcctttagaaataatatgaaaacaaaccagaaatattaacaaatataagtattttaagaatccttacaaaataaataaataagtatagtttaattacttgccttcatgaaaattgcatcagctgtggggacagaacggaacatatcacctcctaacatgggaaacaccggagtacg

SEQ ID NO: 257378 - DNA, 752 bp, Cannabis indica
tgcacaaagctaataataaacacctttatgtgaactacagttgttgtaattgttgtataaaaatattgagattgtaatttctataagaaccaaaacaaaaaggcactaatacattgtgggagaagtccccaatatttagacatccgaattttcgctcaaagcaaattatatgttaaccttttgttttaacaaactgattgctattttatatgtaatccttatgtaaccttttgttttagcaagtaacgacccatcaatcaaactgaaatttgaaccacaatttcagatagaaacttttcaacacaaaaataagaaccaaaaataaaataaaatagcaatggtgggtaaaagagttcttatactaactccataaaagaagaaaaaaaaactcatcttaaactaatcctgcaaaattttaatagccgctctctgtctctcttctctcactctattatcaaaagactcaaggtcttttttatatgctgttgtattatttttcttatccaatggtataatatattgttatctgcaaaattctcttcgtgattataatttcacactctatgtacaggaaaaaaaaatgaacaaaactcaccaattgtctagcattattaggcaaaaaaaaaaaagagtcaagaatcataaatcattgcctaacaaaaacctataaacgaaatagtgaacatgatcaattttccagccatttggtgttttgttatttggcaaagccttcttcaatccctaatatatat

SEQ ID NO: 257379 - DNA, 728 bp, Cannabis indica
tagggaattattgattagttagattgtaaaaatggataattcatagcatattttatatttggtatgtagaggatattatttaattaggagtggaatattgaatgtatagtagagtcaaaaggaattaataagttaagaaatttacttggtaaattttttatctacttattaggagcttgattacataggcccatggtccccacaataattgggatagtattattttgtaatctcaattaattttgagaagaaagagaatagggatttatttgtatattagtacactttagtgtgtctaattaataaatataataaaattgtatttatttcataattattaaaataaaattagtatttaaataattagatgacaaaagtgctaaaattagaaaagacacttttgtttcattagttaaaataaaacggcaaaaatctaactctaaagcccatatgtatattcaacgctaagagtaagattcaacccaagtctttattccaagtctatctcatctaatcctaaccctaagtgaagactataaatagaaagaggagtgaactttgtcagatgatgatattttaagctataaaaccctaaaaaggtcacttcttcttctcttttattttttaaaattcagagactattttctcttggatgtcgtcatgaaatttcgtgctcctttgtaatgaccgcatttataatatgacttagtaaagacaattaacactaa

SEQ ID NO: 257380 - DNA, 659 bp, Cannabis indica
aatatactaaacttaatctaaaattcaaactaaaaataacctaacacattgttccttatatagatgcataccatgtctagaagacatatgagcatctttggcgttagtcattaagaagcactcaagcaccttatcaacgtaagctgctttcaatagagtaagtgatatgttcttccagtctctattaatttatatcctaagaacataactagcttcacccaagtctttcatctaaaactgggtgttcaactattcctttacatcagtcatcttcttgacattgtttccaatgaccaagatgtcatccataataaggaccaagaaaactaccacttgattttccttgagctggtatacacaaggttcatcatcattttggtgaaagttgtaggtccctatgatttagtcaaaacttttgttctaagaacgagaagcctgcttaagtccataaatagacttgtttagcttggagactttcccttcttgtcctagaatcttgtagccttctggttgctccatatgatggttccatcaagaattccgttaagggaagctgtcttgccatccattttccaaatctcataattgagaacagtggctatggaaaaaaagtatcctaatgaatttgagcatggcgattggatcaaaagtatcctcat

SEQ ID NO: 257381 - DNA, 749 bp, Cannabis indica
tatttttactgaaatatttttgtaaataaaaaggttcacatcgtaaaaaattttaaaaattctatgttagtattttcttataattttttctaaattttttagtttattatgtaatatgctcaataaatttttaggcatcaatgccaactacaaagatacaaaattgtttttatccctcttctacctcttctcatttgtgtctacacaatcactttttgggccattatgcattacagatactcttaaaatgtttttttttaaaatactatatctaataatataataatgtttttttaaatagtaaatttaattttgtgtacatatcattatttaattaaaatttacatcaatttcaattttggggtatttatgaaatattttttataaaaatgggccaaggtgtggatcttgggcctaggcccattcgcccccctccccacgcagccctcagttctacccaaaacaaatatacaattaaatatcaatattttatttttatttttttggataattacataataaaaaaaattacaattttacgtttaaagaattttttttttacatttttacagttttcatagaaacaacatgaaaataacaagaaaactacataaaagtagcatgaaaatgacatttaaataacatcaaaataacaacaaaaaataacatgcagataacaaaaaatcaacaacaaattaacaagagtacaacataaaaagacagtattttttgtaaataaaatcaaaaaa

SEQ ID NO: 257382 - DNA, 860 bp, Cannabis indica
tttttttttaattggtaaaatgtatttgtgttatatttttaattttttaaaaaactatttatgtggaccaataaaatgtgctacgcgtatactgtgtctacgtagacagtccaacttgacagttaacagctaaaaatagatggaaatgatgaattactaacaaaacgtgagtttaggacattttattgccaaaaagagagatgtaaaagtaaattgatagcaaggtgaaacttttagggattttgccgtaattagctaaaaaaacaaaaaatattcgaaagagtttgtatagtacatgttaatccgaaaactttccatggtgatgtggacatcaatttttgacacatggcatgaaggatgacatcacggagtcgagtaaacttgagtcatagcggtcaacctgggaggggatgttggaaatattttaccaggatctagatttactaccaagtatgtttgattaacatcctaatatgaattctaaaacaataaaaataaacacataagagtttaagaaaccttacagtgggtgcagcggaatattatgactccttccatttagatctctagcccttgattcctttctgtagcagagcataatcaagatctgaatctggatctctttctctccttcttattggtgctgatttttcatagtcttacatactatgattgaggtaccacttgatgtgtgtgggcactactcattcactcaaggaatttcgaaaaacagagaagaaagagagaggaaggtggtggctcaggaattcactctgaaaagaatgagatacaaatggtcttagaaacctgaagcctttaccttctattgatagaataccacacagggttaaggttgaatt

SEQ ID NO: 257383 - DNA, 1038 bp, Cannabis indica
atgttgctctgcatagttggaatgaaaagtcctggtgtcattatcagtacttgatctctattttctggaatgtggtttagtaccacaacttaatggaaaaaatatgagaaatcagattgaattgaatgtgctttctagtaccatgctctatctgggaagagacgctagaaagttcactggaaactctgctttggactaaagagattcatttatgtctttggtgagtttctttttttttttttattaattgacttattgaccttttagttttcttctaaatcttacatcttaagcactgccatcaacttctctactactttttattttattcatcaaaataccttataaaaaatgtacaattttatatacctggaattttctatattttcttttacaaatttgaaaatattatatcttaaactgaattaatttgtgcttcataaggtgttgtccaacccaatttatatatacatatataaatatatatattatatatatatatatgaggtacattaaatatgtaaccattaatggttacatatatttagtcatcaaattacgattgaatgattgtgattattttgaaaattagataaaaataaataataattaatttatactttaatagttacctaataatttatttccttataaaactttaatgaagataaattatatttttttaaaaggaaaatcaaaatttattaaccttcaaatttagtcactaatataggcaacaactcagtttgaaagtagggtaaaataaagaacgctcttgcaaactcatgaacgactctattagctgaccgcttaataaaacactcaatttatcgttctgttaattgatcaataaagtgtcacatgtgaatattatattgactaaactaataatcttttaaaaaaaataattttaaaaaataaaaaataaattaaaataaattacatatattaaaaaaaaacaactatatacatatacatgaaataaaaattaaattttacctatcttcttcctagccatctaatctttactagattaac

SEQ ID NO: 257384 - DNA, 888 bp, Cannabis indica
aaagaaaaagaaagaaaagagttcattaccatgtacgtgtgtaaaaagaatagttgaaaaaaattggtattaatgaagagtattttttgtaaataatttgaaatacttgtattttgatgtaattttctctaaaattaagataatgcttggttgggaggaataaaaatataaatttaagaatgaaaataacaataagaatagaataaaatttaaatgcataaaaaaattgacaaaaatatttttaaactttttctcatcatacattggaatacctttcattccatttcaaaatagaatagtcattccaacaaaatggtagaaagactattctattagaatgatatttcaatattttaatatacaaccaaacaaaaaatgtaatgaagattgtttcatttttattttattctattttattatctccaactaaacgttacctaagggtactgtcaacaacaaaaatttacaatttagttggttgtgatgtatgacacattacacaataatatgagttcaattctcatacataacccccatatattttgagagttgacccttcttaccattgatccgtatggcttattaaagtatttctaatagtaaaaattaaaaaatacttactgaggtgaatattttaagtagtaaaatattgagattctatattaatagagagataaatgtcattctaaaaatttatatagatataaaaaaaaaaaatgaaaacaaaaaaaaattaaaaaagaaaaacatgcaataaatatatacttattgtattttattagctctaatcgtctaatttaatggaacaattattaagatattaattataaaattatatatacgacaaaatatacgaagcaaaagtaaaacggcaccgttttaatattt

SEQ ID NO: 257385 - DNA, 1233 bp, Cannabis indica
atcctttaatgatacctctagagaaagatggaggattcgagagtttaccacctccaacaataccctcttggctaacagatgaagtcctcggctgctataccaagctgttcaggaagagtggctttactggaggattgagctattatcgagctttggacatgtaagtaaccatttaatattctaatttatatatatatatataagcattgagtaacatccaaattatatctatattcactgtatgcagatcatggaagctcctgttaccttggaaagatgcaaaagtcaaagttccagcaaagttcatagctggggcgaatgaccatccactacattttgaaggcatgaaagattacatatttattaatggtggcttcaaaaaagatgtgccctcacttgaagaagtggttataattcaagatgtgcctcactttgccaaccaagctaaaccagatgagattagtggacatatttatgaatttttcaagaaatactaatcgatggtttatgtatttaccttcgattatgtattttctgggttgttcccttaattgttctctcttctagctaccattgtttttgttcttgttttgtaatgtttaattgttcttgttgtatgctgtttttcttgcggtgtttttttgtttcaataagttcagccttaattatggcttcaataataaatgtgaactttcttttacgctcaacttcattggattgggttgggcacgctcgatcgaggttaatctatccaaatattccattaatgatgttggattttgaatctacaatgatttttctttttattttaacattttctttaatttgtattgaaaattatcctaaattatttgcttacaatatacataaatattagagaaatttgtgttgagggatgaaattttaaaattaatctcataaataccatttttctttttatttaagccatataataccgttgtattttaattttttttaaaggctaattagaaattattttccccaaattttgacatgtaccaaatcatgctccttgaatttttttcgccgttaaaaatttctcttaaactattgagattgttagatttaattaaggacttttatctaatttcattcaattttactatttcaatgattgtttatgtactaaactatgtttcccagactttgatatctaccaaatcatgcccctcaaacctttgatatgtactaaatcatgtctcctgaactttc

SEQ ID NO: 257386 - DNA, 742 bp, Cannabis indica
gccaaaaaaggactttacagcatttctgtttattaaattatttcaatttgttttttaaattgtagattgcataagacgatatctttttagtgagagtgattcgtctccggtaagtaatttatcttgctacaacgatgaaaatatttattttctttatagaaaagaattataataatattttgttgaaataaattaagtgtattgcactcaatagattcttacgtgttcactatagtatggctagttgagtagtgtgcactcaattttgctatatttttcttaaaccttatagaatttctatatttttagtcacactttttaggttatattagaaaagcaatacaaataatattacacatgcctttgaaaatatgcagattggtcttggggattagtttagcttatacatcaatgctattttattttttattgaaattaattgaattggtaattaatgatcatgtagtgagtgatagatctatatgtgagtacaattaataatacaatacaatttcctcttagtacaatacaatacatatttatattaatatattgcatttgagagttgatacttgttaacagattatgtatttatttgtaggttttgggttctttgtgttgattgaagattgcgcaattgtaactctatctattggagaaaggtgtaatctctaaaaactttataattctttgtttagtggagtttgaatatgttagatattcatccgtagtgaagtaggtt

SEQ ID NO: 257387 - DNA, 643 bp, Cannabis indica
aaataattgaagtattggaattgaattaaaaaaaatagtaaatttgttgtggcttacgacacgcatcactctcacctgagtaacattgtaatgccactaactctatttctcattgttatacagattatgtttcctgcttattacccccgacggctccggtgggttctccggcttggacacctccgcctgaagattggatcaaagtcaattgtaatgtcaaggttggtggagattccatgtgtatggcggctctggctagggatcactctggaagtgttgtgtgggttgctgttaacacgctctacttcagagatcctctgattggtgaggcggcggcgtgtcgtcttgctttggactcgactagactcaagaaccacaactatgtcttggtggggagtgattttgaaatagttatcaaaacacttaaaggactactccactctagttggaatattgataattatgtctctttatgtaatcaactctcgaaaaaaaatttatcttgtaatttttagtttatttctcgttcatgtaattttgctgcccataatgtggttaattgggcgttcgcccagattatctcaagttttgtggagccctcttcaatacatgatactatcatttataatgaccgtgaggtcta

SEQ ID NO: 257388 - DNA, 809 bp, Cannabis indica
tttgtttcctaaaaaaaaaaaaaaattaagataccacattgatagaagaagacaaaggtgattttctagctacctattagtgacacatattctagcttaggattaactgaaaaataaaacaaaaataagttttccttaaatgtcatcaagactcttaaccaaaacatacaagatttaattcaagaaacgcaatctcacatagattatttgagaaaattggcactctcatgtattgggtttcaattaataaaaggtcgcacgtaatgtggaaaatttaccgctacgattggtggtattaatattcatgaagattttaatcatagaagaagaaatttctcagcaaattattaaacaatatgtaagtaatatagttgatgatgaatagctaatatgtaaagattatgttttaattttcaccaagtgaaaaatctctaataaaccacaaaactaacatgttctcaagaacgaatgaacaacttaaaggacaatgaaaatgcactgccgaatatataaatatgacactctttcaaaagtatacactactcctcatggagctcgaaacatagctatcgtacatactcttgtcatatctatactttactctccttcactcagaattggaacgatgagtggtttcatctcctccttcactaagtcattgtttattctatgagtcgtctagagagcccctttgatccaaaaaagaagagaaatccaagtacttagtaaaatctagattgggaaaagaatgtgtgaagaaatgagaggacttgttgtgagttaaagtaacaaacaatgcaatagtaggc

SEQ ID NO: 257389 - DNA, 599 bp, Cannabis indica
agattttgagtttaaatgtctagcttaggtttaaacttggaaattgagaaatatgatgaattgcaataaattggtgcttgaaatatgttttatttgtgatagtattctgttcaggaaaggattacaggttgagtttgtagttgtagttgagttgagtgagttagagtttaagaactcaaaactcactcaacaatggtgaagttgtgattttaagttaattgttggttttgagttttgagatatgttgtatgcatgttattgaactattctgtgaagtttgggaacaattggttaggtttggagcaagttttgagactttgaagatctgaaattttcgagtttctggtgtggtgaaccggaattccggatggtccagggctgcaccaaccggaattccggatggtcaattttcaggaatcgccgattttcgtattttagccataacttttcactcgggtgtccgttttagacgttctagataccgttttgaagcttaagaagagctttatagtgtgagaaatatattagagccaaaatatgtattttattctagggtgttttcaccataagatttgatagaaaaccctaagttattttat

SEQ ID NO: 257390 - DNA, 1752 bp, Cannabis indica
aacattttctaaccagtatttcataaaaactcagtgtaaaaaaatatgccattagagatcaaagcattgaactcaaagctcaaacttgcacaaaatctaattcaaacatcaaagctcaaacatttctaaccctaacagcccctatatctcaaaatcacaaactaaaaccaaatcaaagctttgaaacaaagaaccaattatctagggtttacctcaacttgagtctcacttgaatccctagctgaaaatccagaaaaccagctgaatagaggtgatctcctctagtttttgctatggctgaacaagggagagagagaaagaaagatggttttaaacttataaataattataaaaatgtcagaaattagttcttatagcctttactaatcaaaaatactacagcggtcattacataccaatatcgcacaagccgcagaggatacaattgaggtaccaatcgatccttctgatcataatgaagttttgaaaattggttctaaactaacctttcaacaacaagaaaagcttgtcacttttctcaaaccaaatttagatgtatttgcatggaaacactcagacatgatcggaatatcaccgcaggtcatgtgtcattgattgaacattgaccccaaagtgcaaggtttcttacaaaagcaccgcaaaatggacctcgtgaggtaccaagcgcttaaagaggaagtggatcaccttttgacatgttgcttcataagggagtcattctacccaaactggttagcaaatctcgtactagtgcccaagccaaatggctcatggcgcacatgcatcaatttcattgatttaaacaaagcatgtcctaaggaaaattttcttttacctagcattgacaaacttgttgatgctaccgcaagtcatgagcttcgtagcttcatggatgtatatttgggatacaaccagattctgatgtatgagccagactaggagcatacctctttcattacagatcgaggtttgtattgttataaggtaatgccctttggtttgataaacgcaggagtgacgtatcagaggcttgtgaacatgatgtttgcagatttaattggcgaggcgatagagatgtatgttgatgatatgcttgtaaattctcaacatgcgtaggaccatgtcactcaccttgaggccatgttcaaaatcttacaacaatacaaaatgtgactcaaccccctcaaatgtgtttttggagtgggctcaggaaaattcctcagctttatggtaaatcaacgaggaattaaagctaatcctgcaaaaataaaagccttggtggagatgcgatctcctaccaaactgaagaagtccaagccttacaggtatagtcgctgcattaaatcgctttatatcacgttcctctgataaatgtaaagagttttttcaaattctaaaaggaaataaaaagtttcaatggacgaaaaagtgtgaagaagcttttcaggccctaaaagcgcacttggggcaacccccgatactatctaagtcgatgcctgtagaagttttatcaatctacctcacagtgtctaaatatgtaattagttcagtactaatccgcgaagactaaggtaggcaatatccaatatactatgtgaccaagcgtctcttagacgctgagacccattacccataaatggaacggctagcatttgcactggtgatcgcttcaagaaagttgcgaccttattttcaagcacatagtattgaggttttaacaaactatccctt

SEQ ID NO: 257391 - DNA, 756 bp, Cannabis indica
gactcacaatggtcaaaaggtaataagaaagttgtgtttgtatgctaagaaaattgtcctttcacttaacacaatatttaattgaccaaaataattagtgggaatggagaatttaacaccaaatcgaccaaaaattaatagataatatatatggtgtatgatttcatagtgggtgtcaaatacaatagaagcttctaataagagaattgctaggactcattattagtggctagcacgtttttcggtatcatactgttatagtgtaattgagtatcatgtcttatataatttttaaaaaataactttaaaaaatatcgctaaccaattataaagcaccacttataaaaaaaacgttaaacacaccagtacctaatatgctcaatagtagatgtgaaatacaatagaagcttctaataatatatgtaaagtaagaagcttctccttcaaaaaaaaaatagaaagaagataaaaattaatcctaattcaatactatattaataatggtgacaacatgtcaatcacatttgaactaaatcacaatattcacgtttccaatcatataatttagactacaaaagaaagactttgactctttttttttaattgaaatattcaactattatgtagggacttttagtgaaaaaaaaagaggcaaacttgaggttttttttgttatattattttatataatataatatttagattaaataattaagttgtaaatagttaagtgtgacaaagtattaattttgtcaa

SEQ ID NO: 257392 - DNA, 1592 bp, Cannabis indica
attactatgtcatcgacatagactaaaagtgcaaggaaacttgtggaagattttttgatgaaaagagagtgatcataggccgattggtgaaatccatgttcaagcaaggtggtgcttaattttgcaaaccattgccgagaagcctgtttgagaccataaagacttttatgtaggagacaaacatgatttggaggtaactccccctcatggacataacctttagggagtgtcatgtaaactttttcattgagttccccatgaagaaaggcattatctatctccatttggtgaagggtccagttgttaatggcagccaaggctaagaaaagcttaagggtgttgaattttgcaactgctgaaaaagtgagttgttgttattgggtttttttatgttgtataatagttgtttaattgttttatttgcctttttggaaaatagtgattacggagcatttgtggctgcttttgcaaagttcttcattcatgggaaagatgtccctactgacattaacattaaagtttaccgcactcgtcttgctgccctcttgttttcatatggtcaaagaaaaaatgatgaaagtattgatagtgaggatgagaagcagagcaagtcttccaagccttctaaagggaaaaagtatggtcattttatgggaaactttgttgtgcttggttgattttcatattttaacggattatactttttactattttttatatttttccaattttatgctcgtctttaatttctgcatgacttattgttatcatttcatttcagaaaatatttggtcttttaatgtttttaggtactttatacgtttgatgttatgtaactggttatcaacttataggatatttgaaattaaccattatattatgtttattcttttttatgttttaacagcaactgtgttataattttataattaatattttttgtatatttttaggcgtacaactttaaaaaaaattattatgcaactgtgtaaaaactaatttagtagcaaaaatatttgtcaatttatttcaaacatcttaactcaatagattaccaactgttatgcaacttttttgtactttttattatacaacttataaaaaactcatatccgacttttgaaaaccatttcttttgaaattaataaattcttcataagtaccataactgtccagaaactattttgcaactatgaaaaaactatttcaactttgctaagtaatagcaatctactaaaactaacatttcatgttgtcaaaattctcatagaaatttaaacaattcaaataattctactgtatctatttaattgcttgatcgttgcatgtctttcagttgtgaccatgttgaccacatttgctgcacctattctatttttttgtatcccaatcagcttaaatcttcttttccttggtcttccagattttattttctagtttggtggcagaacaaggataacttttatgttttgtggtacatcccatgttgtgtgattgtgtataggatatattgacacgttgtatgttttaagtcatgttcttgtcatgtaataatgtgaacaataattgtaaatatttaagttcatctcttt

SEQ ID NO: 257393 - DNA, 665 bp, Cannabis indica
ggaataaaccatattttctcttggaaatttcaaaaccaagaaaatattgcactggtccaagagttttgagtttaaacttctaatgtaaagaattttgtagctgatgtaaagcaacaacattaggtccaacgatgataatatcgtcgacataacgagtaaagctatgaatttgtagtctatgccacgagtaaagagagtataatcagctagtgattgcttgaatttttcttgaaacaaggcatccaaaagcttcttgtaccattgtttggaggattaatgaagtttatacataaatttgtgaagtttacattctaggttcgaatctatagaagaaggagaatctaaagttagtcctagtggtaattgcatatagacctcttcattgaggttcccatttaaaaaggcattggtaatgtttattcgtaacttatgtcactattttattgtggaaataacaagaagtaatttcaaggtgaccattttggccactggacaaaaagtgtcaaaaaacaagtccttcttgttgtgtgtatccatgagccacaattcgagctttgtatctttgaacagatccatcactggtaaacttgattttgtacacccaacgactgcctattgctctttttcctggtgggagaggtacaatatgttggaaattattttac

SEQ ID NO: 257394 - DNA, 661 bp, Cannabis indica
aacattaagacatgagttatataattagttatttttttatgttatttaataaataatattatttttattaagagttatttataaaaataaatataataatattttaaatttattgttaattataattttaatttaattataatattttaattttatagtattttttttttttgaaatgttatacactttttttttaacagaattataagaaaaatatattttaaaaaaaattataaaaaaatataatgaacgtttaatataatataaaataaaaaaaatatgtataataaaattaaatttaaattataatatttactttaattttataatcacatttaatataacataaatatttttttttcaaattttttgtactttgtggaggtgggcatgtcatctttcatactttgatgttgaaaattgaaatacgaaagatattatagattattgaatttttaatattttatttatttaatatttgtagaactaattattataatcaaatatacttaggtggcatttgattaagagaaataaaaatataaaaataagaataaaaatagaaataaaaataggaataaaatttaaaatgtataaaaaaattgataaaaaaatcattttctattattacattagactggtctttccttcatttttaaaa

SEQ ID NO: 257395 - DNA, 1465 bp, Cannabis indica
ccactgaagctgaatatatggctactacagaagccataaggaagcaatttggctcaaggtaatgtcatctgaaatggaaataaactctgaagatatcactgttttctgtgacaatcaaagtgctttgcatctcatgaaaaatcccatgtttcatgagaggtcaaagcacattgatataaaactacatttcattcgagatataatcagttctaagcaagttcaagtcaagaaaattggtacaaatgacaacccagcagacatcttcacaaagagcactactggtgacaagtttagacattgtctaaacttactctgaatcaactaaagccatgtctcctattggagacaacctatattggaattagaaagcagtcttcctattggattttttttagaggtattcaagtgatcaaaccaggtggaattgttgaggtttgacctcttgaagttggagttattgtcagttttgacagttagcaactttctctaactaacttaactgttttgacagttaaggttagttagttgctaaccgtatatatacattaaaggcctcttatctttagttgaggttttagacagaaaatcagagggttgagagagattgagagagtgaaattgagagctgtaattgacctctcttgtgtttgagagagagtcactcgattgacactttgtaaggagcaagactccatttgtttcaagggttttaatccctggttttgtacctctgttcagattaataaaactcatcaccacagccatgattaaggctgctttctcccgtggattaagctcatgatcaccttgattatgtagcccaaccacgtaagttctatgtgttcttttactgctttctttaagttgttcactggttttaagttggtggtttatggtttgattgtgttcctgatcattgtgtgtttattttggtgttgtgttggttcttgttgggagttcaagcctccacagctgataactactcgatgccatggagacccgaacgaactcagaccaagaaccagtaactaacgccagaaaccaataagccaaaaccaaagagagaaactatagaaccatgtcaaaagacaagacgaataagagaaactaaaaaaccatgtcaaaagacaagactaatggaaaaacttaattagtttcaatacataaaactaaaaattctaatcccataaaacattaattggaaataacctaaaacagcaaataaataaaataagcaatagaaacaaaaactaaaaagagtaatctttcctttaaacaaatgatctaaaaccaactaataaattcatccaccacgttgaagaacacgacaacaaccctagcaccgccgtcgttgacgactgtgagaaagaagatccgtctctgccgtcaactacgattgggaaggaaggcacgtctctgccgtcagctacgattgggaacgaggaacttacaccatctctgccat

SEQ ID NO: 257396 - DNA, 945 bp, Cannabis indica
cagatgaagcttgtaaatctttgtgtgttttacttctttattctcaattcaagtctaaaattcatatgttgaaatcaatcaacctaaagataatcaacttggtaatctggatcattaaaatcaacaagttgtactttcagactatatgttttagacttaccagattttgtatatattaaaccataaacatgaaaactacatgtaaacataaatgacttctaatctttcattgataacaaatctgattagattgaaatgagttttatttaaggcataaaatcccaacaagaagttgatcattcacgatctatgattccaactctagattaacagccactgcatcttcacctgaagatacattaaagggcaagaaattgattggcttcacccttgcaccattaagatacccatccaattgatgaccacgaactatcgttgaaactattattttccatagcgtaagttgatcctgtccaatttcaaagcaaaggattgcattagagtactacctacatgaggttcaatgacacttgttgctggagttgagatttgagaaatgccactgggcatgcgtcttgatgtcgagccttgttcgccatgcacaggagtttgttcagccatttcactcaaatagatacaccactagtgttgacaataactttgataccaagtttgaaaactagagaaaaacaaagagcaaaagaaatgaagaagaaaggaatgaaatctcaactcaacaaaaacattggctaaatgattgtatttatattgacttatcctctgtataaaataatgacctagacccttttacacaattacaaaataattacattaagaaatattctaacaagaattgttatgcattgggaccacaccattcgattatgacagctcataacttctagaactagtggatatttttatttcttcacataaacaattaga

SEQ ID NO: 257397 - DNA, 1121 bp, Cannabis indica
gcatcaatgacaaataaaatttcctaaacaaataaaaacattaaatatgggatttgaaaacctaattacatatatatggcatatcaaataccataaaaagacctaaaaataaaaaaataccatataaattggtcaaacttaaatgtgccatatttatcataagaacttttaaaatcccatagtaggtgtaatttcctctactaaatttgtatttaaataaaactttacatttatattagcgattatttcacaaatacataaaaacaacaacaacaaaattacaaaaatacgattgtagcgaattttatatttttacgatttttgtgattttatttatagaaaatatagtcttttatgttgtaatcttgttaatttgttgttgatttcttgttatatgtatgctattttttgttgttattttgatgttatttggatgttattttcctgttgcttttatgtagtttttttgttgtttttgttgagttttataccctaataaaactcatttcaatataatcagattgactaattaataaaagatcagaaattgcttttatgttgcatggttcacatgatttatttcatgattatgtttaatgtataaattctattaaatccaaaacatatacaaatatatattttttcattattatagtgtcatcagtacagtggaatataatcataattatatgttcaaaagtttaattctcataatttatcggttaactagatttagactgacattgtaatgccctaagaattaggcacgctacgacaatcggtaatataacctaatcccaataaaccaggattactagaaaataagagcggaaaaaatttaaactttgattacaatggaataaaaacataacttataataatttaaactttacaatcaatcaaaaaaagacaacatgtttcgagatctcataaaactttttgcaaaatattacaagctattttatatgctgacctaagtggcaaaatctgagaatataaaatatattcgttggtagacccaacccgcttggtctagtatggcccgaacatgtacaatctattggaaattattttaccaggatcttagatctactcacaactatgtttattaacaccctaaa

SEQ ID NO: 257398 - DNA, 694 bp, Cannabis indica
aagacatctcttaatacctcattacctaaactcaacaaaattacattatgtgctttggtttcaatctcatacctctccttcttatcttcaatggatttgaaagctctctcatccaaatcttccaagacaccttgatgccctagcaatgctctcattttgattcttcaaaggccaaaatcattggctccattgaaattgttaatttcaaattttgagtttgacacttaattggtgagttctttgaagaatacctttgatttgtgaaattatgagaacctcctcctcagctctactactacaaaggggcctttactgttttttaaaccctttagaggaagttttggcaaaattcataacccatggagttccatcggctgttaaaaggataaaagagaactacctctaaagggttcatttagaggcctgcaattattagcaaataaacacctctaaatggaccttatggaggaggttatttgctaaaaactacctccataggtatttttttttataaatatttttattttaatggcagttcgatggagaatgatgaataagagaaagtttgattttaaccaagaaattaaagatctaatcgtaacaatccaaaataacacttttttctaaaaaaaaaattcaccacaaatttgagttaactggcagaactactcgcaaacaacaaaaataaaatggt

SEQ ID NO: 257399 - DNA, 586 bp, Cannabis indica
cctcattagcagcttcaaaaacgtaagtgcagtacctgttatgagtgaagtaattgtttaaccggccaatgaatgaaacagaattcctcctctccgatctcggatcagctagtgaacgaggtaggaaagccaaaaaaggccgatatagagagagagatggcgttacggagagagagccaaaaagttatgctatgactttggacgaaagtctaataaatatgacttcggtttttcttgctaaaccacaattgggctaactcaaacattacaaatggactttttttctattttgggctaacaaaaaagataaacatttatattttatactaccattaatttcaaaaatactattttaaaaaaaaaatgtatttacaattacggtagagagaacgagaaagtgagaactttgggtgtgttgagcttttttctcaacacaatagtaactcgaaaaacaaactttaaagtacaaaatcaatttttttgaaaattgtttttcgagttactattgtgttgagaaaaaatcaattagatatgaacatattgaatcaacttaaaacaaatcacgaaagagaaatcattaccaact

SEQ ID NO: 257400 - DNA, 642 bp, Cannabis indica
tctaactaaagttatttctcaaacatattttgagttgttataaggttggaaactgactttacgacatgtacatattttaaaaatatccatatacagttagagtataattgtcataggatagaactggatccaaataccataaataaacattttatcataaatgctataaagtctaaaggttacatattttattatccatctcacaacaatagaattgtggaattaagaataaacttgatcagtgagagtgatcgatctaggaacctagtttttagaaaaattcatttattttttcaaacttctaccacgagtattaaattaattatgatttagaacaatccttaagtttaatagttattgagaatctacaactaatcattaataatccacaggtcattgatgaaattttaataagtcgtgttatttagtaattacttacaatttctaaagaacatacatatttaaccattcgctctttaagggagtttgttggttcatccttaaaatgatttattagaacaataagatcaatatttctagtgattacattatatacaataagagttcaactacaatattaattttagacacaaattaaattgtagaatgcaaataattaaaattgttgtacaatatgccatg

SEQ ID NO: 257401 - DNA, 1016 bp, Cannabis indica
ggtatttccagtttagttgtgggtacttggtatgagcaatgttgcctctactgtatacgttacattgattcactttataatggtagttaactgtaagtgattgggaaattttaaagttgtgtcagctcaagagaaattgatgcaagttaaaataagtagaaacgaacaagattcaagttaacaataagatgggaattccataagtttaagtgaacaaaaaccgatgaggaattgcaagaggctaatgaagggagtgatggcaattgaattttattaatgaagagtgatttctctactttgggttgccattttcccttcctgttgtttcaacctttcgaggatctctcgccatggcgggattgggtttgatacatcttcgctggtgttgcccgtgtctgttggtgctccgagaacgttatctgggttgtcttgaggggtgaaatcttcttgttcattttctatttttttcttgctctcaatcgatcgttctatgaaaaggtctttttactgaagaaaagaaaagtttcccacagacggtgccaaactatttcggtcaaaaacagtcacaatttgttttcgtgagctctctattttcccagttcctaatcccctctcttttacgtcatcccctttcatttatatggtacgtcctttttattgcatggatgatctatcatccctctattctattgtcgacatgtgttctctctcttctattctctttgccatgtcagtgcctgtgtttcaaaggataactttaacgctacacgtgcccgtgtttcaacgggtaattttatcgctactgttttccttcgatccgacggcatcgtatccttgaaaaaattcatttttaactttgtgcccaggtcttctttttccgtcgaaaatcctatttgaggtggtccgagttttcttccgtcggcgaaatttgtcttaataatgtgttggaaatattttaccaggatctagatttactaacaagtatggttcattaacatcttaatatgaattctaaa

SEQ ID NO: 257402 - DNA, 1146 bp, Cannabis indica
ggattaatgattcggctttttatttttctttttatttttaaaattgtagaaaagaaaaaaagaaacaatgttgtttagatttcacaatttaattgaaaattatttgttgattattctgaaaaaattaactattgaagattgcattgacggaatcatatccgatttaacaagtgttccctacataaaaaatttggtgtcatttttctataagtagtttcatcttttctttttattaaaaaaacagaacttttatttatttgttaaatcagaaaagaaaaaaaaaaaagttagtacctcaacaagaacatcacctctcttacactagatttgtaaaaaaaaaaaatgctctaacaagactattagcaattatgttagaaggtttacgacaatcttctataataacctcaaaagaaaaaaaaaatatgagtaatgaatttcgaatagcttagacggctacaaagcaatctcactccagctctatttttcgttatagttgagttttaatcagcttaacgcttcttttatacgaactatttcagccaaatccaaaacacctagaccaacaaaactacccgacttaaccatcactaattcatcttaaaaccgttttatatgattaaagcaatttctatataaatctatattaaattaaggattccattctctatacatatgtagctataaatctccaaagaattgtttattttttgaaagaaagtattattttacttgaatcgatcatgattcatgtcccaagtgtgtgatgcggcgtgctatgatttacattttatacattatgcaagattacgttgtgattcaatcttattatgtgttcccttatgcaaaatttggtgacatttttctaaaagatgtttgatctcaaaacccatatgagaatggagcccatggatcccaatccacatggggctgtcttctgggcctatgaatagaacgaacaatggtcctgcaccctacacgttagtcgcgaatcacatatgaatgaatcacctgacgtttctttttttaaaaccactctcacaagtcccaacatttcctacttaattttcaaaatacattataaattttattctctttattttaattttaaaactacacttttataatacatcatacattaatactatt

SEQ ID NO: 257403 - DNA, 505 bp, Cannabis indica
ttcagctcgtccaccaatggccttaagaatacatccatgtccttaccaagtgacttaggtcctggaataaggagagtcaacatgaaattattatccttcatacacatccatggtggcaaattgtaattcaccaacactacaagccacatactgtatgataggctcatgttctcgaaaggattaaatccattagcagctaagcctaagaacattccgaggatctcttgcaaatttgggatgtctactatcaaagtctttccacgcggtaaaatcaacaggatgatgcataacaccattttcttttacacgaccagtacgatgccataccatctctttggttgtatgttttgaactgtataatcttttcagtgggtgtcatgatgttttgggagtcgaattggtagctccagaatcaagatactaatttgtgtcccatccagcacttgaactagcaaggtgtgcctgcatttgagctgtgtggacagtgtttccttaaggttgtgtg

SEQ ID NO: 257404 - DNA, 716 bp, Cannabis indica
taggattttccataattttttttgcaatcttcttgatatatatgtgtatagatattcctatttgggtattactgtgttctttattttcagatatgagaaataataatagttgtgggggaaataatttagggttttcaaatttaagttttgggactgaaattttgtgtatatatttgtttgtgggatttgaatttgtttaaatttggtttgaattttgtttagttttttttgtgtgatatggatttaaaaaataagttgtggtggtagtttcggtagtggtgggtggtggtgtttacggtggttatggatggtggtggtttcggtagtggtgggtggtggtgtttacggtggttaaggatgttcgtggtttcaatagtggtggtggtgtttacggtgactataaatggtggtggtggtggcagtatatagacggaagaaaaagaagaataaaggaaaaatattagagattttttttttcttcagataatatgttatggttgaaaaaaaaatatttttttatttatttttatttttttaatataattatttacatgtgccaataaaattgtgccacgtgtatactgtgtccacgtggacaatccgacctaacagttaacagttaaatttagatagaagttgtaatttgctaacagtgttgttgttttgggagtgttatattattttatataatataatatttagattaaataattaag

SEQ ID NO: 257405 - DNA, 846 bp, Cannabis indica
tttttttactttttttttaaacagtaaaaagccttttgattaacctaaaattgtatgtatatgccaagaaaccttgacttattgacacctaatataaaatgtataaatagttagtgacataaaaggttggaatataaatgcgggtaaatattattttagacattgtattttataaaagttattaattaaattatctgttttgttaaatgacaaaatgaaccttatattttctaaaatagtacaaataggaccatgaactgattttttgttaaaataaaatttaataataattcgatctaaatgtgttatgacaaaactgtttacattttctgtatccgttcatgttaaaaattgtcttcaaattggttgtattaacaaaaaagttatcaaaaattaagctcagagtcttatttttaccgtttttgaaaatacaaaatctattttgtcatttaacaaaacagaaagtccaactgataacttttgtaaaacacaaggtctaaaatgatttaccctgtaaatgctacttaattatttggcttaggtataagattattttttataagtatatatatcaagcaccccaattaagtgtgtgacatctattctatactattaagtgtgtacagaatttttccaatataggtttttttataaatgcaaacacaatatattacaaatattgaaataaactctacaataaccatagaagttataaattcaacaacacaatattataacaatacctacttacttattaacttaatataaaaaccttatcataacaaaagcttcaagcgttgaacaatttaaaaaacattttataggaatgtcaaagaagaaattcca

SEQ ID NO: 257406 - DNA, 639 bp, Cannabis indica
tatatatatttttcacaattttcacagctcaaatttacaacaaatgtctgacaattctaaaaaaaatgcaaacaaacaaattaaaatgctatccaaaagacgggactcaccttcacactttccacacattaatctttttatacgtcgtcgaatagtgcaaaaccattctttgagtttcccattcttctttttgacaactacttcttcttgacaatcttttacaacttccattctacaacaagtaggaatttcagttgtggcaaagacatttaaggtcattttctcattttgaactcgcaaccttaactcccccttttgaacattaattaaagctctccccgtggctgtgaatggtcttcccaaaatgataggaatgttttcatcttcctccatgttaagaattaagaaattagtaggaagaatgaatttaccaaccttcactaagatgtgttcaattgtactccgagggtgggcaatggataggtctcccatttgtaaagatactatcgtaggacgagcttctcctagtttcagcctttgaaaaattgataaaggcattagatttatactttccccaagtcacatagggcccttgtctcaactgaaccccctatagagcaacgaatattgaaactaccc

SEQ ID NO: 257407 - DNA, 595 bp, Cannabis indica
aggagagtgagtccatgtgtcatctttttaggagcctgttctcgagtttctaggtgaaatttttcaccctataacacatgcccctagttttgcgatcgacagccatgtcataagggaaactatgagagagaggcaggcgagtggttgtcacgagatggtgattgttgggtgtcacgtcgagggttttgaaaagacggttataattattactttattcctttgaggtgccacatcatcagaatcctttggggtactgcagacgtgattattggtaactgttagattaagagaccttaggcattcctttgccacgtgtctccatcccaataaatgagggatactagtatttaaaccctttgatacaaaacgatcctttacccatttttctctcatttttattttcccctctttctctactcagaatttcgaattcacaaaacttctttcaactgggaacaaattcaagggctgcattactcacagaattacccaggaaaacctacattttaaggttagtgattttactttctatctaaccgttttgagaatttgcatgtgtacagattttctaggggtaggaaatgcatgaaatagt

SEQ ID NO: 257408 - DNA, 2064 bp, Cannabis indica
aaatttcaatattttgtaagttcttttttttaaataatacatccaatagagtgaaaatgatatattcacaataaatcatttgaaagctcacatgcaaactatttagctttttttaaattttcaaaggtaagagaatttttcttgaattcaaataatatatattatttatttcttaaataatatttttttaattattattttttatattgattatataaaaatgaattgctgaatcaataagaaaactggtaggctgttagttcttttttgcactacgattctctttctcatgaaaatcagcttaggagttaggatggtgactgccaaactttgacagtttaggacacatttgaaaaaagaaaaacaaatagtcaaaagactaatttgagaaagagaccctttctgttgaaaactccttaatagtgtattagtgataatgtcatacttatcataccaaaggaaataatttactagaagaataatccggtttttgtgccaagtcagacaagattggcaatttttttttttgaaatcacaaggttggcaatttaaacacacaatatatatatagaaaattatattgtatatccactttactttacttattttactttttacctctatttttatattttttagatatacctacgtttatgaatgatgtctccattagacctcttaagttatgtaaattatatctagacttaagtagagagtgagaatatattaggtaatccactcaaaaaaaatgggtatattttaattaaaaataatataaaatattttttataatagataaaaagtatttctaacttatccctcatatatatatatatatataatatatatatatataagttaattggaaagaaagtccaaattgtcatagagttcagtatggacactatcatgggcccttggagatctagaaaccgaaattggttatttataatgttgagcccatccatttatttttattgttaggctatttacaaaattatgttaaaaaacagaaagtttatataaatatggtattaaacttaaccccacgtatttcttatccaaacaaactaaatatatgagtatataaataaaaaatatcataaaaatcattaaaaataaaatactattaaattaaatttagtttgattaaaaaatacaacactttattaaccaatgacataattatttgtttaaccttttactattttttaatgtcattggtttttttttctattttaaatttattacaaagttatttctcattaaaaaaaaaatatctcaatataaaaataattaaaataaagatatattttattacttcaaaaaaaaaatatatatattaaattcagaaaagttaatattttgatatttatacaacgaaaaaataatatttatttaaaaatatatatctattgattttaaattttaaatatatgaaataatttcaattacataaatttatatatataatccaatacctaaacccctacggaacctaatattatttgtcagtgattcttctggttatttctttcccatataatatcttgtttacaaattggtgataagtgtttatgtgcggataatgtgtacaagtgtagccccattatatatggttcaatatttgagttatcctacgtttagttgcatgtgggacatacaatattgattactgtattaattctaaattggttttgtttgaatcaatcaaccactttaaaatcgttcaatcagtgactgtaagatcaaatatttagataagaaaaggacaagagaaaaaaccaagcttacctttgttttcttttccatacctaacctttggatatttaatatttatgttcttacatctgccaagtttgacaagcaacagctttctttctcatttcaagttatttcttcaatattcactgaaaaagctctccgcttattttacaggtacctttttcttcttccctatatatacacacacatatatttctttttaataattttgtgctgaaatatttgttataattagaggaattatattgtaaagccaagagaaaaatggctgagtcgttc

SEQ ID NO: 257409 - DNA, 534 bp, Cannabis indica
taaaaagagaaagactacagacccatgttgggggttttgctagtgatcacaatgaagctagaatgaagtgtaatgtcttgttgaaggaaaaataacatattcaggcgtttttcttaaagcaatcagagcaagaacgttgtgattatcgaagtggcctaggtgcatccattgatgtttctcgatttcttttaagacaagggcttgcttttcgtggtgatgatgaatctgagaattcaagcaaccaaggtaactttcttgagcttttacattttctctctgagcattatgatattgtcaaagctgttaccttgaaaaatgctcctgagaatttgaaattgagatcacctaaaattcagaaggatataataagtgttgcagccgctgaaacaattgatctaatgatcaaggatattgacaattcattattttctattcttgttgatgagtctcgtgatatttctatcaaagaacgaatggctgttgtattacgttgtgtgaataagaaaggactagttattgaacgttttgtaggga

SEQ ID NO: 257410 - DNA, 837 bp, Cannabis indica
catttgagggagttgagcttcatattgtagatgggaaggattttgaagcacttgcataggtcctccacatgcccctcaacctttttggatataaaaagcatgtgaacatcatgttcactagcctttgatacgtggcccctacattttttagcccaaagtgcatgactttgtcgcaggaaaggcctggctccgtcatgaagctagtgtgcttctaatctggtggattcatctttatttgattataacctaaatacacgtccatgaaactcaggatttcttagccagttgtggcatctgcaagcttgtgaagtaacataaaatttgctctagtgccacccaatgatgaattgttggagaagacataaactgactaatgacactaactgggaatgcaatatctggacgagtcacagttagataattcaactttccaaccaatctgcgatagttctcaggatcttaaaatggttccccgtcacgtgtaagatgcacagctagattcattggagcattacaaggtttttctcgtaactttcttgtctcagttaacaaatcaagtacatacttccgttgagacagaaaaataccttttttacttctagtaacttcaatacccaagaaatacttgagctcccctaaatccttcgtgtgaaactgggtatgaatgaaagacttaagggataagatgccttcagtatcatttccagtaataacgatgtcatcaacatacactactaacaaaatgatggcagcagttgatatgttatagaacacagaattatcagacttacttttcaacaaaccaaatttctcaacagcctaactaaatttaccaaa

SEQ ID NO: 257411 - DNA, 436 bp, Cannabis indica
tttattaatttttataatattattatatatatttaaaaataaaaattatgtagatattttatataagaaaatttaaatttaaatttaaaatatttaaaatattatagatattttatataagaaaaatttaattataaatattatattttagtcttctagtcatatttagtgtgcttatattatttattttcattttttctttcttttcgatcaatatataaatgaagtgacatttaatgagttttataattttattcatcgatacattttacttagtttttttaaaggcatgatcttgaaatataatttacataaattattttctaatatcaaaatcgaaagtattttaagtcgaactatatatttgtaaggtaagtcaaatttgatatatcatgaatatataaactactaattattgataggagacatatatata

SEQ ID NO: 257412 - DNA, 856 bp, Cannabis indica
acaatcatattttcgtacatactaatatttggccaacaattccattcataaggtcatcatattgtatattaagatcttatagcagctgttaaaactcacctgcatttgaaactctgcccacatgccaaatctgacagaaaaagacaccacctttagcgtgaacaccatcaacaagaggcttccaagcttcaacatgctcttttgtctaaatacaaggtgtatcagggtacctatatataatagaaaccacacaaacattttacaactttcaagtgagtagaaagcatgaaatttaaataaaagtacttgcaataaatagatcagtagaattacccttgagcagtatcagaaactccagttgcttctgaaatgagaagacccccattggaggttctttgggagtagtacaaaatggcatgtggctgagggacattgttgtatgacctttgtcgagtcaagggtgccaagcaaccctggaagaaatcaacatcaagtacacacatttagctaaaattaagacttcactaacaattttattgaaacaaataaagaaaattgaagaaaagtcatattgactatcaacaacagaaaatgtaccaacgtatatctccttaaataatgatacattatttttagcgaagtaacaccagctccatgtaaatggtgttgtaatccttaagggataagtatgagcatagtcacgtatcttccaatagcggaaagtttgatttgtatccccattccaacatttagcaggatctgtggaaggcattccaaggttaactaaactctctcttcaggtttcccatcttcatcaaaaatgaagacacccagttctgattctaaagtcatcatc

SEQ ID NO: 257413 - DNA, 737 bp, Cannabis indica
ttgttggtaggaatgtagcagtcccaagccgcccaggtatccatcctggtcgagagaccgaaaggcgcgccttagtaaccttggacggagtgcttacccacctggtgcccaaggcaccctgccttctatgaggaatcgccgccgtaagttcctcacagccgtagtccactgcctcaactaggacgtctccgtcagcatcgactggctccccagccttattgtactctccgtagtttgggggtgtaacctctgcctttttcacctcctcggaggaactgccaggacgtacatcatcctacccctcaatctcctggacctcaacgtccccttcatgatcctcttccatcgggacggctggatcctattcggcgctaggtaaagtggcgtgccgagccacttgagggtcagatgcgtcagccagacgcgtggttttctttgtaagagccatcattctattacggagtacagggtttgaagaatgtccttcgctagaggaaggtggaatagaacaaagacgagtatgatccttgtgtggaagttgaagcaggtccttgttgatccgatgtctgttttcccaagactaacccgagttcatctacaaaagacaacacttaatatgagtgtttggtcagaatatccaacgatagacaagcaaatatgcggaccaggagtactcaacagattaaagaacgattatgtttgaagaaaagtcagaactcaagaagtcaaaagttttc

SEQ ID NO: 257414 - DNA, 769 bp, Cannabis indica
ttgggtaaatggatgagcgaagccgcgactgggatttttatctcagaagtttatcgaatagtgcagtctgccagagactccaatactgccagtgatcccgcttctgattcttctcttgtacaatctgtgagtgtctctgatttatcattttcttaaagcttgtatgaaatgaaaactttgaaaaatgagtcttaattcgagttaggtaatgcgtggtgtggtctctctctcactcactgtcttgtgttcgctttttgaataattaggttaagaagcttcatgaattatgtaaagctgagaatgcagaggatcttgttgtaagagtttatccacatattaacaagcttttttcaacgctcagttgcttcactgtcacagtctcgaacatccaatggccttctcttactggttcggattaaattttcaccaatttattagctgcaatgagatttgatttgggatgaagatatttttagatgaaagagatattctttacaagtattattttttactcacttttaatatattgtgtttagtagaaatataagctttataattggtgtgaccacttttgatcttgtaatcctagctaaaactttgcatatccttagaaactaatcgataccctttaggctttatctatcactatgcatgattgctgaaaaaaatttgaccatctactattgcccacatattctcgtcaatgtttttttttacaatttgccatttgtccttgatttctctagctgttagtgtaatttaatccata

SEQ ID NO: 257415 - DNA, 667 bp, Cannabis indica
catcattccatgaagcagccataatggtactcgtgtataagatccatgattctgtgggtgtaagggcccaatggaggcttgaagcggggacgttacatctttactttgtaagagatcctcagaatgttcgcttaggcttagctgctgatggatttaatccttttggcaacatgaggctatcatatagtatgtggcctgtagtgttggcgaattacaatttaccaccatgcatggatgtgtatgaaggaaagaaatttcatgttgactctccttattctcggacctaaaacacctggtaaggacatggatgtatttttgaggccattggtggacgagctgaacgaattgtggactaatggggttgaaacaaaagatgctacaagcaagtcaatgttcaagatgcacgcaactcttctttggacaattaatgattttctcacccgtaataggtcgcctagatggagtggacagagatataaaacttgtcctacatgcaacgaggatactagttctgttcgagtgattggtaagacctcttatgttggccatagacatttcttgtcatccaatcatcgtgtgagaaaggaccatgaatttgatggaaatactaataagagacatcctccaagacgatttacttgttaaaaaatattagaacaagtgaatg

SEQ ID NO: 257416 - DNA, 765 bp, Cannabis indica
tagggcataaacccaacacctttaaggtatcggatcaagtggtgcacgacttgtagatgaggagtgcgaggcttagccatgaattgactaagattgttgacagcataggtgatatccggtctagataaagttaagtaaagaagtcggccaatcaattgtcgatatgaagatggattatcaagtggttctccttgttcatcatcaagtttgagtcttggatccataggggttttggtaggtttggctaccaatgtatccagtgtcttcaagtaactgaagtgtgtactttcgttgagataggaagagtccttcagttgatcgagcgatctcaaaaccaaagaaagtactttaaggggccgagaccttttaagctgaatttgtggttgagtgactcttgtaattgatgtagaagaggtaggctaggtccagtgatgatgatatcatccacataaacaagtagggcgatgaaattgtcattagagcctttggtaaacaaggtatagtcagctttggattggtgaaagccatcatcgagaagagcatcagaaagcttgcgataccattgccttgatgactgtttaaggccatatatggacttgtgaagcttgcaaacaagtgtagtattggagggggcagcagtaggcattggaagtccttgtggtaatgtcatgtagacttcttcttggaggtctccatgttgggttttattccctaaataaaactcatttcaatataatcagacttacttattaatatagatcagaa

SEQ ID NO: 257417 - DNA, 1470 bp, Cannabis indica
aataacatgcttaattcatttcataacatcgtaatcacacaaccctggtactttataaagtaccattaccactcattaaccacgagctatatatgtcactatcgttgctcgatacagcaaacaataagtaagaaacttatccatagtttcaagaataattactcataactgtaacgactgttaccaatcctctccactcgttatccacgagctgcgtatgtcactatcgttgcccagcaaagcaaacgataagtaagaaacctatcagcagtttcaaaagtaattactcataacggtaatgaccgtatcttaatttattcacaacaacggtgataaccgtgttcttccctcattcattaataattcataaacgacaataatcgtttctcaccacaccctcgatcaccatcgagtcacaacaaatacatattattaatctcgatcaagatcaagtcacactaaatacatatcgagatcttgatcacaatcgagaccgtaacaatcatatcatcaacaataaacagtgcttaataattttcttacctcaagtccaatatcaagtgtatcgctgacctgagtggaacgatgctcgatgatctcgggtcatatgtcacgacaaaggtaactcaataagggcctattccaaaacactgtctaaaactcgcataaaataacctagggttttctatcgaatcttatggtgaaaacaccctaaaataaaatacattttttggctctaaactatgtctcgtactgtagagctcttcataaacttcaaaacggtatatagaatgtctaaaacgaacacccgagtgaaaagttacagctaaaatacgaaaaatcagcgattcctaaaaattgaccatccggaattccggttcacaacagcaaaaactcaaaaatttcagatcttcaaagtcccaaacttgctcccaacctacaattcccaaacttcacagaacaattctatatcatgaatacaataagacttgggggtaaatgttgcctcagatttttctcaaaatacgtggcagcggctgcgtgtggcatgtgaatttcaaggacacctcacccacaaaattagctaatttatatatagacaagcaagtgcacttcagggagtgagcccccggagaggttcataaatcatgcctctactctccgggagctagagatacaacaaagcatctctgggagaaggagaacctgctcgaatagttaatttaatgcggcatgggaaaaacgtattagaacacccataaaaggatatgacagatggtgtaagcttcgtttacggtgattacacgataatcaaaaagtctagtgacaactacattatgaaatatcacttcaatcaaggaaggataaagattactctcacctaatccctatgatacctatggcataggtcatgtatgtcgtattttatatctcttaagaacttgtgcacctagatggctggcactcaaa

SEQ ID NO: 257418 - DNA, 607 bp, Cannabis indica
ttacgatgaaaggttggagacaatgacaatgatctttttattttcttttttgatcttagatcaatggaaacattattaagagtagtcattatgtttgttatacagatcaaaattatatctgaaataatagatctatatgtataaatagaaaatgcatgcatggatgcgtcttttcatttttcgcggtgataatttattaaataattgcacctttttatgtaatgtttattatataccttgggactagctagctaggatatgtaggatcatttcaccattatcactacatttatagctaataataattaataaaacccatctcctctcccttgattagtaatgtcatgttcccctcctctaatcaaataattatttattattaatttgaacaaattatatttattgttttgtcttttcggttcacctggggtattgatgattgggttgccataaagatgtttttcctgtgggtttttttttttttttatttttttcagatttcagagagaggtccgatggtcgaaccatggggtctgattggtcggaccccatcggaccccaaggtccgaccatcggctttgtttggttttttttttttttacttttt

SEQ ID NO: 257419 - DNA, 1301 bp, Cannabis indica
tagatcaatggaatacaatccaaaggaagaccaaccttgctaaaataaaagaactcaaaaaagaagtggagaagtattctaaggatcattcaactcatggcttcgccaagctcaaaattctagaaaaagacctcaacgatcagcttgccaaggaagaactgttttggaaacaaaggagcagagccatttggctagcccatggagatcgcaacacaagatatttccaccaaaaagcaacatctcggcgtaagaagaaccgaattaattgtctctttgataaaaacctaatctggaggagttctaaggaggacatagaaagcaccatttgtgaccatttccaagatcttttctcagcaactgatggtggtcacgctacagcagaacaccttcaacgatttgtaccgttacgtctcagcagactccaaaatgaccgcctgctctcagaatttacagctgctgatgttcacctcgcattgtctcatattaacgctatgaaagccccgggaatagatgggatgcctcggctattttatgagaatcattgggaagttataggcagggatattactaaggtttgcttggacatcctcaacaaccacaatgactgcatgcagctcaataagactctcctttgtctcattccgaaaaccaaacatccgaaacaagttggggattaccgcgccataagtctttgcaatgtgagttacaagatcatagcaaaatgccttgccaatagaatgaaggatagtcttaaagaggtcatatcggaaaatcaaagcgcatttattcggggtcgtctcatccaagataatgccatattgggatttgaaagtcttcattgcatgaaaaaaggtcggtttggaaatggaaggaagatgactctcaagctaggcatgtcaaaagcctatgatagagtcgaatggcgattcctagaagcaatgatgatttgtttgggttatgaaaagcgttgggtggataaggttatgaattgcattaagtcaatttccttctcgatccttcttaattgagaagtcaacggtcaaattgatcctagccggggcattcgacagggagacccccaatcaccatacatgttcttactctgctccgaaggcctgtcttgcctcatctatgaaactgagagagccgataggtgttaggctaaaattagtctaagtttcgggtcatatttttggttagttttcactctttgtttctagttttagggctatattacgcttgattctttggtttcaggtcctcgggaatttaaagaaagtatgtacaagaattgaggaaaa

SEQ ID NO: 257420 - DNA, 783 bp, Cannabis indica
agtgtagttgtagttgcaaatgttagcccattggagaccccaaaacatagctttggcctccatttcttgagatttaaagttgccaacagtaggcttagacatagctactacaacactacccgatgagtctcgtatgatcacaccaatacctatcttactcctcgaagaatcaattgctgcatccacattcatttttaattttgtctctggaggaggaatccatttcatctgatttacatcagctgcaacacagaatgctactggtgtagtatggagttgcacagatttgaaattggctagatatacttcggcttgtgatgaaatagccataggttgcttgagttgtttgccatgaatgaaattgtttctatccgaccaaataaaccacattgtacaaaacaatcgttccaattcagatttggtgagaatagtggataaaaacatgagatagtcaccatccttcatgtaactagctttctgaaaatcaagctgaaaaccagtattttgccaaactgccttggcatgacagcaggaaaataaggcgtgtccaatggattcccacgctcgtgaacacagagaacatgtggcagaggtaattaccttacgatgaaacaaatttgtggccactggtaatgcagaattaatgaccttccagccaaaaatccaaaccttagatgggagagttaaaccccaaaatcgtttccaccatgtctcttgtgaaccagaactggaagtttgatcccggttttccgatgaacaagcaagtgtatacccagattttac

SEQ ID NO: 257421 - DNA, 899 bp, Cannabis indica
tcgatttatatttagaaattgggctttgggttagatagagattgtagaagcatttcttattttgagttgaaaatacttttatggctttgtgttcaacgaaatgcgtaagagaagagtaatgttgtatcttttaaaggattcttttatttggttgtattctaaattatcggaatttcattctaatggaatggcgttttcattattttggtgaaatgagtattccattttgaaatggttggcaaaatctaagaaaaaaattgctttaaaggagattttttttatgcattttaaagattattcttttattcctatttatgtttttcattttaatgtgtaacttttaaaaggaagattgttttttagaaattaaaatccttatttttcagtaggattttttcgactacaaacttaattttcaaatcttatgctaacaattcatacattcggttatttcgaaaattgtggaatatgaaaaatattatgagtgtgttctttaacttcatttcattttattgcataatttgaagatttattcattgggtttttagttgaagttgaaagtactgtaattttgtgaacagcttttcggtatgtggaagaacattgagaagtcgcggataaacgaattgaactacaacaagacaataagagttcttgttgaagatgatctgattgaagaagcagaattgttgtttgatgagatgaagagtcatggtcttagtctttctttggaaacctataattcaatcatccatggttttgcaagaaaagggttttttgacaaggctttacattatcttgatgagatgaaggaactcaatgtagcaccggaaagtgatacttacgatggacttatcgaagcttacgcaaaacacaagatgtacgacgagataggaatg

SEQ ID NO: 257422 - DNA, 1156 bp, Cannabis indica
gtaagtaaaaaaatatttagttcttaatttcttcactataagtattaattttttaaaaaaaaaaaaattgtgttgatttttatttatataagaagttgtatgataattttttttaattatttagagttttctatataaatttattatttttttaataaaaaaaatacataaaaataaatttgaaattatttgatattattatttatataattatttaacgtcgtgcgcgaagcgcggtctgttttctagtctatatataaaggagaagtatgaagcggtgatttggcactctaaaatctttctaattaacattatttgtactctccttaattctctcaattttttaattttttattagcttcataaaaattaattgattaattaactaaaataatataaccacaatttttttaatatctttatctctttatctctttatatataaaaagtgtctatctaactgttttttgttgtttaacagaatatactttaaaaataaaaaatattctggttaaatttaacggaagattaacgtttgaagttaacacttctctaatcttatacgaccactaggaaacaaaccgcgcttcgcgtgcgagttataaatattctcaattatttctataaaattattttagtaatatttttatcataattcacaatattataataataataataataatttactcaattaattttataaatatgcccccgactataaaaaccttacgattattaggttatttataaactgtgtcttctaatataaggatagactcttttccttttgagtacaatgagcatagactcctaatgtgtaaaaaatataataattataatataaaatgagaaaaaaaatacaaaaaatgtaccaattagaataataaataggatatttttttctttatttatggttttctaaacttttttttaaatttttttcttatactataactatcattacaaatgctatttttatttatttctgttcattttcttaaataatttgctaacatgacactattgtatttaaaaaagaaaaatttagatatatttatataaaaagtcatttttaccataaaaaaaaaacttagtagaaatacatccaaaaactaggggagaatctaaacaaaaaaaaaaaactaaagtggaa

SEQ ID NO: 257423 - DNA, 1102 bp, Cannabis indica
atacattttttctcgatttttttttcaggggggcgactgccctccctcgttacaatgtgggtccgcccctgagtgtaatacactgatgcccattattcggcataagtaatcacgattcagattactaatgtagtataacatctaagtgaaggtgttatatatagtagagattatatatgacatggattgatatgtacttaagttatctatatcaaacatgtcatttattataatgacctaattcatatcataaagatgattaatattagatcagcctgaatcttgagtaatcatgaacttctactcatggtattagttttttttattcactcgttaaaatttcttagagaagatgattcttacaacttctagtttgagaatctaataatacggatggtacggaacatgatctacaattatggaattatgactttcctagcatattgaatgttggttccctttaagtgctaatcctagagcaaaaatgttatgcacaaatttagattggatcaaaattatactttcaccagtgaattaacggtactaaaggatcaataagtaattcaaaggataaaatggtaatttaaacacaattaattacgaatcaacacaaagagggctaatacttgaattgattatattaatgaaaactactataaaactcaataaatataattctataattactaagagttcaatttaatatttatagtagagtaaccgtggaacttaataacatgattatatggttaaagagattcaataaataatttagtttattggagcttagaattatgggtccatggtccccggatgaccaccttaaaatattgtcaaaggtaggaacaaaagttgtatatgaaagtttgaaaaagtctgttttgatttgtccaaatagaaattgtttattttgtaagaaataatttatttttcaaatttattaattaaataaattaagaaaaagacaaaagttatatagaaaaaagacaccactagctaatgtcttaattaagacataggtggcaccactatcactgtgtcctaacacagtgataggcgcctatcatataaggtggactccacaggatttatttttgggtta

SEQ ID NO: 257424 - DNA, 579 bp, Cannabis indica
attataaatatataaaaaaaaaaaagtaaaaatcgggttaaatcgggttgggcggttttggtcaattttcaacccgcccaattaactgattgggtggtttagaattttgtcgagttatgtcagtttgtattttttatcggttttgtcggtttggtttgggcagtttacgaaaatttttgtacacccctagtaattacataagaaaagaagaaaataaacagtagtgcagaaaaataaaaaaaacataaggtttttgtacgcggtatcaaaaattcttgcaaattgttactagtccacggggccgcgcccagagataagattcattaaatagatctcaaaaatacaaagtaattgacttatgcataaatagactccctcttattgtatgccacaagcttggtgaattccaccttctaatcgaatcttgttaaaacttcaagtgctcgaactttcttcgatctccttgaagagtgcttgcttcctcccgaggcaagacttgaaaagtaatcttccgaaaacttgtagaaccttctcccaaagatagcactattgtttgtcttcttttgtagacttgaatac

SEQ ID NO: 257425 - DNA, 931 bp, Cannabis indica
atttagatttttattttttaaaatatcaaatatcagaataaaattaattaattttagatattagtagattttgaacctgaaaatggataaaatcttattctttttctacttaattggttacttttttacaaagtttaattattttatcttatttttaaatttaaggtcatatattttatattatttaattaattttataaaatgatcttatttgaaatttaaaataagatatattttaatctaaagaattttaaaaatctaactagatattttgtcaccttttaaattttgttattttatttaaattacattataaaattagataaataatatttatttatctttttattttattagatatttaattttttttttaaaaaataatataaagtttaaaaacttagttgacattttttgaatagatatttaggtttgttaaaacccttattttttttttttaaatttttaggtttaattttaaaattaattatttaatttaatttatgattttcgaaaataataatttattaattagatttttgaaaataatttaattatttaattaatttaaattaaataaatcctatatccaactatccagtttgttgcatgtgtgtgctttatatattatttattattaaaacttttttttttataaatcttattattgtttgatctaaattgctatggttaacttgttgacagatctaatgatctaattttaactaatagttcaattatcaatagtcaaattaataatttgaaacaggtaaattttgtaatcttctttcatttgtgtataaacctagtaacatgataggatccatccaaattagtatgtgccttttcccatatgtttgctttgggcttagatgcatataggaagtccatttaattttgtaattaaaatggactaggtttctaaaataaa

SEQ ID NO: 257426 - DNA, 551 bp, Cannabis indica
catttacacttgttttttactttagttacagttctttgaatttttgtttgtcttgatgtatttttctaaaattaaaggcattctattttcatgttatgatattttttagcattaaatgttctttttttttaaacaaagcattaaattttttttaattgaagcaaaaagggaaggaaaaaaagttgtagctttgttattatggttttgatttttacatttcaaaccaaaacttgataaggatatgaacgagtgatgaacatgaagatgagattcttttgtattgaattataatgtatggattttaggtctccctaaataagtttagactcgtttctttcatgttagttattagtaagttttgacttaggctctgttatgtaaattttttatgttgcgtaattattgagaacttttatttgataagttaatatttaaagggtgttagaaatattgtttgtgaactggttttggtttctgtatctaatggttggttttgttgttttgggttcgaagtttaaatttttgttttaattatttaggtaattgatttt

SEQ ID NO: 257427 - DNA, 826 bp, Cannabis indica
taatgggttttatttagggcacaaaacccaacaccagactagggacaaagaaccagggtcgggacctagaaccactccccagtctctatcccaaacccaaacttagaaatgagacctgggactggaactagaaccaaaccgagacccgtgacactaatccaaatcttgactcgggattcaggtaacggggcctggaacggagctgtagtcggtgtctagatctaggactcagactaggacaaaaacccagacgaagaactaaactcgaacccaaacctagacttgggacccaaaattagaacctaaatatgaatcgcagaaccacgaccctagaaaaaaactaagaccgtgactaggaccccgacctagacctagaaccagaaaaagacctagcctcagacccaaactgagactggaactcgggcccagacatggtcgtgtacccagaccggaactaaggcccggacctggaccttaatctaggacgcgatccaaaacaaaaacttggacctagatagggatccggatacgaacctggactcggacaaagacccagacttggatcgaaaggctggacctagatgtggaccgagatcctgacccataaccaaacttggacccgcactcaggaccccgaacttggacctggacccgaacctagacccagatcggggtccacacctgggcacaaacacggacaatgactcggacccgaactcaaacccacacctagaatcagacccaaagctagacccggacacacacccaaagtcgaacccagaccaggatcagaaccaaggagttagacccagaactgaatccagac

SEQ ID NO: 257428 - DNA, 919 bp, Cannabis indica
catataaattatatatatgtttacctcataagtaaccatcttaattacatcacgttgcctaatcaggcaagtcgatactttaatctgataatcctgtatttcatttcctaatcaggaaagcttgtgccatagcctagcacccatatattgcataactgcatcacctaatcaggtgagctcgtgccaaaaacctgcacccctatataatataattgcaacacctaattaggtgagctcgtgctacaacatgacaccaatatactgcatcgtctaatcagacgagatcgtacctacgcccggtacttatcatatgtcaccgacgcctgtacctacgcctgatacattgctaggtagaaacccaataattgtttcgatctatgccataaccaggcattttcatatcaccgacgcccgtacctacgctcgatatgtcgcctggaaaatcacatcacctaatcaggtgagcccgtacctatgctcggtactcatcacatagcactgacgtatgtacgtacgcctaggaacgttgccaggaaaattgcatcacctaatcaggtgagctcgtacctacactcgatactcatcatatatcactgatgcctatacctatgcccagtacgtccccaggaaaattgcatcacctaatcaggtgagtccatatatcacatgcataatatcatcacattatcgatactcaaccaatcaatcttttcattatgtaacaatattaattgtatctcaatattaatcaattcataacaatactaattacattacataacactatgtagtacaatatacttttattatctcaagtttcgattcaggtatgttggctgacctacttggagtatgatcgatgatcctgagccctaactcataacaataacagacatataagtgtttatcccaaaacatt

SEQ ID NO: 257429 - DNA, 828 bp, Cannabis indica
ttttaaaataccgaagacgtaagtgggggctacatcttcgattattatataaaaaccgaaaacatagactacttttttcttcagtttgtcgtcgtcgtcatcctcgtcaggggtagctatagcgatcggagagagggtttgagcgagggtcgtgggttttgagggtttgaacgagagggtcgtacgtcgtgggttaaggggtttcgacaaagggagtgtaataaactaaagggtctcgcgtgatattggaatatacacacctttgtcttcggtaattcccaaaataccgaaaacaaagggctccacggtattttgggaattacagaagacaaacgtcctacaaaatctctactattataaaagaaattaaaccttttttgacttcggttattaacaaagaccaaaaatataattaatatttcactaaaaaaagcaatgatacgggtattaaaatagtttatcatcggatttttaatttattaaagatgaaaaccaaaaataaaaaatataattgtagtagtgcatgaaactttgtgaggtagtgacagtttttcatttcttcaatttatagagtttcaattatagctagagataaaaatgaaagaaaaattataacatcattaagacttataataattattaattgaataaaataaccaccacaaaataagaaaagaaattgtatagtatatgaggggagagagaagtgatataacatgattgaaatgacttaaaattaccagctgactttgaaagtttgtagtttaaactacaagtgtcaatgttgtctcccaacatattaatcaaagccaactttcttccatatgg

SEQ ID NO: 257430 - DNA, 1009 bp, Cannabis indica
aaaaataaaaaatattataaaattaaaaatattacagcttaactaaaattttaattaacaaattttgtattgtgtttttttttttacaaataatacttaaattaaatatttttaataaaaaataatattgtttattgaataatataaaaaaaaattaatatataactaaaaatatatatacacaaaataaaaattaagaatataactaaatatgtattatactagtatatattatagagttttaaactttgaaaaacgaatatttgtaaataaaatttaggaccggcaaaacgggttagacacgataagatgactcgaaacccgcacgagagtcagcaggtgtgggtttgccttaaatgggttcggatcatgttcaggttgactcgtctaacccctttaataaacaggtcgtgttcggatcaacacgtttataacccatttatgatacgttaaagtactaaaataactttaaataggtcattaacgggtcaatatcatgttaggggttattttagtactttaatgtttaaataaaatatgcttataaaaggattacatgggttgtgccatgtcaatccgtttataaacggattatattcgggttttattttttgacacgattattaaacggatcgtgttcggatcaagtatgtacctgttatacatgagtctcgaaacgatacaaacacgaccaacgacaaattgccacccctaataaattccagagatgtcctatttatatacattattattgtacctttggtgaagtatttcctactatatttgtaaaaaaaattaactataaatatgatatgattttcaggagtaataaactaataattacattaatttgatttcttatatgtttttagtttttacatatatattaatttcactattatcttaataatacttatatatatatatatatatatatatatatagtagagagatagatagagcccactttacaactacatgtataaaagttagggtagtgatcaatact

SEQ ID NO: 257431 - DNA, 2620 bp, Cannabis indica
gaaattttccgagaaaacaaacgcaagagaagaaaatatccagagagaagcagagatgtacggatacactggtgtgcatagcaaggcggaggaggtagatctagagtccggtgagactttgtatccgggacttagcgccggagaaaatcagctccgatggggtttcatacgcaaggtgtacggtattctggcgacccaaatccttcctaggctttctctacacaccataattgctattattattattggtctattcgattgttgacttgtcttttttatttattattatccctatatcaatcttacactgttttaaattatgtatagatagatacatattgttcttattgattgctgattgctgatcatgtttgtgaaatatatcgaattaggttatttattttatttttgccttttctgattcgttaggatttggaacacacttatagattcttgatcctatcattggactgttgatagattgattgagtgagttgagtaactggtggagaagaaaaattgtattattaaaccgtcgtaaatgatgatcattagtattaaaagctgatttactcacttctctgtgatggagatataggcctggttcccaattttcttgattgtgatattgataacttatcaaaagtttatacgtcgtggtttgtttgcagtattgtggccattatatgtctaccagcaaaaacatcctcagaacttcatcttccttggactttgtactctgtcactcagtctaacacagatggaaaaattgtacttgaagcattgatttgcataaatcaattgttatttatacaattttttaagttctctcatgtaaacatcttcacaatttttggaccagcattactgttgctataaggtgtaaaatcaattggttataaataaatatttataatcaagagggatgcaacttgcaatgtggagagatgcacattatgtcttgtatgtaaggaattactcataaagcatatatttattttgaatagactttcttttggtttaattgaaaggctatttcaggacaagcatgacactgactgctcattatggtcttgagttatatcaaatggattactaactgtcatttatcgatggtgatattgatgacataagttatgttgtgcaaccagaaaactttgtgtccaaagatccaaagaatatggtttacaaattagaaaaatccatgtataaactcaagtaagcttctcatcaatgattacacaattttcattaagcattctcatttagtttttgagataaacgcttttgatgattgtgtataaatcaaaggttcagtgggagtaagaatatgatcctagtaatatatattggtaaaaaaaattacttgccattgattacataccaatttcgttttaagaattcaagatatgttgagattattcttgagatattcttgaattataacaaaagaggtatatcaataaagtattcaaaaattttggcatgaaagataatgtactaggtgaaaggcttgtagctaaagaaaatacgttgtctatgtcattgtcctaaaaaagacttagaattcaagaaatatagaagattcttaattcatattggaatttaatttatgatcaagcatgtatatatttgtacttaatatacatattaagaatgttaggtagatatttaagtaactatataaggaactttcggtatgcagccaaataagctataataaatttaaagagaacaaaatactatatcttcacttatcagaaatcagaaaatagaaaactttggagattattaagatttcttattttgatcttattaagtttttagttgtgagattttttgttacatatggctgtaaaattaggaatgttattgaaagctattaaagatatatgttgtgacaataaattaatcaggttgcattttagcaacaacatgaactctataaggtcaaaagacacattgactttgagctaattgttattaaaaggaagtttagagtaataatgtgtctataaaacatactaaggacaaactccatattttgtgtgatctggatctttaaggatataccacttaaggcttttcaggagcttattgctcatatatggatgtagtattatttaagattgtgcttgtttagtgggagtttgtatttgagatgttctatcaagctgacacatatttatggtttaattctgcagataaagtatggacttaagttttgagtactctgaatattttctttctattgaggtttaagtataaggttagaaagaattaataaagaattgatctaaattaaggaggactagttggaaataggcatgctaagatcacatttgcatgtaatttccatgctacgcatccatgattgatctatgtcatttgattatattgatatacgtgaccactgatgggtttagctacattaaatgtggcgaaagccgctttgatcctatatttgtataatcaatggacgagattgttttgaaatacctataattatgatagcaaagtttaagcgcttataatgttacgcactataagaaaacatgtgtagcccaagtgggagattattggattaaaatctctaatgtgggctcatatgtatttgtgt

SEQ ID NO: 257432 - DNA, 621 bp, Cannabis indica
taaaaatgaaaaagccccttaaattaattctttaagttattgattagtttaattttaatttcttaggctattttaaaaactattcatgcatttagagtgttttggaggagttttagcatatttggacaactttagaggcataactggacttagagctcaacatgaaagttttagatctcgttcttagctttcgataacatcttcaatcgtccaattccgagcaatatcgatagagttatggccaaaatattgtcagtcatcgtagcaagaaatttttggaaaaaaaaaaagaaaaaatagcgaaaaaaagatagtttttcaagaagagttacgattttgttattttttttaaaaggtgagttatcatttcttttagtgagatatttcataatactataaatagaatcctaattcggattcatctatctttttaatcactataaaatacaatcctaattctaacgacattcatctattttctcaaacactattaatagaatcccttaggctacgaatttaagaattcaatatctagacattagagagagaaactaagggagagagtaaggaagagacggagatcggcttcgaagtgttttttattctagttcttttcttctc

SEQ ID NO: 257433 - DNA, 455 bp, Cannabis indica
tttttccaaatctaaccatttaattaaataaaaaaattaatttaaaagagttgtgttatcatcagaatggtgacaaccaaattttaaatacaaaattcatagtttaatagtcaagcaaataccttgtctcaagcttaagtttaacgagctactgaagcaaaggactaagagaggaattagtgctttgacgtcataagtgaatagagagagatgggtgagatgtccataattgtgttcaccgttgcaaaccagatgcggcgatacataaactaaaactatagatacacattactgtcttcccccattgcaaacagaaacaacgactcgtcggtgcccaaaaactcagtgtaaggcttatctgcatcgattgaaggcaatcagaagccactttaatttattttttattgcataatttgaatacaggtcaatcggaatatgaatttggatttaggaat

SEQ ID NO: 257434 - DNA, 631 bp, Cannabis indica
agaatgttcatgcctaagcgtgacatgtaatacaatcttctccaacggccggcaaaattttaagtaaatctctcttttttctttttctgattccatctcaagaagggattaagaagatcaacctcttcttctacttcatctctaaactccccttcacctcatttttagaatagttagcacccaatatttgataactaaaatacaaaaaagaattaccacttccaatttctaagtctattaacaagtttatccctaagattccaaaaaggccaagtaaaaagtacaaaatcaaattaaactgcactaacatatgtattttttttataaatataatttataaaatttattaaaaaaacctaaaatttaaaataaatggaatcctaaatgaccttaggttatagttaagttaacctttttcaaacgggtaagcagtacaaattcacgcctgtggacgatacaagagcagcgtagagctaaattatgtctatcgaaaaccttattataagccactaaggctagcttagtggtgagggaggggtggaaaaaagggagagatcatgggttcgaacctaggaccttaaagctattaagttattaactgattgtaaaataccattacgctacactcaaa

SEQ ID NO: 257435 - DNA, 893 bp, Cannabis indica
tgcaaaggtggttcctttttctttttttatactcatgataatgattttaaaaaagatttgatccaatggacgtgattcgaagtggaagtggaaaagatgatcatttaattctaatgtacctcgaaaccgcacaaccgccaaaatcagaggaatgcgtcttttcaaaaacagaggagcgtgatgaaaatacccttggtaatcattaaaaaactctttttaattaaaaagaactttttaaggggcaattgttatacctgaagtttggtaagcacatcagaggaggacacatgtcgagctggtaagaattcaaacacacaaacgacaagtacgcttagcatggaacaactcgttggaaatataatgtgcaaggtaggtttatacactacaagaaaaggactttttgccggcgcatttcgtgacatgcgcctgcaaaagttgtcgacataaacaaatgtatggaatcccaatttttttttgggtttacttttgccggcgcatatttgcaccggcaaaacatatctataccggcgatgtcaagttaaatgcgccggtaaaacgtgaaaatattaggcgcgagaatttgccgcctttgatttcatttttggggcgcatttatacttttaccggcgcaaatgtgcgccggcaaaagtaaccaaaaatattggagggaaaattcccgcgtgggttttatgtggtaggtggggccacttttgccggcgcattaagtgaaacgcacgttttgccttaggttagaattatttttttttaatacttttaccggcgcaattggatgcgccggtaaaaggtgtgatatgtatcaggggctacgaagccccctttcttcccctccacttcattttctgcaaacacaccgcccctcagccaccccctct

SEQ ID NO: 257436 - DNA, 848 bp, Cannabis indica
caatttgatatggcagatgttgcgaaattgtgggttcccgggataacggttccatgataatgatgggcaggatgggtcgtccaatttactgtaccagtgtgaaataaaccctgtggctaaaactggttgtactttgtgagtgctcggttggtaccgagcaagtacttttctgatgttcagatggatagactgaaatatgtgtacgtcattatgaaggggtacaatattaatgttggtcaagtgatctaagtagtattgagcaaattgttcagggagccacaggcggtggccttgggttggctggagtgattattgatctttgcgggacctatgatgtgcctgaattgaaatatgacaacaaggtggtaccgcaaaaaaaatggatgtcaacatggttaacaggctcaaggaacctcatccttatgggtagccacccctagaagcgtaacctcaaggtcgaaggcgacaaagagagcccagtgtagaagaagaggaggaagagccaccacaacttcttggggccattgatccagcaatggaatatactcatgcacagatgagttatataattcagcagaacaaccacatgaaaaactacatggtgcaaaggagtatctacgatgaggggcaagttaatcaacttaactctctgatcaccagaatgaacattgggattgaggaccctaattatctggcgccacctcctcgttttcacccatatgaccaactgtcgccaccagaccctttcttatgagggtctcaggtaagtctctttcctttgccttctatttacacattggggacaatgtgctctttagtttgggggagggacataaatttttaatttt

SEQ ID NO: 257437 - DNA, 889 bp, Cannabis indica
gggcacaaaacccaacagaatcctaccaagtttactgcattttctattctgacagaagatatagaaagtgtgtacatggctactcagtcattagccccgtacaagaagcccgcacccatgaataaagatgtaagcaatagagacatgaccaagttttgtaattttcatggggattatggccacgacgccaatgaatccaacaatctaaagcgagaaattgaatttctgatcagaaaaaataatctgcatgtgcaaaaatatgtcaaggccaatcaaaatcaaaggggcgataacaaccaagatttactaccaccactagtagatggacatctgtaagtcattattggaggttcacacatagcaggagattcaggcaaaccccgggaaaggtatgctcgaaaagtacagcatgagcaacaagaagtagttctggcagtcgaagaaaggaaactcaaaataccacgggcaggggagccaactataacatttggtaacgaagatgctataaatatcagtttcccacaaaacgacccgttgatcgtggaagtccagatagctaagaagatggtggctcgaaccatgatagaaatggagcctcttccaacatcttattcaagacatcgtacgaaaagatggggccacaactcaaagatttaactccctttctctagcgcgtgtatggtttctccggccaaggtgtcgcacctctagggaaaattcgcctgccctcactattgggaaagctctgaagagcataactataatggcacaatttttagtattgaaccttccattcgcatttaatgtcatgttaggccgaccagctttatatgacttaaaggttgttacgtcaatattgttgggttttatgccctaaataaaactcttt

SEQ ID NO: 257438 - DNA, 944 bp, Cannabis indica
attaaaataagagataattctaatttcactcaatcgaccatacaatgattcactatgatatctcacttgaattttattgtacatataaaatacgcatatatactcacatccaaaggacagtgtaaccacaatagctaaaaaaaattctcaaatatcaaaatttcaaaccccatttcaaaaattaataagaaaatacagtacctaatttaaaaaaaaattaaacatacatatattacacttgaaatcacctaattgaacctaattaaaaagaaaattatttatacgtgtattgaacgtaacattaacctagtatatatagaaaatttttgtgataagaacacttgttgtccttatgatgagatttttttataactatacatagtaatgacttttaatggtacacattaattattgtgtaagtaaatacatacaataaattatattattctaaagaattttgaaaatataaatgtcagaataattttaagaaaataaaaataattcaaatcaaagaatgtgtgttaaaaaagtatctaaccaattaaaattttggcaattgtcatatttagttatacaaatatagggacacgattttgtcccgttagtgtacttttacggaatgtattccgtgatgtacgacaactattagatggggtagttatttgatctgagggttggggttgatataggggtaaagggttaaaaaaatggtaacgtaccctgagaccattattacgtaccctgagaaaggctgccgtacatcacctaacgacttaagtacatcacgaaatacattccgtgaaagtacactaacgggataaaatcgtgtccctacaaatatattttacttctattcaatatatatttatatatcactttgggtaattctacaatggacactccaaaatcaaatatatcaatgcaccccttaaactcttaataat

SEQ ID NO: 257439 - DNA, 583 bp, Cannabis indica
gtctgaagttgaagatgatcttgataggtgctcaatgaagactccattgataggataatatttttatattctattttgtgtaattcttttgtttgataggattttgaaggggttctaatttttttgttttttattttttccttttgattatttgatttgatgtgaactcaacaaagtttaataggaatttgatgtctatcactgagtttagtttttaatatttttaaactttacttcactaccatgagcaagtgtcatcgagagtcctcattgagcacttatcgagctcatcttcaacttcatacaaagtacataaaagtatacaatgctatcgagcttatatttaagtttctcgaagaagcatcaagttagcattgaaaacttatcaaccctattgagttttggaaaaaaaaaaatacacaattctaacctagacaaatttaaaagtgaaaaattcacttctttaaagcttgccacagcttcaataacccaaatccaaacaagatcaacaaatttattattagaagaagaagaaacattcatattcatatccattatgtcttcttctttttcagccatgaaa

SEQ ID NO: 257440 - DNA, 636 bp, Cannabis indica
cagatgaggctctaattctaggaaacatcttttacaaaaatctacgtatcacatataaaactattaatggcaatagcaagtatattaaactaacacttatcttatagtgagatggatcttttgagtcttctgtatgtataccgtgagtatcattcaggataacggacgattggctcacatacaaactgtaacgccctgacattttgccttactttacaaaaataccatcttaaatgcataatttgaaaagataaaaaaaaaatccttgaaatacaatagtggattttagaaataaaaatgcaatagagaaggatccttcatttggaaaataaaatacgataagtaaatgattttaaataatacatttcaaatgtatttagatttatcaacaacttaaaataaaactaaggcaccatcggcgttctagatcgtttgcccatccgtagccgctcatagtatgcgtaccagaactcaccctgctcattatacatacttccctgtctaatacctgtggggggaaagtaaggggttgagctaaaagctcaataagaaaatacttatcatacaataccatacaatatcacacataccattaatgtattaattaagtttcagtaatatcatacaccttatttt

SEQ ID NO: 257441 - DNA, 771 bp, Cannabis indica
cactgtcaacaattgcaaaggcaataaaaaacaattggttctttgcatcgtatgttgcagcaactaacattgtgccgccatatcttgtcttcaagaacgtttcgttgatactaatcatatgaagacaaaacttaaatcccctcctagaagcatctagtgaccaaaaacaatacttgaacttgttgtcctctatgacaatgtctgtaatagtacttgaatttttttgttccagcatgtacaagtaaccaggtagctgactataaacttctgctggcgtacccctcgcatacataagtgccttctccctgcacctccaagtcttctcataactcatcttgatgtcatagtcctcaaacatatccatctgtatgtcttttgccttgtacttagttccatttgatatgaacttattcttaataaggtggccaacaacccaaagtgttgcttgacagttatcagcatgtctagaattcaggttacttgtgcgtttgttgtggaacatagtgacatcaaacatgtaacaatgtgccttcttcctcccccacactctccatttgcaatttgaatccttgcaagttgcgtaaaatacatcagtgctaaacttcctcacaatgaactcaaaatttcattttcaatgcaaatattcccactatattttcaatttagtcttgtttgcgtacaactcgccaatgtgtatttcccttgaatatgtaccactaggagaagttttataaacataattttcatttatgtcttcccttgtccacacaa

SEQ ID NO: 257442 - DNA, 525 bp, Cannabis indica
agtttagagagagagtccaagatcatagtgagtgtgtgtggagggatgtaaagggagtatcactcttgaagtgatttctctcaatgtgagacataactctctcgaatcatccaatttcgagcaatatcgagagagttatggccaaaatactatcaatcgacgcagcagaaaaatcaccgtcaaaaccaagccatctggtgaaactccaacacgggccgcgacccagcctttttggggccacgaccggccccctaaacagcacaaaaaatgtatgtttgtctcatgtgggtttgggtggtttcctaattcgaataggcatttaacatgtgcgtttttatatctttttagtgcctgaaaggctatataaagagtgaactggagttgatttgagtgaagcaatttagagggaaaaaggagtacgaatttcagagaccaaagtcaatacaggaagcattctacagagggtctttaacattcttttcttctctattttattctcttttcttaaagttaatatgtgtaatt

SEQ ID NO: 257443 - DNA, 784 bp, Cannabis indica
tatttaaattgtggaattattaattgaagaaaaaagtttaaaaagcatgcactaattaatcatctttataattgaattgttgataataagaaatatatgaatgtattaatattgtagataaaaaaaattcaaaagacatgtatacatatatataaaatttaagtgagagtgagagctttagagcgatgataccacaagcttcctttctaactttaaattttatccaatttttaataatttatgttataaagtatattttttaacaatgaaacaaaattataaaaactcacaaaatacaaaaaataaaattctaaatagtacttaaactgccatatcataaagtttaacaacaagattatataaatatatagatatatgtatatatcatcctaataacacttataatataaaaataacattaatttagaaggtgaggagtcactcaaaagattgtgtatttgtataatcatcaaatagtttagacaattttcttatttatttggttgtctgttaagtctttctcattcaattatgtttactactaatcttaacttaaatagtagcatcaatacgattttgtcaagcataaaaaaaatatttccatatactcttctaagatttatattaattcctaattcgattacaacaattttttcattaacattgtttgtagtttattaaaaataataattttcctccataaaaaaaaattattttgtgtgtataaactaacttctagaattataatacatgctatacttcataagaaattctgtaattaatt

SEQ ID NO: 257444 - DNA, 746 bp, Cannabis indica
aaatcataaattttttaaaaattctcttcaattactaagattgttgtgtttaagatttttatctaattttaataaaaaaaagttaatataaatgaaagttttaatgatatgatttgatacatttaaaatttgagaggcatgatttggtaaatattaaagttcgcaaaacatgatttagtacatgaacaatcaccgaattagtaaaattgaatgaaattaaataaaaatcaacaacgaacatgatttgttacatgtcaaagttcaaagaacaaaatttttaattagcttaatttattttcttttctttgtgagaataaatgaaaaaccattaaattatatttagtctaattaggatttttgcttcgatgtactaaatcatgccccctaaatttttttggtcgttaaaaattctctatgaactattgaaattgttggatttaaggatttttgttcaattttagtaagaaaagtctaatatggatgaaaatttaaaagcataatttgacatatgtcaaaatacaagagacatgatttggtagatattaaagtttcaggagcatgacataaacaatcactaaattagtaaaattgaatgaaattagataaaagtccttaattttgataattttaatagttgagggagaatttttaacggccataaaagttcaggggcatgataatttagtacatgtgaaagtttataaaacaaaaattctaattaactttatatttatgacaagatccca

SEQ ID NO: 257445 - DNA, 910 bp, Cannabis indica
ggtacgaagggttcacatactcccggagagcaagaccataacaaagcacctccgggaggtatcaaatcctatctgaacagtcacctcacatttaatgcccgcatgggaaaagacgtattggaactgccataagtattaaagcctgatggcgtaaccccccttctgcagctactacgctatgattaatgagcctagtgatggctactttatgagaaatcacatcagtcaagaaaggataatggatcacatccacctaacccctataaacctagggattagaccatgcatttcttataatatactcgttgggaatgtgtgcctttactgaataatacagaaagacatgtacctcagttctagggatcaccccacaaaaacactataaatacccccaaactcattaagacagtggtcgagaattctgggtttcataagaactagagagaaaagtcaccaagaatattctctgtaataaatactctcataaataacaaagactcgtggactaaggttcattaatgccccaaccatgtaaaaatcttgtgcattaacttcttacagctttcttatatattattattttattgattgctgaaaacctcggtcaacactacgtaatctatttctagatttatgtataatttggtagcacttgttgaagaaaaactgatttcacctatttatagtaattgtaaaattatctaaattatattaaaaagatgtagtaaacgaattaatattgtaatattaagatcaacatatataaatcaccttgaattttttttactgtggtagaagttactatcacaataaaatgaccctcatcttttttatacacatttgtatcaaacatttctgccatcttaccccacagtgtaatttttgttgtgattgaactgtaaaaagaaaa

SEQ ID NO: 257446 - DNA, 712 bp, Cannabis indica
agctatacataccgtcgaccctgcgtagacagagaagttcgtgtaggttcttgagatcggattcgagtttgaatcgacacaggttctgggccaagcaaacccgccgactcaggattggttaatctgcagtggttccttccggggaggactcgcgtctatagctgacttcgttgttgtcttagtaatcgtcgtaaccttttctttaaattcctcgccgcgtttcaagatcttgatttgacccgtgaagaagctttcgacgtgatgaggcttttcgaccgtggatttggtagccggaggggaggtggtgccatcggaaagaggagggatcctttttcggcgaatggcctgaggacggctgttgttggggcggttgttagggttttgagtatagtatcccatgattcttgagaagaaagtatagagagagagataaaatatggtatgggttttttcccctttctttgctttgtctatggatgctgtggttggatagggactcgtatcataagacaagttgataattcttggttagggagcttacagttttatagctatactaatttttctttttgtgatgaaagtaccaaaacgttaaaataatattaagaaagttacttttttttggccatttcttttaatcctattagcaataataaatttaaaattagaaaataataacaatgtattataaagggaaatttgtggcataaat

SEQ ID NO: 257447 - DNA, 749 bp, Cannabis indica
agattattaatatttaaaagattgtttaattttttagtttaattattgggtttatttgttaacgggagattaaacctaatcgttaaatttaatagaatattcttttatttttaagtatattctgttaaaccaagaattgccgttaaataggcatttttaatatataaagatataataaggctgatataaaccttaatattcggttgcttagtaaggagtttgttttcacattaaattttgttttctcctctgaattcaaactcaactttttatggccagttagcctgaagtggttatatattgtataattcaattataactagtgatcaattggtaagaaaaaaacccatgtatataaatttattatgtgaaaaaattatgaatttttgtctatatgtgcacaaaacaacaaaagccccatcatcaacagcttcatatataattactatacatagtactattattgttgcctaattctcacgctttgtaattatttggtctttctatatatatatactttttctttcgcttgacaaacattgatacgcaaaagatatatttttctttttaaaaaatgtttgtttatggtacagaggcatgtatgtccctttagaaaaatcaaacccattgctaggtagcatcgagtataattagcaaaggatatatacatcgaaatatataataccctttaagtttcaaaatgtaatgaaataaataaaatcaaatattaatgatgatataatggtgta

SEQ ID NO: 257448 - DNA, 607 bp, Cannabis indica
aagtcgacagatttagggaaaaatgttctatgtgttattttatttttgatataaagcagtatatataacatgtacaataagtctataaagagaaacatatcaaataattaagatgcaatgaatccctaaactaattccctaaaaatatggtacaataaaaacagaattattattatatagctatactatataataataataataattaagaaagctgattttccaacaaaaaatctataaacagaaaataattatatgttctaataatagcaattttatcaaattaaagcatttcgattattttttctagttatgtaaataaaataatatgattttggttttctttccagacagtttaataaacaatataataaaatattgtttccgattattttctattttaaacagattcatttcttccattaattattctgattccagctacagtttaataaacgcaccataataaattactttcagtttctgtattgtgacaaagacaacatatctcacatatatgatgtttacaaagtcttttatcatgcggagcataaagatcagtctcttataagttattttatggcatttaaaaaacatatgaagagct

SEQ ID NO: 257449 - DNA, 1022 bp, Cannabis indica
ataaatacataaatcgaaagacaaaccataccatagcagagtacgtcctcttctatatcatcatcattaactctaacatttcctaatatcccagcagcactacttctaattttagggttatcagaatccccaatcccagcttcataatctgcattcaaaattagaaaaggtgttggaagaaagagttcacctcattttgtagtcatctctgccttcttcattacgcaaagccactaggagagagtcttgttcaatcttggtgagagtatcgctccatcgtcattcttcaccgcatcctcatcaatcttctcttcctcagaatcaaaaaattccaccatatcaatctccaatattgccaccatagacctcgtctttctcaccaaaatagagttagaagttgtgggaaactttcgtcactacttaaatctttctcagaactcactatactatttttaacaggcactattgctttaacatttgtagagtgattcaagatgaagacacttataaagaccattaaaagtgaagattaacatgcttttggagattttttatttttggctacagtgaaagctaattttctttattaaacatgaaatcaaaaatacaacattgttccaggtaacttatttatcattcactgtgagaagttaaaaaaattacaattcaaattgcctagacaccataaattagaagttcttatttgttgggagagttcagtcttttactggtctgaatctttgtcctaaaataataccttatttcaacatttttttaaggtttgagttcagtctttactggtctaaatctttgtcctaaaataataccttatttcaacatttttcttaaggtttgagttcagtctttactagtctgaatctttgtcctaaaataataacatttaaataagtttcatacattcatagtaatattaacattaaatgcatttgcatgaaaagataattatttacctgtaaaatgtagcaaaaacattgttgtgtttggtcactaatagaggatta

SEQ ID NO: 257450 - DNA, 1204 bp, Cannabis indica
ggtgggggcagtcgggtgtgggcagcttgcgtggacgagtgtgggcggtcttcgtctgtgtccggtgtgcgtgcggttgagggtatgcgagacagacagagtaagagagaaatagaggggaaagagagaggggagtcagatttgaatgaagggggtaatgtgggaattaagtaaatgttgtcctattttaccaatataaggtattttaagtttaagggaaaatttttcccttaatgtaaggataaaaaatcaaattttccatttagttttccatccattttcattagttaaatgtcaagttagaatgtccatgtgtatactcatataataatgataaattattatttttgaattctgaaataaattttttaaatgcttttttataaattttaaataataaaattaggtgtaccacatgtacgagagtgtagacataaacaatctatgttagcataaaaattgctaacagtttagtaattcaaagaattttacccctaaaaattatacttagaaagttaattgcaagtgaattggaagttcaggggtaaaattccttttgtgctatgacacaaacattttattttttataagagcctattctttcttggtaaagcttagaaattaaaaacatacaaatttattaatattattataggtaaataccccggtatgatgagggatttttggtggggctatgagcagagtaaccgtggcctttacctgaaagcgtgggaccacctgtgccttcctaaagcgagaggtggtcttggattccgaaaggcttcgaaattaaactatgctttcttgacaaaatggggatgggcccttcttaccgaggatcagtcgctttgctgcagggtgttgagagccaaatacctgaaaagtaaacctttttcgaatgctacgtataataatgctgattcttggttttggaaaaatgtggtcaagactaaagctatcctcagaaaaggcgcttgcaagctcatctcaaaatggggaaaacacgaacgtttggttggatccctgggtggttcatgggacggatttctacccgaaacccatctcttcctttcctaggagagtagcgaaggttttagagctgttgttgagtaatgggggctgtgacatctccttgctaaggtctatgttcgactcggccacgattacgaacatcttgaaacggggtagacctagcggccagggg

SEQ ID NO: 257451 - DNA, 784 bp, Cannabis indica
aaaaaattgaaaagtgaaaacagttttacagaatatgtttttggaaaatatattttcacttttctaattttaaaaacagaaaattgaataaaaaagtgaaaccaaacgccacctaaacttataatatgcttttatattttttataattatttaaaaatttccttagattagttctttttactgaatacttctaaaaaagaaaaatataaaaatgaagtacataaaattatcacctttcacaaaacaagtaacattaccaaatttagaacatagtatagtcacaacataatttgaacatgatttttcttttctttggtataatgaaaggaactaataatttgtgacagtatgagtttaacatatacctacctaataatcaacttttattgaaatgaaatttgccaaataatgagtaggaaaataaacacaatttttttgtaattctcgtgagcaataaaaacttaaagtatgcgtaattctactactgtcgcgacacgggaagtgaattactataaatctcttgtgtctctctatttacttaactactattttttttaatattctagcgagtgagtattagccaaatttttacataaacacaatttgcacaaagatatctacaatttacgaattaaattgtgcgaattaaatatatctattattttatcaacatcccaccctaatataacatatgtttgatatatgatttaaaaagggaaatttacatggtatacttatttttgtctatttttttttactaaaaatactattaggtggtattttt

SEQ ID NO: 257452 - DNA, 606 bp, Cannabis indica
ggacgaggatgctgagcctctaaactttggaagatataatgatgtcgggtcgccagtgtctgcagagggcgaagtcgtagttgaaggagtagactacgtcaccgaggagcttactgcagtagttcctaacaggaggcaaggtgcctaaggcgctagatgggtgagtcctccgtccaaaatcattgaagcgcgtatgaaagacttggaccggtctggttatcttggcagacttgaatgttacgtccctacttcaaatcaccgagccacaaacctgcggaaggggatgtgtgccaggtcaggtgcccacactaatcaaggggcaatgctgcctttgcactcatacttcaagaagatgggggactattttcgtctttgtcttacctagtttactcccaaggtcattaagtatttgtctgccctgttcatcctttatgccatctagaagtggggtgcaccttctccgcacgagatcagttggttttttgaccagtagtctacccctaagcaaagcaggtcgggctacttctacttctctcagccagatttcaagtggttgacaggcaccgtggacaaggtcttgagcaaaatcaggaattttgttgacga

SEQ ID NO: 257453 - DNA, 751 bp, Cannabis indica
gccctccttactgaggatcaatctctttgctgcagggtgttgagagccaaatacctgaagagcaaaccttttttggaagctacctctaataactcagactctttgttttggaaaaatgtggtcaagactatccctatcatcagaaggggcgcttgcaagcttgtctcaagcggtgcagatacgcacgtatggagtgatccgtggatcgtccatggaaaggatttttaccccaaacccatcttttctggcaatgagagggtggttaaggtggcggatctgctcacgagtcagggagactgggatatctccattctcaggtccttgtttgactctgacacgatctcgaatatccttaaaggggggaggccttgtggccaggggacagacaggtggatttggactaaggaaagttgcggaaaattctccactaagtctgcttatttgcttttgatagacgagagagcccctgcctgtgtggtagcgccgaccttatggaacaaactttggaactccaaaattctcgaaaggcataaattcctttggtggggtattctctctgacgctttaccgatctgcggcctcctagctaggaggatcccaatcaaagatgacacttgccccttgtgtggggaggctgcggagtctatggaacatcttttcctctattgtaactttgcttgccacctctggaggtcctctccttggagagtcttcgcgatccttgctctgggggtcgagtttgggattgggt

SEQ ID NO: 257454 - DNA, 1147 bp, Cannabis indica
tattttattttaaaatataattttatatttagtcatcaaattaaaatttatcactgaaataattattgatttaaaaaactgacatatttaaaaatacaaaataaaaataaaaaaatactaatactaataaaaaataacataacaataagttataaaactaaaaataacaacatcgattaactaaaaactttgtgagcattaggatttctaatttaaacgttttatgagtcaaattctaggctaaacttgttgcatagtaagagtaataaatatattgagtttatcggtggactaagggtttcgctaattgttgatagggcctagaaggtatcgtaggagttaattacagcagagttgaggtaaggaaaaattattatactttatacttactttttatatagtttgagtacctagtgagactgcttgaataaattgtattgaaactgtggaatgtgatagttccggtgatataatattttgtcgatggattgtatatggctatttaataatgttccaggtacttggaagtggttagaaaccacacatgtatggttatgtggtaagtgaggcagtgtacgtaagggtgcactagtcattggtactgctttctggttaagaacgtaagacactccagatttgtatggaagctggagtgtgagtgtgtcatatttctgtattactgtggctgcctctatttaaaaacatgatggttttattgtatggttgatgtatgtgattgtgctatgatgtgtgaattgtaaaaaccgcttagatttaatttggaattagaagataattaggatttaattatggaaaatatttattaattttgaattatttaattatgatgatttatttaaattcagaatgcatttaatatgtcatatatagaaattttatagttttgcatgttttgtgtccggcaatattggaacgcggtgtttggctattagattcacatcctagtatttttagtaacgggacaatatattttgacattgcgaatgtcaggaatgggcgggattttaaaatttctcaaaatacccctaagtgccctttatgcccttttagtgtgggaggggcaaaatagtcattttgccccataagctttttgtcctttagtggacttggctttagttagtaatct

SEQ ID NO: 257455 - DNA, 691 bp, Cannabis indica
aaaaaccgaaaggttttttaatggagcttaagcttaagaaaactcacttaagcttaagaagtgtctaaagagtggtgagacactaaaactccacctatatggactagaggtggtgccgcctcttatgagaattgggagttattctctagagagtccatgaattggaattttgcacatggccattaacggtgcaagagcgagacatgcggtctcaagtgagcattagcgagggtgtgtgtgttatcaccggtttgtattaaaggaataatggttcaatgctacggcaaccaaaatttcatcaaactttgtggtaattacactaaggtaaaattcaagtcgaaagacattttacctaatgcacctaagcaagacttctttaaaagtgtgtatttagtcaatcaaagtgggggaatgttatattttgatataatatttttgattgattaaataaatgttacaaaagttacaagtttgttactaaagagataatatttaatctagtgggggattgttatattatttataataatataatatatagattaaatatgtgtaataaactaataatatgtaacatatgacaatgtatattagttgtcatctttttgtaacatttggggagttacttgttactatgagtaacctccaccattatcaccaacattaagagtgtaaaagatgttacacatct

SEQ ID NO: 257456 - DNA, 1029 bp, Cannabis indica
tgcggacgatagcttgctattttgtaatgctacagagagctcttgtttggctatcaagcgttgtctagacatataccaccaagcttctggccaagtgttgaatcctgataaatctgtcatttctttctctccaaacaccactttggcggctcaagttcaatttcatagagtgctttctatgcctatcagtgaataccatgaaaaataccttgggttacctgcatatacagatagagataagaacaagctgttcagtgaaattaaggaaaaagtatggcgtcttatgagaacttggaatgacaaactcttttccattggaggtaaagaaatcctactaaaagctgtggtacaatctatccctacttatttaatgagttgcttcaaattgctgattactctatgcaatcaacttgagacaatgatgtcaaatttttggtggggatctaatgaaaatggtacaaaaatccattggcaaagttggaaacttttgtgtaaagccaaacttgatggtggtatgggctttcggtctttcatacactacaaccaagcgctccttgccaagcaagcatggagacttcttgacaatccctcatcacttttgagtagacttttgaaaagccgatacttcccacacaattcattcttagaggctccacatggtcactccccttccctcacatggcaaggtatccttcacggcagagagctcttacaatctggtttacgatggaaagttggggaaggtagggacatcaattgtgcaatcgatccatggattcctggccacagaaaatttcaaccaattcattatgcggggccaccaaacgctgttgttgccaacttgatcgcaaaagatcgccaatggaacaagcagctgctagatgagtttttctcaagtattgatgtggatcgtatactaaccatcccactgagttacttttcagcaaatgatcacctcatctagcactatcattcttcagggatctataatgttcactccggataccatcatgctgcttctcttgaaga

SEQ ID NO: 257457 - DNA, 1595 bp, Cannabis indica
gtggtatgtctagttcaagtcccaattaaaagtttgacccatttgcattaagaaggtccagaaaattaaaatcctagttaaggatgtcaacttaggcactcggtgaaaccctaagtgcccagattgacttctagggtacatgttcatgtaatttcaactcacgaggcctagatttgattgctccatgtcttcatggtatagaatacagaaagataacgagttggaaacaagttattgaagtctaaacttctaggattcccaaagtcaacctgggggcaaggggcctctcctttgttgactgctatgactcaggtctactaaactctgtgacatcatctttcttgccacgagtaaatattgatgtccacatcatgagggaaaaattttgaattaacaaattgtacgtataaagaaatgttgaattttatttaagattatgttttccttacatataagaatagaatatacatttgatctattaagttttgaaatatatttgtatcatgtatatatattagatttttaaatcactatttcttacattaaaatattaattgtaaatataaattttttagaatatatataaatatgtgtgaattgaattatatcggttacttttacatgtcaaataatatccaattcgcacaagtacgaatttttgatttttaatccaatccaatccacacaagtgcggatatctgcactttacggatattggattggatcatacgaattgaattgaattgattaacttatgaacacctctaatttagacaagatggttgtgttgaatgattgtaaccaaactttgacttggggatttcctttcttgtgcatctaccttagttagggtagatttgccctcctttttttttaggaataaatttctctctcaaaaaaaataattattataataattaattttttttttttttttcttaaattaagtgctacaactattattaaacagaatgagaaagaaaagaaaaaaagaaaaagatatagtgtaactatactaattatttttcgctaaacgtaattatacaactattactattacgtaactattttaaaaaacactaactattattactttaaaatattattttgtgaatattactttaatatatgctaattagtttgtgaatatttagttttgctaatatcttacttcttactattttaaaagttacataatagtgtgatattttaggtactactttaccctctatttaaaaaacgataattttaaatttgtcattttcttttcttttccttattttatatttaactattttcttttaagtataaaagtatctatttttttcctcttttcacatttatttattcctatttttccatttttaatgtaatattatttttgttcattaagttttatattgttttgaatgatattttaggactactttaccctctattaaaaacaatatttctaaatttgtcatttttcttatttttcttatattatatttaactattttcttttgaaataaaattatttttttttctcttctcaatatttatcctattatccattattatataatattatttttttcatttagttttatatt

SEQ ID NO: 257458 - DNA, 964 bp, Cannabis indica
aattttaaaattttgcacgaggtttccaaaatactcaggccgccctgagatatactataagtaaaataaggtgaattcaattggatgaataccactacacacaatatataaaattagtttattttaatcagattaacacgtttaattatcaaacagattgttttgtaacaatgacaacatatctattatgtttggttttaaaaaaatatacaatagggtaagtccgttataaattattcgtattaaaatttataatcgtattatttaatacaatttaaaattttatatgaaaaatagtgtaaaataagtataatgtctatcattatttagattgacatatttacacaaatcgaagacttttttaatttatttccttatccttcatagttcgttaactttctgatgtgacattaaatgcctaaggccctaggtaattttttacaaaactttcacaataaatttaggtgtaaaactcatgaatcaatgctcccgcaacgtgaagacataccagctagctactagtaaattggtgtataaaataaacgtaaaggctcttttggtacaccgtataagaatcgtattgtattaaataataaataacactatgtttggataaaaatattgtattaattattacgatcaaagtttttaatacaatgtatattgtattatttaatacataacaaatgatccgtattaacttgtattataatatttacaaaagattcgcggtcaacaccaatctccaacccgaacccggacccaaacctaggacccggacccagaccaggaccaggattggaatcagggcccggacccgaacctgaaccctactcgaacctgaaccccggacccaggacccgagacccgaacatggacccgggatcttgatccgaacttggacctgggactcggacctagacccgaacccgtagttggtattggggttgagtgtattgaaaat

SEQ ID NO: 257459 - DNA, 883 bp, Cannabis indica
aagtagcagttttttgtagtgaccctctgtttgtggactgtatatacacaaagagacttgctacaacaattagttgctggtatggcttcattcagtggctgaggaacactaaggagcttcaaagagggaccctgaaagctttcaacttgcaaaatcagctccagaatgctgtcattgcagcaacattgtattatgtgtggcggaatagaaatctttgtgtttttgaatctaaatgtttgattgttggtaatgttagcttgatgataaaaaaggagatcaaatatagagttttgggtcttattagtagaagagtaaaaaaaagaacaatatgttatggccactaatgaaaaatggtgacttgctggtgttgttgagcaaccgtttggctggctgtgtgcttgtacttgtttgtggtgattaatatattcagttagttcaaaaaaaagcttaatacagaataataaaagaaaaaatatccaaaaggttcactcaaaaactctctagtgaataatatggcatgatattatttatcaacaaaagatgagaagatcaatgtgattttgttgattttggtttggattttgactagttgaagtagaacgctccaaaacaactttggagcaaaagagtcttaaatttaattatgtagttgattgattgtgtcttagttcttgaatttaattttgtttggttgggatcttagaggtaaaagcaaaggtcaaagatttgagttgaatctccaattcttagtaggtaattatgtatatatacatatgtattcttagtagtaatctcataaaaggaataatattaatacagtaataactataaaagagtagtctagactttctttttggatttgtggtattcagagtctgatatc

SEQ ID NO: 257460 - DNA, 1519 bp, Cannabis indica
acgtgcggagcacgtgtgcctcccactagtaactcaataaattaattattggaataatatatgttcgtacgttgatgataccatataatgaaagataaatactattttggattctattttgtaaaaattattaattttgttaaataataaactctaaaatagtacaaatatgacctgaagtgattttttgtcgaaataaaatttaatgataattcgaagaaaaaaaaatgtgttatgacaaaactgttttcgttttctgtatatttttactattttgaaaaatataatgtttattttgtcttttaacaaaacagagagtccaattaataattttgacaaaacacaatgtccaaaatagtatttactctgtaatcaatctaaaacattatattttcaaagctctcatttattttttccacattcttctttcttcttcttttgtttagttgaaaggacattatatgttcttctttttatggaatgcaaacagaagagtcataaaattatgagtcaatcaaagattcaaaatgagcaaatgcaatgtaccttggagaattattgatgctaagtgctaaaaatggagactcaaatagtactactaatgttatactatagtaattgtgagaatatatgtataaatatattccaatatccatcgtattatacagacataaaaagaaaagtcttctattctgtcccagtttggtttttaaacgtagacaactcaactcaactgttattttttttatgtttgttttttaaataaaaataataatgattttattgcttattatggtgagagagaaaggtaaagactaaagagtatgtatatctgtagaataaagattaacgatacgtttactatgaaaatattagtaatataagaattacattagaatagaaatataaaaagattaatatttttttatatggtttatggaaatagtatttttttttttttgactagattcttttagtttcagggtgttttaagagtcctacaatttatatctcaacaccaatcaactttatgattcatatggtctttgcaacttcaatcgaaatggggcaacagaaattgtcatttcttaaacaaacagtgagtatttgttaatttgcttaatctatgtaggttctattaacatctctaactcttaaaatttattaaacaactaaatgagaattattatcaaacaaattaaattgtacgttactacaccaaatgagactttttgtcagtttcaaacggacgctaatttatcttaataatgtcggtgtgcatctactaaaaaattaagatttctcgaatagtattcccgtcggtcttagcaaaactaggtagaattgacgttagtgaaaaaaatgttggaagaagtttttcccgacactggaaaaccgtcgacaatactaaacgtattgtggctaaacacatacttatcccgctaatccgaaatttactagagccaagagcaaaaattaaactttaaaaatacagaataaaaataataacttgtaatta

SEQ ID NO: 257461 - DNA, 714 bp, Cannabis indica
tttgaagcttgtaagctctacaatatggtgtatgtcttagagtccaaatataagttttattgtagtgtatttgtaccatgagtttttgtaggaaaccatagattaccctgtgcaaatattcagtagtgtttaggataaacacttattggtttacctgttattgtgacagggatgagatcattggggaggtttctcatcttagtttggctgacatgcatgaaactagatcaaaggtaagaaaagtataatataccacatggcatgacaggtttcataattatcgacgttctgattaggtagtgatactgcgaatgtgatatacaatctcacctaattaggtgatgtgacagatggattctagattatggtatggacttgcctgattaggcaatgtgatatacaagcacacctgattaggtgatgtaatatatggatctcacactatggcatcggtttgcctgattaggcaatgtcttatacaagtgcacctgattaggtgatgttagtgataggctatggcacagactgaaaccattgttaggtttcttcctgtcggtgatgcttacatgttagtcctgagttgtggcataggcttgcttgtttaggcaatgcattcttatcggtgatcctgcttagggacgagcagcagtgacatatagttgtggaacgaactctcctggttaggcgatgcgatatatgttggaaatattttac

SEQ ID NO: 257462 - DNA, 910 bp, Cannabis indica
acacatatgcttccaactagaccaactaaccccacgtttttgatgggagcccgaactccaccaatatttactcatcattccttctaacttattacaagtttccatatagatctgtgttgttaggttaggatcattgttgtttttttagtttatttgttaatttattctaatagttattttgttattaattttcttagttttttttttagcttttaaaatttagtttactagttttcaaaattagttttaaaaaatttagttttctttcttgttgtttgtcctttttagtaatgttactgtcatagttattttggtattttttatattagtttactattttagcaatttaacattagtttagtttagtttatttatttaattattaatattgtagtatattaaatttagttattttatgtttttaaaaaaacttagtttactgtgtttgtttgtttgttttttttttgtttttttttatgttagtaatgttagggtttatttattgtttagtattgtgatgtgtatttttggtagattgtaattttttgtgttagcaatggaaaaattagtttacaaaattttatgtttatatttcaaacctggtaaaaagattaagtgaaaattcatgttattccctaatcaagataacattgtggttaaaaatattaattccaagttgactgaaggtcaacgtaatatttttcgtggtgcttgttttggtcattttttagatagtcatcctgttgaaattcagtctcaacttgttcataatgccttacatagggtaaatatacacacagagataatgcttttgttgatcaatgtttttatgatcagacatatgtacaatgtatatatttaatgatttaatatatatatattcattataattgtaataaattaatatgaa

SEQ ID NO: 257463 - DNA, 1051 bp, Cannabis indica
cacttattagtcaacttcgaaatgaatctgttaagtgatgccatccttcctgttagtgcttgtacttccttaggctttgttggtgatggcatgtctattaatgccttgattttctcgggatttgctttgatacctctcgcattgactatgaatcccaaaaactttcctgagaaaactccaaaggaacatttttttgggtttaacttcatgttatactttgtttactaatttgaagcatttcgcgaggtcagtggtgtgatccctactttttattgatttgaccaacatatcatcgacgtaaacctccatgttccgtccgatctggtttgcgaacatttcgttcaccaattgctaatatgttgccccagcattcttcaacccaaacggcataactttataacaatagagtcccatgtttgttacgaagcttgtatgctcttgatctgtgacatccatttttatctagttatatccaaaatatgcatccatgaatgacataagctcgtgcccagcagttgcatccactaactggtcgatcctgggtagtggaaaataatcttttgggcacgccttattcagatcagagaaatcaatacaagttctccaagttccgttaggctttgggacgagaactggattggctatccatgtgggataaaacacctcgcatataaagtcattaacaaacaacttatccacttcctgttttagttctcattgtctctcggaatctaagggtcttctttttctgtctctttactgggtaggttggatcaatacttaaatggtggcagataatgttagggtcgatctctatcatatctccatggctccaggcgaattgatcctggttcgcctttaagaaatttattagctgctatttgagttgttcgtccaggttcttccaaatgtatacacactttgtgggatttcctgggttgagaataacctattccaattcttcaattggttttaataagtttctttcttcttgaacttgggggtcaagatctttgtctttttttttcattttcttcttccaagatcgtca

SEQ ID NO: 257464 - DNA, 1105 bp, Cannabis indica
agatcctggtaaaataaattccaacaaagaagagcaagaggtcgccctcgtgcgcaagcgcaagggaaagatggtggaagaggagccttctaagcgtccccagagggtggacactccggccccgagtcatgactctgggattccctccgaggcggaggaatacacagtgcctcatggcattgtgttgactccattcctcggggacgaggagaggcagaatcttcggatagccaagcacaattatgcccttgacgagtacacccgggggaacgctgaaatggaggccttgaagagggtcttacgagaggagtaggaaaacgtcctcaacgtggaggacttccagaattcgtgggacctaaacatggacccactgacagactggttcaaccgttccttaggcccaccttggccccttttgcctcagagatgaccagcgagtatatctcccacctaactcaattcccgcccaaacggtacgctgcatgtgcatccttgaactccttctaccaggttcaagacatcagcaacgccatgactgcggtaagtacttttatttatttctttcctcggtattttgtctaagggttttattctcactcttatctcctttttcgagattactgcggagaccagccgtctttccaagaccatagtcaatcatggcttcgtcatgtccgaatttgggggcatcaacgaagccgtgaggatcttgcgggacttgtctgctgagaggcgggcgatccaggaggaggccgagcgaagggtggcccttgctaaggagaagcttgaggaggaggccaaacaaagggaagcccaggcggaggtccaacggaaggaggctgagctggaggcgaggcatcgtcaggcgctgaaggcggagggtgaggtcgtcgccagggccaggggtgagcttcgggaggcaagggaggtcgtggacgaaatggctgccaaggtgaagtctttggaggagttacaccaggcggacttgcagtccaaggataacttggcagtggagatgaaggagctgaaggacttcaaagatcaagccttgaagaaggctaaaagagatgagctcttgtccactgtctcctgcaagcgttgtgtc

SEQ ID NO: 257465 - DNA, 978 bp, Cannabis indica
gcataaaacccaacagattccaccactgattagaagagggaagttactcttgcatctggtggttcagggcagagcaagtgattctgtgggaaccaaggcagaggtggacgccagggttactcttagcttgagttccgaagttgtaagaaacatcatctgggagagtgcaaccgcaggacatgctttcagtgtggcatggtggggcatttcaagaaagattgccctcaagcaaagaaagaagagtcgaagtcagaggcaaaacctttacttcctgggatgtttgccatcacccaagctgatgctgcagccagtccttccatgctgaccggtcaacgtcctgttaacaaatccttttatactgtgttatttaattcgggaacaacacactcatatgtggcaacacgagtaattgatctagtgggtaggcctggtgatattcttaaaagagggttttgaaccctaatgtctggtggggagttggttatctccaatagacacattaggtctatgcctgttaggatcaaggatagggagttgagtgctgaccttatagaactggaattaatagagtttgacatcataattaggatggattttttgtccaaatattcagccagtatagactgtaagtagaaaatggtgactttccagccaaaaggcgaggatccatttgtttatgttggattacttcagggtcggatcccagttatttctatgctaagggctagggatatactaaagagtggatgtgtaggatttttagcagtggtgatagactctagcagacccgaaacatttggccctaaggtagtcagagtggttaaagactttctcgacgtatttcccgaggagttgctgggattaccgccgcaacgagaaattgattttgtgattgatttggcacttggagctgaacctgtttctacagctcggtataggatggtcccagcagaactcaaggagcttaagttacagctt

SEQ ID NO: 257466 - DNA, 544 bp, Cannabis indica
ttccattgatcaatagaccttaatgcgaactgaacaacatcactagcactccggcttttctgatcccagaccaattcattccgagccttccatatcgcccagcataacgtaccagcctgtgcaactttctcagcatcgactgtgttcattaagtgctgcaaccagtctcgaaatgaatcccaaacccgacccctaacacacacagcaagcttctcccaacaagcagtagcaaaatcacaattaaggagacaatgtgtgatagtttcactagaaactaaacaaaaaggacagctatagtccaaaggtaccttcctctcaaaaagtctcttcctagttgggagacaattagccgctgccctccaaaggacatctttgacagtaggcggcactttgacatcccataactctttccaaaactttgaatccccagtcctttcgtcaacgttggagtcacgattcatgagtaattggtaagccgattttactgagtaacaacccaatttctccttcaaccaataccaagaatcactagcatcattaatag

SEQ ID NO: 257467 - DNA, 994 bp, Cannabis indica
gatgcaatatattagtgccaagttgtggcatgggctcacctgattagatgatgcaattatataatatatgggtgtaagtttttggcgcgggctcacctgattaggtgatgtagttgtgcagcatacggggccatgctatggcacgggcttgcctgattaggcaacacaatacaggattatcagattaaagcatccacttgcttgattaggcaatgtgatgtaatgaagatggttactttatgaagtaacatatatatgatttatatttttaaatgaatataattcctattattggtagaataattttatatcaccaaatatctgtatattgatacctattcatggaagattccagttgtgatctagatttcattttatgaacaatgcgtaatgttttgattatgattgtgtataaatgataatattcgaataataaactatatgattattattattacttttcttgctgagtctttgtaactcacggatgctatgtggtccatgtcaaggcaaagaaaagctggatcaaccatgaagtgacagtcttctccagcaatatacatattgacctcgccagcctgcatgttgggttgccaagacttattttgggctgtatctattgtgtattttgattttatatatttgaggtatcatcgtatatagtttcttggaaaaatttttataacagggatccctggaacacgctttttatgccattataatgtctgtttttagtattttattttagttaagtttttaatattatcacgatttttaataattactattggtattaaactagtttataaaatcacacacgtgacgtccctatagattagggtgttacagtaattatgcttagaaatgtaaaactaagtgatacatcaacacttctagtcaattggtgtttggtttaatatattactaattaattatttacttttacagtctgctcagcaaaagaaaagggggagaccaccatctgccaacccaa

SEQ ID NO: 257468 - DNA, 545 bp, Cannabis indica
atttatttattacaaaataaataattactattttcccaattcaagatagatttttcgaacaacattatgcaactctttatccctacctttgacagtatttcaaggtgccattcgggaatcatagacctataattctaagctccaataaagtagattatttattgagtcttatcaacaaaataatattatttattaatttcatgattatttcactataaatatagaattgaaatcttagtaattatataattatatttactgagttttgctacagtgtccattgatataattaatttcagtgattagccctcttgtgtcgcttcgtaattagttttggtcaaattactgttttacctttctaattacttctatatcatttagtaccattaattcattagtgaaagtataatttagatcccatctgaatttgcgtacacttttcagttttaagattaacacataaagggaaccaacatatgattcgttaggaaagtcaagatttcaaaattgtagatcatgttgccagccatccatattattagatt

SEQ ID NO: 257469 - DNA, 945 bp, Cannabis indica
ctttgatgcctatccgacacgaagactaagttctcaacattaccaatcgcttctttctattttctcataaaataggtctaataattgtggtttttattgtcaactacagcgaaagctatcagaaaaatatggttgcctgcatggtgtaccccgaactaggtgtagtgtcttctctctgcacctccaagcctttcataactcatttggatcccgtaatccttgtacatatctttccttatattagaggccaaattatctgagccatcagttgcgaacttatacttaattagagtggcaattatcaaaggtgatgcttggcggttatcttttcctcaaagattaagggaacatgtatgtacattttgaaatgtagtcacctcaaacatgttaaaaagtatgttcttcttcgctcttaatctccaccgaaaatctgtatccttacatgtaacataccaaacagtattaccgaacttcctaataaagtggtcaaaccctttcttcattgcatacaagacaacaaccatctttaaatgctttttgtttctaaaaaactttcctagatgtaactctccacctggtgtgccacccatagatatataatgactatgatcctcgatgtcttgtaaacattttctccttgaatttaccgtaacttgtcgaagaagaaaatagatcgctaaatccagtccaacactaggaccactagcatcattaatccctctagcattactggttccgtctggacgactactaatattactaggtgtttgatgattttctctatggggcattcttttttgtgtcggtttcctgggtggtatttggtacggtagtagagtcaagttcaaagctacagtagtagagacctcttgttgaattttaaacccatttcaatataattagatttagtaattaataaagatcagaaatcgttttatgttgcat

SEQ ID NO: 257470 - DNA, 691 bp, Cannabis indica
aaaaaaaaattaacaagaccgcgcgaagcgcggcttagttctctagtattttaataaaaggcagtgtcgtataaaacattaaaaattatactgtataaaagaaaaaaaataccgtctagtaatataaatataaaaaataagaaaaactcagtatactgtacaatttttcccatactattataccaaaccaaaaacttactagagcactctcactttataatagctaaaagcttaaaaaaaataaaaacaaaaatagcaaaaggcttaaacttgatctccatcaaatgttctaaaatcttagttattatagctcatttcaaactttaaaaaaattctccacatatagctcaataaatagtggtgagctaaacatactttcagtttttttttttttatcttcattctttaattaattctatttatttctttttttggtcattttttaaattttaaataataaattctatgtaaagatataatatttaagagaattgctaaaaatgtacatagtgtctaacaccatctttgatgtcatatatgtcttatataatttaagaattttttttttttaaaatattgttaaacaattttgggaaagctacctcattctacaaagatattgcgtactagtgcataatagtaatatttaatattaaataatgtagagtaagatattgaaaaattaatgtat

SEQ ID NO: 257471 - DNA, 664 bp, Cannabis indica
tatatgtatatttatgagaaatgctgaaggccgggcacaagtgctgcctagcaccctcctatgttcaatatcactattggtacaactaagtatcgggtaccatataatttaatataataatttttagaaagtatcgatagtcaatcacagggcgacatatcgatagtcaatcacactagtgcctaataggaatgctctctttatattttaatttacacaatcaggatgttaagtaaggtgaggtggcactttctatggatttattctagtaatatcttttctctcacttttttaatttttaatcttatttaaatactttttaatttactttttccatgtaaacagtatacgtaattgtaattaagtaccaaatattaaaatgttgtaaacttaaagtcgttttatatcactattaaatccataataattattatttcaaccataaccataatgaacaatataacattcttaatatagatcaatagataattagataggtataaatacaggtgtgtataaatttatctaatctaatgacattcgactgatttaattataattgacgtcggctaaatattagatttctaattataattggattggattggatgttatttttgaatatccaatattgtatcaaatcgggtgttggatggatatctaa

SEQ ID NO: 257472 - DNA, 1051 bp, Cannabis indica
tcttcccactttcacactgctctgcaatttcgtcaaattttcccccaatctcagaacgaaaaagctcatcaacctggggatcttcctcatgttctaagcagtctgtgaactgcttactcgatttctcaccatccgcaccatcttggattgaagggggatccgaatcgatgaatcgaaaaggcttttgaatagctcgcttcttcttcgccatggaagagagagaaagctacagtcgcacgcctaagattccaactctaattttttaaaataaatattgtattttatattgtaaattatttcgagttctcaaaattttaaataatatcttaaataattataatgtacaaaattataaaaaattagactgaatttgtttctaaatatcataataataaagggtgcatacccttttgggagtaccataaaagtttcctaagattatatatatatatattaattttttgtcttaatgtttaaatgtatttattttatttacaagtgagtcactcttcaagagaaagattgcaagttaaacactcttcgggaggaagattgcatgtgagacactcttcgagatgaagtgtgcaagtgctacgaattgaagggagttcaaggtctcgacacttctgaaatctaattgcaagaatagactacaacagttgcggcaaattcaaagagggagtttttatatgtataagccaatttggttttgtaaacacttgttattcatctaataaatttctttctctaggcgtggccttgtggactaggagcaattcgaaagagttgtcgataccacgtataaaatgatttgtgtcatgtaggtctagcttaactgtactatttgtgttctttgacttgttcgttaaagctgatcaattagatcggcccaatacttacattttaggaacatagtacaattgagtgggagcgctaatcatagatacgaaatctatagcttctataataacatataagtgaaatgataattttctttgagtttggcttaaaagagataaatagaagagatcttattgttgggttttgtgcc

SEQ ID NO: 257473 - DNA, 1060 bp, Cannabis indica
catcaggataaaccattgtaagagcatgatgtatgaattatgaatatgtgagtagagttatgcgagtaagacataaccaggttagactcggtaactataaccgagacaaaccctagtaatgccttaaatgtaaaatagatgtgtgagcgtaacacgtgagtctatgctatatagacattaatagacgtgtgagcgtatcacgtgggtctatgttatatatatattaattatagtgacattattatatatgcaataatgtgatataaagttatttatttaaatttagtttattattagctttaaattatttggcttacagttaaaatgtgtagcatgccatatacttatattaaaatatacacacaaatatatatatatatatattatgctaacagaattatatactcctagtatacataacaatataaaaaataaatatcagctaagaatatcatacaacaaagtcgaatgaattcagaacactaaattatgaagtattcaaaggtcatttgaacaacaacaaaaaaataaacagactcacgtaaattagcgacttctcaaataatataatgtaaaatatatgcaaatgtttaaaaatatgagatttttacaccatatattgaaatttctaactttttttttactgtgaggtagatttttttttcaaaaatactgtatttttttttcaaaaatactatttactgtgttaagttttcactgttgttctacggttattttttacttgttctactattatttttaattattttattttgttattttacggttattttaggttgttttataaaatatagtatttttataaaaaattccgtgtgatgataaaattgtaaatttttgctcaaaaatcacgtatttttgtaaaatccttttttttttattattattattttgtttgtgttaggccaatatgagaagccaaggtgaggtccagagccagttacaaaaccgaagtctcatcagtcggtaccctagaaatattatcaagcttgttcgttcactactgattgaaggttggagagttggaattctgtttcaa

SEQ ID NO: 257474 - DNA, 887 bp, Cannabis indica
tatcaaagatttcagttagagcatcacaagactctcgattagcagaaccaaaaataaggctatcatctgcaaaaaataaatgagttaaagaaggggccctacgcgagatagaaataccctttaaatgatgtctatccttatgaaatctaagcaaggaagataaaccttcagcacataaaataaacaagtaaggagaaaggggatccccctgtctaagaccccgagtaggctgaacactaccagtaacactaccattgatcaaaaaagaaatcttagtagtagaaatacacttcataataagagacacaaaattttgaggaaaattaaattgagacataatactatgcaaaaaatgccattcaaccctatcaaaagccttagccatatcaagcttaagtgcagtccaccctaatttaccatgctttctaatattaatagcatgaacaacctcttgagccagaagaatattatcaaagataactcttccagaaacaaaagcactttgagcaggggaaacaaccttgcccaatttaatttttaaacgattagctaagaccttagaaataattttacaaaaagtattacataaattaataggtctaacatcctgaatagaatgagcatgttgtttcttaggaattagagtaatcaaagtctgattaatgtaagaaaagtcctgattattattaagacaatcaagcacagccttaacaagatcttggcatgctaaacttagcattttaacaaaatgtattagcagcactactaatatataaataaaaaacgttctcactgttatttaattctttttcatttatttaaaaataaaataaaataaaatgtacttttatttcattattaatgttgttgttaattatttattattt

SEQ ID NO: 257475 - DNA, 1073 bp, Cannabis indica
tttataggaatccttctaggtttaggtttgagttatatggcattaaaaaatgataacgaaatggctaaattgagcttaagtggccgaccattaggatgttggcccacgaattacaattttgccattttactcaattatttatcctattctttcacaaatgtcatattttccaattcaaccatttatatgtcaaaactatatatttaataattaaaattaattatctaataaaatttccattaatttatttattaaatagacttaataaagtctcttaataaacaaataaaccctaaaatctcttttcttcacaattaagcccttacttagtgaaaattcataaataaggcatagtctaattttagaattataattgattgattaaaactaattaactgagtcttacaagtagtattgtctcaactagtgttgggaccatggggcatatataaccgagcttctaataagtagatctagaatttaacaagtaaatcctctaacttattaattcctccttgcaccactatagatttggaattacactctcaattatatagaacgctttatatgttccacgatatagatacgctatgaaattatccatattctaatctcaataatcaaagatcctctatagatgatttacatcgagtagggacaaatttaccgtttcacccctcaatgtattttatccttaaaacacttagtttcctataaatgatattttagtaaactaatataattactaaaataagagctcttccatttatctctattaagccaagctcggaggaaatcatcaattcacttctatgtccagaagctatagattccatatttatgattagcgctcccactaatttatactataaggttctcaagatgtacgcattacccgaactaattggtaggatttaactaacagctctaaaacaaaaataacactcttgagatcgaacctaaccatatcaggattaagatcttttgatctaagatcacccagtgatattgacttagaaagatacaactgtaagattataatatttttaccaagatcaatatcggtcccaatc

SEQ ID NO: 257476 - DNA, 716 bp, Cannabis indica
tcccagtcattgtaccagtaacaggaggcttaatttttggtttccaccctttagtaacaggcttaaagtctccagcagccgtatctgtgtttgtggcccctgctggaattggttcctttgtttccttgactatccattgttgctttttatgccttggttttttcctgcattcttcagtcatatggccgagacaattacaatttttacacaccatgggtttccattcatacttgatgcccactgtgacattgaacccatgttcatcctcaaaactgatagttccaggtaaatcctgctgcagtgttacttcaataaggattcggggataggatagtttatgcctcattttcgtattgtcatccaccattatagggtttcccacttgacctacaattttgaagagagtattttggccccaatacttcaaatccagattttcgagttggatccaaattgggacagctcgaatatcttccttctcaaagttggtgtcgggatcccatggcttcattatcaccggcctgttattaaagaaggtataccctccattaaggatggtgtccctgtcctcaatggtagtaaaccgaatgataaagatgccataggatagtaatccaactttgtcaacttttgttgggttttatgccctaaataaaactcatttcaatataatcagagttacttattaatacagatcagaaataacatttaatgtt

SEQ ID NO: 257477 - DNA, 878 bp, Cannabis indica
atagttgtcaaagtttaggagacaaagatgctaatttacaaagatgtgtcgtcatttaaataaaataatgggacggaacctaaccaaaggactaaatttctgtaaatgtaaaagttcgggaataattcttaacaagccatatattttagggagcaaaatcagtataatcgaaagttcaaggagaaaaattactaattattctttttaatattatgcataaaagtaattttatttacaaaaataccttcaacaaattatttacacaaatattgatgtgccacatcagcataaatattgaaataaaaaatatttaccgaaaattgaaaaactggaaatatctcgctttcaaaaattttagttttatccgaattaaaaaaaaatccttttgggagcttttgatgtgaataataaattaattagttacattttattaaaaaaaattgtttaaagataataaatttttagatatttaataattatactattataatgaatgtattatatatcttataattatattttatatattgtctaatttattattcattaattacttacttttaagacataaatctcaacaaattatatgtgttatgcctcagaaatgtaagatagtgtcatataatttagattctatatctcttaatcataatatagattattgtatgatccactgtcatactagatagaaaaagaatattagtttgcattatcgaaagaagaagtggaagcaattgaaattaaattccctatatttcatttcttaattaaatcttgtttattgctttgttatttaatttttgcatagattatttagtttcaaaatttatttttcaattgtcaaatatatccatcgaaccatacatctcgatcggaaa

SEQ ID NO: 257478 - DNA, 712 bp, Cannabis indica
aaaattaagtaatttggtttttaaggaactcaattccaataaaaaaaatgagagagatatggtggtttgaagtttcgagaccaagaggtgtcgagtggggtgcatcgcatgcaccaggcactcggacaaggtggggcatctgcgcgcatgacagggataattccctgtctaaagacccgtgcgtccctcgccttcagacacgatgcataatgcatctgccccagcaccttctaaacgccgatgtttgccgctcatggaccctgccaacccttgctccgtacgggctcctactgggcagccaaggtgctttgcaccaaaatttgatttttggggattttttcaactaatttcgaattttttagctttttcaaaccacaaatatcttatataaaaattatttttaatatatttaaactcaaatatcaattttacaaattaataagattttattttaatagattcttattaatttatgatattttgagatttaaatttaaaaattgcataattttttttaattatggtcaaattttaaaaatttgttaatttcttgaatatttaatatattatttaattataagattagatactttaatattgggtatattttaaattaaatgataacattatctatttaatttgaaatattatattaaattatcttatatgataaattaaataattaataaatttgaaattaacttagatattt

SEQ ID NO: 257479 - DNA, 661 bp, Cannabis indica
agtcagcgcacttcctacctgttcggacaaatttctccattgaccagtacgctaagttatatgttagagaaattgttcgtcttcatggtgtcccaaagtccattgttttggatagagatccgaagtttacctcgagattctgggagagtctatatcgagctatgggtaatcaattgaagtttagcacatcatttcatcctcaaatggatggacaatccgagaggatgatacaaattttagaagacatgctaagggcatgtgtgcttgactttgaaggatcatgggtaaagtaccttcccttgattgagttctcttatatcaacaactactaggcaacaatcgggatggccccttatgagcttttatatgcaagtaagtgtagatcgcccattcactgggatgaagtgggtgaaagaatgtttttgggacccgaagctgtttagagaacaagtgaggcagttgacaagattagagcgcgaatgctcgcggctcagagtagacagaaaagttatgctgatccaaagcatcgcgatatagatttccaggtcgggaacatggtatttctccgaatatctctgatgaaaggcatctaaaacgactttgggaagaaagggaagcttagccaaggttcattggaccttttgaaatccttgagaggata

SEQ ID NO: 257480 - DNA, 866 bp, Cannabis indica
ctgcttcttgttgtcgtccttttccacagcccaagcgaaatcgattcggcgaatcagagaaagccgcttctcgtcatatcccacatcactgcacacaacaaaatacaattgggtcagattgataaccactaaaagtaaaggaattactgttttcaagtaaataattcgcatgcattttcccggaaaccaaacagggtagtaactctgaacgtttttcttagggagaagaaagtagagagtcgtacgagggaaatcgttcgaagccattttcctcaatggcctccaagcgcttgatgggaagtttgtcgagggaaatttgcaatttctcgctcattttatgcttctgaatttgctgggaaaattggagagaaaatttagggctgaagccaagaagagaaatgagagggtttatcaattagcagcaacacgaaactggaacagttctgctctacattatcagtcaataaacgacttgtagtttgtaaattacgtgtcgtttgctctcataacatttcggttaaagtaattaatttgctccccaagcttttttagttggcaaaaattccccggtctacgacaaatcttgagaagttcccttctggtctgttttgtctgaaatatattaacactcttaacataaagttgtgcacttttcatgtatcaccatcttccctttttactctgttagaattattattctgaactaatataatcgtaagtttaatatcataagtataattataaattatgtgtctaatatatgttcactactataataggatggttaataattatatattatattagaagcatatgagagcacctttcaaaattataattggtccattaaattataatataccatt

SEQ ID NO: 257481 - DNA, 613 bp, Cannabis indica
aatgggagaaactcgtttaaaatagggaaatttgtggcataaatacctattttgttcaatttgttgctattaaatactcaaaatttaaaaatagtggcaaaagtactcaaatcctcaatttctattatttccgttagtacctattttaacagttctgttaagtcctccaagaatggcacatgttgatttccaattggtatattattattaaaaattattaaaataattttaaaatgaaaaataaataaaataaaataattttttctttcttctctctcttctccgtctcttcaattttctccttctcgacttccctctcgcccaacttctaatcagcccaaggctctctcaggccatcgacaacccaaacggaggccacttccagcttttccgactcccaaatgtcccagccccgagcctcaccctctcgatcacctcagtcgacgtccatgggattcacccatcgatcgacctgaccaccaccaaggtttttgtaaaccattcatagtgagcatgataataccaaatcaagattcaaacctttgcatctctccacaaacagtattatcaatcccataactaccaaacctcaaaactatcatatcaaaatgat

SEQ ID NO: 257482 - DNA, 533 bp, Cannabis indica
cttattgtgtcctttttcaggtgctttctgacaagtcggcgcgacatagtcacaattggaaatttcgggccgaaccgggttgttcggggccgaaattcatttttgggattatttattggtattttatttatgtgtgattaatcaaaatttattttgggtagatatgtgaagttaaatgacttaaatacccttgattacttatgcgagtgttatatggccttaggggcaaattggtcattttgactctttgaattatcttcaacaaaaagggatttttagcataatcgaaaatgttcttttttttttcttctagtttttctaacacccaaaccgaccctctgtttctctcttaatctatctatacactttgttgaaaattgttgaggaattacttggtgcaagcttggattttggtggcatgtgctggagattcgaaggatttgaggtagctcttcttactgttatttttatgtgaaattgcagctcagattttaatgttgaaaagcatgaaaaatgtgttgtgttgctcttgt

SEQ ID NO: 257483 - DNA, 546 bp, Cannabis indica
cattccaccaaaatgatagaaaagtcactcatttataagattggattttaatgccatctttacttgatgtatgtagatactggggactggaatggacacacaggatacatcaccttcggtgttacttttctttgaccggcagagatttatctttaatgcaggagaggtaagtcttctacactgatttgtacttaaggaaatcattcatgtaaattgatctcattattttggtgataactttttatgtgcctaagttttgtatttagtaaaaaagcagcattggattatgtcaaaatctactcagtataaataaaagagtttttattgcagtaatttaaggctactaataatcttcaatagtaaaaaggaatttctttgatcttgaagggctgtgttgtgttgttaatagttttttttttccccttaatactggatctgtaagcatcattggatgatgctatgggtgacgagcgcatttgtagaatgacggctatacatcacttcatgttgttcttgttgaaactagttgagtaaatcaaacattgt

SEQ ID NO: 257484 - DNA, 735 bp, Cannabis indica
cgcggaacttgggactaactccaaggttccactcagagggatgggccgcggaatacagaagccatgccgcggcacctgggttccaaacccagaaaaccagcgaaattcatacgaatttcaacttccaaactcaactaattcatgccagtaaccaaccaaaacctaaaaccaaacaatagattttctaagaatcaaacagggagttaaaagcaacaattcatgcattaaaattcaacattagaccccataatttcagattgcacaacaacacaaaatcatgctttaaattaacaaaactcaagctcaagaacttgagcttcaaaccattcaaccttattattttttttccagcagccaacaccttaaaaacacatggattagagctagaaaaacacttcaaaaatctcatctaaagctcaaccgaaacccaattcaatcatataatcaaagattatgtataaacatgctcaaatcataaagagaacaccaacataaaatcctaagctcatcctcaacctatttcatgatcttccaacaataaaatttcaacaaattaatcaaagatcaaagctatagatagctacctcaaattaatccaaaggcaagctcaagatcctcacctacaaagcttcaatacaagcacttctcaagaaatcttaaattttgaaataggtttagagaagagaaaagggggcattcgggtttgaggtgtaaaaactagaaaattccatttcc

SEQ ID NO: 257485 - DNA, 2594 bp, Cannabis indica
gtggaatgctacggttcaaagcacgagtgtgtgtcccagaataacactgagcttaagaaagagattctggatgaagctcacactaccccttactcactgcacccaggaaccaccaaaatgtatcaagatttgaaaccctatttctggtggtatgggatgaaaagggatgtggtagactatgtcactaagtgcttaacctgccaacaaattaaaacagaacatcagcgaccagcaggattacttcaaccgctatcgcttccagaatggaagtggaaagacattgcgatagattttgtggttggtttacccagaaccacaggaatgtacgactcagtttgggtcgtggtggatcgctttacaaagtcagcacatttcttgcctgtcaaggtagcctatacagtggatcagtatgttgacttgtatgtgaaagagattgttcgtcttcatggggtaccaaagtctattgtttcagatagagatcctaaatttacctcaaagttttgggtaagtttgtagaaggccatgggaactaacttgaaatttagcacggcctttcatcctcaaacagatgggcaatctgagcaaactattcagatacttgaagacctattatttgcctctgattgagttctcctacaataatagctatcaaagtaccataggaatggctccttatgagcttctctatggcaaagacaagattaaagctcgaatgctagcttctcagagcagacagaaaagttatgcagaccccaagcagcgggatgttacattccagccgggagatcatgtcttcctgcgggtgtcaccaatgaaaggaatcagacgctttggaaagaaaggtgagctaagtcctagatttataggaccttttgaaatacttgagaaggtgggacaagttgcttaccggttagctttacctccatcattgtcaactgtgcataatgtattccatgtgtctatgttgaggaagtacgtgtcttatccaatgcatattctgagtttaaggcattggagttacaaccggacctgtcttatgacaaacaaccagtacaaattctggatagaaaagagaaggtccttcgaagcaagaccatagcattggttaaagtactctagaggaatagtaacgtggaagaagccacttgggaattagagtctgagatgaggactcaatatccaaagttgttcaggttagattcgaggacgaaatcctatggggataattgttatgactgcatatggttaacactttggattattaaataattagggtttatgtatgagatttaattattatttataaaatgcatattgtgaaaatttatttaagttgtctatatctatttattatgctatttatgtaaatttctcaatttctgtggttgtgttcgaaagctgtaaaaagcgacgttgggcctttagagagtcgcattttatatgttttagaatattattagcatgatatcagttgagtatgggaggtgttggaattttcggggtttgcaaatgactaacttacccttgggagtttgtaaccatttatgttagttagaagggcaaaaaggtctttaggcaaagactttatttgtcttatttaggtttgtttctagtgctgaatataattttattgatttaaagaaattcatttatttaggttcgaaggaatcaaagaaaacttagagaaaaaacattttaccctttcttcaactctttctctctctttcgattctcttgggcaacagctgggattggtgtaattggagttgaatcaaggaatgttagtgataatagagagttttggtcaaaataatcctttctacttccttccttcttgagtttttgtaatttaggttagatttttgatgtgagattatgattctagatggctgaatgtattgggttaatatgttgtttaattttggagttaggagttaattattcatgatattttgagctgagattgaggtttgtgttgagaatttttcaagttaaagttagataacctaagttgggtctctaatggtgttttcataaattgagttgtttgctgtggtttgatgcttgatatgtgttatttggggtataagcaggtatactggaagtttttagaaagtttggggtttatttgaatcaagggggttgatttttgggttcccagcacaaaaccgatcaaccggttctgggtgaccattagaaccggtcgaccagttggtacccatgaaccaagcttccagaatcctagtttttcctgtttttgtgttgtttagggtattagcatcctatttatcgatagggttatccttaatttgaattttaaatccctcataagtgttttagcgtgtctcttatcgaattttgaatattatggtttaggaccctgtaaataggaatgtcagtcgggccgggcccggcccggcccgccacaaacccggcccggcccgacatcactttagcccggcccggcccggcccgactcttttttttggcctagcgggtcaagcccggcccgagataattgggccgggttaggcccgacccggttttttttttttttttttttttttttatggtatggttcaattttatggata

SEQ ID NO: 257486 - DNA, 729 bp, Cannabis indica
aaaaaagatgctatgtttggatgtcagattttagtatgaaaacattttactaaacaatagtgaaaagtatggggaaaatatgttcctataattctataataagatttcatccaatcatttctttttttgatttgttataagattttatttaaattacgaaaaaaaaaaatctatttttctaagaatataatctctcatttttcttaaaattccaaataaaataaaatgaaaggctttggaattaattcatttgttttctacctaaaatctgagttccaaactccaaagatttgaaaagattactgaaactaaaaaaaaaaaaaataagttcatataataaaatcaattaaaataacagtccaagtaaaggtaaccctgagaaaatttatctttatagggatcgtaactactattactgctgagattaaggaagggtgaacaaacgaacctgaagtgaaggataaaaggaggagccaaagttgctttattagccattgatttgtactatgatgactttgaagattactctagcaagtatatagtgctgtttaagacaaacagagaatgttagaagtatgaaaatgatgaatgaaaaaagactacttttaatgttaagttttggtttacgttgtagtataccaaaagttagaggcttttaaactgaaatcgaaaggtgtcaaatggcgtaataacgactatattatggatatgagctgttatatatggcct

SEQ ID NO: 257487 - DNA, 925 bp, Cannabis indica
taaaataatttccaacacatctagcatacttatagaaattaaatttctagctaagttaggcacaaatcttacacctgtaagagttcttacaataccatcatacattttaaagctcacattacctgagccttcaatatggcatgtttggttgttgcctaagatgaccttccctcctttagattccctgaaatcagaaagtaaagatctattattagtcatgtgaaaagtgcatcctgaatctaaaatccattcttctttgaatttagttgcagtaatgtaaacttctccactctcatagccatcacttagattggcttcatgcttctttcccttttcctttgagaaatgattttctccctggtttgagtcaccattgctaccatctgttcttcctctgttacttctcttccaaaaataacagtctcttctgatatgccccggtttaccacagtgatagcagcctttaggatctttctgtcctcttgatggagacttcccatttccatatcttccacccttggaagaatctttgctattactccttcccctattgttccaaggcttcttctcatgaggccttcctctactcaagttcagctcaccattagagctccccaacttgtcattcttcatctctaagtccatagactttagtgcagagatgacttcatctagggtaatcgaagttcttccatactttattgctatctttacatccttataggattccggtaatgagttgagaatgatgattgcttggttttcatcactcaaagcttctccttctcccgagttagccaactctatatgcatcttcagaaattcatctaagttgtcttcaagacttttagatctattcatcttgtagccaaagatcctttcttttagaaagatcttgtttgttagtgacttttgttggaattgc

SEQ ID NO: 257488 - DNA, 598 bp, Cannabis indica
atttatttagaattgatttcatgcattttggacgtcaaatttcatttttccgatctggtggatatcgagtctggttgacccacgcgcaaaaatcccagtcaaatggacccaatttgctagagaagatgatgcaaatgatgtcatttccagttgtttcagttcataagacatatcatttaaaggtgatgttgtcttctttttgttgggaaaacgacacattgttttctgcagatttttcaaaaaaaaaaaaatgaaaattaagaaaaatttaaatttcgaaaatttattagtttatttattttgaaaatttattttattttcttattttgttaatatagtcaattaaattatatttatttaaatttttcatttttatttaacacatatttttatatatataggttatttagtaagaaataaattatggaaaatttttaatttagtaaattaattacatactttatttttacatgtaattataataattgtgattgttatacctaaaattcggttggaggacacgtgtcaagataaagggaatgtaaaccctgtgcaatagcttttatggaataactcattaattacgtaagtattaaag

SEQ ID NO: 257489 - DNA, 746 bp, Cannabis indica
aacacaacagttactaaatttcatagaataagtaaatggcaccaaaaaaaatagaatcatcagttaaatctaaacaacctgtggcaaccttgaaaggaaattcataaccatctcctttggccgaagcgagctggagggatttgatacgagccaagaacttctcagaatcaacagtagctactaaacgagcatacaactacattgcaaaaacacaatacccccatttagcccaacgggaaattccccaaactaacaacatgaaaatgttaaatcagcaaattaaccacattgaaaatacactgtgccaccattaaacaaccatgatggtctttttatggtagcgtagtgtaatttttgatcgtttgtgaaatcaaacatagttatttctgatagctattttttccaaaccacttacattttttcaagtcacttctactaatttaagattaaaaaaaaagaacctttgttaaatagtaatatgattctatagaaaagtgtatcatagtaactttcatctgaggcatgggaaatttgccaaactaacaacattaaatttacattgttttatggtcaaatagtataatcttatgattattttgctaataaaaattttcatatgattatttttacaaaacactgttcaattattgaggtttcaaccaaattctcatccacattaaaatagtaatataagctcaattttggagaacttttaaccaaattctcatccataaagtttccaaatt

SEQ ID NO: 257490 - DNA, 564 bp, Cannabis indica
atatatccctaaaattgatctctttttttcataaacattaacacatattctatgcaacattttgtcttaattttttttggagtttgggacataaagagatcactttgaaataattctgtatggattaaaatgaaagtttcacaacaatttaagggagtagatgttagaatttaagataaggtaaatgtgttctatataaaaatcaattagtaatgggtagagtaatccattcatcttatatatgacaatttattttcacacatataagcaatgtgggactaactctaatagtagaggaataattcaggttaaaaaaggataaaagtctaagatctgtttatcccaaatactaggatcttggatggatgtgtcataagagcattttttcatggtgagcaactcggtcttttctgttattagagaaacaagcatcttgatataacattgaaaatggtttggagtctaattctaagttggcagtgcaaaactttttgataagtaaatgaacattatcactggtaacattcatcctattcctatctatgtaataattttccccaaaaa

SEQ ID NO: 257491 - DNA, 713 bp, Cannabis indica
tatttatttctaaatattggggtccacaattaaataaattcataaataataataaaataatataaattagtgttaattgcctttactaatccaaattactaaagcgatcattacaataattgtctactttagtatcagattcaaaaaaaaaaagtgtctagtttggttagttgttaattctttagttttgagcataacataggcttaagttggtccatgggctttgcatattttttgagtttttttctcttttaatattgctttcactttttgcccaataattaaaatggtacataaatacaaaaaaaaagaaaaatattagtatttgttgtctattataagtatcttaacttacatagatgaattgtggcgtgtatggtgtcccttgtcccttatcccttggtatttttgttatacaaataatgagaaggagaaaagttatgtttggatatggactatggactatagggtgagataatgagaattaggaagataatttaaaataagcaagttgtttgcctatggtacattgttgttattacattgttgttgttatgaaaaaagttttatccataccctactctattacataatgattagtattattaatcttattagtttgtttgattgggtttagcgaacactggatggttatcttaatccaaacgggatcgcagtgtagcatttctagattccaaaaacaaaaccattcg

SEQ ID NO: 257492 - DNA, 970 bp, Cannabis indica
gtaaaataatttccaacattacattcaagggattcaccaagaatcaacttaaaatcagcaaaacccagatgaagaacaccacaagctactggtttgttctagggttctgaaagagagagaagagagagaagtgtctttatgtaattttctatttttgtaaaaaaaataaagaataatttaggttttatttaataaaatatcagctcaaaatatatttaaaaatctaatttatttaagttaattaatcttcactaaaagacaaaacacataagagcaaaaatgaccattttgcccttcccatactaaaaattataaaaggtcacttagaggtatttttgtcaactcttaaatctcgactattctcgatatttctaatgtctaactatacttccccgctatactaaaaataataggatgtgattctaatagccaaacaccgcgttccaatgttgccggacacaaaacatgcaacattatgaaactccatatatgacatataaaatgcattctgaattcaattaaatcatcgtaaatagataattccaagttaatatgcaagtttcataattaaaccctaattaactattaatttccaaattaaagctaagcggactttacagtgattgtgacagttagtagtctcatgatccgtaaggggaaataccgggtaagctgtgcaatcccacatcgcctgggaaaggtcaagtgggatgattctgagactgtgtaggtatgggactacatagttgaagagggtttaaatagattaattggcactacctatattaaaaaggtgcatccaatttttcgatagcccgtcacgaaagaactccacagttaaacgttcttgacttaggataatttcaagatgggtgacctcaagggaagtttttcccagaagtgtgcgagtgaggacaaagcatgctggaaatactcgtgttcgtttgtagggtcagtcatcagtccatga

SEQ ID NO: 257493 - DNA, 787 bp, Cannabis indica
atgaaaaaaatttgactaaaaaattatttcgggtgctaaaatagataagggtgcatcaatgtatctattttaagggggtgcattgtagaattttcctattttttatatttaaaagaatttcttaattcaataaaattttgagaaatttgaaataattttcaatataaaatttaatattcaaacaataaaaaagtcacaatttttcaccctatttttggctagttaatttttttaaaaaaatttcttacaattttacaaaatctgttaagtaactacaacacacaaaggcgatcgactagagcgagttcttatcctaggattcatcaaaggcgatcgactagagcgagtccttcctccggggtcgaactctcggatgtggctactggattgggtcttgagaatggggagctacgatctgctaaaggggacatggttattgaaattcaggtggaggaaaattttcaattgggcgaggaggcggcccttatcaagccccctccctcccaatgagagttctttcctggaattgccggggtctcgctagaccaccggcaatgcaagcccttgtggcttgggtgaggagatataaggtggactgtgtgtttttaatggaaacgaaattgggtgctgatcaaatggaaactacttgccgggctcttaactttgactttggggaatttattccctcttgtggaagatctgggggcttcgggcttttgtggaatattcaagcaggcattacttcggtggcaaaactacaatctgggtttgaatgcaaagtgtggga

SEQ ID NO: 257494 - DNA, 1415 bp, Cannabis indica
aaaatgaggaacaatggaagtgataacgaagatgtcttcccagaagattgggaagcagatgataacgaggcaccgtcaactccattggaaacaattatcacggccattggtgatacacaatgacaggacgaagtcctacttctacctggactcccacaaaatgtgccgtttgtgaggaagaggaagccgcctaagtacttgaaggactacattgcggaaaagaaaaagaggcgagttgttccagagaacgtagatccggaaagaccagtagaccgtagattgctacgtacgttcaagaggtggttgattggagccattcccaatgcgcgacctaggaatgtgcacaccggtgttggtgatgtcaagctcttcacaacattgtttctaaagggggagtggctggacgatggtgtaagtatttaattattaattagtattttgatgtttttctgcattctgtctttattgtcgatgtgttagcgacaatgtcacgacattatcgcgacattgttgctgacacagaaaattttgtttcttctgttttatttgtcgatgtgttaacgacattgtcacgacattatcgcgacattgttgctgacacagaaaatttttgcttctgttttatttgtcgacatgtcgcgacattgtcacgacattatcgcgacattgcgacatttttattctgtcatgtttaacgacatgtcgcgacactgtcgtgacagtgtcgcgacactagttaaattcttctcacgacattgttcgcgacgtgtcgcgacttcatttacgactttgattaatcttctcttatttttatgcagtacatagatgccatatcacacttgatgaggaggagacgccttcattttccagagttgtaccctcagccaggtttattttggacacaacacttccacaattcctcataggcatttggggctgtgagactggtgacagaagtacgtttgaatggccagatgcagtgaaccagtactatctgggtatggagagccgttacatgccatgttggaaggatcagaacttcatatacttcgtcctgcacttccaacgacaaaaacattgggttgctgttgaggtagatattgatatgtggcagattcgggtgtacgataatgatatatcgtgcaccaccaacgcagagtttgatgccatcatgctaccttggactcagctgtttccacatctgctgaggtcaactggctattacgatcaagtcaacaactacattctgaatgtggacttaggggacagtagccaactcagatcaatgcatgctaaacgcatgccaagtgaggtggtccccaaagtaaaacaaggtaattattaatatagtatattattatttcctttgccattactctctaaatgtattttagtctctaaatgtgtttgttgtt

SEQ ID NO: 257495 - DNA, 594 bp, Cannabis indica
ccaacttccaactattttaactaactatcagttatgacaattagtattgagctcaacaaccaaaggctatttatagccatttcctactgctgcttatggtatgagttgagggagtgttcgaaggttttttgtgagctagttgagagaaagaaagagagaaaagaagagtgttgtattggcatataatgtgtttgatccatagtgccacaagtgaggatgtatggaaattgaagttgtgcttcattgagagattgtgtcgagtacacattggagatcaacaccttgtaattcttttcatctagctcaataaagattggagccactgtggctgttcttaccgaggagtaggcaggtgattcactatcactctattcgaacctcgtaattatctttgtattgaatctatttttaatcttcttgttaatccattcttatttctggtttaattctttatgtgtggttgcaattgatcttgatcaaactattgttgttcaatgttatgttttgttcttgcatgagttacttgatcgagttatcaatcacatcattatccaatacgaaccttaagcctaaggatctgaacataatgaatat

SEQ ID NO: 257496 - DNA, 806 bp, Cannabis indica
tttcttgaaaatctttctgccagttcccgtcgcgactgggatattgcccgttgcgacgggatttggcaacaacatatttttttgatttttcttctcaattctttcaccacttgtcctcaattcttgtacatactttctttaaatacccaaggacctgaaacaaaagaatcaagcgtaaaatatccctaaaactagaaacaaagagtgaaaactaacagaaaatacgacccgaaacttagactaattttagcctaacaaccataatgaagctacgtctatttcaaatttttattgctcacaagaataataagaaaattggttaagacaggaactctaatttttagagagatatgttttgaccttatgagaacttagaagaatataaaaaataaactagtggagctcttcctttataaagaatgaagtcctattaaaataatacaaaaatatgaaaatatgtatatattttgggttgattttggccattgataatgatctaatggctaagattgactcttgataaaaattatcaattttcgaaactaaaatatgtatatattttgggttgattttggccattgataatgatctaatggctaagattgactcttgataaaaattatcaattttcgaaacttgaatttcatctgttggatcgtttttagatgatttgcgaaaaaaattgtacttgtcttggggacgaattttggacttaaaatctgggtgtgagacatgacttaaaagatatttgaaagagatttaaaatgcaaattggataacgttaatcagattaatattgagggagt

SEQ ID NO: 257497 - DNA, 1142 bp, Cannabis indica
aaaaaaacagcctctaaaggcccatattgtagtagtgtaccttgatatgttaatctgatgggaactgaatcatgcatgttgagcatgtacttatgtgcatctattataccaatcttacctttacttcgtaatcaagtgtgtcagtcaacttgagtggaatatgttttcgaacgataagtggtcttaagtcacatttgcataaaattcgtaagtgtctcgctaacacaattttggggacttaaactcaaaactagaaattttcctatcaataaatagtgtagaaatgacctaaatatcgagaaaacacaaaagttaaggtacttgaaaactacctcatctagtccactgaatcccttaaccgtttctattgaaacggttagcttatacctagtagaaatcacaaacctcaacttttctcgatcaaccccaaatctaacaatatcttacaaaacacatattagcaccataataaacataattcaacagaaaattgcatcattaaaggtcaaaaaataaaaataccattattaatttaagcttaaggttaaaaactcaaactatattacagccatcaaaacttctcaaaatcaacaccaacaaacatatcttagacccgaaaacctaattttaaaaacatcaaaccttaacagaaccgaaatcatgaactcactcaccaaaaccatgttttaacctaaaaatcaaagggggataaatcgatcagtacccgttttaataacacattaactaaaagtacatgcaaaataaatttagttgaaattaccttcttttataattgaattacccaatataccctcacctatctatcaaattcttttcagtccctactgcagccacttcagattcaaccctagcaactaaacgcatgcaatctgtagtttgccatagccaacatcgatcaacctcctctgccatcttcagcgtcccttaacctccagcacaaaaacactacaccttcgcaaccgcaaccacaaaagccaaaagtccttaactatttgaaggtatgtaactttctctttccattctgaattagtattagtttctttctccatatcttgtttctccctctttcaatcttttattatattctggtttgtaagacctatgttcatatgtataagttt

SEQ ID NO: 257498 - DNA, 527 bp, Cannabis indica
tcaattttttaattccaaataatccaaatctaaactcagaaggaatcctataaatagatagtgatagactcaaaactgacagcttagaatcattagcctttcaatcacatttgagtcttctctttctctctctaattttcgaatccttctccctattttcttcttcaaattttatccctcttagtgattgagtacatgcttacacatagcaagttagtactcaatcatagtgtgtaagactatgaagaatccaacacctgaaggaaaatctgggtcagatcttgataatactctgcgacagaaaggaacaagggttagagatctaagtggaaggagtcatttaattctgctgcaatcaatgtaaggtttcttgaactttatatgtgtttaaattctattgttttagaaattcatgttgaggatgttaaacaacatacatggtagtaaatctaaatcctggtaaaataatccccaataatatctagcttgatgtgttttgtgcgagcatggtaaataggattggagac

SEQ ID NO: 257499 - DNA, 1478 bp, Cannabis indica
tatcaaacaatatgaattacactttaataattattgtgtagtgtacctagggattacctttaattattgtatagcgtacctaaatcatttttattaatattttaatataaattgagctttcaatctattattcaaaataaacatttttattaatattttagtgttgcccttaatttatcccaacacttgtggtaagtcacgataagccatgtggcaagaaaacttatgcaccaggagtaattatggtaaacctcttgagataatcgtcagagacttattggtcatgtccgagaagctagaccctggacctaagtcacagtggatgcattaaatgtggcttggagaaaacatttgcgagtgatcttgaaaacatgtgtcaaaggctttaaacccattattatgtgattatgcactaacctgttatctaaatttgggaacttgtgcaagtaatgctcctacacttacgacaatggtaatcttttcaccatttttatggggttataaacactccagctatattatgagaaatgggtcgaaaaaaatagtgtaaacactctctgtaaagacctaatatatatagttgtgatttgtggactaaggttcattaacgccaaaccacgtaaaaattctttgcattaaatctcttttaatcattaaaacaactctaattaatagtttccaaaaatcttggttgaccttttagtgctttcatttagagctgtaggaattattccatagaaggaatatcataaatagattcttagtgtgatggtgttgaccagaaaccacacacatcgaccacatccaccttaaggtcttgtgggtcaggtgaagaagaagtggcttcacgagtagatgtggaagagcacgatgaaactaaagatctcgagtatgaggaaaaccaagaagagtatgaggtgtatgatgatagtagctatactgaactgatggtattaagacaaaaagttgttgaccgtgaaactaagttggtggagcaaagggagcaaacagaaggatgcatgagataatgatcgccatgcaaagagcgatggaaatcacagtcattcacatgcatgcgtgacctattggacaagacaagacgagagaggagtctccgcagccatcgcaaaatcagaggcacaagaatcgggagccaagtcctatccgatacctttctaggagtcccccaaaggcaaaccctacaaaaattttggaaagcaatagaaatgctcaaggtccacgtaaggttcgatccgatctccctaaagggaaaggtccgtagaggggtagatttcctaagggaaaggatggtccttaggacttaggagaccggaaaagcgcatctatgcattaagagacggtggagagaaagggaaaaagccaaaaggatcctctgttcaacttaagacaaaagctcaatgccaagcacagtgacctcagagatcacttagagcgaaagaagaaaaccgcaccagcct

SEQ ID NO: 257500 - DNA, 955 bp, Cannabis indica
actaaaaagaatcagcaatttttgtggacagacaagtgttaagcaagctttcaggaggtgaaacaaagattgattatagctccggtattatccctaccttctgataaggaaaagtttgtagtctactacgatgcatcagcatagggtttggggtgtgtattgatacatgttgaccgagtcatcgcttatgcctctcgacaattgaaagaatataagcagcgatacctaactcatgatttaggtcttgccgtggtagtcttctctttgaagatttgacggcattatctctatggagagaaatgtgagatttttaccgatcataagagcctcaaatacttctttactcagaaagatttgaatatgagatagaggcattggttggagttggttaaggattgtgactatgaaatcctttacatcatggaaaggccaacgtagtggctgatgccctaattaggaagggtcccaggcaggtaactagtatgattaagatttcaccccagttagcaaaagacatggtcagatccagcatcgagtttgttgtaggtaaacttcataatttgacgttgcaatttgatctgttagaacgaattaaagctgctcagttagctgatccagaattagtgaagatcttagaagaggttttagttggttaagccaaagatttcatggtcccaaatagtgggatgctattttttaaaaccagggtttgtgttccaagtactgtaaaacttaaagatgagattcttgaggaaactcataccactccatattcattgcatcctgacacgatcaagatgtaccaagatcttaaaccgtactactggtggtgcgggatgaagaaagatgtggtagaatgtgtgtctcgatgcttaacttgtcagcagatcaaggctggacatcagagaccggcaggtttattgcaaccactgacacttccatagtggaagtggga

SEQ ID NO: 257501 - DNA, 653 bp, Cannabis indica
ttattgtgtttattgatttccctttcttctctaattttttttaactaactaatttaattttatcaattctccaatatatattaattttttatcctatttattattttcctatataaaagataataccaaacaaaatttaagaaatagtaataataaaaaaattataattacataattaaaattttagaaaaaaaagaaattttacatcctaatttttagaaagacgaataaaagttgatacaaaattatctctatatttgaatttatatattatataattcattttttttaatctgtatctttatatatatttatatctatctatatatttatataaataataacacaaatcaaatgatcaagatgacatccaataattatttttgtactatttatttatttcattaaatttagtttgtgttttcttttataatattatatattgaataatatgtcttctaagtaattttcttttcataaaagtcacattatttttaaactatatgagagtatactcattggttataagtaaaatatttataaattcatttcaatttgtctaaaaattaatatatattttttattttgtatagattattgaatatttcacttttgccttggtgttatgtatatatattttttgaatttgatta

SEQ ID NO: 257502 - DNA, 335 bp, Cannabis indica
agatcctggtaaaataatatccaacatgtacctcttccatgctcccaggtgaaggcatggccatgaagcttcaagtcgagaagagagcagtcacgaagaataccctagaagccgttaatgagatgtgaaggatagggccacccacttcttttctcttcttgcgtagcaatattgttgaagtcgcctataatgcaccaaggaaggggcgactgagaagcaattgtacaaagaaggtgccaagtgcgatcacgtagtgctctgtttggctctccatgaaacccagtgagcctccatcgtgcatacccagaaatatgaacttcaatatcaatgtggtt

SEQ ID NO: 257503 - DNA, 586 bp, Cannabis indica
cttattgattcaacttgattatttatatacattttattttattaaattaattcaacttaagtttataacaaatattcaaacatacaatattttagtacatacattttttaaatcataaatctaaacacaataaaaaataataactttatcctaacaattaatataaacttaaataatatgctatatacaaaaaaataataattatttttgttgagatgtacttttatttcatcattgagaatgtacatttaaatatgaatgatacatgatcatcttttaatttcttggaagatgtttctaaatctctctttattttattaagatgaaaagttctaactcttaaaagtagaacgacgccaagaatgaagagaataagtctatgcaagacaataaaatttgggaagttgtcccattacctgaaggtgtaaaactaattggtttttaaatggatatttaaaaccaagagggataaaaatagtaatgtggtgaggtttaaggcacgtcttgtagaaaaaggctatactcagaaataaggcattgattataaagagactttctctccaatttcatcgaaagactcttttag

SEQ ID NO: 257504 - DNA, 1474 bp, Cannabis indica
gggcccgaaatgcaatttgggattaaatgttggcatgttattttatatttgataatctaaaattaatttggaaattaaatgggtatgaaatgacatgtttacccttatgagggtgtatatgtatgctttagccttaagggcatttttgtcttttaactattgacgatataccttaattttgattgaatttcaagggaaaaacaaagaaaattctggcctttctctctctcaaacccgatcctctctccctctcttaccctcttgatttgcaatcttgaaatttgaagaagtgcttgggagttttggtgattttgggacttgatacttggaattgcttgagtttggctttgagttggaagtgaggtagtttccttactgaattttagttgatttgtttgctgaaaatattttgagaagaacatgagttaaataaataatcttgtttatgcatgtatgaggatgttgtagctaattttgatgaatttgagtatgcttatgcttgaatctttgatgtggtgattaattgagctatagatgagattgtagggttcttctttaccttaaattcaagttgtttgagattaattgttgctgaaattatttggataggttgaatttaagctcaagtttgagagcttgaagtttataagtttaagcatgattttgagatgtttttacaatctgaatttttggatttattatgggattttgatgcatgaaatatattagttgagcatctattaattgctagtaattctatttgttaacttgtgagtttggttgtgaatttggggtaaaaaggttgaatttcttgctgaattttcgtgtttcaagcagctggtttctgggtttggaacccagatgccgcggcatgctctgagcatgccgcggcccgtcccttgttggtggaacttgggtttcgtcctaggtgccgcaacatggcttgggcatgccgcggcccgcccgtgtgtttttgggcaaattgagttcgaactttggaatttcgtaactttttattctgaactccgatttgggagttctttatatcgttggaaagctcgttctcagctctatatgattatctaaatttttaaataccatgattaaattttatgagttgaaaaccaggggttaaccctaagtgtgaaaaatttccaaatttgtgtgactaggattaccgggacctgatcggagcacccggggattcggaatctctgtctattgcaggacaacaggtaagatagtgattagcacatagagtatgcgcagtggcgcttatattgaaagtgatatgtatgattttttaataatcgggattagggttattaccctaataggagcggtatagttgcctagggttattaccctagtgatatatgtatgaaattgccatgtcatgttatatgtaatgagattcaagagttatgcgcttaaggcataatcaggttggactcggtaaccataaccgagatga

SEQ ID NO: 257505 - DNA, 703 bp, Cannabis indica
acacagtgtaggtggcgccactcttgtcttaattaagaaattggtgatgttttttatccaaacaacttttgtcttgtctccatttaattgatttgaaaaataaataatttattacaaaataaatacataaatcgaggtacaatcgtaccatggccggcgaggcaaaccgtggtcaaatggaccactgtgtcctttacttgagcttcatggcacggatcgcagctcctcacggagcaaattcagaattcaattcctatttgcctttacaaatgggagaagggacggtggtccctatttgtgttgtggttggagaagacgccatgtgatggtcatggccctattgttattcaacgaactgagacccgatcaggtcccatgggtctttcaaccctatcttcgcctattgcctatgcccgcggtcttcttcatgccattcatggccactgtgacaatggtggctcatggagtcgccaaccacaataaacaaatggtggcccgaccctatacttgataatttatatatgtatatatatgttatacattatataatgtatatactatatagtgtatacactatacattatcattattatttaatgaatcaaaaataatattttgaggaatatttatttttaaaattattttgaaattaaaataaataatatttgattttggatttgaaattcaaattctaatatccata

SEQ ID NO: 257506 - DNA, 573 bp, Cannabis indica
cagagcgttgaaataaacaccaacaacttgcaaaacaaatctttctaacattcacatacatataactaatccatctaaaaacaaatttcagaaatggagtacctgcaagcatcagacaatgtaacattgcaaaaaatcggagaatttttttaagaagcaaaagaaagctgctttgtttggagctgtaactgcataaaaaagaagaaaaaaaacaaattaaaaattaaaattaacaagaaaaaataaatcgaagaagaaggaaaagggaagattatgtaaaccttgaggggagaagggaaatgggttttggaaagaagagaagaagaatggcgggaggggcagagaaggtaattagtgtgaaggccaggcaaaagggcagtggtgcaatccattttctccggtctccaagaggaagaagaagaagaatggcagaagaagaagaagaatggttaggggagggggggttctgtctagaagaaagagaaggagaaagagaaagagaaaagagaaagaaaaagagaaaaaaaaagtatttttttttttaatttttataaattgttttttttttaattt

SEQ ID NO: 257507 - DNA, 618 bp, Cannabis indica
tgggcgaggaggcggcccttatcaagcccccacccgccccatgaagtgcctctcatggaactgtcggggcctcgcaagagacccgacaccccgagctctggcggcttgggtgaaaaaatacaaggttaattgtatttttttgatggaaacaaaagtgaacagtagtaagatggagtctctagcctgaattttaggcttctcaaaagttgtttgtgtagatgcatctggtttggcagggggctcttgtttaatgtggaataccaatattgatttggcgattaattactttgctgatggtttctatgatgctactatctgggactatcaaactcaatctcactggaaattgtttgcggtatatggcactccttattccagtgcaaatgaggtctttaagaagtctttggaagaggaatgttctcactgtaacttgccgtgggtccttttgggggatttgaattgtattcgtggtcaagaagaaaaggctggtggtcgtttagtgactcgtgctgaaactaaatggctgaataattttatgctcaatattggtgggatcgatctgcgctttattggaaataaatatacgtgggaaaataaaagattcaatggaggtctcat

SEQ ID NO: 257508 - DNA, 572 bp, Cannabis indica
tcgagatcagataatcggtaagtcgcattaccaattttttcagcgattaggtatggcccttcccagttatcactaaaaactccatgtgatgagttacgtgtgttaggcatgaccttttgcaaaaccaaatctcctactcgcagacttcgttctttgaccctcgagttgaaatagcgagttgttcgctgttgataggctacatttttcaaatgagcctgatcgcatttcccttccagaaaatcaagttgtaccaactgattttctatgttactgttgatgttgaagacatctctcctttaagatcctgctctagcctcgactggtaccatggcttcaaacccgtaagagattgaaaagggggtttcaccagtcgtagagcgaggagttatattatacgaccatagaacttgtggaagttcttctggccatgtaccctttctttcttcgagcttacctttgatggtatgcttaatgatcttgttaaccacttcagtttgcccattcctctgaggatatgcgactgctgaaaaagccttttgaatccctaactcatcgcatagttggcgcatctc

SEQ ID NO: 257509 - DNA, 624 bp, Cannabis indica
acactaatgagtgtatgagtaagataaattttttaaaatttaccctaaaaagtagaacattttaaattttttaattagtgggtcattttaacaaaatttaatggaaaaacaatcttaatatattcacgtcttagtagtatgaaatcattatgactagaggggaaaaatatttggaggagtgtccgaaccatatttcacaaacgggtaccactataattaatgtgagattatcactatttcaattaaaattattgttagtacttgaaaactacgttttctctcaatgtttccaatagaaaagtgaagcacaatgctcttagcttcatccctgtgaaatttcactatttttcaagatgtgtagggtgaggttttaagaaaacattaacgagtgaaagagtaaggagaaactagctaaaatctcccctgaaaagtagaacattttaaattttttaattaggtggtcattttatccaaatttaacgcaaaaataatcttcatactcacaccttaataatatgaaatcattgtgacttgagggaaaaaatattttgagatgtgtccgagccacatttcacaaagggatactattatgagaaatgtgagattttcactatttcgattaaa

SEQ ID NO: 257510 - DNA, 858 bp, Cannabis indica
acttgatatatattagtatttgttttggtttttttttctcttttctttttaattaaccaaaagtatttataggtttgtaaattcaattgtttatttttcttttcataaatttgaccgtttctatttttttttattgattaatgaattttataagtttctaactagattaatatttaaaaaatatattttctaaagcatttatttatataattatatatatttatttgtattattttatatatatatatttatatatatttatcgttctaataatgttattttttatatgaaaaaatttgtgtttaatgccagctcgttttatctatttaaaattaatgttattttttttacctttcactgaaatcccacatcaccaattaaacgactaaatataacaaaaagtaatataattggtacatctccatagttgtattatattaaggggtacttttaaccagtttcatatcataaaggacatcatttggaaccagtttcatatcataaaggacatcatttggtagtgtcataagttcacaaggcaaaaattttaattatttaattgttattctattaattggaatatcatatagtggaatgacttttttactatttgttgggccccattctttcaccttgtcgggctgctacctcaccttaacttccacattagtgtgatattgtccgcttcgagcctaagccctcacggttttaattttgggcacttttccaaaaggcctcatattaatagagtagtgtccatccttatatacccataattcttcccattcctagccaatgtgggactttagttgcatacctcaatatttctcccctcaaaccaaggactacatactcgtg

SEQ ID NO: 257511 - DNA, 537 bp, Cannabis indica
tttggatctgcttgatgaataatgaactgagtcgcaagtcactaatgcagcgtatcaacaccgagttacaagatacttcaacaaaaaagtcaagaaaaggctattcaacgacggagacgtggtgctaaggcgagtatttacaaacacgagagatgcgtctgcaggagtgttcaacccgaactgagagggtccatatgtaatcgaagcagtagtaggaatcggagattacaaattgcctcggctaaatggctcgctaataaagaactactggaacgtgaaacatttgcgatcctactactagtaaattaatgatgtaactcacattgctgatgtaatattttaaacttcagtcaagaataaaaatttttaaggggtgttcataaaataattaatttattccaatccgcacgattcaatccaatccaattggcaaaatacagatatttgtacttgtgcagattggattggattggaaaattaaaaatcaccacttgtgcggattgcatgttgattaacatgtaaaattaaccgatccaa

SEQ ID NO: 257512 - DNA, 976 bp, Cannabis indica
agaagactcgtgaaacaccacctcccccgacagctccactagcctcattcctcgtctgtaaccactgtgctctgatcaagtaattctttttttttttcatctgcgccttcattccaatcccatatggcttaggcaattgatctacaggctgatcaaaacgcttaggacagaaacgttctgaatgacctatgattccacacacaaaataaaaagttgggagatgttcatatttgaaattagcccaaatccattcaccattttccttgcaaagcttcattctctgttttaatggtttattaacatcaatggttgctctcacccggagataatctctccatattccattgaagttctttggatcggatttgacatatccaccaatataatcaccagcactcttaaccaccctctccaacataaaaccagactttagatcatgaagctgaacccaaaaatccattttgtgtagctgcaccaccttcgggtcctctcccttcctcaaacgatggaaaacaagagggcatttgttgaacgtccaggggctcccatccacgaccgattgaacatccaattcatgatagaattgaaaaagatatctattggtatccaattccctgatatacacaccctttcccggttgccacaacgaggccatcatatgtctcattgcatcaaaatccagtgtcctacccgtgagaaacttccccaccaaacaccaccgatcatcaaaagcaaactcctctccttcctcctctcctccaatgagaatcccctcttcctcatcatccaaactgatctgagcatactgctcattcagatcaagaacatgttgactactagcagccatagaagcgaatacagcaattagaattgacttagaacgttgagataataccttcaaaatatgtcatacgacaagacttggatgtttcataagtttaaatgcctattagctcatatatttttattttaaaga

SEQ ID NO: 257513 - DNA, 684 bp, Cannabis indica
tttttttttttttttttgcatgacaaggctcgtcggctgtttcttaaccttatgacgtggcttggtcgggtcttgttatttctcatactatttttcgatttcggtggagttgttgttatccttctgcctaagtattcttttcttctccatattcttttttcagagacgtgtcttggagttttgagttgttcattggatcttcactagtgttaattttcttaggattcgattggtacactgtgttgtattgtattgtatagtatcatattggattattttatattgtattagtattatttatacaatactagttttggtagtgacttgtattgataatgttatctgtgtttccagaaaggggacacgtgacattctcaattcaaaattaattaactaaaggcatggtcagaagccctaacaagataacgaacccagtaggtatggaaggatatcacacttgtccaaggtccaagatattcacgtccaagaccaaatctctctgaatctagaggtgtgtcaagcccaaatacgaaagagcaattgaggccatctagattagcatttgggatatttatggaagggcatttcaagaggccttctgtaaacctactccaagatgacatggcgcccatctgacactgaatcccacttaataatctcctatgtcaaaccctaaaagtgcgc

SEQ ID NO: 257514 - DNA, 570 bp, Cannabis indica
aaaattcataaaaaaaaaaaataataaaaaattaattaatttttttaaaattttagtattgaaatagtttttacttctattttaaaatggaatagtcatttcaccaaaatgattgaaagattattccatcaaaatagtatgtcaatagttttaaatgcaactaaataaaggtatagaaaaaaaattaattttcttttcattctattctattttattacctctaacaaacgccacctaacttttttccaacactaaaatataaaattatagtttgtggataggtgcgtatagcatcttccaattttttttttattaacgtcttttactaataatttaatgaaatataaatgtatttcattttgtacaaaaattttatagcattaattaaaattaaaaaggtataaaagtaaataagacaatgtatatttgatttagttttgaatattattaattaattttaaattttatcaattaatttgaattatttgtaaaaaataagtatgagtatattttaataatgggtaaataccattttggaccctgtgttttgcaaaagttacagattggacc

SEQ ID NO: 257515 - DNA, 697 bp, Cannabis indica
aatagtgtaatggcggtttagagagaaaatatagccgttattgaatagtaagaataagaagaacaaaaaatggtgatcatgctcttgattttatgaagtaacaattggaaatgaaatagtagtaaataatgacaaatatatttttatatttatttatatatatagaagtattaggaggtattagcttccattcacagtaatatgttaaaattagattaacaataataaagaataataataatctattagatgttatgttagttattatgttagaagttaatttagttataataataataattatgttagaagttaacaatatatatattctctatattataataataaatgttgtgttagatatttaaattaatataaaatatatttacaaaataattgaaatatatgtataaaagatagagtacttatattagtatgatgagatagagtgatcgtacatgctgataacatgttataaatttagacagatatgagtaagaatagttgtattcttttctgctctttcttcattttacctttttcatcaaacttatacatatatatataggagaatacatgtatgcatattatatatttattatactttactgctacaagttgaatactattctatagtattgtaggtttatcacgtagagtatactacttatctatccgtagtcattcatatcatata

SEQ ID NO: 257516 - DNA, 805 bp, Cannabis indica
ttgttgaaaggacatgggagagtgcccaatggtcttcatttgaagctttgaaatgagaagtgaagtactgtgtaatgaccgaggcaatatcatcaccagagtgcacatattgtccatttccatcttgcaatttggtaatatggttgttagattttcgagaggaagcctttgcatgaaagaatttggtattacgatcccccaacttaagccaatccactcgtgatcgctgctgccagtattgctcttcattggctaaaagctcatctaaaatggcttcaacagattgaacttcctgtgaaaaattcgagtcaggtacaacacaattatttaattgttcaactctagcttgcgcctccttgatatgttgtttcatgtgcccatattttccattatgccattgctgcaaattgttcgaacacatttgaatgctatcagcaagctgttggaaaatatctctctgagtaccagcatttttattccagtttgcagaaataatggcagaagattctgcatcatttaaccaaattttcttgaaacgaaatcgcgatcttcttttctcatgctgattttgattagaaaatttgatatccaccaagaccgctctatggtctcagccataataatcaaggtgtgaaactgtaagcaaaaagagtgtagtctgccaaacagtattcgcaaaacaccagtctattctttcttttagtgcagcagggttctttttgcttcgagtccatgtgaaatcatcacctaagtaagccaattcattcaaagaacattgatccaaagttgtacgaaaagctgtcat

SEQ ID NO: 257517 - DNA, 1247 bp, Cannabis indica
aggtttcctcccaaatatacagcatagcccccagttgatcttcgatcatctagatagcttgcccaatcagcatccgagtatggttgtaaacataatcttggagcaggtctgattaaaagtccttcatgaatggtacctttgagatatctgaacaatctcttgcaagcatcccaatgaactgttgtaggagcatgaataaattgactcaatttattcacaatgaaggcaacatctggtctcgtcaattttaagtattgtaaagcccctaatgtacttttgtacagtgtatgatcaacaaaaggttctccattggtaagagaaagaacatgagatgcagttgttggactaggacaaggtttggtaccatccattttgagctttgtaagaaaatcgacaatgtattttgattgtgagagatatataccagatgttgttctatgaacttcaactcccaacaagtaatgtaaagacccttgatccttgacatcaaattcatgattaagtgcagtgatgattgcatcaataacaacctggtttggtcctgtaatcagtatatcgtccacatataccaaaagcacaattagattctgacctgatcctttgatgaacaatgagttgtcaaatttggacaactgaaaccccttgttgtacagagtatttttgagcttgtggttccaagctcttggagcttgctttaggccatacaaagccttgttcaacttgcacacataattggggtatttggggtcaataaatcctagtggttggggcatgtagacagtctcttcaagggttccatttagaaagcattagagacatctagttgagtaatttgccagttgaaagagactacaagagtgagcaaaattcgaacagtggctggtttaaccacaggactaaatgtctctttgaaatcaataccaggagtttgtgaatagccttttgcaactaacattgacttgtatttgtccagagatccatcaaccttgagcttgatcctatgaacccatttgttgcccacaaaagtcattgatgggtgataaggcacaagttttcatgtgttgttcttaataagcagggccggccctgggcataggcgggctaggcccgcgcctagggcccactcattttaagggcccaaatcaaaaaattgcgttttaaaatatatatatatttttaataatttttaaaaatactatttatctttatagtaagagccaaaatttttattttttgcctatagccca

SEQ ID NO: 257518 - DNA, 1086 bp, Cannabis indica
aatttgccatacataatgtattattttatttttataaaaggtatttttatttaggttgtttttatatgtacacgggtagctgaaatattattcaaatatactatgtacaaaaatttattccatttatacggttaaatgacattttatttgtaaatataagacactttttaaaaaaaaaacctgctattctaaagcttcacagttcacacaacatcatctctttggcttcggcaagatttcaacatccattgccggagctactgaatttaaaataggctatctctctctcccgaaaaatccaaagcatcaaatgttcaaccttctaattttttcttcaattacattaaagttggcaagaatttcaacaatatggggaaaacttagatttattggaaaaaagctttctatcccttcaaataaaatcagcagaggtcattaaattcatgttgaagatttattacagccatactaaattctaattgaggtaattaaaagcttaaaattctcttttattaatattatgggtaaatatgaattttggtgttaaactttgtttgtttttcatcttgttcttaactttgaatatggttcacacggttcaatttgatcggttcacttaatgaattgtttttgttatattttgtgcatatgagttgatgttaaagttgcagatatatagttactatagtgtttctgcacatgttgctagaaagtttgttgtaatcaattattagaaagttactataagtagtactgcaagagttgctaaattgattgttgtattttattattatttctatttacatagggttgttgaaagtgtttctgtaggtattgtcaaaatagttattgtattcaatcttttgttttttttaaaaaaaaaaaaatactgttgttggaagtattggtatcaagtttgctgaatttctttctttgttctttgtacatatagttgctacaagtgttttgaaaagggtttctgcatttgttttttttcttaacaaatggttgttagtcagggttgctaaagcagttgctgtaagtgttgtgaaaaggatttctacatttgttttttttttttttgtt

SEQ ID NO: 257519 - DNA, 1275 bp, Cannabis indica
agagagagagagaagcttctcttttcaatttctctcatattctatttgtaggatttcttctagggttagggtttaaattatatggaactaaaaaagataaaaatggctataaaaaactccttaagtggctggccatataatgggccccactagtttcaattttgccattttattttaacaacttatcttttctcttacaaataccatattttaattttaggcctttacattaataattaattatcaaataaaattgtcatttaacttatttattaatttgaccttacaaagtctcttaattaacaaataaaccctaaaacctcttttcttctcaattaaacccttgtttagtgaaaatttataaataagatgtagtctaatttagaattttaattggttaatttaaaccaattaaccgagtctacaagccaatgttatctcaactagtgtgaggaccatgagcctatataatcaagcttctaataagtagtttagaatttatgaagtaaatttcctaacttattaattcctcctaactctactatagattcatatttgcacacttaattatatagaacactctatatgctccaaatatgatacactattaaatatccattattttaatctaaataatcaaagattctctatagatgatttacatcgcgtagggacaaatttaccgtgttgggaatattttaccaagatctaaatttactatccttgagtacataagaatctgggtggaattggttggaatagtttcccttatatacccaaagcttctgattactattcattgtgttccaaaactacaactttacccactacttgcaactacaacttacaatagaaacacaagatcaagatcaaagaatagacagttacaacaaattgagttacagcataagtcactagggctctgccctagatcagtattttttcacagaacctagtctatttaaaaaatactttttcctttcatttggtaacatagatagccattttgaaagagtgtttcagttgagagagttcttcctagagagctttgcatatttgtatgttcatgtaaagaaaaacaaaagagacagatctgttagtttcaaagagagaaaataagaggataaaaatcaaagttgtaaaagatcaaacttttgtaatctgttgttgatgaatggagtcaggctctgaggtagcttcacggagaagtagccggtaacattgggtgaactccgagatcaaagttctggcattttcttttttactttcatcact

SEQ ID NO: 257520 - DNA, 606 bp, Cannabis indica
tccaagtagtacggaacttagaagtgagatcctcgatgaagctcatactactccatattcactacttcctggcactgccaagatgtaccaagatcgtaaaccctagtattggtggtgcaggatgaagaaagatgtggtggaattttcttcctagtgcttaacttgttagcagattaaggctgagcatcaaagaccagcaggattattgcaaccactgacacttcatgtgggaggatgtcattacgaatttcatggtgggattgcctagaaccacgggaacgtacgatttgatttgggttgtggtaattcaatttacgaagtctacacattttctacaagtaaaaacaacctttacagtagatcagtatgtagatttatacatgaaagagatagtgaggttacatggtgctccaaagtccattatatcggatagagatccgaagttcacttcaaaattctagcagaatcttcatcagactatgggtaccaaactgaaattccatacaactttccatcttgagactgatggacagttcaaaaggacaattcagatacttcaagaaatgttacgagccagtgtgatggaggctcctagagcaagtatct

SEQ ID NO: 257521 - DNA, 816 bp, Cannabis indica
aaaacaggtaaccctatcgataaataggatactaacaccttaaataacacaaaaataggaaaactagggttccagaaaaacccccaactggaaaaccggttcccaaccagaagcccggttcctgggtaccaaccggtcgaccggttctatgagtcccccagaaccggtcgaccgattctgtgctgggaacccaaaaaccgatccccacacctcaattcaatcccaaactttccaatagcttccagaatgcctgcatatactccaacaaaccaatttcaaaatagaacctaacaattagcacaaaatctcaaatcaccattagagagctaggtttgagttcttaaactcaaactttgctcaaacctcaactcaactaacaattccaatccaaatcaacttaaacaataccaagcaaactcgagaataccaaatcaagctatcttaattcatacagcaacataaaactcaagttcacacattaaacctaacttaggctaaagaaaaattaaggaaagaaagagaaaggagagataccttgaatcacaacacacaaaaccttttattgttctctgaattcagctaagaaaaaccaaatccttggctgagagtgagtgaggttcgaaggagagagagaatggtgaaaagagaatgaattttctaggttttcatcttttctttctaactattctcttaattcctaattaaattaaatcatacctatcctaataaaaatataaccagcccccaaagtccactaaaagccaaataactaaacaaggaaaaagacctatttaccctttaactaaattaaaatgg

SEQ ID NO: 257522 - DNA, 1341 bp, Cannabis indica
ccgttaggcttcggaactaggaccggattggctagccattccgggagtaaacattgcggatcatgccgcttgttaagagcttgtccacctctttctctaaggtctcggccttcactgagtcgaggggacctcgtttctgctagaccggtggcatgtccgggttgacgttgaggacatgggtgatgacgtggggacttatgccagtcatgtcctcctggcaccacgcaaaaacgtcaatggcaccctttagtgtccttattattttttctttctcctccgggtctaggctctttcctagccggagtactttggtggagtcgaggtcacacactgatatctcctcgacgtcctccatttgttctacaattttttcggatccccacgcggggatccaactcgtcttcttcagccatttctggctcaatagtttctcggaccattagcacgggtaggcgggtggcaacgttgtagcattgcctcgcctccccttgatttcctctcaccgtccctatcccagcctcctgggttgggaatttcaggcacaagtgccgtattgatgtgactgcaccaaagtccaccaaggccggtcggccgaggattgcgttgtaagctgtcgggcagtccaccaccacgaacgtacagtacttgaaagtgctctggggcgtgtccgggcacaaggtgactggaagcctcactttccccattgggataagtgttgttccattaaaccctgtgagttgagagccacttggtgagaggtctcggtccgtcaggcctattgcagtaaaggcctctttgaatagcaaattcacggaactcctgctgtcgatcaagactctggccaccaccttgttgggaatgggggtctctatgaccaacgggtcatggtgaggaaaacgcaccgtcttagcgtcttcttccgtgaatgtaatgggttgatccatcagccagggcctttgagctggaagttgagtaacttcccaaacctcatcgtatttcacggcccctgcgtaccgcttcaactccttgcgcgtggtccctcctatgtggggtcctcccgagatcatagccactctcccgttaggcctaggtggcaggccaggaacatgctgagcatctctggggggagcaactggagccaatactcctgctgcaccccctggtgttgcttgtggcaaagctccggccgcctgacctgggttgaggtgaggtaaccgattcttgatccactcgtagaggtgtcccaattggattaggttttcgatctcgtctttgagatttttgcattcattggtgctgtgcccaatgtcgtatggtactcgcatctcttgttgggatccc

SEQ ID NO: 257523 - DNA, 731 bp, Cannabis indica
aattcgggatgagatactggccggtcggcctagagagtttttgatctcaaatagcagaatgttactatttaaagctcgactttgtgttccagatgatggtgagcttaagaaggaaatccttaatgaatctcatataataccttatttgttacacccaagaaccatcaagaggtatcaagatttaaaaccttatcattggtggcatagaatggagaaaaatgtagtggattatgtgactagatgttaacacgttagcagatcaaaactaagcacctgagactggcagggttattacaaccattagcccttcctgaaaaagagcaggaggatattgtgtggacttcgtagttcgttttcctagaaccacgggaatgtatgattcagtatgggtcataatggatcattttcgtgaaatcagctcattttctgccagtaaagattacctatatagtggatcagtacggtgaactgtatatgaaagagatagttcgtctccatggagtgcctaaatccattgtttcatatagggatccagagtttacattaaaattttgggtaaatctttagaaagctatgggcacaaagctgaagttcagtataacttttcaccctcagactgatgggcaattagaaagaaaaattcatatattaggagatttattacgagcctgtgtcatggactttgggggctcatggagtaagtacttacctttgattgaattctcctacaa

SEQ ID NO: 257524 - DNA, 606 bp, Cannabis indica
tgttactacaaccatggtggctacacgcaaaatagtaataaagaagactccttgggaaacctcgacgtagtcatggaagatgtaaacccctctttccagagcatgcccaatcgagtaatgtgagagaaggggatgcatttgaagctgataacaaaggtgaagatccaacttgatgtcacaaacaagtcaaagaagtagtccctaatgaagagagaaaagaggagggcaatgaaggatacatcaaagatggctacaataaagactggtacttgcacgagaaggacccagatatagttcgagtatccaacgaattgcttgagacccaacaaaaattaactcatcaagaagaggtctctcaaaagatggaaaagatgatgggcttcctccacaagaagttcagaaacctagaagaagattctaaagaagacgcttaactggaagaagttgatgaagataatacgaaaaaaccctactaatgcaaaaaccgtcagctcctataaaggacaaggggaaggaaaattaggtgagcctccaaacaaatagattccttacctcctagaaaaggcgtgaatttggccaaccaacccttgcagacacagattgcca

SEQ ID NO: 257525 - DNA, 745 bp, Cannabis indica
acctcaccaagcatcctctaaaaatttactattgtagaaaaaaaaaatgctattttagaaatttgcattgatgttatgttgtagcattgatgctattcattttttttcaataaaaaattgaaactaaaaagttattgtagctaaaaattaagatatatattaaataataatgggtgagatcataattatagtaattttaaagagtgttatatattgaagtgttttaaaaaagtaagagtatcaaaaatgatgtaaaagaaataaaataaaaatattatatttttgggtaaatagcggcataaatacctaaagttttatgtttgtaagcggcgtaaacccaatgtttatttttagtggcataagtacccaatgtttgtaaaactgtaattctcttctagttttgtcagtacagactctgttttgaatttattaaaagaacatttagaagtagctgatactatatatttctatctaggcccgatgatcaaaaatttaggccttatatgtgccatgtttgagacaatatcagagtctgtactgacaaaattagagaaaaattacagttttacaaatattagatacttatgccgctaaaaataaacattgggtttatgctatttacaatcataaaattttgggtacttatgctactatttaccctatattttttaaagagcattgctattaggcaccagtggtgcctagcaccatcttgacatgtcgcggtgtgattggctagtgatac

SEQ ID NO: 257526 - DNA, 521 bp, Cannabis indica
agaatggcaggtgaaattctgtccaatccagacaattcaatggtttgtggtgatgatgataattttgatgatggttttacaaaagttgttttcttgatgaaaacctcaaactccattgataaaatataaaatgggattatgatgatgatggtttaggaaaattatgggaagctgccttagtacatgatcttattcaatatatgtacgaaaaccctagggtttaaataataaactttcagttaataagcaatatagctttgatgatgatgatgatgatgatatcaaattaattattaaatatattgtttggtattttcattgggcaaagccctcattgtaaattaggtctacactagtaattatagggtgtgtaaagaaagtaggatatattatatagtaggtggaaaaacaaaaataaataaataaattcaacaaagttaaatattttgaataaagtgtataatggcacccaattttgttcctatcctaccaagggtattttttatttttggtatacttag

SEQ ID NO: 257527 - DNA, 1173 bp, Cannabis indica
gccaatattgtttccctagaagagccaaattaaagtctctcaagctttagaaacccagtcctcctgcatgtttatgacgacacaaccgctcccaactcatccaattaatacctttaccactgctcgaatttgaatgccaccaaaacttagccataagtcgctctaactccttacaagtgtttaaaggcaagagaaatacattcatagcataattcggcaatgcttgagcagtagatttcagcaatacctcctttcccgcacgagacaaaatatgcccttcccaaccttgaattatcttccaaagcttatccttaagaatgtcaaggatagcattctaattcctcccaatcgaacaaggagggcccaggtaatagccattttcatctgcctcataaatttccaacatagcacagatagaatctcgcacctcactaccagtattattgctataaaacacagaagacttaatgaaattaattctttgacccgaagccacctcataagtactcaacaactccttcacattgtacgcttcctcctaagtggccttacaataaatatagctatcatcaacaaaagagcatatgagagattaccggtgcacctcgagcaattttacaccccgtgagtaaaccactttgttcataactacgcaacaaactagaaaaaccttcagcacaaagaataaacagatatggtgataaaggatcaccttgacgtaatcctctttgagcaacaatgggccctaactccttccctccgtgtgaaatggaataggaaacagtagaaacacattgcataactaagttaatccaacgaccatcaaagcccaaccttaccatcatagcatggaggtaaccccactcaagcttatcatatgctttgctaacatcacgtttaagtgccatacaaccatccctcccttttttattttttctttaaatgatgcataatctcataggcaatcatgatgttatctgagattaaacggccttgtaaaaatacactttgagtatcggatatgatggacggcataacactcttgagtctattagcaaccactttagacacaatcttgcacaacacattgcataaataaattggtcttaaatcccccatatccataggctgcttcttaggaattaagactaaaatggttttgttaagatctat

SEQ ID NO: 257528 - DNA, 795 bp, Cannabis indica
cattttttttcctacattgtataacatgttaaaaattgatagaaatttatattttaatattaaatgtagtataaagtaaaaaaaaaaaactgagaataaaaagcatatacatttttttctcaattttttttaaggggacgactaccccacctcgcctctatgtgggtccgcccttgtccataaggatttgctattcttgtaatagcaatattaagtttccggttaatgtagttctttttttactattcatctgtatttcttctattttttttcctaagtcaaatgcagtagtgctcaattatctgtatgctaattttacttttgataaaatcagcaatcaaagttgatactacacattaattttagtaagcaaaaaaatacattaggctaaactaatgaagcattgagtgcgcttactttcaagtgagggatgtatactatttacattctctacctggtatatctattagcatctccttcaaaagttccttgaagccatcttcagtaattcccttgcgagatatgatttgcaactgagaacaaagtaccaaaacttcaaaaggattcaggtgctttagaatatctgggtctctatcataatcctgagaacaagaaaagacccaaagaaaaacaggaatgagaggcagcagaaattaaggaataatttgtaacactaagtcaattaaaatatatagcatcagcataataagtaactagtaccttaaatgtgcagaagcatcatattatatatagaaagcaaacatttaactacaattaaataagcaagtgagtttt

SEQ ID NO: 257529 - DNA, 743 bp, Cannabis indica
atcctatgagaaagtaacttcttttgaatttattttcattttgcatcttatgataaaaattctggagatttctaatatactttataagtttttacaacttcaattcttattttaaatacaatgcatcttgtttcatttactaaggctctcattcaaaaattaagagaagaagaatggggtgaattagttgatgaggtgaaatctttttgtgaatttgttaatatacatgtgccaaattttaatgctcactatactgcaagaagaggaagaagtcgtggtcaacaagatgctaatacagtggagaattattacagagttaatcttttcaatgcagataggctttcaactacaagaattaaacaacaaatttaataataacatagtgaagttactcattcttagttcaacgttagatctgagagagatgcacgcatcattcataattgatggcatttgcaagttggtacaattttttttacagaatacgagatggtacaactaaggacgcaatttgaacatttttctcatgtacaagaacttcttaattttactattttggcaaccatttttgatgtcattggttggtaaaaactagaaaagcagagattctctcaattgtgtataaagtgataactcttattcttacactttcagtttttaccgctaccacaaaataattttttcatttatgaatacagtgaacactttgcaacaagatagaagataaattttgaagtgtttgt

SEQ ID NO: 257530 - DNA, 983 bp, Cannabis indica
taatagagaatggatagagagctttctaaatgtaaggagtttcctattttttactaactttttttaatattattttaataaaaaaatattattacttttttcatttcatcaaataaatttatatttaataaattcaaattataaaatatatagggccggtttgtcacaactgtactgtggaaaaaagcaattgtagttgtgctgtgagaaaaaaaaagttgaagaaaaactctagaaaaaaactgagctgagtgtttggtatattataaatttcaaagtactgtgagttgttaagatctattataatgataatgataatgttataatctagtttattataatcataaatatgtaaaaatttattttatacaatattttattttttatattatttttaaatttttttttctaatataaatttagaataattagcaattttgtcccctgaactttcgacaatactaattttgacccctaaaatatacgacttgttaaaaatcccccctgaatttttacatttataaaaatttagtccttctgttaggttccattaaattattctgtttaaatgatgacatgtctatgtcaattagcaactttgccccctaaactttgatatctatcacattgtaccttctcaaaataaaaatgagaaagatttaatattttttttagcaaatcttaaaaatttaatttagaacttaagaaaatcattttgaatgattaagaaaattaaaaaataaattaaatttcaaaactaattactcgatatgaaaaattattttttattagaaaattcatttagatattcaaaaaatatattaaaaatttaatttgtaaaaattaaattttaaaagaacaaacttgaatatatttttttttatcaaaaaatgtaaatttgtttaagtaaacataacattttttttagtttaatttataactttttttttccaaaaaaaaaattatatttttattgaattttt

SEQ ID NO: 257531 - DNA, 805 bp, Cannabis indica
tcaaaataataatttgagatatgcattatttcaccttatatatgaaacttttatcatcacttgcaagtatcatattgtttatatatgaaataaatattactcacactgaccttctggtatataattatttccataatgctcttttcaaacctaaagaaaaagataacataatgaaaataccaaattgtgagatgtttgttttaatttataggtagacttttaaagcttgcatatcttcaccactagagaaaaatttttagttatacatttttctctagtttactattttgaaattgatgaataatttgaaacgagcaccaaatatcaaagttactatactagaatcttttataaagacaagtgagaatgtaaatctcctttgttattgatttttagttcaaaatgaacttgttttatatctttatgtctccatgttgcctaataagtatttattagtgaaagacctatgctaaattaatgttctctaccctattagacaactttactaaagataaacttcattgctctttaagaatttatttattcattcatagcatattgtactacaattttaattctttgcatttcacagtttttatctgtatcacaaattaatattgtagttgaacttttattgtaaataatgtattcattagaaaccactaatccttttgttctaataaattatcttaacgatgaactaacaaactctcttaaagagcgaatagttcaacatgtgttttgtttagcaactgtaagtaattactaaataacataacttattagaattttatcaatgacttgt

SEQ ID NO: 257532 - DNA, 722 bp, Cannabis indica
gtgcccaagtgggattcagtagtaggtgttttgaaagcatctgctactgtacataccttgtttgggaaaatgcctcaaacaatgattgtttgtcaagatttgtggtttattttagaatctcatgtttatattgttttattgatttaggtgttaagagaagctgaaatgtcgattgagtggaaagcacattatgctggaaccataattgatctggaaaaatagaaattttattgtctttttctcaaggtttgcctttttttttgttcctttcttttttgtaatcaaggggtcaatgaattaaaaaatggttatattgtctgttatgtctattttgtatttgcaagaactatatttccagttatgtatctacaggggcatttgtaagtggtttcttgctgtaaaattgggacaatttatttgtcttcttttccaaatttattcatacttactcaaaccatgcatatgtactaacacaatgaaactaactggctttttcatttggatggctatgaatgaaactctaattttctcacattatgtatataatagtgataaaagactaaatattttattctcgtatgtataaaaaaaagcttgatgaaatactcacatgagttttgaattttattgtattgattttagttggcttaatttccaatttttaatgttaaaaaaatcattgtacaacaaaggggctgcaagaggtgaggattatttttatt

SEQ ID NO: 257533 - DNA, 1042 bp, Cannabis indica
ttgggctggaagttcaccaactcaaggcagattcttcattgtttttctacaaaagtcctggtgttattctaatggtgttgatctatgttgacgatatcattgtaacaggtaacaaagctgcaacactcaagaactttacagacaaattgaacactctctttgctctcaaagacctcggcccgattcacttcttccttggaattgaagtacatagagacgaaactggtctctacttgaatcaaggaaaatatgtcaaagaattgctagcaagaactggaatgatgcatcttaaaccgtgttccacacccatgacagtgggaaaaccattgtctaaatcagatggtgaacctctagcaaatccatccgattatagaagcatcataggggggctgcagtacttgactcacaccagacctgatttgtcttttgccgtaaacaaactaagtcaatttctccaattccccactacagttcattggaatgcagccaaaagagtacttaggtacttaaagggaacagcttatcatggtcttcacatcaaaccatctgatagacttgccatcacaggttactctgatgctgactgggcttgttgtcctgatgacagaagaagcattgctgggtactgtgtctatcttggagaaacacttgtgtcgtggtcgtccaaaaagcaatcggtagtgtctcgatcaagtactgaatcagagtacagggctcttgcacatgttgcagccgaaatagcttggatacaagctttgctgaaagaatttgagtttccattgctctccactcctgtcacttggtgtgacaacatgggagcaagtgcactggctgccaatccggtgtatcatgctcgaacaaaacacatagagttggatgttcactttgtgagagacaaagtcattaacaagaagcttgaagttagatatgttccctcaagtgatcaaactgcagattgcttaacaaagagtttaactccatacagatttcatttcttggttgacaaacttggggtagtcgaatcaccctcaagtttgagatg

SEQ ID NO: 257534 - DNA, 771 bp, Cannabis indica
gttgatttcttcttgctggcacacatggattcaacctgtttatccatccactcttagaattgacgcctctgttgttctaacacatggttcactatagagcatgtttctttctaactatggtgtgtgagtttagacttgtcccaccacttctctcagggtctccagatcaacattttcctccaaatcaacttggggttctcccacagaaggttgtccgatgcctggtccagtttctccagcataggcctagctggtgtatccagtctctaggacatcgagcataattccagcgagggaggttgtaaccccaattgctatggggttgatattggcaggtgataactctattttctaaatagtaagttatctttgaagtcttgtaaaaattgttatttttagttgtgttaatttaattaaatgtgtttgttggttgttgaaaaagaagaattaaattgttaggaaaaaggaaaggagtcaaggacaaagtgggaacaaaagctaaaattgggctaaattgctgaagtaatgctacaacgaattcaacattctgggcagtgacgaggagagagttggaagaacgaattttggttgtccacatcaacatgagtgtgtcaattactcaaaattaagctagttggctgttgtggaggaagaagactaaaccttgtgggccaaggtggaaaaggactgagcttctatttttagggtattattttgtaccctatttacccaacaactaatagaaagaagactaagtacaccttcttcttc

SEQ ID NO: 257535 - DNA, 1758 bp, Cannabis indica
cttgtcttgaatgttgaagtgcaacttttggacatcagaatccctgcttttcattgcgctgactgcattcagcaaatcactctggaagatgacatttctaaagccgaagtttatggctgctgccgcaccttcgcagatagcatcgacctcccctggcagcgggtcactgaagtgagatttgaacgttgagatgccgaggatagttccatacgcgtctctaaatacagctgcccccgtagactgagattgaccaatggccacatccgagttacaagcaatccacccttccggaggtggattccactcaatattaagagggtcggtgcactcctgaatagagtccaactcacacagcctactatttatatggtcaattcgcaccttcaagggaataggttgttttccgtgaaggattgaatttctctccttccaaatactttcaaagataagggcagcccctcctaggacacgattgagattcatagcatatggtctgttatctcgctcaataaaccattgcatccactcctcccaatttgaaaggaaaggaatagatgttctaatgttccaggaacaaccaaaccatatagctctagccagggtacactcccaaaataggtggaaactactttcctcagaggatgaacaattcgcacaagttatatcagtgatgggaaaaagggatccgatcttacctttggtgggaaggcaattggataagattctccaccacagaaatttcaatcggttgtgaattttcgcaccccatataattctccatttcctgtccaagtttgcattcgaattatgattcgatatcagtctacaggcggacttaatggagaactgatcgttctgttccggaagccaaagccaggaatcgttggtcgagctttcaggcagggatatgttgagaattcttttagcatcatcccttgtgaaccatttccgaactagctcctcgttccattgttggttcgagataaagttacttaccaaactcactccttcagaggcatcaagtcggggcattggttgtctattctcgcctggaacccacggatcgaaccatatggaggttgcattcccatttccaattttccgacaaattcctttgtggaagtcaccacggatgcgaagaatggccttccaaagtgttgtatcggaggccttaatctccatgtcaaagaagccttcgttcttcatatatttgtcgttcataagttggctccacaaggatcggtctgagttcagaattttccaagcccacttcataaggaacgccttgttcatattctccgttgttcgaaaccccaatcccccattagtttttggtttgcaaagacgctcccaggctatcgtgtgaagtttacgcttgtcttctgtgtcgccccaccaaaagtctctcaaaagtttgtcgatcttgttggcggtagttgcgggaataacatcagatgaagccacataatttgccaaactcgaacatactgccttaatcaaacaactcttgccagcatttgatagaagctttactttccatccttgtattctttgcatcacacgatcaaccaaatgtttagtatcctctgtcctcttagttgaccggaatagagggagtcccaagtaggtggccgatcggttcattctcctcacacccagaatcgttgcaattgactgagcttttctggccgagacacctttggagaagcaaacagaggacttcaagaagttgattttctgacccgagctatgacaata

SEQ ID NO: 257536 - DNA, 808 bp, Cannabis indica
atactacatattgtttttaattgggccaataattaataataatggcaggtaacaaaatggaggtagtatggggaaggagaggctacaatgatgcattgacaccatttgggaagaagggttcaagcattaagatggttatggttttcaaaaggtacaaagctggtcatcatgatcgcatagcaactgcagattggaagaatcctccagatgcaatcttttttaatggggatctctgtgtaatccctaataccactcaattctagtacaagccacccctagtataatatacgagtgcaaactttggaaggagttattattattaattagtatgttagttttgttagaattctatgattttcataaaacataaaaatataaaccatgagatcaatttatatatttatatatatatatatggaacactttttaatgggtattacccatgaatggttactaaacaaatttaactataatattaattttaaaaatatcaaaccatccaattttgatctaataacgaataatgaaatcacaaatttaaatttctatgcttaatttaactactttattaaaaaaattaatcaaaaaatatctctttttacactatataaaatttgtgtttaatgtgattaaattttaatcaaaaaaaaaaaaaagaaaagaaagaaatttgtgtacgtattctattccacattactcatgtgtgagtgatttgtaggatttatatcagtcttatagcaactaccaaaactttaatcccatgacagaattttaggaagtgtttaactttataacttaaaaattattt

SEQ ID NO: 257537 - DNA, 553 bp, Cannabis indica
cctccctcaaagagacttggggtccttatctccgagtccgaattgagattgatgtaactcaaccactcccgcgtggtacgggctttcaatttcaaggaatggctgccccggtttggctcgaatttcgctttgaaaatttacccgatttctgtcattactgtggaagactcagccacattgtgaaccactgccatgaattcctagctaagtgtgactcttcttcagctcctcctttgcttcactatgaccaatctttaggagccaaaatacgtattacctccaaccctttttacattgcctgctctcgaactcggctgcgaccacacatcgccaatccaacttcattggccccgcctcctccttaccgtttacaccaagcttccatcatctccgaaggtactttcaatgatcctactaccgcctacggtgtccaacacttcagccagccgcaaaccactctcatgggcttatacaatgctcaatcctcaccccatattaaccttaaccactcccctactaataccaccatatggccctacacacagcctgttgt

SEQ ID NO: 257538 - DNA, 550 bp, Cannabis indica
ttctttttcaaaaaaaaaaaagtggttttattattactagaattgatactaaaggcatctcatccctttagtctttaattcatacttagtttcacacgaagaatttaggggtgctcaagtatttcttggacgctgacgttacttagagtaaacaatgtatttttctatcttaaagaaagtatgtacttgatttgttaaatgagacagaaaaaccttgtaatgatccaatgaatctagctatgcatcttacacgtgatggggaaccatttgaagatcctgaaaaatatcgcagattggttggaaagttgaattatctaattgtgactcatctagatattgtattcccaattagcgttgttagtcaatttatgtcttctccaataatttatcattgggtagcattagagtaaattttatgttacttgaaaggagcaccaagatgaggtatagtttacaagaatcatggacatacctagttttagtgtttctctgatgcagattgggcaggctccaaggtagatagacgatccacttgaggatattgtgtatt

SEQ ID NO: 257539 - DNA, 752 bp, Cannabis indica
atagtttttgtgctttaatttatcattaaatatttttttaatttgtgtgtcttatgtttctagttagatttcttagttagtgtataaggtaattggtttttttgcatttaattgttggttttcttattttacataactatgtttcaagttgtattatttgaaatggttatttcacatatttatgtaataagtttccctaagtcagatttttaatagctgataatctaactaatttttctatgttagatttttgtgtattaattttaatttgttcactttacttaattggtttttgtgtttttctatatgtagttgctctattctttgtaatttgtagtgtttagtctatttttcattttaagtttgtcatattatttttttatataatctaaactagttttataggttttgttatggtttcacatgttttgaggatattgtaataaaatttctctacttttatgatgtcattatatatatataatttttatttttttattttgtttctatgtttgaaattagttttgtttttagataattgttgtgtattgtgtgttcttttaattatatttgtgagtttttttagtaatttttgtgtgtgtgtgtgtgttttcctatttggttgacagataaaatcggtttcagttatcatcattgtttattattttagttttgttataattttttatagggtcgaaacttgtttcacaagttcacatgttcgaaactagattttgtaatggggttgctct

SEQ ID NO: 257540 - DNA, 1065 bp, Cannabis indica
tcaagactttttcccatatttgtaagttttttttaaaaaaaatgccatatttagtgtaattaagtttttatgccatatatatcaaaacttatctttattttctcatatttttgtaaatagccctatataatattatatttaatttaaatttatatatttatataaacatacgtgaatatcaaataatattggaaaattctataatgcacctgatatatctctatatgttttagtatccgaaaaaataaattgactcgtcatgtaaattatagttatttaagacatcctgcaaaattttaagaaattcaaaaaagtttaatacaccaaaaattgcattcaagcagtatgttgcacgcgtgactattttattttatacgcgtataaaatagattgtttgaacattatttttaatattgtaaattatttcgaatatctcaaacttttatagaataccttaaatagatataacgtatataaatatgaagaaaaaaaattaaattacaaaatttttctagatgccgaaaaaagtagagggtacatctgtacatcccttttaggggagtgtattgtagaatcaccctcaatatttataagaaatttactaagtaataattttttttcgaactttacaagaaaattgttacatttatacttttactatttaatttctttttttttttaactattttttacttattagaacttcaaaaagttttttgttttgctttttgtttttaaatattttttttatttttgggttgactttttttttcaatgaatttttttcccctttttttctttctctctccatttctctttttattttgtagttatatcaatgttttgttattttgttattaaatttttgatgtttgttaagttattaagttattatatagggttgttttttttttactaaaaattaaattgtattttttgtaatttttaaattttaaacagtatttttataaagttggtgtaatatttttgtaaactttcctgacaataattttacatgtttcccaatattcagtatataaaaaaaaaaataaaactatacatcat

SEQ ID NO: 257541 - DNA, 1072 bp, Cannabis indica
ataggcatcaagaggtaattaaatttcgtttggtagattagatttaatctatattcattatgttgagatccttgggcttatggctcatattagataaaaattattttaccgaaattctgcttctgattttataactcagatatagaccataaaaaccaacaattggtactagagcaatcttcataatgatatagattaaatactgtgttgggtgattatatatttatacatatagatattgatatattgtgaatgaaatgaaattaaacttttttatgcatgaatgtgaatcattaattatatggtaaagttaggttacaaatttaaaattttactagaaaaaatgtacactattatcccaaactttttccacctaatgtatcatgtccacataagccaagacaaagtacttgtagaacacaaccttaccaatagcaagacaaggtctccatacaaggtgtggaaaaaccgtcaagtaataagcaaaaagagttaagcaagcccctaaagagctacaccaacatgtttggctgcccaagggaagtctataggccagccaagatgagtttgtatggccaacctggatttgggtataagctagctggccaaaaggtgacttgtagaccaagggagcttccgttcgactaagagaacctgatctctacaaggaaaaggtgtccaaagctgacctccactttacaaaggttaactaccatctctaaaggctggcctcctcttggaaaagttcgcaagaacatgacctgcaggatcctatcaggcacatggccggccagaccttggcaagcacatggccagccaaatcatgacaggcatatggccagccataccctggttggagcatgaccgaccacacgtcaacctacagaccttgcaaagccagtcagacctcatcctgcaggtgtatggccaaccagcttttcctacgcaggacattgatgtgtagccttcacccatggacagaaaaccaagatgtgagttgggccttgacatcctattaagatggtacaaaaatatctagtttcaagggaaacttagtcatttgtatttatta

SEQ ID NO: 257542 - DNA, 1180 bp, Cannabis indica
caaattttgacaaatgatgacgtagcaagagtaacagtacgtgacacagaaataccgagactgaattaatggagaatatgtaaagtcatgactgttggagtgaccgttaatcatgaaggttggttatgaccgttagaatggaagtcagacaatcacctttacccctaacttgagtaaggtgggcgtctccaagatggaaaaacgatatagactaacaccttcataagtgggatgaacaatcaccacacacttgcatgccaagttagtctaaggggtagatgaaactacccccaccatagacataaggacattctcaaaggtagatgaggacatcacaatactatgactacccacaacatataaggggtctccgggggtcaccccgaaatgacaattgacgcccccctcaggttgggtctcgaaggtgtcacccccaagtgttagcttctatccccgaaggtggtcaatgattgtgtcacacccttaggagatcctcatcgtcaatgactagttgaaaggttcaaatcctacaagaagctcaaagatagttataaacccacaaaaatagcgggatattatcataaaaatcagacttcaactacctccgaaaatcaagaagacagttgagagagatccgcgttggtcgcgtctcctgagcatgaaacaccgaccttttcccctatataaggggtcacccatggcctagaaaagggatccgcgattttgagcacttagagaaaaaacattctgttattctttgcattcaagagtctattcttgacttttacaattctgatcaataaaacataaggggagtaggctattaccgacatctgagccgaacctctttaaattttggtgtctttctttatatttattgcatattccaatatcattaattacatttattgttacgattttggtttaaatctcatttattacaactccgcgtcagtggagctctccttttatacggatgcaggtcctattataatgataaaatattacaaaaaatataggaaaatatgtttgagttgatcttggctattgatgatgatctaatagtgaaaatgacttcagatgatgatcatcaatttttggagctcaaatcttgttgagaggaaataaaatttaagtagaataaatgagaaacacatgagatttatagtagttcaccccc

SEQ ID NO: 257543 - DNA, 764 bp, Cannabis indica
tcctaattaaccttttttttttaaaaaaaactaagttatttttactaagaaacttcattaattttatatttaaaatgtgatatataagatcataatggacaatttttatcaaccatttgagtattttttgtaaaaaaaaaaaaatgtgtcaaattttatgtaaatgagagataataacaaaaaatcatattttgggatgatgtattacttttgacaactataaatattatcacggaatttgacttatcattaattttctcgtctgagaagtaaagcataagagagaaagagtcaaggtataaactgtttggtcctttctctaatgctttttctcgttttcctttctattataagttttttgtattctatttactggggattggataaaggattttgggtccctcatctgcgtgaaggagaatttactatgatgaacaaggctttgatatgtagtgatacataaaccataactcactcttaaagattgcattgcagaatctcataaatagtcatataaatttgatgagctgatatattcattgatataaagcaaatcctacaatatgtttatttgtatatcgtactataatcctaccttaagtgtccaaacataatgaatgaattcgttgcatttttatcatacaaacaattatatgcaatgtgtccatccatatatgaccaaacaataacatgaaccaaatggaaaaacattttaaggattcacatgtgcagaagcagaaccaccaccagccgagcagcccgcc

SEQ ID NO: 257544 - DNA, 596 bp, Cannabis indica
tcgaacctataatgacaagtaggatcagcatgcccatatctcatacaaacttgacacaaaagtcgattgtgattagcatattgagggtagtgagttaactgatttccacgattaaggaatcttgaagaagaatcatatccaaatcctctcccaccattattgttggacctaaaaccaccatttcttgatctaaaagtgagattagaagccatttttgttgacaaatccatcattgtagtgtgcctttcaagcctggtttcatgagccattaatagtgcttgaacttcctcaagagacaaagtgtcacttcgagaagtcataccagaaacaacagaattgaactcaggtccaagaccatttaatagatgaagaatcaagtcaagatcagtaatagagtgtccaacaataacaagggaatcacatataactttgagtttgttaatatagtcaaagatggtatgattacctttatgtgcattcaatagttggctcttgattgcaacaatcaagccttcgattgacttaagaatttctattctaaggccttccaaacagcatttgagctagtgtagttggccacagtttcgagaattcat

SEQ ID NO: 257545 - DNA, 350 bp, Cannabis indica
ttggtcttacatgctgcaacaatcatctgcaacctctcctttagaagctgaagctaaagtaatacaaatggctctttcttgggccgtagatagcaggtggtctcagatttgtgtggtgtcagattcggctgttgcagtccatgctttccagcagagaagaaaaatctataattggaagcttttaagcatttctttaagtattttagatacaattaagacttttaatgtttgcaattttatttatactaataggtgtaatctatcttttgtggatggtttggcaaaaaaagctagagcttctagtgaaattgctaaagtttttcaaggggagggtgttggaaattatttta

SEQ ID NO: 257546 - DNA, 1170 bp, Cannabis indica
gatcacaaatcgctcttgtcgacattcaacacaatggtgcaaactcgtagaggcctgtccgacccagcaaattcacagacgctggatccgacattgcaggacccaggaagttcaagggtcccacccgctatcaatcttggacagacgggaagtgtggtgaatggtgaagcgactccagttactgaaactgtgcctgttgtgcaagagactcggaataatagttccgcacacaggcagggcattcataacacgactgttccgcctggaaccaacgcccagacgaccatcagagacgtaaccgaattgcaaaatctccgtgctgcgctcggactcatgcaaagtcataacaacactctgcatcatgatcaagatgaactgcgtgctgcagtgaatcttgcgtttgacgaacagaggcgtatgttcattgaatggagagacaaaaagatggaggcattaagggctcaccatgcagagatcgaagatcgtagtcggcaagctaccgttctgttatgaagagcctaccagactgtaggtcagcaaatgccaaacgtcattcccctgggagaaatggaggatgacccgacgatgaatacctcccagacaaccaatggtcagccgtccaatccccagtcacgagttccacccgtgggccaagagtaggcgggcagaccttgtcccggaattcatcaggaggagccatacctgacggatctaattagaataatggagttattccgcctgtcaaccaagcgaatcaaccgctaagacaatcatgctcttctgtgttcgataggctgggaacaacccatgacctaagggacgatctaaacagaagaaggggaatagactagaagaatattgcaacgatcttgtagcccggagcccatactcaaatccccccctcagaaagacgctaacgtaatccaaaccgacaaaaattccaaacaagtcagcccagccgtacaggcacaccttgacgagttgaagaatatgtttcatggcatggacggacagcgtaacaatgatcttgagttggactgtgctcgtcgaactcctttctcaccagagatcaatctcctaccactgcctcacaagttcaaaatgccaatgtggaagatgtacactggaagagaagatcctctttcccatctcaagtacttcgagatgcaa

SEQ ID NO: 257547 - DNA, 763 bp, Cannabis indica
aacattctcactaccaagaagaaatcttagatatatattacaaatattacaaaattaagaataactaacactggaacattctcactaccaaggagaaatcttagatatggagtcaaaaacagaccaaacttaaaattaatgtgtacaagtattcctaagaagctacactgtcagcctaccagaagtcatgaattttaacaatgctaactgaaatctcatctgctcattataaagccaccgtcactcaaaatagcacaacaaaagtaacaaaatctcatctgccatatttacatatatggatcgatctcttggaaaagaaatgaagtactataatttgtagtttatattatagagagaagttttcacgtaaagaaataggtatatggtttattatatttatagagttacttgaagagatttggagggtaagaaggacactttttaattattataatatgatgatatatagtaataatatgtgatgagaaatttccaaagcgtggaaaataaagtattagatgtaggtgattggatttggattggatattcgttagagttttgttaagttaatcgtaaatattatttaattttttgggtttaattattggctttatttttaaaatttgaataaagcgtgtaaaaaaatttcaaaaatggtagaatttgttagagagatatgtgggtaagatatttttttaatttaaaaaaaaaattgtagccgtgtaaaaaattcaaaaatggtagaatttgttagagagatatg

SEQ ID NO: 257548 - DNA, 3127 bp, Cannabis indica
aaaagatcccaaaattaattttatacaaaaaaaaaaaatgataaaattccaaagccatacaaaaaggaacaaaattcccaaatgagttcactaaaatcattcttggaatatttaagatgtcattcacctcacaaaatttcaaagaggtcattaacctcacaaaaatctcaaaaatggtaattgtacctaaaaaattaaatagtgcactaaaattcaaagccataacaaattaaatgacattccaaaaaagaggggttattcacctcttaaaaaattaaaatcggaactacgtttgacttgattcctataaaaagatacgtaggtaacttagttcctaagactaagtgcagtcgccgataccgcaaaatggtataaaatataaatctcaaaattccataaaaggtcatacacctaagaatttttccaaattttcaaatagccaaggattcctgaaagtggttatctaccagaatctttatattcaaattctaaaatactgtattttgaactacaagtggcttgatctttcacaaagaaggtatgtaggtgtaattccaaattcacccttaatttttcccaaattatttcaaatcatttaatatcatcgtaattgcgatcaaagagtatttcctttaaataaaaggattgtaattaagagattatttttataatcttggatgggtcgaacttaaattaataaaatcttatgttataaattttacataggtgaaattgtgttttgcatttatttttaacattctaaatgtaaaattttttacttatcataatttttggcacgcccggtgggaccaattctccttttcatctccaattatgatgactattatttaactttaattttacggtgctaatcatgtttaccgttttgtgggaaaaaaaggcaccacaagtcatagtttacttccagaaactaccaacctcttctgcccaagaagggaaaaagaaccacttctttgcaacattctctatcgattgagcacccatttcatgtagggtacccgaaccaatatagaatgtgaagacatctataccagttagaaaggctgaaagagggaaaagtgtgaagagtatccctaaggctacgcaagccttgagaggcaaggcagcaaagggcctcaaaaagaggcaagcccgggcaataaaaaggtccgcgacaaaggttatcaagacagaagtgaggctaacgaagattggctctcccgtaatgatccaaaaggaatggggccatgagcgtatcttggttggttccattcctattttcttgcccactgtcgcatcagtgatggttatctttacggaggaaattgaggcaacaccggcttctcaacttcgaagaggtaggaaggcaacaaaaggcaggagggggacagagacttcaccttcaccaaaccctttgaaacgagggagttagaaggaggcacgccgattaggcctccgatcgtaatccctgtcaatcgccaaggtcaacagggggcattgactgagatcaatgaacaccctttattagatggggggtgtaagacgcctttctccttcccaaagaaggctagaggtgacagtgtaagggttcccaaaacaagccctaactcattccgaaaaagaacagggtgactagaagttcctccagggatatcaagcaacaagggtcacttcaactgttaagcctacctcctacgcgggccctgtaactcgatcaagagctcgtgccatgcgtacaattctcgttcaggaatcagtgaacccctttgttcaaaaagttcaggaagagaggtgttgcacatctgaacactctttaaaggacactccctttattgaacacaatgaggggatgtctgctgatctcattattcagttcgaagcactaaccattggaaatgataaaaatatgccagtgttagtaactagggcaatcattaatgaagagaagattcaggaactacaaagattattggccgagagggatgaagtagcccgactctcaacacaattatctcatcaagctaatatgagacaaaaggagagtgaggttagacaacattcctcgccttcagcgctgcctgtaggcaatacacaaccgccaccactcggtgtgcaaccaacactagctggtgttcaacctcagcaggacctgaaggcttttatcatggagagtattcgggaatatcaggctgcaacaatgcctattcttggatatcataagccataatcagcttactatgaccaaatcccatttccaccaaactatgtccgacaaaagttcgaaaagttcgatggaattaatggttctccccatgagcatttggcctatttcacctttgcatgtggtgaatctgcccaatcagatggactatttattagacaattcgtgcaatctctaaaagaggcagcattcacctggtatactcagttacccccaggatcgataaatacttgggacatgcaaaaagtttttctagcacagtttgtgagctcaaagaagaccataagtctccatgacctggtggaaacgaagcagcaaattagtgagagcgctaatgagttcataattaggtggagagatctcaatctccaatgtccaaaaaggatattggaacaagcggcagtttcaatgtgtgccaaaaacctcaaccctgaggtggcaacttttgtgggcacaatagaacccaaaactttcaatgagctcgtcttgaaagcctgtaatgttgagatacaaatttctcggcaaaagggtggtaaactctcaccgagatttgaaaacaaaaagccattcaagaagggagaatcaaaggcaacttttatcaataccggcaacaaagataaagggaaggcacgagagcgacaaaaaaaattaactctcaaagaaaggaaggaagttaaatatccttcgacgatgatgacgtcgaccaaattttcaatgagttgttaaaaattaaggcaatacgagtcctcgagccaaaatgacccagcgagagttgtatgacaaatgatccaaattattgtcggtaccaccaaattgtgagttacccactgtcggattgctacatccttaaaaatattatagaaggtatgatcaagagaaaaagagattgagattgactcttctctt

SEQ ID NO: 257549 - DNA, 1051 bp, Cannabis indica
gggcataaaacccaacaagtaaagagcgcaatatttttatagagatttgacccccttagttagcgggtcatgacctactccctttttggttttattaatactacagataataccactcagatcacaagtattgtgaattctaaagtggctctcttaagattacaatagtgagaattagtaggcaaatctcaagtaagagagatgaaagaaactgtctcttctacaaagcttggggcgtgtagaagggagggagagagagaattagagtttcagacttagagcttgagagcttagggagcttgagacttagagaaattagggttagttaatgctctttatataggagagcttacaagagaataataacctaatatccctaaaaaataagaactataaagtatttgttacataataaaataataaataataaataggttctcccttatttttatgggttgttgaagcccaattcatagctaggattgttgtcccagatgaatgctacacaccaagttcctgctagggtgtaagttgaccggccaagtgcctactagggtacaagctggccgacctttctttttctcgaggttggctggcttatgctggccatagggccagcttgggggtccagttagacccctgaaggtggccagtttgttgtctctctatcttgcttaagtatttggacttccagacaactgatgtattgtgtagatgacttggccttcttattgacaagttttactccatgtgacgctggtctttcccacttggacatgccatgtaatgtgggtaaaaattaggataacattttcccccaagtccctgtgcggacgtctgtatggattgagacttttcagattatagtttggactgatgaaatcttaacggggcaagtcttacagtatattcaatctttggaatatttgctcttgcttgtctgatcaccttccttagaagaaaattaaaaatacttttgcaagttattttatgcatgctgcatggtaactaagagagggacccaccagaagctatataagcttattggtgt

SEQ ID NO: 257550 - DNA, 764 bp, Cannabis indica
cccgggttctgcaatggaggatccaccgcctgtggatttgccagatcaaccatgcccttagagtctgtatcaccatcgtacttgtgattaaatttagaatgaagagcgatccttgattctactctcaatgaaagcaccaaaatgttgacctcacttttagcaaacgacagtgagtctaatttagtaaccgacaagtagtttataacgattgaaatatagtaaagcaatataaagacacaagaattttatagaggttcagtcctgagcagttcagtaatagcctaatcctcgttatttgtattaactcaagaacaaggagaaatgttccttttcttatagctcttacaacaatatctctgaatatgaattcttagacaatatctctcaagtaaaatatttcggccctttgcccagtgaacatgcatcactatttatagggctatgagcttgaagaggaagtattcgttacaattgatatatgcagaaagattgcatagtaaatacagaatacgctgatcgtggaatttggacagctttccatatctctataatctgatccccaaattatagggatttcctcgatgactcacgatgcaaaagttgaattcgctaagtgtttgtcactctgtgcggattgttgattgctttgcctcgagcatgcacatgaggtttcctgttcggactgtatcttgtgagcagatactcggagttgattctcgtgtgatgccacttcatagagcaaaaattgggataacacctttaat

SEQ ID NO: 257551 - DNA, 747 bp, Cannabis indica
aagccatgaatatttcataaattatttatgccataattttttattctgaactccattttggacgttctttatatccatagaaatctcataaaaagctctatcatttgatccaatatgtgagccctgattttataaaaatattttataaaattggggattaaccctattgtgtttaaacttagaaattgtgactaggaataccgatacttggacaagattacctgtggattggaatttctcctcatacgttagaaatcaggtaagacaatgaattatgcacatagagtatagcgcaatggcgcagttcatattatgtgattaatttgattaaagtgtgagttaggattattaccctaaatttatatggtgtgaactaggattattaccatagatattattatatcgagaatcggggttattacgtactctaagtaaatatattgtgaattacgattattatccaaaatatatttattgtagactagggtcgttctaagatccgaataaatgcttagaattatgcaagttcgggttattgtcttaaaacttcatatagtaaagtatatgttgaatgtgttgtatgtatatatatatgtcaggagttatgtgtataagacataactgggtttggcctgataaacatcatcaggataaaccactgtaagaacataatgtatggattatgtatatatatatatgagtagagttatgcagataagccataaccaagttagactcgataattat

SEQ ID NO: 257552 - DNA, 1001 bp, Cannabis indica
caggaaaatcacagctgtgtgattttctaagattaaccgcaattatactacgtgatatgtaaatcaaatcccatgattcaggggaaaaacgttgtaaatattacagtcaactttgtaaataactgcctactatgtgattataaatagtggcaagtaagatcaaaaagggactaaaaatatacaaacaagccttgaaaaactatcagaaatctaataagattgtctcgtggcctatgcagaattttaactgcaaaaccacgtaaaaaaatcatttgtgttcatacctcttactttactactttcatttttctgtgtgaaattataactgtgaggctcaaattttggttaacgaaaatttgcgttaacacttatggtcagaaaaccaacctgagctttagtttcagaaatggaatggagaagaagatgaaacacaaacccatattaccaccttaaaatggagtaaattcttattcctctctatatagttttacaaatatgattttccaaccccctccacatctgaaatggcaggtatttataggatctaatggccttgtttacaaagtggtcccatgggacaaaatgtcactttggcgctgatggttgtaggtactggaggtagtctggtaccttgcacccttgtctggtgttaggttgtccccaagtgcaggttgtagtgtgtagtctttgggtacacgcatgtggtccccggtttcatgcaaggtggtccctaggtacatgcgcatggtcctcagttgcatgcatggtggtcccaggtacatgcccgtggtcctcggttgcatgcgtggtggtccctgagtacatttgtggtggtccccaagtacaggctttgggagagtggttgcaacatacccttggtcgggtcttcagccctcgcaggtccattgttgcccctacttgtacctccttgctcttattcttcaaaaggcatggttgtacggtcttccctagcacgcattgtcctttgattcctctcccaa

SEQ ID NO: 257553 - DNA, 1477 bp, Cannabis indica
tctctactccatactctattttaattagaatttttatagttttggctgagcgtaatactgagggatttttacaatctctttccatttcgtatttctccaaaattttctcttgttttgatgttaagatgaaattcaatttgggttcttattcaatttattaaaacttagtttgtagatttccagtcattcattttctgtatgacagagtttaaatttttctctataatgtgttaatttcctgtttatatttctagtgtttgtgtggtttttttcttttagacttagtttaggggacgttttattttatttatgcatgttagtgtaattagttaaatgattctgattgatctagttttacgattgtaatggaatttgttgcggaaggtgatacattgagtattgagatgcggaaaggtgggaggagtttagtgccacggaaagtgggatttctgtgccttttgtggttaaattgtgtctttgttagggtttctttgtgccatgttaggtggctttactgatatgaaaagggatttctgttttaaggtattttgatgtaatttgtatcaagtatctattacaattaagatttttgaccttttaattttattttaattttgtggttttgaccttatctagtaggatgatttaattatattactaaatttgtgggatttcaatggaattaattggtaagaatgaatttatgaggaaattatattaaggctttagttggaaagatttgtggaattttataaaatcagttttaatttcattattagtgatttgaagaaagaagtttaattggttttaagggaattggtaattatgattttggtaataatggattcgatagttatgaattggtttaaatattttgattttcaattttaaaagatccctaatgtatttatagagtggtttttacaatttaattagattggtgtccaattagatattatataattatatgttggtatgtatttatatttatggtatagcgttaaaagaggtaggtattttgtcaagctatttgtggaaagtttgacttcttttagagtatgttattctttaatttggaatatctgtgatattggtagattttgaaaggtgatttagagattaattagaataaaatgttataggaaagtttcttctttgattttaacttaatggaatccggttttaatggtattgattgagttgcaattttggtactaaattatgtaatatacactgtcttactataattaaggcaataaaatttaggaaattttaattttaatgttgagaaaattttggatttggaatggccatgtatgagctgaaggttggatctgttttgttatggtatatgtgtgagttacttgtaagtttattggaataattatttattaattatatatttaatttaatttattactatttattcataactttttattatcccaaaacttaatttatttaattagtatatttt

SEQ ID NO: 257554 - DNA, 533 bp, Cannabis indica
caaataaaaaagaaacatacatatatacaaaaaaattatcaaacaaatgaaacaaaatttttaacataaaaaagaccgtatttttaatgtaaaataaaatacaaaaaaaattagtaaaaatattttaaaaattccgtgaaactgtatttaattttttttatcacatacaaagctctaatttattataattcaagtagtctgaaaaaataagaggaaaagatcaagcctcagatttaaaaatatgtggattataagagagtttgtcttcaacttctgcatctccactaacttcagttatcactaacatacaacattgctccactaatctttcattatgaacattgctagttactgatacttcataaaaactaataaaaagagaattaaacaaaatactactggtctctaatacggtatcatactcttatatgtataattaaatatagaattttatataaattttaaaaaaataattttataagtagtacctataaaaaagtgctatacccaatagcaatactcctaataacaat

SEQ ID NO: 257555 - DNA, 725 bp, Cannabis indica
atttattgtaagtaaatattatttttaatttgtccatatacaataggaacattttaccaaccgtctatacatatgtactttcgaaggtatatattatataatatttttttttttttttgaaaattttcactgatattattgattataatcgtcgataataacagagaaaataggactgggaataacacccgtccaacagacatcttcatccaactccaaagcatattttgctaaaccatgagcagcatggttagcatttctcttaacatgagaaacaataactccggagaaagaggacaaaagataacgaacatccattattaaatcactaaaacaggataaatcaatggatgaagagtttagagccatagaaactctaagtgcatcggtttcaatatgtgtaattggaagctgttgttgcataacccaattgatgctgtgaaaaagtgctttagcttccatttcgtcagatcgaaaacaaccttgaaccggttttgagaaggcagcaatgacttgcccttgatgattcctcaccacagctcctacacccagaatttttttatccgaatttaaagctgcatcaacatttagcttcaatccaagtgggtctggtggcctccattgcgctccaaatgggtgctgggcaggttctggtgcttgtgttgtttgttgtacatgaccattcgatgaactaagtggaagagaagattgattgggagcatctg

SEQ ID NO: 257556 - DNA, 806 bp, Cannabis indica
ctaggaccaaagtgctccattgtgcgcacctcgaaccctcagagctcaccaccatgccgaccctcagtgctccactccaggccaaccctcagtgctccacaccaaggcgaccctcaatgctacgccccaggccaacccacagtggtccacaccaagccgaccttcaaagtctagcaagacaactgtaggcattcgtggacttgagcacgtgaaaggcactcttgtgctaggcactctcgtgctaggcacgtgccatcaaatctgttacaggaatatctcaaacaagttataattatttttttttgaagatatttactttggaatgttattttattattattttatatttgaatttaacttaactctagttaggaaaagagaagtatcgggttaagaaacgttaagccctatcctgtaaacttatataaaggttattaaatcagttgtaaggtacatatacatacacatctcgctcttttactttaaaaactcactcgagaactgaactcttagagaactattcttgagtattgagataaattacactctaagtggactagtctatccccgttgaaagggggtgaagcactataaaaactcattgttcattattgttaaatttctttctacaaattaatttacttttatcgacattaccttatgttcatcttattttttatgattttcttagattcgtttgttaggaatttataaaacactaaaagaaatatataaatcacagatccaaacatattcctaaaagtgctttaatatagaaaaccctaaatcataaatctataaagcct

SEQ ID NO: 257557 - DNA, 678 bp, Cannabis indica
aaatataaaaaaataaaaaaaacattatttatttatgacacaaaaagtaaactataccttaaattctcatatttatatgaaaatttcccttttttttatgataaaagtgccttgtgttgtttttggcccatacccttattgtaatgggccatgcagcccagtggctttagacaaaaaaaaaggaaattttttgtataaaaatctcaaataatgacacggttcttttctttcattgactaaactccaaatagattaaatatattttcatgaaacaaaagttcattaatcattagatgataagtgaaatgggattcatatatgattatgatggagttactccttaagatagatatcaacgatttaataaaaaaattagttaatttgtatttttgttctaacccttaaaatttttattttaattattgaaattgttcaatttaaaaacttggtacggttcacaaattttaaataactctaattgaaaacccagttgcataatggtcattttaatagcttattcaattatcctttgctttatttttttttttatatcagaacgtacatatacctaaatataacatttttaaaatcatttcattttctttttcaaaaaagaaaaaaaaaatcatttccttttaaattattgccatccttcttttttcatgttattatgctctt

SEQ ID NO: 257558 - DNA, 965 bp, Cannabis indica
gttggagacggtaagaaactcctaatctccaatattggtcttgcctctctatctgcatctaatgctaagtctctaaaattacaatctgtacttcatgtccctgcaattaccaagaacttggtcagtgtatcacaattaactaatgacaattttgtgtttcttgaatttcataaatcatgttgctttgtcaaggacaagcaaacagggaaggtgttgctcaaggggactcttaaagatggtctttatgtgctagaagaatgctccaagaattcggctaaagaaggatatcaaggtggtgtgtctagtggtaattgtcctgcagcaatgagttgtaccagttctttacagtttcccaatgtaaacacaaacattatgtgtaactcaactcttatcaataaagaaaatgattttgaatctacttcctatcatcccactgctttacaaactactaccactaatgacataactgtttggcatcaaaaacttggccacccatctcaccatatactcaacaagattcttaccaatattcaccacaaaggcaacactcaacatctttctttttgccatgcatgccaacttggaaaaagccacaaacaaccattctctagcacagattccaaagccgttcaaccccttgagctcatacacacagatgtatggggaccatcccacatcaaatccaaagatggatacctctactatattcatttcatagatgattatagtagatatacctggatctatccaatgtcacaaaaatctcaagccttagaaacatttgtcaagttcaaagcaatggttgaaaaacagttcaaccttcctatcaagaaagtacaggcagactggggaggagaatacagacctttctcacgattcttaagtgaccaaggaatacattttcaacacccctgtccaaaaaccagtgagcaaaatgggcgtgctgagcataaacacaggcatat

SEQ ID NO: 257559 - DNA, 919 bp, Cannabis indica
atatatacttgtcaaaagccaaagaaaatttagtatgtaatatgctgctgaaatgtttgatgtatgtgtactagctcatttgggattgataaattaaacacggtatgataccatgacaacatatatatttattaatatgagtaaaattttaggattgatcatttaaattctgtcgtacatatattgaaaaatcctaacttattaatttaataattattggattgactttagccaccacccactttcaaagcctcatttcaataatatagttcattttctttctttaagtaatacataattaaattttgcaatcatcttgcaatacacagatttaactttgtttatgatttagtgtccaaaatttagataaaaaggttcagtgctagagctaggatactttacaagtaactcaatttgagtttcttctatctctatactaaactagtaattttttgccgcttaatgcattgtcataacctttagagttatataaacatttagtaaagttagtaatgtaccttcatgttcagttaaatattgtgtttcgttatatatttgttattgttagtgcgaaataatttttttttctttgattgtctcattatgtgcttgattctaatataacaacttacttattttgctactcataaataaatttttgtgcaatatgcaggtataatgagtgtaatttttgaaacaaatagaagaatatttatgttcctttggactctttgtacgtaatatatattaaattggctaaattagcaaaacattgtaattttatcaagataataaaaaataatttatttttattattttagttgttttcttattttatttttgtgtgactacaaataattctataagctaatatatattataaattatatttataaccgatgcgtaaaagaaaaaaata

SEQ ID NO: 257560 - DNA, 725 bp, Cannabis indica
taaataaaataaaagagagaggtgaaaaaggtgcttctacaattattatccagaaggcgggaagaaaagaaaacccttcattgtctctaggatattatttctcattaatctcccagaattattaaccgatactattagaattaataactttgctctttttatattgttattgatgtaattaagcattcagtcacatataattaataattagtcataattttttatttttaatcacaaattttattatgattaaagtaaaattttttatagtgtataaaaattactattagctaatatctagcacattatactcttattgatgtaattaaattttatcttatataatttttttaaatatatgactgaccaatcataccaaagtggtagaaactattaatatcaaataacaaactctatacatatatattcgaaaatcgaaattgttgtctcaaggatattacttctcataaatatcaacgacccctttatctatataacccaattacatctccttatctcttttatttattattatttttttttttttgagaaaatacatccccttatctttttggtcaactaagaaagtatcatattacttcaaattttttaagtgattttttttcttaaaaaagttaattaagattttttttcctgaacttgtactaaatcatattttttaaatttttttggctattaaaaattcctcttgaactattgagatt

SEQ ID NO: 257561 - DNA, 995 bp, Cannabis indica
aattcaaaacaattactgaaaatagaaaaactcgaaaaatctagtttccataaatttttattttttgggagttttaaaaaaagcaatcatttagatacttttgatgtgaataagacattaattggttacttttcctttaaaaaattatttcaaaattttacacatatataaataataaaatgaccattttagtatgtgagaaatatatatttttcggtcttcagaaaaagatgactaatattaggggtaaaaatgttaaattttaatagttaagaaaacagaacctaacaaaagcattatgtaactgttatattttatatgaaatttctaacaaaatatatattttaagaggcatgattagataatatcgaatgttcaagagataaaaatactaattatttattattctaattattcttattattatgtatgtctatgtgataagattaaatatgtaatattatatatcataattaataaagcattaattattggagtctagtctacattattatttttggcttttggagagctacactttttatttatttagtctatttagatatacgtgagaaaagattgtgacaatacacaataaacaatgtgtgtgtgatttttttttttttgaaaaacacaataaacaatgttaaagtaagcaaattcggtagaactaaattaaattattattattattattattacaatatatatgttactttttttttattttaagcgtttatatattacaacatgttttattcggactcgaacttaagacctccaacactcacacacccacctatagctacttgaggtagcccaagtggttacaatatatatgttatatatgttatgatttctgatattgaatatcatcccacatgggcgactaacaagtgatgcattgtcttcactataaatgatattattaaaaatttgagtagtttattacaaaaaaatcttttaagtctctctcgtgttatatctatttttca

SEQ ID NO: 257562 - DNA, 1087 bp, Cannabis indica
ataaataaaaagtcgcccatgaatttctcataaaccaagaattcggttatataggcacattttatatagaatagaagtgagtggacaattttcttataataaaagaaatatactaaattattagaatcaattttttttttttttttaaaaaaaaaaagacagaaagagatagactaaaaaattaagacatgaagaaagagaagaataaaatatcatactgccaaaaataataaatagataactaagtttatattgttaccacaattttttgaaataaatgagttttttttttttcaaaaaaataatgattatattgttactttgaagagatttttttaaattattttcatttattaattatttaaatatattgaaaaactttaaaaattaggaaaataagagaagaaggatggatagattaaattattaattaattaatataagttagttaattaatttttaatgtaaattaattatttttagtaaagattatgtatttcaattcaaatttaataacatagttataataaatatttattataattagttcaattaagatgttagaactatatcaattgtgtcaagttatcaattacttctatttgtttcaattcaaaaaagattaaaaaaattaaaaaaaatttgttgaagtattagttttttttaactggtaattgatttatatgatattttacaatatatataattaatagaactatttttttttaatcctttaagagtttaagtaagggattgtttggaacgtcgtattaggttgtattgtattgtattatattgaattggatcatatatcatatttttatataatactatgttaaattttaatttatactaaaatattatatatttaggtgttcataaaagttaataccacatatagttttgcataaaaatattgcataaaatacaactcaatataataccatacaatacaatacggtgtaccaaacgaaataaaataattaataattgaactaataagttttttttaattctttaattatttacttggcaccttttacctcttgaaaaaactaatcaattaaatattttagttatttttttt

SEQ ID NO: 257563 - DNA, 609 bp, Cannabis indica
attgctactaagaaggataacctatgggtaaagtgggtgcatagtgtatatattggagatgaagattggtgggggtatgaggctcccaatcatagcagctggtattggaagagagtagtgtgcataaaggagttagtgaaacaagttatccctcctactcaatttacaacatcagagtttcaaatatttgctgtttataaaataatgatgtagtaacagaggaactttcaccttagcaagcagatttggagtagactaaatgtaccaaaacataactatgtgttatggattgctgtacaaaacaagctgaggactcgggatagattgcagaaattcaacattgcagcagatacaaactgcctggtgtgtgatattgcagaagagagtatgtgtcatctatttttcgaatgtagatttgcacaacactgcctgcaagaattgaaaaattggctgttgggttttatgccctaaataaaactcatttcaatataatcagatttacttaagatcagaaataacattttatgttccatggttcacatgatttatttcatgattatatgtatataatgtatgaattcttttttaagtccagaacatatgagtttg

SEQ ID NO: 257564 - DNA, 765 bp, Cannabis indica
actaagcggtctttacaaaatatgtacaaaaatatcaacaaaaccattaaattttattaaaagtatataaatattctattaaatataaaaataaaatctaaaaaatgattaattaaattaataagtggcaaaaaaataaataaaaatataatatttattgtgtttaaaatttggtccatgctatattttgtgctaaatttgacacgatttttagaatatgtacatatccatgacacaatatttaatatatacatatccttatttactttagttagaattttaactttttttttttaaattatacataactctatatttcttttttacttgttgcgcaccggttaggtgaggttttcctataatctttgctctgttttattttctcaaactaaattagattcttagtaatttgtggctttctttgtcatatttggagttgtgtgttttgttttgtttgtaccaattattaatatttttttaaaacctcacaattttccctatttttttttaaaaaaaaaaactacacattttgttacactatttctcttttaaaatatatttttctacatgtttttaccatttttttcctcatgtgttttttttctaacatatattttttttttaatgtttctttacatttattaataagtaaatatataatagtatagaagacaatacgagcatgcatatgatattaatattttttgtgttgttatttttttttattaatttatgtgaattaattttatttttcttataaacttt

SEQ ID NO: 257565 - DNA, 402 bp, Cannabis indica
ggtgtatttgtgattaagtatgctgatctattcatctagggcaagattagtgagattcctcctaatatggatgagatgattacgcactatagggatgacatcgctgtgacattgtataactatgcccagaagaagattaatgaaggatattatattgaagataggccaaagggaaagaagtccaagaagaagaagttagattcttgttaaatatttgtattattttttggacagatacaatgtttatagttttgtttagtgttttttttggaacaatacattatgttatgtttatattttgattttatgttgacaatatatggaaccagtttttatatgtttatatatacttttagtattttctgatttttctttttgtaatacatatttttatggttttta

SEQ ID NO: 257566 - DNA, 1509 bp, Cannabis indica
tgtaacgcttgtggtaagcaactgctttctccaccattacttccttagtgttcataaaacattatgcaacatcatttttctatatgtattactcctctagggataataaattctttaatgttacgataagtgcatctgaatatacataagacatgtaacaccctaataattatgcacgctaccatttttttataaacataacctaatcccgctaaaccgggattactagaaataagataagaatttaaactttaaattacttacagaatgaaaatataacttgtaactatttaaactttacaaaccattctaaaaagatttctcacgttttgggatcccataaaaattttcacaaaatattaaaagacatttttacatgccgacctaagcagcaaaaccgagaatacaaaatacatccactagtagacccaacccatgtggtctagtatggctcgaacatgtacaatctacccccaagccctcgaactcatggctgatcacaaatcgatttaccttttcctttagtagcgcacccgtcagccaagcccagcaagacaaaataataatacagcatgataattataataataattacactttataccgcacgccactgcgcatatattgtgccactgcactttgtatcacattatttcatatgtaatgttgtcactgtaattaatgtctatacagcatcgacccacgtgttatgctcacacgtctattaatgcctatatagctgtaacgcccgtacttgaaattttactaatttgaaatctaaataaaatttattatatttataaaactttatagtcgggatcccgagttttaaaccactgttaaagaatacatatatcatggtatagttacataatttttttttacaatccacagggaggtaataaaatatgattcaaaatatggttagaccgaaaccttccaagatgcattgtcgccatacgtacaatccttgccgagccccaactcactgctcctccagccaagctttatccttacctacataaggtagcaaactggtgagtcgatagacttagtaagataagaatgtaacaaaccatacataattgacttgtgtataggcgcccatacacctattcacaggactaaccaaatgattaagaacattcttaaaggttggtgttatttatcatgatatcatccactacaagcactatgatcgcaatgcaggaccggcactatgttcatactgctatgatagcatcaatagcacccaagattacaattggccatgatttcactcttaaccagtactatgcccatactgtcgaaccaacacaatgattatgtttctatggtagcgttaattaatactcttcggggtgaatatcactcttaactagtacgatgcatgtactggtgaacaatcataatggttgtgtcgctatgatatcacccaaacataaacaatcacaaacacaacatgcatatatatcatacatatacatacacccagatatttatatcaca

SEQ ID NO: 257567 - DNA, 938 bp, Cannabis indica
aaaattatgattatatgttttgaattttaaaaatatatcatttatgttgttgacgtgatttgtatgataaatacaaattttattgtttattattagtatcttattatgttttgtaattattaatttacaattttatgtaattagtaggcttactcattaatactatataaattagtcataaaaatagttatacaaatctaaatatagtaagttgactcattaatatatctattataatttaattaagaatttgtatgaatttttgtaaatatgttttcaaatgtgtacatttttaaaattgtatttttttgcacattttttgtaattatttaagaaaatgtatatatttatgtaaaatgcccttactaatatgagactaagggagttgcccaatttacttttagggcaagtgggagattgttagagtttatgctctgaaaaagcctgtaaaaatattactgattataaaagaaagagttagatatttaatatatgtgtgaatgttaagttattaatatttattattgaataatttatattaaatatcaaaaaattcctttttcatatatgagactatggcttgtagttgtacagagaactaagaccacttaactatgaataaaacaaccagtgacatattaaagttatggaatctttaatcaatggttgctagtacggttcattgatgtctgttctacggtgcaagtaatcttggttcagattactaatgtagcgagacatctaagtgaagatactatatataatagagattatatataacaaggaccgatataaataaagctatcgttattaacatgttgtttatcataaagacctaattcatatcataacaatgatcaatagtatatcgccctatatcctgagttatcatgaactcatgttcatgttattagtttttttgattcactcgttaaagt

SEQ ID NO: 257568 - DNA, 1076 bp, Cannabis indica
atattgatgcaattaagtattgagttctatataattttaattaataactttaatagaatatcattaactatttacaaaacgttacctctaaataatcttagggtcagtttggcacagctgtgctgtgggaaaaagcagctgtagctgtgctgtgagaaaaagcagctgtagcagaactgtggatatataaaaaaatgtatgttatataaaattttattttttatatatttttaattattttctttctatagtataaatttatatgcatttgataaaaataatatttaatatttttaaattatatttttattacttgtaaaaaaagataaaattgtagtttataagaaacataaattgatattgtttgttaataataaaaatataatataaaatattttttaaaataaaataaaaattaaaaatttaaatattaattatttttaaatgttttttcatttaaaaaatatttttattttttataatatataataaataattatataaatttttagtaaaaataatttattataaagtcttttaatcaaaacagttttttctaaaagttgggttgtaccagttttagcttttagctgtagctttttcataaattctttaataagctgttttttaactgtttaccaaatacctttttgttatagcttttttgaaaagtagcttttagcttttccaaaagctgtgccaaacgggcccttaagcactaatagtgtgtgttaattaatataaaatcaatttaataagtaatattaaaaattaaaaaccaacactaccattaatttattgagtaaatagctaaaaaaaaagtgtaatttggaaataaaatctctattaatattgactttttattcttatcaccacatcaactaaggtggcgtttggttggaggtaatgaaatggaatggaatggaaaggaaataattttcattccattcctttgtttggttgtattttaaagtattggaatggcattccaatggaatgctctttccaccattttggtggaatgactattccattttaaaaggaaggaatgaccattccaatgtaacaagaaaaaa

SEQ ID NO: 257569 - DNA, 1250 bp, Cannabis indica
ttcaaacctaaccctagtggaatgctataaatagatagtgaaggcttcaggaaatttacaacttgacatctgatttccttcagagaaaacctgagccttctctctctaacctagccgccacctatactctcttcttctctcttgaatttcgaacctcttagtgattaaaataatttccaacagtgctggggcccagcggccaggttgacaatcaacctggtgcactagtttcaatcctccaaatgcaaattcaactctaagaattctccccaaaatgatcaaaaaaaggaaagggagacctcctccttaattttaagaaccttggaagtatcaaaatgacatctcgaaagttttaattagagcactcagcacctaggttgacatatggcctggtgcgttgggttctacttatccgattttaattttttcttaaccgtttgtctaatttttcatagcaattgagagcggtaagtctcccatttctgcaaaaatagcagcatctctgagaactggggaatgtcttcaccagaagacagaaactagctaagttatttcaaaatatacttagacatcaaaaaatacatccccaacacgttttccatagaatagccttcagtaaaatagtcataactcactcaactattgatgtgattggcgcgatttgacttgcatttagaagctatttcaatgatctatcaagtaatgtctcacactccaatcaaaattttgacgtaatcaactccaaattttaccctcaagagagttataaatttaagctacaacttacctgtagtgggtctcatggatgcgactcaagctccaaaagttgatgaccgacctccatagtcaattttgttgttcgattataatctaaggtcaaaagtagcctaaatgtatttacttatattttttggaatgttttattattatcttaattggtcattctttcctataaaaggagagctccactagctcatttatcaagtttaagataagttcccattcagagcatctctctttagtttctctctctagaaattagagttcccatacattgatatttttctataatccatctcgtgagaaataaaacttgaagtaggcgttgctccattactgtcgcgacacaggaaataaactactataaattgttgtggctctcttatttattcttaactcataatacattctcgccaatctagtgagcaggtgtgaccaaatatatacgtccagatttttgtgtcaacact

SEQ ID NO: 257570 - DNA, 1050 bp, Cannabis indica
atactgttatgaagtacaatacagaaggaaaataacggaaaactacttgcatgactaatttgtaactaactaaactaactgtcagacttaacagttatatcgtttacatcccccctcaaacgaaatggtgaagaagccatttgaagtttgctttttaagtagttaaaacgatctgtagtgagcggtttagttagtatatctgcagcttgatctaatgaaggaacatagcgaactgaaagttgcttggcaaggatttggtctcaaacaaaatggagatctatctcaatgtgtttacatcttgcatgaaacacaagatttgctgcaagagctgcagcactttgattgtcaatccatagaataggagcatgtgagagtggtacttgtaattcagacaggagagatgtgatccatttaacctcagcagcagcattagcaagggctcgaaactcgctttctgtacttgatctagcaacaacttgttgattttttgcggaccatgatactaaattgttgcccaaaaacattagatagcctcctgtggacctcctgtcatcgatgcagcttgcccagtctgcattcgtgtagccttgtaggtgaaaagtatctgttggtttgagccacaatccatctgttagtgtaccttttaagtaacgaagtagtctcttgcatgcctcccagtgtttaacagtgggagcatgaaggaattagctgagtttattggtaatgtaggctacatcgggtcgagttaagctaaggtattgtagagctcctaatgtactcctgtacaatgtgatgttgtcaaaaggttccccatcaagtaagctcagtttggaagtggaactagtaggattggggcacacctttgctctttccatttgaactttacagagtatatccgtgatgtacttgctctgactaagatacatacccgagtgttatctcgatagatttcaacccctaagaaatagtgtacttcccccaaatcttttaatgagaatgcagtgttcatgtaaagcccgcttagttaatttggaaattagcagttgttta

SEQ ID NO: 257571 - DNA, 609 bp, Cannabis indica
aattaaaaaaaaaaaaagaagatgtcattgtgtggtatccttttttggcctttttttcactctaatagaaaccatctattaaaagatgctaaaaatatatcctataatcaattttttttttaaaaaaaataagcgtactttcattcaaataaaatcaaagttagacctctcaatcattacacataatatttttcggaaccaacaaagtcggaatcgaaccgtacaacttgtgggtgaaagcccatttagccacattatgggcaacaaaattacaagttctactgacaaatagaaaattatagcaattaaaagagggagaggacttgatacaaaaggagacataattctcaagtgcccaatgtgactcaatcctattgagagcattgacaactatcctcgagtcactctcaattgtaataaaatattcttgaaagcatcctcattgagcatttccactgatattaaaaaatataagtatattctcttcagtgcaaaagaaaacaatgttattttaggtattttgtataaaaatttattttattattaaatttaacatattcttcaaatacatggtttatcgttttgtttcattttgttttcagtgagtta

SEQ ID NO: 257572 - DNA, 870 bp, Cannabis indica
ttttattttttgtcattttattttaattcattttttggtttatatgggtagatttaaggttttttttaatttttggatgactatatcaacgttaacttatgacttatgtgaattcgatatataatgaacttatgatgaactctttgatattatttagtatgtgtgaaaaacttttggattgtgtgcttaacctgttatgcttgcttttagtattgtgatatgatttatgtgttattctacttgttctatatgttgtgattttatgtgtctatgtagacttggtttgatttagtttatattgagataactagaacttgtgtgattaatttatattgaggtgaaatcctaaatctttgttgtgtagaaatgattaaggcaattttctttaaaaagtttgagccaaaaagctaaccttaatatattatcctttgttatcctattttgagcctaatttttccaatttgcattctttattaaaaacaaaatgcatatttatccttgattatgagccataaaataaattatccttaccatattgtgtaccataaatataggttattgtgtactgaatgaaaaatatgatgtaagtaggatgagacaatttttttctgagaattatgttgaaaagggtgtatgtgcatagagagttatgatccaagtacattatgttgaaaagttctcttgttaaaaaaaaataaaaataaaataacaacaacagctttgaagagagaaaaaattcataatatgaaaaaaaaaataagcaagagatatatttgagaggattacaactctaatgatatgaataaagaggtatcaaatgaaaaaaaaaatattatcgggagaaaaggaaatttatgatgaaggttttgt

SEQ ID NO: 257573 - DNA, 1117 bp, Cannabis indica
aatacaactgcagatgcgttagcacgattggcagccaatgtaagtgacaaggaaaaactagttcctatccagttcttcgtagagcctagcatcactagcacggaagaaattgaaatgattgatacaccctcaaactggatgacaccaatagtagcccacgtcaactcttgggaactcccagataactgaaatgaggttcagaaaatgagaaggaaagctgcacagtatatcatagtagagggagtcatgtacagaagaggattctcgatgccattgctcatatgtgtcactcaagaagaagctgcacaaatcctatctaaagttcacgatagattctgtggaaatcatgccgccggatagagcctatccaagaaaattcaaaggcaaggttacttctagccaacgatgattgaagattcgagaccctatgttaagaagtgcgacaaatgccaaaaatttacaaagataccaagagctctgcccaacgagttaatacagatgcaaagtccgtggccctttgccatttggggaattgacctgatcggacaattacctaaaggtaaatgtggtgtgcactatgtagtggtaggggttgattactttactaaatggactgaagccgaaccacttgcaacccttacattaaagaaagttcaagactttattgtgaagaacatcatatgccggtttggactaccgtacaaaatagtctcaaacaatcacaagcagttcgacagccaatccttcattgatttctgtgtgaaccatggtatcatcaaaagtttctccgcagtggcgcatcctcaggcaaatgatcaagtcgaagcagtcaacaaaaccttgagggatacactaaagaaaagacttgaagatgccaaaggaaactagttagaagagcttcttgaagttcgatggtcataccgtacgacggaaaaaacagcgaccgaacagacaccattcacaatggcgtacggttatgaagctatgctactcgttgaactcgagccaccttcccacagaaggttgacgtacgatcaaggtaccaatcacatactccttgcagaatcacttgatgaaatcgaagaaaaacgagcaactacaaacataaagatgatgg

SEQ ID NO: 257574 - DNA, 998 bp, Cannabis indica
ttaaggtattttcatgatatctatctatagacaaatttttagttttgaatttaagtccccgaaagtgttagggcaacaatacttattggtttttttttcggaattatgacttagggcgtccgattacaagtagctatttccacttagtttgatcgacatacttgaaatcaaaattaaagtaagactagtataacacacatacaaatgtacatgtttatgtttgccagatgtatgacatattagttagaacaatagtttgtgtatatatgattgcatcttgatgttgtgaatatatgagattagaaattcagaaagtatgaaccaatactaccaacactagcacgcaagagtactgagggaatgtggtattatagttggttatacttccaaaagtaagaactagtgctaccaacactagtacgccagagtactgagtgcatgtggtattatgactagttatacttaaaatatggattgatgctaccaacactagtacgactagagtactgagtacatgtggtattatggtcaatcatactatggtcaagaatgttccagactcagctataccaatttgacatggtttatgacttgttcttaggtgtatgaactcttagccgcatgtcagttatatgttatgttttatgcttttctaactgagtctattgactcacagatgctatgttatgtgtaggtaaagacaaagttgtcattgaacggctgtgggtttagagctggatgaagattgttcatatcaagatagtttgacgtagagtcttagatcttcgggacagctagggctcacaattttgtagtctttgtgcgagatcttttgattatgtatagttgaaaaatatagacacagaatcccatattttataaatataatgcagtttatgtttatttattaaagtttaaattttatcactttttgataaactcttttattagtaaaggttgcacagtaattataaaaagcattgtagcatggctaaact

SEQ ID NO: 257575 - DNA, 605 bp, Cannabis indica
atcattgcaggtattcttttccagttgatttcaccggaattaatggttgtatttctctcattttggttgttttacttatttaaatgatcgaggtatgttcatcttcatcgttcgtttcgtgcggctgaaaatttagagcatgttgtatttttataaatatttatatatgggctgtataaatgtttaatgggcccatagtatatttgttaatttttttttcctttttttgtttttttcccaaaaagaaaaggttattagcttaaggtatcttaaacaataacataatataatatagcctaaaaaaatcataataagttaactgatcaaaataagcaatcaaatgtgtatgagaaaaaaactatcttgaaacaatttcttttaataaaaagtatctgattgatatattatttacattaaaagaaacactagaaggtcttatttgtactattttgttgttaaaagtaacaattttattatatataaattattaaaaattgactttatggtcttatgcattatacttgtcacgatgatatgtttatgaagtattaaacttaaataaaaagtgatacttagtttttatgtattttttttcttcatatttt

SEQ ID NO: 257576 - DNA, 847 bp, Cannabis indica
cacctttaaataactgagagttaaacttaagtaattaattctttcatgagagccagtcttaaatcatgtttaaataataaagaccaatctatatatctatacaaagaaaatgtataagatggtgacgtgacgttctaaaatggcttaaaatctaattatctatttgtttttatttttttctaattatttaaaatctatttatccatttttatttatttttaattatttaaaacatgtttatctattttctcattttttttttaattttttaaataaaaaacacaatagattttttttaaaaatactaaatttaattgtatctcaaatcaaaaacttattaatcgtgtaattcaagaattttaaaaaataaataaataacccaatatttcataaaatcaattaagaaaatatcaatatatatagtcttttataaatttattgaggtactatatggtgagttttattcaattttatcatttatatttttgtagatctctatttttaggtactatattctcacagttctattcatttattattatatggtgaattttattcaattttatcatttatttttgtagatctctattttgaggtattatattctcacagttcttttcatttataattatatggtgagttttattcaattttatcaattatttttgtagatctttattttgatttagttttttataatcctatattatttgacaataactcttctttttctttctgttttagatcacaaattaattatatgataatttttttttatagatttgtcaacttttttcgagatctctattctcggtgagaattttttcaatttctaatatttgttaat

SEQ ID NO: 257577 - DNA, 797 bp, Cannabis indica
ctttttgaaaatactctcgtgggaagggtgtttaaagcaaggtattatcctcaaggaagcttcctcacttcttcacttggaagcaacccaagtttcatttggaagagtatctttgagtctcaagatcttgttaaatctggcgctagaattcgtattggtgcgggttttgatactaatgttctcaactctccttggcttccatcagatacatcaccctttgttacatcagaccatccgtccttaaactcttgcaaagtgtaccagcttatgaagaccgatgttaaagagtgggatcctgaaattctgtttgatcttctcagcactactgaagcacacatcatcctgcaaatccctcttactagtaattctttggaagataactggtattggaataaagaaccaactgggttctactcagtgaagagtgcttatatgcacttgcaagcaatgaaggacaatttctcaacgcataatagctcggctttttggaagaatttctggaagattaaagtcccccccaaagttcttcactttgcttggcgtgttttaactgattgcttggcaacccgtgttcagcttcaaatcaggcgagtaccagttcaaagccactgtttattttgcaactctgcagctgagacttccttccatctgttcattgagtgccccttctcaaaatcgtgttggaacatctcggctgtgactatcccctctacgactgctgccagtttccttgactggtttactgcagtttcggatagatataagggtgatgcaattgaagaagttttaatggtaag

SEQ ID NO: 257578 - DNA, 839 bp, Cannabis indica
atttaagtctttttcaactgtgtagtcccatacccacacagatcactaatatagaaaaggtaattaaattgattgacaacaagtgaggccatgctaaaaactaacctaatccaatgcatgcaatgtcctcgttaattttagcctatgcacgctgaaacacgtcctaatcaattattttgctcattcagctattaaaattcttaataagaaaaaaaaaaaaaaactattaagactctcagagttatttttttttgtttggttcgaatctccatcatatgatttcaaaaaagaacaaaaaaaaatctccatcaaattcaatcaacaatttttgtaaactctacaaattaaatttttataaaaaaacaataaaagaaaaatcttattaagaaacagtaacgtgtaagactttgttaaaatgtaatatagtgactgacgtgttgaaatttcatctacgaaactcagcgtctccatctccatgcatctacgctcatccaaccaatcaagggaaagcaaccaagggtaaaagagtcacgaaataaaatatctaaagggtacgatagggacaaatgaaagagttggtgaacaagacagctcaaccgcaccacgtggcacgatcaaaataatagtatccaaatccaacggtgaatgagaactgtttgactgtagattagatgatgatgatgaggcggtgcatggagagtgatgcagtcaccgaagagagatatagattatatatgttcccattgtttggagccgaccattgtgtaatagggtctctcttttctttctctctcgaaagacccttattatttttattcaatcctttgctccttatcact

SEQ ID NO: 257579 - DNA, 995 bp, Cannabis indica
actctgacttttcattcattgcaccagatgaagctctaacatataagtcatagttagatagatgatcttgtgttgaagaagatgatgacccttccacaagtgaattgttttcacttaaagtaggacatttagatttgtactcattgaatagatcaacacaaagcctacgcacctttctaatttcaacctcccatttatcatctccatagagttgaggaaaataaaattggagcaacaaaaacttgtatctaggatccaaaaccactgcaatagtcataatcccatgaatctgttcccaatacttttgaaacttaaacatcatttgagttgacatatccttaataaataactcatttgatgacattccttcttcaattttcctcttaattttacacatctccgggaagaatagattggcagtagggtacttggtaccagaaaataactctgtcacctcatgaaaaacttctagcctttcacataacttttgagctctaatccaatcatcttctgatggcaaacatttatactttggatcacaaagctttgctcgctcaaatactgttttgtacaataaagctgtctttatcattaagtatgttgaattccatcttgtaacacaatcaagagacaactttttagtacatgtgactccaaggtgacgagcattctcctcaaatttctcataccgttttggtgtgcctgaccaataagcgacactatctcgaatcttatcaatgctatcaccgataacagacaaaccacctctaacaattaaattcaaaatatgcgcacaacaacgcatgtgaagcagctctccattcaaaataaagcaactaggatcaaatttttgcttcaaaagtggaatcattgcatcattagtggatgcattatcaagtgtcaccgtactaaccttatcttcaatgctccattcagacattgaagaacttagtgcctctgtaagtgctggagcgtcatgtgggcatggtacatac

SEQ ID NO: 257580 - DNA, 521 bp, Cannabis indica
ttttattttttaattgacacaatgtgcagtagtagatattgacatattaattatatattatccattatattatatactccattttgaaatcataagattttattatttatattattaatgtaactatttatttaacttttaaaaaataaattatcatgtggtatagttccatcaattgaaaaggtcttcacaaatgtcatttctgggaagctattctcttgctgttatcgatcccaaaaggtgtcttattgaatgatagtcgagtctgaaagggagttcccggatgactataatgtcctcttgggcctagtcttctagatagatagctttccctagaaaagagttccagctggctagttatctttctgaatggtagatccggatagtcaagtacagcagactttatcctatccgaaagcgtctagcgagattcgtggtcctcaagtttggaagctcttatgtgttctcagaggtcttggcacttaagctgacatggaaacttcactcaagaggagttggtt

SEQ ID NO: 257581 - DNA, 703 bp, Cannabis indica
tttgtgtgtgtatatgtgtagagatcagatcattgtagatctgatcttggtttagtgtttggggtttgatttctgggttttcaggaggctagggttcgagtttctcagagagaaactctctgctagggtttctagcatttcagagagagagggagtaaatgagaaggttctcgatcccttctttggttttgttcaaagaacaaaacgaggccgttttgaattagactttgaaaagtcaaagggaacagttaaaggtcgaaattgaccttggacattgatttgtttgttttgttggtgtaggggcaggatagtaaaagactatcttaaaatttcctacacatagttattgaaatttctctatctagaacttcctaattatgatgttagtttaggtgtggatccattcccataatgctcagctcatgtttaaatccacatgtgagccttttgtagcaaatatctttggaggatataggctcaatatataaaaagtacattatagcaaatgaatcttaaagatcttggaaaaagtaggcccaataaatataaagtacatgcccaatgaaattagatccaactttgttactcttaacaaattagaaagaaatagaatggttttacaccaccctaaagaataagtgtataatatatatttttttagtatcaattagttttaataatgtctcatttgtgtttttctcgt

SEQ ID NO: 257582 - DNA, 584 bp, Cannabis indica
aatagtcgtggtactatcacaatagatcaacacagatagtatctgtctttcccataaagagatcttagctagcaggcttctcaaccaacctacttcttcactagcagttgctagtgctatcattccaaactccatggtggactgtgccaaaatagtttgtttctttgattttcaagaaacagttccaccggctatactaatatagccactagttgctatggagtcatcaaataaagtattccagtcagtatcgttgtatcgttcaaggacaactagaaacttctaataatgtaatccaagattcatggttcttttaatgtatcccatgactctctcaatagcatgacaatgctctatattaggtctactggtaaacctacataatactcctacgacataggcaatgtcgggtctagtacagtcagtagcatatcggaggctaccaatcttgctcgcataatctgactgtcttactccatcttgagtgctcttaaataattttacacgcatcatatggggtacaagcacgtttagagttaaagtaattatatttctttagaatcttctcaatgtaatgagattga

SEQ ID NO: 257583 - DNA, 908 bp, Cannabis indica
ttgattttgtcttttagtggggatttaatgttatgtttaaatctgattttttaagcttaatatggctgaaataaggtgtttaattaagggaaaaatcattcatttattcattttattccaagttaacaaagttagacaaaattgctttttctctcaaatctctctctctatttcggccactacttgagcagctagggtttggattatttttctgcatttcaagcttgttctagcagggattaggagatcttgagctctaggtaattccttgttgctttctctttgatttcttgggttttaaggaaatggatttttgcatgctttgggattttacttgttgtggttgctgtgattagttgttgtttttttcagaagcttaaatatgtttaattgagtggattcaagctggttttgttgttagttagttagatttaaccaaatttaaagctttgaactcaaaactttgggttttaatggtaaaatgatatttttgctgctatggttattgtatgtgtttgagtttggtttctggatgttagatatgttgttttatgttgaattaagttggttgtagtggctggttgtggtgttagccaagctttgagctttgaagctcaaacttggagctcacatggtgaattttgattctgagtgtgtagggttattttgttgctttgaaaatgttctttgttgtctgtataggaggaagacttgaatgtaatagtcttctttttcttctcaacttcctcttcttcttgagcactcatgaaaatttcatggttcatgagtgagctgattaactcttccaagggaagtgttgagagatctttggcttcttgaatggcaaccactttcccttgataagccttggtgagacttcttaaaatcttggtcaccatatccttttg

SEQ ID NO: 257584 - DNA, 847 bp, Cannabis indica
ctagtttccttcttcatagtaggtgaaacattatttcgatatcataccatggttgatgtatctaactagtttgatgaatttaaggtgataaagatactttttgatagcattgtcaattcagttaaaattttgtcttgaatacaattgtttttttggtacagtaattttttttttttttgtttcttcagatgatgtatggaatgaaaattataaaagataagattgtcttaaaagttgttttaagtcaggaacttagaaaagtaaaattataatgagtactaaatgtgaagttgtagcgttaaaaatcagtaatgccacaagttatcacctacaagcactttccaatgatgattattggactttatttgcttagcacacttttaataatgctcaaaactcatgtcaacattcaaatttggaaacaattagtcaatggtaaattactcagtagacttgcattcaaagttaaatataaagaaatagaacgataaatagaacttatccgagagagaaagtaatattattccagctttgtggttaagttaccttatctgcaaccacatttaaaaagatactttatgtacatattgcttgatactttctaagtattaccgatttgagctaaataaattaatttggatgtgaatggaggaagatctttgcaactcgagaaattaaaaacattgacaattggaagggtggggctaagaggacctatgcccttggctcccacttaggtgttaaattcttttttttttgtttattttttggaagtaaccctaatttttaacaaataaaataaatatttatatattgaaattataatttttttcaaaaaagtatctaa

SEQ ID NO: 257585 - DNA, 575 bp, Cannabis indica
tgtaatgtaaagttaagacataagacatgtgacaaagaataaaaaaaagacaagagaaagacttgccaagtcttgtgaatgaagacaataaatatacattaattcatgcatgccattaataaactcatagctagtcaagagtactagtcaacttcctcaatatagtgtggtaatttctagccaccaatataatattaatattagagatcagtaaaagaagtgtcacttttaccagtatagtttgctattgcgctgttactagcgcatttcgcaaactgcgctagcaaaaaagtcaaagttttactagcgcatacttgcagtggctaaaatttaatttttaccagcgtatttacacactgggaaaaatcatttttgccagcacacactttttattttgtgctggcaaaagttctaatatcaacgttgatttgccaacccttttgccaacacatgaaagtaaattccattttactagcacaatatcaaacttttaccaacacaaaatgtgtcggcaaaaataatttcttgtagtgataagaaatatctaattcatcgctatattattatattacact

SEQ ID NO: 257586 - DNA, 826 bp, Cannabis indica
tatacttataattaatgactcgcacgttagttttaacttttttaagactatatatattaatgtttattagaaaaatttaaggtccgtaactaaattagtgtactacaagctacttttattaggaaaactaagtttataaatgatatgatatagttcaaaaataaaacataatttataaaaagtctcaagatttaaccgtcaatatatgaattaactttatttttttacaaaataataacaaaaatcgctttattgtatttacaatttccacaaaataattataatattactgtgaaataacttgaaaaggattgtaaattgatgaatagaagtacacccgcacaaagaccgataataatatatagtattaccgaactcttgctatttgatgtccacccatgaaaataaaaatactttttgcggtactgagtatatttccccgtaaataatttccctgcattcttgtagtgacaattgataatgatctccgaaataatttcgttgcattcttgttgtgacaactaatattgatctccaagtagtgatcaattcacactccaaaattatataattacatactatttatataccaactaacattcaattttcatcattcaaaacaaaaaatgtagtttatatatgtatgcttatatatatacaaatatgtttacacgattcttctttaaaaaaaatgagaaaaggaaatatatactattcataatacactaaaaataacatgataaaaaaacttttctttcttaggtgatgaaatctcttttatatatatgcaacttaggattacacttatatatagatttagattaat

SEQ ID NO: 257587 - DNA, 926 bp, Cannabis indica
gaccgagcagacttttgactcttattcacttgtttttcacaagtatgctttttgtctatgcggggctctgggtatgagcacaccttttgtacgcatttaatggtaaatgtataacttgctaataaacttgaatcaatttgaattgaaagaaacatctttattcatttgttggtcgagaatatgtttgttaccataataacttacattggagctattatattgatctagtctgatctttagcttagcataaacaaaacaaattgcaaaaaataaaaattgtactttcataagtggtcacctgacctgagtactttgtcattttattcgaacctttgggtgtggtctgcccagaaggccattcacttaagagtaaatgttctttagtttcgtacttaccatggtcatccgacctggtagttttactggtagtattttcttaagtgttccccgttccaataccttggtactagaacgagttgtattttttcgtcatacctaccccctttgtatgctcctaactctagaacttcgatcacctgatatggtcctttccagttcggtccgagcacacttatcgtgctatctttggtgttcaagaataccattctgaggaccatatctcccacaaagaatctccatgctttcactttcttgttaaagtatcgagctaatttttgttgatgggctatcaattttaggtttgttgcggttcccttttcttcgatttcatcaagtgattctgcgaggagcgcgtgattaactttttggtcatatgtccatctcctgtgggacggaggttcaagttctacgggcagcatagcttcataaccatatgcgatggaaaatggagtctgtccggtccctgttttctcagttgtacggtatgaccataatactacagggagttcctctggccagttcccttt

SEQ ID NO: 257588 - DNA, 1156 bp, Cannabis indica
tataggttccttcaacaagctaagaacactaacaaccacaactctgatctttggaaagcgttttggagaattcagataccaccaaaagtccttcatttcggttggaaagcaattacaggctgtctccctactaaagtagaacttcaatacaaacatgtaccggttgacaccctctgtcctttctgcaacaatgcatctgaaaccatccttcatgtgcttgttacctgcccgtttgcaacctcctgctggaatagatccagtattaatttttctggcagcagcaatggtgatttcagaacctggtttgaagcaataacagcaggaaaaaaggacgacagcttgcaagaaattttaatgattgcttgggcaatctggaatgcacgaaacaaactcctgtggaacaagaaaattacgttagctgctgatgtagtaatgtctgcaagatcaacccttaatcaatggagttatgctcatcaaaggagaatggagcctctgcttatgttcaatgaacatgatgctgaggtagagcattggatttcacctgcaaataatacgattaaggttaacgtggacggagcaacatttgaagctacaaattcatttgggtttggatttattgctaggagagatgatggttccctgatagaagctgtctcggttgggaagataggaagggttgcacctgaagtagctgaagcttcaggcattaaggaggcccttagctggatcaaaagtaaaggttgggaaagagtcactcttgaatccgactgcttagtagctatacaagctatacacagtaaggcttcacttccctcagcttttggtctgctgatttatgactgccaacagcttttgaaagctctaaataatgttaagatttattttgtcaaacgttctgctaacaaggctgcgcatttaatgattatttgaattaataaaatgatccatttccattcaaaaaaaagttggtaaattaatgagtgacttttcatctttgaaattaatcaaataaaaaaagttagaaaaaagaaaaattagaatcctagatggttaggttgccatgtcatcttgattagcaagggaattatattagatatatagagatagagatagatattgcaaattcaaggacgacaacatactcaaatttatttga

SEQ ID NO: 257589 - DNA, 509 bp, Cannabis indica
aaaaattaaaaatcatatcagaccaattaaatgatgaaaccaaaataattcactcaaaaataaattagtttgattcaaaatcataatttgtatttcgtaattattttaatgtatatattattttttagtaatttttttttacttttaataaatttataatacataataaataattataaaaaaattattatcatatcaaattaatatcaatattctacctaaaattattctcaaatattaatatttatccaaaaaaaaatatatattaagtatatgtaaaataattataagaattggtgtggtttgaattgttatcgagatttctaaaaccgtgatcaaactagaagattcaaatcggtccaaaaagaccaaatcattcaaaccagatttatttggttcaatctcaagtttggtctaaattggttagggttcggaatcacagattgcaaattatatgaatatctctaatttttacattaattaaactaataaaaaaatataaaaaaata

SEQ ID NO: 257590 - DNA, 568 bp, Cannabis indica
aaaaaaatatatgcttttcacatttttaagaatgattattggagacgaaatttatttttaagttaaggaaataaaataaatactttttttttactaaaaaagacaaatatagaaaatagatggggagagaagtgtatatgtggctttttagaaaagacttatttttttttaaaaaaaaaaaaaagacataaatgtttaagagagagacaagataaataagtaaaaatgataataattaatttgtgtgttctaatttgtgtgtacataattaattagattgagcgagcagaatgataatacttttcggtatgttttaatttgtgtgtacatgattcatcgaaataatgagtaattacaattatactaatgtttttgaacttttttctatatagaattttgtcttgtgactataccaattttacccctaataaaattataaaattacaataatataaatgtttttttaaacttttctctatatagaattttatcttatatctattaaaggacagtacacttttaactcgacacataaaactgttattatattattattattattattatt

SEQ ID NO: 257591 - DNA, 690 bp, Cannabis indica
gtctcgtgggtaccacccagaggagagtgctacctctcttagagggttaaacagttgtgtcatatcccaagaggtaccttcaccgtaatcacctcattcaacatttaaatctagcaataagctcaatggttgttacaaacccacgaaaatagcgggatattactacaagaatcagacttcaactacctccgaatatcaaggagacaattgagatatttctgcatcggtcgcgtctcctgaagaaagaagcactgacccttttcttatataaggggtcatacatgacctgggaagagatccaaaaatcaacacttagagagcaaaaactctaccatttttattcctcattcaagagcttgttcttgactttgcaactccaattaataaaatacaaagggggtaggctattactgacatctggggccaaacctctttaaattctagtgtcctttattatcatttattacgattttggttaatctctcaatcgttacgactttgtgtcggtttttctaaaagtctaataaacatcattatatttcgttaccattaatgtaagtgatcctaaactttaaggtgtttatttatcattttaagtattttatattttaggatgttagattatatattgtataatcaaacatacatgttagtaaattaagatcttgataaaataagttctaacagttt

SEQ ID NO: 257592 - DNA, 1035 bp, Cannabis indica
gaaggtgtgaggataatttagctacaatactcataaaaaaacaaaagtacatttgaattaaattttattaaaaagtaaatttgatttttctataaaaaaaacgtattctatcacttctcccaaaaaaaaaaaaatagtgctgtcattattaattttaaaagaatttttggaggctaaaccctcttaactatcgtttctcttacatctaattatctaagctcaaattttgacggtaaaaccctctaaactactaaaccgttagcaaatttaagttgtcatctaattacccgtcaccatggactgcttatatgtatactcttgtacacgtgacacatttatattagtacactgaatataattattttcaaaattcattttaaaattaaataaaattataaaataaaaataaaaaaatattataaattaaaaatatttttttatattttttaaataataatatttaagtgtaccaatataaacgtgacacgtatataagagtgtacacataagcagtctatgttgacagttagttgtgaaaagtagatgataccttaaatttgcaaacagataaatagtttgaagggttttatcatcaaaatttaagcttaaagggtgaagtgtaagtagaataatataattgaaaagctgaaaaaaaaaaaataacatatatatatatataattttgggattcattaaaaaaaaaaaaaaaaagtccaataaataaaattttttgagagaattgggatgatattgcaaatcatttgttaacattataaggcattgagtacttcattgttttgttgaggaataggggatgtggttcacggctttctggtcattgcaataaaacatgaggaaattacacttagtatgggattttaaaagttcttatgataaatatggtacatttaagtttggccaatttatatggtatttttttatttttaggtttttttatggtatttgatatgccatatatatgtaattaggtttctaaatcccatatttaatgtttttatttgtttaggaattttt

SEQ ID NO: 257593 - DNA, 820 bp, Cannabis indica
taatattttttttttaattactattacaaagtataatagtaatttttatttttatttaaatcactattatgctttcaaatttcaatgattatcactacattgaatattattaattttaaaataatgatattaaaaaaaattaaaaactaaaataaaattaacatacattacttgacacgtaacatctatctagtatatatataaatagttgattctatatttttccaccatatctgtctcttaattctattattcaaaaaaaaaaaaaaattcagaccagcttcgctgattatttggctcaagaaatagtgttgtgatgatttacttttaaggtgtgaaaaacatatttttttatcattaccaaaaaaagataaccgaaatcaaaagcatcattttagtttttttttatatatatattttattaactatacaaaatttatatattgactagttttaattacttattttagatatttaatttaaaaagtattgtttcaatcttaaattatattaagttatttgaaaaactgaatttttacaaataccaataattattacagaaatatatgaaatataaaactgtatacgtctgcatcagtagaatgtaattctgttactacaaaaaccagttttgcagagacaaaccagaacaggcagaatataaacataattacagaaaattaaatcacttgacacaagagatttgtacctggtatcagtattctttcaaacactcctagtccacgggaccacgcccagcgaaagaaatcaattaataaagtatcaacaattacaaagacaattgacttaaacaagttta

SEQ ID NO: 257594 - DNA, 619 bp, Cannabis indica
tttgatattcaactaaaagaaccggaagaaaagttggggaagaagaagacggaaaatcagtttactttattggacacatcgtttaatcccatgacagtgatttagaaacgaaaaccaaacaaatggaagtggggagctgtaagctgtttcaagagatgagcttggtattcaggagatgccttcaacttcagcgtcttcccaacttggctcgcattcaagctctgaaaaagtaggagaggtatctcataggacaaagaaattgactgaagctactcttaaatcgtctctgaaagcttctcggaaaaacaaacttagtcgctctgttacatgggctgatgagaaatctgatagctgcaggaaaagtaatctttgtgaggttagagaaattgaagataaaaaagaagctaattctatattaggcaagaaaggcaaagttcctcttaaaccttgggggtcactgaaagctggtacctccatgtcttgggctgatgaaaagtgcgataccaaagtgtgtaaagatacttttgaggttagagaaataaaagatttgaatcaaacttcagatatgcttagtatggacattggagatggcgacttgttgcgccttgcatcagcagag

SEQ ID NO: 257595 - DNA, 729 bp, Cannabis indica
tgtagttgtaaatctatcacactattgaaaaaatcaatacaaaaatagtgaaaatttgtaagctttggagctctacgtcgtgatttcccttgagcacaatacataccatccatatttatcacatcaatattgaactcaacacaaaaattagaaacttcttctactaaaaaattccatccattgtctctcatcacttgtaattattccttggacactttaactaaatccatggcattcacaatatcttgatcacctttttgcaagacttgcgacaactcatttgtgattccaagtatatttttcactaaatgcaagctaaaaacaaagtcatatgtttgcactagttgtaacataatagatgcttcatatttttggtcactattcaaactatcacttgtaatttcctcaagtacatcaagaatggatgaaaacatgatagtgaaacttaccaaagtgccaaaatgtgatcccccatcgtgtttcacatggacgcttaatcccattttcttgatttaagccttttccacttgaaagttttccacattttaaggcttcaatgacttgagcagcttgcttttctcgaagaatgtcacgacgcttagatgatgctccaacaatattcaccacattagataccacagtgagaaatgtacctatttttttttcatacaatacaaatcattaaatggaaaaatggcttactaaataacaagtattgatatatatata

SEQ ID NO: 257596 - DNA, 827 bp, Cannabis indica
aataaactatattatttattaaatctcatcaatgaaataatcttgtttattaatttcatgcttactcgactataaatataaaattgaactcttagtaattataaaattatatttattgagttttactgtagtgtcaattaatataattaatttcagtgattagtcctcgttgtgttggttcataattagttttggtcaaattatcattttacccttttaattacttctttatcctatagtaccgtcaattcactagtgaaagtttaatttagatccaatctaaatttgtgcacaactttttaattatagaattaacactaaaaaggaaccaacattcgatccgttaggaaagccaggattccataattgtagatcatgttcctaaccatccacattattagattcccaaaacaaaagttgtaagaatcatcttctctgagaaactttaacgagtgaatgaatctaataacatgaacatgagttcataattactcaggattcaggctgatttactattgatcatcttcatgatatgaattaggtctttatagtaaatgacatgtttgataaagacatcttaattacatatcgtttcttgtcatatataatctctattatatacaacactttcaattagatgtcatactacatcagcaatctaaaaccgaattacgagcatcagtgaactgcactagcaaccgttgattaaatatttcataactttaatatgttgctgactgttttattcatggccaagtgatcttaatttttcaataattatatataaattattcaatattaaatattaataatttaacattcaagta

SEQ ID NO: 257597 - DNA, 932 bp, Cannabis indica
ttttcaaaacattattactatctattggatcaataggtacctcaatggtgtctcccgcggcttgagcagttgcagcataattgaggaccttatgatccaaattcggctcatctttatgcggtacttcttctattctgaggacctcctgacgaggaggcggtgcctctagtagatagatgacattgactgacttcttctctacgagtttgaccactgtgttgtggcataattgctagtctgactggattcctcgcacagaacctactccagcaggagtagggaacttcattgtgagatgatagattgacgtcacaatcttcatctcttttaaaatacgccgaccaatcacaacattgtatgctgagtattggtcgattactgcaaagtcagccatcgacttggctactaccggggcggttcccaaagtaattaggagcttgatcattccttttaatgcaatgatgtcgccggtaaaaccttatatacttgattctacaggttgcagatccttctcattcaaccccatctgtttgaaagcttggaagtttaagagattcacagaacttccattgtccacgagtatacggtggacgttatctccgccaatatttgcaacgatgaccaacgtgtcagaatgtgggtggtggacccatctcgcatcactttccatgaatgtgatgccgtcgcactctctcttgaacaacttctccagtcgttcgctcaggttgttcacattggtgtgtggcctttctttggcttctcttgcatatcgctcctgcgactttctggagtcacctgcgatatggggtccgcctatgatggtcaggatgttgcaagaagttctcgaaccactcgcattctggttttcttctttgtcatcagctcggggatgactttcctcattctttttgtatttgctgaactttcctctc

SEQ ID NO: 257598 - DNA, 623 bp, Cannabis indica
caaatctaaattgtttctagagtttaacataactagtatattctagacttaatctaatctagaaatctcttaagctcttagataatttttctgcaagtgtatagaaagttttagactaaattgtgtagaaaattctagtactcctctttggtacacatttcggtaactccgatcatgttttgtagtagctcgaacttgcctcttggtagtgcatttgtaaatatgtctgctacctgctcttcagtcttggagtgcttgagcttgatttctttgtttgcttctgcttccctgatgaaatagtacttgatgcttatatgcttagttatactgtgaaatacaagattttttgccattgctatagctgatttgctatcacaatatatctttgtagcctctttctgtgattctcccatgtcttctagtattcttttaagccataacttggcttgtagtcattgctgctgcaatctactctgcttctgctaatgattgtgcaacaattgcttgcttctttgatgcccaaaaaaaatattcccgatccaagtgtgaaggcataccctgacgtgctcttcatgtcgtcaactttaaacttctttatcgtcttttcattattgcctgtgtag

SEQ ID NO: 257599 - DNA, 2343 bp, Cannabis indica
tactaatcttacctcgattccgaattcaggtgtgccggtcaacctgagtggaacgatctgctcggcgaattacaggctcctaaatcatagtaatcacaacactgataagtgacacgctaaatcacttcccggggacttaaactcaaaactagaaatttccctatcaataaataacatggcaataccctaactaacacaaaaatgggaagaactagggttcccaaatttttcccaatccgtagaccggttctacaaccgaaattttggtcctaggaagaacccaggacaccaaccggaattccaattcctacaggccattctgaaccggaattccggttcagtgcaggaaaccttaaaaaattcatttctcatgcaattcaactccaaaacttaccaaactctccagacctactatttagaccccaaagaacatattccaagcaataaaacaaagcttcatgcacaaatacaaaaatttccattgatgagtcaagcttgagttcaaaaactcaaagcttgctcatccaactaattagctatcaaaacctgtttaattcaccatatataaccataatataactccagaaaacaaacgcaaacacaaaccacaaccacaacagctaattcaacattttaccataaaaatcctaagttttgagttcaaaactccacactttgataaaaccaactaacatgcatcaaaacctactctaatccactcaattgaacacatttaaactacagaaaacatcacataaatacagcagcaacaacaaccaaataaccaagcatgcaaactatcatatttttcttacaactcaagaaaacacaaagagagttggtagagataaaaccttggcttgaattacacaaagagctgctggaaactaaggattgagagagaaaaaatcaacagccctagctgccctaaaggtggccgaaagagagagagcctgagagagaaagagggattttgaaattttccttttccttaatttttgataaaatgaaatgataaattgacatattcaatacttatttcagctaacatgattgaaactaaatcaaataattacatcatactaagccacttaaggacaaaagcttatggggcaaaatgaccatttgcccctcccaacaaaaaggattaaaaagcactaaaggggtattttgggaaaactctaaatttccgactaatcctgacattcccaatgtctaaataaaccgtcccactatacaaaaatattagattgtgattctactgagccatacaccgcgttccatgttgccgggcaccaaaaaatgcaaaattatgaaatttcactatatgacacaaaatgcattctgaattcaaatatagcaacataaataattatttaaatattaataaataattttcataattaaaccctaattatctgctaatttccaaatttaaagtaagcggtctttacacctactaccagtaaattgatgttgtaactcacatttctaatgtaatattttgaacttcagttatgaataatgttaatcatctttcttcaagtaattacatagtgttgctctttaaaattacttgagaggcatatgtgtatgattaaccagaatttatctagaaatacatgatatagtgaaaacccaccactttaaaattttttaaagttcttgttgatcaaacctttctaaggagaaaggaagatcaaactattatgaataactttttgattaaaaacctttctaacgagaaaggaaaatcaatagttaaaaatgagatataactcataactcacatgtgaagctgaatactaacgactcgcattgtatcggaaagtattaaacgagacatcaaggtgccttgaaaaaagtacttaaacctagtgtatgaatagacgatctaaatattcatataagcaatcaaaaatatacaaagtgataaatcattaacagtatattcaagtttgcttaaaacagattataattgtttgtgcgaagcagaatcaataattgctcgcaaaccaaaagcatggcagataatagattactcgcacacatagtagattactaactacttaaatattatcaaaggaaaatatgagcagtggaaaggcctagagtattttgcatttgatcaaaatatgactgttcaaattgtgaatgaaaatgcaagcaaaaatgcatatattaagttcaaatataaaagtatgaagcattcaataaagaaaaaataaagtaaagtttgtcatccaaccttgtaaatatgtctttacaaaaaatgccacaaggggcaaaccactgtctcggccttacggccaccaacctagataaaataaaaataaaaaccaa

SEQ ID NO: 257600 - DNA, 1250 bp, Cannabis indica
acaaagtaaactaatcaaatgttatagaaaaaattattgattaatgatatttctacgtttttttttttttttttaagtttctctcattaggtttactcaaaaagttttaatgagacctttttctaaaaatatccaaaaaaaaaaacaaacaaacaaattagaaattccgttattattccgtatctttaatacaagcaaataaatttcatcaatcataacaatataaaatttaaaaaaacaataatattaagtttttattacaagatttttttttgacgcggtgatccaaatcacacatgattaacaaagcagcaatccacaatcggcggcggcacctcctcgaaccaggatagctcattgtctaaccgaagagcatgttttgccaaaccatgtgctgcagaattcgcattccgagccacatgggacaaaactgctcccgggagtttagacaataaagctatgacatcctcaagtagcacacccagctcgttgaaaaagacccttcctttgtttatagctgtgactagagacaaagaattggaaaaaacctctttaatttggattccgcatgaaagagcccaattaagtccaaccaaaagggccaaggtctccgcttgtaatacagagatactacctgaaaacataacaaaccagaaaacaccacaatgaaaaactatgagtagaaactaaagacaaaaactaccacgagaaacgcaacccaaaaaaacgataaaatcaacaatgcaaagaaaggataaaggaaaaaactagccaaagggataaccctttggctagtgaaagaacaccataaaacataaaacaaacatttttctcaaaaggggcaaaacatataaatcttgatacattctagcctgatacaagtgcactccagaactagcctaccaatgtctaactagtcagtctaaaaacacctaaccacattatataaacaccaccaagtactactcaatcacttagctagaacatatttaaaaacttgatacgtcagacctaacccttttagcaattaaaatataaaagaccctacgtcatctgaaacatgtaaaaaccagacctaatactgttcaaacatgaaaccgccccatgtataatgtttcgaaaccttttcaaaaacactatgctataaaatttaaaggcttatacaaatcgaatagatttccttaaagataaagaactgtctacctttgagaggtttgcaaactgctgccctcacccttctatcttctgaa

SEQ ID NO: 257601 - DNA, 685 bp, Cannabis indica
tcaattagaaactcaattaaaaattgaagggactacctcaaattcttgcaacgttaagcacaataatttccccaatattccatttcaattttcaagccaaactcaagcaaattcaccgtaagaacttgaaactttcaagagggttagagagggagagatagttcgggtgagggatagagagaaaacccagaatttttcttttcattatctcaaaatataaattttattaaacatagaaaataaaggtcaaatgaccaaaatgcccttagggccaaagcacacatattcaccctcacaagggtatttttgtcattccaaatatgtttaaatcccaattaaatttcagattataaaatatcaaataaataaaatgccaaaaattcaattccaattacatttcgggctcgaacccaattcggcccgaaatacccaattgtgactataccgcgccaacctgccaaaaaacacctaaaaaagacaacacaggcataccatataataatatagtcccataagcacattaataaataaatttcattattttacccttctcgggtcaaaattactaaaatacccatggctcaccaacggggtcttacctgttgggttttatgccctaaattaaactcatttcaatataatcagatttacttattaatctagatcagaaataacatttaatgtt

SEQ ID NO: 257602 - DNA, 1081 bp, Cannabis indica
aatgagttattctatttcaatatcttccaatataataattattatattcgtttattcgtattctcccatgttgacatgtgtcctcctttgaagtgccaaccgaattttgggtgtaacacctagatatttttatagacattctaaccataatattttaaaattcaaaaataggttattttgtgaaatatttattttttttataaattataagttaaaaaaatggtattttatatcatttcacttatcagaaatttataaatagtatttaaaatgtttaaataatctagatatttttgtagatatttggaaaatgcttaatttcagatattttcacatatctgaagagttacatctaggaaagttttatagagacaaagagcatttaaagatggttgttgggttgtatgcagtgaagaaagggttcgactacttcgttaggaagtctaatattgttgtttggtacgttacatgtaaggacacaaattgtgggtggagattaagagcgaataagaatgtactttctaacatgtttgaggtgactacatttcaaaatgtacatacatgttcccttgatcttcaaggaaaaaataaccgtcaagcatcacctttgatagttgcccacctaattaaagataaattcgcaactgacgactcaaataatttagcctttgatataaggaaagatatgtacaaggatttcaggatccaaatgagttacgagaaggcttggaggttcagagagaaggcactacacctagttctgggtacacttgaagattcatactcaaaattacctggttacttgcacatgttaaagttgaaaaatttaggtaccatcacaaattttatggtagaggatggtcgcttcaagtagtgtttcttctctctgggtcattgtagacatgggtttaggttttggtgactgttgtatgtgttgatgggtttttcttgaagactaggtatatcttttcaaaaaaattcaaactaatttaaaatatctatgtttatttaaattattttatctaattaaattaaatatctaataagataaatgatttgaaaataaccaaatagatatttt

SEQ ID NO: 257603 - DNA, 1121 bp, Cannabis indica
cccacgaagaatttctgagccttcacttgtttgttgaaataccgagctactttttgttgatggctatcaactttaggttagttatggctcatttctcttcgatttcatcaagtgattcggccagtagtacgtgattggtatcttggttgtacgtcaatcttctgtgggatggtggctaaagttctacaggcagtatagcttcatatccatatgccatagcaaatggagtttgtacggttgccatttttcagttgtccgatatgaccatagaacttcaggaagttcttctgcccaatttcctttgccatcttcgagttttttgttcactgtatccttcaaggtcttgttcactgcttcaacttggccatttccttgaggatgtgccactgcggagaaacttttgatgatatcgtagttcacgcaaaagtcggtgaaggattggctgtcgaactgcttgccattatctgaaactattttgtacgacaatccgaaactgcagattatgttttacacaatgaagtcttgaactttctttaatgtaatggttgcgagtggttcggcttccatccacttagtgaagtaatcaaccactaccactgcatactgcactcctcctttgcctttgggtaattgtccgatcaagtcaattccccaaatggcaaagggccacggactctgcatctgagttaactcgttaggtggagatcgaggtatctttgaaaatctctggcatttgtaaaatttcttaacatagtattttgaatcttcaatcatcgtaggccagaaataaccttgccttagaattttcttagataaactttgcctggcaacatgatttcaacagaattcgtggtgcacctcagataggagtcgcgcagcttcttcttgagtaacacatttgagcaatggcatggagaatcctcttctgtacataattccctctactatgatataccgtgcgtccttccttctcatttttcaaacttcattccgattatctgggagtttcccagtgttgaggtaggcggctattggtgtcatccagtttggggaagtttcaatcattttgatttcttctgtgccagtgatgctaggctcttcgaggaactggataggaacca

SEQ ID NO: 257604 - DNA, 700 bp, Cannabis indica
caaccttgctgctgtcaaacaagaaacagatcaggagaatcaatggtcctatgaagccttcctagctcactttaatcgtaatttcagaggtgtcaatcctcctcgaggtcagtttccttaccattcacctcaattttctaatcagtatcacaatagaggatctaactctagctttactcctcgaggacaattgacacagtactaccctggaagaggacagtattcgaatcactatggaggcagaccacaaaccaatctcaacaaacctcagtgtcaaatctgtcacaaggttgggcatctggctcttgagtgcttctataggtttgataaaagctttactggtgccacaccagttcaggaaaatgtcaaacctattcaagctcatactgctcaaactatgaactcaacacaaggtttagacaccaagtggtaccctgactcaggtgctaccaatcactgtacaccagacatgaataatctgcctcagcatgatgaatacaatggtcaagaaaggctgtatgtgggaaatggctcaggtttggcaattcgacacactggttctgctctttttaaatctcaaaattcagataacctttaatccttaaaagtctattgcatataccagaaaattaacaaaaaaatctcttgagtgtgtcaaaagtttcgtttgataatgaggtctctttgagtttcacccttt

SEQ ID NO: 257605 - DNA, 816 bp, Cannabis indica
tactcacactgagttccaattctctatctcttcaatttatctcttctaatgcagggagctcctttaggaaggaagcaaagaggtagcttccacaacatgaaacaagcaatgctcgtgttagattgtaattttgttgtttttgtatttgtgcgtgtggggtttaggacacttagacaacacttctgactaccttgacagttggtagttaactcggttagtcctgtcctaactaaccgagttctataaatagaaggtttatgattcgcttgtatgagagagatcaagttagtgagtaaaacacaattaaaactcagcttgtaattgagatgaattctcttggtgattagttgaggatgagggttgtaaaaggcatttccatgtgtttgattggattgcctcaagtgagattaagtttgtaattgatgtgtatcaccactagtgttctttgtgttcttgatccaagtgtttgtaacattgattcttgccattcaatatcaaaatcatcacaagccaacagagttgttttctacctggggattagacttgtttcgtttgatttgtattttttgtttatattttagcttgtaaccacgattttcctacaatgaagaggaagatttgtgcatggattgtttagaaaaatcctatttaattttctgacaacatcactacatctgaattgtaaatataaataaaatgctattttctaaacaatccatgcacaaatcttcctcgttcaattagttagttactgttacaacacaggtgttatgaatttgtatagctgagccaatcagagctctaagaagtcagtca

SEQ ID NO: 257606 - DNA, 690 bp, Cannabis indica
ttattaaaaattaaacttagggtactattgtataattttaaaaaaaatacatggtctattttatcatttaaatcgataatttttgtaaaacacgaaatttaaaataatattaaaaaaaaaaagataaatcatacatgatcgattagccattttctcctatcccattagaactacacttttggcgtacaagtttaaatttgaaagtctaaaatgtattcttcaaaaaaaaaaaaaaaaaagtacgaaaatgtactctcactgtctcacataaattatgagaatcggaccggttttgtaaaataaaatttttaaatttttaaaagtggtacagatttggtgatgtaagcagaatattactacccctgtagccagtttcgttgaccggataaatggcaccccaaacatttagtcatttaatattattttttgtagggttatgattataatattacattttattggtaaataaaatttatcctagtatgagtaattgtacctattgctacccaatgttgagagacccctttaaacctccacctccacaagcagcaactgctttgtatcagaatctgtctacatttttaactgtaccatcatgggagatttttttgctctttacaaagaaatcatcaggattcattccaaattaaacaaaaccaagatatgaacaaacaaataaataaaagaaag

SEQ ID NO: 257607 - DNA, 823 bp, Cannabis indica
ggctgaccggcacacttgagtacgaaacgaggtaatatagcataataacgtatatatgaatatatgcttgttttaactatttacactactaacactaattgtttatgtgattttaagagtgttagtatagtgtaggatattgatgtggttacggtgttaccaacacgagtaccagggggtacgtcgtgcatgtggtacaacacttagtaattcccgagagtacaataatggctctaccaacacgagtatagggttggtactttagtgcatttggtacaggggtcgtacttcccttaagaacattcttaaccatttgatgagctcggttgttgagcttagggcggcttaagcataaagccgatctagcattgattttatatatgtttcgtatatcttactcagtctgttgactcatcaatttgctaccttgtgtaggtaaaggaaaagcgaagctggaggaacagtgatatggagctcgacagtgattgtacatatcgcggcagtgcaacctggagggtttcggtctttcaatattttgagttataatttagttgcctgttgtttgtaaaaatatatatatatatatcactagtagactttgtattagaaaaatactttatgaatgttttaaaattcgggatcccaacccatataattataaaattataatattataaagttatcttttgagttttgtaaatttcaaatacgggcgttacatacactttgcttatatttttcctagaacattggcaaagtatactagtttcgtaatgtatggagtatacatttgactgtatcaatattgatctgggttaagata

SEQ ID NO: 257608 - DNA, 822 bp, Cannabis indica
tatataaaggccttaaccctagcgtagaaacctaagtcattaagtcagataccctagaccatcttcctctctctctctgctacacgcccccaagggctctcttctctcttcatctctcacacgcctcgaaggcaatctcgctctcacattagagctctgcctattgattcatgtttagtatccttatagagagctatattagatcccacctatagcgatttaaatagtattatctctaggtattaatacaaccaaaatgagagtaggtcattacacgctatcacaagggggtcgaacctctataacaaatatttgtgtttattaattttcattcttgtttgcgtaacacgtggcaagcatcagatccatacaacccctctatcgatttatcattttttgaggtcaatagtttggtgctttcattgagagcatggatatcgtatctgatcaaactacattgttaacacaagaagaactcctatcgcaccaacttcatctttgggtctccctcaagacccacagattgtaggtccagatactcagattccagtcacaactagaatcccgatgaacactacagatgtggtaaatcctatcaccacaacaggcaccatgagtctggcctcctcttggtggagctatagtgacctgccaggttttgcacaccttggtctaccacatcctgcaagccttgtcctgccaggtcctgcaagccttgacctaccagatcctacacaccttaggcggccacatctttcacaccttgagccgccagatcctgcacagcttgggcagtcaaacctcccctataggtctatggac

SEQ ID NO: 257609 - DNA, 509 bp, Cannabis indica
tatatccataattcaatgaaagcatagatgtgtttttgtattgctacaatcatggttatgtttctagctttattgttggaatgatgatttaaatgtctcactcaaaataaggataaaataaaattagtgtagttccttttagccagctatatgatggagaaatcatatatataatgaacatgcattcatactcatgttcatgttgattgcttttgcttttaatcttggagggttagttttagtatcaattatattgatatatgtttggtttgtgatgtttattttgtttttaaagtcaaattgtatatgttttcttggacagagagttgcatgtactgggaaaaaagatttcctcgattgataagtaatgaaccacttcaagagttaatgtggaaaggatgtcctctggttggactgtgtgatataacttgtgacataggcgattcactagaaagtgtcaatcaaacaacttccattgactcacattttttcaggtttagttattctgt

SEQ ID NO: 257610 - DNA, 1300 bp, Cannabis indica
attggtgatttcaatgaaattctatctaacaaaaacaagcttagtggggctttacgaagtgagcaacaaatggacaagtttagatcagtgttggattcttgttatctttatgagcaacctttcgaaggtgatccattcacttggattaaagggcgccacaatgtcaatgttatcaaggaacgacttgattggtgtttcattaacgaccaatggcaaaattcttttcagccgattacaacaaaacacctagactactacaattcagaccatagagtaatttctgttgaagtacttcccctggctgctcgaatgcacgaagataaaaagactgtcaaggttcaggtttgaaaaaatgtggctgtccgactctgcagcaactgatatcattcagcaaaattggaaacaaaactcgataggaacaacaatagacaacttttgcactaatcttgaggttgtttccaattctctccaacagtggcaccacatgtaatatggcaacatcaagaagaaaatcaaagcagctcacaaataagtggaaatcctgaataatcaacaaacccgaaccaatgagtccatgtgcaatttgaaaaaaatggaggatactttggatgaattgttatctcaagaggaagtatattggcaacaaagatctaggattgattggctacaaagcggagatgagaatactaatttttttcatgcttatgcatcttcaagaaagtccaacaatactatcaaaatgttgtagtaagttcaaagcaaggaatgactgaaataatttgcaacttttttggtgatttattcactgcttcgggtacaaatgcagtagctttgcaacaagttcttcatgctattcccacaacagtatctgatgaaatggactcctcattgttgcgtccttttactgacaaacgctcaatgagtccagacaaaagtccgggaagtgacagtatgtctgcaatgttttatctacattattgggatcatataggttcggatgtcactgcagttgttcttgaagtattgaatgaaggccatgatatgagtagaataaatcaatctatcattactctaataccaaaagtcaagaagccgaaagtaatgggggactatagaccaattagtctttgtaatgtgatctacaagttgatctcaaaagtgttagtactacggtttaaagatgttctacctttgatgatatctaaaaattagagtgctttccttccaaatcgtctgatcactgacaacgttcttgttgcttttgaattggttcaccatctcaaacacaagacacaaggta

SEQ ID NO: 257611 - DNA, 999 bp, Cannabis indica
ttatatattttaatatatattaatataaaatatagttaactatttacaaaaattcatcttattttatattactattacatatattttatagggaaatgaaatggatgtataatgagatgtgaacaaaaacaaatgatggagtttaaatacaaattacacacaaatgattaggtatggccattacccatataacattatatcaaagaccatatctcaatgtcctcttctttggttctcattttgcaaacctaaaccatattcaaaataccaatcataacaaattcaattattcagttaattgggacagatttgaaataataataatttatatcttataaactagtgtatttttttttcattaacttgtgccattttttgttttttgagtttgtaaaatcatgtgaacctcacttcagttctcaataaatattttagcaaaaagtgatatgcaacacaaaactcttacaagatttacaacaaatataaacttgaaagaaataaagcaacaatctttaaagtttacaataaatttaagcttctgacatttttccgattatctcgattcctgaacacttattttgtgatgaccgcgaggtctaactatctctttttatctaatatatgaacgcttttctaaaaaaaaaacaataaatttaagcttagagagaaattaattatgaaacaaaatatcatctcaagagtttatatatataaaaaggataggaaaatttacaaaaatactagaatatgagttaacttttacaaaaatactatcatacgaaaatattttcaaactgtgtttttataaaacactagtagaacatagaacagaacaactcaaaacaatagtagaaaaactataaaacaccagtagaacactattgaaatcttaacacagtatacttcaaaacaatagtagaaaaaactataaaaacaccagtagaacactattgaaaacttaacacagtatactgcagtatgaaacttataaaaaaatac

SEQ ID NO: 257612 - DNA, 723 bp, Cannabis indica
agtcgtgtgctttgagtgaagttcactggtgatgggtcgaatggatgatagccgaatggaggtttggttcgcagtggctggtgcggttcgaaaagcttggagctgggcgatttggtggttcgaaggttgggttcacgggctgtgaatgggatgtttgttgagatgagtgttgtgaggtatgggttgagtcgaatggcgagctgctggtgcgaggtctgtggcgacgggttcaatggtggaaatggaagctcgggttcaatggagcgggtcgagtggtgttggactggacaatggtgattctggtgggttggtgtcgacttggaggtggctcgggctgctatgggatcaggcgggttcgaacttggtgggtgaatggtgaggtgcgatttgggtgaagaaggcttcggcttgctcttggctggttcggctgtgtgatttctgtggctttgaaactggtagacggctgagtgtgtgaaaaggatgaaggtgatggtggtagggttgatgctaagtgggcgggtcaacattgactggggcccagttgaccaaaaactcaggcccaaactgattaaattaaagtggggtctttgtatctccaatatcaattgggctcacttaattcaaaactaagtacaccccaaatgattatatgaacaaaaatagaattttccaatgattgtatcatgaacaacatggcaatcacatgtttttttttcttttttt

SEQ ID NO: 257613 - DNA, 699 bp, Cannabis indica
tgcacttacaatacacaagtatcctccataagtgtgattagaaaatgttctcctactcctactttacatcagtgtatactcacccttggtgtctctgagaaaatcatagtaaaaggaagttatcaaaatgcaaacagactattaagttcgaaatctatctaaccccctaaaatgggtgcatagcaaacaatgtcttgatagatggtctctttggtttgttgctctttttcttcagtttagctgcagagatcaataattatggaatcaaaaagggaagaaatttcaagcagaataaccaatcactcacatgcttgagaaatagatctgttagagcttaaggaatgggaatgcatacatcaaattcaaacaaacagagctaccagtggagggtgtcacaaggaagtggctgtataaaagtacctatattgctttttataagccctttaccctaaccataatattatcactaactggtacgtaccaacgccaggcatatggttctcattgacaatctcaaaattcttgtatgtgtagccaacaaaattggtaaactttgaagaaagcatttgaaagaaacaataacaatatgatccgttaattctaagacattaaaagttttcggtttcaacacaccataagagaaaccaatatatatatgtctagtatgtctaaaaacagcaaatttaggacatatccaga

SEQ ID NO: 257614 - DNA, 1288 bp, Cannabis indica
tctagttcttcgacaaattcttgaagatttcaatcttaagaccagtctaaaaccttgaggtaagctttctccatgtgttcttgatgatttcttaagttttaggttaggttttattgagatttcccttggttttgggtctgtggtgtaagttgagtttagattatgttttgggtttaaattaggtttgtttaaatgtgttttggatgaattacatggttgtttagactagaatgggagaattaagtttaggaactcaattttcactctttaatggtgaatttgtgattttgagataatactaagttttgattgcttgaatatgttgtttttatgttatagaattgttatggaaagtttgagtaggattgatgaagttttggtttagtttcgaagagaaaaaccaagatttttccaatgctggcaaaactggtcgaccggttctacaggtcactggagaaccggtcaaccagttggccagtagtggaaaatcctagttttcttcgaggctagtttttgctcgaggtatttttccagaacttagtttggggtattttattgatgtttaagctatttttgaagccagtggagattagggtttattcggttgtgacattagggtttatttttggaaattggttaagttgtttatcaagtttcattatcgtgacataggatctaggatcgtcgagcatagttccacttagatcggcccgtacacttgatattggattgaggtaagaaaaaagccaattgcactacttagcatgtcaagtgagcaacgattattatcgtttgtgactcgattataatcaaggtaaggatacgataatcaccgttgttgagaatgagtgattactcactttgaaactgctgataggtttcttacttatcggttgcctaattaggcaacgatagtggcatatgtagctcgtgggtaacgagtggtaaggaagctttatgaggcatcaaaatcagtttgtcttataaaataaataattatttatgtgatgcatgattatgtattgaataagtatttatactgtatgatgaattcgtatgttatgcattgttataatttctcgtgttatgcgatatttgtgttttacttgcatttttggctgagtctttgtgactcacgggtgcttcgtggtacaagtaaagggaagggaaaatttgaccagccatgaatcagaggtctcccggcgatgtacatatcaaccgctgtgtcttggtttcagtgggcatgatccaccttttgatcatgttttgaaaatgtaaccccattttg

SEQ ID NO: 257615 - DNA, 1720 bp, Cannabis indica
tagggcataaaacccaacactttacccctcccttcattgttggtagggacccaataagatcatcccccaaaccgcgaagggccaggggctagtcatctgggtaatctcgttggggtgggctcttggtatgttcgcgaatctctggcacgaatcacattttaggacatagtctatgcaatcttttctcattgttggccagaagtatccctgtctcaatattttctttgagagactcggacctcctgtatgatctccaaagaacccctcatggacctctagcataattttcttagcttcagggtccgatacacaccttagatatggcatgctgagtcctcttcggtaaagaatattatccatcatcacatatcggtccgcttggtactgtatccttctggtcagtgccctttcttgaggcaactcacctttggttatgtattcgatgatggggatcatcaagttgggctctcgctcgactgctgccacaatatttttggctttaatgcttggttctgtgaggcgttcaacgggcaccacccccagtttctcgatctcgctgtctgatgctaacttagccaaacagtccgcgtgggcattcttttctctggggactctttctactttacaatccgtgaactcatggagtagctcctagaaaattgctacatacgcagccattctttctctgcacgtttgatattctcccgacttttggtttaccaccagttgtgagtcgttgaagacttctactctcgtggctccaacgacttttgctaactttagccccgcaatcaacgtttcgtactcaacttcattatcagaagctgggaattcaaaacgtagggccgcctggagtcggagttcgtttggagatatcattgcaaccccagctccggatctgttttcattggacgctccgtccacaaatactttccatgctggagtttgtggcactggtacgtttgcgctagcttctgcttcattgcactctgttatcaagtcagctaccgcttgtccttttatagaagtgcgcggtatgtagtgtatgtcgaattggcttaactccatagcccacttgaggagccttccggatgcttctggcttctgcaggacttgccagagcgggtggtttgtcaataccttgattgggtgagcttggaagtagggtcttaactttcttgaagtcatcaggaggtaaaaaactagcttttcaatcactggataccgtatctccgcccctatcatacgcttgttgacatagtacacagagtgttgagttttttcctcttcccggactcaggctgtgctgaccgcattcgcggagactgccaagtatagtaacaagtcctctcctagaactggctttgactggatcggaggtttggccatgtgctcttttaattttttgaatgcctcctcgcattcttctgtccattcaaatttttggcatttcttcagaatgttgaagaatggaatgcatttgtcaatggaacgggaaataaaacggttcagggtagcaaccttcccggtcaagttttgcacatctttatgcttcttgggagaaggcatgtttagtaaagactgaattttttccagatttgcctctattcctctttggcggacgataaatcccagagactttcatgatttgaccccgaaaatgcacttattcggggtgagtttcattccatacctccggactgttggaattattttacca

SEQ ID NO: 257616 - DNA, 600 bp, Cannabis indica
aattcaatatctacataatagaaaaattatatcaattatttttttctatttgggagttgataaacaatcaaaattactattagtctttattagtgtcaaatagtaatggggagacttgaatggctatgaatcccttatgacttgaactaagtaatttgaatgcatgattttagcatttttttctttgttcattcaagtaagcttacagtttattaattgttattaattggccatgagtaacaattggctaagctacatctggttctagaaaggctagatctagtagttacaacttcaatgatgcaagtgaagtcccaggtttaggtttttcttagtaaatgaaataaggatatttcattacctagcataacttgagaattgatgtttaattgcaactagatttggtataggaatatattaaactaagtggtagaactcaatctgtgagttttggaaaaatctcataaacacatgaaagattctgtttaactctgtgcaactttgctaaatgaatgttgtaacgactaagaaaatttaacatagggagatttagctattcaagtctatcatttcatagatactttttcttgcaattaattt

SEQ ID NO: 257617 - DNA, 595 bp, Cannabis indica
aaataaaatttaattcaaacatacctctttttatgagtattgtacccaaattatcctcacacactcacataactaagacataatttcaaacataataataaatttgtattctttgtagatggatgtgtaggtttgtagaaaagttgggacaaaattttgattagagaagaatgaaatttatcgtgaagtgataggataaaattggtagaatgattgaaaaaagaagtaaacataatagattttaaataagagggtaaaaattaaaggcatcaaattaaaagaggtaagtagtttaattttctctattttttttcatgttttgggttgattttcattgttgccagtttaacttttatgttttgctgattatcatgttgtgacattattcacgacatttatcgatatctctttcaaataacaatatgtaaaagttgtgtattttatcgatgttttcacgacatgtaacgacatctagttgcgacatgtcttcgattgttttttagtagtttaacgatatcactaaaatatcattattagtatcgctttgatacctatccgataccaacactaaattttcaatctccacaatcgcttc

SEQ ID NO: 257618 - DNA, 1355 bp, Cannabis indica
gtttcctacagacgatgccaaatattgtcagaggaattcagacaacaccaaaatgtaagcaaataataaataaaccaaagagaaacagtgaatactatacttagaatagcgagtattcaaagaaaactaccaagataatagagcaacaggaaaaataaaatgaacaaagggaaatatagtgattcagtcagatcgccctctgcttagtccacggttgcaagtaatttctgcttagtttattcaacttggatcactcctttatatagaaagcaagtatccttttagttaaacatcactgattggcaatagaaccgttttacaataaataataagaataaacgtaagagaataaatgaattgacagtttaattcgttatataaatgcagcaacgtatgtgaccaatagggtgcgagtttcctgttcatatttttgcacaagctcgcaggctttaggtgtgttctatattcataaaagggctaatgagcctaacactaggatatctgcgttctatttgaatcgcattgacggacatcttgtgtgtcgatgacatgtgacatgtaagtccctatcgagtcatcaaacacgtttcgtcatttggaccaattattacataaagaggtgatctttacttagtcgcaagagaacgctacttagtcattgcatatattttatatatgcacgacttgtataaatcccttctggtcttgcttgtcttacactacgcaaggcatagcatgcgactagaccttgttaaggtcgcatcatctcacgagtttggctcaagcgaggtcaactctcggagaatcattagttagtagctcatccattccttgaggattggatccacatgtcaattttataggagactcatctcaagtttctaggcaaaaattcacactataacaaacatatatgcactatgaacaaggaatcaaaatacctccagccattgattctttgagctttaatcccaaacaagctttgatctacaaaagaaaaggaaactgattagtgtgggtaatcgggcttccaagctctctctactctctttagatagatttatagtgtttcacagaatgagtagtgagctcgaagattgaagccttatatataggtgagaccttccatcaatgtctttgctacaattagtttttagaatattttgataattaattctataaattaaatccaaaaattaaatatttcgtaaattgtaatgtgaccatatatagaatatcaaccgattaattgtgatcaaattcaatgattataaaatattcatttaccttaaaattaattcattgattttattcttaaaatagaaaatattgtaatattctctcacttggtcagc

SEQ ID NO: 257619 - DNA, 1051 bp, Cannabis indica
aaaaaggaagagtggagggagaagcaacaatcaaatcgtcatcattacaagaaaaaaaaacactgtaagatacaaaaatttaaaaatataaaattacgaaaataacttccagaaactacaaacaacaatatatgggcttttcatctcaaaaaaaaaaatacaatataagcatttttaaacatacattataggctttaaaaattcataaaaaatgtccaaactaaattatatcatatttatcataaaacattgaaactaaattatatcatatttcttactattataaaggtaatggtgtgatattaccataccacttttgctgctcacattaatttataattatattagtgtgatattaccataccatttttacctttcacaacaatttataatcacattaatattaataaagtgtaaagtataaaataatgtaaaatatagacaaatatatatctttacatgattgtatatttcttatgaaatgggtttttgttttttgcccctcacattaatttataattacattagtgtgatattaccatactatttttacgccctcacaaaaatttataattacattaatattaataaagtgtaaaatataaaataatataaaatatagtcaaatctcatattcttacatgattgtatatttcttttgaagtgggtttttgtctattctacaaactgcaacatgttaaaataataggtgcatattcaatttgtacactaaaacttagagttaaaattataaatcatttagatcaaatacataaacattttttttttttgataaacctgatgctttcattacacaacgaagaagaacaaagtcaacaggtataactggaaggcaaacaaccattccagacgcactcgctaagaagcctgagaccaattttagcatgatcatgagctaacacattatgactcctatgaacatgcttaactacgagtccagggctttgagttagcaaggctttggtacaattaattacatcacttaaaatagaattattacaaaaactattattaattttgtccactacta

SEQ ID NO: 257620 - DNA, 537 bp, Cannabis indica
ataaaagttaaaaaaattaatgtgcatatatatatatttgatattgtaagtatcagatctcctaagtattctaattagttcaagcttacaaaaattgtaagagtaagatgtgagcctataaaatataaaagatatttgaatactttttatacttggtaacactaaagtagattaacaaaaataagttgtactcacagtttgaaataaccggtgaagaatgataagcaacaaaaaagctagcattctccgtttttttttccttttgcaatgctcattacattagatttttttttatgagaatgacctgtaaaaagagacaacaaatgaattagaaaatattctctaaaaaaatgcataaaaaaatactaactaaatacaaagtctaagaataaattgaggctaagatatgtaaagcccacaaagcaaaaccaaccaagaaaaaaaaaagcaaataattaaccaagcgtcacaaatttttgtattctccctcgatagtttcatctcatcatctcttctcatgcatatatatatatatat

SEQ ID NO: 257621 - DNA, 508 bp, Cannabis indica
cactgtttgaagctttagatctgttcggatgacatggatcagcactttctggaaattcttcgaaggatttgagaggaaaaggtgttctgctctgaaatcgtcaagaaagaaaatgctaaaagtggtttattagagatttgtgccctatttataagcaaattagtgaggaagtgtaatcaaattgagatttaaatgccacggtttccccccaaaagtaaacgttgggcaatcaagtacctgaagagcaaccgttaaaagcgtgcaaatttttggaagattttgaggtatgaatcaagcagcaataatgagtcgaatatcgaatagactcttagttagaatcacattggatcaccaacagacgcgtcgaacacgcgccacctgttcaaatatggattcaaatcgagtgatgtctacgcgcgactagtgacaaatgttccgaacagaccgcaagcaaaatatttgtacgcacaaagtctgcttgaccaagcagagtaaagggcagataatc

SEQ ID NO: 257622 - DNA, 779 bp, Cannabis indica
attaaaaattaaaaaaaaaaccaactattttggtgggacccaccacaccacaccaccactctctctgtctctggcttccttctatggtacgcttttgagttttccctcctctgtgtgcagtctcattcctaattaccgtagacactcaataacattttgccacgtgtcactaaaacggtactttagtaattatagcttcgtgtacggacaaaaggcacgtagcggtagtgggcgtaggataaataaaaaaaaggaatgtctgtcctttgatcttatctaataaaaattacttttcttactacgttgtactcgctctcgttgaatgacacgtggcgagttaatgagctttgggttatgcacgtgccactcacgtgggtagaacgcggcagttgcaggttttttttactctacgagtgtgtgggtgtgagagtatttcgattcggtaagacggttacgtcactcccctcacgccatgcttacacaatgactattttgcccttcactattttttaaacttcttttttggtggttttttgtttgattttgtagtttttaattttgaattatgttgagatttgttagagcatctccagtggaaaaaaaaaaaatcttacttagatggataaatgatgtagtaaaatatttagatgttataccattggaataaaaataatgctattctaggaatttgtaaggatgctatacagtagaatattatatttttagatgatgtggagatttttaacatccttagatgatgctaccattggaaatgctct

SEQ ID NO: 257623 - DNA, 509 bp, Cannabis indica
ttgaatgtgtttggttatgtgatgtgaaagaaattcggatagattttgaaatcattttgaattgtttttgatattgggattgaaatttgaataattgaaagtaaaatttttaaatttgggcaagaggtacaaactttaggcataaatttggatagtggaattttggtccccaagtgtttgatgaattctcaagtgaaaaaaacatgcgttttaagtcactttacttgtgcgggcttatgtgatttcttcacatacttaagtttgaatgcttgtattgttgaattgtccttatcttgattgaataagtgacacgtcaccgaggtgtacgtcggtcggtttagtcgggttatagcatatttttatcaacccaatataaatattgggttgtaaatattcaattgtaacacgcctaattaaaaattaagaaaagttcaacccgcccaataaatttatcagtttggtcaggttaacccgttcttcactttttttttataattattattgttagt

SEQ ID NO: 257624 - DNA, 801 bp, Cannabis indica
aaatggaagagtcgattggttttttaaatgagtgaagtgtcgcacggtcggtgtaaatgagttagggtttagttttatttatatattttttaaaattaacgggaggattaaacctacgttaaatttaacagaatattcttttatttgtaaagtatattctgttaaaccaagaatgtacttttaatatataaagatatatataaaaccagattttttgggcaagtatgaaggagatctccttaatagttgatcttctttcgttggcttttatggagatctctttttgttggtcgatgttgccatgattaaatcttgaagcaaagcttctcaccgacattcatcgagattttaaaaaatcttctcagtgacattcatggtgatcgacaaaaacttctacatcgctgatggttttgttgatttcaaatctagaattgtttggagaagcttcaccgattatggagcaactgacttgtttgtggaggagaagaaacttcaccctaacatgtaaagctcttaggagggctgagcatgaaatccagaaaactgaaaaaaacagttcaaattgacctgccgaacactgttggaatcgaaaccgacggaaccgaaaatcgaaaaaactgctcacggttaaaattatcattgaacggttggtttttttagataataaatcgatcgaaaaaaccgaaactaaccattatacatatatatatattaatgtattaagtttttttttagtctttatatattgtagttaataataatatataataataatgtataattattattatatattattat

SEQ ID NO: 257625 - DNA, 956 bp, Cannabis indica
ggtattttttttaagcattaaaaataaaatatctcaaagccaaacaatggagtcttacatttacttctcttaataatatataattattatggtagtaattatacaatatagtaattaattatattttaaaatataagatatgtttagagataaattaattcataatattttatttgataaaattattagtaattatattagaaaataataatttttagcatttaatatttaaattttttaataattacacaatttatatagggtattagaattagaaagtgtaataaaaacctttcaattatctctaatatatataatgacagtgtaattatgtgatcacacaagctcgcaaaaatgtgtaattactttcaattatactcaatttcaatactcaattggcatctcaaacgtgcctttaaatttacaattaacgtgttgtatattaccaatttaaaaatttattatttatttttttttattttggatagtgaagtttaatgatatttgagagtaaagtataatttaataattattttgcataaaagtttaacagttttttaacaaaataattagtaattacactataaaataatatttttttagtagttaatatttaaaatagaaatttttttagtgattacatactataattacactcaattctcgtagaggctatgagaattagagtgcaacatggaacttctcaattaccttcaattacacatttatagtgtaattacatttacattgttaaataaatatgtcaaattatgtaattacttctaattacatcatgacttttcaatcaaactctaatgtgtgtgaggactggtatgttagaaatattagtactttcatatatctttatatattaaaagtgcctatctaacggtatttcttggtttaacattcttggtttaacagaatatacttaaaaataaaagaatattctgtta

SEQ ID NO: 257626 - DNA, 526 bp, Cannabis indica
tttttttttttgaagaaaagtcatcaactttattaattgcaatcattcatgattacatgaagcaactcagtagaaatatcgttgcttgtaagagtacgatcaacaataaaataagaagctcgagcaaacgagtgagcaacactattagcagaccgtttaataaaggaatgctaagtattaaattagcatctcggttattgaacagatcaagtaccaagtctacatcccaagcatattctccagtaatcatcaacgaactaacacattggcttaacaaggccgggtgagtagagattacttttggattatcaacatccggcagccaagaatcaagaagaacactcactgaagacccattaccaattcgacgtctaaccccttcacgaaccacatcctgagcttcaagaatactacgccagacaaaacttgggttgccacctaattctgccgagaggaagtctccattcttgtagtatctggctttgaaaattcttcccaccaagaatgtggctgacacaagagacgc

SEQ ID NO: 257627 - DNA, 735 bp, Cannabis indica
attgactgctttcgggctccttccaggttattagagaataaaacactggtctttggtttgctacagctctgaccagaccacttctcataagtgtttaggcatatcagcaattcctttgcctctgattcattcgctcgtgtgaagaggattgtatcgtcagcaaacattaagtgactaatcgatggagagtctcttgcaattttaatcccatggataccgctcctagcctcagcccgattcagtaacttggacaaaacttcttgacacatcaagaaaaggaatggggagaggggatcgccttgcctcaaccccctttgtggcacaaacttctttataggacttccattaaggagaactgaataggacacactacaaacacaagacattagaagattgcagcacctttcatcaaaaccattggcagagagtactcgtctcaggaactcccactccattctgtcatatgctttatgcatgtccagctttaccgccattaaccacccttcccttcttcctctatctatgacattcttgagtcaaaattgaggattccgctatccactccccggaaatgaaagccgattggactggactgatcagagtctcatcaaagggcgcaatcaattggagagtatcttcgcaataccttgtaaatgaaattgcaaaggctaatgggtctgaattgatccattctaatagagtgctccatctttggaattaggcatatgaaactgt

SEQ ID NO: 257628 - DNA, 970 bp, Cannabis indica
cttttgaaatctacattatcttaagcggaagcaagtgggcaaggatgggtttatggcgttgaaatcggatttaagtaaagcctatgatagagtggattggcatttcttgtgtgttatgcttactcggatgggattcgttgataaatgggtttgtcttatctttggatgcttgtcctcggtacagtaccagattgtgagtagtgaccgaactatgggtcctattgtgcctagtagaggcctccgacagggagaccatatatcaccatatctttctttggtgtgtgttgaagctttttctactcttattcgcaaatttgaaaagaggaagtggctgcatggttgtaaagtggctaatggagcgcctagtgtctctcgtatgctctttgtagatgacagttttttgtattataaggcgactaatggagagatgaatcgggttcttcagttacttaggatgtttgctactgcaacgggacaacatgttaattttcgaaagtcttctgtcttttttagcactaatacttcatctaatatgcgacagaccatctgtactactctgggaattcatgaagcgactgagcacaataagtacttggggttgccgagtattgttggcaggaattaaaatgtcattttcggttatttaaaagataaagtgcagaagcggatccagtcttgggacaataaattcctatctcgtgtaggaaaggaagttcttattaaatcagttgttcaatcacttctcgcctatacaatgaatgtgtttcttattcctgtaggaatttgtcaagacattgagagaaccattaccaagttttggttgaggtcgaacatgaataaaggcatacactagctaagctgggacaagctcacgaaacacaagagcaatggtggcatgggatttcgagatttaagggacttaaatttagctctactagctagctaatcaaggatggaggcttttgacttg

SEQ ID NO: 257629 - DNA, 1063 bp, Cannabis indica
ctcctcgtattgctcatactctcttgatcaacataacagcgtggtctatctcctcctcacgtatgcctttctaatcgagtgtgccctcgagatcttgaatgtcccgagctagaacttgcctcatcctgcacaagcgttctccttcgaaaaaggttcgatacacgccctctgtttaggtatgtgtatgcctcctccctatcagttcgagaaagatgctgggggtgtctcggtggtaacccacatgtcctaggttgagtcccaagatttctctagttattacaagggatttcctgttccctagttttgggttgccttatgttcttgtttctatgagaagactctggcacatcattgttttcattcccccgattcgtaaatccccggcgtctttgaggtacttctcgacgaggtgcttgattattctattgttcgtctactaaaacatccctagttccttcaggttgctcctcctgggtgttttggggattttcttgatttgcttcctgcctcctggttcttgaacctcgaggtctaccacgtggtcttcttttgccaggatcatgttgattttgtgcattgtttccttgagtggctctggctattgctgcctctctttccaactcagcattttgttggttagacttgactaagttttgttggagttgtcgattttccaattctactaatggtacatacctaatggggtcataagcatccttacttcttggtatataaccagtattaatattggtttcctcattccttctttctgggttttgatcatgaccaccttggctccttcttgaacgtgttattcctaaagtaggtagcctctatgaatccattggttctttcccaggacgatgagtagtgtctttaggacgactattatcattttaattatgatcagccatggacaaatttttgttggttaggagggatttctctgaattttatcatgtgggttctcaatgaaagcaccaaactgttaacgcagatttttgttaacgaatatgagcctttttcgtaataaattaaatacagatatacatatacaagaaaa

SEQ ID NO: 257630 - DNA, 572 bp, Cannabis indica
agaacataaataatacaactaagctgaatgtaatgaccgcattttataatatggattaggaaaggcaattagcattaattattagtatttttagaattatgtatgaatttacttatttgtgggccccattattagaaatagacatttgagttataatttctctattccggaaattttattaaactctaggagtattatttgacatatatgtgaagtatgttatttttgaaaattttgctcggcgacaaccaaaaatgggatggatggctagtttgatcacatgggtaagtttagaatcttatttcttagtggtatatatattagagaaaataaaatattggggttaagcggggttatgaaatttgaccattttacctctagtcttgtgaaatacctaagtttgaacctaaagggtattttagtaatttaatttgagggataggtggctgcctaggttagtgacacctagcaattcagcaaaggattaattagaaatccttttcattttgggaaattagaagaaaattaagaaaagtcaaaaattgagaaactcatcccttctctctctctct

SEQ ID NO: 257631 - DNA, 779 bp, Cannabis indica
ttggccagaaataaccttgccttagaattttcttggataaactctgcccagccgcgtggttgccgcagaatccatcatgcaccttggacaaaagtcgtgcgacttcttcttgtgtaacacatctgagtagtggcatggagaatcccctgttatgtgggagttccccagtgttgaggtaagctgctattgacgtcatctagtttggagatgtgtcaatcatttcaatctcctccgtgacagtgatattaggttttttaaggaattggatgggaattaaattagccttatcatttatgttgctgctcgcaagtctggctagtgcgttagcggttgtgttttcttctcttggaatttgcttgagagcatatattttgaattgtgcgagtcgatcatgtattttgcttaggtaggctatcatcttttctccctgagcttcgtagtccccaaatacatgattcaccactaactatgactcactacaaatctcaatgtgttcgacatgcaagtctcgagcaagttgtaggccagcaataagaacttcatattcagcttcattgttggattctttaaacttgaatttgactgctccgtgtagacgttgccccccaggtgtgacaagggaaatccctgcactggacaattgatctgtggctgacccatctacatgtaattttcatgttggctcgtctttgctgttgctcagctaaggttcttatactggctccgggttgttttttgaagtgctctcttctttacccgtacattcaaccacaaaatct

SEQ ID NO: 257632 - DNA, 932 bp, Cannabis indica
gatattgatttatgattatatataattttacttatatattagtaggtttcactaaatataataaaattgaataatagtataattgtattatagttgtagtatacttattttatttagactagtgttaaatttaaaaatattaatttttttttaaaaaaatatatatatattaagtgaattccttaataaatattagtggaattaataaattatacaattttttaattaatatattattttttttacttgaatttgcaataaatattaattattgataaattaaattgaactccaaacactttaagcaccaggttacattttaattttagtttaaaaaattattcttttttaaagtattataataataaaaaaaagaattataatatatttttctcaattgacacacctcctaaaaatgtttggttacaaaaatttgtacttgttgtatgttgtttgatattggccccccctattataaaatcctggctccgcccctgcctctatccctctccctccatccttctctcccctctaccaaacatagtgttagtgtaaaaatcccttaaataaaagaagatcagcttttaaatattctttgacacgatatcacaaataaataatgataatatcttcaataaaataaggagctttatttaacattttattttcaacccattatatattttagtttttgatagttagatagatattatgttttagtgtgatttataaaaaattaaaaattgtgtgttaactctataataggattttggtatcagtattggattttggtagtgtgtatttgtatttaatagttgaataaataataattatttgtcccagaattttttacaatattaattttacctcctaaattatacagcttaagaatccccttaaacttttccttttacagaaatttagtccttctg

SEQ ID NO: 257633 - DNA, 831 bp, Cannabis indica
ttgtcttttcaggtgtgttctgacaggttggcgtggtatagtcacaaccgggtatttcggttcgggcccgaaatgcaatttgaattgaattaattgtcattttatttgatgatggataatctgaattttttttgaaaaataaatgcgtgtgaatgacaactatgcccttttatgtgtgaatatgtgagagttggccctaggggcattttggtcttttgaccttatttgacttatattggtaaaagctgaatttttgagataatgaaaagaaaaattctggtgtatattctcttttacccaaccctctctctctccctaaccctctctaattttcaaagctaaattgatgaaaattgcttgatgttggtgttggattaagctttgtaattgggaattaagcttggttgtggcttgaagatgaggtagttcttctcctcattctttaattttgagtttgtaactgagtttagaattgaaaagtatgctcttttaagctttgaatgttctttgttgcatgttaagtgaattggtgttaatcttgttgaaattaagcttgttgttgttgtatgttccgttgttgagtttgggcagagattttatgatgtttttttaggttggaattttatattttactagtgttttgctgctggaatttaatagggatgtgttggatttgaactcatattcttgaacttggaaatttgttgatttggctcaagttttggagctttggttggatgttgttgattgatgttggaaatgatgttattagctctctgttgtgatgatttttatctgtaagaagttaattttgggtatggtttgattaag

SEQ ID NO: 257634 - DNA, 796 bp, Cannabis indica
ttttatgttgttttcttgttaattttatgttgttttcgtgttattttttgaaaaaccgtaaaaatgtaaaaaaacattctttgaacgtaaaaatataaatattttatagaaaaaatggtgccttatctaattattcctattaattacgtgtatacatattcaattatcctcaggggcggagccacatacacccctataggggctgtggccccccctcaatttttaaaaactttacactactaaacatatatatataatcatatttaaaaatatattaatacataatttgttacgtatgaaagtactaaaaaattggtatttacttatttaaatataattttattattaagaaaatatatacagttttattttatatattaatgtagtaaattattatattactattttattagacttaattaatttattttaatttaaaaatatatttagtaagttatttaataaataagagtaaaattaactaattatattatttctaaaatcaatatgagtatttttttcttaagaaattacatatcattattaattttggtaatattaaattaaactacgtcgaattttagcataacactcgtattttattttttatttaatgatttgattcattttttttttaaaaaaaaaaattattgtataattgacacacatccttaaaaagtattaaattcatcgaaaattaaatttattgtatattacactgtctgatattggcccccccaacactttaattctgactccgcccctgattatcctccatacatattatattaatctt

SEQ ID NO: 257635 - DNA, 865 bp, Cannabis indica
gatcttgggaatattggattcggagacctactttcatctccaggagtaatagtctcttttcctctcatcatgttcatctttcttttctttctttctttctctttctcttgtgttttctttggtgtttgccgtttcatgaatagaagacataaaataataataattgaactttaaatgaatataggtgagcgcggttgttgtaacgcatttaatgtcattcatggctgcccacgcatttccatgtgcatctgtaaaattgcattggctgatcatatctctatgtacaatctcatatatacgttctacacacgcacctatagctatatctaaacttcgaactttgtgtgagttatatgtttcatatgtattattaatgctgctatagtacttttcccttaagagataaaagcatttatgttataaataaaacaaggaccgatcactacaccaccattaatgctgccatggcctataatacttctctattatacaatcgacaatcgcctatacttgttttaaaaacttattttcgagaaaaatacatcaaaataagaaaaaattacacaaaataaaatgctttcataaatatggaaatttttttctataagtgtttcaccgctttttgtttttttgtttacacttttatgagattcattttcacatatttttgtattttaattaataaatataatattatgaaaaaacaatatatatttattttattattttttaaaataatttaatgcataatgcataattatatatataaatccaatactttatgatatatataacaagttggatcatcttaatttataaatgctatgtgtaatgtttttgaggagaagaggctgcagaagaaaaa

SEQ ID NO: 257636 - DNA, 375 bp, Cannabis indica
ttaccattttcaagggaaaaatggcaccacaaatcacattttacttccacaagttaccaacaacatcttctgcccaaggagggaaaaagaactgcttcttggcagcatcctctattgatcgagcacccatttcatgcaaggtgcccgaaccaatgaagaatgtgaagacacctatgccagctagaaaggctggaagagggaaaggtgtgaagagtatccctaagactgcacaggccttgagaggcaaggcagcaaagggctttaaaaagaggcaagcccgagcaatgaaaaggtctgcgacaaaggttgccaagacagaagggaggacaacaaagattggctcccccgtaatgatccaggaatggggccatgagc

SEQ ID NO: 257637 - DNA, 956 bp, Cannabis indica
attattatttttatgtttctttcaagttgttcgtgaaagctaaccaatggttcttgttgatatttacatctatggaacatggtagttcaattgagtgggagcgctaatcatagatatgaaatctatagcttctataagtatatagaagtaaaacgataattttcttcgagcttggcggaatagagataaatgattgagatctcatttcagtaattatattagtttactgaaatatcatttataggtagctaagtgttttaaggataaaatatattgaagggcagaacggtaaatttgtccatattcagtgtagatcatatatagaggatctttgactattagaattgtaacaatgaataatcataacgtatctatatcttggtacatatagagctatctatatagttgtgagtgcaattccgaatctatagtggtacaaggaggaattaataagttagagaatttactatgtaaattctagttctacttattggaagctcggttatataggcctatggtcccctcactagttaagataatactggttgcaaactcagttgattggttttaattaatcaattataattctaaaataagactatattttatttataaattttcactaagtaagggcttaattgtgaagaaaagaagttttggggtaatttattaatcaagagactttgtatggtctaattaataaataatataaatgtcaattttatttgataattaattataattatgaaataaatagttttgacatttataggattgaattggaaaatatgatattattgaaagtagaatagccagttgaaataaggtggcaaaattgtaactagagattggtccttatgtggccgaccactctagttatttttgcccaatattttgttcttttttaatccatataactcaaacctaagccctagttgaaacactataaaaggaac

SEQ ID NO: 257638 - DNA, 667 bp, Cannabis indica
tttgtactattttagaaaatacagggtccattttgtcatttaacaaaacacaaggtccaattggtaacttttataaaacagagggtccaaaatagtatttacccttattatttacatgtataaatataaatgtataaatccacatgtcgagtaaactaactatttattactatgattaatcttgtttttggggacatagttttgagtgtcttttgtttaagttactgcaattagtcttatttttgtgacgtgattttgcatttttttttgtttcgttgttggttcgtcttctttgttattcgtgactcgcatcaaatcgatgttaatggttaggaataacaagttttttacagctgaaggagttgttagtggtgcaattacataccttgtgcaatagttgactgctcaagctaaggggttgaatgaacctgcaacagtttttactgttgtgtcttatgagcggtggaggaaactgaatataagtgttcttatggctaattgtgatactgtaatctttttttatctgatttttttttttattttgtttttttattaaatgatcctggaattaggcgaccaatatttttttattctaatcttagtcgtttttccaagttccaaaaggagagatgtctcaattgaattgcaagctattattttagttgat

SEQ ID NO: 257639 - DNA, 851 bp, Cannabis indica
tatggaataactcattaattacaaataggcagagtatatttgtaacctactgactgtaaggtcttaggtgaggaatcaatgtacaagctgtcacttagtatattagcgagaaaccatatgtcgtcaaatgcaaatagcgaggcgtcggagaaagtgacacgtatcaatcgtgaaagtccttagtgtgcaatgaacaaactaagtgtaaaagtcagatcgactcaaagaacaagtaagcgaagtgaccatcttgctatgggaagacttcttatagcttcatccagctaatgggagcgaggcttacaaccctggcgattcagaacgattctttgtaaataaccgctattgacacaagacatacattgtcgacctcggaaggaagaatggccccaactcactattgggattactataatcacgtttctgtcgagacatttccagatacaacgattaaagacgtgtttaatacatgatagttttggcccagtaaaagcgggaaaatcacaactatacgtttttcaaatcataaaccgcatttacactacatgatatgtaatcaaatcacacgattttagggataattgctgtgaacatattcaagtcaactttgtaataaattgtccactatagaattataaatagtgacaaacaagatcaaaaaagggacgaaaaaactcatataagagggttcctaaaaaaaacaatcataaatctgaataagattgactcgtggactatgcagaattttaactgcaaaatcacgtaaaaaacccagtgttcatacattatttttctatagcttttattttttctctgtgagatcaataatgtgaggctcaattttagttaac

SEQ ID NO: 257640 - DNA, 942 bp, Cannabis indica
tacataattatttagtacttataaataaatatccatacataaatatatatttatatatatattgactttgatatgagactatgagaggtggggagaatccttgcaatataaaaacataagagcatagaataaaaaataagactcttaacaaaattgtggtatatatatatgttaagaaattaaagtaaaattagcaagatgtgatcaatatatatagataccttaaattaatatttttacggatcgatgattaattgtgataattaactctatttgtttgacactcttctcctttcatcataatgagttgcttgattcttttttctatcatcactatgttataaataatttgtccacctagataaaaaaaaaaaataataaattttatgttaagtattttctactttatttaaaagttaacaattaaaaattaaaaaaaatatattataagttattaagtgagattattattatgtatatctaaataatttggtagtgacagagtagttcaactatatgaggctgaaactgataggctttgagccctttacatgtttaatgccattgttaatttcaccaattgagttatgaataatcgttagaacatagattaatctcatggttcaattgtaaatcaaaatataaagaatttctatgagggataagtcgaaaagtctagccataaatgtttcccattgttttggtttgatttgaatattctacagttctgcctctctcaaccatgaatctattcaattacaataaagtaaaatcaacaatttaaatatccacttaccacaatcacagagttatcctaattgattcttcttccacctcttcaaaataatgcttaaacacctgcaaatgaaaagcaactattgttgttggacatcaaatgtgataactgaaacatatagtttggtgattcaatgtgcttatatt

SEQ ID NO: 257641 - DNA, 617 bp, Cannabis indica
tcgggttccaaacctgagaatttgacatagtgaactgatcctaagacctgctcatcagtgctctcagtagctgggattggggagtgtacttgatcattagctggctcgataactatttgactcaaggcacactttttgttagccgtggttttcctcgatctcttcaagggttccagattttctcctgacgaagtctctcatgttgtaatcctcttctttcccttttcgcccgagctggtaacaaggctctcgaaattcatatatgcgaggcaaaagacagttatcacttgcaacaaagtaaataagggaaaggggtggagaggtaatctcccactcaagaaaattaccataatcatcatctgatgatgaagaagaactatagtaattactaaactcccgagaaccagtgatcatatatatggcataaggatttattggagatatatctcaatatgagtctagatggcttgccctatccaagttagtatcatactgttcgaaaattatgaagtaggagctattacgacttaattggacatgacacatggggtaccagttgtcaaacctatgggctaggaaatctacacacaaacgatcccagatatagaagttatact

SEQ ID NO: 257642 - DNA, 1456 bp, Cannabis indica
aaaaaaaattactatttttattaatcatgtaaaaagagagaaacatataaaaggagtgctcttaatttttcttgcaagagataaaaagcgtattaaaaaaatatgagaaaaagtgtggaaaaataatttattttagtaacagttaaaaaaattaatgtataaaaggaatgttagttcttgttcaaattgccctttatgtggctactcagatgacacaaatggacatgcaattttttggtgtgagagaatacgaaaggtatggcaatccttggaaatgtaatattcaatgtgtcattccaaatggtaattttaaaggcatctgagctactatctaaatcagagttcgagctatttctattcacatcctggtctatttggaaggaacgaaacaatgtcactcatggtgggacttcaaaaccattatcccaaattgtttccaacattaagaggttatttgaggaacatataaaggcatggaatcagagaagttttactaattgttctccgtgcaattcagcaagtaattggagcaaccctccatatgggcaacttaaattaaatgtggatgcggctattgatgaaagctcaagaaccattgggattggagccatactaaggaattcaaatggagatattgtagcatgcttctcaaagcctatgtttggtaagaattcttaagatatatatttttttaattgaattcttcactatgagtcctatattataaattcattatgagctcttaattataagttcttttttctgacaatgattagtgaaatgatataactttggcctctctttccttcaatgtcaccctcttggcctgataatcatctattagaagcctcagctcaatacatgaggttctaaaagcttaaacaactatccccattgatagggaaatagtattttgtgttagatcattttcctaaattgtgaaacaaaatgtttacacagaacttgaacctttctggtagcaagcaacatcatctctgctgcttcaccatacttactgcccaaccagtttttaaattactttaaaaaaatatatctcagttttttttcaatgttaggaggaatactaagctccaataaattgtctcactttgaattgaagctcttttgtaacagctgtacaaacaaataataaagacttcaaatcatattctaataaagcaacttcagtatcttgttcttgtttatacatctccaaacctcttagtttctgttttaaatactcaatgtgtttaattacaattatgatttcatcagttatttgttatagttgtcctcttaaccattctgtttgatatttcaattgattttcttttaatcaatataatcagttctattaattgttaaacaatacacttacacatgacaatatacataaactatattttaatgtcaatgtttctaatataggaaattaacacatgtgtgtatatatata

SEQ ID NO: 257643 - DNA, 625 bp, Cannabis indica
tgtgtagaacatccacaataaaactctgttgtggaattaaaacaccaacacattctcaatgtagcaagagttttatccttccaatctcacctaccacttgtatattggccctatttgattcagattgccatttatcttctgaacagaactctatcttccttattcaaaggcctcacttcttatgaaatcctccataagaaacctcctaactatgatcatttacgatgttttggatgcctagcttatgctgccacacttccctgtaaaaggcacaatttttcacctcgaattcgtgcttctatcttcattggatatccacatggcatgaagacttatacactactcgacattgagacaaaacaaatataccaatctcgagatgtagtattttatgaaaataattttccattctcatcttctacatccaacactgagatagaccaattctttcaaccaactattttaccagcacacaccaacatctccaacaacagtcacactcatctcacaccagatgactattgggctttgtgccctaaataaaactctattctaatgtaatcttttctattcaattatcaataaagaaacagatttaattttattacttgtttaatgtgttatt

SEQ ID NO: 257644 - DNA, 577 bp, Cannabis indica
aaatataaataattttgatttttcttcaaaaaatattagtttgtttaaactatatattggatttttaataattttagtgttatttttttaagatacgtgtttataaataaaataaaatttgaaaaatatttttcttaagaatactttaggtttcttaagtaaacttaatatttgttaattaatttaaaattgttatcaaatttttattttttctaataaaaggggtgaaattttgtatcggtcaaagttgagggggtaaaaatactaatttttaacggtaaaagaaacgaaacctaatagaaatggcataattatgtaactgttatattttagatggtatttttaacaagccatatattttagggggcaagatctggtagtgtcgaaagttcagcgggcaaaattgctagttattctaaacaaaatattgtaaaaccaaagtcctgataggcatgtagtgcttgtcaggggagaatgaggctctcagttatgagaaccaagccatgatcatacttaattcactaccagaaacttacaaagaagtgagaacagctattaagtatggaagaacctctat

SEQ ID NO: 257645 - DNA, 858 bp, Cannabis indica
ccagcgcatttacgcactgagaatagttatttttgccaatgcttttcattttgtgctgccaaaagttctaataccaatgttattgccaaccctttttgccaacacatcagaagtaaattttatcttaccagcaataccaaacttttgccagtacaaaaatgtgctggtaaaagtgacatttcttgtaatgaattattttttaaaattaaaattacgtggatcactaaaaattttgccacgtgtacaagggtgtacacgtggacagtccaccgtggcacttataactgtgatttttggacggaggggtatggagcaaaatagaaccagggttcagagagttatgccgccaaaatttcaatttttgtggttaacggttacaaacctaaaaattagggtggtttagccgccaatattcttaaataaaattaaaaaaatactaataataatataactacgtataaatatatatttagtaagttaaaaaggcaattttttaaaaaaaaaaataaatttttattatatatataaaaaaatacatatatataagcttttaaaccctaaaatatttattgttttctctatatataatttcagtttcagtaaaatgggttagagttggtcaacacaaacatgacacaattttttaggaattgggttagggttaaaaaaattaagcgcaagttgaaaatggatcaacacactagcttacgaaatataaaaacaggtcaattacaatatgtctcaccagctaatacacgtgacaagatgacatgttttgtcattcctactctcatattgtatatatgtaatgttcccgtttcaagcttcctggaatgactcatagctcttatacacgag

SEQ ID NO: 257646 - DNA, 603 bp, Cannabis indica
tgtaatcaggtgaaagattgaatagcttctctattaggtttttttttttttttgtttgaaagataggtgtaggtaatctattggaaaggtagacagaggttctaaaagcttcatcccaatatttaagtggcatagatgcttatgcaagtagggtaaggccattttcaacaacatgtatatgtttcctttcaactaagccattctgttcatgtatagtgggacatggatgcctatgagtaatgccaaactatttaagatagtcagtgaaagacctaagctcccctccccaattagtttgaaggcattcgatctttttatcaagttgtaattcagtttctgttttgaattgcaagaatcttttcaaagctcaaatttgtttttgagcatataaatccatgtgaatgtagaataggcatcaataaaatggatgtaatatttttagccattgacagaggttgttttggtaggaccccacaagtcagcaacaattaattatattggttcattatatataaactgtaagggaagactttggaaatgttagcctgtggatcttgcctaaacaacacgctgaacaaactattaaggaatttttattactaa

SEQ ID NO: 257647 - DNA, 582 bp, Cannabis indica
ctcgctctatatctatatatctatatgcgggtatgtgtatatatagaagaaatgtacgaacgatatatgtgtggtttgtgattatttttttttgtttcgtttttgtatttaggtgtatgcatgtgaatcaatcggattgatatatacatagagtaaaagaatagggaacaagaagggaaatcttgcggcccgtcctaaacaatcgccggcggcttcaccggcggcggtgactaagcaggttgtcgacggagcatatataattatataattatatatttgattattggtatttaatttgttcctctttcagatatttgctaaggaaactgttgattaaaattcaagcttatctaaactctaacctaattatctttcagagagagaaaattgcacttactttcctttcttttagaagctttgcttcagtacttttcttggacatgataccttaatttattaaatatatattatatacattatatgatttagtttagtggaagaaaaatagatagattgtcaaattcattgtgcgaagacgattgaacaatcaattttgaagctttctcttggaaggagtttttt

SEQ ID NO: 257648 - DNA, 800 bp, Cannabis indica
tgatcttcaggtcaggttccatcaaagaaatggtgctcatctgtacaatttgagaaaagactttgtgaatcttaaacaggaaaatcacaatgtagggatgtatttcaccaggctcaaaaccatttgggagcagctttccaatttcagaccaacatgttcatgcaatggatgcacttgtggaggagtcaagaagttgcaagaacactacaacatggaatatatcatgtctttcctcatggaattgtctgatatgtatgctcaggtttaaggtaatatcttggttatggatcccttaccagaaatcaatagagtctttcaccttgtcacacaagaagagaatcaaagaaggggtcataatcccactacagatccaaatccgaatgttgcctttgctttccatggtgataaagcttcaggaaataaggataattatagttcaagacaacaacaaccaccaaacgaaaggcaggtccttttgtactcactgcaattttcatggtcataccattgaaatggtgatccatcagctaaggtaatagaagaagtgggactataagactagagagtcgacaagagactggaattacttatcatgtgatttgtggcaccagaatcaatgactcatttttaggatgtggaaagaagacatacattagatttacttgaatcaacaattgtaatgacaggaggagataaagacttgagtgattcctagcaccttgagaacttggcaaattcatccatagatataaggatcgatttgtcaaatgcacactagtgcttgcaacattagcatagtg

SEQ ID NO: 257649 - DNA, 861 bp, Cannabis indica
acatgggctactccactcattgccaattggttttgagatggaaccccatgattctcaacatccgttggaacaacctgggacttccaagaaaggaagttgacacgatcaagtttgatcttgagagacgaggacagagaatttgagaatggattccaagatccagcagcaggggtagataccgggggagcttgagtggcaggtgccatggcaggttttccaaccagaaagtggtgtgccaagtgtgcatgaagactggccacacggctgccatttgccattatagatttgataagaactggtctactcccaaaccaggtaacaatgtaaatcgtgcttttctaactgaacttgactgagaatatgatccccaggcctatgcaacaactatgattcaagattttggtgaagataactcatggtatgttgactctggagccaccacacatgtcacttttgatcccacaaatcttgatgattcaaagcctttctctggaaatgaaactcttgctattggtgatggtaagaaattattaatatctcatgttggatctgtttcaattccctctgtctctaaatcttgtcccctacatatgcagtctgttataacagtcccctctattactaagaaccttgatagtgtctctcctcactgaactacaagtgaacttgtctcagtgtcctgttatatgggtcgataaccaaagtgcctgccaatcccgtctttcatgctcggtcaaaacatatagaaatagatttgcactttgtaagggatcagataatggacaaacggctctctgtcagatatgttcccagccgtgatcaagttgctgatttgctcactaaaccactctcaaaggatcg

SEQ ID NO: 257650 - DNA, 1442 bp, Cannabis indica
ttcaaataatgtagcacttcgaaagaaaccaggatattatcagagattaagcgacccgggataaaagcgctctgatttgcagatacggctttatccataaagggcttcattcggtttgccatcaccttagtaattatcttgtaaagcacattacacaacgctataggcctgagatcagtaaccagctctggattctttttcttgggaatcagaacaacatgtgccttgctggtactactagccaaatttccatcttgaaagaatttttgcaccactagcaccacatctttcttaactatactccaacatttctggtaaaatccaggagtcattccatcagggccaggacttttcgaaggatgcatctgaaaaagcgctttacggacttcttcttctgtaaccggtagacacagttcatgattgaccatatcagaaatagaacattcaatgtcttccaccacttccaaacaagaggcacccgaagctgagaacaaggctgaataataatcaacaatcaattcagataaaccattctcccagctaacccattgaccgttcccatttctgagttttcctatagcattgttccctcttctagtagtagcagccatatgaaaatacctgctatttttatcaccttccttgagccaaaactgtttggccctctgcttccaaaaggtctcccgttggtccataatccgagagagttgattctttaactccccaaaacgttgcacagaaagtgcatctctcttgccccttaaactggttaattcttgcttgcacttcttaatcctcactttgaatgaacccgtaatatcctttccccattcggttaacttatctgcacaagcttgaattttcttcacaatatcttcattgttcatagaatcccaacaagcttttatcaattctacacataaaggttccttaagccaggcattctcaaaacgaaacttacgaggataaagattaaagggttctatagcaggttcaaggtaaattggggaatgatcagaagtggaagtttcaagattacttagcttagcttggggaaatagccgaaaccaatccgaggagataagcgctctgtctagccgaacctcaacccaattcgaagtccctctgcctctttcccaggtgaacgggtagccgaggagctccatatccgtcaaatcgcagtcgtttaacgcttgcaggaagccttcgatcagggctcggggataagggtgtccaccacgcttgtcttgctgagaaaccacgttattgaggtctcctaagatgcaccacggcaagcttgaggattgttttaaagtgcgaagaaggtcccaggtctcttgtcgatgagtccttcttgattcaccatacacccctgtcaaacgccactctgcctttccttcctccctgaccacaaagtcgatatgatgatgagagaaacccac

SEQ ID NO: 257651 - DNA, 610 bp, Cannabis indica
ttatccaagctcttgaggtgcaatcttggtgttcaagaactcatcaacttattttagagtttctttcctgtcctgtcaacaaaaccaattcaggttaaggtgtctaataataatacaaagaaactaacttctataagttatattggcttcaagtacaagatctacataaatgtagtagatatacacataattgtaataataataaatacataatatataatccccaaaagtaccccagatctatttttgtgacctccacattactcaaactcataatataataaataacaataatactccaaatccaaaaactatttaaaaaaaataataaaaaaaaatagaaaagagttgataataagaaaggagacaagagatgagaacatggcatggattgtgaagttgccacatagccaaagttgcatgctgatccctaatactatgcagccacgcacctatttgatctttatatatattcatatcagaaagtagaaaccttataataaattttagttggaaaatttttcaaagctcgaagggtctttgtccactataggtgtatttgctaccaagcattaccggtactctgttttactttctatatatactttcg

SEQ ID NO: 257652 - DNA, 865 bp, Cannabis indica
atggtatcaggaagcttttgaccaacgtctctcctcgtcaccctgaacccaccgctccatcttctgctgctccgattccagcagctccaccagttcatcaatggaatccttttcagaattctctgaattcctctcttactgttcgactcgatcgaacaaattatcttgcgtggaaggcgcaagttatacccaccgtcatcggtcacggccttgacgatattcttctcaccggagtcgctcctgttcgaaccctcattaatggcgacatcaatccagagtacacatcttggaagagaaaagatcaaatacttctcagctggcttcgatcttcaatgtccgaaactattcttggatcatctgctcaatacaattcctcttacgaagcttggcgtgctctggaacaaaggtttgcaagtcaatccaaggcccgattgcttcaaattaaatcacagttatctacaatccagaaaggtaatctttctattactgattactgtgacaaagtgaagcttcttgcagactctttatctactgctggtcatcctcttgatgatagtgatttaataatgcatctgttaaatggtttgggacccgaatacgatcctgtggttgttcatgttaccagccttgtggataatctttctttaaaatctatacaatctttgttgctaacccatgaaagcacgcttgaaagacactacaccttgggtgattcttcatccaagatttcagcacatctcactcgttatgctcctggctccagatatcgatcttatcctccccaaggacgtggaaccaatccaaattttcgctctcaaaatcgttcttttggtcgtggccacccctccattcctcgacttctttg

SEQ ID NO: 257653 - DNA, 913 bp, Cannabis indica
gcagtgaaaaatggggtgagattgccatgatttgttggtctttatggggggctaggaacgatctagtttggcaaggtaaaagacacacagtggcaagtgttgtgtctgcagcttctcaatattttgtgcaatggaagaatgctcaagataagtcaaacattgctctttatccctcaaatattgcaggtgaggggttgtttcttgggttaagcctattgagaatgtactcaaaatctcagttgatgcagcaacttttgaccacaattcatcatatggtttcgggttggtggcaagggatcacaacgggaatttggtggaggccaaaacagtctatcgcaggggtacaatggcactagacatggctgaagctttagccattaaagaggcgttaagttggatcaaggatatgaatggcataatgttgaactcgagtccgattgtctctcaattgtccaagctattcgaagtaacatcaccatggtttcgctttttgggggagtgctgatggactgtcgaaagcttctatccttaaacaatatttctttatttttcattaaacgatctgctaatatgactgcgcacagctttgctagagcgtcatattctttttcagatcaagttttcagtaggagggatgttcctactgaattacagtcttgtcttttggctgatttagcaaattaataaaattccaatttgcattcaaaaaaaaagtattttattagtatatatatatatatatttaattttaataatatatggatgatgattaatattgaaattatttgattaataaaatcttaaagttattacttcaataataataataataaaaagagtctgattaattatgtaatttatattaaataaaataaaattatttatgtaaaataaacagaaataaaaaaaaaaa

SEQ ID NO: 257654 - DNA, 910 bp, Cannabis indica
ggtcccatgacttagccaagaactgacagggtcaccaaagccaggcatgaaccgacttgctttatagggtgaaatcctagagctggccaactcccatcattaagtgttaaggccagccaagtctcaagcaagacctcctaggctagccaaggttagcttggaatccaaatatgtttttttttttcaaaacttgaatatgtgcatcgttttctttatgaatcaatgagttaggaatcacaacgaaggccgaaattgaattatttccatcaaaaaatcacacatcatacattccaaaactatgatgaggatcaatataccaaagatgttacaaactagcatgagaattaaaaagtttctaaaagcttaaaacgcttcaaacttattaatggcaggtacaaagaagagatatcaaagaagataagatgcgacgtatatagggagagaaggtcaaagatctagaagcatgccatgcaaaaatccaacacttagctagataaggctgctcgacgaagactatatactacaaagatgagagctagaaagtccctatttgactagatattcgaacaaggacttgggggaaaatattatcacaaattttgtccacctgacgtggcatgtccatgtaagccaagatagagtacatgtggaatataaccttggcattagtaagacaaggtctccataaaaggtatggcaagactgtcaagcagcaactgaaaacagtgaagccaactatcaaggggctgtagcaacatgtctagccggacaagagaaccctataggatggccaggtgagcttgtatggccaaccaggatctgtgcacaagcttgccagccaaaaggtgacttttagctaagggagcttttgttcgaccagggaacctgacctctacaaggaaaaggtgta

SEQ ID NO: 257655 - DNA, 1093 bp, Cannabis indica
cattcaattctcttcacacttgtgaccctgctgaagactactttgagggaagtagccactataatgctccaaatgaacaatctcacagtgggtcgtcctgaaaagattctaagttcatgatcgacctggaagacaaagagacatgcgtgaactcttgaataaaagaagaatggtggacgtgggaacttctagagaagaccctatctgggtgacagaatctccatctgggacgcagaccaccattcacagggtcaattaggcagagtttgacaccttgactgctttagtgaaggggatcacaacacctaagttgtttgaatttgagctaaatagagaacgacgctcaccactctgtgaaagaatcaaagcccttcccattcctccaaagttcaagaatctttcctagcatcaatgcactgggaaggaagatccactgtctcacatccactactttgaagtgaagactgatatgcaaagtgtgagaaacgaagtcaggtatagaatctttcctgctacactaacaggcctagcacaacggtggtaccttaagttctcttagattaatagactcgtggagatctagtggatgctttcggtaattagttttctccttcccggctgtgctagatggagtccaatgatttggtgaacattaagtaataggaaaacgagcctcttaaggactatatccaaccgtttttaaaggcagccgctaagaccaaaagtcttagcgaggatgcaagggttatgtcactcgcagccaagcttcaggggatgagtcctctattgttagaccttcatctcaaggcagtatacactaggattaacttcttagagagagtagacaactttatcaaacttgaaaaagccaccacccgagctaacaactcaaagggtggcaagaagaaggcactagacactgaagcccctgctattgaggcacagggtaatgggaaaaagggaggtttgaatggaggaaagagagcaaacagcactggcaagcaaggcaagtcccctggaggaaataagcctaaaattgggggcaagcccttgagagattatgagccttgcatgaatgatcattttccattag

SEQ ID NO: 257656 - DNA, 578 bp, Cannabis indica
taataaaaagaaaagggtgacagacagtggtatacagatattgaatttggttgcatgcaatgcagaagtattcagtaaaaaagactaaaagaagagtatagtaattaagtaataaacgtagcaataagatgtgttgtgtgtgaatgtggggaccatatatgagagaaagctctagagagaaacagtatatagtaatagtaggaatggagtggattaggttttgctttatgtatatatagtcagtgactgagtagtagtacagcagcagtagtagtaccacagtttgtaaaccgcagtattacttgtttactagtattataatgagaaatgttaaagggcaccaatcgtctctagtactctcttatgtgtcaatatcgtcattggttcaactaagtatcggatctcatataatttaatatattagctttcagggagtagtatcgctagtcaatcgcaatgcgacatgtcaagaaggtgttaggcactactggtgcctaataagaatgctctattataatatatatatatatatttacagagatagataccttcttcgcctcttgagatgcccgccacta

SEQ ID NO: 257657 - DNA, 513 bp, Cannabis indica
ttaattaatattttacgtggttatattcaatcattatagaacatttgtgtatgataacaattggtgtataactgtgtggcgtgagttattttgtttatatagtcatttggactatgatgatctctgagaaataattgtccttgctcaattttcaccgaagaaaaccagttgaattccttgagcaccaaacccagtttggacccgcatgctctaagtacttaaacatggagcaaacacatctgaatattggaaagagtgctgaatatttatcagtgagcttgataccaatatgctaaacttaaatatattttaaattctaattcatctttgaaggtttcgctcaaataagtatttcatttagagattgctatacaattgagtttagatgtaactctaaattgtttgttcttaaaattttggacgctcttacatttagttgctgtgaactacatatctacaagctatgcacaggaataagagatggaaatcaaagcattagaagcaattcttatg

SEQ ID NO: 257658 - DNA, 827 bp, Cannabis indica
aatttctcttttgtttagttaatcaattatgagtaatgatatgatcaaacacacattaattgcatagtagcttaggtaaattaaattttttttttttttttttttgaaggaagcttggtaaataattttattataatagtatattagtatattttattccaccaaattgtttaaaagccatttcattataatcatatttcaatattttaaaatataaactaataaaataatgaaatgaaattaattctttttcattctattctatttatttctctaattagtatgtcatttatgaacacaatatgtaataagcgttatttattttaatttaaaataaaatgagttagttcaatatataattgcatcatacataatattcaacaccaagcttatagtgtgcactttaattattcaatgctaattgttgtgatgaatgagggtaataagaaaaggcactacaaaaaattttacttttagtcacaaaaactaattataaaatatcaatcttatgttgtgactaaaggtattagtcacaaaaattacaatttattgtaactaaatgtatttttagtcacaatacttgttgtgactaaaactaaattaatgacaacttgtaactaaatgttatattttagtcgcaagtaatattttgttgtgactaaaagtcacatttagtcacaaaaaatttatgttgtgactaaaaggttgtcactaaaagtagctattttttgtagtgaggctaaaaatcttcaagttgatttggtgctttgtttaaaaccaaagtgaacaggttaattatgacgtactatgatacaaaataattctcc

SEQ ID NO: 257659 - DNA, 932 bp, Cannabis indica
cttctccttcagatatcccaaagatgcattcttgttacggcccatagaacttggcagtcctaaatagaaactaccatccggagcaattctcatagatagattctgacaaagcctctgtttcacccctcctccgtgttggcactaaaaaatatggatgatttagtaaaattaactttttggcccgaagcattttcaaacttttggagcacatccttgattcgagaggcttcattttcagttgctttacagtacaaatagctatcatccgcgaacaacatatgtgagattcttggcgctccatttgcaactttgcaaccatggatccaacctctttgctcatacttctttagaatagccgataacccctccgcacaaagaataaatagataaggagaaagtggatctccttgtcttattcctcttgtcgggataattgggccaacttcatgattaccatacacaactttgtatcttgctgaagtgacacaacgtaacacaagttgaacccatttctcttgaaatcccacctttcggagcatagcttcaaggaaagaccattcgactctgtcatacgccttgctcatgtcaagcttgagtgccatgtaaccctctttacctttcctctttcgcttaaggtagtgcaagatttcaaaagaaaccataacattgtcagagattaagcgtcccggaataaatgcactctgattttctgagatcaacgaattcataaatggcttcattcgattcaccaagacttttgtaatgatcttatacaatacattacaaagagctataggcctcatgtctgcaatgaattccggatgcttcttcttaggaataaggactacattggcttcactacattcatccttcaactcaccattttcaaagaattgacgaacgtactgaaccacatctcctttgacaatcgg

SEQ ID NO: 257660 - DNA, 963 bp, Cannabis indica
tgatgaaatcctttagcaaccagtcgagctttgagcttgtttatagtgccatcagggttaagtttgatcttataaacccacttacaccctatgggtgttctaccatcaggtaagggaacataggtccatgtgacatttctttttagagcccccatctcctcagacatagcactgagccatttttcttgcttcatggccattttgacacttgttggttcttgaagagccaaataaaccttaggtttgaatatgctagattttgctcgtgttttcattgaatgtttgttggttacaggtacctgaggaacttcagaaggctttgaaacagctgtggtgggaattgagagaggagcaggtggagttgcagacatagcaggctgtggaatagctatagggacagtgttggattgtgaaagtgaatcaggggcatgcataggttgagtagaagtggatacagagagttgaggcatggctatatttgcagggtgaaagataggtgtttgggatgaagactgagagtgatcatcaggaaataaaaactcaggagtgtatgtagatgtgggaattgtagcagatggtaaagtatcagtaccgtctgatgcaacaggtgagagaacagactgagatttaaaaggaaatttggactcatcaaagatcacatctcgagatatatagacacgaccagaactatctatacacttataccctttggttcaaactgtacccaacaaaggtgcagggagatgatctaaaagccaacttgtgtctgttataaggccttatatttggataacatagacatccaaaagttcttaggttggagtactcaggtttaatattgaacagcatctcaatgggagagagctgatgcagtacaggggtaggtaatctgttgtgtaaatacacagcagatctgaatgcctcatcccagaactttaagggaagtgaggcatgagcaagaag

SEQ ID NO: 257661 - DNA, 749 bp, Cannabis indica
ccaaaaaaaggaaaaaaatacaaataaaatatttttgaccgtagatgatgatctaacggtaaaaattagtatatgaaagtgatagtcatttttcagagcctggtgggacccgttgtgagtaatcagagcttattttcgtaactcttttggggtgaaatttgagattgatagcttcagaattttgatcaagtgtgagatattaattgatagagcattgaattagcttcaaagttcaagttgaatcgcatcaattggattaatattgagtgagttatgaccgttttactaaagcagttcatgaccaagtgcccaagttgacatccaacgccatgttgacatctcattgcctaggttgacatatgatgtcaacatggatgctcagtaagtgaacaaatgtccaaggaatgtactttaagatgtataagtgatattttaacattacttagtctgtttttgtgttttagcaaacctggtcataagttctcggagatgttgttgttctacaaaaatgggagactcgaaactcttcatttccgagtgagtttcccatgttagaaatgagaaatgcaaagttgtaaatttgacttctctgactttatgaatcttagttattgtgaaaaactaaacggacagtcgaaacaaaatcagaatcggataagcaaaacccagcacactaggccatttatcaacctgagtgctaggtaccccatttttgagctcccggccggttgtcgttttgatacttccaa

SEQ ID NO: 257662 - DNA, 566 bp, Cannabis indica
agaatggccaaagcctctaagatgtcgagatcgttccccgagtacttacgtcataacaggtaagtcttaggggtactgtgtaggatcgacagcaggctcatcgggctgatcttcagtgggcgctggttgagttgctgctatttcaaccatttgcccctaaaataaacaaataagttaaatggttaattttaatacaaaataaattgaaagaattaaataaaaatgaattaaaatgtaaatttacgtaagcttgttgcgcgtactcgttgcgccaattgttgcctttatggtgaaacttttgaaaagtttccaccgcagttggcagttctcctgtgtcggggttagcctatttttaagagaaaatatattactattgttattttactagaaaaaattaaatcaatgataatgtaatatataaacttaccccctcgacaacatatgaaacaataggcttcgagccccagcctccttgaagcttcatcttaccccgactttctttattttttgctgctctcgcctgaaattaataatttttctaacaattaattatttattattgacta

SEQ ID NO: 257663 - DNA, 671 bp, Cannabis indica
ttaagatcaagattatcttgttccaatcatccgtatgatcttcaatacttttccctagttgcattttgaacagtaaagtttttgcttcaggaacaaacgatttgccagagattttgtcatgtagagagactccaatttcttccatagaccaactgtcgtggtttccttcaaaaccttccttggaaccttatctccaaagactcaagatgagtgcactatgtgctttttccatgagttcactcttctctgcatccgtgttggctttaatcttaccatcacaaagaattacatcctgaattaatagttgaaccatgacaactcgcatctttactctccataaattcaaattgtatttcccatcaaacttctcgatgtcaaacttggcattccccatttcttccctggatgttcttcacatttgatctcacactagcttagtttgatccaagctccaagaacccatccagctctaataccacattgttgagtttcgagctcaaacgtcccacaaccataaccatttacaatgtgttcgaaagaataaaatctataactccgtattgatggtagttaagtcttatacaattaagttacaatataatgtgtttcaagaaaatcagggactatatataaaattagtctaatttattttgtcacttgaaactaactac

SEQ ID NO: 257664 - DNA, 724 bp, Cannabis indica
gaataagtggttgaaataaagtctttttcaagcacaataactctttttatgcttgtacctgcatgtcactggaaaagtttgcaataaagtcagctaatacctgagatttgatcgctgtccttggttggaatgtgatgtcgttatcactgagctctacttcccacttggtgagtcttcctgaaagctctggcttgtgtaggatgctacgaagtggatattgtgtcaacacaataatagtggtgttgaaaatatggtctgagtttgtgtcctgttgtgataagtgctagtgccagtttctcaagttggctgtatcttgtttttgcatctagaagagtctttgagacatggtagacaggttgttgccttccttcctcttctctgattagcacagcgctgattgttgtttcaaaaactgctaggtatatgtagagtgcttctccatctttaggtttcgctaagagcaaaggtgaggcgagatattctttaagttgtctaagtgcatcttcacattcttttgtccactcaaagtcctttgcttttcttagtgttaagaagaccaagtgacaacgttcaaaagattttgaaatcaaactgatatcctccctgtaaggcgttggacgtcctcgattgatttcggtgattgaatgttttgtatggagcgtatttgatctgggtttgcttcaactcctcgctttgtcactaagtatcttagaaatttacctga

SEQ ID NO: 257665 - DNA, 519 bp, Cannabis indica
aaactaaaaaaaataccatatatttttttcaataaattatcaataattaaaattaaataaaaatcattatgtaaaacatatgtacaatttaaatgtgtctataattataattatgggcggatccatatagagaccagacgaatcagtcaccccttaaaaaaattggaaaaaaattatgtatcaaataaaattttattttaaatttgtttcaatagtattatatattatttaaaatggaatgaaatcaccaaagatacatttggtatgtcgtattacatcgtattgtattgtatagtattatattgaattgtattttatgcaatatttttatgtaaatatatatgtggtattgatttttataggcacttaaatatataatattttagtataattaaattaaagtttaacatagtattatataaaaatatgatatgtaatctaattcaacataatataatacaatacaatacgatctaatacaacgtattaaacgaactgaaggaattatatctggaaata

SEQ ID NO: 257666 - DNA, 648 bp, Cannabis indica
ttaatcacataatcttgattactttccactatgttgacaacacaataatcaaatatatcaatgtgataaggatttggatgaatttataaatcaaacaaatgatcatgaaacaaacatgtgaaccaattaatacattaaacaagtaatgaaataaatctatttctttattgataaatgaatattcaagattatagtgaaatagagttttatttagagcacaaaacccaacaaactgccacttgcactaacataaaacaatcagtaaatttcaattaatcctagattctctctgtgcttttcaaatgtagtaactgcataatcttggtgaatggatcagctaggttgtcttagttatcaacctttccactagtacgtctcctcttaccacatattctgcgatgatgttgtgcttcctctcaatgtgttttctcctcttatggcttcaaggctcttaactattggatatatcactagtgttgtcacaaagtaaaaccaatagttttcctttccaagaacaacaccaagttttgtgaagaactttcttaaccaaaccaattccttagtagcctctgcggctgctatgtattcaacctccatggtagagtttgatattgcagattggttgacacttctccaaataactactcc

SEQ ID NO: 257667 - DNA, 849 bp, Cannabis indica
tatataactagccgtaaatcatttttccttttttaaaaggaagctattccatttagccaaactcaaagattacaaatggaaaggcaagtccaatccaacaaacggactagcaatagaaggtactgtcccaatccaaataggagttactttagcattcagatcaaaaaaaaaaaaaaaagcaaagaagcttcacttaaataattatctaaatttaatttatttattaaaatataatttagataattatttaaaagtataaataaaattaaataatattttttattaattttaattttaatttaaattagacgttaattcaattgattaatcatatttaattaacaattttattagttatattattcaaaatatttagatttatttacttattttattatttaataaagttagttaaatatatttttataaataaatttaaaattaaattaattttaatatatttaaaaaatataattttatattaaatttaatttttattattattatttaaattaataattagataataatggcatgggcaatttggcagtgctgaaatagttatcatttgtccttttcttctcttttacaagttatgtcatctgattataagtataagattcctcttttttaagtcgtttccaagttttcacttagattttgtttttataaattttgttaatagaaaaggctaaaatttattaattaacaacagcttggtagactacgacaaagaaggaaactcctttaatgcaaatagatcttagaaggacaggaccatttagttacaagtcatcaagatttatggtattttaccttatctaatagacacttgtcatggtatatttg

SEQ ID NO: 257668 - DNA, 990 bp, Cannabis indica
ctccttcatggttttcttgagtttgaagttaggaatttgcatgattttaaggatttgagttaagtagctgctgtttgtttttggttttattttcagaagcttatttatgtttggatatgttgatttaagcatgttctgaaggttgttagtaagtttaatcaagttttgagttttagaactcaaacttggagctttaatggtgaaacttgtttctgtgcatgttgaggtattttgttgccttgtttatgttctttgggatatataaaacatgtctggaaggtttggtatgatttggggttgttttgagtgagatatgaaattttcaatctttcttgcactaaaccggaattccggttcagggggacctgtaggaaccgaaattccgattggtccccaggaaacgccgcagaaccggaattccggtttgaaaccggtctaccggttgggacagttttgggaaccctagtttttttccatttttgtgatatttaggttattgccatgttatttatcgataggaaaacttttagtgtcaagtttaagtcccccggaaagtgatttagtgagtcacttatctatgttatggttgatgtgatttaggagcctgtaattcgtcgagtagtttttccactcaggttggcgggcacacctgaattcagaatcgaggtaagattagtataacggtatacatatgcatatacatgtttagtgtgcatgttacttaagcctattagattacattagatatgtatgttggcttttgtactatttgacagtatcacatcggtacacctagagtatgattagcgtaccgagtataggttgatattgtggtcaatagtaccgtaatttttgacagtatcacattggtacagctagagtatgactagtgtaccgagtataggctattactatgtcaaaagtaccatcgtacgaacattctagactcagtaccgtgccggtcacagggatatggttatgattgggggt

SEQ ID NO: 257669 - DNA, 836 bp, Cannabis indica
taatttttttatatatattttttacattttttttagttttacaattttttatttttaattataatttacattcctgtaaaaataacataaaaaaaaaataaactaataagtaaaataaaccaaaaacaatatataaaaacacaaactataattcattaaaatgtttaaaatttcgtacaaccatattgttggtaagtttttttttagtttatctattattatattgatcttatcattagaccaaagtggtgtatcagttatatatactaatcaagatacgtagttgttgttgaaatcgcgttcatattgaactaattaataagctaattaaactaaacccatacgtgtgattatggtgaacacaacaaatggcaattaattagactaacttattttaaataagtcaaaaatattattctttccatatattatctttccgtatagcgtcatcctaattaatcaatagtcgttttcccctacacaaagtatgagaaatgcaaaaaaaaacatctttaatttaatggtgttagttagtgacaaagctagaaaattattttagatacaaggaataaatactataaattaaaaaaataaataattttgtactcaaatatataattttgttattatcctccctaattttaattataaagcataaataattttcctataaaaataatcttttttattactattttcttttgaaaatgattactaaaatatttttacgaacataagttaatattctgtacaattaagttaaattataacaatttttagtaaaataatttatgcaacaatgggaaccaaagaaaaaaaaaacaaaaattaaagaa

SEQ ID NO: 257670 - DNA, 612 bp, Cannabis indica
ataaatagaagaccaacttttatgtaagaaactgtgataatattatcactacaactaagagtgttaattacgacctcacctcttaacagttgaaataattagtttcacccaaaggttaatgtttttctccaaatttagtcttatcaacatgagtggaactcaccaaataaaattttacatgggaaatttcactttaccatgctaaaatcaccaacttctatcaaaacaatccttctcataatacatattagaaatttatatatttcttttcttttttactaaaaatatccctctcattatcttctccttctctttttcttcctcctctctccatactttgaattttgacccatcaggaccagaacctgggactttttaaatatttgatataagcttttgttggggtttggacttaggcctgctttgatttaaggtatagagcccgtttggtgaagaaatgggtcatggatggctttattagagagagatacaatcaggcttacacacaaaggctcatgatcattccattgtgatgtaatatgagctgctaagttgaccatggacttcttacaaaatactgtgaaatgggaaaaaaattacaaaatattgtga

SEQ ID NO: 257671 - DNA, 792 bp, Cannabis indica
gtatttcaaataacaacttgtaacaccataactgtatataaagggccttaaccctacgtgaaatggatctgaattcatttattctacacatgcacttaagacctcagaagtactaaagtattaaattctaatttccttctcatcactttgcaagtctctagtacacattcttctcattataatactgaagagagtcatagatagaaattactaagttttagcctataatctgcatgtttttatttcaagagtgaatacaacaaaaggacagtaggtcattacctcaccaaaggggtagaacctctataaattcttgtatcttttatatttgttatcattcctcacgtaacagtcataaacgaaattagatcctaggtagactctgcgtcagttggctatatttacaatcaatatttttgtaataccctgaaattaagaaatggattagcaaaaccctaattagataattatgaataattgaggaattatattattatatagttcaatatatgtgaaataatatgaattttaatatgttaagaccccgttggtgagccaggggcattttggtaattgtgacccaagaagggtaaattgatgaaattaattgacttacgtgcttaatagaactgtattattatataatatgcatgtgttgtcttttcaggtgtgttttgacaggttagcgcggtatagtcacaaccgagaatttcgggccgaaccgggttcgggctcaaaatgcaaattggattgatttatttggcattttttatttatgggtgataatctgaa

SEQ ID NO: 257672 - DNA, 676 bp, Cannabis indica
cacacgtctcagttggacttctcaaatgctttatgcggagaggcgacgacttgttgtttagccatttctgtggtaattaaattaggtttaaagtttatcattattgagagagactcgagactaactatcaatgctcttaatgggaaggagtcccattgggctcttgagaactatgtctccttttgtatgagattcactcattcttttactagttgtaattttatgaatgttagtagacgttgtaactatgttgcccataatgtggctaagtgggcttttaccctccagaggtttggctatataccggtctcctccttcccggagaacttgctttgtaatgaccatgaggtctaattatgttttccttatctaatgcaatttgacgctaattttcaagaaaaaaaaaaactatggacatttttgttttccgcatatagaaaattataattataatgaaaacttttatttgtactctaaaataaaaatctaaaaatttaaagtaactttattttaataattttatttgtaaaataattctttttcaagagataagttcataaagcattattttttataaaatatttacattttttatatttgaaaaatatatatatttatatatatatttttacgaattttctatagtaacaaacatgaaaatataataaagaaacac

SEQ ID NO: 257673 - DNA, 1449 bp, Cannabis indica
tattttatatgtacaataaaatcaaatgagatatagtggtaaatcattatatgtgtgattgaacgaaattatctcttattttaattcaaagctaaactaataaagttaaaagtgtagttaaaaatagctataatattttaagtgttctaaaattaaaaataaaaatttcttatataaaatagctacataatttttatttttaaatatatataataaaattaaaatttgtttatataaaatatctacataatttttatttttaaatatatataataatataataaaattaataaagaatattttattaagtaataatatattctgttaaagttaatgtaaaaaataaaaaaaaaacattaactaaaaattcgattacataactatattttatataaaacaaatatatttaaatggttaaatatataattctaggaaatactaatgatattaatcgaaaattattgtataacctttttcctcttaaaatattgttgtatgtagctccattaacatgcaattatttacgtagatgcattcaatttgctatcctgaattttgtttgggtgacgtggcacatttctttgggtgacatgaatcatcgtatcaaaactttggcagaagatctagcctcgcaaaatatttgcccaagatatgcattcactcacatgtaataacagatgaaccaagtatagtttgccgcacacgataagcatgagttgatctggtaaaaaaaatggtctgaacatcatactagtcgaccaaggggaaaacgcgtggtagaagacatttaatataggtgacgtttggtaacacttttttaatcagttttttattttaaaataaaaaagtgaaaatatttttaaaaacatgttctataaaactgtttttgcttttcaattttttaagggaaatttgaaattccatgcttaataaaacaaaaaattggtatcctaaactaatactatgtaatatttgtaaaatgggataagtttttctaaaacccaattttacccccacattacattacccccctcccctctctcttcttctcatcccatttccttaacaagccgaactccccttctctcaccataaaattttttcctcttcactcattctcttcattacactatattataagcagccgaactccccttctacctattttctttaaaatttggagggagcatcatacaaggagcaacattgtacaagcaatgggtaattttttttgtttgtgtaatcttgtttgttgttgttatatttagtttagaatgttgttttgatgcttgatctgtggattgttgctgttattttgctgttttttctgttaaaaagtttgctgcctgtgaaaatctggattttttctgggttttctggcattttttttcgtcgggcccgatggggcccgatgctggcccgatgggggtccgataagctgaaaaattt

SEQ ID NO: 257674 - DNA, 1037 bp, Cannabis indica
gatgacgagaaaaatgccctggaaacctttttgagaacttgattgaaaacaacccaggttgataatatgacaacctaggagcttggcccagtgctaggtgtcaacctgggcgccgggtcccagttatagccttttaaaagtttcgtttagttctcgaaaatagttaaatcttaatcttttttgaaaacaaagaagatgcttggaagagttctcacaaaacataatcagaatcggcctaggttgataaaatgtcaacctgggcgctgggccttgcttttggcacccaggaagtgttgtttcttccctgaaagtacctatatccccatttttaaggaagaagaagaagaagatgcaaaagtttaatagttgatctgatacttggaaggtgcccagattgacaaattctcaacctgggcgttgtggtgtcaagcactaggtgctccggtgctgaaaaatgaacttgctccaaatctaattttgatgcctcaaacatgtttgtggtatgtctagttgatgtcccaatgcaatgtttgacccatttgcactaaaatggtcccagaaactgaaaccctagttgaggatgtcaacttgggcactgggtgaaaccctaggtgcccaggttgactttcaggatgtaggttcatgtaatttcagctctcagggcctggacttgatttctctatatcttcatggtatagaataatgaacaatagtgagttggaagtgagttattgaagtctaaacttccacctcgaagttcctaaagtcaacctgggcgtagggctagggacccctctcaagccgacttgcaatgaatcgggactactcaacttcaatatgtcatctttcttgccacgtgcaaaacattgatgtccatgttattagggctactcttggtgtaaacatttacccccaaagtcaactttatatttgtgtgagattgactcaatgacgtgaactaagcccgtttctctcgaaactaccaggcaggaatcaattttgacagtcttggataattgtttttgttcttcaagcat

SEQ ID NO: 257675 - DNA, 1161 bp, Cannabis indica
caagtgcggattggattagattgaatcatgcggattggattggatcgactattttatgaacacccctaaaaaaattataatcactccataagtatatataaatatatccaaaaaaaaaaaaaagcaagtcaaaggcaaaaataactctccactgtatatttattatttaggagttgagtaaagtagggttataaatagcttgagttccacgaatgcaaggccccttctttctcatcatgtccatcaccagatcattgttcttttgcttcgtacacaggccaggactctcttaattttgttggccccatagcaaacattttaaattaaattcaaaatatgtatacacttttttgtatttaatttttgtcctctccattttccattaccataattacattatttttcagttcatatttgttatttttacatttcatccaaatattatttggcaaaaagtgaaagactagctagtaacaacaacaatttatgtagttactttgcaggcctatgggctggcagtgctaatactcaaccacataaaaatcagataagctacagtagtattaattaatataatataataaggtcttctcactataacttttacagcaaataaaaatattatctcaacaaaagaaaagtgagagcaataaaatgatgatgagacttgagagttggtgaaggagagcaattgtgtagagtaagtaaggtggcatatggcctatcaaaactggttattaataattaaaaaaaattaatatattaattagaaataaaataaaattttaatttgatgcaggagaggaagactctataaggttgatgattaattgtcttctaccgattagccaccatgaccccatcccacgacatatttttatttttctttttgtataaaaaatggtaattaaatactgtgagacaaagaagaatatatatttccttgaattctatattaactttttgggttacaataacatttctttggttcaattcatgaggatagaaaataatgggatgtagggaagggaggtgatgtgtgagtacgtacacataaagggtgaagttgaattcttccattccatttgtgtatagattaaagtggtttgttgttgggctttacagagaccacatgatgaaaagaagaggtgttcagtttac

SEQ ID NO: 257676 - DNA, 1141 bp, Cannabis indica
aaagaatataatattactgaagtcatacaatatacatttagtttagtgattgtaagaaaaacaaaaatataagaaagtaaagtacgaattcgagtcttgatatgtaaatagggtgatatgagcaaaatacggtacgaatttgagaacaacacaaaaatattggatttacgaggcgtgttgggtttaccctttaaaaatattagcctaaaatgacataacccgtattttaaaaagtatggacaaatatgggtcggactagcacgacatgctcaaatttatagcattattcatgggttgtgtttgtgtcgtggagacttaagtataacaagcaatgtcacactcaaaattgactcatttattaaaaatgaatcgtgttaaaaactaaaatccaaacccgacccaacccaactcgtttataaagaggttgatatgaccctacccgtaaaagtttaccaaacaaaatggatttattttaaatttactcatttttatgtgttttttttttcataattctaaaaacattatataaaagattcaaataactataaaattgggaaaaaaaaaggtaacaaaaacattatataatttttttttccttaaaaaatgggtaactatctattaataacaaaattaattgtcagtaaacagtaataacaaaatccaacatattttgagattctccgacattatctttcaagttagcagccttttatggttagggtaagtacataaaatttctaaaaaaaagtacataaaaattaattatttatcagaaaataggagagagggttttggggtgataaagtttgaccaatcacgcacggttgtggtgagtgaataaaaatgcgagcagttcttattctgtgggcgcctccaggagatgtacacacagaaacgtggccaatcgaacaaccaaagcttagagtcaacatcgaagaaagagccctgggtcttgcccttaatgttttaatcacgtataatattattcgatattcgaaatataaatctttttttctttttccttttttcgtagtcctcagaaaaaaaaaaaaaaactcgaaccgcttggaacataaaaggcgagacacgcacgatgcggaaattcgcagctggcaggcttaaaaacgctctcacccgttat

SEQ ID NO: 257677 - DNA, 1237 bp, Cannabis indica
acatagaagtgaaatgatgatgttgttgaaggaatttttacaacatcaaaaaaatagataataataataataataaatccataataagtgcgagtactcgacccaaaatggtgagtattcaaatcaggaacaaaaatacttagcaaaagactggaaaaataaagaacacaagagaaatataccggttcagtcaggtctcggtctccttagtctactattgcaaagattctgtccctttttatttcacggcggatcactcctttatatataaagtaaatgtcctatcatttacacaagaattgcattcattatcaatcgctttatacatttatttacaataattaagctaaaaaacgtaaacataataaatgaagaatagtttccaatttaattcactaaatacaacaacatatgcaacttctctagtgcgagtcgattgttcatattcttgcataagctcgtaggcttaagatgcattcaagactagttgagtccaggatgtctgcgtccttataaattcgcttttacggacgtcatataacgagctgatagaaccaggacatgcgagtctatatcggtttatcgaggttgttgggtcattggtcgcagctcgcaacataaagaatcgatctctatgtttttgcaggaggatcatggggatactcgcatatatcttgatatatgcgagttaaatccgttacttggtcctacataatgcgagtcattcgaatgcgattagacttggtcatatccgcatcatctcactgactctagtttaggcgaggtttgtactcgaggagtctctcattgacatctcagctttccttggggaaattgagtagacatgtccttcaaacaggagtctggtctcgagtttctagatgagaaaaatctcactataacacttgcccctagttttgcgattgacagatgcggtcatgagggaaactataattgagaggcaggcgaagagatgtcacgaggtggtgacctttggttgtcccatcgagggtttcaaaaaatgacggctgtaattatcacattttatcctacctatggtgcaacgtcacgaaactcttcgattttcgtgtaggcatgcccatggttaactgttggatgggatgaccttaggcattctcattgccacgtgtcacaatcccaattaatgtgggtcattggtatttaaactccctgatacgaaatgattcccttattttccctctcattttcattttcc

SEQ ID NO: 257678 - DNA, 882 bp, Cannabis indica
ttttgttttttgttttttaaatttttgccgtttaatattatagtataaatttttgctgatatatggtgtcagtttttaccattattctcaaaatgttcttagtttataattggatttgtttcactgcaggagcttaatgcaatttgcgagagcaattatcagcagaagacgaagaagagatcttagcagaatttgagagcttagaaattgaggttagtgtgtttctctttttgacagattgtatagctaaaattaaacgttcatccacttattttttgttaaactaatattgcttgatttaaactaagaagtgtgcctcttgctcaggtagagattaccatacattttctctcttcaattcgtattataactataattttatttttattttatgtatgttgatgtgtgaggcttactttcaatggtattcacctaaatgttcatctataatttcaatgcaggctataaaaatactaaacgatgaaatgcagttggatgtcatcaagattggaaatttggttcgggttaaagtgcgcaatccgtatgtttaaaatacgttataaaagatgaccttctttgaaatcctaaagaaacaggtattgtagtaatgtgtgagtgtgtgcgtgtgctttaaataaaataaaatagatgggagaacactgcaaatcgctcgcagttgggacgaaggtgctactcctcttaaagatatatttaaggtcttttgggttctattgtttttatttattatggtttttatttatcaactcttttgatttcgtaactaattttggtatagtttttattcactaattttggtatggttattatttttcaactctttttatttcttcttcatcattcatttggatgtgagcaggagaa

SEQ ID NO: 257679 - DNA, 959 bp, Cannabis indica
tcagcatgatccaatcttatccagtttagtctaatcatttccagttcagtcctgcgtaccaaacgggcccttatagtattgtattggattgtattatattatattagtattatttgatacaatggtatatttgatattaacttgtactaataggttgtgtaaaattataaattaccactaccaatttataacctcatagctagattattaattttaagtatttctaattagcccttcaataaattagaaatatcacttagagtatctacacatttagcctatgacactttaatacccaatgactcacaattactaaaatgatcactttattttagtcaaactttatatagtaatacacataaatacatatgagctcacgttagatatttttatcctacattcctcttggcattttttttaagatattgtttggctaaatttttatttttacttatagttagaagtataagataagtataaatttgaatttattttatgtagatttttttaataaaaaatatttttcaaagtgtttaaatatcactcaatttttttacgaataaattaagaattatttaaattgttttaatttaaaaaatagtttttatttaagttttttttaggctaattaagatttttgccccttaaattttgacatgtatcaaatcatgccctctgaacgttaaaaatgcccctgaactattcagatggttggatttaaggattttttttccaattttaattaaaaaagtctaatatagatgaaaattcacgggacatgatttagtatatgccaaagttcgagggacataatttggtacataaacaatcagtgaaataattaaattaaatgaaattggacaaaaaattcttaaatctaaaaatctcaataacgaccagaaaagtacagaagacataatttattgtatgttaaagtttaggagtaaaaatcctaatta

SEQ ID NO: 257680 - DNA, 1009 bp, Cannabis indica
ttaaaaagataaaacattgaaatggagttttatatagggcataaaactcaacaatacccagtaattccaacaaggttaatgatgtcggtcagcacattggccaaaccaatcaggctctgagacaagcaggcgtttccgtatttgataggttgaacacgactcatgatctcagaaatgatctgaacaggaggagaggagtggacgatgagcttgacacgccaatcgtgcaacccggaacccgcactcaaaaagatgctgatgtgactcagatcggcaaagaggccgaataggttagtccagccgtgcaggcacagttggacgaactaaaaatatgttccaaggcttggtcggtcagaggaacaacaatctcgaattggaccaagcacgtggaacccctttctccccagagattaatatcctggagttgccccacaaatttaagatgccaacctggaagatatatactgggaaggaagatcccttatcccaccttaagtattttgagatgcaaatggacctggaaggagtatgacgagatgtatgttgcagagtttttcctgccaccctttcagaagccgcccaacagtggtatttcaagtttgcacccagaaagttcaactcatggaagtctttctcctcgaagttccatgcacaattctcctcctctggccaacttccattgcacctaggagatctggccgaagtaaaccaaagactaggagagcctctccgagcctacatcagcagacggaggcgactaaggtttctcgggtaactgaggatagaaagttgtccgcaatactagggggcattgaagtccttggtgagctttggaaggacatatgaagaacggacaagtagactcgatgagtgattttcttgacagtgtggaaggttttatcaaacttgaagaggccattcagcgatcagaaggtgaacaaaaacctggtaagtcaaaagctccttctatcgagacatccatctagctcccccattacccaagcaattc

SEQ ID NO: 257681 - DNA, 1020 bp, Cannabis indica
cctcataagagatcataatattgacagaaatcaaccgtcctggcaaaaaagcactctggtttgtagatatgacacttggcaatacaactttaagcgtatttgcaatcaccttggaaacaaccttataaaggacattacaaagcgatataggccgaagatcacccatttgttcaggactcttcttcttagggataagaacaatattagtctcattcaaaactgaagggaactcaccagtaatgaagaaagcttgaaccagccgcaccacattgtcgcctaccaagttccaaattttttgataaaatcttggtgtcattccgtcgggtcctggagacttatctggatgcatttggaacaatgtcgtcttaatctccttacgagtcacctcctcaagcagcacagcattttggtcatcagtgaccgtttgggaaacacaattgatgactgtagaaaaatcaccaacgacatgtgtgaacaaatgctgaaaatagtccaccaccaccgtaggaagtccatcatcccagccaacccagtcgccattagaattcttcagcttctggattaagtttgatcgtcttcgagatgttgctttggcatggaagtacttggaattgcgatcaccctctcgcagccacaactgcttgcttctctgcttccaaaagacttctctttgcaaatagagattatttaacttcaactcagcagctttgtaacaagctacagaattagagtcccttcctttcttccaattctttatctcggctttgcagtcttttattcttttgccaaagttgccagtatagtctcttccccaatcaagcaaagcattaccacaatcacgaattttctcggtaataggaagaccattagacaaatcccagctatcttcaacaactttaaaacatggtggctccttcaaccaagaattttcgaacctaaaagttctctttgacacttgcattgtttcggctacagggaccaaatgaagatggcaataatccgaagtggacacctccatat

SEQ ID NO: 257682 - DNA, 795 bp, Cannabis indica
aaatatctaaaattcttatgtatgccaaaaataatttgtaaatcaaataaaaaataataatttaacatatatatttaagaaaaatttatactaggctccactttacttttattagttggcgtctccatcttttacatttagagaaattataattttgtatctaattctatattttaatttataacatatatttttatttagtttaaattttacactatattaaataacatatagtattatagtaaaaaaaagtatatacattatatttataaaatataaaatctaaaattatatttatattattacaaaaattacgcgaagaatgagtatatttccttgtaatagtaaagtttagttgcttggatattcacattttattcatgaagtattcattagttaatgatatttcatctcatatgaaaatgaaatgaatatctataaagccaactatgcatgacgaaaatcaaatttataacattgaattatagtgtggtggcaggcaatatggcattgatatatccacccgtttttttctcccttcttcttcttcttcttttgggttcttcattattactctactattttaaattgaactacatttaattatttatcattaaatagctacagaattatctagaggtgtttgcggtgcagatagtgcggttttttactatttttaaactaatttgcacatgcagtttttccaattttctaaaccgcccgcaccacaaaactaagaaaccacaaaaactgcaccgcaaaaaatagtatagtgcggtacggtttttacagttt

SEQ ID NO: 257683 - DNA, 1074 bp, Cannabis indica
gacaagatcattctctgccaagagtcaatatgcctatatccacttgaaagtaggatcatctatattcgaaaatatggatgtacattctggggtggatatgagttatcgttaaattcttaagacgatcactttagattttaccttatgcaaagaaatttgaaatgtttgagaaatttcatgaatttctatcaatggtgaaactatcaaggtaagtggttaaagatcttgcaaactaataggggtggaaaaatatttgctggatatgcagttcaaagatcattaagttgaatttttaattgtatcaaaacttacctccctagaaatttggattgcatattgatgaaagtaaaaagttatgattagttattagcgatttcctaagtccttctattgatgtaccccggtgataggaaaatttcagaatgatggaatggttgtgtacttaaagtaaaccattactagattcatggatgtcctgatcgtgagcttaagcaagctaaaactgttaactaaggttttcatgtttgatagctattctaagtgattaggggtggaccattctatggtgattaagataagaaagtgtttgtttcaacaaatactacttgtctaagaatatgactaaatctgaaaacaaagtagcaaagtagggaagatatttttatcttgatactaaattgttctatcatcttattctatataagatgatcccactgcctctattgtattgacacaaccgatgaggacaataccatttagtgttcttagacagaaagtcatggtaccttgtcgtattgggaggatttcaaggaactcaccttgttatgagttgggacactcttttgattaaaatccattgttagtttaaacaagtaatggatagtcagaataaggaactaagaagcaaagccaagagaactatggttaaaaccattcacatggattaacctaaaagttttctattacaagaacaagaaaggaaattttaaaataagtctattcaatggactcaaaaaaaacttctcgttcctagtattataataggtttgagtttatctaaacctatggcttgtg

SEQ ID NO: 257684 - DNA, 751 bp, Cannabis indica
agaagtcttctttaaactatgtcttatttggcaacctagctatgatcttgcgatcgttcgtgtgggtgtcgagatagtaaaagcctcctgcaactcgcttccttgcaggaaccacctttattgagtaaaaatagactatttccaagggagtagggcactcccatcctaaaatatggtatatgacctcaagcgcgcgaggatcctatatgagatggggttcaactggaaggggcaaccccaagatagttgcaaaactccttaaagtaatccctaaggggaagaaccgccccagccttgatgttcttgaagctctaggcaccaatgcccgaggaattgctcgtgctgggtccactgcactcctcgcgaattaccttttctagaggaaaacaactgaatttcccataagccacggaccttatgatgcaaccgttttctctgcttgataccacatgattttagtatgctgccaacgtaggccccaatcgacctaaccttggactcgatgagttcagcctcgaaggtgacactaggatcatgtgggtctttgatttacgaggcttaggagacataatgtcaaactcaaggtcacctggttcaaaagcaacagtgactttgggtaaaaataatgatctcacgagtggaatagaagatgatattgtgggttcaggtcaggctgcgtctcacaaaaaaggacatttgccctccaaaacctcttgtagaaatcgcctagaacgactggaaacttcttcct

SEQ ID NO: 257685 - DNA, 1185 bp, Cannabis indica
aaaaaatatatgaattttggtgtagttttcaaaagttgatttgaaccattagattaaatcaagggctataaatcaatatccctattgataggtaaaatacccaatccctaccataatagcccctttttaaaaatattaagacattagatttttatccgatggcgaataatacagaatacttcttaatgggtattacccattgatggttactaaataagtttaactataaatattaattttaaaaatattaagccattagattttttatccgatgacagaatgctttatttaaaaataccataaagaaaaaagctccttctctctcggttcttgcagctctctctgagctggtgcgatggctaaaacaaggtctaagatgcaggggaagcttcaatcgactgtgaaatcgaatgcgaaaaagaagaaaaaaggtccttcgtcgtccattgatataaggaaaactaagtcaatggataaggttttgggaattgaaccaatagatttctcggatgaggaagaagattgtactctgaaatctccacaagccaaatcgacttcgcaggttgttttcaggaggctctatcgcccagaacctctttgaacacaattctgcagaacgaagaggttgtgcgggatttcaatttcttcatggaggctaatcgtaggtgttctaaagagatgaaaagaggagttcatgtaactcccccaattctgcgatctgggaatgttgtaagaaacctctcaacaaccttcgaacataccaacaataccagtcaggtgaagatactctagatgatattcatgaggaggtgaattctggaactcatctcttgtatgctatatactaggtgctaatcctcccttaaatgtgattgatggttttgtgagacgattgtggaaggataaaatagataaggttggaatgctctcttatggaattttcttaatcagatttcatgatgtggttgatagagatgtagtgttgaatggggggtatatatttttcaataagaggccagttataatgaaagcttgggatccaaatgttgatttcaaaaaggaagatgtgagtagggtgccagtttggataacaatggatgatttagagttgaaatattgggggaaaaggtccttgttcaaaattgttgggcagattggggaaccattaatggttgatgctgtcac

SEQ ID NO: 257686 - DNA, 1334 bp, Cannabis indica
ttggtaaattataatttttaaagtgctgtgagttgttaagattctattacaataatgataatattttaatctagttcattataattacaaatatatataaaaaaatatgttatataaattttttatttttttatatatttttaattatttttttctatagtataaatttatatgcatttgataaaataatttttaatatttttaaattatatttttatcacttgcaaaagataaaattgtagtttataagaaacataaattgatattatttgttaataataaaaatataaatataaaatattttttaaaataaaataaaaaattagaaatttaaatattatttatttttaaatattttttcatttaaaaaatattttattttttataatatataataaataattaaataatttttagtaaaaataatttattataaagtcttttaatcaaaacagctttttctaaaagttgggttgtaccagctttagcttttagctgtagcttttccataatttcttcaataagctgttttttaactgcttaccaaacacctttttgtcacagcttttttgaaaagcagcttttagcttttccaaaagctgtgccaaacgggccctaaatagtcgagtaaagtattcctatcggtaacgcctattcgacagtcgcaaaattagatagaataggcgtcggtgaaaaaatgtcaaaaaaactttttacaaaaaaaaataataataattaatttagagttgtatactattagagtattttttgtatgaaaatgtgtcaaatcttacgaggatataaaagaaaattaaaaagtaatattttagaatgatgcatatattttgtaacgatagtgccccattattttattttttttgataaaggaaacttttattgaagaggaaaaaacctcagaaaataaagttcatagtggcaacaaagggtgccacttccctatccgaaaaagctctaaaacaactgaaattggcagcccaagccgcaaggtcatgagctgcaacattcagtctgcgagggatccaaaccagaccagaattaggggctgtcgacatggcctgcaaagaccgatcaaagcagcatctaacagtccaatccgggcatctcttggccttcaaaccagcaacagcaacttgacagtccgagagcaccaaggaattcgcccagttgcgtcgagcactcaaagcacacgcctcacggatggctaccagttcagcctccaaggccgaaccgacttcatgtctcacggtcgcagcctccaccacctggcccgtcaaattaaacacaatcaaggccacaatccccgatcggcctcg

SEQ ID NO: 257687 - DNA, 1362 bp, Cannabis indica
gatgtgcttttttttttttttgctgaatttaaaagttaataaagtttgattactttcttcaaaaaaaaatcaagtacgttctaatatatgttgttactatatataattaatggttttcttaattatttttaaattattctttctattttaccacattttgcactctcttaaatttttgctacatgaaaatcaaatttttaattaatcaaactataatgatatccacatgaatgatgaaagatcactaaaaataaaattttcaaattttattgtagagcataaaaactcaaattttgcaataaatttgttgagtactgtttactaaatgtttatataatacctatttatttatagttttagggctcgtttgatcggctgtataaagattgtttaatattaaataaaaattaacactatacatgaataaaattttgtattgtattaattattatacgaccatacattttaaagcaatgtgaatcgtattttttttttttgtgattgataaatcaaaaatattttattgattccaccttgaatcatattatttaataacaaatgatcgtattagcttgtattataatatctccaacttagactctgacccaaacccgacctagaccggagccttaaactcgtcttgagacctagatgttggaacttattttactaggatctaaatttactaatatgtatgtttgattataatctataaactaacatcctaaatatgaatctaaaacaataaaataaacatatataaaattgtagaaaatcttacattggtggcagcagaatttatggttcattccgttcagatctctaacccttgttccaatctatcacagactattgccaagatttgaacttagatcttcttttgtgatagaatttgttaggttatttttagtattaaatttagattcattttagtatatttttaattagttttaaattgtgtttggagcatttttatgcttgttatcttttatttgtccagatttaaaataagaagattagaaaatatcagaggaaaaagatgggaaaaaaagataaaaatatctcacaaaaagatgatatttaaaatagagaaaattatgcaaaagataaagctaaaacttacaagcctgaattcgactatcttctgattagattttgaaaaaggtcgaaaaataaaagttctagatctctcttttatcttttcggaacatcttgcatcatccaattccgagagagttatggcctaaatactatcagtcgacgcagtagaaaattataccgtcgaactccaacatgggccgcggcccagcccttttggggtcgcggcccgccctcctaaatagcacaattgacactcacttc

SEQ ID NO: 257688 - DNA, 1283 bp, Cannabis indica
actaaaatacatcacttcctccttagtgaagagattaaccttgaacaatagtatagacaaataccttccttagaggacaaaataaagtcgtcctgaggccagtctatactccttcagtgataattaataatggagaccgtaggttacattgacatgtactccttcttcgactcactattttaggttaatgtattttatacattaattctcaaaattaatacatattaatccctttaataattataattaatttatttataataaaaacctcaaattataaaaatttcacatcacaattattaaattaaaattaaatcactttttagctttataatttaaaactatattaaattaaataggttgattttaaattactaagttaattctaaattaatcttagccaatttacatgctttcggtttctaaaacaataaatatataaacacataggacaatcttaatatatcacatttctactatgaaatgcatgataataaaactgtgtgggatttctatgtatgagatgttattcactaatgcatgatcatgttattaatgaattattaatgatcatttatttaaaaataataaataaacaatgatgatgaactgagtaaaatattagatatttctaattttacaactcttgaaaaaaattagaaaataaattaccaaactaatgttcatcgctgcaagggtattttgtaattttatagaattaccgtaagcctcaaattaattaaaaaaaattaattaattattctgaaataaactatttatttaagacaattcttaaacccttaaattaattaaaataattttaattaatttattctaaaataaatttttagaatgacaatttaattatcatttatattttgtcttaaataattattttaattaggattaagacaacatttgtcttaagttggttatggattttgaatttaaatttcaaatctaaaactaagtaatatttatttataatttaaattaatttgaaaaataatatcctcaaaatataatttaatcaacaaataaatgataataatctatattacatatacagtgtatatatgcaccatatattatatactttatatacattatatatactataaatatatgtatgcatatacacatatatatttatatgggctatttataaaaatatgggaaaataaagataagttttgatatatatggcataaaaacttaattacactaaatatggcatttttttaaaaaacttacaaatatgggaaaaagtcttgagtaatgcc

SEQ ID NO: 257689 - DNA, 1806 bp, Cannabis indica
taatatgagctatatatgtggaacacaaatatttttaggtttgcacaactttggagactcgatcgagggccaaaaatgtcacaacgggtgtaattattagttttgatgggaaaattgtgataagtggataatataggtattgggggtacttaagagtatatatgatttaacttagcgctctaaaagtaaaaagttctgagtggctaaaaaataataagataatcgttaataaattcttttattaatatcattatattatcattattaatcttactgttattattaataataataatattcttaatatattatattatattattatataaatattaatatcattaatatatcatatataaatgtaacagtttatatataataaatttataaataaaatttacaaacgaaacaaaacttttgtttttcgtcaaaactctctcactttcatatttattttctttgatttgaatccgaaacttaacaatctaatttcaagtagtagcgagatagcaaattctcaaagcgggaaagcttaaagtaaggtttaattcaatttttagttttaaataattagtttcgtatacggcttttgtaaattataatagttattaaagttttgacattatagacttgttctcgtgtagtcatggaactagtttcgatatttacttgttgaatttgaggtggatttgagtttaaaaattgagtttgtaattttttaaagctattaggtccgagctttaatgacgttttccgtttaagggctcgattttaatttcagttacgtaaggattatcttatatatattatatatatatgtcctgtgaagtttggaatgatttggttaggtttgaagctagtttggagggtttaaatataaggaaaatcgtgttcttggctgttgagaaccggaattccagatgtactaaccagaattccgtatggtcagtttttgaaagtcgaattttgtattttggccataactttttactcgggtgtccgttttggacgttctatataccgtttcaaaccttgtgacgagctctatgatatggtgtattttttagagacaaaatataagtttcattttagtgaacttttacctcaaggtttggtaggaaaccctaggtattcctttacaattattattgcattcttgctgagtccttgtgactcacgaatgctatgtggagcagataagggcaaggaaaagttagagcttccatgaggtgactaccttctccaagaatgtacatattgaccccactagcctgtgtgcggagttgccaaaaattgttttgggctggttgtatctgttgtattttgggatctccggaacacatttttactgtcgttataatgtctgtttttagtgttttattttagtcaagtctttaatattctcacaacttttaaaaaaaaattaattaatatattaatcttaatatagtttatacaattacacgtggcttccttatagattagggcgttacaaattaatacttattagcaataaaataaataaaagaagtatttaggttgtgaatttactttttgttaatagtaattattagaaatatattaaatttttttctcctcctaacaaattattttttggcaacttctttttgtctgtgactaatcgacacaattgagtgttcaatttcctcgattcagaactggtaattaattgaggaactgattgccccgattaggtgttgaccaactgacaggaaataatcattttagggctcgtttagtacgccttataagggtcgtattgcaataaataataaataatactat

SEQ ID NO: 257690 - DNA, 700 bp, Cannabis indica
gcgcataaaggggaagggaagaaagtgaaagagagagagagatgaagctaaatatgaataaattgaagacgctttgtatcctttctagataagaaaagataaaaaaaaaatacacatatctaccacacttggcattaaagagttgacgcgtggagcaaaaataaacttatgtgaagagtatcttttctagaaaggaagcccaagcatgcaacaacttatcacacctgtccttgaatagttgacaactgttatcttattataagaagaagggttatatttgtaaattgactataaaaagcccaaagaattattctattttttataaaggtttatagatgtacaacgttaattcttaggttaattgtttattatttttataatgtcttttgttgatttttgtgtaaaattgtatacatatagaatataatatatatatatacataatattttattattttttattattaatatattattttaataatgagagaaatttaaaatcgtggtttatggtataatgtaagagtgtgaggtgcaatttaataaaaaagaaaaaaaaaagttttaataaggtaatattttaaagaataaggtagaaaagagtacaaattaatatgatataggataatgcttaggtagagaccaaaaaaaaaaatatctgtatgacatttttttttttattatgtgtcactcccatatt

SEQ ID NO: 257691 - DNA, 889 bp, Cannabis indica
cgggcccgcggtctccacgggaacgttaaacgaagggatcatggcgaaactcgccatacttcgaaaagatatcgcccgagtctcccggagatagaaaggcaatgactccgactcagactgtgaggaccgggagccgtgtgccaagcacatcctggaggtagagctccccaagaattttaagatgcctgaaatggcactactacaaatatgggattcagtgacccattttgagagactctaaaaatatttagtgacacttcaatgcgtgtcactaatgtgggtgtcaggaaaagtaatatttagtgactatctgaagcatgtcactaaaacattttagactccctcattgcatgtcactatagactttcggcgcgtcactgtttgtattttttatatattttttatttatatttctgataacaacccacgctcaaagagtgtcactatatcatattttttaaaattaaaaaaaaaataaataaatatacattatatatcagatttcctattttcaaaatatatatatcaaatttaatttatttttattttcaattaaaaaaacaaaacataatctttcaaaaaaaaaaaaaaacaaaacataaaactacagaaaaaaaaaataaagcattatatattgggcaaaatttgatatatacattatatatatttacattcaacaacaaaagaagaattaaaccaataaaaatctgaaatacaagcaccaaattaaaattttttccataatattcatcaaacattgagtatgaacaatatataccatacaaaaaaatttgaccataaatacttaaaacatatgaacactaaaataaaaataaaaacccagaaatgggcatgaagacatctagatattagaaacctaaacaaaaaa

SEQ ID NO: 257692 - DNA, 900 bp, Cannabis indica
ttacttaaacaatttttttttcctctaatcataaatttccctcttttttttttcatctgtaaggaaaaaaaaagttcactcttttgataaaagggcgggatagaatcaacattttcctacccactttcccggaaaatggtaccgacgaaaggccagtaaatgggtagccactgccacaccaaggtaaccaaaatctctctcaacatttcccatttttgtttgtttgtttgttgttgtccatttttgcagaccctacttcactttctctatcagggtacaaaaatcttggaccatgttgttttccgacttttcaaaattgcatgaattgaaaagggttttgtttatcaaagctattatgtattgaaggggttgatttggtttcttggattaaaaaggagactgaataccgaatacccatttcttgtatttgatttgggttcaaagatgacttttttcttgtattaaagtgtttgtttatgttataagggttataaagtttcagttgcatttgcatgcatagtctggtgatcaaagttttcttcttaaaaaaaaaaaagaaaaggtctttagataagatcatattaaactatttgattttgatcctatggttattatggaaaatttgagtttttatgattaatttagcttcttaattaaaaatctctcttttaacactatatgaaaaatatgtttatatcgaaaatatctaactgtatctcaacttttgttatctctctcaagtgattgaacaacaaccttaatcatataatagccaattcaatgtaaaaatgagtgatattttttaattagatagcaaatttcggtatagatacttacatttcgtaataatatctattcatgggtaatacccatcaaaagtgaactcatatattatcaaga

SEQ ID NO: 257693 - DNA, 1119 bp, Cannabis indica
gtttcttggtcctttagcaaaccacttcaattcatctggcacagttttggttatatgctcattttcaaccttttttttaaccaaagaaaaaagttttatgatgttcatcttgtacccacttgtccctccttgttgtgttgacactcctcaagtgctgaaggtgttcactatataccatacaataaagttattactgatttcatgtttacattactctcaatatagtgctcactcaatgtaaggttgcaccaacgacgttttgtctatcacatttatgtgtgccaaataaatttcttcatcatttgttaaggtaggagttccagcaccgactcctttactagtgttttcatcagatattggttttgggataccaattgcatcaatatgactaacatattcagagaaaaactcagcaacctcttctgcaatgtaacattcaactatacaaccttccggcctactatgattttgaacatatccctttaatatattcatatatctctcaaatccgtacatccacctcatatacactgacccacctaactcaacttccctaactatatgcactgtaagatgaagcattatatcgaaaaaagatggagggaaaaattgctcaagcaagcataatgtaaactcaatttcagtttgtaatcgcttcaaagaggatacatcgatagttttggcacaaattggattaaaaaacaaagtctggtgattgcagctttaacatgagtttgagatgttccccgaatagcaatatggagtaattgttgcattaaagcgtgacaatcatgagacttaagcccaataagtcttaaatctttcattgacaccaagttgcgaatattggatgaataactatacaggacttttacattggccaaaatcgcacacacttgatgtttttcatcttttgtaagattaaaacaagcagctggtaataactttctcctttcaccaactttaacaagaggagctaaagccgttctaattcccatttccaatagatcttgtcgtgctgcaaaactatcctttgtctttcctggaacgttaagaaaagtttcaattatgctttcacaaacatttttctcaatgtgcatgacatcgagattatgccgc

SEQ ID NO: 257694 - DNA, 1103 bp, Cannabis indica
tccatattactcctataataacaagtagtaattttttatttattattattttgtttggatatatatatatatgatattactacatatctaataaattagtcttttaacatgaaaaattagtataattttattttacttagcatttgattgcctaataatatcgttttgattttttgtttatatttatgttatctattacttgttagtatatataaagttttaaacatatataaattaacatatacaatttcaaaatatataccgaatagtatcttttacttgttaatattttataattttaaatttataccaattaatatataatttaaactatttataatttattaggatctattcaattttaaatatataccaattagttgtttcgattttaaacgtaatacctaatagtacctattacttatttttctctatatatacagttttaaatatagactaattagtatgtatattttcaaatgtatacctagttgtatctattattttttagtatctatataattttaaatgtgtactaattagtatgtacaatttcaaacatagtattaattacttcttacttgttaacaatagtagctattatatattcttaacatatactaattagtatatatagtatatattatttgttagtattgtttttgttatttgttaataatatttattaatatatctaccaaatgagaatataaaagtgtaaaaaatataataagaaatgaatattatatttcacatactgtaaaataaataaataaataaataaacattgaaagttatttatttcaaaaaaaaattaatgtagaaaaaataaataataatataaataataagaaaataaaataaaggttatatttatatagaaaagcatatttatgttatatatatttataataaaaaattacataaaagaataagttatatatatatttatatgtaaatgcatatttatattatacctttaaatatttttagaaaataaaataaaatttttaaaggaaatatataagggataatttcacaaatgcacaaaaataacaaaaaaataacaaaaatactttgttcatttgttgttaattttttgt

SEQ ID NO: 257695 - DNA, 711 bp, Cannabis indica
aggataaggtcgccatttcttattctcaccttgaccgctattctagccaccttggaacctatttgttcttcgccataattggcgattcatttagtttttgctccctgatctactcgtaagttagttccataagtttcaccacatccagtggcacttgaggcagtatcagtggtacaagaatagacacaagacgggcctattattctctcagatcttggatctgttttccccttattgtctaatcatatccttcagagaagaatttacatacttccatcacagcaataaaggattctcttccttacagtttgccttgagcccaaacaactcagtaatcaggctattcgattgctgttacacttacagcataacttatcacacatttactctacatcttcaaagcaattagaaatcagatagatatcaacatcaatatgtagataccatacacatattcttatcataatcatcactatactacttttcccaacatactttataatagtctaggtaggtaatccaataacaaataacataaatacttactataccataagtcgacctgtcttcgtagcaaatgtacatattcaaccagtcttcaggaccattaagaccatggctgctgtgataccaagttgtaacgccctaatttaaaggaacactacgtgtgtgattttataaaatagtttaatactaatagaataattaatt

SEQ ID NO: 257696 - DNA, 1352 bp, Cannabis indica
gagcctaaggatcacaaaaggttcaatgcttgtatgaaaggaaagagagtacatgggctatatgtactcgagcatgaaactgtacctgtgggtgaggcagatacagtaaaaggcttagaaagtgatatgcagctatggcatcaaaggctcagacatatgagtgaacaaggcatgagggaattgcacataaagggagtcattgaaatgcttcagacatgtgcattaccattctgtgagacttatgtttatggcaagcaacacaagatcaagtttacaacaacgactcacaacacaaagggagtcctagagtatgttcatgctgacctttgggggccaagtagaatcccaacacattcaggtaaatactacttcctatctattgttgatgattttagtagatgtgtttggacctatttacttaaaaccaaagatgagtgtctagaacaatttaagatatggaaagctttagtggaaaacaaaacaaattcaaaggtcaaggcacttagaaccgataatggtctagaattcatcaatactgagtttgatagattgtgtaatgagcatgggataactaggcataggacagttgtgaaaactccacaacagaatggagttgctgagcgtatgaatagaacccttttgaacaaagtgagatgtttacttcttagtttggggttgggaaagccttattggggagaggctttagctactgcttgttaccttgttaataggagtcctaatagagtcatagacttgaagacaccttatgagatgtggtatgggaagataccaaacctgaaacacttgagagtgtttggatgtgcagcatatgtacatcaacctgatgataagcttgatgctagatctgtcaaaggcatgtttctaggatatcctataggcacaaaaggttatagaatctgcataaaccagaatgggaagcctaaggtgattatttctagaaatgttgtgtttaatgaaaatgattttcctcacttgaaagctgagaaaggcaatgtgttacctgatgcagattcatctggcaagagggaagatttggcagagtttgaaattgagctcaaaggatttgaacgagtaagtgagaagaatgacagtacagacacagctccagatgaggctgaggaacaaccagatttgtctgacttccagcttgctagagatagaactagaagagaaatccacatacaaacaaagtttgcaaaagctgatctgattgcctatgctttgtcaatagatcattcctgtgacatactagaatcattgagtatagaagcggctttaaatggaaagtacaagaaggagtggtctcgggatgtggatgatgaattaagctc

SEQ ID NO: 257697 - DNA, 523 bp, Cannabis indica
gctgaattgaactagagtttcataatacctaatcacatatggtactaggataaataatttaacactaaaattaatcttatttgcgtaagattatttattccaacaaaaagtgtcactatttatcccacacaatagaatgattgactaaactattaatgcttaattttcttaaaataaatttacataaattataatatgtatcttatttaatataacattaaacacaacaaacctgtatcaaatttcaactaaatataactatattcaatttaagaagttttatttattagaagtgacttgttatataggtgtaatttatgtgtgtactactcatcattcttcttatcgttatctaaccaatcctgtatatcaaatgagatatcaaatttctttctagtttaatttagaaaaataggcaaaatctcattaaataaggagacgcgtaatccggtgtggccgattacagtttaacaccaactcagatcccacaaattccatcttcctgttcatttgtcctcaacat

SEQ ID NO: 257698 - DNA, 561 bp, Cannabis indica
caactaaacaatctcaatttaactagtatttcttaattaaatattaatatatatatatatacataataatcctaaaccatatctcaatattaatatgtgtatatatacatagataacaaaaataaaacattaatcaactaaacaatctcaatttgaccgtatttcataattaaatattaatatatgcatacatacataataatcctaagctgtatctcaaaattaatatgtatatatatacatagataataatcttaaactacatacacatcattctatccaaaattcaaattatattttatattttgcttgaatcacttatatatttttagaattttttttcttgcattttttttttctcagcctccatcaatttttttctctcatatatattttggtatttgttattttttactttggatcccaacctattatattagggaaatttcattttttgcccctaataaaacccccaatatcaaaatttagaccctccactaatttgtacaaattaattctattgttacatgaatttcccattttatccttgttttaaaaaaa

SEQ ID NO: 257699 - DNA, 576 bp, Cannabis indica
aaaataatttccaacaccttcttgctgtcgaggaggaggagattgctggagattttgaagtccaagaaatgaaggacgagggcgaggtccgtcctggaactccttctgaggctgagggcaaagaggaagacggggtagctcaggttctgcccctcggtggcttcaacaaaaaggtagatcttgtctctgagacaggtgaagtcttggatgctggctaggactatgtcgaggaggagtatatcgaggctcatcccgtaagcaaaaaaggtgcaacgggagctcaatttgtttctccaccattcatcgtaactttcaagagattggctaatctctttgaagatggtctcctggggcaggtcgaatgcttcctttcctctcctgggcagctggcaataggccctggagagggttactgtgcttggttgggttatcatgccaaacagggtgcaatgctgtctttgcatctgtatttcaaggagatggccaattactaccatattactccgacccaattcacacctagggttcgcaccctcaccctagccccaagcctagagagcttgcggttaaccctat

SEQ ID NO: 257700 - DNA, 625 bp, Cannabis indica
ctgaaaataaggtttaaatatttcgttgcacacacaactttttgctcctatactcgtgttaagtaactgtttgaactttattttgggcactgtaacacattcgaaattttttgaaaatttacaaatgatcttaaatagctacaacgtatgcaactataaaacaaaataaactaaaaaacttttatagatgctgaaacaggttagaagtctacccgaacatccttttaagggagtgtactacagaaatccacaaatataatagttgattttgactttgcaagttattgttggtagtttcaatctatgtcatcttgcttaactatgtttattgtttgtcttatcattgtagatatgacaattagttccctaatgaagaaaaaaaggagagcttcatcacgtcgtcaaaataaacgaaagaaaacattttcttcaagtcgtcgtaataaaaagaaggatgcaatttataaggtatgattatgttttattgtagttaatatgttttgaacaatctttgattcaacttttaaaagggtaaacaaaattgttggtttacatgtaaagggtatgattaaattggagttggtttacattgttgaaaccacaacctcaagacaagaacataatt

SEQ ID NO: 257701 - DNA, 1797 bp, Cannabis indica
ttaaaaaaaaaatatatgtatttgtctttttatttttggttaattcttttataaacaaaaagctagtagaatagttatattagaaatagtaatggcacaattgtaataacatgagaatattataattaattattaagtacaaataactcttgctaaaaataaggataacttgaagaatacctgttttttgtgttagtcaatcaaaattaccagcaaactatattcatttaaattatacccacttttataaggagattgcctaatatacccccacattaacattaaagattgaaaattaagtctttctgttttgggttgaagaaagggtattataggaacattaattataaaagtgggtagaaaaaatgaaatattaaaaagagggtaaaaattaaaatggttaacttaaagtgggtaccccaggcaatttcctcctaaaaatataacatttgtcatcacattaaagaggaagtgagatagagagttttcttatgagatatactcttattatcgtactaattgcataaatagtaataaaatctaatttttgtattatatttagatgatacgcaaattgaaatgtactatatagatattttacatgtttatctattaaacagtatagttacaattcaaactatttaaggtagttgcttgtatcgcaatggtatttttatttttttttttgctaatagtatgaactcatgtggaagaatcaaattaattttatttgataaaaaaaaattatatgatgaatttatttgaaaatttgggttgataaaattatttaaggaaagttgtgattagaaattaaaaaaaaaaaatgtatttctttagaacatttagtaaattggttatatataataattataatatactttgggttaattatgtaatgtttaacaaaattgtaattatttatttttattagtatagatttgtaaagtcctcttaaaactaattcaaattttaaaataactttagagaaaaatggtaaaaatcacattacccaataatggggaaaatgtggtatttatacaaagtgggaaaaatccaaataagaagcccaaaacctaaaaacagaaataagcccaatcctaatacaccccctcaagatgaagtgtacaagttgtgaactttcatcttggataaaggagattgaaattgattgggaaataaaggtttggttaagatatcggcgatgttatcctttgtagagacatgtaggagtttgagacgaccttgttgaagcttttccttcacaatatgacagtcaatatcaatgtgtttcgtacgctcgtggaaaatcgggtgttctgagatgtgtatagctgttgtattatcacaatataagataggaggactggtgtaatgaatgccaaagtctgatacgagagcaaggatccaagtgatttcgcaagtagcttgagccatagctcgatactcagcttcagcggaagatttcgaaacagttggctaatttttggacttccatgagaccaaggactgaccaaggaagacacaataccctgtgatggaccgacgggagtcagcacaagagccccaatctacatttggaaaaaaattaagttgtggttctacatttgtaaagttagattcagcaaaagcacacaaatgaggattagaattagcataaaaaaatcaggccttggccctgtgtgcatttgagatattgaagaatcctatgtgcagcatgtaaatgaggagtgtgtggctcatataaaaatgacttaaagagttgacagcataggagatgtccagacgagtaatggacaa

SEQ ID NO: 257702 - DNA, 711 bp, Cannabis indica
attgtagttgtaaaaatagttggtggaattcagagtaatgagtacattttaattgggatctaacattaacgaaagggattaactgattcatattgtatagaatattttttgttatgatttttcatatatataatttcatttttgtataccctcaaaaaaaatttcatttttgtaagtagtaactttcatataatgcatgtactaaagcattattattttgttttaggaatttaggaatggagcaaaatatgtttgtactagcttccattgttgttgataaaattgtaattaataagggtttgagaataatttgatataaatagatagttaacattttattgattagttttattagctcattaatttcgctagttaaattttaggatttgaaaataatttagtgttatactactttcactagcttcttattttatctatatatagaaaaatttttaaagcttctgtaatatttttcattcaggttgatagggaaaataaaatctttataatgtatttaaaataaaatagaaatttgatgtgaatgatcttaaaatacaataatcttaataaaagaataataatatactttagatatgaaagtaaaaggtaaaagcgtgaagacatataataaatcattgcaataatacaaataaataaattaaaattattttaacattaataacaagccaatttggaaaacttacaaaaata

SEQ ID NO: 257703 - DNA, 496 bp, Cannabis indica
tcaaaaaaaaaaaaagttaataaattgttaagtcaatttaggttggctaaattataaagaaggtcaggcttcaatatgaaagttcaggcttaaaaatataaaagtttaggcttcaaaacacaaaaggtcaggctttaaaaaaattaaatacccaagcctttggaaccagaaccctagggatcaagaagtaagtagcatttattaaatgcttcaaggaataaattattgaattttcaaagttctaggccattggaactaggatcttcaagaatctaaaaaaagtaaacaatttgtcccagaaagattaaagtctaagcatataggttgagatcctaaggttcaagccattggaaccgaaacctcaaggaacctggaagtaaactaacttggcacatacaaattttttcaagtataacaaatactaaatgaatccaaacaatagtatggtaaataaaaaacagtttagtaccatgaaaaggtcaaatatttacatact

SEQ ID NO: 257704 - DNA, 500 bp, Cannabis indica
tttattttaaaaaaataattttacttacgaactttattatcattttttatattaataattaattataatagaattgattatttaagtatttttgtatttgtttatacatagttctaccataattatttcttaaattaatttgctttaatatttttatttaaaatattttattaatttttttaatcaagaaagataatttctattaatcaaaccgagtcaattacactcataagcgaattccccttcaaaaaagaaacagagcactcccaagagcttctctactctattctttaaaacactttactaaaacttcattttttttttactttacctcacacatttacattacactatacaccagcttctttataatttttttctatatcatttaaatattatatctttacatatattttattaataaaaataaaaaaatacacaaatgaagtaaaaaaagaataaaaaattaattaaagaaacaaaaaagaaaaagaaaaaat

SEQ ID NO: 257705 - DNA, 807 bp, Cannabis indica
tattattaatttgtggtagtgcaaaggtaagggatttttttgccagtcgagtaatgagaggccaggcctgaccctttgaaagtcagtgcgatagcgatcgtatccagaggttggaagtgcagatcccttcatagtcggaccatattccagttcaggttcttggcccatatcaagcaattctaggaacttcagacatttgttgtatggatgacccaatttaccacactccatacagtattctggcaagcgctcataccgaaattcgacccaaaattcatctcgaatttggtttaaagtgatcaaccttccacgcagcaaaggtttggagatattaatgttgactcgaatccgcagaaaaggcccccaaccttcatttaaagagtcctcaaatacatcaatgtattcacctatgatgttgcccaatgcttttgctaatcctttagttttactaagaaatgggagtctgtatatctgaacccaaaaaggcgagtaaatgagtgattcagaggtggtattttgcccaggcgttggtgaagacaaaataatgtgatgattttggaagtgaaaaggttcaagagacaagacccgcactttgtcaccttcacaaccaaaagttagtaaaaacagatcagaggactcagaaattttaactggaaatcgtccattccagtgttcagccatctgatttcgtaaagtcgaaagccagactttcttggttgttaaaacacgggtatacaatacatgactttcaggggtttcaatattagcttcatggtcaataaattcaaatactgatccttcctcttc

SEQ ID NO: 257706 - DNA, 1506 bp, Cannabis indica
gaaaatgttcaaactcgttgtctgcttagtttaatgcgagatacgaaaaataactattaaactaagattgacgagacacatatataccttgggataaacagagtagtaaaatgtgcaagataagacatgcaaagaccttaaccttctcttgagaagagaagaacttatgatacttaaccgcctcgtgttactcatagcataatgatcaccttgcattactaatacaaatgaagggatataacgagatgaaatatttccaacacttagcgtttttttttattaagatggacaagaaggagaattcatgtttgtcgagatacaaccttccaagtcagcataaccgtttaatggataaaaataaggagtggttaggtggttattagatattatctcatgtgtgaataaatgaaatgtggggaatgttcacatttcattaacagttataaatgaatcaatcctaaaaagaataattgtcaacctatatttctataaatagggacataatccgtgggaaaggggacgacaaaattgagaaagaaaatcttattattcaaatattggtattgtactaaatatcctagaaaatatccctaataataaaaactcgtggagaatgtagcttttacaaaaccacgtaaaatatctggtgttatttattatatatttatttctgtagtgtatttattgcaaaaaggttgttaatttagttaaccaaaatccgcgttaacacatcataatgacaaacaactgatagaagtgaaacaagtgtgttatcctattttttacaccttgacgtggcaataggatcaaatgacacgtgtctcatatttctgatactgaggtggaggaaaataaccctagcagtctgcacatgactaatcaacatctgtaatagtcggttatccgagcaaggttgtggagaagatatccaatcaggtagaagcatgtttatgtcgagcgacgcacaaggcttcagagaaatctcgattattcaaacgcgaagacaatccctataattgtgggattgagtcagagagaaatggcaacctatcctatttcctatttcgtatattgtaattatagttacattgtaattgcctattttgtgcactgtaagcaaaatagaaactatttctcatgtaataaatccttataaatagtgacctagcctcactaggaaagggatcaagagaattgctactacaatacactctagagagaaaataatgatctaagagagaaattactcagagataaattgtaagagctttcaaaggaaagaatactctgttccttttcttaagtcaatacaatacaaggggagtagactattaccatattatggggtcgaacctctttaaaatttggtattcattttttattattatttttgctttcttttaattacgttacttaatcgctttattatgtgacttgattgtattgataaaatttaaaaaaaaaaaattgaaatataaggtactaaatatgcatgattttaaaata

SEQ ID NO: 257707 - DNA, 867 bp, Cannabis indica
cttttgtgtatgtttatcattacttatgttcatgttttttatgtatactattcaggtttctcatggaaagttggaccagatttgtgttgaaattaattctatcaaagagtgccaacaacaaattaaggatggtatttccagcttgaggattgagtttttgagtgagtttgctaaattagcagaaattatcaatggattgaagaagaaggagaatgatggcagttctaaggattctgaatttttttcatcccctataagagaggtaactagtttctttgtttagtgttttttgattataggtttgttgtttatggttttattatagttttttttatcattttgttgaaactagtttctgtattgaatgtgttattatattattttccacagttgtttgaaacaggtttctgttttgggtttggttgagatacggtttttctgtttattgacactggtttctggtctgggattaggtctctgtccctgtgttttttttttgtaagaaacgagtttctttatttatgttgtttttggttttttttttatagttttttcatcatcttgtttaatttagtttctgtattggatgtgttattgtatgatttttgactgttagttaaaacaggtttctgtattaggttgggttgagatacgctttttcaatttattgaaactggtttctggtctttgtttatgtctatgtttttgtgttattttctgtaggaaaccagtttgtatatttatgtttaaaatctggtttcaattaatttatggttcaggcgtactatcaggatatatcggatgatggtggtgggttacagttgtctgttcatactgttgaagctgaggtacaagctttttcacatt

SEQ ID NO: 257708 - DNA, 578 bp, Cannabis indica
ggccttgatggtcttctcggcttcctcttttgacttctcagcttcttgtttaaggcaggtgattccctactgacttcgtccctttgcttaatcacaaccttgcattgggatagtaatttcagtacctcgccctccatgtatataagccgctccgagattcgtcgattagaagcgaaagaaatgaaagaagcctggagaattgcaaacatatgaatatgaaagaagtacaaattagaaaaaataataacaataaggccaacttaccatgaagttgtagtccaagctattcgaaagcatctcttcttgactcccaagattgatgagattccaatcagggggaagcagagtttgaagtttacgccagcaagcaaccccatacatttgggcgaattcaaatccagcctctcccactgcggccgacaaggtctcaatggccttgcttgaggaggcggaagcatgggctttctcaggacgaggagcgttggtgttagaagtaattggaagaggaacattttcttgcgtctcggtatcagaaacctcgagatcgataagcttggccaatgactttttcttgtggg

SEQ ID NO: 257709 - DNA, 572 bp, Cannabis indica
aacacgttaaactgtgtaattacctccaattacattcaattccaattcccaggtggcttttcaaatgcgccctaaaagttattgttaaataccaactgaatgaccactatgtacatatatttatagggatatgattttgtcccgtgatgtactttcacggaatgtatttcatggtacattagatgagttttagggtacattaaatgagcgtcagggtacgttactactttttcaccctaattacccatagatcaatctcagccgtcagatcaaataacttcttcatctgatggctgccgtacatcacggattacaatctgtgaaactacaataacgggacaaaattatatccttatatttatatatgaaaattaaaatttaaaatcaatactataataattcagttggtattaatttatatttaatagtgatatctaggtgaaactcaaacttacaaaaataaataaataaacacaaaaggcagttttgcccaaacaaaataaataaataaataaaacaaggtttcggcgcaaagcctcacatatatatatgacgtggcatctttatgcctt

SEQ ID NO: 257710 - DNA, 917 bp, Cannabis indica
aaagcacacctgggcgaggtagttcttcctttatagttttttcaggtaggtcttggaaggagtcatcacattatgggctatagatctaccttgaacaaacgaccccttcgattttgattgattattgacggaagcactttggccaacctggtacacattagcttcgatatacacttgtataaagtagtacaacaagcaataggtctgtaatcaacagctctagaagggttctcaatcttgggaataagagaaatcatagatctatgcatctccttcgggattgcaccagtttcaaaaaaatctgctactgctttgcaaatttcagctcctatgtgaggccataaagctttgaaaaaacccgaaccataaccatccggcccaggcaatttcgagtcaggaatactaaagagagctcttttgatttcttttggtgtgaacggcttcagaatctcaagttgttgatcaagagatagaacagccccttgtgtcatacaacctagatcaatcttccttccaaccctgcttttacagcccataaagcttcggaaatggctcataaaatgctcaacaacttcagcaaaattatcaacttgcagcccctgatcgttagtgaaactaacaattctattctcagttctcctctttttaaggcaagcatgaaaataggatgtgttagtgtccccttttttgatccaattcaccttgcttcgctgtttgagaaagctgtggtagctattcttaatactattaaatatagcagcagcagctgcttcatcacactggaagctaaggtttgttggatgggtctgggcaagcatccgggcctcttggtaactatctttagcttcttggtacttcctgccaatatctccgactgtatcatggttgaacttcttgagttggtgttttaatctcac

SEQ ID NO: 257711 - DNA, 1156 bp, Cannabis indica
atcttttttattacattgttaacaatcttgctgacttgactgtcgcagtcccttcggtcggaaccatcccggtgtcccaaggtttttcggttactctcttctttgttctacaggttgtcgatgcccacgtacgatcatcttcgattggttgtggattttagcatctataatttggcacccaccttgaggccctgacaagctgcaatcgagcaaagtatttcgacctttatcattcagtcaacccacaccagagcaatggtggaacacatggaggaaggagagatcaatgaggaacagactagctttcgtcaacaactctcgccattctcacggctcaaatgaaagaaaacttggagcgcactcaagcagtggaagagaaaaatgcatcgttcaagaaggagaatgtcgcactaaaggtccagtttgagtcgttgactgctttgatggcaacaactgacaatagttgaagaagattccaagttccaattgatccaatgcaatcacttgacgataccccaataggaagatcaagccaagtgattagacaaccatcaacaacaggggtaactaacgtcacggtcagacaacaaacaaccacagtcaatcagaatatgggttcagcagtcaattcatcagccattcctccagcagtcaattcatcagccatccctctagtagtcaacttgaacaacctgactgcccccgaaagctctctaaaccaacaatcccttactagagcaaataatgcaatacttgatttaacaccttttattgtgaatgcaggagtgaatgttccctacccaagaggagttgattgaacaaataattgcacgaaaactggaaggcatggaggccatgatccaaagaatcccaggggtgccaactccaatcaaaaagagcctacctagcagctttgcagatcaccctttgtagatgtcatcgccttggtcgaaatgccgaagaagtttgtgttcccattaatgaaaatgtatgatggaacgactgatcccaacgaccacagagctagctacaagcagaggatgttcactttcgcgatacctcgcgagttacgcgaggcgtgtgtgtgtgaagggtttgggtctagtctagtcggctgttgcgaaaattattaattactacgcaagtgcacgcaatc

SEQ ID NO: 257712 - DNA, 1135 bp, Cannabis indica
atcttcaaaatataaatgatttaagactttatctattttttatctatcttacaaaaaataaagattaatttttagtttttaccatttaattattggttttgataaatgcaaaaataataaagaaaaattataacacaattttgtttacataaaatattttatcattaatgacaaatttttaatcaagaataactgttattcaaaaactagagtttgatggttaggaagattaatatgaaagttcaactaacgaaaaaggtggatatgcattcaaaaaaactgaaattgagtggcccatcaagaggattagaattagtgaagacaattaagtgttgcttatctttttttggaaaatatgtgttcatgtttttcaaatttatattaaactatgttatagtttatgtattatgtttggtttatgatttcattatattcaaatgcttttttaattaatttttttttctatctatactttgtgatttttgcctttacatgagtactaccaaaattcacatatcttattaaccaatattttcttaaaaacttaaatttgaaaacaaaacaaagattaacaaaacttgagaatacctcaagtgtgtttggcagagattggagggtcctttgttgggttgagtatgagatcgaaacccagtaaaaaacatacacagtgacaaaaaaaaagaatacaatgctaaccaattgtaaaaaacaataaaacatggttaaaattcatagtccaaagattacaatcaataatacatacactcatctaacatcttcaatattagtttatacttagtaatttgaatattactcaacactctcatgtggtgtattttgcacactattgtccgcatgcaagtttattgtatcgatttcaacctaaaagtaaaacaaaaaaataaacaaaagactcaataactattataatagttagaatcagatgtaatgtaatgatatatgaggtttcaaaattgtcaatgtaaacttactaggcgacgacgtagttgatgtatgagattattagaaccattcaatcgttctttagattcaagaatcttcgtgaccaaaacattgtgcaatccaacaatcatggtcatcaaagtattgaccttttgcacactaacctatcatc

SEQ ID NO: 257713 - DNA, 740 bp, Cannabis indica
atttataatgattatatttagtagaaatctcacttattctccccttatatttataatgattatatttaataaaaatcttcattcttggtaatacatatttctataattgtgtgctaattttattttacatgtcactgtataattactcttaataggtttatttgatctctctttaattatctcactttttaattttgtattcagtttataaatattgttgaattaattaattaagaaaaatattactataattcatcaactaataaaatatctaaaatatatacatttttaaaaaacctaaaatatctaatgttaaatttaaatctttattaatatctattctatataaagtgtgcttatataactgaaattcttggtttatgagaaattcatgggtgactttttatttttatttaataaaataataaaatattatttatatataataaaataaaaataaaataaattccattaatatttgaattgatatttgaactgatattaaatattcgagaatcacaacccaatttaaaaaaaaacaaccggagatttaatacggagaggagatttgaacttgttttggttttggattccggagctaatgtcttcgtctttttttttattgggtgaatttatcaggagaagaaattacaaatgcttgaataacgaagatcgtggctgatttgagtttggatccgtgttttggtttcgtctaaggtttgttttcatcaatgtgattt

SEQ ID NO: 257714 - DNA, 1743 bp, Cannabis indica
tacaaaatataaaaactagtggcgtctaggattattatcatgtataaaaataagtgatattttataatagttattagatttatttacagtatttttttaaaagattaataatattataaaatatttttttttgaataaatgacaaaaatatttttagttagctaaataaataaatataaaacttaaataaaaaaaatttacacaaatattatttatacacaccttcaactgaggattcaacacaatcgaaatgaaaattcaactagaaagagaaccatcattaatttcggcgaatctacatgagaagacgaccagaatcaatcaaaacaagagctgtttcgaattcatgaaaaaaataagtgtagaaaaactactacgaaactaaagttcagtttaatttccataaaactaatgtcattactttaattttcatatccatgaaatgcatatttcaaaaagttgatctgaatccaactcaagtataatccacaaaaaattacatcaatattatagtaaaacattttatcctggtgtattttcgttgtgttccaaatttctaatggtgaatttgttcatattaaatcatgaagagacatgtggatagagttacgtacgtgaaaatactgttttgatttttaatgtttcataacagttgcatatatattttgctaacagttatttcgtctgattgaaactttcatcgatgcgacctttggtcaatcacccagcaaccacccaacaaccttcgtatgattgaaaccttcgtctgatgcaaccttccatcaaccatcgtctgattgtgtaagtgatagtgtaagaggtattttggtaattaaaagcacataaaaagtaaaaatgttgtccacaccttatgaatatatttttgtaaataaagtgtcaatttgtatttttcatgtaatagtccctaattattaaattatgttatattaaatttgatatttaattatactaaagagatatgacatcttaagtagtgagcattttataaaaataaatagataatttatatacaattgtaaagaccacttagtttttatgtggaaattggcggacaattagagcttaattatgatttatgaatacataaagatttatttgaattcaaggtgtattatttatgctatatatgaaattttatgttgttcatgttttgtgtccggtaacattagaacgccacgtttagctacttgaatcacattttagtatttttgtagtagcagggcaacttagatagacattagaaatgtcgggaatattcgaagtcttaaaaatgaccaaattacccctaagaggtttaaagactttatagtataagtggaggcaaaatggtcttttgtccaaaatgagattttgtcttttagtgacttagtatattgatttgttttatgttagaaatctgattttaatgtttaattttagaatttatctcatttgatcacaaatagaaaaatcaagaaaaacatctctctccaaactctctctgtctctttctcgagctccttagaagcagcaagattttgggattttaggttgttgttggttatactaattaatcataggataatagtttttgacaaattacataaatagaagagaaacaacacgagctggatgaaacaacaataaaacttgaaaaattaaaaactcactatagcctcaataactaaaaaaaaaaattaaaaaataaaaattcaaaactctaatttaaaaaaaaataaaaac

SEQ ID NO: 257715 - DNA, 802 bp, Cannabis indica
aagattttgccggcgcattgttgtcccggcaaaacctttactcgccaataaaaaacggacaaaacttttgtcggcacatatatgtgtcgataaaatatattttacccgtcgaatgacggatttaggatcctagtttagaccgacgttagatttttctcagcacaatatggcgccagtagaatccatttttactgggtagatgccatttgcaacagtaaaaagtttttaatgacagggtttcgtggacaagttttaccagcacaatatacttatttttgtcgatacaaaaatgcgtatgcaaaggtgatattttatgtagctagggagatattcaaattaagtggattttacaatgtgtgatcatgggtatatattctactacacaatacgtggaagacggagcaaagtaaaagatcttgtgtgtttatatattttaattatcttcccattatagtatttggttagaaagaaaaaaagataggtatctataatgtttttgttttgttttgtttgtgcaagtgacgtcacactatcatttatttgcattagttaatcaaagaaaaaattgcttgcattatgtattctcaaacgtcacaaaagtcaactcaaaatgtagcaaaaatatatcatatccatgttaaaatttagaataaaaatgaataaaggaggttaagatgaatgagatttgatctcaaaattaattgataataagaagaatagtatattcatcttatatatgataatttatttctacacattaattcactacaaacaattgtcaattttagtgacaactttttag

SEQ ID NO: 257716 - DNA, 747 bp, Cannabis indica
aacaatatggcaataaaatattgtatatgcttctttttatagtctgacattgatttatagctttcttatttaattttattttcataggacctcacatttaaactaaatattaagtactactatacttattattgtgtaacagttaattatgattacaaatcaaaggtcatgcaatagatatatacattaacttatgtaataattataaataaaagttaattattaataattaaaaatgtgatgaaaaaatgaaaggtttattaagaaaaaaataattaaataaatgtgaaaatttcataaaataaagaatgagaaatatttaaaaaaataaccaaataataaatatgtattaattttattaaataatttaagtcacttattacaaattattattattagtaaaagcgttacattttttttattaacattatatgaaaaacaacaattaaaaacaaataggtagtaaaaattgagaaattaaaaaactggtaagaaaattcatacaacttaccatctctccatagattgttttgatttgattgttattatataatataaagtgaaaaaaaattagttatattttagttacaaattttatatgtataaaccattaaaattatcctaacacatatattaacgtcaaatgaaaggtaagagtcttaagaattaaaagtcaaattcaataaactcttttatataaaacctttaagttattacaatggtaacaaaaaaataataattaactta

SEQ ID NO: 257717 - DNA, 849 bp, Cannabis indica
gacccagacccagacccaagaccctgactcagacccaaacccggacccagacccaggatcttgacccggacccaaacttggacccgaacccaagaccctgacttagacccaaactaggaccggacccaaacttagactcggacccgacgtgtagttggtgttggggtagagtttattgaaaatatattatctttacacaatctattaatacatgccaataccaaacatagtattatgttaaataatatactaatacaaaattaaaatggatataaattataagttaatattaaaattcttaaaaaaaggggttgggtcagatcagattcgattcgaataagttggttcagatcggatccggtctgagtatctaatatagcagaacgggacggggcagatccttacatgatctgaattagattggatcatagccggatcagaatcgacccgacccatttacactcttataattaaagcgtgcaataattgatcattgtgaaagagaaaaatgtaagtatacattatcaataattacttttaattatatatattaaatcaattgagtgagtgagtaagtattaatactcgtaaataaaggttttttattgaaaggaatgacacgaagttatacaggggatgtttaggcagaaatagttgaggctattagtgttagagaagttttaagttggatcaagaattaagggtggaataggaaccgacgccatataggggtacattgttggaattattttaccatgatcttagatctactcacaagtatgttgatttaacaacccaaatatgaacttctaaaacgatgaaaaattaaacacataaaagtaagagaaa

SEQ ID NO: 257718 - DNA, 2295 bp, Cannabis indica
aagaaaaccatacattggtggcagtggaataatatgtctcctttaactcagatctctaacccttgttcctttctatcagagagtaataataagatatgagcctggatctcatttatgtgttggattcttcacattcttccacactatgattgagtacttgacttgatatgagtgggcatgtactttatcactaaggactttgaaatttatgaagagaaaaagaggagaattaaaaatctatagaaggaggctctcagagttagaaaattaggttatgaaaagatgaatgagaaagaatgagagccatcttattccttatataagatttgtcctaaggttaaatttaaattatgtttaattaaacaaatataaaaattagctaaaatacacctcaattggtcggccatacaatgggcccactagttacaatttttctattttattcaaaaatttatcttttctttcactaatgtcatttctaattttaatcatttaaatgtcaaaactatttaataattaaaattaattataaagtaaaattatcatttatcttatttattaattagaccatacaatgtcttttaattaacaaataaaccctaaaatctcttttttcacaattaatcccttgcttagtgaaaaatttataaataagacgtagtctaattttagaattataattgattaattaaaactaattaactgagtctacaagcagtattatctcaactagtgtggagatcatgggcctatataatcaagcttccagtaagtagatctagaatttatcgagtaaactgtctaacttattaattccttcctgctccactatagattcagaattgcactcttaattatatagaacgctctatatattccaagatatagatacgctattgattatctattggtattgttgacctcgcttttagtcaatgacagtgagttaattattaagcgattaagaatataatagaaacagagaaaaaacaaaaagtactaaagaacaaagtgtttttctctctcaaagctcttacaatgaaatctctgagtaattctcttagatctctctttgaagcaattctttcgatccctttcacagtgaagttagatcactatttataaggccttaatgcatgagggagagttttccttttgcttacaatgtataaaataggaaagaatatttattccataattatgatacacaaataaggaaattggaaaaagttgccagattcctctgactcaatgtcacgattgtagggattgtcttcgttcttgtacctaacgagatcattctgaagtagccaagtcttgatgagttgtttggaaagccaaactcgttcctactcggatagtctaccttttaccctactcgggtaattagaagttatacgtgtagatgtgatacttgaagtttgttcaggatattcatctctaactagatgtaaggaatgcaaaacatgtgtcactcgtgtattctggcacatcatagtacaaaaaatgggataacatttccccccaagtctgtgtaggacctttatggtcgcacgtcaacttcactcggtctggatccttatctgaacgggtggcacatgtttgaagcgtcagttgatgatccgatgtgactctgactaagggtcgcttcagtttttcagctaattaatgctgacagacatgtacattgaatcacgcctaaaaattagcacgtttaaacgtttacccttcacgtaattgagtgcacaacgtacacttttggggggaactcgaggtatttaaattttgaaatgattactttgcctcactaatttaattataaatagggataaaaaccttatcaaccacttttagcaattttagtctttgaagaatcaaagcaagaaatctactttctttcaaatccttcgaagaatcatcaggaaacaccgagcagcgtcatccgagcaaatctaaagcttcaaacagtgagtaagttcttcatttgattcttcttatatgcttgaatatttgattttttggatttttgctacaaaaaacgtgatagttctttgaacttgctctaggaataccatagaaaatttaggtttaggaatgtgaaatcttgactatgcttaatcacgttgcttgattataactgcatcttaatttcaattcaatgatattcactttaacttacccattcggggcttagtgaaagtcaaccattaattcaaaatttcaaaattctagattgcaaacctcaatatcatgcaaaatttttattttttgctcctttgatcagacctggtcggt

SEQ ID NO: 257719 - DNA, 571 bp, Cannabis indica
tatgtttgggcataatcaatttatgccaaataattcctgcataatcaacttcttgagcatccagtaagtttttgtaaaaaaaagttaggctagaatctacctttttttacagcaagctttagattttgatcgtttgttctccctcgaaacctcaacaacatacttgttgttactgctcaaaaaaatgagatttttaataaatatggaaaaaaatttaagtttatttttatatagcataaaaaaataatataaaaatatatgagattaaaaaataaacaaatttaaaatatgggaaacaaaacaaaaaaaacataaataaagttaatagaatttttaataacaaatatcgctagggcagacattgtcattaaaaaagtcactgtcaccagaaagtcactagaacagtcaccattgctgggaattcgccagaagagtcatcgatgccaagaaagtaatcaaaaaattcatcgaagttgtcattgtcgtcaaaaaagttgaatttttattgtcattggaattagtgtcttaaacataaattaaaaaagcattggttccataacaaaatgagtaa

SEQ ID NO: 257720 - DNA, 583 bp, Cannabis indica
attgagccatatataaagaacatgagctactccactcatagccaattggttttgagatgaaaccccatgattctcaataatcttaaacaaaaaatccaaactgagatgacatgggaaccgagctatgatagcttgaaccacttgtaaagcatctgattcaaccaccacctccgacaagtcttgtctctatccaacttagcgcttctttgaccccaaaaatttcagcaagctctggttgaacacatccacttctgctgccaggcatagcttctatcaaacaactatcatggtcacgaataacacaaccaaagccgtatttactcttacttttaaagatagctcaattgacattaatcttgatcgtatttgtcgttagtttctgccactgctcgcagccattattgttattcaccaacaacaacgcttcacccttttgttgttgagcagtcctctattgatcaaaaacaatcctagtcaatcgaactacacttaaattaaaacataaattttatttgaaaattgaaatcatacataatgataaatttaatctcatttaattcagatatttttacataaccttaaa

SEQ ID NO: 257721 - DNA, 671 bp, Cannabis indica
ggtttagtttccaatattcaaaacaccgttatactggtttggtcaaaaaatataaaaaatcagatcaaactaatctgtgacaccttacctaaactcaataatacacctctcaactcaacttcccccattctatctcctctccctctcattctctatattctctctcttataaaagaccacctgaactcaccacaacgcaccgctcaccatcgcactccgctcaccaccgcgcacatctcattttcttgctctaagtttgggtaacttccaaactatacgtatatagtttatttttaacatatctatacatttgtgtttgtatttccttaatttattacccaaaaaatagattttaaattttttgcattttctctttttgcgatatttagcaatatatttacaataatagaccaaatctgaagttatggatgaagtttagcgatgattagcgatgttggcgtatttagcgatgtatttaagatatgagactaaacctgcaaagcacatcactaaacaacactaatcatcgtaaaaacttgagtgtgatttagtgatgtgttttgtagtttttagtctcatatcgtaaatacatcacaaaaatcatcgctaaatacgcaaacatttactattttagtcaaacattgctattcatcgctaaacttcatccctaa

SEQ ID NO: 257722 - DNA, 566 bp, Cannabis indica
ggaaactaaattgatgttattactccctataaatagtaaaattatttcactacttagaaatccaaaatttttcattcaatagagcactcacgctgctaaaatatttgtaagagttttcgaggaagattaagaacttattgcttcttctctcacaagttaataaaagtaaaagggaagtaggctattaccactatcacgggtcgaacttatatagcaaattcgtttcattgttacttaattattattattattagtttctaatcacttttattgactcaatgtcgttggctaaaagtaaggtcaatattttggagaagaaggtcggaagcttactcactacaagatttcattagagaagaaggccggaagcttggatcgctgaaatagcacaaaaatcccgagaagaatggtgcttgagggtttgacctagagagaaggaggagctttttctagagcaagtttctagtgagagaaagtaaaaatttaaaaatgagaagtgaaaaaaggattaccccccccccccccaaaaaaaagtcacttatgtaatacatgtgggccattttttt

SEQ ID NO: 257723 - DNA, 749 bp, Cannabis indica
tagcaattaaatctcaaattatcatgcatacacattgacacaatatcataaacacaattctggtactttataaagcaccatttttacccactcgttaaccacgagctgaatatgtcactatcgttgcccgatgaagcaaacgataagtaaaaaacctatccacgatttcaagagtaattacccttaacggtaataaccgtttccaaccctaggtcataaccgaggctcaacaacatttaattagagtcttaataataatcaaggccataaccattcaaccgttaacatttagccacatacgatgcttaccacttttcttaccccaattcagaactcaagcgtgcaggcagacctgagtggaaaacaagctaggcgatctcagtcctatgtcacgacaaccaaaactcaataaatgctttaaatcgaaattccataataaaaccctaattcaaaaccgaataagaacctaacccccaaaaacttcaaaataggttacataatacccaaatgacatgaaacaggtaccagattccaccctgagccaaaacagaactcgaagaaaactcgagatttttcccctacaaggcaaccggtcgatcagttctagtgcaccagaaccaactggtcgaccggttttggtgcataagaactaactggtcgactggttttggcagaccagaaaaattgtgggctttcttcccagctcgaacgagaaccaacaatacatgtaaaacacctccagaacagtt

SEQ ID NO: 257724 - DNA, 734 bp, Cannabis indica
ctcaagacatggaatttttacctcaaattttaaaagagttgtagggatctccttgatgggctcctctttcttagattttttcaatctacttggaaaaggtagaggagtgacataagttggtacacttagtttgtttggctttttcaatggtggtggaccaactaaagtaggagattcaacttttggtggagataactcttcaagggatgaatttttgactcctttagttggaatcaacttatgtacttctttgtgtgatggtaattcaagttttgcactactttgaagtgttatggccttgacattctccattggattacattctatttgtgcaggtaaagtatttgaactttaaatttcatcatagatgtttccattgacttcgcaagattctctaacttttgtagagattgttgaaggctctgcatagtttcatgaacgttttgttgaaatggcaaggtattagctgctaatatttcaatcagctcagcactagttggctttttactgtatggtgcaacatgagtaggttgttgaaactgtgcattattctgttccatctgagtagtaaaagtgaccaaagtgttgagcagatcagtaagagaatgatcttgatcttgtggtgctacaagagaatagtaagaagttggttgaacatattgattgatcccattctaggaagtgttagaataatctccacgttgttgattccatgtgtaagtgtcgtagtaggg

SEQ ID NO: 257725 - DNA, 1000 bp, Cannabis indica
catggagcccaatgcctgcttcacaaactgatgtctctcctgtcacctcaaagagatctggtctatctcttttgcattactcatcgggcgacttctattttgttttcttctttatttttgtttttattcttcttcttcttcttcttccaaaataaaaattaaaaaataaaaattcactgttttgtctctccacttgctacacttcaaattgttttattttgtcaatgtattaataattctttgctttttgcgtgatttcatattcaattgtttggttttcattgttatgtattgcttctttgtttgtatagcatttgtctgattgacaggtagtaaaaactcatgtggtacagtcaaagtaaagtctttatttacattttattaatttttgaaaaatttaaaagaatgctaaaataaaataaataaaatgtaggtttttttaatttttttattatattttttacgaaaaaaaaaataaaaaaataatatataatctataaagtaatttctcaataaatattataacataaatctaaaacaataaatagtattctttaacatatagagatagatatagagaagtatgaatcaagattttttattaaaggtggttttcatatgtattgtgtggttttatttataaaaaatttaaatactttaattaagtacaacaaaaatagttaacatgtttaatataaatttaagtagttaatgtattagatttggattggtttaacacattataagaaaataatttttaacaaagaatagccagagaagtataattattaatgctcaaaataaacaactttttaaataagttattgtgactgttcttaataagacatataaacccatcagaaagtggtgtattgacaatttgtaaaaaaaaaaacatatgtcaaacttcatatatttaaaagttgatatttattaaactttcgctgaaactattagtacgtactcaaaatagataagatagcgtagatagagatctagt

SEQ ID NO: 257726 - DNA, 487 bp, Cannabis indica
attttgacaaaaaatcaattcagggtcctatttgtactattttagaaaatacagggtccattttgtcatttaacaaaacacagggtccaattgataacttttgtaaaacagagggtccaaaatagtatttacccaatattaaatataagtggaccaattcttttctttttttaattattgttattatttaaaaatgacttcgagtattattgctttgtcgggcctatttcaaaaattttacttacatggccgaccttaaatatagcaaaacagaataattaaaaaacaacagtctaataattaaaaaataattgtagaataacagtgaaaatttaacacaatacacagtattttttaaaaaaattccaccttataataagaaagaaaaaaagtatacaatgtaaaaactcttatattatattatattatataatttttagactttggggttattctgcaatattacttaaattaatatatacatatt

SEQ ID NO: 257727 - DNA, 1041 bp, Cannabis indica
cccccttcaaggtggactgtataggttctgtacagccatcttgctagtgtgagtcaagagtgttgaagcaggtaagggctttgtgaaagcatcagcaagttggagagtgcttggaacaggtatgagcctaatggtggattggttgattttgtcacgaacaaagtggcaatctaactcgatatgcttggttcgttcgtggaatgtcgggttgttggcaatgtgaatggccgactgattgtcgcagtagatgaaggcagggtttggttgctgaatgtgtaggtcgcgaagaaggtattgcagccaagttacctcactggctgtagcagcaagtgccctgtattcagcctctgctgaacttcgtgatatcgttggctgtttcttggttttccaggagatgagacaatctcccaagaagatgcagaaccctgtcgtggaacgtctcgtgatggggcaagatgcccaatctgaatccgaaaaacctctgagatgaagggaggagtttgcagtgtataaaataccttgaccggggctgcctttgagatatcgaatgagatgttggagagcttgtaagtgaggagttcgtggagaggccatgaattgacttagaacattgacagcatatgttatatctggccttgacagtgttaaataaagcagtttgcctatgagttgtctgtaggttgatggattggtcaatggctcaccttgttgatcatcaagcttatttctaggatccatgggagccttggcaggcttgctgcctatgtaaccactatcctcaagtaactgtaatgtgtatttgcgttgtgaaagaaataggctgtcttttgttcttgcgatctcaaagccaaggaaatatcttagtttaccaagggctttgagtttaaatttgtcatgtagagaagcttgaatttgttggagaatggcaatgttgggaccagtaatgacgatatcgtccacataaacaagtaaagctatgaagttgtcatcttttcctctagtgaataacgtgtagtctgcttgtgattgatgaaagccttc

SEQ ID NO: 257728 - DNA, 944 bp, Cannabis indica
cttagcgccctccctgaggtttcatcgggtgcgggcgagggtgagggtaattccgggggttggccccgacaagaccttccaatctagggcctcctgatcaggaagttctttctcagcctgagaacctttcagcggtcatgctgggccaaaatccagggctttcatccacctctcctgctcagacttctgcttctctccttggagcgccgtcaacttcccatcttgccctttctcctgctctggtacatccttcaaccttttcttctggccaaggctccctgcctctatccagtcatcccccgcgggcctcggccgaatgggacgagatccctgctttccggatcaaaaaggatgttctgttcgaggagtcggctaaaaattatttcaaaactctcctggatgccgtcagaaaacctgatgatgatttttacatctctcatgggcgtgattctattgtgaaggatacaaccatctcgggaataaaggtaatttgttccttgcatgtatctcattttacttcagttattatttcgcttgttgtcattcatgtatattttttatattatttattttattttattattattattattatttaaaaaaatccccttttttgccagacggctttgagatgtgcccatgttatgaagtttgctccacagactgatagggagagggagagcttggctaagggctattctcgctacaagaagaattatgaagcagctgttgccgcgaagacggctgctcttactaaagttagtgccttggaggtcgacattaagcttttgaagagtaaggccgacagtcttgagtcggagaagaggggttgggatcttactcgttcagcccttgagtcagaaaagggggttctaagtgacaaggtggcttccctggagactagtctgtcgatggtgaatctggagaaggccactttgttgcaa

SEQ ID NO: 257729 - DNA, 1378 bp, Cannabis indica
tgctgctgcaacattttatacgcgctgctaaccgagtacacaccagatttttcctcagaccaagaccaggtatcaacagcatcagaatcgctgagttggattgctaaaattctcatgctttcttcctcagtaaacatgtcatatatcagttcctcatcccaggttttgtcttccattttcatcagctatccacggttctgccaacaagattcgggtgagaagttgtgataaaattacacccagttccaggcaaccatggctcattcagtatcatagtggacttcccatccccaatagcttttctagctcccatccgaaccaagcttttagcctcccataagcttctccaaataaagctaggattcggacccaattcagcactaaagaaactcccattcgaataatatcttgctttataaatctttgccacaagagaattatcattagttactagtctccacccttgtttacccaagaaagccaaattatagtcccttaaattacgaaatccaagccccccaacatccttatgccgactcaatctttgccaactcatccaactaactcccttagtagtagaagattgtgatttccaccaaaatttcgacattaatccttcaaggtgagagcaaatctctttagtaaggaggaagacactcatagcaaaactaggcaaagcttgggccacagacttcaataaaatctctttcccagccttagacaagaacctagtttcccaaccattgattttctttttcattttttccttcaagaatcccagaatggcattcttacttctccccatagtgcagggaagtccaagataagtgctatgttcagaagcagctgccatgcccaagagactacacacttgatcacgaattaaagcattagtgttattactgaagaacacagatgacttattgatgttaatcttttgcccagaagcttgttcatagatggccaaaagattaagcacattggtagcttcgaaagtattagctttgcaatacacgtagctatcatccgcgaacaacatgtgagatacaataggagctcctctagccacccgacaaccagatatccaacgtttttgcacaaaccgcctgactaatgaagagaacccctcagcacaaacaagaaaaagataaggcgacaaagggtcacctcgaatccctctgcttggagtaattggccccataacatgactaccatgagtaatgctatacttaaccgtggagacacaatgcatgatcaaggaaacaattttctgattgaaccccatatgaagcatcatttgctcaagaaaaacccactccactctatcgtaggccttactgaggtcaagttttaacgccatatacccctctttacccat

SEQ ID NO: 257730 - DNA, 597 bp, Cannabis indica
taccattaccctgatctgattctaaaagaagtatctaggtttcgaaccactgaaccagatcgtaaaatagggggagtcggagccttaccttgcaaaatcgcactgttacattgatcatttgccctcaaaaaattgataaagtcatgttgcacctcctcctgcttccgaattgcttccaatgaagatttgggagataataaagtttgcaagatatccttgagtgctggatcatcttccaccaaaaactcctcatccaacatctccaaaggttgaattgcagaaaaaccatcctccatcgattcacgaattgcatcagtaccgaatttcacttccttcttcttagaaatcttagcagtcgaattaggtttcctttgagttcttgatcttgtttttgccatggcgccagctgcatcagctgcaagagcaaaaatcgcaggagacctaaattctacgtataccaaatttatttctagactacttattatttctaatattaaataggaaaatattatacattgtgaaattaattatttaaataattattttggtacaatttatttcaagtataattttcctagtattaaactagagattaat

SEQ ID NO: 257731 - DNA, 722 bp, Cannabis indica
aaaaatgttatgcactactgatattgcttaaggcaaggctagatgataagatactaatacaaccttctcgagaatctcaaaagaccttgtaaacctagggcttaacttgccattctttcttaaatgcttcacccctttcattagtgatactcgcaggaagatatgatctcttacctgaaactatatgtctctgcggcttggatctgcataacttttttgcctattttgagaagtaatcatctcgaccttgatcttctctatagcctcactggtccattgaactaattttggacctaaatacttcatttctgtgatttcatcccagtaaactagagaacgacactttctaccatacaacatctcataggaagccatccttatagtactctgataactcttgttgtaagaaaactctatcaaaggtaaatacttactccacaaacctttgaaatccattacataggcttgtaacatatcctccattatctctattgtcctctcggacttgccatttttctgagggtgaaaagttgtactaaattttagattcatacgcatggccttttgaagactttcccaaaacttggaagtaaactttggatattatccgaaacaatggacttcaaagccccatggagacgtattatcttcttcgcatataacttcgcgtactgctccactatatatgttgttttcacaagtaggaaatgtggtgacttggt

SEQ ID NO: 257732 - DNA, 341 bp, Cannabis indica
atatataaagatatatgtatatatatatatatatataaatagaaacactcactcacaaccttgagtgtagatgacttgaacaagatattatattttttccaaaagcttattatttgttcttatctctaagcactaaggaactctctaagaaatagttttggaaattatcaaatcttgtgttttctagtaagtgcttgttgataaaatactaattgtcacaaaatgagtactttaaacctctatttatatagtgtttgaggattactttagaaaattaaattctcttcccctcatggttgttgccaacatttcaattggtgtttaataggataaaaatgcta

SEQ ID NO: 257733 - DNA, 548 bp, Cannabis indica
ttgaaatattatttatttattatgtcacttacgattttcgaacagctttgctcaaagtagatgcagaagtaaaagtttttccatcaaaatatctgttctctcctttgatcctctgcttgattcttatgtctaactcatcagcattaagcacaaaaggcttatccgaagcctgtttcaattcatttgacaaaattaatttagtgcattaatcaaaggtaattaattaattaattcaataaaatttgaactatatttatcataccatgacccaaccccaggtatcagcataggaaggaatatgagctgagtaaggcacaacatctacatataaaaaataaaaaaagtattgtcaacatataaaacaaagtcttatctatacataatattttaaggtagattaagattgctcttacatttgaaaacttgtcttaaagtattgtagatgcaagagaacacttctgtatggctaaaaatcccagctggaccagcctgcaaaattcattatattaattaagaattttgttgcttcaatcttaattcttatagta

SEQ ID NO: 257734 - DNA, 710 bp, Cannabis indica
tatgtaatttttccattaataatttgtataaagatgaggcagcttctacaaatctctaactcttcgaaataatttacaatataaaaagtaatattcatacagctattttacacgaatataaaaaagttatgtgtgcaataaattgtttgaactttatttttggtgtgttcaaattttttcaaattttttaaaattttacaaaatgtcttaaatcactacaaatgtacacgaccatgaaaaaaatttagactaaattttttttctcagataccgaaacaaataaaaatgtatcggtgtacccattttaagagatgtattttaagaagtgcattaaattttagttaacatgctattttctattaaattattttttttccttaattaattaaaacaatttttccaaaatcttttttctggagcagattggcaagattcttctatacaaacttcatcctctaagctattcttttctccaccaattcacagtatacactaactgcttctttgtcttcaatataaacactttcatccttcggtaaactaaatttcaataatttgcaagcatctaacatttttggtcataatgcagccttaaaatattataattggcatatcttatatcagcaaagtttgaagtttccattcatcaagatacacatttcaatgcatatattatgccacaaaccattgagtcaacaaaattctacttg

SEQ ID NO: 257735 - DNA, 940 bp, Cannabis indica
tatcccaacagtttttttgctacagagctaaaccgatgggaaaaacttccacttaccttttccaacggttccaataattgaccctcttttaaaccgttgggaatagcctattttgtagtagtgaaaccaaccatgtcaataagggcaaaccctaatgaaagatcaatctatagaacaagaaattaataacaatcaagggatcacccagatcaaactactgagtagagaaaccttactgattagaataaaaactattcctcccactaaagaaattaaaaaaaaaaaggattaaataccatcacatcagacgttgtgtctctgccactaccacgaggatcactacagccagtcagtagaatcatcaccacagaaaaatttgacaaaagacgtgaaatccccacccatatctccattgtgaatcccaacctctacgaaccactgacacccattcgagatcatctctgccagactcatcaaaagcaagaatgccatccctaaagaacaaaaacccaacacgatggccagatgaaaaaggagcagatccatgacgacgaagccccttgacccaaatagggacactcctcgtgaacccaaccccacaacaaatctgatcaaagccaatcctaaccaacaagcgaaaccccaaagattgaaaaataaacgacatcaattaatcctccatctaggagtgttcacagattggtttggtgtgaatttttaaaattttcaaaccaaaccagttttatggtttttaaaaaattcaaaaccaagccagaccaattaaaagatcaaaccagattaaaccaaaccacgcaaaaacagattgatttggttcgaaccataatttatatttcggaattgttttaatttttttacaataattatttatttttttagtatttttttttacttttaataagcttataatacataaataaca

SEQ ID NO: 257736 - DNA, 2048 bp, Cannabis indica
aacccaaactcggaccagcactcgaacgccgaaccgaactcgaaccacgacccgaactctaacccaaactcgaactcggaatcgcaactggaactagaaccagacaaggactaggaccaggaccaggacaaagacccagacccgaacccaaacctaattaaaaacgtagaccgagacctaaacccgcacctagatcgagacctaaaacccgagaaaaactgggaccttgacctaaaatcaggatagggacttgggcagcgaaactaggaccgggacccaatacccgaccctagaccttgactttaacctaggacccagctcgtgacccgtaacccaaaattgaatcaggtcaggacccgagatcgggatctggatctggaactgggccttggaccgaacctgtagttggtgtctagatttgggaccagcctcggacccgaacccagacgcagaccgaaacccagcaccataccaaaacctggacccaaacccgtaccctatgatctaaaattggaaccgaaacttgaagtagacatggacctgggagtgggactagaaccaggacttggatctggagttggaaccgtaaccaaacatggaccatgacccagaaccgtagtcggaccatgaccaagaatccaacccagacctagactcgaactgggaaccagccccggctccccacccaaacctggactcaggacccaaacctggacccgaactctgacccaaacattgaaccaaactcgggacacaaaacttgggtcgggacctagaaccgcacccaaatctcggtcccgaaacaaaactttgacttgggaacaaagacctgaaccaaaacaagatcaggacacgtgacagggatctagatcagggactcagaccaggactcgaacccaggccaggacccaaacctggaccctgacctagacccgtgacccaaaattggaacctgaacaagaaccgccagacgaggatcctcgaaaaagactaagaccatgacaaggacctagacccagacctagaaccgaactcgaacctagcccctggacctagaccgggatcaaaactcgggacctagatccagaccgagccctgaccctaaccgagacctggacctgcactcggacctaacctgaacctagacccaaactgggatctagacttggacccagagccgaacccaaactcggaccaggacacagaccccaaacaagacccggacccaaacccaaacccagacactgaatcaaaatcgaaacctagtctagttacactatcctaggtcctggtctgggtcctagttcacggtctgggtccaaggtcaggtcttgggtctcagtgccagttccaaagccggggtctcgggtccaagttccccatccaagtcccagtcctaggtctcagtccgtgtctaggacccattcggggttcaagtcctagttcgagtataggttccctttttgatccctctccaggtccagatctgggttcgagtcccaagttcgagtctatatccaagttggggtctgagtcttgaattctgatctgggtcagggttccgaggcctgagtccaggtcaattactatgttcgggaccatcttcgatttcgggtcctattcccagttcaaattttaattctgtgttcgaattcgggttcgggtctaggtctgggtcggggttggggtcctggtcttagtatagggttggctttgggtcaaagtccagatcacggcttgggtctgggtttgggtccaggttcgagtccaagtcttgggtacgggtccagattttttctaggtctcagtccagatcaaggtcccaagttttgatcccggtgtaggtatggctccgagtctgggtttgggatcggttccgaagttcaagttcgacctgatcccgaacttgaacctgaacacgaacttggacccggaccaggcctaggacctgaacttagatgggggacccagaccttgactaggaccagaacttggtctcagaacttggatgaggatcgaggacccgacccaagacccaaacctggaca

SEQ ID NO: 257737 - DNA, 603 bp, Cannabis indica
ttggagtcctaacacataccatgactaactcaataaattttcctgaaaactgcagagcatacaacatttaattcctttaggaaatcccaatccaatgtgtcatatgccttttgcaaatccaacttgatcatgcaatttggcttggctaccttccttccatagcttcggattagatcttgacaaatcatgatattatgtgctatatatctaccctttatgaaccctccttgattaagtgatactaaatcagggagaatgttctttaacctagaacatatcaatttggtagcaaccttatatagcacattacaacatgaaataaatctgaagtcactcaccagattaggactcttgactttgggaatgagagtgatgactgttgattggatataaacatgtcacgtgtacaagagtgtacatataagtagcctatgacggaagttaactggataacatcttaaatttattaacaggtcagtagtttggaagattttaccgttaaaaatttgtgcttagagggttaactatacgtaaaacgatagttgagagggtttagccgccaaaaactcaaaaaaaaaaaataaaataagagagagagagaga

SEQ ID NO: 257738 - DNA, 876 bp, Cannabis indica
tgagattcatcgtgacaagaatcgaaaaagttcttgacttatcttaagaagcttacattaatcgtgtgcgcaaaaggttcaacatgaatttatgtaaggatggtgatgttcctcttctaaaacgggacaaatttactaagtaacaatgtcctaaggacgacttggaaagagaagaaaagaaaaatatcccatatgcaagtgtagtatggattttgatatgtcctcaagtttgcactagacctgatattacttttatagtcaattttcttgggagatatttatctgatcatgatcattgggctatagccaagaaatttatgctatatttgcaacggagagttttatgcttatatataagcatgtcgacaatctctgagttgttggctattcatattcagatttttcgtggttgtgtagatgaattaaagtcaacttctcgttatatttttactttggttagtgcaactatttcttgaaaaagtgttatgtagactttatattgcatcatctactatatatgttgagtttgttgcatattatgagacatctttgcatgctttatttttttaagaatttaattttagagatacaactagtttactctattttttcttaagttattgtaaaaataatactgttgttttattttcaaagaataatgagattaattgtgcttttaaacatataaaaataaagtatttcactattaaagacttgatcaagaaaggagacagtgtaatagaatattgcaagaccaagtcaatgttagcagagtctctaaccaaataattaagtatcgtgttgtttaataaacatgttgatatagacattttataatcttttgtttctttaagttagtaggagtttcttgttcta

SEQ ID NO: 257739 - DNA, 633 bp, Cannabis indica
ttttttttttgttttacatttttatagaattctatatagaaattcctattgcaactagcagagcaacctaaattgcaaccaaaaatcgtatagcaacttacaaaccgtaaatttgaaaaaaaagttaaagaaaatagtatataaaataattttccgtttttaattaataaattttaaataatttacagtgtataatccaaacatacacgcgtgtaaaaaaattattttcaaattttatttttaaaactgtaaaatattcaaaagtttatcaaaaacggatggtaacatcatataataataaaaaaaaaaaattcgaaagagtaaaaataatgtcccacctaattaagaagcactatatatatatattattgttttataattaattgtattgctaggtgtcttaaaattctatattaaattgcactttaataattctgttaaatatatgattttttccctctaacgattctcttgttttaattaattagctaacttaattaggttatataacttgttataatatatatccatatattcattgcaaaaaatatatatacccaatacccatatattaatttcatattataaattattaattaatttttctagcacgcgtttaagcctgatacatat

SEQ ID NO: 257740 - DNA, 630 bp, Cannabis indica
ttagctgccaacttctgggggggatacaaaagaaaataaaaagatccattggagcacgtgggctaagttgtgcaagccgaaagaggaaggaggcttaggttttcgaagcctaacggagtttaatcaagctcttttggccaagcaagggtggcggttaattcaccatccccattctctcttggcaagagttttgaaacacagttattaccctaactcttcttttctgcaggctaagtgtaaaccgggggcatcgagtatttggcaaggaataacttggggtcgccaaataatagttgaaggagcccggtggagagtgggaaatggaagaacggttagaatttgggaagacaagtggatcccgaggccaaatgacaccatcacttatcgccacacagatttagcccctaatacaacaattcacaagttgctaaccgaggagggtgattggaagacggacatgattcatgcttacttccacaaagacgatatcccttggatcttaggtacacccgtggacattcaagaggaagatgtattaacttggcctctctcttctaaaggtcattacttggtgaagagtggttatagagtagcccgagagcttaatgtttgtcccactagatgttcgaa

SEQ ID NO: 257741 - DNA, 540 bp, Cannabis indica
ttttctatctaattaagaaaatctcctatttttatatcatattggctgagattgttccatcggtaaaaaaaattttaaaacaagtaatttagcaaaaaaaataagaaaagaaaaagttgaatttgagttaaatatttttgtatgaacatatttttcatatagtgtaaaaaaataataaaaaatatataataatgatagaataaaacaaatatataatatatgtttctaaataatttgaaatcgataaataataataaaataggttataaaaactcataattcaaagtattctaaacttacttatctatttatctttatatatatatattcaataataatatatattgacaataattaattaatttaaatttcttcaaattatgttagataatgaaaatatttttagaaaattaattaacttaagagagatatggactgttcagtcaattacatatttatgacattaattaagtacaaaaaatgagttgaaggctcataagagtatatatacggatttagagatctagattgtatgattaa

SEQ ID NO: 257742 - DNA, 522 bp, Cannabis indica
tcgatgcacagtcagaaatgttattggttaactgaaccaatgggctgctgtcaccccgattccagtttgccaatataatatcagcacaagcttcttcccttaaccagattttttcaaagcggaaccgagatttgaattcaacagttccagtttgatcagatttagccgtgatagtagctttgagagctctatgatctgatctataaaaatccaggtgctgcaaagatggaattaaaaatgtagaatcccattgattattgatgaaaccatagtccagtcgttcctttacatgcccactgccatgacttttattcgtccaagttggcctttgtccatcaaaagaaagttgggatagtttacaggcatccactacagcacgaaaagcctttatctgtgaatcacttcgtcgaggcccaccaatcttatcatcatgagaaataatctcattgaaatctcctaggacgaaccaaggagaggagggtgcaatatcagaacatcgacgcaataatgtccaagtaagat

SEQ ID NO: 257743 - DNA, 832 bp, Cannabis indica
tgactctgatgttcataatattgtcgtggcacatgtgggcaatgagccgaatgaggttaatatggtggggttgcagcaaaataatattgtggtcagggataagagtttgaatagttcatcttcggatatggatagtgtggctgaaatggtgatacccgtagataatgggaagaaagtggctgtgggtgagggtgataatggcaaagttaatgcttctactagtgctactgtggacttggttaatgaggtggaatttggtgaaagagtaatcaaaagttgactaaagaacaaaagggtaagggtgttttggcacattcctctcaagatgagctctcttttagccatgcgctacaacatacatttgaaccacttataaaagcacaaaaagccaaaacttggaagagaatcaattcttcttctagccgtgggtctaaaggtgtgtccaagctctcttctttccccattagtcctaaattatcacatgttatggttgctaatgctaaatacaagttgagtccgaaggtcaatggtggtgggaagcgcaaaatggatatagagggtgctaccgaaagtgtgaaaaaaggaagattgggtgagcaagtggacatgggtccggaagatatgaatatgttattggcgaagcctgcggagcaggctcgccaagagccatgagtctgctatgttggaacgcccggggattggggaatcccggtgcgttgactgccttgcgaacgattgttcgtaagttttccccaagtttagttttttatctgaaactaaactttatggtggttgggcggaaggtataaggcgacatgttaactttcagaat

SEQ ID NO: 257744 - DNA, 1419 bp, Cannabis indica
aagactaagtgacttaaaaactacttttcatgtcacttagggggtactaaggaatatcatacgggaaaatataaacagattaaacataagaaatataaaaattaaatatattcgaacataaagtagattgtttaaacaagaaaatcttaaaaagaaaaggcctcgggacggccataaaagtctccccttaagtaaaagaagaaattgtcttagaagtgaggggaaggacacgatatgtaaaaaaagagataataataataacagagataaacaaatgatttaatcgaaccgaaaaggaagacgaggacccctgcgctcctccagcactacatccagcctcttcttcttctcccagaagcgagccagaacctcttcaggcttgggatagaagttgagacaaagattttggttgttagcctgccaagccatgaaaactccatcatcgaagcgcttcttgcagtgctagcaagtgattggggccaagagagcatctctcttcaccttggccgcctccttttgagcctgctccttaaactcaggaagccccttcacttcaacggttaggttcgctatcatttgtaaatccgcctggtgcagctcctctagagacttcaacttgacggtcaattcctgcactgccttcttagaatcccaaaggtctcgcctcgctgtggccacaaccgcatccttggccttcaatggctcgtccttagccttcagtgcctcctagtcgctccactccataagggcctctttctactgggcttcctcccggatagctctcttctgcgcctctgactcccgaagactcttcatggcctcctccatgcccctgaactcggacatggtatacccatggtcaattagtgtgttcgagagatgatcggtctctgcagcaatctggcaaccaacaaaaaatacaaatacgtgatctcaggcatcaaaaagaaaagaagcttgaatatatctctaacagataggagcttaccacggtaagggccgcgctcacgtccttgatttggtagacgagattagtagaagcacaggccgcgtatctcttcatcaggagttgatttaggtcggcagccaagtggctcatcaattgtgaagcaaagggagccagggtcggtccaatgaaatggttgaaccagtcagtcacgtgatccagatttaaatccctgacattcccggcgtactcactgagagtaaaactatcctgggcctccctcagaatctttttcaaggcctctacttcagtgttccccttcgtatactccaccgtggcataattgtgcttggcaattcagagctgagtcttttcctcatcaacaggattgggggttaagcaatgtcaggtggcactgtatactcgtccacctcggactgaactccctgtgctgaagctgggggtgagtgcct

SEQ ID NO: 257745 - DNA, 1129 bp, Cannabis indica
cttagaagtggaaaacagtctttgcggcatgccttgttgaggtcgctaaagtcaatacatactcaccagttttttattgggcttgggtaccagtatggggttagctacccaggctgggtagaaagcctcaatgatgaagttgttgttgcacaacttttctacctcttcttttaatgcttgagcccgttctttatccagcaatcttcttttttattgaatgggcttaaagtttggatcaatgtttagggcatgtgaaattatagaaggattgatattgaccatgtcctcatgtgaccaggaaaaatgtctagattttctcttagaaattttatcaaagctgattttacttcaagcaacaaacctttttttgattttgagtttcctagtcgaaacacttgtgttaatttctatctcttctaattctttcaccggcccaacatttgtgtttggttccccaagtcggggatccacatcctcgtcctcgccttgtgcgattccctatttggcaatgcttttcccctggtccgaactctgacctaaggattcttcctttttggcctcggttagggcaaggttgtaacattcccgtgtaacttgttcgtttccctttaggcaccctactccattctttgtttggaacttgatgcacgaatggaaaattaatgtaacaacttttaagtcatataaggctggtcgtcctaacatgacgttaaaggctgatggaatatcaagtaccaagaattgtgcctttacagttatgctttttggagcttgtccaacagtgagggtaggcaaattttccctaaaggtgcaacactctggctggagaaaccatagactggctggaggtaggggattagatctttgagttggagacccattttctcgtacggtgttttaaacaagatatttgctaaggctccattatatataataattcaggccactgttttgtttactatatgttttgttcccctaccagtggcattttaggcttcctttcctctacaaccagaaccacttctttttgttcgtgttgtaaagttcgggcatacatctcccgagctttgcctgaatctccagcaatttgtgggccttcgatgataacttgtaaatgcccgtccactgg

SEQ ID NO: 257746 - DNA, 1466 bp, Cannabis indica
ataattttaaaagagggagtaaaaattaaaggcatcaatttaaaagatgtaagtagtttaatttcctctaataattaataaatatactttttatttaagttataatgttgtcattaaatttttaagttataatattctcaataattatttttttgaaataaatgatttatttattattagtgtaattattgattttatccattagtacttaaaaatactactatatactatacattagagtaatttttaaaaatattgtactaaatataatatgtgctccttatcaaaaatatatgtaacataatatttatcttattttttttgggtaatgcatttttatttttataagaaaactttattacctccttatagagcaaaaaataaaaaaaattaaaaatattatattatatttgttttgagtaatgcactaaaatattttaaaatattacattcttatcttaaataaataaataaaaaatgagccctaattatctctacaattttaaactaatgactaattatgtaaattatacatacatatatattttttaaaaaacaaaaaacccttaaaaataaaaaaaaaaaaaaaaaaataagacaaggagaaggatcgaacccatcacctcaacattaccatccaatcctcttaaccaattgtacttcatccgtagtgaagtaggttctgcaattaattgtacttcagttagatagatagaattgcatgttagatgagtttgaatatcttaaatattcatctgtagtgaagtaggttctgtaaatacatatattgcgatcggatagggtggataatttttgtattgttaattattttgttttgttttgtattgttttgtgatattgtttattattttttgcatgtttaaaatttttgagaatgttcgataatagtcgttatgctgccaaaattttgatagaattatgataaatttcacaaaaaatacataaatattagaagaaaagtgttagattagggtaaaattatctatgtgtggtattgaatttaactaattaattactacacatttaaccaaataattgaatataattttatttttttagaagtttcaaaattaatagaaattagatgtagtgtgaatagattatcagcagagtatatgaaaagtgttgaccatttcttggacttttatcaaaagaatgcgaaaaattctaaattagttctttgttcttgtcttaaatatggaacatacagcgtatgagtattactaagataatagagcatttatttaggaattgaatagacaagagttataagggtttggtctcaccacgagaaaaattagagttctgggtgagggaacgtctaagtctaagaaggttaaaggtgttaatttagattatgaggaggatcacattttaaaaaaataggagatgaacaatttgaatcaaatgtcgatccattaaaattttaaaattttgtagaggat

SEQ ID NO: 257747 - DNA, 1697 bp, Cannabis indica
aaatgaacatttgcttttaagtgaatggccttttgggcggactacgctcaaaggtttcggtaaaagaaacaaagtactcaggttgtgtgagcactttaaagtacagtttcttatgtcttcaatttgttttatttcatgttaagctaaaagatcagattagatcaaatagctctgatgtaagttactagggtaacaaatacacttttcgatcaataaacgaataaagatagttatttcaaaattcaattgagtcgaaattattagcatgtttctaatttaccatacaatgcgtacaaaaggtttggtcaaacccataacaccgaacagataaacaatatatttgtaaaagacaagtgaccaagattcatacgtttgctcggtcacttggggggcacctatacctgtacaaagcatttggtaaaaataaaacaatcacgattgcacgacaattataaacagagaatgaaattcattaaggataaccaaagaacataatactgggattaaaagctacccggtcagcctgttgtctaaaaaatgaaaaataattccaattttaaagaccgttggctggtcatgatgtcttagaaaaggccctgaggccgaataagagatatcaaataaagagataaaaagagaagtgtttaagcacctggagtcccaggctcttggtttggttcttctgggccaaccgaagcaggaggatctattgtttgaacaagaggtgcatcagcagcctgaccggaggttgaagcagccgcctcagtttcgccataggccacttgggacgcgcagaactcaaggtacatgtcgttagcatcaaccaagtagtcaaaattggcctaaggattagtcttccaaaaatcaaagaagagctcaagaccgcctgtctccaaggtattgaccttctccttcaacctgtccacctcagctgaaagctcctctcccttggcttccttttcctcctttatccgatgaagaactgctcgaagggaagtcctctcgtcctgaagaatgtttacctcagcagataaggtctcgatggtctcctcaaaacggtcagcaacctggagatccttaatcaccatagtgattttcttctgagcggcaaacaacttcttgttggcttaacccaattccaactgaatagctctgactttcgccctggcttcttcggcatccttcctggccaagtctgcctctgcccttagggtgtcagacagagtcgtgttcttggaagcagtagacttagcccgggagtaagtgtaggccaacttcagaccggcccgcacaaggaaaaaactttagcatttgagctaagtatggaagattaaagtgaattattaagaaacacttaccctggtgaactacttcaagactccacccacccgcaattccaaagaagagtcattatcagcaccagctagttgctcactgacctcaggaacaagacggttcatataatgggctagcatctccttgccctttttggcctctagaagctccaacaaaggtggagtagtgcctcacccgtttaggatcactcctgactagttcagacccaaccttcagtggtccagactccttagacttggcagctttgggggtagagggaattgcagcagtcagcttttggggtagaggggtttgcacaagttagctttgggggtagaggccttggcggggccgggagtttc

SEQ ID NO: 257748 - DNA, 562 bp, Cannabis indica
taaaatattggatagacccaaattaaataaatatgaaatacatccaatgaatagaaccgatccaatccaatatccaatggatgttggatcgattggatgacaaaattaattggatcggatcgcatggtaaaatctaacatccaatatatgattggatcagatctaaataggcctgaaaatattggatgtgatccttgattttttcaccataagatgttagtaagacaactatttgacaacgcgtaaacaacgtacggacaactatgtatgaaccatatgtttgggtattattaagaaaaaatttaaccaactattattagactgatgaacaaagatttgtagtttgatgttcttttgtgaagaatcaactgtaaaaacactataaatcaatgtcaactcaatcaatgttaaaatataaacaaactaatcacattagaattatttttatgagagccttgtgtaggattctctacatgaaataccctcaaataacactaaaaatagtgtaggctaatcagtgtataagtattgttgcatcaatttcttggaaattattttacca

SEQ ID NO: 257749 - DNA, 716 bp, Cannabis indica
acactagcttccatgatcagtataaggtattgatatccatccaatagagtcgacgaatcggattgaaatcagtgtgaagaagagccatgcgatgactaatcaagcacaactaaatagtaatcatgtccacaaggaaaggaaaaaaaatacgtcttccgctcctattagggtgctatgatgccctaactctaatgaacagttcatattgatattaaatatgtgaatgattctaattatattagtgacattcaaattgatttcttacataacaaaaaaaaaaatactcattaaacccatgaaatagtagcattaatttcaattaaaccccaaaatcaacattatacttacaaatattttatatataacaatatcattattaatatttaaattattataatttatatttatgatataaatgtagtattataataatattttagaatttttaataataatataatatgtttattaaaaaaataaacagttttacactataaacatactaaatatttatgatcgattttagtatgatttatcacaaatttatgtttattttataatatattttcttataaaatattcgatttatataagttgtttttattttttaaaaataaaaataaataaacatgttttaagataaaattaaataaataataaacagtttaatagaagtagttttttattatagtatataatttattataaatatatat

SEQ ID NO: 257750 - DNA, 537 bp, Cannabis indica
atttttgtaaaaaaaaaaagtagaaataccatatttgtaaaataataataagttttgccggaaaaatcatcgacaccgaaaaagtcgtcggcaccggaaaacttactagaaagttagtatcaccgaaaaattcgctggaaatttactgtcgccgaaaaattcaccgtcaccaaaaaattactgaaaaagtcaccagaagtagatgtctcaaatataactaaaaatataaccggttctatgaataaatattaataactcaaacgggttataattaaaatataactggttatgtaacataataaataaaaataaataacataaaataactcaaaccagttataattaaaatagttacggttctacaatagtattataatgaataaaaaccaataacactaaataactcaaaaccggttataactaaaatagaatcggttatataacataatgaatacaaacaagtaatacacaaaaattcaaaccgatttcaattaaaaaataaagggaaaatcgattcctaaaacactaaaacataaa

SEQ ID NO: 257751 - DNA, 529 bp, Cannabis indica
cttacgtgtttttatggctctccagttgactctcttaagcctcacacttgtaatattctgaatcggattggtaagagtaatcctcgggatccgtggcttatcattggggattttaatgcttttctcttttcccatgataaataagggggaaatcccgacaggggcccctcctctgatttcagacagttccttgactcttttaacctctccccgcttgaccagcctggtcccttgctcacgtggaacaataatgtcgcatccccaaaaaacattcaagaacgattagactggggtattgctaataactcttgcaccgaaaacttccctgacgccgctcttaatcatttgggtttcttcggttctgatcaccgagcccttgagcttgtcacttccaatcctccgggcactcgtcccaatagtaatagtaaacgttttcacttcgagaatgtttggcttaaggacccaaattgaaatcgtgttttcgaccagtcctggacttgccacctgacccagcatgagcccatcctta

SEQ ID NO: 257752 - DNA, 895 bp, Cannabis indica
attatctcttagagtaagttgacaaatgtttgtgttactagcatataatttgcatacacaaaacaactaggactatatattttggtcgagtttgacccgtactggccaactcacttgaacccgatccgatcaacctgttgtttgggaaaattcgttccctacgggcgagtcgggtccaacctggtcaactccttcggacgggttcgattccgattttgctaacccatgggttcatgttggacccatacctgcccacaaactcggccagtttttttaaaaaattttaatacaatataacattaaataaataatatatttttatataaaatttcagtataaattatatgtatatgtgtaacaatgaaagtaaaaattaaaatataaatataattttttatatatatatattatctattatattggagatatgtatatgtatactatactataatcattattttaaaaagacttatgctttaaatcatatggaaattaaatttataaatacttttttaatttaaacatttttatggtagacaatagctagtacagaatgtatggactataaatttttagtcacaatttattttgatacttttagtttttattatcatgttcatcataaaacaaagagcagaagtttgatgaatgatttatttggttttggatttattaaaattatattattattttggattacaaatgttttttttctctaaagaattttggttgataaaaaagcaaaaatgttgaccgagagttgatcgaatttgtcgggtcaacgatcaacccaaactcgtggaccgacaaacttgtgagcccgaattctttaaacggatgaatttgggttccattttttaggcctgaaacccgcaaacttgaaatccagtcaacc

SEQ ID NO: 257753 - DNA, 553 bp, Cannabis indica
ttttttttttttttgagatggatttctatgagttttattcctaaacttttacagcatgtttatgtctgaggttatatacatgacatattaggcattgtggtagagaaaatgttcaatcataatagaaaacaacaaaatatagataagcaatcaatcctattatgactcaattagatacttatttgaacacacaaaaagtgactatatcttaccatatagagtatcaggaaaaaaaataataaaattaccatatttatttaagctttttagcgaagaggaagacaaaccgaatatatcaaggaacaacatgatgttgagtgagccagtttatactaaaaaataattagattcagatagaaatcactttaaccatgttcgagagactcaatataatcatagcccaaaaatatcatggacaggcaacaataattgacactaaaacctacgcaaaccatttaatcaataagatcttggttaactaattaatcaataaggtcttacttaatttgagaggctaagagcatctccaaggagaacatcaaatttgatgtta

SEQ ID NO: 257754 - DNA, 634 bp, Cannabis indica
aattaatataaaatcacaataacacacctaaactagtagggtgttacaattttgtatcagagccactaagttgtcttcgaagatcatcacgatatgtacaatcatcattatgataagctcgactcacggttcagtaagcatgtattactttagtagcttattgttttattagtatgttataagaaaagcatgataggaagcatattactagcctggtaattgaatagacacatgttttaatttcttaagtaagtggtaattattaatttattcttgatcgtgatttgaccaggctagttcttagtttcgcaggttgttctattagaatggacgccaggcagaacacgagaagctaggataattcggtcgaatccaatggcggtcaggaagtttagtttcccccaaatatttgtggctgaggtagaggcccaagaggtaggatgcgtggttggggagatgttaaccccatcggcagggctgggccagggattggggagaacaggtttgcaccatgcaagccagaataaatgagcaaagatgagaaagatccggtgcttgaggcaacatggtgctcctgcaatgcctgctcctatggtgcaagtgcggtcctgcccctgtgtgcaggcagggtcga

SEQ ID NO: 257755 - DNA, 531 bp, Cannabis indica
ccccttgatcttccagtctcacggtcgttaatgatcttcgattcaaagatttttaaaaatgatacttttaattctcactttttaattggatgtgtagaatttttgtttttaaaaaaaaaattaaaattttaataacgtacaaacatatacattttatacaattttaatttttaaaagtcatataaatcaatggttaaaaagatgtatgcatagcataagaacaaaaccatagttcctaccatagaatttctctatatttacatataaaaaaaacttattttttgaaataaatatgggaaagtgaaggatggaacctaacatatattgtaatttaccgtttaaggtataactttttttaatgcaatttatatgaattaaatttatatattatatttttatatatattaatttaaaattttggagactccaaaattgtaaagcctgagacctaggccttagtcgctccaccctttggccgactctctaattatagaagaatgaatttttctctaactaagaaaatctcttttt

SEQ ID NO: 257756 - DNA, 1716 bp, Cannabis indica
cattccattacttcctgggaacatttgtcaaggacttcaaaaaacaattccaggccgcaagggataggcgacccgaggcgtccacgctaaccaacataaagcaacagccaggcaagacacttaaggcatatttaagtcgttttagcacggctgctgcaagagtaagaaatctggatgatagtacacaacttactgcccttaaagcggggatcattactgatctatccaccgctgagggcaaattgtgagacgacttacagggtcgtctagtgaagaacatcactgagttcaatgagagggctcaggtgttcgtctgaaaaagaagaagctcgaaaaaagagatgaacttgttaaaaattggctcgggaagcaaacccaccaatgtttcaacaagtactatctaaactagagttgataactcaggggcctttgactcaaagagaaaagacggttctaaggggtcatcaaaggacaaaaagaaataaaagaagcatgataagtacgtgccagtttatactatttataccgagcttaataaaactcgggaaaatatttacctcgtacatgagcacaaggttgcctttagcaaacctgagctcatgaggcacgcaaggcataaaagagatccgaccaagtactgcaagtaccataaagacattgggcacacaacagacgagtgtcgtcagctaaaagatgagatagaaagcctcatcatgcggggccacttcatgcaatatgttaaaagacagggcaatggacataaccagcccaatttgcccaacaatccgaacaaccagggattacaacctcctcgttttgaaggagaggacatcctggttatttcagaagggccgcatattgcatgagagagcaataattcccaaaagaggcatgtgaaggaaataaaaaataagcagtcggtatttgctccagaaccttccaagaaggtaaagctgaagaacctctaatcgtattttcgagggaagatgagaagaacgtgagatatcctcacgtcaatccattggtgattactatctagctcgccaataaaaggataaagagggttttgatagataacgggagttcaatgaacatccttttcaaggaaacactacaaaagatggggctcgaaaaggcccaattgagtccttgcatggtaaatctatgcgacttcattggtgacagtatcgccaatcaaggtataatcgagctcgcattgaccaagggtgaggcacccctatctgccacaattatccaagactttctggttgtcgacctaccatcggcttacaatatattattgggtcgtctagcattgatcagactaggggcagttagtttgatcaagcatcgatccctgaagtttcaaacactagagggtgtggaagtggtacgaggcgatcaaatgctagctcgtgattgctatcgcatagagctacaacacagaaaagtcagtcaccagttaatgatagtcttggcagaggaaagagaaaagaaggatgaagatcttgatccttagattcaagataaaagaaacttactaaaaccaattgaataattggaagaagttgttcttgcccaggaaatcccacatattgtgtttagattgggaagaacctggacgagcagttgaaatagtagctaataagtttcttacgggcgaattaggttagttcgcttggaaccatggaggtatgatagggattgaccctaata

SEQ ID NO: 257757 - DNA, 765 bp, Cannabis indica
cctttcctttacctacacatgaaactagcactgtgagtcaacagactcagtaaaaaaagcatataacatatcatataatatcgacttgtatctaggcacccatacacctatttacaaggcttaacaaatgagtaagaacattccatactagggtacacccactataccacatatactttgtaccaacattgtacgagtgatggtagggtttattttgtaccctaagtaccactaagtgatataccacacacaccctgtacttgtgctggtaacacctaaatgtactctttaaacaatatacactataccaatgcactctataccatttccgtacaagtgttggtagcgtaccatccataacaagcatgcatatacatttaacgcatacatacattcgcatatttatatcacatattatatgatgttcttacctctttcctgaattcacgtgagatggctgacctgaacgaaaattctcgtgttggatggatgctctaatcacatattaaaactgggtaaataacaagccaaaaaccctaatttcgaaaactcgaacgtccaacctaaggttttgttaatactaaatggaaccacaataccctaggaaataggaaatcacccaaccaaggcactactgtggacataaattgagaaaacaaattgtttggggaatctgccaaaactgattaatcaattttataggtcctagcaaaccgattaactggtttgcactaggtctccacaaacaattccaaacttgctcaa

SEQ ID NO: 257758 - DNA, 795 bp, Cannabis indica
tttagtcaagtttttatattatcacagttttttttataactaattaatctattagtattaaattagtttataaaatagcatacgtggcgtccctaaggatatagcattacaccatccattaataataagataaatattacaatctttaaatcaagagttaattaataatcaagataggattaagataatctcatcgttctccatcaacaattctctctcatccataaataccaaaacgaaaaggaaaaaaaaaagcttataagcccaataggaaaataactaatatcaaaggactagtagttttataaaaattcctgcatagttagcttttaaaacaaaacatatctcatcatcatcaagtacaaaaaataagagaaaccataaataatcacaagagacaagctacccatgcatatcacaccctctactaaacccctagctctcaataccaatcatagaaaatgatattcaaaatcaggtagtcgcgcctcataatcaccataacagtactggggctcagattcaattcacgcctatacagattctaggtctttcacctacaagtgagtatacacctgatctacctatgatgacacatagagactagatcgtgaaacaatagtatgcacaaatcatgatcacgtggctctcatcagtaatcattaaagccaaaagtaggcaaataagaataacaaaagaacatattccctttttattttagaacattcaacagcatgatggctgtaatttaaataaatctaaaaatcataacttgcataaataattgtacaaaaa

SEQ ID NO: 257759 - DNA, 173 bp, Cannabis indica
cccatcgtcgaatgtatatttctccataacttttcctggattttgtatcgtcaattctaggactgaaacctttccatcttgcataagtataatagaatgcctcccacatttttagacttaccatctctttcccttcaatatcatgagtatctatttctgcaactgatttggat

SEQ ID NO: 257760 - DNA, 758 bp, Cannabis indica
tttaattttttaatcaaaaaaaagaaagtagaatttttgttttaaaaattttgttcttgaaaaataaaaatgtgttctataaccacttttgttttataattttaaaaatagaaaacaaaagtatgttctgtgaaattcatttttattttattttttttatttaagtcgggtctgggttcggtcaggtgttaggttcggagcaagttactcaagtagctcgtaatcgaagaggcagagcaagtttttggattttcaaacaagtacaaacaggtaatgcaaccagagtttttgggtaacgtggaaacgagcttaggttctaatgaggagggagaggggtcacgacgggtttggggtattgaacggagcaaggacgccagtggtgcagtgagagttttacttggcgacgaccgcttgggacggagctgaaaggatgtgaacaatcagagcttgtgtcgtgatggaaaagatggaccaaggggttggtgggtgatgggtttttgggggtggtttcagggagcaagaagatataaaaaaaaatatattaatgttaattttttattattttaaatgatttgaactaataatttgtgaacacattgcattttgaatctataaatggatctgttagaaaagaggactaatacacttacaaaaaacgtgaccttagaaattattatcgcaaatttttcaagttggggacttgtctgcataaggtactttttagggactcataattttctgtaacaaaaatatttttt

SEQ ID NO: 257761 - DNA, 1656 bp, Cannabis indica
agtggaccgtcgatcatcgacacagctggcccaatctgcatcggaataggcagtaagagacagccgagacactggtttaaggagaattccatcagaaatggtgccttttaagtaacgaagtagccgcttacaagcttcccagtgaacatgagtgggtgcatgaataaattgggacaacttgttgatgataaaggcaacatcaggccttgtcaaggttaagtattgaagagcacccaaggtgcttctgtataaggtgacatcctcaaaagggagtccttcatgcaaagataacttgtgagaagtggaagtgggactagcacagctcttagctccttcgagatggactttgagtaaaagatcagcaatatattttgtttgggacagatagagaccctcagagcttcgatgcatttcaacacccaaaaaatagtggacttgacccaagtctttgagagaaaattgagtgttgagatccaaaataagcttctgaattagagatttgttagggcctgtaacaagtatatcgtccacataaacaaggagaatcacaagattgaaaccagtgccacacacaaagagagatgtgtcggctttagatgcagtaaatcgccagccaagtaaggttgatttcagcttgtcattccatgctctaggggcttgatttaagccataaagagccttattcaacttgcaaacatgagttggatatttggagtcctcaaaaccttgtggttgactcatataaaccgtctcttgaagagtaccatttaagaaagcattggccacatcaagttgtcgaatttcccattgtgatgagatggcaagagtaagaacaagtctcactgtgacaggcttcacaaccggactaaaagtgtcttcaaaatcaattccaggtttttgaatccaaagtcagggacagtattagcaacaaaagcagcaggatcatagtcaagggtgtgttctgtgagatgtgcttgcggttgggaaggggcagtaggggctttgggtgtaacccaatttttatcaaatctatagtgacaagtaggagcagtatgcccatacctcatacaaacacaaaggttgattggagttggtagatctcgagttgtagggtggctgatttccacgagtaaaaaatcttgaagaatgaccattattatctacaccagatcctcttcctgcattattattaaccctgaaattaccatttcttgaaccaaaggtgaggttggcagccattttagttgataggtccatcatagtagaatgcctttcaagtcttgtttcatgagccaacagtaatgcttgaacttcttcaagagacaaggtgtcacttctagacgtgataccagaaaccacagagtcaaattcgggtccaagaccgtttaacaaatgaagaaccaggtcaagatcggatacagaatgcccagccacagcaagagaatcacatgtaacctttagtttatcaatgtaatcagagatagactgattacctttgtgagaatttgaaagctgactcttgagttgtaacaatctggccttcgattgacttgaaaatttttgttcaagagctttccacacagcattcgaagtagtgtaattggccacagttccaagaacaccttcagtcattgaagatcggatccacgagagaag

SEQ ID NO: 257762 - DNA, 1130 bp, Cannabis indica
cctagtttatccaattttagcattcacaattctcacttttcagattttgaattgggatcataaagcatacaaaaggtgattaatcttaaatatgtaattaaacacaaatatggataaattttacaatccagagaagagaaatagcaattatcattaactaaagataaagtcaatcgacattcatcatctccccaaataggagtttagttcataaaatccataatcaaatctaaaacagaaattaacatagaaatcaagagtttaagaaagaactagttagtgattgcgctccggatcgtcacaatagcttcctctcctccttctttcacttttcgggtccaatctctaattattttcgttctaaaacacaagccccttaaatagaaattagggtttttacctctgaatagtcaaagtaaaaaactgcctaaaattctcgtgtttagcccatagttgcgactacttaaagcctagtcgcaaccataggcaaaacacaaaaatcaagctttctgcttactccatagtcgcgaccctggtcgggaccatagaaaagggtcgcgactactgaagcgtttttgtcagcttcagcagatttttctccagaatgccctgtcttttgaacaattgatacaatttgagctctcatgcctcagggatctgaaacaaggaaaattaagtgtaaaaccattccaaaagataacattgacatagaaaacaactataaaattgacccggaacttaggctaaaaatagcctaacaattatcccacatgtaatttaaatgaagtgtggggattgtctacgtttcatgaacaattatatttgaattaatctaaaaaaaaaataactgtcaacctatattcatataaataggggcagattccatgagaaaagagatgaaaattttgagaagtaaattattattattcaaattctgaagttgtactctgtgttcaaaaaagatccctaatagtaaggactcgtggagtatgcacatttcaactacaaaattacataaaaatatctggagttataatttctttattgcttattaatttctgtggaatatttattactaaaaggctatttaattttggttaacgaaaatctcgttaacacgtaattttttt

SEQ ID NO: 257763 - DNA, 554 bp, Cannabis indica
gcggtagacttgttcgataggctgacaaaggcgtcatacttcaccaaatttgatctccgggcggggtactgccaggttcgaattgcagtgggggatgaagcgaagactacctgtataaaaaggtatgggtcttttgaatttttggtgatgcctttcggtttgacaaatgctcctgcaacattttgcaacctgatgaatgatgtgctatacgagtttttggatagattcgttgtagtatatcttgatgatgttgtgatctatagcaattcgttagaggaacactttcaacatctacggaaggtgttgacaaggctgagaaaggaaaagttgtacatcaaaaaggagaaatgtgagttttttcggaaggaggtgaaattccttggtcattgggttggtcaagggatattgagaatggatgaaggtaaagtgaaggcaatcatggattggcctatccccactaaagtagcgtagttgcgatcattcttggggctggctaattactatcggaaattcataaaagggtactcaaagagggtgagcgctcttactgatct

SEQ ID NO: 257764 - DNA, 798 bp, Cannabis indica
tagcatcgcataaaaatattcctcctagtctgttgattccaatgggtggattacatgtggcctttagtttcttggtctgtgaacttcatgtgtgtgatgcctagatcagcatgatgacgactgaatcatgtcaacgtgtaccgaggttaatatttttcattgaaagcacctcaatccaatgcttgacatttaatgctaacctttttattctcagaccgttatattcttgtattttcttgaatgtaatctgaaccattgattaaggggcatgcaaatcaccatttttccttataaatagagtgaaaaccttcattcaccacttttgcccatttcacattttcaatttgaatttttgagagagaaaagatgaaaagtgcttttgctaatgtccaaccattttgacgtgtgcctccatcttcttcttcacatttgtgcacgattaaatccaggagcaccactcccagacctgacatttcctccttcagatccatcaaaactattggatttccaagcagaaatagatagacttatagctcgtgcttacaagattcagtccaatcaattgtctagacgatatttttgttgttgtgttgttgttgcatccaccacacgacgtccaaattccttcctcgagtgcttcgtcttctccaaattcttcgctttcatcatgcaagtatcttttacacttatggaattttgaaatatgtttgagatttaggttagaacgaacaatttttttgagaatgtatctggccaaatttgattgcttgcatggctactgtatgagatagtgaatag

SEQ ID NO: 257765 - DNA, 928 bp, Cannabis indica
tctcaataccaatcatagaaaaaaaaaacatccaaaaaccgggtagttgcatctgatatccaccaaaataccggcgctcagatttaattaactccctgtacaaattctaggtctttcacctacaggtgagtgcacacctgatctacctatgatgacatagatgctaggtcatgaaacaagaatatgcaccgaacatgatcaacatggctctcatcagtataaccaaagcagacaaataataagcataacaaagaacatattcctttttaatttctagaaaattaggcagcataatagctgtattttgaataaacccaaaaatcataacctacataaatatttgcacacaaaaatatatttggcattccgtgccccagaacagtccagaaaaatttgcacattaagttttcaatttttcaaataatttgtaaatcataaaaatatgaatatgtccattgttatacaacacatataaaaatcaagtccaataatcatgttgagtccctacctctcccgagtcgttaaactttttccagaagatgatcttaagctctcaagtcccgagctccaattgtttagtccaatcttacatattactctcacctataccatcaaatggttaaataattatcatcatcgcattctacattcaaaaccctgtccaacgacatataatatgactatattttaaatttggggttccgaagcctcacctaagcgatgtacattaacaatcagtggcggtaaaaatcggtgtactagaaatgtcgccgaaaataggggtagtgtatatcaaaatgaccacctcgacgagtagataacacccacgccaactgtttgtcaaaatggtacacgatgtcatcgaaaagccaccgaaaagggccgaagctatgaaaatgtcaccagaaaaagtagcaagctgggcgaa

SEQ ID NO: 257766 - DNA, 489 bp, Cannabis indica
aaaaaaaaaatagtaacccgcccaatgaaatttgtcgatttggtcgggttaacccgtccaaaccaaccactaatatttttttttaatataccacctaattagaaatatagtatacatatacttttaatatcctttcctcctaaaaatacccttacatttaaaaaaaaaacttctttctctaactctctcactctatagcgttaacctcgacccagaaccccggttgcaaggccttgccattgtcttctctcatgacttctctcgttttttgtgtttctttcttctagtttactatttttttgtgatattttgcgatatttagcgatgtatttgcaatgataaaataaatctgaggttagggatgaagtttagttatgatttacgatatttgctatgttttgcgtatttaacgatattttgcgatgatattagcgatgtatttgtgatatgagactaaaaaatgcatagcacatcgctaattatcatgaa

SEQ ID NO: 257767 - DNA, 579 bp, Cannabis indica
aaacggaggatcaacaagagaaagagagagagcaagaaacaaaccttagcgggtatggaggctgaagaaagaaagcagccctggaagtttcaacttaaaaagaaacaaaaccctagtttctacacggtaagcaatgctatataatttcttttattattattattattattattttaccagaatgctataaaaaataaataaataaataaatgaaataattaattaattctttttcaaaaaaaaaataattaattaatcactcatttcccattactaaaaaaaaactcaaaatatttattaaaaaaaaattgcgtcataacctccttaagtagccaagtatttgcaattaaccctcaattctaaaattttggtggtgaaacctcataaactcgtgttttattagcaatttaacattttcatccatttttagctattaactgctaaggtggaatgtctacgtggacacagtgtacacgtgacacaattttattggtccacgtaaataaatatttaaaaaaataaaaaaaattaattatttaaaaataaaaaataaaaaataattttctttaaaattaaaaa

SEQ ID NO: 257768 - DNA, 907 bp, Cannabis indica
tgcaacataaaatgttatttctgatcattattaactagaaaatctgattatattgaaatgagttttatttaggacacaaaacccaacaactggttccccaaccagaagaccggttctgtggggtttcttggggaccaatcgaaattctagtttctacaggtcccactgaaccggttgaccaattcagtacagaaaacaccaaaaacatcacaaacaccacaattcgaccccaaatactaccaaaacttccagagtacctaattacactaaaataagtagaaatcaaacaataaaaccaaccaataaactctgtagcaaaaatcaccattagagaccaaagcttgagttcataaactcaaaccatgctcaatcaccataacaatcaaccaacccaacttaaaagagcttaaataactttaacataacatcataacataattcaaaccaaattaaacctatataaccctaactatagaaaattatgcataaacttagcttgaaacttaaggaatcacaaagagagaagcttgagtgtttaccttgggttgaaatcacaaaatacttgctagaaaaccttgaattaagctgcagaaaacctctaaatgttgctggttctcaagggtgagagagagagaaagagtcgaagagagatgaaattttgtcttatttccttacttgaaacaaaatgaattaaactaaagttttatctaaaaaataaaaattaacttcatattttctaacataaataaaatcactaaaggacataaaaacccaaatggaaaaatgaccattttgccattgcctaagccaaaaggcatacttgccacctacgggtattttggtcatttctgaaacctcgaatactctgacattcccaatgtctatcttgttggaattaattttacca

SEQ ID NO: 257769 - DNA, 703 bp, Cannabis indica
cttcttaaaaatcctggccggtggccaagggaaggaaacagatttccaagcacaatcaaccacaagtttactacgctcatcccgggtccaggcttcctcaaacctaaaaaatcttctgacattctcccctaaaccaccagcatacagacacagagggcggtgatccgagttggctgtctgaaaagaacagaggacagccttcgggaaaagcctaacccaatcaccattagcgagacctttatccagggctgacttaacatgattagatccagaacgatggttgtcccaggtcaaccggtctccctggatgggcagaggaatgagcccccgggcattcaccgaattcgagattacaggaatgaattggtctttacctttagatcccactcgctcagaactactaaggacaaagttggtatcacctaaaataaaccacggaccaccaaacctatcccctagcaacattagattctcccagaaaactttttttgcatggaaatacggtgggccataaacacaggacaggagccacgggtgtgaggaagggtccgaatacacaagaccagagatgtgattttgggagcactcaacacattcaaactcaaaaccaattttccacgctaaaataatacctcccgcagtacccacagccggaacaataatatgaaagtaaaaatgaagtgagttaagaatacgtaccaaa

SEQ ID NO: 257770 - DNA, 560 bp, Cannabis indica
aagagaattcttaaggtattactgtaaaattttcttattaagtctctaattttgtggtcacttgagactcacctaatctagtcctgtcatcctctctctttctctcatcttgttgttgccactactgccaaccaacaaccatgcccatctccggctctgcccaacaattgtagtggtcttggagagacgatccgcagaggagattgcgccgaggcaacacaaagatacatctcatctccttcaggtctctttttcaattcaattcaaatgtgaacatttcttcctttattttctttgtatgaaattggtaaacttttgatgattcccaatttattttcatttataacagtgaaattataaatctgatcatcagaattgctttatatgttgtatgatatatcttagcatatgggcttgttcgataatttcaggatctatactttcgtagccttcaataactttttatcggatgtttatctaaacaaacatttaaccttgaaagggagttgacttgacttagttttctactattttctagactttctattaggttttggtga

SEQ ID NO: 257771 - DNA, 688 bp, Cannabis indica
ttgaagtcactgctcttgaagctttactcttggctcaagagcatcgcatagaacgcaagaataaagatcttgactcagcctctgtcaatcttgccaactcgaatttcagaccaagaaacagtcaatcaacaaacaaccattggaactcctatgccaacaatcgacctagcaacaacacacctaatactcaatcttacagaccaccaattccaaatggcagaggcaattcattcaactcgtttggctctactggaaacccaaataattcatctcgaggaacaggtcagaataccaacaaggttgtctgtcagatttgttttcgaacaggtcatattgcatccaaatgttaccaaaggttcaaccctcaattccctggctatggatcacaaaatcaaggatatcctgctgccatgcttgctactgcagaaaccatctgtgatgactcctggtacccagattctggggcaacacatcactgtacagctaatgaggacaatcttgggcaaaagactgaatgccaagcaaatgaacaagtttttatgggcaatggcagtggcctacaaatccaaaacataggtaaaacacaaatcttggcatcagataagtccactcttctcactttgaataatctattacatgtccctcaaattactaagaacttgatgagtgtttcccaattttctgctga

SEQ ID NO: 257772 - DNA, 687 bp, Cannabis indica
ttcttatcattgcatagaatctgattgctgctttcagtatgttcttgtcactgtatatttgtcattcttcgatctcaagcaccatgtaatttgtgatgatctccatttcttcatcccttctcttttttattgcttcatttggttgctttattataaaatctgcaacttcttcagccattgcaaacatgtttggagagattgttatctaactattatcatgatttaaatcttgtccttcattatcaaattactggttgaatggttcattatgtatttgtagaaccagttcctccactgtcttgctttgctctagtattggttgttcaaaagattgattttccactgtttgtatagctatctcttttgtagttgtgatgcatagtggagaatcagttactctagcctgtgttttcttagctcaatgtagaacttgagggaattgtcaatcagtagcttcattagtgtcgttcccggtgatatctagtacgatatgtctatgctgcttctattgcaatttatttttgtttttatcagctccatcaagtatactagtgaagaattggtttgaattagaattccaatcattgtgtagtcatcataatttgtattttctctccattgaccccatatttcatcacacatatgatttgttccatacctagaattttaaaggaaaagtaatattag

SEQ ID NO: 257773 - DNA, 749 bp, Cannabis indica
gagagagagagagagagaggacttttaattgagaaagagtagttctgttattgattagctagaaagagattacaagagattatatatatacaataacaaccactttctaactaactaactgtaaaagttaacacaactcagtagttctaacagaaataactaactaagctcccttgacaacccccttcaaactcagtgtggctagagaaataacgctgagttctgacatgaaatcactgaacttgctgttgttgattggcttggtgaagaagttagcaatttgtgcagatgtagggacatgtttaacttgtatttgttgttgtagaactttgtctcgaacaaagtataggtcaatttcaatatgcttggtttgaacattcaaaataagattggcagccaatcaaattgtgctttggttatcacactacacagacggagatgtaggtatttgaatatgaagttcttgaagcaatgactggatccatacaacttcagtaactgcacttccaaggcttcgaaactcagcctctggtgattatccagatatggtaacctatttttggggcttccacacaatgagattacatccaaagtacacacaatagctagtagtggattttcgatcatctaagtttgatgcccagtctacatcacagaatacatccaaggcaaagtctggagcaggtttgagatgaagaccatgttagactttttatttggggttacattaagttttattggttttatta

SEQ ID NO: 257774 - DNA, 1256 bp, Cannabis indica
taactttactctttaaattttgacaactattaaattgtacctttttaaaataaaaatgaaaaagattcgaattttgtttttttggtaaatcttaaaaaattaatttagatattaaaaaaaatcatttttaatgattaaaaaaattaaaaattaaaaattaattaagttatttaaaaaattatttatttttttaataattttcaataattgcttttaaaaaaatagaacattataatttttaaaattaatttttattagtaaaaggaggcaaaattttgtattggtcaaagcttaaggggtaaaaatattagtttttaaaaataaaaaaatactggtggtaagatcgtcatcgcttggaatcctgatagatttactgttgacatccttaaatgcactagccaactaatgcatttaaggttgacaacaactgaaggattcaatagtcttctgactatggtgtatgcatcaaacaacagaaatgaaagaagagtcttatggaaggatttatgtgatctgaacacaaatgagcagtggttgttaatgggggatttcaatgatatacttgccaaagaggagagaatagggcatcgggttaaaacccatccggacacagagtttttacaatgtgtcaatacttgtcagatggaagatgtaaaagcaagtgggaatttctttacttggtcaaataagcaacatggggatgatcgaatcttttcgaagatagatagaattatggccaatcagtcttggattaataagtatgagcttgctaaagcgttattccttaacgaaggtttatatttgatcacacaccagcaattctgactctttatcctaatataattagtgggaagaagccttttaaatacttcaagatgtggaaatcccatccaaagtatgaaactgagtcaaaggaagtgtggaaacagccaggggaaggatcaaaaatgtatagagtagtgtctaagatgaaacagttcaaaatgcgacttagagaaatcaacaaggagggtttctctgacttctaagccgcggttttcagagccaaggcagatctggatatgcttcaaaaccagttgcaaatacatcctatggacagtgagctacacactcaggagaaggaagctcgggggaaaactgctcaaaatacaaagtgattacacatccttcctgcaacagaatctaaagctgattggattcagcatggggattgcaacactgcactttttcatgcgtgcattaagcaaaggcagaga

SEQ ID NO: 257775 - DNA, 1759 bp, Cannabis indica
atataaaaatgaaaaacataaaatataaaaaagtttaaaaaagctactggaaaaaaatgtaaaaaaaatgtcaaatttagtatctagtgtaagcttcactagctaggaaaatttggtacggctcatatataggaccaaactttttttggacataaattaggggtgttcataaaatagttgatccaatccaatttacacgatccaatctaattcgtaaagtgcagatatccatatttatgcggattgaattagattgaaaaattcaaaatccacacttgtgcagattgaatgttgattgatatgcaaaagtaaccgattcaatctaatctacacatgtttataaaaaatttaaaaaattatatatacaaataataatagtaatttaaaaagtctaaatgcatataatacaattatatttcaaaacttaatagattaaatgtatattctattcttatatataatttttttttctactatacaatttaaataaaatgaaagtaaacatttctttatatatacaactttttttcttcttttgaatttgttaatttatttatttaatgtgttcttggagacataaaataattataatttattttattttgttgctatgtgaaaaaaaaaattatttcataaatattaaataatttaatattaaaaagtaactaaattcaaaataactgattcaatccgcacttttgcggattggattggatttgagctattgtgcggattaaattggatctaaaaaatgaaatctacacttagtgtagatcggatgcactatgagcaaaatagtgcggattgaattggatgaacaaccctaaacatattataagaccaaactttatatgtatatatttactttatattttttttccatttataatttggcacaccttaaacggttaattaacccaattaaaagtcaaataaagaacatactatttattataagcatataattaggatgcaacaaaattatagaataaacgaaaatataactatttattaaaaaattatttgttacattagaaaatatttatgttactactttgaatgaaaataaaataaaaatagaaagccaactacttcatcaaatatgtgttaatattatcactacaagaaatgtcacttttaccagcacagttcgttactgcgctggtaaaagtaacttttaccaacgcatttcgcaaactgcactagcaaagtggtcaaagttttaccagcgtacatttgcagtgactaaaatctaacttttaccagcgcatttacgcgatgggaaaaatcattttttccagcgcttttcattttatgctggcaaaagttctaatactaacattgatttgtcaacacatcacaagtaaattctattttaccagcgcaataccaatttttgccaacacaaaaatgtgctagcaaaagtgccatttagtcacaaaatttttatgttgtgactaaaaaattatcactaaaaataacagtttttgtcgtgtgaaaaaaaaaatgtataaaatgaaaacatatagcatcaacatttattaaagcaaacctcttgctaaaattaataacaatcataatcctccaaatcaaaagggttacagaaataaataaaaataaaaaatacctatattaaaaataaattgtgttaagtagcaataatttatttttatttttttaaaaaataaaataaatatttagttatatattcatgatcattattaaaaatgtcgaaaaggagatttaactcatctcatat

SEQ ID NO: 257776 - DNA, 772 bp, Cannabis indica
ccaatgctggtaatcctagtcataatttctgcgattcacaagtatagggttaatccctaaatccacttccacaaaatatataattggcaaattatagataatcacataaagctcgtgatgagcttttcaacaaatatatagaactcccgaaacggagtccagataacaaagttatgaatatttgaaaatatgcacgaatctggccaaaaacaaaggggcgggccgcggcacttccacatggggtcgcggcacctgggttcgaatcccaagccaccaaaagagggcgggctgcagcacccaaggagcagggtcgcggcccttgggtttaaaacccaggaaaccctaaactcaacttcgaaaatacctgctcaaacacacctacttaatcccaatcatgcataaacctcaaaatcatactccaaagattaatagtaataaatcagagcatcaaaacacatatatcatgcttaatctaccgccaacattcatcaaaaaattcagattaacaacctcaaaataagctccaaacattgagctagaattccacataacatcaactcaaccatatgagtaacaagctgaaatcacaagcttaaactccgaagaatccacttcaatttcagccactaagaattctcaatttcacaatttaaaacccatacgaagcaataactaccaattcaaacacaactatgtctacaacatcataatcaactccaatctcacaagcatgcaatttaagaacctagtccatggcttcacatatattttt

SEQ ID NO: 257777 - DNA, 1104 bp, Cannabis indica
aggttgagtttggtgcatttttgcacctaaaagtgagttttttgggggttttaacccaggagccacagcatggtctttgagtgtcgcgacccgctcgaggttttcaggacagaatgtgttaaaacttattttgaacataacttttgactctgaactctgttttggactttcttggtaccattgtaatcttgtttcaggctctatatgttaatctgtaaatggaatttaaattatgtgtatgtgtgaaaataaatttgggattaaccctgttggtgaaatcccaagaatttgttactaggattactagcacttgttcaggagcatgcggggatttggaatctccacatacttgggataccacgtaagacagtagttagcagtagagttaagcgtggtgacgctcatatttgatattatgattgtaattaaattagggacttggattaaggttattaccctaaaatgtggggttatattgcctaaggttagtactctagtgattaaatgattttgaatacaataccatgttttatttgttgaaataaagaattatgcattcaaagcataattaggttagactcggtaattagaacttaaataaactattctaaggccttattgtaaatagacgtgtgagcgtaacacgtgggtctatgctatatagacataaatagacgtgtgagcgtaacacgtgggtctatgctatatagacaatagatgcagtggcatttgaatattgtgacatttgaatattgtgtatattgttatttatactatcttgttgggcttggctcacgggtgctctactatgtaggaaagggtaaatttgtttgtgatcagccatgagttcgaggacttggcggtgggtagtacatgtttgggccatactagaccatgcgggttgggtctaccagtggatgtattttgtattcctgaatttggccgtctaggtcgaaatgtaaaagtcacttgtaatgttttatgaaaattttacaggatcccgaaacatctaacctgtaacttttaatagccgtctaggtccaacgtatgttttgtgttgattcggaaggtttcatgttggtttatgtgcttatgtgatgaatg

SEQ ID NO: 257778 - DNA, 745 bp, Cannabis indica
gttctgctcttgttcgacaatatttttcttctgtttaagggatttgattttagcttttaatttttcaatcatcctccgtttctgagccacaacatcataaacttccattttcttcctaccaaacagtttagatgtcttggcaaggaacatgcaaatcaatagataaaattagctataatttatttggtataactaaggaaataacatttttcaagtactagcatacccaacagctctgacacgtctaggatactctggtgtcccgagcgcctacgtcagaatgtcattttggccatagacctgaacttgttcctcgactaacttgctcctctagctgagcctaatacacatattcaagcaattagtatatgatttatatatattaactcattattcttacttaatcaacgattaatatatacttactatcttttcggaaatttccttgtcgtaatcaatgacaagtttcgttctcttagttcgagatttgatccaaacatggtggcttggggattttgaacctcgaggtcctttttctgcattattttataaaaattaaatgagtacaattacattttgatgcactattttttaaaatgttaattacttaccacatcttctcttacgatcaccattctactagttctacttcttacaggtaaatttcgttcccctaacagtgccaaaggagccatttctccctctttagtaccatctaaatgtcttatttttctgtctatcagga

SEQ ID NO: 257779 - DNA, 772 bp, Cannabis indica
aacgagtctcagcgtctaggaaacgtttcctgacatagtacactgggtattgccgaccttggtcttcgcggattagtaccgagctaatcgcatattcagataccgctaggtaaatgataaaacttctctaggcattggttttgacaggattgggggctgccccaaatgcatttttagtgcttggaaagcttcttcgtacttttcggtccatggaacatcttgttgccttttaaaatttgaaaaaattctttgtatttgtcagaggatcatgttataaaatgatttagaggggcgactttacctgtcagactttggacttcttttggcttagtcggagatcgcatttctacaaatgctttaatcttcgcagggtttgcctcaattcctcgctaatttaccataaacccgaaaaattttcctgagcccaccccaaagacacacttaagagggtttagccgcattttttatcgtcgcagtatttcgaacatcgcttttaaatggttgacatggtcttttgcacattgagattttacgagcatatcgtcaacatatacttccatggtgtccccaatcaaatctgggaacatcatattcaccagcatctgatacatcgcacctgtgtttatcaaaccaaaaggcaataccttgtaacaatacaaacctcgatctgtaaagaacaaaatatgttgctgatctggttcatacatcaggatctgattatatcccgagtaagcatccatgaaactaagaagttcatgacctgcagtggcat

SEQ ID NO: 257780 - DNA, 833 bp, Cannabis indica
atttcatttctacagaaagttgtggtgtgtcctctctgacttggcaaggaatttgctgggtaaaaagctattaaagaaatggattagactaaaagttggagatggacataacatcttttgtgctactgatccatgggtgcctgggaattctattttcaccccagtatactacacgggttgtcctaataaccatgtctttgactatattatagctgacagagagtggaacttcgctaagttagcctctgatttttcgactgtggatgtggaacgaattctctctatgcctctttctaatcatgcatcaccagattattggatttggcacttcacgggtggggaatataatgtgaaatctggatatcattttgcatgttccattgcagatgacactaatgtttatgtttccaacccaaatctttttggagccttaagttgccccctaaggttaaattttttgtgtggaaggccatacagaactccctgcctgttgctgcagaattgtttaagaagaaatctctcactttggcctcttgtagcttatgtctaaatgcttgggaatctgtgggacatgccatgtttgcttgcaagcatgcgaggaaagtttggaaacttgttggttttgctttcaataacaaagttgttgtatccatgaaaactgaggactttttgtttcagatatcagaatgttataccaaattcgagctggaaacgattttctgcacaatgtggtctatttggtctgatcgaaacagtgtccttcatgccaaatcagctcagcagccgactgtaattttggctaactcaaatctttcttcacagcttccaaactt

SEQ ID NO: 257781 - DNA, 523 bp, Cannabis indica
aaaaaagtataaagtataatttctcctaaaatataatatattataatatgatgttagacatcttaaaatacccaataataatattttattattttatgtttaagcctaactatataatattaaaaaaatttatggtactttaccaagattacaacgatacactctttttgtatttttaacattcaaataatttaattttaattttttatatgatagtttacagcataattatttaaattaaaaataaaaaataaatagcacatcaaaaacaaaagttctcatcaattgcacttttacttttttttattttataagtatgtgaaataaactatttgaaccttattttctgtattgtaaattattctaaatttctctaaacttggtagagtgtcttaaaaataactacaatatacataaaaaaaaaaatattgagattataactattcaaatattagaaacataataagagtgcattagtacatttattttcagggaatataccgtagaaccacttgttagtatt

SEQ ID NO: 257782 - DNA, 1312 bp, Cannabis indica
agttgcacaattaagttaaaaatcatgtcaacaagcctaaactagtagggtgttacaatttggtatcacagtcgccaggttgtcttctgaagatcgtcacgacatgtacaatcatcatcagcgatcagctcgactcacgattcagtaagcctttattgctttagtagtttatttgattagtatgttataagaaaagtttgataggaagcatgttagtagcttgatagctgaataggcatatgttttaatttccaaaataagcggtaatcagtaagttattcttgatcgtgatctaaccaggctagcttttggttttcctggctgttctaatatcatggacgccagatgaaacactaggaatcagggtaactcggtcgaatccagtggcaatcagggagttcaaattccctcgaatgtacgtggccgaggaagaggccctagaggcagggcacgtggtcagggagatgttaacccactgcaggctgcccaggagtgggaaaacaagtttgcagcaatgcaagccaaaatcaatgagcaagacgaagaaatcagacgcctgaggcagcagggtgctcttacaatgcctgctccagaaatgcaggtggctcctgcccctgctgtacaggcagggccgattgctgcagtaaaccgaagggaaccactgtatgaaaggttttgcaaggaggcacctccagtctttctagaaggtcacgatgtaataaaagccgagcagtggctgacggttattacaagaattttgaatttgatgggcgtcactagcaatgacagagtggcccgtgccacattccagttgcaggaggtttccttggtttggttggacatggtgtccttgactcgtgatgttactactgttaactgggaagagttccaggagttgttcaacgcaaagtattacaacgaggcggtcagaattgcgaaaagaaaagaatttactcaggtgactcaaaaggaaaatataagtgttactgaatacacaactcatttcgaccgattggctaggttggcctcgagaattgtgccaaccgatttcagcaagaaaaaaaagtacctggatggattgaatttaaaaataaaacatgaccttatgatttttactgacgacaacaccacctatgctgacatggtgggaaaggcactacgagctgagggcgtagttgagtgcacccaggagtcccgaggggacttaggttgctggtggagcccctactcctcctacctctggttatggtaggggtggtagcgactcgaccactgaccacttaccactggccaaaatttaaatttagaagat

SEQ ID NO: 257783 - DNA, 680 bp, Cannabis indica
ctaattaaattaaaacttcagaaattttttaaaatattaagcaagtgagacgaaggattttacgtgattcgggcattaaatatccctagtccatgagtcagtatattggccttatacccgtttaaatgtattacaagtggtgtttactgttaacccaatttttgctcacctgacgtggcatgtctgcatggccaacatcagtgacacattgccaacatcagtgacacatggcaatgcagcttgccaataagaaggtcaagtcatctactcaagacttcaaccaacgaggggttcgagtactcaagtgggacggtaaagagacgaaccagaatcctcaagggggctggacgaccatccttggacggccctataaccagcgtaggcgggccggcttctagacatcccatggccggctagcatgcaccctgcaggtgcatggacggccaacctttggcttgacaggattttgatgcccaactttcatacgtggacagcaagtcagaccacgaattgggccttaacaacccacacaaatagtggaaaaatatctattttgaggggtattttagtcatttgtattttattaatgtaatagtaaagaatagcttattttacctatttttgagggatttaaagggtgtaagctctcttatataaagagccttagtcaaaccctaaaa

SEQ ID NO: 257784 - DNA, 840 bp, Cannabis indica
atataaaaatattttgaaaaaaacgtcagaaattaaactaaaaaatagttatgtttacttaaataaatctaaatttttagtaaaaaaacttatgggtgttcataaaattacccgcaccacaccacataaaaaactacgttaagaaacacttcgtgagatggttgtggtttgtatttttgctaaatcgcacatattgatttagtttgcaattttaaatttaattattgtaattcaaaatacattgcacgaatattgataaatttatacaataacttatatgtttgtaaaataaattttgatttaagtttcaaaacatattgatttaagtcttgtataaataattacggttgagtttatgtatataattataaagtaagatttgaacattatttttttttttgtatgttctaaaaaattttatgttttttttaaatccctaaaaaaattatgtatacatataataattcacatataataattcatgtcctaaaagattgtatatatattagtttgaattttgttgtattttaaattggtgtgttgtaagaaattttaatatgtgtattttattgtgttgactaaaattttaatatattgtttgttttattttttttaatgatagcataaaccacttataccacacactatttttacaatgttgttttggccattttgagatcttgtagtgtggttgcggtttaagtaattgcaaaattgcatgttcagtttggttcaaaaaaaataactaaaaatctacactgtcagcactgcaaaacactaaaaaaaatagactcgaacttgttccgtaaaattagtttttttacaaaaatttaattttta

SEQ ID NO: 257785 - DNA, 1194 bp, Cannabis indica
ttaaaataatcaaacttctctaagttcttccaaactttctccaaatattttttcatctttaaacctttcgcttggtactcgcctagaacttgattcataatcaattgtgagtcactatagcatataagattttttacttttaatacttcggctattctcaagccagccaacaaagcttcatatttggcttcgttgtttgaagtatcaaattggaatcttaatgcatagtggaatttgaagttatctggcgacatcattatcactcttgcccacgagccattctcatttgaagctccatccacatataattttttaagtttctgtattgtgtttgacgagtgggtcttcttctcagattatcccttcaattaggaaatctaccaaagcttggcctttgatagacgttctcaggtggtaagttatatcgaattgccccagctcggttgaccatttaatcaatcttcccaaagcatcaggttttgataaaacttgtcttaatggttgatcagttaagactcttatgggatgtgcttgaaaataaggccgtagtttgtgagatgcatgaatcaggcataggcaagtttttcaagagcgggatacctcgactctacccccagtaaccttttactaacatagtaaacatgttgatggtgctttccctcttctcgcatcaaggctgcactgattgcactctccgaaacagctaagtaaaggtataaagtttctccagttattggtttggccaaaactgtaggtgctgacaaatgtttctttatgcttttaaaagcttcctcacattcttctgtccattcgaacttcttattgcctcgtataacattaaagaattgtagacatttatcagttgatttgaaataaatctgtttaatgctatcatttttactgttaaggcttggacttctttcgacttcgttggtgaaggcatctctattagggccttgattttttttggatttgcttcaattcccctcgcattaactatgaaacccaaaaattttatcgaggagactctaaaagaacacttcttcgagttaagcttcatattgtactttctaaatattccaaatcattctaagaggtcttttgtatgatcttcacattttactgactttaccaacatatcatcgacatagacatccatatttattccaatttgcttttcgagcatcccattca

SEQ ID NO: 257786 - DNA, 713 bp, Cannabis indica
ttttaatcccaacactatttgtaataaacttttaatttgagttatacatgtatgtgacttgttacaataatgccaaaaacactcataatcactacaagaaatgttatttttgcctgtacatttttgtgctggcaaaatggaatttacttctgatatgttggtaggggttagcaaatcaactttggtattaaaacttttgccggcacaaaataaaaagtgctggcaaaaataacttttcccagcgcgtaaatgcattggtaaaagttagatttttgccattgtaaatgagcgctggtaaaactttgactttttttccagcacagtttgccaaatatgttggtaaaacttacttaattttcctagcacgacattgaaagcaatcaagcagtccaccagtacgaaggttgtcacgatggtaacttgtcaggatttttctcccatggtgagtgttgaatttatcgtgcccaagggctggacggagtctcttatgaacctgtaaatgggggttgatcctagtttcaagttttttggtcccaaatattagggtttatgcccctgaaaaagcttataaagaaattttttatcattaataaagagttgaatatttttatatatgtatgaatgttaaattattaaaatttatatgttgaataatttatatataaatatcgaaaaaaaatttattcatatatgaggctgtgacttgtagctgt

SEQ ID NO: 257787 - DNA, 709 bp, Cannabis indica
gtaggatgaaaaaatagggtgtcatgggcagattttctcggcaggtgcagcatcaccacacgccatttgcagggtcctcacgtgcgcgtccctggatgtctgaacgaggttgatgagcacttcagacaaaacatgtctgatttccgcccgcatgcaccaccttgtccgagggtctggtgcgcatgagcaccaccctcaacagccaatggaccccgatttttaaatcaacatatctccttcgtttttcatcggaattgagttccgtaaaaataaaaattgcttaatttttcacaaggaatccaaataaaataacttcagaaataaaataaaattatgttcatggaaaaatttcgtaatacacatacaatcatcaaataatcacataaacaaacatgaacacatccaaatcaacatgcaaacaatattcatcgttttaaattcatattacatgaaagtaaatcattaccgtggctctgaggcaagttgttggaaatattttaccaggatctagatttactaacaagtatgttgattaacattactcactatgattgagtacttgacttgctatgtgtgggcatgacactcactcactataggctgaagtaagaagaacaatgaaggaggtgagaaaacactaaagaaggaactctctcatcaaggtttggttgaatagtcaggttaacaaaaaaatttatgagtgagagta

SEQ ID NO: 257788 - DNA, 599 bp, Cannabis indica
taaaataaaaaatatttaatttaaaaatttaattaatagttataaatatcaaccattagatttgatccaatggctaataatagaatattcattcataggtaataaccattaaaagcatgcccatatatatattgttacataatatagcaggactaatatttaacataataatgattataaaatacattaattaatatacatctaataatatgcttaattatactctgcacattttaataactaatataaagagataagaaaaattaattgtgagtgcaatttcaattgaggtatatttgagacccgtgtaggacataatttctttaaacagatttgtctccttcagttagtgctagagaatttcaacagtgtttatctcccaagatgaaataaagaaaagtaacaaggagcaccgctttttaattttgtggaactaaatatgcctcaatataaactaattactccaaggagtattttaagataatttataacactaataacttattttcaaagaaagacttaattgactaaatgatatgaaatgttcatgagcaagttttggtgtaaaaaatataccaaatgcttaagactttttataa

SEQ ID NO: 257789 - DNA, 503 bp, Cannabis indica
acatatttaagttccacctcattatcctgaacatcatcatcatcaaacaatatatcaattacatcatatgtatcattcataaagtagccaaacatatatgtgtaatgtgtgtatacatcatatatattacgaacctaccattctcttgctatgctctttcattacaaatattgccattgctagaaatggacgaggcacaaatcgagttccatactccgcagggaaaaatccctatatcatgaatttaaacaacaaaattaagatgacacaaaacattatatatatatgtgaaaataaatccttaatagatttcaattatagatgtaatgtaataataccttatcatttttctcctcatagttttcgtccaactcaatgctttcgtcaataaaaatatctatgaaaatactgagatcagatgtgcatgacattaatctaaaattaataatatacattaaaaacataatatatacataccatcaagagtaagatgcattccactg

SEQ ID NO: 257790 - DNA, 1208 bp, Cannabis indica
cctccaagttatttccaactcaccttcagtattctataccatgaagatatgaagcatctaagtccaaggctcgagagctgaaaatacacgaaatagaaccacgaaaatcaacctgtgaacctaggtttcacctagtgcccaagttgataacccaactagggtttcaatttttgggatcgtcttagtgcaaatgggttaaaatttgtattgggacatgaattagacatgtcacgaacatatttgaggcatcagaataagattcggagtacttttatttttgagcacccgaagcaccaggtaccccatgcacccaacccccaggttgacatttttttcaacctggggcacttctaaccatcaaattgaagatctatcctgagtattttctttgacttcatcaaaaacgaggaaacaagtacttttggggaagaaacagaccgacataggggccagaaagagggcctagggaccatgttaacattttgtcaacttgggtcgattctaaggagtttcttcaagaattttccaggcatattctccattttcgtcaaagattaagatacaagtgtttctgagaatcaaacgaaaccatctggcatcttgaaactagatccggcgcctaggttgacaatttgtcaacctagactgtttccaatcatgtttcagaaaaagtgtttcagaaatttttccatcatgagaaataacaaagatacaagtgaactcagggtgaaaacaagaattttagggcacgaaaactgagcccaatgcccaggttgacaattaacttggtgcgctggttttgatcactcaaatgcaaattctatttcaagaattctctccaaaatggtcaaaaatagagtaggagactcatcctcaatttcaagaatcttggaagtatcaagacgacatcctgtaagctccagaaagagcacccaatgcctaagttgacatgtagcctggtgcgttgggttcttcttatttgattctgatttcgtctcaagcattcatctagtttttcatagtaacatagagctatgaagttagacaagtcaaattcacaacttcatatttttactttttttaggcaaagtagacttaactcgcaaatctggtagttttgagtctcccgatttcgcgaaatagtaacatctctgagaactagggaaaaccttcacctgtaacgcgctaatctatagggacgcaacgtg

SEQ ID NO: 257791 - DNA, 661 bp, Cannabis indica
gaccttccccgccggtaataggtccgcccctaattatcaaaattgttgtagtgataggagggtgctaggcactactggtgccctttaacatttctcatcatataacttaagaaaatagtttttaaaaaatatcactaaccaatcgtaggacgccacttatagaaagtattggacaccattagtacccaatagcaatactctcttttatataaaatataccattttctatattttagccaaaaaaaaaatatatttatttatatcatttttgttataaatattaataaatatatggatatttaaattttttatttattattattaattgtaattaatattctttttttattaatttcttaatatttgactctcatatatatatataaataggagatcactattagaataagatactaagaaaattcttatctcttttcttttttctttatctaaattataatattttataatacgttatcaacacgagcctctaaccaaggtataatagtgcatgtttgttatatctgatctcgaattatttcaaagtcatgatacgctaaatatatatatgcatatatatactcatctgactgaaacacaatcgaactagccattttttatttatttattttgttatgaatcaatatttatacaatatatg

SEQ ID NO: 257792 - DNA, 477 bp, Cannabis indica
tcaacacagtgtgctttgattgtcggtaattaactgtgaattaattgcttgatattcattttaggaagtttccctatttaacttgatacgatactcagtcgagatctggcagttgttgtttccttatttgtgtgcatgaattaaaaaggggaaccagatcagtcttttgggaacacgttgtctcacccttttggtctcatggtattgtacttgcttctgagaataagttatcaatagtggaagactttatggtcacagagctgggttatgttcctagaaggactcatctaaatgggattggcccactttatcttcgttgagaaacccactgatgggccttgaatgctgacctggattgcatgtgtccattgccgaaaatacagataatatttacccccaagcttctataatgttgcatatggtggaagctattggaatttattttaccaggatcttagatctactcacaagtatgtt

SEQ ID NO: 257793 - DNA, 1608 bp, Cannabis indica
ctgcgactaccggagttaatatcctagaaaatatcgccgttgtagtaacggcatctacgacgactcaaggcaacactgccctagcaggcggtattgaccagggtatgcttttacaagccttgacgataatcgagcagcatagaaagcccatatacaagctgcatgggacttctcctttcactacgaaagtgcaacaacctagattacctaagggatttcgattgtccgagtctttgaaatataaaggtaccactaatcctatagactattaagaaaaatttaatactattatggaagtggaccaggtaccccagcttgcgaagtgtcacattcttgcggcaacactagaggataatgctcacgattggttcagccaattgcctaaagcatctatatcaacatgggagactttttccgacctctttttcatgcactttcaagccacgatgacctataggccaccctataccactctggctaacattaaacaagaggtcggtgagtcctgaatcgttggtcgagtttttcgctatggcagaaccgcataagaggattgagaattctctagccgaactagagaaaggaaaggataaacgcgagtcgccggtaccgcgatcacgatcccgcagtcctagaggaaaaagttccaatgggaggagccctagaaggcgcagtctgcaaagacagcgaagtttgaagttggccaaatcccctccgaagaaggagtcatctcccaagaggaaaggaggtccacgtttcgtgaattagacggaattggcggttcctcgggaccatatctatgcaattgaagaaaagaacagagtcttcaaaaagcctcccccaatcaggggaaaccgcaacaagagagacccgaaaaaattctgtaagtatcacaaggatattggtcatactactctggaatgttggtttttacaggatgagatagaagaattaatcagacgagggaaattcaacaaatataaaaagaacgaggagagtcatccccaagcagatgacaaagaagaaaataacaatgagagtggttcaagaactcctcacaatatattgaccatcatcggcggacctcacatcgcaggagattccaggaaatcacaggagcgataagccaaagaggctagagagaggccactcactaatgtgaacaatttgagtgagcggccagaaaaactgttcaagaaggaaggtgatgatataacatttatggaaggcgatactagatgggttcaccacccacatgtcgatgcacttgtcatcgtcgctaacattggaggagacaatgtcgaccgcatactagtggacaatggaagttccgtgaatctccttaactttcaagcttttatgcagatgggactacaagagaaggatctgcgaccagtcgtgtcgagtatctacggttttactggagacactatttctttaaatggaatgatcgaactcccaatcactctgggaacagcacctgtcgtggccaagtcgatggttgacttcgcccttatcgaccaatactcgacatataattcattgttgtgaaaaccctatcttgaaggagatgaagactgtgacgtccatttatcatctcaccatgaa

SEQ ID NO: 257794 - DNA, 1210 bp, Cannabis indica
agcctcgcccaggtaatcgaaattggggttagccttccaaaagtcataaaaaatcttgagaccagctgtctctaagacatgtactttttcttcctgcctcgccacctccgacttgtaattcccaatctcagtttttaagcacctcttccttggtcttcttctcctcttccagccgacggaagacaatctaaagaagtcccctttcctcttgaaggctatttacttctgctgacagggcgctgatggtagcatcaagttggtcggaagccttgaggtccttagtcaactcggctattttcttcctagccgtaaaaagcctcttgttgacctcacttagctccatccgaacagctcagagctccacccttgcatcatcaacgtccttcctggccaagtccacctccgacatcatggtgttggacatagcagcgttcttggaggcggcagacttagctcgggaataagtataagccaacttcagaccagccaacttcagaccagcctacacatagaaaaactttagagtctgaactaagaaaaaaaggactaaaggaaatggtcaacaaagactaacccttgtgaattcactgaagactcctcccatcagcagctccagagaatattctttgttagcgtcggccaactgctcacgtaactcaagaaccaacaggttcatgtaatgggcgagcatctccttgcctttcttggcctctagatgcactgtcaagggtggagtaggagcccgcatctgctcagatccgctcttggccaactctgatccacactttgattgctcaggcttgttcgagcttcctactggggaatctttggacttagtaacttttagagtaaaggggttcgtaacagttagctcttcggaaaggtcaataacctccccggcgggtgccttttcgttggaaggggtcgcctcacggcccttggatttcttggctggaggagatgagcttaagcttcctccaactctcttcttcagagcatcgaacatcttctgagacatgtctgcacggaacaaaaatagcatggttagaggaaaaagacatcagaagcataaagcataatagtcaggaagtttaaaaacaaaacggagtagcctgcaagacgattatccgagcaaaaactcgaaagtccatcatcacctgacaagtctcttatctccgccataacagctttcccttttcctagcacggga

SEQ ID NO: 257795 - DNA, 528 bp, Cannabis indica
ttaagtctaccaacctttactgtcattgaggcagatatatattgaaaactgacctggatatgcactgcctaacccacctacaaaacttttctggagccttaaaacttcgaagcatatgatcattaaattgtcagcttagcttatcataagctttaaccatatcaatttttatagcgaagaattcctcttttccttttttaagtttaaaaagagtggattatttattgtactaacacattgttgtcttggatacattgtcctggaacaaaggctacctgagtacgtaggacagataatttgtgggagaaccctcttaattcactttgcaatgatttttgagataactttatagattacattacaaaggaaaataggtttgaactgcaatacttttttcgggttaggaaccttagaaatgagaactatattagttttattgattcctttatgtatagacccagaaaggaaaaattccaccacaccctcacagaaatctttttccactaactcccagtaatgtttgaagaa

SEQ ID NO: 257796 - DNA, 544 bp, Cannabis indica
acaaatctcttgtgtcaagttatttaattttctgcaaatatttttatattctgcctgttctattttgtcgctggaaaactagtttctgcaatgacagaattacattttgcttctgcatgcgtatacagttttatattttcgtatatattgacatttacaaaaattcggtttttcattgtgtatcatactattaatgtagaaacgtagataatagtatattctaattaagttctttagtgctttgtccttacttgccacacaaaaacccaatttacactctctttcccttgcatttctttttttttttttttttttttttttttttttttttttttttatttttttcccttttcattcttatttcaattaaaatatgttaataacttccaattgtcattggacctttttttatttctttttacaaaataattgtcattgggcttagaagtctgattattattgttatagttttacatttttcttaatattattagtgtttgtttattattataattaatatgtacttacttttttataattcttt

SEQ ID NO: 257797 - DNA, 686 bp, Cannabis indica
cttcagaaagggtataggtgttattgtcctgatctcaacaaatatcttgtctctattgatgttacctttgtggaaaatacaccttatttttcatcttcaactactcctacttgtcagggtgaggatgatgatttgttggtatattctatcacatcctctgcgcctgatacatgttttgacaagtgtcttattccttcacctgtctcggtcataactcccacaatgccaccacctccaccactccctcggcctcatatagtgtacactaggcatccccctcctccacctcctatttcttgtcctgcacttgcatcttcgtcatcagatccagaactcaaagatgatcttcccattgcactacgtaaaagtaaatgccaatgtactttttctatttcttcttttgtttcttataatcatctctcctcttcttcttactcttctattgcttctcttgattctatcactattcctaaaactgtccgtgaagtaatgtctcatccttgttggcttgctgcaattatggaagagatgaatgctttagctataaatgatacttgggtttcggttaatttaccttcaggaaaatgggccatagggtacaaataggtgtttacggttaaattcaatcaagatggaacaattgctcgcttaaaggtccgtcttgttgccaagagttatgctcaaac

SEQ ID NO: 257798 - DNA, 803 bp, Cannabis indica
aaaaaaaaagttttaccctaattcatgcattattatatctgtggggtccatagcattgaataaaatgaaataatgaattaataaaaaagtaattataaaaaattggttagatgatacactatataatggacacgtgggagacaaataacatttttcaattaaatagcaaatgtcaaaaaatagagttgaataaaaaaatattttaatcaatcctagtttaaatatgttgcatttaagacaacggtattacaatgcacttacccaattaaaataaactattaaatgtcctacaaataaggtatttagaaaattccttacagtagaagagtcttatacatatttacaattattttatacttgtaagtagttaacattcatatcaatactttagtagttataaatgacttatttttcttgagtcgttagacattcaacaattacaccaaaaaaagataagatatagtagcttaattagtattatttgtaatgtaatcttatattaaaacttaaaactgaaaaaatgaataaacaaaattagcaaacggacaaagaaaaaaaaagaactataaaatcaaaagtcatgtcgtaatagtattttttggtgtttagaaacatccaaatatatataaaattaaatattataaaccaaatgtcatattataacagtgcttttttggtgcttaaaaacacctaaatatttattctcgttagtttgtcacttttataatttttgaacatttgtattcttgaataaatatttattgcacattttgaataacataatatattataagcataattaa

SEQ ID NO: 257799 - DNA, 666 bp, Cannabis indica
gattatagacagagttattagcagctcttgttccaccaatcgccttcaacctaggcattggacctcttcctttcttataacgtgaacgtgttcccaataccatatcaacaatttggtcgtcagacaaaatatctggctggtcaacagtaacgtcagaacctgcaggctgactaatatttgttctctgagtagaacgcaaattgtccatctctgtctgcaatattagaacaaacaaattaacaataaaaacagtaacaaagcaaataattaattaatcacaccataatcatacatgtacagaaagagaatgccaaaaacaggaaggacagaaaatggtaccaactgagtcatcaaatatagtttatgagaggtgaacatacataaagagtatttcctataaatatataggtttgaataaactcatgatcagaaaactgaaatattgtaaactcaggttataatttgctagtacttgtatttacattttccatgactaattttctttcaaccacaaattaagtaattcatatataacatttaacatcatatacaatctaataaactctatattcatattaattatattatgatgaccagtactgtgttaggtaagtatagcaatcaagttatagcaataaagatattgtaataatgtaattaaatcga

SEQ ID NO: 257800 - DNA, 628 bp, Cannabis indica
tatatatatatatatatatactctcatatttaaagatgttgttcatgtctagcacagtcaaatatcattaagcttttgttgaagtaatagttctggatctaaaaggataaagtaactttttggagtagttgaagatcgtaatggactaattatgcaggggcattgtagtttcaatacaaggtttttcatctaatttgttatttattacccatctttttatagaaacttattgtaaaattatatatgataaaatgacatctatatatctaaatgaaggaaagaacaaaaaaatctaggtggcatcttaatattattttctttctacttttcttattttgtaagacattcataatttgtaaagagaaaaagcattatttgcatatttaattattatattaatagtcaaaactatttgtattcttccattaataataataataataataataataataataataataataataataataataataataaactatttgtattctttgaataaatttattcacgaggctttttaatatcttcatcaaaacctttaacatttcttaccatactatgtgtgtaaatatgtcctactattacttaattagaaaacaaaagccgcgcgttgcgcggt

SEQ ID NO: 257801 - DNA, 486 bp, Cannabis indica
tattttcttgggatatccaaatgatgttaagggctacagactttactctcttgaaacaaataagatcgtaacaagtagggatgtcatttttaatgaaaatgattttccttttaaaagaaatgagaaaggtactgtttctgatttttcaggtcagcaaaaccatgataaagtgagtactcaaatcgagttggaaaaggtggctgttgatcaagaaacaacaccagaagacacagatgaaactgaagcagacactgacaatggtagtaaaattttggaagattaccagctggccagagatcgaattagaagggaaatcagacctcctgctaagtatgctgaagctgatatcattgcttttgctctttctatgaccatggaactctcaagacaaagtgaccaaagtcatatatggaagcaattaacagtaagcaagccaagaatggaatgctgcaatgaactctgaaatggtgtctctcaaagaaaaat

SEQ ID NO: 257802 - DNA, 575 bp, Cannabis indica
acgcttttcttaaaaaaaaaaaataccacgcattaaattataaaatcagaactttaaaaatagaagtaggtgcactcatccgtgtttcttttttttttttggtcttttctttcttttttttttttgagtggttttttcaaaactgaaattaatttttttttattattttaaaatcaaatatattaatttctctcttaatattttttttcagaaaattaattctaattacacactagttattctggctcaaaaaaatttaccatcacaacctactttttaaaatgatcatttaaatatgtgggaaacatatattttttttaccattaaaaaaatatatatcttttagtttcttttatatttagttaacaaaaggataattttttaacttaacatccaaatagtaactaaaatgatttaaacaatgcttatgttataggaaagtattttaatattttaggtctaaaacttataatataatattttaaagaagttaattttataaattaattttaataaattacaaaaaaatagcttataagaaacttaccacatatagttcaatagtaaaattttat

SEQ ID NO: 257803 - DNA, 1429 bp, Cannabis indica
tttttaaaaacaaaaaacagttttttaattatgatgtcaaacatgcacttacagtccagtaaaaaaaccgtaatctcacaacaaaatgataactgtcgattaatcacaccgatttgaaaggagcaaaaagctccaggctcacgcaagagcaaaaagagaaataatatcccaaaaaaaacataatgccaacgccactaaagacaaaaagtacacaccgaaaaaactaacaaagctaaaataaacaaacaaagcgaaaacataaacataaagaaaagctgcttcaataagtcacccctctaacgcaaaggaagcgacacgaaagaccaaaacaagcccaacaaaagtagaggagcaccgccgtcggaacttccgacgagaaaagtccactctcagtctcccgatgtggttctaaacggtaaaggtgttgggacaagaaaagcacatccctttgagtaaaacccgatcaccccatatacatcaacaacacttcactaatgtatagttatacaatttatcctctttgattgacttacattattaaatatatttcctataatctatatatatattttaacatataaatattatttattttgaaagtctgataatttttttcttttctttttttggtaaaagcttatgaagaccttagaggagactcaaggtacaaggaaattcttgcaaagcatcttaatgatatcaagaatggttacaaactttacaagtaatcaaagacacttggagatcttaccaagaaagtagcgtactttctcacgtttgcaatttctaaacccattccccaaatgaattataaggttgctatttctagctaatgagcttcagcaacaaacttcttgttgccaactcagctccctaatagccaaataaaatacacactccccaaaccaaaacccatactattcaggtaaagcatattttaatgaaaatagtacatatgtaaacctttaagctgtaagcctgtaatatgcatttatgatcagtgtcggcatcaaaatttattgatattgagttctttttctctgtattactagtgtgttggttgctgtattagaactcaaatagagaaataggcaatacaaatttacaagggagtagttttgtctagacaaatatggatctaaagatataaatctgaatctttttgtcttatataaaggatgagcttcatagcagacttagcaaaatgtgatggccttgactcaaatcataaatgattattaaccacactggtcacagaaattcaaaactcaagttgcctggaaagcaagagattcatcttgtgaatttaattgcttgtaaatttgttatcttccactaccaaggtaaactagttgaacccttttaagtttaacaccataaaataaagaaaaagaaaatcacaaaagaccatttttcattttcactttta

SEQ ID NO: 257804 - DNA, 779 bp, Cannabis indica
ttgtttgctactttggttttgaggttacatttatgtatttaacgtctagaaaattagtatttgtgtaaacaaacacttactagtcttgatggtcatagtgtagtccacccctagtcactttagaatagccaccaaacatgcaaaccttagtcaaaagttctagctatttcttatggacataaccttaaaaagactttcttagcttctaataactaatcatagacccaatcattttatcaatatgcgactccgaaactttaaggaggtaagtttgattacaatttgaagttcatttacatgatatttgaactgcatatcaaatattttttcacccctatcagttctcaagatcttttaatgactttcttaattgtctttgctagaaattcatgaaaattttcaaatatttcaaatttctggcataagttaaatatctatagtaatcgtctaagaatttgatgagttactcataaccacccctagaatgtatatctctatgtccaaggacacatgaacataccatccaagtagttacttaattgaaaaggagaatgaagtgaacttaattgaataatatgatcctatgaatgattcaactcatctagatgcttccaacttcgtagaaaatttcaatgataataatgagtctactgactgtgataccagagaaaattaagtataatctagcattaactactatatttgatatattatgcctttgtcttcaatttattacattatttgtgatgttttgtgtattatgcattttttttaaagtt

SEQ ID NO: 257805 - DNA, 785 bp, Cannabis indica
gaacttgagactttgaccaaacctagaccaagacccaggacgcgaaccaacacccggagcctgatttggacctagactgaaatccggacccgagcccaaactcaaaccagtacttgatctccgacccgaactcaaaccaaactagaactcaaaattgcaaatggaactagaaccgaactagaacaaggaccaggaccaaaccgaaacccaaacccgaacctagatcaaaacccagatagagacataaacccgaactgagactgggactcgaaaccgaacctagaacgggacttaaacccacacaataaccgggacctggatttagaatcaagatagggacctgcgaaacacaactaggaccgggaactagtacccgacctagacccaaacttgaacctaggactgaactcgtgacccagcaccagagattgaaccagactgggactcgagattgggattcggatctagacccagggcttggacaaaacccgtcgtcggtctttggatttgggacccagccctagaccgaaaccgtgacaaggacccgaactgacaccctgacctaaaccaagtcccaaacccaaaagtggacacgaacccgtaccctgtgacccaaaattggaggcaaaactggaagttgaccgggactggaactagcacttggacttggaatcataactgaaattggacctagatccaggaccgtaacgggaccaagactccaaatcaaacctagacccgaattgggagccggacccgtatcccaacccaaacctggactcggg

SEQ ID NO: 257806 - DNA, 1045 bp, Cannabis indica
catctcgagctaagtcccaagaaaaccttgctcgtgcttcttatactgttttattgggctttatttaagttatttgagttttcttgtgcttattgtgttttattgggtcttttttaaaattaaatgttaatgggctattttttagtttatgaatgaatttgggttagacaaagccctaaaattcaggttttttaattgaggcgtgtgcctcactgtttgtaccgcctcagaccatatctaactgtctcacatagttgaggcgtacgcgtctcttctcccagctaaggtgcacacaataaagcgtttttcttccgcctcaatctactgcgcgcaatgaggcgctcctcgaaaacgcaattttaaacattgagtgtaaccatctcctttcaacattttttgtaaacgtattaaatcaggctcgaggggattgcttgaggacgtagagagatttttttagtttgcacactttttcctttaataatgggtcctcaaattttggaggaatgtctatgtatacgtcttccacaaggtcgtcgttaagaaaaatattcttcacgtcaagcttgaataacgaccattcattgtttaccgcaatagataagagtactcggatggtgttcaacttagcaaaaggagcaaatgtctcttggtgactaatgccatatgattgggtgaatcctttagccactaatcgagctttaaatctttcaatgctcccatcaaccttatatttgaccaagaagatccatttacaaccaactatgcgcttgccattaggtagatctgtgataatccatgttttattctttttcgagtgctcctggttcctccattgtggcagcattccaattggtatcctgtagagcttcttgaactgaattggaaatttgaacttggtccagagcagtgataaaagctctataggtaggagataagcttgagtaactcaaatagctgtgaatgggatgttgagtgtaggaaggaacccctttcctgagagcgatgtgaatgcttagatcgttagacacatcttcttctacaatag

SEQ ID NO: 257807 - DNA, 593 bp, Cannabis indica
aaatttcttatgtgacataaaaatgcattttgaaattaaataaatcatcgttaataattaattcaatattaataattaactttcataataaagcccttattatctactaattttcaaattaaagctaagaggtctttacagtcatgatcactcttcatggttgacggtcatgaccacccttcatggttgacggtcatgaccacccttcatgattgacggtcatgaccacccttcatgattgacggtcatcccaatggtcatgactttacatattcttcattaatttagtctcggtatttttgtgccacgtgttgctactcttgacacgttatcgtcattaaaatttgggtaaatatttgcccctaagtttctagcggtatgaccatatggtaagaactttcttgtgtaacccgagtctcgctttagttgttgacggcttagcgtagaagaaccataaataatacgcctatactaaaattatattccaaaaatgcaaaaatattttcctcaaccattactcttttacattttacaatatatcccaattataatttttccctttataagaaaaattaaattacaagaaaaataaa

SEQ ID NO: 257808 - DNA, 780 bp, Cannabis indica
gtgcacagcagcccaggctgctagcttgtgagccacaacattggcatctcgaggtagccaagagacatttaaaccagaggaggttttaagacaagaaaacagatgcaaaaatatattagagaggttccaaacaggtattgtaaagtttctaacaacattaacaagctgcaaacagtcagagaagaagttagcatccttgcagttcaacttcaggctcaaggagaaggcgtgacagagagccatacactcgacatggaacgctgaagtagaaggcaccttggcagtgagagcatccacaaaatctccatccttgttgaaaataacaacagccacataagcccaactaattccacgaaccgctgcatcagtgtagaaattaaactccttcatcacctgctgagcgtgattaggaggatcaaaaattgatccctagaattccacagatagaagcacaagtaggcagcaaattgaatgtaattcttctcaaaataaatagtcatattcagggctggttttaggttaaggtgtgttaggtttgcacttaggattcacttattttaagagctcaaataaaaaaatactttttaaaaatatcatttatttttatagtaggactaaaaaaaaaataaaccaatgacttatttcaacttagagtcgtcatattccaatattaggtgactagaatcctcaaataaaacataaatgcctattctaggcgagagaagaaacaaaaatgaaaaaagacccttaagtgctcacttaactaaatataattagtta

SEQ ID NO: 257809 - DNA, 549 bp, Cannabis indica
ttttttattattattatttctctcattcatacacatttctcacaaaattattgcaatagtagagaattctaaaagttatctatcatagtgccacgtaccacttgattatatatattctttcaaaaaattagtaatatatgatgccattaaatgtttatgattttgatacgagatttaagaaatgagtgtcaactatgctataataaaatatgaacaaatttcgatatatgatgagagtacctatatggtttgatagcttaaaagatttttgtgtttaatgtcatttacatatttaatttaattgaaatttatataattgagaaaaccataaattacttgaataaatctgttattgaatagatattagtaataggaattgggttatgttagaccaattgatacaattgaaatcaataacgtcaattcccacattaatctacttacttcctatttttattatttttttaattttcccttaaatccaaaatatctaaatagaagtaaattattaattttaaaataataaataagctaccctacttatgtttt

SEQ ID NO: 257810 - DNA, 560 bp, Cannabis indica
aaaaagagggtaaaaatgaaagagaacaacataaaaagggtatagagtgtaatttcctccttaaaaaatctctacattgatacacgtcacctgaattattttacatattgggccctgctccaactaaaaatcatactgggccctgctctcctccctcatccttttaatgatttctacatcttttttcttctttgttgatttatactactaaactaactatgttttattaaataaactcatacatgtgatcgaatgttggaaagtaaaaagttcagactttttaaaattgctcgaatcacccaaagttttcaacatcaacaaataaacaaacattacttacttacttagtagtgtttatggaagcaagtaataaaacttactatagtagttcaagtgagaaagtatttgaaacacttgtactataatggctcattgttgtcaaatgtcaacaagcttactcaaagagaaatccaagctaggagagaactttacaaatctcctttgaattaatagaaagagaaatccaagctagaaaatagtatcaaagaattcacaaagca

SEQ ID NO: 257811 - DNA, 549 bp, Cannabis indica
aaattttttgatttttctaagtatagaaaatcaaatttcccttttataatatatcacttcagaaaaataattttgaatagtgctgtaaatatgggtcgaaatttttaacgtgataattttggactattttaccctctattgaaaataatattttcaaatttgtcttttcttttcctattctatattggctattttcttttaagataaaattattcatttttgttgtttctcttcaatcattattggtgaagaaaaataacaaattaatcctattatttactataatataacattattttattttttatgactaatctatgttcattaagttttatattatttttaatgttaatagtgttataatcaatgtaatttttctacttttttctttttgtttgttttattttctatatttataaagctaattccttcctaaagctaattctttcctaggtaaatgaattcaaaaaattcgaattttgtaaagatgaataaacaggcttatataaaaaggatacgaaatgcagacatgaataaaaaaagaacagt

SEQ ID NO: 257812 - DNA, 635 bp, Cannabis indica
ataacgttaattgatttgtttttcttgaatctacgcatatatttgaaaattgatatttattaagcatgtgttgacgtaagtggctaagggagttagttaaaggttgagaacttttaggatgagatatttttttatgatttttttttaataagaccaagtctgtgtgtggtaggtttataaaagagagtatttgtagccgaaccctatattctgcgactcactcttaaattcttctaaaaatataagctctcacccactcatattctttctaatcattgctcaagtttagcaaggggattgctaggaaagatttgactaacgcatggtaactatgatttggttttactttaaataagttttgatttaatagatttagatatatacattgggtcttaatttggatcattgattatgaatgtttaaggtgatatgtaagagagatcttcatcaaagagttagacttctgtaatcattctttgaatcgttgtcagttcactatcttatcaagtaagaaaattaagtagtttttatgtgttaactgcataatttaaattatttgtgtattgaattattattgcgatgtattattatgaatgtgtatatagtgctgagaatgtgtggtatggacacaatat

SEQ ID NO: 257813 - DNA, 1667 bp, Cannabis indica
ataagttgttctttgatcacgattagtatggacgccaggcgaagtaccaggagcaagggtaattcggttggatccagtggtggtcagggagctccgattccccttaatatctgtggccgaggtagaggtcccaagggcacggcacgtggccggggtgatgttaacccgccacaggctccccaagctgcccaagctgctcaggatgcccaaaattgggaaaataggtttgcagcgatgcaagccaagattaatgaacaagatgatgagatttgacggttgagataggagggtgctcttgcagtgcctgctctagaaataccagtggcacctacccctgttgcgtaggccgaacctgtggttgcagtaaactggatggaacccttgtattaaaggttccgcaagcaagcacctccaattttttggggggtccttatgtcatgaaagccgaacaatggctaacagtgattactagaatcttgaattttatgggcgtcactggtaatgatagggcggcctgtgccacttttcaatttcaagaagacgctctggtctagtgggacatggtgtccgtgattcatgatgtgacaactatgacctcggaaaagttcgaggaactgttcaatgctaagtattacaatgaagcagtcagaagtgctaagagaaaagagttcacccaattgactcaacaagaaaacatgagtgttattgagtacacaggttggcctcgagaattgtgccaaccgacttcagtaagaaagagaaatccctggatgggttaaatgcaaagatcagacatgacttgatgatcactacggacgacagtaccacccatgctgaaatggtggataaggcccggagcgtacgatcctcgagacatcagggcttttgctgtttagtcgctaggcgacaaatattttgtatatgaatagtaaacttttgtaactgtattttgtaaacgggatcccggagttttataaatgtaatatattatgtttaaaataattaagcaaaattttaattattaacgattttcattaatctcattgattagcaacgtgctgcaaagtacgttaaaaatcacgctaacatgcctataatagttagggtgtaacactaaaagtttaaaataattagaaacaacaatattgagtaatacaatagaacaaaacatcatgaaaaaaaaaataatacaaaacaactaagtgttacaaattcaacacacaaaaataaatctactacaaatataattgatgtatgtttgaatttttaatattttttattttataaataatttttaatatatataaatataattggattggatcgattttcaattaaattttgagattgacgttcaataactgatccaaccgaattagaattcaactttcaacatccaatccaatctaattgtaattgaatatctaattttttttaattgaattgaattagatcgcttcggttcaattgaattagattggatgttgtctgcccctacttctcatactacgtacatctgtaatcgtatttttaaattttaagagtattttcaaccatgctctctaaccaaactctttagctaaaatagaatgcgctttaaaaatatgagctacaaacataccaaaagtggctccctataatagtaaatagataagaagatctctaaa

SEQ ID NO: 257814 - DNA, 836 bp, Cannabis indica
aggcctgaacatcggagaacccttctctattgatctatttaaatgtagcctttaactccttcaacttgcttatcaattggtacattctagtccctctcttttccttgtgccaaacttccgaaaccttattaaaataattaggatgagaagaccacatcctaaaatatttaaaaggttttttcccacttctccaccttggatgtaaagataagatggctggagtatgatcaaaagtcccttcgtttaggaacattgcctcagcatttggatactggtccagccacccttgattggctaagattagatcaatctttgaacatattctgtctcttccttgctgtttattagaccatgtaaagtagcagcctgctgttttaacatcttcaagttgacattgttgaacacattgtataaagtttgtatcaggatgatagcaaactctatgtcccactctttcttctttggctaaaatggcgttgaaatcccccattataagccaattttccttagttctcaaaccacacagatcagcccataagagtctccttccttcattatcattggccccataaaccactgtcaaatggctatttaaactaccatcagctacagaaattctcacattcattaattgactagtgcatttgagaatatcaacaacaaatttgctaggatcccacgcaatcactatcttacacccttgatgccaagctatattcaatgaaaaacaccaacccttatacacatttaggtacaaggttccaagcttgtgaaccttgaccctagtttcgagaagaccaacaaaaccagcagtatgactgttaatgaattgcttg

SEQ ID NO: 257815 - DNA, 638 bp, Cannabis indica
gattttctcccgtacaattcagttataacttttgctggattctaagaattttgtattttagaatattctttcttttattcctttttgctttactcattctttgtataaattgcagtgatattagccatgtatagtaaccgttgcagacagagcttcaagtctccttttttttttttaactaattgaaattctatgttaaatgtcatcagaatttctcagctaaagcatgagtataaatatgcatatactcatgcctttctcaacagctagctcaactgtcatgactttcttgcttattaaaaaacaagaagtaatgggagttgatagcagcactgtacccacattactaacaaaacaaaaaaaggttttaaccactgggcacaacgcttgtttgagtgatagatttgccattttggttatctcataaatgagaatccgatgaaattatagcttaatacaaaataaatttcagttatttagaataacctgaaatctattctgtcttttcaaagttccgggaatgatcatgtgtaattaactttttgagttccgaaatcaaaatcaccatggacaaatttcaggctgaatatacaagggaaacttacaaaaatattgtttttttactaaatattttcaaa

SEQ ID NO: 257816 - DNA, 775 bp, Cannabis indica
cttgctccatctcgctagaattattggttattttccaagtgcactcgtgttgctatggtggttctatccgtgagtgtggaagatgatagctataaatacatttcttcatccttctctatgactgtttttgtgtttttttatttttattctcctataaatacatttgacgagctcatggcaaaaaattttgaggggtgtggttcttttatattcttttaagtagttatgtctgcttcattgttttacatttgtttttgtgttgttttagtagttttttttattctgattttcatgactggagttgcaaatatagcagctattgtatctagtattaaagctgtgtagaagatggttagttttttttaatcccctttttcttttgttttttttttaatttgttttagtattgttttacagttgttttgccatgattatttatttgacgttgatttctctatttttgttccatcttacggaaattaaaggttgttttcaagtgttttagtattgctggggtggttctgtccgtgggtgtggaagatagagtcttggtatgtgattttcggcgtctatactataaaaagaaaaaaaaaggcaaaatacaaatataaatgtaatttttaccgtgtaaacagtataaattaggggtgttcatccgatccaatccgcactttttggtcaaacaacatccaatccgcactaagtgcggatttcatattttggatccaatccgatccgcataaaagtttaaaatccaatccaatccgatccgcaa

SEQ ID NO: 257817 - DNA, 715 bp, Cannabis indica
agtcgcctgatggagtgcacgccgagtggttgctgaggcatgcttgcagagtgggtgcatgatgagtgtatgtcgagtggctacttgtacatgcttgcatagtaggtgcatgatgagtgtatgtcaagtcgctgattgtgcatgcacgtcgagtgattacttgaacatgcatgtcgagtggttgcttgagcatgcatgccgagtaactatctaggcatgcatgtcgagtagctacttgagtatgcatgtcaagtagctacatgagtatacatgccaagtggattgatggtgtgcatgtcgtgggtcactcgtgactaccggtggaagctagtcccactaatctcttaaatcatgagtgtttactaaaattgaaggttagttttgttaatttttagggttaacaatgaaaaaaatataatttgctctttttttttgtaatgataatatttataattgtaatattattataatggaaaatgtatagttgaggtggacaaatcaactagcaaatttcatattccacacattgatcagctataatattattatcgtgtcagatgatggttgtcaaattaatgtatcaaccttacataatggtcataaaattatagagctacacagagaaaagctgtaaaaaagaaaaaaaaggctatttgtagcttgatcctctaaataaataaacgatttatatatagtcaaagtataatagtataac

SEQ ID NO: 257818 - DNA, 503 bp, Cannabis indica
attgtggtctctgcttaatatatttgtcatttttcttttggtagcagcatcactgaactctgctgattgttccctcatgcatgtttgaacaacaacagttggcctcgaaagttgcaaagtttaggaaagtatacttctaggcaaacgttaatgacatgatttaaataattgagcaaatatctatttgataggaatcatacaattttaagtcctcttacagcttgagcagtattgaaacataagtttctagagtttcttcatatattgatgatatatcaatttaattatttgtttattcctacttattcagccaggagttactttaaaacataataaagaaggaactgaaagctcaactttctggtttatattgagtttgttatgattgttaaactagagtcaaatatagtatgatattaattgtaactctttgtacctcaatggctagcttgttttttatacttatataaatactaactatgtattcttgattcataataaaa

SEQ ID NO: 257819 - DNA, 576 bp, Cannabis indica
tgattgaatttttcaatttttttcataaattttctcgacattaatttgtaaatatatatatcttttggagatgactttttcccgtttgacattgttatatatagatatataatgtaacgtcaaaaaaaaattaattaagatataattttttagaaatcttttcatatgtatgaccctctcttcaaatcattttgtttgacattttttttttcagcgaactaaaaaaccaattatatatatttaatacaacttccgatttttctaaatataacttgccactaataaaattaaaaataaaaaacatggctaaacacatacccaaaatatatatccataatcagcactacccttagtatatctttgtaggaacaccgaacacacttagatgaaaattgcatttaatttcaaatctttctttgtcgggaaaacctaattaatatcgaaccaaataaatatattgttgccggaaaactactccaaagttaaaaagcgaggaataaatcagaaataaatagaaactaacggttaggactcttttttatttttatatatacacctaatatatatatatatata

SEQ ID NO: 257820 - DNA, 864 bp, Cannabis indica
ttcatagttaacacgaggggtatcgaagcaaatcccaagaaaatcaaggtattaatagacattccatcaccgacaagtcctaaagaagtacaagctctgacatgaagaatggctgcacttaacagattcattttgaagtcaactgacaagtgtgtgccgttcttcaatgtattgcgaggcaacaagaagttcgagtggacaaaagaatgtgaagaggcctttgagaacataaaaaggcatctagcaacgcctctaattttggcaaaaccaataattggagagatgttatttctctatttagctattttgaaagaggctattagtgcagctatagtgcgagaaaagggtaagcagcagctacctatttactatgtaagtaaaaggctactaggggcagaatctagatatccccctctagaaaaactcgctttgtgcctagtccacgcgtctcgtaagctacgcccatatttctaggcacatgccataaaagtgttaaccgatcagcctttgagacaagttttatcaaaaccagatgcttctggaagattgataaattgttcaatcgaactaaggcagttcgacataacataccaccctcaaatatccatcaagggccaggccttggccgacttcttgatagaaggtataacttcagaagaaattctgcctgttcaacgagatgcggaaacctagaagttatacatggatggtgcatccaacgagcaaggttcgggtgcagggtaatattaatatcaccagaaggctttaagtttcactatgctctgagattcaatttgacgcatcaaataaagaggttgggtatgaagccctgatcgctggattaaagatagctgaggcgttgaa

SEQ ID NO: 257821 - DNA, 647 bp, Cannabis indica
cttgaaagagcatccgcgactacattatctctgcctgacttatactcaatggtaaactgaaatcccaacaacttgcgcaaactgtgttgttgttccggcgtctgaatcacttgagtaagtatctccttaaggctcttgtgatctgtgcgaatgatgaagtgtcggcccaaaagatattgacgccaacgagtcacgacctcaactaccgcacgaagctccctgtcgtaagcagatgccccgagcaaacgctgcccaaacctcttgctaaagtaagcaagcggatgaccatcttgaagcaacaccccaccgaacccaatattggaggcatccgtttcaacaacaaactgtttagtaaaatctggcaactgtaacacaggagtagagaccatagaatccttgagttgctggaaggccaaagtagctgctggcgtccatgagaaactgtcctttttgagcaagtcagtaagaggagcggcaatggatgcataatgagcgacgaaacggcggtaataccctgtcaaacccaaaaaaccccgcagctgtttgagattacgcggcaaaggccattccaccatagccgagaccttcgaagggtcggcggccactccttgatccgacgcgatgtggcctaagtactcaatggattg

SEQ ID NO: 257822 - DNA, 690 bp, Cannabis indica
tgactttatctgcctgcattagcacacacgcccaaaccctcccttgatgcatacgaaatacaccacaaatctctcttgatcagacggcaaggctaaaacaagagctgtaatcagtcattgtttcagctcttggaaacttccgtcacacttatctgaccatataaatcgttggttcttcctagttaactcagataacgatattgcaatcttggaaaaaccttccacaaaacgccgataataacccgctaaaccgagaaaacttcgaactttagtgactattttgggtctaggccaattcttcactgcttcaatctttcctgggtttaccattatcccgtcttttccaacaatatgtcccagaaaagatacctgtgatagccaaaacgcacattttttgcacttcgcatagagtttatgatctctgagtcgttgcagaaccattcgaagatgatgttcgtgttctgcttctgaccaagagtacacaagaatatcatcaattaattcaattacaaaattatcgagaaagtccttgaatactctattcatgagatccataaaggcggccggagcatttgtcaatccgaatgacataactaggaactcgtaatgaccatacctggttcgaaaggctgtcttcgggatatcctcttctcagattctgagttgatgatatccagatctcaagtcaat

SEQ ID NO: 257823 - DNA, 633 bp, Cannabis indica
attaaagttgtgtcctcatctaagtctctttttggtaagtaattttgtcttctcgtcaataacttttattacttatttaatgatcaatcataattatataattgttgaaagtgagacacaattatgttggcttttgtgtggtgtagatgaccaactttttttttttctttatttggtaaggaagtataattttatagatcacaattaaaaactaaatacaaacaaataataggcaataagcctcctatatgtgtaaggtatgaaccccatttttctttatcatcatttaccctcactacaaaaagttaatacctttagtgacaattttttagccacaacatattttttttttttgctaaaaataacttatagtcataacaaaaattatttgtgattaaaatataatatttaaatacatttatttgtccctaaaaacacatttaatcgcagcaaattgtaacttttgtaactgatacatttagctacggaccttttagttactataagtagagcctcgcgattaggcatgtcaaaaagatccatttagttagatcggatcgaagctctaatcagatccgctccgccctgcctaatttcttttaatcggatctaatctgacccggtttcaatata

SEQ ID NO: 257824 - DNA, 667 bp, Cannabis indica
acaaaatcttaataattgtttaagaattaataattattcataaacattgaatttacattcaaagtgtttatgtggcattatctctttgcagagatggaaatatcatagattttgtatcaataataaaacacaaacgcatacaaacatgataaacatataaatataattggtattggcatacacaagataaagaaaatatgaaattcataaatgcaattcataacaaaatggtcgtaatgaatcgtctgcaataatatgaaatagggaataaaatcccaaaccaataactgaaactataaattgttcataaattgaaacaatgaaatcaaaaattaaaagaagattcgagcttcatctttacttggacaatcttcatcattctgtctaatcatccgactcaactcgctaggatagtaatccaagtttaagcagctggagctgaaataagaagaaaacaaaacatggttaatagatccagagttaataacccaaagggataataatttctaaaacacatgagtttatagcagaaatagaaataccttgtttctttgccaaaaacttaggacactggggtttccaatggcccttttcgttgcaatagaagaactttcctttttgctttgcatttggattagcagtctttttcttattagttgttttaaca

SEQ ID NO: 257825 - DNA, 650 bp, Cannabis indica
attttgaagtacaaaaataaaaacccctatatatttatttattttaaatatataatattaatttatacacatgcacataaaaaaataaaatattaatctataaccttaataaaaatgagaatgcttatgggcctctactattgaattacaaaataacctttaattaatatatttatatatatatatagggcaaagactatagtaggacctagcaaaagttccctatcggtagggaactttttttgaccattgattttaaatcatgtggttattatgatgtaaggtatatactcttacgatatgactacttgtatacaattaaaactttatacatattataataatatttaatgattatttaattttttttaaaaaaatattattaataattaaaaattttattaatttttattttgaattattattattttttaaagttactttgaattatttttatattggtatttattttcaaaaaaagaattttttttctaaacttatttttttggcttttcataatttactgatttttttttttttttgcttttaggttgtgcgtaattctagtgttattgactgtttttttttttcaatagtttttatcttcttgttgttttggatgctcttttgagacgtcacttataaaaaaa

SEQ ID NO: 257826 - DNA, 754 bp, Cannabis indica
ttttaatattatttacttttgctggcaccgcaaaagtaggaaaaaaaggcggtcatttttcccttgcagttaaaaaacgtgcgcgcaaaagtaggtgggacttttgccggcgcacatatatgcgccggcaaaagtaggaaccgtttgacccttggacacgttgcattagggttaagcttttgatgtgccggcaaaagccctgaaatttttggcgatcaacttcccgcccaaagaaaaacgtgtgtgaaaattttgtgggaaacttttgccggcacacctaattgcgctggcaaaagtcccaacttaaatgaaacgctgcgttttgtgcgtttttaaaagttgagggttaataaagccagggacgaacgcttctccgccattttctattttctctttctctctctcttcaaccttcgcacctcaccgccggtagccccatttatccccctccaaaccccattttcactaccaaatctttctttctctctttttgttctttttttttttcatttattttccaaaaaaaacatttatactgggactccggcgagaacgtgtcgccgcacctccgacaaccgctgcctgagctgccacccttctgccgccgcacctcatcgccggtacccttttttttttcctctattttagttttatttaatttatttttgatttgtgtatatataataattttaatttatttgtgtataaagttgtgtttaattagttttgtaagtttatatatgtgtgtaaattt

SEQ ID NO: 257827 - DNA, 527 bp, Cannabis indica
cgttcagttccttgtggattcgcctacatgaccttggtacttcaagtattgggggaacgaatagccttagtgctttggttagtactattgggaaacctattatggtggaccaatatactaaggatcgaactagagttcaatttgctagaatccttgttgaaatggacatcatggatactcctccaaaatcgattcagtttctgaatgagtttgatcagttggttgaacaagcggttgagtatgagtggcttccagtcaaatgtaagaattgtaatggttatggtcatatgcaagctgattgccgaagagatgctaatggtcataaagagaagaagcaggaccctaaaccagttgctacggctggtgaaaaagagcaacagccccaatctatagggcaagtacctacatctaaacatattgaaaaaactgagttggtggaaaaatggcaaactcctaggaaagttactcaagctaagagacagggtactttgattccaaggtctaaattggaggcaaacagcatcaac

SEQ ID NO: 257828 - DNA, 655 bp, Cannabis indica
ttatatagcaaactaattagagtcccataaatcctaattaggtttattattaggtactacacatgtactgaataagatatttattgaacttatttaattagatcacttatttagtccaatttagaatattagctcaaataaattgtcttaatttataagcccacatattggattattaaaaataaccaaacaatctctcacttcggctacaaattgattccaataacaattacatctgataatcttatgtgcgaacaaacttgctaattattctctaaacatctcttttaaacaatttggaccatctcatataccaatatgagatcaaagcggtcttcgttacatttatcgtaactagacacatcaatgatcaccattcaaatatattaaatgatattgtaatattttgaaaataaaattatgttaaataaagtatatttcattaaatatagtaattaaatagaatatttttggcataatgggtaaattatgatttttttcaagttaattatgtaaaatttgagattataatgaaaatgagttaataagtgtaatttattcacggaaattttattaaaatatatggatattgtatatatcattttttaaaataaaatattttctagttttgtgaatgtggaagctcgattatttg

SEQ ID NO: 257829 - DNA, 1024 bp, Cannabis indica
ttgctggtttacgttggaaaattggagaaggatgtaggataaattgtgctgatgacccgtggattccaagacattccacctttcggccataccacttctccggaccacctgatacgactgtctcaaacttaattgcagatgaaaggcaatgggatttagcactcctaaatcaatggttttcctctccagatgtagatcgtatcttaactattccactgagctttttccgttatgaagatacccttgcttggaacccctgctcctctggaatatattcggtccaaacaggctatcacctagctgcttccctagcagaaaccgatgacagctcatgttcttcaacgtttgcttcatggtggaacttcttatggtcactgtccttgccacaaaagattaagattttcatttggcgggcctttaatgatgctctccctgttgcaacagcccttgtaaagcgcaagattatcacagattcaacttgttccttgttccatctgtcaacaagcttgggaaactgctgggcatgcactattcagttgtaagtatgctcgatctgtttggcgacatcttgatattactcatgactggaatactgctaggcttatgcacaaaggtgattatttggtgcactttgggcaatctggactgaacggaaccgtgtggttcatggtcacaaagccaaaccagcaaaagaccttgctttttttttgcaaaaaactattggcataactacactgctgcccaactgaagtgctcttcttctgcaccagatcccaactcgctcgctgcagctactactgcttctttgccacaaatttctcctgctgcaccattgatgccgtggactcctcctccacttggaatgctgaagatgaatgtcgatgcggcagtagatagcacacgaaaaattactggtattggtgctttaattcgaagttcaaatggtgaggttgtagcagccatttcaaagccgattcttggttgttatgcatctcatgaaatggaggcaattgctatgtttcac

SEQ ID NO: 257830 - DNA, 1624 bp, Cannabis indica
aagaaaattaaaaaagaaattaacattttaaaactaataagtgatttaaaaaattatttacttgttataaaaaatccattgagatataaaaaatataaaaatttaatttttgtaaaaactaaattttacgggaataagtttgagtctattttttttctcgaaaattctagatttatttagtaaacataacattttttcagtttaatttctaactttttttttcaaaataattttatatttttattgaatttttaattagtattctttattttttaagacacgagtttataaatataaataagcttgattttttcttcaaaaaaatcttagcgtgtttaaattatttattagattttaaataattttaatttaattttttaagatacgtttgaaaataaaataaagtttaaaaatattttttaaggaataatttaagttgtttaagtaagtttactattttttaattaatttaatatttttattaaatttttagtaatttttattaatttttttctttcagaattaatagaatattataatttttaaataaaagtaggtaaatttttgtattggtcaaaatttaaggggtaaaaatgctaattttttaacccgtaaaagaaacagaaaatatataatatataactattatattttaaggaaaattttaacaagctgtatattttaagacaaaatcaaatagtgttaaaaaatttagaggacaaagatgttaattaatcttttaaaatttaaaattgttattacataagtaattttgccgataattatttatatataattagttaactaaaattaatgaaacgagatatagaagttccacccaattttaattttattaattataataaatgaaactcataaagtttagtaattatcccaagtaaaaataaataaacacacacaataaataaaacaaatattattatggtgtggactattatttattataatactattgtcacaagtttattaatttataatattcttgttgatttccttccaaaataaaatccaaaagaagataatttcatatttaaattcttaaaataatagagtttattattgtctagctatagtctacattaataatgagtgattttttatattatcgaaattaataaaaataaaatgatgattatataggccaaatgataacaatatgatgaaggtggaggacctttctacatcatatacctactaactataggagtactaatagagaattgaacatataaaattatatctatatataatataatatgaccatattttatttagtgaggatgttaaaccttcaaatcatggacttcattttccacattaacattaattataatttggaccatgtgccttttttttaattattataatgtttttgaattgagctagcaatattgttccatattttatgaatggttaataattttttattgataataattaaaatatgtaagagttatagtaattaattataccaataatagtataatatctcttagtaataataataataataataataataataataataatataattttaacaatttttttacttgtaaatctttttgattttgttctccaatgtgataatgaatattcat

SEQ ID NO: 257831 - DNA, 651 bp, Cannabis indica
tacggacaggtacgtgtagatgatattgactaataacaacaatatactccatttttcccgaattcaatagtgaatacatggtccgtattccgtacgtccgtaccctttcgccagatataatataagttcccactccctacatgcaatgtctaagtcatatctttatacttaaataattataaagtacctttgtaaaataatttattttgttttttttttggaaaaatatatagaaaaaaaatgatgcaatttagcataatttcacgatttttatttgtgatatgtaaaaacattgttatatttcactttaaataaacgcttaacggcgtcttatttagttcatattcataataatatgaaagtgcagcagtttgtgtatctaagaggctcttagtgatcttattcaaaaatttataatattgtagattttgtactaatatgtaatttttaagctattttttctattctccaacttattttactaaacataatactaaattatgtaactttttacaaaaataacgtttttttaaaatgaaaacaaaatgacgtgacacgtcattgtcttctccactataatcttcaaccagagaaacggctgaacctaaaaaaactggaatcacgcgcatgattcctaacctacaaacgaat

SEQ ID NO: 257832 - DNA, 1135 bp, Cannabis indica
caaaatcatcttactaagacttaaaagaaaaggaaatcattagacatgatatttccaacaataatttttacatgtttcttctggtactgtacacattatcattgataaatcttttggattttataaacggaagatatagaactttgcaatatacatgcatgttttttcaattttcaattatggtgtcgttgctaatatttttgttttctaattttttaatcacgaataaaaaaaaaattattttcgaaaaataaaaattcgttctataaccacttttgtttttcaattaaaaaaacagaaaataaaagtgtgttctataaagttcgttttcatatttatttttttattttatttaagtcgggtccaggtccgagatcgagtccgagtgtaggttaggggctgagttcagtgtcagggccgggactgggtttgagtccggtccgggtctagtcagagtccaaaatattgattaaaaaaactgtttaaaaaatattgaaagtgattttacttaaaaaaaaaaaaaaaaaaattgattctcaattaaaaaattaaaaagtgaaaagagttttatagaacataattttgaaaaatatttttacttttctaattttaaaaacaaaaaactaattaaaaaaaatgttatcaaacatcacctataataatatgaattagagcgtaatggagtttagtatgtattagtattattatgtagtatatattagtttgatgttatagtattgcttagtgtttgttattaccaagctactaaatatataggggcgatcataaaatattatcatcccaattcaaagtgtaagtactaatgttcgtacttgtgtagattggatgttaattgagatgcaaaataacagatttaataaattcaattcaatgtacacatatttatatatactaggttgaaattacgtacaatgcacgtttattttgttataatatatattttttaaaaaatatatcataattttaattgttacaataattaatgtcttacataaatttaattttataaatagtgttattttaaagataaaaaaaatattttatatacataatatataaaaaaaaataatttaaaaattaaatttttaaaaaaaaacatggcctaaataacaac

SEQ ID NO: 257833 - DNA, 913 bp, Cannabis indica
gatgtgaatgacagattatacaatctaacctaactcttttcagatcttttaggttctatatcacatgttctctaattaatctcttaattagaatcacatgtaatcaaccttaagcagtaatctaattgtcagataggtcacacaaatactttcgtttcacataaaacctagattatctaattttagcattctcaattctcactttttcaaattttgaattgagattatagaacatgtagaagatgatcaagcttacacatggaattaaacacaaatatagataatttcacaaatcaagattaaaggaatgacaattgacattaactaggcaaaactttgaataacattcatcatcttccccgattgtgaatttagttcatgaaaataaaattatccacgattaaatctagaacagaaatagacataaagaaattaaagagttgaagaaagaaactagatggtgatttctctctggttcgtcaagatagcttcctctcctccttcattcacttttcggggccgatttctgatgcctttcatcatctgagttgagtctcttatataagaattaaggttgtgcctctaattggaaaaatatcagaattaggtcgaaaatcccgtgtttcgtacctggtcgcgactaccttaatggttggtcgcgaccataggaaaaaaatggaaaaacacgcattctgccaatccacctaagtcgcgaccgtagtcgcgaccaaagaaaagggtcgactagggcttgtcatggtcgcgactactgatacgtttctggaagctttagcagatttttcaccagattgtcctgtctttttgccaattgactgaatttgaactataatgcaccgggaacccgaaacaaggaaaatcaagcgtaaaaccgctccaaaaggctaccataaat

SEQ ID NO: 257834 - DNA, 1219 bp, Cannabis indica
ctctataatcttgattgtgttctttaaattctgttattatattttctgcaattcattaattcatttctggtgtgttgattattgtttgtttgctggctgaggttgttgtctaacacaacaaatggtatcagagctaggattcaagagaaggatcggctaagcaacaatcaagaaacctgcagaatttgacagagaagaaaaagtgtttgattactgttttgaattacagcagcaagaacctcaagattcagattgaaagtgaccaagaaagatgtctacaacaaagatagacattgagaagttcaatggcaagaatgacttctatttgtgagagaaaagatgaaagctcatcttggaaacatgggattagatgaagctctcaagggagaagacaaaatgtctgaaacattggagaaatccaagaaggaagagatcctgaaaaaggcaagaaacactatagtgttgagccttgaagatgagattttgagaaaagtggttagagagaagacagctgctgcaatgtgggaaaagcttgaacaaacctacatgacaaagactctacccagcagggtttatttgaaacaaaaattctatggttttaaaatggatgaaggtaaatctattgatgataatcttaatgaattcactaaacttctttctgatctttgcagtttaaatgtggaaattgaggaggaggatcaagcaatttatcttctcaattcactacctcagcaatatgaacaattcagagatacaattttatatgcaaaggacacattggtgatggatgaaatcgttggtgccatatattcaaaggaactatctttgaagaacaatgggaaactatcaagattgaatggtgaagtgaatttcacaagaggaagacaaccacaaagatcttacaatcagaataagaacaacaaccattcaagaaaccatggaagatcaaactcaagggattctagcaaagactcaaacaaggatgtaaaggggtgctatacatgtggaaagttgggacattacaaaagagactgttactttaacaagaacagaagtcagaatcataagaacaaaaagaactatcatcatagctccaacaacaaatttgaatcccaagattcagcaaactatggtgatggatatgattctggagaagtattgctagctgcttctcacatccaaaatgaaaattggatcttagattctggatgcacattcc

SEQ ID NO: 257835 - DNA, 729 bp, Cannabis indica
cttcatcttctacatcaatacattccaccaccaccacaaacattaatccatatacataaaaattattaaaattaaacacaaatatcattacagatcaatataacatgcaaaaaattgaaagctaaaaaacaaattcagcaactttgggagtattaaattggagctttgtcgattccagcaactctttctcgacttttgacatgttctttcgattggatgatattttcatggaggccagaagctcaacatgacccaaaccaatccaagaaaatagtcttaacacctcaggcgatgtgggattgcacaacttattcggtatttcctcttacggatctcgggactactgactgtcacaaaaacacaaggtactaaatgactatatttcatataaataataaatattcagagcttagttgattgaagtgtatgacataatacacaatggtgtgtaggggtgttcgcggtacgggtggtgcaatttttaaccattttttcaaaccaacccgcacatgcagtttttataatttcccaaaaccgcacccacaccgcgaaactaaaaaatcacagaaatcgcaccgcaaaaaatggtgcggtgtagtgtagttttttaccgtttctacaatttggattatcacctaataattaaactatcacaaacacaacaaaacatgagcaacacttgtcaaaaataccataaagcttgaaaataaatatgaaaaaaaaatttaa

SEQ ID NO: 257836 - DNA, 718 bp, Cannabis indica
atttatagaggttcggcccctttcaaccgtaatatccttctctggtgtttgttgtattgcttttacgaaagtatatcaagatcacaatgtccggccaggtgagtttctcaatatcctacttccggcttccgaatgagccaaaattgatgttgttaatttgattgatctaactttatagatcattgtacttgtaagaaaattgatgaacggtcaaaacagcatcaaattctgataagcaaaacccagcgaaccattgaactctcgagattctattttttatacttttaaggctatcaaggcttctgaacttgaggacggggtctctccccccataatgaccatgctgaattcaatggtcgcatcggatttggcatttgagcaactgaaggcagcatcacaagttgattgtcaacctgggcgttgggcccagcactagttcaacttgggcgatgggccctatttccagggactcgggattgtagttttctcctcaagtttacttgaatctttgttattttttatgaaggtgaagatgctcggagaactttttgctgaactaaattagaaacagcccaggttaacaaaatgtcaacttgggcgcagggcctagtcccaagtgtcaacctaagcgttaggtccctcttctgccccttcaaaagttttgtttggtcccccaaaataatgtattctcaatgttttctgaagatggagatgttgc

SEQ ID NO: 257837 - DNA, 523 bp, Cannabis indica
gtaaccatgatggttacatatttgatttaactattggaactttttttttatatatattaggataagtctacatcgatcacactctcttaaatgggtgtttcgatacgtcctctatttgtttctgcattaaggggagcttcttaatttattatttttcataatcatgtacgttgtaactatttaacaccacatgtaaattttcagaaaattttcagtagtttacaatactaaaaataagatttacatattttgttgtacgtacaactatttttcttatacatgttgtaagtaagtgtttaaagtttattttcgacactgtaaaattatttttttaaaaaaaaaaattacaagtagtcctaaatagctacaacatatgtgattatgaaagcaaaaaatagactaaaaaaattcttctaaatgtcaaaaatagataaaaagaaaaaattacgagaatcacacttaagaatgttgggtccgccccttgttagtgagcttggactattcaagggcttaaggcccattt

SEQ ID NO: 257838 - DNA, 1214 bp, Cannabis indica
  modified_base (1202)..(1202): a, c, t, g, unknown or other
attttaattccatttttggcatatttaattgacaaaaatattttattatttattattaacttcactgtggtgttaatattggtttccttattttgtgtatctaactttggaagaaaagttgtctaactttcctatttatgaaaattaaggtaaacaaggtaagtttgattactcaatttattgctatctaacgtcttttctgatcttgtgtgagtttcccattttgttagatcagatttcttgaggagaaaactagacttaaactttccttttctataaaaggaaagtcgcacttactgctcacgattttgtaggtacagaaatggaaattcctgggctgattgaagatttattttagagaaatttttagtgggctgtcgtcttgttcagaccgtgtgtaagctgtcaataaggtgtatattgattataaatacaccttgtagcagctaggtttagtatatcttttgtatctttgatttttactcttatctttagaaaagagagtcttattttgtagagaagagcttgttcgacttactctgtttatttgtattttgtattatctttagtctatattcaagtttacaaagaagaagaacaacagtgctaccttcaggagaaggttttacaaagctttcggaagattacttttcaagtcttgcaccgagaggaagcaaacactcttcaaggagatcgaatggagttagagctcttgaagtttcaacaaggtttggttagaaggtggaatacatcaagcttgcggcatataataagagggagtttatttatgcataggtcaattactttgtatttttgagacctatctaataaattttatatctgggcttggccccgtagactagtaacaatctaaatggattgttgaaaccacgtacaaaaaccttgtgtgtttttacttttctacactgtttgtttttctggcttttggagttacaaagttgttttctgtagctaaagaaaaactgtttcagtaacagttttattattttgcatttaattaaataataaaattgggaatattaaaatatggaatttcaatattaaaccaacaaaaattgttaaataaccacattttataataaagattattcaattttttctttttatatataaacaagtggaaaattataatttcttttcaaaaaaaaataaaataaaaggaagcccaaaccaaaaaaaanaaataatatata

SEQ ID NO: 257839 - DNA, 777 bp, Cannabis indica
gtccttgtacgtcgtgccactcagccattgatactcattctacgaaaaatagaagtagtccgaccgattgtgcctcagactagatttcaaatcaaagagccagttcatatgatgagaagacggctggccccaaccttgtttggtatacaaaacgaatagtgcatctaagtacttcatgcccttcgaagtgaaatgggtcgggcaagtcttattgtaatacccaaagattaagaatcggattagcaaaccctaactagttaaatgtgtatgtattatggaattatattattatataatttattatatttgaattaaattgagaaatgacatgataagaccccgttggtgagctaggggcattttcgtaatttcaacccgagaggggtaaaactgtaaattgattttaattgcgtgctaaagcactatattattatatagtatacttgttgtgtccttttgcatgtattttctgacaaatcggcgtgctatagtcacaatcggatatttcgggccaaatcgggttcggggccgaaatacatttttgggattttatattggcattttatggttgagtgaataacctaaaatttatttgagaatgtatgtgatgaaaatgacattttcgcccttgaaattgtgtatgtgttatattaaggccctaggggcattttggtctttttgaccctttaattctattttcaacaaaagggattttggctgattatttgagatatttttctggttctatacaactcaaaaccaattctctctctctct

SEQ ID NO: 257840 - DNA, 912 bp, Cannabis indica
  modified_base (43)..(43): a, c, t, g, unknown or other
tcgaatttcccagtgagagagtaatgtccacacacatcaaacngtacctcaatcatagattggaagactgtgaagactcacctccaactgaaggacattcgggctcagatcttgattatactctgcaacagaaaggaatcaatggttagagatctgagtggaatgagacatattattccgctgcaatcaatgtaaggttttcttaactttatatgtgttttccttttatcgttatagaagttcatatttaggttgttaatcaacatacttgtgagtagatctaagatcctggtaaaattaattccaacataaacagctcccaaaattcttctcaggtcattgtaatgatttccctaatgagggaaaccatttctcaccatacgagggcgtcctcctagaattgaaatgtggcataggtcatttggtcattgccggtgacacccctaaaattcaagaccttttcaataaccgttagccactgtttggccttcataacacaagggcctcccaaaaaaattgggggcacttgtttacgaaaccgttcatcaaaggctccatgcggttactagcaaccagttattctgttggctccattgaaaccaaagtggttggcacttgctgaggaggcatagcagaagaaacctactatctcagcctttgcatctcttcatcctgctgattaattcaggcttgcatttctgcaaatctttgctcccaatcctaaggagcatgtggtggattttgataaccacctctttgaaatctaccatggcctctaccgcatccatagagatgtggtggattttgaccttttataactaccttcggtgtcaaccatatttccctgacttcttgtgttatgtcaagcgtccatattataggacttagcctgcgaacccataagtcaaatag

SEQ ID NO: 257841 - DNA, 894 bp, Cannabis indica
aaaatgtctaggtttatttgaattattttatgaaattaaattaaatatctaataagatagatgatatgaaaataaccaaccacatatttttcatatcatttttttattttataatttaatagaattaaaataacaaaataaaccaactttaaaatagatatggttaggcgattattattttaatattaaaaaaataactgataattttctaaattatatgtcaacatatctcacattaagccctttttcaaattttaacaaaaatatctaagttatttaaatatttaaaatattatttataaatatctgataagtaaaattatatattattgtcataaatattatttttctaacttataatttataaataataaaatatttcataaaataaccaatttatgaatttgaaaatattatggttaggaaatctataaaagtatcaaggttaattttaaatttataattatctaatttatcatataatataatattaatatagctgttgcctcgaatttttttcaaaatacatgacagcagctgtgtgtgacacgtggatttcaagaacgcctcacccacaaacattggctaagtcacgtatgggtagaaaatctcaggagtgagcccccagagaggagtgtgaagcatgccttgactctctaggagctagaaatgtaacaacacatctccgggaggagaaggggccgtttgaacaatcatttcacatttaatgcggcatgggggaaacgtattagaacccccataaaaggattggacaaatggcgtaagcctcttttacggcgattagacaataatcaacaagtctagacggctccattatgaagaatcacatcagccaaggaagggtaaagactactttcacctaatccctaagat

SEQ ID NO: 257842 - DNA, 885 bp, Cannabis indica
ttagtcacaacaagtattgtgactaaaaatacatttagtcacaataaattgtaatttttgtgactaatactttttgcacggaccttttagtcacaacataagaattataatttataattagttaccattttttcacttttaatcacaaattttattgtgactaaaagtaagattttttgttgtgatgcatttctcatggttcttaattagattattttttaggctacctagcttttttttttctttcttttttacagctagtggtgtaccctcaagagaatatatatatatataggtagaacttataaatttaggtacgatttcctctcatatataatctgtttttttttttcctttattgtacgtacgttcgttgtgtacattctatattttatatttttgaagattgaagtaaaataagatgaactaattgtgaccttgtataccctttgcttgtttgaagacatgtagataaaattcagcctcacataatttagaagaggaatctcttatatatgcatattgtacgtaactacggttcaaatgattaattaactttcatgcattgtaatataatatataataagctaactgtactatctatatatatatctcttcttcctaattttcttcccaaattaacttactctctccaaaaattaaaaaaaaaaaaaaacattaaaatcggcaattagtagcataaaacactaagacagactcacacatggacgtgtattcttccacttttaattaaaaacttcttattatatctattatatataaaatgtggctatataacaaaatttttggtttataaaaaattagtgagtgacttaatttaaaaaaaaaataaaaaaataacaaattattaaatgttgccacgta

SEQ ID NO: 257843 - DNA, 1792 bp, Cannabis indica
gtgatatcatctcaaaattacattcagtaatcatggtactcacccgaaacaagattggtcttcattttactgatcctaatgctaaggcaagagatacaaaagatccaactaaggctaccagtcatcacaagaaggatcaaactagtaaagatcaaaatcatgaagatcctatagttgaagacgacgaatcaggagaaaatagttctaatggtattgaagatgatcaccaaaacatgcctgctgacggtggtactgaaaagaaggacaatccaaacgagtcaaatcttatggtcattatggtaaagaagttagaaagaactaaaaataaattaactcaacaagaagaattttatttacagttgcttgagaaaatgtcgaaatggaagttgtattgataacactgatcactggaaactaaaccaaacagacgaccccataagataacaccaccgaaaaaacgttgatcctaaaaattctgaaacatatgattcgcgtaaggatacagggaaagcaaaagtgggcaaaactttggagaagcctcctcaagttgaacagtaaaagaaatcaaatttaccagccaacctgaataaaagaaagaaatcatgcgtcaaggcagggtgaccaaactaattctaaaggtagagctgcgtagaaagataaatgtgatgtcaaagccaaaatgcctattacctagaaggatacaaatcactctaatgatcttatcagtcaaagtaatgatgttgaagaagtgcatccagtattggaccacaatagtggaagtctctccaaagatgatcgatctgaaattctttgggtggccactaaaaaattgagttttaaggaccccctcgtgaaggggctgcaacctgtgaactaaaaaattattctgaatgtcgaaacaagtagagggtgcatcagtacattcattttaaggggtgcattgtaaaagcacactatatcatcttatattaaatggggtgtacctacaatgcacccccttaaaagaatgtactggtatatcatctacctgtttcgacatttagaagaagtttttagtctaattttttttatattcgtgtacgttatagttatttaagatattctgcaaaattttgagaaattcagaataatttaaaatataaaaagcagtgttcaaacagtctatttcacacgtataaaataaaatagtcacgggtgcaacacaatgtttgaactctatttttggcgtgttaaatttttataaattttttaaaattttacaaaatatcttaaataactataacgtacatggctataacaaaaattttgattaaaaattattttggataccaaaacaaataagggtgcatcagtacattcattttaagggggtgcattatagaattttcctattaaatatatctatttaacgaaaattgttggtttaataattttttttttcgttaaaattaatggttaaaactaacaccgttaaattaattaattattttagcaaaaaaactcaattaattatttatctttttttttttaaaaaataatttttaatatttaaatttaatttatgtattcagatataatttagataattttttaaaagtattattaataataataataataataatttttatataaattttaatttaaatttaaattagaccttaattaatttcttttgaaaggaagaccttaattaattaatcactctttataataaatttattagttatattgttcaaaatatccaaaatccttaaatcaattaattattctagcaagaaatctttcaaag

SEQ ID NO: 257844 - DNA, 535 bp, Cannabis indica
tgttataattccattttagataggaaaatttacaaaaaaaattaaaataatttaaacaattttcataatattgacaaaaaataaagccaccaatatatattttttatggattttaatccttgtatttagttttttttttttttgttaaacgatgggtatcaaattaattaatataaaatttaatgtgctactaattggttctcactattaatttttttactttattagtgatctaatagtagcttgttaagaaaatattaaaaatcgaatttataatgtacaggataaatgttagtcaattacttttatcgccacttccagcaccgcaaaggaacatcccaactaatgatcttccttctacttatgaacccatcgttcttgatggtcgactttatacatggaagacggagccatgattaagaaaaacataagatcactcttaaacctaatccccctaatatacatttgcttgtattgagattagacataatcccaaagtgatgatgtatgtagtcttgtatcttttgtttttgtt

SEQ ID NO: 257845 - DNA, 743 bp, Cannabis indica
ttgtaacaatcatcccacatttctaactatttttaaaataataataataaatagaagtaattaatacacttgatcttttaaagatcgatgaagaagtttattatttatttacaaacaaaaattcttaatttttgctcttaagtactaactcgacatggtttgggtatggttttgttgatctaattttgccttttgtgttctgtgcttttgtgattggcgtttttgtggtattagcagtttttgatatggcgggtattggtgtagaagaacagtatgctgatattataaaagttttgaataatttgttatttttgaatgaactcccttcgaactaggaagcagttgtggatgtgaataagtctaaaatttttcatgattcatgtgttgatttagaggccgatctactcactctgttggtaatttatcaagttgaagatttgttaattgaaccatctaggtcttgtacttgggaagatgaggttgataagaaggattttcaatcatcgacgatgcgtggaataaatttaaggcaaattaagttagaactccttttactcatcttgactttactaatcctatgaatgttggtgatcaactcattgctaaaattgatgttgaagacgttgaaattgaaatttcattttggtagaaattctattacttatgtagtgtttggtgcaaaccctcctttcatgtttttgaagaattcatgaagcgagttgaggtaatctaggggttaagca

SEQ ID NO: 257846 - DNA, 840 bp, Cannabis indica
tgtcaaactacaaacctagtggccaggctgtcttgggtacaatgtcagagattgtcagcaccaaaatatattacagagtttttcgacaactaaatatttttagcgctttgaaaagtaaagataggataaataacaaggtaacaaacgagagattttttacgtggttcaggcgtcaactatcctttgtctacgagtctattttattaggctcatcgactggtggttgttaatataaatagagatacaatagactagaacttctttcaaccgtgttcctcttgaagaagaagaagcttaaaaggaatattctggagctaatcgtaggattacagaaatgtgcttatctcagattatcaagaatcgatccgaaagaaaagtccccctcccttgggccttgtctcggatattataggccaacttttttgcatgcactaccttggatggatcatcgtttgggtgaaatccaatgttcgattggtaggtgctatatttcccatttggcatttaagggtgtgaaatcgtacgagcgggcctcagacgcgtgtcgctttagggcttctcctatttgaatttccttgtccatagttgttggatcatttggtcaggtacacaaggacacgcatgctctttacaatagcatatcgtcactactacaaaaaagactttttgcttcagtttttaagtgacatataaagtatttgcttcggttagagtaaccgacgctataaccgtagacgcaaaaattgatttttttgctttggttatgaactgacgctaattagtttttttcttctgttcataaccgaagcaaaaaaaaattttttttgcttcggttcataa

SEQ ID NO: 257847 - DNA, 1081 bp, Cannabis indica
agtccccccaaagaaggaatccttcccaaaaagaaaaggtggcccacgcttcgtaaactataccgagttggcagtacctcgagaccatatctacgccatcaaagagaaaaacggggtcttcaagaagcctttcctaatcaggggaaaccgcgacaagagagaccctaaaaaattctataagtaacataaagatattggtcacagtactctagagtgttggtttttcgcaggacgagattgaagagctgatcaggcgaggaaattttagcaaatacaagaagaatgaggaaggttatccccgagcagatgacaaagatgaaaatcagaatgcgagtggctcgagaactcctcgcaacatcctgaccatcataggcggaccccatatcgcaggtgactctagaaagtcgcaggaatgatatgcaagaaaagccagaggaaagccactcataaatgtgaacaacctgagcgagcaaccagagaagttgttcaagaaggagtgcgacgacatcaaattcatggagagtgatgcgagatgggtccaccaaccacattctgatgcattggtcatcgttgctaatattggcggagataacgtccaccgtatacttgtggacaatggaagttctgtgaatctcttgaacttccaagccttcaaacagatggggttgcatgagaaggatctgcgacacgtaacatcaaccatatatagttttattagcgacatcatcgcgttaaaagggatgatcaagctcccaatttctttgagaaccgcccctgtggtatataagtcgatggctgactttgcagtagtctaccagtgctcggcatacaatgctgtgattggttgatatattctaaaagagataaagatcgtgaagtccatctatcatctcacaatgaagttccctattcccgctagagtaggctctatgcgaggagtccagtcagactcgcaagaatgctacaacacagtggtcaaactcgcagaaaagaggatagtcaatgtcatctatctgctagaggctccacctccttgtcaagaggtctttagaatagaagaagtgccgcataaagaggagcc

SEQ ID NO: 257848 - DNA, 669 bp, Cannabis indica
atagtaggtgaaacttcaaagaacactccttcgactaaacaataaaaaaagtctaaaaactgtcgaccaacctcaacaaaaaaagaaaaggaaccatgcttcagggtaagttgaccagactaattctagaggcagagttgcatagaaagataagactaatgccagaggcaaaaagtctacttctcggaaggacaagcatcgtaacaaaaactccagtagtcaaagcaatgattttgatgaagtgtatctagtcttagatggaaatagtgaaagtctttccacaaatgatcttcaaagaagatcaaatgagaagagagagaaagtaagaacgaagaaagccaaaccctgtgagaacgatttaagaaatcatattaatgatcgtgttcacagaagggaatctccaagtgacaaaactcaacggttggaatgcaaagtcgaagagttgatgaagctcacagagaagatctctagaaatcaaaatggcactgtgtcagattttgaggaagaagacacaaaaccatgtgtgaaatgtatcacagatgcaccactgcttgagcgctttagaatgcaacaaatgaattttcaaagataggacggaccccagggaccaccgtgtgggttttaagttgccctaaataaaactcaaatttcaatgtaatctatttattc

SEQ ID NO: 257849 - DNA, 853 bp, Cannabis indica
aacctttcccgacatagtttggctaggctagaaagctgctataattagtgacattagtcgatataattcgtgacatctcgcggtattacctaagttattggaagttataatttttagcgacatgaagcaatatgttgttgacatagtttgcggttttgatgtcttttgattgcatcccaaggccttgctgtagttagcgacatgtggcgacacgtttgtcgacatgtcgcgacatattcattggggattatttttaacagaaaatgtgtatgatttagcgattattgtcgatttgtggtgacttggtttgcgatatttggcaatttattttgcgactttttgcgacacttttttatgtgttttaatagtttctcatttttttttgtagatggttcctaaacttaagcttctgatttccaagcatttcactgtcgtctttcctaatgtcgtaaatttcattgcaacatgtccctacatgttaaaagtcatttctaaccttcaacgcactctaatgtcgctagatatcgataacagcgtcataaaaaatcactaaaatttgaaaaaaaaaaccaaaaagtgcagaaatcgagcagttcgagttttaagaataaaacaactaaaataaatgaataatatgtgtagatctattcatatcaaactgaatacaacaataattactaaataaattacatgcttatttattttttttaagaattatgttggtaaaggagtttgggttgctcttatacacttagttgtaggggtgttagcggtgcgggtggtacgatttttgaccattttttcaaaccaacccgctgttgggttttgtgccctaaataaaacccattacaat

SEQ ID NO: 257850 - DNA, 876 bp, Cannabis indica
ataaaatagattacattgaaatggagttttatttagggcataaaacctaacaatacatacttgatagaagtgtggttggtgcactacaatacgccactatcactagggctgagatttcttatgcagtgaatcatgtttctcagtttatgcaagcccctcttgaatctcattggaaaattgtgaaaaaaattcttaggtacctgtctggcactattgaccttgggctgcacctcaagtctgcctcaaatctcaccttgattggtttttgtgatgctgactgggcttcggatgctgatgatcagagatcaacatctggtttatgtatatttttgggccctaacattgtctcctggtcatctaagaaacagaagactgtctctcgatcaagttcagaagctgagtatcgaagtctggctcatgctactacaaacttagtttggatccaagctttactcactgaaattggtattcatttgcagcatcttccagtaatttggtgtgacaaccaaagtgttgtcttaatggctgccaatccgattatgcattctcgaactaaacatattgaattggatctatactttgttcgagaacgtgtaatcaacaagtaacttcttgtcaaacatacacttgcttgtgatcaggttgcagacattcttacaaaagctctctctagcaccaaatttttgtatcttcgagacaaacttagcttagattttttatctaggctaagtttgaggggggtgttagtctgatatgtaaggttgttacacagtttgttattgggttagttgtacaattaggatgttagatataatagttgtacagttgattttatgctatgtacattgtattcataaatagagcttttgctcattc

SEQ ID NO: 257851 - DNA, 1921 bp, Cannabis indica
  modified_base (1780)..(1780): a, c, t, g, unknown or other
tgctaccttgtgtaggtaaaggaaaagcaaagctggaggaacaatgaggcagaactcgacaatgattgtacatatcacgacagtgcaacctagagggtttcggtcttttattaatttgaagtctgtattttgaggttgcttactagcgagtttttttttaaaaaaaatattatatgtacattttagcaaaatacttttaaattgtattttgatactcgggatcccgactcttttggttattaagctataaaatattaaagttatctttcgagtttagtaaataaaaaaatacgggcgttacattggtctttctattttattaaatgagaaaatacaccttgtattttttaaaatagtacaaataggatcctgagtttaattttttataattttttaatatagtcaacttgaagaaaatttctagcacgaccagatgtagaatacataaccagttttatcataatacttctatatcagattattattaaattttattagaaaattaccccatgtactatttttaattttttttaacaaatttacggtttgagtttctcctgtagtttttacgtgggttgctatgtagattttggttgtgatttagattgatctattagttgctatgggcatttctacatagaattctataaaaaatgcaaaaaaaaaaactgttttgtagtgtaaaaataaaaatgacataattttattttacaaaaaagttaatttagggtactatttaatattatttttttaaaaaaaaatatagaattaaatttattatttaacaaaaaaataagatctaatcaataatttttacaagataaaagaatctatttgaaaaaaaatgtaataatatataatatgtaatgttaaatactttctccaagaaaaaaataataaaaataatttactttatatagagtaactgttacaaattaaaaagaaaaaatagacaaaaggatattaaatgtaggggtgttcataaaatacccaatctaatttgatctgcgccatctaattcaatctaattcacaaagtgcagattagatattgattgacatataaaagtaactaatccaattcaatccatacatatttataaatatatatatttaaaaataaattatatatacaattactattttaatgtaaaaaataataatttaaaatttaatacatatgataaaaatatatttcaaatatatatttcattattatttataagaaaaatataatctaaagagtaatttgtgatataaatacctaaattcaactctcagttgcaaataaatacctaagtttaatttttggcggtaaagtaataatacttaagttatatttttggaactttgtaggtatctgactggtaaataataaatattaaatcattatccatgtgtcattttcttattggtatatttaaattaattttttaaaaaaaataaaaattttaatgacttggaccaactaggaattgccacgtggcaatttacttaacacttaacagcaaggtacctacaaatattctagaattacaacttaggtattattaccgtcaaaaattaaacataggtatttatttgcaactgagagttaaacttaagtatttatgccgcaaattactctaatctaaaaaaaaatcaatatttctttatacacataatttttttcttcttgctttaaatttttattttttgttttatttatttaatttttttgttagagacataaaataataataatttattttattttgtcgttagttatttttttataaatnttaaaaagtaatcaatctaaaataattgatccaatttgaagttttgtggattaaattggatttgagttgatatgcaaatttgattggatccaaaatataaaattttcatttagtgcaaatcaaatgcactataaataaaat

SEQ ID NO: 257852 - DNA, 1289 bp, Cannabis indica
ggctacacaatcaggtagatccccagagaacagaatgctacagcagatgcacttgcccgtctggcaagcaacattattggcaacaaggaaaacctggtgccaatacagttcttgaaggaaccaagcattaccatcctagaaaaagtcaacatgttggatgacaatccaacatggatgacacatattgtagcttacctccaaactggagccttgcctaaaagcaagaatggggcaaaaaagataagaagaaaggctgctaggtatttaatcctagacggagcttctcaatgtcgctcttaaggcgtgtcaccaaggctgaggttaagtggctaatgatagaagtgcataaaggcttctaaagtaaccatgtcaggggcaaatcctatccaaaaagatactctgacaagggtacttttagccaacaatgatcgaggatttgatgggctatgtcaaaaaatgtgacaagtacaagagattctcaaagattcccaaagctccacccaatgagctcatgatgatccagtctccttggcccttcgtaatgtgggggataaaacaatcacatccaagaaagtccatgactttgctgtcaagaacatcatatgtcgattgggacttccacaaaagattgtgtcagataatagaaagcagttagacaatgacatgttcactgatttctacaatagatatggcttcatcaaaagcttctcaggtgtgggccatcctcaagcaaatgggcatgtagaagctgtcaacaaaatcctcaaggacattctgaaaaagtgccttgaggaagcaaaaggcaattggcttgaattgctcccagaggttaagtcctcatagtaattactgacactttctgtgccactcctcctatcgtaggatcatattccatcatatcctactcatttcttcattcttgattaaagaatttctaaaatacttgtcccgtgtaagcgacattagctgattttggcttggaaccatactttccacatgctgcaggtgtttatcttgctccttccaacactttttttctttcgttctactagttaattcctcaattctttcttggtgctttgggaaattgccacttgttgcgactcatcacccttgagttgtggttcagacccacttgtttggccgatctcttactgattctgagttttgtctactctggctcgcatgtcgaccattttgagaataaacttttgcatagattggttggcatcctcttgatgttgtctattttcattttgatcctgttggcatctttccttagccaagcg

SEQ ID NO: 257853 - DNA, 1342 bp, Cannabis indica
ggcataaaacccaacacaaatgtccagataaccgttggagattacattaagatccagaacctccgtaatgctctagggctcctgcaaggttatactaatacgttgcatcatgattaggaagacctccgtgctgcagtgaaccttgcgttcgaagagcaaaggtgccagttcgtcgaatggagggatagagagatggaaactgttatcccaatttttacactcttacgtgacattacatgctggggacacgtggaattgattctccatacctacccgaaggagatgttatgagtagagcatcgcatatacctatacggacaaggtcctcccaaccgagcagtgaacaatccgaactgcttactaacacttagtaatttcaacatttgcatcgtgaagcataagagcaatccctataaatctaggatcgtatcacagagatatggcaagctgtccaaatcccacaattaatgtattctaaatatgtaatatgtatccttactaattatagacattgtaagaaaaagggaaaccttccctcaggcatgtagtcctgtaaatagtgatctattctcactagataaagggttaaaagaattatctaagagagcatactcagagatttcattgtaagagatttaagagaggaaacagtgtgtactttgttcttaagtcaatacaaatcaagggagtaggctattaccgaactgcttggggccgaacctctttaaaaactctgtgttctttatttatcttttcatataattttaattaaaactaaaacaaattaataaataaaaaagtgtaatttatattattttaaaaaaatattaaataattagattttcaatttactgtttttataaaatttaatatttaattattaatataaagatataaaaaaattagtgcatttatttttaaaactatgtaatttaatcaaaaaagaactaaaatttttatttttttaaaataaaaattagtaaataatttaaatttttaatttaataattttttaaaatttaatatataagtattattataaacatattaaaattcaattcaatgtatataactttaaaactaagtatatcttaattaaaaagaaattttattttattttttaaaaaaatattattaaataattatcttttttattttaataaatatttttatatttatttaatatagataagtattattataaatattttaaaattgaatgcatttaatattaaaactaagtatcttaactaaaaaaaagttaattttattttaaaaaaatattaaatatttagatatttaatttaataatttttttaaaatttattttatataattaagt

SEQ ID NO: 257854 - DNA, 560 bp, Cannabis indica
tgtttctttattgatgttaaataaaatagattacattgaaatagagttttatttagggcataaaacccaaaaattttaccccaaaacaactaaatgtgtaaaaaaatttgccgccatacttatatttttatggaaaattttcaattattacttaaatacaataaaaaatacataaataacaaaaatcaaattaattatgtatgagaaatttgactatccatgcttaaataaggttatggtcttttagtatcccactttaaaacatataggggtttaatactccaaaattctataaactccaaaataccatcttcattcaaacacacccattctaactctccctctttctctcagctatctctccctctctctttctctaactctcaccaaatccacccaaaaaaacccacgaccacttcaccattaccgttcggctgcccatttggacgaaactcactcctctctacccttgaagaaacctaggaggccattcagaacccacttctcttttgttgtttgtggttgattataagaaaatttatttggattaggttcgatat

SEQ ID NO: 257855 - DNA, 581 bp, Cannabis indica
tgggtatcgaggataccatatttgaaataaaaatatttttttcaggctcaatgactatggaaacttggcaatgtgattaggaatgtcaggacaattaaggatggattattttagaaatattctgaactagtctagaattttagaataccagtttggtggattagttattaaaatactaaaataccctaaaagttattttgaagttaggatggaggaaaggggtagaatggtcaataagtaataatttgatttctttttgttttgctgaactaagtttaataaatataataataataatagttatataagggatttatgtagtaggttaatattaagaaaagttaacttaatcttagaaaaaaacatctctctctttttcttgtttcttggtcgaaccctaaggaagaaaagcaaggatttcctttttcaaattcagcatattttggttggattatttgggtgtagggatcaattattcattaaggtaagtgtttagcataatctcctacttgttcttgaagctttagattaataaagttagaatttatttgagtattaggcctgtgatgttagtttagggt

SEQ ID NO: 257856 - DNA, 782 bp, Cannabis indica
tatactgtataagggtcgtggaaaaagttaatttataattatatatataaaaacagtctcacaatcaaggaacgttgtatctgcgctatgctcatataattgtaatattatataaatatacataatacatttattgtaacgtaattaatttgctcataatatatgtggccaattggctttaaaatacatattaactgcggcatttaatttaataatgttaatataatctttggtttaccaataaattgtactaattatactataatgagtactgtatataccattaattcagaaacaatggataatattcacggtatattatgaacgagtcgactggcacagtaaatacatatataattcaattttttattaatttttttaaaataagaaaatcagagatgaaagattattaaattatccaattgtcgtagctagaagatttatagttagctccaagaaaagaatataataaaataattaaaagttaatttgtagttttagacggacacacattgtaaactcatgaccaatattgattgcttaatcaattctctctataaaatgggagcaaaactttcgagtaagagaaaaacatataaggaaaacacacacatacatatatatatattatattatattaaattatagtggtttatttttcttattatatatatttaataaaatatgggaataatgatcagagtaataacaatttttgtaggcatgctcttattccagttcttagtcgcttttgcagacaagggaaccgcaactttctacac

SEQ ID NO: 257857 - DNA, 914 bp, Cannabis indica
gtgtcggttattatacaataactgatgccataacggaccctatgccgtcggttgttatgagaaatcgacgccatagggtcttgtttttttccagctttacaattttgtgtttcagcatattttttatatatattataattaaattaagtataaatcatatataataagcataaataaaaataaattgaaaaggtaaatatatacacatttatattaatcaaagtgtttgtatattagctattttttattaatattttatattatgtgtttgtatttttgtagtatattagtatcatttctataattttttaagttatattttataaattaattagtatattacataataaataatgtgtaatactataaatttcatgtatttaatatttttatacatttaaaattttcaagaccaataaaatgaaacaataatttaaggactagagtaaataaaaaaattagagaaagggctaaacgttgcatgaaattttttaaaaactttaaacattgataacttttgatccgattgtccgtttgaggcgatttttttttaaaacttgggtattttttcacgttctacgcatcccaaacagcatacggcagtttggccaaccattttgtctaaaaaaatactcttttgtatactaaaatcatgttatgcaccccctttcacccaattttttgttgttttattttgctattttacttaaaataaactaatagaattctaattttaagtattagaatcaatatttatgatgtatttgttaattctactacaatgaaatgtgcaatactaatttctttttatatctcttctaatatttaaataaatttatataaagattgtgtttcggtatattggtaaagacttatcaatctatacttttagtcacaagttcaaatcccaatag

SEQ ID NO: 257858 - DNA, 1314 bp, Cannabis indica
ttaaatttttatattgtatacgttagatatatatgtatatataaaaaaaattaatataaattttactctttttttcttggattagatggatccaatccaatccaatccaatatatattgaacctaaaatattggatggatccgatccgatccaaaaaatactatgtctaaaatattgaataaacccaaattaaaccaataaatatatataaaatgtatccaacggataaaaccgatccaatccaacatctatcaatccaacatccaattggatgattaaaattaattgaatcagattagatgataaaatctaacatccaatataaaattggatcggatctggataggtctaaaaacattggatgtggtccaatgaacacccctagtgcaggtggagtgatggtggtgaattatattgtgtggttcaggtggagtgatggtggtgagttatattgtgtgttatatttttcaagtggtaactgtgatagtggtagttgtggtggtggtgtttgtcatggtggtgtaggtggttatgaagaacatggaagggaaggaagaaagtagaaaagaaaaggaaatgaaatgaaaaaagaaatgtcttatttattttttaacatttttatttatgttttaatttttaaattatgtttataatatttaaataattaaaattatgtagacaactaaaaatttactacttgtacatttgtgtacacttgggtaatctacttggcacttaataaatttttttagatgaaaatgtaagtagcaaaacaaaatggtagtttggagggtttaccaccaaaaaatagttagtaaagttaagtgtcacaaatcatgtaatttaggtagttttgtcgccaatatcccttaattaatcctaaagcacgacacattaacgaatcctacaatttaataataataataataataataataataataataataataaaacttttatttatcaattacagatagaggtgacaaatcgtgttcatgtcatgtaaaagccaagattttacaagtaaatgtcaaactcaaatttgagcaatttattaatcgtgttgaaaaattaaaatacaaattcaatcaatttataaacggaatgacctaaccttacttgttcaacctgtttatataaacaatcatgcttagtttttattaaattatcgactcattaatttgtttataacaagtttaatatgtttacaacacttttatggtacatttatgagataattaactaagtaatacaatttacttgtaataaatgtaataactataagagttgttgacgctaaaaagttacaaa

SEQ ID NO: 257859 - DNA, 749 bp, Cannabis indica
aacattatcttttattcaaaaaaacttgtcataaaaagcattaaaaattaggcatatgaaaaatagaatatattcatttgttagcttgtatttttttaatcaaaacacaaaatttagtactttcattttggataattgtatataattatattttgaaattgtatataattggtactttgtacttaattttttattaattttactaaattgattttagttatatttgaatttaaaactcatataattaaaggttgtttaatcatattcatcacatatcacatttacgtttaaggaactaaatataaacaatttcaaaatagaatactaaaacacacataatacgaaatatacatatacattttaataaaaaaaaaaaaaccaaataaaaacacacactataatatatttatagagtaatttgttacataagtacttaaatttaatttttagctgtagataaatgcttaaatttaatttttgacaataatagtagttaagttatatttttgaaacttttgtagtactttaagtgtcaagtcaatgaccatatgacaaatctaaattgttttaaaattaatttaaatatatcaataaaaaaaataacacgtggattataatttaacacttaagagtcaggtaccttatgaaaattctaaaattataactttggtattattaccctaaaaaattaaatataaatatttatctataagcaaaagttaagtttaagtattcacatcacaaattat

SEQ ID NO: 257860 - DNA, 1318 bp, Cannabis indica
cttcattcgagtcataaccaggcagtttcccatattccccatcttggtatcttctgaatttatcttccaactcaatgattcacaattagattggatcttcttgctttcgattagcattaagttgttggcgtaaatcaggtgcattctgatttaagcgctcgtgtaaatcgggttgtctttgattcaaatgttcacaaagatctggctatctttgatcatgattgctcacaaaccttgtatctaagtaactctcagattgatagctcctcgtattactcatactttttcgatcataattaaggtgaggtttatctcctcctcgcgtatgctttttgatcgactgtactctcaggatcttgtatgtcccaagccagaacttgcctcgtccttcacaggccttgtccttcgggaaaggttagatacaccacccccccccccggcccggggtatgtgtatgcctcctccctatcagttcgaaaaggacgctgggggtgtctcggtggtaacccacttgtccaaggttatgtcccaagatttctctcgttattaggagggatctcctgttccctagttctgggttgccttatgttctcatttctacgagaagactctggcacgtcattattttcattcccttgatttgcaaatccctagggtctttgaggtactcctcgacgaggtgcttgattattctattgttcgtcttctggaacatccatagtttacccaggttgttcctcctgagtgttctggggattttctgtatttgtctcctacctcctggttctcgaaccgtacaatccaaataacagaatatttcgaagagaaaggactaagcatgaattgatcactttcagtaacaatatcctatgccacaataagaaataactgaaataagaatgaaatagaggaaactagctaaagattgaatttgaaaatgcaatcaatatcagaaggattcaaataataatccaccttcaaaagctgatctagaagatgagaagcactctgtacattagcatttgagtcgactgaaagcttacataaagcatcaaaaatctgattaaagaatatgataaaatctcctcttacacaacctgctcaaaaaacaagaatacatatcacatacaatatcaatatggggagttatcataattaagtgagtcagctaaccactcaccttttcaatattgtataaagcttcacaagcataatatctgactcagctgtcttggccagaaaatgaattcagcacgggaggcacaatttgcttgaaaataaattaaaagaaaaaataaaaataaaataaaaagttgta

SEQ ID NO: 257861 - DNA, 757 bp, Cannabis indica
gcgtgtgcaaaatatcataacacatagttataggtctatttggtatttaacaatcaaaaactaatgtaaggagtacatagcaaaatatttgtggaggttggggagtttagccttaatttttccagtctaaaaggttgatcgtgtcaagtttcaaagttcaagaagttctatcgtaaattacccttttaataaagatcactacctatacaacaagtcaccaacaaattacttatttattttgcatttttaaaaagaataaataatttattgtatttaatatttttgttcatagcattaactgttagattaaattcttgaggctataaacaaatcactacaaatagtgactaattttgatcactattatacaaagacccttatataataataataaaagaaattgttaaacattggtactaaacaacttgcattaatttagacatataaaattataaatctttgaattaatctagcatgagtcaatttcaactcttttgtccttgacaataaaagcatgcttatacatcgatcatattaaaacttattaaatatttttatttatattaaatataatatggtttatatatttataattgatcattgttaatttttttttttaaaattattcattgattgtataggatttaaggaaaccatgtagaaaaaaaattaagattttagtatgttctatatatatctatcatatatgtgtaggtgacactataaaaagaaaaaggaagtatattcctatcatttc

SEQ ID NO: 257862 - DNA, 1023 bp, Cannabis indica
agggcataaaacctaacaacctcaaccttaaccttaaaaccacccacacaccaaaaatcacagagcgcacaaataacacaaatcaatctgtagaaactggtttttgacatgtttccaaaataggtatgatcaaataggtttccaaaaaggtatgataaagttgaaaaaacaaattttcaatatgtgcattactttgcaacctgaacattaaaacacctcacaaaccaaaaatctgaggatcccaaacaacacctgcatcaattctaactaatatagaaactgtaatctcagaaactggtttttaattgattccaaattaggtataggataagcccaaacaacacctgatatagaaactgtgatctttatatagaaacaggttttccaatgacaatttttaaaatcacagaacgcacaaataacacaaattaatctcgagaaactgtttttgaagaatgattattattctttgaagaaagattcattaagcaagacaattttaactaatgccattttctttccctattgcttagaacattatcttcataatgttgaccaaatattaaaacatcaatcatttcaccaaataaaaggaaaattttaaagatgtctaaggaaagagaatagataccacaacattaatgcaatgttattcttaataatgtaaattagtataacactaaattgcactatactcatacactacactcataaccagagtttgataaacatgttttggttctaacttgcttttataagcagtgcttgttaaagatttgaaggttccctctggttaccaaaggattaaagtcactggacatgctcataatgatcaaaacacagaaacccattttcaaaataacccataatgtcagcttaaaccgaaaaagaaaccaacaaaatttcaaaatcaaaatttcaaaaaatacacaacaacaaacacaattcacttcgttttatcattttttaaaaaagaagatcaactaaaaactaaaaaaactaaaatggtaatcagtaaagagt

SEQ ID NO: 257863 - DNA, 821 bp, Cannabis indica
taatttttttttaattttttatataatatttaaaaaataaataaatttaaataaaaatttatctaaaaataagattaatgatgtgaaccaattactcaaatatcttcattaaaaataattaattattcaataaaattagtttagaaggagtagaagtttaatttttgttaaaaaaaaaatagagtttcaatgcaaatattataattaaatgttttaaaagttataaaaactataatgaggacttaaatataaaaagaaaattatttatatatagtaattgcttaaaaatgtctaattaaaaatgatttttttaagcacataggtaattatatttatattaattctaaaagaggaatttttacctattagttacctgttattacaggtaaaaagaaaatgtaaccatcgtggttacaataaaaatgtaaccattaagtagtcacccatatattattatatatacaatcacgtgacatacacatatatatacacacatatacacatatatacacaaatttatacattaacacaaatatacttatctatacatatatatatacatatttaaagtaaaaaaaattataaaaagtaaaacaattaatataaatatatatacatatttaacatcacatatatatacaaaattaattattcccatataaaaatttaaaataaaataaagatttaataaaaaattaaaacttaccttgactgagaaacaagaggcgacgattggaatggctcgggcattggtggtggtcgaaggtccctttggtggccgcaggtgatctctttcaatcactactacaatatgggaattt

SEQ ID NO: 257864 - DNA, 1059 bp, Cannabis indica
aaatattaaattaaaatttatatttagaattatctaaattagtaatttgaattaaataaatatatattaaaataaatagattaaaataagtatcaaatgaaaatgtaactctttaaaataatgagctttagttataaggacattcgatctccattgttggttctacgcagttcttagtttagtgagattcatttccaatagatggacgttcattagtaatttaatgtcgtagaatctcgaaagataagtattgttgtaagtgtattattcttagtaacgttcatccaaatagtggttgctaagaataggacttacaaggtatgaaacaatggtggaagctcatgaaataggaatgaccttgactctcgactaaaataaagcaacgttaaattctcttttcgatcgaataaaagttcgctagaatggtttccattttagatgagttgactactctattcaatgaatgatatctttgactcttgactcaaaatgaaaccttgtatcaatttgttggaaactttggaaattatttaagatgcgcttgttttgtattttcacatgcctttcttacttgctacttgtatgataattttttatttatattgaaccatgttattatttgttattaatgttgtagtataattttgagtcttcattgttggtctaacttaatttgttgttttgatggcacaaatcccaaaggattgtcatccgttagataaacataatagtgttagatctcaacagataagtatttgtaaatgcaacatctagttgtacatcaaaagatgataacttagattagtgtttacaatatgaaacaataaagagtaagaataactttgactctcgcctaaacaggacatcgttggattcttatttaattcaaaattatccttaaattcttcctcttagctttttcatttagaattttcttaaatagtatatcattggatgaatggtttataagtcattcgcttatgatgtcattctaatttctcttatgaaattaaatggcgtagatgactatatctcgacattctatcccaaaaatgatat

SEQ ID NO: 257865 - DNA, 771 bp, Cannabis indica
tttttccctaaatttgtcgacttggcatcagtgccagaaaagaaaaaaaatcgtactctaccctaatcgcacccctaaccctaatcacctctgtcctatttgcaccatgtcagattctgagtcaggtataaccaaaaacaaccccatcccaaccaattccactgttctttctaccaaatctaccgagtctcactctgtccagatcactactattcgcttgaatggagaaaactttctgagatggtatcaatcggtgaagatgtatatgaaaggtcgaggaaaaatgggatatttgactggtgaaaagaaggctccagcagaaactgattcaacctatgaaacttgggatgctgaaaattctatggtgatggcttggcttgttaactctatggaagaagagattagctccaattatatgtgctatcccacagcaaaggagctatgggacaacattattgaaatgtattctgatcttgaaaatcaatctcagattttcgggttaaatatcaaacttggagaaataaagcaaggggaggacagcgtgacaaagtactttaattctttgaaaagaatctggcaagacttagatcttttcgatacttatgagtggaaatctgcagaagatggcaaacaacccaaatctataagttcctggctggtctcaatgttaagtttgattaggtgagggggaggattatttgaagacagcccctacctccaattggtgaagtatttgctgaagtgggacgagaggagagtcgaaggagtgtt

SEQ ID NO: 257866 - DNA, 902 bp, Cannabis indica
caggagggcccaacttgaggatggtcccagtgctcggaccacacgtcaccaaagaacttaacctgatattggtcctagtacgtggacaacacgctcaaggagaactcaccgtgggaatggtcagaatcccgaggcgagggatgaagagctccactgtggaggtgcccaatctgtgggagaaataacttatgaaacggaaagtcgctgcctgagacaccatctggaagaggcgcagtgtcaaaacattgagttagaatgagaggcagcctcggccagggcggcgcaggggaggaacgcttaaaatcaacctgaacctggagtgacaagaccacgtggcagacctcgtggctcacgaactaggcgacaggaaaaggcatgggaagaataacccggagaaaatgagacgccccttgagaattaggatgaacatcacgaaaggagacaactcgaaactgatgaacgagaatccctcatgaaaatgaggaggatcttggaactcagccgggagaatggagatcacctactaggaatcaccagcgttcttcccaaacccatagagagaggactcgtacgtaccctgataggggaaatacgaaaaaccactgtcaagaggaaagaacagagcgtgaaagtgtgacttcgaggcgatccagaactcatagtcaatcaactcgaagaggagaaagtactcaatgagctcatgatcgggagagtatgggaacaagtaaatctgcaagccacttaaaaacaaagtctataagtaggatgcagtcaatgagtaagacgagatatgtcaacaattactcccaaccagatctgcgagagcacttgaatcggaagaaacctaatcttcgcgaacagcttggtccaaagcaagagaatccaatccaattgcgaataaa

SEQ ID NO: 257867 - DNA, 1836 bp, Cannabis indica
atctggtccgatctttagcttaacttaaacaaaacaaattacataaaatagaactgtactttcagaaatggtcatccgacctaagtactttgtcatttcatctgaacctttgggtgtagtttgcctagaaagccacttacttaagagtaagtattttttttttatttcgacttaagatggtcattcgacctggtacttttaatggtagtattttcttaaatattccccgttccaataccctggtaccagaacgagttgcatttttcatcgtacttacccagtttgtatgctcctaattccagaattttaaccccttgatatggtccctcctagttcggtccgagcacacctgctgtgctctctttggtgttcaagaatacccttctaaggaccatatctcccataaagaattttcgtgctttcacttgcttattaaagtaccgagctaccttctgttgatgggccaccagttttaggtttgctgcagttcgcttttctttaatttcatcaagtgattctacaaggagtgcatggttaacctcttggtcatatgtcaatcttctgtgggacgaaggttctaattccatgggcagtataacttcataaccatatgccatggaaaatgaagtctgtccggtcgttgttttctcagtttcctttagcatcttcaagtcgtttctttaaagtgtctttaactgtcttgttgactgcttcgacttgactgtttgcttggagatgtgccactgtggagaaactttttatgatcccatgatttggacataaatcagtgaaggattgactgtcaaattgtttaccattgtctgagactatcttttacgaaaatctgaaccgacaaattatatttttcaccacaaagtcttgcactttcttggatgtgatggttgtcaatggctcggcttctgtccatttagtgaaataatcaacttcaaccactgcgtactgtactccacctttacctttaggtaattgtccgattaggtcaattccccaactggcaaaaggccaatgactttgcatctgagttagtttgttggacggtgcacgaggtatctttgaaaatattttgcacttgtcgcattttttaatgtaggcctttgaatcttcaatcatgattggccagaaatatccttgccttaagattttcttggatatgctttgcccagctgtgtggttgccacagaatccatcgtgtacttcagaaaaaagtcgtgcagcttcttcttgtgtaacacatctgagtaatggcatggagaatcctcttctatacatgactcaatctacgatgacataccgtgcaacctttctcctaattttttgagattcgtttctgttacttgggagttccccagtgttgagggaggctgctattggcgtcatccagtttggagatgtgtccatcattttaatttcttctgtgccggtgatacttggtttttcaagcaattggatggggattagattagccttatcatttatattgttgctcgcaagtcgggctagtgcatcagcagctgtggtttcttctcttggaatttgcttgagggcataactcttgaattgtgcgagcaggtcatgtattttgcttaaaaggctatcatcttttctcctcgagcttcgtactatcccagatacatgatttactactaactgtgagtcgctgtagatctcaatgtgttcggcatgaagttctcgagcaagttttaggccagaaataagggcttcatatctgcttcatgttggatgctctaaacccaaatttgaccgctctatgtagatgttgcccccaggtgtgacaagggcaattcctgcaccgaa

SEQ ID NO: 257868 - DNA, 623 bp, Cannabis indica
tttcaaatatgtatatcatttataggtacctatatagaaccataaataatgttatttggacatccataaataatgttattttttcctgctccttttctctacagtgtttaatgtagataaaagtatggttggattgaaggatgtaggcaactgaaatgaatgcaatactcaaatggatagagcgttcaaagatcagtcgattcaagaaggggtttttgtatgctgtgatggctgcgcttgtgtaccagatttagaaattgaggaatgggctgttgtggaattcagaggagccgaaagaagcacaagtgatctgtcagactaaagaagaaattaagagaataatcatccatgttcggcctaaaaatgtctctacaagtgataaaaaatgatttttagatattgtaaagttataggagcacataatggaatagagaaagcttatagaaaattattgtatggttgaaaaaatatatataggtcttcaaattgaagatgctattaggatgtaaaagagatatttggagtaataaattacactgatttaccaaaaaaaaacactttgagtaatattaatttgcagttggcatatatcattttgaactatatcgttcttatatactttg

SEQ ID NO: 257869 - DNA, 617 bp, Cannabis indica
ttaatcgtgtaaggctaaataaaaaaaaggaatcgttaaaaaattgttaaaccaacaattgcagttaaatagacactttttatatataaagattttcaaaaaaaaaaaaaagaaaaagatatttttaagaaacttttttatgaaaaatataatggatgagatgtaaaatgaccataaatctgaaaatcaagttagcaaatgtcttctttttcaaatatttagcaaaatggcctaattgtcaaaaatttgacagtaaatttacaattataactttaaaagttttatcctaagttttaccctagcgttctaccccttcttattctctcatcttcaaagtcttgcctccctcttctcttggtcccgatagagttcaatctccatctctcgcttccagtttggcctccactcccttggtaagatggttgaatcactatgtttcatgtttaattttttatgtgtgcttgaggctaccgatctaacatagtgaactgagaaatgtatagagaaagagcaagagaaaatttacttaccagaaaaaataatctttactgtgatatggcatattcatattactctatattaattgtatgtgatgtggtatatcttgaatgaaagaa

SEQ ID NO: 257870 - DNA, 570 bp, Cannabis indica
tatttaaaattgaatttatttactaaaatataacttaaataattatttaaaaatattactaaaataagataattattaacgtttatataaatcttaatttaaatttaaattagacgttaattcaatttattcatcatactttataacaaatttattagttatattagttaaaatatttaaacttatttacttattttactatttaataaaactagttaaatatattttcttataaataaattaaaagctagattaaattttatatatttaaacaatataattcaattgtattaaatttaatttttattattattatttaaattaataattagataatagaaactctaatacaactctaagcaaatttgtattgcatgttactaatacctagtatatatatctattctacataaagtgtgtttatataacaaaattcttagtttatgagaaattcatgggtgactttttatttatattaaacataaaatagtttattattaaaaataaaatggtttatgagaaattcataaatcactttttattatatataataaaataaatacccattaa

SEQ ID NO: 257871 - DNA, 1201 bp, Cannabis indica
atatgttggttataatattgtcattaaatattggaaatttacgatctttacaatttttttaactctaactgatgaagaaaatgtaaatggatatgtacaactttttgtaattatatcttttttaatttattcttatgtgttctgagaaatattaaaataatatattgttataatcaattgttttttatctttatttattctataatataattaattattattatttgagaaattaccattttctccctgttgttgcttattgtagttaaagattgattataaaattagttatttttgtcgttgaaaaagttaagacttaatataaaattaatacattaaattgaaagaaattattatcttcaaaaaccaatggcaaacatatatatatatatatatatatttaaatatagtgcattgtagtaattatctttgaataattttacagatatatttgttgcaagtatgattggtttttcatcgattatgttagatactatttgggcttcatcactgacaaagcgaccccacattgttaaacaaattggcttgaaactaaaaattaaaaatatttgataagtttatatataatataatttaactaaggaaatttaatttattttaatagaagttgaaattagtaagatgctttttattctatatgttgttgttatattttttggtggtttgacttatattcgacggtttatatatctacattttaaatgttaaaatatttttaaatgtaataaggaatttgcatagaagcaaaaacattataagtatattaaaaagaaatgggagaatgtttgtcaaccgaagtccaagggggtttaggctttaaggatccgatgctttttaatcaagctatggttgctaaacaagtttggcggttactccaatcgcagaattcattgcccggacgtgtcttgaagcacaagtattttccgcacacattaatattggaggctaaagatcgccaaggttcgtctcatttgtggtcaagtctgatatgggggttggagttgttgcggacggggatgaggaaggtagtgggggacgggcaaagtattgacgcgtttcgggatccttggattccccggcctagaacgtttcatcctgtaacggttatccctactggtagtgtgatggttaacgatttgattggtgtggacgggtcttgggatatccatactttgtccca

SEQ ID NO: 257872 - DNA, 635 bp, Cannabis indica
tttaatttagttaaagggcaaatgggtcttttcctttattatttttttggcctctagtggactttgggggttggttatatcttttattaagataaatatgatttaatttaattaggaaataagagaataattaaaagttgaaggaaaaacctagaattttctaagtctctctccttctctttcgaacaccaagggaaccagctgggaattgttgtggttagctcaaatttgtgtgatcttggctgattagaacactccaattcaaggtatataactctatccctcttttccatgatttttcctaagcttaatgtaagttttatgcatgaacttgggtgtttagggtgctgtaagtttgggatgatttattttcgtgttttgggattaggttgggagtatgttgtttgatttgagctgttatggtaggctttgttgaggtttggctaaggtttgagtttatgaactcaaatcttgacctttaatgatgaattgatgttcagtgtttgttgttgagttttagtgcttggttttagttcattatggtatgtacaggtattctgaaagttattggaaattttgggattgaattgaggtgtgggggtcggttttttgggttccaagctcagaaccggaat

SEQ ID NO: 257873 - DNA, 582 bp, Cannabis indica
attctctatagaagcccaatagtgtttgaaaaacaaaactgacattccatcaggtcccgacgctttgttattactcattgaaaacagagtagccttaatttcctcgcaggagggccttctgatgagctcagcctggtcttctaaagagagtctatcttggattagatcactacaattcgtctcaatactagactcctctccggtgaagattcctcggaagaagtccatgaattcattacctattgcctgtctgttgttgatccacaaattatttttgttgagaatgcactcaatggcatttcttcgccctctgatagtggcagagagaaaaaagaacttactacatttgtcgccttctttcagccaagagaccctggccctttgtttccagtatagatccttccgcacacgggcctcattaagcgaagctcgcaactttctttccatctcccactctctagagcccaccgggagtttttgaacaagatccagtctcctttccagatcacgaattaagaagtcaagattaccaaattgagacctgttccagtgtaatagagcgacacgagtagccccaatttt

SEQ ID NO: 257874 - DNA, 810 bp, Cannabis indica
ctttctctctcggtttctctcatatagtaacgtttggaaagtatattattagattaacaaatacatagagaattctttttaaaaatgaaattattgttattgtattaaattcataacacaactagctatgagattcatatatattttttaactatattatgtatacttatgaatgagttttatatgtataatttattaatgaatctttgttaataatcacagaagcaaaatttgagtgagtggtcatttccactaaaactattgagtcaagataaagaatcattattgaaagttccagtttttaatttgcttccttcgatcaaacgagttgattagcctctggatacggtgcttgttcggtgatagcaaaactcattgctcactggcttcactgcaacccaaaattaatccccagaagggtacaatttaaatccctaatcctccaaggctcttctgagtggcgagcactcagcaaagaatcatcttattactagaacaaattttttaacaatcactttgatatagagactgtggtaaatgctggtatcagaccagtctctattttcacagataaatcagttgcgggaatgttcggggttgaaaaaatcgactttttgaaggatatgttctctttagacattatgtgtgagaccataactaataaggatttaacaacagagccaaaaaatttcgttgtgggttggaatgatcacttctttatattaaaactagaacttcatgtgtaaagcccgcttagttaatttggaaattagcagttggttatgtttaattatgaaattatttatagtc

SEQ ID NO: 257875 - DNA, 982 bp, Cannabis indica
tatccttaaaatcgtgggatttgattacatatcacaaaatgtaaatgtggtgtatgattttgaaaatcatataactgggattttcccgattttactgggtcaaaaatatcgtgtattaaacacgtctttaatagttgaatttggagatgtctcgacagaaccttgataatagtgatcccaatggtgatctggaaccattcttctttctgtggtcgacaatgtatgtcttacgtcaatcgcgggtatacagaaatcttctgacctgccagggttatgagcctcgctcctgttagttggatgaagctataagaagtctcctcatagcgagatggtcatctctcattcttgttcttcgagctgatcaaactttcacacttagtttgcttatttcaagctaaggtatgtgttacttttctccagtgcctcgctattcaccttcagcgacatatggtttctagttaaacactaagtgctagtttgtacattgattcttcgcctaagaccttacagtcagcaggttacaaatatactatgatacttacgtaattaatgagttattgcataaaaatatattgcaccgattcacattccctttaccttgacacgtgtcctccaaccgaatttcgggtataacaattgccccttaaaaagttcattaattacggagggcattttcgccaaaatcctttcttggaaaggacgcctcctttgattctggtggttgtacagtttcaagagtcattatgaatcgcctattcatattctgtacaactcccaacagttagatttctcagtctttggatttcttgtcactggtcttcgtttataaaatgacggcccaagcttattatttttcacaaatctttggcttcttgagtgaaatccatttttagaatggattatttccttccttccaaaatttctcttctgagtttagaggttcgtccttccaaactcataatacccagatgcaccaaccatt

SEQ ID NO: 257876 - DNA, 734 bp, Cannabis indica
ggcgtcggttgtttttaatttagcgtcacccggaacagcgtcggtagcgaatttcgccaataccgacgctgaaagcccttaaaaaccgcctctaaagcccaattttgtagtagtgaaagtacataaatggaagatgttacaatcgtattaaattaattattatgattttgtggttggctagagtggggataaatttgtggtgaaagtaagaatctctggaatgacacgaactcgcatttactttgagtatcgaatcttcaagctttcaaataacgaggtatatataaatatatataaatatatataaattaaactttgtgttttgtaaattataatagattttttattttgttgattgataattcaaatcttataaaaaaaataatactccgagctgtttaactttctttaataagtttttttaatataacttgaattcaacttttacaataaactaatgcaaaaaatataatcaacgaaatcataacatctatagttattgtgtttcattattttcgacacatataattctaatttgttgttgttgttgttattatgtatatgatagcttattttggaagcaaagacaacggtggtttggttgaataagaagtatcgtccttatcgtataccatccgaaatatataaactctttaattaattaattaattatcaagtaataattcactattttaaggcaaagccattttgtattccttctctctctctctctc

SEQ ID NO: 257877 - DNA, 925 bp, Cannabis indica
ttttcttttcagccaacacattctctcccttttccatgctcacttcatctacagtctcaacctcattaccatcactgccaccattctggctgagctttcgtttgatagattgtttacttggcttaacttttttttcctttttaatatttccctcaggtttagggatctccaaaccatattcggcttcattaatctcttcaagcgaaagaaaacctgtacatatatacatatagataaataaaaattaaaaagcataaacgttttactacacaatctgtttcatcgacataatttcgaacgatttcgtttgattttcacataaccgtagcaaaagttaagctactaatgcaatcgaaacttccaacaattaaatgtatcattacaatatcctcctccttctagagtatgaaagtggaataagaagaagaacaaacctccttcgagttcattggagccaacgacaaaagagaaagggtcatcgccagataacgacgagctccatgggagggagtcgaattgctcgagttcagcgtcgtgtttctgattccgttttctcttcgctctcttcattaatgctccattggatagagatagagaatccatggcggtggtttttgatggtccggctgagactggcggtgaggtttatcagactaatattaagaacgaagtgaaatgggaagaagaggcgaagaattaccaagggtttttctttgtttattacgtaattgcccctaaacttataactattttatttaggctaaactttgacatgcactcattttcagtcattaaaaattagttaatttggatttatgtctcttaaactttgatatgtactaaattatacccgtgaactcttaaggttgttaaaaatatcgcttgaactattgagatggttggatttaaggactttatctaattt

SEQ ID NO: 257878 - DNA, 899 bp, Cannabis indica
aaaagtaaaagtaaaagaagttgaagaattttttaaaaaaaaaaaaatggccacactggttatcgattgcctagcctgaagtctcatatttagttcatctaattgtgacaaaataagtaattatttaaaaatttattataagaagagaattttaatttgtgtaaaaagaagtttactaattttattgtaaatattataattaaatgacttaattgttaaaataattaatgtaaggatttaaatatatataaaaaaattatttttatatattaattgctaaaagaggtcttgttaaatatttaattaattactttaaaaaattagatcattataattaattaattctaaaaagaggaatgtttacctattagtaacctgttattacaggtcaaagaaaaatgtaaccatgatggttacaataaaaaatgtaactattgaatagtcacccttatctatttacttatactaatatttaatctatatttaattgtatatataatcctaaaattaaacaaggtgatgtggtagaatatatgattttttttcttaatttttttcactcaatttttctaatttagttaaatttttattcaatttttgtaggaaaaaaatcataacaatggctcattaccataaattaatataagtcatttataatatatatttacatataataaatatttattgaaaaaccaatatttaatgtatgaacatttttattcatcatcatatcataatttattaacacataaacatatttaatagatatttgaaaaaccaatattttaaatttgtattctttatgtatctaggggtgttcacggattggtttggtctggattatcataatttttgaaccaaaccagtataacggtcttttgaatattagaaaccaaacc

SEQ ID NO: 257879 - DNA, 1018 bp, Cannabis indica
tttgttagattgttctttgtagttattattattattattattattattattattattattattattattattatgcttagttcggtaatgtaatttaattgcagaattagaacggtgtaaagtgatattgttgtcgagcaaatttcgcaacaccaaaaataaatagtaacaataataattataataataatatgaagaacaagtgcgagtattcaacctagaataacgagtacttgaactgggaacgtaaatgcttaatgaaaactggaaatatgaagaagacaagggaatatagtggttcagtcagatcacgatctgcttagtccactgtttcaaggatttcgtaggtgtccatttcacggtggatcactcctttatatacaaatcaagtgtctgattatttacaaggattgcattcattcccaatccattcatacattgatttacaataattaagctaaaacgtaaacattaataaatgaagaacagtttctattcgctaaatacagcaacatatgcgacttctattgtgcgagttggttgttcatattcttgcataagctcgtaggcttaggatacacctatcattcagttaagtctgagatgtctgcgttcttgtatagtcacacttagggacatcgtataacgagctgatagaacctagatatgcgagtctatattggttcatcgaggttgttgggtcatcgggaccagctcgctttatagagaatcgatctctatgctttcgcaggaggattgagagattacttgcatatatcgtggtatatgcgagttaagtccgttccttggtcccacataatgcgagccttgcgaatgcgattaggcttggccatattcgcatcatctcactgagtttagctcgggcgaggtttaaactcgaggagtcccccatcgacatctcagctttccttagggaaattgagtacatgtgtcctttaaacaggagtccggtctcgagtttctaggtgagaaaaatctcactataacacatgcccct

SEQ ID NO: 257880 - DNA, 1441 bp, Cannabis indica
agagagagagagagagaactttgtgattaacttgatggaaaaaaaagaatagaactttgagtgaaaccaaaaatgaatattaagtattacaataatgctctgtaggagctaacttcgtggaagtatacagaacctgctcttcttattcgttcttcatcgaactcttaactacctaagttccatggaccccaagcaagttagtgatctcttccaggatgcagtcctaataaccagtgatgaaatcacattctccctcaatgcaggtgaagttgatgagcctcaagaatctaatcaagtcctcatagggaaaatcctcagccgatataagctaggcaaagcagccatacaaggctctctgcggttatcctggagtgccatcaagggatggaagtggaaagaaatcgaagatgggctcatcaaattcacgtttgccaatagaaacgatgccatgaatgtcctggcacggaggccctggttcgtttgtgggtcactcatggttttaatgccttggccatcttggctaactccctctgaaatcaaatttgacaaaacaccaatgtgggtgaggatagaaagcatcccacccttttattggaatctctctaacctcaaagagctagcttcaagggcatcaccagttcatgaattgccccaaggcattgaggatgctatcgggatgagcaatttaaagttcagagcgaccattgaccttaataaaccagttttctctagttttttccttcggcggcaaagactcaaggatctatggatccaatacaagtatgaaagactaccaaaaatgtgcttcaaatttggtctcctcactcatgaacaaagcatttgcttcaaacctcccatgacaaaggtaacttctacccaatgtatgggatttggctcaaggctgatgccaaggagaagtcgacattcaccaccccccttgccaaatggtttcaagattgggtctttcaaaagaggttattcctagaccctacccttcgaaaccaactcaaagtgcaaaaggcactgctccatggtgaaatggatgaactcagggagaaccgcaaacaacttccatccaagaaacgcatagtcgccgacgaagaacatgatcaacacggtgatgaatcttcaccccaagaagcggttattacccaaatccctctggtttacctaccgggtattggggaaattaccccttttggccataactcaaaaacagtttctatcctagacctgcaagaactcaaagaggcggcttcagggagtacggggaaaaggcccaatcgcaataccccttctgcacctaacacagacaaaatggaggcacaccaaatgagtccaaatgccagcagtgttcagaaagagaaccctcacagacttcccatctcaggcaagcaggagatagttgttggtgacttcagtcaaaccaatttccatttgg

SEQ ID NO: 257881 - DNA, 1077 bp, Cannabis indica
tttacattttaaaattagatgtgatacctatcaaataatattcctctctctctctcttatatagtttttttttaaaatcttttctaactatatatacagataatcatttagtctaaaaaattataccatcataatctatattctttaacgtaatcattttaatatgtgagacgcatatacttttttactgttactataaaagataatcaaaattaaaagtaaccttttactttcttttactttgattaacaaaaagaaaatcaaaatttaagtttaaacaataatttatacttcaaagtgcactattaataatctactcttaaaaataatcttttttataagtgggaagcatatattttttaaactaatattaaataagtaacattttagttactaaattatattctcacatttttttatagaacagtttggtagatttttaaaacaacttataaagaaaccctttaagaaaaaaatttagctacaccgctattcatttgagctcaagattagtggtaccattacgatcttgttttttttttttttgaaatatcattttaataagtggaaccatagattttttcattgaataaaattttcagaattaaaagtaaccttatagttccttttatatttttttaataaaaaaaaaagtaaccaattaattaaacaaaattcaatatgtcaactaattttatattactaaaaattatttgtaattttatatataaaagttactatatggtatatattctatataaacttattttatagaattatttcaataaatattatacaatgattatatatatatatttttaaaaaagttacgcttattttactaatataagctgtttagtaattttttgtatttttttgtatcttattaaattttagatatatttaaaagtaacgtgaaaattgctataaaaataaccaacaaaaaagtaatataatgatcaacaaaatataagttagtgaaaataaaattataatttttaaagttaatcaactagaataagtaacaaaaacacgtatatgaaataatattatttcacaaactatttaatattttag

SEQ ID NO: 257882 - DNA, 757 bp, Cannabis indica
cgcttaaatcaaaaaaaaaatattaaacacataattatataattatacaaaactcacttgtttgagctacccaaattaatatgaaacattcttaaaaaaaaaaaaaaaaaaaaaaaaaaaaaaaaaaatcaacataattatataagaactaatattaaaaatatcaataatttgtatctaaagttaaatatatattatgttttggttttgttttaaaacataaatttttgtaaaccgcataacttgaataaaaagataaattaaaaaatctgacgaatatataacctacccaatctttatatatatattttttttttttgaataatacccaatctttatattgagctggttgaaaataataacaaccagttcaatcaactcgaactaacccgaacaaccagattaacagggtttttatatatttatacatcatataatttgaattcaatctatatatatatatatttgtctcattattacaattaattaaaatataacaattcatgaatgtaaaaattaaaaagaaaataaaaatgaaaatattaatggttagtttggacgggttaatccgaccaaaccattaatttcattgtgcaggttagtactatttacttttttcttaattgaatggattgcacatagatttttgtaacccgatctttacattgggttgaatgaaatataacacccctacctatgcattattcaaaataataaaaataaaaattttgatttgagaagtaatactttttttttt

SEQ ID NO: 257883 - DNA, 546 bp, Cannabis indica
aattatatatatatatatagcttgaaaatatatcagtgagataaataaaaaataagaaagagatagataaattgtttaagaaaaagatgaaagagaaagaaagaaaaaaaacggataaaaaaaaaaggaagaaaaaaaacaaaaactaaggtatatgtaaaagaggaagaaaagaacaaaacaatatactaaaaatctgaagcaaaataataggcagccgcagacgtatatacgtgtctaagaaaataagaaaattgacgctatgtttcacaattaaattactagtgtggtagttgtgatatttatttcaaattttcgtaactgaccgtaaatttctccaaaataaatacatttaaagaaaggaaatttgtagcataaatacaatatgttttgaattttatacacttaaataccatttgttttttttcgacggtttaaataccttatgttatatttttgttacttcctttactacttttctgttaaatataccagaatttaatttatatcctacatgctgattaattattggtccatataattatt

SEQ ID NO: 257884 - DNA, 562 bp, Cannabis indica
actactattacaattgacactaccataaaaaggtatttttccaacctcacaatcaaaaagtacaacattatagcatacatatagtttgaattgagaattgaaattgtttaagtagagtagacatataaatgaatgattagtcatgtgagaattgaaattgtttaagtaatgattagtgttgtcttgccccactttaaattaaacagtagtgaacctttattatatgggatataacatttaacttttgttttgttttggtgtacgtgtggatgcattgcagggttgttaacaggttgttttgtatcactatttagtgtgtacgcaattctggcacatatattaggcattttctcccctaccaaaggaattatttatatggaaactgtctaccctgtttttaggtccatttatatacatacccctcttcttttttattactattattattggtaataaattaattaataagaaactgaaattaagtaattaaaaatgatgtgaactgtacagtgtgtttgcattgctgagtttgcacctgtttatgtatggatgtaacctgttc

SEQ ID NO: 257885 - DNA, 515 bp, Cannabis indica
tgaaggttcttttgaattttgaccttatgagaaggtaaaactttttgattattgagctagaagaatattagtatattactattatgttttcactctactcaaaccatataattgcaacacacacatgtcgctgaaatttaaattccaaaaagtttgttctttttttttctttttttttatctttcttttatttttgatgcaagataattcatttcaaaagattatccatttatgtaaactcattgcaatttcaagatctattgaaaaattgaataatatacctaaactgaatattaaatttttcgtccatctactaacaaatttttatatatatatatatttatataatcataagacattaaattcaactactatctataatcgtcatagtctatctctcaaaaatttttggcttcaatttattattattattattattatgtctttttcattttttacatttcaaaaataattttttttttgcatttttaggaaattctacatagaaattctta

SEQ ID NO: 257886 - DNA, 1186 bp, Cannabis indica
  modified_base (1125)..(1125): a, c, t, g, unknown or other
acaaaattaagtgaccaattatgttatgcgtatcaaaagggtattaaattgtcatggaaataatgtgtagataccataagttaatttataatttgttgaggggccaaattataaatacccataactcattctaacactacaacatttatggttattagaggcggagggttccgctgctaataatctctcaatccgctggtaaaagttaatatcggcggggtccgttggtaataatccgcttgtaatactttgtcgatataaattaacattagtggcggactgacacccccgctgctaatactagtgttagactgataaattgatgtcattattagcggcgggccactccgcctctaatgctttttatatttttttaaaaaaatcttattatatattaatattgattaaaattaaaaatattttccatttagataattttgataatatacactgatcaacaatagtgaatactatataaaaatatttattattcaacattcatatatacaaatatttatacaacaaataaataaaaaaaataaataattattcactgtaacattatagcaaacataatgttcattttcgacaacaaatctactattttatcaaaaataatgttcatcttcaacaacaactgcataattgaatttatcgccaccaacaattgatctacttctttggtatcaaataattttaaagtcatctatctttcatcttcaacaagtccttgaaatccacaactttggtcacttttattctgcacatcgacattttctcttcttcacgtcgaaagagtcactatcttctttatatcgattgagccactactctcttctattataactacaaaaataattttagttaatttataagttgcacaaaaaattacatataaaataatctaattattttgagtaagtcttcataacaatactctccaatatgataatatataactcactacaatctccaattatgtactggtgggaaatcgaaagacaattttagtgagagacaaaataaatttacatcttttagtctcactaattttagtcaatccctaaaatcatttcaaaatataaaaaaaaaaaccgtgcaatccattttaattaatcacaactnttaaaaactaaaattttagacacaaacagaagcagagttcatatattttttctaatctcac

SEQ ID NO: 257887 - DNA, 955 bp, Cannabis indica
aattaaaacactaagacaaactcaaacttgtgcacataagagactaagcattttcattttaatcagttttctgatataaaataagtcttaggtttatcaagatcaggttcttgaagcttgaaactaattcttgatgacttgaatttggttcttgaaggtttgaagatgagtcttagatcacttgaatgcagttcttgatcttcaattcaaccttgctctgataccatttgtggtgaaaacaccctcaattcttggccaaaaacagtgccaaaacaacaagaacaataattaacaagtaatcaacataaacttaaaaccagaaaagaattatcagaattggacaataaaagattaataaacttagctttgaatcaaatgaaatcttattcaatctttaagcaccttaacaatccgaactaattactcaaaattgagtctaagtgttaaacacattacaaaacaaacctcacatggtagaagtcatctctaaggatgagcattctaattttacaaccctcctacacactcacaaaactggtacagaaactagagagaaagagagagggaattctaggtgagagaggctcggattggactcttttgaatgaagccttggtgctttcttttataggcattggttgaatcaagtaggtaggtattgcttaggtgccaagctagataactaacttaactaaccaatgacattggttgaatagaatgatgaagtggcattagctcattgggacaaaacctacaacaatatatatatcataccgcagccatcgttaatgaagcgaacagctctgcaagattctgtgtgggcgtgcacttccaacaccctaacaaacaaacaaattttaatttaaaaagaaaagccaaaggaaatgagagactgacagtgacagagaatggtttagattattatacctttaaggagtggaatcagcagtgtagc

SEQ ID NO: 257888 - DNA, 1350 bp, Cannabis indica
attagaagcgagaagcggctctgaagactttcacatttatttttcgaagagttcttttttctctatttttcttatgttcttaattgttatcatatgttttcaatgattatgagtagttatactttttattagggtgttaatagagattgtttgagactttattttggttttaatttgatttagttctttctcaattttctatatgcatctatttcattcgaacttaattatttttaatttttcgatcaccaattaattgtttaatgatttcaatgcaaaatctaagaagtgagtattgattgtggtatagtgaaatagacataaattttgatataggacgagagtacctatataatttatgtagcatttgggatttttatgcttaatgcctcctatgtatttaaatttatcaaatttgcatataggttgagatttatatgttctagctcgaatataagtatctttagtaaatctgctatcacatgaaaattagactttaagaattaaattatgttaaatcaaataaaatagattcaattgaaattaattaccctaagtttttatcattgttgagtttactattcattaattgttttatttgtttgtttgttaaattgttaattctaataatgtaatattatgataaaataatattgattctattttattgctttcaacttatttatttattttattaagaagtctagtaaggacgacattgttgctcctaatgctaacttttagaggcgacaaaaagtgtcacccctaataaggagtattagggacgaagtattaggagcgacatgttaggggtgatatgtcgcccctaatacatttttaagggcaatattcgaggtctttaggggtgacaaaagtcgcccctactactctctttacttgtagtgtaaagagcttcattgaacaagagaagaagtcttcgggagaagacttgtctaagacttacttcggaaggaagtaagcacacactcatcaaaagttgaagggagttcgctattggtggtgttcaaaaatcagattggcaaaatgtattagaaaggattgcaacaaatcattaaagagagtctaaatttgtttaagtcaattacttttgtaatatttgatacttcactaaattatttgcttaagtcaagttttaaattctgcacaatttatttctatttttgtgttgttacaataagtctgagttaataacagtaacaagttttgaaaacttgtaagctgttacagtggcattttaattacaatttttaaagaaataaattgggtagatttaaatttgagattttaggttggattaaaaaaaataaaaaagttagaagaaattattaa

SEQ ID NO: 257889 - DNA, 1018 bp, Cannabis indica
aattttttcttttcagaagtgcaagttgccaatttattttcttgttctaatatggaaaactaagttggtgtggtggttgtaaatagtggtggtcgatttagtatttatgttttttctactcagttcaaaaatgacacctcataatttattttattttaggcaaaaggaccattatcattaatgtttaatggccaaaagtggttacaaaaaaattggaaaactggtaaaaaaaacaaaaaatttgagaagttggaaaggtaattcttgctatagaacttcatcatgcaaccctaaaacatggtttgttaaccattatagacaaaagtattatttttcttaagatgagacactaggactgagcatcggtcggtttggtcggtctttttctatataaaaatcctaaatttggttttcgatttggattggtgcaatccaaaagccaatcgaccaatccagagcctatctgaaaacagaccgaccaatccagaacctatattaaaaccgaccgttttgaacctcggtttggtcggtttaaaccgcccaaactgaacttattttaaaaaaaaaaatgattcaatttattctataaatatattattttacattttacagctacaaacatacaaattaattgttcaaaaattaattatattattttttaactttaatattaataaaaaataatatattattatatattattagtaactataatacatgtaaaaaaaatttaataaataaatacatatatgtatgacggtcggtttcggttttttggtcggcttattaccaaaaacaaaccgaccgttcaatagcggttttaaccgttagcagtttttcgatttttggtttcgtcggtttcgattccaacagtgttctgtaggtcgattttaacggttttttcggttttttggatttttaagctcacccttatgagacacattaactttaacaagaaagggagaagacgaaaaatatctaaatgtaagaatctaaatgatgttggaaatattttacc

SEQ ID NO: 257890 - DNA, 668 bp, Cannabis indica
aactggaaacagtagctagtaatcgatttcctggtgtctttgttggatgcataatcagcatcaacaaagccttctaacttcagtgtgttgcccgtcttctcaaatttcaaaccatagtttgaggttgtctttagataccttaaaagccatttcaaaccagtccaatgttcttcatcaccaagattggatatacctgctcaaggtgctgacagcatatgcaatgtcagaccttatgcttatcattgcatacatgacactcccaatggctttggcataaggaatttcttccatccttttcttagatttttcatcttttggggattgctctgttgtgaatgcaaaatggccagctaaaggaacttgagtttcttttccaccatccatatggaacctcttaatgacattttcaatgtatgattgttgtgtcagcaggagcttcttctctttcctatctctccttatttcaatgcctagaaatttttctagcaactcccatgtctttcatctcaaaatcactatttagtacatatttcagtttgcttatttggtttgatcttttcccatgataggtaagtcatcaacatagatcagtaggaaggttgcagcttgtgaattcagatttgtgaaatacaagcatgtgtcaaacttggatctgatgtaaccaactt

SEQ ID NO: 257891 - DNA, 640 bp, Cannabis indica
agaactatttggaggctaagtgacttagaggcaacttagagaacttaggtttttaggctaaggttaaagcctttatataggaagccttaaaccctaggtttacaacttaaatcccttgaaaataggatagttagctagatctttacataagaccaaaatgcccttagattctagatacttctcagcctgtctgttggacttttagggctcaattcgtagccaatgccttggtccacgtatagagttgtacatggagtcttgccaagtaatgcttggccatcaaaaggcctacaaggaagtcaaggcggccatggtcctgccaggacttggcagtttaaggcctacagggtctggcaggatactatagctccaccaagaggaggccaaccttttacaaattgagggcaaatttgtacattgtttcgatgaagatgctaggttcccttggccaaacagagtctccttgggttcggaagtcgcttcttggccggccagcttgtgcacaaatctcggctggcctataggctcaccctggtcggcctataggctcctcttaaccggcaaaggatgttaatacaactccttaagggatctctttacttccttcggtcgctacttgacgattttgctatatcttgca

SEQ ID NO: 257892 - DNA, 538 bp, Cannabis indica
catctttcataccggcatcttgagcttaggcaaggataaggcattaatgtatttcgagaatagtgatccccttgacctgtctagctcaaggtctgaaggttttgaacaagtcaggcccttgatcatgtcgcttattttgtctaattatgcttgcacagaaggatccattgctgtagggacttggctgatttgctctccttggatgggctacaggctcaaatgtgctagggtttggccggccatattttgggagagtgtatggaggaggtcggccagccttgtgcagtcctgctggccttggccaaccactcccaggtagggaggttgatcttggattgccaagcttatgttgggcagttgttcatggctagccagccctgttctaggtaaggcctggttgcctatgatctcccggtaggctgatgtagctggtgtgttgtaggaggtagatcgcaccaattgttggagttaggtgatttagatccctgaagtgatcaatctcacttcccaaattgttttaggcatttccacccattct

SEQ ID NO: 257893 - DNA, 653 bp, Cannabis indica
ggcataaaacccaacatgaacaagttgaataaaagtgtggagggtgaggaatgccacatgtaaggaaaaaacttaacatttcattgataagacaaatgcgtaatgcctgggtacattttctatttctaaaggtcaacttaggtgcctatttaatttagtacaacttattaaagatatacttgccatcactaggagtaccttattcgatcgactgttggaaataggagaattttactttggatgcttaatgtttacgggttgtgggatggagacttctctcaaatgtatcagcttattggtgctaggggtatcacctagcagaccctgtaagggtctaatgagcttccagatgagtgttcactcatttatatttttaagccttttattgccctcctccacgcagatgtatttttctgccctttcgtagaagtcctctagaccatccaactctcttttaatcatgttaacccatagtccccctctcctaaggcatacacctgtaacatgacgatcttgagttcatctttagaaaatttccccactttggtaacttcgtgttcaagcgtcggatgtagctttgtaagtttctgttctccttgcttcacattggggatcatgtgacgggcataaatatactcacatgtagcttgata

SEQ ID NO: 257894 - DNA, 577 bp, Cannabis indica
gcctaaggctcctcttggccagcctgttggtacagctccttgtgggctcgcttcacactcttcagtcgctgcttgacaatttcgctatatcttgcatggaggctctgttctgttattggcaggattgtactctacctgtactctatctttgacttacgtggacacgccatgtcacgtggacaaatttgggataacaaaagtacgtaaccaatggtacatttgatactcacttttagacaaacacttcgtcaggggaagagattatgcaaagataatctaacctttatcaaatatgctcacaacacatttctaatattccattgatcctcccagattacccatccttcaaaaatattatgctatcttcactttaatccccatagttctcgacatccttcattaattcttaacatcataaccaaagatatcaactttgggatttcacaagagtagactattcctttgtatgaattccatatcctcatttatcgttgttgtatacaaaagcggtacgttttacatttatcaactcgcaagcgcacgaatctttattgtagtatggagattgtgaagaacg

SEQ ID NO: 257895 - DNA, 890 bp, Cannabis indica
gcttaccacttgccttccaggtttgtaatgtggattatgacttgtgttagagctactagctactctatcattatgaatgggagaatccaaggaagcttcaaaggggaaaaggggctcagacaaggtgaccctttatcccctctcttgtttgtgcttgttatggaatatctaacccgttgtcttcaaaaggttgcaagttgtactaattaaaggtatcatcccatgtgcaaggagcttagaattgtgagtctatgctttgctgatgacttaatgttgtttagcaaaggtactcaacaatctgtcaaagctctcaaggacactcttgaggagtttagtgcagtgagtggtctctccattaatacttcaaaatctcaaatttattttggaggggtagattctgatataaagcagagtataatgagagattttgggttgatggaagggagctatcccctgcgatacttaggagttcctttaaggccaactaaatggaaagcagaggactgtggtatcattattaagaaaatgaggcaaagattgcatacttgggcaagtagacacctgtcttatgcaggaagggtgcagctgattcactcagtgcttcttgggcttcgaaactactggatgagcatttttgttttacctcatagtgttactaaggaagtagagaagatttgcagaggttttctttggggttggaatggcaatagaagtaagatccacttggcctcctgggagaaagtttgccttcctaagagttatggtggtcttgggttcaaagatgggattagatggaatcatgctattttggctaagtatgtttgggctattaattctaagagagacttactatgggtcaaatggattaatagcatctatttgaagaacaa

SEQ ID NO: 257896 - DNA, 609 bp, Cannabis indica
aaacaaaaaaatactgacaaatagtttcttatagatacatattcacatttaacatttctagttccacgttagttaaatgatgttttactactacaatatcatagtattataaaaacagagtttggaattgttaaatacacgacctgaacagataaaatacgattattgtaatattcgtttatattaaatatgtgaaattattagttattttgtggttttgtgttagttgactcgcaacagatataattattgcagtatagtttccttacagttttctcatcgtaaactgaccataaataaattttaaaatgtcaagaaatggacgtaattccatttctcatatcggacaatgggcagtttgatcaatgaatgaattgtctaaattacaaatttagtagcgaattcatctcaatggattgaaaatatgaagaacttatacacaagttgaaacaagtgtttaaatacaacaaagaaaatagttagctgcaactaaaatattaagtgaaagaaggttaccaaccattgagataaaggacgatccaagcctattcttctacatccaagcaattatatattaaaagaatatttatttgaattttttaatttttt

SEQ ID NO: 257897 - DNA, 1220 bp, Cannabis indica
gtgaaatatgagtgctttggagatattagaaataattgtaatggtttatttgattaataaaatcttctttttagttgtttaaaccgattcccttgtgtcagtccaagcactttctaattcagttttatgctttctggtttttggtttgttaatttccgattgtaaacaattgttagattgtttgtgtgatgtgtctgttacgtttgtgtcgcgatctgctaacaaaatcgctcattgtcttgttcgcggttcttgttattggtctgattgcatctttaatgtcagcaatatccctaatgctgtacattcttctataatgaccgatttggctattataagttaatgaagtttcaccttctattcaaaaaaaaataaaaataaataaagtcttcttttttgataattaataaaaaaggaatattagaaattatatataaaagtggtgtaagtgagtgtgaaagggaagccaaaattctcttatggctaattcaaaatgagtgagaaagagctaagattgtgacctttgtatattgctttcaactaataagcctaagcactctccacaaattattattggaatctttaatgtatttatttttctcatccaatttggatggattaatacatctcatcacaaccaccaatttcttcttcttagctaaatcccaatatatgattctatctatcacatgtacgtttttctcaattactttacaacaaagaaaaaataaacatttttaagtgtgactatatatgcctgaataataactaaaattaaatcaactattcctatgtactatacatatagttgtgattcctttttttaatctatataaatttttagtatttttggtacaatatatgaatatggtgtatgatgtagttattaaagagaattcttcaaaaaatgaataatcgaaatttgaattcaaataacttcttacgtgcacaaaataaatgagtacgggtgaataaatcgatctaatttaatgataattaactgattcaattacaattgatcgctaaacattaaatatttaattgtaatcaggttggattggatgttatttttggttatctaattggatcggatcggatcggatgttggatgaggtatctaaaaattcaatacatctaacatccaatagaactaattagtattttcatttagtttggatgagtaattaaattttatattttaattattatatgtatatata

SEQ ID NO: 257898 - DNA, 567 bp, Cannabis indica
ttatttttggataataattagtattttgaataataaataatgtgtaatattttaatttgttattttacttaaaataatttatagaattgttctgttaggtattagaatcaatatttaggatgtatttgttaattcttataaaagtagattaaagaaagtatacctaattctatcgaaatttcaacagcataacgactataattgaacgtttctaaaaaaatttaaagctattcataacaacaaaacataattcaaaacaataaagcaatcacaacaacatttaacaatacaaaaatttatcatccatccgaccgcaggacatgtattcgcaaaatcttcttcactacggatgaatatttaagatattataactcatctaacatgcatactattctacccatcgatccgattgtagtacaatatatcccacaacctattgattactagttagtactaactatagtatactaaatataatttgtaactaactattaactaattttactctaatttactaactatattataacaggtgctcctcacacattaatgatttattcataacaa

SEQ ID NO: 257899 - DNA, 803 bp, Cannabis indica
tatagcatgcattaaaagtttacaaattcaagagtaatactaattagtacaaataaaaattccaaatctctttgaagaaaatcaattacaacaatatagctcaaaatgtgcatatataaatttaaaatattgatttagcatcttttctctaaattttaaagttgtttaaatgtgtcgcccactcacgtcgaaccacattcagttgatcctttgagtaaaattgttgattattacactacaagaaaaaaaaaactataagtactaagagattaatataccataaatactaagaaaataatatacttagaatcataaaatttttaatctctatataaaacaacaaatatacctttgattttatataactacttggttgaggttcaaacacaagatctctcatcatggcgcaaacgtaaaagccacatgttttaaaatcttgttgttgagggcactacatgaatatcaaagaaatggttaaatattattaagttaataatgaacttaaataataataaaaaatatgcaaatgttaccttaacattataccattgtaatgaatcttgtttcattcttttgccctttgttaaattatgtaattgaaatgcactgtatcaaataataaaagttgaatgaatattaatttaatcattatgacgataaattcaaaacttataattcatatacttacattcctacaacattcttacaaacttcaggaatatagcctcgaaggggatcaaaaaaatatactatctctttagataagtcaatcaacaagaacatccaatgtctcctaagtataa

SEQ ID NO: 257900 - DNA, 584 bp, Cannabis indica
ttaattttgatatgcctactaatattttccccagctctcggacaccaactgtcataactgtttttgacagttatgttagttagagtctttcttttcactagtgtgtataaatagccttttggctatattgttttaagtgaccaattgtaataaagctaagtatcaataaagctttaattctctctcaattctgtctaagagtttttcgagttcctttgaataggttcagttgttgaacccgagtctgttctggtgtatgaaagttacacctgctggtgtgattgaattggtgtttgctcaacaactggtatcagagctatggagggattgatctgtgttgagtcgtgaatcaagtttgtcatgttcaaagaagtttgaaggcagttcttggagttcaagattcaggtgattgatcagcaaagatgggaaataccaggttcgatctggaaaagtttgatggtaagaatgatttcggtttatggagagtaaagtgttgggttttatgccctaaataaaactcatttgaatataatcagatttacttattaatatagatcagaaataacatttaatgttgcatggtt

SEQ ID NO: 257901 - DNA, 757 bp, Cannabis indica
ccttttcgtttaaattgaaaaaaatgtgtttaattacgttacaattggaggtaagatgaatagagttttctttttgtttattttttggattggtaaaatgagttacattttttttttttcttactgtttggctcttgtcggatagttattggagggtaattagcaattttcatccttttaatttttttggcgttaaaaatttcccctgaactattaagatagttagatttaaagatttttgtttaattttattcaattttattgtttttgtttaggtattaattatgctcacagactttaaaatatactaaataatgtctcttaaattttgatatgtattaaattataccccttgaacttttagtccttagatctattaagatagttaaatttaaagatttttgtttaattttattcaattttactgtttttgtttaggtattaaattatgctctcagactttaaaatatactaaattatgtctcttaaactttgatatgtattaaattatacccccttgaacttttggttcggagaaatttttaactgttaaaaaaatttaaaaaatatgatttagtatatattaaaatttgagaaggggggattgttaatttttttgtttagaattttagataagaatgtgagagtgtgtaacgaattatattaatttataaaaaaatgatggtatttagggaatggtgatggtgacgttgtcagcatcgtcgatttgtggggagtacaagaaggtgttattctt

SEQ ID NO: 257902 - DNA, 534 bp, Cannabis indica
ttttttttaggaaactaaatcaaatgttatacatggtaatttgatctcttcttttatatattatgtgcatttcatattaacacaattgaattatcacgttaatctcttgtttccatttttatttttcatttttatgaattttagtaattaataataatattaatgtggtttgtttgagtcttaaataatattaaatatacaaaaaaactgatatttattaattgaaaaaccatataataagcaaaatgcatataaaagttcacaatgcatgaacagaggtgagtagggtgcacaaaatatgggcaagtgagttacggtgataataatgggtaagatacggtgagacaagaggtgaaatatgatgatgataacgagtgagatttaataatgacaataacttaaaaagatcgagatataaaaataatatattatgaagaacacttcaattttttcctacaccatcatatttacttatttttataataataattttttaaaaaaaaaaataatttaaaattctatatatatatatat

SEQ ID NO: 257903 - DNA, 1097 bp, Cannabis indica
aggcaatttcagccacacattagctaagcttcgatattcagtttctgtgctggatcttgaaatggtatgttgtttttgagacttccaagcaatgagatttgatccaaagaaaatggcaaatccagaagttgatcttttgtcatcaatatcagtagcccaatcagcatcacagtaggctttgatttcaagatgttgaggctttgtgagatgaagtccatagtgtatagtgcctgtaacatatcaaagtatccttttgacagcaagccagtgggaatgtaagtggttttttccatgaattgacatactttgttcacactatatgacaattctggtctggtgatggtgagatactgtaatgctcctacaattaatctgtacatgtgaggattatcaaagtattcactgccataaaagctaatagttgtaaaaataataataaaaaattgttgcagattgttgttctctggttcatctgctcagtagtggcgacaacagataaggatcggtggttttcggcctttaagacactagttcagtgggttgttgacggtgaggacatgtaagaatcataaggcgtgtgtgcttttgaatttggggcttcaagagatgggagaagaaaaggtggcactgaaagaacttagggctttggtggggggacttccagtggtggcgaaaatgacgggaagggaacttagggcttcagggggtttctgtttagatctaaagagagagaaagagagagatgttttttaattgaaaggggtagaatgcgtatgtaaaaataaactaattatagattgctatcaattattttgagaaatatttttagatatgtggtaaatttttttttttcttattttaatgaaatttcccaaatataattgcaaaccaaatatccctattaacaaatgtgtcgtttggtaacacttttgtttttttaattttttaatcacaaaatgaaaataaaatttttgtttttaaaaaacaaaaaacaaaagtgtgttccgtaaagtttatttttatattcattttttgattttatttacgtcgggtctaggttcggggtcggattcgggttcaggtcagaggctgggttt

SEQ ID NO: 257904 - DNA, 545 bp, Cannabis indica
agcagctttcatttcggtttttccataatgggtagatcgatgctgtaatggcagcagccatcaccctccttcggctcttttgagagctttgatcgggccaaccacctgaagagatgtgaaatgctacctgctcttgtactccatgctagccaatttttatttctgttagacatttcaagctaaaagtacactcaaaaaataagtgttcaatctattcctcatacttctcacatattacacattttgtatccatcacaacattaaactttttcagtctagtctttgtttggagacgctttagcaccgaaagccatagaataaaactatgcttcggtacattgagtctattccaaacaacatccgcctaatgaacctttggttagttttcaacaagcatttgatagactttattaatgttgtatgtacctgtaataagtggctaaaagttgatgcctttgagatgatccttgacagccacaatatgcttcaaataccaactccccgagggtgggactttgtaatcccaccaatctcttccttttaag

SEQ ID NO: 257905 - DNA, 672 bp, Cannabis indica
ctttccaaaatattgaaattggctttttcgcattaaaagtgtattttgaaatctgttgatggttttatagccaaagtttgagattgatttttgttgccttaaaagttaacttgatagactattatctcggattgtttacttccgttgccttaaagtattaaatgtgatattttatcgtctgccatctaaggtttctcaatagtacaaaatataattactaagttaatgtttgttgctggttaccttcttaaatgttgaaattggcttttgttgccttaataatatacttgattgacgattgcttctctttgaaacaaacataattacaattttggaatttgctggtgcataagccttgtgtgtcatttgattaagctgtacaatcaaacactctcaagagtttcaagttaggttatttaaggtctatggccctgttaggattcttgttaattaggtaacaggcagtagatcaagcctcaccccagtgaggctttcccaaccttaactaagaagcaaacatctcactatgtccaaaagagttctattcatgcattcaacaaccacattttgttatggagttctcactactgttatacatctagctatctcatactcattacacattctatcaaattgtgtgtttgtgaagtcaagtccattatttgtctcaag

SEQ ID NO: 257906 - DNA, 857 bp, Cannabis indica
cttatagatgactttcttaatatgcaagagtaatgttatttatttaaattttaattatcaatttaataatatattttgaaatatttattacttaactattatagtttggccgccctaactttaattcctggctttgcccctgttgcgggggaactagagcaagaatcgaaattgccgccaaagcgcgccaagcaaatactaaaatgatccccactaatttacaacgtcaatttctctatggtaagcgcaaatggttggtaagagtaagaccaataatgttgtagtcccatattaatattacgtatcattgcactaataaaagagaaatgttaaaagacattagtggtacttagcacttctcaaataattatatggttattggtataattaaatgtaagaaatttggcttagcatgcttaaataaaaagtatgattttttaatataccccctgttatattatttatcaataatacattgtatagattaaatatgtgtaataaattaatatgtaacatatgacaattgccatctttttgtaatatttgggaaagttacttgttactatgagtaacctccaccattatcaccaacattaagagtgtaaaaggtattgcacatcttaatttaaaattcttaatgctataggagttatagtatgtgcataacttacatctctataggagttatgatgtgcacgagttacatctctttattgagtccataacatccatggagactacgacttatgaatttgaatttcaaatggtgatatcctaaacactatataaagatgtctaaggtgctcatattgaagataagttttctatcaagaaagcactttgctagaaaaccctaa

SEQ ID NO: 257907 - DNA, 1041 bp, Cannabis indica
acgtacattcacctagtatattactaatagagaaaattactgttatttttagtaaaaaatttatacttttacatttaatgttttctagtattttataaagatacaaaaaacaacaaaaaaaagtcatacgaaagtaataagaaaacaatattaaaacaacataaaaaataatatatagataacaaaaaatttaataaaataataagagtacaacttaaaaatacattaaaatgtcatattttttgtaaataaaattttaaaaattgtaaaaatatttaaaatttcgtacaactctaattttgtattttttttttttgaaattatccttaataatattagggggtttttcaggtatatatataaaaaaaaagtaaaaatattacaaaaatatattgaactgctcctataaatatttatacagcacaacaactaaatattacaatgatacctcttcttctaagccttcagccgcacgaagcaaagtcctcaacaacagaaagctttaatcgatcaacacagcaagcctatcgaaacgaaacccaaccaggcggagaatcactattaatttcggcgatttcacatcagaagaagaccgggatcgatccaaacatatgctgtttcgtattgatgaaaaaaagtgtagaaaaactagttttgaaactaaaattcaacccaaaattctggtttaattagcaaaaaactaatcctcctaatattaatttttcgattcataaaatgtagatctctaacaaatagatctggagctcccaatcaatccaaatcaggtataatccaaaaaagaaaaaaaaatcaatgcatcaatactatagctaaaagtttacctcattgtatttttgttgttttatagattttaatggtaaatttgttcatattaaatcacgaataaaatagtaaatttacatgtacatagagtcacgtatgtggaaatactattttagttttttatgttttagaaaagttgtatcacagttgcataaccgttttgctaatgctctggaacttaacatatcaattattaca

SEQ ID NO: 257908 - DNA, 527 bp, Cannabis indica
ataactatatgttctggatttatcattttgtacattaaactataatcatgaaaataacatgttaacttaaatgacttctaatcttctattgatagcaaataagattatattgaaatagattttatttagggcataaaatcccaacaaattcccacttgcactaacataaaactagaagtgtatttcaataaatccattgtcttgatatccgtatcaagtatagtgtgtttcactatacccaaataacgaaaactgtaaggctgtgataagcaatagctttctccatcattacttcatttgtgttcatagaatattatgcaatattattttccttatatgtattactcctctaaagatactaaaattctttactgtttgataagtgcatctggatttatggaagacacatctctaattctatctaaaatggaatagagataaaacaatcaagaactttcttcaatttgaataactttctagtgtctttcaaaagaaactcagttgtttagcttcactggtggaactaa

SEQ ID NO: 257909 - DNA, 1263 bp, Cannabis indica
tcaaggtgatgttttaatagatgctactatggtatcatggagtatttgaaagacacgaaatgaggtcttttggcagcaaaaaccctgctctgctttggaggtggttaagtcgacaaggtcagtccttgatcaatggagggttgctaaatctcactcaccagaatccctatttgctattggtgtgtcctctagcagcaaccattggagtaaaccgattaattgtaagatcaagattaatgtcgacggtgttatttttgaagctcaacaaaggtttggttatgggtgtgtggcccgtgatgagaatggttagcttattgaagtcatttcagattctagtgttgttctgcctgaaattgctgaagtaattgggatgaaggaagcgttgagctggataaaagaagaaaggccaggaggatgtgatcattgaaacagatgtgatagttgtggttcgggcaattaatagctctgttcatatgacgtctcagtttggtttgttggtagaggattgtcgcttgatattatctaatttaaagaatattttagttttctttatttatcgatatgctaatagggctgcctactattttgttagggagtcatgttatttgtcaggttgtatgtttaatgagttgaatatatattttgttttaaattgggtaggatgctcaaatttttagtatcacattgtaaaatagtagctaattaatatgattatatataatattgtagtaattattttggataccgattagtaagaattgcattagttaccattaagtatcaaattttattgtactaagtagtttagcttaaatatgctagcttatattattagataaggaaagatacgaaaaagtaatatgtcctcttggggaagaatattgtaacatctagaatactaaatagtatccacttcttctgttaattgtgtagcagtgtagtacaataaaaaataataaaacaacaataattgttatgaaatgattagtaatttgatagcaattggtagtctatattatttcttttaggagctaaaatataatgataacattaaaaattgataccaaatagtatccaaataaataattttcaagtaataaagaacattataaaaagactaattagtaatttttccttccgaattttgacaactaaatcatgctccttgaacttttttggccgttaaaaattccctgaactattaagatggttagatttaaggatttttgtctaattttaataaaaaaattctaacatggatga

SEQ ID NO: 257910 - DNA, 771 bp, Cannabis indica
attaaataattaattattgtattattactataagatacttaaatagacactgtttgaataaaatagatatatgtttaaaaatataactaacaaaaagtaaaacgaacataaagttataaagaacacatgaaattatacatggtattagttctcttttcagattgctactagtccacggaccacacccagggaataaaatttattagaagaatttcaaagtgattacaaaataaaattgtcttatataaagaaagactccctctttgaatttttttgcaacggttgtaatattaacgcctaatcaaatttgtagtactaagatcttgaactcccttcaaatcgtagcacttgcacgcttcctcttgaagagtgtctcatttacactcttcctcctgaaaagagtctcatgaacaagtcttctcccaaagcttgatgaatgatatccaactgtgttcaacctgcacaatttccataaagaaacaatacaggaataacacagtaataaaatactaagaacttgtttgactaaagctcttcacacaacaaaatgttaggacctaggattagtggggtgtgctaacatatagtaaataaaagggtaattgagtctttgtattgagggtagtgttttggagggaatacaatagtatatatagaatgttaaggggaattgagtggtatgcaatgttttgagtaaatactctaattgcaccaaaggagcctaagggctcctatcttttgtaattgaatttctcaatacatttaatatac

SEQ ID NO: 257911 - DNA, 614 bp, Cannabis indica
atttgacttacggtttcgatcattatcagggacgacggctgaagatatcttcatattggcaatggtttagtaggtgtgccaaggatccgatctaatccacttgaattaaccgaactgattcaatttaatttaaataataaaaaaaatattaaattggattaaaggttaaagttaaattctaattggatcaattatcacatgttaatttcaaaatctaattgaaatcgatctaatctattaactataataattaattaggaagttagttaattagaaattgttactctttttttgttttctttaaagctagcaacattttactactgatataaataataaaattgcaattgcattcttctattcaagttttctttctttctttcggttcttaaacttttactctgcatcttgtttttgtttttatatggtatctaatcctgcaactagtttggcaacaatggctactgccactacacctactactacaacatcgactaatgctcccattctttcttggaattcattctctaattctctgaattctattctcaccatcaaacttattaattccatttttagcatatttaattgacaaaaatattttattatttaat

SEQ ID NO: 257912 - DNA, 855 bp, Cannabis indica
aaccatgcaacataaaatgttatttctggtctttatttataagtaaatctgattatattgaaatgggttttatttagggcacaaaacccaacagactgaacttatataaaagatgctattaactttggaagaaaaattagaagatgaagaacaatttaataaatgggatgtggagatgaagcacaaaagaatcaatatcaatattaagaataaaaagtacaatgtctacactctaaccacaccaatatttctaaaatagttcactcatttttgtcacataaaataaaataagtaaacctaagagagaaataagaaaataataaagagagtataatttaactactctaaaaatctgatgcctttacaataattttgggtcctatttatagagagatattgctcataaaactagcatttttatgtgccactttagttgatttagtggcataaaaaggtgatatacatgaggaaatggtagaaatagtgggaacatgcggacatgtggtgcacgtcaattgctagctttatgcatgcgttagtgtgtgatggaagggaggaacccgatggaaatagaactaattcaattatgggccaactttctcttgcttgaaataaaggatccattgcatatgtatccaactttgattgaagacatatatcgcgtgagtccaaaggatactaatcctgatgtttcatttgcttttaatgggcttatgtcattgggctttaatttcatctatatcattttctttctaaatttgaaaaataacaataaaattaaagtaaattaaatatttactaataaaaataaatttaccattaaaattacaaatattcaatttatattaattatat

SEQ ID NO: 257913 - DNA, 1030 bp, Cannabis indica
acccattctcatcttcaaaatatatcatctcgggcagctcttgtttgatggcaacttcaatcaataatcttgggaaatttagcttctctctattctttgtggcctcatccaccataatcggcttcctaatttgcccaataatcttgtacaatgacttctctccccaatacttgagctctagatcatctaggtgaacccaaataggtatcattctaatatcttcttttttcacattaatggatggctcccattctttcataacaactggcctacggttaaagaatatgtatcctcccctaagcacttcatctctatattcaatggactgaaaccgaattatgtatataccatatgaaagtaatccaactctctcaaccttctcagaccacatccttctcacaaaaccctcaaacactgctaatggaagattagctcctaaaacataacaaacaattgagggtttccaaaaatccacttcctcttggatatcatcattagtaatcttcaccttattgcacttaggaaatagacttctaacaactaaaccagatcttagaacagggggattagaaaccataccttgtgcaattttagcagagcactgctcagacgcctccaagaaatgggcaaaatccaccctgatatcctcctgttgcataatcaatcttagcgaggacttcggcgtcagtggatcaggttccagcatacccggaggtaatccctcatttccgtccaccgaatcctcatcgtcgacattagaaaaaactataggagcaacacctagtaccgcatccattgatttggttttcctaacatcagaaacagaattaggacctttcttcttcactggcttcgtcagatttcctttcccatgccctctacctcttgtcttcgccatggctccagcacttgctgcaaggagtcgagagagagagaaaaggtacatgatcaactattgatattgacttggaaagatatgacggtaagtttataatatcttaactaagttgcaatatcggtccaatccaat

SEQ ID NO: 257914 - DNA, 1123 bp, Cannabis indica
tctacatgttttcttcctttccttaacaaatggttttctccttgttcatcaattaatatgccattgtcttcttgtgcatactctggatcttctacataatcatcttcactaccctcctcactttcaccttcattttttagcctcattaaccaaatcagccctaacatccttagtttgtaccacattatgctgaaaattcctaaacaacactgtaatatcctaagattaagaaaacggaatagcgaaccctaactagttaaatttttgtttattatggaattatattgttatataatttattatatgtgaattaaattgagatatgacatgataagaccccgttggtgagccagtggcatttttgtaattttgacccgagaaggctaaaattgtaaatttaattgaattgcatgcttatggactatataattatatagtatacttgttgtgtccttttttaggtgttttctaacaagtcggggcggtatagtgacaatcgggtatttcaggccgaaccgagttcggggccaaaatacaattttgggattttatattggcattttattgatacatgagtattctgaaaattatttggataatgtgatatgtgttaatgatatttttgcccttgtaatgcatgtatatgtggaatgtgaccctaggggcatttttgtcattttgcctaattgagttatttttcaacaaaaggaaattgtgagtaaatgaaatgaattttctggactgtttctcaacccctttggaccaaccctatctctctattttcacatatcaatttgttgaaatctttgaggaattgatcttgtttcaagcttggatttgtggaatttttttgcttggactttggaggagctaaaggtagtctttctaccatttttaattcttgaatttgctgctgtaattggtgattgaagagcatgtttatatgttgtaagtgttcttgatgcatgtgtggaggattgaagtaaattgatagcttttttgttgtttgagcttgctacattattgagttatacatctagatagttttgggggaatttagggctgcaaattgaggttgaacttcttggttttaagcttgaatttctgagttttaagcttgaag

SEQ ID NO: 257915 - DNA, 793 bp, Cannabis indica
ttcctattttttctattttgtgatacattctcttattttatttgaaaaataatctacaaatacaagctaaaagtcctacattgtttagagaccttttaggtgttattcatataggttataaatagacttttatcttttttttttactttctattatctaacaaatattttttttttatgagtgattgattaatgtcttacccaagttttatatatatattttgttataagtagtctaacaaatttgactctactaattttgatattaagtatactttgttataactctgtaattttatcgcacatgtttaaatgtaacgatagtaactaaaagaatgtaaaactatcttaaagaacaatacatgataacttttaaatatgaaaataataataacaaaatataataatttgtgaagttagttggtataataaattttttttacttaaattaacagtagtctttggttaacgtaatatgaaaagaaatggtagtgatgtctaaccactacgtgtgtcatactattattgaaattaaatattgggtcttaaagattgtaatttaataattttaataaaatatcactaaccattaacaaaaaagtcatctcacggtacgcattggtactacaggtaccaaggcctgtcctgagttaatttgggcttttgaaaaaataatatttttgggccttttttataacaataaatgatatttttaaaattattaaaaaagatgtatattttagtttttttttgttttttttttttcattttgacccctaatagaagtgaacttt

SEQ ID NO: 257916 - DNA, 548 bp, Cannabis indica
ctcaccaaaacaccaccaaaacttatccaaatcacttcaaacttcacagggcgtatatataccataaatattaccattcttgcgtaacaaaaattaaaatcgagcccttaaatgaaaaataccattaacgttcggactaagatttaaaaagttcaaaactcaatttttaactcaaaaccaccacaaattcaacaagaaaacatcaaaactagtcccatgactacccaagaacaattctataaggtcataatcatcttaactattctaattcacaaaacccctacacaaaaacaactatttttaaatttaaaacgagattaaaccataccctcttcaaggattttctatcctgctactaccggagcttagatcgctaagttttgggataaaaatcgaagaaaatggttatagggagaggaggttttaaagaaggggggagaacgagggtttcattcgttctttatttactgtgttatatgttacttgatatatataatatatacgtaaattgataaaatttattagctaatatattataataaaataat

SEQ ID NO: 257917 - DNA, 1287 bp, Cannabis indica
aaataatctaaaacaagataaaataagtgacgatgacttagatgattttaatcatcattgaattttttattaatgttttaattcgagttttatgagtcaagtgtgctctaagataataaaatttagggttctagttcaaaaaacataattatctttactttagtttaagttatatgatacatcttttatatatttaaattttatgtgacattttattaatccttattaaaatattatttcaatataattagtgaggattacacgtcaaacgtctcaaggcttacaaaattagtaactagtaactaattatactataataaattataaactagtaactagtcctagtttccaccgaaattttggcagcataacaacgttattaaaaaatttaaagctattaataacaacaaacacaattgttgtggtattttcaacaagcaagtgtacgtattgtaaataagtaatagactcacaaaaagtgaggtcaatcccataaggattatagttaagtactttgaaattaaatctttactcttacatggttatgcaaaattaagagaaaattaaatttagaaacactaaagaaacagtgaaattaagaagcaaatcaatcaaaaagaaaatttacgataattaaagttagggctttcgatttcacgaacccacagcccagcgaacccaaaaccctcgccaaccaccacctccgccaccccttttctctcccatttctcaaccatttgatcctattttttttttttaaaaaaacaaatctttcatttttgatacgcaatcccatacacctaaaaagttttaatttttaccctctttaagtgttatccgaacccaatagaaaatagtgggtatatataactccggtcactattatttgttgagaaaatattgaatctcaacattctttaaggtataaatatagtttctagtcatttttataatgtacattattttatttttagtttttgtaaattattttttgggttattttcatattagtaatattattgtgttgtatgtgcatagtgcccagattttttgcagaattgctcgtcagattgcgcttataacgtataaatttaaacctcattatataaatatttttctatattttattgaatatgtgtttatatattgtgtgtatattttttatgtaaatacaatttgtaattgtattgtatatattcaaagtaatatatattaattgtaatgagaatgacattggaggaatttaatgaatttttaaaattgaattagtgtgggatataattgatt

SEQ ID NO: 257918 - DNA, 926 bp, Cannabis indica
taactccctcatctgacagcggccgtacatcacggattacaatccgtgaaagtacaataacgagacaaaatcatatccctataaatattatatagcattatgataattttaacttttaaagttatcaaaaaaagataattttaacttttaagaagaaaaaaatcctctgattatttaattaaaaaaaacaacaaaaataataatttttgaatgatgacgcataattgaatatataatccaaagagtaatatatgattataaattctaaactttgccaactaaaataggggcactaaattgttttagcgatcaaataatatgataaaaaaaatattaaaaagtacagttgtgcgtaatatcatttaaaatattttattgctattgatataattaagtattagatttcacattagtgtaataatttttacaaaatatcgctaactattcttaaaatactaccttggtaaaaaaaaatgttaaaagacaccagtagtacctagccccacctaaatgtgtcaaatcattattggtacaattaagtattagatcttacataatttaatataagaagttaataactattatttgtgtttccagcaagggacacgtggattctaaatagaagtcaaggctcatcagtgggcccaaacatcatgaattgggtcgagcccaataccgacttggccttctaggaaagcaattacgcttcttgctcaggcaagcttccgctaaggctagtcaatattcgaaaggatcttagtttcgtgtatccggaagaactctttagcgtgtgtctcgaagccagttgcaatttctcgtttactgttacgtgcataataaggaaatcacttttctcagatctctggcagagaataaatatcaagctaaaataggaaattacataattaaggatcaaataattaata

SEQ ID NO: 257919 - DNA, 661 bp, Cannabis indica
atgtgggaaatatatatttttttgttattaaaaaaataaaaaacatccttttaatttctaatttttatctagttaacgagtttttttttttctgacttaatatccaaagagtaactaaatgacttaaacaaagtttattatatcaaccaattcaaaaatgatttcatatacattttgttcactttttttgtttagttacttttaaaattatgtgatcatttttagattaaattatgttgttttattgattatgaaactttcacattacttctttcttagtaaaatttgtgttacatacaaacttatttaagaaactaatgtgttacaataaactaaaataacttatacaatctattagcaggatttgtaaatatttatgttatcaattgttattttaaaaatatattatggtttcataatattatttaagatatatttttgataactttaagtttattataaaagctgatagttgacatataatataatattataattttattgtagaaactaactagttatttaattaactaaattttaaaaataattttgagttgttaacttaagtaagaaagtatattaaaagatttattttaagataaaattatcttacatacattttggctactaatttcgagtggttacttttaaatttatgtgt

SEQ ID NO: 257920 - DNA, 843 bp, Cannabis indica
aaacattgaaccagactagggaaagagaaccagagtcaggacctagaaccgcaccccagtctcgatttcaaacccaaactcagaaatgggacctgggacctgaaccagaaccagactgagacccgtgacagtgatccagatcttgactcgggattcgggtaacggggcctggaacagaccagtagtcggtgtctagatctgggactcaaactaggaacaaaacccagtcgaagaaccaaacccaaacgcagaactaaacttgggacccaaaattagaacctcaacaagaatcgccaaaccaggaccctagaacaagaccaggaccgcgaccagaacccggacccagacctagaactgatcacacacctagcctcagagccaaacagagactggaactcgggcccggacacggtcgtgtacccagaccagaactgagatctggacctggacaaaaatctgggacccgatcccaaacacagaattggacctagatagggatccgtatacgaacctggacttggaccaagatccagactgggatcgaaatgttggacttagatctggacggtgatcctcacccagacccaaacttggacacgcactcgagacctgaacttggacctggagccgaacctaaatccagatcggggtccatacctggacacaaacccgggcatagactacgacccgaaatcaatcatccacacctagaatcagacctaagctagaccagcaacccgaacccaaactcgaacacagaccaggatcagaacgaatgacttagacccagaactgaatccagacttagatcgggattggaacttgggactcggacccaaccta

SEQ ID NO: 257921 - DNA, 1029 bp, Cannabis indica
tcactatttataattacatattgattttaaagttgactgtaatatgtttacagcgatcatcccctaaaatcacgcggtttgattacatatcatgtagtgtaaatgcggttatgatttgaaaatcatatagttgtgattttcccgcttttactgggtctaaattattgtgttttaaacacttctttaattattgtatctggagatgtatcgatagaagcttggttccagtgatctcaatagcgatctggggccatttttccttccgaggttgacgatgcatgccttgtgacgatcacggttcttattttcaaagagttttttgaagctgattttaatgttagcttatggctggccagggttgtaagcctcgctaacgtgactggatgaagttataggaagtcttcccatagcgagacggacaccttacttacttggtcttgagtcgatttgactgttacacttagtttgtacattatacactaagggcttttgcaattgatatgtgtcgctttcatcttcctatgtgtactgtccttgatgcctcgctatttgcattcaatgatatatggtttctcgctaatatactaagcgccagtttgtatattgattcctcgcctaagactttacaatcagcaggtcacacatatactctgatacttacgtaattaatgagttattccatgaaaagcgattacatcgatccatattccctttatcttgacacgtgtcctccactgagatggcagccaaattttgggtataacaattgccccttaaaaagttcttttttagtaaaaagtgctttttaataattacagagggtattttcgttaaaatccctccttagaaaaaatgcgtcctttgattctggcggttgtacagtttcgacggtcattatgaatcgtctcttcatattctgccctactcccaaccgttagattccttaatccttagctttcttatcactcgactttgtgtataaaagggtggctcaagcttgtcatttttcacaaacttctggctttttgg

SEQ ID NO: 257922 - DNA, 897 bp, Cannabis indica
gaaagaagagaaaaaatggtaagaaatggcaactactgtatatatagtactattttattatgactatatagttggtttcaaataacttgttgattaatttttatttgggatttatacttagaaacataccccactttgagttttagattccttaattgagtttagtggcaagagcatataaatgcatccattatctacttaaataattgaaaattattaggtaaggtatcacttttcctcatgttgtagccttgtaggtgttttttatttttatattgtaatttaagaataattagtaattttttttaaaaaaaaatttacatttatagaaatttagttttttgttaggttctttttcattattccgtttaaatattaatgtgcttttgtaaattattaaattacataccttctctaaataaaaatgaaaaagattaacatttgttttgattaaattttgaaaaattaatttagatcttaaaaaaaattatttttaataattaaggaaattaaaaaataaattaaaaattgtaaaactaattaagtgatttaaaaaattaattatttttattaaaaaatccatttacatattaaaaaaaagtacattaaaaattcactttttttaaaaactaaattttagaagaataaagtctagtttttttctctagaaatctagatttgtttaaataaacataatattcttttagtttaatttctattttttaaaataattttatatttttattgaatttctaattatttttctttacttttaagataagagtttgtaaatataaataagtttaattttcttttcacaaaatcttagtttgttatttaaattagttattggataataattttagtttgattttttaagatatgtgtttataaata

SEQ ID NO: 257923 - DNA, 574 bp, Cannabis indica
ttagaaatgtgtatcaagagaaaagtttaattaagactattttttatcattctctttagaaaaaacaataaattttaaaaacagttttaactgaggactaggcatgtcaaaaagaatatccatttagttggatcgggtcggagctccaatatgatagatcatttctaatctaaaatatttaaatacttattggatctcaaatctgattcgctctgcccccgcctaattttttttatcggatctgatccgatccagttttaatatattaaaaaaattaattcaagacccggacctaaacctcagacccggacctaaacttggacctaagacccgagattcggacttggacctagatctgggacccaaaacctgaacctgaactcggacctgtgacttggacccagactcaagacccagacccagacctgaacccgggaccaagaccggacccgggacttggacttgaacctggacccgaaccaaactgggaccggggacccatgactctggacttggacccagactcgaactaagacccagacccaagacctaaatccagactcgagacacggac

SEQ ID NO: 257924 - DNA, 923 bp, Cannabis indica
aggcttcactaaatcccaatatcctggaaaaaagcactcccatatccatccgggcctggtgctttatccttatctatggaaaagatagctatttccacttcctcagctgtgtactctgccaacagtagctgtctatgaggctcagtgactttaggaccaagatcaactacagattggaacactttccttctggctggtatcttcgatcccaacagcctctggtaatactcaaggaaagcactttggactgtatctggggtatcacaccagttaccaaactcatcttcaatcgagaaaactttattttgaagtttctcaattttagagaagcatggaacagataagaattatcgtccccaaatttagtccaatttatcttagttttctgagtcatgaagcttgcaaacgccttgctgatttctgcatattgcttccttacacactgttcctgctgcatcaattcttcattctgtggatcatgacttaatttcccttgaacctctgcaagcaatgactttgtcaacatctcagtcttttgaatttcagaaaaccctgccttattaatctgcttcagcactgcctttaatcttctcagcttttgcacaatgctaaacatcctcgaacgagtaacttcttctttccaggactgtgtcaccatttggtcataatctggagccattttccacatattataatacctaaaaggctttttcccatagttgttatcttcgtaaatagataccaagataggactatgatcaaaagtcaattcaggcagaaacacggcttctgaacatggaaacctattcacccactgattgttaaccattgctctatcaatcttagagaatatcctctcttctggcttttctttattgttccatgtgaagaaagaacctgaaaacttcaaatcagccagctta

SEQ ID NO: 257925 - DNA, 1698 bp, Cannabis indica
tttgatgaatacccctaattgtaagtggtggtttttgtagcaccattccgaaatcgacaaatggtgttgcccacacactggcaacctctgttactagtttaggaaattatgtttggacagatgcttgtctacgattttcgagttcttctgtaatagcgaatttatcttaatgaattaagtatttcttttttttaaaaaaaaaaaaactaaagattcatgtctatgtcaacatatgaaacaacagcagtggcgctcagcaagaaaaaaaaagagaacaaatgaacgaaagtatggtaaagaaagagaactttgacctgcattttattataattactcctattcgggtagtgaaataaaaataatcaattcacagtgaggttaagtaagaaaatcttaacagaaactcaactcccttcaaagtctccctgctggatcccgggactagaatcaggagcgagaagttcgtcgagagttgaatgaatctctggaaagaaaggtcatttactggaggcaacgagccagagtatcttggctcaaggaaggtgacaaatgttctaagtttttcttcctagcggctgctattaaaggaagaagaaatgccattgagagtattttaaacaaagataatgtctggatctcgggcagaagggctattgggggtgaatttataaagtattttaaaggtatttttgccggggttgacaatgatgttgagtacaattgtgcccagttatttcaagagagaatttctcttgaggattcggaggctctggtttgctgcccgagtcatgatgaaatcaaaagagttctatttgccatgaataaccataaggcctcgggccctgatgggatgtctgttctgttctttaagcactattgggagtcagttggacaagacttctgtgatgcggttttagatttctttgtcactggtaatatgcataggggaattaatgccacaaatgttgtgctcatccctaaggtccaaaatccgactcgaaccactcaatttagacctatctctctatgcaatgtggtttataaggttatctccaaaattattgcaaacagaataaaacccctgcttcccactcttatatgtccgactcaagctgcctttgtccctggaagaaacatccacgataacaatgtgattgtccaggaaattattcattcgttcaatcggaagaagggcaaggaggggttttttgcaataaaaattgatttggttaaagcctatgacaggttaagctggaaattcactgatcatgttttggattgcaatggaattccccagaagtttcgtcggtggatctcgcagtgcatctctaccacttcgctaaatatttgtctcaatgggggcccggtgggtagtattaacccaacttgcgggattcgtcaaggtgaccccctctctccttatttgttcatctgggctgttgaagttttatcaagactgttccatgttgcccttgatcagggcactattcaggggaattaaaattaagtaggggtggcccgactctgtcccatatcttctttgcggatgacccgattcttgtaggtcgagctaacttaactgaggtcaacggattctggagatgctttgagatttctgctcttggtcgggtcaacaggtaaatagcttaaaacgtccatttttcttggtaagataccccggtgagtgtgcgtgaagga

SEQ ID NO: 257926 - DNA, 620 bp, Cannabis indica
aattcaagctctccaccatcttcctcatcagtttttactagtgggtaagctttcaaattttgttcttcacttgtttatttggatttaccacaattgcttaaaagcttttcttcgctttgaatattttttgattttgacattagattgtaatctttttggtattttgatcttgatgatagttttagaatgcataaagtgtgattttctgaggaaaaagattagattttgacctttgttgtgattcttcactctttgagtcacgaagaacacaaagaacatgtttgagtttttgaaaaacacacattttgattcatcataatccctggccagccgtataggtcataatcctttgaatcctaggacactacaaaatgtgacttaatcctttgaggtgcatttttggagtggagtcaggaaaattccttggttttatggtaaaccaacggggattgaatttttccagataacaaaaggtaactaaaagtttcaatggactgataaatgtgaagaggcttttcaggcattgaaaatgcacttggggcaaaccccgatactatccaagtagatgcctagagaagtgctttcaatctacatggtagtgtctgaatacacgattagct

SEQ ID NO: 257927 - DNA, 745 bp, Cannabis indica
tttaaacaactcatgattactatgcatataagagaaaaaaaaatatgagtacaacaaaatattttaatcttcttttcaatattgtaatttgaatttttattttttttacaagtaatcctaaataattacaagcgtacactaacataaaaacaaaatagaataaaaaattctctttgatataccaaaacaaataatggtatgcaagaatgacaatttaagagatgtactatatgttaaaaaaaatatttttatatttattacgtgttacacaatttactgggtaattttatattacatcttctaaaatgactgttttggagcacccttaatatgtttttacatcaaagataattttaagtccaaattattttcatgattatgtaggttgtatttatttagaatcatttgtaatttcttacaaaaatttgaattgtttaccgggccaaaactaaggttaaaaaattttgttgcacacatgattttttttttaatttgtgtggtaagtaattgtttaaattttatttttaggcaccgtaaactattcaatttttttaaaaaaattacaaatagtatgagaaaactacaaagtacacaatcatgaaaaaaaaaaagactaaaagactttcttagatgtcaaaacaaataaaattgtattgaaataattttttagctaggggtgtactatagattttttcaaataaaaattaatagttgacccccctagtaattaggtcctggctccgcc

SEQ ID NO: 257928 - DNA, 849 bp, Cannabis indica
gacacacatggaaagaacaccctgaatctatgacccaatcgagatcagaataccctgtagaagccaccataactcctgcactttcataaccatcatcactagtgtaaccccctgacaccagatcaacatttccatacttcttggaaccaccagttggtttcttgtttagttcagggcaatctctcttgagatgagatgttttgtgacaaataaaacatctcttcttgaattttgaatttgactttcctttggtggagtgattttgatgttgattcccattgtatcttccctcaattcttcctcgagcaattaacaggccctctcctgcattgtcttccttctcagactttcttttcaattcctttgacatcaaagcactatgtacctcttccaatgtcaatgaatcccttccaaacatcattgtgtcaacaaaatgttcatacttgtctgatggcaaagagttcaagacaataatggcctggtcctcactttcgatcttgatgtcacaattctcaagatcaagaattatcttgttgaaatcatccatgtgatcttcaacactcttccctggttgcatcttgaatgagtaaagtttctgcttcagaaacaaacgatttgccagagactttgtcatgtacaaagactctaatttcttccataaaccagcagctgtggtttccttcgaaacctccctcaggaccttgtctccaagactcaagatgagtgcactatgagccttctccataagttcactcttctctgcatctgtcttgtccctgatcttgtcatcaccaagaatcgcatcctgaatcccttgctgaaccaggagagccctcatctttactctcc

SEQ ID NO: 257929 - DNA, 780 bp, Cannabis indica
cacatgaatgtactaaccttagggttcattgacacgctctccttttgtagagaaagaacgtttagtcaattttccttctaggcaaaattcacaaactagtagttcacttaaggtgaaatttttcaatggatcacctttggttaatctataaagcttatcatagcttatatgaccaagacgtaagtgccatagatatgttttgccttcatcattaatcttttgtcttttatagtttcttagtttagcaatattaaaaagttcgttcataagcgtgattggtatatcatgtcttaaaacataaagcccttgttccatatacacataattgatcaccattacgagaaatagttgaattagaactcaaaagactgtattgaaaatgttgcaattgtaaacatgaaacaaaaatcaagtttctactaaaatttagaataaacaaaatattgtctaaattcaaaaatttgttctgaaacttgaggtgagctttccctctcgcttggatcgacaccaatttgttattaccaactttaagatttaactcatcgggatttaaatattcccaagtcttaagcagctgcaatgaagagcaaacatggttagtagacccagaatcaacaatctaaacggatttgtcgttctctaaaacacatgattcaaagcaaaagcattaccttgttcttagggttgagaagtgcaggacactttgaatttcaaatgtcccttttgtccacagtgagaacataaaataatatgcttgcttaactatccttgattgtctta

SEQ ID NO: 257930 - DNA, 1297 bp, Cannabis indica
tgttcattggatcacattcaatgaatttggactcgacccaaccgatccaatcatattatttattggttattgaattttgtcatccgatccaatccaatcgaattgagtcatccaatccaatctgatccaatggatgtattggattggatcggttccaaccattagatgcattgactgattttttattagaatgtattggattcatccaatctattttatctaccatttaagttgatttcattaaaaagaaaaaaaatataaaaaaacataatttaaaacttaataatccaacatacatattaaacattagtttagtccaacttaattcttgtggtctcataataaaacctctaaaaataaaattcattcaattttattagcgtttaggaagatgagaattaatattttagatctaagattttttttcattaatctcatgtgttaaatgtatattaaatcaattaatatatattttcaaataaaatatattaaatatataaaattataaatgtattttaaaaatatataaatataattagatgatcactggataataattagatcggtttggtcggttattcagtggatcacatgtcccatccaacaaccgattcgatttaattagattttcaaatttatatatgatccgatccaattatgattggatattcgattttatttgatcgattgggattgaattggttggttgtaattggattggatgactttctacacacccctatcagtcaattgtaattgaatcgaatgactttctacacacctctaatttaattactctaatcaaatatacatttgatgctactaatacttagtatatataaagattacaaaaattgggaaaaaaatagttccctagtttataatatttaaaaatatattttaattaatttttataataataataattatatgggctatcgatcatcatctggaagctctttgggttcagtggataaatcatgtgtatttaaaatggcaaaacttttggcagtatcatcttaagaatgacactagttggtactggaaaaaactttgtaatatcagattgatgctttctaaaccagaagtggaggatgctatgaataagggtaaattttgtgtcaacagattatataaaagcctttgtcttggtgagcaatttgagcaccaacggtttgtttggaatcggtatgttgttcctaagcatagactcatttaatggtaggttgtgagagatgtttaactcactcgagatcatctttctaaaaattttacatattgacagcaggctttgtcc

SEQ ID NO: 257931 - DNA, 970 bp, Cannabis indica
ttgtgacttgggtgctgggcccgatttcttggggcttgggtttgtggttttctccccaagtttgcttgagtcttcatttattttttattgatagagaaattcctagaacattttttttggcaaacttgatcggaaacagtccaggttgacaatatgtcaacctgccagctgggtcctagttatgcccctctgaaaattctatttggtccctagaaatagttgaatctcaatagttttttatttttggagaagatgctcgaaagaaatctttgaaaataccatcaaaaatggcctaagttcacgaaatatcaacctaggagctgggctctagttttggcacccaagagtgttgtttcttctccgaaaggacctatttccccattttcatcaagatgaagaagttgcaaaaattagatctctgatctgatacttggaaggtgctcagattgatagattgtcaacttgggcgctaggtgctcgggtctggggcctcgggcgcttaaaaatgaacttcctccaattcagattctgatgcgtcaaatatttctattgtatgtctagttgatgtccaaatgcatattttaacccatttttactaagaagatctaggaaactgaaaccctagttggacttgtcaacctaggcgtcgagcaaaaccctaagtgcccaggattgcttccaggttgcaggttcgtgtaattttaactcttagggcttggattaggttgctccatgtcctcatgatataaaatactaaaagatagtgagttggattcaagttattgaagttcaaacttctatctcgaatatcctgaagtccacctaggtgcagcgctagggttccctctcaagtttattgctacagttcaagtctactcaactttgtgacatcatccttcatgccaaatgttaaacattgatgtccatgtcaccatgaaaagtttctggattaacactcgccatttggatc

SEQ ID NO: 257932 - DNA, 541 bp, Cannabis indica
ttagtaagagaatatttaaaataataagtagactattttgccttaagtaaaaagatatttgtgaattgagtaaaaaaaccttaattttggtatcaatcagtattgttacattacatgagaataatgtttctacaatttccccaaatacagttgttgttggccaggctaatgaatcagtaaattcaacatctatgctgcatctgcaagacattagtaaaaatataatttaaaaagagaagcaacttaagaaattaatttcattgcacaaaatgtacattgtatagattaaagtaaagtgctacatttgtatagattagaacaaagtggtttttttctagagaaagaatgatactatttgagtccttcgtatcaatattttttctttcctctttcccttattgtatatacttatgtgtgtctatctagcaaaagcatcctccatacatatatataatatattcaatattcatttacatggaaggccacgtttttacaaggatacttacagttacattgtatcctgtacaatacaatatataca

SEQ ID NO: 257933 - DNA, 568 bp, Cannabis indica
tttttcccaatgaatgcacactttgtgggatttttttgatataaaataaatcttctaatttctcaactgatttcaattgattccattcatcttgaatccaaggatcaagatcctcatcctgcctctcactttcttcagtcttgacgaccattagttgatgaccaacttttctattatgtagctctatatggtagcattcatgagccagtagttggtcacctcgcaccactcctacacctgtcagtgtctgaaaacttcagggataggtgcttaattgaactaattgcccgtagtccaattaaccctggtcgactcagtagtatattgtaggctgatggtaggtcaacaattagaaagtcttgcattattgtagtggataaaagtgcttcgctcacagttaatgggagcttgattattccttgactggcgacattgtcgcctgttaatccacatagatttaccatgcaaggttgctttttggagccccattttcttcagtgtatccttataaaagatattcactgaacttacattgtccaccaacaccctttttatccttttgttggtg

SEQ ID NO: 257934 - DNA, 1115 bp, Cannabis indica
ggttccaccaacacttggagtcactcgaggctcttgaagaaacttcactgcaccttcggctcgcagagccttatcaaccatttcagcatatgtcattgcttcgttagttgtgattaccaggtcatgtctaatcttcgcatttagactcactagatacttttcttttttgctgaagttgatgggcactatacccgatgccaacttggctaaatgatcaaactttgttgtgtactatgttactgacataccctcactctaaaccagctcggtaaattctttttgcttagcactgtggaccgtctcattatagtatttggcattgaataagtcccagaattctttccagatcataacagtgacgtctcaagtgagggacactaactcccaccacacaagcgcgtctttctagaactgaaatgtagaacaggttactcagtcattttcgttaactcacatgaagttcaagattctttcaatgatagtgagccacttcttggccttcataacatccgggcctcccagaaaaattggaggcacttacttgcgaaacctctcatacagtggctccatacggttgccagtaacaggttgttctactggcaccactagaaccatagcgacctgaacttgtggtggaggcactgtaggaggaccatgctttctcagtctcataatctcttcatcttgctgacgaatccgagcttgcatttctacaaatctttgctcccaatctggtggagcttgaggtgggttttaatgtcgatcaccctgaaaccttccacggcctctgctgcgtccatggagactttggggaattcgatttctttgaacgcctctagtctcgaccctattaccctaactccttgtattttgttgggtgtccatttaataagagttagcctacgaacccataagtaagtcaggtcacacagcgatcacatagacttaataccgcacttatggcttttaaggtaacacattaaaataaacaattataaactaatatgcttcctaatatgctttactaaacaagtaagggcttactaaaccgtgagtcgagctattctctgatgatgattgtacatgtcttgacaatcttcggtagacaaacctgg

SEQ ID NO: 257935 - DNA, 374 bp, Cannabis indica
aaaataatttccaacacttctgacgcttcaaccatttgaagtacagaacaaatactagcacgggactgagcagtagtgttgggactaaaaaaggcagaagacttggaaaaatttacttgttgtccagaagcttgttggaaagtgtgaaggagagtattaacactcaaagcagcttccggagtggcctggcaaaacagataactgtcatctgcaaagagcatgtgagttatggaaggagcaccacgagccaccttgcatccttggatggcccgatttgcttcaaacttattaatgagtgccgtgagaccctcagcacacatgatgaaaaggtaagtggaaagtgggtcaccttgccgaataccgcgggaaggaat

SEQ ID NO: 257936 - DNA, 1108 bp, Cannabis indica
ataatggcctagaattttgtaatgacttgtttaataattactgcaaagagcatggtatcatgagacacaagtctgttaggcacacaccccaacaaaatggagtggcagaaaggatgaatagaactctgctaaataagtctaggtgcatgctgtttagtgctggtctgtctaaaggtttttggggagaggcagttgttactgctgcctatttgataaataggtgtccttctagtgcaataaacttaaagacacctgaggaaatttggtctggaaaaccaccagatctgtctaatcttagagtctttgggtgtgctgcttatgctcaccaaaatattgggaaattagaaccaagggcaattaaaggagtgtttctaggttaccctgagggagttaaaggctataggatttggctaagagatcaagggggtttaaaaactatcactagtagggatgtaatttttaaagagaatatttttccctgtttatctaacaaaactcctagtgcagatattttaactaaccctgcaggcatatcagattttgagttacaacccaacattcaggaaaatcctgatgaagaacctgatgtgaatcaggtggaacaagttcagacagaggcagaacctgtccaaccagttcaggtggaacctgaaccaaatcaggcagttcaagatgtaacagaacaagctgaggaacaaggggatcaagacctaagggagtatcaactcactagagacagaagtaagagagtttctaagcctactcagagatttagtttcaatgcatggaatgaagttctggcctatgcttttctaagtgcaatggagatatctaaaactgaacctagttcttatgaagaagctatgcaagacaagaactctggaaaatggtcaaaagcaatggatgatgaaatggattctctaaggaagaacaaaacctggaaagtggtcaagagacctgatggaaagaatgtcatctcatgtaaatggctgttcaaatacaaagaaggaaacaaacctggtgaacctacaagatacaaggcaaggctagtggctaagggtttcagtcaaaaggaaggaatagattatacagagattttttcccctgt

SEQ ID NO: 257937 - DNA, 561 bp, Cannabis indica
aaatatcataccccgctcacaatatgaccaattaaggtcttagatccccatccaccttgaatcttcatttgtcctcgatttttcgcattttgtttagctcttgcttgtaatttaaagtaaatttattgttaggaaattgaaaaaaaataataagttcatggatattaaatattataactttcaattaatacttactgttttaggtctttctagtaggcgataacctctgcccacacctccgatgtcaccatatctggacgtgatctcctggttgcttctttctcccaatattttttaaatattctccttccatgccttttttcgtatctgttctccagtctcgtaattcttttgacattgatttggtgacgtaatccgcgaatataggattattagttgtcaactcaaacttgatctggaaaaaaataaacattaaagtcatatatatttatttattttggtataataattttgtttgatctattacaataaaaattagaatgttaccgctattctgccccatatattctgaatgacagtatcctcaacgtcctcgaactc

SEQ ID NO: 257938 - DNA, 743 bp, Cannabis indica
atattctgttaaaccaagaaataccgttagatagacacttttaatatataaagatatctttaaaaattcttactcatcgagtaccactggccgataaatggcacttgttcagcatgcttggtttactcggattattatgagatttgaaatatgtccagatgataattgctgaaggattagacgctactcaatttggctctgacttaatctagatggatcaatagagagatatactcagcccaagttcaaatatatgcaatacgtgtcacctatgtgaaatttgggataacaatcttatttctagtctactcatttcaagctacgttactaacttgactgttagtgtccctttggctggtaccacccagtgtcccaaagattttagagttatttgcatcaggaaccgttgttttcattttaattaagaatttgacattgttttaattaatagggttttataccgttccacctataccgtttcaattgttttgctatatttttatagcaccacctctctctcttcccaatcgccaatccttcaagtctcgaacatcggacaccctcttccgcctcctctgtccgacatccaagaccggagcactaatcagatccacgacacccatattccttctcatctgacgaacgagttatactcatcaccttcgaatccacttcgcccaggtcaaaattcaatcacttaataacaagcaaagtaatagttatggtgttgggttttatgccct

SEQ ID NO: 257939 - DNA, 1038 bp, Cannabis indica
aatcaatattttggacttcgatcagatccggacccaaatccccccacgaccctagtgctaaacccgacctctgacctgaacccgaatccgaccccggacctatagacccgacgtaaataaaataaaaaatgaatataaaaatgaactttacagaacacacttttattttctgtttttaaaattgaaaaacaaaagtagttacaaaacgtatttttgttttttaaaaacaaaaattttactttcattttgtgattaaaaaattagaaaacaaaagtgttaccaaaaagtaccttaattaatgaaaatgccaaattcaactaattcctaccgaaaatggattaaaaaatgggaaaggctctctcgaaatttttcgttttaaattttttggtttcactacaagaaaagggaccttttatcccacttttttagttaacaaaaataaaaaatgagataaaagatatattgagactttttatcccacttttagatttggcctttcaaatatgcagcaattattttttagataagggctctgtttggtagaaagttaaaaaaaaatattaaaggcaaaaaaataatttcaagattcgatttttatgagtttgccaagcaggggttaaattttttagggaaacctttttatcccgattttaactaaataaccgggataaaaagtcatccctaaaatcccaaacgtcaaacctcgacatatcatggtcgacaaccccaaagtcccaacccagaaaccctctcgcccaaaccctcacgcaaaccttctcgtccaaatcctcgcccaaacccagaaattaaccgtcgcccaaatcgacattggcggtgccgtagaagataacgctagcaaagtcccgtttggtctttattcccaggtttgctctttctttttatttctttctattttcttagtttattttatctatttttgttgctgctgtttcttttcagatatacctgttaattacatctgttattgatgagtgagaacacaaaacacactcacacatctgctgtgttagatctagc

SEQ ID NO: 257940 - DNA, 548 bp, Cannabis indica
aaaaagaaattaagaaatatattactacttaagggatattgacgggttaattaattttttagcggtaaaactatttaaattttacttttattatgttatttacacttttattaaaatatgatattgttaaatgtcaacactactcacgatgtgtacacaagtatacgtgacaaaataaatttaattcaacaaataaaaaaatagataataaaattacaaaaacaaatatttataactcaaaaaaccatagctcatccatcccaattgccttcccctctctctttgttactctctctcttgatctaggtggaagtccagcaaacgaccaggcgcacggttgaatctcggcgacagtgatcgaatatgatcacaaaatcatgattcccattcctggttcacactttttctgcggcaccttcctctctttctctttgtttctcattctcggtgtaggcgaacggctatgcagacggttgaatctcggtcacgatggttggatatgaccacgaactcatgatcaccacccacaaccctccccctcccccata

SEQ ID NO: 257941 - DNA, 715 bp, Cannabis indica
ggacacaatgatagtggcgtcacttatgtcttaataagatattgatagtgtcttttgtccatacaacttttatcttttctctaatttatttaactaaaaaatttgaaaatttaattatttattccaaaacaaataattaatattttgacagatcaaaataaattttttcaaacttccatatacaacttttatccctactcttgatagtattccaaggtggcgatccgagaaccatgacctataattctaaggtccaataatcatgtttattaattttatgattactctactataaatatggaattgaactcttaataattatagaattatatttactgacttttactgtaatgtctattgatataattaatttcagtgattagccctccttatgtcggttcgtaattagttttggccatattacttgttgcccctatttttgcccaaactaagtattaattttttcatatttttctatatataaataattttctaatatatataaatataattaaattagaacgattttttaattgaatttttgagatttacacaaattttgtaattaaattagatcgattttgtaatcagatataattggctaattagtaattttttctccccgtaactttgacatgtactaaatcgtgtcccctgaacttttttggccattaaaaattccccctcgaactattaagattgttaaattttaaag

SEQ ID NO: 257942 - DNA, 506 bp, Cannabis indica
aattggactatgattaaaatcagatcattggatatgtcaacaagtcagtcataatgatctgagatgcctcggtcacgagctgtctgaagctcaatcttaaccaaggtgtctcgacccatctgcgcgcacgtgtgcacctgattgtgatattttcattctaaattcaaaaaatcataactaattcataaaaaaactaaattgaattttataaaagccttaatttattaatttttcatctacttttcacaaaaaaaaatactttcaaaacgaaactaaaaatatttatcatcgtaaaattgcaatttccatacaatcataaaatatgcacataaaccaacatgaacacatccaattcaacacaatcatttttttaaatccttatttcatgaaagtaaatcattaccatggctctgaggctagttgttggggattattttactagaacctagatttactaccatgtatgttgtttaacaccctaaacatgaatttctaaaacaatagaa

SEQ ID NO: 257943 - DNA, 997 bp, Cannabis indica
tttttagaccaaacgacattactctgtagcaatatagactcatatctgtttgtaaacttgtatgttcttggtttggtagatgaattttgatttgattgtaccccgagtaagcatccgtgaagcttaatatttcatgccctgttgttgcaatcacgagctgattgattcctagaagtggaaacagtccatgaaatcaatacacactcgccattttttgtttggcttgggtacgagtacgggatttgcaacccaagctgagtagaaagcttcaattatgaaattattgttgcgtagcttttctacttattcttttcgggctagtgctcgctctttgtcaaatagccttcgcttttgttgaattggtcggaagttgggatcaatatttaggacgtgcgaaatgatagaaggatcaattccgaccatatcctcatgcgaccaagcaaaaacgtccaggtttgctctcagaaattttatcaatgatgattttacttcgagaagcaaaccttttctgatttttagctttttggtcgggatatctagatcgatctcgatatcatctaattcttccataggtccaacattgctgtttgggtccccaattcgaggatcaatatcttcatccccgccttgggaaactccctacttggaaatgttttttcccttgtctgtgctctggctggaggatacttccttcttagccttggccactgcaaggacaccctaccccattcgtcgttggaaacttcaggcatgagtggaatatcgatgtgatagcctttaagtcttacgaagctggtcggcctagcatgacgttaaaggctgaaggaacatctaataccaaaaattgtgccataatagtcatgctcgttggaggttgcccaactgtgaggggtaggcgaattagccctagaggtgcaactccttgactagagaaaccatgcataggcaggagatagggagttagatctttgagctggagccccatcttttcataggc

SEQ ID NO: 257944 - DNA, 1255 bp, Cannabis indica
aatgatcctttatggatgatttaatcgagtagggagaaatttccgttttacccgtcaatgtatttatttaaaaatacttaggtagttgtaaatgatattctagtaatctaatataattactgaaatgagtactccaccatttaaactcgtttagccaagctctaaaaaaattattttttttacttctatgtgattataaaaactatagattccatatctatgattagtcctcccactcaactgcactaccgtgttcccaagatgtaagtgttaggccaattttattagtcagcttcaacgaacaggtcaaagaacacatgtaatacatttaagctagaacctaaccatcacaagattgagatctttgatctaagatcaacaaattgatatttacttagaaaatatattacagtaagttcatgatatcattttctattgtgaatatcggtccagtccgatgtataaccaatacgtccgatataagtttactttgctaatgccttgggaaagccattccacttatgcaagtgtaggtaaaccagattgttgattatcatatcagtgtaaattcagtgtactgataaatcatgggactaattagtttaatcacataatcatgattattttctacggtgtagacaacaccataatcatgaataataatgtgataaggatttaataaatttatatatcaaatacatgatcaagaaataaacatatgaaccatgcattacactaaataagcaataaaataacttctgttcttttattgataatgaaattcaagataacattgaaatatagttttagttagggtaataaacccaaaaactcccacttgcactaacataaaataatcagtacattttaaccaatcctaaattctttctgtgcttctcaaatgcagtctctgttaatgtcttggtgaatggatcagctaggttgtcttcaatgtcaacattctctaccagcacgtctcctctttccacatattccctgatactcctcttgtggctttgaggctctttactgttgttgattgcaccggtgttgtcataaagtaacaccagtgatttttctatatttggaataagccaagctctgtgaagacttaccggtccttgtagcctcagcagcagctatgtactcgacttccatggtagagtcaatatattgctgattgcttgacgtttctccaaatgattgctccacccccaagagtgaataccatctcagatgtagactttctatcatc

SEQ ID NO: 257945 - DNA, 1217 bp, Cannabis indica
gctcatgtagttagctatagagggataataggtcaatagtttattttttcttggtcgacgtactttttttatgctgattaagattcattcttgagttttttatggtatcaaagggcaaaagtcttacttcagaaaattgacttcaagtacctgccatagaagaatggcattactctcaaacgtgataacaattaattatatatgattatttgttgtgtcacgatcaaactatatagcatctaaaaattatttggacaatataattttttcttatgttttttaataactttttttttttctaaaacttttttaataggcctaagtttaacaaagattcagatacataagcactattgcttaagcaatataaatagaaaaaatctaaaaaaaaaaatcaaactttaaataaaactaacaatatgtgtgtttagagtctaattttgtgtttgccacttcaattaattgcaggtcaataatagtgaggaagactttgagaaggcattgaagcaatcaggtatactttgattgagatgtatatgactaatgattatgatccctttttattttaaagcagccaacccagacttgtcaaaaaccctacatcatgtgtatcaaaaaaaaacaatactaatgaatattagtatgaccattagtatcattcattaattaattaacaaatggataattatgatgtattgtataacgtagtgaattaattaattgggaaagagagaaagaaataagtcaagtatgtattgtctgaagtgaaagttaattgactatgtctctggttttgtttgtgttagcaccacgtatggctggattcctcgtcaaggtttttgtgtggtttatggagtcacggatctttggaactttgctattctacattttgaaggctaataatcttatacgatgtagttttaaataaataaaataattctacttgtcattctacttgtcttaagtagattttttttaattaaactaattattcacaccatgtcgtatcatcttaaatgataataaataactatttgcgaaaataaaataactacaacgtgtacacgaaaataaaataactattttataaaataaaatagttgcgcatgcagcagacagtttgaaccttgtttttgacttgttaatctttttcaaaattttataggatgtcttaaataactacaacgtgtacacgaaaattaaaaatatatatatat

SEQ ID NO: 257946 - DNA, 1023 bp, Cannabis indica
ctctctatctcatctttcagttgccgacactctttggtagtatgtcctatgtcttatgaaatcaaaatttttttgttgaatctcgtttatatctcgcatgtctcattggttcagggttgcgaaatgttttcatttgcgagaaagatgttttcacgagtttcattcaactcggtgtacattatgtaaatcagaacatatttgtcgtgctttttctgtttcttcttatttttagttgattctctcgagtcatattttcttttggtgtttgagacacttggattatctactttaatggagacggtacttgttgtggtagtacttgtgctggatttgtttccctagctagtcttcaacaacttcatctcgttccttacttcttctttgcgcacaaacactcgcactctttcgttgaattcattaatgttccttactaggcgatcctataagtcatcccacaattcacccccagctgttgaaatatcaattgtgatccctgcttgaaaggcagtaagctgaatactgtcattcaaatttctaacttttgtagcggctgtgctgaaacgactaaggtaagcctttagtgactcacctagttgctgctttatgttagttagggatgatgcttcaggtcgtctatctctggcagcttgaaactatttcttaaagtccttggacaaatgttcccaagacgttattgaatggtgagttaacttattgaactagctacttgctgccctagttaaagaagtcagaaataaaatgcatcgcaaattattcaagacgttgctggctcacattatggtattaaagttattcaagtgagcgactagatttgtggtcccatcatactgcgagacgtgtggatttttgaatccctaagggaattcagaattcagaatatcaggatgaaatggctcggtctcctcattcgagtcataaccaggtaatttcccatgttccccatcctgatattttctaagcttatcctccaactcaatgatttgcaaccggatgggatccact

SEQ ID NO: 257947 - DNA, 1139 bp, Cannabis indica
gtttgggtcccggtctaggttcgggtttagggtttgggtctagatcctagtcctagtcatagtctggttccagttctagttgtgtttccaagtttgagcttgggttcgagttcgggtcggggtttgagtcctagtccgagtttgggtttgggtctggatcgcggtctagttcggattggggtccaggtgtttgttcgagtgctggttttagatctggttctgggttccgcggcctaggtccctggtctaggtcccccatccaagtccggttcctaggtctagtctgggttctgttctaggtctcggtccctttcttggtctaggttcaggttcgggtcctggtcaaggtctggatcctggtctaggtcgcgtgtctcaggtcccggcaagggtttaagaccaggtttggtccaggtcctagtcctggtcgtggtccaggttctggtctgcgtttgggttcagttctagtccaggtccgggtctcaagttcgagacttagttgcagttttgggtctcgatcccaattctgtgtccccgagtcttgttccatgtttgggtctgagttcaggtttgggttcgggtctcaagtcctagttcaggtttggattaaggtttcgaacccaatctcaaggtgggtctgtgtccttgtcttggtcctcgtccggttacagttttgggtctgggttcaggtcctagtcctagtcctgctcctgggtcccgatttgcttctagtttcggttacagtttcaagtcccggggtatgggttctggtcgagtttgggttcgggtcctgatttgggtccgagccgaggtttagttctaggtttcagtctcggttagggtctaaggttttgtatggttctgggttcgggtccgggtgcacctctcggtctcgttccaagatcccagtccagttctagttcaagtttcgatttagttctcgagtgtgggtctgggtctgggtatgtgtccgagtcttggtttgagtttgagcttgggtctgggttttggtgtaaggtcccaaatcaagacaccgacaacaggttgggtccaagcaccgagtcttggatctcaggtcctaaggtgacttctaggtccaagtttgggtctggggtcgggtcccgtatacccgatccaag

SEQ ID NO: 257948 - DNA, 487 bp, Cannabis indica
atattctttcattgatcattattcattatcaagatcattattagttctatttaaatttttaataccaaaatattcaaatcacagtcatcactaactcaaatcaaatagctcccccaacaacaatatcatcttcatctacacctgttatgtatacatatatataatacaatctctattttataataaatacatatgactaccaaattgcataattcctcttcttctaattttcttctactattgtttcttattcaacctaataacactactactatacttacattcacaagaaagggataagaaatcgtatacaaatctgtatatatatgtcaaaatgaatgaaaatcatgtattataatctaaaattaaaaaattttagaaacccaaaagaggaattatatatccattgaataaaaacaaaaatgcatctataaaaatatgataaaatggtttaatagatttaagagagagagagagaaggatacaa

SEQ ID NO: 257949 - DNA, 1505 bp, Cannabis indica
tttgatccttgagtaagttctcgatttcttttatgtttacattgcacatttactctactgaatgcaactttaaccttgctatagaagatatataggaaaccctaagttttagaaactatgcgattttcctttgtaacgattcatgcgatttcatcgttcataatgcttgctttttgaactgcataatgcctgtccttcatcttgcttatcctaagcttcatgaaattttgttccctagctcgcaaaaatttcaaacttttgagttttacttttcgtcgaatactcttattctttaatctgttgagtactcctggtcggcatatttgcctgttttaatgttcgatatcccgaccagacactcatcttgtgtgttgtcttttgtagatgaacccaggtgagttttggggaagcgaacatcaaatcgaccaggatctacttcaactcctgcacaaagatcatcctcgtctttgttctagtccatcttcttcgagtgacggacattttagcttaagtcttccatcaagccatcggatgatggctcgtacaaaaaagacaatgcgtagaatcgacgcatctgaccctcaagtggcttggcatgccaacttacctagtatctaacaagatccatccgcttaggaggaggaggatcatgaaggggacgccgaggtccaggagattgaggagcaggacgatgttcgtctttgcagtgcctccgaggcggaggaagaggaggaggttgcacccccaaactatgggggatataatgaggttggggagctagttgatgcggatcgcaacgtcctggttgatggagtggattatgccagtgaggaacttactgctacagttcctcacagaaggcaaggtgctctgggtgccaggtgggtgagccctctgtcaaaggttactgaggcacgcttacgggatcttgaccacgatggctacctgggcgagttagactgttacattcctgcttataacaatcgagccacaaaccttgaaaggggaatgtgtgcctggtcgggtgctcatgccaagcaaggggcattgctgcctttgcacccatactttaggaatgtggtagacttcttccacctctgtccgacccaattcaccgccaatggcattaagtctctgtttgccctcttcgttctctacgcctcccagaggtgggatatgccctctccccatgaggttagctgggttttttatttgaagtccacccgtaagcaaggcaggtcggggtacttctatttctcttagccatacttcaagtggttgacgggcacaggggataaggccgttagcaaaattgggcattttgttgacgagtacttcatggtggaaggcatgggcaccacccatacacagttccagcagatccccacataccaccgccctccctttacacttgctcttaaggaaagagctcaaaggcttgctcaactgctgggggatgatcggaatatcattttgttgactttcgaggacaactttgtgaagta

SEQ ID NO: 257950 - DNA, 1233 bp, Cannabis indica
cagctaccacaagggtgcccgccaaatttcatgcccttcgcttatgcgccaagcgccgccgtgataaccatcgtatgcaagcccggaagcggcaggcttgggatgaggacctggagagggagtgtttggctaacgagaggcgtatggaggaatgtttaagggagggggctcccttttacccccctggcttctctacgggttgccgtcggtgcctaaggagggttgttcgggggtctatcgtaatctcgggttctctatgcatactctgctggcaccatcccgaccgcgagcgcttctgattcctaagtttaggttttgttaggtatttgttatttccttgtgcatggctttcatttgtatacaatcgctgtttattatgtcttttcttctctctttttttttgtgtaacttgtgtttaggttacgatcttttaatgggtatgtatttattactcttggtgttctttcctatgttttgtgttcgtttcatataaggttgggaaagctgcgactacgttaagtgtatttattacttatcatttatacatatatttatacgtacttattccgtgttttttttttctgaatagggtgctttggaaagtggaaagacatatatactcttagggccgcttcttgaaatttgggtacacgtgttcgcttggcacgtgttttaatgcaaaaagtgacttttcacttccgtttttgtggcatctttattaactgcatgcaatcttttagttgtataaataagcttctagttgagcttttttctctaagaattctttcgactctcttttctttttctgggtaagtttagttaagctctttgtttatcctttctgcattatggcttccctacttaaaaaccagatgcctcactcaaaagagccttcctcctccaacattttctcaggcttgcagcccctggatcctgcttttctttcattgaatcctttttcgagttttcgtgacttcgaacctactacgcttccccccattgcatttttcagaggtctgcagttgtccctatttcgagcaagcagcactgggcttagggacttacactgcttttcgagtcgaagttgcgccacctctagctatgtgcccttttgctatttttcctcctttgttggcaccagctgaggcggctaaggaggagcccaaggtgtcagagggaagctcaactcagacgatggcgacttattatcccgagttcgagttactgcccagt

SEQ ID NO: 257951 - DNA, 1068 bp, Cannabis indica
gcatcctccgaaatggatcgagagaccaggtcatcaagcaggggatcagtaggggtctcacgcgtattcatatatattttctcacatcaaaattgcaaagctcccaaatattccaaatcaaaactaaaagctttttatatttataatatgttataaggatactattattactgctgttagaaatgtttattggactacatctaatatttttagacttattcagatctgatccaattatatatattagatgttatattttattaaccaatccgatccaattaatttcagtcatctaatcgattcaatacccaatgaatgttggattagattgattttatcaattagttatatttcatgaatatctattgatttaatttgagtttatctaatattttagacttagtatttagtggatcagatcggatccatccaatattttagatttagtatttatcgaattgaattggatccatctaatccaaaatagaaaagtaaatttttattgttaattttcatatatacatatttttttacgtgtaacaatataaatgagttttttcatttttacactttaaaataattttttttagattcttacggaatttcacacagaaactcctatagtaactaacggagcaacctaaattgcaactgaaatccgtataacaacccacatagaaactaccgaagcaacccaaactgtacattttaaaaaaaaaaatgttaaaaaatagtatatagagtaatttttttaaatttttttgaaagggaattaatttggcacttttaagctacataaatatataattttttttaaaataaaaatgaaaacttattggcaccaatcatttttgaaaaacaatgtcttctttttccattatgagttgcaaaacgtgtaataatatgtggtgttcgtattatattttatttgacctatttttatattttgtatcaggcatattgatttatttttgacctgcatctaattatctcaattttaacacaactcgtaaaagctgtatcgtgttcgcattgacatacttttactcgtttattgaagctaaaatt

SEQ ID NO: 257952 - DNA, 558 bp, Cannabis indica
gggtttcagggcccatcgccgcaaccacggtttggcttgccgcggtgaggcccagcaggttggggtcgtcgcgacgagggaccttggtcgccgcggcgagaccttgtttttcctagaaatttttattttctcgtttttgccataacttttgactcgagactccattttggatgttcttgatatcgttggaaagctcgtttcgggctctatatgttaatctataaatagaattcaaattatgtgtatatgtgaaattaaatttggagattaaccctatttgtgaaatctcaagaatgtgtgagcaggattactggcgcttgcttaggagcacccgagaatttagaatctccacatacttggactaccaggtaagacggtaaactagcacatagaagattagtgcagtggcgaacgtgtatgtaattttgtatatgctatgcaagaaaccgaaaataggattattaccctaaaagttgacgattatgtgatctagggttattactctagaatttaaatggatatgaatgcaatgttgcattgtatatgatgatataaaga

SEQ ID NO: 257953 - DNA, 1056 bp, Cannabis indica
gggttcaaatcccactctcaacacttacttaacccttctttttttttttctttcattttattgttttcgtacggttccagtttaattttagctactccaattagttttttttttgtctctttttctattatttctttcacactcttttatcattaacaacaatacaatcttcctcatttagtttgtttattgagatacttgaggtgaaagtatttaaattgttatgtttgtaataaccaagtcctgtacttaaattatttctttaagagcaaaagtatctaaattattatatttatagcctatttcatttatgtttttagtgtttaaatctatttacatgatatcaaattttctcatgttctaatatagaaaaaaataatttagatatttttacattttaaaaaataattggagtacttacatgccacaaatataataatttaaatactttcatcgctaaaaaaataaaaactgtttagttataattgtagatactaaaattcacaatcaattgaagatgatcgtacgcgggcaccgacaacttatagaacaaagaaaagagtaaccgaaaaattttgggacaccgagatggtaccagccgaagggactctaacggtcaagtcagcaaaattgttaacaatgtaataaaaaagatgatagtaaatgactgaactaagttaccatctatcttgattgcggaaataagtctgtagtttttgagatgatgagagagtgaacaataagtaaaaagtattgagatgactgaaaattgatgtctctctcatagactgagagtggctcttataggcgtccatagaaaggcattactcatgaccgctcacccctttgtgaagcgctcctctcccacttgatcagggagatcgttatttgcgtgatcagtttgactgatccctttagagatcgttggatgagtgataagacttagtctcgtatacgggtaggatcatcgtgagctcaatgttgggtcatggataatgttaatgtctgacttgactgtcttattttaggtctgttgggcttggtatgttgatcgta

SEQ ID NO: 257954 - DNA, 533 bp, Cannabis indica
cacaccaagttctgatggaaggcaacttagaatggcctctctgccttcgattctgacactgtctctcctagtcctgcaagttcttcatctgctgcatatgatttgcagcctcaaagtctgtctttagctgtcaatgtaactagttcagactccaatgtttctcttttttcattgtggcatggcagattgggtcatccatctgccaagactgtcaaaagtgtactgaatgcatgtaatgtccctaatgtcaataaaactatctttgatttctgtactgcttgttgtaaaggtaaaattcacaaattcccctttccaaattcagaaactaagtacaccaaaccattacagcttattcactctgatctttgggggccttccccaatcttgtcatcatgtggttacaaatactacatacattttatagatgcattctctaggtatacttgggtgtttttattaaaatgcaaatcagatgccttagcaacctttctaaatttcaaaaaccaggtggaaaatgagtttgattgtaaaat

SEQ ID NO: 257955 - DNA, 1012 bp, Cannabis indica
agaaatttgtttagaagacactcacagtcttctatgcgatttttttattgttaaactttggcatttaatttacaagtcttgttcactttgaaataagcagaggaattttctaagtgacacatgtttcttatttttaaataggcattcatatacatgaatataggagccactctcacacttgtgagattttttgtttagccagttactgaaaagaaatcacatatatatatatgtgaatatgtaatatatggttggcgtctatacacatcctcgatccacaacttatgtgcataccatgtataaatcataccaatcccttgataataatgacgagaccttttgtgcatatgatcattttttatatgaataataacatttatggatatatatatatgtatagtcactgatcacctatttttttacagagagaattttcaccattaattatcacaccaacaaattgaatttgattaggatatactcgactgaacctacatctttttttttgagtgtgcagtaagtaatcaatcaacttccttatattactctcatttctttggtatgagaatctacaccttatgataattttgatggtataataatttctttaaatcttatattcttctcttgggttatgtatcacatgtcgacttattttcagaagtctagtgaactaaaagaaaatcatagggatttacaataaattggacggcataacaccataaagatttatattattctcttcgattatatatcacatattgacttattttctgaaatctagtgaatcgaacagaattatagaaatcaataatgaaattgacagcgtaaaaatattagttttttcctttctctttgattatatatcacatcaacttatttctgaagtttagtgaatcaaaggagattggaatgactatttgcagtaaacaaaaataaaagagaaagaagaaagagaggtagatccatttatgagcttgtaaacaattgccaaagatattttttctaaaaa

SEQ ID NO: 257956 - DNA, 563 bp, Cannabis indica
ttcttgctcttccaagacacaagggaatcaccaagaaaaacacaaaaaccagtggtagaccttctggtgtcgatgcatgatgcccagtcagcatcggtataagcctttagtctgatatctgagtttgcagagtaaaacaacccctgcccaggtgttcccttcacatattggaggaccctttgagcagcattgagatgagtagtcctaggagaagcaagaaactgacttagtttattgacagaataagctaagtcaggccttgttatgactaggtattgtaacttcccaatgattcttctatagagggtaggatcggccagcttgtcatcactatcttggctaagctttaaattaatttccataggggtatttacagatttgcagcctaaataccccagatcctccaatagttgcaatgcatagtgtctttgtgatacaaaaatccccttattagaccttgcaatctcaaggccaagaaagtacctaagttctccaaggtctttcaatttaaatctattattgagtctgatttttaaagcttcaaggtctttgatgttgttgct

SEQ ID NO: 257957 - DNA, 518 bp, Cannabis indica
ctttgcagttgttagttttcaacttaatcagaaatttccatttaaaatcgttgctctgaattagtcttatatgtttttgctttaacaatttacttttcagatgaacgtattatctatctaaaagtagtcgttttgtgctatatataaatatattgagagagaagctattaacaacaaagtggctgtagtttagtggtgagaattccacgttgtggccgtggagacctgggctcgaatcccagcagccacattattttgtctgaattattttttttgggttttacaaaaatattaaattttgaataaaaatttacatttatactatcacgagaaaagttatatttatactgtccttgcttttttttttattttcttttatattatagatatcgaaaattacgagacttccatttttcacacctacgaaccgaactaccctagcaacacgagacactcgaaaaacaaccattaattccggcgacataaagctaaaaaagtaaaaatcgacgtcaaataat

SEQ ID NO: 257958 - DNA, 1136 bp, Cannabis indica
agcagcaatgttggacctgtggaagaactggaagagatcaagatcgatccagatattttggccagaaagctaaaaattggaaaagatttgttgctcaaactaaaatgagcattgatcaaatttctgagagcaaacctagatgtttttgcctggtcacatgaggatatgatcagaattgttgcttctgtaatttcgcacatcctacatattgatcccaacttcccaccagttcaacaaaagtgaaggttgttggacaaggagcgagcactagccctgaaggaagaggtagagaagctgcgaaataacaacttcataattgaagctttctacccagcttgggtggccaatcccgtactagtacccaagccaaacaaaaaatggcgagtttgtattgacttcacagacctcaacaaggcatgccccaaagactgtttcccacttttaagaatcgatcaacttgtagatgcagcagctgcacacgaaatattaagcttcatggatgcctattcagggtacaattaaatcaaaatgcatctaccgaaccaagaacatacaagattctgaacagatatgggtctacattgctacaaagtcatgccatttggtctcaaaaaatgctagagccacataccaaatattggtaaaacaagatgtttaaagagcagattggacgaaatatggaagtatatgtggatgacatgctcgtcaaatccaggaaggcaagggggcacatagatgacctgtgcgaatgcttcaaagtccttaggaagtacaacatgaaactaaatcccttaaagtgctcctttagagttagctcgggaaagtttctaggctttatagtcaatcgcgttgaattgaagccaatccagagaagattcaagccctcctgcatatgaaatcgccgagaagaaccaaggaagtacaaagtttgactggtcggatccccgcacttagcagatttgtttcaaaagcaacagacaagtgtgttccattcttcaatatcctaggaggaaataagcaatttgagtggacagaggaatgtgaaaaagctttttaggagctaaaaacgcaactcgcaaagccttccgttctctcaaaacctctggacggagaagaactcgggatatacttagctg

SEQ ID NO: 257959 - DNA, 568 bp, Cannabis indica
tcatcatcatcagaatcttgtgtcactaactcatcagatgatttatcctgaatcaaacaacagtaatgcaactaaaataaaataggaaaaaaactaaaaacaaagcatgtaaaaacataaacaataaagtctaattatatacctcatcagaaggtcgacgatgaatgacattaactttttcttgaatatccttaattacagtcattacagacttgaaattaaggtcaacaaaacaccttaaggaaatgaagtctacggccaaggattcttgattcgaaatgaccagctacaatttagatttcaacaaattaatgtcctctgaatcaaattttttagaagatgaacaactctcaaatgtttgcttagatataccgggtcatcaatagattcatctagaaataaaccttccaattgtagcttctgcctttcctcatcagtaggacaaatatttttaatccttaactgaaaatcataatcaaaacaacaaaatatgaagcaaaaacaattaaataacaaaatattaataaaacaaaacaaaacaaaataaaaacagtaaagaaactgaaaa

SEQ ID NO: 257960 - DNA, 1732 bp, Cannabis indica
aggagtgtgttcgttacaagtgggggacccttgtaccctttggtgctccatccagacatcattgcatacgccaggaagtcattaatggtccacaaaataacagctctcagtgtgaacacagtcctgttgtaagcatctcgagcttggacacctgaatcccacaactccctcaattcatcaatcaatggtctcatgaaaacatccatgtcttttccaggggcagtgcgccctggcaccaaaagatataacatcaacgactaaggtttcatgcacttccacgggggaagttgtacgggactaaaatagcaagccacacactgtaagcgttactcatgttaccaaagggattgaacccgtcggtggccaatcccaatctcacatttctagtctcacgtgcaaaggatgtatgacctctgtcaaactacttccactcttgtacatctgcagggcgtctaagcacgctatcctctttaggtctcttagagtagtgccaccgcatgtcttctgtcgagtgtcttaaactatataacctcttcagtctcggaattaaaggaaagtatcgcaaaacttttctagtaactttttttccgtctccctttctctttttccaacgactctctccacaaataggacatacttctttttttttttcattttcgttccaaaataaggcacaattatacttgcatacatcaatggtttcataacccaaaccaaggttacgcaatttcatcttcgactcgtaatgggacttggataattttgtaccctctagaaataactcaatcaatatggcgagtaacatatcaaaagaatggttactccacttattgagaactttgcagtgcatcagcttcaccaaagcgttgagcgctgattttttgcaacccaagtacaattcagttttcatatccttgaacaaatcgtcgtacttaccaccaccattcacaggggctcattaaaggaagcagtggtagaacttggatcgtcaaaactaggatcttctcttaaaatatccgccattacatctgccatttcttcttcttcgttgtctaatatttctacagccagttgcgtgaacgactccccatgaaaataccaagtcgtgtacgatcgttggatgcaattcccaaacagatgtaccgaaatattatcgggagtttcaaagttcacattcagacatctcatgcaagggcatcgtgtaactccgacagaatttatttgcattcgagcaactccaacaaactcatccacacccctacgaaactctacagatcgtctgtttgaagtcatccagcttctgtcgctcaccatattgctacacaatataaaaacacacaatttaaattaaagttaaaaatgtgtactactccaccttgtcactccatttctaaaagggtaaagaacctatcccattcaggtttataatatacatatagtgcaatctattctcttaagattgcttagtttttaaaaaaaaattggcagcacctccctacagttctcataagtaagcaaactattaccaagtatgccaacttacaagaacatgcaacgagatggtgtaccgaaatctttaacaaagaaataatcaaatgagtaatatatcacactataggtataaaacaagcccaaactatccatgtggacataaatagtcctggctaatttggagaagcgtatttaagagtcctttctgactcagcctctccaaacgggtctaaggaaaaat

SEQ ID NO: 257961 - DNA, 1251 bp, Cannabis indica
tgaaaattaacattgaaattttaatattttttcttcgattggatggatccaatcaaattcaatacatactggacctaaaatattagatagatccaatcctatccaaaaaatactagttctaaaatatgggataaaattaaattaaactaataaatatatttgaaatacatctaatggataaaactgatcttatccaacatcaagtggatattggattgattggatgactgaaattaattaaatcggatcagatggtaaaatctaacatctaatatataattggattagatctagataggtctaaaaatattggatgtgatctaatgaacacccctagttcctaccatgttggaaggaccacgactttctttacattacactaaaccttaaggctcaaaaatattgagtggctgtagaggtggacattttgaagagtggcgacttcagatgtacgataatgatctttcttataccagcaagaaagatttggaagtcattatcaaaccctggttggacctgttatcacacttattttcgtcaactagttatttcgaactcaacaattgcatccctaacattacattagaggatagtagccaattactaatgatgctttggaaatgcatgccatgtgaggtcatctcctagggtaaaaagaagtaagtacctacctccttctttctttatttcaattattagtaattcattagttttactagtaactaaaatgtattattttattgtttgcagtagtgattatgggatgtacgccatcgagtgtgttgaccttagaaatttaccaaccgacagcggagtcaaatgtaatgctgatactttccacatgttacacatttagataagaaaagtaaatagccacatgattttatagaaattcggcccccttagttagtgggtaatgatctactcctctttagttgtattgatatcgagagataatactacttagatcactatagtgatgggatctaaagtggctctcttaagattacaatatatgatcagtaagcaagtgtcatgagagagagatagagccttcttggaggcatgtgagagagagggagagagccctttgggcatgtagcagaaagggaaaagagaagattggggtttcaaacttagagttgagagcttatgacttagggttttagagataggctaatactctttatatagtagagtttacatgcctaatatccttagaaaaaggtaaaataaagttgttatttacat

SEQ ID NO: 257962 - DNA, 570 bp, Cannabis indica
ggggtatggcgtcttcaacactccttcccgaaataaaaggactgcttgaagtctgtctcactcccagtgatactttcaccctttgatcttcttaagcaaaatcatcgcttaaatttttatgcaactcgagccttccctcacggaagtcggagcttgccttataaaaattcaacatgactcttgcgtgcatgttttttcttgtgcaagaaagatcactaggggtatggcacgtcttcaaccctccttcccggaaggaaaggactgcttaaagcctgccacatgcctagtgatgtttcaccctctagctttggcaagcaaagtcattgtctgaatttttttgtgcacctttagcctttcctattgaaagccaaagtttgccactacgaaatttagcatgactcttgctaattgaagcggaccttagcacatgatggttgcccacgtaaggacgcaggaccagctttccctccaggaaacaaaaagtttgccatgccgcaagagcctatactttcccttacgacgtccatgtcatgaaggaaccatttgggaccagccatccacctaggttcc

SEQ ID NO: 257963 - DNA, 548 bp, Cannabis indica
gaccatagtctattcattagacatacaccattatctgtcacactcatccttgtttatgtggatgatatcatcataactggcagtgatcctagcttgatctcccattacacaacagctcacaatgctcaatttgctcttaaggatcttggcaagcttcatttctttcttggtattgaagtgaccaatactgaagcaggattacttttatctcaggccaaatacattcgggacttacttcacaaagctgatatggatgaggccaagtcatctaacatcccaatggttagtggtctcaagttatctgcctatggcagcccacctgttgatgatcctcaacattataggtcaattgttggtgctttacaatatctagtgatcactcggcttgagatttcttatagtgtgaacaaagtgtgtcagttcatggccaaccccctacaatcccattggaatgctgtaaaacgcattcttaggtatctaagtagcactcaggactatggtcttcatctacagaaaaccaccacactatgagcttactacctttgtga

SEQ ID NO: 257964 - DNA, 620 bp, Cannabis indica
atataaaggaaattttttcaagtttctgaaatcttctatttattgcaccaagttgtaattaaaatcgcaatcaaaatattatagataataaccgcgagtacccatgtactgcgaaaatattataaatagatatccccgtgaggatataagagtcgttcaaaataaacataaatgtaaattcgactaagtacaaggtgcgagtacccttgtaccgcgtaaacaaaaaaaaggatagaatttaacacaagcaaataagggaaaagtcaagtattcggagcagacccatccacgactttgctgacggcttcattctcgacttcttcagcctctgcaatctcagcctcctcgagaagattccctccaccaccctgagtttgtgtgggcgacatggcacgaaaagcctcagccatttcagcggcttctgctccgaggattgaaaagtcgaagtctagaatcttagagagagtggtgtagatgtagtctgagaccgcctggtcatactgcccttttttccatttctccttctcgacctcccaaatcgcgagacatctccttcgatcttcgtctgagcgtttcttagcctcgagctcgcttgctccttggccttgcaaagttcctcg

SEQ ID NO: 257965 - DNA, 515 bp, Cannabis indica
agtgtccttggcgcttagtctcacaaagcatgtagtagcttggtaaagcatgtagtagcttggtgtggtgtggtttgtttcagtaataatgaaaagtgcccttggggcattttttgttgtgtgtttaatttagctttgagattaatataaggcattttcttgtgactgtttgttttatttgtttatgagttcttctctggctttgcatgaaagggtttctatgatctgtgcttgggatttgggagtgaccataattttatggaagaaaacaaaaacgatgcagcgaaaacaaaaacaggaaagcatttatttgcaaattaaacaaataatttatttactgaaatcttattatatatatgtacatacaaatataatacaatagacggggctggctaaagaccagtaaaaaaaaattaaggatggacgtgtttatttattaaagaccggcgaacaaagggcatctctttgctcttgctccgactccggctgactaagggcatctccttgctctttct

SEQ ID NO: 257966 - DNA, 512 bp, Cannabis indica
tagtcaacaacctaaattctcagtctctctttctttcttattttattgacaaatttctgagtcaaagaaaatataagtaaaatatgaggagaacaatttaaggtattttctagataaaataattaattaatattaatttctgctttatttggaggaatgagagcatcattatggaactttccaaatcctagctaatccattaatttatgtagaatgaaaaatgaaattataacatatagagaaaaggtgattgttgaatttaaatctagatcctcaaataaaacgaatcaactgatgtgatcttaattaattttaattatttgagctgattcaaaaatttattaaaataaaatcgctcttatgacaaagtgattataatcatttaaaattttaacgatgaagtacaacataactcttcaatctataatataaggacatgcgtgctttgcctattagcaaaatatacacgttcttgggagtccgttaatgccgtgtattgggtatattgggga

SEQ ID NO: 257967 - DNA, 792 bp, Cannabis indica
ctgcacccaatggaaggtttagtaaactttatatgtgtttatttcattgtttcagtattcatattagggtgttaatgaaacatacttgttagtaaatctagatcctggtaaaatatatccaacagcaacatcttcggatggttctgcaacgacttcgagaacataagttatatgccaaattcaagaagtgtgaattttggctatctcaagtgtccttccttgggcacattgttggcaaagacgggatcaaggtagattcaggaaagatagaatctgttagggattgaccatgactgaaaacagttacaaaagttagaagtttcttgggtctggctggttattatcgtcagtttgtagaagggttctctaaaatttcaacacccttaaccgagcttactaaaaagaatcagtattttgtgtggacggacaagtgtgaagcaagttcaggagctgaaacagtgattaatcacaactccagtgttagccctactttctgataaagagagttcgtggtttattgtgatgcaggctaatcgagttaattcttatgcctctcatcagttgaaagagtatgaacaggaatatccaactcatgatctagaacttgccgcggtagtatttactttgaagatttggaaaaattatctctaccgagagagatgtgaaatttatactgacaataagagcctcaaatacttctttactcagaaagacttgaatatgagatagaggcgttggttagagttggttaaggattacaattgtgagatcctttaccatcatgggaaggcc

SEQ ID NO: 257968 - DNA, 665 bp, Cannabis indica
ggtacctcttggtttgttctgatatgattccagtatgacatcagttgggagtgtagtcggtgctccgtcgatgtgtagatggaccaatgcaagaaattctcctatttctctttgacaagctatctcgtgagacttttgaattgatgatgacaaccctttagtagttgtggtatgataaactcagtattatttgacaacaagcagtcaaggttggattttgttccaaatttagcccttaaccatctatcaaaatttaagaagtatggtcggtgaagccttcatttgggattgggccttgcaaacccagttgcaaactgacctactcgatggattccacctcctcttgaatcctttactttagcgacggatgcttcaatgattttgggaaggggttttgtcagattgggaggagtgatacgggatgcagagggtgtggttcggttggcgtggtcatcaagtgtgttaggtgatttttctactaatgtggcggagctacttgtcattcagctaggcttaactcttgcacatcaatttaatttcagtatctccattattaataagctccacattaattttatttttcagtctatttattttttattagttgctgttggtggtgattcttgcagtgccattctgcattcagtgaatggtgttgtccatac

SEQ ID NO: 257969 - DNA, 826 bp, Cannabis indica
ataccctaaacagtctttcgacagagagctcgattctaaagaagaagagaaaaataacaaagacacaaataaagaagattctacgcatcaaacaacagattcagttaaagttttttcccagaaatccagtgctcaaccaagaagttctatcctaacatgcaaacaaacggtgaaaggcacaaactgtccaaaaaacttacatgaaagttgagagttgggggtcggcgttgatcgacggtacaaagtggattggcaacggcgaaggaaaagcaacaagaaatctatggtgtctaaaattttttctctccaaagtgttcttttgaaaaaatggcaaagtagggaaagtaaccaaatgaaggaggaagactggcttttataggccataacgggtacaaagcagctatgatcaggcttcatcgaatggtgggaatcgaatcgattcgcattctgcagatctaacagttgggataaatgctccttagggccgttggaaacgcttcagtatttgtttgacaccaattaaatgcgttggatcattaatggacgggaagcgaatcgttacctgcaaaaagcaataaattttaatgaagactgtcataaatgcagcccacgcgcccgaagcacgtgccaggaaatcaatgagacagctggaggcaccttgcaagcctcgtttactttgcaccaaacaagacttgggggaaatgttgcccttaatttcgtccaaaatacgtggaccaatatgacaacgacacgtggatctaagaagcacgactattagatgaatcgactaagtctttttgcatcaggagtgtcaacgagaatatgc

SEQ ID NO: 257970 - DNA, 510 bp, Cannabis indica
ttgttcatttcaatgaagccatggtggcttagcaggcttggcgaatccttaaaaaatcccagtttggttcttaaagctcgttattttcctcatttttatatccttgaggttgtccctggtcataacccttcttactcttggagaagcattttatggggaagagacttaatggctttgggggtgatttggaagtaggtaattgaagttgtagtagaactcttgatgatcattgtctccctaatcacaaacattaatctcttaataacaatgattatcctttttcttgtttattgtcttactttattaatgactcaggaacttgggatgtagttaaattgcggtcatacttggatgaatcaatggttaatgatattcttaaggttcctgtttctgggtgttatggccatgatgatctgatttgggaaagggaaagttctggtattttcactgttaaatttgcttaccatttggctttctctcaacaggatcttccctctgcttcttcctctt

SEQ ID NO: 257971 - DNA, 1275 bp, Cannabis indica
acataaatatccacttggtacacaatacaagaacatagaatttttgttctacatggctgttatagtgagaatttctcacctagaaactcaagaccaggctcccataaaaacgacacgtggacttactgtcctcgagcagggctgagatgtgagtgcaaacctctcctgaaccagactcaacaggatgatgtgaccttgatagtgtctagtcgcattcgagtagcttgcatggagcaggaccgaatatcgggttaagacttgcatataccaagatttatgtgaggactaaaaaggtcttcctgtgaagaggtaaagatcgcttttgtactcagggagctggtctggatgaccaacaacttcgataactcgataaggactcgcatgtcttgagttatcgacttactataggatgttcgtataagcgactcgaacaggacgtagacatcccagactcgactagtcttgtgtgcatcctaagcctgcgagcttatgcgagaatatgaacaggaaactcgtactataaaagtcgcatacgttactgtatttagtgaattggaccgaaactattcttcatttattgtatttacattatttattgatttaaatgttatgttcaatgtacaaatggattgataatgaaatcaatctctgtgtaatcaaaggacacttactttgtatataaagaagtgatccaacatgaaatgaacaagatagtaaacccttgcaacagtggactaagcatactgtgatctgattgaactatattttcttgtggcctttatatatccagtacttctgtgtatccatagcttgaatacttgccattctaggttgagtactcgcacattttctgtttatatttataaaatattatttatcttggtgttgtctaaattcctctaacaacatttgctgccgtctgtgggaaagaaatattatgttaattttggagaaaaatcatcatggctggaaacctgacgaatggagataacaacactagatcaatcaatgttgaaaaatgaatgttccactcccacgtaatggaacgacacctgtccatgccatcaacgaaggagtgggatggagaaccgttactcctctcagcttattccttgaaactgccgctcatgttggaaaaacatctacactagcggccattgcggggcagttctcgcctatcatgcgtggtgttgtgtctgaaggtatcatccaattgaccacagcccaatatactgccttacaagatcaaatacaggctctacaggctgaaatcaa

SEQ ID NO: 257972 - DNA, 656 bp, Cannabis indica
tctattaagctctctagctaataattaatgggtgtgaaatttatagcattgtgaagggattttggagttgatggtgatctcttcttatcagcctgctcaattactagtcttttattcaatataatggagtggcagtatagtagaaactacagatttggtccataatcttattgtgaaagctgaagattttgaagaagaaagagttattttgttcttggaaacttcttgttcatcaggctttgatatggatttttccatctttgctgttacattcaactctttcactttttcctcttcttgattttcaacattgcttgaaacttcaaccactacttttctactgtcaaaagtttggatctttggacaatgcccatttaccattaactagtacaagatttcgttgtcccagttcatcaacaacagctaatagcttcaaagttggaaacttttgaatcttgggttggttgaggaggtttatatatcaagagcagagcttcgaaaaaagctttcttctgagcctgctggttgagagaaactctcagcctcttcaacataacggttattaattagaaaaggttgaccatttttcacaaaagagattgattgcccaaatgcatgcatgaattgggttcccctcattggcttcattgggtgga

SEQ ID NO: 257973 - DNA, 977 bp, Cannabis indica
gataatggatttcagctgggcttgggcgggtttcctcccaaagaccgcatcagaattcctagctccgacggtgcaatccgaccatcgccatcgatgtcgaattgggtgaaagcctccctcattgaagatacttggttgtcgctcagatcctttcccatggctaccggattaacggagtgagtgggtctggttcctttgtcgctctagaaaaagaaatctctcagtttagggggggtggttctgttgagaagaagaagaagaagaagggttaggggaggggagttctgtcgagaagaaagagaaagaaaaagaaaatagaagaaaaaaaaaaagaaaaaaaaagaaaaaagaaaaaaaaggaaaaaaaaagtaaaaaaaatatttaattttttttcttgatttttattttttttaaattatttataattattttttaaaattaaaattatgtggaccactaaaaatttaccacgtgtacaagtgtgtatacatggacactccaccgtggtacttaactgtgatttttagacggaggtgtgcagtgcaaaatggaacccaggtttaggtagttattctatttagagctaaattagcaccagattataagaattattttattattttctttcacaccattattattaggtttaattagattataaaacctaaatctctcacattcttgttacgtaatatgcagagagcctctaaccctagaaaaataaaaactcaatctcaatctctttctttcagcctgaacacaattcttagagaagacactcataaaatcctaaccctacaagttattcatctcgctatctatcaaagatttattattttccttcttgtttcgttctcttcgccaaacaacactcatgattttcaacataagattgagatcattatcaccattctaataatttgagatttcaagatctagcactgattaagaagagtcatcaagaggtaagagagtt

SEQ ID NO: 257974 - DNA, 658 bp, Cannabis indica
ttcttaataattatgaaaaattatatattggaactttatatataattattaatttgacaccaatttatcataattaataactttcccaaaattttcttttcttctctaatttacacatttgagtgaaaattttccaaattttgaccaggtcaacattgataattctaatcgataataaaatcaattaattgagattgtctcgacgataataaaatcaagctcccaataagtagttctaaaatttaacaaatgaatttcctaacttatttattcctcttgacttgattatagacttggaattgcactctcaattttataaaactctctatacatgtttatagatatgctataaattattcattgttttaatcaaaataactgatgatcctctataaatggtctacaatgagttgggactaatattaccattttagtccaatcagcttgaagctaattttttctccgtttttgctctagcagcttgaagctggagctatggtgaaaactaggtcaaagacgaaggggaaagcaaaggtttcgacgaggaaagcgaggaaggactccggttctgtgattgaggacagtatctcgaaggcgattgaagaagaaatagggattacgccactggagttatgagaggaagaggatgatatcgttg

SEQ ID NO: 257975 - DNA, 601 bp, Cannabis indica
ttccaagtttaaagaatggtgctttaccatttccacgacaactggcccgaggagagtcctcctatgatagtgaagaacctgatcatcacaccaactcttcaaattgcacacgcacaactgatacaggctacattaattacaacacttctgcccgaggatcacctttggacaaggctgcttcaactcaggctttcattgttgctaattccatcaatgcggcaaaggttcctgccactcctttgctcgatactcaaccagcaaagtcttcttcaatgaaccgtgcatcaacaaaatctcccacaaagtctcagcctcaaaccagtaagcctcaaaccagtgagataatcactgatctgtcaggggtcttcaccccattttctgtcattcataatgcccccactgcttttgcaacttaccctccacataccaactcatctcatacaattaaagttaaccaaatacataccccattgccctctataatgcaaagcagtacacaaccaattgtgtcttctggtattgatcagccagggaacaaagagaatatgtcaccaaatcgttttaccaaaagacaatcggatggccaaaatctgaggcaaac

SEQ ID NO: 257976 - DNA, 794 bp, Cannabis indica
gaggaggcgcttacagctgaggtcaagaagcataaatcggggatggcgaggctggaagagaaaattcatgccttagagacagccggtctcgatatcttttatgacttggaaggctaaccctctagcaaattttgattacttgggtgaagccaaagacatgtatctcgagtactgcgcttcccaagtggcttatggtgaacccaaggcgactacttctaccgctggcgagaatgttgatgttccttccgctcagacaacagatcctccagctcctaccagcccagaagacccgaaccgagagcctgggactcaaactatttaaatacttctctttttatctttcttttttatacatatcttattcggccataagtcctttttctgagacatcatgaccggccaagcggtctttaaacttggaattatttttcattttacagacaacaggctgaccaagcaacttttaatctcagtaatacgtgcttttgttatctttaatgaatttaattctctgttaataatcatcgtgcaattgtgtttgttttatttttaccaaatgctttgtacaagtataggtgccctgcaagtgaccgaccaggcttatgactcttggtcacttgtttttttacaagtatacttttttatctgttcggggtcttgggtttgaccagaccttttgtacacattggatggtaaattagcaacatgttagtaatttcgactcaatttgaatttttgaaataaatatctttattcattgattgatcgaaaatgtatttgttaccgtagtaact

SEQ ID NO: 257977 - DNA, 780 bp, Cannabis indica
atcattattgcttcagcaaaagaagcaggttcgataacagtcaccatctttccattatgatcgtagacctcaacaggacgacgttcggagtttgatcgaagctgttgaataatatttgaataagttctcccagctgaaactgcagtagtagtagatggaagattaaacacaagagcaacaactactatatagctcatcatcatcatcatcacaccaattttattgttgatctccatattatatatattctcactagcttattgtgatctattgttatgtgtaaatatatgagctgcaagcatcctatttataataacacaagtgctactattactagctactacgtaacactaactccaatttggtgtatatgctcgtaataaatgaggtgataacaagatattaatattaatgatagaaaaatcatcttatcatatcttatctattctctctcctcattattattagttattacgggtccatactccatgggtgtgaccaaatattaagaggacatgaatatgagataactccatacatatataaatatgatgaaacaaaaaattgtataaggaaacactgaatcctatcttcacttatgcggcatacctttaattaagaatattgccatcactaattcaatataattctcatctctaggcctagtacatatgaaatcctataatacaccataagagatgtatccttaaaacaataaatgaatctgagttttaaaattgaaataacatggttcttcacaatacaactcactagtaatct

SEQ ID NO: 257978 - DNA, 631 bp, Cannabis indica
agagaagctttgaacaagtgtgtatcttcaggagaagatttttctaagtctcatttctagaggaagtgagcatatatctttgtgagaagcttaagatctgggtggaagtgagcacgcatcaatagctgaagagagttcactacttagtgtatttcagagatcatattagcgaggtggatttgaaagggttgcaacgacaaatcatttgaaggagtctaattttgtttaagtcaattgcttttgtaatctttgatactttactaattgattttatactctaggcatgacctcgtggattagtagtatttgaaagaacactgatatcacgtataatgtattgtgtcaagttttaaattctgcacaatttatttatgtttctgtatttttacaataagtctgtgttctgcaataataagttttcaatatgttattgtagacttttacaatcgcatttttctttaccgctattaaaaaaatttattggcatatgtaaaaacatgagtttttaattaatattaaagcgggacactaaactcttcaacgttttcttgtgttttttttttttgcaatatgtcattttttgtagaaagaagtttcggttctcttccaccacttctcaatgattctaact

SEQ ID NO: 257979 - DNA, 614 bp, Cannabis indica
ggaccatatggcagatttggttcaacaccttcatctaatttttctaaaaacagagagcatttatcaaaaacatgtccaatgattccacactcgtaacaaaagtccggtagtctttcataacggcaatcgatccaaagttcatcattcatccaaggaaaagtaacaaactgaccacgtaaaagaggttttgagacatcaatttcaacacgcattcgaagaaaaggcccccacccttcatttagagaatcttcaaaaacttcaaggaacttgccgatcatattgccaaggatttttgcaagtgcttcagttttgctaagaaagggcaatcggaacacttgaatccaaaaaggagtaagagtgtaactttccaaagtagcattttgcagaacacttggtggacataggatcatatgtaagttgtggaaatgccaaggttctttagccatcattctcttaagatctccttcacagccgaaaaaaactgtgtatgaatctgttgaagcatcatagtccgaaatggctacagcaaaacgaccaacccactatttggtaatgaagttcttaagagttttggggttgtatcctttcttggaaaatatcctacagatcagtcg

SEQ ID NO: 257980 - DNA, 810 bp, Cannabis indica
aataataataataaaataggaatgagttagtcaacaatggagtaaataaattaaatatttttttcacttccaccactttacattaagtgagttttcattaccaataaaaataataataagaaaaaaaggctataaagaggaatggagaagttaaaggggattgtaaatttttggccagaatttattgtaaaagagaaatagaaaaaaaaaaaaattacatattgaagatctatctccaagctttacaataagggtaagtgaagatttataatatggatctattcttcttattcttttatttttcaatgttgtgatgaataattgttctaatcctctttgattcactagacttcagtatataagttgatgtgatatataatcaaaagagaaaagaagagactaatattcttatgttgtcaattttattatagatttttatatttatctttgattcattagacttcaaaaaataaatcgatatgtgatatataatcgaagataataatatgaatctttatggcgttatgatgcttgatttatttggtttcctttttagttcattagactttagaaaataaatcaatatgtgatacataactaaaagggaagtagttaaaagttttttttttaaaaaaaaaattgttaatgcgatcaaatgtctttattctaaatatgtatcaatgtgaaacgataaattgatctcatgatttactgaaaaaaaaaaaatcaaatttatacattcacagaagaatttaaagatatcattcttcttattcttttatttttctaatgttgtgattaagagtcgtc

SEQ ID NO: 257981 - DNA, 1944 bp, Cannabis indica
aagcattcgtccaagtcatctatgtgcccccaagcctttttgcatttgacgagcatgtcatccacataaacttccatgtttcacccgatctgatctttaaacattttgtttaccagcctttggtatgtcgctccagcgatttttagaccaaatggcatgactttgtagaaatatagacccaaatctgttcggaaacttgtatgttcttggtctggtggatgcattttgatttgattgtaccctgagtaagcatccatgaagcttaatatttcatgccctgctgttgcatccacgagttgatcgattcttggaagtggaaaatagtctttcgggcatgcttttgttgaggtctgtgaaatcaatacatactcgccatttcttgttcggcatgggtactagtacaggatttgcaatccaagctgggtagaaagcttcaattgtgaaattattgttacgtagcttctctatttcttcctttagggctagtgctcggtctttgtccaatagtctttgcttttgctgaactggtcagaagtcaggatcaatattgaggacgtgtgaaattatagaaggataaattccgaccatatcctcatgtgactaggaaaaaacgtccaagtttgctctcaaaaattttatcaatcctgattttacttcgagcaataaacattttccgatttttatcttcctggtcaagatatcttgatcgatctcgatctcttctaattcttccacaggtccaacattgttgattgggtccccaagtcaaggatccacatcttgatccccaccttggcaagttcctacttggagttgtttttttccttgtccgtgctctggccggaggatacttccttcttagccttggccactgcaaggttataacattccctaacaatctgttggtttcctctcagacaccctaccccattctttgttggaaactttaggcatgaatggaatatcgacgtaccagcctttaagtcatacaaggctggtcggcctagcatgacattgaaggctgatggaacgtctaataccagaaattgtgccattatagttttgcgtatcaaagcttgcccaaaagtgaggggtaggcgaatttgccttagaggtgcgactccttgatcggaaaaaccatacacaggcaggagacatggggttagatctttgagctggagccccatcttttcatagacagtcttgaataagatgttggaaaaggctccatcatctatcatggttctggccaccatctgttgctatctggacctccacgaccagcgggtcgttgtgcaaaaatctgatcgtcacacatcttcgtcattgaatgtaatggcgggctctcctgaccgtgggattttaggcttccttccttctacgggcaggatcacttcttcttggtcgtgttgtgctattcgggcatacctctcccgagctttgcccaaatctcaagctatgtgtgggtctccaacgatgacctgtagatgtccatctactggtggaggtagcaagtcttggttattatcacctctctgattgttatcggccttaacatacttctgtacatgcgagttatttttccttattcccacttgagtttgttgcattcattggtgtcgtggccgtagtctccatgaaacgtacaaaacttggtcatatctctcttgctgacatcttttatcatgggtgcgggcttcttgtacggggctagtgactgagtggccatgtatacactttctatatctttagttaagatggtaaatgcagtgtacttggcttgattctctcggggagcttgttcggttttgccggtgaagtttccctttttcccattcccttgtctattgttgttgctggaacgtttaccgtttgagcttcaattatttgggtaatgagagagttgggcgaatgtctcagtagaaggagcttttggcttgccag

SEQ ID NO: 257982 - DNA, 787 bp, Cannabis indica
ttggttagtgtttctaaactaacagaggataacaatatttttcttgaatttcataaacattggtgttttgtcaaggacaaacacactgggcaggtgcttctcaaagggaaagttaacgatagactctaccaattaggtgctgactctccatcatctccagttgcaacattacaatgtaatcttgtatcgagttttgtagatgaatgtacctatgtctgtaatccatgtaattccacagaagatacaattgacaatgagaattgtactactttgcccattaataaaacaactacctttgttgattataatgtatcttcacctgcattatttttctcatctgtcagtaaagacataaatacatggcattgcaaacttggccacccagcaccacaaacaatgagtaaaatcttaccccatgtttcccatattggcaccattaaagatctcaagttctgtactgcttgtcaattaggcaaaagccacaccttaccatttcctaaatctgacaccagagccaaccaaccccttgccttgattcatactgatttatggggcccctctcatgttgattctaaacaaggatacaagtattatgttcattttttggatgactatatcagatacacatggatttttccactcactctcaagtctcaagcctttgaggtattcatcaaatggaagagcttagtggaaaatcaattcaatctccctgtcaaatctgtccaagcagattggggtggagaatataggtctttcaagaaattcttggaggatcaaggaattc

SEQ ID NO: 257983 - DNA, 1270 bp, Cannabis indica
ctataccatttcacatggcgggaaggagttggggcccattgttgctcaaagagggttgcgccaaggggatcctttatcactatatctgtttattctttgtgctgaggtttctctagtttgttgcggagttatgaacaaagtagcttactcacggggtgtaaaatttctcaaggtgcaccggtaatctctcatatgctctttgctgatgacaacagagaaagaagcgtacaatgtaaaggagttgttgcatacttacgaggtggcttcggggcaaagaatcaatttctctaagtcttctgtgtttttcagcaataatattggaattcagctgcgggattccatttgtgctatgttggaaatttatgaggccgatgaaaatggctattacctgggtctaccgtgttcagttgggagaaataagaatgttatccttggtttacttaaggataagcttcggaagagaattcaagggcgtatcttatctcgtgcgggaaaggaggtattattgaaatctattgctcaagtcttgctgagttatgctatgaatgttttcctctttgccatcagacacttgcaaggagttatagaggtttatggccaagttccggtggaactcagatttaagtagcggtgagggtattaattggatgagctgggagcggttgtgttgccataaacatgcagggggtttgggattttgttaggctgtttttagcctaagtttcaggtcatatttgatagttgtttttcttctttattattatttttggaaaagaattacgctagttttcttttgtttcatgtttcgacacatggaatgcataaattggacaaatttcggaaaacagtgatctataaaatagagaaaattttgaaagagaaaaaagctaaaacttcaagcctaaattcgactatgttctaattagattttggacaaagtttaaacataaatgttttagatctctttttttatctttccaatgcatcttgaatcagctcatttggagttgttatgagaaagttatgcccattttactaaaagagatcgaaccggaaaaaattgggtccagtggccgcggcggggcttttagccgccacgacgggggactacagaaagcccgttttttcacttttctacagccaccgccgcgaggatattgcccgccgcgtcgccgacttcgtacatatcaaggataactttgtcttttctcgtttttgggctgaaaaactctatttaaaggaaaggtgtcgtgaattatagaggggagac

SEQ ID NO: 257984 - DNA, 1999 bp, Cannabis indica
ataatacaaactaatacagaccatttgttatgtattaaataatacaacatacattgtattaaaaattttggtcgtaataattaatacaatacattactttatccaaacatagtgttatttattatttaatacaatacgacccttatacagcgtaccaaacgagcccataagagcttatttttcatttactggagatagaactcatgatcgatagatacatttgagctcgtgattttggagactggagagccaaattaatgtatatctattctatataaaatgtggttatttaacagaattttttagtttaaacgatttttttaacgttttttgttttaaataaaaactaacatagagttaacgatttaaaattttcaatcttatttttaaattcaaaatatactaaaaataaataaaaattaaataaaatctttacttttcctacgatttagaacttttttttcctacgattgataataagttaaccattgcaattttttaattccattcttaaacccaaaaatttcctatgatattgaacaatggaagtaaaccattgcaaaattaaaaaaaaaaaaaacgtaaaaaagacaggtggaggttgttgcaaacggattcgacctcacatctctcaaaagtactttgttccttagcgtttcatatacattgataaaattttatcaattaagaatctcaatcggaacttgaaccaaaaaaaaaaaagtagatttatgcatggaaaagaggtcgtagagcttgatggaaccattggctacggcagtgacgagtgttttgctaaataccccagaacatcacctttcaagataaaaaaaaaatagtgtagtgtgatttatgaatcgtagtacatggaaattttgaatatatttagataaaagaaaggggattaaaccattttttttgtacccgcctaaagagaagcattcctcgtcgaagcattcctcggagatgtgtcaatcatttcaatttcttccgtacgggtaatgttgggttcttcaaggaattgaattgggattagaatagccttatcagttatattactgcttgtaagttgggctaacgcatcagcagttgtattttcttctcctagaatttgcttgagaacgtagctcttgaattgtgcaagtagatcatatattttgcttagataagctatcatttttgccccgggcctcgtactctccagacacatgatttactactaactgtgagtcattatagatcttgatgtgtttagcatgtagctcccgtgcaagttttagaccgtcgatgagtgcttcgtactttgcttcattattgtaggctctgaacccaaatatgactgccccgtgcaggtgttgcccctaggcgtgtagagggcaatccctgcactggacagttgatctgtaactgacctatctacgtgtaatttccaagtaggtttgtcttcattgttgctcagctgaggttcttgtactggctccgggttgccttttgaaatgctttcttttttgcccatatactcaactacaaagtccactaatgcctgtcctttgattgttgttcggggttgaaagattattttgtactcacttaattccactgcccatttgagtaaccatccagcaggtttttgtaatatttagcgtaatggttggtcaatgtatacccgaacaggatgagcttacaagtaaggccttaacttccttggttctaagattaggcagtaagtaagcttttctatcagcggatatcgttcttcaacttcaacaagtcttttgctgatgtagtagatcggatactggacattgttttcttctctgattagcacggtacttacagcatgttctgtaacagctaggtatattcctagttcgtctccgtccagagtttttgagagtacaggaggttttgcaagttttcttttaagttcttgaaaggccttctcacattcctccatccattcaaatttcttatttcctcgcaggatgttgaagaaaag

SEQ ID NO: 257985 - DNA, 749 bp, Cannabis indica
ttgcttttggaaaatgtttttcaatttccactcatggagttttgaaactaggttatccaaaataagttaaaatctacattcttttggcaagacctaaacaatgggagacccaaataattaatcttttccatcgatttgttgagtccaagctcccgcattatgcctcttttcataccctcactagtcttatcgctgaagaaaatgaaggtttttagtttatttatcctctgtccccaccaataacaaaatttctctagacactggcaaaagcctctagcttctgctatagtcgccctaccaacaaggatcagatcgtctgtaaagaaagatgagaaagcctaggaccatctctactcaacttgattcctctaatagttctaatatccagagcgttctcaagaatatgcgagaggatatcagtaaccctgataaagaggtaaggggataggggttccccctatctgatgccacacatagggaccaaactactaaccttgctaccatagaggcaaatctaaaataaatcgttgagatacactgttgtacccaattacagaacttatcaggcactttgaagctacagagcacatgatcaatgaatttccagcttaacttatcataggctttaaccaggtcaattttgataggaaacaaaccctctttcccttttttatgtttaaacgagtggatgatctcttggactaaaatattgttatcctgaatgttccgacctagaacaaatgctacct

SEQ ID NO: 257986 - DNA, 933 bp, Cannabis indica
agttactaattacacaatgtaactaactaggtttctcacaattaattcatattgatttatatattactaaaattattgttttagtttggttcatgttattaagttgtaaaagttttaattaactaactaggatagtgtttcgttgattggaatgttagtagaattggaataacttttcctaaagtgaatccattcatttgtttagtttgtcatttataattgtaaagtttatataaatgtgttatgtcacctaatttcttccagctagtgagtaattaattagttatttatgttatgtacttttcctttaatagttacatttttttattaaaatttattctagttctaccgaaattttgacaacataacgactgtaattggacgttcccaaaaatttttaaaaggtgcctaaagtaacaaacaaaacaaatataaaaatacaaaacaaacaaaataacataaacaatacaaaatttctccacccatcagactacagtacatgtattcgcagaacctacttcactacagatgaatatttaagatattaaaactccactaagcatgcattgatacttaattataataacaaaaagttagtgaatggatataccaattgcacgttaaaattcgatcaacaccgaaatatgttgaacctcaaatattagctcacaacctataatataatgcaatatacaataaagttgaaattttaattattaaattacttcctaattattaaaaaatttaacaagttactagttactaaattctatagttaatttttattaaaaataacatatacatatacatataatcaattatatatcatactaacataattttaagagctttaattctaaacaaattaaatctctactacctcattctcattcacaacaaatatatataccatacaattgttgggttttatgc

SEQ ID NO: 257987 - DNA, 513 bp, Cannabis indica
tttaaagaaatgtataattgaattgtcatcatatcatatgtatggaatgcatttattaattcggtgtgtattcaatattcactttattataataaaaataattaaggttgttcattttactaattgtgtctatataaaagtccataatcacatctgtccctacacaaaattatcaactaaataaaatacctagtaatttacactaagaaacgagtctaccttttttttttaattaatttgggtattattacatcaaagataggtccttttcaaaataaaattaaaaagtaataataaacgaactctaactaaatattacattttttagatcaaatagataattaagtggaagacatagcaaaatataagtcacactgcaacttcttagagcagatcactaaaagaaacaaaatgacaatcacaaagaaaggaacaatatcttaattattaattagttcaaatccgaataataattaattaaaagacaatcactttatatactatttttaattt

SEQ ID NO: 257988 - DNA, 1007 bp, Cannabis indica
cgtaccacgattcctttcccaagtatacgggtaaccaaaaagctccatgtcacaaagcccacactcccccaaagcatcattaaaaccatcaatcaaccaatttggataaggattacctcctcttttatcatcttgagaagtcacattattgaggtctccaataacacaccatggaagtcttgatttatcacgaagaattctcaacaaatcccaagttcttctacgcaaattttggtttggctctccatataacccggttaacctccattcaccattttcactatcggcgatacaaacatcaatgtagtcaacaccaaattccatgactttaacttcctcatcaattctccaaagcaaagcaaccccgccacttttgcctctagcatccacagaaatggcaccatcaaaaccaatagccacccacaacctctctaccacctccttccttgacaaagttccacataagaacaaataattaggtttcttttggatcacaagatctttgatgaattgttgagtccatgggttcccaagcccatggcaattccaagaaataatgctcataatgtctggtgggcctgagaacaaaggcccaccttcaaatcgttttttgtatccagtttgaccacattaacttggcccaattccttctcagccacatcaacatcacgtgaggcttgctccactacagtacgtcttcttttgctatccataagcaataaaatctcatcattattaacagccacctgtccatgattcttgccaatatctcctctttcaaaaccaacttcattgatatcattatttccaaataaaacacctttattctttcctgaatttaaggcagccatatcctctccctgattagcatcatcaatctccatgatttttggcccaaccgaatctgctatgttcacaccagaacgccgaccttctccaccattgtcgcctgcaacctcctgttcagaaccagtccgaagcaattgagctccgatcaaataattctt

SEQ ID NO: 257989 - DNA, 856 bp, Cannabis indica
aatgaccaaccctatcattgaatcaacattttaaatcataaataaacctttgaaaacaacatccaaacacagcagcaagaacattaaaaactagcatgcaacctaagcactttcttcaaaaatctcaagaaattcaaatagcaagatgaagaaacttaccaacaatcaaatatcacaaaactcgctaaaaagagcttgaattaccaagaagaatcccaccttcttgctgctcaaggaggccgaaagtaagagtgaaagagagagagctttcctcttttttttttaaaaaaaaaaaattctaactttttacttttaatgaaatgagagtaaataaacaaataataaccttatttcagccaacacatttcaattaaaaccacataatttaaccaaataaagtccactaaaggaaaaactaacaatggggcaaaatgaccattttgccccttcacactaaaataacataaagagcactaaaggggtattttgggaaattctaagttccggccaatcccgacattcccaatgtctaataaaccgtcccacaatacgaacatactaagttgtgattttactgagccaaacaccgagttccatgttaccgggcaccggaaatgcaaaattatgaaaattactaaatgacataaaatgcatttcagaattcaataataacagcataataattatttaaatagctataaataatttttcaatgattaaacataattaactgctaatttccaaattaaactaagcggtctttacaattgtactcgtccactactcaactttaattatgtcagtacctcccaaaaaagtccgaggttccagctgcacaaaccgttcaacacggaat

SEQ ID NO: 257990 - DNA, 866 bp, Cannabis indica
cacaatcacattccactgtattgacaatactgtaattgtgaataactataagttttggatttaactgattttttgcatatatcaaatatatatattaaaccataaacatgtaacatacatgtagtcataaatcacttcaatattctaaattgataactaattagattgtaatgggttttatttagggcacaaaaacccaacaagatccaagaagttactgattgatataaaaggtgaaggatgtagtgaaaagacaggtcataaccttcctaatggagttccattcaacacgatcaaatgccttggccatgtcgagttttagagccatccaacccacttttccatgtttgcggtgagttaaagagtgagtgacttcttgcccgatgatgatattattggagattaagcgattgggtaagaaagcgctttgggctggtgaaataatgcatcatataattggtttgagacgattgactaaggtgcgagaaataattttatacattgtagagtagaggctaattggtcgataatcagtgatggagtgagggtgactcttttgggaataagaacgatgatggtattattaataggcgataaatctgcattgttgttcaagaagctaagagctacttgaaccacatcagttccaagcaaatcccagttttttggaagaatgttccattgaagccatctagtccggggaatttatcgcctgctagctggaagactgcttgttagacctcatcagacgtgaaaggtgcttccccgcatcggtaagtttgttgaagattccagaaagaacataatccatttgctcagcagtaggtttttgaatggtaaagagttgagtgaagtattgttcaata

SEQ ID NO: 257991 - DNA, 772 bp, Cannabis indica
aaaatttaggaatttttttatttttacacttcaaaatatatatatatttttgcatttttaaagaattctttataaatttcattcaactataccgacctcaataatatttagcaacattaaaagagagattatactttgaaaaaatacgatcggcgtataaagaagatgctctagccataagataagcagcctgattagcaaacagtttgacaaaacgtaaagaaacatccctaaaataagataaaagttgtttacaatcctcaacgacaccaccaaaagtggatgacaaaacattcaaatttataacagcttgtaccaatatcaggtaatcagattcgataatactaacacacggaaaattgcgcttcaaccatgataattctttttgaaagccatggcttcagcaatctctaaaagaacttgtccaatccgtagtcgcgtaatcccatccactacccgacccttgtgatcccaaacaaccccaccaaaaccatgccttccctcctcgtcaaacaatgcagcatcaatattcaccttgagtttgtcataacctcgtttagaccatagcccaaccccatccgaaagataccaagtatcaaacgcaggaaataaactttttcttgagcttttctcactgatcaagagtgatacgagccaaattgacaacgaactctgttggaacttattttactaggatctaaatttactaacatgtatgtttgattataatttataatctaacatcctaaatatgaatttcctaaaataataa

SEQ ID NO: 257992 - DNA, 515 bp, Cannabis indica
gaatcaagtgccccatgacttcaccattgacaagaaaagagaaactgtttgtagaaagacagcccattataagtctaacccaaccgctggcaaaacccatttgtagcattaccgcttcaaggaaacgccattctactctatcaaaagccttactcatgtccagcttaagagatgcaatgccttgacgcccagaagttttgtttttaatcgcatgaaccaattcaaatgcaaccaaaatgttatcagcaatcaatcgattaggcaaaaaggcactttgtgtagcagaaatgaccatgggaagaatctccttgaatctagccacaagtattttggtaaccaacttggagatgacattgcataagcttataggccgaaattcaagtgatgcgttgaggtcgtttaacttttggaatgagggtgatgattgtgcgattgaaacttgatggatcagcccatcgttaaggatgctcgaacatggctgtagtaacaggtactccacaatggcccagttctgt

SEQ ID NO: 257993 - DNA, 958 bp, Cannabis indica
tggacttgtccttctcaattatggtatttggctgcagctattatttggccacaggtacttatataaatatatatatatatttatatatatatatatattggttatcttatagtaaggtaactagttaccctaaactgtatttcttacattaacttttttttttaattttgccacaaaataatttgttcgaaaaaaaaccccatatttcataaactttgcaaaaaaaaaaactatagaaattttactggtgtcattcgatacagaactttagaaactggatctgccgtcattattaagtcaatttcctattttggtggtaaaccctgataattctttcgaaaacacatccagagattcttgtaccacatgtacactttcgggttctactggtaccttccttgtagtgtccactacattatagctaaatatctgatacattcccctcgtaacaaatctcttgccttaaacattgatatcattagaactcggtattcatgaacttttctcacaagcacaaacggattctcaccttccggttcaaatgttgtcatcttcctcttgcaatcaatggtagcattatactttgctaaccaattcattcacaagatcacatcaaaatcttctaagtttaactcaatcagatccattgacaattctctatcttccacacacacagaagagatctaacccacctgctaaagataattgttctccaataggtgacaacgtaccaaaccgacttgtcctcgcatggcctactcaaactatcaattactctacttgacacatatgaatgcatatcaccagaatcaatcaaaataatcaacatagtgacatcaatagaaatctcacctatgatagtggaaggccagcgttagcatctgtttgggtcaaagaaaacaccaaagcatgaacaaaagtatcatctttcttcatatatgatatttgtaactgtggg

SEQ ID NO: 257994 - DNA, 567 bp, Cannabis indica
gtagcctttcttgtacttgaaatttacttccaatttcaagtcatactccactttgtcaacatccagttcttcatacaaaacatcaaccaaaccctgagtagcttaggttcggatcaatgtcaaatgtcaaatttttgccccgtttataaacccaatctctaccatcaagctcccagacaccattatacataacacacgcattaacagttgaaccagtcacatacatttaaaaacaccgaaaaaaaaaacttaaaatgcaatatatatgaaaacaaaatcaggtctgatcccaaaaaaaaaccaaaaaccaaatttttgggcccaatcggacccaagtcggacccccatcgaactaggcccaaaatacccaaaaaaagacattttatggggtgccatcggaccctatcgggtctccatcggaccccatcagactcggccacaaaaaccaaaaaaataacatttttaagggtgccatcagacccctattgggtctccatcggaccccatcggactcggccacaaaaaccaaaaaataatattttagggggtaccatcggacccctatcg

SEQ ID NO: 257995 - DNA, 1108 bp, Cannabis indica
ttattttttattaaaaaaaataaataattactattttttcaattcaaaatagatttttctaatcatctttatacaactctttattcctacccttaacagagtttcaaggtggtaattcgaggaccatggatctataattctatgctccaataaactagattatttattgagtctcatcaaccaaataatcccgtttttattaattctatgattactctactataaatatgtaattgcactcttagtagttatataattatatttactgagtttaactacagtgtccattgatataatcaatccagtaattagccctccatgtgttggttcgtaattattgttggtcaaaataatattttacccttctaattatttatttatcctttagttccattaattcactagtagaagtataattcaagatcccatcaaaaatttacacgtaactttccaataccaaaattaacagataaagggaaccaacattcgatccgttagaaagttaagattccataattgtagttcatgttcctagccattcacattattagattttcaaaatagaagttgtaagaatcatcttctttgagaaactttaacgagtgaatcaaagaaactaataacatgaacaggagttcataattactcagaatttaggccgatctactatagatcatcgttatgaaatgaattagctatttatgataaatgtcatgttaataaagatagatttattcatattggttcttgtcatatataatctatattatatacaacactttcacttaaatgtcttactacatcaataatctgaactaagattacttgcaccgtagaacggacattactctaccgtacaacaaccactgattaaagattctaaaactttaatatgtttctggctattttattcatagctaagtggtctaagttctctatgcatctgttgggttttgtgccctaaataaaaccctttacaatctgatgagttatcaatataagaaatttgaagtgattaatgttttcatgaattttacatgctaatggtttaatatgtttattacacacaaaatcagttaaatccagatcatatgtttattcacaatta

SEQ ID NO: 257996 - DNA, 743 bp, Cannabis indica
tatatatatatatatgtatgatcaactgaaaaatatcaggaaataaataatatattgcaaaccctccatttacaaaaaaatcaagctttttaagtggttgattgatgtcatctatggacgatgcaaagtcaaaggtagcagttgtaaatgagatttaactcatacaaacaacgataagctacatgtgaagctgaatgtttaacgactagcattttataggaatgtgttaaaacgaggcaccaaggccttgaaaaaatacttaacctatggtgtgaatagaaagcttaactattcatacaggcaatcaaaaatatacaaagtgattcaccagatgaattattaaaactatgtttcagtttgtttaaaaacagatcataactatttacgcgaagcagaactgataattgctcgcaaatcgaaagcataacaaataataattgctcgagcacatagtaggtaactaactacttaaataatatcataggaaaataatagcaatggaaatgcttcaggtgttttaaatttgatcaaggtataattgtttaatttgtgacaaaaaacacatgtaaaaaaatatattaagttgtaatgcaaaaatacgaggcaataaataaaagataaaataaaagcaaagttggccatccaattttgcaaattggtctttacaaaattgccacaaggggcaaaccgctgtctcggccatatagccattatcctaaatatataaaaaaaaacaacttaaa

SEQ ID NO: 257997 - DNA, 895 bp, Cannabis indica
tgagagagaatcaaagaagttatccagataaaaagttggattgaagaacatcattagatcaaaacaaacaaacaaaaccgactactagttgttccatgaaaagacactagttgaagtcattgtaaatttgtaacgaaccaaaaaagacttcaaaagataaaaagagaaagagaattaattagtagagtaattaatgtttaaaactatttaagacaaaagtttcagaatacatgagtgtgtagtgtatgtatacttgaaagtgaaactaaggcacgtgtttgatgatgtatgtatgcattgcatgcatggctgcctgtcacttgcaaatgccatcatcatatataatgcgttttgaccatttggacgagtatattacgactaggaaacagtgaccaaatttggactgttaaaataatggctaattaggatttttgtccctgaactttgacatacaccaaatcatgccccttgaacttttaaggtcattaaaaataccctattattgagattgttggatttaaggacttttttccaattttagtaaaaaaaatctaacatggatgaaacttcagatgtcataatttagtacatgtcaacgttcgagggacatgattcggtatatatcaaaatttgggagcataatttaatccataaacaatctttgaaacagtaaaagtaaatgaaatttgacaaaagtcattcaatccaataatttcaatagttcaggaggcatttttaacgatcttcaaagttcatggggcatgatttgatacatgtcaaagttcatgaggcaaaaatcttaattagcctaaaataataataaaaaaaaacgaataattagtatcttttgaatttcggacaatatataattttgctccttaaaatatacgattgg

SEQ ID NO: 257998 - DNA, 522 bp, Cannabis indica
tgacaatgataatttttttattccaaaatttctcccattcataatttttcttgtctctcactatgtgaattgtttatcttctctctctaatctatctcctaagttgaaattccaaaacaactctaaaaaaccattaaattaaaggtgcccaaaatttagaaaactcattaaagtcaacagaaccataaatgttattgatgcattgtcgtcaagattgtcattgacaaatcgccaaaaaggtacagactatgaaagttaccaaagacagaattagtgattggaatgaagtcgtaacaaaatagttgtactggaaggcgagatcacctttctttttaggaagaatttcgatttttttctatttttttatttaaattttgtctttgttagtacatttgagattttggcaatttaattctattttgtatatatacatgggattgagttttttttttctttaattttttaattatgaatttgggtagtgttctgaattgttaagaaaaattttattttaatttttat

SEQ ID NO: 257999 - DNA, 1155 bp, Cannabis indica
tttctattatttcacatgttttgaatatcgatcctaacttacggccagttcaacgaaaataaaggttgttggacaaagaacgagtagtatccctgaaggttgaagttggaaagcttcgcaataacaacttcataattgaatctttctacccagcttgggtcacgaatcccatactagtgcccaagccaaacaagaaatgacgagtctgtattgatttcacagacctcaacaaggcatgccccaaagactgttttccacttctaagaatcgatcagcttgtagacgcaacagcaggacacgaaatattaagcttcatggatgcttactcaggctacaatcaaatcaaaatgcatccaccagaccaagaacatacaagtttccgaacatatatgggtctctattgctacaaagtcttgtcgttttgtctaaaaatgctagagctacgtaccaaagattggtagaaaaaatgtttaaagaccagattgggcgaaatatggaagtgtacatggatgacatgctcgtcaaatctagaaaggtcggggggcacatagacgacctggacgaatgcttcaaagtcctcaaaaaatacaacattaaacttaatcctttaaagtgttcctttggagtcagctcgggaaagtttctaggcttcatcgtcaatgcccgaggaattgaagctaatccagaaaagattcaagctctcctagatatgaactcaccaacaaaaaccaaagaagtgcaaagcttaactggtcagatcgttgcactcagcagattcgtgtcaaaatcaacagacaaatgtgtcccattcttcaacatcctgcgaggaaataaatagttcgagtggacagaagaatgtgaaaaaggtttccaagagataaagggacaacttgctaaacctcccctactttcaaaacctctggacggggaggagctgggaatatacttaactgtcacggaacatgccgtgagtgccgtgctgatcagagaagagaacagcgtacaacacccagtctattacatcagtaaaagactcattgaggccaatggcccggaacccattcggggtatctaccggaccaggcccactacgacaaatactgcaaaagctagatgcttttggacggttactcaagtggacgatagagttgggtc

SEQ ID NO: 258000 - DNA, 1064 bp, Cannabis indica
acctcttcgtcccaccccctttcccccatcaacattagattcgaaaccaatttatcctcaagaccttggttcacagtaataacatacggattactgtcatggggcagccaaggatcatttaaaatactcactaaagatccatctccaattgatcttctagcaccttgccgaacaagggattgagcttcccagatactgcgccaaataaaactaggattttgtcctaattcagcgttgatgtaagaactccgtgggtagtatcgagccttataaatccttccaacaagagaatcttccttagttaataatctccatccttgtttgcccaaaaaagaaagattataatgtctaagatctctaaaacccaatccaccaacatgtttgtgctgacacaatctcttccaactaacccagctgatccccttttgagaagtgtttgattgggctttccaccaaaacttagccattagaccttcaaggctagaacatatttctttagttaaaagaaacacactcatagcatagcttgggagagcctgggcaacagacttaatcaacacctcctttccagcttttgaaagaaatctgttttcccaactgaagatcttcttcttcatcttctcctttaagaaaccaagaatcgcgttcttgtttctacccatggtacacggcaaaccaagatagaaactatcttcacgagcctcattcaatctcataaggctacaaagactatccttgatatccgacgtcgtattcttgctgaaaaatactgaagacttctcaaaattaaccttctgaccagaagcaagctcataagaatggagaagattaataacctgttgagcttctctattatttgccttgcagtagacatagctatcatcagcgaaaagcatatgagataccgcaggcgcaccacgagccactctacaaccagtgataagttgacgtctttcatagtttttcaatagaaccgacagtccttcagcacagatgaggaataaatatggagacaacgggtctccctgacgcagccccctaccaggcgtgataggacccaatga

SEQ ID NO: 258001 - DNA, 508 bp, Cannabis indica
tttttaaaaaaaaaataaatcacctactaatttctcattaaactaaaaattcaattatataactacattttatatagaatagatatagagagagaagagagtaccagagtgtagttgacggccattgattctaggatggtaacgtaagagtgttgttttttccttacaaattaaatttctactctttcttgagatagataatccaaatctcatgtaataattatttttctagttttcaataaagtaagtatgcctattattcctttttatttttgctttaagtggcttcttaatttaataaagcgtggaatcctaagaaaaattaacagtaagactagttgggatttaattcagataacatgaactcaagttcaccacctctaaattgaattttatgatttaagaactaaacagtaatgatacatgtgagacacactttaaatattaatggaagtgacttgttacatatcattactttaaatattaatgaagcttccttagaattcta

SEQ ID NO: 258002 - DNA, 788 bp, Cannabis indica
ctgaccattgtttctattctggactcaccattgcctatttataggttaatggatcgtcatcaataccgtcagcaataaccatattaattttaccatctaagccataacgagatggttttgtagacaccctcccactacgacgaggagtcgtgatcttttgaataggaacatcattgatattttcctcgattgtatcaacttgtattggtttactgagggagtgagattattctctatttgagtagaagacgatagaacatttgttaaagttatttctgaaagtatttcctccaatactactttgctttatggcttgaagtttttaatatagtcatctttaaggaatgtggcatttgtagaaacaaacactttattatccttgtgactataaaatagtccacccctggtctttttagaatttcctagaaacatgcaaacctcagattgcgcttctagcttgccttctttcttttgtaagacatgagcagggcacccccagattttgtaatagcgtaaactaggtatacgaccattccataattttacaggtgtattggggactgatttagatgaaatgacatttaaaatatcattagccatttgaatagcataaccctagaaggactttgggagagttgaatagctaagcatagacttaactatttccaaaagagtgcgatttcttctttctacaactctattttcttgtggagtgctaggggcagtatattgggattcaatttcaagttcaaataaatgatctttgaactgcatatccatatattctc

SEQ ID NO: 258003 - DNA, 839 bp, Cannabis indica
tgttttatcaggttcatcttccagtgacacttcactttcaccatctgaccctgcttctcttcctacctcttcatcatcttcaccatcattgtcctccacctctgcttccgctcactcattacccactgtttcagtacccataacagggtctgtcaccaccacaactacccctgctgtcaccaacaaccataatatggtcactagatctaaagctggtgtctataaacccaaagtatacatggcatctaaagacctttaagcttgcaagaagctcttcaagatccaaattggttctctgccatgcaaactgaaaatgcaaccttgaaaaagaatggaacttatattcttgttcctcttcctgctggcagaaaggccataggttgtaagtgggtttatagagaaaaggagaatccggatggaagtctaaataaattcaaagctaggcttgtggctaaggggtttcttcaaacctatggatttgattttcatgagactttcagcccggtagtgaaacatacaacagttcgagtgattctcactctagctttgtcaaataattaggggttacaccagctagacatcaacaacgcattcttgaatggggatctaaaagaggacatttatatggttcagccacccggctttgaagaccctgaaaatcctcatctggtttgtaagttgcagaaggctatatatggacttaaacaagcccctcgcgcttggtatgataaactgagcactacactaactacttttggttttcacaatgccaaatctgaacagtctctctttcttaggatcacttctcatcacacaacctatattctagtttatgtcga

SEQ ID NO: 258004 - DNA, 941 bp, Cannabis indica
aattgtaacacactactagtttaaatgtgattttatattaattgtgcaattcattgctaatcaacgagtttattgaaaatcgcgtccgtagctctatagttatgatttctttatttggcaaaattgttagtaattgtaggaatttgttaagttctttgcgtaatgtttcttttcattttgtaaaacgatcagcaaatgtaacggctcatttctttgcgagggcctctatatctcacccttatcgccttttcaatatggacactgttccagttgagttgttgcctagtttggtaacatagtttttcgtttaataaaatgactttcattttcaataataaaaaaaaactttgcttaattactcttaatattaaaaataactaacttttataaaactgggatcccgagtttaaaatatttacaactgattcaaaatacttgatacaaaagttgtcgcctaacaattatacaaaatacaaccagctgtcccaaagatcgcacactccggatctaaccaccctgacatgtacaatcctcatctgctcgctctcacggctgctcaaccttagccttgctgtgaattaatttttatttatttattattataaatttctattttaatttaagttcgtttaaaaggaaataaataaaatagtctagtctatccttaaatcaaacatggtttactttccgcataatctattcttgtccaatccagtccaatcttgtataccaaacaagtcttagtgcttaaagagagtaaaaataaacttttggacaaaggtgtaatacttattcaagtcataatctagagtaagtatttctatatatattctttcttattccacatttatatatataatatatatattttgtaatatatgttgctgtatttaatttttttgttagtgctttgttaggttataattaacctatatttcggg

SEQ ID NO: 258005 - DNA, 608 bp, Cannabis indica
ttatagatatactattaatttctacattcaaagatgttgtcatcatcgttatttttcttataattgttattattctcacttgtaattgtttctattctcaaagtttttgttatcaccacaatttacttgtaattgttactatctttcctaatatgtctgtctacacacatatatatatatatatttataaaaataaaaataatgagttaactacttactttttaagaaaatttacatacattaattgtaatttaattttaaaaatatggtaggtccattataattctaaactataccgtttaaacataccgtttttaaattaattaattttcattttgatgacgtcgcccatcatatccatccttccaggacgtcaaccaatctccaaaaaaatcaagctccacgtattttgttagcttttttcaaatttgtagttagttatttttgtgtgtaattgtttataatcacattttttttttgtttaaaataggagtgagtagagtgtttataggggtaaatataagtcatttctatcatttcttattttcacatttttagttttttgtctttttcttattcttctcctttttttttttgcttttattttc

SEQ ID NO: 258006 - DNA, 549 bp, Cannabis indica
gtatattttcacatttagtatatcatatatttatatatataaatgtgtaatatatatatatatattttttgcaattacaagtctactgaaacttatattaataataataaaagtaatatttaaattaaattttgcaggatcatcgtttgtttttccaaaaaattacggagagattatcagtcattaaatggagaatccagttatatgtaacggatgagcccaaagtacagtcaattcaccattcaaactgctgagttgatgaaagattaagatagcgttttactatgcttaattttatttttcataaggttttctatattgaaattttaataaataattattttccccaagattatatttttctattcattttagttacataatatttagtataaatttacttaaatttagataaatattttgtatacatacggatgaaaagtgcaaagtaaaaatattacactattcctttaaccgaagtaaaagaagattagaaacaactattatggtgacttgtaattttctattttacaattacatatatagcga

SEQ ID NO: 258007 - DNA, 581 bp, Cannabis indica
tacactctcacaaagtggctatagtgttggctccagctcagaaccaaaaagaaaaaagtaataaggtatattctaaaacaatatcatagataactcgttagtcaattatatcgaactcttgaatgacattgatcaatgcgacatttcatcaaaatttacttcataacaattgaggcatttaatcaaacaggtaacagatactagagaggcaaattaatacatacaatttttttttaacaaaacctatacaccacaaagctgtttttatgtttggtatactagaatcagcatatgtaaaaaagcgaaaccaaatgaaatattaaaatacaactagaaattcttcccaaaacaaaacgaagaaagaaactaaactagaaccaaaaaaaaaaatggcaccagtagaatcagcataagtaaaaaaaacgaaatcaattgaaatattaaaatgcaagttcgaaattcttcgaagaaaattattaacacagaaactcaccatctaaatgaataatcacttagacccagcaaacaatctagaaatgttttacatgaacacccaccaaaagtacatgggaacaagcaaa

SEQ ID NO: 258008 - DNA, 626 bp, Cannabis indica
atgactatttggtatgatatcttatttgtagtaaactctcttagtaagaacttttaaagtgaagaatcaacaattaatattgccatagatctttttaaggatcttatttctctttttaaaaattatagggaaaataactttatatttgctatgacttcaactagaaaacttgcaaatgaattaaaaatagaattgaaatttcgtaaaaaaaacgtgtgatttgtaaaagaaacaattcgatgaagatgttagcgatgataaaataaaatctcctgaagaattatttaagattgagtattttattcatttggttgatcaaataatttcttcacttaaaaaaatttgagcaatttgaagttttagaaaatatttttggattcttatttgattttactatactaaagttaatggataataatgctattaaacaatgttgtttaaatcttgaagattttctaagttataatggacattctgatatagatagaatagatttatttttcagagttaaaagttttaagagaaatttatcaaaaagatcaatgtagtccattgaaagtacttaattatataaaaaaactttgattcatttccaaatgcttatatttcttatagaatattgttaa

SEQ ID NO: 258009 - DNA, 666 bp, Cannabis indica
aaaagacatcgctcgagtctccccgagatagaaaggcgacgactccgactcagactgtgaggacatggagccatgtgccaagcacatcctcgaagcagagctccccaaaaactttaagatgcccaaaatggcagcttataccgggaactatgatccatgtgattacctgtcacggttcaaccgagtcatgacagtcatgagagtcggcaatgaagctaagtgtttgtgcttcccgcttactctaagcgggtccgcggaagaatggttcaagaaattggaaccaggatccgtgggttgctggaataagttaaaaactaacttctggagacaatttgtcgccgcaaggaaagtcaacctagaggtcagcgccttgactaacatcaagcagctgcctacgcagacactcaagaatttcacaaataggttccgggaagaagcctctaaaaccaagaaagtagatgacagacaacaacttgctcttctcgaagcaggcaaccgtacagagactccattctggaacgaactacaacaagaaggagcttcaaaccttcaggacttccagaagagagtccaaaaatacattaacattgaagaggcccaaatagtggcctatggaggatattgttggaattttttttaccaagatcttagatctactcacaagta

SEQ ID NO: 258010 - DNA, 549 bp, Cannabis indica
aaatgagatgatgaagtacttatatagctatgactgtcattccataggaaacgtccaacattgcttactgcccatcttttagagctggtaacaaaatgagtagctggacctagagtctcatcatctttttgttgataatgactagttaattagatgttgatagagatgtgctgctgcaagtattgcgtttcttttttaattatcccttcttctctttctttgacaaaaagatctgcaatggcctcaacagtctgaccatcattcccattcacttccctgccaaaatcagaggaaacacccataggcaacactctcttgttgaatcgagactcgagagagaacagaaagagcacttgattcttcaacgattaagggcagctagggtttgggttatggttgaattgatggaatcgttaattgagagagcacaattaaatatatatgttaataaaaaaataactaaaaaattatcaaatgcttaaattttactaaaacttaatacagtaacttattttatataaaaatcttttttaatttctatatttaaac

SEQ ID NO: 258011 - DNA, 1290 bp, Cannabis indica
gctggagtgggtctcgccggagcctttggcgcttctgatttgagttgagggcaatccctcttgtagtgtacgggcatgccacactgaagcacccctgacctctgcactcacccagatggtgccttttacaaatgggacactctgggtaggaataacgagtctcagcactaccctgacgactgcctcgactctgattcccccggaacctcttgttctgtcccgagccaccggatgcagtcgatgttttccttttctggtccatggccgaaccactacctccccttctaaagcctgatgcaggaggggtaggagccccgccactcaccggagtcctagctgactcagtcatacacccaactgcgccctcagctcgcagtgctttttccaccatctcagcgtaggtggtcttgtcgtctgtagtgatcatcaggtcatgtttaatcttcacattaagtccatccaaatacttttcctttttactgaaatcggttggcacgattcccgaggccaacctcgctaaccgatcaaactgcattgtatattcagtaacgctcatattatctttctgggtcaggtgagtgaactcttttctcttggcacttctaacggcctcattgtagtatttcgcattgaagagttcctggaacttttcccaggtcatagttgtgacatcgtgtatcatagacaccatgtcccaccagaccagagtgtcctcttgaaactgaaatgtggcacacaccactctgtcattcccggtgacacccataaaattcaatatcctcgtaatcactgttagccaatgctcagctttcatgacgtccggacctaccagaaaaaccggaggtgcctgcttgcggaacctttcatacaggggttccattctattcactgctactactggttcgccctggacagcaggggtaggtgccactggaacttctggaacaggcactgtaggagcaccctgctgtcttagtctctgaatctcattatcttgttcctctattctggcttacatttctgcaaacctattttcccagttctgggcttcttgagtggcttgggcagcctgtggcgggttaacatcaccgcaaccacaagccctgcccctgggacctctacctcggccccaagcgtttgggggaaactgggcctccctgaccttgatttgacccgaccgagttgcccctggacctccgtggtactttcccggccctgggccatcccatctaatcttaacagcctgcgaaaactagagttggcacatcaggtcatgatcaacgagagctt

SEQ ID NO: 258012 - DNA, 1180 bp, Cannabis indica
taattagttagcagttttctaaatcatttatataaattaaaacttttagagttggtattaaaatgcatcattaattgtatggtgccttttgtggtgcttgtcatcttaatgtgtatcttaccatttttgttattaatatgtacatatttttataactacgattagaatttcaatatttttttgttaattatacataagtttgcaagaacatctccaacggggagatgtaaaaattgtatatttggcaaacaaattactttgtgatatatttgtattaatttttagcattgtgctccaataatgtacagttgcaaaacttgatgcaaaatttactatttttattgcaagtataaaaaagttaccgattggaccttgtgttttacaaaagttaccaatttgaccatttgttcttttaaatgacaaaatagatgtattttccaaaataatacaaataggactttttgttgattttttgtcaaaatgaaatttaatgataatctgatctaaatgtgttatagcaaaactgtttacattttctgtactagttcgtgttaggaattatcttcaagttggttatattaaaaaaaattgtctaaaattaagctcagggtcctaattttaccattttggaaaatacaagatccattttgtcatttaacaaaacagagggtccattctgtaactttttcaaaacacagggtccaaaatagtatttacccataaaaaaattatcattaattttttaatatgaaataataaaaataaatagttcataattaacgctataaatatactaataaaataataaaagtggcataaaagtaaataataaagttgtccatttatcataatgtaaattttgtgttataataaatattttgtcaaatttagctcaatatttactatgtgccaaatttacatcaacttttagcacaccattggagaacaatttttgctatgtgaactatattttaactttacatcacttattaatttacatctctattgaaatttctctaagttttttttaattctttttatttttctcttattcatattgtttatattagtcatttttattagtatttttgtataaatttatttaatttattttttttaaagtacacatgtattggatatagagaaaaaattttgatacatgtgcatttcataatttaat

SEQ ID NO: 258013 - DNA, 595 bp, Cannabis indica
ccactttcttgatgaagaaactactttcttggtaattttgctggcgacaatgccaattttgatgactttttcgacgccggcagtaactccggcaaatttttcgacaccagcagctactccggttaattttctggcaccgatagcaaacttcggaatagtcgtcgaaattggtattgccgccagtaaaatcaccggaaaaattaataagaatatttcgacacgtgacaattttgaaaaaataaacggctcagttaaaattaagagtaacggacaaatggaaaacatgaccttgaggactattacaactatttttcgaggttggggacttatctgtatcaaactgaattttttgagaacttttgccgcaaatttctcttttaataatgaggtatatacttattattttatcaagtgtaaatagaactctcacaaaattattaacacttttattacagttgtaattatagataaatattgtctcaatttagttatatatactaataaattcattttttatatggtataattattagtacagtggaacctctatctaagaatactctattcaagaataacttctaatttattattaaaa

SEQ ID NO: 258014 - DNA, 623 bp, Cannabis indica
tcttatcaaaaatcaaggtgaatgagtactaacccaagaagggtgggtagctcaaatggtcaggctgcttctgaggtgcataaaatatggccaggccttactaacttgcccaacttaactcatttttaatagggtatcttataaaaatacttaatttttttttgttatttttatatttttactgtcacattttttttcttcatatttttactatattaaattttaaaaaatactatgttatagttttaaaattaaaaaaaatattgtgtttcagtaaaattaaaaaacacaactttaaaacaataaaaacagttaaaaaataactctaaaacaacttaataaataacatgaaaacaactataaaataacaaaatgacatacaaaacaacaaaaaagtaacaaaatattgacttaattgtaatatgcgaaacaatgtcaaatcttcaacatgtttttgtattaggaaaatttttatttttacttagtttagacaactttttatcttgttgtattactatactatttttttcaggaaatttgttgttgcaacttcatactttcaacatatttttctctctttctttttgagttaatgacacctaaaatgacaatttattttttta

SEQ ID NO: 258015 - DNA, 620 bp, Cannabis indica
catatcttgggctaacatatatagatctagggttttaatttttgcttctgaatgtattagttagttagttacagactgtagttagaagtggatttaaccaaatccactctaactactttctgttaggtttattagagaccgaaggtcagcttagggattttgcatgtatttccttttctgtcctttgtgttcaagttgtatttggacttaatatcagtgtaagtggaggtttaatccaacactctctagttctctgaatcgctctcacttactctttgttttgaatttttcctgaggtacacactagtgttcgaaaagcagtgaacgacacaagataggttgatgggattagagtactatagcagaaagatgatttacttttctttttttcaaaaaaaaaaaatgtgacttgtttttattctggatttggttagtcaaaatttgatttttttattggttgattttgatatatttaattgtgaaaactttgatttaatagataggaatgtttttgtagccatagattgatagatttaatatttataacacagataaatgtataataatagttagaaaatgtgttccatcatattatttgctatattattttaataatattt

SEQ ID NO: 258016 - DNA, 536 bp, Cannabis indica
aagaaattgagctcttgtagcacggctcttggtgcttggggaaaagatatcacgggaaatttcaattacaagatcaaccggtgcaataaaattctcaagagactaaagggtagaagagattcagagtccatttcaaagtacaaagagacacaatctcaactctttgaagtcctctctaagaaggaagtttattggaggcaaaggtcgaaacagttgtggctacaagccggggatcaaaacaccaaatattttcactcatgtgcaagtagtaggaagcgtaccaatcaaattgtgtgtttaaagaatgatgatggcacttgggtcgattgggatagtggtcttcgagatgtgatggcaaagtactacatggagctattttctacttcaaatccgaattggcagcgtgtcattgattgtgttcgaggtatagtttcggaagaccagaacagggatatgttacttcctgttgaggagcatgaagtgaggaaagccatttttcaaatgcatccagacaaatctccaggtccggatggttt

SEQ ID NO: 258017 - DNA, 535 bp, Cannabis indica
acaactctagtatcagtaaggcgggcacgctcaataatgtcagcagtgtactttgactgagaaagaagataaccttttggagaaaaggcaacttcattacctagaaaatagcgcagagaacctaaatccttcatctcaaattgagaagctaattctgacttcaacatttcaatttcatgtaaatcatcccctgcaataatcatcatcaatatacaaggaaagtagaatacgacttggagatgtacacttgacaaataaagttgaatcatgatcacttgaaacaaaacaaagagacaaaataatagtagagaacttttgaaaccatgcttagggagcttgtttaagaccatacaaggttttttcaagcttccaaacctcgccttgcttatgaagaataccaagaggaggaaccatgtagacttcctcgtgtaagtcaccattcagaaaggcatttttaacatccatttaagatatagtccattagcgaactaatgccactgatataagtgtacgaacaattgtcattttcgtaaca

SEQ ID NO: 258018 - DNA, 608 bp, Cannabis indica
aattgtaaagctgaaaaaaaaaaagctataggaagaccctatgtcgccggttatttcataataaccgactccatatgtgtcctatggcgtcggttatatgaaacaaccgacgtcatagggtcttcatggcgtcggttatttcataataaccgacgccataggggtcctatggtgtcggttgtttttacccctacagcgtcggtagcaaattttgccaaaactgacgctgaaagcccttaaaaaccgcctctaaagcctaattttgtagtagtgtggaaggtttggacacttgcaaagatcttgcaagaagtacaaagagcaacaaggctaaaacaagtctcacactggagataggaaggacttccgacaccatcaccacgggaaggattttgatacaatcgttaaagatggcgatgattgttccacagaccaagaattgttctccatctcaggatcttcaatgaacatggagtggattctcgattctagatgcacctatcacatgtgcccaaatcgagagtcatttttttgttacaaatcagttgatggatataaagttctaatgggtacgtaatgatcattcatcactactacaaaaggcagatttc

SEQ ID NO: 258019 - DNA, 753 bp, Cannabis indica
tttttatattcaagcttaaatcaagataaaatcaatctaaatatggaaaagataggtaagacaaaaacttgggacttgcaaattagcaagtgaagcaaaaaactttatgtcaaattgtaactgacgcaaatttgttatttgcgtcagttacagtttggcgcatacaagtacgtaaaaactattttttttttatctttttgtgttgattataaaacaacgcatagttgtaggaaagtgaaaattacaaatttctttacaattttctcgacctacattttcaaattttagaattgttttgtataacaatatttttatgcactaacattaataacatttgtaacataataacgataacatttttcatgtaactaaaaaattgatataactataaagacctaaaactaatataacaaaaaagtaacgatcataaaagttgtatcctttacgtcataataaaaaattgatatgactataaagtatatcaataaaactataagtaacaacattaatataaaatgtgtatattataatgtgtatgaggcaaattagttttttgctttggttatgaaccgaagcaaaagaataatttttttttaaaaaaatataaaccttcagaccaccaaaatccttcggaccaccacaatatccaacaataacaacaacaacaataaatactgccaccacaacaacccatcgtaccagcaaaagcagaccaccaccaatggctagaaaagaaaatgagagagagagaga

SEQ ID NO: 258020 - DNA, 756 bp, Cannabis indica
acctccggagtccatcctctggtgcggagccaccgcgcgccaatatttttgtaacttttctgtggttgagctctcatgaactcaccatatggtttcaaaatctggtatgtcgattgatgaaacagccggttgcaaaatctttcagaatggcctatgatcccatagataaaacaaaaagtcggcaccctttcatatttgaaatgaacccaaaaccagttaccatcttctttagtcaatttcatacgccgtctcaacggtttcgctatatcaatcgtcactctaatgcggagataatctctccaaactccaatgaatctgaacccaaatatcaaggctgtttaacagaacaacatacggatcaccacccactgacaatcgttgaataatcaattgcattctctcataagtccacgggctgccattgataacacgttgaatatctacttcatgatagaattgaaaaagaaaacgattattctcaagctttttgacaaacattcccattcccggctgccatagcgaagccaatatattttgcatcttgtcaaaatcaatcatcctattagataggaatcgccccactaagcaccacctatcatcaatcccctcttctaccccgtcccctcctacagtcattccttccaaatcttcctcctccacctgaaagttgtacacatcctctctatccccaaacatagcaccacttgaagacgccatcacaagacaggaaaacacccaaacaagactagactatca

SEQ ID NO: 258021 - DNA, 1973 bp, Cannabis indica
ataatcatgaaataaatcatgtgaaccatgcaacattaaaatattatttctgatctttattaataactaaatctgattatattgaaatgagttttatttagggcataaaacccaacagagaattcactcgataaattctagaactacttattgaaagcttgattatataggcctatggtccctgcactagttaagataatattggcttgtagactcagttaactagttttaattaatcaattagaattttaaattaggctatgtcttagttataaattttcactaagcaagggcttaattgagaaaaaaagaaattttagggtttatttattaattaagatactttgataagtctgattaataaataaataataattttattaatatttaatataattattaaatagataaaaatggcatttatagagttagagttcaaatatggtaatttagacagaaagataagttatttaataaagtggcaaaattgaaacccatagggcccacaagggattcagccataaggttcaattttaaagccattttatctttttttttttaaatcctaacctaaccctaataagaatcatataaatagataattatatgctcttatttttataagttgataacctaatttcactttgttagaaaaaaaatagagactcctaattatttcaaaatcctactcttctctcctctataattcgtgtcctatagtgaaaagagttcttttccacacattttaattcaatactcaatcatagtgtggaagattgtaaagaattccatcatctaaggaaaaaccaagtttagatatttgtaatactctgtcatagaaaggatcaagggttagaaatttgaacagaatgagtcattatattccgctactaccaaggtaagattttctataactttatgtgtttattttaattttttagaaaattcatacttaggatgttagattatattcctataatcaacatacatattagtaaatttagatcctggtaaaataacttctaacaggaggatctcaatctcttcctgatttgtgttataaaagagtatatatacatacatatatttttaatataattatcattttttgttgttgttattatttagaatagaaaaaaaaaacatatatgtcacaacgtgatctagagtttgggcgattagcaccgattccagatgcttgacagaccactcatcataagtagggcaaatgatgggtgactgacattgcaagagagacatggatatattttttaaaaaaatatatcttctttatatgttttgtctaaataaattatataattaacttaaatattattgtgtaattggagaaaatgactaccatacgtgagacacaacaaacacagtttacccaaaatattgaagagctaggcaattcatgaatcatgaagacgaagatctatcacttgtgcaaactattttttggaaaacatcgtgggcacctaaaagattatggacatctaattagcacaagagagatgacatcaccacctacattatacctagcctcctccacctccggctggtgtatatgttagagctgatgtcataaatgatatgcatgagtatattagacagttggaggaactggttcggacaaattctgtgacttcgagatcacaaaatttgctttaacaatctgatcatcccagtgatgaaggactaagtcggtagttatgtttatatgtagtgtttatttctttcactcttttattattatgtttaatatttaggtaactaaaattataaccttaataatgtaaaaaaaaaaagaagaagaaaatttatggtatatttattaatgaattttacttttataattatttgagcaatattaatgtcaaaatgtataagatatatttaacatggaaattaatatttattaattatccatattttcggatggaggacatgtgtaaatctaagatagtttc

SEQ ID NO: 258022 - DNA, 1002 bp, Cannabis indica
gacttcaatctctccaaagtcatatgtccgaacgtgagggctttggccgcagaaaaggtgttccgggacgacatcattgccacggcggaggacaagtattagaggtacctctaaaggagggaacaggagctgacctacatcaaggcccaggcggccgctgggaggactcttcgcctggaagctccgccggagcagaggacccgtaggcccaagccagtggtcccggtcccaaataccggggctcccgatgccagcacttcgggttcgggtaagtcccctttattaatatattacgtccctcctgtccatgagtatacccgtcttaggcctatagggttcgacgagcgtctctatatgtttagaatgccttcttcccggtggggggatcatgccaaggagtattacttttcccatttaggccactatttaggtcgatcccggatgggtacgggacctccgacacctattcctttggatcactcggcctacttatcttccagctggtttcttcccttggacagttatgtcggggatgatgaagccagtgctataatccaagactttgctagggccgaattagagagtcagggtagtactagttttattgctttttcgctaagtgcggtttgttttcattaatgtcctaacacttatttctttattgcagcagccaggcccatggacgatctcctggccacttttgctaaggcctacagtccggacgcctctctacgtccggttgtctcccatttaactactgccaggaggtcctcctctaatgctccttcaggcaccatcgtcctggtggacgaggaggaggaagttgaagaaggggaagtggaggacccggacgcccttgagcgtaagcgaaagggcaagatggtggaggcggagccttccaagcggacccgaagggggacactcctgccccgacgccgaggcatgactctggaattccttccaaggcggaggaatacactgtgccgcacggcatagtgttga

SEQ ID NO: 258023 - DNA, 522 bp, Cannabis indica
acttgaaggtattcagatgtgtctgttatgcacacatttagaaaaataaacttgaggcaagagccttgaagtgtattttcttgatggtattcgaaatgagtcaaggttatagactatggtgtttggagctcggaatgagaaaatgtataattagtagggatgtgacatttagtaaatctggtatgggtattcattcacacacatgctggaagtcaagctggatctgatcatatgaaaattgaagctccaggaactaagcttgaggtggtgcctctggaaagagtggagactgaaatgcctatagatcatggaagtgatgattcagaagatgattctggaagcgatgatctaaaaggttatacagtggcgagagatatgatatagagagaagtaaaaggttctagacaagtatggacatgctgatataatagcaatcacatttgaaattgctagtcagattgtgcaggaagagcctactagctatgcacaagcaatgataagcaaagatcagaagaaatgaaa

SEQ ID NO: 258024 - DNA, 906 bp, Cannabis indica
gtaatgggttttatttagggcacaaaacccaacataaactccacaaccagtagcaatcttgttcaagatccaactactgctgtcaacacttggcattgtcgccttggtcacccttccaagcccattttagccaaagttctttcacatataagtcctactctcaaaggtaaaaatgttactttttgtgatgcatgccaaataggcaaaatgcaccaattcagctttaaatctgtccaaaataagacatctattccttttcaattagttcatacggatgtttggggtccttcttttcatatttctatggatggatacaaataatatataagctttgttgatgattttagtaaatttgtttgaatttttcctatgaaaactaagtctgaagcaccaagcttattcattcaatttaatgcctttgttgaaagacaattccaaacaaagataaaaagtatccaatctgaccttggcaaagagttttcccctcttaaacaacaatttcaaaaatgctggaattgttcttagaaactcttgccctcacagtcatcaacaacaaggaagagtggaaagaaaacataggcatgttgttgatgttggtctcacccttttagcccaagcacacatgcctctcaccttttggtgggaagcttatgtggttgctgcctatcttatcaataggcttcctatcccggtgaacaattatctatctccatttcaaaagttatataaagaagcaccagattataaccttgtcaaaatttttggttgttcttgttttcccctcttaagaccataccaatctcacaaagtttcatttagatcttccaaatgcttattcattggctatagcatgacacaaaaaggttataggtgtcttcaccatagtggtaggatatatgtggctag

SEQ ID NO: 258025 - DNA, 1009 bp, Cannabis indica
aaaaatactgccaggcataaatttcctttttaaaaaacctataatgaagatgctaaggtagtacaatgcataaaattaagcataactcattgccaaatagctatcaaaaatatcattattattgacgctaaaaagtagctaataccagctcgttagatttgtgagatgaatatgaattaaagtaaatactgtagatatgttaagcaaaaattttacatttagaatattaaaaataaatgcaaaacacaatttcacctatgctaaattcatagcataagagtttattaatttaagttcgacccatccaagattataagaataatctcttaattacaatcctttgtttaaaggaaataccatttgattccaattacgataatattaaataaattaaataattgaggtaatttcgggtaaatttgggattgcagctgaactcagtcaatttaattaaccgagctgcctacataccttctttgtgaaggatcaagccacttgtagttcagaatacggtattttagaatttggatataagaattccggtggatgaccactttcaagaattctttgctatttgaaaatttagaaaaattcctaggtgggtgaccttttatggaattttgagatttgtgttttataccattttgcggtatcggcgactgcacttagtcttagcaactaagttgcctacttatccttttataggaatcaagtcaaacgtagttccaagagtgttaattttgtatgaagtgaatgacctctcatttttttgaatgacatttaatttgttatggctttgaatttaagtgcactttttaattttttaggtaaaattaccacttttaagattttcgtgaggttaagacctctttgaaattttgtgaggtgaatgacctctttcatattccaagattaattttagtgagctcatttagaattttgtgccattttatatgactttagaattttaccacttttttgtgataaaatttgaggtttgaaatctttt

SEQ ID NO: 258026 - DNA, 1058 bp, Cannabis indica
ttgggattcaattccaagttcaattaaatgatttttaaactgcatatccatatcttctccacccctatcagttctcaagatctttgaagttttacccaattggttttgagtcgatgcttgaaactcctgaaacttctcaaacgtttcagatttcttatgcataaggtaaatatgaccatatctagagtaatcgtcaatgaaagtgacaaagtactcataaccacctttagctttgacattcagtggtccacaaagatctgaatgcactatgcctagtggttctttagcacacttttcctttgctaagaaagaacgttggttcatttttccttctaggcaagattcacaaactcgtaattcacctaaggtgacattttcaattgaccacctttggtcaacctgtcaagtctatcatagcctatatgaccaggacgtatgtgccatagatgcaacacaagtttgaatgtcatttcgagaaatgatagaaccagaactcgaaaaattcaatttgtattgttgcaactgtaaacatgaaacagaaatcaagtttctagtgaaatttggaataaacagaacattgtctaagttcaaaattctgttctaaaacttgagttttgcttttcctctagctctaaccgataccatttcgttaccaactttaaatttaaagtctctggattttaaataattctagttttcaagcaattacaatgaacaacaaatatggttagtagtcacagaatcaacaatccagatagatttgtcattctctaaaacacatgattcaaaaaacaaggcattaccattgttcttagtgttgagaagtctgggacaatttgatttcaaatgtcccttctatttacaattagaacattaaataatatgtctgcttaactgttcttggattgttcttattgctggttcaatctgttgtgaaagataatctgaggaagtggaatcactttctctatttttctcaactgagcctgaagtagcaggattgttagaggactcattctcagtatctcagctttatgtttgcccttatttacattact

SEQ ID NO: 258027 - DNA, 496 bp, Cannabis indica
taattaatctatggaatctatggttatgtttactgaattataattatcattttctttagtttgtataatgtgattataaaatggtgtgctacataccctttttactttaatattagaattaaagaactattttagtcatggaaatagttagagaaaaatcctgttattattgcatttatgttttaattccaatagtgatatgtcatgccaaccaatatataaagtaaagaaagaggtatgcgcttttcattcaaatttattttgtatctatacctttattagttgatgggttaggagatgcacatgagcacaaaaaaactaggacaaagtcagatattttttacttcttaaatgaaaaattattttcagttgtttttttttgttggtatatttgtttggtttatagtttatgttgtctttgatgatctttgatgatatctagtggtaatattttgttgtacgaatgagtgtaaaatttgtgtagtttttttactca

SEQ ID NO: 258028 - DNA, 545 bp, Cannabis indica
agtggacactgaggtagccgtctttgtgcttatacaacttgtcgaaaaggtataaaatctccttactgatttttactagtagaggtccatgaaatcataaagtgaaacataaatgatactcttttcatttgccatttttttttcttttatgattttggctttcattataaattataattactaaccaataaatgttcttatagaagagagtgctgaggtgtattgaaatgattcaaaacttggaccagggattaaaatccatgtgagttgcacagtctgcaccagatcgatatggtttgcttggtttgttaagtgtgattaggatgagcgatcctgatctaatgtcactttcccttagaatttatttgacgaaactagtttaaatttgaagtcaacggaaaatcttcataaaacttttggttcttgttggtcggatgagctagctaagggtgatccaaaattcaatttcccacaatgttactatgctaactaaacaactaccttctttacatgtgtgttttgttttcatagctatatcttccgta

SEQ ID NO: 258029 - DNA, 815 bp, Cannabis indica
aacaaagagattaaataaatgttacaacacataatatataatatatatacactatatatattatatatataagaaaggtagaagaaataagaagattacacaatattatataacacatatatatcatatgaagaaatatacatatactcacaaccttgagtgtagattagtggggatcaccatgacttgaacaaggtattacacctttgtccaaaagcttatttccccctatctctaagcactaagggaactctctaggaaatagctttgggaattatcaagccttagggttttctagcaaagtgctttcttgatagaaaacttcatctctcactctcaaatgagcaccaaagacctccttttataatgtataggtgatcacttagaattcaaaatacacaacactcatttctctcatataaatgagtattaatatagtttgtaacaactatatttcataacatttgaattccatcatcaattgtgtaacatctcttttattacacaaaatatgatcaaccaaaagaagttacaaaaataattaatcttgtaactcctctccatattacaaagtgtaggttacaactttaggttaaataaattatatattacacaatttatttaccaaacacttaatatatattattcacataataatatatattaccacattttaatctacacttattatattataaaataatataacaatcccccactagattaaaatgtgtgacacacttgtaacatttatttaatcaatcaaaatattatatcaaaatataacattcccccactttgattgaataaataca

SEQ ID NO: 258030 - DNA, 626 bp, Cannabis indica
aatgaggagaagaacctgaggcaatggaagctgacttaggtaaacagaaaaaagtttgctattcaggggataatgtggtagaattgacaaaagggaatatagcttcatggaaagtaacatcccttgaataaaaagttctgtttgtgttgagatctaaaagcttataggctttcatactaatagggtaacctaagaaaacacaagggacaacccttggtgaaaacttacacctggaggtaagtaaagtggaagcataagcaaggcagttaaaagctcttaagtgatcataaacagacactttggattttagaagctcaaatggtgttttaaacttcagattaggtgtaggggttctattaattaagtaggcagcagtactaacacattcatcccaacaagctagaggtatgtaagattggaaaaacaaagccctagcaacattaagtgttgatgtttcctttccacaactgaattttgttgtggcctttagacacaagaatggtagtgtataatgcctaaggagttgaacagttcaggaaattgtaattctttggcattatcagacctaacccctttaatttgaacaccatattgagttttgataagctgtaaaaacttaggaatag

SEQ ID NO: 258031 - DNA, 549 bp, Cannabis indica
gcatgcctcgtgcaactcgcgagggatggcagcagtgaacatcttttgtttataactagctatgtgatcatttggattgcttgttccatcttacatcctcattaatgggaacacacacttctttggcatctcgatcaatgcaatggcatcaacaaaaggtgagtcagcaaaactgctaggcagacttttctttattggtgttggaacccctggaatacattggatcattgcttctatcccttcaaacctccgggcgatcgctcgttcaatcaaatcctcttgagttagagtatgaatggtggtatgacctgcatcaacagaagatggaatcagattggagtttagcataacatgtgtggtagttacttgtgatggtgagagtccttcaagaggagacgttgttggaggatcagatgttgtagcgtcaacccccaagttgcaagtcgctgggaggctgactatatgcaggccagttgtaggaaggctgactgtaggcagaccagttgtaggaaggttgactgtaggtaggccaattgtaggaaggttgac

SEQ ID NO: 258032 - DNA, 1087 bp, Cannabis indica
atgtgatgtcgaacctagatgctaggccaagggaaatcatgctgaggattgtattttttgatgcctaggtgatattttgacatcactttagctagtttttgtgttcttgtgaagttattcaccgattctcggagagcaccaagtcatatgtcaacttgggcaatgggtgctcattctggagcttccgagatgttattttgatacttctaaggtttttgaaatcaaggacgaggtctcctaccccgtttttgaccatgccaaagagaatgctcagagtagaatttacatttggatgatcgaaaatagtgcaccagattgattgtcaacatgggcgctgggctcagctttcatgccatgggattctcgtcttctcatcgactttacttatatcttcattatcttaaatgacagaaaaaaaaaatgcccagaatagtttctcgagaatatgattggaaataactcaagttgactaaatgttaacctgggcgttgggtccattttctggccactagatgacttcgtttgattcctgaaacacttatttcttaatatttgaaaaaaatagagaatattcccagaataattctcagaaaaactccttagaaatggcctaggttgacaaaatgtcaacctgggcgctgggcccagcacctaggtgtcaacctaggtgctgggtccctctttcagcctccaagttgatctgtttctttcctgaaagcatttgtttcctcattttcgatgaagacaaagaaaattcttgtgatagttcttcagtttgatgcttggaagtgccccatgtcaacctgggtgctaggtgcctagggcacctagtgctctgggtgctcaaaaatgaaagtgatctgaatttgattttgatgcttcaaatatgttcatgacatgtctaatgttgggttttatgccctaaataaaactccattttaatgtaatccatattattcaatatcaataaagaaacagaagtatttttcattcatttgtgtattttttggttcatattgtcaattacttgtctatttgatttataaattcatccaaacccttttcacatttatgttcttgtttattg

SEQ ID NO: 258033 - DNA, 802 bp, Cannabis indica
aatattgatccgattgatgcgattcaacatgcatttcaaagctattacaatactctatcaagtcatgtctcacacttaagtcacaattctgaagttattgactccaaatttcatcccaagggagttacgaatttaagctatagcttacccagagcgagtcccacaaatgcaactcaagctccaaaaattgatgactgacctttggagtcaatttaccgttagataatcttgtactatcaaaaatatcctaaatgtacaaaatttttggattattttattgttattttaataagacattcttcgctataaaattagagcttctcaagctcatttttcacattcataaaagtacccataaggtcagagcatctgtctctagtttctctctctaaaaattagagctttcacacttagccaattttcttataattcttgttagaaataaaaactcaaagtagacgtagctctattaccatcacgacatggggagtgaactactataatttacttaaacttattaatcatctcgccaatctagcgagctagtattggccaattttcaatgtcaacattttagtgtttcattgagagccgcaacttgacttcctcaactacagtttgattttcttgcttagagatttattttgaaaagaatgcataagtttaagcaagagatcatccatcaacacgcaaagcaagactaccactcctaatagtcaggctatactactcaacaagtagcaagcactgagattccccataagaagcgaactatgagaaagcgtccgaaaggacccatact

SEQ ID NO: 258034 - DNA, 784 bp, Cannabis indica
tattaataataaatcactttacaacatcacatatatatgccaaaaaactcgtacaacaagtaagtaataaagaaaaggaaaaataaataaataaataaactgcaacttacgaatcaattcaatatatatgtatacctaagaggattgaagtcaataaaaaaattcaatcaattaatacgattgaaaaaaaactgattgatgcattatatgccatccgtatatgaaccaaaaacgaaaattaatggcaaaagccattaaacatatattaacgaacgtccaaaaaaaaaagaaccatattattattatatatatagatatatattagaagaatattacgtgcgagtcaatacctcccacagcgaaaaacgcactcgagtcaatacctcccacagcgattcgggtatgatgttattaataagaggtaataaacacaacaaggggttgttcgttttcccacttcaatcgagaatgattggctctcgatactcatatcaatggatgagtattgctagagagaatggttggcatgttttgctcgacgcttgtgctttgggacccaaagacatggaaaccttagggctctctctgttccaaccagattttctaatatgctcgttcttcaaagtatttggggaaaacccatctgggttcgggtgtttgtttgtcaagaaaacaacttgttcgatcctagaagactcgacattggcctcaactatcggcatagtgagccttgtagaaaacccattatgaacaaacttaatagtttccgatctttcaaagtaaa

SEQ ID NO: 258035 - DNA, 504 bp, Cannabis indica
ccatacttggaaaccgtaccctctaccccgttaatttcagaatttgcccatttactaaataatgaaaactgtcatggccaatgctctttatgtcatagaaatagctaaagtcctccccctttggttccccttgaacataatccatgtacatcacataaaaccctagtattatgcaataactatttggagttagttggaagggcaagacatagtaatgactaaggatgtctttcacgaagggatgaaaaggtagtgtcaccccgccatcgcaaaatgggaatcgagaccaccacatcttgtgtagggatgatcgacaggattagtgaaaggaagatgaggtcgttgagatgccgaaggacgtaaagtccctatacgaactaaatttagccgtgcaagcttgtgcaggtctaatttcgtaactcgcgagactagatcctcgcaagaaaatggttcgttcagttgggtattctcaactgaattcgtctcacttccatcaacctcccc

SEQ ID NO: 258036 - DNA, 1143 bp, Cannabis indica
ttttgggtgcttttggctatgtgtgatctaccaaaaatagtttatatgtgtccatctagtgctagctgggctgctctaggagggtatggatttccaggaccatgagctacaataggtcttgctactagagagttctgcacctcctgaagggattatgcattgggagcttgaattctaggagtttgtatatggcctactccctaaggaggattaatggctccgtattgtccaggaagaaaaagttggccatgtgcaactccctatccaagataaataactggtatccttacccatttagatagatgaccatttcggacaaatccttcaatttcatccctcaggtagtcacactcattggtggtgttccctatatcaccgtgatatttgcacttcttgtttagatctctcttttatcttttgcccttgtacattggtggaggtttcttgtaatgggccatgctacaagttgccttataaatattctctcgagtatcagcaaggcttgtgtactcggagtatcttgactcttgagtctttcatttcttcacacgacttggacccttggaactcctttaactccatgattggcttacattggactctggagcttttgctttttattttgtttgtttgggattagtactatattcattttgtactactctgaatccaaaaaaactagcctatgcagctggctacgcggaagcacttggtcgataaactgtaggagttgtaaaggcagttaccggatgataagttaatggaacagtcatttgtgaagtcttggtagtttctgtgttggtggaaggggctggaagtacctcgtaagcttgggcgtaagcatcttctaagttgatgaatccttgggctctcgttaagaaataattcgaagtctttactcttttgctttggagatctccccagagcaaagatttaatggctaatcttgatgtcaaagccaccatcttcatatcattagtaactttatttttgcctgcaacgtccatcatacactgaatgtacttcttcaagctttcccctggttgttgtttaacattggttagggagctgacttctagatcaaagcctttgctgccacaaattgtttcctgaacactgcctgtaggtccctccaactgtgga

SEQ ID NO: 258037 - DNA, 512 bp, Cannabis indica
aaggtatgtggtttttttttttgtttttttaagaaagggtttgaagatttattttgtttgggattgtttgtgaaatattattggttagatttaagaattttgttgtgaaaatgggattcgaatccgtgaaaattggattccgactgtgaaaatggtgagattggccattcgcatctggggaagaagctcagtctgatgggtccagctcggtccgatggtccgattatgggtcccatgggtccctttggctcgggtccgatggtacgattatagggtccgatggctcgggtccgatgtgtgttttgtatgggccgatagtgtgatgtctgatgggtccgattggaccgatgggtccgatgtgtaaccctatcgggccaatcggacccgagctgtttttttttttcgttttaatgatttagtaattattttatgtattattttatttgtattgatttattaagtattgtttaattaattattgttttattattaataattaattattgtatttt

SEQ ID NO: 258038 - DNA, 704 bp, Cannabis indica
cgatttttgctaaaataaaaacttggatatataacagtgggataaaaagtatttaaaaaatcaagataaaagatacactttttatcccggtttttatgagaaaaccaagataaaatggtactttttctcccaatttttttttatgaaaaaactgtgataaaaaatacccttttatcctgatttttttgtaaaactcggataaaaagtacgttttgagaaaagtgtaataaaagggtacttttttaaaaaaatgataaaaggtgtgggaaaattacgactaacagtgcagaatcaaatcaactaaactttaaacaatcaaacaattgacaatgacaagactaacaaatcaagaacaataatcgaaagaaaaacagggatgaacagagtatgaaaaaactagaaacaataaatgcataaaataaagaaatcaacaccaatgtatatactagtttaagtttgatagatcggcgtgatctatggctctactcaagttttggaacaccaccgaaatcctctttgttgattgagcaagaacaagtacattacagtcaagatagattctctattgagttctcttaaagtgtttaatctctcacactcttaatcaagaatcttcttcatctggagaagattcttcatacaaaaccaaaactcaatctctctcttttctcagtacctctatctctacctctaaatcttctctc

SEQ ID NO: 258039 - DNA, 1676 bp, Cannabis indica
tttttttagggcctcttgtataatagttttttcatccctttttcgagattatttgccactatttataattgcatagtggcagttaattacaaggctgaccaaaatataattacagtcactatcccttaaattaatcatgggatatctgattacatataataaaatgtaaatgcggtgcatgattttgaaaatcatttagccgcgattttctcgcttttactgggtcagaaatatcgtgtattaaacacgtctttaattgttaattctggagatgtctcgacagaaactagactgttgtgatcccaatggcgagctggaaccattcttcttttcgaggtcgacaagatgtgtcttgcgtcgatcgtggatataaggaaatctactgacttgccatggttatgagtctcgcttccgttagttggatgaaactataagaagtttcctcgtagcgagatgctcgtctaatgcctggctattctcttttagccacatatggtttttcgttaatactctaagtactagttcgtacattgatttctcgcctaagactttacagtcagcgggctgcaaatatactctactacttatgcaattaatgaattattccataaaaagatatgtaaccgattcacattctctttatcttgacacgtgtcctccaaccgaatttcgagtataacaattttatataaagaaatttaaatttaaaatattataaatatttttaactatatatatatttttaactttattattatttattttatattttaaattgaaatggttgtaccaacgacttgattgatttctattttagttatggtaaaccgattcacacactatatttttcgtaaagtttgggaataataacctttatattaaatttacaaatccagtttatatatacacctcaaatttgattacgtgagttttggttaaaaatatagtaaattacaatatatgcattatcagatacgttacctaattaagaaaattttaaaaattttaaaaatatgtatatataataatatccaaatgaaactcctatgtagcaatagctatttttttttttttcaaaatctcaaaccccattatttaaaataaaaaaaatacatcaccaaattcaaaaaaaaaattaaacatacatgtattgcacttaacatcacctaattgaacttaattataaaaaaccaattatacgtgtattgcacgtaacatcaacctacgtaacttttacattacgtttcattaaaagtatatctatttcgttttgataaaaatatatatatttatatatatatgtatatgcacaaattaaaaaatatactgtgtttctttttagacagaacatttaagacattattactacactaaagtaaacattttattacttggcaaacaacatattatatgcattagaagatacatttttataaagaatgatagaatattcttcatccaagaattaattatttacatgtattgaatatacataaaaataacttcacaaaataattataatacttttttattgtcttaatcactttatattaaaaaatttaattagactataataataaattaaattatatataattatttcttatattatttataattaaatgatatagcacataatataaaactaagcatctgtgccttgcacgagttttttt

SEQ ID NO: 258040 - DNA, 514 bp, Cannabis indica
tttttttttttttttcaaaaatgaaaaattaagtgaaaaaaaagtttaaaatgtaataacaactataaaattaatgattgttaactattttcactcctcattataatcatcttcatcaatctaaagattgtaaaaaaaaatgatcaaagtagattaccaattaattgaaattattgcttcttttttacaaataagcataacagtaggaaaatagcaagcaaattattaaaaaccaagaaaaaatctgaatgtagttggttatagagaaatgagtttgtgacagtgatataggagattgtatcgaagtagaaaattcacataatgttaggttgggacaaattgaaaccctaatttttaaaatttttctataaaggaggaagatatgtcaagcggttgttgcaaaataataattagacgtaatttttaaaaatcaataaagtattcaaaaatttattttagaaggggtggatgtctgaattttgtaaaaaaatataattttattgtaaatattata

SEQ ID NO: 258041 - DNA, 1003 bp, Cannabis indica
ggttctgaataacggtaggactgtcgtcgctctaccctcttcggtactctactgtcgcgagagtcagagtaagatgttatcgattgtctattagattcgtcttcctcccacttgatccgcgcccaagttttggcaagtacgtcctccattgtcctgcatggatatatttgtcaattctttgtaaaggtcagattctaccagcaggcctttacggaaggcggtaatggttgttgtgaacgcagatttttgttaaccaaatttgagcctcacaatattgatttcacatagaaaaaattaaagctatcaaaataaagaatatgaacacaaaatttttacgtggttttgcagttaaaattctgcatagtccacgagtcaatcttattcagatttctgagtattttttaaggcctctttcatatgagtttttttgtcccttttttgatcttttttgtcactatttataattacatagtggacaatgaattacaaagttgaccgaaaggtgtttacaacaatcatccctaaaatagtgggatctgattacatatcatgtagtgtaaatgcagtttatgacttgaaaatcatacaactatgattttccccctttttatagggtcaaaaatatcgtgtattaaacacgtctttgattgttgtatctggagatgtctcgacagaaacttgattataatgatcccaatagcgagttggggccattcttcctttcgaggtcgacgatatagatcttgtgtcgatcgcggttatttataatgaattattctaacttgccagggttgtaagcctcgctcctgttaactgaatgaagctataggaagtcttctcataatgagatggttacctcgtttatttgttctttgagccgatccgcctttttcacttagtatgttcattgcacagtaaggactttcacgattgatacgtacgctttctctggtgcctcgctattgcatttagcgatgtatggtttctcgctaatacactaaat

SEQ ID NO: 258042 - DNA, 732 bp, Cannabis indica
gacttagttgtattgtacaagaggcagcctattatagacttgtaggttggttacaatgaataggacaagacagttaagttagttggaataactaacttaactgtcaaaatagtaaaagacaaatacaacctgtacaatgtgaagtcacactagattttacaagaagcttatataattttataataaattgcttatactaatctttattactaccactattgttaatgccagacaattcttttgtctatactttatatactcatcaaagcagagtaacagaaaaactattctaacacactaacataagtcttgattgaaatttgttctaatctaacaactacaatacgagcctttatacccttaatctttattcttaatgataaatttacacaaaatagtttgctactttggttatagcattgagcaaagtattaaatgcaaaagcaagattgaagagaaaaagaaaataagcacataaagcaaagacaatgtctcttggaaaaagatgaagcaaggaatataacaaatccatgttaaagcaattaatacaataatactttactttggagtgttaaacttgttctaatgcatcatctttgctataaatattacaaatcaaaacgcccttcatctcacacaacacaacataatttcgatcaatacaacccctcttgagttccttccctattaaccttcgccctttttcatcataccttctaagtgaaaatggcc

SEQ ID NO: 258043 - DNA, 498 bp, Cannabis indica
ttttaaattcaaccatttaggttcaatttaatattgtcagtgcctataattagtataactattaatgtgaaaaaatacatatatatttgtaaagtagataaaacatacctgaaagaaacctatgaaaataagcttagttgaatattgattgaagagattgagaagtacgaatatttcgaaatatatatataaatatatatatatatatatatttgagattatattgattgagaagaatgaatattatgttcatatatataacttaagtagagggactagttataattaacgttggattactcctacttggaataggaaatgtagagataatattataggattctttttcctattataattaggatttagtagttaccttctttagattttattagttttgacccattactaaatttacccaatgttttaattaaaagatttttcttacgagcaaacccggttttttatgatcaagttatctaaaaaagttaccctttt

SEQ ID NO: 258044 - DNA, 1415 bp, Cannabis indica
aagacaaaaagatacttaagagtctattgagttattatcagagccggacctagacataggcaggctaggcccatgcttaggacccactcattttaggggcccaaataaaaaaattctttttaaaaaatatacatatattttttaaaataccatttatctttatagtaagggcccaaaaaaatatttttgcttatggctctgaacccagttcgacctaaaatacccagttgtgactataccgcgccgacttgttaaaaaacacctaaaaaaggacaaagcgagtatattatataatagtatagtccataaacacgccataatattaaaattataattaaccctttttggtcaaaattacaaaaatatccctagctcaccaacagggtcttaacatgtcattaattagtttaattcacatatattaaattatatcataatataattccacattaatacacatttaactagttagagttcgctaatctgattccttaatctttaggtattacagtaagagttgaaatcctcatttaaacaaactaggaaacaaatcgcgtttctcatgcggttgtattttgtttaatgataattttaatcataaaagcctatcaaatttaaaattttgatatatttttttaataatataaataactattatggtaaatttttattttattttcattttaataataaaaaaattaatatcatacaaattatttaaatctaataaattataacttttaattaatttatttattataaatataccagtttttgaaaataaataaattaaattagaactcaaaatatatatgtataatataacaactgataaatttatataatacatatataattaaggcaatatagttgctcttcacacgactattttaatctttttaatacagtaattaaaaatataaaaaattattaatataataaataataactcaaaaaatattatttcaatgtataataaattaaagttatattatttaattgtatcacactagttgtcatcaccgtatttcgcttataattatgactattgtcctctagtagatttactctatacataaaacaaatcaagagttaactacttgtttttataaaaatgactaccacattattttttatcggttagaaaaaataagtaaagaaatagattacggatagagatattagaaataattttagaatgacttttttttaaagattagattagtttttagaaatttaattttttaggtcttgattaaggtgttgtgggttgtaaattattttgaattaatgttaaggtgttataaattattttgaagtaatgcaaaattaattatgtatttatagatttaggtttctcttaattgaagaatttggtttgctataaaagcttagagtactcacatgagcttatt

SEQ ID NO: 258045 - DNA, 559 bp, Cannabis indica
aactgtttgtagactctcattatagataatggtcgatttgagacgtcttttagaatttctctatgcataagcactcacaatagcacacactgctaaaataatatctaaaattataattaaatcctgcactacaataattgttttttactttcttgctaaacttaaacgagccattaatctacaaaaaatatcaaagcaaaaaaataataaagaaactaaattatatgacaatattgacataatgaataataatttttcaattatgtgtatgatcggcagacatatatatacatataatatatttttactttagtgactaattataactatgtatatatagaagaagctttcttgggaatttaaaaatgatcctaccgtgaggtatttaactaagtataatattgttggtaaagcatacaatattataatagaatcgtatatctttttaattgtgggatctattttgtcctcttctctgctattttttttgtggcacaaatcaaaatttaccacctcaattaaaatatcagctcacgatgggtagtggggatgtatagat

SEQ ID NO: 258046 - DNA, 503 bp, Cannabis indica
aagatcttcgcaacttcttaggctttgctttatgcattgctgttgagtttgaagcgaccactttgaaacgtgatgatgtgttaaaatgtaaatacaatgtgaaaaccaagaatggtcagaactttcaattctattcaattatgtattgtggatattgtcccacatagaataaatggcagagaattgagcaacatgggctactccactcattgccaattgattttgagatggaaccctatgattctcgacattatgcaatgccaaaagctactcattttgatgatgatgatgatgatgatttagactcgttctcaaatcaagtgttcttatggtatgataatggtaaacactttcagaaaaagagaccacattcagaagtttctctcaataggagagggaaagtcatacgttgtgatcttttattagatagggaagagagtgtcatatttgagtttcagaatagcaaaggaacaataaaacaatgtggagtccacttgctacat

SEQ ID NO: 258047 - DNA, 940 bp, Cannabis indica
atatatattaattttaatttttgttggagcctccaaaattatggtgcctagggcggaggccccggctgccccactctctggccggccctgcttgttagtaactagaaataacagtgcaagttgaatgtatcatataaaaataatcgactactattttgtcctttatgaagtgtttcaaattaactaattcataaatgcatatcatattttattcttgtttttttaatgtaaattgataaatgcatttgaagtgttcattcctcaaaaagtatatgatggtactacataattgacctttaacaccgtttttttcatgacattccttgctccagtgtaagaaaatcgcttaactatacttattattttataaatgcacgagattattattagtattaatatatttaaatttggattatatttaatgtagaccaatatttcacaagatttataaaagtaaatcagcagaacggttacaatcactgccatatctcatagcactgctaagtttaatgttatcgatgtactatgcattgcttcaggaaggtgttctgctgctcattactattaactcatttgattgtgttatcgagaccatctacattggcttgtttatcttttgctcccgaaaaatctaaggtattcatccactattaatatttttaattaatattttattttaacaatattgaatgggaaatttaattttttatgcttacatatacttcattttttccctaaactcataatatttgatatctgtggaatatgacagattttataatatccttaaagtaccgtcccgcccccctatttacatcaccccctctctcttattttctctttttatttgactacacagtcgatccatcgggccccatcggaccatatcaaattctatttttttacacaggcatcgagcccaccatcggacccatcgggc

SEQ ID NO: 258048 - DNA, 543 bp, Cannabis indica
tagaataattaattattaagaaccatgataatgttaaaaactttgctaatataaaacactaaaaatagacattacaatggcataaaaagcgtaaaccgggaatccctgttacaaaaagttttactaaagaaatatatacggaaactatttaaacacaaagtcaaaatacacagtagatacagccaacccaaaacaactcctggaaactcggcacgcaggccggtgagctcaatttgtacattactagagaaggtagtcacctcatggcagctctaacttttctttgcctttaactgcaccacatagcacccgtgagtcacgaggactcagcaagaaaagcaatcatataatcatataattttttattcgaaatattatcagttatacacaatcagaatcaaacaatcacgcattgttgataagatgaaatccaatttgctagtggcatcaaccatgaataagcatcagtatatagatatcttgtaatacaaaactattataccaataatagaaatcatattcatttaataatataaattatat

SEQ ID NO: 258049 - DNA, 533 bp, Cannabis indica
cgcctaagatagttagggtgttacagaggtggtccgtgagtcgtgggtagtgtgggtggtctgattgtgtgctcctctgtgtgcgtgtttactgagagcgagagagaaagggggaaagagagagagggggttgttcaaatgagattttagaaaaaaaaaatgacttattctactaatattaaacagcttaggtttaggaaattaattttaacccaataaatgcataattagtcaaattttccaatggaaattcaataaaaattaaccaaaaaaaattattgcggttcgtgtgagatttgtggtgttctatgttattcttgtaaatgatatttgcggtataaatgctatatatttctagttttatacacttaaatattataagttttattttgatggattaaataccaaatgttacgttttttatgcaactgttactaccatttccactaagtcctattaaatttgattaagttaacatgtgtcaatatatgagtgatctacctcatattcccaataaaaaattattaaataaa

SEQ ID NO: 258050 - DNA, 598 bp, Cannabis indica
tagaagaaaaaaattcaagaattaaagcctcctaaatataaatatataataatatattttatacttatatatttttagaaaattgttaaaagacaatattggtgtctagaactctcctcagtgtcatatcgttattgatgtaattgagtattagatcccatataacttaagaaataacttctaaaaaatatagcataaccaatcatgaagcaccacctatatagaaggtattggatactactggtgcccaataacaatactcatattaattatatacattaaaaaataatttttggtatatgattcaatgtcatcaatatggaactatcaccatactatgcatgcatatgacaaccaatacaaattatttcaaagcacggaaccagttagtaatcagtgggttcttggcctcccctcactacaaaaaattgctatttttagtgataactttttagtcacaacataatttttttgtgactaaatgttaattttagtcacaataaaaagttacttgtgacttaaatataatatttagttacaagttatcactaatttagttttagtcacaacaaaattgtgactaaaaatacatttagtc

SEQ ID NO: 258051 - DNA, 983 bp, Cannabis indica
actgaatctatgacctatatatagaaatatttacaaaggcaacaagagctcaaatagctcaataaataaactaaccaacctaatagaataaccactaacgatgtagaactaactgaagcataaatgtatataaattctgttatcctcttaagatggattgtatatgttgtatacagatattttggcaatgtgagaagtaagggtggtagagggaagaggtttggtgaatgcattagtgagttgtaaggtgatattgataaggattagccgaatggtgttgttcttgaatccccgatgaaatgacaatcttgctcaatatgtttaatacattcgtggaaggtgagactgttgactatgttgatagctaattgattgtcacaatagataaaggctgaagcatcttactgtatttgaaaatcagtgagcaaatattgtaaccatgtaagctcactacttgaggcagccagcgcatgatactcagcctcagtagagttctttgagatttttcgttgcttcttggtccgccatgagacgagacagtcaccaaagaacacacaaaaacctatggtggaacgcctagtagttgggcaagaggcccaatcgaagtatgagaatccacaaagatgcaatgaagatgatgtagagtaaaggaggccttgaccaggacttccttttaagtaacgaatcaaatggtgaacttcctgcaaatgtggtgtacgaggtttcaacatgaactggctgaggttgtgaacgacgtatgtgatgtcagatcttgataaagtaaggtaaaggagttgaccaatgagttgacgatgtggtgaaggatcatcgggaggttctccttgttcatcatccagttggatacgaggatctattagggtcttggcaggcttactgcttgtatatcctgtatcttctaggagttgaatcgtgaattttcatcgagataagaacaacccttctattgatcgcgctattttaaa

SEQ ID NO: 258052 - DNA, 551 bp, Cannabis indica
caaaggaagtccaaagcttgacttgttaaatagccgcactcaacatattcgtttcaaaatcaacagacaagtgtgttcctttctttaacatccttcgaggtaacaaaaagtttgaatggaaagaggaatgagagaacactttctaagaattaaaaagacaaattccaaaacctcctgtaccttcaaaacacctggaagaagaagaattagaaatatacttggctgtcactgaatatgctgtaagcgccatgataataaaagaggaaaacaacatccaacatccagtctattatatcaacaaaagactcgttgaagctaaaagttgatatcttttaatagaaaagctcacttactacctaatcttagcaacaaggaagttaaggctctatttccaagctcaccttgtacgggtgtacaacgaccaaccattgcaccaagtattacaaaagtctgatgcttctgggcgattacaaaaatgggttatagagttgggtcattacaaaataatcttttaaccttgtaaaactatttaaggacaggccttggcagaa

SEQ ID NO: 258053 - DNA, 547 bp, Cannabis indica
atatactaggttgaagttacgtgctatgcacgtatacttagttatatttaattatttttttcaaatcatatattataatttttatattataatatacaatatattgataatttaataaataaataatttattttaaaaaacaataaatatttaatataaagtaaataaaaagaacataatgatatattaaaataaaaacaacgtgtagagttttagaaataagctcttaattcttgtatataatttaaaataattataagatgtgtttctaatctttgtcaatataatgacttaaatattaggcttagtagccttgttggataaatcaacaaccaccgagtgttgtgatattttgttagtataataaaataattatcaataaataatagtaaatagcctatccagtgagtgttcatacgaagatattttttcgagtaaatactattttagatcttgtgacttgcaaaagttaccgactgaactatctattttgtcaaataataaattaacttctgtattcaccaaactatctcataatttattgata

SEQ ID NO: 258054 - DNA, 1079 bp, Cannabis indica
ctccgccttcagcgcctcccggtacctcgcctccgtctcaacctccctccgtttggcctcctctcggagcttcgcctccacttgggcttccctctgtttagcttcctccttgagcttcgcctccgcgagggcctcccttcgatcaacctcctcctggatcgcccgcctttcggcagacaagtcccgcaggatcctcacggcctcgtctatgcccccaaattcggacatgacgaagccatggttaattaaggtcttggaaaggcggctggtctccgcagtaatctgaaaaaggagacaagagtgagatcggatgccttagacaaaatatcaagggaaggaataaatcacaagtacctaccgcagccatggcagagctgatgtcttgaacctggtagatggagttcagggaggcacaagcggcatatcttttaggcgggaactgagtcagatgggagacgaactcgctggtcatctccgaggcaaagggagccaaggtgggcccgaggaagcgattgaaccagtccgtcagtggatccatgttcaggtcccacggattccggaaggcctcctcgttgagagtgttttgctgctcctcccgtaagattctcttcaaggcctccacctccgcatgcccccgactatactcgtcaagggcgtagttatgcttggccacgcggagattttgcctctcctcatccgcagagaccggggtcaacactatgccgtgcagcacagtgtattcctccgcctcggaaggaattccagagtcatggctcggcgccggggctggagtgtcccccctccgggtccgcttggaaggctccgcctccaccatcttgcccttttgcttacgctcaagggcggctgggtcctccacttcaccttcttcaacttcctcttccttgtccaccaggacaatggtgcttgaaggagcattagaggaggacctcccgggagtagttaactgggagacagccggaggtatagaagcgtccggactgtaggcctcagcaagagttgccaggagatcgtccatgggcctggctgctgcaataaagaaataagtgttaggacattaa

SEQ ID NO: 258055 - DNA, 1359 bp, Cannabis indica
gattgctagttaataaagttgcttagtttaattcaaaaaaagatatatatttatatattgtagaaagaaaaatgttaaaagaaatctaccaagaattaatatcactattgatatagatggatccaggtagtgcccagaagaactaaaacccaccttgaaatataaaaatatattaatatataattattgcttacatatattagtcaaagagaaggattgattgaaatgctttcaatttacctgaaaaaccatatttccaatgtttctaatcctctgaccatttttttttatctatattttattatttttttaaaaaaaaactaatgaagtgtaaggtttaaactagattctaacttatgaccactaaattaggagcacgttgctaaacaatcattctacttaattaaatttaacttgtcatttattgttttattttatatttaatatataactaagtacgctaaaattaaatcatgggtacgccactggttgaagtattgggtcccacaaaatttttggacccacaaaatttttataataaattttatagaatattgctaactaatcacaaaatgccacctctaggtggtgctattggtgctttatagcaatactcttataaaaaaaataacaggagtgctaccgtttgttgaagtttcgagccattgatgaacactagaactagtaacagagaaaaacagagagagaagaaaagagagaagaagaaggaagaaagagatgaaaagattgaggaaagattcttattgattaaaatgaagtgttacagcttatataacaactcataacaagaatatcacaactaactctcaacagaaatcagcacgtgtttaatcaatactaactaacttcaacgatactaactaacaccaactgttttaactgccttcaacacctaccctcaaactcataattgaacgatcttcaattttgagtttgtgtctaaactcagcaaacctttgacttgatatggctttggttaacccattagctagctagtcataggaagagatgcctaatctgaacagtcttgttaagaatttttctctgatgaaatacaagtcaagttcaatgtgctttgtcctttgatggagcacagggttctgagttagcattatggtgcttagattgtcacaccatatggtaggaggttgagatagttgtatctagagttcaaaaaacaagtattgtaaccaggtcaatcctgttgtaacactagcaacacttctatattcagcctcagtgttggatctagagatagtttgtagttttttacttttccaagcaattagatttgagccaaaaacaatagcaaactctgtagttgaccttctatcatct

SEQ ID NO: 258056 - DNA, 1275 bp, Cannabis indica
gagggttctcgtagataacgagagttctataatattctctacacaaaaactttaaagaaaatgtgcttagaagaagcaaggttgaaaccatgtatagttaacctatgcggtttcacgagcgatagtgtcgcaagtttaggcacaattgaactcccgcttaccatgggagaaccaccattatccactacctagatgcaagagtttctagttgttgacatcctttctgtttacaacattctgatgggtcgcccaacattaaaaggaatgggagcaataagctcaatcaagcatttatccctaaaattccccactcatttaggggtagtgactgtgaaatgcgaccaattattagctcagtaatgctatagcgtgaaattgaagaatagaagggcaagccatcaattgatggtaatcttgacagaagaaaacgagaaaaagatggaagatttagatctgagaatccatgatgaaaataaccaactcaaacctatcaaagaattagaagagatgaatttagatccaaacaatcctactaagtgtgttaacattgggaaggatttggaggaagaattaaaatagcaactaatcacttttttgaaggaaaaccaagatcaatttgcttggagtcattcgaatgcgatcgggatcaactcaaatgtgatatgccatcacctcaacattgacccagcttatccctaaaaatgtcagaaacaatgacctttagatcccgagagataaattgcaataaaggaagaggtcgacaaattgttgaccaataacttcataagagaagcattttacccctcgtggatatctagtccagttcttgtcccaaaactaaatgggacatggagaacctgcatagacttctttgacttaaataaggcatgccctaaagactgttttccatgaccaaggatcgaccaattggtagatacgatagcaggacatgaactaatgattttcatgaatgcatattcaggttataatcagattaaaatgcatctcctagatcagaagcatacaagtttcgtcacaaatatgggactttattggtataaagtcgtgtcatttgggttaaagaatgctggagcaacatactaatatctcgtgaatgatatattcaagaactagataaagcaaaatatggaggtgtatgtataaacgatatgttggtaaagtttgttaaaagcgagaaccatacaaaggacatcgcagagtactttgttggtttaattttttttctaaaactggttatatttagtaatctggtta

SEQ ID NO: 258057 - DNA, 1128 bp, Cannabis indica
aatatgctatcatattttctccctgagtctcgtgttctccggatacgtgatttaccaccagctgtgaatcactacagatttcaatgtgttcgactttcatctcctgggctagttgtagtccagcgattagagcttcatactcggcttcgttattagatgctttaaatccaaactggactgcagcgtgcaggtgttgcccctaggtgtggcaagggaaattcctacaccagatagttgatctgtagctgacccatctaaatatagtttccaggtaagattatcttcattattacttggctgaggtgtttgtaccggctcggggttgctttctgctatgctttctttctgccctgtgcattctaccacaaagtctgctaaggcttggcctttgattgctattcggggttggaaagtaattttgtattggcccaactccaccgcccacttgagtagccatccagaggcagttggcttttgcagtatttggcgtaatggttggtcagtgtacactcgaacaggatgagcttgaaaataaggccttaactttcttgttgctagaataaggcagtaggcgagtttctctatcaatgggtatcggccttcggcctcaatgagtcttttactgatgtaatagactaggtgctttatgctgctctcttctctgactagcacgacacttacggcatgttccgtgacagctaagtatattcaaagttgttctccgtctagaggttttgagagtacggggggtttttcaagttgtgcttttagctcttggaaagcattttcacactcctccgtccagtcagtcaaactttacacttatctattggttttgaaacaaacctgctgagtgcgacgatccaaccagtcaaactttacacttccttggttttagttggcgacttcatatccaggagggcttgaatcttctctggattggctccattcctcgggcattgacgatgaagcccagaaactttcctgagctgactccaaaggaacactttgagggatttagtttcatattgtactttctgaggactttgaagcattcgtccaggtcatctatgtgttggaaatattttcccaggatctagatttactaccaagtatgtttcattaaca

SEQ ID NO: 258058 - DNA, 455 bp, Cannabis indica
aataaaaataaaaaaaaaaataaatgtttttaattttttataatctaaaacctccaagaatttttttttatatttttgaaaaattatataggtggattaatatgaatgtgccatgtgtataagattgtacacatcaactgtccatgatggcagttaatagtggtaaatagataacaccttaaattacagttcagtagttcggagggttttaccaccaaaatttgagcatggagggttcaatgtaagtgaaatgataattgggagggtttaggcacaaaaaaaaactcaatctatattttgttagtattttacaacttctatctatttttaggtgttaagtgttatattagatgatctatttgtacacagtgtgttgtctacgtggacacaatgtacacatgacacaatttaattggccaatataataaatattttaaaataaaataaaattttaa

SEQ ID NO: 258059 - DNA, 1363 bp, Cannabis indica
gtagtgaattatgatgaacatgttcattattgtggaaaacttagacatgtgcacagtaataattgcatattgaatatttctggcacttgttagagtgcataatgcacagtttcttcatttacaactttgatgtcatcatctcatttcatttgtgtatggcacaactgactatgacatggaatgggacactgctctttgaatcaaatgatggcttactattttggccatctatgttctcgttttactttattaactaatctatgttatgatatttaactgttgtgaccattcaaatgttaatgaatttctggtattgttgctggtatatgtttatgtgcgtagggcagggatattgtggagttcactatacggtacactcaataattttgactcttgaaatgtggagatttagtcagattgtactttaatttatttataatttatgaagaaagaataattaatgatattcaaaatacatatattcaataatttcaaataaaaacaataattattaaaattaaattatattgaatgaaaaaggctacaagataatagagaaagaaaaaaaaaataggaataaagaaaatatttcattaaaatttatggtagacatactttattactttaaaaaaaaaatactataaaatattttatatattaaaaaaacaaaaggagcaatggttgggacaaagtcaacccacctatttagtgagataatatagtccccttgtttcgacattagttagaattttggataatgttatagcaaaattgtccaatctcaattctatatccaaggttgtaaacgaactagcggtgcgggttgtaactttttcttcataccaatatgcggtttttgtaattttttaaatcgcaaccgcatctgcactacgagatctaaaacctgtaaaaatcatatcgtaaaaatatggtgtagtgcagtgcagtttgaacagtctacaccatcatcattatcgaacattataataaacatttaaaaatctataaagttttatcgatacaaaaataatcttgttaaagttttaatatcatagcatatatattaatcaagttattatattatattgaattgtctctataatatattacatatatttattcttatataaataaaaaaaataaaattatattgtaaaattagtaactttataatatatagtgcggtgcggtgcggtgcagtttgaattgcaataataaaattcaagactgaaaaccgcatcacaccgcgcgatttggaaaaaatactaactgcaatggcactcaaaggatttcaagctgcatttttatgtgatgtgtggtggtgcggacagtttgtgcgatgtgagcgatttgatgaacaccc

SEQ ID NO: 258060 - DNA, 531 bp, Cannabis indica
tttcatagagaatttgagaagataaaagcaatgaatgatgcggttgcattatattgaggatattagatttgaaagatgggtttggtcatactttctatggggaatattacaacgtaatgacgagtaattgggctgaaagcttcaacaacataactaagaactcaagaggcttcctgatcacttcttgtgtttaattcttgaggttcaaagtcaaagagttgtttgctacgtgaaaagaaaaagctgacaagtgtacgaagaccctagcatcagaattagaggaggacttggcattatatttgagaaatcttgttatttgaacgttgatatatgtggaccttatactttgaatgtccaccctggcggatcagttgagaccagtcccgtagtggacttgtaggaacaaacttacacttgtggcttgttccaaatcatgaagtttccttggcctcatgtatgtactgcaacttaacaatgaagtattagcctgtacgcacgatgctcgccatgttacacaatagaatattggag

SEQ ID NO: 258061 - DNA, 1049 bp, Cannabis indica
attaaactttattttgacaaaaaatcaattcaggatcctatttgtactattttaaaaaatacagggtctattttgtcatttaacaaaacatagagtccaatttgtaacttttgtaaaacagaaagtccaaaatgatatttaccctattatttagtattctacatgttacaatttttttaccaaagaggacatattactttttcgtatctttccttatctaataatataagcatatttaagctaaactacttattacaataaaatttgatactttatggtaactaatgcaattcttactaatcggtatccaaaataattactataatattatataatcatatttaattatctactattttacaatgtgatactaaaaatttgaacatcctacccaatttaaaacaaaatatatattcagctcattaaacatacaacctaacaaataacatgactccctagcaaaatagtgggcagccctattagcatatcgataaataaaagaaactaaaatattctttaaattagataatatcaagcgacaatcctctactaacaaactaaactgagacgtcatatgaacagagctattaattgcccgaaccacaactatcacatctgtttcaatgatcacatcctcctaacctttcttcttttatccagctcaacgcttccttcatcccaattacttcagcaatttcaggcagaacaacactagaatctgaaatggcttcaataagttaaccattctcatcacgggccacacacccataaccaaacctttgttgagcttcaaaaatagcaccgtcgacattaaccttgatcttacaattaaccggtttactccaatggttgctgctagaggacacaccaatagcaaatagggatcctggtgagtgagatttaacagccctccattaatcaaggactgaccttgccgacttaaccacctccaaagcagagcaggttttttgttgccaaaagacctcatttcgtgtcttccaaatactccatgataccataacaacaatctattaaaacaatcaccttga

SEQ ID NO: 258062 - DNA, 746 bp, Cannabis indica
aataaaattaatgtaaacctaaataaaaaatctcctattccagagtttcaagttgaatttgattgtaaaagcaatacatctaatatattctaataatgaaagatgtagagatgttgagttcaccgagtgggccaatatccctgtggctattttcccaattttcttttaacttttttccggcgcttttctttttaggtgcttcttcttgttcattggattagatatttccttaaatatgattgtgtaaaaggtttattttttctttatagggaacctagttgcatatactttagccaatacataattatgtattgattaacaatactagtcctagactgggattaatcacttgtcatgccttgagatttgacttgccttatctttgtgctgttgtttaattcaatgaatgaattccctttaaaaaaaagtgtatataatagctatagttacacaaaaataaaatatgatgtaaaacacaaagttagaggaagtatgcctaataacaaaatacaaatgatagctaaatagtgaatggtttgatcaattgtaatagttttgggccttttggcataccttcaaatggtggtgctgcatatataaattggaagtttcgccatagccacatttgatttaaaaaacaaaattacataaaatattattttttaatttttttttacatttttacgtacacacaatctttttttatatttctacaatattttataaaaacaatacgaaaataataa

SEQ ID NO: 258063 - DNA, 1527 bp, Cannabis indica
gatttagagatagatttagattttagaatctcaaatctatgattttgggcaaggtccgatggggtccgatgtaggtctgatggggtccgatagggtcgaatgaaactatgagtttgcgaggtaggagacgtaggttcgatgggtccgatatagggtctaatgggggtctgattggtccgatgggtcctccgattgtgtccgatgaaggggtccgattgtgtaaatgggggtgatggaaatgggggtattttagggatatcataaaagttgtcatatcctacaaatattagttattatgtgtttaggggaaaatatttaaccaaatgtaagcataaaaaatcaaatttccctttaaaaattacattttagattttttttttctttaaaaaaaaggaaagaaaattgcaattaggatcagtaagtcaaaatatttttaaatataattaaaatatcttaattatagtaagaatttaattattttagatattagatgaacttatacttttagaacttctatcttataacaaaactaagaaacaaaccgcgctttacttacggttatattttgtttattaataattaagttatagaaatatgttataatttgtaaaaaaatttatcatacaatttttttatctaaaaaaaaaaaagcaacaaaaagatattttcaaacgttatagtaaaataaaaataaaaaatagaagttggaaaatccttacacaaaatagaaatctaaaaaaaataatttataaattaataaaagaaaactcatcatatgattttaaatctgttgtcattcaaagccaatgtcatcaccgaatctcacttgtagttgtcactacattcaaagtcgctattattatcgtatcttatttgtagttatcactattgatcaaaataagtttgctttgtacataaaataaatcatatacttttttttttgagtgtagcgtaatggtattatacaatcatatattagcttaatagcttaagggtcctaggttcgaaccaatgacctctccctttttcccatcgcccctcaccactaagctagccttagtagcttaaaataaatcatatacttgagttaattaactactaatttttttttatacataagtgatgattttattataaatttcttacttgcctcatcatataatttgtgacctacaaaagaaagagaaagagtattagatataaaaaaaaaatagggtagtaaaagactaaaccaaaaccgaaatagagataaaaaaggattaaaaatgaaaaaatcctcatcaagaaaaaatatttcgaaaaaaaaaaaaaattgacaaatctgtgaaaaaaaaaactcatcatataatttgtggtctaaaaaaaaaataagagatattgtcaaacgatataggataataaaagactagaccaaaatcaaaatagagattagcaaatattagaaattaaaaaaggtctcaccgagaatagagatctcgaaaaaaaaaaaattgaacaaatctaataaataaaaactcaatcatataa

SEQ ID NO: 258064 - DNA, 1454 bp, Cannabis indica
acaaattacaaatacggacattaagtaatattataaactaccttctaatagtaaactattttacttctatatattttgttactaaagaatatgagcttcagtataggtaagaaaaaaagaagtactctagatcaaccattttagtaaaagaaaacaaaaaaaaaaaaaaaaaatagtagaatgccctgttttcccttggatcaaaaagcagcaatattcaatctgaatgtctagtgttaattatatgacaatgaatagagagaaagagataactgtagtaccaaccagactaaacaataaacatatgtaatcaaaactcttgtagtactaaagcttcattgaccaacacttaaaagttaatagcaaagttcaaagctgtggtgatgacaatcgtaacaaggtagtgaaggaaagctctaaaattaactactatctagcaagtgtagatagaggcatatatcaaacaagtgtctataagataaacaaagagtaacgaaagcatgggatggaaacttattgcttagattacctagagtaacaaagaagcaagtcctctgattttaaaaagacacatttaaaaaagaataaaacatgtagtcataagaatttatgtcaattcagtacatgcaagaagagcttcaagtcttccattttagtaacacagatacaacttatacaacaaagaagaataaccgtgaagtgaaccgattctgttaagactttatttgacagttttggcctttagtcaattatttagttagagaccagttaaacttttgcagtagcaaatatcagtcgcatttgcttaaatgtaatgtgtgtgtgtgtgtatatatattggttggggtaagataagagtaagacccaaaagaaaggctaaacattgataaacaattaagtaatttgtaattgtaatttcgtctaacaccttctgcgcacaacgattgtcagccattcacaaaattccattaattttctgaagatgtaaacataataagagagtgtaatgcagttaactaagaccaaataaatcataaaaccccatgtccgaccaactagagttgttggaatcaatagaaaagaaattacatatagtattgaaagtgcagagattatgtaagtttacctgaaaaaaaaaagaagaagaagcttttctggggattgtatcagagagtagagattgagtagataagagatcgaagtgagtattactttgtggagagagggtagagacgagaggaccagctcggcagagacgatatcgaagtgaagaccgttctgtgcttgagctttttttctaggtaagggattcgaacttggaaggaagatgtatgaaacagaaatgtttaaaaaaatgtaaataaaaaatccaataaaaaataataaacaaaatatatcaaaattaaactctggtatgctattttttttatttttttaatggtaaaataaatttt

SEQ ID NO: 258065 - DNA, 781 bp, Cannabis indica
gataaatgagaagaagggtggtgctgatcgtagtgtggcggcaatgtctgaattccaacaagcactggataggtgttctttggcggatttggggtttgaagggcagtgttttacatggttgaacaaaaggcatggagatgcgcatgtacaggaacggcttgatcgttatttttgtaaccaaaggtggcatgatttgtttccttctgttaaggttcttaatggtgattttcttcactctgatcatagaccgattgtggccactttggagaatgtgactagaaggcggcattttgacaaaaagaggggttttcggtttgagactcattggttgaaggatcccgaatgtcaagaaataattaataagtcatggttatcaaaggcgtctcctttagctcatcaagatagtcatattgatatttttggctcgtgtgctgatcagttgggggagtggaataaaggtaagtatggatcaattcctagattggttagagaaacgcagaagcaactggatgatcttcttagtgtttcggcgcctttggtgcatatggaagaggtaaagcgtcttgagtttaaattgaatgaccttttgactagtgaggaattgtaaagcccgcttagttaatttggaaattagcagctgtttatgtttaattatgaaattatttatagccatttaaataatttattactgttatttacggaattcagaaatgcatgattatgtcatcagtagcttttatatttcgcatttccggtgtccggtattttggaactcggcgtt

SEQ ID NO: 258066 - DNA, 1720 bp, Cannabis indica
ccacgagtcaatcttattagatatttgatagttttctcagggccttttttcatataatttttttgtcctcctttttgatcttacctgccactatttatgatcacatagtaggcagttaattataaagttgactgtaatctatacaacgattatcccctcaaatcatgggatctgattacatatcatgttaagtaaatacggcttttatttgaatttcacacagctgtgagtatcccgcttttattgggccaaaatgaatgtgtattaaagatatatggtaagccttaacgtattggaatccctcactgggaatagagtcgagttgatcttgatggcgagatggatctcttcgtatgtctttccaaggttgataatacttttactttaattctgacaattgcaatttctggtgacgagatgatctttttcgcatgcatgccctcctacggcgaggtggacgtctcgctatctctcgctttggttcacccatttgttatacttagtttgtgtaccgtacattatacgctaagtatctccattgtcattatatctcctccatgtaacgaggttagtgccttgtcttgtacacctgaagttacatggtttctcatcgaggcacaaggcaacggtttgtacatttttatctcgcataagactgttcagtcagtcgagttgtaaacatactctgttaatgatgcttttaacgagttattccatttcaagtgtaattatagttacatgtttgagttctttattcttcccagcttgacacgtgtcttcctctggtgtgttatacgaattttgggtataacaaatataatatttcaaaataaaagataatgctgtcttttattttaattcataccaaatattaaaatatctaaccttataattaaataatatataaatattaaagaaattaataaattttaaaatctgaccataattaaaatagaataatcaatttttaaatttaaacgtcaaaatatcagaaattaataataatctattaaaattaaatattatgaaaaaatctgatcttcgtcaacgacttggtccaaagcagagggatttattccatctgcgaatagacgagttggagaataagatcagaaggcatcaagtcaggaaacctgaaaggcaattggggtatgattatgttgaagaatttgagtcgaaagcttcaggatcaaagagggcagacgattccaaaaggttgcctaaggataagaaatagaagaaacacaataaatatatacccctttatgctgaatataccgagcttaatgaaactcgggaaaatatctacctcgcacatgtacaagaagtcatttttagctagcaataacctatgagacacgcgagacataaaagggacccaacaaaacggtgtgaataccatggagatattggacataccacgaaagagtgtcgtcagttgaaggatgagatagaaggtctcatagcgcgaggacaccttcaacaatatgtaaaggggcagcacgaagcccatgatcagtctgatctgctcagtaactcaagagaccagggatcataaccttcttttgtaggaggaagggatacctcggttatctcaaaagggaacgtgtcgcaagaagacaatggacagttaatctggtaaagcaattatgtaaaagtattgcgaagtgagtaaatatcggctcgctatggtggtcgtatcaagctgccacgtggaaag

SEQ ID NO: 258067 - DNA, 799 bp, Cannabis indica
ctctctctctctctcttctttacagggatctcattgtttattgtctgagttcgtggtggacgaagatggagtttgatgctcgtattacatctcgagttcatggtgtcaagctttgtgcttggtggcgtttgaagctcgttagatatcagcgcgttcatgaagaatttgatttccttttaattttctgttaagttttagtttgtaattttctgagttaatttatgttttaaactttatgaataaacccactgtattcttgtttgttagatttctgggtttgttacacttgggtttgttacactcatgggtgtaatttttttgttgtttttggttaaatgtttgtaaatttctgggtctgtgggtgtatgattaatctgtatatttgattcaaattattaaaatttgtattcaagttttttcataccttatatcaattttgatgtactgtttttttaggtacaattaaatataagaaaacaaatacacaacaattttttttcctaatgttttaattgttaatatacacattattttgtttgttgttttaaatttaatttttttattaaaaatgaaaatagaactaaaataaatttgatatattatccaatttttttttaaagaaaaatatgatatagtgacactctgttagtgtggtcttattagggaaattaatttttaaaaaataaaaatagatacagtgacacgttgagagtgtcgctattgtgtttagagtctcacaatttgagattctaaaagtctacaaggacgcgctttgagagagtctaaaaggattaagtga

SEQ ID NO: 258068 - DNA, 1325 bp, Cannabis indica
tcttggttcggttcttctggggcaaccagagcaggaggatctgctgtttgaacaggatgtgcatcagcagcctgaccggaggttgaagcagccgcctcagtttcgccataggccacttgggacgtgcagaactcaaggtacatgtcgttagcatcgcccaagtagtcgaaattggcctgaggattagccttcccaaaattaaagaagagctcgagaccggttgtctccaaggcattgatcttctccttcaacctgtccacctcagtcgaaagctcctcctccttggcttccttttcctccttcatccgatgaagaactgctcgaagggaagtgctctcgtcctgaagactgttcacctcagcagataaggtcttgatgctttcctcaaaacggtcagcaacctcgagatccttagtcagcacagtgattttcttctgagcgggacacagcttcttgttggcttcacccaattccaaccaagcagctccgacttccgccctggcttcttcaacatctttcctggccaagtccgccttcgtcctcagggtgtcggatagagccgtgttcgtgtctgggtccaggttcaattcttgggtctgggtcccaggttcgtgtctgggtctacgtctgggtccgggtccaggtccagtgttttgatcctggtctgagtctgggtcagggtcggtattcggtttgggtctggtttcgtgtccatgtctaggtccgaatcccaatttaggtcaggggctttgggctttgtttgattccggaatcgagtcccgattttgggatcaagtcttagtcctagtctgggtcgcggactgggtgggggaccgggtccgaggccgagttctggggttgaaatctggtgtaattcgagtccccgcctaggtccaggtactggtcacagtcactatcctgttccaggatcctggtcacattctgattcatgtttttgtttcgggtccaaggtttgggtctgggtctaggtatttgtccagcttcgagtctttgtccgagtcccagttcaagacatcgactatgggtcttgtccaagccccggttctcggatcctgggacaagatctggatcataatcacgggtcctagcgagtttcaattcatgccccaggtcccgctctgggtatggctctaggtgtgggatcgagactggggtccagttttgggtctcaatccctgttctggctcttgagtcatgttcaatggtcgagtctgagttcaggtctgggttagggtcccgagtcccaatttaggttcaggttcaggttttggacccaatcccgatgtgggtctatgtccgactcc

SEQ ID NO: 258069 - DNA, 1229 bp, Cannabis indica
ataactatcatacttaggggtgacaattcaagttatgatataacaacataatacgataacctgacctgaactcatacgaatttgcaggtcagtattaatgaaaaaataaatataggttaaaaattgggtcgaacccaaatgacataattattatttgaaatggattatggttgtatcatatgtaacacgaaattgacaataaattgacctgtttatatccaatatattattaaaattattaatttatagtaaaattattatttattgtatagaaaaatatataaaaatttgaaaaaaaaaaaaatttacttacaaatataaaatggaaataccattttggaccatgtattttacaaaagttaccgattggattatcagttttgttaaatgacaaaatagaccctgtattttccaaaatagtaaaaataagaccatgagcttaatttttgacaattttttttttaatattaaccaacttgaagacaatttctaacacgaacagatacataaaatataaacagttttgtcatagcacatttagattggattattattaaattttattttgataaaaaatcagtttaggatcctatttgtaccattttagaaaatacaggatcaattttgtcatttaacaaaaaaaaagggaaattagaaatttttacaaaatacaggtctaaaatagtatttacccatataaaatagataatttatacttgatatcaacaattttatttattgtattgataatttgtgataaattattgttgtaaaatctaaatatgtgataccaatcatgttaattagcatgtattgtaacataaatatagttaacacgcaaacaagacaggtcgggttaggatcaagatttcttgacacgaaatatatatatgagttgggttagggttgaccagtgaaacatatcaacttgcactacacgtagggctggacttgggctaaggcagattaggctcgcgcctagagcccacctagtccagggaccaaaataaatattttcccttttaaaaaatataaatatttttcaataatttttaaaattactacatattttttaaataaaagacccaataatttttattttcttaaggctcactaaatttaagggtcgactttttacacgaatataaatatgacatggtaacacgaattaccactcttaatcatgacttgcaaatgattattcaatttttataataatggttaaatta

SEQ ID NO: 258070 - DNA, 685 bp, Cannabis indica
caaataacacaaaaacgaggaaaactagggttttggaaaatggcccaatcggcagaccggttcctaaccagaagtccggttcctggggaccaaccggtcgaccggttctacaggtccccctgaaccagtcgacaggttcagcgttgggaacccaaaaaatgtccccatgacctcaaatttcacccaaactctccaataactttcagaatacctgtaaatactataataaaccataatcaagcattaaacctcaaaatcacacataaaagctcaatccaccattaaaggtcaaggtttgagttcttagaccccaaccttgccaaatcaacaacatagaccataaaaccaactcaaatcaacctaaataatctattatggtgtaatgggacactggaagaaaaattgtaatgagtatctctccgagcttaagaaaggtaaatttgatttatttgttcttgaagctaatttactagaaaatgataaatctttatggattgttaattctggagccactaatcatattttttcttctatatgcagatacttgattcgttaagggagctagctgatggagaggtgactatgtgggttgggaacggagcacaagtgtctgccaagaatattgacaacatttgtttgaaatcaaataataagtttttgttattgaacaatatttattttattc

SEQ ID NO: 258071 - DNA, 1462 bp, Cannabis indica
gcactcttgactttttgcacttacaaaaaggttccactctggatatcacacattttgtgatgctgactgggcggctgacccagatgacagacgctctacgacagggttctgcatctatcttggtcccaacctcatcacttggcagtctaagaaacaaactactatatccaggtcttcatctgaggctgaattcaggagcttggctgctgtcgttacagaactcacatggcttcaatctctcatgactgaactcaaagtcaaacctccctcagctcctacgatttggtgtgacaatctcagttcagtcatgatggcttccaatccagtgttgcatgcctgaactaagcacatagagatcgatctctattttgtgcgtgataaagttctcaccaaacaaattcagatcaaccatgttccctctgaacatcagctggcagatgggtttacaaagcctatttccagtaataggttctctctcattcgtgacaaactcagtgttcatagctcttcctcactgagtttgaagggggctgttagagaacctatactaaactgtccagctgtcacttgaagttgtattctgttttggtaattagttggttttccaactaactttctgttacattgctttgctttgcttgtgtataaatacttggattggcatctgttgtaaattgtaacagaattgaataaacactttctctccttctttcctcttctttcttttctctcaattctgttttctaagtttcttcaccaaccacatcccaatatttttgataaaacccaggcgtcatcccatcaggtcccggcgatttatcggggtgcatttggaacaaagcttttctaatctcctcaggtgtaacttgttgtaacagagagtcattctgaacactagtaatagtcggccgaataccacttaccacaggatcaaagttagagctagtggaagtaaatatatcagagaaataatcaacaataacatctgaaaaacccccttcccaatcaacccacacacctgaattattcaaaagagagttaatggagttgtttttcttacgagcagttgcctttgcatggaagaacttgctattttgatcaccctcacgaagccaaagttgcttggaacgctgacgccaaaagacttcacgctgagtatacacttcaccaagagcagcaacagaccgcttatactgagcaatagagtcctcatcagaacaccatttaagccttcagatctcttttttacaattagcaatcctcttcttaaaattgcccgtatagtcttgaccccaaaccatcaatttctcaccacaatattttattttgtcagttaaagtcagccccacgcaaacttcccagctgtctaggattacttgccgacacaatggctcacggagccatgcattttcaaaacgaaactgagcaaccgaatggtagagattgatcgcagcagtacgga

SEQ ID NO: 258072 - DNA, 784 bp, Cannabis indica
gtgtaagtaagctttatcgctgactatcacatcagtgtaaatccagtgtactgatgaatcaagggacatattttttgaagcatataatcacaattactttccactgtgttgacatcactgtaattgtgaataactatatgttctgaatttaacagattgtgtacacattaaaccataaacatgaaaactacatgtaaacataaatgacttctaatcttctattgataacaaattagattagattgaaatgggttttatttagggcataaaatcccaacactagggaccatgctccataacccattttccgtctgaccccttttcaaagccaaaacagaagacattagaaaaagcttggctaggaaatggggtatcaactctcacttgggtcatccacagattagtacaataataaatgcagatcaagtaattttaaattttattagtaatagggttgttcattgaaaccgaaaaactatggtttaaatttggaccgcgataatccaaactgctgtagaccgtaatcggggaaaccatttttggtggtccgattaatccggaccgtttaccgcgtaatggttcgtaataaattattaacggttaaaccaaaccggaccgtttataataaataattgatttatatatgtatattttatatatgactatatttataatatatgtataattttgaacttttttgtgtgtcgggttttttattgcataaattttgaattttatttgatgtttgacttttgagaatttttttatattgttatttatatgt

SEQ ID NO: 258073 - DNA, 1296 bp, Cannabis indica
gtgtcagttataaaccgagaccatagagtttgggtggtctttagtgtcggtttttttttaaaaaaagaagtccctcaaactgacactaaaaatctattttgtagtagtgcaattctgttcacttgtatccatattcgatctaggtgagctcttgcttcctcagaccttagtgagtgtgacataactatatgtttctcgcgtgccattaacaacacacactctctcctcataattactccatgcctggattaattatatccatatcttctattattctccttagtttacttctatcgttagatgtcggcaagcgcctcaagcccttaattgccttaactatgtttggatttattaattaacgatgtacaacccaaaataaatattagattgaaattaaccaaacttaacatataagacataacacaaatgaaacatacttacttgatgacaagttgatcctttgaaacaatggtgtgtatgtcgtgtgaatacaagatcaatgtaactgtggctctaataccatatgtaatgtcctcatttatttaaaaataaaatgccataaataaactggcatcaaagtactaatgtatttaagtaaatgcaatagaaaactaaaaaacaacatccataataagttttatgaatttaaaagtgacttttagcagaagatggccaagatcacatgcagttacatgatctcgcgagatacaccccatgtttttcagacccaacttcccaccaaaagtttacagtcttacttatctgcacatggggagtaaataaggggtgagctgcaaagcccagtaaagaaaaaaaaatatcatgtacaagcactcacacatcatagcacaatcatataaatcaatcatacaacaaatccatcctgtttttaaatagaggcagccacactaatacagatttatcacacactcaaactctagcttccatacaagtctggagtgtcttacgttcttaacctgtacgcaataccaatggccagtgcacccttaagtacactgccccactaaccacatcatcatacatgtgtggtttccaaccatgtccaagtgcctggaacatgattaaatagtcatatacaatatatcgacaaaacactatttcaccgaaactatcatattccacagtttcaatacaactaactcaataaatctcactaagtactcaaaccatataaaaagtaaaagtataaagtataactatttttccttacctcaactctgttgtaattaagtcttacgatatcttctaggccctatcaataattagccaaccctt

SEQ ID NO: 258074 - DNA, 1451 bp, Cannabis indica
tgaagggggattttcattgaggttacaatttcttagactcgctatacaattattagtggataattttggattgttggagaatcttgaaattttattgtgatttgtcggattttgctcattacattgattggaaaaagttgtttgtgattaagagttgttctatttgtgattgggttgttacccgggaagtgaattttaaggggaagtgctgccaaaattttcataaatttttgagtgttagagagatgggtcctaaaagagctagagtaagtgaaagagggggagcttcatcatctaacctacctaggggtcgctccactgttgatagggctatatttgtaaatattgacgcacaagagcgatttctgcaactgaaagatagacccttcatcgaagataggggcatagacattggtgaccccaaccaaactagaaacattcctgctgtatttgagcctatcagagagcaaatcataaataggcgttggactaagtttgtagatgtcactgaccgcaacaaccgaaccttagctttagaattcttggctaattggccagaaagagaggatgacaaggtcaaagttaggggggttagagtgccagtttccacagccgccattcatgctgtctatgacttaccgaccttcaccccagaagaacaaccactaaaacagcaaatccgagcaaagagcttgaattatgaggacatagctgaaacctaagggtatccaggccttaggtttcatgagtatgatggagaaccgtatcatctgtttaggtgtgaactaaaccaggtagccaaggcatggctatactttgttagtgcaaggttggtaccaaacaaacattattcagatgcgcagatcgacaggcttaaatttgtttatgcagttatgaaggggtacaacctgaatgtgggggacataattagagtgacttttgatataatgattgagggctcttgtggaggtggacttgggcttgatgatattgtcaccaccttgtgtgaggcacatggagtaccacaatactcctatgatacaaaagtagcgccacaacgtaatatctccctatccacggtgcttcgattcaaaccaccgcaccctcatggtcaactgctagctcagagagatcctcctgcagaagagcgagaggagcatgaagatattgtaccgccacatattgctgggcctcttgacccagccatgcaatacacgcatgatcaactgaattatctgattcagcaaaacatgcacattcaaaattacatggcccaaaggagcatttttgttgagtagcaggtggcccagttgaacacgctaatcacgagaatgaatgtcggtgtggaagaacccaactactttgcaatgccgccccgcttcaacccttatgatcagccacctccgccaaaccccttctgatggggctcaggtaagtctctctcaaccaca

SEQ ID NO: 258075 - DNA, 627 bp, Cannabis indica
tccactggtggaggcagtaacagatcttggttgttgtctgcttggacgacccattgattctggtcagccttgacatatttctgcatgtgcgggttactttttcttatcaggaattcaatttcccgcttcaagttgttgcactcattagtatcatggccatagtctccataaaaatggcaaaatttggacatgcctcgcttgcttatgtcctttttaatgggagtaggttttttgtacgggactacaaactgagtcaccatgtagattgtctccaggtcgtcagtcaggacatagaaagaagtgaacttggaaggattttctctaggggtctattcggttttgcctgcgaactttccctttttccattgccttgtttgccgttgttgttagatctcttgttgctcggatttaaactgctagggtattggggtttttagtagacgctcctgccgagggggcctgtggttggcttggtctaggctcgacatctgcccattgaatggcctcttcaagtttgatgaaaccatctgctcggtcaagaaaatccaccatagagtcgacagggccacttttcttaatatctttccatagttctccgagcacctcgatgccccctaatattgcggc

SEQ ID NO: 258076 - DNA, 885 bp, Cannabis indica
aagtgttttttcatcaacagcttgctatgccaatttatgaatgtcatgagaagtatttaggcctaccatcttactcgggacgcgataaaaaagaaatgtttagccatattaaagagaagatatggaaactgatgaatacttggcatgagaaattttttttcagctggaggtaaagaggtactcttgaaagcagttgttcaatccataccaacatatgccatgagttgtttcagattaccagtctacttttgcaagcaagtggaatctatgatggccaatttctagtggggcttgactgaaaatgggtcaaaaatccattggcgctcttggaaccttctttgtaagtcaaaatcagagggcggtatgggttttcgttctttcattcattttaatcaggcacttcttgcaaagcaagcatggcgaatctatgacaatcctgactcactcctaagtcgtgtcctcaagagcaggtattttccaaataacacttttttggaagcttctttgggtcactcaccatctctcacttggcaaggaattcattgggctagagagcttcttctcaagggtttacgctggaaagttggaaatggtaggcatatacagtcgggttatgacccttggattcctgggcatagtactttcttgccttttctctacaagggtccatcaaatggtgttgttgctaaccttatttcagatgaacggcagtggaatgttcctgtattacatcagtttttttctcctgcggatgtggaaagaatcttaactatccctttgagttatttgagttatttcagcagtcgtgacactcttatttggcaccaccatagcacaggaatgtatacagttagttcgggctatcatcttgcttctgatcttgat

SEQ ID NO: 258077 - DNA, 743 bp, Cannabis indica
tcttttactcttctgcaatgtctaacagattcaacatggtatcagagcgggactttcctccattgacggcaaacatggcgacgatcggagctcaagttacgcagaacaacggaggtgctactcaaccagcaaatcgaatcggggataatccttctccaatctcattcaatcacactctctcgatacgtcttaatgaccacaacttcttgttgtggaaacaacaagtgctagctgcaattaaaggtaatcggcttcaaaaattcatctttgatccacctccagcccaatttctcagtgatcaagatcgtgccctagaaaatatcagtcaatcgtacagtgactgggaggtccaagaccagcttctagtctcatggctactttcctctatgaccgagagtctccttacaaggatggtgggttgcaacacagcacaacagatctggaacactcttgaaaagcactttgctcttcaagtttcttccaagattcttgagtttagaaccaagcttcaacaaatcaagaaagggagaatgtcattgaatgagtatcttcttaaagtgaaacagatggtggatcttcttgcatcagttggtgaaaggctcagtgctcgagatcatattgcagcgatattcaagggcttacctagtgaatatgacacctttgtcatctcttcaaacactaggattgaagagtactctgttgcagagattgaagctcttctcctctcatctgagtcaagaatt

SEQ ID NO: 258078 - DNA, 729 bp, Cannabis indica
tttttccttgagaatggtgctcagttactttttacatgtcggccactatagtatctagcctttggctctttccgagaagtaatttttatttcgtcttcatagtggtaattttgggattttgggcccatagagttagctcgcttctcctttctggggcaatgttgcgaggtacttggatctcacggtgttggtggtggagggtgcctaggtgatgacgggagatccttccttcgcctcacaccttcaccttttggtcgtgatggaagcagtaactctgttgcgctattcatccactagaatcttttcgcggtgacagtctccttatcttgcttgaggttcccacctgctcacgccctctcctcctacttgaggctggacaacgttctcattttcttctcttacttgagagtcgtgaccattagtgccttcttctctgatgatgggcggagggaggtcttgcctcgaagcgaccaactggttgtcgtcaaggcaaatctccacgtcctataggcggtgagagcgtctaggcattttgtgtcgatggtgtgtaaaaaacgacttggcttaagcttgtcgttcccacaaacggccccaaactgttgaaggtgagaactcgtctaccaaatggtgaccgaaaaaccaacttgagctttaggttcagaaatgagatgaagaggaagatgaaatatgaactcaaatcgctcttttgaaatggagagaataatggag

SEQ ID NO: 258079 - DNA, 515 bp, Cannabis indica
taccactgcagctgggtacatcttttttcttttgcattgtccttatgacctccaaaggaggagatctgggattatcttttcaacaatcaaattaactgtattctcaaatggggtaacttctccaatccccggtaaagtgaccgctgggtaccggttgatgaccatttcaccagagctgactctggtctccaccaccgtttccacttgtcttctcttccccgggtattgcgtacgaagctcccttgaatccgcaccctcaatctgtaagctaagtctctgattctttagcaattgtctcattttttcatctttggccgccttttgattcactatccactcactgaaccatttcggcaaaggtagattgaagggtgaccgttcaatggcatcctcaggcatccagttcccatacattgggtataattcgccattggtgtccttgatcacagccggagtcttgaaacaaaacttgtgttcatgtgtcattaatctgcacttgtaacatattctaggaa

SEQ ID NO: 258080 - DNA, 852 bp, Cannabis indica
tgcaacataaaatgttatttctgatctttattaataaggaaatctgattatattgaaatgagtttcatttaggacacaaaatccaacaccatcggaccccatcggacgagcatcgggcccatcggacccgacctaaaaaacccaaaaaaatgccgcattggacggtcatcggatgggcatcgggccccatcggacctgaccccttaaaagcccaaaaaaattggaaaaaaaaatgtcagagagagtttcctacgatggtgggggcggccggcgtggacgatgtgcgtggtgacggtcggtgggtggtggtgacggccggtgggtttcctgcgatggggttttgggcgaagatgaggcagagagagtttgagggaaggagagagaaagggtttgagtttttgagaggggtatttttgggttttggaaaagtgatcatatattttcaatgtagaaaagtattaatttagggaaaaaattatcccctaatgcatgcatagaaattcaaatttcccttttatttttacgtatgagaagggtacggagcccctacccaatgaaaagcatatagggcaagtttggaacaattgtactacggagaaaaacagttgtagttgtgttgtgagaaaaaaccagttgtagcagaactatgaaataaaactaaattgagtgtttggtaaattaaaaattttaaaatgctgcgagttgttaagattctattataataatgataatgttataatctagtattttataatcataaatatatatatatataaaatatgttatataaaattttatattctatatatttttaattatttttcctatagtatatgtaatgaccgctctagt

SEQ ID NO: 258081 - DNA, 824 bp, Cannabis indica
atcaataatatggtttacttacaattggataaatgaaatatcttttccagagaattagcaaagtaaacttttgtcagatgtattggctatacatcggactgaaccgatattaacagtgaaaaagatattataaacgtactgttatattttttctaagttaatgtcacttagttgatcatagatcaattgatctcaatgctaagatggttaagctttagcttaattttactatacgagttcttagacttttttgttaccagcttacccctaggactagcccatacatacatgttgcgaattttatagtgtaattgagtggaagtgttaattatagatgttgacctgagatctggccaaccgatagcggagtcgtatttaatgttgatacttgccacgtgttacacaataataataaagtaaataagatacttgattttatagaggttcgaccccttaattagcgggtaatgacctactccccttctagttgtattgatacccagagataacactactcattattatagtgatgggatctaaagtagctctcttaagattataatgtatgaatcaataggcaaatctctaataagagagagagatagagccttggaggcatgtgagagagagggagagcgctatgggcatgtagaagagatgggaagagaagattagggtttcaaacttaaagaggagagcttagggagtttagaggcttaatgacttagggtttgagacttcagactttgggttttagagataggttgatgctctttatatagtagagcttacatgcctaatatccttagaaataggtaaaataa

SEQ ID NO: 258082 - DNA, 459 bp, Cannabis indica
cttacaatagtaaagttttacatgctatatttaatggagtaggtgaaggttttattaagtttatatcttcttgtgaatctgctaaagatgcttggcaaattcttcaaactcaatttgaaggaacaactgttgttaagcaatctaaatttataatgcttcaaactaggtttgatgatattagaatgtctgacaataaatctttgtctaagtttatgaaagattatttgatattgctaacaattttttttctcttggttgaaaaacttaaagaatcagtgatagatagaaaaattgtgagaggccttcctaacaaattcgacgctaagttgttggctatgaaagaagcaaaatattttagcaagatgaaggtggaggaattgatgggggtcctttcgtacctttaaaccaaatcaagtaagaagacaaacccaagtccacatttgatagaggtaaatgtat

SEQ ID NO: 258083 - DNA, 1009 bp, Cannabis indica
tctacccatagttatgtgttttgtatgtgttttgaatgaatatgaagaatggcacatggattatatatagtgcaaaaaattggacctagtaggctactactactacaactatactactataactattgttataagtaacaattatcaaaggctatgatcatatcatatcatatcaatttatatgttttatatagatttgaaattttacactagagacactttatctctattggtaactaaagacatctttagatttgtagtacctagagaaattataacttaaattttcttatataaatatgtacattttagttatatagcgtatgcattccacctatttttagaaaatgtagaattactttacatcaatggaattcaaatatttaattatgcaagtgttttttttacaaatacaattgactattttaaattttctgttttttaaaattgtaaattattcaatattttcagaatatataatatcacacacatatatatatatataaaacaaaattaaattatagcaatcaatacctaaaatatagatggctctactttttaaaacaaaaataacactatacaataataatatagggaattaatgctaagagatatttttttttttgaaagaaagaatttatattaatttaaatctaagtacataagagttttaagttccatcggagtattgaactcagaaaaattacaaccagaggagtatcgagagctacatgcaacccaatgaactactcgatttgctgatcgttttaccaaaaaataacttaacattaattaaagagaaaagcaaagcttgacaatcttgtatgagaagtccaaagactgaagacataaaggtactacttcgaattgcttggacaattataaccatatactgtcagtttctagtgttgcttcttgccagccattgatctttattcaactaagggcttctttcacccctatggcttcggcaatctccaccaacggggcctctgctaagagatattct

SEQ ID NO: 258084 - DNA, 633 bp, Cannabis indica
gtatgtttcaaataaatataaaattagaggtaaatttgattaattgatgaataaaagaggcatttttcaacttaccccgaagctattggtgtatgagggaattaaacttgagttttccaagcaaaatctgctgggcttttcagccctgaagagttatggataagtggaagaataccattttttttatacatgaactaaatttacctttaaataaaatttaattcaaatatacctctttttataagtattatacccaaattatcctcacaccttcacataactaagacataatttcaacataatagatttgtattgtttggaaatagttgtgtaggtttgtaagaaagtttgggtaaaattttaattagagaagaatggagactattgtgaagtgataggggtaaaattggtagaatgattgaaaaaagaaataaacataataaattttgaaagtggaggtaaaaatgaaagttatcaatttaaaagaggtttgtagtgtaatttcctcgaagagttgtggcttggttctcggcttgggctttaaccgggcctaaacaatccttgtccgcccactctaatgggccatacctctgttggcctctagatttgggttgccatagggcacaattgttt

SEQ ID NO: 258085 - DNA, 1279 bp, Cannabis indica
atgatttagcattaatttttctaactagaaattcgtgatgtccatgtatcattcgttaaaatgaattttagttttgatatggagtctagattacacaagtctgactaggtagattaggattttgtactgcacagatctacattttgtctgaacactttccatgtctattcagaatgaatttttataagaaaactattgaatgacttctctttgtattcatactttttgagctcgattttggctgttatttatccctataaatatcgcctaaactattagcaaaagattctatttcttatatttttagaaaatagtgtttcttttgtaaatgatagttgttgtgatattccttggtgaattttgtgtgtttttgtgattacttttatgtaaagtaaatttcaaagtgatgaatgcaaagaacagccttcgggagaaggttcatcaaagtatttcattgaaaggaaacaagcatcttgcattgggaagcaagcatcgctatcttcgaaagaagatttctacaagtcttgtatcgggaggaagcaatagcaccgctatcttggggagaaaatttctataagttttgcacccggaggaagcaagcattcatcaagtaagttgaagggagttcaaacctttgtgtcttaaggagattcattcaacaaataggattacatcatacttgcgacaaaatcattagaaggagtctatgttttgtttaagtcattatgactttgtacttgttgaaatttgactaatgaatcttaattctaagcgtggtctcatggactagtagtaatctgcaagaattactgataccacatataaaatatcgtgtgttattttaatttctgcaattttactttctctacttttatttagatttattaggttcaattttttatagaaaaaatttcaattatgttcaaataattttacaacaatttcttattaattaaattatttgtcaatgtcacttggtaatcatagaatttcataaattattttttagaaaagaagtaatctttattcaagccaaatcagccattataatatcatgaagtaataccggagcattaactagcattaatttgataatctgacaaagaacgagagctcctagcaataaagtgaacaactctattaacaacggaacaaaagaacaaacaacattaacaaaagagtttaataagagcttgcaatctttaacaagtaaatcaaaaggagaaggcatttgtattgaactattaagcacctgtattgaagttaagttatccgtctc

SEQ ID NO: 258086 - DNA, 532 bp, Cannabis indica
tttttttatttaaacgtttatatcttacaatgcataatttgggacacaaacttaggaccacacgcccttctataattacttgagctagcctcaagtggtcacatatgcttgcaacatatagcatttatcttgcttttcttagaccaaattaaaataagagtatttgtacgaaatttttcttatgattgaactacaagaaatgttatgattattatgacattttaagaatattatgactatgttatgaatgctatcattttatatttaaagtaataaaaagttatgactaattataaattatcatttttatatatgttgtgactaaaggatctgcgactaaaattattagccacaaaaattataatttattgtctaaatgtgtttttagtcatagtacatgttgtgactaaaattaaattagtaacaacttgtatctaaatactatgttttagtcacaaatacatttttgtagtaattaaaagtaacatttagtcaaaaaaatttatatcgtgactaaaaaattatcactaaa

SEQ ID NO: 258087 - DNA, 1048 bp, Cannabis indica
taagttcatcaacgtatgcgtcttccgaatctgcgagttgactgttcatattccgatgttaagctcgcagggttatcattatgtttaggatgtctgcgtccttaggtagtcgcttcttgtagacatcgtatgtcgagctgatagaacctagacatgcgagtctatattacattataaaggctgcagggttcttaagaccaactcgtatttacagagaatcgttctcctggtttacataaggacaaggggaggatgctcgcatatattcgatatatgcgatctactctcttgtttcggatgcgattagacttcggtcatgctcgccacctctcgttggttatatcttaagcgaggtttaaaacttcgaggtttacatacgtgtcctttaagtaggggtctggtctcgattttctaggtgagagaaatctcactataacaacaagattaaatgtatagttttttttttcaacaatcattttttttttttacttttttattaacaaaacctaaaaataaatacttcagcttgactataaaagccaaatgttatatatgtggtttgaaaaattaagaaaaaatagagaattttaaactaaataaaaaataaagatgagaaataaagacaaatgaagtaattttatcaaataaaaaaatgagaaaattaaggagagaataaatatagttaaataaaacaattttagactgacacatcacttcatcatactttatatatatatatatagactagattaaagaaagttacgtgcaaggcacgtataattagttttatgttagatgctttctattttatttaaaaaataatataataaataattagaagaaaaaaaattaaataagtaatagtttaaaattatttttaatgtgtattcaattaatgtcaataatagtattgcaaattaaaagtaaattttgaatgcaatattataccgtgtatatcacactatttgtaaaatctgtatcaattaagacttgccttttgaaaagattaataaaattgcattgaaataatgagatgacatgataataa

SEQ ID NO: 258088 - DNA, 1387 bp, Cannabis indica
agagagagagatcttggctttgaagtgttctccatcacagtttttttttctctccttaaactcttactatttattatgattatcgttataatatctagttttgagtagttctagttttgagtagttttcttttagttaaggattatttcaaaacccaaaacatgaattcttaatttcattattgaatgttaatttctagtttacgttatatcaaattgcttctattcttctatattcaatgtcatggttattgttttaatcttgtttagatggccactaagttaggttttactttgatctaccgtcaacttagaattactattcacctaatagtctaagattctaagtgtttgtgataaattgtaatttttaatattgtcaaatgtactttaattgtgatgaagaatagaacctaggttaaatgaattatatgcttcattaatttattgcctagattaatctatctccataaatctcaaagttttatctaagttaaataaattccatgcttcgtggatttactacttaggtaaaatagttattttttgagcgtttcgtcttgattacatgtaataggaagattgagataattgattgcttcaacattatttgcgggattaatagtttgattggaaattaaaattacattcattaataagaattagaaatgattgttgagggtgctaataatctttaactagtttctcatattgtagtcttaattttaatttatttttatttttatttatgctattttactctaaatctcaaaatccctttttctaacttttgtcactagtttttgagtaattaaataaacatagtccttgtgggatcgacccttacttacggttatattaaaataattagaggtattacaattaaaatattaataaatttgttgtggcttacgacacgcaccaaaattttggcaccattgccgtggattattgttttattttattattcatatttaatttttgctttactaacttgttcttcgagttgtggttttaacttttagatctttttttggaaagatgacgatgtacaatcaataaaactatgatccatattatgtctagctacaagtgtatcaatatgatttctactacgatacttacacatacaatgaataatggggagattattctttcacttcttacagtaggatcaatcaatatgttcaaccaacttcttactattctcctgtagcaccacaagatcaagatcattctcttattgatctgctcaacactttggtggcttctactacttggatgcaacaaaataatgcacaatttcaacaacctactcatgttgcaccatatagtgaaaaaccaactactgctaagctggttgaaatgttagcagctaataccttgca

SEQ ID NO: 258089 - DNA, 614 bp, Cannabis indica
atatttatactctacatagctttgttttttttaacttttcatgtcgttagaaatgtccttgaattattcatctatagtagtcattctatcaagttttgtcacacgtggcaaataaaataatgacatgattgcttagtcggttgccacgtcagtgctatgtcaatgccaccacgagtataattaatttgaaaaaaataatttatttatttttaaattactttacgcaattttttaaatcattaattactttttagtttaatgatttttcaaaaatacatatttttttattttttaatattaaattatacatgtggcgctgatataacgattggctaagtggccatgctatcattttatttgtcacgtgtgacaaaacttcacataaggaccaatttacaatactgtaaatagttcaggaactatttgtaatagactgaaaagttcaagggacacagtaatgcatatgtcatagttagggggcaaaaatcttaaatgacctatttatttaggacttttttctgttataactcaaaaaaaaaaaaagaaacaaatattaaacaaatattgtgggtctgccaaataaacacttatacaatccaattaaaaaaaattac

SEQ ID NO: 258090 - DNA, 1623 bp, Cannabis indica
ttgcctagaaacaaagagatttttatagatatttattttcttgtaatattttattcatcaaaaagagtagtatacgagatttgttagtgagacatcccgacatgtgggggatcactagcaaaccagcctatatatcgatcaagtaaaggatgagaaatggacttcttctttggagttttggattttgaacttttggacattcttctctctttttagatcttctacttcaaaagcttctccttgaaaattacttgacggcatccaagaacaccacactcattccctcatctttttcattgagtccaccatactctgttgacaccagacctcaaaacaccattgatacacacttttcattacactttattggtttatggttcctaagaactttacaaccattaatttagatcatgtttatgaatatcaagctcccatgagtcttatattcataaatcttgattaaaattttacctagagatccatggttgtatttttatcctcacactcttgagaacataactttggtgtgtcgaatctaatcaataaaactaaaagtagacatcgccccattacaattgcgacatgggggtgaactataaattcttgatgtctatttaatttattacgattttattagtcagattaatttaccgtggtcctcttttattttcaatcttcttagatcaattaacgaaaaaactgcgtcaacatgaaccattaaaaaatgatttttaaaacacaagatatgataaaatcaagtttggatgcaagttatgccacagaacttgaacatgaccgagagaatggggccaaaaatgggtgtctgcatgcgcaagtagggtatctcggccagctttgcaaccaatttttaaaaaatcatatctcagtcaattttaatccaaattgagatccgtaaaatcgtaaattgattaatttaaaaaaataattctagtacgaaactaaatatttcatgaaagtaaatcattaccatggctctgatattagtttttggaacttattttaccaggatctagattaactaacatgtatgttgattataatctataatctaacaccctgaatatgaatatcctaatacgataaaataaacacataagaaattaagaaatccatacattgatggcaacgaaacaatatgattccttccattcaaatctctagcccttgattcctttctatcgcaaagcattatcaagatctgaacctggatcttttctctttcgatttggttaaccacagtcttccgcactatgattgagtacttgacttgctatgagtgagcatggtactctatcattaaaggcttgaatttgatgaaaaacaatagaagggtcgaaatcactatgaaaggagtctctcatttaccagttgtcatcaaataatgaaaactaagtttagataggttggatgagaatgagagcatcatgttccttttatagtatttcaactaggttttaagatttaattatatggattaaaaaaaagataaaacaataggaaaaattcaacctagtggccggccatacatagtgggcctcttaattaacaaataaacctcaaaacctattttcttcacaattaagcccttgcttagtggaaatt

SEQ ID NO: 258091 - DNA, 715 bp, Cannabis indica
acaatgtgcctatgtttacgctcggccctaccgtgttgttcatgtgtgtgtggacacgggtgagaaaaaataataccttgatcactcaagaaccgtttaaaaggtttgtactctcctcccccatcagcttgaacaccttttataggtaatccaaattgtttctcagccatggctttaaatttgagaaacatgtcaagggcttgggatttgagggacatggggaatatccaagtaaaccgactatagtcatcaatgaagtgaatatagtatttgaaaccatctttggattggacatgtgaaggtccccaaagatcggtgtgaatcaattcaaggggttggctagcacgagtatgagatattggaaaaggtaatcgatgactcttgccttgttgacaagcattacaaaattgtaatgtcttaagggaaccagtatggggcaatataggcaataatttgcttagggtgtccatagatggatggcctaatttgtggtgccatacatttatatcagtaagttttgtagtaagataggcagcaggcacatgattagaacaagagtctttattgatatcattttgagtacaagcaggtacattagctatgctattacaagaagtggaaagagtagaaacacaagaacaagatgctggctcaaaaccagtggtaagaagacactgaagtgaagatttggctgtgtctgaaccattactgagca

SEQ ID NO: 258092 - DNA, 1235 bp, Cannabis indica
tcgcatattgatgaagtcgcagttcaatagggaaagacgcaaatacatacaccaatcaacgaaagtcaacagtcaaacattcaaggagcattcatgacaaacgttacacatattttataaccgttgtaattaatttgattaataagccaattattatcattatcattattattttgtaacggtctcattatgaccattatttgtaaccgatgcctactacctataagtagaggcttccccctccattcaaagggggctgatctgaataaagaaacagagccagagtactcttttcaacagtggattaggcaggccgagcccgaagctcctgctgaaccactatacttttctgtgtctattttatactatttacaatactcgcatatattatacactatattctttgagtactcgctattctaagtgagtactcgcatatctattttttggtattcatgcagtccttgaatactcacacaaaattggtgttgtcaaaattcctccgacaacaataacatacgttggcagttaattacattcatattcgaatcccacaacaatatttccccaaaattgtgagccttaattacgctccacgtaaataaatgcagttattattaaaaaatcccacagccgtgatttaaactgcttttaaagagtcaacactgatgtgaattaagatacgctgcaaaacgtatctcgcttggtacatgaatagcttagtttattcataagtcttccagcaatggcatgagcaccagtgtactaagcaaacttaagaactgctctttgaccataaggccttgcacactggacaatcatgtcttgggggttctcaatagcaacaataaccctagcagcgagctggagtttaccaggagtatgccttcctatagcgagatggatgtctcgttatccgttatttatgtccttcaagctgttacacttagttaatataatgtatattatacactaagtgttctaacgtccagttcaccttgtcaacacctctctacatattgcgaggtagatgcctcactatgtattatggatgtcctcagctttctattaataactcgctttactcagtactgtttgattctggggctacacattcttatgtggcagccagagtctttagtaaattggatagaccgtacgatagatatgaatcagggtttggaaccctattacctggcggagagttggttatctccaacaggtggattaggtct

SEQ ID NO: 258093 - DNA, 512 bp, Cannabis indica
agaaggtcccaaatggaacaaggagactttagctaaatatctttgggctatttctacaaaacaaattgtggtttgggtaaaatgggtgaacaatatgtacataaataatgtcagtgatttggcttcttgagttaaagatcgacattaattggtattggagaaaacaattgagattaagagagactttcgctcaagaagatattatcaaagatgtaactagtggtagatttttgattgcaaaagcttatgatcaactcattttggatgggactaggtttgaaagtatacaagtaatttcgtgtaggctttcgacaccaaagcatcgatttattatgtggcaagtggagacaatcttgtcaagatgttatattattttataatataataaagtatagattaaaatgtgataaatatatgtgaataatatatattaagtgtatggtaaataaatgtgtaacctatgattttataacctacacttttgtaacctacatgttgtaacttggagagga

SEQ ID NO: 258094 - DNA, 571 bp, Cannabis indica
gaatggtctttcttggctgccgtaatgggtaagatgggtttcaatattcgatggatctcccttattatgagatgtttgcacactacttccttctcctttaatctcaatggttcggtggtgggttcacttattcctcagcgtggtcttcgtcaaggtgatcccctttccccatacctcttcctcatatgttcagaaggattgtctcgtttattacaatatgaggaaaaagttggtcgacttaagggttatgctgtttctagaagagctcccacaatatcccatttattttttgcggatgacagtttactcttttgtcaagctgatgatcgatcttgtgggtctatcaaacgggctttggatatctatcatcgtgcttcgggtcaagaactcaacttggataaatcggtgatgtccttttctccaaatactcctccacatgttcagcactcttttcagaatattcttgggatgcctataagtgattgtcatgaaaaatacttgggtttgccagcttactctgagagggataagaagcaactttttactgatattaaagaacgaatttggaaat

SEQ ID NO: 258095 - DNA, 1071 bp, Cannabis indica
  modified_base (455)..(455): a, c, t, g, unknown or other
gtgagactatttggaaatggcataatgagatgatctttaaggacaaactgtgtgaaatggaactgttttataaggattgtctttcgagatacaataattttaagtgcaaccgtatctagtttgaagaaatggatatgaatgataagtatgtgcagatgcatcttcatcaaattatggaggatttctagtgttgcaaagtcgatgcttctgtagttgatgaagaagcaggttttgttgtttttcacataatgtctaagtttttagtaaaataaaaaagtttaaaaagtaaaaatagaaaaaaaatttcgtgttactgttatttttgttattttttttttaatttttgtgtatttgtagaataattcctatttataaatatataaacttattagtgaatatatttatattattacaaaaagtatatatcattttagactccacatttttttaaaaanattgctgattgatagtttttttttttttttttacattcgagaataggtccgaattcgaatttatgaactccacagaagtatcaccaaactgtgcttatacgaccactcataatttagatcttatattttgcaatagtgtcaaagattgtagttcagtgatagggcagaatagtcatatatatgtttatactagtaagagggcatatgctcccaaatttatttattttcaagaagaatttaattgcccaaatataaactacaatactataaacagagattaatatgtgactaaattatagtctcatgttatttttgttttgttctttcaaaaaatgtgtatcttttaactcaataagtgtgtatattatatccacccatttttttttatgtttaaaaaggatatacatattatcctaatgtgaattatattataaataataaaatatattaattatgttctttaaatgaatttatattattcataataataataattaaaatagttacataatttacaaaacacttgtaaagtccttttttagcaagttagttgacaaaataattttttctttttatggtaagattgttgtgcattcatattcgatttcttgcctta

SEQ ID NO: 258096 - DNA, 777 bp, Cannabis indica
taaataatagaaagacaaaaaacaaataagtaaatagaataccagaatttctagaggttcggcccgtgataatggtaatatcctactctctttagttgtattgacttgagtgataaagaatgaaagattctctctcaaactaaaactcatttatttttttttaaataatcctaaacaccactttcgtaaggcccaaaacttagaggaaattacattgtataccctattatactttacttattttaatttttatcttaatttttatatttttttagatatacccacttttatggataatgtccccagtagacctcttaggttatgtaaattataagctatacttaagtagagagtgagggtatattaagcaatccactaaaaaaagtgggtatattttaataaaaaaataatatgagagtatttttgattaattgatacaaaaataagaggaaattgcaatgtataaccactttattttaattgttttaatttttacctttatttttatattttttaagatatacctacttttatagatgatgtccctattataccccttagattaatgtaaatcatgtgctatacttaagtggagtgtaaggatatattaggcaactcactcataaaatagatagattttaatgaaataaaatatgatggtatttttgattaatggataaaaaaagaagtattcttcaacttacccccaaaaaaagaaggtattattcaacttactcccacaacttatccaaatacaagagaaatcagaagcccaaa

SEQ ID NO: 258097 - DNA, 967 bp, Cannabis indica
aaaataaattccaacatagccttctaggaactccagagaaaacttcgcttaatatactgaaagacaaggttgtccacacaaacaccatggtgcatagtaaatcttgttaggtactatatgagagttgtcacaacataaaccaagtcattgagaaaatgtttatcaaaattcgattccgtttcgagcattcaacaattttttcgtagtaaacgaggttataatttgtgacaagtcaaattcacactttgatatttcacccttttaacaatgtagaatatcgacaaaatcaaggagttttgagtcttcccgatttcacaaattaaaaaatgacatttttgagaattggtgaacaacttcgctagaacattgaatttgattaattggtgtcaacacatcatttaggtatcaaaaaatacaagtctaggacgttttagcactcactctctgtccaggttgatgtcataatgtcaagctgggcgctgggttgtcaacctggttgtaaggtgctgaacaaccttcagtaaaacggtcatacatttctcaatattaatcttattgacgcgattcaacttgcatttcgaagatatttcaaagatttatcaagtcatgtctcatacccacattgcaattatgaagatttcggatccaaaattcctcctcaactgagttgcaattttcttagcaattatggcatgtttggtttagtgtaatgggaattgtaatggaattattattaccattacatcgtatgttttcatttttaaacctttataatggctttacattgtaatggtcattacaatatgtattgtaattcccattacatcataaaactaatgtaatgatgattatattgttagaaaatatttcttttgccctttttttattacttttttttaaaaaaattttaaatattaaaaataataaaactaagggtatttttgtcaatatacaacttattttattt

SEQ ID NO: 258098 - DNA, 929 bp, Cannabis indica
aaaccgcctaaaaccgccaaaaaccgccaaaaaccgccaaaaaccgcctaaaaccgccaaaccgaaaaccgccaaaaaccgtacggtcggttttatacggttataatttctaaacggtcggttacggttttcgtaaaataaaaaccgtaaccgtccggtcggttataaaattttaaaaaccgaccataaccgaccgattttcacccctaatccaaaccattgccctaatgccgagagttcccattggcatctttaagacaaaaaatctggttattccttcttcttgaagacgactttgaatgaaaaaacttgctattctgatctccctcttttaaccacagttgttttgatctttgtttccaaaagatttctctttgattcaacacagcaaacaactcctttttagcatcatagaagagcttttttccttcttcgtcccttctactttttaatcttttaagctccaaattgcattgcttgatgcgagttgagaagttcccaaatacatcttttccccactgttgcaacaatcggccacactcagaaattttttcctcaataccgaaacccctcatcctatcccaacaccctttaatgatctcctcacaaccttgatgacttgtccaacaattctcaaacttgaaaatcttaatatggtcatgaacgttctccacttgaacttccaacaacaaaggacaatggtccgaaggagagacttctaaattgaaaagtttagccgaaggaaacatgtttaaccaagcttgacttactagagctctatccagacgcgcttcaatccagttaggtgagtctctgcttttctcccatgtaaatggatgcccaagtaactccaaatcgcgtaacccacataacgtaacggcttcaatgaaaccttcaatcaaccaagaggggtacgggttccctccacg

SEQ ID NO: 258099 - DNA, 529 bp, Cannabis indica
caagttactattcaccaactacaacaaccaaactaacgaaaatacaaaaatcctataaaagatcatttatctttaagggcaatgaaggcctaagataactatacaaaaataaattcaaaaacagaaaatatcagaaaaaaaaattaagaaaaacatactcgattatgatcaatgacgtcaacgataacaacaacctagttatagtcctttctgtagttgacgagagccactttggagtatcttgattcatattctcattaattttaaactattaaacagaaaatttacaacaaatctgttaaacacaacaaatatcagttcaaatattaatgggatttttttatttttattttattattttattaaatataaataaaaagttacccacgaatttctcatagttatataggcacacttttagaatagatataggtttaaagaccgcgcaaagcgcggttcgttatctagttatgaataaatgactattttgtttttgaggctcattactacaaattctgctttgtagaga

SEQ ID NO: 258100 - DNA, 1206 bp, Cannabis indica
gaatgatcttgtcaaaaccactatgaacaagatgcagatgccatagataatattatatggttgtgttcttatgatgacttgggtttcgttacaacaaagagttcttagaatagtccaagtgggttctggtaacagaatacaaaactcaaaatccatacattaacatacagttcggatccattaacagaaaatgaatattaaactttctgaaggttgtactgtaatgtccaatgtattctggaaactgaaattcaaaatttcatatttggaatctaaaatcaaagtcaaagacctaaacttataccaaatttttcttgagttattattctttcttagaccatcactactaatctaactcgaagtttaagtgcctttagtaagcgtatataagtagaagattctctaagatcgaggatttatatcattttaggatagaatgtctggaatatagtgatctgcgccattcaatttcatagtagaaaatagagtggcatcataaacaaatgatttataatccttcttacccaatgatatactatctaagaaatttcttaatgaaaaaactaaaggaaaaactaaaggataatttcgattaaaataagaatccaaagatgtcctgcttaggagagcgtcaaagttatccttattttataaatctcttcattatttcatattgtaaacactagtctaagtcgtcatctttggatatacaactagatgttgcaattacaaatacttatctgtcgagatctaacactattatgtttgtctaatggatgataatcctttgggatttgtctgattaaaacaacaaattaagttagaccaacaatgaagactcgaaatttatactacaaaattaataagagaaaactacatgaaggttcaatataaattaatacacaattcaaaaattattaagcctttagcaagtaacaaagatatgtgaaaatagaaaaactatcatatcttaaataatttttaaggtttccaacaaacttatacagtgtcctggtaggcgagagtcaaagatagcatttattggatagagtagtcaactcatctaaaatggacaccattctagcaaccttttattcgatcaaaataagaatccaatgttatctcggtaggtgagagtcaaggtttttcttattttattagcttccactactatttcatactttgtaaaattatctctaagtagtc

SEQ ID NO: 258101 - DNA, 527 bp, Cannabis indica
tagcgggtattttcacaccctttagcttcccttttataaatggggttgaaaaaactgcctctaaaggctaatattgtagtagtgtgtatatcctttcgaaattgggttagttagaccaaaaataatatgtaataagctgttgttgttttttactaaaaagtatgcattttattcatgatcggacaaatcatgacaaacataagtttgtttcaataattatgcaatttgatgatattaattgcaactgtcacattctgcataaatataatttaataattatgtgtatatttagtacacaacattcaactaatgatagccaagctttatccaatactaaattcattcatcacgtgcttttagtcggatgaatatatggaaataaattatatatatactaaaattttcaaaggttatatagcagccctttgtggacccaaaattaatgtaattaattaattaacaactaagtatgattatttctctacagttgtactctaaattttgtttatttgttatgcattgacaac

SEQ ID NO: 258102 - DNA, 1147 bp, Cannabis indica
gttgatcccttgatgaatatttttgctcttgataagcttgttgaatccattttgggtctttcaaaagtttggtaaaaataccaatttatcatgaaagatttattttctcttttaattttgctacaaaatcaacaaatcattagtaacaaataataatcaaatatttgttaatcatcaaaacaaggagacctaaaagtttgagttaacatttttagctttggaaatgaaagttcaaggtgattacaaggaaattttagttcaagaatagtgttttggagttgtgaatatcttaaatatggaatttatggatttctggagagttctagaatcctggaagcaagcttagcatggaagaagaaggaagtttttattaaaaaaaactattgtaattgggagtcttttaaatttaaatcttaaaggaaaagataaatgataagcaaaagatcaaatatattttttcttcttctatattctctaatttttgaatggcgcttccaaataggagtaggatttaaatccaattaatcttaatgccatgagagatatgggaaaattttaagttttcaaagaaaaagataaaagaaaagtgaaaaatgataagtttttttcctctttatctttgcttaacaatttttgaaaattgcaaagtgttagtgcaagggaatccaaagtcttaattatattgggaattattgaagaacaaaaacaattttccaatattgtcagaagtgatgcccatccggtagtttcgagagaaacaagctcagttcacgtcatcaagtcaaccccacgcatgtataaagtggaattggggccaaattttaacccaaaaatttttcctagtgaagaaaaaatcaatatttgacatatggcaagaaagacaacatctcgaagttgagtagccgagtcctaacggtcgacctaggaggggtctctagccctacgaccaagttaactctgggaattccaaaattggtgttcaaatttcaataagtcatttccaactcactatcttttagtattatgaaccatgaagacataaagcaaccaagtccaggccacaggagttgaaaatacacgaatcagcacttgagaaatcaaccggggaacttagggtttcattaagcgcccaaattgacaaccccaa

SEQ ID NO: 258103 - DNA, 774 bp, Cannabis indica
ttttagaactaaattgaaactaaagaataactaacctatgtttattttgtgagtacaaaataacgccatgtgtgatgttttaccatgaaataccaaatttcccttataaagttgaccaccacgagtttttaaaaagggtgtcaaaaaaacttaattttcattgttagtgagtgtttttaaacctttaattaaaggcacacattgtatattcttaaaaagtatttcgaaagaagtattttatagcagtactttttttaataattttattgtgtttagctatgcaaatagaggagttgacagctttcacaatggtttctaaatattataatatagtaattttatgttagtgttttttaatttgaaatttttttttgtcaattatataataaaatttgtaccgagaaatttctttatttatgattattgtgatatatataaaaattagacaagaaaaataaaaatatatatattttcacactacgtacattttgatttgtataatttttttttattaatatacatatttaaaaaaattatcttggggagtattttatttgtgtaattattaatatatatttattctatataaatgtgtttaacgaagtttttggtttaacgaaattttatataaaatgtgtttaacgttattttttagttttttatctttacttaatagaatatatattttttttaattttataatagggacttttttattttttacatttcgaaaaacagtttttttttttttttttttacgttttcgtactttag

SEQ ID NO: 258104 - DNA, 682 bp, Cannabis indica
tggaaatattgattttctatcttttttatttacattcggctattctttatttgaattatttattgacttgatcatcggagtccctttagttggcaccatcctagtgtcccaaggtctcaacggtcctttttcctttattctacaggttgtcaatgtctgcgatccttccatttcgatcattgaagattttaccctctacaatttggcgcccaccgtggggccctggaaaactgaatcgggagcaagggacacatatccaataccatggcaaatttggaagaaggagagatcgacgttcaagtccagatacctactcttatgtctcaaatgagggaaataactgaaagcctcaaaatggtacaagaagagaataaatgattctgggaagagaatgctcttctgaaatcaaaggtggagatactggagtccgttcaacatagtacgacggaatctcagtcaaggtttcgtgttctagaatccattgattccactcttatgacaaacttaggccaacgtccagcggtcacaggaatgccaccgaaccaaacaacacaccagcattcaactacaacgactactggagcagatggatcggaactaggggatctacttgttggaatatactttaccaggatctagatttactaacatgtatgtttattaatatcctaaatatgaattt

SEQ ID NO: 258105 - DNA, 508 bp, Cannabis indica
tattaggattataccagaattgggttcctttactgtcttagattgtttaactgttatttacagttattagttattgtcataccgttatttcggttagttatttctgttacaataactctccttagctaagatatttagccttaatgtcggtcactccatgtatatatattggtgttcttcttcatttgtaactaagcagattgtacattttcattcattcagtaaataaactttttccttttcctctgtcttctctgtttcgtgttataaattatttagaaatttctcagcttttgtaactacctgcattttattttattttggtagtatcaaataatgcacccgctagttctgaaaagttcttattcatacattatagtatgataaaaaaaaataacacatattatcatattatctggtgtaatgatcaatgtatgtaacaattctatactacatacgtatactagtaaataacgtgctcaatacacttaagtcttcggagtgtatc

SEQ ID NO: 258106 - DNA, 925 bp, Cannabis indica
gcgggatccgttgcgggtaatttgaaacttattttcgtaactcccttaaaaataagatttgatgatgatagctttagaattacgattgaagtgtaagatatgacttgatagagcattgaattagcctcgaaacgcaagttgaattgcatcaatcggatcaatattgagtgagttatgactatttactgaaggtacgtatgttcacgaccaaacgccccacattgacatccagcgcccaggtcgacatcccagtgcccaagttgacatatgacgtcaacctggacgctgggtaagtataaaaacgtccaaggaatttactttaagatggctaattgatattttgacatcacttagtctgtctttttgttctagcaaagctagtcaccagttctcagagatattactattctgcaaaaataagagactcgaaactcttcatttccaagtaagtatcccatcttggaaataagaaatgcaaagttgtgaatttagcttctctgacttcatggatctaagttattgttaagaactagatgaacggtcgaaacgaaatcaaaatcgataagcaacacccaacgcactaggccatttgtcaatgtgggcaatgggtaccctattcccgagctcttgggatctcgttttgatacttctaaggttcttgagcttgaggacaaaatctcttacccatttttgaccctttcggattcattggccgaattagatttggcatttgaataattgaaggcagcgttataggtagattgtcaacctaggcgctaggccctatttccaagggcttcagttggtgattttctctcagagtttacttgaatcttcattattttttatgacggaaaaaattgttcagagcactttttggtgaacttgattggaaatagcccagcactaggtgtcaaccttggcg

SEQ ID NO: 258107 - DNA, 888 bp, Cannabis indica
actgatttcacaataaaataaattaattacacatacacaaaattttatcatcaatacatttgattgaattgaaataacttaggttgaaaaaactttaaaatataccattgtgtaatatgatacattccaaccaaccaaactatgaatatttgtgttttacaataatttaattttacttaaataaaagcataataaaatattttatttttttaatttggaccctcaaaaaatgtggacgatagacacaagcttagtctaactgtgtctagggtcggctctggagcctaaattaaatactgcatgatatataattaaaaattaaggaagtttactaatttacaataataacattactactattactgacgtgccacgtcagccaaatctaacatttatgatgttttccaactttttattttttatttaatttttttattttcctttattttaaaagtaacttttttgttactaatagtattgataagaaaccagttagttactgttatataaaagttttatttttatatcatacaatttgtgatacattttggttactctcttaaaacttatttgtatacatcttagtaaccaactagttatttttaagttatattacggtagatataatttaaaatacatttaggtaaccttaaaaaaatatcgaaactaatgagttgccatgtaatataacaagttactatttttatatatatcgattattttatatatacatttttattattttgaaagttaattaattatcgtataatataatattattcaattaacaaaattctaaaataaatgttaactaagatttaaaaaaattaaaaaatagtaactaatcactatattagaaacccaatttttagaaataacgaaaaaata

SEQ ID NO: 258108 - DNA, 1344 bp, Cannabis indica
aaccggttatatttcaattacaatcggtttgacttattttgtgttatttattttcattcattatattatagaaccggttctatttttatttatatttgagacacctacttattgtgactttttcagtgacttttttcggtgacgatgactttttcagtgactttttcagtaacagtaacttttttggtgactttttcggtggcactaactatttcggtgactttttcagtacccgtgactttttcggtgacttctccggcaccagtgactttttcagcgacttttcggtatcggcaatttttctggctaaacttattattatttacaaatataagatttctatctttttttttacaaaaatatggcataaaaaaagcccatataaatttaaaaaaataaaaaaaattcataaccccttagcattatttatttatgccataaaaaagtaaactcttataatttttttatatatagtgtaatatctactttaatatatgatactaaaaaaaattattcaattcgatttaaattgtcaatgaaatttctaaaacattaacaaaatcaaaagaataataacaattggaatttaccaaagtattgattgatactaaattcttttggtcccaattattttaaagtttgaaaacatgtaattttatacaaaatacctaaagtcgtacttttcttactaatttttttttacttttttacaattttttaaaattacaattttacgaaactcttaaagcaacatgtaaagcaacaagacgaaagtaatatagtataatgttgttgtaaaaataatgtaaaacaactatgtcagtattttgtaaaaaaaaagtttaatctataaaaatattgacttttgtaaaattttgggataaattaaaaaatatatcttttatttatcaattaatcaaatttatttctaatttatatttaattgaaacatacctctttttatacgtgctgtacccaaaatattctgacataaagaagtcacatggagggtatcttaaagtggcagaggcaaaattagtacaatattaaaaagtagaatttacgtggtatatggtttttttaaaaccttttatgataaatatggcatatttaactatggacccatttatatggctttttaaaactttggcaacagtttatgggatttcaaagcccatacggctggaacaattttgccaaaagctcatattgtgtgtattgtattctatttaggttattttagtaattttaggtgtttaaatttttggttcagtttttttggaagataaccgtttatttgtagagggatttttgcatgtattcatgttgatttgatggttgctt

SEQ ID NO: 258109 - DNA, 508 bp, Cannabis indica
caagttcaggatgatactattcaggtggaacctagtaccaggaagaaggacaagaagcagatgaactacaagactaccagttaactagagacagaattagaagggttcctagacctacacagagattcagttttattgcttgggaagaagtgctagcctatgctttcttttgtgctatgagaatggaaatgactgaacctagaacctatgaagaagctatgacagacaaagatgctgagaagtggtctaaggctatggatacagagatggattctctgagaaagaacaagacctggatacttgtcaagaaacctaaagggaagagcatagttacatgcaaatggcttttcaaacacaaggagggcttaactgagacagagcctaagaaatttaaggcaagaatagtggctaaaggatttacacagaaagaggggatagattttaatgagattttctcacctgtggctaagtataaaactatcataattatacttaccatagctaccca

SEQ ID NO: 258110 - DNA, 1032 bp, Cannabis indica
ctaacctaaaaccaactaaaatttataaaacaaggcatagaacttgtaacgccctaatgataaggcgcgctacagtgatttttcaattacagtgctatctttgctaatcaaagaacttactcgaaaatcgtgtcaaattaaaacttttatattaaatattaaactttataactttataaaatcattttcaagtactgggatcccatttttaaacttttatacaaaatattcaaaatgcaatattcaggtcgcacaagaactataaaataacaaccccggatgtcccaagatcgaacactccaggtcgcgctgccatgacatttacaacctcatcccagctcagactcactcctgttcagcttttccctttcttttacctaaacatggaagcagaactgtgagtcgacagactcaataagaaaagcatataacatatcatacaataccgacttgtaactaggcgcccatacacctatttacaaggcttaacagatgagtaagaacgttccatactagggtacaacctctataccacatacactacgtacctcactatatgggtgttggtagggtttgtttcgtaccctaagtaccactgagtgatataccacacaaaccctgtacttttccatacttatgctggtatcaccgtaatgtactccttaacaatatacactataccaatgtactctgtaccataaccgtataagtgttggtagtgtaattaacatataagcatgcatatacacttaacatatacatacactcgcatattcatattacacattatacacagttcttacattctttctaaattcaagtgagttggccgacctgaacggaaagtctcatgttgcatggatgccttaatcacatattaaaactgggtaaataacatgtccaaaaccctaatttgcgaaactcgaatttataactcaaggctctgttataatcactagggactacactatcttaggaaacagggaaacgcccaactaaggcactaaaatggacccgaattgagaaataggt

SEQ ID NO: 258111 - DNA, 1300 bp, Cannabis indica
aatattaaaatattgttttcaattttcaaaaataattttttttggtctaacatattatattttacatttttgctcacatactcgaattctcgttacagaaccaaacccaaaccctgatggattcatgtcacggtatggtaaatttaaaagtagttttaaaaaacttctgccaaacaccattaaatttttaaaataataaaaaactgttttctattctcaattttgaaaacataattctaaaaactaaaaactgaaaatacagccaaacaagctctaagtgtttttttttttacaattttttttcatactaaatatgagagtttttatttttttgtctgaattttccctacctttttattttttttttacaaaaattcaacttccaaacataaaccaaccaaaaaaaatacttagaggtaaaatttggtacatagtggtagaaattcagggtaaaaaaatactaaatggcctaatatggttttaactttgcatatttttgtacaaaatttagtttgaattatttatttatttatttatttttgaaatgaaattcattcaatacaaagaaaaaggctcatcaaaccaaagagcttgatgaacacaagggggtgaaactccaatccacatagcactaactttaaataacaaagtttaattagttaaaatgtgagccacttgattggcatctccaaaaataaaaaataaaccagatacattaggatgttgcattaaacttctatttggagtagcagctcatcgatgtcgcaacaactatccctttcttttgaagtagttggatcgctcttaaacagtccgattcaaccgtaaagttacaagaaatgccatttttatcagcgcatatttacaccgacaaaagtaggcacaacacgctgacatacttttatgcgctggtaaaaagtgtcttctgttctcggttggtaaaagaattttcgccgagacaattgccaattctgccgacaaaataggctttcgccagcgagcttatgcactggtgataaaccaaatgccgacgtaaaaaagtgcttaaatatacccattgatgggaaaaataacttttgctggagcaagtatgaacgattcattttggtacaattcccggttgatgtgaatgctagtgaaaacatcgtcaccatccattctgctcccatttgtgtcaaaccacttacacctaaacaataaaacattacagaccttcaaatgagaaaactctataattttttcaagtttgccataaaaaaatttaccatcttcctcaggcaccataacacaactattttgt

SEQ ID NO: 258112 - DNA, 1315 bp, Cannabis indica
  modified_base (1250)..(1250): a, c, t, g, unknown or other
attgagaaattttattgcttaaagagatgttacaagattgcaagacactatgaacaattttctcagagggatgccctaatctgttatgccacaaggtaaactcattctcaacagcagtattacatttaatacaacttgaaacagtagcactagagttgtttagggtgacaacaaaggtactttttgaactatggttactgctggtttttgactcaggttgctggtgtgagacagattgatgaaaggttgaagatccaatgctgaactgacttggttcaaaagaatacaggccattcttgtgcctccccatcagcaagatagaatgagtcaatttgtccttaacaagacacatgtcatcatgaaattcaaagaaaacattattgtcatgagcaaacttggaaacactaattaaattctttgttatttcagggacatgcaataagttgttaagaacaagggactgagatgacaattttggaaaaataaaggattgaccaaggtgttttattgacaaacctgagccatcaccaatgtgcatctgatcgtgaccttcatagtcatagcaattagctaagttctgaacctgtggtgtgcagtggttcgtggctcccgagtcaggataccaattggtgtcactgattgtgtttgatgtggctagattggcttgagttgaattctgagttgaggattgagtgctgctgctagatgaacttagagaaggtcctgagaaggctttgtcaaaacgataaaagcaatcttgaacaatatgtccaaatcgtaaacataattgacattgtggcatgttattaggattcataccagatctgcctcctctattcatgaaaaaattacctctacctcctccaaaattccaaatcgaagctgtgtcattcgcacgcatgtagcttcggctactaaactgattttgtccattgttggagagtgactgacctcctcttccaccatactgctggtttcgaaatcttctgaatgcaaggttggcctcagtaactggatcgaactcagaagttgtaaagtttgcactgtaatcaatttctttgcttgatttttcgattctcgattcagaagctaggagaagagcttctatttccccaaacagtatagtttttcgattcttgtgttagatgagataacaaatgtgtcgtactcactagggaagaccttttaaagatggcagctacatgatctcgatcacttagcacttctccactgatgctaagagatcaacngtttgcttaactttcagcaataatcatttcagtacttagagtacgcttttttttccagtattttg

SEQ ID NO: 258113 - DNA, 1784 bp, Cannabis indica
tttagggtttagggtttagggtcgtaggttccaaggcgcaggtcatggtccaggtcctaggtcccgatctgggtccatgttcgggtttgggacctagtcccagttttgatttcgattcagtgtctgagttcgagtttgggtccgggcctggttggggtctaagtcttggtttgagtctaggtccgagtctgggtctaggtttgggtctgggttcgagtccaagtccgagttttggtcttaggtgcaggtctaggtctgggtctggggctgggtctcagtatggatctaggtctcgagtttcgatcccaacctaggtctggatctgggttcgagtctaggttcgtatccggatccctatctacgtctgagtctgggtcttggattgggtcccaggtctatgtccaggtccggctctcgctccaagtctgggtacacgaccgtgtttgggctcgagttttggtctcgctttcggtttggggctaggtccgagttcggttttaggtttgggtccgggtcctggttttgcagttcttgttcaggttccagttccgtctcccgggtctgggtcagggtccgcgtttgggtcctggttcgggttcgggctcgggtcctggtttgagtccctaatctagtctcggtcacctatcgagatctagttccgattaaggtccttggtcccaagtccgagtttgggttcccgaccgagactggggtgcggttctaggtcccgaccccaattttgtgtcccgagtctggttccatgttttggtctgagtttgggtctaggttcgacagtgagtctatgtatgagttgggatctaggtttgagtctcgattcgggtctaggtcttggttggagtctggcacctggtccggttacagttttgggtctaggtttaagtccagttacggttctaggtctaagtccaagttctggttacggttccagtcccgttcccgggtccggcctcggttcaaattttgggtcacagggtacggatttgggtccaagttttggtttgtgactggttcggtccgggtcttggttcgggtcctggtcttgttatagttcgggtcccgggtcttgtgccgggtcctaagtttacgattgggtctgagttcggggttgtgtcccgatagtcaagtccttgtttctgggtccagggttgggtcccgtctctcgagtttggggtcgagttttgggtcttcatcccagttccaatgcctagtttctagtccaagtcctcaatcaagatccggatcctttgtcaatatttgtgtccatattcgggtttggggcccaagtcccccatctaggtctagatcttaggtcctggtctaggtccaagtttaggttcgggtttgaatctcagtttgggtgggtttgaatctcagtttgggtccgattctaggtcccagtacgggttcaggtgttagtttgggtctaggtccagaatgagtccaagtccctattttggtccaggtcggggtccaaaaccgaggcctagtcaaggtctaggtcacgaagtaggttttggtccgggtttaggtcttgagtttgggtctaggtttgggtctggatctgggtctgggtcttcgtcctgggttccaatctcggtttgggtatgggtcttggcccgtgtcaaggtttgggtttagggtttagggtttagtatttagggcttagggattagggtttaggggtaagtgtaatgagtttagaatttagggtttaaggtttaggatttagagtttaatggtccgcttccagatccggttccaat

SEQ ID NO: 258114 - DNA, 644 bp, Cannabis indica
gacaagaatgtcatataggcgtcattggacaaaaaggatatactcctactataagattttggctcgtgggtcgaaggtgtctgaacaaatggggcctatgcagtctggataggtgtcacgcacggacgctgctacagtagacaagaatgtcaaataggcatcgttagacaaaaaggatttactccctttgggagggcgcacaatatcatgttctgacataggggacaagatttgatttagtgggactaggcatcaaagggcagccatgtcaccctgcgagaggcttctggagacgcctcttagacttcctctcattaggtatcttatcaattgtttagaggactttgtttattttgtctgttggaaggctggaagagctttgggagcaaaggggcctcatcttcagaggcaaggttttaagagtttagatgggctcgggcccaactctgatctggactgggtttttgtatacgggaaggcttggccttagcttacgtagaccaattatactttgaaaatgtcacattttcccatctagatatatagataatatttacccccaagctttcgagacttgagaatggtagaagcttgcagtctttcttccagatgactttggacactttggacacgtgaaccatttt

SEQ ID NO: 258115 - DNA, 633 bp, Cannabis indica
aagacccccttcattcttagatcatcgttgacgatgtcactagatgaccgtccaccatcctctgctaccgctcaagctcggaaaaagtctcaatccaaaactcttcatcttatgtacgtgttcccctttcatctctttcacttctgtagagaatatgaggttttcattttgctttaaaatctactgaagtggaatagttcgtttttagcctaattcatgcatgtatatatatatatatatttatatatttgattcaaattatcatatattctttttgttctttgagtctcgttaacgaagatgtatatggatttatttaatttcttgacctcaaatcacgatttcttgttgttgatcacgattgaattgttatgttggtcctttgcagcatgaaacattctttctgttgtttggttgctgagaaatgtgtatgaatgaaagtaaaattttgtttatattatttttgctgtgaaattataggggagaatcagatattttggatgcccatatggttaatgttgatgtattatagttggtaactgattatttgaaatcttaaatcattttggggatttgggttgggcattttttccagatagtaaatactgaatttgatcacttagactgttgata

SEQ ID NO: 258116 - DNA, 759 bp, Cannabis indica
gaccaagtacctcaactggctaaatgtcgaatctttgccacaactttggaggaaaatgaccatcactggttcaattagttgctggaagaatcgatatcaacttgggaaacattcgtagatctatttctaacccacttctaacaataatgacctataaatcgccttacacgactttggcaaacattaagcaagaacaagatgagacctacaagattattttaaacgtttcaatgtcgaaataacaaaagtaatgaaggcccccgagtcttcgttgatttgtatgcttattacaagggtattgtcgaggactgattcttgaaagtaattacaagcacgatgtcccgagacgttagttaaattttttgccatggaagaaccccacaagagaatcgagaactcgctaccaaaactcgagaaggccaaggaaaaacgatgatctccagagccaagggcgcggtcaaagagtccacgatggaaaagctcgagagaacctaagctaaggcttagcccagcgagatgtcgaagcccaaaactagcgaagccccaactagaaaggaaagttcaccaaagcgtaaggaaggccctcaattgttaattatacagagttgaatgtacccaccgaccacatatatactattgaggatcattaactgcctccaatcaggagaaaccacgccaaaagggacccacaaaaatactataagtatcacaaatatattggccatactatcttaagatgttggtttttgcagaatgata

SEQ ID NO: 258117 - DNA, 846 bp, Cannabis indica
tcttcacaattttattcgattatatatgatagttacatgagactaaacatttacaatatttgactaaatatatagattaatttggtgaaatactgtattactggtaagaaataaattaatacgatcaacaataacattttccaacttagacacaaaatactattcacgcttatacttttgttgggacacgattttgtcctgtgatgtacttttcacggaatgtattccgttatctaccgagtacattagatgagtctctcagggtacgtaataatggtctcagggtacgttactattttttaaccctaattacccctagatcaatcccacctctcaaattaaatatctccttatctaatggcggccgtacatcacggaatacatcccgtaaaagtacaataacggaacaaaatcgttttgttgttggttgattattaattagctgatgtggatccaaataccttggctaggaaattctccgttaacgacaaataaaagataataccccgaaggagcaagattagccgaagcaggagtgttaacctccacttggtacatcattccacctatttttttcacttgcccagtgggtgtaagtaccaacaatctctggttcattgagaatgagtgagtcgtaaacgacggagaaaccattgtcgttttcactgatttcgcgtctacgttattacccatcacccgaaatcgaatcgtcaacttctgcgaatacttgaccttggtttgcgacccgggtaaaacgataacgggtcggagatttggtctctccaaatatgacggaatgaaagcctctaagctcagctccgttgggaatagaacatttgtgaactc

SEQ ID NO: 258118 - DNA, 572 bp, Cannabis indica
gggagaaaggggatccacgtgctcggtccaactcaaggtcatttttcttctgaccggccaggccgtggaacatactttttagctcatccaactgtgcctgcacgactggattaacatgttcagcctcttggccgactacagtcacgtcaacatctcattgagcgagattttaagcacaagccccgagctgaacgactggcgcgtcatgttgctcgtctaaccctctccttctgttcagatcatctctgagatcatgaaccattcccaatcgattaaatatagaaacacccgggtgtctctgtgattagttggtttggccaatcaactggccggaaccatttacttgtgcagagttattaggtgtgacttctcctaatcaattgttagatagagtttgcccgcctaccgcttggcccacaggtagaacctatgaccagggattggacggctgaccatttagagtttgagaggtgttcacaacgggatcttcgtctgtctcgcccaggggaatgacggttgcaggttgttgattggttgcctgataggctttttgtattaacatggtggcctgt

SEQ ID NO: 258119 - DNA, 515 bp, Cannabis indica
gaagattcttcttacaaacccaagcccaatctctcttttctctgcacccctctctctagctctgaatcttttctctctcaaattctcaatctcatctctatttcgtacctctcccaaaataacttgacaatgtggtatttataggcttaggatcaaggtcttaaagtcggtggctgcaagaaacgaggttgttaattagttagaaataactaacttaaccaactcctctttgagcaaagtctccacgttaggttaagtatcagagcctatgtgaacatatatgagctttaggactcatagaccccaaacactcgctgaagacgcttccaaataggattgagtctgctgtatagtcaattatctggatctaccattccaggagtgaacatggtagtcattcgggaactcccattcagacttgactatcattcaacaagactccttccgagactagcaactgcgagtgaacaactttccagaaatggcatttgtggaaaccttttcatttggaggaa

SEQ ID NO: 258120 - DNA, 567 bp, Cannabis indica
atgttgatgccccggtgtcaaatgggcagctcgtgttacgtctcataggttccttgccagagacgtacaatggtacagttgatttcatccaaaatcaagagcctctaccttcgttcaaaagttgtcgatgaaggttgaaaatggcaaaacacatcatcaaagcacgtgttgcaagtgaatccagaacccgcggtggcacaaacatggttgcagtaactagcaatgactcctcctttgctcctaaatgtaaaaaaaaaaaaaaaaaaaggggcaacaacaacaaaaataaataaatatatatatatacaaataatgatagaatatatgctaaatatattccaacagatacaaaggtacaagtagtgggaacactactttttgtcctactcagggtataaattgtaatgaccgctttagtaatgtaaattagtaaaggcaattagcactaatttttattattttactattatttgtgaatttatttaattatggaccccaatatttagaaataaatattagagttataatttctcaattcctgagattttattaaactctaggggtatt

SEQ ID NO: 258121 - DNA, 1095 bp, Cannabis indica
tagtggttttgacaagatcattctttgcaaagaaatatgcctatatccattgaaagtaggatcatctatattcaaatatggatgtacgttcaggggtggatatcagtttttattatattcttttagtgatcactctagattttaccttatgcaaggaaatttgaaatgtatgagaaatttcaagaaattttagcaatgctgaaaaacattaaggtaagtggttaaagatgttgcgaactgataggggttgagaaatatttggagactcagttcaaagatcattaagttgaactccaaattgtatccaaacttacctccctacaatttcaatttgcatattgatgatactatatggttatgattagttactagcagttgcctaaatctttctaaaggaataccctagtgataggaaaattttagaatgatggaatggttgtgtacttaaattaaaccattaaaagatttatgtatgacctaaccgtgaccttaagaaaaactaaaacttttaacttaagtttgcatgtttaatggctattcaaagtatttaggggtggaccattcaattgtcataagataagaaaatatttgtttcaacaaatactacttttctaagaaaatgaataagtttgaaaacaaagtagcaaagtagaggagatattttttttaattctaaagtgttctatcatcttattctatataagatggtcccactgcctctgttgtcttgacatagtaccttgttgtagtgggagcgtttcaaggaactcaccctgttatgatttggaagacacttgtgatgaaaatcaattgttagtttaaacaagtaatggaaagtcagaaaaagaactaagaagcttagccaagagaactatggttaaaacaattcatatggagtaaccaaaagtttattattacaatggcaagaaaggaaattttaaaaaaataagtctatttaatggactgaacaaaacttcatgatactagtattaaaggtttgagtttatctaaacttgtggcttatggtatacctgtaatttaattactctagtgcaagcaacttacttttgtaagatgttgaaggattttttttgt

SEQ ID NO: 258122 - DNA, 711 bp, Cannabis indica
ttattaatattatcaattaataaagcacccgatttttgagattgagcagaaagatattggtcaagcaacactctagccgatcggacaacatccatagcagaacaaacttttttattccataacagttcattacgggcagaccaaattcgccaactaacaaccgctgcctcctgcaccacggctgtagaagctgttcgtgagagagcagaaaaccacgaactgaagtctgcaacaccagcaccagcagacacgctggaaacgcaccagcaggactttgcaaaacggcattcgattagcacatggttaatggtttcgaacgccaagttacaaaatgggcagtataaatcaacatttacatttttagttccaagttgaaccttagtagggagacaacccacaagaactctccaaagaaaatgttgaaccttcggggggatgtccagctgccacaagaacttaaaaagcaattgatcatgagcagcagcagctacacgagaagcctgctgcagcaaccaatatgcacttttcacagtgtaaaaaccactattctcttcactccaatgccacttatcagcagtggcatgatcactcaactggatagacaaaatcaagttcttatccctctcggtaaacaagtcagtaagaatatcactatcccagcttttagagtattcagagaacaagcttgagacattgtgatttaacaaacct

SEQ ID NO: 258123 - DNA, 618 bp, Cannabis indica
taaaataggttagccggttttacgggcattgtaaaatcggttagctagttttacctagaaaacccaaaaaacttcaaagcctaaccaaatcgatttcaaacataaccaaactttgtagacctgcatattataccccaataaatattttccaagcaataaaacaactacccaagctcagaattgaaaaacaccattaaagctacaagtttgagttgtaaaactcaaaactttgttaaacctactaacaaccatcaaaacaagcttaaatcaacctatgtagacatattttaactacagaaacatacttcaaacaacaacaacaacaacatcatctaattcacaaatcatacaaaatctcttcacttaaaggttagaaaaacaaaggagattaactctaagaaccttaccttggattatattactaacacttgatctaatactctgattgcagcaagaaaacactactcacaaagctgttggtccttgggtttcgaacaagagaaagagagaaaataattttctctcaaatttccactttcttctattttcttaattttccaataaatcaaaattatacttagattaattaacatagtgtggccagctgccactctaaaa

SEQ ID NO: 258124 - DNA, 658 bp, Cannabis indica
tataaaatgggttaaaaaaatagaagttaaaggcctatattgtagtagtggttagaacatcctccaaactgaaataaccaccaggaaataaaatagcaatctttgcaaagtcgtgagccactatattaacagatcgtttaacaaaagagacagaaacaataccaatagaatcaagcaaaaatttacagtcatgaataactaaaccaaataaagaaattatttttaaagaactccgtagagcttgaatcctgcatagacaattggattccagacaaacattcttccattgcctttctttgatccagctgagagcctctttgatgcctatattttcagcaagagatgattcaaccatactatggggaaaggaagttctaccttcaataagcatcctattagaatctcgggccacaaggccatgccaaaactatgaccgccctcgaacaatgtcgcgtccacgttaatcttgatactattgacatttggtggtgtccaatgctctctcccattacctgtctgatattcagaccatgatgcatccatgttggattttctagtattcttccattgatcaagatacaacttagcaaacacaacaacgttacctgggttaaattctttattttgctaaacgagattatttcgggctccccatata

SEQ ID NO: 258125 - DNA, 891 bp, Cannabis indica
agtctgcccaataacctaaacaaccaggggttacaacctcttcctattgaaggagaggacatcctggttatttcgggagggccacatatcgcaggggaaagcaataacgcccagaaaatatgtgaaagagataaagaacgagcagtcggcattcgccccagaaccttccaagaaggttaaaaccgaggaaccttccattatattcacggaggaagatgagaaaaatgtgagatatcctcacgtcgatccattggtgattaccattcaacttgataataaaaggatcaagagagtgttaatagataatggaagcttggtaaatatcctttataagggactctacgaaagatggagctcgaaaaagccaaattaaggccttgtatggtgaatctttgcggattcaccggtgacagtattgctagtcttggcataattgagctcgcattaaccttaggcgaggcacccctatctgccactgttatgcaagacttcttagttgtcgacctgccatcgacttataacatattgttgggtcgagcagcactgatcagaataggggcagccagttcaatcaagcacctatcattgaaattctaaacactagaaggcgtggtagtggtgcgtggcaaccaaatgctggcacgtgaatgctatcgcattgagctgcaacataggaaagtcggtcatcagttgatggtgatcttggcagaagaaaatgaaaagaaatacgaatatcttgacccctgagttcaagatgagagaaacatattgaaaccaattgaggaattggaagaggttattcttggcctaagaaatcctacaaagtgtgtatacattgggaagaacctggacgagtagctcaaatagtagctaataagttttttgaaggcg

SEQ ID NO: 258126 - DNA, 1062 bp, Cannabis indica
gctaccaaccagtgacgcataagaaacaactttcatttttatctctctctttatcattttgtggacattggctctttgagaacttgtcacccttcactatcggtaccttcccaaaagaacatgaatgcatgttgaatcttttcaagatatgatcaatgtaagttttctgagacaaaggaagaataacattggccctatcttgaaggatttgaatcccaagcgcataagaagcatcgccaaggtttttcttttttttttatgtcaaaatggtcaaacaagagttgttttgtctcaaccaacagatcagaattattagaagcaattaggatgtcatcaacatgcagtaccaagaaaataaaactgctcccactgaccttcatgtatatacattgatccaccacattcttcctgaaaacattttgagtgacaatcatatcaaacttgagataccactgccttgatgcttgtttaagcccatatatcgacttcttgagtttgcaaaacatgtgttctttgccagacttctcaaaacctacaggttgagtcatgtacacatcctcagataggtcaccattcaagaaggcagtccttacatccatttgtttgagttctagaacaaaataggcaactatagccataatgattcgcaacgaatctttggtggaaacaggcaaaaaagtttctttgaaatcaatgtcctctctctgactatagcctttagccacaagtcgagccttgcacctctctacttgcccatttgagtcacgtttgatcttatacacccatttgcacctgatgggtctacaacctttgggtagttcaaccaacacccaaactttattttgtgacatagaactcaattcttctttcattgcatccacccacaatgcagatttaggactattcactgcttcttggtaaatgactggctcagaatcatctcccacattaaactcatgttcctgcatatagacaagatagtcatcaggaatagcaggcctacagactcttgtgatctctcaccacacctcatcgtcccccaaatcaagattttcatcttgt

SEQ ID NO: 258127 - DNA, 620 bp, Cannabis indica
aagtcctatgatcttgccaaacttatagcttcaggtttgggtgacctcattcaagttgacgaggataccattaaggaaggcactgggccttacttaaggggtagattccttctggatgttaataaaccacttaggaggggtattaacattcgttttcttaagatgggaagggaatttaccaaatggttggacttcaaatatgaaagattgcctgatttctgcttttactgtggtaggctagatcatactcgtagattctgccagtcttatctgcaaaaatgtgatgaaaatcctgttccaccacctagtccttacaccattctgcttagggggaaagaaaaatctatggacaagtctggtccttttgattatcctcaccctcctgctttttccatctctgagttacctcagcagccttcccctcttaatcagggaatgtcaaatccgttcttggcccagtcttatactttcactggtttgttgaactctactattggacctagttcatttttgggatcacctgttaactctagtgttcttatgatccccactcctgttaatccgaaccttagcactcagggtacttctagcttccctgagtatattactcacatgcacta

SEQ ID NO: 258128 - DNA, 571 bp, Cannabis indica
tcatgatgagagaattttgataatacatgccaattatgcatatcaacagaattattaatgttaataaccatgtgtgtgtgtggttatataccataaacttattaagaaaaaatattattatagatagatagagatctagaaggattgattacctgaaactgaatcaacgaattctccattaatgaaaagctttgtgaactttatagcaggcttcttctccatcatattatcattactactgctgctgccgcctttgtaataacttctcatatctctctcttttttctggttgtgtgtaaaactaaaggagatgttatatttataagaaacaagtaccaaacatattgtacagtataataaatgagtcaaagtcaattatatatatatatatatttaaatctattaattattcatttattaagatttaatttacggtgagtattattttggacatcccaatgaacttattttaactatttttaatttatataaaatacagtatatagaaaaatttatatgaaaaatgcaaaatgatccttttattacatttttactctcacaaaggttagga

SEQ ID NO: 258129 - DNA, 1067 bp, Cannabis indica
taaaaaatttgcctaacatatatctaatatgttaatctgatggcaactgacatgtacgctaaacatatataagcatatgcataacattatactaatcttacctcgatttcgaattcaggagtgcccgtcaacctgagtggaacgaactgctcggtgaattacaggctcctaaacaataataatcacaacactaataagtgacatgctaaatcacttctcggggacttaaactcgaaactagaagtttccctcttgataaaaagcatggcaataccctaaacaacacaaaaatgggaagaactagggttgcaaaattttccccaacccgcagaccggttctacaaccggaattccggttccgggaggaagccagaacaccaaccggaattccgattcctacaggccattctgaaccggaattccggttcaatgcaagaaacttaaaaaatttatttctcacccaattcaaccccaaaacttaccaaaccctccagacctgctatttagaccccaaggaacatatcaaaagcaataaaaccaaggttcatgcaaaattacaaaaactaccattaatgagtcaagcttgagttcaaaaactcaaaccttgctcatccaactaattagctatcaaaacctgtttaattcaccatatatgaccataaaataactccagaacacaaactcaagcacaaacaacaaccacaacaactatctcatcattttactcataaactaaagtttgagttcaaaactccacactttgataaaaccaactaacgtgcatcaaaacctactctaatccactcaattgaacaccttaaaactatagaaaacatcacataaatacaacagcaataataaccaaataacaaagcatgcaactatcatatttttcttacaactcaagaaaacacaaagagagttggtagagataaaaccttggcttgaattacacagagagctgctggaaactaaggattgagagagcaaaaatcaacagccatagctgcccgaaaggtggccgaaagagagagagcttgagagagaaagagggattttgaaatttt

SEQ ID NO: 258130 - DNA, 1252 bp, Cannabis indica
tataaataaatgtatttataccgagctcggagagagaaagagagacggacgggaggtggtggtggtccgacgtatgagacggagatgagagggacaccgatgggaggtagtggtggctcgacgtatgcgacggagaggagagggagatcgacgggaggaggggtgggtggagatcgatggacgagagagacgagaagattgggagatcgagagagggaggaagacaacgagagaggagggcgatggtgcggatgcgtgggtggggttttggagagttaagattttcgttttaaggtgtgggaaatgaagaaaaaataggtgggcatgtgggaaatagaaaataagtaggtgggcacgtggcaaatgtggcgagaagtaggtaatagttttttattgggctcttatacccgacggtttaaaatcgtcgcctataagggccaataaattttacgaattccagttaaaactgtcgcatattcctgtaattactgttgtaaaccgtatggaatactaatttttctcgacggttttaaacagttacttaatttttttagcgacagcctccaaaaaaaatatttttaggaccgtcgcaaattctgacttttgtagtagtgatcatccaatatataattggatcggatctggataggcctaaaatcattggatgtggtccaattaactcccttaaacaagagtagctaaacagtttattaggagtttgatggatattgtttgacatctatttaatgtgaataaattttctcctaattttctatgtattttattttattatactcaattagttttaattgctctgtcattaattaattgtctataattttgatacgaaatctgaaaagtgggtatcaattattctaatcttcaatcattgttaatttacatattaatttacttgcttgtttttattgcattaaagtctagttctaatttttcttaaatttgaataactaaatagaagtaaaagtttaattagtgcttaattacaatcattgtgggatcgactttactttttgtgagtctattacttgttaacaatacgtatacttgcgtattgaaaatattataataatattctatttatgtaaataaataaattgattttttttatataaagtgtataatattttgatatttataattatagaaaatttgtttattgaatgtgaatttcttgatcatatatctcgtccaaacctcgtgcctaccttgtggagtaaatgagtatactatt

SEQ ID NO: 258131 - DNA, 932 bp, Cannabis indica
aatttgatatactaaatataaacagtttaacacggattgattttagagatatttttattggtgtctaaaaattaaaaaatacgaaatttatagtttttttcaatatttttttaaataggtttgaacttttttattttttttacaaaatatgaatggttgcttacggtattttcacaattataatattacgttatttgaactttttgtaaatttaattaaaattaacacttgtttattcgaaaatttgacctaatgacatggacatcacttttgacatgcggcaagaagaaaaataactttgggcttacctcctaagattagggtggtcaacttgggaagttgatattagaaggcgtccagttaggtaccgagatccatcgaagttgtttctgggtgctatccttcgacaagttgaaccaaataggtcgcaatgatcctaaaacgatgaatcatgaggctgaggatgtcttgtggacatcctaatcctaagactcaacttgggtccagtagtacagggcgcctaggttgacgtcttgtgtgtcgtctggcattagtttcggttcacaacaactttctatgtgcaatctgcttagtcattgcactaggataatgagagacatgtcgtagccatgtttcagacttaagagaatagagatgagtctagaagaaattacacttggaccctccaaaaccctaatgggcgcccaagtggacatatattcgacctaggggacatagaggctaacatttaaacaatatataaaagagtaaatattattttggaccctgtgttttgttaaagttgccaattagaccatctgttttgttaaatgacaaaatggacccagtattttccaaaatggtacaaataggactctgaactgatttttttcaaaataaaatttaataataatctaatctaaatgtgttat

SEQ ID NO: 258132 - DNA, 520 bp, Cannabis indica
atacatattttctttctttaatatattttggaatgagtcatgtggttcagattattacttcttgcatttgcattagctgtaagtacatattgactttaattctctaatcactaatattggttttaataatagcagcaagcaagcaaaacgtttgaaagaattattaacaatataaatacatatttggaatccacacttatcctcccataaataggagaagagggttgaagttcaaaccccctccccaatatcaaaaacaaaaataatataaatatacatttggatttttcttttttggtggtggcgtcgttcttgcctaactgatctattttttataaggtggatatttatttgtgttagtcaaagtcataggcattaggcactaggtttcattttaagttttatatttatcaaaaaaaatattatcatgaatataactaaaaaatcaattattattagtgcaatttaataattaatttttgaagacgtaaaaagattctaaagtaattggatcaaaaat

SEQ ID NO: 258133 - DNA, 1672 bp, Cannabis indica
ttataatctatgtaacaatcgcacaaaatcgcacagtaatcgcataatgtcgcacaataaataccagtacagactccagatacgtcgcacaaaatcgcacatagaatcgcataaaatcgcacaataacctaaaaacccagaaaaagctattgttcgaaacccacattcatcccacagttttattgcacaaattatccccaaaaaacatacaaaataacaactttcaattcaataccagattcaaccacaaatgtatgcattttaaagaagaaaattcaaagaaaaattccacaaaaactaacctggattgctgcgattggggttcgtgggattcgactgggtctccttgttcgctcgggcgtccgtcgatggggtcgattggagtgggttcgagggttcgtctgggttgtcgtgggttcaagggttcggttcgtggccgtgggttcgtgggttcgtcgtcgtcgtcgtgggttcgtgggtttgtgggttcgtggtcgtctggtggttgtttggtggtcgactgcgattggggttagtgggttttggttgtttggtcgtctggtgtggttgttgtttgcagcgtcggtggggagagggaatgaagagagagaatgtagaagagagagaatagagttagagggaatgtgagaagtttgaaaagacaggggtatttttggaagataattaaaagataggtatagtttttttatgtgtaataattgggtataattaaacaccctatctaattttttagcataaattatcaaatttcccttttaaaaattagttaatttcttaaaatttattgattatttaataataagattagatattttaatattagatatattttaaattaaatgatattattatccttttactttgaaatattttattcaaattatcttatatgataaattaaataattgtaaatttcaaattaacctagagatttttatagatatcctaaccataatatttttaaattcacaaattggttatttgatggtatattttgttatttatggattataagttagaaaaataatatttatgacaacattttattattttacctatcaattcaaatatttataaataatattttaaatattccaataacctagatatttttgtaaaaatttgaaaaaggcttagtatgagatattttgacatataattttaaaaattatcattgatttattattttattcttgaaataataattacctaaccatatctattttaaaactggtttatttgattattttaattttattaaattataagatcagaaaatgatatgaaaaatatctagtttgttattttcatatcatatcttattagatatttaatttaatttgataaaataattcaaataaaacttaaatattttaaaattagtttgaattttaaattttgaaaagatattttaggttgttttaacaaccttaaattttcaaaattagttggttatttaaatgataattttattatattattaataaatatctcaacttcacaatttgttacatatattttttatttatttaaattatttaattcaaaacttttaactaaacctattatttaactgatctaaattgctatgattaacttgttgacagatctaattatttaattttaatcatagtccaattgtcaatagatc

SEQ ID NO: 258134 - DNA, 899 bp, Cannabis indica
aagaacaatgccattcacagtcttcaaaacgactcaggagtttgggttaattgggacaatggtttggattctcttattgctgattactttcagaatttatttgtttcatctaatactgattttaatgatgtagtcttgagtattgtcccatccattaccactgccgaaaatgaatctctacttgctcctattactgatgaagaagtcaagaaagctttgttccaaatgcatcctgacaagtctcctggcccagatggtatgacaccgggattttatcagaaatattggtcaattgtgggccgtgatgtcattaatcaagtgaaggaattctttgcaacttgctctcttcctaatgggataaaccgcaccaatatagttctaatccccaagaagaaacaaccttgtacgatgagcgatctacgtcccatatctctttgtaatgtcctttacaaagtaatctctaaggtacttgctaatcgcttaaagattgtgttgcatcatattatctctgaacaacaatcggcatttataccaggccgcctcatctctgataatatcatgattgcattcgaagttatgcattatttgaagcgtaagcgcaaaggcaaggagggttgtatggctttgaaacttgatcttagtaaagcatatgaccgtgttgaatgggactttattcgtgctatgatgatccgtatggggtttgctagctatttcgtcgatttgattctgcagactctaacttcagttgaatatagtgtggttcatagtgggaagattattggtcctattatccctcacagaggaattcgtcaaggggacccgttgtcatcctatttgttcttgatatgtgctgaaggattgtcatccttgatacgaaagtttgagaggcttggtcatat

SEQ ID NO: 258135 - DNA, 549 bp, Cannabis indica
aaaaaaaaaaaattgtcctttggttataacttttcagaatcctgactttgtctaatcatgtatcagcattccctaagtttagtcaaattatagaaaaaaaaaaaaaaacaacttaaatatcaatatatatggtgctatgcaaacttgagacagaccatctagttaagatatggaaaaatatgtaaaacagaagttagaattatagaaatttatagttaccagatacgtttatattttatttatattactttggtttttataataattaatttttttttaaaaaaaaattaacaggtcaaacctaacggcgtctgattatctcgggactggcctgttccgctaaaccaaaagaaggaatcgggccaaattaagccaggccaaagtaatatcgggtcgggccgagtctgcaacgggtcgggcctggcccaactcaattgacattcctatatataaaaataatgaatatttaatatatcgcaaataaaattgtcgatttcaaagtaaaataaataaaattttcgatgaaaagtgtattagatatatgctgat

SEQ ID NO: 258136 - DNA, 879 bp, Cannabis indica
gtttaaggaaaacatgtctacatgatcggctggggtttatactaaaaaatatatcggcatgtaagctggtagagagagagaacatgtgaacattcggttaggtttttcaacgcaaatccgagaggtacaaatacgacgtaacacgtaaaaatatgtgcataagcctagcatagtacgaaaaaaatataagtttaggcacgacacgaaaaatatgaatttaagtatgacatgacacaagataagctcgaagacaaacacgaaaactacacggatataaaaatcacgaattaaatataattttttgtatttaaattaattatttatttagttaaaaaaaaaatctattttttcaaggataactaaattattttttaatatatattgtgtagtcatttaatataattttttttaaagaaaaaataatagtaatgtactaattatgattaacatactaaattatttatatcctatttaaatttaaacatctattgcaaaagagaaaatacacttgtataaacaattactcgtatttcatcctgtattcagaccctcacaacacctaatagtttgttctacctaatttgatcgttcgcacaagttaaataaagtattaatttataataggagtgttcatgatttaatccaatccattaaatattttttacgtatatatatcttcaattttttaccaataaaataattaaaattcgaaagacaaaagtaaagagaaaaagaaagaaaataattgtgaatctttgtctatggttttcaaaataactaaagacataaataaccgaaaataaaagtcttcaatagtctaaccccatatcaaatactgaaaatcctaaaacataatctataaatccttataatctcata

SEQ ID NO: 258137 - DNA, 610 bp, Cannabis indica
acacatacaattaatattaactataaaatacataaataataatttcttttatgtatggaacgaacctattagaaaggatattaataacgactacaagtgagatacgataatgacatcaactttaaatatagtactgaatacgagtgagatacggaaataacagttgtaattatataatgcgttttctatagatttattatcttctttttgttatatagatctctatttttgtgtgaggattgtttagtttcaaatttttcttcactgtaaaatatatttggagacatttctttgtattttcttttttaagaaattgtataataattttttttcctagaattttttcgatttttctatataaccgcacctgaagcgcagctcgttgcgactagttattaaataaaatataaaaccccaggcatagtacggtttgtttcctaattacatataaagaacccaaaattgtggtgagcataatatactaactacttcatcaaatttattcaaaatatatagtgttttttatattaattggctccattaatgtagaccaaaaatgtataatttgcatatttttcgtgtaagatagcaaaattaaatggccgaaata

SEQ ID NO: 258138 - DNA, 704 bp, Cannabis indica
ataaccagtcaaaatatgcaaatcccttgaagaggaataaaaaaggtatgatagcctcttggagtgataataactccaagagtagtgaagatgaggaaggtaatgttgctttaacttctgttatgccgaattttgtagctaaagataaaaattttgtaaatctaaattgactgatgaatctttaagtgaatcttaaaagaagatttatgattcgtggttgaaaatttgttctgaaaattgatccttggttaaaaaaaaataaaaaattgtattttgaaatcaaacaactttctgagttaaacaaaaaaattgaaaaagaaataatttcaaaaaatgataaaattagtaagtcgtcaaaagatttaaatgcaattgagaaaaatatagtgatgcttaatcccgattcttctatttaacgccctaatgattaagtacgctacaataactttctaaatacagtgcacacctttgtcattcatagggcttttctcaaaaattgtaataaattaaaattttgatttaactttaaacttatataaacatttacatatatttacataaaaaaaaaaaattgaataattgggattccgtttttaaactttacattcaaaataacattaataaacatgtcgcacaacgactacaaaatgaagtccaagtcgtcccgagaccaaactctccaagtcgcaccgtctcgacatgta

SEQ ID NO: 258139 - DNA, 1319 bp, Cannabis indica
agaacaggaccatctatatatagacatacaattctaacaagacctaatgacatttttcatgacaactgttaaaactcaacagactgacgtggagactaacaaatatccacatctagttacgacatgcaaatataacagataagactggaatcacttttaatataatctgtcaaaacatggaccttacaaagaatcctgtcaaattaaaacttttaaattaaactttcataaatatgtatatccatacaaaaagtcaggatcccatctttaaaatttaaattcatattcaaaatacacttatagacatgtcgcactgcgactacaaaatataggcccaaatcgttctgaggccgaactctctatgtctaaccatcttgacatgtacaatcatcctcaagctctggactcactggtgttcatccttagcatttcctttacctacatataaaaataatatttgtgagtcgacagactgagtaagaaaaacatataacatatgatattttaccaacttgtatttaggcacccatacacctatttacaaggcttaacaaatgatcaagaaggttcttaatagaagtacgaccactttaccacatgcacgaagtacttgtcccgtactagtgttagtagggctaaacggtacaaagtcactgacacacacacccttaccggagcactctttaattgccgaagtcttagcttgacaaccaagtgtgtaggagtaggagcaacccaaactccctgccaacatcatccttgaaaaaaaaaatagcatgtaatttaattaataattattgttgaattaagttgtatttaggttgaaatgaatctacacctatcattcttttattttggttatcttgttcctgaaactcgagctgctggaattctgcattttttttttttgtattttatcgataatttgcaatttctagcgatataacgcaatattagagtatgttaaaggttagggatgacttttaacgatattttacgacattaagcgactaagtttacgacatgtgccaatttatgcttaccatggacaatttttgtgatgtttgtcgacattgtttgcgacatgtgtcgatagtttagacttagagtattgtgttggtttagtgagggggaattttatcgacattttagcgatatttatcgacatagtttttattaactaatgtttttcctttttttttttcgcagattcaactgtattttgttgacatgttagcgacatacgtttaattaataagcaactttggtgttctgtagaatttagcgatatctggcgatactgttaacgacgtctgatg

SEQ ID NO: 258140 - DNA, 617 bp, Cannabis indica
atttaaccgtttatatattataacatagctgggactcgaaccctggacctccaacactcacacacccatctatgaccacttgagctaagtttcaatatgtctataattattctgttttacatatctatactttatttttgatatcaaatttaattctaaagtatatatatatacatgtagtcttattgaatgggtggtacgtacgtagacaaatagtgctataagtagtttttatgtttatgcattacaaataaagagatacctaaaaaaacaaaagtggttattaataatggtttggtcatcaaatcataaatagccaattaattaattaattgggcattaagtattataaagcagaaacaaggcaataatagctgtgtctctgactggtcactatagtgtacatatatatatatatataaatacacattaattatttgtacgtacttaatggaactaattttatatgttaattaacacgcctaatagctttttctaataatcaggccgagccctataattactaattactgcttcgttgcatcattaattaccaatacttgtaattaagtagctatatatccagcattattcctattagctactagtatgtcata

SEQ ID NO: 258141 - DNA, 640 bp, Cannabis indica
ttttgtatgatttagaatgtcaatagcggggtactcttcttagggattggagatatcggggatttgtcgggagtggtaaatgactaaactacccttgctacaattaaagagttttcaatcagaaataggaggtccaattcaaggtataatgcatgcttagccttcttctttatggttttctttagctcgagataggttaattacatgattttagtgatttgaggttctgtagtgtgcaactagtttgggtttgaattctggggttaagataggtttgttttagttgattttgtgttgagatagctagttgtgctacggattactcaaacttgaagttagagagcttaagctggctctctaatggtgtttttaatttctgagttatttgatatgttcggttgcttgaaatggatttagtatagtatatgcaagtgttctagagagtatggtagagtttgggctcgatttgagttgtaaaggacatttttggggttccctgcattgaaccggccgaccggttcaggggagcctgtaacaaccggtcgaccggttgatccccagagccgattttctggttgggaaccagtctgctggttgggcttttttcaaaaccctaccttaaactaagttgaagaataag

SEQ ID NO: 258142 - DNA, 1122 bp, Cannabis indica
cttcagatcatcgggttagcatccttaccagagccaacattgaacatttgctttcatgaatctttcctcatactgtttctcctgtgatctagtcaatgcagcctcagcgagtaacgggttagactcaaccacctgagcataaaaactggacaactcccagttgttttaaccactatatcaacattctgagcgatatactatttttcaccttcgattggatttagccttcctagaggccttagcagccgcttcttcaaaataaaactctgccaatcgatccagcttagtgtcattttccatcaccgcgctgcccggaatcaatcatgtaagttctactaccttgccactcaggtaatctcttatttcatagcatgtatttgctctcagtcttgtggtagtggaagattcatacccacactaccaactccgagcctggcaagctcacaattattcttactagatcgccctaagtacaccttctagtacaatcacgaccattccttttcatggttaaaatcttcccaatcagaattaatgctaataagcattaccacacatacataaacatacttagcaattttataccaaacttatcacgcttctctaatagcttacacatttcaaataagcagacaattcaaacaataaacaattagtctattaatcaactaacaattagcacttactaagccatgagtcgaacgagtcttcgcagccaatgtacatatagagccaatcttcaggatctttaaactttagtcgctctgataccatgttgtaacgtcctgacccacatggacgccacatgtgtgtttttacaaacttatttctaactaatctattagtttaagaaatgtgtggtttaattaaaaacccataattaaatttaaaataaaactttcatacaaaatactgccataatacggggatcccctgtttataaaattcttttacaacaagtcacaaaaccgctattgcaagagttaggttacattttcaaacatagaaaaaagggttgatctttcttctcggaagccaagacaccacgactgatatgtgcatcgcaaagagacctcaaactcatgtccgaacacagttactatccttcttacctgcaccacg

SEQ ID NO: 258143 - DNA, 856 bp, Cannabis indica
tacagaatccgaatatagagcacttgctcatgtaagtgctgtgataacatggattgaatcattgctcaaggaaatcgaatttccatttactgttatcccaatcacttggtgtgataatatgagtgcaaatgatcttgcctccaacccagtgtatcatgctcatactaaacacattgagttagacattcattttgttcgagacaaggtgttaagcaagcaattagaagtcaggtacattccctcagctgataaagttgccgattgcatgacaaagggtctttctcattcaaggtttcattacctgatttccaaactcggtttgaagaactcaccctctcgtttgaggggtgatgttaagaattagttaattgtcattagttgttaattgctctgttttcagtgctttttattaagatgtaatcaacctttatttttctgttattccttgttcccttggtgccaacattagggccacctgttatactctcatttgtcattgtaatctctctacagagtataaatacaatatgatttacttagaaataagaatcatagattaaagacagaaatactcagaaatcattgtaaaaactttcaagagagatcaagaacttttttcttctcttctcacaaatcaatacaagtgaaagggtagtaggctattaccacaattatggggtcaaacctctataacaaccttggtgttctctttgctttatctttattattattatcatcgttattatttaattaattattatcgctttaattgactcattgtcgttggctaaaagtgagtttaagagatttctaagatttaatgggggtgaaatattctatgttttggatgctcaac

SEQ ID NO: 258144 - DNA, 302 bp, Cannabis indica
ctttgttatattttcaatatgcaataatatatgatgttggtttatttttttttacctttgtcacaggagctcatatagggccagagcctacaacagatagatttgttgttgtaatggtatgataatttgtcatcttcccatgatgttctgtgttttaacccattcagttttgcttatcaaaagtttttttaaatcaagatttgaagatctctttatcttgatgcttctattaaggctgtttttgatatctctttgttgtttggtgtattcgattgttgttgtctagtctgggcctgatgaga

SEQ ID NO: 258145 - DNA, 699 bp, Cannabis indica
aatttctcatcggattagagttttgcatgaaacccctacttcaaattcatgaaacccctaggtttcgaaaccctagggtgcaagcatggtctgctcacatggccttcttagtgtaccatggggacactcaaatagggtactatggagtcatgagtcgagtgctaaccctgtttggttcctttgagtcttggtcaaggtttcaaaatttgactttcttaacctctcaaaaattgagtataatttttatttttaaaattggataacaactttgttttaagttcttctatttatattttttaatttccaagagtaagttttattatattttttttaactaaaatgatgatgtggatgaatgagaaatggatccgtggtttcattccatgatgggacaataatggtagttaattgagaaaaaggaagaacactttaaaagtgagttttatttatatctcataaaattataactacatcataatattaaaaaaaacaaataattaatttttaaaaatcattctttaacatttttaattttttatgttattttgtgttaattttaatatttactttaatttttttatatatattttaaaaaagtatactttttttttaaataaaatttcatcactttttatttattttcttaatatttaaagtatatttttaatttttatgttacatgtatattattttaagaat

SEQ ID NO: 258146 - DNA, 666 bp, Cannabis indica
atatttgattttagagctcatgaactttaacccattttttttgttttattgatttattttcttttcggattaatatgtttattaatgggtaatgtgagattaaatgttgtagaatgggttttttcttaatatttgggactgttgctatatgattttatagtaaaatatcaagttttttataaagctcattgatagaggaaaactcatttcgggctcaaaatgttttatctattatttagtatttttgaattaaatgggtattggaaaataatagagggttgaaaatggaacaaaactcctcaagcggcgtcgaatttggtggctggatgtgggagatatggccgggtcacgaacggggtcgcgccgatccgaatttcagacccacggacccgtctgggaaattctggtcgacagggatgatgaaaaaatgacttgtcgttttcgcctctgtcgggcaaaacgacatgtcgttttgtcatagtgcttcatcccttcaaaaaacgacgtgtcgtttttggagtttcagcccagcccttcgaacgacgtgtcgttcggatccatgcccccttagtgcaaacgacttgtcatttgaagccctctgtctgtgggtcgttttggccaaacgacatgtcgtacgaccatggctattttttttaaaaaaaaaaa

SEQ ID NO: 258147 - DNA, 1017 bp, Cannabis indica
caacctgtacaacgagctttatcctttttgtatgttactacatctgacatggagtatgtcttaggcagacactttgtgaggctcttcgcccaagcattgatgtcacgatacgtgtcacccaaagaaatataccacgtcatttgaacaaaattcaagataacactaagtaaatatagtaactagtaactacttacaatgatgttcttgaagtctcttagaaatcaaaacaaaagtcactcaatatatctacaattaagtataaacaagcacaaataaaattaattacataattattaaaatatagttactaacactttctcaatattaatatattagaacatttttaaaaactaattagtcactcttctaaataaaaatgtgtgtaaaatttctcaatatcaatatttatctacatgtttcaagctaaaaaatacacacatagtactcaaatattactactaattttggtataaataaaaaaaaacaaaacaaattaacaaattttattaaaaaaaaattagcaaaaaatatgcagccacctatttcaagcttaaaactcacaacttttaaaacccacaacaatacccatagaactctaatattactatttaactcacattaaataaaaaacccatatatatgagtgcactcttaatgggtattacccattcatcggtagttttatgaaaatttgagtttttatgcttagtttttctatctaattataaaaaatctctcatttttatattatacgagttgagattgttccatcagctgaaaaaaaaaattaaaaaaaaaagtttttcgacagaaagaaagttgaatttgacttaagtattttgtatataaacatattttgatatagtgaaaaagtaatattttttgatatttttttaattaagtagttaattaagcatagaaattcaaatttctctttttattattcgtcgttggatcaaaatctaatagtttaatattttaaaattaatatttatagttaaattgtttagttaacca

SEQ ID NO: 258148 - DNA, 979 bp, Cannabis indica
ttgtgggtttagttttaccaaactgagtaaattgctttgcttcgtttctttgttattttgctgcgcttgaagtttatcgtttttcccaacaagtagtatcagagccaaggttcagatcaacacagaaaatttcaaagatggtgtcttccacaaaatttgagatcgagctttttgacgggaagaataatttcagtttatggcagagtacggtgaaagatgtgttggtacaacaagggctcctaaaggcactgcagggaaagaaacctgagagtatgactgatgaagattgggaagagttgcaggcaaaagcggtaagcactattcatttaagtttggctcctgaattaaagtatagtgtattgaatgaaacatgtccgtctgagttatggaaaaagttagaaaaactttatatgtcaaaatccctatcaaatagattatgtttaaagaagcagttatatgagttaaagatagttgaaggacaagatattaaggaccatataaatagatttaataagtgcataactcaattgttaagtgtagaggtcaaaattgatgaagaggatcaagctattattttgttggcatcattaccaaaatcatatgagacattagtgactacacttttggttggaaagactactttaactgtagatgaggtgtcaactgctcttttggagacagatagtatcaagcaaccaagtggtgtgtctcatactgatcaagctcttgtgacaaggtcagaatcaagtcgtggtaggagtacatcgagaggaagatatgatgacagaagagacaatcgcgctcattcacgcttttcgagggaagtggagtgctactattgtcacaaaaaaggacatgttaggcggaattgtaaagagttgactaagcatcttgaagcaatgaggaatcaataatgcaaaggcacatcagattccacaaatattgttggtaaaggctttgaaagtgactctgatgttct

SEQ ID NO: 258149 - DNA, 1015 bp, Cannabis indica
gattggatgttgattgacatagtaaaagtaaccgatccaatccaatccacacatatttattaaaaaaattaaaaattttatatacaaataacattttaatgtaaaaataataataatttaaaagtcttatacatataatacaattgaaaaatttaatagatcaaatgtatattatattcttatatatttttttacatacaatttaaataaattaaatatttttatactataagtttttttttatttttttgaatttattatttgttattttatttattttaatgtgttgttggagacataaaatgactataaatttgttttattttgttgctagttatgtaaaaaaaaataatttttttcataaatattaaataatttaataattaaaaaataaccaatccaaagtaaccgatccaatctgcacttttgcggattggattggattggatccaaaaaataaaatccacacttagtgcggatcagatgcactatgagcaaaataatgcggattggattggatgaacacccctatgcataactttcacatacaaattctaaatgaactgatttaggatgcgttagaaagctaaaagaaagatctaaaacttctgtactttgaacttttccaaaatctgactagaatatagtcgaaaatataggcttgaagttttagttttattttcttgttaaattttttctactttataaatcactgtatttttttaaatttggccaatttatacattctaataagtgtgaaacctgaaataaaaaaaaaaggtgtaattatgttccaaaaagtaacaatgaagaaaaaaaattaattttaaaaatgatccgaacaataggctaaaaatagcctaacactcaacaccttctataggtggtgccctatgattggttagcgatattccttaaaagctactattttaaattatatgagatctgatacttaattacaccaataacagtatgagaccgaggaaagtatcaaacaccaataataccttttaac

SEQ ID NO: 258150 - DNA, 1041 bp, Cannabis indica
gtttaggtcattttcttgttaacacagctaactcgtttattaaacggatcattaacccgaatatgacacgataaggacctatgtatcagtatacactcttaaaattattatatttattacatgtaaattatattttatagttaaataggacataaacatattaaattgctcataaatgtgtcataacaagattgtaaacatgttaatgagttgataagttaaccaaaactaaacctaactatttatataaatggattaaatgggtcggatcatgtcaacccatttataaacgagttacattttagttttagtttttgacacgaataataaatgggtcagatatgaattcgacatttgtttgtaatacctaagcctcaacacgacacgacccccaaacacaaacgaattacaacccttatttgtcccaaggtattcctcttcatatatgcagagcaatattgaaatcaaactagaacttaaacatgaaatcgcttgatgcaaatggtaagctaaattcatgaaaataaccattaatgttttaatcctacaagaggagacccaaaatataatcgtttgacctaaaacaaattctagcataatgatgctcttaacacataacatcttttgcagtgggcctagttttatagctcagagcattcacctagaagattataaacaacaggcataactttgacaaaaagaaataaaaaatagattactacaaataatacccaaaagctgagtcaaattggacagtgaaatcttcagagtccccaaaccaaacaagcaaagcagaacaagttcaaataactaagaccaactccaacgcacactttggtgttaaaaataactttttttctattacaacagtgacactatagctacaccaaactatagtgtagccagaccatcactatttatttgttttttcatattattatattatatttaataaattttaaatatattagggaagatgctatagtgtatatggtcgaagatggcttaagcacaaaacatttcaaaccaaaatccaatcta

SEQ ID NO: 258151 - DNA, 927 bp, Cannabis indica
aattgtatacctcacaaattatagtacatcgaacatggtggctggtggtggagaggactcatgcgggttcgaggggggtggtccgccttggagaaattcactttagggacacctccattgctaccgtggtgatctagcttatgtttggacttctagtagtagagaaaatcctggtcgtcgattctctggatgtccacactatgtaagagttttgtctttttagattcaaaagtacttcttatttatatttacattacttaggctggcacaataaactaattgggttattttcaactcaggagaacgatgaaagtccagaatgtgattacttttgttggatcgataaaaaagtacatatgctatacctggattgcgaaaccaaatcaagattttggaggaagataagaaacgcaatgagaatgttattaaaaaattaatttttatcattttgatttgccttttcatcattgtccaacttatattgcgttaaagatatgggtagtggcaaaatgattatgttttgtatttgttatgttctcaaaactaatgtttaactttattgtgtagaaattttagagaagtatagatcatggtgaaatttacatttggttaaaagaaccctaaagtaggaaaatgatctcttttctacattgtgtagaaatatttatttatgtgatgggttcaatgtgacgttgcaaaatgatatgttattcacattttgtatttgatatgtgaagtagcaaaaagagtatgttttgtacttaatatgttgtcaaaactcaaatttactaagtttgataagtttcattgtctatttacatttggttaaagaaatgggaattgatatgttttcaacattgtgtacaaataattgtgaagtatgggttcaatctcaaatttaatgtgttgtcaaaactaagtttaaac

SEQ ID NO: 258152 - DNA, 1013 bp, Cannabis indica
accaacaatagagatcgaatatgctcaatatttgaaagaattgtatttttaatttgatacttatttttactctatttattttcattatatatatttattttattaaaattacttatttagatgaaatctaaatataaattttaattaaatatatataaaattataccctagaagatctaaaaaataaaaatttattttctattcttagtattaattttccaataaatattatgacaattaattaatttgagttgaccaaaagttaattaaataatcaattttcaactcaaatttaattttctatatatataagtatgatagaattcaaaatccaatgtataaaaattattcattttcgaaatctattaaaataaaataaaataaaactagagaaactattctaatttatgtttgtctaaaattaataaatatattaatttttaaacttaaatataaatttcccatttaattaaatttctttagaaaaatatcaaatatttaagtgtcttgaataaaatcaacttaaatattaattttctaatttaattaaatatatttagaaaaataccaaaaagtctacctagaaaatatctatatctatataattcataaactaattacttattttctaattaatatataatatatttaatctattcattttaataaaatcattaatgaaaattacttgaattcaagttgatcaaaaattaattaataaattaattttaaacttaatctaatttttaaaattaaaaaatttcaaaatatctacatttaaattaaatgtatttcgaaatataagtgggaaattattattaaaataaaataaaatatattctgaaaattattctaatttaagttagtttgaaatagaaaaatttctagcttaaatataattttctatttaatttcatttattgaaatggaaacaaataattaagtatcttaaattaaatcaacttaattattaattttaatttaatatctaagaaaatattctaatttaagtt

SEQ ID NO: 258153 - DNA, 885 bp, Cannabis indica
ccttattcccaattagatagggccgaaacttatcacaagcaaacacaattgcaagtatctctttctccgtggtggcatgattcagccgagcatcatttagggttctactagcatagtagatggtatgaaacaccctgtcaaccagttgtcccaagactgcttcgattgcgtagtcacttgcatcacacatcaactcgaatggcaattcctaatttggtgaagtgactataggtgttgatatcacgttaacaagcagatttgacagcggttttgagatctttgagaagtctttaataaatctccggtagaatccaccatggcccagaaaactccttactccttttacagaaacaggagggggtaaattctctattgttgacaccttggctttatccacctcgatgcctgcgtttgagatcttatgtcccagaactatcccctctgttaccatgaagtggcacttttcccaattaagtaccaagtttgaatcctcacatctaattagtactttctccaagttctccaaacaatgatcactggaagaaccgaaaactgagaaatcatccataaagatctctatacatgtttcaatcaagtctgaaaagatagccatcatacacctctgaaatgttgcttgagcattacatagtccaaagggcattctcctgaaagcaaaagtgccatatggacatgtaaatgtcattttctcctaatcctcaggtgttatggctatttgatggtacccagaatagccatctaagaaaaaataatactcttgcccagccaaccggtctaacatctgatcaataaaaggcaaaggaaaatggtcttcctagttgccttgttgagcttcctgtagtcaatgcagattctccaaccagtaac

SEQ ID NO: 258154 - DNA, 780 bp, Cannabis indica
aactagatttgatgaattgagaatgtcagaaattgaactttatctaatttttatgaaagattatttgatattgctaatgagttttttgcttagggagaaaaattagatgaccatgtgttggtttagaaaattgtacgtgtgcttcctaacagatttgacacgaaattacaagcaatggaggagataaaagattttgacaaaatgaagatttaagaactcatggtttcattaagaatttttgagttaaatcaacaaatcaagaaaaagagcaagcaaagcgccttgagtgaggaaagcaaagatattgccttttaagtttttgaaaataatatttatgctaatataactgatgagagtctcaatgaggactcctttatgttgggcaaagtttttgtcacgggacactagtattcctttactgtaaaggatgtggctgaagctcttcatttgcctattggagtccagcctacagaagtggaatttgatcgtcaaaaggtgtttgagtttctcactggtgacaatgatgtggaactctcggacataatgcacatgtctcaacttacctatcatgctgctcttatgaggtttgccctctctaattggtttccttgctccaattcagtaaacgtttcaaatgaacttgtttctttttgtataaagtttctattggtgtaaaaattaatttggctgatgtggtttgggagcaaattatctctctttgaaatggcaagaaacctaggcttaatcttatttttcatcatttgatttataaaattttgt

SEQ ID NO: 258155 - DNA, 508 bp, Cannabis indica
aaattttaaatagaaatttttattgctcaacactttataaatctaaaccgtaaattaaaaaaaaaaaaattaaaaaatcagtatataaaataatttttcttataaaaatagaatttttactgtaataattaaataatcactcatatatataatctataaaagaattgataaaaatacaaatattttctgtaaattttgccataaaaaaagcaaaacacatcttgctaatttcattaaataaatgtatttgatattcagaatcgagggcaatttcaaagtacatagcagaggagtacgcacaaaagggaacacaattgataccaacggactccaagaagaaagcgattgcatcagtttggatggaagttgaagctcatcaatttgatccagtcacatcgaaattggggtgggaattacttttcaagccaatgtttggattaaccacagatcagactgtggtggatgagtatgaggctaaattggtgaaggttctggatgtttatgagaa

SEQ ID NO: 258156 - DNA, 580 bp, Cannabis indica
attttgtacatattggtataatatggtctttatagatgattagcataacacgtttaagtgtagaagaatttaatgcgaattagtttcagttggttgacagtttgttgaaaattcaatttgttcatgttgtaagttgtcaagttgaatttatggtgtttgtcaagccacaaactaacattagaccacaaacaaactgcagatgtgcaacttctttctgcagcaaagatgtcggtttggtaacaactgccgcttatcacatggtatgctgcagcaaaatctatttgtaacctgtaattatagctcactagtgtttagagtcctttgttcgggtatggaatattgctagcaatggttgtccagtttaagaaatagcatgacttttaaatgaattaagcaatgtttgattcaaatgatgattctggttctggctcagcgttcaggaaatgtactgataatgtttgcttctcccagagagcaagcattttatttcgttcttctacctttttgttgccataaacgcaaatggcagtttgagaaccattttcaaatgtactcctccatttaggcacaagctgtggtc

SEQ ID NO: 258157 - DNA, 617 bp, Cannabis indica
gaattagttggtctccaagtcgtcaattttatttttaaataaaatttatttttttttatcattttcaattttgtgtttttctcatttttatattagtttttgtggttgtaggcatttctttattttaatacaactattaacaaaggaatggtaaattttaatgagctgggggtgctatttgtggatgttatagctttattgtctaaattttcgggggcagttttgtcctatgttgctcgcaataagatttttgcagctcatggtttgacaaagcatgcccttcggttagacaatgagctatcctggttcgaggaggaaccactgccgattgtggattgctgcatcgttaatcatgtgtgattttgatcaccgcgcaaaaaaaaaaattacatccaaaaataacttacaagcttaaccataattgttatttctttgtgataagttaaacaatgacatacaaaaaaaaaaaaaaaattagaagactcaaattttacaagtttcatactacttaaaatatttatagggttaatttcacaaatgcacaaaaacaacaaaaaaaaacaacaaaatacggtttcacggaattttaacatttttttgattttttttattttatt

SEQ ID NO: 258158 - DNA, 653 bp, Cannabis indica
cgcgggtacgagttggcgcgcaggcgcaggctgggcgtgcgcgggtagcgcgcgggcgtaggctgggcgcgtgggggttgggcatgcgagggcctatgcgggcgcgggctggggccagcgtgcgaggtcgcctgcgagtgcgggccgggtgtgtgagggctcgtgcaggcgcaggctgggaccagcgtgcgaggctgcctgcaagcgcgggtcgtggccttcggggtctggggacgtggatgcatccaagagatgcatgactcgatttgactaaagaatatttacaagcaaaggacgcgggggccgctttttgtccttttctgcttgtgcggaatatctagtgccattcatccatctgcttgctattcatagaaacattttacttctcctatttttggtggttaacacttctcatggactaaaccaatatagcaaatcttgctaagatcattaagatcgagagccaaaagctgtcaatataatactattgatttggttccttgcataattacaaataatatatatgacttggaaacaaaagtgttatttcatccgtgggaaatcaacaccatgagagctcgtttgatacgttgtattaggttgtattgtattatatggaaatgaattatatatcatatttttatataatacta

SEQ ID NO: 258159 - DNA, 978 bp, Cannabis indica
gtctttagaaaattgaaaaatagaaaaagcattacttaggagaattcaaaatgtcgattttgagtctagaatatcaaatgtctatttagataaaaaagaagctacaccaataagtaaacacaacaaaaaatatttaaaattgtccactaaaaataactatgtttaactaatttattacctatgtgcacatttttctaaggaaatattttacaaaaacaacaaaaaaaatattataaaaaatacgttgtatgttatttaaatgtttttatgaatttatttataataaataatgtatttttatgttatactattgttgatttattgttgattattagttatctgtatgatatttcttgttgttattttgatattatttagatattattttttgattacttttatgtagttttcttgttattttcgtatttttttttatagaacactataaaaaatgtaaaaaaaaaaaaagtctttgaacgtaaaatgtaaaattcttacaaaaaaaaagaatagtattttatgtaattattaatttttttttttttattaagagtattgaaaataaataaataaaataattacctaacacaccaatgggtttataaaaaaagatatttttttttttttaaaaaaagtgaaataatagcaaaaaatagtatcccaatttttatttctttatttattttttgaagtatttattaatgaaaaatactaaaaggtaccactagtagtccttaacatcttttatcttttataggtgtcttacaattgattagtgatatttttttaaaaattatattcttaagtttcacaagatccgatacttatcgaagagagtattagacaccagtaatacttttatttttgtaattcttaatagtaattagcaattttctccctcaaattttgacatatatcaaatcatgccccctgaattttttttgccgttaaaaattccccttgaactattgagattgt

SEQ ID NO: 258160 - DNA, 772 bp, Cannabis indica
tcatcatcatcatcactatctcctcgagttttctgttaaggaacatccaatatctatggatagtattgtggcatctgcaaactcgtcatcatctaagatgtttgttgcccatgtggtatcgacatcatttgagataaatgttgtccatgtagtgtcggcatcatctgaaaagtttgtggtatctatgacatttgttatgtctgcatcatttgtggcatctgtgactatgacatctgagacatctaaggcgactgcatcatcatctacatcattacttgtaaattttttggtgacatcatctatatgaatgattggaacatctaaaactgttgcaattgagacacctgctgaggagatgatgaaggtgcaggaaaagtgatatgaggctactctaacatttttccaaaagtaaggggagtctgcttcaattgttgatgatgaaccagatccatcgggttggatgcattggagttgcatcaatcatctcatcttccagtgatatacgttcctcacgtgacaatttttgagtcaatatctcgatttgtcttagtaatctagcaaccttctataatttttatgaaattcttaagaatatgaagtgccaaattagacttcaaaaataatgaattattttataggcgtataaaataagcttcaaatacatttattttcgtattttcaaccacaaagatatgtaaataatccaaattttttgatatgacaacaaacattattgttattaagaacctctaataaatttttagaaaatttt

SEQ ID NO: 258161 - DNA, 498 bp, Cannabis indica
acttttataaggtttatcatctggtattttcattattttaatgccaaataatcgttttagaagttcatatttaggatgttaatcaacatacttgtgagtagatctaagatcctggtaaaataatttccaacagcttatgaggtttccttgattggcacaattcaacatgggccttttccaccatctggttataagtgggcccaatgttggccataatggttgtaagaataccattatcagccgaattgggagggggtctcgaggaatatttgtttaaaatatcagtatcagaaagaggactattattaccttgtgtatgtctccgtagcacactaggagaaactgacctgccttttctttccttcctaggatgtctagttgccagcgtatcagagaacttgtgaccaatgttaatgtccagcggtttgacacttgttttgtccaccactttcaaatttcttcctaaagtagcacctgggccattgttagtgactctga

SEQ ID NO: 258162 - DNA, 694 bp, Cannabis indica
gacaaaagtccttaaatttaacaatctcaatagtttaagagaaaatttttaacggccaaaaaagttcagggggcatgatttgatatatgtcaaagttcgaggggaaaaattgctaattagcctaaaaaatatatatacagagcaaaaaaaactatagattacaccacatatactaaactttctttacatataatattaatacattaacttaaactaaatcacataatataattttttttacctaaacctaaacaaatacactcacaaaactaattattctttccacaaacaattaaacaaatcatttatttacctaattttaaaaaataaaaaatacatatttatatattcacttttttttatgaaatatatattcacttaaatttctacaaatatacaataaaacctaaaaaaatatatatttataaattaatttatctattaatttataaatatatattctttaaattctaaatatttaagtaaataaatttattcaaaaaaaaatataaaaataattacagattgtgaaataatatataaataaatgtatagataccgtgtgagaaggagagagcactaaggtggaggagagcagtggcggttggctcgttggtggtgggtggtggatggtggtgtttttcgtcaaatgggagaaagagagagcaagagatcgagcaagagagagagagag

SEQ ID NO: 258163 - DNA, 871 bp, Cannabis indica
aaccctgacctcaaaccttccaaaacagtataatatagtaaacatgacataacccaacaaccaattcattgaaatatatccatttgctcaaaatcacacttcaaagtgaagaaaaacacaattttatccctatgtagcttaatcaattcaaccagcccctaactccaatcaaattaaacttaaactagttttaaacaccctcaacaactaccctagaatcatattccatcaccaaacaacttgcagcccccttgaaaaaccaaaaccccaaccaaaacaaacttaaaactaaaagaatttagtagggctccacacgggtcgggttttcgggttttcgggtggtcgggttcgaattttcggatttcgggtgtttgaaatttgtaaccgaacccgagtttcgggtggtcgggtatggcgggtttcgggtcaggtttggcgagtttaatgtcgtcgggttcgggttttattagattaatctgaatgattcatttttgggcccaaatataactacttaatttttaatttttttttctatttttaacatttttttgagctttattgaattaaagcatataagtttaaataaaaaattgcattatatatgatataaattataatttatattcatgtacatctggatataaattatgtatattgaaatcgatggtcttgcatcacagtcattgtccgccgatttctgtatattcatgtatattgaaatcaatgctatgagcctatggccaccatatatattcaaatcccattgattccattatttccctgtagcacgtttcaaacaaacacagacatggcaaacatataaatccaacatatataattaaagaaagaaagaaacaaacaatgaaatttg

SEQ ID NO: 258164 - DNA, 1422 bp, Cannabis indica
tttgcctcatctcgctcctccaaatcccacattttactcttgcacttcttcgccttctgggttttgagcatcttgaggaggacagggctgacgtgtagttgttacgagtttctaccattgttaatctgacttttcctttgactgttgtctttttgatgacgcttccctcagctctcaatgaaagacaccaaaatgtagaacgagattttcagcaaccaattaaataatagaaggagaagagttgtagaagcttcaataaaagtgaattttacgtggttcggccattaatgagccttagtccacaagtctttgttatttatcagagtatttttacaaagaatgctcttggtgaatctctctctctctctctctctctcttctttactcccttcgattccttaataatcgatcgacccctttttcattctatctatggggtatttatagtgtttttcgggagaatccctagaaagggatcacttgtctttctatgtttgtcccttaagggcacaaattcgtagcagatacaaaaataggaaatacatgacctatgtcgtaggtctcttagagattaggtgaatattatcttttatcctcctttgattgatgtgagtcttcataatgtagccgtcactagactcattaattgtcgtgtaatcgccgtaaaaaggacttatgccatctgtcaaatcctcttatggaggttctgatatgtttccccacatgcagcattaaatgcgaagtgactgttcgaacaatctctttccctcccagagatgccttgttacaattctagcctgccagagagtaaaggcgtgtcttatgctctcctccgggaggctcactccatgagatgcacttctctgcctatgacttaaccaattttttgcgactggatattctttgggatccacgtgtcgtacgcagccgatgcgacgtattttaggaaaaatctgaggcaacaggtagtaaattttttcattcaaaatttgtagtaaaatgttccttttagattatttattataatttatactatcttttgccccataataaaattaataattttttttcatatttattttaagtattagaagtaaattacttaaagattatggtacatctatattatttttgttaaaatctttttgatttaaaagttatgtcaatatttttaatttcctatgagctgtgagttgttgggatatagattttgctgacagtataattctattttgttgtatagtacattaaaatttttatttgatatttattttttattttattatgtatataaatggtatataatttttttttagcataatacaaatattttaatgtatgtatataattttattggtcatgctacatatatttaattattattctatatattttatgatatatatttattttaaataatat

SEQ ID NO: 258165 - DNA, 1175 bp, Cannabis indica
tcaataatgaaatctatctcccgttatggtggtagtcctggtaattcctcgagaaacatatccaagaattccttaaccaccttgatctcctcaggtccgagtaacttaggtttaccagaatcaattaaaaccgctagaaatccaacacatccactgcgtatacaatccctagcctacagcgctgaaattcttaggacatgagaagcttgtaccgatccaacaaaaataaatggttcctcattctccggatgaaaagttaccatttcccgttcgtgattaatactggcagagtatttagacaaaaagtcctttcagagtatgatatctaactcggccaaaggtaactctactaaatcgacacttagttctctgcgtttaattctgattagcacagatttaatctgctttctcgaataatcaatttcgcattaggcaatagggttccaaaccccatttcaaaaacataactaggcctaccaagctgattaagtactctcattgctacatatgagcgtgtagctcctgaatcaaataaaatagtataagtgaagccattaataagaagctgacctgtaactactgaaggactggcggcagaatccgcctgagtgatagtatacacacgtgctagtgcaggtttagcttctagcttgggttcctctttcttcagctagggacaatctgttgggattttatgccctaaataaaacctattacaatctaatctgatttgttatcaataaaagattaggagtcatttatgtttgcatgttatttttatgtttgtggtttaatatatgtacaaaatctgttaagtccagaacatagtcatttacaattatagtgatgtcaacacagtggaatgtgattgtgattatatgcttcgaaagacaaagtccctgtttcatcaatgcattggatttacactgatgtgataatcagcgatgaagtgtacttacattgtaaagaccgcctaagattaacagtatggattattaaataattagggtttcactataagatttaaatattatttgtattaagcatattgagaaaatttaattgagtttgatataattaattatgctattttgtaaatattcctcattgctctgttgtgtttgaaagcagtggaaaacgatgttgggcctttagagagtcgcattttatatgtt

SEQ ID NO: 258166 - DNA, 684 bp, Cannabis indica
agttaaaattttaatataattttactaagtaattattattatttaaaataaataatttgtgtatatataatttaaaatattttatacatctgccgtgaagcacgggatgcttactagttattagtataatagttttgtattaccaggtatttgtatactgatgcttatacatcgtagatgccagaattaatttgaatttcatcttatgaacaatgagtaatggtttgattctgaatttgtataaatgataaaattctaataataaactatatgattattattattacttttcatgttgagtccttgtgactcacgggtgctatgttctgcaggtacgagcaaggaaaagttagagctgccatgaggtgactgtcttctccaacaatgtacatattgaccctaccggcctgcgtgccaagttgtcaggagtttttttgggctgtatcgaattttggaattttggttttatatttttgaggcgtctttgtatatagttcttatgtaaaacttttcataacagggatcctcagaactatgctttttttataccgttataatctctgtttttagtgtttttacgttggtaaaagttttttgataatatcactagcttttaataattaattaatctattgatattaaattagtttataaaattacacacgtggcgtccctatagattag

SEQ ID NO: 258167 - DNA, 1183 bp, Cannabis indica
ttatttgggcgggttagaataatattcaacccgctcaatatatatattgggcggtttgaatttttgtaaagttattcgggttgtgttttttgtcggtttatccggggttgggcgatttgaaattttttttgaacaactctcaaatttataagctgataatgtatattctataatgtgaaattaaaacaagagaaattacacgcactatgagattttaaaagttgtttatttaaatatgatactcttaggtatgatcaatttatatggtattttttatttttaggtacttttatggtatttgatatgtcatatatatgtaaattaggtttttgaagcccatatttaatatttttatttatttttaggtagttttatttgtcactggtgctgaaaaagtcgccagagtttactgctggcgcttgaaaagtcgccgaagtagctgccaatgtcgaaaaaattgccaaaaaaattatcgaaacagaaaaattaccgaaaaatcactaagaaactgatttcttcatgtttcttgatgaagaaacgagttccttgataaagaaaccagttttttagtgatttttccaggacaatgccaatttcgatgacttttctggcgccggcagcaacttcgaagacttttccgacaccggtagctactccgtcgactttttcggcaccgacagcaaactccgaaaaagttgtcagaattggcattatcgccgataaaatcaccaagaaactggtttcttcatcaagaaagaagaaaccaatttcttggttatttttccagttatttctcggcgacaatgctaattccgacaattttttgggcgccggcacttcagcaacttttggacaccggcagctactctggtgactttttcagcaccgatagcaaacaccatcgattttccagccccagtatcaacttcgacgatcactgtagttttatttgttttatttttaagaaaaatatatgaaaaaaacttttatattttttatggtaattcaaagtgacatatctgatatatgataattttttattttaaatgccatatttttttctattaagtttggtacctagctttatttttcccatatttatatgtaaataccccttaaaacaatcatttttctattatataaagtggtgttatcctgggctagagccttcaggatgcatgct

SEQ ID NO: 258168 - DNA, 953 bp, Cannabis indica
tttattttattgttttagaattcgtattaggatgttaatgaaacatacttggtagtaaatctagatcctggtaaaatatttccaacagtattcagcttacttctcttcaggcagggatcacaactgacctatctacggcaggaggcgagttgtgggatgacctacagggtcgaccagtgaggaacattaatgaatttaatgaaagagcgcaagtatttatgcacaaagaagaagctagaaacgagatgaagttgctgaagactgactcgggtagtaaacctcgcaagagtactgcaacagtagtggttcaaacacgaaaagaaaagatgattcaatggaatcatctaaaaataaaaaagaaacagaaaaagtacgacaagtatgtcttgatttattcaatatacactgagttgaatgaaactcgtgaaaatatatttctcgcaaatgaaaacaagattgcattttgcaagcctgagcccatgagacatgtgagacatgagcgagactcaacaaaatattggtgatttcacaaagacatagggcatactatcgaagaatatcggtaactgaaagacgagatagagagtctaatctcgcgtggatatttcaaacaatatgtaagaaatcaaggaaacaagccaaactagcccaacaaccctaataacccaaataaccagagaatacaacctccccctattgagggcaaagttatattggtcattttgggagggggcatctcgctggaaaaagtaataatgcccaaaaagatatatcaatgaaataaagaatggacaatcggcattttctccagaaccactgaaaagagaaaaattagatgaacctccgattatcttctcggaggaagacacaaaacatgtgtagtatccacatgttgattctctcgtcgttacagtttagctcgccaacaaaagagtgaagagagtattggtgga

SEQ ID NO: 258169 - DNA, 961 bp, Cannabis indica
tacactgtaactgtgtaattggaagtaattgaggggttctaattacactctccaattctcatggtccgccatgagaattgaatgtaattacactgtgtaattactaaaaactttccatattaaacattagctattaaaaatattatttttctatgtaattacttactattttgtcaaacaagatatcaggaattcatatgtaaataccatctcatatccaaacacagcttacattttaaaatatagtataattactaaattgtgtaattactactctagtaattaccctacctcgtaattacacagttacttccaaacacactctttatgttttatagtcacattttatgtaagaaaaatatgtctagtttaaatttaaattgtaatatttaaaaacacaacactttttgttttatagtcatggaatcgtcaaaaaataataatctcagcacaatattacatggcttaattaagtataaattctatatatttttatttaaaaatgattaatttaaaagacaaattataaatatatataatctgcaattcaattccaccaataaaatgaataatggtgttttacacaacaaatgccttctaaaaacaaaaaatctgtacaattttaaaaaattttgtttttaaaaaacaaaaatacgttttgtaaccacttttgattttcaattttaaaaacagaatataaaagtgtgttctgtaaagtttattttcattttctttttttttgattttatttacatcgagtttaggtctggggtcgaattcgggttaagatcagaagacgggttcagcgctagggccgtgggaggatttgggttcgagtctgatcgaagtccaaaatattgattgagaaaaaaaaaactgtttaaaaaaatattgaaagtgatttttttttgtttttaaaattttgattctcacttaaaaaattgaaaagtaaaaacagttt

SEQ ID NO: 258170 - DNA, 805 bp, Cannabis indica
cgaaatggcagcttataccgggaactcggacgcaagcaatcacctgtcacggttcaaccgagtcatgacagtcatgagagtcagcaacgacgccaaatgtttgtgcttcctgcttactctaagcaggtccgcgaaagagtggttcgagaagctggaaccaggatccgtggattcctggaataagttgcaaaccagcttccggaggcagtttgtcgccgcaagaaaggttaatctggaggttagtgccttgactaacatcaaacagctacctacagagacattgaagaactttataaagaggttcaaggaagaagcctcaaaaaccaagaaagtcgatgacgaacaacagctcgctcttcttcaagcgggcatccgtacagggactccattctggaacgagttacaacaagaaggagcctccaaccttcaagacttctagaagagagtccagaaatacatcaacctagaagaagcccaaatagtggcctatgggagatactatcctactgggatagcgagatatatacccggagctcagctcccgagacccctaccaacagccgctcccccgatgagcagcatacaattctctgctactcccaaatatagtcaagccttggcccctgcatcttctcactttggaaatccctcagggattaatggacaaccccgtcgcactccgctccggccacaagcttagccggtcctcctcaaggctctcggagcaaaacgtcttcaaaaggtagcaactggacggaggacaagcggcagaaaagggggtacactccccagtacacccagtaca

SEQ ID NO: 258171 - DNA, 813 bp, Cannabis indica
atttaaagtagctcgcgacttcttctcttttctcagaatctacaaaagcgtttttagtgtgcatatcatcaggtacataacaactctattttggaattattttgcaacttattgcttgttctaatgggtcgtatttttatttgtgttcataaacatctaataacatattttgtgatagccatggagttggtggataattttcaaatattcaaatgagtatttgaactctataaaagttgtcactttctttttagagcgttctcatagtgttgtagagggaatagtttattattaggcaaagtccttaatatgagacttgtttgggccttgagttgtctagcaaaatcctttaagaattaaagcttttacgcatatatttgaaaaaatgtcaaccacagcttcacaaaaatgttactccacattatatgtcagtaagtagtatttaagaaaataactaacaaacttttctggcaaggtgcaaatcttgaatcaactcaagtacactatattgagaaaatatctttataataagattatgtatttcagtatatatttgagttaatcttaaagttagcatgaagaaaataatgtgagagtgatggttcaactacattgtgtttagaagtggtttaatctagatatatgatgtagagaaagaaagactatttacttatttatcgagaataattgtagagtatgttatgttctaatgtttagagttatttactcacatcaaaacacgtatttttcttcaaaaaaaaaaaaactagagattactttaagaaggtttttttttttttttagttttaagtt

SEQ ID NO: 258172 - DNA, 811 bp, Cannabis indica
gcacatactttattatctttaaagtactattgataaatgattattctattgtaatatatgggttacaacttaggttggttatgcaaatgctagaatatttattttgatattataaggccagatctcaaactaaactatttgtgcatatttggtaacacttctatatcttagtatttaacaaagtaaacttttggtagcgacttccttaaataatgttgagaaacttgcgattcacaaggcaaactcgagaatgtatatggttaagatcagtgacacaatatattcaaagatcgtgtggatcaacatctcataaagaggtaccaacaatggtgatatatcaatgttcaataaaagagatagaactaaactcattttacaaaaaaaaaaaaagttatgtacacatgatcatcaagagaatggtgatatcgatgttgatcaaaaatttgatcaagtgacaatcatgaagacttattcacaaaataattaccaacatcaacattcgagaagatggtacaccagatcagaatgtgccgattaaaagaactctaataatcccaaaatgagggagagtgatttcatactacactatgtttctattgaccaagtttttgtcccactgagttttttagacaagattttcaatgacgtagtattatgtgtatacaagggtagtattatataaataatatatacatatgtgaatgtccaaatcacttaatcaattacttttgaatgtaattaccattatttatttatttatagtttcgtaatctgtctcacatttttgtataaacactacaaaaaactgcta

SEQ ID NO: 258173 - DNA, 747 bp, Cannabis indica
ggtataatgggaataaaaactgaaaaagaaggtataagtgagaaaatttaaaactaaaggtaaaaacaagagagtctaacttaaaaagggtacaggatttaatttcctcgagtttaaatctgatttgatttgggataagttgaagaatacatttttttttttatctattaatcaaaaatactatcatattatatttcattaaaatctatctacttttgtaagtgagttgcctaatatactcacccctccatttaagtgtagcacatgatttatattaatttaaggaatataataggaacatcatatataaaagtgggtatatctcaataaatatagaaatgagagtgaaaattaaaatagataaagtaaaatgggtatacaatacaattttctcacttttaattttgggatgatttcaaaaaaaaaaaaacgaaaaataaccaaaaacaaattacaaaaatacggtctgtacggaattttcaatatcttagattttttgaaacaaatattttatattttatttacataaactacaatttttttatattatattcttgttattttgttatgggaaatttaattttctatgcattttttatacttaaatttgttccccaaactaataggtataactattgaaaaaaatgggtatacttttctctaaaccctaaaataacccctcccatttttcttaacctctctctctctctcttcctcctttctctctcaaaataaacccaaaaccca

SEQ ID NO: 258174 - DNA, 570 bp, Cannabis indica
aaagaaaaaaagaaaaaaactcgtgaaatattaaattaagtttttggtatatatacttttttgtactatactggtggtatattaattttcactatagtatttatgcttatgattgcagaatatagtttttatatgctattgtatatcgtgaaaaaaaagtcatttaatagtatattagtttaagtttatggtatattcatattggtctaaaatatatcgtttgtattgttaaaatttcatgattatgagctaattgaaaacacattaaatgctaatcttcattactcataatcatcaaccaagatctatattttatttagagcatcacaaaacaaagataaatatacatacttcccattgatgatccatccatgtgagccatgttagtgcatccaagaatcttcaatatgaggacaagtagaaactcaaaatgatgttagagagaacactatgaggagctatccccctttcactaattactattaggggaatttttaatgatatacttaattcttaagtaattaacaaatataccatcaacaatttaaatgatacaataagcggtaattg

SEQ ID NO: 258175 - DNA, 698 bp, Cannabis indica
cacggtttaaaagattaattaaacagatattataacaacacatactacattatatatataagaaaggtaaaagaaaaggcttgagggtaggcgagacagacgtgtgcctcatgcccccaaacgctcaaggcctcaaaattgtaaaaaaaaatctttagtatatagaagaaatattaaataattaaatattatgataaatattgtttggtgtagtggtaaaattttttatttaagtagagctcaagagatcaattaccaacatctacacttttatttttctaaaaagtatttaatgtgtagttatgaacgattgaaccttagagaaagtcttaccattacactagaattacaaatttgttaataatctaaactatatgtaggagtccaaaaatttaattttgtcttaagtcctatatactttaagatcgggtactagaggttcatagagattaaatggattacaaaattaaaggatacttgagtgataagggtttagtgttcaatatgggttctttgtggtgttgttgggggcttctcgatcaccattatggattaatgtatgtctcatcgatgatatctagtcattttggcaagaacatcttggtttttctatttgatcgtcaaataagggagatttttaaatctttattagctctatgttatgtattttaaccttttgtgattgagaattataagat

SEQ ID NO: 258176 - DNA, 1542 bp, Cannabis indica
agaaaaacgtgagatatcctcacatcaatccattggtgattaccattcaactcgccaataaaaggatcaatagagtattaatagacaatgggagctcggtaaatatcctttataaggaaatactaaagaagatggggctcaagaaagccaaattaaggccttgtatggtgaatctttgtggattcaccggggatagcattgccagtcttggcataatcgagctcacattaacattgggcgaggcaccactatctaccactgttatgcaagatttcttagttgtcaacctgttatcagcttacaacatattgttggatcgtccagcactgaatggactaggggcaatcagtttgatcaagcacctatccttgaaattccaaatgccagaaggagtgggagtggtgcagggcgaccagatgttggctcgcgattgctaccgcatagagttgcagcataggaaagccgatcatcagttgatggcaatcttggtagaagaaaatgaaaagaaagatgaagatcttgacactcgagttcaagatgagagaaacttattaaaaccaattgaggaattggaagaggttatccccgacctaggaaatcccacaaagtgtgtatacattgggaagaacctggacgagcagctcaaatagcaactaataagttttctaaaggcaaaccaggatcaattcgcctggagttatggagatatgatagggatcgaccctaatattatttgccatcatttaaacgttgatccaaagtacccagcgaagagacagaaaaggtgacccttggtttccaagaggcaaggggcactaaaacaggaagtggacaagttgttagtcaagggctttatacgcgaggtgttttattcctcatggatagccaatcttgttctcgtcctgaagcctaacagaacttggagagcttgtattgatttctctgatctgaataaggcgtgcccaaaagactattttccacttcccaggattgaccagttagtggatgcaactgctgggcacgagcttatgtcatttatagacgcatattttctggatataactagataaaaatgtatgtcccagatcaagaaaatacaagctttgtaaccaacatgggactctattattataaagtcatgccgtttggactgaagaacgctggggcaacgtatcagcaattggtaaacaaaatgttcgcaaaccaaatagggcagaacatggaggtttacgtcgatgatatgttggtaaaattaataaaaaagtagggatcataccacagacctcgcagaatgctttatgatattaaagaagtataacatgaagctaaacccgaaaaaatgttcctttggagtatcctcaggaaagtttttgggattcatagttaacgcgaggggtattgaagcaaatcctgtaaaaatcaaggcattagtagacatgccatcaccgacaaaacctaaagaagtacaagccttgacttgtataatggctgcacttaacatatttatttcaaagtcaactgataagtgttgggttttatgcc

SEQ ID NO: 258177 - DNA, 690 bp, Cannabis indica
acatgtgaatataatacgagttattagcgtgtaatatttttttttttaattttggtgaccttggagactcgattgtgaccaaaaatgtcataacaaacttaattgatagaattgatggaaatattgtgatcagttgatagtgtaggtattgaggtaattaggagtatacaaaatttggtttaacgtcttagaaatagaaatttcttagtggctaaaaaaagataagataatcattaattaaaaattatcgttaatattatattattattatacttactattactcctattattattattaattattatattattattattaaacgttaacagtatatataaattataagttataaacagaaaacatacgaaaggaaatgaaactctcgtcctctaacaaaatccttatctctccttatccattttctttgaatttctacctgaaacctagcgatctaagctccggtagcagcagaataacaattcttggagagagaaaagcttaaggtaaaatttaattctgttttaagtttgaaacatttggtttcgtatagggtcttacaaattagaatagttatggaggttctgaccttatagaattattctcaggtagtcatgggactagttccaatgttttcttgttaaatttgaggtgattttgagttagaaattgagtttagaactttttata

SEQ ID NO: 258178 - DNA, 969 bp, Cannabis indica
ccctacttcccaagttggcaaggttgtctgaatgagctcgatttgtgaattgaaggaatcgtcattgcaattcatttttaaataatgaattgacaaataaaaagaaaagtatattttttttgttattattttgaattattttgttatactatgttaaaagttacatgttaatttgtttagataatgtataataatttaattaaataaacaactttatgtaaaaaaaaatggttaatataaagtaagaaaaataaaatataatagcatttttaaatatatatatatataaataatagcatatattatctgaacatattgtattttatgctcttacctaatatttcttgttttttaagagcatcttcaatcataattactaaatatactccttaactaaaataatgagtgagctctctctagttaaaggagtatatttagtaagttagtttttttactattttattaaatttcttttgatagtattttaattaaaagtattattactttttattatttattaaattaaaatttaaactataaaatattattaaaataattaaataaatatataattagaacaataataataaaaatgattttgttttaattttcttttttaattaaaatttggaaagtacacttagagataggggtgttcattggatcacatccaatatttttaggcccatccagatccgatccaattatatattggatgttagattttaccatccgatccgatccaattgatttcagtcatccaatcgatccaacatccattggatgttggattggatcggttctatccattggatgtatttcatatatatttattggttcaatttgaatttattcaatattttagactagtatttttggatcggatcggatccatccaatattttaaatccaatatgtattgaattagattgaatccatccttttatttatttattacaataccgactg

SEQ ID NO: 258179 - DNA, 884 bp, Cannabis indica
ctctctctccacccacgaaacccacccaccatcgccctctctcaatctccctctctcttgtctcgcttcatttctcgctctctcttgcgtctccatcaatgaccaccttcctcttcctccaccggtcacttatctaatggcattcctcccaagttatatacacatatatatttattaatattaatttatatatatttatattcatattatacgtatatatataccgtacatacaatattaatttatatatattatgtatattgtatatatacgattatacgatatatatatatttatacctatatatttaattaatagatagttattatgaattgtttaattattttaagattaggtattaaaaaaaaatatttgatttaagattaattatttagttttttaatttaggcattttaaaaaaatatttagtttagattattagttgttatgtaataaaaatattatatggattatttgttgttaggtaataaaaatatttagtttagattatattaattgtttagacattaaaaaattattttttattaattatttatgttaacctgtttttggacaactaaatatttttagtaggttaagaaagtaataatggagtagataacaaaaaaatgaataagagatttttacgtggttcagacgttaactatcattagtccacgagtccattttattaggctctttggcccgtaactgtttatacaaatagagatacaatagactagaactcctttcccccgtgttcctcttggagaaaaggaagcttagtacgaatattctggagttgatagtagggttacaaaaatgtgtttgcttgggatgatcaagaatgggttctttttttcgaaggagaaggttttcctctt

SEQ ID NO: 258180 - DNA, 661 bp, Cannabis indica
gaaaaggggtattaattatatctagatgatatagctcaagctcctcgtgatggtttccctaattcccccacttcacatctcctgaacttgtcctccagcttgtttatccgcaattggattggatcctcttactttggaccaagctgttggggaaggtcaggtttctttcgattcaagtgctcccgtagaaccggttgggagtaattgctggcacacctagtcttactcacaaatcgtgtcccactcatagagtttgtctttcagtggctcgcgaatttactacttcccatattttctcgatcattacctcgttgagtactttctcctcttcgagctgatcgactgtaagttcttgaccgcctcgaggtcacacttgcttcttcacgctctgttctttccccttgagagcaatttgccgtatttcccccaataacatctgtacgagtcctcgctctatgggtttgggaagaacgttggtgatttcttgcaggtgacctctgttctcccgattgagtcctcagatcctcctcattgtcatgagggtttctcgttaacaagtttttggttgtctcccatctggctgttcgttctcatttttcagggggtgtctcattttccctaggttgttcctcccaggaattttcttgtctcctggttcgtg

SEQ ID NO: 258181 - DNA, 579 bp, Cannabis indica
tattcataagctttattaaactttaatctctgctaccaaatatgatagcagttcagttgggatattttttatactgaaagtacattcaggatataaattagaagctcgaacaaaagcatgagccaccacatttgctgaacgtttaacaaaatgaaaagaaacatttcttagttctgcgagcaacactttacactccttaataatcaaaccaaataaagaaagcatttcaaaagaattccggaacgcttgcacaacgatgaaacaatctgtctccactacaacttggttccatccctggtttttaatccaacttaaagcttctctgaagctaattgcttcagctatctcaggtcgaaccacaccattatagctctttgtaactccttccaggaaaaagccgtgatcatcccttgcaaccatcccaataccgtagccttgaccaactccgaatatagatgcatccacatttaccttgacatgatttctttgaggcacacaccagctctcaacaccatcaccagcaactaggtcggtttagatttgagtttggtatttgtttttagggtaaattgcggcata

SEQ ID NO: 258182 - DNA, 606 bp, Cannabis indica
ctgaccatactaagtgcataggccaactcaggcctagtgcacaccatgcaatacatgaggcgtccaacacaagaggcatatggcattgtatccatgtacatcttctcctcctttgtccttgctgactgattttgtgtcagtttgaaatgctgagccaaaaaagtgctaacaaatttagcttcattcatacagaacttgtctattagcttctctatatatcccttctgtgacagtgaaagtctttcaggtctatctcttttgatgtcaatcccaagtatcctcttggcttcaccaagatccttcatttcgaattcaacactaagatcttgttttaatctgtccatggcccgtctcttcttaccaattatcagaatgccatccacatacaacaataaccagataggttcactgttgtaatatacacatggatcatagttgcttctgttgtacccaatgctcaccatgaattcatgaaatctcaagttccattaccttggagcttgctttagtccataaagagatttctgtaaaaggcatacctggtttggtttactacttttgtatccatcaggctcttccttgtagatttgttcttcaagtctccca

SEQ ID NO: 258183 - DNA, 571 bp, Cannabis indica
tttttttattattcatttcctctttggttttggctattatctttgttatttcattaaagaccctagttggagtagattcatagctatgtacaattggattttctgttgtaacattccaatgcaacaatgtgccaatacttgttaaactaagctaagcttgcattgtttatgaaaaatgcccaagtattgtgacttgactatatcttcattttctttgtattcacccagagagctcttttcatctgttttagctttttcccccaaaatgtagctctttaaaattggtttaatgtatctttttccattacttggttttgtgtttagattgaatgttttctgtgtaatttcttcatgaagaactatgtagtgatgtcttaatttttgtatagctttctatcattctaattcttgaactgttcagtggcatgtggttttgatttatggaataatatgtcaaattaattactgacaaaaatggaattatgacttccactgtaaaaaaattatatgtgatcaaatacaattttcttcctaatcctttcacagtttggttagaaaatgatttctcata

SEQ ID NO: 258184 - DNA, 1006 bp, Cannabis indica
gtaaatatttgtatgtggactgataaatgtttaatgggccgccaagtattttgtaatttttttcctttttgtattttttgtttttttccctaaatatattattggggccatttgttattgtaaactatccatttggattctttatttttaaaagagaataaccaataattttattttagtgacaataatagataaaactaaaaacgaattacaattttataaatattagatactataccattaaaaaatttattgaatttataacacttacaaactcaaaaatttatacacttagaccatctccaatgggaatgggagatgtaaaaatttaaaaagtagttttttagtaaatttataccaaattttaactttgtgctccaatgcacaattacaaaattttgatgtaaaatttaatatctaattaatattttattaaaaaataaaatctaataactttataattaattttattattattttaatatgtaagacaataaaaaaataatataaatgttttataatttaatgtgatagttaaatatactaataaaataatttaaatgacataaatgtaaatgaaaagtagtgcatttattgtggtgtaaattttacatcatagcaaatgttgtgccaaatttggcacaaaatttgctatgtgccaaatttacatcactttttagcactccattggagcatactttttgttaaataacctatattttagcttttcaccacttatttacaccttcattggagatgctcttatagtgctatttaacttaggggtgttcatagattagtttggtctgaatttttaattttttcaaaccaaaccagtattacgatttttaaaaaattcaaaactaaaccaaaccaattaaatgatcaaactaaactaaaccactcaaaaacagattagtttaattttgtagttgttttaattttttttacaataattttttattatttcagtatctttttagttttaataaatttataatacata

SEQ ID NO: 258185 - DNA, 856 bp, Cannabis indica
gctgacttgccgagggctcactcatcgaggcattcaatcgccccaactatggagtagttgtgctctaccttgtgtcgagcccaacgtcgatgagcatgtgcaaatggtaccataaattctacattgatcatggttaatttggcagccgtcaatatgtgccattgatttgctgctttgattggctctaccggatcgtgtgtttgtggccgctcttccacccccttagaatcccaaatatctcgtgtcctctttttcaagcctccaaaaagcgtcccagacatcgaattatgcagtagtattctaggtacaattaactctatagttaagaaattttagtaccagtattagaccaatgatctacaactttgattggctctatagctaatttggatcgtgtctatatttagttttgaatgtgtgtgatgaatttttttctttgatttttgttctcgaattatatatttatggctatagacatctttttattttttggtattttgagtgggtgtaaaacataatattttttttcctaatttcaataatgatctttttaaaattattgattgtttcatctttcaatgcccaaatagaggacccagaagaaccattttcccaaagaagaagattgtgtgttgctccacctagagagacccatcaataatgtacgattatatggagtgggctccatgtttgatattactctctattttactcttttgttggtaaagtatgattttgagaaaattgagctcattggaatacaatttgatttcaatttaataagtctacttatataaaattgggaacttagattgagaacagagtaatgagattaatttgtatagaatgattctac

SEQ ID NO: 258186 - DNA, 615 bp, Cannabis indica
aatagtaatccaatggcttaaaaaatacaaccatgatggtttcaataaaaatgtgaccattaaaactttttcctatatatatataatcccgagaaatggtatatatgtttatttatatggatcactagaatgacgtatatttttagttatttaaaattgattataaaataaaagatatataagtacaataaaatatttaaattttataatttttaacttgttaaatttataattttttaaatatttataaaatatttaaataattacaatataatgaattaacacttatcaaaaatcaaaataaaacaagaataaaaaaattataatggttaaatcaaccaataacacaaattaaaaaataaatactaaacaaacaaaattcatcacttgtttgttttcttcaaaattaaaaattcacggaaggaattgtcatttagcgaagcattattcgatcatcatcaataatgaagaaatactaaagagaatacaagagttgagctcatcaatattggtgtcttgtacctcaacaatgatatcttacaccttacaaataaactcacttgagagagtagtgatcaaacacacatcctctttaacataacaactattcttact

SEQ ID NO: 258187 - DNA, 636 bp, Cannabis indica
tgagatttggtagaaaaccctagattattttatgcgaatatgaggcagtattttagaatagacacttatcagtttactgttgttgttacatatgacctagggtgtttctccacttgagttagctgacatgcataaatttagattgaaggtaagaaaagtacatttgtaacacataacatgtcaagttacgattattatcgttatgactcaattatgatcaaggcaatagaacgataattactgttaagtggattgaagtcacgacatcacgtgaaaccattgttaggttccctacttgttgattgtcttattaaatgatgacagagatatgtggatgccatgttagggcatcgtcttgccttattaggcattgtgatatatggatgccaggttagggcatcgacttgccttattagacaatgagatatatggataccatggagtggtattcaggttgtttcctgtgagacaattgtgataagtcatgactctaaactaaatttttgttacgtttcttacttgtcggtgatcctgattaggtagtggcagtgacatatatggatgccatgttagggtatcgacttgccttattagacaatgtgatatatggatgctaggtagtgcatcgacttgtct

SEQ ID NO: 258188 - DNA, 454 bp, Cannabis indica
taattgctcgcaaatcaaaagcatagtagataataactgcttgcacatatcaaaggaaaatatgagcaatgagaattcctaaagtattttgcatttaatcaaaatatagttgtttaagttgtgaataaaaatgcaagcaaacaaacatatattaagttcaaatataaaagtacgaagcgttcaataaagataaaataaaagtaaagttggccatccaaccttgcaaagttgtttttataaaagttccacaaggggcataccattgtctcggccttaaggccatttgcctaaataaaatagaaattaataaaaaccaagtctacatagtaggagacttcaatagttcttcttctgttactgcctcggcatcctcttcctcctttctagtctcctcgcagaaggcaagaatttcctcctcagtgacttccaataaactcgtattcatcttcacatt

SEQ ID NO: 258189 - DNA, 1680 bp, Cannabis indica
aatagaattcatacattatgtaaatataatcatgaaataaatcatgtgaaccatgccacattgaatgttatttctgatctatattaataagtaaatctcattatattgaaatgagttttatttagggcataaaacccaacagattgtttatttgttgagtcactatttatatgggtatgagaacggtaagagagtcggcaatgagttatttggttttgttgatggcgatttgtctgagctaaggaatatcgcatttggtaaattgctgtgggataggactttccactacatgaatttggcattcaaggacggtgacaatatatattacaagattgagaaggccaaggaagagaaggataagttttattcttttaaattccaagggtttccatttgctttcctaatttggttgttcgagatactaccaagcctgtctcctaattactgcaagaggaattctaatacatatcctcaaatgttgaattgggagagttcatatttgaaaaaaaccacgggctattcagaacttgtttaaatagtgtatttataactggtttttaatatgtttgatttctttcaaatttttcaggccactgttaaggatttttatcctgttggccgtgagcttaagaaagttgctttgcaaaacctcaaatttgaaccagtttatcttccaaagaaacctcaaggtttcgatgggaaggtatgccttctttatgctttcttttacttgttggttgtgttgttacagtttattttttatttagattcttgttttttttcttatatgtttttttcgatgtttgttatgtattattgtttgttttcagttttcaaatttggagaaggctttggtctgtattcaagatgaccaaaagaaaattttattgagtattaaaaatttaaaggatgagtttaatattaaatttgatgaagtcattgaattattgaagagcaagaaggggtcatctgtgcccaaagattgtgaggagaaggttgaagattcttgctctgagaatcttgatgttggtgggaatgacaatgagttttccgatccgccgtctcccgaggtattttttcttttagtttgttgtttttcttttttataaccggttattttttattttctatggtcttttatgtttcctgttttttgtgttttataaccggttatttttttgcattttctgtttttttttattcttttgctgtttagaaaccggttatgactatgttttttgttctatctttgtaggttgtttaaaaatccaatcttcctgaatatgatgatgatgaaggtgggctgcaattgtcactcatttgggaagattaggttgtatgtttgtttctttgttataatggatgtgtttattgttgggattttaagccctaaataaaacccattacaatctaatctgatttgttatcaataaaagattagaagtcatttatgtttacatgttgttttcatgtttatggtttaatatatatatataaaatctgttaagtccagaacatatagtcattcacaattacagtgatgtcaacacagtggaatgtgattgtgattatatgattcgaaagacaaagtccctgtttcatcagtgcattggatttacactgatgtgataatcagcgatgaagtgtacttacactttgcataagtgttatgttctttcc

SEQ ID NO: 258190 - DNA, 1264 bp, Cannabis indica
aagtagttaaattaagcatagaatttcaaatttgtgatttcattattcgttattagatcaaaattcgatggtttgatatttttaaaattaatatttatagttaaatttgtttagtaaccattcatgggtaatatccattaagaagtgttccataaatatatataaagattgtctcctacttaattgagaaaattgttttagccaaataatagtaaaatgaaaattttattttaaatgcttaaaatacattttaataaaatttagactactaattaatatatacaattaaatgctattatttttaatttttacccaaattactctcccttttattttccttctctttctgtctctttctcttatgtactctctcttcctcttcctcgcaccaccgagaccaaccagactcaggcaccgagatcaccaaccactacaatcgaacctcctttcctccaccaccgaacctcctcatctacccaaaaaccctgacgaatcccagaggccccgaacctctgtctctgtcttaatcttcgtatttatttgttttttattggatttttgtttgtttcaaaccttagatggttgtggttatggtgttttctggccaaaacgtgattatcgataggttatcgatgatttatgtttatgtaacacagttttgtcaatttcacatttattgatagtttatcaatgacatttattgatagtttatcgatgacatttattgataggttatcgatgacatttattgataggttatcgatgatttccgtttgctcacaaaaatagcagtgcacaaataaaaccatccataaactatcgataacccattgataatcatattttggccggaaaaccatactctccaccaccatctaatgtctcaaacaaatacgtattcaatgagcttctagttgggggagggtaaggtgggcggtggcgaatgacgatggtggttgagagaagccgaggacgaggaagagagaaagatttgagggttgttggatttagttttgggtagatgaggaggttcagtggtggaggaaaggaggttcggtggtggtagttagttgtctcggtgcctgagtttgggtgcctcggtagtacaagaaagaggaagacaaagagacaaagagagaaggaaaataaaaagaagagtattttgagtaaaaattgaaaacaataatatttaattatataaattggttaggaatctaaattttattagagagtattttttgaagcatttaaaataaaatttccc

SEQ ID NO: 258191 - DNA, 690 bp, Cannabis indica
tgatagtgtaagtggtattttgatgattaaaatcatataaaatgtataaatattgtccacaccttatagaggtatttttgtaaataaagtatcaatttatattttttataaaataatttcaaaaaatatgtattaaaatattaaaatataagttttttatttaaaattataagtcatgctaatttaagttttattaaaatattatctgtttattttttatttttataatataaatttaaattttaaaataataaattatatatcatgaacatttaattatttttattaaaaatatttagtttattaatttagtttcattaaatattatttaacataattttttattaacaaaaaaattaaaatatatatttattagaaaatacattacattccataatatatatattttttaatattagtaaatgaatataataaatttaattattaaaaaaaatataattataatttttgtccccgaactttaacatgtaaaaagtcatgcccctaaacttttaaaagtcgttaaaaaaagcctcctaaactattgagattgttagatttaaggaacttttgtccaattttagtaaaaaagtactaacaaggaagaaaagtacggagagcatgatttggtagatatcaaagtctgagagcatgatttagtaataaacaaatcactgaaataataaaatt

SEQ ID NO: 258192 - DNA, 822 bp, Cannabis indica
ttattattaatagaacattattatttggtaccttaagatgttcaacactgtacaaatatgatacttaataattggttagcagttttttataatattcactacattaaaatttgtgagacccgatattgaaaggcaccaataacaatataccaccattcggagtgtttaacatctcccttagtatttttcttatcatcccaatggatattgtataatttaagctaaaaatgaaccaatattatatttcacccaaattttataatagtgcttcaatgcacttagagtaaagttattcttttttgatagaaaggtgtataaaaaattaataaaagcattaaatctttattgaaagtatataaaaatacaattaaatgtataaataaaatgtaaaaaatagttaattgcattaataagtgacaatagagtaaataaaaaaaaaatatgtattgtgtgtaaaattttactcatgttatattttgtaccatattttgcacaacatttagtatgtgctaaatttaaactactttatacattactattagggcttgtttggaacgtcgtattaggtcgtattgtattgtattttattgtattgaattgaattatatatcatatttttatataatattatcctaaattttaatttatactaaaataatatatatttaagtgcccataaaagtgaataccacatataattttacataaaaatatttcataaaatacaattcaatataatactacacaatataataattttatgaagatggactaaaatatgcatatacaccacatttttagctctccattagagatattttt

SEQ ID NO: 258193 - DNA, 860 bp, Cannabis indica
agaattcatattagggtgttaattaaacatacttgttagtaaatctagatcatggtaaaataatttccaacattctctcgatcataatcgagtcacaaccaatacatatcgttaatctcgattgagtttatgctacaacaaacacataccgagatcgcaatcataattgagtctataattatcataacgttagccatatatagtgcttaatactcttcttacctcagtccagaagtttagcgtgcatcacgtctaagtggaatcaaagcttgacgatcctgggtcctatgtcacgacaacaacactcaataaatacatttattaaaatctttggaataatctttaattcccaaaactggacaatcattaacttccaatagttcttggttaggttttacaacttctaaatgttccacactgaacacagaaaaccaccccgagccctaaaaccagccttgaggaaaaactgaaaaactctcccctgtaggcaaccggtcgaccaattctggcaaccggtcgaccggttttggcagggcagcaaccaaaagttctttcctcctccaaaaattcgaccctagcatcaccaaaataacctagaagttccaaaacagtttaatctcacatacacaatatattcaaggtttcaattcatatgaattcttcaaattactccaaatcacataatcaagtagaataaattcattaaactcaattcttttaatatttatagatacaatagttctatttctaaccaaatagaacttaaacaactcagaaattaagtctaagaatagattctaacttcaatttatactccaaccctaaaatccacaaaaaccctagccaaacctagcttaaat

SEQ ID NO: 258194 - DNA, 731 bp, Cannabis indica
taataatggaattatattattattaatttattatacgtgaattattatgatttatgacatgttaagaccccattgggagacaggggcattttagtaattttgaccagagaagggtaaaactatgaatttaatttaattatgtgcttatggactatattataatatagtatgcctattttatcctttttcgggtgtgttataacatgttggcgctgtatagtcacaaccaggtatttcgggccgaaccggatttcggggccgaaatacaattttgggatatttgattggcattttattttaatatgagaaatctgaagtttattatttacatatgaaatgtgagaattatatttttgcccttatatgcttgaaaatgggaatttggccctaagagcaatgtggtaatggtgcatttttgtttattcactaaaagggaaattttaaagaaaagagggctttatttttctgcattgtttcagccctactagccgaaccccctctccctctttctccatatttttaatttgctaaagtgttggaaaaattatcttgaaagcttggattcttggtgagtattgtgctaagcttggttttgagtttgaacgccattattgttgaatttgttgttgaaattttctgggttttctcctctcatggccgaaccccctttttatctcttaagctatttctttctttgattgaatgtgtgagttgttgcttggatcaaagct

SEQ ID NO: 258195 - DNA, 612 bp, Cannabis indica
aaaattttataaacacatcaaactcaccctaataggctaatagacagactcgtggactaagatttgttaacacctgaaccacataaaaaaatcatcacctcttcatttctgcaatttataatttctttagttcttaaatatttagttttcaaaaatcttggcaaatattttggttcttttattgagagctaaagaaagacataacccactgatgcttccatggtgttcacacgaaagacagctccttagaagactcttcaaggtggtcttgagacggtcaaggaggaagtaaaccccctctcaccagagcaagcccagtcgagcgatgcgaggggtggggatacgtccaacgtgaatgattgaggggacgatccaaaccagtatgaccacattggtgatgacagagaagctgagatgaatgaagaagaagaggaaggcgatgatggttacatcaaagacgagtattacaaagacgactatcattacgagtaagatcccaaagtggttctagtgtctaattatttgagactagacagaaactagcctgtcaagagagattttctcaaaagatggagaagatgatggctcaccttcgagccaagtttgaagatc

SEQ ID NO: 258196 - DNA, 1017 bp, Cannabis indica
aaccaaaagcctctgccagcattaagcaaatgaacaggaaataagagcatggaaaatagtttcctcacctttttgattaattggacacatgatttgaattgggatcctcttaccacttaattgagtcacggtgggcaaacaatttgaagcaacccaccataccaaattgagagctttcggtggtaccttcaaattccagagcttacgccagaatctagaaaaatcagctgcaatccaattttctttctgagcttgtatcaacttatatgtactatgcaccgagtagaaaccatgatgctccttagaccagaaaaaacgatcatcaactacattcagactcaatggaactgccaaaatatgttgttgatcgtgctcgttagaaagatctttaataatatctaaatcacattccctcttatccgtacataccaacgagctcaccttaattatggcccaccaaatatcgggcatctaaagtaacaaaaggagacacatcattaagaagccatggctaatgcaaaatagcaaccttcacaccagaacttattgcccaacgaaccgtagacttgagaagctcttgtgattcgaagacgctcttccacacaaaacttagattattcccaaaggaggctgaaagaaaattactcctgagaaaataacgagccttatataacttactcaccaaagagcttggttttgtcagtaagcaccacccttgctttcccaacatattgccaaataattaaagcacatgcctcttgtgacgaacgacttctttaaggaatggaacattttgtcagttgccaagcccacaacagttccaattgaggacgtacactcatgaattctcacaaccaacgtgacctcagaaccaccacaaaaaccttataccatcgactcccacgaaatattttgacacaaaaaccctaaccttagaacatacgcaacacatgtgaaccacacgaacacactaggaaaaaacctaacacacagtagacaagactatttaatataaca

SEQ ID NO: 258197 - DNA, 2006 bp, Cannabis indica
ggttgggaggcggacgagctccactccatcttaacacttgcccatcagctcgagaagatcgtaacggtggcaggcatcaagccatcaatttttgggaccttccatcgtctgcctcgggatgaagagacgcccaatcataactacggggggttcggagcctggagccagacccacctcatgtctggggctatgctccctcttcaggattactttgttaattttctagtttttgttggcctcgagccgtatcaattaattccccaagcatgccgcctgctttcaggcttatttatcttgtacgctgcccgaagctggggttcgcccagtccagctgagattttatatttttacgaactcgtttccgtccccaaaaagggggacaaatttaaagatggtttttatggacttcggtcccatactttaaatgagggcttggtccgttataatttttagaagcatgtgaaggagtacagccaccgcttcttcttttcctccggcttccaagccatggaccgcccgaagcttcttacagagtgggtcaggatccctccctacctgtagactgcgcctacttagctgttcctccaacaggccaagaccttctctacctatgacaagaaggccctcaacgttggggacttggtcacgacagagaactgtgagaaggccaagctgatatccgagaatcagtcggtggatgactttaacctttccaaggtcatctgcccgaatgtcagaactcctgctgcggaaagggcgctccgggtggacataatcacttcggcggaggatcgatatcagaaatacctcttcagaagggagcaggagctagcttatatcaaggcccaggctgcagccgagaggacccttcgcctagaagcgggcacggatcggaggccatccaggcctaagccttcgatcccgattcctaacactggtgctccagatgccagtaggcctataggatttgatgagcgcctttttaagtttaggatgccctttcccacttgggccctttcttaggccgatcccggaggacctcctgcacccattcccttggatcattcagcttacttgtcctccagctggtttctctcctcggacagctttcttggggatgacgaagccagcactgtagttcaagactttgctagggctgagttagagagtcagggtaggactagctttatcgttttgctgttaggtgcacgccttcttatagttattttaacatttcatttatttctttcttgtagcagccaatccaatggaagatctcctggcgacccttacagaggcctacagcctggatccttctctgcctctggctccatcccaattggtgacccccgagaggtcgtcttccagtgccaccttaggcccaatagtcttgatagacgaggaaggggaagtcgaggaggaggagggcgagattacgacttcccttgagcgtaagcgaaatggtaagatcgttgaggccgagtcttccaagaggcccaggaggagggacactccggctgttagcactgactcagggatcccttccgaagcggaggagtacaccgtgccgcatggcattgttctcaccccggtccccacagacaaagagaggcaaatgctccgaatcgcaaaacataactatgccctggacgagttcagccggggacatgctgaggtggaagccctgaagaagatcttgcgggaggagcaacagaacaccttgcgtgaggacgcattcagaaatccccgggacctgaacatggatcccctgacagactggttcaaccgctttgtcagtgctactctcgcccccttcgcctctgagatgaccagccagtttgtctcccatctgactcaattcccagccatgagatacgcaccctattcctcagtgaactctgtttaccaggtttagtgttgggttttatgccctaaataaaactcatttcaatataatcagatttactcattaatatagatcagttttaacatttaatgttgcatgg

SEQ ID NO: 258198 - DNA, 661 bp, Cannabis indica
acatgagacgtctgaggcgactgcattcattatattcatcaatatttgcgaattttttggcgactgtgaccacaaacttacaagtatgattggtacatttgaccgtgaaattgttcagcagttaacgatctagacggaggaacaagaggctgttgtgtcggttgctgaatcaaagtaggagtctgctggggctgctgaaaacccatttggtgaaaacccattggctgaaaagatgaatcaaatccatctccaagcatttgagagcgagacggttgtggacgcattggttgggttggagctgcatcattcatctcaacatctattggttctagacgttcacgtgacatttgttgagttaacatctatatttgtttctgtaactcaacaattgtttcctgtaagtcaggttgatcagcagttgcaggttgggagcatcgtcctgatgattaccctttcaatttgcgacccactcctcgttgatggccatgcctctctccaagagtttgtcgaagtatctcaagtttagaaacttgtgaagattcgaaagcaactatttcgagttgtcaccatctcttcctataatataaagaaattagaaatcaaataaagttacaattattggaatatatttaaaagttattattttataaagacttacata

SEQ ID NO: 258199 - DNA, 582 bp, Cannabis indica
tcacaagcagaaaacttagatctactctttgggtgaaactgccttgatgctttgcctttattgattgaggacaatgctcaaagttgaaacacaacaaggacataaaacatgaacaaaatagagtcttgctcctactgcaatggctcacttgagcgacatgagttatacattctcaaaccctttacaatagcacacattctcaatctttttctctcaagctattgaatagcaaatggtctttatatatagacccaatacaagtatacccgaaccaacaaacttaatagaatttaactaacaaacatatctaacttgcacaagtatataaacaccaccaatttcacctggtttatatacttatacaagagtgtgaactttgagcaaaacaaatgggcaaaatcattccatcagcaaagtcatcctccaagaatggaggatcaataatcttctatgttcagcagctttaggcatagcctaacacttctcaccagtgacacatttcgtgaacatatcagctggattttcatgtgtgttaatcttcttcactttaactttcttgctggcaataatgtctctgataaa

SEQ ID NO: 258200 - DNA, 1092 bp, Cannabis indica
tagagatacagatacttttccttcatagtattgcaagttataactcacccattgtgattgaatttttgcagtcctcaagagccaaacatgccaaagtaccatgaggctttctacttagtgcatcaactactatattagctctcccgaggtggtactgcaaagttaaatcatagtcctccatatactcaacccatcttttttgccgcaagttcaagtcccattgagtaaaaagatagtacaggctcttatgatctgagtataactcaaagtttacgctatacaaataacatctccaagtttaaaagacaaagattaccaaggaagttctaggtcatgcatagggtaattcttctcatgtggtttcaattatcgagaagcataggcaaccaccttgccattttgcatgaggacacctcctcagccagtgcatgaagcatcaatgaataccacatatggtttctcactgttaggaacagtgagaacagactctgaagttaatctttccttcaattctctgaaagcttcttcacaactatcatgccacacaaactttaattcctttcttgttaacattgtcaaaggcatagcaatctgagagaaattttccacaaagcgacgatagtagcctgctaacccaagaaaacttcaaacttcagtgacattctttagtctttctactacaacattttggtcttttagtgacactatttagtgactcgcattatagtacgtgtcactaaagagttagaattgatttttagtgacatgcacaaatagactctaaatattcagtgttagtgacctgtaatgtgggtcactaaaaatatggagtgtcactgaaaagtaaatcccataatttttttaatttttattaatttgaaaaatattagcctatagtgacacaccagacgtgattggataaatatatcccaattcatatggtgtgtcactatatagtaactaaattaaaaaataaataaaaaaattcaattataattaatattattttaaataaaaatgaaagatataataataagtaaatcttttacatcacttaaaacaaaaacaattacaatttgtttcaaagaaaaa

SEQ ID NO: 258201 - DNA, 618 bp, Cannabis indica
aaaaaaaaaataataaatagatacaaaaaaaaagaaataataataaataaactactatactaacctcttgtagcgcagaaacctccgcagcaacggcgccaaaaattgatgttgcctaattagttacactgcggtcgcggtggtaaacggactatatgtcgtatccacagggagtgaaaataaactgaaaaggacagttagttaatttacgagaatagaataagaaccttgaatgtgatgagaatattgaaaagaaaaattaaaaattaaagaagtaattaaaatgagaagtgatcagaaaatgattatggaagacacaagcttcgtacatgtaattatatttccctaataaaattaattctttaaactcaactataattctacaccattaattatagatggaaaatgtgtataattaagctcactagaaaaatatgttctctaattaaattaatactacttctaaaaatactatcatagtatatattttaaatcgacaaaataccaccggcagaatgcagtaaaaatcatataatatattaagcactctaataattaatagcctaacttatataagaaaagcatgactgaacttatataaaatgtactattaaattt

SEQ ID NO: 258202 - DNA, 572 bp, Cannabis indica
ccacaaaatgtttgggacttcgcggacaatgatggggatacaccctttatataggaaaacaattcagttgaaactacgttagttgttcaactttcacagttggatgatgttgactatgttcgccatgatgtggaccaaactgaagttgcaagcatccatcgtgtgaattcagagcctcaacagttagataatttcattgtcgatgatcacacctaaaggaatgaccaagacaataattgcttagaattagagagtgacaatgatgataatgctgtgtatgtaactgatgatgatgaattgtaaatgtaacaatgttttaataggaataaaaattacatatgttcttatttaatatgttttcaatatggttgtttattttaaatctgaaaatatatgttttatatattgtacgtctacactaggtggcagcacttcgaaaaaaaaagagtaagaggtagatacaaaggcaaaaatgttgggaaagcgctttcaaaaatatcggctgccaaactacacattgaatttcatgaagaaatgggcacccctgtcagtaaaaatgggaaaaaagttca

SEQ ID NO: 258203 - DNA, 588 bp, Cannabis indica
ttgagtatgatgactaattaggtgctcattaagattaaaacaataaagggaattaccctatttattattattattttaatttttaagatttgagttgtttcggtaatttttatgtgggtcgctatgtaattttggattgtaatttaaattgttccgttaattgctatgtaaatttatgtaaaaaaaaaatactttggaatgtgaaaatgaaaaacccccatataataagaaaatattgtactgtaatttaaaatgaaaataaaaaataaaatattgacttttaaataaacaaatattctacctattaaaaagtttttagtatacattaaattaaggaagattattagtcaactttgttagtatagtcaataactttatttcataataattaaaaaaactatatatatttggatcgatatgaaatgggttagtatcaccctaatcccacttcaaacttgctttgggtatataaaattgcaccctacccccactctattacctattaaagtggataattctcgcacaatttagagtagggccgttcatagaaattggaaaatcccaatttaaattcagagctcgataatt

SEQ ID NO: 258204 - DNA, 850 bp, Cannabis indica
agtaatgaccccttgagataagttggtttggtgggttcattgaagaatacaatttgggatttttcatcaaaagagaatgtagtgtagtgtagtgtacaaggtcttttactaattaatatataattttttttctattttatttttgtaggataagagcaattaatccatacttaaatgacgagatgaatcttcggcgtgattagtagattgaatacgtttgagcacaaacattgcgacaagggctattacgatgatcagtttctgtttttgtttatactttacactataaccagttatactttcatataactaatgattaagtttgagtacgtagtttgtatgaatttcaatttttgttcatttttaatttatgcttatacttcatcctaactaattagtgactatataaattagtgaaaattaattaatgcatgaaaaaaagtatattttttttgtttttttttttttttttgcaacccaatgactggcaaaaaccgtcgctgaaaaatacaaaatttataattaaactgaaaaatttactacaggcgacggtttaaaactgtgcctaaagcactataggtgacagttttaaactgtggcctatactttaggccatagttttaaactgtacggtttaaaaccgtagcctatactattttcccgacaattttaaaacgtcgtctattctacgcagtatttgcgacgctcatatatatatgcaacgattttatggactgtcgagaattctttggccgacagtgtaaaactatcgggaattcggggttttttagtagtgtacggacacacttataatcaagataaaagtatatttgattattgaatagaatgt

SEQ ID NO: 258205 - DNA, 559 bp, Cannabis indica
ggagtgacccaattcttgtcaaagcgatagtgacacacggctgcggtgtgaccagttcgaagacacacttgacagagaagtctagcaccaggaggtctgccattgtatctatttcgattgttgtcgtgtgcagggccacggggattagcattaggatgcctgtatggaccatttcttgctgcgagattagcttgcatttttacagagagatctgtaacagattgatgatgctcaattcgtgtctcatgtgagaggagaagtgcctgaacctcttcaaatgaaagaaagtcgcttcttgaagtaatgccagagaccactggatcgaattctggtccaagaccattaagtagctgcaagattaaatcttgagtggatactggtgaacctgcaatcaagagagcatcagcaatagattgagctttatcaacatattctgatatcgtaaggttgttcttaaggagatgggagaattggcctttgagctgtaacagacgggcctttgtttggcttgagaagcgttgttccaacgcacgccagactgagaaggatgtgtggaaat

SEQ ID NO: 258206 - DNA, 762 bp, Cannabis indica
ttttaactattattgaggctaattttccctaaaagaagaagataaataaacacaatttaaaatttatttttcaaaattagtaataaaacacacatctaacatgtataataaatattagtccaacacaattttcatggtcacataatcaacatataacaatataattcaaaaatccaatccaacgtacataatgctattataatccatatacgccttagtatatgcacatatatataattaaagatatccatttatttataaacacatataaacttaagaataaaattaataaaaatattttaaaaatatatataattataattagaagacaacttgatgagaattggatcgatttgatcaattatctattggatcaaacgtctcattcaacaaccaatctgatttaattaaattttaaaaatttacatgcaatgatccaattaaaattgaatatccgatagttggatcgaatgactttctaacaaactcttcccactttagcagcttaatacgtgaaattcgatttagattctaaaaattattcatgccatgaaatttgtgctcaaatgtaatattaaccataaaaattaacaaaaattttaaatttttaattaaataaataaaatacaaaaacaattaattgtattaataagtgctaaaagaataaataaaaaatgatatttattatggtgttcattatattttatgtctaatgtagtacaacttttactgtgtacaaaatttagccaacattatacacta

SEQ ID NO: 258207 - DNA, 820 bp, Cannabis indica
tactttagggggttttgccgcaaataaccctatattattttgttttattttattttttattgtaggtatttatgttttgttgtatggtatacacattttattgtgtataccatattatttatttaaaatgatatttaatttttattttattatatataatgattaaatataaatttgttggtatagaatacacattttaatagtgatatataattttgttagtatgatatatatatattttgagtattaatttagtattgttataatttttttgtagtatataattttattattacgatatattaattttttcgtgatatgatatattcaataatgttttatatatttaatgatgggtaaatactcctgtggtaccttgtgttttgttgaaatacataattggcaccctatgttttaaataatgatcaattttttttttgaaggaaaataatgatcaattagtatcctctatttgtaaaattaacaactttggtacccttaatatccctacattaccccttaaatgtatacttttgttatttttaaattgtatatattttattaattattaattaccaattatctacctatgagctatttaaaaataaaaatatatatttgcctatgagtggtcatttttacatttttttttagtaaaaataaattattaaactaactaaaaatatatttaattaaaaaaaactaattagaatgaaacccaaaactccccactatagaatcgaactaaacccaacgaatattaacccccaaaactacttaattaaattggaatgaaatcatcatcatcatctcacacaaa

SEQ ID NO: 258208 - DNA, 540 bp, Cannabis indica
catggccggccacttttggagggaatttaaactgatattttgtaaaataatttccaacataatattgtattcaaaatcatttaaacactagagtaataaccctagaatgtataatcgctcactttagggtaataacccttattttggtttctcacttaaacacaagtataatatcaaacataagcgccacaatgcttaactctacgtgctcactactttcttacgtggtattctaagtatgtagagattccaaatccccgagtgttcctgagcaagcatcggtaatccttgtcacatgtttttgggattcacaattaagatataaaaccctaactattttaggcatgttcacgtgattcttaacttactgtgcagctcgttgctaatcaacgaggttatcgaaaaatcatgattgttaacgcagattttcgttaacaaaatttgagcctaatagtgaagatctcacaaagaaaaaataaaagctgtaaagtaaaaagtatgaacacacagaattttatacatggttttgcaattaaaatt

SEQ ID NO: 258209 - DNA, 542 bp, Cannabis indica
atttcacgatactatctctctcgtattttctctccgattttctctcggattttctctctcagaatcacgcgatcatctccggcaaataaagactgcaattcgatctcaaacgcaagcatttcacacaacaaatcaatctcacaaactagaattttgatcaattgacgacagagctgcaataacaatcatcatctctgattgtcttctccagctccagtaagttcttcaattgcttctaatcttcttcctcaactgtgtgaacctgaaaattaatgctcataaaatcgcatacaaaaaaataaaaaatcaaactgaattatacacatcaacaaatcttcaacaacaattctcagtataaacaaaacaggtatataaactcaataatcaaaattatatatgaacatattatataagaatatatatatatatatattatttggaaaataaatgaaactctgcaatttaaaaaacataagatataaaaaacgaaagaactggttaaatcaagaggaaacaaaattaaggacaaccttatatataaa

SEQ ID NO: 258210 - DNA, 712 bp, Cannabis indica
aaatgaccaaaaaccaggtaacaatcacaaatgcccactttttttattgttcttgtgagtgttttgtaaaaatattctgtatgaaaaattttattagcaaaataatcatgtatggtcgcggtttggaaccatagatttacactgtgtaatggttgagtaaattgagtaagttttactatttcacattgttagtttgacaaatttaactcggtaattttgacatgacatttccttttgaattgaagaacgacagcatatggatgctattcaagaagttgaaaggagttgtgaagaagaagatgaagaagaagaaggtagaataagcaatgagtcaaaaggaagcagtggatcaaaagagagtaatgagaaaaaggagcataagaaaggtgtaaagggatttagaccagcttcattagatgttttggataatgtaaagatcaatgttgcacctgaaactccaatctctactttgagaggaatcctcatgacttcaacctctgacttctcattcagcagagaagagctaaaaaaatcagaagagttgatgaaacaggcctttacagagttctatcaaaagcttagactgttgaaaagctactggtaagtatattggctttcttatttatgcagaatgaaaattagtataacatgttgtgtggtgtagtggtagggatgtctttaccgacatcttttgaaatgttttgacaaacta

SEQ ID NO: 258211 - DNA, 512 bp, Cannabis indica
ttcgcattactcatctcacatataaccatgcatcactcatgaggttcgctcttagaaattggcttccaaattccaacaaaaccgtggtgtctcaagatgtggcctcttttctctttcgtatcacctcggggacatccatcaatttggcttctaatatcttgcaccagattatttcatttcggagaggtaaaaaacgtactcataagcttgtttttcctaatttaatctttaagattctgtcctctcaaaaggatgtggcctattctcatgagacacttgagcctcccctcagtggcatcatattttaaccctcggagtactttgatggtgcttttcccaagcgttgaaagctgttgctgctgctggtgcaagttcgagttctgctcttgcaattgtccaggaggtcaagcatgaggttcaacaggtgaaccattgtcttgctgccttagacgaggttcagcaagagatgtccaagtagctgtccacattgatcaagctttatggggcataag

SEQ ID NO: 258212 - DNA, 1145 bp, Cannabis indica
aactattgtttttaaataaaaaaaagcttgcaccagatctgaaagtgtcatcacccacttcatcatcttcttcttcgtcttcgtctttgtcttcgtcacccacagatcttccgttgaagcttgcctagtcgcagatcttcattcatgcaagaaatagagaaatcgagagggaggaatcgaggggaggagaccgtcgtcgaacttactctcagtcgcagatcttcattaatgccggcaagagagaaatcagaaggggatgagagggatggaggagactgggcttgcaggtttatgggcatggggattaggatttcgtggtccgtttggaccattggcggccggagtgagcttcgtcggcctggacacagaggaggcgtagagaagaaagcaaacaagagagagtacgggagaatgaatgtctttagggttcaatatttttttttataattattattttatacaaatttcatttaaatttaaatttaattagtttatataattttaatattattgagtgacgtggcttaatgttaatgatgtggattagttttaatgagttgggctaataagatgttgacaattggcaatctatgtggcagttaacgccaaggtacctacggctgcaccaaaaatgtaacagaaggtatttttaccgccaaaaaaaaaatttaagtatttaactgctacaatatacaaaacttaggtattttcgccgcaaattactctatagtaaataaagtaagtacgtatctgacatattaattattatattcaactatttattttttcaaaaaaaaattatttaactttgatgggccaccatatattacatactaagataaacattaataaaaaaaatacatataaaagtaggctatcataatcttaggggggtcatggcctctatagtcatcaacatacatcatctcttgtttactaccatgtatgttgtttaacattctaaatatgaatttttaaacaatggaatttaaacacatataaagttcaagaaaccttacattggttgcagtggaattaaacgagtccttccactcagatctctaacccttgcatcctttctgtagcagagtatttgagcccgattctccttcaattgattggattcttcacagtcttacacacta

SEQ ID NO: 258213 - DNA, 527 bp, Cannabis indica
atatatgtaaatgtatgtatatacactactgacattttttattataaaaattaattgtgtactagtggcctgttatatacaccttcatcaggccatgcaatttttattacttattttgataatcagtacacttttgtagctagcgatggggtaaagttaattaagtaaacaagtcagtcatcactctactcagattatcaagctccattacctacatatatactaccttaattaattataacaaacgtgatccaacgcgttcgtacgtatatagattataatcaattaattttctctacacacattatatctttgagtttagcaccaacaattaacctggttaataattattagcaactatatcatgtgtatcaagtttcaatttaattatcgatccataaaattagtttatattatctgtgaaataatcgagtatttatatatatatatatatgctgggccgggattaattgcttggggttgggatattaattttaattatgtgcttgagagagaattaactggag

SEQ ID NO: 258214 - DNA, 541 bp, Cannabis indica
attagggatactttcagaatacaatatacaatatctgattttgaataatgacgattctctatcaaatttgtcgtcccttttccaatggaatctatccctatttacaggagtataggttggatgttattcgttttgggatagatttatatataaatgcaaatgagacgtggaccatccccacgtttcatttaaatcacacgtgagataataccaaataactacccaactgttctttagttttatcctttagatggttattaccgacgtggaaggttacatcttctctaatttgagttatcttcctagtccatcttgataagaaaaaacactaagtgttgggaaggtttcgatctctctacgtcctctttgtggcttttgtaacgcgaggtgatcttctcgctatttgtaatgcgagggagtttatgttgatacattcattctgctcgggtggatgaatatcccattcttgtttgtatattctgaggcatgtatatatctcattaatttcagatcaatagttattcttgtctcgtttttgact

SEQ ID NO: 258215 - DNA, 609 bp, Cannabis indica
aggggaaaaggggtttacgacagagagatccaatgtcaccattacttttcgttcttgatatggagtatctatcaagaataatattgaagattggatccaaaccagactttaaatatcatgacaagtgtgcagaattgaaactgaatcatttgatgtttgctgatgatgtcatactcttttgtcatggggatttcaagagtatatattatgttttacaaggcctgaagcttttctcttgttcttctagacttcaacctaacccaaacaagtctgcaatctattgttgtggtatggaagatcatgatgttcagcgtatcattgacaattctggatttagcaaaaaagaggtacctttcaaatacttaggtatccctatttgtggtaaacatatttcgggtaaagaatgtattgtgctagcagataagatgactgctaggatcaaaacatggagttcaaggaatttatctctagtagaaaggattgtacgttaacttagttctcatgtcaattcactcatattggagtcaaattatggtcttacctaagaagaccataagggatattgaagctatttgtcatgcctacttgtgggaaggtcatcatgtgtcc

SEQ ID NO: 258216 - DNA, 647 bp, Cannabis indica
ttcccacatttcattctctctctactaaaagtaactcttgaaagctcttccgtctctctagaggttgatgcccatagctctgcatctgtcgagattttagcgctattttgtcgattaaagcttcccattttcttcatcaacagtttctagtagtgggtaagctttcaaatcccgttattcacttgtttatttgattttgccatggttttttgaagcgtttcttcactttgaatattttctgattcccatgttagattgtaatctttttggtattttgatccacatgaacgttttaggatgtttgagttcttgaaaagcacagactttgatccgtattacaccctggccagccatgggctcttctcatgggagctggccagccatacgtggttaccctaaagtttggtcggcccatgcctgggcttagggtcccttggccagcccttggttgggtcatgaaaccctggccgaccttctctctacttgggaaccctggttggccaaggcctagattccaagcgggcagtcaagtttttgttcacttatcagaaattagaaaattgaaaattttagagatcattaagatttctgattctgatcttataaagtttttagttgtgagattttttgtcacatatggctacaaa

SEQ ID NO: 258217 - DNA, 683 bp, Cannabis indica
cacaaaggtcaactaaaattttatcgtcagattcttcagcaacttcttcttcgtccatgttgtgatcctctttgttaacatgcaaattttgttcagtgccaatgttaatcgaaggttgattaggttgcatacttaactctccaagatcaacagttaaaacaaaatttgatgagcttgtgtcatgtaccaaatcaacttcgacattagtgtcatcatccacgatgtctcggatttgttgatggtttacattctcaactattttctaattttttcctctcagtaaatcgaggtaaaatacttgctttgcttgatttgcaagtatgtatgagtcatctttataccattcaccattaacattaatactagtgatatagttctcaaggattgttttcttccgtattggatctgtatttaaccacttgcacttaaataatgtgacagagtaaatactagtgaaggttaactttagtacttcttcaagtgtgccataataattaaaaccttctgtttcagccacaagcactcaactattttgtgtgctcctcttctcatcttgtttgctagccataatcgaactccattcacaatacaaccttcataataagtgttgggaattattttaccaggatcttagatctactcacaagtatgtttattaacatcttaaatatgaactttctaaa

SEQ ID NO: 258218 - DNA, 707 bp, Cannabis indica
tatatatatttatatgtaaaccaatatgagcatttgcatatacattgatacatatacgtagtcataaagaaccgcaaatgaaagaatcaaaatcaaaaccaaagtacctcatcccaatagctagtatctaatgtacagtaattgggaaaaagagaaggagattcaaatgaacttatctaatgaaatggacttcatagcaatttgcatagaacacttataacaatacatatataaatcaaagaccaatattagcatttgcaaaggaaaaaatcaaaatcaaaatacctcatccgaagtgctagtatctaatgaaatgaatttcatcgctgtttttgcatagaacacttgtatatataaatatatatatatatatatatcatccattttgcttatatatatcaaaaaccagtatgagcatttgcaaaggaaagaatcaaaatcaaaatacctcatcccaatcactagtatcatctttaaacagaaaagaggtagaatccgaaagacgaggcttcttggaacgtgaggggtttgcatttggacgaggaaccgtggaggagctgaatttggacctggtactgggcggacgagtggagctcagtgaacgatgacggtgacgatgacgttcgtcgtcatccgatgatgatagaaccacaaccttgttcctcttcttccccatagccacacaacaatgagagagagagagagag

SEQ ID NO: 258219 - DNA, 947 bp, Cannabis indica
ataccaaaaaaatagatatgcgagcactcacttagatagcgagtacttgaagaatatagtgtataatgtatgcgagtattgtaaatagtataaaatggacacagaaaaatatagtggtttagcaggagcttcgggctctgtctgcctaatccactgttgaaaagagtactctggctctgtttctttattcagatcagccccctttgaatggagggggaagcccctacgtatagatagtaggaatcggttacaaataatggcgataatgagagagttacaaaataataatgataatgatcataatgggcttattagtcgaatgaattacaatagttatataatatgtataacatttgttattaatgctccttgaatgcttgattgttgacttccgttgattggtgtgtgttcgcgccttttcctgttgataatgcaacttcattaaatatgcgaggtttgcctttctcaatatagcgaggtctctttcagttaatattgcgagcactgtaataccgcgagttctctatagacaagtcattctcacggggagggtaaatttatgccgataacatgagtattgacttgaattgtgtgagaaactcctcaataactctagggtttctaaaattttagaagaggaagaagaggatttcaaaatagataatggctctctttattttttttttttgtctcacaaagagagacgattaggtttagggttttctattagcttagaaaaataagagccatattattctatttataggatagcttttaggattaggtttagaattaaaatgtaataataaaaaaaaaagaataaataaatggctttattaatccatcatgttcaaaccctatgtgggttctagtgtatttcaattttttattttattgaaacttatctttcttttctcaaatgctatatttaattctatctctataaa

SEQ ID NO: 258220 - DNA, 716 bp, Cannabis indica
atgattactcaggatttaggccgatatactattgatcatcatattaggtctttatagtaaacgatgagtttgattaggacaacttcattcatattggtcattgtcatatataatctcaattatatacaacacattcacttggatgtcatactacattagtaatgtgaatctagattacttgcaccaaataacgagcatcaatgaatcgtatactatagcaaccactgattaaagattctcactttaatatgttattgactgttttattcatggttgagtgatcttagttctccatacaatacaagtcacatcctcatgtatgaaaaataaatttcctgatatttatatataaattattcaatcttcaatattaataattcaataagtatatataaacttgttcaactcttatttataaatcataatgtctttacaagttttttagggcataaatcctattatgtaccacatcaaatattttttggcctatccaaatccgatccaatcatacttgtattttaccattcgatctaatctatttaatttcagtcatccaatcaattaatactttatgtagtacaactatcaatatatattaacaaataaaaatataagactttccaccacaataattacaaactttaaaaaatttataatacaagaattattccatattaataaatgttaaatttctaaattattgtttagaaaaaaaa

SEQ ID NO: 258221 - DNA, 535 bp, Cannabis indica
ggatcgtgcggattggattagattgtaacttagtaacctaaattatcacttaaggagcaatttatggagtgagtaatagtctttacacaaacaaacttgatacacattgtagtccaccttttaggctaaacacactctgcctgaagggcccacataatgatccaagagatcttgaatctttccttagcaatatgtaagtatcttgaatctctgtatcatcttaaaatattataaaatattatagaaatatatatatatatatatttatctacattattttttattactttatttttaaaattactctaatgcagtaattttaaaagtatagactcacattattatttaatatattattaatttcaggacagattgcaatgcaatatttcagcaacaacaaaaagtttgaagagttcactatgcatgatagtgttaccatagaaggtattaattaattagtatggcatgaaaagctcactggttaatagcatatgaaaaatattggcaaaatagtcatagataacatcagatgtat

SEQ ID NO: 258222 - DNA, 804 bp, Cannabis indica
tttcttctttcttcttctgcaaaacactctttctctctctaacccctttctctttctatatacagatatatatatatatatatacacccctctcctcccagccctctttctctgcttctcctcctcatcgtcgtcgtaccaggcaagcacaaacgagattacaacgacgacgaggaacagaaggttcatgagcccacatgggcagtagcaacaaacgacgtcgcatttggctgccacgccgccggcgacctcgaccagcggggtgttttttgatgaggagttttgggttcttaacaaaggttgccttcggttcgaaaagttgttgtgtagcatgatctgattcgacatgggtcggactttggtagctttactgtttgatcagatggaaaatattataggattttcttggaaacttttggtttctgatctgggttgattggtaatttttaggtagttgaatccttttcgcattggagctcggttggagaagaattaaagctccctgattatttcaaaaatcggttgaggaatataccaaaaaggatgaggttctaaaaatcttggccaacacaaatttagaaccagaatctcaaatcgaagcaaaaacccaaaatctgaaataatactaaaaattaaacataaaaaagcccaattcaaatccaagaacattttctcgagaaatcaaacatgaaaggctcaagctccatgcaaatgatgagtcaggatacgctatggctgagcttacaacaagggcataagctcgctccggcgttgattaagagaagttgttgattgatgtgaggg

SEQ ID NO: 258223 - DNA, 977 bp, Cannabis indica
ccttgacatacttctgtaagtgtgggttattctttctgataaaaaattcaatttcctgcttcaggttattacattcgtttgtgtcgtgaccgtagtctgcgtgaaaacgacagaacttggatgtatctcttttactcacatccttgttcataggagatggtttcttgtacgggaccatagactgagtttttgcgtatattgtctttaggtcatctgttagggctgaaaaggcagtaaattttgaggcattttccttagggtgctgttcgacatttccagtgaacttgcctttctttccattgccttgcctgttgccgttattagacctcttcccatttgaatttgagttgccatggtactgtggactttgaacaaatgttcctgccgaggtggtacgttgttggctcttcttttgtctgacagtatccacacgccgaacaacttctttgagcttaataaatccatatgctcgatccaaaaatttagccatcgaccccacggtcagcctcttaatatccttccacaattctccaagtggctcaatgccccttgtatagcggccaaccttccttcttcgatcaaccccttaattttggtagcttctgtcataaatatgcttatataagctctgaggggttccttggcatttgttttacctcaaccaagtcttctagatgcgagggaagttgacaaaaggaggaaaactgtgcgtggaactccgaggataaatcattccatgaattaaacatccctggagacagcttgaagtaccactgctgggcaacttctgtgagtgtagcatggaatattctgcatcagaaatcaccccttaccccttgcaaatcaatctgcatctcaaaatatttcagatgtgacaagggatcctctttccccgtatacatgttccaagttggcattttgaattttaggggtaatttaacgacttcaatcttcggggagaagggtgatccgcgtgc

SEQ ID NO: 258224 - DNA, 1141 bp, Cannabis indica
aacattaaatgttatttctgatctatattaatacataaatttgattatattgaaatgagttttttttaggatataaaacccaatattaaagacttttttacgtctttggttttaaaagactttatctaacttttgttatttaatctctgacatatttaattttcatgttttaacatttggatgcgacatttcatatgatgaggaggtgacaacacttttgtccggaggtgtacccaaataagtgtgtcatcatgccgtgtattttcccatcaggagttattggtcggtggcaagctgcgggtgatgaccatactaaccttcagtgggatgacaacatattatttgattcgaggagataatgcccaatacttggacagttggaagaataaggagagaatatatatggccctcttcttcgatagtgcaaagcattgggtgacattagaggcagaccttgatcgttagttattgggcatatttgactcgagcctcggattgatttccccggatgaattgaagagtcacttggcattgtgggaagagttattcccaactttgatgttgtagtccgacctattcgagagtcatgaaatgatcgtcatgcctcaactgaccgtctcagagaggcaggttagaacttttacttcaaaagtcatcgacgagagcattgtacgacagacagaatcaaggtaacttaattacaattgattttttattatttaactagaatttaatttgcatacttttatttatttacttttattatctcatacagcggtgattgtgggatgtatgtgatagagcacatcgagcatagtatgttggatcttacgttgataatatgaacaatgacaacatgaagaaatttagagagcggtggtgtgtagatttgttttacgagaatttagcatgaacaattatatttttttaaattggtatttattaagttaacaatgtaactagtttcttttattggtatgtttacgttcttttattagttcataacaattttaggcctttccttcatgcaacaaattataataattatctaaacataaaatatcacaaattctaatgtttaaaaaagtccaacatgaattcaataaaattcatttttaacctcggtaggtgcaagtgcttc

SEQ ID NO: 258225 - DNA, 806 bp, Cannabis indica
tgaatcaggaagctttgtgatctcattgtccgctatggatagcactctcaagcatgggaatgacttgttcaagtcttcaatctttaacaaccttagttgatcactgcttggaccttgttcccacaatagggtgcgcaagcatttggctttaaataaatcctcaaattccttagggtcatcggcctttgcacattgctgcaggtacgaaaaatgacgaaccttacgagaacatttactgatattattcatcgttaaacaaaaatcaccagaaacaaatattgccaaatcatgtataagatcatgcatgagaaaaatcggctccacctcatattgttatttgattgttgaaaaaatgacatagaaattagatctttgaagtacttctttccaatatcttcatttctaattccctctttaggaagtaaaagaccttcacccatccacaataagatcatctcctgctcattgtactcataatctttgggaaatatagcacaataggagaaacaagacttcaaatgtgaaggtaaataaaaatagctcagccataaagctggaagaatacctacactctccctctcatacaactcccatatatcgttgtttaatatgtcatcccaatcctctttattttgcttcccacgtaaaagacccccaagtgattttatagctagaggaagaccattacacttttcaacaatttttcgaccaattacttgtaggtctgagtactcatgcgagttgacatcaattgcagcacatctgacaaataactcccaacctttgtcaaaagatatagtgcttag

SEQ ID NO: 258226 - DNA, 564 bp, Cannabis indica
gacaacgtattaacagggagaaaagtggagttgtcttctctgcaaatactcacaacaacaagaaaatggactattctacaacttctccaaatgcagactctaaaagctaaggataagtacctgggaaacccgtttttcttcacgggtcgaagaaaagatgacttttagttcctaaaatagaaaatcatgaacaaaattgatgtttggaaggcaaaatgcctctctcttgcaggcaaaactactctagtcaaatcagtccttcaaagcattccaacctacttcatgtcaacaactatgattcctctttccacctgtgaggaattggacaggatggttgcaaaattctggtggctcggggcaaaccagaaaaagaacaaatattgtgctctaaagtcctagggagatctttgccaaccaaaaaactatggaggtcttggtttcagaaagtttcatgccaagaaattttgctcttattgcaaagcttttttggatggtgctgtagaagaaagataaaccgtggatcaatactctgtgtgctaaatactgcagtacttttaatgcttg

SEQ ID NO: 258227 - DNA, 628 bp, Cannabis indica
gaaaccctagatatttgaatatttttattagttaattacacaaaagacaaaaatgcccttgaacttagatattattcagctattcagttggactttgagaactcaattcacagcctaaaagatgttgttcacgtgtagtgcacaggaaatcttgcaggacacctcttggccggctaggccctgtggagggcaggctggtcggccatggtgcagtcccaaggctggccggccaagaggaagctggtctgtcacttgttgcccatttaagtgttaggatctccgtttgcttaggtgctgacttggccttcttataagtgagttggccttcttattacactcgtaaaaatataaattttatagagactagagtagatatatgagaataaatatgaaaatatgtaaagataaaaataaaaaaatataaatttatatgggtaaaattatagtatgtaatggcaaactaaaataaaaattaaatttatgagggtaaaaatacaaatatataacaaaaaatacataaaaaataaattttaaaaagttaagtgaggtcatgtgcccccacatgaccccatgtcactgcactaaatagacaaaggaaccaatacttttaagcttttttttttttttt

SEQ ID NO: 258228 - DNA, 838 bp, Cannabis indica
gtgggttaaagcgggtgacagaaggcttttggagagttcgggtaacgctatcaaagccaatattgttgtggccaaggatggtagtggaaaatttaagacggttaatgaagctgtggctgactgtacctgataaaagcacgagcagatttgttatttagtgtagaaaaagggtgtttataaggagaaagttgagattggaaagaacaagaaaaatgttatgcttgttggtgatggtatggatgccactatcatcactggtagtcttaatgttgttgatggttccaccactttcaactcagcaacagtaggtaattaattaatcataataatattatctattattaatttatcttggactaatcttaattaatatatataatattattattgttattttgaatttgtgaaccactaactagaagataataattgacttattattttataagaaaattttataatgcaccctcctaaaaaagatacattgatgcacctttatttattttggtactcgaaagaattgtttagtccaatttttttttttataatcctatacgttatatttatttaagatatcatgaaaacttttgagacattcaaagaaatttaacgcgctaaaaataaggttcaaacagtttgttgtacacgtgactcttttattttatacgcgtgtgaaataaattgtttgaacattactttttatattgtaaattacttcaaattttttagaattttacaaaatgtcttaataattataacatacaccaaaagaatattagactaaaaaattcttttaaataccgaaatagataaatagtgcactcctattaagaatgtg

SEQ ID NO: 258229 - DNA, 737 bp, Cannabis indica
gtaatgggttttatttagggcacaaaacccaacagagttgctgtccacgtgtaaaagtgcacaggaaaccctacaaagcacctcctggtaggccaggcccttgtggagggcaggctggccagccatggtgcagtcccaaggctggccggccagctcttgtgaggggctagcctatcacttgatgtcgcttgagtatcagggtctccgtttggttatgtgctgacttggccttcttattgttgagctgtactgccacgtggcactgattttgtccacgtaagcatgccatgtcaagagaacaaaaattggtataacagtaaatataccacttatatttttatgggtattaccaaaccctcataaggggcacaacttaatacagtttaatgagtaaaatataaattattattgtttaaagatcccttaaggaattgtgatacactaaaattgcactctatcataaataatgccatgaaattaaattcaaatgcacaattcaaagggatatagacttacataaaattatatggctaaaattaaggaatatttatggaaatagtacccaaatttcacttattgttatgcttcatcatgttagttttatggtactaaatcaggtaagcagcagaagagtttcacattatctgattatcattgtaccatagcccaatagatctccatatgtgtgtacattaaataaaaacataaaataataagttaagaacatatacctcttg

SEQ ID NO: 258230 - DNA, 772 bp, Cannabis indica
gacataatgtgttccatatgataatgatcttgaagtcttttgactcctccacaagtgcacccattgcaggtgcaagatggcctaaaattggtcaattcctcccaaatagttttaagcctagtaaagtacataccaatggtttgattgtcttgtttcaggttcatgagatctttccttagattgtatatatgggggccatttctttgttggaatcggaccctaaggtcatttcaaatggcagcagtagactcatcatagagaatgctagaagagatttccttagatacagaatttagaatccatgaaatgacaatgttattgtttcttatccatgcattgtaaagaatttgatcagaaggtaagggtttagaaattgaaccatccaagaagccgatcttgttcttgacagagatggcgagttacatagccctgctccaagctacataattgtcctgccccgtgagtggttgagagacaagagtatgtactggattgtctccatggtgcagaaagaacggatttgcaggatcttcgagaggatttcttgaagctgaaacctacagagaagagttctgggtttctgtcatggtggtttggatcgtggcttcgtcttgagtgccttgattcgattgatcattggtagacatgttagacaatcaatcgagtagaaaatcgattgaaatcttgacagagaagaaggatagtgcagcggaagaggacacatcttcgtcggggaagaagaagaacacaacgcagctggaagaaaaggatc

SEQ ID NO: 258231 - DNA, 835 bp, Cannabis indica
gataggggtgcatcaatatatccattttaaggggtgcattgtagaatttccatatatttatattctttatggaaaaaaacaaaaaatacaaaaaaaaaaaggaaaaaaattactaaaatagactgggccggccatttacactattatacaacacacaaacaaatatttacaaaaataccacatcctctataccttcatgtgcatgaaacagaacaatgaacaacaacaatcttctatcgttcaaatcagcaacacaacataaatgaaactacatcaagaggaagaccaccattaattccggcaaatatcactagaaaaaagacatggaacgatctaaacaaaaattgacaaaaaaacagatcaaaaaaattgagacgaaactgaaattaaacactgattttcggttttattcgatcaaaacgactcctcctaatatcgaaatttagattcatgtaatgtaaatctctaacaaacagatctggagctcttccgaatccaaaactaggtataatgtaaaaaataaaaaaaaataaaaaaaaggtacaggaataatagagcttaacaacttttctatcccatatttttctttttccgatctaataactgccgactcagccctaccgatcaccttcatcagtcatcgtttccttctttttttactgtcattaccataattttattgttccattcaaagttggccgcaaggcacacgtatgtatattctattagaatatttctaattaaggaaataaaataatattattgattctgataaatgaatattttatatttattgaatctggacagaatcaattacgtaatattctatatatgg

SEQ ID NO: 258232 - DNA, 890 bp, Cannabis indica
gtataaaagtaaaaaaattaaaattttcagtatgtggtgtaattatcccttaagaaaagcattaaccactagttgtttggtgcggtttgggtgacgcaccctatcataggtgagagaggctacacgaattggactttgatgaacattcaagagcaaagtaaaagctctctcggtaacgctcaaagagaggtaggcccttccaggaccgactgtaagcataggcaagctagggttcacttattttaggagcccaaataaaaaaaattattttttaaaaaaatataatattttttaataatttttaaaaatactatttatttttatagcgagggctttattttttttttttttttttactatatgacctattttaactcaggaccgaccttaggctctccctattaaaaaaaaaaaaaaaactacaaagtgcatgtaatgcaagtaaattcaacacgtgaaagacacgcgccaactcttccaagtaaaataattgttgctacgaataagagcatcttcattcgtaacattttttaagggtgtcaacaatttctagatcatgtaaaatatattttattttatcaccattatttttattatttttttgttctaaaatatttcaataataatcatctttaaaaaattattatattattatttaatatatattatataattaaattttattcctttatcacaaaattataataaaataaataaataagaaagacaagatataaaacatgccaaaaatatatctatgttatcgatcattgtttaacgccatgtgaagtgttactcttaaaaaaaaaaaaacagagtgaagtgttgttctttttttcaacctaaaccctaacccaaaccttccatgtgaaaaatttctgctgcacctg

SEQ ID NO: 258233 - DNA, 560 bp, Cannabis indica
tgctaagcgctactgcttccttttacgatttctcattaagtagtagagtaaatgttgtgtatgaagtaattaaatttatatatattatatatatacatataaaaggacttgtatttgtgttttgtcctcctcgtctttgagccttaatcccataatatgaatatggtaattgctaatagaaggtaaatttgtaactatttttcattcaataattcaatcaatttggccaagtgctaatctcaaatatgatccgagatgttgatttatttcttcttatttttttaggctaataagtaatttttcttcctgaactttgatatgtactaaatcgtgctccctgaattttttttgccgttaaaaattcccccgaactattgagattgttaaatttaaaggcttttgtctaattttagtaaaaaattggggcttgatttagtacatatcaaagtttgaagagcatgatttggtagatatcaaaatctctggagcatggtttagtacataaacaatcactgaaacagtaaaattgaatgaaattagacaaaagtccttaaatttaa

SEQ ID NO: 258234 - DNA, 1401 bp, Cannabis indica
gtatttgatatgtcatataaattacgttttcaaatctcatatttaatatttttatttgtttatgcaattttattcggaacttatgctggaaattcgctgcagtttgcagccgacgccagaaaaatcaccggagtagttgtcgatgtcggaaaagtcgttggagttattgctgacgacagaaaattcgtcagaattggcattgtcaccgaaaaaataccaagaatctggtttcttgatgaagaaaccaaccggcatcaagaaaccggtttcttgatgaagaaatcactttcttggtgattttcggcgacaatgccaatttcgacgacttttccgacaccagcagctactccggcgacttttccagcaccgatatcaaacttcagaaaagttttcggaattggcatagacgccgaaaaaattaccaagaaaccaatttcttgatgaaaaaccagtttcttggtgattttctagtgatttttctgacgattttttcggcaccggcagcaactccgacgaattttctgacagcggcatctactctggctacttttccatttccaacagcaaacttcgaaaaagtcgtcagaattggcattgttgccgaaaaaattaccaagaaaccagtttctttattatgaaactagtttcttggtgaattttccagtgatttttttggcgacaatgccgaattcgatgacttttccggcatcgacaccaactccggtgacttttctgacgccgacagctactccgacgacttttccggctcctttttcgacaccggtgataactctggcggtcactgtagtttcatttgttttattttttaaaaaaaaaaatatgaagataattttaatattttttatggtaattcaaagtggcatatcctaaatatgttaagtttttattttaaatactatattttttcctattaagttttcttaccatatttatctaaactagttatatttttctcatatttatgtaaatacacctttataaaaatgtcattaaatcattatttctaatattttaaataattgtagtcacattttaaaattattactacattatattactaacatttatacaaatgtcattaaattatatttttatatgtatatttaaaaaaaaaataaattactgatttttcatgcgatttataatattgaaatcacattttatttttaaaatattatataattaattaattttgaatttatattaatacaatttcacttattataaacaaatatagtctaaatataaatattgtaaataatacatatatctcaaagtatttcttacacaataataaaacaagtaatatttaataaataccaattatataaacaaggacaacactaacgaaattgttgaccgagattttcggcaactatt

SEQ ID NO: 258235 - DNA, 513 bp, Cannabis indica
tattgatttgttaactttaaatgatggcattttatactggtggattgctgctattaatccatcagtattaatattataattcgcgaggtcctatttttgttgctattaatattattagcgacacattaatatcggaaaatttcgctgttaatacccattatcggtaaattttcacattaatatcggcaaaactgtccacctctaaaaaatcttaactgttttagtaaaaatggtacaaagaccatttcattagaatgatattctaatactttaatatacaaccaaataaaggaatggaatgaaaattatttcatttccattcaatttcatttcattacttccaactaaaggccgcctaagtcttttctaactttaaatgtaataatactgactcgtgaactaaggtttgttaacgccccaaccacgtaaaaattctcgttgttattttatatctttgatcattttctatagctttcacatataataaatcagttttctaaaaattcggttaaa

SEQ ID NO: 258236 - DNA, 1232 bp, Cannabis indica
gactatatcaatatacttttttcatgtatattttttattatgttaaagtgaatatttgtttgatagtttgatgtttattcatgtttaatattaatttagactatgacatattaaatttgaaatatatatatattatatatttatttttcaattttaatatttgaaaaccttaaactaacaaaaaaaaaaaatatagtttggacaaattaacaaaaatattggacaagttaagcttatttttaatttttaattaagtgggttacaattaaataatcgtaatttggtatttattacattagatttgtaaaaaaatactataatccgactaaattgactaatgtactgtgttaaattttcactgttattttttagctgtttcactattatttttaattttttgattttgttgttttacgattgtttaaaaaaaaatagtatttttgaaaaaaaaaaccatatggtagtatttttgtaaaaattaacataaattttaatatttttgtaagttcccttaagaaaaagggtcaatgagtatttgaattatctttagactaacccattttgttttggaatgtgactttaaatactattttttttttaaattattattatttgttttggtttttggtttttagtttttttaaataataataataacaaaataataaaggttctttttaaaaaaaaaattaaagtctctctaaaacaaatcaaaaccaaaaattacaactatataattataagaagaagtactgaattttttgaaaaaaatcactgagaaattcttaaaatatgtgtttcatcagacctcttatctatttaggcattcattagagcttttaagtgtgtatgttgtagttatttatgatcactagtaaatttttaaaaaaatttaaattatttatattgtcgaaagtaaagttcaaacttcaaagagttatttattatgtatataaaaagaatagtcatgattttaattaaatatttaaactttattttttagcatttgtaaattattaagttttctaaaaaatttattggtgggtctaaataactacaacgcacacaattattaaaaaaaaaattaaaaaactctacttgaaatatcaaaatagatagatgacaaccaaatatatgcctactataaataccctaatacttttttttattgtaagtaaaaaatcttcaatcttggcctctccttgaagtggagcctcattccgccagtgggt

SEQ ID NO: 258237 - DNA, 671 bp, Cannabis indica
atataatcctttatcccctcttgattgatgtgattcctcataatgtagtcgtcactagccttattaatcatagcgtaatagctgaaaaagggggagttacgccatctgtcacatcgtttatggtggtttcaatacgtcttcccccatgcggcattaaatgcaaggtgattgttcaatagagtccaatacctcccggaactgccttagtatgtcctggcctccgggggcataaagatccgccttatgtctcctccgggagacaccttcccagagacattcctcttttgtctaagacctagttgatttctttaagagctggtcctctcagctccacgtgtcatccttatccaggtccacgtattttgggcaaaatcaagggcaacaatattatttattttcatccataattaggggaaaatttgtagaatgagaaagagtttctttccaaataatagtggtatcattctcttctatgaataatgggagtacctcatcagtattattaccctcatatgtacttggtggaatggattcttcaaaattttcaccactagagatagaggtgacacttacctcgtcaaaattgtgaaaggtggtattggaggttcttcaatcactgggtgcagaggaaaaccattagcatgcaaacttaccaggtgacaagataattt

SEQ ID NO: 258238 - DNA, 529 bp, Cannabis indica
atctattcatcaggttaagttcttgggttcacaacccgggtattcttggagccctcttgccccctgccaagtcatgctgacagtatgggctcgtaggcctattcgcagcttgccacttcctgttggtgccactaccaatctttccaacaagacgactgggatttcgtcaaaaatggggatttcaagagcccatctgagaggagtttaaatctctaaatctcgataagtttttatctttatctcgttattttaaatttcttaatcttcccttatcatcctctccctgaattatttttgtcttggaggcatctatcttttctgacttagctcatcaaagagaccttcagagaattaagcaactagagtctgagcttcgcacaaccgttgagcaacgtgaagttgttgtgaggcaatggaatgaatctcaaacagaggttgctcgagtaatgaatgaagctgaggaacagaagaaaagccataagactgagctcgaaggtgctaaaaaaaggctaaggatctccgtgaagct

SEQ ID NO: 258239 - DNA, 812 bp, Cannabis indica
aatagatttgatttttttaaaagcatttttagattgccacgtcaccttattaataatagtattaaaaattaaaaaagaaatatgagattaattaactaattacactaatttagaaaagaaatatgagattaattactagacatatattataataatttaaattgatatacaatttaattatactgaatgggcttaagagtttttgtgagtagagataaatcagggtctctcattcacaatgctattcgagacttcgagtatattttgatgatacttcctttctcatcctccatctccatctcgtctattttgttgcactctcttctctcatcttttttttagctgcattagatattttaattattcattgtaactatttttttattattattaataattaattttatataaatatatatatacatgtatatctatctcgtagtggagaagaaatagtaaatgattaataaaaaaaaatctcaatatttgataaagaaaaaatgaaaattccaaaattcatatgacaaaaacggttaaattattagcataaaaaaataaattgtaagattaaaaataaaatgaaacaaaatttatgaagaaacaaataggataaactcaaaaaaccttgcgatgagtatattcagtggtttggtgattggtgatttaggcaaacaataaaaagagtatcgtactgatcttcaaagaacttgggatctccaaaaaaaactatttgtagtaataaaacagaatgcattcaccagatgattcaaacattattatataaaaagaatttaaaatatacatatatagaa

SEQ ID NO: 258240 - DNA, 757 bp, Cannabis indica
tgcaatatccttgacagtaaaagaaaaccaatgtcctctaacatagactttaccaaagaactcagaattctcatcaagcatgtcattagtcaaattggcataaaattctttgacaatattttcaatatatccttcaaaaccagtgggagtattttcccattggtggtattgaacaaacttaacaacaccatataccctatgagcatgcaaatcataattcctttccttcttgatagatgcttgctgggcacgagtacgagtggaaggacctgttggagttgaagcagtaactcccttccctgttgcagcaggaggcgatacagtagcaggtggaggagatccctttgaagaagaagacgatgaagtccaacatttgtagggtcgcacagattttccaaccacttgtttaggaattcttttcggtttgggcttctcagggtgagattcacgttgaggaagcgacgaatctcctgggttcgaagcagttgcagcagcaggcaggaagattggagcagcaggaggagcattcgaagggtcttgttcggattccaccattgttcttggatgccctaggttcttagtcttagccatggatttctgaaagagaaatgaaaaacaaagagaaagaatacaaggaaataggaatcgggtaggtggtgagaaaaataacacaaagaaatcggtttaaataaacatgggagagttaagcaaaagaaaaccaatttcaaaattttgagtaaccaccagcccacgaaca

SEQ ID NO: 258241 - DNA, 995 bp, Cannabis indica
aaactttatgcatgtgatagtttatattgtgaataaaattacaagcaaacatccacataataaagtttacacttaaaagtgtgaggcattaaaaagcaaagttggaaaaaggagataaataaaccaagtctacatgttgggagacttggacaaatcttcttctttttcctcgacctcactgtgttcttcctccatcttggtcttctcgcaaagaagtaaagtttcctcttccttctcccccaagaagctggtatacatgttagggttccaaagtcaggcctgatatacagcgataaaataaactttatcacaccgttctacggtctcgatttctttctcagcaagtttttcagtaagcttttcctcaaactcatcggcttggactttgatggtcttctcagcctcctccttcttcttctcggcttcctctttagccttctcggcttccttctttactttctctgcttcctccttcgccttctcggtttcttgcttgaggcgggtaatctccttttgggcgttgtctcgttgctcacacacaaccttgcattgggatactaatttgtgagtctctccctccaaatactcgagccgctcagagagtagtcgattggaagaaaaagaagcaaaagaagcctggagaattgcaaacagatgaatgtaaaagagataaaaagataatataattataataacaaagccaacgtaccatgaagtgacagtccaagctccttgaaagcatctcttttggactcctaagattgagaaaatctcaaacagggggaaggagagtttgaagtttgcgccaacaggcgaccccatatgcctgggcaaattcagacctagcttccccagttgcgaccgacagggtctcgatggcctgacttggagaggcagtagcgggggtcacctcaggatgaggggcatcggcattgggaacagcttgaggaggaattcgctcttagatctcgttgtccgaaacctcgagatcaata

SEQ ID NO: 258242 - DNA, 902 bp, Cannabis indica
ttttttactttttttttctttctccttttcttttctttttttttcctctttcttcttctttttctccagaatttccagccctctctttctctctctcgtctcatcagttaggggcagcaccaaaggtcaaaagccatggaaggagtgtgctgtgattgaggaagaagggcttttagaggcgaaagattgccagaagggtcttcctcgtcggtgttatgttctcgctttcgtccttggtttctttgttctcttctccttcttctcaggaaacttaaaacgtttttgtacaaccgaagtcaattccataattcttctttccttttcccctaatcacattcaaaatttccaccatttttacactctgagtcgcctccagccattactcgtctaagccgcctccaccacatccgtctcttatcccttccatgctcaacaactcttcccaccctctgagctctgttatttctcctttcgtttgagacgaaaatgcaggtttcaaactcatactcatggtttctctttgttatttctttacttttttctaattgcaaggtcacatccataatttctctatgattctttttcttattcaactatttgtctacaacatttcagatatgaggtaatctaacattttctttatttgtaaaaaatttcggtaacatttgaatcttttgtttaattcaaatttttctatattcatgtacctttcgcttcttgctcatctgagtcgccattttgggttgagaaagtagagattagggctgccgtcaacaatggagtttgacttttggtgctgtccctaagtggtgagacgagagagagaaagagagggctaggagttctgtagaaaaagaacaagaaagatgaagaaaaaaataaaaaaaaagaaaaggaaaaag

SEQ ID NO: 258243 - DNA, 324 bp, Cannabis indica
agtgcaataaatttgccaacaaattgcattgattattgttatagtaaggaattcgattgcaatgcctattgcattgagaaaggctacaaaaatggaggaaaatgtacatttcaattcaaggggaattatgctcaatgttgttgttttaataattaaaatttgtaatgtatatcctcatcattaaataaataaaaggtactattataataatagtataattggttttattattatttctacttttagtattttcatatattgataaaaataatcattttagtaaaatgcatgtaatgtctcaagaagatattttacacaaaattg

SEQ ID NO: 258244 - DNA, 634 bp, Cannabis indica
agagtagaaatgcacctcataaccaaagtaacaaaattaaatagggaaattaaagtggaacataatgctttccgaatatttccatttagctcgatcaaaagccttagccatatatatcaagtttatgagcagcccaacccctcttaccattcttccgagagctaatggcatgaacaatttcttgagcaataagaatattatcataaataattctagcaaaaacaaaagcactttgaaaggggagataattttatcaagtaccaccttaagacgattagctaaaaccataataactttatacatagtagtacaaagactaataggcctaaagtccttcatagaatttgcatgttgtttcttagggatgagggcaataagagaagtattaatatccgagaaataaacattattattcaaacagtccaagacagcatgaacaaaatcaggacaaggagtggcccaatttttctagtagaaataagcattgaggccatcaaggcctcgagctttatccccagaatgactaaaaacagcttttttcacttcatgagctgtgaaaggctggccaagaaaatcaatctaaggatccttgagagagggtcataaacagtcaaatttgacaggtagccttagc

SEQ ID NO: 258245 - DNA, 1155 bp, Cannabis indica
tgttggtgcgattttgaccattttggtaggctatattggcttcagcatattgatctatatcagtagttgtgagattgacacttagatcattttcttgatcaaaatcagtctttttaatttgagactcagaggcaagtaagagagcttcaatttcggctactgagtattcttcgattcttgtattagtcgatatgatgaaagtgtcatactcggggggcaggcctttaaaaatagcagcaatgtgatctcttgagctcaagacttctccaactgaagcaaggagatccacatgctgcttcacttttagtagataatcatttaatgacagagatccttttctaagcttcagcaatttcgtcctgaactcaaggatcttagatgagacttgcagagtaaaatgtttctcaagagcgctccagatttgtcttgctgtgttgcacccaaccatgtgtgtgaggaggctctctgtcattgaagaaagaagccaagaaaccagaagctgatcttgaacctcccattcaagaaaagctggattgaagttgttcgaggcttgatcagtgtcattcaagagctgaggaggaggagcacgatcttgaatgaacatttgtaatctatttccacggattgcagctaaaacctgttgtttccacaagagaaaattgtgatcatttaatctaatggacatattatgattgaaatataccagattgaactcatcagagttgcttcttgatcgactgagatttgaagctccattagtttgaacagtcggtctgttgggaatcgaattgctctgagtgttggtgttgccagctccaacgtttgccatgttagtcgtcaatggaggaaaaggctctgataccatgttgaatctcttcgccattgatgaacactcaagaacagagaacaagcagaacagagaaaccagaaacgaagagaaagagagaaagagaaggaaagagaggaaaagatagagaaagagaagattgtaaacaaagggcaatcttattatgatctgtaatgggaaatggctttatatagccaacgattacaagcatggagaattagttagagctaactgaaatcagtcagagcaagtagtacataacagactgttaagactaacaaacataaataactaactctaactaatac

SEQ ID NO: 258246 - DNA, 520 bp, Cannabis indica
aaaaggaaagatgcgaagaaaaaaataaaagatgagcaggaatcaagaaaagaagatgaagaagaggaagtgggtacctgaatattttcggtgcaaagatctcggattccagctccgttgaagctgtcggttgccgaagagacccagccatcacctgggtcgatctcttcgtcgtagtctaccgagacagcagcaaacacagtgctcatcttgaacgtcaacgtcgatctctccgacgttcccttgcaatcgtggttggggaagaaggtggccggagtaaatccttggctggatctaacatttttctttttttttttttggaatgagctgtgcggctgtgagcagaaacaaagaggagagaggtgaaagagaaaaaatagggttttgttttgttttgtttttcttttgaattgggtggcgttaattaggctcactaattaattgtttttatttttttaagtgcagttgcttttttctttcaaataaattgtaattgtttttttgttttaagtgatatgta

SEQ ID NO: 258247 - DNA, 728 bp, Cannabis indica
ggtgaccttattgaaatatacccactttcactgctcgagaactctggcctttccttaggattagagttttgcttgacattaccaagcctctgcgtaggggtatgactatccgtttcaggtccattcatgaacctaaatggataagcttcaaatataaaagccttccaaatttctgctacttctgcggccgccttgatcatacttataacaaatgttcgttatcttctccgctgtgacaactttccttcccctcccattttggaatatactgactctcttcgtgtaccggctcaaccccaacacaaaaagaatccttttgacatctccaatgccactccttttgaggagcttttcccgcctcctgcctctccggcccacagtctccagcatgctgttgaccagttcctacgtgtccattccccaccccgcaccaccaccattgttacttccacattcccttcccccacttcctcccctcctcagccaactcatccagccattccaaccccaatcatgaccacgtcaactatttcccacactgccaaagggaaaggcattgctttgcctgtttctgaccctcctctctctaggcccccgggtattgttattcatgaatcctctacaagatcttctcccacttcctcagttggtacccgtaaacacttcactcgacagtccactcaagttggggactctgtcaggagtatgctcaagcgtgctcgtgcagc

SEQ ID NO: 258248 - DNA, 611 bp, Cannabis indica
ttcaacttgaatgtacttcttggctttttcatagaagtcgttcaagtcttctagctctctcttcagcatgttattccacaacttgctttttggacagactcccgcagttataaccatcttatgctcatccttagtaatcctccaaacttttgatgcttcagcgttgaaacactggatatagcttttgaggctttcaacttttccttgcttagtatttgccaaactagtttagggaatagtgtagtcccaagaggcatggtgttgagccaagaactcatgagtgaactatttccaagagattatagacccaggcattaactgcttgaaccatttgtatgccgcacccctgagcgttactgcaaagcattgacaccttactttgttagtaaccctcttaatctttattatttcgttaaaggcatctaggttgtaccttgggtcagttatcacctcatatggtaacatatttggctctttgaagttcgtaggcaaaggctcagcttgaatttcttgggagaatggagatttctcatcaaaattgtcctcgtcctagttacactctttttagaggtagctaatgctatccttcgtcaaaagtcttccattctcct

SEQ ID NO: 258249 - DNA, 524 bp, Cannabis indica
caatagataagcattgagtatttaaggcctaaaggggtgtttgattttcacctttgctagtgaagaaggagacacatttgatgcaatatcttcttccaaagaacaatgaaaaagacaagtgtaagcttgcctcactcccaccaaatggtcaggagatgaagcacatgacatctcaactatgattttgagatgctcaacacttttcttactgttttccaaggcttcccgggctaatttcgcgtccctttcgcaaggatcatacgcccacaaaataatcgctttctgttttaaaagattgggagatattatccttaagccaatccaaattaaaataggtgtaacaaagttcataccagaatcaattccttttcattcttatctaatattctgtttgaacccttattatctttttcccaattgattataaatcaaaacccaacttcagtaacaaggaaagaatcaaaaagtattaacaaactaacatagaaaatcaccaaaaacatatcaaaattataaaaaaaaaa

SEQ ID NO: 258250 - DNA, 831 bp, Cannabis indica
aaagcagctgtagcaacactgtataaaaatcaacgattgatttcgtattagggtatcattaatagttgttcacgacaagttcactaattgatttcaaattctacgatttatcgtaacacaatcactaatcgatttatgattattgttcttcttagtatagttatgagacacaaaatcaacatagttgtatgaagcagactgtgtatacaatgtatatagtatacgtctttcaagattaaaagggttatagtttgaattaatgattaaagaacaaatatacattgaatacacaatttgcttcatacaactagcagactaaaatattgaaagcctatattttatgtattagggtatcattactagttgttcacgataaaatcactaatcaatttaaaattagtgtttttcttagtaacacagtcactaatcgagataagatcaattagtgttcttcttagtagttttgacacacaaaatcaacgatcaattccgtattagggtatcattactagttgttcatgacaaaatcactaatcaatttaaaattattgtttttcttagtagttttgagacacaaaatcaacaatcaactccgtattagggtaatataactagttgttcacgaaaaattcgttaatcgatttaaaattagtgttgaaataaaacgatgaaataaacacatataaagtattagaaaccttacattgggtgcagctgaataatatgaatccttccgtttagatatctagcccttgattcctttctgtagcagagcattatcaatatctgaacctgaatcgctttctctgattctttagtgctgaaactcct

SEQ ID NO: 258251 - DNA, 819 bp, Cannabis indica
ttaacagctaaatttggacagaagtgttaaattgctaacagtttactgattttgggggtttacccgcagaaatttgggttttggggtttaatgaaaccaaacgaaagtattgggggttttaccgccatttaccctatggagaaacaatcttattaggccttccaattgtttggaaatctcgatccatacaagatattattattattattattattattattattaggggtttttataaaaatactaaattttgggcaaaaaatcaaaaatttacaattttactatcacacaaattttttatacaaaaatattatctttttataaaacaactataaaactgcaaaacagaataattaaaacaacagtagaacaactaaaaaacaaccgtgaaacaacaatgaaaacttaacacagtagactgtataaaacttacactatatttttgaagaaaattctgccccacaataaaaattaaaaaagttaaaaattttagtatgtaatataaaaattacaattattattattattgctgttattattattttttaaatagtacacaaatagttattatgatggcaattattattagtgtaaatagacttaaagtttcaaatttgtaagtgacataatctcaatgtttatttttagcggcaaaaatacttaatgtttagaaaactgtaatttttttctaattttttcagtacaaactctgttattttcttaaacatgtcacaaataaggtccaaattctagatcattagtattaattacttccaaatgttcctttaataaattcaaaacggaatctctactgaccaa

SEQ ID NO: 258252 - DNA, 552 bp, Cannabis indica
ttatttatgtataataaaaatatatattttaattatatttttagtggtttttttggtattgaatttgtaatatttgttttaagtatttttcttttcatttttaagttaatattaaaaattaagtgtgtaattaaatatttaattaaaaacgagataggattttttggtctaattatatgggatggaatgatgattttccaaatccaagttgaattagaccgaatgaggataaaaaaattggattggatatgatgtccaaccttaccttccattcatatccacttgccatatggtactttacgtttgtctttgatgtttaagtcaccatttatcaaaactcttggcatagatatttatttgaataggattagtccttagattttgttttgtttgtttttatgtcacaacgcagacccccaattataatgtaaatatgttaaacaagtcttttcctcacaatcgtccttattggggattcatctaatttggacattggtgtttgtctagaaaattatgtcctggtattagaaaagttactgaaaattgttgctt

SEQ ID NO: 258253 - DNA, 1215 bp, Cannabis indica
gggtgatgttatttttgaatcaaacacatatttcttaataagtaatgagaattaatggtaagctaattatttgtttacttacattattaaaattagaaaagggagaacttgattaaataaaggagaaaagaaaaggagaacttctcccaccaatttcataaagaatgccattaagggtaatagattttaattatttttattttattttttaatattaaatatataatcaaaattttatccattaaaatatgtcttacaaaataactactatataatatagtttaactcaaaagggcaatttagtcaatttaagcattccgattacgtttcctaataaagtaaacaagataaatcacaactattccatttctaaaaaaatttagtaaacaacatattacaaatattgattccgattaccttttatttattccgttacatttctccattaatttattctgattctaattactgtatagtaaacgtgttagtactagtggtgttttactaaaaaaaaaaatcttatttttagttacaacaaaatttgtgactaaagataaaagaagttatggctaattgtaaattattattgtattgtgactaaaagctccgtggctaaaagtattagtcacaagaattataatttttcgtaactaaatgtgtttttagtcacaatatttgttgtgactaaaattaaattagtgataacttgtaactaaatactatattttagtcaaaagtaattttttgttgttgactaaaagtcacatttagtcacaaaaaactttaatgttatgactaaaaacgttagttactaaaaaataacaattttttgtagtgtttagtattttctcgatatatcgcgttacgattggttagcgatacttcctaaaagctattatattaaattatataggatctaatacttagttagactaatatcgatattgatacatagtaagacgctaagtaccactgataccctttagcatttcatcactttttgaataagagaggattaagctaaactaaatggaaaataaatggagacacaaagtggatgatatgattttattgcacaaatatctattttcgttttcaaggtttattattgactttgaaatatgcaatacctaaactagctatattaatgtttggcaagagattatacttgatatattgcatgacaatgagatcgcaggggcgtgcaaaaatgtc

SEQ ID NO: 258254 - DNA, 609 bp, Cannabis indica
gcagctaataaaggagtgaaggagtaaaatggaaaggaagttttatttttcatctacaagggagttgttcagaataatggtggggctatcagaatgttatggaagtttcaatgtattcgattttaaattgtgatgttgcttgtttttggtttaattaatattctagtttggtcagtagtttaatttgtctgaaggtggatgtaagcaatgatattttgaggaagaattattttatcaataaattatgtttgtgcttaatttaatcactgctatgaatactttaactattatgattatttcttcatgagatacatctacaaaagttcttacagtacattttcttccaataatattatttaagtttataaacaataaaatattaacaaaaaactgaatatcattaaaacagaatatggttgataataaaggaacgttacttttttattataagtttaggaatattaacaaaaaatagtcttcaatagttgtcattgttgtagtagtaatatttgaaaaaactgataatattgtaaagtatgagttacattggtatcaaggtaattaaactaaaatggggaataagttaactatactataatgggtggacct

SEQ ID NO: 258255 - DNA, 669 bp, Cannabis indica
ggtaaaatatatccaacagtgatgtcagatgtagaatattccctgttacactcgcagaagccgcccagtagtggtacttcaagctgcctccaaggaggtttaatttgtggaatgctttctcctcgaaattccacgcgtaattttcctccttctgttaacttccctcgcatctagaagatctggtcgaggtaaaatagatgccaggggaacccctcaaagcttatataagtagatttatgacaaaagctaccaaggttaaggggttgaccgaagaaggaaggttggccgctatactgggaggcattgagccacttggagaactgtggaaggatattaagaggctgaccataggatctatggctgaatttttggaccgagcagatggatttattaagttcaaagaagctgtttggcgtgtagacactgtcggacaaaagaagagccagctacgtaccacctcggcatgagcgtccgctcagagtccataatatcctggcaattcgaattcgaatgggaagaggtctaataataatggtaggcagggcaacggaaagaaaggcaagttcactggtaataccgaacagcaccccagggaaaatgcctcaaagtttactgccttttatgtcctaacagacgacctagaaacaatatatgcaacaactcagtcta

SEQ ID NO: 258256 - DNA, 787 bp, Cannabis indica
tatctataacaacttttcaaattagatatttaattaattgaattgattaaataattaattaatttaaaaaggcaaaatcccatagggacaacaacatatgctaggcgcctactcttgttgtttaggacaaggataatgtcttttattctgacaacttttgtctaacaaatcttgtgttgacaaaatttgtcttaataatttttgtctttccctatttaattaaattgaaaaattatttatttattaacaaaataaataattactaattttgccaattcaaaatagattttttcgaattaattctaagctccaataaactagattttcccttgataatatttcaaggtggcaattcgaggactatggacctataattctaagctccaataaactagattatttattgagtctcatcaaccaaataacttttgttaatattaattccatgattactccactataaatatagaattgaactcttagtaattatagaattatatttactgagttttagtgcattgtccattgacaaaatcaatttcagtgattaaccctccatgtgttggtttataattagttttagtcaaattaccattttacccttctaattacttatttatcctttagtactattacttcactagtggatgtacactttagatctcatctaaatttgtgcacaacttttcaggtctagaattaatacttaaagggacccaacattggatctgttaggaaagtcaagattctataatttaggtcatgttctcagccatccacattatta

SEQ ID NO: 258257 - DNA, 634 bp, Cannabis indica
ttcgaagcccagaaggctcgcttccaaaacgaaggtcgtccgaatctgaaaggcctccagccttaccaagacgaaataagttaaaccaagctctccgaatgaccaatgtgatgcatctggagatggtatagcaagaggtacctccagaagctctttataaggtgacatggctaccctctgacttctagtcccaccgtattagatcttatctcctatgtcagaacatttagtttttattgtcgatttcagagttattaaagcaaaagtaaaattttgataaaataatttttatctaaaccataagcctaaggatctaaacataatgaatatagattaaatctaacagctgaaaaaaatttaattacctcttgatgcctataagggtatccttgtttacttttttataacaatcgaacatctaatcgaagaacttgattgaagaatctacaccttgatctttcaagccagcctcaacactcaggaatagaatggataattagatcttaaaggatggacagatttaggtattacagtgtgtagtcaactcatgtgacactgtaatgagaatagggttttaatgtcacactcactatgaatagtgtggggcatgtgagacaagagagagagagagaga

SEQ ID NO: 258258 - DNA, 699 bp, Cannabis indica
aagttgatccagttgtgcttgcaaaaaaggatgaacttgtttagcttgttgaccagcctgtgtcacattgggatctcttggaactagatcttggcctcagatgcctggttggacagttggtggaatgtattgttcatctaggccccttcttcgatttaggtcagtcatgaggtcttagtgtctgacttgtttggccagcaagttggcgagaaatttcagtaggggtgaagttagtgtgtataactccacccaaaggacggtctggtaggatctagccgtatactatttggcccacaggttggacctgctgccgtggattggacggctgaccactatgagtttgtgcggtatgcacaactgcatgcccttctaaactccccaaggcaatactagaaccatcctattttcttgtcaaaacttaagacaaagaacttgtgtttttgctctcaatgaaagcaccaaaatgttgacctcacttttagccaacgacactgagtctaataataggcaattgaataatgtaattaaaagagaacaaaacgcaataaagtaaaatgaacaccagattttaaagcgatttggccttgtgagtgtggtaatagcctattgtccttgtattgtattaacttaagagaaggaacaaagtgttcttcccccttgaaagctcttacaactgatttctgagtaattctcttagat

SEQ ID NO: 258259 - DNA, 823 bp, Cannabis indica
attatattatatacatatagcaagagagttggaaccagattgaatgatcattgtgagttgagaatgaaattttgagtgagcgtttgagagaaaaggaaaagtcattgataaattgaggtaattaggtcatgagcttaagaaatgtcatcttttaccaaacccgaacctaagcctcacattataatcctagtaaagtccttttgatctagggtgtaaagctaagctacattagtggagagggttgcactaattcaacttatggaagcaaaactttttaaacttgaggatcaaaggtagttgttatagaaattaaaggtgttggtgggaagtatttgtacacttcattgattgaattattcttggtaagtattaaggacataaatagcatgaaaaactcgattgaaacacacaagtttaagacatattcactatcaccattacacttccattccatctaactctgagagcattttcgtcgctaaaccaagtgtgaaagagcaatatattctctattgtaagtatgttgttgtcgctgtcatttttgtttttgttgtttagttcttgctgtttttcattagtcgaggacgagcaatactctaagtttgggtgtgataactctatggtatatagttatttttaacacctttaaactgaaattaatgtgaaaagagtagtgaaagtgtctttgttattttactttacttaatttctagctttatgttctaaatagtcagttaactttggagtcttataaaaattgttattgttagttgtgtttttttttttaattaaatgtgcttgtttgttgttgaaaaagaagaat

SEQ ID NO: 258260 - DNA, 713 bp, Cannabis indica
atatcaatggtgggttatgtaggagaggcagctactgaattttcaagctggtttggggatttattagctaaaaaccagtaggatgtagttgaagaggctgcaatgatagcttggcggatttggttggcccggaatgatattctttggaacaataaaagtactaaagctttagatgtggtaaaattagctagaactaatcttgttagttggagaaatgctcaaaaacaaaaatcagagcctttacttaatgtgaattatagtaaggatctggagcattggaggaaaccgattgtgcacaaatacaagatcaatgttgatggagccatttttgaagctgtaaattgttttggggtgggaatagtcataagggatcaggccggtcatctagttgtagctgtgtcaactagtaaaattggtgtggtgactccggaaattgctgaagttagttggggtcaaagaggcgctaagctggattaagaatcataatctttctgacgttgaaattgaaactgattctttagtagtggtgcaagctattaatggtgaggttccaatgccttcccaatttgatacgatagtacaagattgtcgtctgatgatctctactttaaataatgtgttaatttcttttgttaagcgatctgctaacaaggtcgcggactgcgttgcgagaaagtcttgttttttgtcaggttgtatctttagtgagctta

SEQ ID NO: 258261 - DNA, 818 bp, Cannabis indica
gcagttcctggtcataggccttctttttcttggagaagcattttgtggggatgtgacctgctcaaacagggtcttatttggaaggtgggtaacgggttgagtattcgcacaattgaggatcattggcttcctggctgtcgttttaagtcctattccagttctgctcctcctgttcaatctctttcttttttttttcaccttctagggattgggatagggaaaagttgattgacttttttgataactctcttgtggaggacatcttgcaagtccaaatttctggccaccattgccatgatactctgatctggggcccagataagtcagggctttttacagtaaaaattgcttaccatctagcccttcagtctcgggatatgcctacgtcctcctcttttgtttctaataaatctttttggaccaaaatttgggcctctgcagcacctcctaaaattaaacacctcatttggcgtgctctttctcactctcttcctgtagcctcttccctattttttcgacacattcttactagccctctttgcccggtttgccagttgcattcagagactgttgaacatgctatcctcggatgtaatcatgctagaaaagcttggaaacattccaaatttttttaccttctatactaatcataaggatagtagttttagcttgtttttagccagtgctttagatgtctatgataaatttgatttggctctgttgttttgttttatttggtcaatctggaatcagagaaataatttatttcataagaaggcagggctctcctcataccacctttttgattatgctgctaa

SEQ ID NO: 258262 - DNA, 517 bp, Cannabis indica
tctttctctttcttctcgatcccctaacccttcttcttcttcttcttctagccatggccggcctcctcctctgccgtaacaaccccaacccccaccaccatttcccccaaccccgacacccatcaccacaactccttttcttcctaaacctatcgatcggccatgggcgaaggcaatgggcagaaggctaagatggcccgtgagaagaatttggagaagcagaaggctgccaaaggtatttttttttcttcattttcagtttccattgctgccaattttgaagcatcaaagtttgtattattgtatatatctgtttcctttagtgatttagggttttaatggtggctctgcctcatctgatttatataggtagtcaacttgaggtaaacaagaaagctatgaacatacaggtattctataatcaagatttgggttttggatttgttttattactgtaactattcaacttccgaatttgaacatttttattcgtacgcataattgttaccatttttct

SEQ ID NO: 258263 - DNA, 779 bp, Cannabis indica
aaaataatttacataaaatagtgttcaaaaagtctgtaatacccactttaaatgtttttttcgtactcttatatttcaaatataataataaaatatgtatttataatttgcactataattaagatataaaaactaattatataaattttaattacaattatattttataaaataaaaatcaagtgaacaaaaatataaataaaatagattaaggagagttaggcacgtgcattgcacgtgctaaccctcccctagtatatataaatatattgatcaccatacgaagtagaatcgaattagcaataatttataaaaattattatattaaattatattaaatttaatatttaattatgttaataacgatatattttgagttagatacaccaataattatagccacctcaattaagtgtgtacaaatgatttttagctcgggatagctctttgactacaaatttttacactacaaattttttttacttttaatcacaacaaaattaagtaaaaaaaattgtgactaattataaattatcatcttatgttgtgaccagagcagattttaaggtatatggggctaagacaaaattaaattttggggttttatatatagtttaactatcatgaaaatgatagttctagtgcttagtgtaatggtaaactttttaaaaactcttaagagctctaaggttcaatccctctcataactacacagtaaatatttttttttaaaaaattagaaagtagagattgaaaagagaaatttgaaattctatact

SEQ ID NO: 258264 - DNA, 564 bp, Cannabis indica
tacattcaaaatgtaggtagccgctagaaatttgtatccccagaagtttagtaacagtaatgagtaacacatcattaatttgactatctataacatggtccagttttttctctctgcaacagctttctgctaaggtgttctaagtgttgtaagttaggataaaatcccttcttccaacaaatagtctttgaattcaaaatcaaaatattcaccaccatgatctgatcgaagtgtctttaatgatttacctaattacttttcagccatagccttgaagtctttgaactttctaaaagtttcagacttcttggccattaggttagtagactctgtctagaataatcgtgaataaaagtgataaagtattcataaccacctcgagcttgaatattaataggtccgcacacattagtatgaataagctcaatttgttctttgtctctattgccttttacaaaaaaaaagggtactttcgccatcttgccttctagacaagatccacatacaggaagagttctaactattaattctctcaaaggaccatcctttgttaaccgatttatt

SEQ ID NO: 258265 - DNA, 540 bp, Cannabis indica
ggatctcgtacgaattacttcttcaattttcgatctaatgttattttctcccattatacacttgttacacgagaggaaagttatttcacttaaatataatgtgagaaacacattaagaaaacgaattgattatgtcgatattaatgaagaaaaatcttactcattacttataaattaattaagtaacaatttcaagaaatagacgtaacccaccaattaagttttcaatgagatatcataattaatgtgacattaatgaggccaaaaatgaaactttcgtgtaacccacccattatgttcccaaaaagattacctgttcatattaccaataatacaataatgtaatataatggtgaaaaatggacctcgagtgaataaatatattcatactgtatttctttgttcaaatggataatgcctttaatgtttacactcaaagtataatgttaaataattctatattatgatggcatcaccaatggcactctattataatttgaatttgtccggtataaattaatttaagataatagtaaaaaa

SEQ ID NO: 258266 - DNA, 1194 bp, Cannabis indica
aatgaaaataaaaaaatgaaatgtagaaattgattataatatttggtggttggaatgaatattggaattaaaattattgtgtttaattggttggtgtaaacacgcccaagaatcatctttgagcaaagatgttttaatgcttcaaaccttccaatgctccccactaatacatttggatgttactttaccaagaaacaccatgagagaataataaaaatagggttagcacatttacaccaaaaacaataatttatggctggctagtgtagtggtgtttcaactttgatacaatgccacttgataccattaagatatgattgcaggttttggatggggacgaaaatagttacaatagaattaaatttgaaattaatgtatgattttacaaaagataaattaattcttaatattattttttttgaaaggtaattctttttattttaaaataactattatataataatattaaatttttaaatacactcaggatactaaaatgaataatttttacaaagaaagagcactaatgaatcattatacaaattataaggcccaagtgcataatttaacatattttgcacataatcggtttggacgattattttatctggtctattattaagaatatattttgtaataaccacgtgctctaacttttcactatctaacaaaatcttcttttttctttttttataaaaaaaatgtaaataaaagaaaacctaaatcccaaatccccatcctgttcgaactcgaagcagaccaccagaccaaaaccccccaatcgttctcttcctcctcgtctcagattgaaggctccctccgatcaaaacaccaggtaccttcctctcttatttcatattcatattcatattcatattcatagtctcatacccaaaaccaagattttagagtaagcactgtatcagctgaccgtcgtcaagactcaattgttcttattaattgtgtggccatctttcttgaggtctttagattttttttaggatcaacatggttaaagttcttgcttttaatattttttaaggatttttttttaaagttattttgttcgtatcaaagacagttgcatattatcaagagttttctcatgtgattattgattgttatcgcagagatcacagtacttcgtctagtctctccctaccaattgaaacgtgactacccaaattgaatgcc

SEQ ID NO: 258267 - DNA, 543 bp, Cannabis indica
ttcataaatagcaatatcgttctcatctcccactctctaaatgtcccctcgtgaaataattctttaccccacaaaatattctttcacagaaaggagtccttttttttcgaagacttaatagaaccgaaaaaattgtttttatgatacaaaccttttaataccaaagccataagcgaagtaggaacatgatagaacaagaatttttatttttataatacaaacctttcaaatattattccaaaagttatcaattggaacatctttgttgttaaatgataatttggacattgcattttctaaaatgatacaaataggataatgaactcaattttaaacagttttaaatataatcaacttgaagataatttttaacatgaacatatacataaaatgtaattaattttgtaataacacctctagaccgcctattattagttttattttgacaaaagatcagttcataatactatttggtactattttgaaaatacatggtccaatttgttatttaatataatagagtgtctaatcaataatttttac

SEQ ID NO: 258268 - DNA, 618 bp, Cannabis indica
cctaacctttgaacttgtttgcctactggtgcgtttaggctgacttgctagctcggtgtgcaagaaatgtcgcacgttccgcttacttgggagtgtctaaatagtcggcccgtgacatttggtatcagagccaagagaaagtgaagcttggtaacacgtacataatggtgagcaatactcaaaggattcaagagcttgagaagcgtataagggaactggatggcctagacgagagggtcagggatctaacctctagcactcagaactcagggctaacagcgacacaacgacaagttgccacgttggctcaagactatcctaacttgttggccagggtggctgcgttcaagaggagagacgttgttgccgaaacattaagtgcgccttagatggaggattgcattagggcaatagaacaagctacaatagaaatgcaggctgctatcaatgtgctataaaatgggcaggctacattacaagactccctcaatgatacgatagaggattgtcatgcatctatcacagccatccgggaagagttagcaggaatgtaaactaagctaaatcttaccatgatagcaatagagtgtgcgattaccggggggcacgggggtatgg

SEQ ID NO: 258269 - DNA, 1217 bp, Cannabis indica
gctctaaaacataagatatgatacttggaatcaggataaatatgttcgagtgtaagttagccaccaggcatcactaggcgcgagtgtgcaagcacactaggtgcctatgttgactttggcatggggctcagtgttctgcccttcaaatagtacttccactctaggaatcagtctattttcccaaaatagattggatgctttgcaagttatatctcatgtacatgtgtcacgtgtaagtccaccgacacccatgtgcactagtgatcatccgagtatcacctagtcatcactagtggatcactaggaatcacccatgcatatcaagtaaaattgccaagagaacttcttcaaggtcaaagaatgaactaaggatagctatcacatcattcaagcatctcaaaatatgcctgaagcccaaaaaaccaagttatgggcacctaggttgacatttatgtcaacttgggcgaccaaaagttaggatgacgtcacaatcacttttcaacagtgcacacactgctcactaaaatagccataattctctcaagttttatccaaaatgatgaggcttaagtggtcaattaaagctcttttcaagacgaatctaagtgtgtctcgcaccctgtcgcaattttgaagattcgggcctaaaaattaacttttgagctagtgttggatttcccaacaaattttgtgtgaatttttctattattttattgtaatttaattggacctccttccttgtaaaaggagagctctgctaactcattattcacactcttcattctctctacaaggtcagagcttctctctctagaaattgtaaagtgaagctagacttagtcatgttttttgagttctcttgtaaggcaattagttttttgtgataataaaaactctaagtagatgtagcttcattaccattgtcatatggggagtgaactactataaattgtggtgttctctttattttttattatttttttatttgtcgttatcgcttattagacgatacggagttgaccatttttcagcatcaacacgtataataaaatatttgaatcttattgttgatactgtaaagtattcacaattttcttacagacgatcctctataactgtaacgtaggcaatcttgaaaaaattagactaaaaaactttattaaatatcgaaacagataagatctactgaaataaacctttagggctcgtttggaacg

SEQ ID NO: 258270 - DNA, 1177 bp, Cannabis indica
actttgttgacactatatgcaagatctggccgagtaatggtggcatactgaagtgcacccacaatggatctgtagagatgtggatcagtgacagtatcacttccatattgagaaagtcttagacccgagttcataggagagctttgtgttttaacaccttgcatctgagcacgacaaaggatgtcttgaagatatttcttttgtgagagcagcagccctgtagcagtgggaagtgcttgaatgcctaagaaataatcaagattaccaaggtctttgagagcaaatttgctactcaaggcagcaatgagattggtaacttgacttgagctactccctgtaatgaggatatcgtccacatatactagaacatataggcagtggttgttgttgaatttcacaaatagggagtgatctgactgagcagaggtgaacccgagatcagtgagtgcaccagatagcttctcaaaccaagcacgaggtgcttgtttgagcccatataaagctttggtaagcttacaaacatgtgttggatgttgtggatcctcaaaaccaggaggctgaaccataaagatttcttcttgcaattcaccattgagaaatgcattatccacatccaattgtcgaattgtccaattttgtgtgacagctagagttagaacaactctaatagtaacatgcttcacaacagggctgaaggtttcattaaaatcgaaaccagcttgttgatgaaaacctttggccactaatcttgccttaaattgaacaacctctccttcagcattttctttaacccgatatacccacttgcatcctattggggtcctgtttggtggaagaggaaccactttccatgtattgtttctgatcaaggctttattttcaacatccatagctttaaaccatcttggatctttaagggcagacttgacattgagaggataaagtgaggccattaacacttttggtttagtgatgccattttttgaccttgtttgcataggatgcaaatttgtacctgtaagacaacaccactagaaacattgttagaaataacaggttgaatgcttgtgggttcatgctcagttgtgttggaaggaagtgctaccagtgggttatcatggacaagagtaggggcagatggtgatgatgacaaggaaagatttggtgaagatgaagc

SEQ ID NO: 258271 - DNA, 1208 bp, Cannabis indica
tcaccttcttgtcctcaggtctttgaactaatacccatgtcttgttttttctaagcaagcttaattcatcatccacaacccgagaccactccttcttgtactttccatttaaagcctcttctatactcaatggttatggtatgtcacatgaatgatctattgacaaagcataggcaatcaaattagcttcggcaaaccttgctggtatatggatttctcttctggttctatctctagcaagctggtagttagacagatctggttgttcctcagtctcatgtggagttgtgtctatcatgtcattcttctcacttgatggttcaaatcctttgagctcaatttcaaactctgccaaatcttccctcttgccagatgcatctgcatcaggttacacactgcatttctcggctttcaagtgaggaaaatcattttcattaaaaacaacatttctagaaataatgaccttaggtttttcattttggtttatacaaattctataaccttttatgcctataggatatcctagaaatgtgcctttgatagatctagcatcaagcttatcatcggagtgatgtacatatgatgcacatccaaacactcttaagtgtttcatgtttgctatcttcccataccacatctgataaggcgtcttcaagtctatgactctattaggactcctattaataaggtaacaagcagtagccaaggcctctccccaataaggcttttccaactccgaactaagaagtaaacatctcactttgttcaaaatggttctattcatacgctcagcaacttcattgggttgtggagttttcacaactgtcctatgcctagttatcccatgctcattacacaacctatcaaactcaatgttggtgaattctagaccattatcggttctaagtgtcttaacctttaaatttattttgttttccactagagctttccatatcttaaattgttctagacactcttatttggttttaagtaaatagatccaaacacatctattaaaatcattaataatagataggaagtagtgttaacctgaatgtgttgggacttacttggcccccaaagatcagtatgcacatactctaggactccctttgtgttgtgagttgctgctgtaaacttgatcttgtgtttcttgccataaacacaaatctcacagaatggtagtgcacatgtctgaagcttttcaa

SEQ ID NO: 258272 - DNA, 1178 bp, Cannabis indica
ttgtgtaatgtcctatataaaattatctcaatgattctcgtctgccgtttacaactatggttggatgatatatacactcatctcaaagcgcttttatcagtgggcaacgtattactgataatggtatggttgcatatgagttattgcataatttactggatgttacttctgggaagaggttttactcggtgatgaagttggatatgagcaaagcgtgtgatagagttgagtggaattttttggagtaaataatgttgaaacttggctttgggagttcatgggtcagttttcttatgaagtgtgttgatacgttagactataatataaatagaaatattaaaggtcaagttattcctactagaggattacatcaaggtgatcctctttcaacttacctatttcttttttgtgcggaaggcttctcttctcttctatgtcaggcaaaaaatacttacaacatttttggctataaagttgctcgaactactacatcaatctcccatctattctttgcagatgacaacattctcttttgtcatgcaacctctcgagctttttattctttgctagacgtctttatttttattctttgctagacgtctttaatctatattccaaagcttctagacaggtatttatttaatattttacttatctaagttttttaaatacttctccttctttagtcaatttctatgatcttcctaagggtacactacttaataaggcaacttgtacagatttagaaagtaacttgttcttttatttgtttgtagagtctagtgaggttgtacattattttattaatttatttaataagttaacttgatatgtctatgaatatcataaattttttcaagtcaagtctgtatttctcaccaaatactccaacggagatgcactttttgttgggttttgtgccctaaataaaacacatttcaatataatcagatttactagttaataaagatcacaaataacattttatgtttcatggttcacatgatttatttcataattatatataatgtataaattctatttaagtccagaacatatgtatttgttaatgattatagtgttgtcaacacagtggaatataatcttgattatatgttcgaaagtgttattccctaattgtcagttcactggttcgctggatttagactggcatgata

SEQ ID NO: 258273 - DNA, 681 bp, Cannabis indica
cgatactgcttaaatgcacctaccaataccaatgtgggtagtaatgctcgaataaaaataaaattaaaaatagatttagtcactataaactaaactactttacaaaccattagaaaaaaaagaaaatatacttctattgtagcgagcattttttatgtttgaaagttgaaactagttgaagagactttcttaaaaaaaactcttaatttgcagcattaaatttgattatttaaatagggaaactttccaaaaaataccaaaatcaagatttggtctttaacccgaataaagattatttgatttgctatatacataacaaaattgaaattaacatttagagaaaaagaaagttaagctttttaaaattaggcaactttttttttaaaaaaaaaaatcctaaacaaaagataccaaatgcaaataaaattttcagaataatcaaagacaccaaattaacataagaaaatcaatttaactatacaataaatagggaaactttccaaaaagtactaaaattaagatttggtctttaactggaataaaaattatttgatttgctatataaataacaaaattgaaattaacatttagagaaaaagaaagttaaattttttaaaattcggcaacttttttaatttttttaaaaaaaattcctaagcaaaagataccaaatgcaaataa

SEQ ID NO: 258274 - DNA, 928 bp, Cannabis indica
ggctatcatcagctgagaatttgagaggaagatatcctgaaaattgcgttccgtactcggtatggacattatgaattccttgtgatgtcttttggactcaccaatgccctggcggcattcatggatcttatgaatcatgtgtttaggattacttggatagatgtgtgatcgtgtttatcgatgacatcttggtgtattctgaatcagaagaagaagaggagttgcatctcagatgggttttgcaacggttacgggaccacaagttgtatgctaaattcaaaaaatgtaaattctggttgtctcatttctctttctgggggcacatagtcgataaagatgggatcatggtggatccaaccaagattgaagctgttcgggattggccaacaccaaaattagccagtgaagttagaagctttctaggtttagttggttattatcgtcggttcgttgagggtttttcaaagattgttgtacccttacggagctgacccgaaagaaccttgttatcccaatttttgcactctgatgtggcatcacaagatggtgacacgtggaatcaactccagttatttgctcgcaagatacagtccaaacaggatacctcatatgcatgctcaagatgaaaaaattagcaacccgaaccgaatgacaaacgcttagcgaattgagctttctcatcgtgagtcatcaagggaatccctataacatggggatcagattatagagatatggcaagctgtcaaaatcccacgatcagtgtattcaatatttattatgcaatctttctgcttatatcaaatgtaacgagaagggaaatacttcctctccaagcacatagccctataaatagtgatgcatattcactgggcaaagggtcgcaaacattttagttgagagatattgtctaagaattgatattcagaga

SEQ ID NO: 258275 - DNA, 948 bp, Cannabis indica
ataacttaccccggtgaggctccgactgctcaataggaccaatcgatagcccaatcgacaacacccaattctgaattagaatcagaccaatcgaatggtcaatcgtatcgacttcaaactaatttgtttacggtgaagctctgatcatcgagaccacattgatgctcaataggaccaatcgataacacatctattctgaatgaagaatacaaaccaaatcaatactgctcgattgcatcaacttacaaactcatcgtcttcttcatcatcatcactgacattggtctgtataggattaggattagttgtataagatcgttgtgtttcgaaccacatcagtcacatgccgaaaacccccgaaaataaattaaaaaaggtatgtgtctcgaaccacatcagtcacatgaccgaaaccccgaaaataaaattaaaaaatgtattattttataccatttgttagagagatatgtgggtaagatgtattttttttaattttaaaaagattgtttaatttttgggttaaattattaggtttatttgttaacggaagatcaaacctgttagatagacacttttaatatataaagatatatatatatatataaatgagaagtatgagtcgatgacatgacgctctaaaatcactataaagttatttttctctcccctccttaattctctaattttattaaatttttaatagatacataaatatgtgcctcaatattttttccttttttcatatttttagtaatattaaatattaattaattttaaaaaaataacacaacaaacactattatctattctctccttaattctctctttttattattttttattcagtttgacaattcttttttaacaaaaaaataaatattttttaaaattcaacaaaatcttaaccaaatatgatatatacaaatatatatgcaaaaaaaaaaaaaa

SEQ ID NO: 258276 - DNA, 575 bp, Cannabis indica
tcactgctattcatatagtgccacgtggctgctacgtggaccatcttaaccgtctaaattttcacggtgtagataggagcacgagtggaatgggttgatcctacggtgctttggctatcaagattcccaccgactttgaccatctcatgttaatgaacggcacagattattttttatgaaagtaagcgtattcgtatcattaaataaataaactagacctgtcggtcattacataataggttcactggaaccgattcgatcggaatagttttatacaacttgtgaataaaagcccaattaattacattatgggcagcaaaattacaagttctactagcatacacaaaattacaactaataaaagagggagaagacctagaacaaaaggagacatagttctcgatcgcccaatgagactccgtcccattgaaagcattgttaactattctcgagtcactctctaccaaaacaaacttgaagccttgctcaagagccaccgaaacagctgaagaacaagctgctgcttctccacataatgcatccgcaaagtctaaccgagccgtgtgaatccgaac

SEQ ID NO: 258277 - DNA, 582 bp, Cannabis indica
aatgatgatgaagaagaaatttcagtgaaaaagttctttccaacgtttaacaacgaaatacacttgaaaatgactgcaaatgaagttgcagtggcatcatagatgagcaaccacagaaatctttagactttatgttgtgttagtttgaagattgaacagaatcaacttcactttgttgtttaaacgttatgatcatgagagtacatgagcctttcttcctacaatcatctcatcttaataacaatataacaaggcaagacaagacacaatatatatttaagctaaagggttttgttggttttgataaagattcgagctttagctacttccaccatgtctgatctcccatccacattctctttgatacacctttccactagcttggcacattcctttattacctctccttcaactctcaatgtattgaccttcaactcatgtttccaatcatcaaaccagtaggcatacgaatcattgtagatgaggaaatgatagaaattcacaaaacatagacaattagaaatgataagcatatatgtagaattctcagaaatccataaacttaacataacaaccataaac

SEQ ID NO: 258278 - DNA, 838 bp, Cannabis indica
ctagcttgtcgatctttggcagcgaaaagcaatcttttggacatgcttcgttctggttggtgaagtcaacgcagactctccactcgttattgggtttaggcaccaacattgggttggatacccactacgggtataatgcttctgttatgaagtcattggccctcagcctttcgacttcgcctttaagcgcttgggcatgctccttgcccagcaactgcctcttttgctgaacaagtgggatgctgggatcaatttttagtgcatgggttatcacgaagaggtcaactcttactatgtctccatgtgaccatgcaaaaaggtccaagtttgcctttagatattctatcatgattgacttgatttctggggctaaatttttaccgatcttcaatcttcttattgggaaagtgggatcgacctcaacttcttccaactcttctagaggtccaaagcttcctacaggatccccaaagcgaggatctatatctgtgtccccaccttaggctagacttcattgccccttgctgggctcatcttctggacttttggaaaaaatcttctcattttttgccttggataaggtcgagttgtagcggtgacgagaagactactcgtctcccttcaggcatgccactccatgccgtattgggaatttaaggcataaatggtagatagacgtcaccaccttcaggtcattgagggtgagtcgaccaatcatggcatgaaaagctgagggaacatcaatcacgacgaattgtaccattagtgttctgatggttggattttctacaactctgacgggtaatctgatatacccaacatatgcgataccttggcc

SEQ ID NO: 258279 - DNA, 1269 bp, Cannabis indica
cggtcatgagggaaactatacgcgagagacaggtgaaaggttgtcacgaggtggtgaccattggttgtcccatcaagggtttcgaaaaatgacggctgtaattatttcgttttatcctatttatggtgccacgtcacgagactcttcgatttttgtgtagacgtgcccatggctggccgttgatgggatgaccttacgcattcccgttgccatgtgtcacaatcccaatttattaggggtattggtatttaagcctcctgatacgaaacgatttcttactttccctctcatttttattttctccattcacccgaagctttcaaaggcaaaaaacccccccttttcaaacaaatttttgttcttcctcttttgaatcgtcaaagtttcttggaacgatcgagactatttacagagaggagcatcgaatcccaaggttagtctttcaaatcttcttttgaattctgtttctgggtttgagaaaaagctttgcatttctgaatgtctttaaactttggaaaaaaggttgaaaaggcatgcttagttgtaggaaatacacatagagttttactcccttgttagaacggggtaatccccaggagaaaacagacctgtaattggcataaccgccaattcaggaagaatactttgaatattcgcatctttttgattgcttatctctagaatactcgcgggtattttggatgagcatctcgaatacttgcataactgctgcctttaggatttctagagactttatcgcttttacccgttgtttagaatttagggttttctctatattctcagtatattttgttgtgggaatactggttaagtctttcaaatggtgggtgtgtcgccgtattccaatgatcacacgtgcaatcgcatgttccttgaggtactgcgatacacccagccatttgcgacatacgctagcgttcccttttcccattcaaccgtatattttgactagtagctttgcttgaaacagtgaggtgtttccgttagcccaaggtttatgcgagaaaggcatgccccttgagatataggagattcctctactgtttcttgagatataccgctagtcggatatgcgtgatatactcgcaggttgtgattggttagatttctcgaaacgtgggtgtttcccagtaacttcagggttatgctcgaaaacgcatgccccttgggtcactgggtaactctcagccgttttttgagatattcttctagtcgcacacttgcaattttatgcctcggtgggctggt

SEQ ID NO: 258280 - DNA, 736 bp, Cannabis indica
ggaatcttagagttgcccaactatctaaattattctggtggctttgcctaaattaataatcaatgttttttttttttggttattatccaaacaaaagagaggaaatagacctcagtcctcgccagcatagcaaaactttaataaactgagaatgtgtgtgtttatgttttctaatatctaaatcattcaaactttttcctccatttccatagcaaaacttaatcctacctaaagtaatctttgaacatttttacatttctagagttcatctataactatgctaccctacaaaccattttgacctcattcccaattgaaaacaaacacattggctcagattagagaaaagaacaaattcgtagcccaaaaagtagagaaaaagcaaaagaaaaattactaaaacacaacgaaactaacaaagcaaaataagtaaaaagtttgcatagggttcgaaatcacccatagggttcgatttcggaggtgggagggaaagagagggaaagaaagagacttacggaggtgggagaggagacttacgccggtggagcagaggagaccttcagaccttcagagcttcagagtaaaatcgcgcgcatatagggttcgaatttggtctgtttaagaaatttgggggtaagtgaacaataggaggatttgcgtcgttttaaaaacgccacacaatctctttaccatcggtttaaaaacgccacacaaagcattcgtgagctttgtaaaa

SEQ ID NO: 258281 - DNA, 1028 bp, Cannabis indica
tttttactttaatctattgtcatcttaggattactattcacctaatagaccagaattctaagtattgtgataaattacaatttttaatattgtcaaaggtatttttaattgtgatgaagaatagaacttagattaaatgaattatatgcttcattaatttattgcctagattaatctatctccattgaacttaaagctttatctaagtttaatagattgcattcttcatggttttactgtttaggtaaaagagttaattagtgagtgcttcgccttgattacatgtaatagggagaatgagataattaattgttttagcgttatttgcaggattaattgttttattgaaaatctaaaataatattcattattagaaattaagaatgattgttgagggtagagaataacctttaaatatttcttgaatatcgtagtatctcattctctttgtttttttttatttatgttgtttaatcttcataattaaaacctctctttttaattccttttactgatttttgaataattaattgatagtagtcctcgtgggatcgacctatatttactgttatactaaagtaattggtaatatagagcacaaccattcgaaaatctgtcatggtcccctttgtcttggaaatactcaaatggattaattactatgagtataacttcaacacttagcccatggtaaaagaatacgggagattaagggcccaagcttgggtaagagtgacattacaaaagtctcgaatctgagactaccgagcatggaccacaacgtcaggtcaatcatggaagaaaagacctgggcgactagtggcgtcaccaccaccctgcaacaccaagtacacccaaccaacaatactctacactattctgaccctacaaccactactttgagtcatattacttggccagtgtactacgtactagtgggtcccccttgcagaccattaaagaatcaatctgtaaacaagagctatgagagctctcctataaatagagactaatccctcattcaaagg

SEQ ID NO: 258282 - DNA, 917 bp, Cannabis indica
aaatgaacgttggtggtgcccaacccaggacaactggtgagaatggtgcctacgatcctacaaggtacgtgccaaccatcgagttggaaaattgccaactcagatgccacttgaaggaagcaaaccgacgaaatgctgagttggaatgtgaggtagccacagccagggtagcacaggagaataatacacaaaattaacctaatcctggagtgagaagaccatgaggcagacctcgcggctcacgaaccaagaggcaggagacagctcaagagaactctcagaacgctgaggaagaataacctcgggaaactgagggtccccctgaaaatgaatagccagagccttctcacagaaatgagaatagaaggcgaccagaagccagggaacaggaaatccctcgtggaaacaagggaaatcctgggactcaacttgggatacgaaggtaaccaacgaggcattgtcaatgtccttctcaaaccaacatggaacgagcacgtacaaaccctagcagggggcacacaacgaaccacacccaagggagaaactttcaagaagacataatcaccaacatcaaactcaacttcccgtcgatagagatcggcacagcttttctgacgactctgaacaaccttaagtctttcttgtattatcttaatcttttcagtggtactagtgataatctggggtccaatagtgacatgctcatctggctctgcccaacacaatggcgatcttcgtggtctcccatataaggcctcataaggagccatgcctatactggcttggtagctattgttgtatgtgaattccaccagtgacaagtgttctccccaactacctcccaaagccaaaatacaagagcaaatcatgtcttccaaagtctgtatggtcctctcagactgtccatctgtctgtgg

SEQ ID NO: 258283 - DNA, 600 bp, Cannabis indica
cttgtttctctctgcgattttagtgattatatatataaatacacacactaacagactaaatatattttttttattatatatatatatatttcaaaaattgaaaagggtccatagctaccagaaacctttgaacgaaatctaccagaaaacccagaaatgaaatgattttatacatttaattgcaaagccaccaaaggagaacaagtgacaactccatagctaccggagatgtgaacaactgagagtgagagagactcacaatttgagaggctcggggagagagggcagacgaccggaggagcgccgagctgcggagagagagcaggccactggaggagagggagagacaccggagaagcggcgagcagaggaggcgcgaggcggagcgactgaaacagtgaaaatggtttaggggttcacactgcgcttaggaggagttcgtctgaggtggtgcactctcgtctcgccgtcgttgtttcgccactaaggagcagtttgtctcaggcgttggaggtcttcgattcaccgcacgggaggaggtcttccattctcaagattgagatttgatattttaatttagattagggttattttatttaa

SEQ ID NO: 258284 - DNA, 527 bp, Cannabis indica
tctagcatgccataaatcaatagcgttggtttacactactaactaagttggtttacactttcctattaattgctaatggggcatcaaaaatgaatattgttaggattcacaacctccaataatcacacaaaaatagaagcaacaacagcaagaaggcaaaactagaaaatgaaacataaagacaaacacaagaagaacaagaaaaataaaaggcagtgccttgaatcgaattcattatgcagaaatgcgttacaccctgataaacaatgtgtgcaaagtatttgatgagagaaaagtgggcaattgtgatatatatggaaaatggtttatacaacagctatatatagccttacaagtggacaagtgtccaaaggagcatttatactagcttttgtacacttaatttgtttaactctaagttgattaggcttagaagcatttatagtgttagaagtagaaaacaatcttggggtagaatggtcataatatagccaatggattctattgtaattgagctgagttcttgt

SEQ ID NO: 258285 - DNA, 866 bp, Cannabis indica
cagtgagcagttgtgatcttggacatctttttttactttgaatgttgaggtactcttgaactttgaagctctcagaaactagttacagttctcatccacacaagtcaccacatactcttttggttcagatcttttagttttaaattggaaattgttgatcatagcaaaaaaaccactgcaatcttcaatatttttctggccttgtaaatctgtcctttttcaattttaagaaccttatgatctgttattatctctctttcccttttccttttgtgttcttgtgttttctcaatgatacaatcaacaacactattaactacttgaaatatgtttggtaatgccagttccttgcttatttctgaagtttcatcatcatattccatacagtcgtatgttggctggtttaatttgcaaaacaagtttttgaacatctatatcttgtcttacagcttaactttctgatttttgttgagcaacgatctggaatcttgtctcatctacagttgtgatgcagagtggagactcactaactgcatgatgtgtcttttatcagttccaagtagaacaacagtgagtagtcacttattatttttattgggggtgagtttgggcataacttgtaatgcatttctattgctgggttgcatttaatttcattctttactaattccaacaaactttttagatcacaatttattagtattagtagtccagtcattatgtagtcttcatactttgtattatctttccattgccctccacatttcaccacacacattattgagtccattcatgtataatatttgaaaacaaatagttaaaaaaatataatgtatgaaaccgatttcttttttttattatttttt

SEQ ID NO: 258286 - DNA, 613 bp, Cannabis indica
ttgcatctgtggccaaccaccacttcctccgctgtctggaaagctcttgagcagaaattttcgagccaatctcgtgcacggcttctacaactcaaaggccaattttctcatattcagaaaggtaacttgtccatttctgattatgttgacaaagttcaaactcttgcagattctcttgccattgctggtagttctttgagcgttcaagacattgttctccaactcttaaacggtcttggacccgagtttgacgctgtcgtatctggaatcacatcccgtagtgattctttgtctcttgaagaggtccaggcccttctcatgtcccacgagagccgtctggaacatcaccacaccatgactgatctttctgttaagatgcaggccaatcttgcatttggttcttcaagaaacaataacactcggtttaacccgccaactgctcgaggaaataactctgagttctcctcaagatttccagctaaagggaatacccgtccatacataccacctcaagctcgactgatatgtcaaatttgtttgaagtatggccactctgcaccggtttgccactaccgttttgataaaaattgggttccccctaaaccaggagctg

SEQ ID NO: 258287 - DNA, 798 bp, Cannabis indica
tagattcttgctctactagggcagattttgtacatttttagtttttgcaggttgtaaattattggatcttcaaggttaaagaaggaacattgatctgtgatgtttgatggaagttcagactgatctgttgaagagagtttagcttgctggaagaaaggggatcttgtcttctcagatatacgtggacttagatctttgttcttgagtgtattcaagtattttggtaactttgtatgaaatcattaaagtttacattgtttgaattgtatattaaaactagagaatgtatgtttgaataatttcttagtgaaggttatcttacccggttcttggagacctaagcactacccggttggaatgagtttccaatgcaaaagaagcttgtaattacgatgtgcaattgattttatgtttttatacttgtgatagaaaacctaatcgtgatttagtagcttttggtatatcttgaactttcatttagtatcagagccatcctttacatataaagaaattgtgatcttgtagctacgtaattctggttaggtttgtcttgttatctgaataggttttggtgtaagttcttttcttctttcttgatctattaagtctggaaatctaatcctctttgagattcatctcagagtgcaccatagttgttggcttggatttatgtaggttgacaggaaatggagatgttcagagaaagaggatctacttctagtccacaaatgctagaaggatctaattatccctattggaagaccaagctgagagccttcttaaaagatgtggatgaac

SEQ ID NO: 258288 - DNA, 949 bp, Cannabis indica
tttaatattcacaatagtctcatctcaccaaaaataaatataaaaatatatatttaaagagttttattattcagataaaatatcatgtattaataaattaatgtagttttaattatttaaataaataattatatgaaaaataattaaatgattttattaataattattttaaacttgacagatattgaaaaatatattttgcatttattttaaaaaaaattacaattaattggggaagattaggtttatcaatcaccttcataaaaataataaataatcctaactttggaacaaactaaagcaaaagaatagtgatctatataatgtaaaagtatatcacccacaatgatttttaaaccatatgagacttttttaacatgactctcgtattactaaaagcatataaaaatattaaaaaaatgtgaaaaatgagaaaaaaagaaaagcaaataaaattcacataaaatgccacatcacctaggggtgcacaaaatatggggcaaaccattcaatccggccaacacaacttatcttttgtagtaagggttatgttaagagtaggtcatggctcactgggttgaaaaatgataggccatataattatgggttggacacattttaactctatataacctaaactaacccatttcttaaaagatgttccaaatttaagacaactttcatacctgaaatatattttatattcacaaaatatatacaaatatatattttacgttttcataaataaaaaaattatattgtgataaccttagaacatgaattaatcaaaacacatcgctaacatgtaatctatagttaccctactacttctactaacaagcttaatgtgagaattaatcactattattaactttgctactcacacaatgatactactactatcttagttttttttaaagtcactatattacacacacatatatgtatc

SEQ ID NO: 258289 - DNA, 1058 bp, Cannabis indica
aaggctatggatatttgatgtgatatggatgattttactatttgccacaatagccttaaggtgagtggtgtgaaagcaagtgcttcatctagtatgctttctccaacataactcaagtgcgaagcctcatacaagctaagcaaacctggaacatcagttattaggctttctttaaagttacctttctcgtctttgaatttttcaaatatgcctgcatatacaaaataatatcatcacaacaacatatagaatgtatatgtgtatgaaaatgttataaatttgaaattaagaattagcttacttgatgaaacattaaatccatgttgtcttaataatctaaaccaaagagaagcatcatgtagattatgattttgatgatgagtgccgatacttaattgttccaataatttctcgatttcactctcaaaatgatgtgataatcccaaacgttggagattgtcaatcaacttcaattgatcatgatttgaagataatatctctttctttacaacttgtattaattcttcaactctttcttgtttgcaaacctgagttaataatttgcataaaatagttaatcaattaaatattgttattattaattaaaacatgcatatgcacatatttattatgattataatatatatatatatatatatatatttatatatgtatagtatttgatcttacgtaccaagtcttgttctgaaatattgtaatggaggaatcgatcaccccaaatagaagggtgaaattttgttgttgggcgagcaataattttgtcacataattgagatgaagctaagacttgaatatttgacattattagtattttttttttgttgtgtgtgtgtttaggcttggttttggttgatgaagaaaatggcaatatatgatatctatatatagtacaaatataagaagtagaggtggttggttctaattaatcgctctcactacaagaaatggggataatatacaatattatattaatacccttttaaattgagaaataataaaaggtatcattagtaaaattaagtatggaattttatata

SEQ ID NO: 258290 - DNA, 829 bp, Cannabis indica
agatgaatgatgcagctccaacccaaccaatgcgtccacaactgtctcgctctcaaatgcctggagatggatttggtccatcttttcagccaatgggttttcaacatcagcagccgcagcacactcctatttcgtttcagcaattgctacagcagcctcctgttccttcgtctgcatcattaactcctgaacaatttcacagtcaaatgtatcagtcatacttgcagtttttggcacagtcgccaaaaaatttgcaagtagtgatgaatatgatgatgcaattgcctcagacgtctcatgtgtcacagtctcgaatgccacaaatgatgccgacacaacatatgtcacagatgccgcaaaatgttcagatgatgtcgacagaagggcagcaatatcagcaaacatcacaaacaatgtcgacacaaccatggcagcagacatcgcagacgatgccgacacaactagggcagcagacatcacagacaatgccgacacaacaagggcagcaatatcagcaaacatcacaaacaatgtcgacacaaccatggcagcagacatcgcaaataatgccgacacaaccagggcagcagacatcgcagacgatgccgacacaaccagggcagaagacatctcagacgatgccgacacaacaagggcagcagacatctcaaatgatgccgactccacatggtcagtagacatctcaaatgatgacaagttcgcaaatgtcgccatactacccataaatactgaatgttcctagagatgctagtgatgatgacgatgctactacaaacttcttttagaattttattttagttttacgaac

SEQ ID NO: 258291 - DNA, 756 bp, Cannabis indica
tgttaatgaaacatacttggtagtaaatctagatcctgataaaatatttccaacagcatgggtcatcacaaaagggtcaatgccgaccatatctacatgtgaccatgttaaaaggtataggttcgccgttagaaatcttatcaataatgattttatttctggcacaaaacctttcccaatctttagttttctagctagagaagtgggatcaacctccacctcctccaactcttttacaagtccgaaattatttgtaggatccccaaagcgaggatctatgtctgtgtccccattttgggctggacttcattgccctttgctgggctcttccttagagcttttggcgggcatcttctccttcttggctttagacaaggctaagttgtaacagtgacaggcagattgttggtcttcccttaaacatcctatcccatgccttgttgggaatttcaagcagaggtggtagatggatgttactgccttcaggttgtatagggctggttagcatatcattgcattgaaagctgagggaacgtcaattacgacgaactgtgccattagagttttggtggtttgattttctccagcagtgaggggtaatctgatatagttgatgggtgcgattcgttggccgaagaagccacacaccacttgattgcaggttgccaaatcagtttgttggagccccatgtttttgtatgttgatttgaaaataatgttggaggaggctttattgtctcttggaatccaaaggtc

SEQ ID NO: 258292 - DNA, 650 bp, Cannabis indica
ttatttatttatttaaattattttttttatcaccatatataatatacaccataaacttcactagtaataaagactaaatattgtctctactatttacaattttatttatttcaaatatgagagatatattaattattaaaaaaacaaagtagaataatgtagagaaaatattgtagaaatataacaaaaaataaaataaaaaacataatgaagtttttctctacaccatattctttcttcatattttataagtttatctattttaattttaataaataattctgtgaacctttgctaaataagtgacacatataaagtaatctcaatcattttgaagggcgaaatagactttttttttaatattagaagttaatttgttacgtccccacttcaaaccttcattgggtccttacacccacggaatgaatgactcttatacatgagtaagtcaatatggctgcttcatggactgacgactggccctacagaccaacacgagtatttccagcatgctttgtcctcactcacacgcttcctgggaaaacttcccaggaagtcacccatcctgatattgccccaggttaagcacgcttaaccgtggagttctttcgagatgagctaccgaaaaacaagatgcaccttgttgatat

SEQ ID NO: 258293 - DNA, 787 bp, Cannabis indica
cctacgggtgcgaggccatggtaccagtcgagattggggcaggttccctacgaagagatgttttcaacatctcgcagaatgaagaaaaacagtcactctacctcgatcttctggaagaaaaacgcgatcaggcgtacttaaaaaatgcgggttagcagcggcgaactgcaagatacttcaattccaaggtcaaggtaaaagtcgtgcgaacaggagacttggtcgttcgaagagtaatgccaaataccaagaacctagcgcatggggtcttcagggataattgggaaggaccatatctcatcacggaaaagattggtgatgctacatatcgactcgcagcactcgatggtactgcgattccacgagcgtggaacggcgaaagcctaaaattctattaccaatagtactcgcattgtctattttgtattctccttgtacttagtcattttttatataaaaaatcctaagtatagggggtatataccataatgtactattgattatataatgaaaattcttggaaattcttcaaagtttaaattacaagtttaaatttttcaagtcttatgagattttctacttattacaccatgctgtaattaaagacgaaatattatagatattgaagcgcgagtacccgtgtaattcgaaaatactaaaaacagatatccccacgaggatataaagttgttcaaaataaaaagcaaacttgtctaagtacagagtgcgagtacccctgtactgcataaaaaaaaaaactaaaaagaaatatagttcaacacaagca

SEQ ID NO: 258294 - DNA, 771 bp, Cannabis indica
atattggacgaaattagtaaatatatattgacacgtgtatgaaatgaattgaatctcacatacataaatttgtaagatatattttatcaaaatcagatgaccgatatgatatagttatcatgtccaccaactaatatatttattttggtcttattttgtgttttatattataaaaatttttacttttagtcataataaaatttataattaaaattaaaaagaattgtgactaatttgtaaattgtcattcttacattgtgactaaaagtattagtcacaatatttgttgtggctaaaattaaattggtaacacttggtaattactaaatattatgtttagtcataactaacttttttgttatgactaaaaaattatcactaaaatttaaaaatgattattttttgtagtgataagtgaactttctacattcaaagtagaagttttggctttgttgcatgctattttttcatttttttttttattgtctggttaagactttgtataatttaaatatatttaataatgaggtagtactcatttttattgttctaaatttttggggtcatcttttttttgtttatgttagtcgtaatttaaatattacaactcattgattggctataagcatatatataatatagttgctacagaaaataaaagcaacgaagttactgaattaaatctaagttgagtgcggctaggtcgctctttttaacgacgttcgtgatactgctcagaattgtgcaagcacatatcagcctcgtcgttcc

SEQ ID NO: 258295 - DNA, 665 bp, Cannabis indica
taggcccgatgatcaaaaatttaggccttatatgtgccacatgtttgagacaatatcagagtctggactgacaaaattagagaaaaattacagtttttacaaatattagatacttatgccgctaaaaataaacattgggtttatgctatttacaatcataaaattttgggtacttatgctactatttaccctatatttttaaagagcattgctattaggcaccagtggtgcctagcaccatctcgacatgtcgcggtgtgataagctagtgatactccctaattaaaagctattatattaaattatatgggatccgatatttagttggaccaatagtgatattgacatattagaaggtgttaggcaccactaatatcttttagcattttttatttttaaataatgtttaaatttttaacatccttaaaaaatactatgctgttatatagcacacaactaattattaaaagtggtgtatggcttggaattatgattaggattctactttcaagcatgcgtgcgcctactaattagagctatgccatagctattatttgatcaaaaaccactgtagatatgatattgatcacaaccattaatatagataagtgtatcatatattcaactttgatgtatgattgaatattggacgaaattagtaaata

SEQ ID NO: 258296 - DNA, 733 bp, Cannabis indica
atttattcatatcaaatcacgaaaaataaagtaaaactgcattcttctcgagctacgaacatggaaacattgttctattttttatgtttctaagtagttgcattacggttggcttaatattttaataacgatctagaaattgacatgtcaataattacaaactgataactatacaatagttttatgacatttgtaagtgtttcatatcgacaatccaacacaaggctctctaaaaaaattataatatatgattagacttttttcatatataaaattagttgatttaaagttgatttatagagttctaacaattatttatccataaaatattattaacttacgagtgattttaatgagtgccaaaaaaaatattgataaatctttacttaacgacgtctaaacacattttccattcatagttgtgattatgttgtaaatctgctgaataatagttgtgctactataatattattatatattaaaatagggcttgtaattggcaatacacgactcgtacagaaaaaacttgattgtggtaataagtttgtttgtttcacatagggggttataagttattttaaggttttatactagatgcttaacaagaaatatagttgttgcctttcagtttttagacagtttgttcatagttgacttatcatgcttgaattttcaaattacaaggaaaatgactcaatttattttctcatattttacaatgggcagtttgatc

SEQ ID NO: 258297 - DNA, 712 bp, Cannabis indica
aatggattgaaggcagctctagacatgttccagtctagccaaggtatccaaggagagtgccacaaatcaaccttgcttccaaccgctataagccagcaagattcattcctgatcagatctctcgtggccatgatacctctagcaccaaaggatgcattcttaggcatcttcaagttccaaaaagaatgacccctatttccccaatacttggctctaaagaccttacaccatagggaatcttcctccttagcaagtttccaaccaagcttcgcaaccagagcaagattaatatcttcaaacttcttaaaatctaacccacccttctccaaaggcaagcataaggaattccaatcacagagcgctagaaatcgatctttgttttccctacccatccaccaaaacttccggaccgcctgatccatctcacgacacaaggatttagggaagaggaaagtagccatagcatacaccggagaactctgggccacagcgcggatcagagtagacctgcccgcttgggagaggagtttacactgccacccctctatcttagagcagatcttttccttgatgaatttcaggtcttaaccttgctattcgaccagatgatcggattcccgaggaatctatcctccttgctcagctttcgaaaacccataactgggcaaaggtagcctgagtagcctcgtccacatttttcgaaaagaacata

SEQ ID NO: 258298 - DNA, 992 bp, Cannabis indica
tcccgccttgcagagacttacccacgccaccttcccaaaatgaggctatccgagttgaccattgaggagattgaggcccagaacacggcccatcggaagaggcttatgtcgaagtcccctaagcgaaaaagcagggcaaagaaaagcaagggagtaaggcttgaagaaaatgctccgtcagatctcggcatgtcatctcagaatgactcagctactgacgatgccattggggccctacttagtgccctccccgagatctcgtcgggtgtgggtgagggtgaaggcgattccggggttggccccgacgggagcttccaatctaggccctcctgatcaagaaggtctctctcagcccaagaacctcccggcggctacgctgggccataatccggggctttcatcctcttctcctgctcggactcctacttctctccttggagtgctgttgacttcccaccttgccctttctcctgctctgacacaccctacagccttctcttctggccggggctcctcgcctctacccagtcatcccccgcgggcatcggctgaatgggacgagatccctgccttccagattaaaaaggatgttccgttcgaggagtcggctgaaaaattatttcaaaactctcctggatgccgtcagaaaacctgacgatgatttctacgtctcccacaggcgtgattctattttgaaggacacagccatctcaggaataaaggtaatttaccccttgcatgtatctcattccattttagttattgctttacttattattactcatatatatctctatttttgccagacggctttgagatgtgcacatgctatgaagttcgctccacaaaccgatagggagagggagagtttggccaagggctattctcgctataaaaagaattatgaagcagctgttgccgcgaagacggctgctcttactaaaattagcgccttggaggtcgacattaagattttgaagagcaaagccgac

SEQ ID NO: 258299 - DNA, 1009 bp, Cannabis indica
ttaattagttttatgtaatgtttaataaattaggtgaaaaaaaaaagaatcaaactaacttctgttagtgggtaccaacgacttagtgtaaaaaatgttttgagtattaatgccgcaatttttaaaaattgagtatttattagcaacaaaatgaataaaatgggaaaattcccaatttaaaatgattttatttttaattttttaacaataagcaacaagaaaagggatgaggataggaaaaaaaagtacaagccaataaaaacatcataaaaataaaagttataaagacattgacaaaaataccatatttttgtataaattcaatctcattactaaaggtttatagaaaattaaaatatggtacttaaaactaggcattgtaaaaataaagcaacttccaccttatcatcaccttatatcatcttgtcaattctagtttcacatctcccaaataaatcaaatagttttcatttttttcaaaaacagacttttatcaaataacaaatagagaaaaacaaaatttattgacatgataaattattacacatcataattgcctaaaatacaatcattgtttctcttaatcaacccatcctctaatcttcccccatctttagggacgagtgtcatcttcaaactttcatttctcctactagttgataacaaaatgtccaaaaattttattttctcaaaaaaagaggaagctaatgagttcaacattatatcttctgattgtatattttccattcgactactttctacattattcaaaccaaccaacttcctatccaaaaatgataaatgtctttttatttcttccatagtaatgcctacatcaaaaaaggataaattattgcattaaagtagttccctttaataataaatattgtatatgttaaaaaaacactaatagatattctaattactttgtaatttgggccaattcgaaaggataataaaaaaacaataaattttttttaaaaaaatggtaatgttaatggtgggagtt

SEQ ID NO: 258300 - DNA, 627 bp, Cannabis indica
atgcagtaaattcaccactaagtttgcttatctgatacaggcgtaagagaaagcccctgcctgtgtggtggcaccggccttgtggaacaaactttggaactctaaagtccttgagagacacaaaatcctttggtggagtatcctctcgaatgctctgtcggtccgagataccctggctaagagaatccatattgatgatgagacttgccctttgtgtggagaggaggcggagtcgattgatcaccttttcctctattgcaactttgcttatcacatctggaggtcctccccttggcgggtgtacccgatccacggttctggtggtagggtctgggattgggttaaattcctttggaacttaaaattaaatggggatgattctgacaagctgtttctttatgcttcaatcttcgtggacatgatttggaaaacccgcaatgataaggtacataacttgactcagtgtaacattgtgactgtaattaattctatctcccactgttatacagattatgcctcctgcttgttccccccggtgcttcctgtggctgcgcctgtttagacgcctcccccagatgactaaatcaaaatcaactgtgatgttaaggttggtggagactccatgtg

SEQ ID NO: 258301 - DNA, 1274 bp, Cannabis indica
gagctataagaaaaggaacttttctccttgttcttaagtcaatacaaataacgaggattaggctattaccgaactgctcggagctgaacctctataaaattcttgtgtctttacattgcatttactatatattgatttctataaaacacttatcgcttactaaataagactcattgtcgttggctaaaagcgatgtcaatattttggtgctttcattgagagtagaatcaagagtatacttgtaaaaaaggtttggtcgatggataaaaagtatacatgtaaaaaaaagtgaccaagagtcataagtctgcttggtcactttgggggaacctatacctgtacaaagcatttggtaaagataaaacagcaacaattgcacgatgattataaatagagaatgaaattcattaaagataaaaaaaagcccgtaataccggaattaaaagttgccagtcagcccattgtctgtaaaatgaaaaacaattccaagtttaaagatcgcgtcaccggtcataatgtcttagaaaaggccttatggccgaaaaagatatatcaacattttgatcttctgggctggcaggagctggaggatctgttgtttgaacgggaggtatatcagcattctggccagaggtaaaagcagccgcctcagtttcaccataagccacttgggaagcacagaactcggggtacatgtctttggcttcacccaagtagtcaaagtttgcctgaggattaaccttccaaaagtcatagaagagctcaagaccggctgtctccagggcatgaactttctctcccagcctcattacctcagccgtaagctcctcctccttagacttcttctcctcttccaatcgacgcaggatcactcgacaggatgtcctttcatcttgaaggctattcacttcggcagataaggtctcgatggtctcttcaagtcggtcagaagcctcgagatccttagtcaactcagttattttcttttgggaggcataaaggacaaagagggcagacagatacttaatgcccttgggagtgaactggaccgggcagaggccgaagaagtctgccacattcttgaagtactggtgcaaaggcaacaatgccccttgctgggcatgagcacccgaccaagcacacatccccttttcaaggtttgtagcactattattgtgggcgggaatgtagcagtctaattcgaccaggtagccaccctggttgagagtccgcaggcacagtaaccctgggcagaggactcacccatctggcac

SEQ ID NO: 258302 - DNA, 1229 bp, Cannabis indica
catcaaagactcccaggaccccagaatcacctttgaagctgagttgatagaatcaaaggtgcgatctatcttaggctaaacaggtgatatactgaagacttgtaggaattgaacttgggcaagtcatgccaagttaggtcagtacgagagggtgagttcagttgtttcccttgcgcatttttcaagtagtaccccggggaccagtgctaagactagtacaagtggctcgactggtatgggcgcctagagccttaagcatatcaaagcaggggccatacttccacttcgagactacataaaggactacgtaaaccacgttgaggttaccccattccgagctgaatcctattcttacaggattctgctagtcagtagaaattgagtatctctactcagttaaggtcgtttcatcgaggagaatgtcgcagggggcttctattatcttggtactcattctagcgagcctaaaatcattgtggacttgcccaacaaagtgtctttcaaagatagcttcttgtggacatctggtctttccccaatcggcacaagcacctttcgcagactttgtcagtgattgttttcatctttcttagttacattaatccttgtctttcagttttctgaccaatgttttatttgttttttacccctcttgacgaagcctacccctaccctcgagatggtcagtcggcataggcgcctgatgactcttccctatggccttagctcatgtgactttcttctgaagaaggccaatctgagatcggtgggccttctttctgacaaggactatactttcgattataagtttcccaagtattgagcttggcagcaggttaccatcccagacgaggataaggcttgggatcacgtggctcgggcacaataccttcaaaacactacccctcaggaagttggtgaaagagcatcctaaggtaatcaatgtggttggttccccacagtacttaggactaaacgtaacacattagtcaccttctgagatactcgctttaatttttatatgacagctagtaccctagattccacgtttagattaactgtaatgagtcgtattatggtatagctgagcagtaggtactatggcagatatggcaagtcatatagatgcgaactgggatttagaactgatcgagccctttgacatattcaagattacaggctgtggggattttagtgtttattacattccttctaccccttcttctagt

SEQ ID NO: 258303 - DNA, 1308 bp, Cannabis indica
aactctctctaaagtcttggccaagtccaatttgacagccatccatccaatcttacccttctttggactttttgatagagtggaaaactttcttgggccataaggatatcatcataaatgagatgacccatgtggaaggcactttggttagggcctgtttctccagcgtagaattggatttgaggtccagttgttgttctaggaggctgtcgcccctgggtccttccttcactgggaggtgccaatggtggatctgctgctggaggcatgggcatgccacttagatccaccgagatgctcacgtcaagttggccagctgtgatgggcagacttgttgtgcctattgtggtgacacgactcaccatatctgcagcattcatggggatcccagttttgactggaacccaagtgtctagatctgcaatctgtggatccagagggagactcaaagatggagatggtgcgataggatttattattgtgttcaccatggcgtttgatcagatcacgatatccacgttcttaatgaaagcaccaaatgtttatcctcaaaagtgatcaaccgacagcggggtcatggagatcttatgctaatgaagtttgtgcagaaataagagtaaaaagcaatagacaatgggatttgttatagaggtttgatccccttgtgatagcggtaaagacctactccccttttagttatattatactaagggaattactatccagatcgctataggtgggatcttctatagtaccctttaggattacaatgtatgaatcagtgtctggcagaactcaagtgttggaaacctagtgtgttgtgaaacctaggcttgggggtgtgagaggctgaggaagagagagagagagtctgacacttagagagtttgagatttctagcttaggggaggcttaggcaacttacgtttttagctagaggttaaggcctttatataggaggcctaaaccctaggtttacaattcaaatcccttgaaaataggatatttagctagatatttacaaaagacaaaagtgcccttagattctagattgttctcatctattctattgggcttttagggtccaattcgcagcgcacttatgatgtccatgttcaggtgtgtcttgtgggacctactgtgtaatccttggcccaccatggccttgtacttgcaaagctggccagccataatggtatccctagcctaaccggccatggggccagccaagggtagctggccagctccctagaacgagctagactatcacttgatccccatttaagtgtcggggtcttcgttggctca

SEQ ID NO: 258304 - DNA, 997 bp, Cannabis indica
gggttcaccagccacgaatcctgaacaaccgaaaactgtaggtgaaggtgtgacaactcctttgagtggaattgcgcctggtgtgcaacagactggaaacaccagttcagcagctaatcaggggtttcccaacactatccggtaaatctccgtgctactcttggaatcattcaaggtcataccaacaccctgcatcatgataaagaggaactccgtgctacagtaaatctcgcatttgaagagcaaaggtgcatgtttgttgaatggagggataaagagatagacacgttgagggctcagcaagcagccattgacgaccgaaccaaacaggccattgtgctgatacgaaaagcctatcaggctaccagttaatagcctgcagccgtcattcccctaggcgagacaaacaatgatctagccgtgaacacctctcaaactctgaatggtcagccgtccaatccccggtaacaggttccacctatgggccaagcagtaggctggcagactttctctagcaattcgtcaggagaagtcacacctaatcactccacccaagttaatggttccggccagctaattggtgaaaccaacaagtcactaagacaaccggtgtttccatatttaatcgattgggaacgattcatgatctcaggtatgatctgaacagaaggagaaggttggacgagagcattacgttccagttgtgcagcccggggctcgtgcttaaaatcatgctcaaagagatgctgatgtgactctggtcggtcaagaggctgaacaagttaatccagccgtgcaggcacagttggatggactaaaaattatgtggcaaggcctggctggtgagatgaacaatgcactcgaggttgaccgagcatgtggatcccttttctccccagagattactgtcctagagttgcctcatcagttcaagatgccaacttggaagatttatactgggaaggaagatcccttatcccatctcaagtattttgaa

SEQ ID NO: 258305 - DNA, 697 bp, Cannabis indica
ttgaatgaacacgtggcatttttaactgtttttacttgaaaaataaatgaataaaaataatatatcaaataataataatataaaaagatttattgttggggtgtgaataacaataataataataatgagaaaaagaaaaagaatcaagaagaagcaaaagaagtccggggaagaagatggtttataggagccttttctatgctcacctaacactttccaatttggatggattacttcttgtcatcgttatccttttttattttattttttttattataagttttatttttttacaaaaatatttattattttttatttttacaattttactattatattttatttatatattttttaaaaatactatcttaaaattttaaaaatacaaaatattatattttaataaaataaaaaacaaataactaaatacactactacaataataaactttaaagactcttatttttaggaaaatttatatggtatactaaatttactttttttttttactaaaataactgtcagatggtatttttaattttttcttactgtatatttttatttaagtttattactgtcagtattctgtgtttatttcttttatttttttgttatttattttagttgttattttacggtttgttttattagttattttactataatttatttttttaacgtttacgtatttctactg

SEQ ID NO: 258306 - DNA, 488 bp, Cannabis indica
aaaaagttaaaaaaataatatatgaaataattcttcaataaaatataagatctaaataatttattttaacacttataaaataaaataaaaaatacttaggcattaaattttttagaatttttcacattaattaatactaattgtcatgtcatgttgacctgcatagtagtactcttgccagctgtcacatttactattcgtatatattatatgtgtaaccaatctagccacgtgtccaacttttttcgaccaattaatttcatccttaatttgtacattaatgcttcatctttcctattaaatgtagagaaatataacaataataagctcatcacaaaagcatggaaatggttatgaagatggagataaaggagaagacaatggtgaagccagcaacagagactccacggcacgtgctatggacctctaatttggaccaaatggttccgaaatatattcacatcccaactattcatttttataagccc

SEQ ID NO: 258307 - DNA, 709 bp, Cannabis indica
tgttagttaagtttagtctgttatttttcttccttgtaaactaactgttagcttcattctgttatgaccgttagttgtcagcattaattagtttgtttttcttcagcttgtaactgattgtaaaggcatataaataaacatcaaagcaacccatttcgggttaagcttttcttggcaatattattttcttgctctgcatttgctctgcttctttcttttctggttttgccttgataaagtttctacatggtatcagatgccattgacgaatgtctctaatggcctccactgaaaacacctctggcgttcactccgatcctacaatcatggctactgctgctccttcttcaaccaactggaatcccttctcgaactccctctctgcctctctcactgtcaaactagatcgaacaaatttccttgcttggaaatcgcaggtcgtccccaccgtcatcggacacgacctagatcacattctcttcaccagtgttcctcctccccaacatctcatcactggagaaccaaatgttcagcatcaacaatggaagaagcgtgaccaactgcttctttcttggctccgctcctccatgaccgaaggggttctggcctctgtcgcaaattacacaagttcttactatgtatggaaagccttagaacaaagattcacaagtcagtctcgcgcgcgacttcttcaactcaaaggacaatt

SEQ ID NO: 258308 - DNA, 578 bp, Cannabis indica
cacccttacctatttcagcatctgaaaaaaagaattagtttatttttttttcatattcgtttacgttatatttatttattaaaatatcatacaaaactttgagaaattcggaataatttacaatataaaaagtagtgttcaaacaatctatttcacatgcgtataaaataaaatagtcatgtgtgcaacacacttattgaatcctattttcggcgtgttaatttttttttctaaaatttcttaaaattttgccgcatgtcttgaataataataacgtacatgactatgcttgactaaaaaattattttgaatgctaaaatagataaaaatacatcaatacatctatttaaaggagatgcattgttgaattttcaaacattatttattatttgtgtttggtggtaaaagtatcaaagtatgaaacaacagagttggtattgaaacgcaagaaaatataacgtttttgtacttttatcaataaataaactaaaaaaaacatacattagaattggagtgtaaaataaataatatttttttatattttaactgtaaatttttaaaataattataaatataat

SEQ ID NO: 258309 - DNA, 898 bp, Cannabis indica
agtttattaatcttgtttttttttttaattatttttgttcattattttatttttttgttatcgtttttcagttaaagattaagaacattcgtccatttgatgaggagaggcagaagttgcaattggaagacttatttttagatgaatctattgatgatcgtggtaccactaagcaaacattcgagagtggttcatcttcgaaaaaatttgattcagaggaaatagaaatgttaaaatctatgttggaattggtcatttctaatcaagaatccttggccgaagattttatatctttgaggtgttttgttgaccttaatttcaagtctgtcatgactgcaattaaggatattcaagaaaaagttaatgttatttatgattgaccttctattgaggtatttattttcacagtttttgtttcatattatttctactattattgttagttgttttcctattttattttagttgcaatactgtttttgaaccaggttaagttatctgatgaatttatcacccagattttgatgatgatgatgatgctgatgatgatgatgatgatgaggatgatgacaaaggattacctaatccagagaatattgatactgattccaatgatggtgatgagttggttaaagatggtggtgatgcttctagagttgataagcttgttggtgatgttcctgctgttgatgtgattcaaactgaggttgttgcaggcagtgaagacaggacaaaggatgttgaaaatgttaaggccaaagagtccggtgtaacccgagatgatttttcaatggtttaagccagcttgaagttgatgatgagcaagttgtgttggctggtttaaaggctgttgctaaaatcaatctaagtgtacattttattctttgttaggttgtgt

SEQ ID NO: 258310 - DNA, 700 bp, Cannabis indica
ttgtcataatatattgcttgccatattacttgcttttatttgattaagtggctaattgcttaattttgtgttaaaagttttgatttaccgaaattagtataaatttccaatgcacccccctcttggaaacatatcttgggctaacacttatctccaaatctttgaagcttgtattggagagaccgtaactagatgaggacggactagcacggagacgaggatgatcctcgtatagaagttgaagcagatcctggtcgatgcgatgttcgcttccccaaaactcactagatttcatctacaaaaggtaggacacaagatgagcatttggccgggctaacgaacagaaacatgttggttgtactgaccaggtccgaataaaaaaaaatcaaaaaatagaaattttgcatgatattgaggtttgcaatctagaattttaaaagtttgaattaaaggttgattttcactaaaccccgaatgggtaagtgaaagtgaatatcgtggagcccgaaatcaaaacgcagttatgatctaccaatgtgattaagcatagtcaagatttcaaattcctaaacctaaattttctatggttttcctaagaataagttctaagaactatcaagttttttgctagcagaaactcaaaaaaatctaatattcaagcatataaagaggaaataaaatgaagaacttactcattgtt

SEQ ID NO: 258311 - DNA, 679 bp, Cannabis indica
cctataggtcactatcggtaacccaaccaaccctaaacatacgagaaaacatagaaaatgaggttctaaacaccaataaaaacaataagcccattagaaaatggcaagtcattttcagtggttcctgtcagggaaacggtctgtcattttctacaagaaatgtgaaaccccaattttcaacttctcaaaacctcaccaaaacataaccagttcattccaaaacttcacaaaacaatcatacaatatttatacaacaatctatatgtaatagaaatcaaaaatcctgcctaacatgaaatatatcatgagaactcaagcgttgagcttaaaaactcaaacttgactctcatccaaaaacagcaacacaactatcaaatgagcatcaaaactaatcccaaaacaaccctaaaaacaaaactcaaagctcactaaactctcagtaattacaaaataaaaagtcaaccttcaaacctaaagtttttcaaaaaaaagaaaagaacgaaaccttaccttagcttccacttcaacttgctacacctctagctgccacaaaaaagttagggagttggtttttttagcaaaagaaatgaaggaaaaaatgtgatggtggtggtgtttcttagctcgagagagaaggagaagagaaaagaattttgactttgtttttcttaactttgat

SEQ ID NO: 258312 - DNA, 572 bp, Cannabis indica
gttacatttctccattaatttattccgattctgattactgtatagtaaacgtgccattatagtaattaatgctctattaatttagagagtttttttaatttctttaattagaagaagaacaataattatttttgctcctttaattttttacattaccaagttgcgtctcttcatcatatttaatgatgaaacaagtgacaccatagatgataattgataaatgaatgcaaattaaatagatgataattgataaatgaatgcaaattaaatagatttcacctgtttttttactttaatgattcaaaaactaaaaatattagtataaattgttattaagaaaaaaaagaaaaatatattttattttattattcattaatataaaaagtgtaaaggataactaatttacttttatttatcaactaccaattaatacttcacttattttgaataaattgcaataataactacattattataaaaattatatttcgacaagtattattaacaaagtgtatataccataagaggtaaaatttaatagtataaaaatttatgagataaaaatataatta

SEQ ID NO: 258313 - DNA, 627 bp, Cannabis indica
tcagatagttggatccaccaaacaccaacagttggtgtgatttactccatgtcaacacacaaactctaccagctaggcagagaagtgtgggcggctaggccctgcccagatagggctgactgaccatgtacaagcactagactcagggttggctggccttgagtgtaccctctcccaaggtatggctggttaggctctgtccaatctgaggttgtagctcaatcaaagaaggctaattaatcgagcctctacaacaatagatccttctgtgcaagcacagttggatcaaatatgagatatgctcaagggcctagctagtccaaagcccttagaacttgagctagacagggctaggggatcaccattctcggcatacatcaatgccttgctcttgcccaaattcaagatgccaacttggaaaatgtacacgggaaaagaagaccctctagtacacctgaagtactttgagatctagacggatctcctacaagtatttggagatgtgcaatgccgaattttctggcaattcttgcttaaatagcccaacactagtttttcaagctagccccaagaagattcaattcttgggaagagctctcctgcgagttctatcttcatttctctact

SEQ ID NO: 258314 - DNA, 1228 bp, Cannabis indica
caattgattaagtgaaccaaaacatacacaaatgaatgaaaaattacttctgttactttattgatattgaataatctggattacgttgaaacagagttttatttagggcataaaacccaacacatataacaagaataaacttgagtataggtcagttatgtgcacctttttgggatatagcatcaaacacaagggctacaaatgtttatcacccactggtaggatatacatttctagagatgttctctttaatgaacatctctttccttatgctacacactctttaccaacatccaactcttctatgtccacttcttcttctggtactggtgtgtcagcctttattcctcagtccactactccttctcatacatcatacacacattctccatctctgtcttcttcatcttccacacatcccactccccattcccctcctgtgacagatttcacctctgttgcacctgtctcccaacccattgaaaccacggttgcagcagctgcttctgtcactgctgctactgtctcacaaccacattcagcccctgtaaccaatgtccctaccaatgcccatcctatggttacacgggctaaggcaggtatcactaaaccaagggttcttctcactacatctgaacccaaatcttataaggttgctttgcaacaccctcaatggaacaaggctatgaactgtgagatgtatgctttgaaaaagaatggaacatggacccttgttcctcttcctcctggaaagagagcaattacatgtaaatgggtatataaagagaagttgaatcctgatggtaccacggccaaatacaaggctcggcttgttgcaagaggatttttgcaacaatatggttttgattttactgagacttttagtcctgttgttaagccagccactatcaagattgtcttaactattgccttaactattgccttaacctacaaatggactataagacaacttgatgttaacaatgccttcttgaatggggatcttcaagaagaggtttatatggcacaacctcctggatttgtagacagtgagcatcctcattttgtttgcaaacttcacaaagccatttatggcttaaggcaggcacctcgtgcttggtttgagaagttgaaacatgtgctcctgtcatttggttttctgtgtgctaaggctgatccttctttgttctacagacacactagtgctcattccacctttttattggtt

SEQ ID NO: 258315 - DNA, 739 bp, Cannabis indica
tgcacgcgcccccacgctcctgcctttttcctttttgcttttttttttaatctgacgtacgacgtgtcgtttatgaaaaacgacatgtcgtttggtgaaaacaacatgcagctgggtcataaacgacccgttgtttttcgctgcaaagggctgagactccatttgtacgacacgtcgttttttggaaacgacatgtcgtttaacccgaacgacatccagaggcccaataaaacgacacgtcgtttttgctcggtgggggctgaaccaaagggcgtacaacatgtcgtttttgcccgacagtggcaaacgacatgtcgttttctgttgtccttgtcaccaaaaaaacccacacacgggtccgcgggtctgcaagccagatcggcacgacccggttcgtgacccgaccatatataccacctctggccaccaaatccgacgctgtttgaggggttttgttccattttcaaccctctattattttccaatacccatttaattcaaaaaactcaaaataatataccaaaaatggtaaatccgaaatgggtatcctctattgttaaacttccatgtacctcaatggaaaatataaaaaaatggttcccaaaacatttatgaacacatttaaaatcatagaactcatatttatacaacattaacatattaatccgaaaataattatcacaaatttcagatttgaaaaaaaaaaaggtttaatgaaaaatttgagctctaaaattaa

SEQ ID NO: 258316 - DNA, 745 bp, Cannabis indica
ctggtaaaataaattcctacaacaactggttcagaaaatttacccatcattcaatcacctcttgcgatcagctgtctaaggactttaagaagcagttccatgcagcaagagataggcgacctgaagcgtcttctcttactaatataaagcagcacctgggcgagacacttaagtcctacctgagttgtttcagtacagttgcagcgagagtgagaaatttgaacaacaacatccagcttactaccctccaagcagggatcacgactgatctctcaactgttgaaggcaagctttgggatgacctacaaggtcgcctagtgaaaaatatcagtgagttcattgagagggctcaagtgtttgttcaaacagtggaagcaagaaaagagatgaagttgttaaagactggctcgggaagtaaacccagcactgtctcaataagtaccatctcgaaaaaggctgacaatctaggaggctctaaaaggaaagatgactccaaggaatcagccaaggacaagagaaaacagaagaatcacagcaagtacgtgccaatctacactatttatactgagcttaatgaaactcaggaaaacatctatctcgcacatgagcacagggtcacatttcgtaaacctgagcccatgaggcatgcgagacacaaaagagatgcaaccaaatttttcaagtatcacaaggacattgggcatacgacaaaagaatttcgtcaactgaaagacgagatagaaag

SEQ ID NO: 258317 - DNA, 895 bp, Cannabis indica
taaaaataaagaaaaaaattaaattttttatctttaatatatattaaatataatttttctttcttataaaatcaataaaaaatcaaaaaaaacaactgtgtatagtaaaaatatttaaataaatgtgcctgacgatgtgatattgttaccttgtaaatgaataaatgagaattattattattattattattattattattattattattgtttgagttacacccaagtatgttttcaagttttaccaaccacatcaagatcatcacaaacaaaacaaggaataatatgatctagagaagataagatattataatgctgaatacgtaggtctgtctactgtcttctattaggtttggttaggcagcaagagacaaattagcttcaattaacttcctaatcatactatttgaatatgatcatatcactaacagtggttgaccaaaaagttataataaaataaataaattagtggtgaaattttgcaaaaattatactttaagacctaatcattttttaggtcaaaattttcttttgtaatagttttattggtctatggcagtcaaatattagtatagatcgacataatattattaagtcacacctaattttattttaatatcttatttagtgttagtgtgtattattataataataaagaataattgtgtcataagtacttaaaattttgaatttgtaactaatataatgctaatgatttttttgagcgatatcattagtacccgatattaataaaaagtgtaatttttatttaatttcgttaatacagactacgttagtattttaaacgggtatgcatgtatgactcatattttaaattattagttctaaatgaaaacatgtagtctcaattatttttaaaaaacttaaatttaag

SEQ ID NO: 258318 - DNA, 582 bp, Cannabis indica
tcccattaaatccaaaaattttattaaaattaaaaaacaaaatttttaattttgtactttcatttaatctcgttgtggctttcctgcacacaagttctcagacccagaccaaactgttatgaaatcgatggatttggaggttgtgggccgccacgcattattcttcaacgatgacgcgaacgccgctttcgtcaactctagggatgctcttgtcgagtgaaactctctttttatagatcgatacgacgtccgccacttcctctctgctcccccgccaccgcgcaaccaccgccgccacgcattgtgtttgatttgatttttgtgtttaattatcttaatttagataaaaccggttggctgtatttaattctccatggtagactattattaattctttcgctatagcaaaaggggtttaatgggtacacactggtggtaaatcaatgctggtctggccaattgttagttcacttactttctacataaaatcaatggagtaggttactcttttcgtataaggggattccttaagaagtttagttttctatttgtatcattattggatttgtcccaacatctttt

SEQ ID NO: 258319 - DNA, 580 bp, Cannabis indica
tttttatatcaagataaaaccctggagatagttggtggtaagtcgcgatctccacctagaacttcaagaaacccctgcgttgaatggttctttgatgagccatatcgtaacatttgtactccactaccttggcaataatcgtaggagtgttgacaattttcagatagggtccatggagccctatcacgtggacccaaaaaaacttattttcccataccagcattgttcgaaagaccatcctctggccattcttgaataataagcatttttccattgatcaaccaaggtctattcttgagaacttcaaagcaatcctcctccaagtcgaagaaaatcccccataggcctggtttcaaagttttgaacttccagttccccttgagcttcttccaaatgtcagggaaaatttctttcactttggttcttgaaactcccttgccttcaaaaaaaacaagccaggacaccagttctagtaacctctgcattgagctcaaaattcggttccagttcgagggacattgaatcaagaaagttttgatgtaaagcttccaactctccctctctcttatccccatctgaa

SEQ ID NO: 258320 - DNA, 1898 bp, Cannabis indica
gggtctaccataatcctgtctttctcgacaatatgtcccgaaaaagacacttgtgacagccaaaactcacactttttaaattttgcataaagtttatggtctctgagccattgcagttctatacgaagtgttgctcatgttctgcttctgatcgagggtacacaagaatatcattgataaacacaattacaaagttatcgagaaaatccttgaataccctatttatgagatccataaaggtcgccggagcattcattaattcgaacgacatacggaatgtcttcttcctggattcttaattgatgatacctagacattaaatcaatcttggaaaacactgtcttaccctgaagttgatcaaatagatcgtcaattctgggtaaagggtacttgtttttaattgttaacttattcagctctcgatagtcaatacacattcaaaaagtcacatccttcttttctacaacaatatcagagctccccaaggaaacacatgaagtcaagtgaaccctaaatccaagattccctagagttgtatctttagctctttcaattgtgcaagtgccatacgataaggtgcctttgaaataggttctgcccaggtatcaagtcaataatgaaatctatctcccactgaggtggtagtactggtaattctttaggaaacacatctaggaattctttaaccactttgacctcctcaggtccaagcaacataggtttaccataatcaattacaactgctagaaatcctacgcatccactgcgtagtaaatgcctagccttcagtgttgatattctagggacacgagaaccttgaaccgatcccacaaaaacaaatggttcctcattttctagttaaaaagttactattttttgcttgtagtcaatactagcagaatatttaaatagaaagtccattcctagcatgatatcaaactcagccaacggtaactccactagatcagcacttagttccctgccctcaatttttattaacaaagatctaatccactttctcgaaataattagttccccattaggcaataatgtttcaaaccccatttcaaacacatcactaggcctaccaagctgattaagtatccttgatgctacatatgagtgtgtagcactcgaatcaaataaaacagtataagtagtgatgtggataagtagctgacctgtcactactgaagggttggcagcagcatccgccttggtgatcgcaaacacacgcgctggtgcagatttagcttctggcttgggttcctctttcttcaactggggacaatcttttttgaggtgcccaactgatccacactaaaaataagccctttagctacaggtaccagggtgatgtttcttgcagcgcaggtactcaggataggaatatgtttgacttccccctttaccctagcatccacgaaacctcttgttttgctctgaactccctgtaggtgggaaagttctcttcttttgctcaatagtggaatcaccactcttttttccaggaccagacttagggagagtagtggtctctgtagcacaaggaatctctcgggtttcttgcagaaactttactgctccttcagcttgaagagcctggtcaaccatttcagcataggttgtggtgtcattggtggtaataactaaatcgtgcttaatcttagcattcaatcccaccaagtatttttcctttttactgaagtctgttggcacaatcccagaggctagcttggccaagcgatcgaacttggtcgtatactcagtcattgacatattctcagcctgtaccagctcaacaaactcttttcgctttacattgcggatgcctcattgtaatattttgttgggctttgtgccctaaataaaaactttatttcaatgtaatctttatc

SEQ ID NO: 258321 - DNA, 579 bp, Cannabis indica
caatacgaaataacataaaaacactcattaaaatgaaatgtctactcaaattaatttctgtcaaaaggaatcaataaaaactaagataagaaatatttgaagtcgattgaatttcatgcaaataaaaaaagaataaccacccgttttgtattgtgtgtataacggtatacgttagacaattaaatctaaaaataaatcttacaagtgccaattttcgctataaaacaatggaagacgcactattacattcttgacgttatcaaaaagtaaaaatttctttttttacttacttaacttaatttaatttataaataaatgaagtaaaagctaatttttaatttaattaaatcactattgaataaatgcaagagtgctcagagactttgatgaatgagtatgtagacatagtatcttctgctctttctgaaacgaggaattaaattagattactcgtccggctatccaatctaattcaagacccaatcagtcgacaccccattagtagtggaagggctatcatatccaaatttatcatatttttttttcatgactatagttttcttaaaccttagcgaaagg

SEQ ID NO: 258322 - DNA, 499 bp, Cannabis indica
aattatcaactaagcaatctagtgcaatgccaacatagtgggttcttctaagcctcttaatccatcattagcacgcaacggatttggttgatgtagatgacctatctgatatttttatctctgatgttggtactattgcaacttatcctccaaatcctactctgtcttatgtgccacctaatgcgcatagcctcaagttgttgcaaaattcaacaagtacagcaactgatgctgttgtttgttcatcggttaggcagtttgttgacaaagaaaatacatccccaaacaaacttttcaagaggcaacctgataatatttcattgaggaaaactttgaagcgatgcaggggactgacacaacctatgttctctccaactttgtctactggagaggatacaaaccagattgtttctgaatcacaagaagatcagtcaggtttcatggacaattcagcggaggctggttctcagccccgctttcagccatgaaaattgttagt

SEQ ID NO: 258323 - DNA, 769 bp, Cannabis indica
gtcacaaggcaggaccaagttctaaccaaaggtttttccatgtctttttataggatatcctataggaatgaaagcctataagctgttagatttgaacaccaatacaattgtttgctccagtgatgttgtgtttcatgagactgtttttccttttgtcaattctgcaaatatcccaccagaattttaaaactttttccctgtttctgctcctgcttcatctgcagccccttctcctcaatttgagcccccttctacttcaactccctgtgttgaacatcaaaacactagacccactcaaactatctaaatgattatcattgctttcttgccactaatgatcttgctattttttctcaagatacaatgtcagtcactgcacgtgctctctcccaagtgcttcattactccaaattatctcctaagttttgagctatggtgttgttcatttctagtcatcttgaaccggtttgttttagtcaagctaaaggaatcccagaatgggataatgtaatggataatgagatagatgcttttggaaaagaatcacacttggattgtggttaccctctctgtagatcagcaagtaatcagttgtagatgggttctacaaaattaaacacaatgctgatggctctattgaaagattttaagaaaggcttgtagcaaatggatataatcaacttgaaggaattgattatcatgacacatttgctctagtcaccaagctagtttttgtgaaacttatactcgcctaagctattgtccatgg

SEQ ID NO: 258324 - DNA, 639 bp, Cannabis indica
tatttctccacccctatcagttgtaagatctttaaccactcacctaaatggtattcataatgactagaaattcataaaatttctcaaacattttaaatttctttgcataaggtaaatatctagagtgatcgtttaagactttaatgataactcatatccaccactgaatgtacatccatatgttcaaatatagatgatactactttcaagtggatattggcatattctctttttgcagaaaatgatcttgtcaaaaccactatgaacaagatgcaaatgccatagatatatattatgtgattttggtcttttgatgacttaggtcttgttacaacaaagaatttttagaatagtccaagcagattctggttacagaatacaaaactcataatccatacattaacgtacagttcaaatccattgtagaaaaatggatattaacaacttgtaaagttatactgtagtattcaatgtattctggaaactgaaatttaaaatttctatttggaatctaaattttaaagttaaagacttaaatttatatcaaatattctctaagtaattattccagcttggaccaccactactattttaactctaagtttaaattgcctttagtaagcatatacaagtaggaga

SEQ ID NO: 258325 - DNA, 1221 bp, Cannabis indica
tgttggtgcccacatttattttcttcgaacatactttcgctttgtctttgcgtccttttttttcttttatggaagaccatagaccacctttcatccccaaggggcttttccctattgagctttcgtccgactcagacggtgatgtcgtagacccttgggcacggtatcaccagctaatgtctaagcatttgaaatgtctataggaaatttgtgagttccaggagcgtttatctagacttaaggacaagattgagttcttggacgaccacgggcatgccaacacgaatgcgcacctttccctcctcaggcagttatattgtgacatagcagagaaacttactcacttgaagcacatttctacgcccgagtctgtctccccctgcctcgccatagagaatagattgaatgacaaccttaataagcacctcacgacttaccatagagaaggacttcgccttctaaccattaagctttttccaaatacgatctcgtactgagttaaacatctcaaatttattctgactagcgaagcaaggaagacccaaatattttttatggcactccacaccaccacaccaagagctgcaaccatattatccttatcagtgttatcaatgttcagactaaaacaaacaatcaatttcatgaagttaacactctgaccagaagcagaaccataccaagagaaatatgagttgctatgcttaatttaactacttaattaaaaaaatatatattaaaaaatatttattttaatactatatcaaaaatacttaactcaaactaaagattttttatctctttttttgtgctaaataacttttttttaaaaaaaaaaaaaaatactcaaccgatgaaacaatcccaatccatataatgtaaaaatgctatatttttttttattaattagataacaaaattaagcttaaaaaatcaattttttttataataatactcatttataggtaatactgcaacttaaatattcgtataaaataatattattttatctcaatgctttaataacacgtgttacatgttatattttaaattattataaattataatttataatatagtacaaaaataaagataggtgaaaggatttcttttatttaaaaagtttatcatctatttaaagagcatattaaactaatttatgaactataatgttaaaaattataactaacataagaaagaaatatctttagaggactgaac

SEQ ID NO: 258326 - DNA, 1366 bp, Cannabis indica
tgcctcaagaaagggccctatccgctacagtatcaggcacatcggtatgtgatgatggataatagtctctaccgaagaggaaccagcatgatgtacttaaggtgtgtatcagaccctgaagctagaaaaatcctgcaagaggtccatgaggggttctgcagagatcataccagaggtccaagtctgtcaaagaaaatattgagacaaggatacttctggccaacaatgaagaaagattgtgtacactatgtcctgaaatgtgattcgtgccaaaggttcgcgaacataccaagagcccccccaacgagattaccctgatgactagcccctggcccttcgcggtgtgggggatagatctcattgggttttaccaacgggaaagggaggggtaaagtatgttatagtagttgtggactactttaccaagtggacaaaggccgagcctatgaagaccataactgccaaaaaagcattagactttgttataaaaaacgtagtgtgtcgatacggcttgcctcataagatagtctcaaacaatggaaagcagtttgactacgaagaattcactaacttctgcaactagcacggagtcattaaaagttcttgtggtggcaaggccacaaacaaatggacaagcagaagccgtcaataaaatcctaaaggtcactcaaagaagaagctactggcctgcaagaacaactggcccgaagaatttccaaaagtgttatgggcctaccgagccactctaagaaccacaaccgggcacttgtcattttcaatggcatacggttgtgaggctatggtcttggtgtaaaccttgttcccatcccataggagaacgacttacgacccggtaacaaacaaagctttattacaagaagcactggatcaaattgacgagctccgggttgagtctcaagtacggatggcagcttatcaaaagaaggttgctaaacacttcaactccaaagtcaaagacaagaaatttaatattggtgatctagtcttaagaagagtcttcccagccactcaagaacccggagtaggggtgcttgggccaaattgggaaggaccatatgaacttgaggatgagatcggctccgggacctacaagctaaaaagaatggacggaaccacagtgcctagggcttggaatgctgatcacctccgaaagtattaccaatagctaaaaaataaattttatgttatgtaaaggaaatttgtaccgaacaaatatatgcgacctctaatttaattttgtaagactaagtgacttcaaaactaattttcatgtcacttaggggggtactaaggcatatcacacagacaaatgcaaacagatcaaattaaaaactaaatatattcg

SEQ ID NO: 258327 - DNA, 701 bp, Cannabis indica
actctttaaggacctagaaggaacgatttcatagggacttgtgcttcgaccatgcacaaaaatgactttcacaagttattcagatgctgattgggccagttgtgtagatgatagatgatctactggggttatgttgtgttcttaggcaaaaatctcatatcctggtctgctaagaaataaccagtagttgcccgttccagcacagaaagcgaattcagaaccttagctaatacgactgctgaacttcgatggatcacttctctgcttactaagcttcgtgttcacaggtcaaattgtccagttatctgggatgacaatcagagtgcaccagctcttgctgccaatcctatttttcatgcaaggtccaagcacattgaaattgatctacattttgttcgtgaccaaattcctgccaagcaacttgctgttcgcgttttgttccctctcttgatcaagtggctgatcttcttacaaaatccttatctatagagagattcaactacctcaagtccaaacttcacatggcaaactccctgctctgtttgagggggatgttaacacctaactgatttaagttaatatagttagttgttatgtctattagggtagttgttagtgtaacgccctaaataattaggcacgctacccaaaatgcttatagaatcctaatcccctaattcgggattactaatcaaaatagc
